United States Patent Application Publication US 2004/0123343 A1 - sequence listing, part 46

SEQ ID NO: 156300 - protein, 1062 aa, Oryza sativa
  Clone ID: PAT_MRT4530_55981C.1.pep
MHRKLPPLPPLTLRRSSSSSSSAAAAASPPPPPPRRLPPPVPLRDLLAHRLPPTPTPDRPPLSRPHPHADVLLRGRRPGCDASPESLHLEVVKRGLTHDLFLANHLVNSYAKGARLDAARRVFDGMPGRNAVSWTCLISGHVLSGLPEDAFPLFRAMLREGPGCRPTSFTFGSVLRACQDSGPDRLGFAVQVHGLVSKTEFTSNTTVCNALISMYGSCSVGPPILAQRVFDTTPVRDLITWNALMSVYAKRGDAICTFTLFRAMQYDDSGIELRPTEHTFGSLITATYLSSCSLGLLDQLFVRVLKSGCSSDLYVGSALVSAFARHGMLDEAKDIYLGLKERNAVTLNGLIAGLVKQQHGEAAAEIFMGARDSAAVNVDTYVVLLSAIAEFSTAEQGLRKGREVHAHVLRAGHIYRKIAVSNGLVNMYAKCGAIDKACRVFQLMEARDRISWNTIITALDQNGYCEAAMMNYCLMRQNSIGPSNFAAISGLSSCAGLGLLAAGQQLHCDAVKWGLYLDTSVSNALVKMYGECGRMSECWEIFNSMSAHDVVSWNSIMGVMASSQAPITESVQVFSNMMKSGLVPNKVTFVNFLAALTPLSVLELGKQIHSVMLKHGVTEDNAVDNALMSCYAKSGDVDSCERLFSRMSGRRDAISWNSMISGYIYNGHLQEAMDCVCLMMHSEQMMDHCTFSIVLNACASVAALERGMEMHAFGLRSHLESDVVVESALVDMYSKCGRIDYASKVFHSMSQKNEFSWNSMISGYARHGLGRKALEIFEEMQESGESPDHVTFVSVLSACSHAGLVERGLDYFELMEDYGILPRIEHYSCVIDLLGRAGELDKIQEYMKRMPMKPNTLIWRTVLVACQQSKHRAKIDLGTEASRMLLELEPQNPVNYVLSSKFHAAIGRWEDTAKARAAMKGAAVKKEAGRSWVTLTDGVHTFIAGDRSHPNTKEIYEKLNFLIQKIRNAGYVPLTEYVLHDLEEENKEELLRYHSEKLAVAFVLTRSSSGGPIRIMKNLRVCGDCHTAFRYISQIVGRQIILRDSIRFHHFKDGKCSCGDYW

SEQ ID NO: 156301 - protein, 85 aa, Oryza sativa
  Clone ID: PAT_MRT4530_55982C.1.pep
GHGEPTHSACKTIRIKGGGPIWSTDPANPANAYKNKQNRQLSIRQMFQPMFHRPNALGLRMQCCQQLQDVSRECRCAAIRRLKIN

SEQ ID NO: 156302 - protein, 45 aa, Oryza sativa
  unsure (1)..(45): unsure at all Xaa locations
  Clone ID: PAT_MRT4530_55983C.1.pep
RIPCGPDGELPDKLRNLEPRLXIAGLEHAKKCVTEMVIWPLLRPD

SEQ ID NO: 156303 - protein, 387 aa, Oryza sativa
  Clone ID: PAT_MRT4530_55984C.1.pep
MASTAGVGGIGNPTPRGKKPFAPWREVPPQVTHTLPPEKKEVFDSLEGWAADTILPYLKPVEESWQPQDHLPDPRSPSFGDEVAALRERAAGLPDDHLVCLVGDMVTEEALPTYQTMLNTMDGGVRDETGAGGSAWAVWTRAWAAEENRHGDLMNKYLYLTGRVDMRQVEKTIQYLIGSGMVVGRALLTGVLKFLEADPRTENDPYMGFIYTTFQERATSISHGNTARHAGRHGDAALARVCGTVAADEKRHEAAYAAIVAKLFEVDPDYTVRAFARMMRRKVAMPARLMYDGADDRLFARFAAVAQRLGVYTAADYAGIIEFLVARWGVPGLAAGLSGEGRRAQDFVCSLGPRFRRMEERAQEAAKRAPPAAAAPFSWIHGRQVQL

SEQ ID NO: 156304 - protein, 54 aa, Oryza sativa
  Clone ID: PAT_MRT4530_55985C.1.pep
MTTEGTTDVVNLSVISEARSDRVRRSESRTTLTFMGLDIKIWDPAHGKEQNNWT

SEQ ID NO: 156305 - protein, 103 aa, Oryza sativa
  Clone ID: PAT_MRT4530_55986C.1.pep
FPLANSIGGDKVEGGKLMTMGRRSDYLIVLFDLYFSMRLASWQSIVDARELFELLGTKSGWYLYELDSYLDILGKIALTLSNMLCEDMKAGPDRVLVLYDQMS

SEQ ID NO: 156306 - protein, 124 aa, Oryza sativa
  unsure (1)..(124): unsure at all Xaa locations
  Clone ID: PAT_MRT4530_55987C.1.pep
MDQINWHAHKPKGKLFGPTLELSRSPRPRVFTSTDIDYENRFSQTDRKGSFPPQKLAIEVRGSPTYILGHLPFHNQCGTIQQSLPSHIGVPQXFTVFGPHWPTVHQVTLRCREVLIMKIPPTKP

SEQ ID NO: 156307 - protein, 148 aa, Oryza sativa
  unsure (1)..(148): unsure at all Xaa locations
  Clone ID: PAT_MRT4530_55988C.1.pep
CHLKNDSLKCQDEARDTRRFTIFTILCIFDRNFASLPSDQTKLPXQLHRKGIEIQRLEEEPERSLAAVVGDAGAVDADAGVKTVFYAAPNGVVELVPPPADQGPAVDAPPDVDDDALSAAHAVDSRGAVVTRDGATFSAIAPVRGYGG

SEQ ID NO: 156308 - protein, 84 aa, Oryza sativa
  Clone ID: PAT_MRT4530_55989C.1.pep
MACLDPTPLAPHAMLLVVEQRSATSTDWTDGGEEGIVITGSSTVTANRGYGREGGAVASDYSTSAVDSVGGGEGVVVVVSNVAP

SEQ ID NO: 156309 - protein, 133 aa, Oryza sativa
  Clone ID: PAT_MRT4530_5598C.1.pep
MKKDRVWKLDPFLRLSFKKEDILKLLTGTIVSQQVTRNARKKRELIFKMVELDDEVFYNLDEEVVLVYDSDQEREVFHFRLDCYRIWTHRRDVQKAPDDKNHTFAELHGAMGFNAVDVLFRIFLEQTSDPTIQ

SEQ ID NO: 156310 - protein, 235 aa, Oryza sativa
  Clone ID: PAT_MRT4530_55990C.1.pep
MWPEFRGIVKEMLDELHKGNLDTDRLNYGVITLLPKLADANNIKQYMPICLQNVILKILIKAINERVAKVAEKIISWTQTAFIPGKNILEGYVILHETLHELKKRKKEKGIIFKIDVEKAYGRVNWNFLYEVTRKKNFSTILKKAKTSRVLEGLIPELIPREMLGMKINYQKSEIYVMGVEKDEELRITNMFNCKVGNMPFTYLGLPMHTEKIGMREFRQITQNVEKRLQSWKSG

SEQ ID NO: 156311 - protein, 157 aa, Oryza sativa
  unsure (1)..(157): unsure at all Xaa locations
  Clone ID: PAT_MRT4530_55991C.1.pep
QATERWGPPPLGPPAPPXTPPAILVGGPVPGGRGPAGGSPDHEGAXPLRRPGPAQGGPPAGPGRAPPGAPPRSGSPAPGAGPXPPGGGPPGLPPXPLPFCTGGVPPGPGCPGPPVAGPWAPNPPPPPLMRGCLHNSGGLLPDGGFPLAGSVFTSVFL

SEQ ID NO: 156312 - protein, 66 aa, Oryza sativa
  Clone ID: PAT_MRT4530_55992C.1.pep
MAAADATTARLHSVQAAAPPASPSRSRLHAAGSGGDLGHMGHVHLTGQVVEDIRPILMGLIEFYLF

SEQ ID NO: 156313 - protein, 569 aa, Oryza sativa
  Clone ID: PAT_MRT4530_55993C.1.pep
MVWAKTTKVGCAAVNCDADRGTFIICEYDPPGNVLGVLAYGGCGRFNQTAQSSPQDFLNLHNAARAGVGAGMLSWDSTVAAYAADYAEKRKSDCRNVHSNGPYGENLFQGVAHISWTASDALFSWLGEAKNYNCTGNTCKDGQECGEYTQLMWTNSTRVGCASVTCDDSAGGGTFIACNYDPPGNVAGQRPYSCSQAGISLPGLVPDKGNGTNQQANGNSSTGNSSSSQSSSKSNPAILPIVLPVSIGLGIISAISICLWRNRSSLKRRQSSCSEEVEDIKSVLLDPSVIRSATGNFAEENKLGEGGFGKVYKGLMPDGQEIAVKRLAKGSKQDLNIDDKKREQLAWDARYKIICGIARGLVYLHDESRVKVIHRDLKPSNILLDMDLNPKISDFGLASVFEGDHTNHITRRVAGTYGYMAPEYAVLGHVSTKSDIFSFGVIILEILTGRRNTISSETIWTEHLLSYVWENWTRGTITEIVDPSLRCRSAESEILKCIHIGLLCVQENPGDRPRMSNVILMIVGKSTTLPAPSRPAFLFRLNDENHIHHGINNLNPSLNKVTITELEPR

SEQ ID NO: 156314 - protein, 173 aa, Oryza sativa
  Clone ID: PAT_MRT4530_55994C.1.pep
LLSSFSLLQSSLLQRRSNASGGARGAASGRGWRAVGTKGGGGGGRRGLRGDASRRAEERRAAQAAGRRWERRGGASSGATGAAGSGRSAVCRRRRHGVQRCAYSLPSLLHALIRIGAGEPDGCGGYGMALGERNSKSADSFFGIAHALFLEASMAHLLEPDFLLPCAIFEMED

SEQ ID NO: 156315 - protein, 113 aa, Oryza sativa
  Clone ID: PAT_MRT4530_55995C.1.pep
MAHRPAWLRVRFGGGGGAREETGLKILAFEVAAAMSRLVSLYCSLSDVEDRRLRVDALLAEGVARVTSTDQSLLLWLACGEVVADLDCAAGSATRFGTRCCAARRSCTIFDRV

SEQ ID NO: 156316 - protein, 727 aa, Oryza sativa
  Clone ID: PAT_MRT4530_55996C.1.pep
MGCAASKGAAVASPAYEATTTSSSSASAAYSVSRSASTGAAAAEVASIWSRPVRLDAYEDDGDGKKKAAARGGGECSSVVVVGGGVRLGNIHRPPTTRSSTRQARTQTVEHLSFSIKLTINGGGNGGASMIQIGQGTYSSVFRARNVETGRMVALKKVRFDSGEPESVRFMAREILILRRLHRHPNVVSLDGLITSRSSPNLYLVFDYSDHDLAGLSSDPSLSFSLPEIKCYMRQLLLGLEHCHARGVMHRDIKCANLLVSGGGELKVADFGLANVFDASSAAAMTSRVVTLWYRPPELLLGATAYDASVDLWSAGCVFAEMHARRPILQGRTEVEQIHRIFKLCGSPGDAYWRRAAAGGGGGAGFRPQQPYESRLRETFGGMMGDDAFALLSKLLSVEPSARGTATEALASEYFRTEPYACEPSSLPKYAPNKEMDAKLREDSRRRVNVGGRNHGGVGGGEATKRLSRGHKSMQDTTAAATAAAVVASQRHGHGHVHAEESLPRANGGEARLFVDMQPVPVIASKRHDDPTPPPPPPPMSRSYQDDAGDRLPLSGPVQLTASTGFAWAKMPRPDSTTTAAAAAKRSSSKVPRTNSNGGAYEAEKQEAMKQWAQVADAFTSSESYNNRFKEPTATAGAGAAAATKEVKSSKVSSPSDHFHHCRNPSSPAISLTIFPPLAEAQGRRREVAQGGILRAVAVAAAAHRGAPPEPRAADPASWPPLVVPQR

SEQ ID NO: 156317 - protein, 76 aa, Oryza sativa
  unsure (1)..(76): unsure at all Xaa locations
  Clone ID: PAT_MRT4530_55997C.1.pep
AWRSYAQLRLSDRTLQTGXRTMEGLKGSMLRXQNMATTHIQTQWRXHRGNSNYLKLKRAALTYECAWRIRVARREL

SEQ ID NO: 156318 - protein, 269 aa, Oryza sativa
  unsure (1)..(269): unsure at all Xaa locations
  Clone ID: PAT_MRT4530_55998C.1.pep
NPTRCASHCLLDPVHLRAQVHGTSRCLRNSIRLRTCTDRWAIKFLESVSAXHSCRLHCNLFIGLFFHCYTMSAVNTDNNTYTGTGEGENGNTNGGNNTNNASSIITMLSFGSLSYVNILDVYAYIIKSMLMFNTFTRSFNYIHVMCSILIFWIKICRFMTKFSTIQKLDRYFSVVGFATSLKPYAFDGSNYKGWKARALFSPEEEAKFEAADCLFRGALISVLADNIVDVYMHMPSRKDMWDALKVKFEVSDVSSKLPNSHAVKPNLRR

SEQ ID NO: 156319 - protein, 115 aa, Oryza sativa
  Clone ID: PAT_MRT4530_55999C.1.pep
MFAWLLRGCRDECSASDQLKQGVVKEKNRCWFWGAFSVNARDVFVAKEAVLQKKISQEMERAKEFTKSGNKQAAMQCLKRKKYYESQMNQVGSVQLRINTKEKMIADHSGNKEDK

SEQ ID NO: 156320 - protein, 126 aa, Oryza sativa
  unsure (1)..(126): unsure at all Xaa locations
  Clone ID: PAT_MRT4530_5599C.1.pep
GGRXPXXXXXXAFXALXPRIIQSLXQVSXKRASLGACGGXGAGAVFXNQVVKWXEKSRXILTRWLRVQSXPXSXVNLMXXXISYFXIGLSATRIFFFSLYGLXKXFGPSICSCRXXTRXAIXNAVX

SEQ ID NO: 156321 - protein, 86 aa, Oryza sativa
  unsure (1)..(86): unsure at all Xaa locations
  Clone ID: PAT_MRT4530_559C.1.pep
YELNSDRNPNMSPTGLGGPSNGSYIFVRSVTGGDIASPWEYGEHXGGEGRAGVIDYFLYIDARYFARVPSTSQRLPLCSLSSGNDL

SEQ ID NO: 156322 - protein, 74 aa, Oryza sativa
  unsure (1)..(74): unsure at all Xaa locations
  Clone ID: PAT_MRT4530_55C.1.pep
SSTRPSTRPTSQANVSGLILADSADFKTELSNSDMFDQXTSSKILNGVEVPYGGXNRFKQAIASSTENVAGVKG

SEQ ID NO: 156323 - protein, 117 aa, Oryza sativa
  unsure (1)..(117): unsure at all Xaa locations
  Clone ID: PAT_MRT4530_56000C.1.pep
GPVFNGGVSPGQLLFFPPPYAVXKKAQKKGWGSFAFKAHPYFLVGPLAGKGSFFRGFPKGVLAKAYRFSKKRGQGVQHKKGDGLGAFPPIQNKGFPGVFNGAESFLGGLGVKKNLIN

SEQ ID NO: 156324 - protein, 837 aa, Oryza sativa
  Clone ID: PAT_MRT4530_56001C.1.pep
MEGDEGAAAAARIRLVRCPKCDKFLPELPAYSVYVCGGCGAALQAKKKYSAQGSDNSDNGHVKYLEVLESVAEAPEAMDGATADGRSIPNRISALHSRSVYNHEDNRMARGPSTSTGEATIRNDGREAKYMRIRNVENADMMKSVRGRGISDISPRSPIDGIPPTSYQAESLVNYQLQSKYRFSNREHANDRDLDGPSRVRGLEKDRAELLKMLDELRDQVQQSCEVTDAPSRSATTNRPADASSSHGAHDQPNQLRHDPSVLHWNGSHHSPSLNVQSPNIPQVHAPLPTRQNLHGYAEPIPHARASSYHAGAGYPCRNVDNFFFGHHDPDPLLSCHHEGLYHQPVCSCFNCYHREFLPVQGTPLGFTDQRAPYLMNSYGAYPVEGPLYGQQRYTSRGTNTSLQRNHLRTNVRKKPAQTCEPIAGGAPFTICYNCYEVLRIPMKHSLLGKEYKLMCGSCSHAILVNLDGSRLNVSEPAPGINLSAALQNGIGDSMRNNGHANADERLLPQYCFSNGSHESQEKDLESNSSESDSKHTPLGTDSENTPQSRDLPSEANVISHVPSLPHHDRCGFSPSEDSGKGSRSTHSEHEKAILFTESCKRNSIKDVCVANETQSPVDEFDDTLYAQDMLNLPQNVGHTRSTKAGDSFLTNLIKRSFKMNNGTRNGRARIFVNGFPISDRAVRKAEKLAGEICPGDYWYDYRAGFWGVMGRPCLGMIPPYIPEFNYPMPKNCGGGNTGIFINGRELHQKDLDLLVSRGLSDSPGRSYIVENSGKVSDEVSGEELYGLGKLAPTYTHLPSIISKPFTKEYSLTTVELCGENEARIWHASPKNHPVTN

SEQ ID NO: 156325 - protein, 85 aa, Oryza sativa
  unsure (1)..(85): unsure at all Xaa locations
  Clone ID: PAT_MRT4530_56002C.1.pep
ISQNPRFAGMHNTTFTSHCSYITDTCQANTCQNLALLLRLIHIYCTCILVKNVKSKLACIYIAPSLCRDRFIQGTSGIWGCYVXF

SEQ ID NO: 156326 - protein, 52 aa, Oryza sativa
  Clone ID: PAT_MRT4530_56003C.1.pep
MGVEGGRWSFGSGISKDSVLYLDYSNVSSRRFQIQGNAKAKYSLVKNVKLLA

SEQ ID NO: 156327 - protein, 77 aa, Oryza sativa
  unsure (1)..(77): unsure at all Xaa locations
  Clone ID: PAT_MRT4530_56004C.1.pep
VVGIVSXGYSXGSCLTVEQHCDVCRVKLXVSYLRXVLGRACRWVVAPHERRDNSLYSDDRCXEYIYLDXSWMCWMLT

SEQ ID NO: 156328 - protein, 530 aa, Oryza sativa
  Clone ID: PAT_MRT4530_56005C.1.pep
MLLSMGCSLRYQRHLSRTSRTLDNWRPRKALEPSPMADHQPAASSPKRKKKHSKKPEDSNATVDDSLAAAASPSPKKKEKHSKKKREAIDATMAAASPKKKEKKHSKKQEDTNVPEKKREVVHVTVDASLTGAAAAGAAPVVAYFPTGYDPLAAGGGRKGREAPRTRLFRHTKHPSRIELVVGAATGGGGGPDFVGRSYAGEAVLPQLTGYALGVLDKASGTLKVVPIAANKILRLDPHLEVQKLAHSQHSGAVGEAVSSAGDADLKVQDITKAFGTQKDKAKDIKWQSLNEQRNDPSAFMDLDLGNADTSVGANESQEPTVRNIPPYDPAADTSERAYLFDEIIPKSIRPHLVDIIGHFESGEISSKGYGSFVSNRVNKLQELQGEDKERLAWILSYITHLLSLLARNSSMSKRHRKENQATSGPVIPQYVYRKMVLMFTEPGSSALSTEKHELLINYILVLTLYADDFRSDPKDICEDLKMTRQMIKPYYDQLGCKSSSAGAFKSSVMTLPAPLKFPKEATRRKRRRF

SEQ ID NO: 156329 - protein, 75 aa, Oryza sativa
  Clone ID: PAT_MRT4530_56006C.1.pep
MVVVVRGLKEHSGTSAWRWWPRRWIGATMIQVWGTDNLELHVPQRIQPLTHSMAKGGIRLSVHLTKMKDGRCVRR

SEQ ID NO: 156330 - protein, 62 aa, Oryza sativa
  Clone ID: PAT_MRT4530_56007C.1.pep
MGGKKRKSGSSLWLAVASWFARLGSKVVASSGSAGGRAGYDAAGEMVRAAKHFSSAHKINFG

SEQ ID NO: 156331 - protein, 41 aa, Oryza sativa
  Clone ID: PAT_MRT4530_56008C.1.pep
RVLENLPLLGSCGPLPLVPICQHLQALMSAGRQFGDEGLFF

SEQ ID NO: 156332 - protein, 180 aa, Oryza sativa
  unsure (1)..(180): unsure at all Xaa locations
  Clone ID: PAT_MRT4530_56009C.1.pep
SLLDPTWASQDQYILAIGNIVALLHSFFSNLPHEWLESTHTVIKHLRPVNSVAMLRIAFRILGPLLPRLAFARPLFMKTLALLFNVLGDVFGKNSQASPPVEASEIADIIDFLHHAVMYEGQGGPVQSTSKPKLGDIRRXSGKVMEILWPDVQHLLSHLKTDPNSSVYAATHPKLVQNPS

SEQ ID NO: 156333 - protein, 136 aa, Oryza sativa
  unsure (1)..(136): unsure at all Xaa locations
  Clone ID: PAT_MRT4530_5600C.1.pep
GIISFGPLLLDYPSMWRISVFCSSLGGLGGGASCWLVYLYILWGWIDIFCVGSSSXGGLLWGGXFLPLVLVLGCLWCVXSEYWADSYDFWLLCLLLYRMISGGFASLCYVALDDSYYYWDVILYLIIRLVIIGIGG

SEQ ID NO: 156334 - protein, 1141 aa, Oryza sativa
  unsure (1)..(1141): unsure at all Xaa locations
  Clone ID: PAT_MRT4530_56010C.1.pep
MASAAAEGEEAPIAAFAVSKGGVVLKNIFLNAPPSPLPVEEAARGRGGEEEDPPVMFGRHPECHVLVDHPSVSRFHLEVRSRRRQRRITVTDLSSVHGTWISGRRIPPNTPVELTAGDVLRLGSSRREYRLHWLSLPEAFDMEDLLPPLLEEDKEELSTCQEASKQLEPDQKESADTETHQETSQQVVSEQIDFHANVIPSAPPIPEFADLFALEESSVPEFDDSREGRIEGNLIEENHVIYSVESSITQPMLATVEDAGRSVKSGEKDTSNARRSKLKSVKTLRIETGRSKERITPLSYSYQKEENQNENPICSQNCGIECEACMVLFNNSYVGEAEEKEKMNILDRIMMEENQEQTNHLQSKEFVHYVAPLNLDYETFSDNENCVLSVAKETEHNDFNSVNCISQDSVCENPQKISELLHFVSPLVFKGDDFTDSKILQLCASVHKELSGPILENPFMQDISDENTNSNKDTGHEGLTLLNLDATLTSNENFAQSKIFVAPEDSESEGTISENLFEISNMKGNEENEENSPWDKENITPFVSGDIIVERSQLRLKPTTISQELMDSISPLNLEHNDFSDDESSILSIGEQMNSNELIAKNLIPLTSVDANMQKSHAGFMTIAHLDFKDSILTDEETSVLSPEKYDTISPVRQGNLFPDKENVTPASRDLKPIIGRKVLGPRVDNSLSVECTSKRRIHRQEPNELSAKSKVCHAVDDDVFYSDKENLTPISSGGIKARRCLPKSLTVDADQDQEAFYSDKENLTPVSSASRKTKDLSENRARMESTITKKRVVDRLPFQTLLSNSPLRHTSSLDSTQVNPRAVDVAMKLEGELNNVPHKGQESEKTKEGMKVWTMVTDMECLLDDESRKSIMLLRGLKGTQLVIPMIVIRELECLKKRERLFRMLSKATSMLQWINECMEKESWWIHVQSSTEMLPVAPTPPATPTALCNNGEREISAGTFNPIALFSPRSFSDIVSPKTEDRVLDCALLFNKLKGNQNIVILSNSVTLKIKAMAEFMQIRATEPEYKPYSTHLKLSSLCFCLIEGIXCEGAKEFRETLVNPCSSRFMWAASAPRGSAWSCLDETTLEENYYNSHHGARRRIPRPMEPAKGLKLILLHNSHYGQATNFVENRPLAPMASW

SEQ ID NO: 156335 - protein, 605 aa, Oryza sativa
  Clone ID: PAT_MRT4530_56011C.1.pep
MADGWGTGKGDVEEERNQIMQKIFGDESGEEVVVEEEEEEDPEEYLAHDGDDATSGGDRGSGGGGGDGGQLQDRRLASPAAEVVEEYGLEDNGHGGDQWEEGQGESQGSSGMAQEIEGDSHDVELGNQSTQVHMKGVNTAEGGHVKRTITSETRSTENEEDHEVLHDAFDDNDEDGLAPYGSRDDNKHAHESLMNDEGPYEELLPEDMVDEDKHYEPDENIEHELKDKPLGPPLNLVVPRMLPPGQPDRMNVIKVSNIMGVNPKPFDPETYVEEDALTDESGSRKKIRLEDNIVRWKIVKNADGTESRESNARFVKWKDGSIQLLIGNEVLDISVNDSNHDNSNLFLRNGKAIIQSLPLPLLSIDHHHVHKLTTDFFSGAYAITRKASTEDEKTIKMQTWIDENDPEKVKEEREKAEGENIRASSSLQRKREQVKRKYSQPLRKRRKLTPGFLEDALEEDEAPGVGYNQRRGPGHAHFEDSLEAEALSKRHVTNAKKANVGKAVPSPSVPKHQVNEYSKSESEESEYETDVEDIDNSPTNGREDDMDEEEEDPEEVIGDTSMSDENNEEQEHVKERKGFNSDDESPPRKQPLNRRKTVVFDSDDE

SEQ ID NO: 156336 - protein, 64 aa, Oryza sativa
  Clone ID: PAT_MRT4530_56012C.1.pep
VSIILPPPDIKDHTDISDYFCHHLIQLEGWKCRKEKGGLLLEFHHCRFVTCRFGAYLSDTSAPP

SEQ ID NO: 156337 - protein, 125 aa, Oryza sativa
  unsure (1)..(125): unsure at all Xaa locations
  Clone ID: PAT_MRT4530_56013C.1.pep
NTEXCGPXPCIPCPSRRXRAPPXPPHSXPSPPRRXNRRRRPAATARRTRGHHGRCAXAARAGTPPARHAGAXGEGRRWCGEATDIVWLGSSSKVTGGWSVLCDSGHGALGLVFGLSHGSTSRVYA

SEQ ID NO: 156338 - protein, 324 aa, Oryza sativa
  Clone ID: PAT_MRT4530_56014C.1.pep
MAAAAVRHREVEVASGVRLHVAESGPEGGPVALLVHGFPELWYSWRHQMRALAARGFRAVAPDLRGYGDSDAPQGRDSYTVLHLVGDLVALIADLGRPQVFVAGHDWGAVVAWQLCLLRADLVTAHVSLSVEYQPRHPRMSVLQAVRVLCGDDHYVCRFQKPGVAEAEFARLDLNHLFKMVFGMRKPATIILPQDKTFFDAIDSDGTCPPWLSEEDISYYADKFGKTGFTGGFNYYRCIDLDWELTAPWTGALINVPIKFIVGDLDLTYNTPGVKDYIHKGGFKANVPNLEDVVVLEGVGHFINQEKPDEVSEHICEFFSKFLM

SEQ ID NO: 156339 - protein, 78 aa, Oryza sativa
  unsure (1)..(78): unsure at all Xaa locations
  Clone ID: PAT_MRT4530_56015C.1.pep
DAEAATPVGSAITDAAAATGTTAAAAVAXLPPTRRVLPCTXPRLTTNGVSDDRPTYVRTACAETLIKTTHELXQVNTE

SEQ ID NO: 156340 - protein, 132 aa, Oryza sativa
  Clone ID: PAT_MRT4530_56016C.1.pep
MDLNNRGSQKQLEGQQPSRFCTHQTTVDSSSVDFVVDEAGLKEIGFVPNQPRGDPDGTQAVAVHPLVTLPCLAAARAGCRQASGAPFLPPSSLNDAGIWQCLATVRTAMGANADCGGRRHVGWPELEIHILI

SEQ ID NO: 156341 - protein, 42 aa, Oryza sativa
  Clone ID: PAT_MRT4530_56017C.1.pep
MYEGREKSEFGQLFMEVTQGAVLLFMGMKNSIPKRQAKNKAH

SEQ ID NO: 156342 - protein, 67 aa, Oryza sativa
  unsure (1)..(67): unsure at all Xaa locations
  Clone ID: PAT_MRT4530_56018C.1.pep
ATVVGSEGGKAAEVPHGLAHLTAARESAGDGXGGATARLDDGRRRRRLARRGGGATEHGRARERGQT

SEQ ID NO: 156343 - protein, 70 aa, Oryza sativa
  unsure (1)..(70): unsure at all Xaa locations
  Clone ID: PAT_MRT4530_56019C.1.pep
LGWAYMAPERSGLSYFRVITVSEAQVKRYMNQLLPGLEHXHPRGLVHRDIKGANLLVNNEGDLKATWEEP

SEQ ID NO: 156344 - protein, 85 aa, Oryza sativa
  Clone ID: PAT_MRT4530_5601C.1.pep
QRSPFFFVESKPGVGSEHHISLIQVKTCTEIHTTGTDLTLYAILVHSSTRNTRIRAYIRYTCGHLPGRVHTLTLWCRDDDGSQPN

SEQ ID NO: 156345 - protein, 153 aa, Oryza sativa
  Clone ID: PAT_MRT4530_56020C.1.pep
FPPQFFCLFPFSALPPKALSAVPPSPFFPPPLSLGPLDPFCPTLIPPLGLGCSPPLFFSHARGFLPPHCFLLVQGVVPPAPFGPPSPIFPALPPFFFFLPGPPQLFKIFLWLPSMSTIAPVDFPPSSCGCCCPHLGSPLPWFLVLHPFLFHPF

SEQ ID NO: 156346 - protein, 127 aa, Oryza sativa
  Clone ID: PAT_MRT4530_56021C.1.pep
MADVRSRCKERKSGTREHAAVGAVVHEVMGQWHGEAAGRGEEQQQQQQRQSDQLIAALHAYKDFRVTGRTHATLPCNASRSDYYRLFSSPLDQNSELEIRSDTLGIVDVMENDWSLDPNFGSEHNPR

SEQ ID NO: 156347 - protein, 106 aa, Oryza sativa
  Clone ID: PAT_MRT4530_56022C.1.pep
MELGIDYKHGKGRRGDYHAARSSLGSQQLPPLLGVRWTTTGNEKEGPEKGTAIYRLVHAIAGCSFLHVAFRSEVPSKDKNSPTPSLLSLGLLAPLIPPAASSSLSQ

SEQ ID NO: 156348 - protein, 378 aa, Oryza sativa
  Clone ID: PAT_MRT4530_56023C.1.pep
MGSSEKNGTAYGEYTYAELEREQYWPSEKLRISITGAGGFIGSHIARRLKSEGHYIIASDWKKNEHMTEDMFCHEFHLVDLRVMDNCLKVTNGVDHVFNLAADMGGMGFIQSNHSVIMYNNTMISFNMLEAARINGVKRFFYASSACIYPEFKQLETNVSLKESDAWPAEPQDAYGLEKLATEELCKHYTKDFGIECRVGRFHNIYGPFGTWKGGREKAPAAFCRKAQTSTDRFEMWGDGLQTRSFTFIDECVEGVLRLTKSDFREPVNIGSDEMVSMNEMAEIILSFEDRELPIHHIPGPEGVRGRNSDNTLIKEKLGWAPTMKLKDGLRFTYFWIKEQIEKEKTQGVDIAGYGSSKVVSTQAPVQLGSLRAADGKE

SEQ ID NO: 156349 - protein, 77 aa, Oryza sativa
  Clone ID: PAT_MRT4530_56024C.1.pep
MAMARHGDGTATGKRRSAGLGVARHGARRGGGSGERRRRRARGDQTSMAMDGDGSSGLKASKGGTAVGRERARLGPH

SEQ ID NO: 156350 - protein, 62 aa, Oryza sativa
  unsure (1)..(62): unsure at all Xaa locations
  Clone ID: PAT_MRT4530_56025C.1.pep
RARMRSGRGCLCEVVILATPARSIYDXDGGVVRRRRRRNLLEEGRVGLDEKLMGKAKAYGLF

SEQ ID NO: 156351 - protein, 707 aa, Oryza sativa
  Clone ID: PAT_MRT4530_56026C.1.pep
MGTAAEQNAEPEEQKFRGVPRGNAGVGFNEGRWLTRVRESMAKRPWKELGAPPVKVFNVPRVLRSTRPEAYAPHHFALGPYHCRRPELRDMERYKLAAAKRAEKLFAAGKRFDDLVRRFSDIHDKILAPYHRLLQPLPRRPPRGPAVRRRTVMRPRHSAVRRRPGLCPPVRRGEAAGRRIYQWDDGEGRRGVRGEKLEKRKRKGCWGREGEELEERRRRKRKRWDEEIRLLELNEQTLAWMMAIDTCFLLDFLESYHRDEATDMVSSAANWINAVVRDAIMLENQIPLFLFAAALELRHGTDQAQAASAAADALRGVLGRFITEVSPIKTTASAALAVAGDDLARHAHLLELLYHFLVPTDAVAEAVGNEPPPLVPEDFSAVDVFDQMQKEIPDYDKVKQACVQVSSLDMAPIRFIKKNLISRPMGLAASLPGKLMRKVPLLSAVAPLVGKLWSSSSSAADMEARLKGVNLGTIINSPLAQELMIPSVAQLAACGVRFAPAPEGIAGIEFDAPAATLKLPVITVDGNTETVLRNLVAYEAVAVRGPLVLARYTELMNGIIDTAKDVKILRQSGVVVNRMKSDGEAAEMWNGMCRATRLSRVPRLDGVIRAVNEHRSRRAAVRLRRMMKRYVFRSWRVLTLLAAVVLLLMTALQTFCSVYQCNRWFGNMLQMPQPGAEWHYGGYGGGGATARGTQHVGVHGYQRSTDI

SEQ ID NO: 156352 - protein, 322 aa, Oryza sativa
  Clone ID: PAT_MRT4530_56027C.1.pep
MNFRPRKPPKDGRVFVRGLAAGTGEADLLRHFDRYGVVDEVSIPGVEADTLTGLPALRFAIVKFGHPEFAGLALADREQVIDGQTVHVGREDPRQSGCHSSGYKPLKQSTRQIGERKRRVGDMIKVVIGPLPEDSLERGLLKYLKQFGSVDAGMLIIDCIIKYISRDGQELTVKIDKSKNAAWSTCEDTFHFSDRRKNSDGRINPNIYRGLINKTPPPAACAYSYNRTGGIAGKKCNIPNGSCNYPTCPKSYHGSIVNQTHFPHPAAYAYSCNRTGGIAEQMCNIPNGFCNYPTYKLNPNFYRGSSIVNQIPFPYPAAYSYF

SEQ ID NO: 156353 - protein, 1147 aa, Oryza sativa
  unsure (1)..(1147): unsure at all Xaa locations
  Clone ID: PAT_MRT4530_56028C.1.pep
MEVMEARVMEVLTKLAGKVEGMDVITNHLGEIDAKLVTQGERLDRVQAKMDLSITLLGQVQQEQSRPEGDVRVWLDNCETYFGFYQIAEGFQVSAASLNMIGDAANWYQAWKLEIGVHDWATLKALVLTEFEAYLVALAHESALSGAGTKKVHVKKDHLSVKNYDKPKLAPGELWKAQQLKEYRRAQGLCFKCGDKYVPGHVCAKTEPAQLKAIQLQSDSEVLSDDLLDVITALDISETSSHLSLHALAGTCNSDTIQLRALVQNQVVIILVDSGSTHSFIDAGLCDRLHLSPDMIQSTVVRVANGDTVYCTAKIPQFTWWVQGYEFSFPLRVLPMGGYDVVLGMDWLSQFSPVTCDWAAKQLQFSYKGSPISLQGMSVPDSIGPVNEVSAVQVLKWTKGNDVWAVAVVEQSSEVIAPSSSFPEIQALLQEFQSVFQDSTTLPPHRVLDHTIALVPNAVPVNAHPYRYSPAQKDETKRQFVLVFMDDILVYSKSWAEHLHHLRCVLQLLQEHQLCAKLSKCSFATPHLEYLGHIISAVGVATNPDKIQVMLQWPVPTNLIELRGFLGLTGYYRKFIKSYGILAKPLTVLLQKNSKFVWSDTAQQAFDALKHAMTSALVLVLPDFAKSFVIETDACSTGIGAVLCQEGHPVAFYSKALGVNNQKLSIYEKEFLAIMMAVDKWRPYLLIGPFTIKTDHQSLCHLDDQVLVSELQKKAMTKLIGLQYKFQYKKGSENKSADALSRVGHFFSLQAISVAQPVWIQVXGLLQPLPIPSGAWQDISMDFIEGLPVSKGFDVILVXVDRYTKYAHFLPLKHPFSALQVVDSYLSRVASLYGMPKSIVSDRDKIFTSHFWQNMFKRFAIPLNLTTAYHPQSDGQTERVNQCLEMYLCCAIASTPTKWSTWLPLAQYWYNTSFHSALKCSPHRALYGSDPTYGILSALPESTDEAVTDADVLLRECDLFSSMLQHHLARAENHMKQLADSKRTARQYQVGDLVLLKLQPYAQRSVVSRLFPKLAFKYFGPFEILAAIGSVAYKLKLPEDCLIHPVFHVSQLKPSIPDNKPVFSLLPTAAQLDIAELLPSEILDWAHGEKGNAAVVQILVGWGSLPAALATWEDFDVVRTRFPDAVAWGQAPIPGGATVTPVPDEPQ

SEQ ID NO: 156354 - protein, 37 aa, Oryza sativa
  Clone ID: PAT_MRT4530_56029C.1.pep
STHAFLAQPMAAEAGWSLKARTEDIYLPLDRAGSSLF

SEQ ID NO: 156355 - protein, 75 aa, Oryza sativa
  Clone ID: PAT_MRT4530_5602C.1.pep
AVVTQQKLVRISPFHDSIINALSASKCLGVQDGQLATIQCRRTFTAAKLTWMLENDVIAQVPALTSFCSRTESSA

SEQ ID NO: 156356 - protein, 178 aa, Oryza sativa
  unsure (1)..(178): unsure at all Xaa locations
  Clone ID: PAT_MRT4530_56030C.1.pep
PNAVPVNAHPYRYSPAQKDETKRQVSDMLAAGLICPSCSPFASPVLLVKKKDNSWRFCVDYRRLNSVTVKNKFPLPIVDELLDELPGTKYFSKLDLRSGYHQIRMLEANEFKAALKTHDGHFQLRVMPFGLSNAPATFQYLMNSIFAXFLRRFVLVFMDDILVYSKSWAEHLHHLRCV

SEQ ID NO: 156357 - protein, 505 aa, Oryza sativa
  Clone ID: PAT_MRT4530_56031C.1.pep
MHDLIDRLEWHSHKETEAGHLRQIKDVVYDAEDLLDEYNYYALKVKVKASKNLGQDHLHEPFLEFLGNVNFSGKFRKVMEIQERLKHVFDQSNSLGLHKTPKKFDKIVRPETCHVLDEPDEIFGREKELEDLKQKLRVRGHKRGRPVACNTTAEARRTELLVLPIVGMGGVGKTTMAQQICVDGVVRNHFNNCIIWICVSDEFEVNRLTRDVLKSLGVKLQDSDTRDTLMVNLRDSVKSKKFLLVLDDMWDDVLKDEKGWRTFHRTLSNGLEGSMILVTTRSSKVANLVSNSNHYELKGLQHGVFWNFFKLCAFGSVQSWSNSCRNRPELERIGEAILPKLKGSPLAAKTLGHLLKSNLSIEHWEDILKSELWRLEQEETDILPALRLSYVYLPQDIKRCFSICAMYPKDHKFEKDFLADISVAQGYVELENAPSCFDDLLNRSFFQKAAGEHGTYVIHDLMHDTAQLVSKDECFIIQHSLSFFEPQFPDSEESKNVCHLEVLEI

SEQ ID NO: 156358 - protein, 418 aa, Oryza sativa
  Clone ID: PAT_MRT4530_56032C.1.pep
MASSGLAVAATASSAWLCCPNHHIHTSSSRSRKHLLLHGLYGSAPARTRGRRPPVWTAAAATAAAPADTAASARREQVEIARSLNAWVEENMLPLLTPVDSAWQPHDFLPCSAAGGGEALAAFTEGVAELRAGAAGVPDEVLVCLVGNMVTEEALPTYQSMGNRAEGLADGTGVSPLPWARWLRGWTAEENRHGDLLNRYLYLSGRVDMRQVEATVHRLLRNGMEMLAPASPYHGLIYGAFQERATFISHGHTARLAGQHGDRALAKICGVIAADERRHEAGYTMASGRLFELDPDGMARALADVMRGKVTMPGQLMSDGRDGDGEHSLFARFSAVAERAGVYTARDYGDLVEHFVRRWRVAELAAGLSGEGRRAQEYLCGLAPKIRRMEELAHRRAARIEPAMARFSWIFDRPVMLG

SEQ ID NO: 156359 - protein, 114 aa, Oryza sativa
  Clone ID: PAT_MRT4530_56033C.1.pep
LVLDRERPPCCFILLGVPSHLVHILVGRRLTTSKGRSTTPRTGPLLLIQHHPTTFNRIIPTTCCHFLRRSSWACSTPEFRPPAASWTTVSEIALTSRPNGARAPRGLQGKRRWA

SEQ ID NO: 156360 - protein, 262 aa, Oryza sativa
  Clone ID: PAT_MRT4530_56034C.1.pep
MKVKSTMMAASMLLFLLVLAGIVTATTTTTDSNIRLPSNGAAGETDGNKQAKSRPWECCDNIEMSVQKVKKMKRTMAATSILFFFLAGLAAAHGSTADDTTTTTTNTIRLPIDGAVAARRRTRPWKCCDNIVRLPERINPPFWQCDDELEPGQCFRQCEACRDPPGRPFPGRPLICDDVFWGDDPGTSCAPSSEWPWGPCCDIAVCTKSLPPICHCSDEVESCAAACGQCEMVDSWSWRPLFVCRDSFTGDPGPRCTPEMHN

SEQ ID NO: 156361 - protein, 845 aa, Oryza sativa
  unsure (1)..(845): unsure at all Xaa locations
  Clone ID: PAT_MRT4530_56035C.1.pep
MKIAKIILSAILSCIIIGGVALGFTYIYIKQSLPDVSTLKTVELQQPMQIFTADGKLIGEVGEQRRIPVKLAEIPQTLIDAIIATEDVRFYEHKGVDPKGIIRAVWRSSQGDTQGASTITQQLARNFFLTPERNLERKIKEAILALEIEHVLNKEEILELYLNKIYLGYRSYGVAAAAKTYFGKSLDQLTLSEIAIIAGLPKAPSTMNPLYSVKRAEKRRNVVLGRMLEVGKITQQQYEQAKAETVTATFYGTALEFRADYVTEMIRQEMVKRYGEDVAYNKGFKVYATVLSTDQKAAQDALSENVINYDPRHGWRGAEILWTGNAWDDEKIIEHLSKLPHSEPFIGAAIIGFNKNSYTIMLPNGDKAELKKANAIFGKEISLHLGEQIWIYQGKKKEWLLGQIPEVNSALVSLNSDNGAIEAIVGGFSFEQSRFNRATQSLVQVGSSIKPFIYAAAMNKGLSLSTTLSDTPITINKQGQKPWEPKNADKRYEGPLRLRVALGKSKNMVAIRALQMSGVDYVADYLSRFGFNPDQFMATEALALGAASFTPLEMARAYAVFDNGGYLIEPYIIDRILDNQGNELFKANPALACLECNHIDLAYQEPTYFDGVKIHDEDQLRAEIDEINANPAASNTQTEDDQEPEIATTIKPQAPSLMTESIKNDASMRYAXPRVINGELAFLMRNAFNSAIYGEPGQNLDGTSRAIAKAFKRXDIGGXDGTTNNSKVTWYAGFGANIVTTVYVGFDDNRRDLGKGEAGAKXAMPAWIKYMKVALADKKERISPLPPNIIETKIDATTGFLGDDLMEYFIKGTEPTKKYIVEKAYQIPDGLQEQESPSSLPEGTS

SEQ ID NO: 156362 - protein, 409 aa, Oryza sativa
  unsure (1)..(409): unsure at all Xaa locations
  Clone ID: PAT_MRT4530_56036C.1.pep
LLPKQKDAKRIQQXKSYXLLNVSFKIYMELTANSSXVIRPSQTTFLPGRNITEGAIILHETIYEMHRKKNDGVIFKLDFGKAYGKVDXGFYXQTLRMKGFLPLWCQWIDNIVRGGSVAIKVNDEVGNLFQTKXKGLIQGDLLSSILFNLVAGMLAILIRKGKWTRELSXVIPHLVDNGLSILQYADDTNIFMQHDLEEAKNLKLVLSTFERLSCQKINFHKSELFCFGKAKEGDKEYVMLFGCGSGRYPFRYLGILMHHKKMSNKDWLAIKERIQKKLISWKRKHLSIGGRLVLINLVLSSLAMFMLSFFEVPKGILEKLYYYRSXSFXQCEEYNKKYRLTKWSILCKPKECGGLGIHNLELQNKCPLSKWLYKHWNEEGVWHNLLRRKYLSKKTLTLVEKKLGDSHYG

SEQ ID NO: 156363 - protein, 190 aa, Oryza sativa
  Clone ID: PAT_MRT4530_56037C.1.pep
MSIEYDYLFKLLLIGDSSVGKSCLLLRFAKIRTIELDGKTVKLQIWDTAGQERFRTITSSYYRGAHGIIIVYDVTDMESFNNVKQWLSEIDRYASDSVCKLLVGNKCDLVDSKVVDTEEAKAFAESLGISFLETSAKESINVEEAFLTMSSDIKKRMATQPAVERKPTVHIHMRGQPIQQQNSSSSCCSS

SEQ ID NO: 156364 - protein, 56 aa, Oryza sativa
  unsure (1)..(56): unsure at all Xaa locations
  Clone ID: PAT_MRT4530_56038C.1.pep
TSPXLVVALFGVRRRRGRRRVRLIVEEPRGLCSKFRSTSYVSRLLEVIINTTKSKV

SEQ ID NO: 156365 - protein, 72 aa, Oryza sativa
  Clone ID: PAT_MRT4530_56039C.1.pep
LLIFIWNFSTVSRLPENPFGPTGLQVGCFHPLSKVDPWDFTVGLKSHLRTLYPQLFRITLAFFFFPGFVAQN

SEQ ID NO: 156366 - protein, 52 aa, Oryza sativa
  Clone ID: PAT_MRT4530_5603C.1.pep
GEQNCILPGSIMEACQCNECYSLHQRSYRKLHVCFRRIQLSPLHLRREMHSS

SEQ ID NO: 156367 - protein, 71 aa, Oryza sativa
  Clone ID: PAT_MRT4530_56040C.1.pep
HYKRVFNIHETPPFLLKFFTPYFYTLTPYFIHTFHTTHFLTFSPYKLFIYNLISYQLSLTYSHTQPFFTIL

SEQ ID NO: 156368 - protein, 126 aa, Oryza sativa
  Clone ID: PAT_MRT4530_56042C.1.pep
MAFYVRLVLTASLWILFALAVGGATLHADESGGAGKLWSVVTVVFGWSGQPDYIDAQPAAPEEEWSMVVAAGWPVNAILIWFKILDPHSKTHGAELRHLNATSTGAECHATVDGSLSRTILRDSLD

SEQ ID NO: 156369 - protein, 291 aa, Oryza sativa
  Clone ID: PAT_MRT4530_56043C.1.pep
MLGDAAVREHFKYGVGAFLLMATLLLIACLPTRRPHLSLRQRSYKLAPRITMASSSSSSPPSSDPSLETVAPHAAVTGERKLNPNLQEQLPKPYLARALAAVDPSHPQGTRGRDARGMSVLQQHAAFFDRNGDGIIYPWETFQGLRAIGCGYPVSIAGAILINLVLSYPTQPGWMPSPLFSIHIKNIHKGKHGSDSEAYDTEGRFDPSKFDAIFSKYGRTHPNALTKDELNSMIKANRNMYDFIGWITSAGEWMLLYSVAKDKEGLLQRETVRGAFDGSLFERLQDSKKSA

SEQ ID NO: 156370 - protein, 198 aa, Oryza sativa
  unsure (1)..(198): unsure at all Xaa locations
  Clone ID: PAT_MRT4530_56044C.1.pep
XGXXIXXRGQXPGGXXKXKRGXPGXXKKRXXGGIGXXKTIXXXXKKIXXXPIFSXXXKGXLRXGLGPPIXASFVVXGXXKKGXXGRLFRPXPRGPFGAAXXXNRXXGKPFXGDXXXXXRLGEIRFVVVGGXXPLSXGXXGGGICENKKRFGGGXRXXGCXFAPXFXXXGQXKNFFFFXXGXXXRXYLIFFSLKXXXXX

SEQ ID NO: 156371 - protein, 73 aa, Oryza sativa
  Clone ID: PAT_MRT4530_56045C.1.pep
VSNSHIRIRGLGALLRSPASFSYFIRDISRWHLEILIRFLVKVSVARIKGWCVLWRGKKPDRTGLNYRGNRKL

SEQ ID NO: 156372 - protein, 55 aa, Oryza sativa
  Clone ID: PAT_MRT4530_56046C.1.pep
MADPPTPELAAAYPSTTKGWAQGGSSAHPRVHGGEYGSSYARGVDLASLKREMKR

SEQ ID NO: 156373 - protein, 574 aa, Oryza sativa
  Clone ID: PAT_MRT4530_56047C.1.pep
MLPFVRSLRRLGPAAADGRLLLPLAPLSSKAAAPPPEYEMPSVTWGVIQGRKERLVSRVLALDFLRSAGVSDPAGELEAVELPSSLEVLQERLDFLLRLGLSTDDLSAYPLLLACSLRKNAIPVLSYLEKLGVTRARLAAFVRAYPACLHASVAVDLTPVVKSLRGLDVDRQDLPRVLERYPDILGLKPDGTISTSVAYLVGIVGVAPRDIGPMVTHFPFFLGMRVGTTIKPLCEYITSLGLPMRILARILEKRPYILGYDLEETVKPNVEALLSFGIRKEMLPLVIAQYPPILGLPLKTKLAAQQYFFNLKLQIDPDAFACAIEKLPQLVSLHQNIILKLVEFLRGRGISNEDVARMVVRCPQILLLRMELMKNSLYFFKSEMKRPISELLDYPEYFTYSLESRIKPRYMRVSTKGIRCSLDWFLNCSDQRFEERMRGDFIEGDAPGPSFTMGGKLQMPGSQLVSDDDNAESDDEIWWRIIPKIFRDVLLTASCTQAIPSLSVNSCLVICICKLKFANHAGILNCKMKKALALMEHSHTNRGHWSAGLSNSSKGLTKVLYRTLLKKNSNNSPS

SEQ ID NO: 156374 - protein, 71 aa, Oryza sativa
  Clone ID: PAT_MRT4530_56048C.1.pep
IRVVGDLWAYVGRCVCENHIVVDIYSLYLSRDTGKCSVYVSHATPMSIDMAAVDSLPNRVPSGYHGFLISE

SEQ ID NO: 156375 - protein, 290 aa, Oryza sativa
  Clone ID: PAT_MRT4530_56049C.1.pep
MMKQTQQQFMNSFIETRHGRVVQKYKLKLVADVPGTGSSKDGEVQKTQVSIDDSGDKGTTGGSSGKGDGFQEGMVEDLGPDGSGLQPYFNNFQDQIDYAVQHALINQSGVLVNTLTNMDYILRFRETRNRCYSLALTDSQLADLAFQGLIAPIKEKFSSQEFESLSHIAQVMLHEQRFAEAKKNFKKINHVYPYMYGSDDEDDSEVAEVEWVRCKKVVPCPWVRSSGKEERFDFDITKADKIFDLLLRDKQIQLPAGHIIPSAEELGKRRYCKWHNSGSHSTNDCKVFTQ

SEQ ID NO: 156376 - protein, 168 aa, Oryza sativa
  Clone ID: PAT_MRT4530_5604C.1.pep
MGLSRQFLNLLVDNGIPRAKSLHCVKLTRHRLFNTTKPTMLPLIGDGNEPKNNNQSMEKIVLPRPSFNLQLLGQEEDRRSEMQEQRDANDDDKEVTDDEDYSMDILFPKSRHRDGSIYRGIMDTWWKKELRIADRNEMILDGIELYHQWTGNHPSQLLPNYYYQTDLI

SEQ ID NO: 156377 - protein, 538 aa, Oryza sativa
  Clone ID: PAT_MRT4530_56050C.1.pep
MSSSASPSAVPSAKYAEHLSNLIAIPSLSHEEHYFLGPIGNLDPTDFIIGKTNRIPFRLANPNLGHWRNTFKFWPSLEKTTPEKSWTTWYKRVSASKQTHWDEIGIGQALALTIANSAKDEPLMAAATYFWSNTINTFLFNQGPMTPTLIDITMITGLDVSSLANPMNLNTKNQYDFRTKSICGLIREPADAGKKRRTRSSAVDTLAPAPKKKAKLKKPKPTDDLPALDPSIEQALDEEEIGEDIDQAADEILRLQKKKIAMKKKSAAPIPKPAPPPPPPSSPIQQPSSDHTPSAAGSYHVEEEVQPAAPTIPALAHLFSFDIKDYLDEETEEDTTSKSLAPLSDNVKKTLEDISHRLEASSLDSLVVNCGPIRTRLHEVQALIPDELADVLTPAVYLEQHQEKAKLRLAERRERKDIEATIQANRQLVHEEKSKLDQLSEGPIKSNIDRLEAHKIELLAQLEECNTELDMEHKKLADLPKSVEEQKARLKSAIKNVADLTKSLKVIPRTDTQDAQAIEEVEQMRQRAISAIQQYLSR

SEQ ID NO: 156378 - protein, 167 aa, Oryza sativa
  Clone ID: PAT_MRT4530_56051C.1.pep
MGKSSIEHGDEHGKQPRGDEHGSDGSHERHSRLPRWRCHGGQSAVRALRWAVPACRRHRVTHTYVVSPHLALDLCPLSIGDRGSEWHSASSFASLVAAIVANASASGGFSAGSIGAAPDTVYGLTLCRGDVTGAECQLWFSEQDFVSAASNIPEKHQKAICHREDGH

SEQ ID NO: 156379 - protein, 877 aa, Oryza sativa
  unsure (1)..(877): unsure at all Xaa locations
  Clone ID: PAT_MRT4530_56052C.1.pep
MSSSASPSTAPSAEYAEHLSNLFAIPSLSHEGHYFLGSIRNLDRTDFIIGETNRIPFKLANPNLGHXKNTFKSWPSLEKTTPEKSWTSWYKRVSTSKQTHWDEIGIGQALALTISNSAKDEPLMAIATYFWSNTINAFLFNQGPMTPTLIDITMITGLDVSSSANPMNLNTKNQYDFRTKSIGGWSGYVAAYMGHRFVTPREHVAFLLMWLEKFLFCGSSCGPTTNWQFAAKALESKREFPLGKILLGYLYKMLNNASAKIAVGSVVEAGGPWWLLQSWLNLMVMKVVNWPSVTEAEFPRLEPITEDDGEERTHRRCMLYGEYASTPANAGAKLSAELLKDWFCSFYEDSADLELPSDFRFXDINHKRYQKSREVFSVAISPCILSIGIHQGRNIQVSYEFYHPMSSARQLGMGQLPIGLFFADKIQCRGEISSTLMMDRLLNLQGPPLGSIENIELAGFKSKNFDIWWGEWKLHLFHQPASMYMTDLFPDVVPQTTESSPPHESNSDRDIEYAPGLIPNGGGPSPPIIGYHAPKTSTLLQGLIREPADAGKKRRTRSSAVDTLAPAPKKKAKLKKPKPTDDLPALDPSIEQALGEEEIGEDVDQATDKKKKIAIKKKSAAPIPKPAPPIPPPPPSPVQQPSSDQTPSAARGHHVEEEVQPAALAIPALADLFSFDIKDYLDEETEEDTTSKSLAPLSDNVKKTLEDISLRLEASSLDSLVVNCGPIRTRSHEVQALIPNELVDVLTPAVYLEQHQFKLEKAKLRLAKRRERKDIEATIQANRQLVHEEKSKLDLLSEGPIKSNVNRLEARKIELLAQLQECNAELDLEHKKLADLPRVVEEQKAKLKSAIKNVADMTKSLKIIPGTDAQDAQAIEE

SEQ ID NO: 156380 - protein, 113 aa, Oryza sativa
  Clone ID: PAT_MRT4530_56053C.1.pep
LVHEEKSKLDQLSEGPIKSNIDRLEAHKIELLAQLEECNTELDMEHKKLADLPKSVEEQKARLKSAIKNVADLTKSLKVIPRTDTQDAQAIEEFMHTGDSEGTANNQCRQDID

SEQ ID NO: 156381 - protein, 78 aa, Oryza sativa
  Clone ID: PAT_MRT4530_56054C.1.pep
MAALFSGHFSMWISHPLSRVQLHGVVRQWNVTGAMDGHLRQLGTWWHCVAFIVDAVGKSLAHLTIANNGDALRCRTPS

SEQ ID NO: 156382 - protein, 43 aa, Oryza sativa
  unsure (1)..(43): unsure at all Xaa locations
  Clone ID: PAT_MRT4530_56055C.1.pep
EEPHXXTEQGEETXXTRQTPLXXXDESMDYLFVPFTMVVEXSM

SEQ ID NO: 156383 - protein, 79 aa, Oryza sativa
  Clone ID: PAT_MRT4530_56056C.1.pep
QRGKKENTPPGNHSTHLKAPLGGGKKGKPPRFLNKGGEKTGPPHFTFYPGKKRFESEAGPGGQKIRGYAKTQRRFTGPQ

SEQ ID NO: 156384 - protein, 249 aa, Oryza sativa
  Clone ID: PAT_MRT4530_56057C.1.pep
MALRRINLWKNPLLLPRPFSSSSSPIPTAPPASSIDDIRRQIESLAARGAPPGSSAASRSPPEPGEGEGRNPETSLFQEMHDQIPIAPSFHHHQGGHHLVASAPTVIEEVALLFMRHDVNDKDDDDMVEGVGRDVAHCNEGLELQMASLIWHGKEQQTNISHRSSSCAFLAFTELVIVSPSLDLLSPFLTVVAVATSMLRASSWTHPHPCLYTPAACSSMAGKEAGEDGSADVDADEIERGDGGRRHDT

SEQ ID NO: 156385 - protein, 180 aa, Oryza sativa
  Clone ID: PAT_MRT4530_56058C.1.pep
MEKLKVYIGPAPLLIGSIERLAARLFMVTVRLWAVTGHARAIWAEPSACTDMPGSLWAVPLPREQPCRLKSLSKQFLVSGDIPNFTAECSLSGYRRSARRLMGPEMREEVLQQAIRQITELVLLHGGPVTVSTAFVDAGRRLDEKEPLPKPPKESIYTGLQDEKDVITGFTVEPRDSNKT

SEQ ID NO: 156386 - protein, 117 aa, Oryza sativa
  unsure (1)..(117): unsure at all Xaa locations
  Clone ID: PAT_MRT4530_56059C.1.pep
PLRRCKAQCVATAHPRRRGRANSGRTLRQLAXVDDSWCQCSALNHMFGGIYRELGATDVGXPHAEVFPGCRRGDLERAAAXLPAFCHVDIPNGTVVSLLVSYLDPENCSLGYKASCV

SEQ ID NO: 156387 - protein, 253 aa, Oryza sativa
  Clone ID: PAT_MRT4530_5605C.1.pep
MATAAENKNEPARPFAVPSPSVHPAATGVGEEEEAQAATGWRSMQYLRKRRRALCCCGCCVTTLVVVGLVILVLALTVFRVKDPRITMNGVWVTAISTGPGTGAGIGSTVATNATLTADVSVKNPNAASLRFSRSETDVYYKGKTVSVAYVPAGSVGADRTVRMNITLDLLADRLASVLNGTGLILGQEYDLTTYTAMRARVSVLGIIKKSLDVRMNCSVILDVAGIAGVLLPGDGAKSGVQTRSVDCVAIVS

SEQ ID NO: 156388 - protein, 227 aa, Oryza sativa
  Clone ID: PAT_MRT4530_56060C.1.pep
MRDPRVSDTTGGGGGLAGGPHQAVVQRGGGRRQPGSARLQADRLSMASGGGMRSPATATGGAGGGGGQRGRQRRRPKVTAVHARRTAVHTGERERGRRGEPHRRVWRPERKAKAAVMIGDAKGRTGGDGTLGERGEGLGLGRKPAATKNGQPEMERMEGKLWRSARKFGAHLTSTSVHSAPGSENFFYKDISCNFLRDIFGQEFATKTNGILEFVRDKSRVRHEHIL

SEQ ID NO: 156389 - protein, 200 aa, Oryza sativa
  Clone ID: PAT_MRT4530_56061C.1.pep
MAKLLVVVLLLSLLIYAATAWDAESFFNFKSCPPNQCSKHGPKVRFPLRLASQSPSCGTPLMELSCSGQDTILYHPVLGSCKVTAISYKHAAMSIILLVDSTPHCPLQKLISTNLSTDVYKPQKLEAASLPDCKVVSNGIQAPSTFKETENGVIGVDELVFTWYSSDITRDCQKCENEGKHCGFSSQRGRAFCNYGIFSF

SEQ ID NO: 156390 - protein, 236 aa, Oryza sativa
  unsure (1)..(236): unsure at all Xaa locations
  Clone ID: PAT_MRT4530_56062C.1.pep
EKNLQQHYRNMAKLLVVVLLLSLLIYAATAWDAESFFNFKSCPPNQYSKHGPKVRFPLRLASQSPSCGTPLMELSCSGQDTILYHPVLGSCKVTAISYKHAAMSIILLVDSTPHCPLQKLISTNLSTDVYKPQKLEAASLVSCSRDLPRDQHGVVGPITCLSNNTSQWYLIHPYAYXSVLQPDCKVVSKGIQAPSTFKETENGVIGVDELVFTWYSSDITRDCQKCENEGKHCGFS

SEQ ID NO: 156391 - protein, 67 aa, Oryza sativa
  Clone ID: PAT_MRT4530_56063C.1.pep
TFEKLEGTKHRLGIYSLLMDCTGWVKANNNNSLIHRLDLDRVLNLCSASSRLLAFCSIVLVSRQEKR

SEQ ID NO: 156392 - protein, 63 aa, Oryza sativa
  Clone ID: PAT_MRT4530_56064C.1.pep
MADPQAVAAPEFGGGGSNLCRRNSRVRRNRKFSTLSNNRGSTGIPIEQPQFDRYMSNCVSSTG

SEQ ID NO: 156393 - protein, 523 aa, Oryza sativa
  Clone ID: PAT_MRT4530_56065C.1.pep
MSRIRLIYEWAKNSELTRVGGGRWIASLWQLEDERWAADGDSSVRVFLRTARIFQVCHFQSMAKTALATALDIAELPFSDLLLLISPDLPDDGRRGRLLTTVATSLGRGGSGLLAITNVPLAAALRRRLLPLARRLAVMDHPSRSQLLKKHGLGSDVPLKKLDRRVSSFARLLRHSGEFQLLESMKEIESIKNDPDYLEKALDGVVIGEPMGDGTEKLGELVEELGLCMMELGILVARACDTVTGGNQLEKSITDFGTAKARLIHYHSELDNIIIKNSSSKRKVPINKIAKATAYESCSRRSASSQGSCIRSECAMTDTLKDSNDKSIHGQGSVVSLTNLWQEWHYDYGVLTVLTAPLFLCSTMGEDCSINKECSPPDEHTYLQLFNRRKVFSVRCSPESFIVQVGETADILSGGKLRSTLHAVSRPYGSTNISRETFVVFLQPSWDKKLPYSGHCFAGDDEPSEGDDSTFSDGQRNSIMVVEVSNKTIKKQYYGVPCSSSQVMENVFGHFIIWHYRKHQTSP

SEQ ID NO: 156394 - protein, 153 aa, Oryza sativa
  unsure (1)..(153): unsure at all Xaa locations
  Clone ID: PAT_MRT4530_56066C.1.pep
MDPSHYKGNHXYVPVSQKGYWQFEMGDVLIGGKTTGFCASGCSAIADSGTSLLAGPTAIITEINEKIGATGVVSQECKTVVSQYGQQILDLLLAETQPSKICSQVGLCTFDGKHGVSAGIKSVVDDEAGESNGLQSGPMCNACEMAVVWMQNQ

SEQ ID NO: 156395 - protein, 72 aa, Oryza sativa
  Clone ID: PAT_MRT4530_56067C.1.pep
MSQCQPDLPAVKVAGATSDNCNEYDDCYNDYGCSEHGGGNNDDYGDGGVDVGIVQGVPQNRQGGGGPDKSNP

SEQ ID NO: 156396 - protein, 393 aa, Oryza sativa
  Clone ID: PAT_MRT4530_56068C.1.pep
DRARPPAGMAEKGNRFALLEHGWDLSGDMAVDNILASQNVGTQLRAYPPPIKYFEALLRQEHAELLEYVDDVDRVVALLKPLPPPKTVRYPVLFERAWGFGRLFPCDVTDESPQYHAYLQEFYRRNCSAPPSVAAAISLCLKNERILRSEWQNRGVQVHPYNLSLSDNILECASNLVDKMNAESATVAYAALCVAKEAELMVQRLRLGDRIYVHYSDRNLSTRIRHEALGLMAGTGPTSSSVTDPMVHSALLGIAREAEWSWKIISHKDVGPLGDRRSEAIRGSALCIIKDELDEYAAAAATAADLSSEPFVVWQRNMIAVIEGGYPNWGTTVKKLDSAVYVAEDYSKDSLDNIFDEDMMSKYINGSHKRKMKKPRGKNSLKEELKYFKKDIL

SEQ ID NO: 156397 - protein, 184 aa, Oryza sativa
  Clone ID: PAT_MRT4530_56069C.1.pep
NKNKKKKKKKRKKGRKHKKKKKKKKKKNKKERAGKRKKPKPKKKTKTKKKTKQRTKGTKTKKATKTKKKKKGKGKKKREKKKKSPEKEKKRHQKKSKAIKEKDANQPHQERANPPHPDRTPQPDRLPQKKEHSRKQAQGRGKKRYRGQKNPCQRLSPSPCPSLSPCRARGRALSQERALSPYLE

SEQ ID NO: 156398 - protein, 45 aa, Oryza sativa
  Clone ID: PAT_MRT4530_5606C.1.pep
TEFLHLVLSERTREFVLSALRLHFCIDHPSWVSVAGYETLCSYAT

SEQ ID NO: 156399 - protein, 86 aa, Oryza sativa
  Clone ID: PAT_MRT4530_56070C.1.pep
MSLLVRCKLPRIRAGPPPIACLVTPHGRRLTPAFIAPYLIALGHHSPRLGAATVGSPTTAAPPETRRSAVPRSLPPRTCPNCCRRL

SEQ ID NO: 156400 - protein, 43 aa, Oryza sativa
  Clone ID: PAT_MRT4530_56071C.1.pep
EMILVYLYSCVGSFGPSFGHVKRWNLVYHRVIFTANATRDQEN

SEQ ID NO: 156401 - protein, 487 aa, Oryza sativa
  unsure (1)..(487): unsure at all Xaa locations
  Clone ID: PAT_MRT4530_56072C.1.pep
MADNEKGNKVRSQDIGTSSSRVNEAPDTSCAAVVQHLINQNKLLIEILQQHRMPILNPSQMQPXQVQLEAVQAFTPQVSAPPTSQKAPHAIPHVDPKEASIICFMCDEQGHYARNCPQQKRKAPMRTEDEVRKMIITSTEWPTPGMTRRQRRNTFRGAPQLTEHLLANGGRVSDSEDSDQVSSDDEGAKSPQGFNQNKIELKACSRCGEIGHVASSCASACVHGEEGHPPDRCPTSRITCFFCEGTDHVPKDCQFSFLLTKKMANQPASSNGEKHQGNTNPRQDSSFSLTPVPGXRKQNEKRKCRVREDICCFNCQGMGHFADKCPKPRNVAASTSVHANPRNQKLAPQRIVIHASRSSPITRVATAPIPMSALPQGVNAQFQPQPPADKTEASICVVPLEVPIQQLRNQVQDEEPEKKGITPKTVPNQGKIDLHITANLHEADIPIVLWSLEQTPYQGVKSSTRYQMLHGVKSAGTGYQAMPCLGR

SEQ ID NO: 156402 - protein, 998 aa, Oryza sativa
  unsure (1)..(998): unsure at all Xaa locations
  Clone ID: PAT_MRT4530_56073C.1.pep
MPRYKPEYLFDVEGFVQESRTMSFVIGFGTAPFYAQIPHDRHEEKCQVKVTLNSNSEDIPSVMFEARGRNYIHACQEVARIAIGELRDRYSDQLADTEYRYHPRQPQGSDRGSYLETEGIENDATTRHLVEMLWAMDESRAETVLAAQDREDRNRGKICKLEDKVDRLEKELAALKGEAPPQKARIRLTARKRALFVPRYQLAPKVRVVEKEVAPTLADSPVTIISDDEEEGSKRNHSKIEWVATQDDEDEPNEPSIDLRCSEELDNGNGPSNNNNGENPTLAQVLAQQTQLMNMMMQQLQNQQNQGNNHVPPQNKLAEFLRVRPPVFSSTTNPVEAGDWLHAIEKKLDLLQCTDQEKVSFASHQLQGPASEWWDHFRLNRITAEPITWLEFTAAFQKTHIPSGVVSLKKKEFRSLTQGSRSVTEYLHEFNRLARYAPEDVRNGEERQEKFLEGLNDELSYPLMTGDYHDFQKLVDKAIRQEDKYNRMEQKKRRIAQFKTQQGNNQKPRLTLRPQSMPHGGSSFVVRPQRQFFNNNAGNNIRNQAPRPVAAPTQQQPAKREQGSKPVVCFNCGDPGHYADKCPKPRRVKVVPTQSNSTVPASKARVNHVAAAXEVQDAPDVILGTFLVNSVPATVLFDSGATHSFLSMSFAGNHGMEVEDLRRPLMVSTPSNQALSLHRSPSVRIEIQGVPFLANLILLESKDLDVILGMDWLARHKGVIDCANRKVTLTSNDGRVVTVYALSSESLRSRLNQITLEEIPIVREYPDVFPDDLPGMPPKRDIEFRIDLVPGTTPIHKRPYRMAANELAEVKRHVDDLLQKGYIRPSSSPWGAPVIFVEKKDHTQRMCVDYRALNDVTIKNKYPLPRIDDLFDQLKGATVFSKIDLRSGYHQLRIKEEDIPKTAFTTRYGLFECTVMSFGLTNAPAFFMNLMNKVFMEYLDKFVVVFIDDILIYSRTKEEHEEHLRLALEKLREHQLYAKFSKCEFWLSEVLFSFGIFG

SEQ ID NO: 156403 - protein, 78 aa, Oryza sativa
  Clone ID: PAT_MRT4530_56074C.1.pep
CKDLRSDAIRTSTVYRIEINFTGFYGIKCFENHVHMILDQWTKDGACQSVGDGTLRMVWRERQEGHLRQHCREERGST

SEQ ID NO: 156404 - protein, 295 aa, Oryza sativa
  Clone ID: PAT_MRT4530_56075C.1.pep
MRFTLEAAHILAPGSIAAKPGRIKLTGTPASHHIWTCTGAKQISQAEKIHLTQVWSKFPTSNGTQTFRPSEVTADELQTILVWWYFEGYQRWQLPLPVEIAQAAVVEHTFNVGNFSISQLCQPPLIITAVNGQLPGPTIYAREGDTVVVHLVNTSPYSMTLHWHGVLQRGTPWADGPAMVTQCPVQPGGNYTYRFNVDGQEGTLWWHAHVSFHRATVYGALVIRPRGGAKAYPFPKPDKEHVVILGEWWNATVYDMERMAFLTGIPAPHADAYTINGKPGDFYNCSAPNQTAKFE

SEQ ID NO: 156405 - protein, 654 aa, Oryza sativa
  unsure (1)..(654): unsure at all Xaa locations
  Clone ID: PAT_MRT4530_56076C.1.pep
MDEVVATMDISEANEGYTSCGSVIEMSRQMKTTRVGARAQPWPACPGIPAVGRVGSVLLFTARMGEGLCHMFTTGSKAMECGVKMCLVGWPGLAWDELGPRSGCQFGLNHRRPWVKAVLVGQLCEEDVVSCLPKLRKTAGSASEVKEAVKPAVKDSKRLRSVKVLSLVSNLSLPFVFPLSLSKPLQQMADNEKGNKVRSQDIGTSSSRVNEAPDTSCVTLVQHLINQNRLLIEILQQHQTPILNLSQIQPQVQLEAVQALTPQVSAPPTSQKAPHAMPHVDPKEASIICFMCDEQGHYARNCPQQKRKAPLRTEDEVRKMIITSTEWPPPGMTKHQRRNSFRGAQXLTEHLLANGGRVSDSEDSDQVSSDDENKIELKACSRCGEIGHVASSCAFTCVRCEEDHPPDRCPMSRITCFLCEGTDHVPKDCQLSFLLTKKMADQHAHSNGEKHQGSTNPRQDYSFSLTPVPGQRKQNEKRKCRVREDIRCFNCQGMGHFADKCPKPRNIAAGTSVHATPCNQQLAPQRIVIHASRSSPLARVATTPIPMSALPQGVNAQFHPQPPADKTEASICVVPLEVPIQQLRNQVQDEEPECKKVIVCYNCSEEGHYSKNCPQPRQNRPPHYRQFTRSRHSNRIVVTGANAVPVRPRVNQDP

SEQ ID NO: 156406 - protein, 534 aa, Oryza sativa
  Clone ID: PAT_MRT4530_56077C.1.pep
MWNGWPGLAWDELGPRSGCQFGPNHRRPWVKAVHVIKKNGKIRVCIDFRNLNKATPTDEYPMPVAYELVDAASGHKILSFMDGNAGYNQTFMAEEDIHKTTFRRPGAIGSFEWVVMTFGLKSAWATYQRAMNYIYHDLIGWLVQVYIDDVVVKSKEVEDHIADLRKVFERTRKYGLKMNPTKCAFGISAGQFLGFLVHDRGIEVTQRSVNAIKKIQPPKNKIELQEMIGKINFVRRFISNLSGRLEPFTPLLRLNADQQFTWGVEQQKALDDIKEYLSSPPVLIPPQKGVPFRLYLSAAEYEAVLKGLQLLKEVEADAIEIMGDSLLAISQLAGEYECKNDTLMVYNEKCQELMKEFRKGDKFILVATDYFTKWVEAIPLKKVDSGDAIHFIQEHIIYRFGIPQTITTDQGSIFVSDEFVQFADSMGVKLLNSSPYYAQANGQAEASNKSLNKLIKRKISDYPRQRHTRLAEALWSYRMACHGSIQVPPYKLVYGHEAVLPCEVRIGSSRTELQDNLTADEYCNLMADEREDLV

SEQ ID NO: 156407 - protein, 921 aa, Oryza sativa
  unsure (1)..(921): unsure at all Xaa locations
  Clone ID: PAT_MRT4530_56078C.1.pep
MAENIDLVLEFLQKNRFAKAEAALRGELNGRGDASNGPTVQRRVAEPKEDDEQDGSEAGSNAGPRGAASVRSADSSREFIVKEIDVGGLPNGSDGRKGLGIGLAQENNTGDLYPWNFSIANSTMEQLAELLVSEEVPRHRRGAVVAEKRDRGVGTEQPGPVLEQKVSFGRGKGKVDVAGTGRNEINEPGHSRDKNLVPEKEELLNGCTVKTVLPFPAENPSSSYHTAHHDGNERKDAKKSXMRTVLKATKGQLDEGNRQYYSGKSQENADQVADRCFDLQLIGDNQREELPKLPPVRLKSEDKLVNMNWEEKVNHNGSGAKHPSADHAFMIGSYLDVPIGQEITPSGGRRTISNNWFSVSQGIAEDTSDLVSGFATIGDDSLEYPNEYWDSDEYDDDDDVGYTRQPIEDETWFLAHEIDYPSDNEKATGHTSGPDRHDRPTKDDDDDQSFVEEDSYISGEQYFHGKNIAQIGTSEGPMGHGIPDNDLIAQYDGQLLDPEELNLMHSEPVWQGFVSQNSELGMLGNGKFLNDSERPHPDDPFVEDDQHGSVRSIGVGISSDAADIGSEVRESLIGGSSEGDIEYFNESNLSVSGKRNSQQETEKKRINAKGAKQEQLNFIDNQKGVLPPGASYADGGFSFPPPLHSGKNVESDVKPLWSKKVDMYTINDPDDLQNGMVSDDMLATWRKKNSESSLRSSRDEMASDVVRSRNSSASSALNNTYDEIDDTMNSRHHKLDDAQEEDTGTTLDDEEAAALQEQVRQIKAQEEEFETFNLKIVHRKNRTGFEEDKNFHVVLNSVIAGRYHVTEYLGSAAFSKAIQAHDLHTGMDVCVKIIKNNKDFFDQSLDEIKLLKYVNKHDPADKYHLLRLYDYFYYREHLLIVCELLKANLYEFQKFNRESXGGEVYFTMPRLQSIAIQCLEA

SEQ ID NO: 156408 - protein, 432 aa, Oryza sativa
  unsure (1)..(432): unsure at all Xaa locations
  Clone ID: PAT_MRT4530_56079C.1.pep
RRRARVFLGCLPWPPAAIPAAVPTSPVAGSLFSHIKWDPHPPFYRFNPIPSLPVVPSPLPAALLSLPRCRLPPAACAASTVRRPAAPSPPPASPPPPPPRPALRFARXPPEARSHRRPSLSSAPAASSRLSLLAGAPSGRAVFSLGLAATSSPSVSPPFRGESTGDASSPAKQWRCRHCSTSGCHCRGSRAPADVATTSLGSATPPSTPAAPRFRRNAVAAPASPSSSSPASFRPPIPPRRLVAPLHHHLLQHRSGVFHAVPXSSAQPLLAAIVVSSSPFVLADRRXPPRPARRLAAPPPSSSSQRRVPRRPRLRAXAAAGCPRRLLAGPGRRRPRPLVVPDRRGVRPSVKPFSSVVRVRQVCRCSPVVVFVLASASPSVASAASRSCTSVGSRSLVRVVTVLVCPLGSRVVSTCAGRVVSSGVRLSATRLG

SEQ ID NO: 156409 - protein, 1362 aa, Oryza sativa
  unsure (1)..(1362): unsure at all Xaa locations
  Clone ID: PAT_MRT4530_5607C.1.pep
MLARFKLIREAEVLDKTSQYRVWTSKNFSHYKARIALQNFDVLLDDHDYCADLWSLAPSKGSGSPSPKGDLCVDNNFSFEEEYSDKLIGPHLLSNRETCVGASQLLEEDKSALGKRKRCHRPTSIRDDQRPKRILHMLKKKKFVLMVELHKWLERLEKENGKIMDRKTLTSTVNKLQKEGSCKCIKVSVPLVTNYARNHLVDVILHSSVGDLSMELVNEIKDRQRNFDTETRSRAVTKLRKKQQTAAIHGLRIRRRVKVNKPLVLEAIYANGFIGAKMIRAKLLHKFLWLYVSSLSNWCSPSDYAKEGHLNKNLNQSCLLFSMSAAIKEMPLELFLQVVGSGKKIDCVITKCSLGETLSEIPTKEYDQLMDTHAKGRLSRLITILDKLKLIQLAKASVEDSGVQSDAAPTYSLVLRPYIEEPTPIILPSSHINESVDAYWETLEYCHLTAGFAKPSSTFPGYSVPEVSHPRSWSSLRVMTTEQRLELQQRVMNVTEKGKLSYKDCRIIAKDLNLSVQQVLCVSSQNRRHRQPRVPVSQSQPKVSSGSTSQKRKRSADEITXRKLLMIYTRYRAARGARSSRVDWNSLSDLPASPAACCRRMSDLRAKMYIRLAVSQICNLLGIRYAKHLERERISKAKGLLSQVSDSNKENCVDSDSEQLNWDNFEDQEIRGALDEVLEFIQLEKMDRTKQISSKNEVSNDSNADEAPTGQEQTIMQYVTSSSTEVPESGLHEHVKPYRHPTAIHASKNMENFFRYHEEVIIPNKDEITKRDVCKSLAVANALELLKMVYLSTSSGPEVQASLTATFKLYSEREIFTAFCFLRDRNFTVTRNGTKPATLSGKFFFNASHSPFPFGSGKKASEFSKWLIAQQKNTMDSRVYLYPDLQCGEIVHLFSLVLSGEMCISPSLPSKGVGEADEPNSHIPLDEADEPDDRIPSVEDTSELDDSTHKRKADKVKLKSSKSKKHKPLPKIESDFCYRREKGFPGIQVALNQEKNQTSNLMHALHDEECLIFTLAREMGSKDVSSQVESQNMLSYLNNSSSCRCLLSASHLERSYSGWPWDAMNIYAKQLPSLSCCKDESFILSSDMFRNAFSVIHQTGEQGIDLREMSQALHPLGMQFVKVIIDTLEIFKLVFKVNAYDGVQIVDTLHKSKYHITTLAKYSGCSCLRDPASEIAATGDAENTLKDKHGVASNLQRTVKMLGDVHTVTVLDVQSNSSSPHMHSGEDERLSTPTQDNGGSGCCHACGRHIYQPILPWINGDGSMNETVYEGFSRRIIGYVMQYPGVVEEHLICRMDVLNPQTCRTLLEQLAVDKHIYVRVFDEPVPVAPTTFQSLLKQHGHCKEPSKCRRRYFANPTSTFQL

SEQ ID NO: 156410 - protein, 520 aa, Oryza sativa
  Clone ID: PAT_MRT4530_56080C.1.pep
MRLPVLLPLLLLLLAAAAAVAAAEAATLSARMVHRLSDEARLAAGARGGRRWPRRGSGDYFRALVRSDLQRQKRRVGGKYQLLSLSQGGSIFPSGNDLGWLYYTWVDVGTPNTSFLVALDTGSDLFWVPCDCIQCAPLSSYHGSLDRDLGIYKPSESTTSRHLPCSHELCSPASGCTNPKQPCPYNIDYFSENTTSSGLLIEDMSEEEARGGHAPVNASVIIGCGKKQSGSYLEGIAPDGLLGLGMADISVPSFLARAGLVRNSFSLCFKKDDSGRIFFGDQGVPTQQSTPFVPMNGKLQTYAVNVDKYCIGHKCTEGAGFQALVDTGTSFTSLPLDAYKSITMEFDKQINASRASSDDYSFEYCYSTGPLEMPDVPTITLTFAENKSFQAVNPILPFNDRQGEFAVFCLAVLPSPEPVGIIGQNFMVGYHVVFDRENMKLGWYRSECHDLDNSTTVSLGPSQHNSPEDPLPSNEQQTSPAVTPAVAGRAPSSGGSTTLQNLLANSNMLLLLTMSVFFIS

SEQ ID NO: 156411 - protein, 658 aa, Oryza sativa
  unsure (1)..(658): unsure at all Xaa locations
  Clone ID: PAT_MRT4530_56081C.1.pep
MDNTGNKGYGNDGSDDSRTQANGNEKSINETSPELIQIVVNQTNMLATAFQLLQNRNNPAGATNVQVPTVQQQCKLSEFLKTGPPTFAIAVDPMEASDWLRTVEKKLGLIQCTDQERVGFATHQLVGPASEWWYSYEASRPEGHTITWNEFSSVFKRSHVPAGMVTLRKQEFRYLKQGDLTVTEYLHEFYRLAHYAPEDVETDEDKQEKFLQGLKDELAVQLLLEDYEDFEKLVDKTMKLESEHNRMTNCKRRIVNIPVFPGGNQRQRTEPLQITGSSVAHQEFPPQEDGRNADNNTSNTNDDDTTNNHGSCPISDHSNKACNVSSIHQDVNDSINVGNQNDNLSNFDSEKDSNGDSNYGTTDANVSKDFQPPIPTPSHNDRPQMDSSVKKTLICYNCKEPGHFSRDCPQPKRNLRHHSGHYARRRRVTRLVVTGANAVPVSLKGSKPKDLIVTRSIHNSRSEEYLYEVDAKDMNYEKXSGTEVPSSSATIQSKSARGATREKSEWRSFASPRRKLAGTVPPPATSGIGATVLPPAGCCSSPVRRSTPPSPPSTPRHRLLPRHHLLLARISPERRRXRAGLTFLLVDISSGCPGRRARASADVAVSSLGDAASPSTPACPRFRRNVAANLSVRLAGVVRPPVPPRRVPVGHLHHHLRH

SEQ ID NO: 156412 - protein, 345 aa, Oryza sativa
  unsure (1)..(345): unsure at all Xaa locations
  Clone ID: PAT_MRT4530_56082C.1.pep
MFNREKGKNVSGYASSNSSFQLNPPLASRELTRAHPWSIPSMLLSSQLPLVGSQDQNQYVFDRAFATQVNELPMPEEDVPFCHDCREQGHYALNCPWVYAKEAPSFGLAGQTSLNQPPCTKSSLQPSVQSGEPNGDNPLNPRKCFPPSLSYHVGSRTKQAKGKKSKTQKRKAPMRTEEEVRKMTITSTEWPPAGITIPRRQRGNTFRGARQLTQHLLSHGGRVSDSEGSDQVSSDDEDEPPRHLGEEEMESKACTRCGEIGHVASMCLTLCPHCEEDHPPGECPTXTNHSLHRQPQQRIVVDGRSCVSPRPTPGRAKGNQPQEGDTKQKTVIRFNQQSEGSFSCE

SEQ ID NO: 156413 - protein, 83 aa, Oryza sativa
  Clone ID: PAT_MRT4530_56083C.1.pep
MAMTMTTIKQRGVCVVEEKYDDVKECWNACAPCMDPTSHPLPSPSSPRPVKEPDCLSHHSSSDPAPPSTINLSIDDADKVCHQ

SEQ ID NO: 156414 - protein, 1564 aa, Oryza sativa
  unsure (1)..(1564): unsure at all Xaa locations
  Clone ID: PAT_MRT4530_56084C.1.pep
MILGISSTFSPLESLAKSFWKELDSSSSRICSYRAFLRRCRRRGPSPPPPSPFKRTPVSPLPAATLAFASRRRFRSSAVCPSFAVAAAAPAVLRRRSRRAVAREGRHRGRRHVAVLVRPFAVTGDRRSFVAVDNPKVSAVSSSPPSSSVVLPPPFWSPIPSFLESPFSRKKSLKSSKASKATPGLEWYIPGLEIELCSRGGCSEWLGLYNRMPRYKPEYLFGVEGFVQELRTMSFVIGFGTAPFYAQIPHDRHEEKCRVKVTLNSNSEEVPSVMFEAGGRNYIHACQEVARIAIGELRDRYSDQLADIEYRYHPRQPQGSDRGSYLETEGIENDVTTKHLVEMLWAMDESRAETVLAAQDREDRNRGKICKLEDKVDRLEKELAALKGEAPPQKARIRLTARKRALFVPRYQLAPKVRVVEKEVAPAQADPSVIIISSDEEEESKHNNSKIEWMVNTRSNGNGPNNPNNNNNGENPTLAQVLAQQTQLMNMMMQQFQNQQNQGNNQALSLQRSPSVRIEIQGVPFLANLILLKSKDLDVILGMDWLARHKGVIDCANRKVTLNSYDGRVVTVHALSSESLRSRLNQITLEEIPIVREYPDVFPDDLPGMPPKRDIEFRIDLVPGTTPIHKRPYRMAANELAEVKRQVDDLLQKGYIRPSSSPWGAPVIFVEKKDHTQRMCVDYRALNDVTIKNKYPLPRIDDLFDQLKGATVFSKIDLRSGYHQLRIKEEDIPKTAFTTRYGLFECTVMSFGLTNAPAFFMNLMNKVFMEYLDKFVVVFIDDILIYSRTKEEHEEHLRLALEKLREHQLYAKFSKCEFWLSEVKFLGHVISAGGVAVDPSNVESVTNWKQPKTVSEIRSFLGLAGYYRRFIXNFSKIAKPMTRLLQKDVKYKWSEECEQSFQELKSRLISAPILILPDPKKGFQVYCDASKLGLGCVLMQDGKVVAYASRQLRPHEKNYPTHDIELAAVVHALKIWRHYLFGTRTEVYTDHKSLKYIFTQPDLNMRQRRWLELIKDYDMGIHYHPGKANVVADALSRKGYCNATEGRQLPLELCKEFERLNLGIVGRGFVAALEAKPTLIDQVREAQINDPDIQEIKKNMRRGKAIGFLEDEHGTVWLGERICVPDNKDLKDAILKEAHDTLYSIHPGSTKMYQDLKERFWWASMKREIAEYVAVCDVCQRVKAEHQKPAGLLQPLKIPEWKWEEIGMDFITGLPKTSLGHDSIWVIVDRLTKVAHFIPVKTTYSGSRLAELYMARIVCLHGVPKKIVSDRGSQFTSNFWKKLQEEMGSKLNFSTAYHPQTDGQTERVNQILEDMLRACALDFGGSWDKNLPYAEFSYNNSYQASLQMAPYEALYGRKCRTPLLWDQAGERQVFGTDILREAEEKVKIIQERLRVAQSRHKSYADNRRRDLSFEEGDYVYLRVTPLRGVHHFHTNGKLAPRFVGPYKIVSRRGEVAYQLELPQSLAGVHNVFHVSQLKKCLRVPTEEANHEQIEVQEDLTYVEKPIRILEIDERRTRNRVICFCKVQWSNHSEEESTWEREDELKSAHPHLFASSSESRGRDSV

SEQ ID NO: 156415 - protein, 59 aa, Oryza sativa
  Clone ID: PAT_MRT4530_56085C.1.pep
SSSSGSTGGSCGTCTRRRGTLTGTTRCKRRMQRCSRVPRVLVVIAPLREVSATPGLHRR

SEQ ID NO: 156416 - protein, 472 aa, Oryza sativa
  Clone ID: PAT_MRT4530_56086C.1.pep
MSQESPGSGHQSPGSVSHASLHHASGSLPATPTPAPSAPSLAQSPNQPGAATTPTISASSTSAAALDTGAHDAPDTTTVLYQIDPVHQDSMVPPRPHTRLQSGICKEKVYTDGTVKWSCFSSSGEPQSLDEAFATNHWREAMDAEYQALMKNQTWHLVPLQQGRNIIDCKWVYKVKRKAYGSLDRYKARLVAKGFKQRYGIDYEDTFSHVVKATTIRTILSIAVSRGWSFRQLDVQNAFLHGILEEEVHMKQPSGYENSKFPNHICKLDKALYGLKQAPRAWYSKLSTKLQALGFKPSMADTSLFFYSKGDVNVFVLIYVDDIIVASSTPSATSALLQDLTKEFALKDLGELHYFLGIEVTRTEDGILLTQAKYASDVLRRVGMQDCKPAYDDSDRTGNPTLGPSSSQANPGQPFHILVVKQTEPQTKPYPLDMWKYGSALQQRPEDRSLYGRGATIKTMHPEPSLKPFWGF

SEQ ID NO: 156417 - protein, 1781 aa, Oryza sativa
  unsure (1)..(1781): unsure at all Xaa locations
  Clone ID: PAT_MRT4530_56087C.1.pep
MSSGTNEGYTSCGPVVEMSWHRAGVLLLGAQSCLPVPGVPAVGGVGSMYTSDQSIIYSNSRALGYGQAKQCTQMAGSINRRGLDLTGFVLELRGMCVVLGYPHGVDYQGKQLPEQEGDDAEPHAAWEVTAVILTGSPERTSLAVTAGGDSFSAACQNAALLAIGTLHQRYPDELQHSPYRYHPRRGGARDYATFRDASSEDDATIMHLARMVEAYDAARIDFHQMVRRGLVENNMKILELRQENLQLEKDLYAVEAQLRQLKIAQGEVCRLKRLRVYRSLKLPAXKSTSRPELVRQSLAWTCFVETPRAELAPVVPQEDGASGVGSTEDALLLTFHXTTRRRANTGDGNQPEGSNHNNHGSPPPPPPPPPPPPPDTNAILTQILAQQANMMPAFLHHIQNPPQHNAPPPPPQHSKLVEFLRIRPPTFSSSNNPVDALDWLHAVGKKLDTVQCSDEEKVIFAAHQLQGPASLWWDHFQATQPEGQPFTWARFTAAFRRTHVPAEVMALKKREFRELKQGNRSVMEYLHEFNNLARYAPEDVREDKEKQEKFLAGMDPELSMRLVSGDYPDFQRLVDKSIRLEAKHKKLESHKRCLANFRNQQGANQRVRYTNPYLGGSSSQQQQQQQPRSAPRPHFVVRVPQPQQQQSQQGTRAPRPPTPAVQPGQGRRDVQGQQRLCFNCFEPGHFADKCPKPRRQQGQPPPRPNNDGKDVIWGRVNHVTAEDVLTTPNVIVGTFLIHSIPTTILFDSGASHSFISVPFVGRNQLGVERLRNSLLITTPRGVMTAKYYSPAVPIEIQGIPFPSDLILLDTKNLDVILGMNWLAQFQGVVDCARRTVTLYRGPEQPVVFFAPPTSVGSSELHQIGLSEIPIVREFGDVFPEELPGMPPKREIEFRIDLAPGTTPLYKRPYRMASNELAEVKKQLEELKEKGYIRPSTSPXGAPVIFVXKEDKTKRMCIDYRALNEVTIKNKYPLPRIDDLFDXLKGATVFSKIDLRSGYHQLRIREEDIPKTAFTTRYGLYEFTVMSFGLTNAPTFFMNLMNKVFMEYLDKFVVVFIDDILVYSQSEEDHQHHLRLVLGKLREHQLYAKLSKCEFWLSEVKFLGHVISAKGVAVDPETVTAVTGWKQSKTVTQIRSFLGLAGYYRRFIENFSKIARPMTQLLKKEEKFVWSPQCEKAFQTLKEKLVSSPVLILPDTRKDFMVYCDALRQGLGCVLMQEGHVVAYASRQLRPHEGNYPTHDLELAAVVHALKIWRHYLIGNRCEIYTDHKSLKYIFTQSDLNLRQRRWLELIKDYDVGIHYHPGKANVVANALSRKSHCNTLDVRGIPPELNQQMEALNLSIVGRGFLATLEAKPTLLDQIREAQKNDPDMRGLLKNMKQGKAAGFTEDEHGTLWNGNRRVKAEHQRPAGLLQPLQVPEWKWDEIGMDFITGLPKTQGGYNSIWVVVDRLTKVARFIPVKTTYGGNKLAELYFARIVSLHGVPKKIVSDRGSQFTSHFWKKLQEELRTRLNFSTAYHPQTDGQTERLNQILEDMLRACVLDFGKTWDKSLPYAEFSYNNSYQASIQMAPYEALYGRKCRTSLLWDQVGESQVFGTDILREAEAKVRTIRDNLKVAQSRQKSYADNRRRNLEFVVDDFVYLRVTPLRGVHRFQTKGKLAPRFVGPFRIIARRGEVAYQLELPASLGNVHDVFHVSQLKKCLRVPSEQADSEQIEVREDLTYVERPVKILDTMERRTRNRVIRFCKVQWSNHAEEEATWEHEDELKAAHPDLFASSSESRGRDSV

SEQ ID NO: 156418 - protein, 111 aa, Oryza sativa
  unsure (1)..(111): unsure at all Xaa locations
  Clone ID: PAT_MRT4530_56088C.1.pep
PIQFLEWCPTGFKXGINYNQTRVVQGGDLAKLQRTVRMISNSPSVVXVFSCIYIKLDFMYSQRAFVLWYVSXGHVSRRSSHXAHEDLTALYKHHEKVGSEFKYGHKGNEGD

SEQ ID NO: 156419 - protein, 34 aa, Oryza sativa
  Clone ID: PAT_MRT4530_56089C.1.pep
MRLEPPLDRFMDLVNESSNRTRRTSDNGNEAGGN

SEQ ID NO: 156420 - protein, 195 aa, Oryza sativa
  unsure (1)..(195): unsure at all Xaa locations
  Clone ID: PAT_MRT4530_5608C.1.pep
MATTDTNVAHIMDEQEDIKIKSSMSXNLIRPPSTLLTSNGRQICMRPPISARQYFMESSWSPLSNRPSLIAKFHPSHPQMKKQGAASPVVGLXGCDFVWDPXPKWGPCGVRPXLGGGRPGILPSPXNSXNKVDLHRQDQQLTGRCIDLLGATQQRLSSTHRKIGLTTALSVTSXSSGFITFEPCFLVSALTRVRF

SEQ ID NO: 156421 - protein, 149 aa, Oryza sativa
  Clone ID: PAT_MRT4530_56090C.1.pep
PTQPAETQKNLSRSRRAHQERGEKHTTAEKKKRNRFLRRGMSRRREEESSRACSLLEDGDREGNGVDQSVARPSCGWRRERSISFSAQTIGQVTGVVWCFALVGCCAVRCNAVQCSAILVVPCQDQIWLEVRWTALCLWLLHLPAGYSG

SEQ ID NO: 156422 - protein, 177 aa, Oryza sativa
  unsure (1)..(177): unsure at all Xaa locations
  Clone ID: PAT_MRT4530_56091C.1.pep
KLVKTFCSTSDHYTGYPKVLEDYSDSNWISDTNKIKATSGYVFTLGYGAVFWKSXKQTILTRSTMKVELTALDTATVEAEWLRXILMDLSVVEKLVPAILMNCDNQTVIIKVNNSKDNMKSSRHVQRKLKFVRKQKNSRVIALDYVKTAKNLADQFTKGLSRNAIDSASREMGLRPT

SEQ ID NO: 156423 - protein, 1022 aa, Oryza sativa
  Clone ID: PAT_MRT4530_56092C.1.pep
MGSVGLNDTVSGVVSRKVLPACGGLCYFCPGLRARSRQPVKRYKKIIADIFPATQDEEPNERRIGKLCEYVARNHHRVPKITAYLEQRCYKELRNEQYGFVKVVVLIYRKLLVSCKKQMPLLASSALSIICTLLDQTRRDDMRIIGCETLFDFTVSQVDGTYQFNLEELVPKLCELAQIVKAEEKDNMLRASTLQALSAMIWFMGEFSHISSAFDNVIQVVLESYNLQKMQNDNIDSEAPGNREDAKDPNFWSRVCVHNMAKLSREATTFRRVLESLFRHFDNNNSWSSQNTLAFCVLLDMQILMENQGQNIDLMISILVKHLEHKSVLKQPEMQLSVVEVIASLAEQSRAEASAATIGAISDLIRHMKKTLHVALGSRDLEVIKWNDKLRNAVDECILQLSKKNSNQMLPSVEHTPYYVGIITQVGDAGPVLDMMSVMLENISRTPLVAIATTSAVYRTAQIITSIPNLSYRNKVFPEALFHQLLLAMVHPDHETRVSAHRIFSVVLVPSSVSPFSKSTSPNQLVKHDIKRTLSRAVSVFSSSAALFDKLKRDKESFREKPQDGSMNRLSHAADNDTSTVKDMPSSRSRRHSFKVPNFSMKRVASLSLKSPMSPKECQNTSAESCSETESTLLRLSSRQATLLLSSIWAQAISPKNTPQNYEAIAHTYSLLLLFSGSKASIFEALAPSFQVAFSLMSYSLEGTDSLLPSRRRSLFTLATSMIMFFSRAFNVAPLIPICKSMLNERTMDPFLHLVQDTKLQAVKDCSEETYGSPEDDNNALKSLSAVELTQSQSRESMASTIMNNIRDLPDSELQTIRSQLLSDFSPDDMCPTSALFFELTVRNPGCDEDSSNQEDVLINMANDNDTFGEVYENTEATTASVPTANLLGIDELLESVVTDAPSQTARCSVSTAPNIPFKEMTNQCEVLSMEKQQKMSVLLSFKHKNQSNVLPINQADNTGAVHISSDDQNTNPFLQQSLDGYPKYVADGEALQVAADDVFQQQFLKLPASSPYDTFLKAAGC

SEQ ID NO: 156424 - protein, 75 aa, Oryza sativa
  Clone ID: PAT_MRT4530_56093C.1.pep
CRCHAWGSDSSFSICDVHSRVSLIGIDRWPAPTKGYLVSREEDLEQRLSLPVQIIHPWFVHQRLHLLVRYVRERD

SEQ ID NO: 156425 - protein, 271 aa, Oryza sativa
  Clone ID: PAT_MRT4530_56094C.1.pep
MAEVSAAMGSNRSVRKKLAALLSDERKDFIRVRSKVKPLIDALESVHACFEKLSLEDEKNLDALQEAWMMDLRELSYDMEDSLDRFLVKSAAEPGSCKKLFKILLTKIKGSTNGIVKVIQDIKMPVEELNERMNRFKLSDDRHVTYDPIKIDSRVTALYVDASHLVGLDGPKLELIKMLRIEDEPEPSKKLVVVSIVGLGGLGKTTLANQVYHHLKPEFDCSAFVSVGQNPDVLKILDNILSGLTHQPYATTGSTVQVLVEKTRRFIADKR

SEQ ID NO: 156426 - protein, 112 aa, Oryza sativa
  unsure (1)..(112): unsure at all Xaa locations
  Clone ID: PAT_MRT4530_56095C.1.pep
MPFSYVAMASSSASSSRKPVPIATASAHRLVPLPAAAAVVAAPTPSPSNXHGLRDPFSYFSGEDTYLTASDLVAASVISSHLSVVGDGADLSKVGIFLNSTARHRSVNGIWA

SEQ ID NO: 156427 - protein, 142 aa, Oryza sativa
  Clone ID: PAT_MRT4530_56096C.1.pep
RTEPRDLRTNARSTLRRKQLILANQTAGPLRYRTYTPNMLLVHSSRHRQGLKTFLHYMLSTRTQSSSPDQNCNTRQHAGLIAEQQHQATTHDAGQLPTISSESGKALNPLRWKNVRPRPALTGVGRRSQVKGRKNQHNRPLG

SEQ ID NO: 156428 - protein, 61 aa, Oryza sativa
  Clone ID: PAT_MRT4530_56097C.1.pep
ALPARDPRLANSSEGEGHRRPRRRERERVSAQNAELYAGAGRYEGNSHRWREGGRRSTASR

SEQ ID NO: 156429 - protein, 161 aa, Oryza sativa
  Clone ID: PAT_MRT4530_56098C.1.pep
MVAARAVVAGAAGAAAPSAAGTVWFGANDAFLPGRARALHDVPLPEYMDNTRAMYQYVGDCAGLPERTNKSAGAYARACVEVTAECGLRVIDIWSKMQRFPGWESSFLRDGLHLTPRGNRVVFEEVVFALKDASLGLEALPADLPLFCDMDPNNPVKSFDE

SEQ ID NO: 156430 - protein, 659 aa, Oryza sativa
  Clone ID: PAT_MRT4530_56099C.1.pep
MEPTGTIVFATVGVTNFGFDVFSAAVPLPPMEEDAERRHTDGVSVNFNAQFVDDGGEEVAFVSERGGAAGLFRCRPGPEQRAEPLPTVEGSLFHDRPTVRGGRLYFVSAHEQPPAPFRSWAAVYATEIGSKETVRVSPPGVVDMSPAVSDSGELVAVASYGDRPWAFDFRVLETEVAVFRAADPARRVVVVGRGGWPTWHGEGTVFFHRVADDGWWSVFRVDVSPETLEPTGGERRVTPPGLHCFTPAAVGRGGGGRWIAVATRRKGRAQRHVELFDLETESFSPLTERLNPELHHYNPFFSPSGDRVGYHRFRGAGARGDSVVPYLQPVQSPVSSLRMLRVYGTFPSFSPDAAHLAMNGDFFKTPGVTILRSDGAKRWVLTREPNLFYTSWSPAESGVIFTSMGPIFETTKATVRIARLEFDAGELTTGRDEVAATLKVLTRPEAGNDAFPAVSPCGKWVVFRSGRSGHKNLYIVDAAHGEDVGAGEGTIRRLTDGEWIDTMPSWSPDGSLIAFSSNRHDPTNAAVFSIYLVRPDGSGLRRVHVAGPAGSAAADRERINHVCFSPDSRWLLFTANFGGVMAEPISAPNQFQPYGDLYVCRLDGSGLVRLTCNAYENGTPAWGPASSPAAGLESLSLGPGAGDESLGEFDEPLWLTCDV

SEQ ID NO: 156431 - protein, 152 aa, Oryza sativa
  Clone ID: PAT_MRT4530_5609C.1.pep
MSQMLRLAELFELVLTSRARIELITNQARVAHEPRAFLTALAAVAWRRRQDGDSSACATGTHREFGSGIHGKILVGAAMVVSDAKHVKSRLRNLHGMEIVGTRVYGGGRSRRWLGKVEEEAEEEGFVKRREDSEEGEMDRGYALEERISGVG

SEQ ID NO: 156432 - protein, 198 aa, Oryza sativa
  Clone ID: PAT_MRT4530_560C.1.pep
MEVTRRRRDDASLTVDPSRSILPPIYYRPDAPARGGRAPARCLYAPARAPQPGGPHPPPSANETHSGGGRRHNRVAREAAPRSPSPSTPWPAQSSLSASRLWRRGSNCTGDDVDCKGSGGDGGCLAFVILMAAAMSPMRPRSSNASSTPVAGKKEKAMTRGGAHNLLHPDAKTLRRVTEHRHHQRSTPSRPSLATKPP

SEQ ID NO: 156433 - protein, 193 aa, Oryza sativa
  unsure (1)..(193): unsure at all Xaa locations
  Clone ID: PAT_MRT4530_56100C.1.pep
PPLAKHTTPQVSPPSPAGNGQSPLVPRXIRKRQRPSQGPXPLHHAHPCLDASARGKLHYKPSRCPRWLVVSTIXLPGHPANRSLIAMGATSKTMHPQPTIQSHFSWIITTMKHGQMSRAXAAHSDTXRSNTVIIPSTELVXLSMAKHTVLARGGRRRREEAAALLGEATATAVRRRSTVALVVVGRAARWWIR

SEQ ID NO: 156434 - protein, 896 aa, Oryza sativa
  Clone ID: PAT_MRT4530_56101C.1.pep
PTSSQVPPHISNAYNDVSRGYPPDTRQGQYNHIAPQTQPIRPPNPPPNPQGPNNMEDMISDIMRNRFGIEPRNRVRAYKKPYPNYYDNVSFPRNYRVPEFAKFSAPFSSPPAWAASRPKPPHPAAPASRAATPPHARRKRADRAPDCRPRIPPPFSAFPVASTLSSPIKWNPLAAPPTSPVRRLAAPSPPSDSQPPPLPRAVLRLARKAPEASSRRRPVASPPLHHLRPAAVHRRYADRHRRLFHRCHSVVLSSGCSSVSPEHRRAAPASPSASPEFPRSALPPPVRRRPRHHHLRHRSGKVVLGLASPPPEPRRCSLSSSPFVLVDDSSSQSFLLAGSSSRCAATVVGIAAACSTSSSPPCSCCRLPSSPPRPFRSSSSRSCFAIRGSSSEPLQPRRHLRPRLRVVKPCAGRVSPSSKDRRRSRSLAVRLRRPRAVSAALLRRCRSHASSRGGKDLSLVALVLVLLVSPRTRCAAVDPGTRVPVSVVVHACSFACVFRVASVVPEVPEAWFAVIAEVLNKRTRIEMDEVVATMDISEANEGYASCGSVIEMSRQMKTTRANIAYDGLLDSIKEKLNGQIFLDTDHVLHEALAQESRVDNNSLNASVDNNAITIIAESSDDSDCVTSLDNDGIAEPRNGLDCVASLENNIIENIAELSDGSDCITSESEIALSPKTESQIGHVDVGKDDDNVLRDSGAIESKVVMHTYQRPYPEYVDSVLYPQGFEVPNFTKFTGENAMTTMEHIGRFIDQCETKGNTKHAFPSKETRDPTKTYSDLDPAGLTAHIPACLHLLQSLQTLVDDIFKIASHQGLVIFNRQVILLEIPKKAKIYLNWQNANFNNVLLLDSAYPLARAYSKQRKINKRRRRLHSTGSLTKATPNPPHHQPHCRTLPGGRP

SEQ ID NO: 156435 - protein, 400 aa, Oryza sativa
  unsure (1)..(400): unsure at all Xaa locations
  Clone ID: PAT_MRT4530_56102C.1.pep
MEMDEVGGRWTSLGQMKATRAAARISETNNTSARRVSSFKVLSLVLMFNREKGKNVSGYASSNLSFQLNPPLASRELTRAHPWSIPSMLLSSQLPLVGSQDQNRYVFDRAFATQVNELPMPEEHVPFCHDCREQGHYALNCPWVYAKEAPSFGLAGQTSLNQPPHTKSSLQPSVQSREPNGENPLNTGKCFPPSLSHHVGSRTKQAKGKKSKNQKRKAPMRTEEEVRKMTITNTEWPPAGITIPRRQRGNTFRGARQLTQHLLSHGGRVSDSEGSDQVSLDYEDESPRHVGRDEMESKACPHCGEIGHVASMCLTLCPHCEEDHPPGECPTRKVTCFLCEXTNHSLHRRPQQRIVVDGRSCVSPRPTPGRAKGNQPQEGDTKQKTVICFEXQSEGSFSCE

SEQ ID NO: 156436 - protein, 117 aa, Oryza sativa
  Clone ID: PAT_MRT4530_56103C.1.pep
MQIYGAKVEVACETEGPNTQANSVFTATDEFGNFTFHLPSRLHATPSLENACVVKVLQLPPDSACGLRHRPAASYRIRPSSSLSSSADGFRAYTAGVIRLQHGGTPSGECVQEHFGK

SEQ ID NO: 156437 - protein, 2021 aa, Oryza sativa
  unsure (1)..(2021): unsure at all Xaa locations
  Clone ID: PAT_MRT4530_56104C.1.pep
MAAGPPAPVSFPSGRSLPLPTLFKPSPRLPRPFPPLXAAPSPRRNRARAVALSLLRRRRPPAGLLRSPGPSPAPASPPPASSHRRRPRPPPRRVRRPPERSRPRRPEPRLRLPPLWPPFSSSPSTXGEPWTAASFPPSLPLSRPPLRRAYGRRRRPXGAGAASRRPRRXGRLRARRVAAAWGPDVNRPRPRVRLTRGAHGAGRXSPGAPGQPWTGLIFVFTGVIASKIKRIXEVKIKSSGSTDPGNXTVPSPLLQMAITWPFELGIGPFKSLFFPXEVKNPFLCFVPACYMEFIRVKALLFSVGRVDFCLXMAGSINRRGLDLTGFVLELRGMCVALGYPHGVDYQGKQLPEQEGDDAEPHAAWEVTAVILTGSPERTSLAVTAGGDSFSAACQNAALLAIGTLHQRYPDELQHSPYRYHPRHGGARDYATFRDASSEDDATIMHLARMVEAYDAARIDFHQMVRRGLVENNMKILELRQENLQLKKDLDAVEAQLCQLKITQGEVCRPKGRRVCRSLKITARKSTSRPELVRQSLAWTCFVKTPRAEPAPVVPQEEGASGVGSTEACACVLLMVTTRRSAATGDGNQPEGSNPNIQGGPPPPPPPPLPPPPDINSILTQILAQQANMMAAFLHHIQNPPQHNAPPPPPPPQHSKLAKFLRIRPPTFSSSNNPVDALDWLHAVGKKLDTAQCNDEEKVIFAAHQLXGPASLWWDHFQATQPEGRPITWAHFTAAFQRTHVPAGVMALKKREFRELKQXGNRSVMEYLHEFNNLARYAPEDVXEDEEKQEKFLAGMDPELSVRLVSGDYPDFQRLVDKSIRLEAKHKELESHKRRLANFRNQQGVNQRVRYTNPYPGGSSSQQQQQQXPRSMPRPQFVVRVPQPQQQQSQQGTRAPRPPXPVVQPGQGRRDVQGQQRLCFNCFEPGHFADKCPKPRRQQGQAPPRPNNGGKDVIRGRVNHVTAEDVLTTPDVIVGTFFIHSIPATILFDSGASHSFISVPFVGRNQLGVERLRNPLLITTPGGVMTAKYYSPVVPIEIQGIPFPSDLILLDTKNLDVILGMNWLAQFRVVDCARRTVTLYRGPEQPVVFFAPPTTVGSSELHQIGLSEIPIVSEFGDVFPEELPGMPPKREIEFRIDLALGTTPLYKRPYRMAANELAEVKKQLEELKEKGYIRPSTSPXGAPVIFVEKKDKIKRMCVDYRALNEVTIKNKYPLPRIDDLFDQLKGATVFSKIDLRSGYHQLRIHEEDIPKTAFTTRYGLYEFTVMSFGLTNAPTFFMNLMNKVFMEYLDKFVVVFIDDILVYSQSEEDHQQHLRLVLGKLWEHQLYAKLSKCEFWLSEVKFLGHVISAKGVAVDPETVIAVTDWKQPKTVTQVRSFLGLAGYYRRFIENFSKIARPMTQLLKKEEKFVWSPQCEKAFQTLKEKLVSSPVLILPDTRKDFMVYCDASRQGLGCVLMQEGHVVAYASRQLLPHEGNYPTHDLELAAVVHALKIWQHYLIGNRCEIYTDHKSLKYIFTQSDLNLRQRRWLELIKDYDVGIHYHPGKANVVADALSRKSRCNSLGVCGIPPELHQQMEALNLSIVGRGFLATLEAKPTLLDQIREAQKNDPDMHGILKNMKQGKAAGFTEDEHGTLWNGNRRVKAEHQRPAGLFQPLQVPEWKWDEIGMDFITGLPKTQGGYDSIWVVVDGLTKVARFIPVKTTYGGNKLAELYFARIVSLHGVPKKIVSDRGSQFTSHFXKKLQEELGTRLNFSTAYHPQTDGQTERLNQILEDMLRACVLDFGKTGDKSLPYAEFSYNNSYQASIQMAPYEALYGRKCRTPLLWDQVGESQVFGTDIFREAEAKVRTIRENLKVAQSRQKSSADNRRRDLEFAVDDFVYLWVTPLRGVHRFQTKGKLAPRFVGHFRIIARRGEVAYQLELPASLGNVHDVFHVSQLKKCLRVPSEQADSEQIEVREDLTYVERPVKILDTMERRTRNRVIRFCKVQWSNHAEEEATWEREDELKTAHPDLFASSSESRGRDSV

SEQ ID NO: 156438 - protein, 1005 aa, Oryza sativa
  unsure (1)..(1005): unsure at all Xaa locations
  Clone ID: PAT_MRT4530_56105C.1.pep
FVAQSGYKQKYTDGDGRSRGSMEYLRDRFCLAFFPVTRIIALRVEILSFQQIKNESIGAAWSIFTDLVQSGPTFSFPEYVLLQHFHTSLDKESAFYLDITVGGSFMHKTPSEGKVILDRILENTSFMTQSDXPYPEASVSKIEKPSTIETQPEPSISTNFLXKAGMSQETADPLDILQTMTEGLSIDREVIHEDLHNVLDHVRENRHHTPLSPPDGXEFDDSRNTVTYLNSRIKEFPSKLVERESDQHIKYXSYKIRGENNSGNSSKNQAHPCFCLHISLPPSLLRPGPPLSVPPACPXLCNFPSRPRNTERERSSADRLXDAARRVATTAAMHTGALERALRTAAATSSPLPSIXIKPERATTPPASPQPPLHFPSRIFKNGATSVEIVHRLLHLRSPSPLSIPPPPVSHCPILRVYTIPGTSXNPMNAPIIQPPDWTLPFEIMCDASNFAVGAVLGQTKDKRHHAICYASKTLTGAQLNYATTEKXELLAVVFAIDKFRSYLVGAKVIVYTDHAALKYLLTKNDAKPRILRWILLLQEFGLEIKDXKGVENSVADHLFGLQITDTQDQPINDFLRDDMLMTVRDSNPWYTNIVNYMVSKYIPTEENQRKLKYKSRCHIWDDPXLHREDSKEFVRRCPSCQRLGGITARDEMPLAYNLQVEIFDVWGIDFMRPFPESRNCEYILVAVDYVSKWVEAMPCSAADVKHAKKFIKIIFPRFGTHRMVISDGELEHRAYWPIRNWNMDFEGAGEWMKIQIAELEEWREKAYDNAKIYKERTKRWHDKRIKIRKLKPGDKVLMFNSRVKLFGHGKLRNKWEGPFDVIDTSSHGVITLRDDSENFTMEGVNTLWASSSASSLVRXIRPLSAPRSAARSLSPRHVTKTKIRGDSPVRRPTTGKLGLLKARRLFQYDEKAAPPPAERYVGTLYTKAADEVLHKYITPSATPSTPKEDRFCIRGVQTPDGGYGKGLHRPLTQSDKEEAAESRSPPPMKVKCRLMPPPTKFGNL

SEQ ID NO: 156439 - protein, 68 aa, Oryza sativa
  unsure (1)..(68): unsure at all Xaa locations
  Clone ID: PAT_MRT4530_56106C.1.pep
MRWQGECIHAAKRAIPMRRIYVNAKQYEGILRRHRARAKAQRENRLVXGRKPYLHXSRHRHTTRRTKG

SEQ ID NO: 156440 - protein, 152 aa, Oryza sativa
  unsure (1)..(152): unsure at all Xaa locations
  Clone ID: PAT_MRT4530_56107C.1.pep
MEFGWVLRRPMRLPDSPRHERGLPAILRGVGVKPEVWCAWLEGVMXRVLSRPLSDVDLYVNIVVCVPRLVLDGDFNAHSAWNSIREFLGVTRAARLTGGVVPSALVKVRLPFPGGTGAQRSSPIKWRVARFDGTHAVTLVHMASESKNKTCI

SEQ ID NO: 156441 - protein, 156 aa, Oryza sativa
  unsure (1)..(156): unsure at all Xaa locations
  Clone ID: PAT_MRT4530_56108C.1.pep
MPMVAQFNGRMSSAASKLIWKQWAPSKCKHCAWLLLQNRIWTADWLQIRQWPNNYFCQLCYRNLETTQHLFKDCPFMRYIWERVLGRLNCNKIDXTHDENVPLLDWWIRRTSRGGKDXPKKKQSVDILVAWKIWCERNRRVFQNQDKSAAARQDTG

SEQ ID NO: 156442 - protein, 81 aa, Oryza sativa
  Clone ID: PAT_MRT4530_56109C.1.pep
MRQERSIQVRTAEKRNTLLPGAKPGFIARGCGQGEQVISQVSTISMGSDRGVLAPFGTPCSCAPAYSRAWLIEYGIQPLNL

SEQ ID NO: 156443 - protein, 353 aa, Oryza sativa
  Clone ID: PAT_MRT4530_5610C.1.pep
MAASSSRSPASTSRRGGGARQSPFFRDLASPIPSHRAASRFASSAAGPTAATTPPPPPLFTLDDRAAAVDFSPDAAASELLLPVASSPSPRSAAAAASRSPSWDRSRGRASAPGSPMDGVVEPPRKEVLALPPPPSPGTPAPPPPAAEAQSPVTPAPVSTGMEQEMNGGGEVDREEWITVFGFSLKDTNLVIREFEKCGVILRHHSGPRDEFHIVDMTKLTIFSPGLGLILTIMFVYLALKHSYDARKALQKNGVQLSSGVIIGVKPIDPMHRQQLDERFAGNKQGGFMVSLPPKSLVLKGTGASNQLGALPRPYDPKANTNVIRDANRRATGSVAAPAKSLVTNVMDLIFGI

SEQ ID NO: 156444 - protein, 974 aa, Oryza sativa
  Clone ID: PAT_MRT4530_56110C.1.pep
MAAGFAPRRRGSRAPPRPTSAELRPPLAAALATAAPRRLHCRLLRASPHPGPRSVSPFNRRNHPSTVHPKPPPPYATGPPFRLRPEEHRHRAPSPFPAPRRRVLGELLLSLLASLLCVPCALPRRWPPPATTWPCTAAPLAWAARTPPCRAASISCAAAAHACRLSRAAHRSPSPETALPPRHGSARPALCRAVPQLRRPWPPDRLGPIRTVGSRGPVVDRLGGPGPRWTGALVPLTGGARLPAPPLPFDDARVGVMERGGPCDGLCRFRIHLGTRGDCPLPAGDGEDQPSTSCLFGSQVKSSLTLRARSEKISSKSSFREDQGYGVPNIGTKDPCQNALQIPEDNDSQVIVRPKENRSDRGLGGDRWSDARLAPSRQDESLQALVPSRNRRVSSWRWHVGSDSHVPTSRLLPAEVETKSLEPHPGPPAEPAKGGLRGLPVRSHELRHLARQFPLFSLMAEQAKAHDLSPSVSGDDGEPNPRRRARTPPPPPHQSPKHREALERVDKSAASPVVGDAGERRDGERRLLVYGDGSTPQGALQAAGALLRHPPVVHDPESPAQRWLDDVANLVMTAQQRLGAGGRSATTKTSGAATTGSVSSRWRVRRAAAVARHSAATPSSAPPTREGQHGEPDARLDIERRRNSRRTPRATEGASSSRVSPRHGREDQPSVPPAGGVGCRAFVASLRNVRWPPRFRPTITEKYDGSVNPTEFLQVYTTGIEAAGGDDRVMANFFPMALKGQARGWLMNLPPASVHSWEDLCQQFTMNFQGTYPRPGEEADLHAVQRGDDESLRSYIQRFCQVRNTIPCIPAHAVIYAFRGGVRHNRMLEKIASKEPQTTAELFQLADRVARKEEAWTWNPSGSGVAASAAPGSAAQTGRRDRRRKKRSVHSGDEGHVLAVEGALRATRKGRPASDKRKEAGAPGPRYLEERRGARPSEPRATSRACGATISAISGPDHSASTTSSYAASKRVLD

SEQ ID NO: 156445 - protein, 937 aa, Oryza sativa
  unsure (1)..(937): unsure at all Xaa locations
  Clone ID: PAT_MRT4530_56111C.1.pep
MLDEYKTSDRFWAEAVNTACHAINRLYLHRLLKKTPYELLIGNKPNVSYFRVFGSKCYILTKKARSSKFAPKVDEGFLLGYGSNECAYRVFNKTSGIVGIARDVTFDETNGSQVEQVDSHVLGEEEDPSVAIKRCEKAPSSTGLSTSWYTWSNHWASRIRSIPTTCTSSTRRSTGSSRMMTKRFEMSMMGELKFFLGLQIKQLKEGTFICQTKYLKDMLKKFGMENAKPIHTPMPSNCHLDLNEQGKDVDQKMFNREKGKNVSGYASSNSSFQLNPPLASRELTRAHPWSIPSMLLSSQLPLVGSQDQNQYVFDRAFATQVNELPMPEEDVPFCHDCREQGHYALNCPWVYAKEAPSFGLAGQTSLNQPPRTKSSLQPSVQSREPNGENPLNPGKCFPPSLSYHVGSRTKQAKGKKSKNQKRKAPMRTEEEVRKMTITSTEWPPAGITIPRRQRGNTFRGARQLTQHLLSHGGRVSDSEGSDQVSSDYEDESLRHLGEEEMESKACPRCGEIGHVASMCLTLCPHCEEDHPPGGCPTRKLXNSNIDDIIHSTHAPPAAPDSAINHSNNTFSSNHSLHRRPQQRIVVDGRSCFSPRPTPGQAKGNQPQEGDTKQKTVIHFNQLKYHIVTRSIHNSRSEEYLVDKGIGLICTGKISNPRRGIGLICTGKISNPRRAHSLLSSCSWAAPPSSPSRPTFSRLLPPGPPPGPSRPTQPPEPLPSRVRTRVDAARPTAPSRASPWPHHLSPPSSSLSRAAGRLQPPLSPRPSAARPCRRLPRRRSRLLFAGAASNSWGNHRRRVLAGKTVALPPLYCLQPPLPRRSGAGRLRRLLPRRRRVALHPGLPSVLPERRRPRRLSLGLVGTHSGSPFRRASAPADVAVSTSGIAAGKVVLGIASPPSKPLRGPSSSPPFLVVDVPSVARPLVGCPFGGFSPGPGGVG

SEQ ID NO: 156446 - protein, 398 aa, Oryza sativa
  unsure (1)..(398): unsure at all Xaa locations
  Clone ID: PAT_MRT4530_56112C.1.pep
RTARRTHRRPKRRRKRNGRRRRRGRSGGALRVDGGDGAPAVFGGDEEADEDGRRLGDHDDGLPERRRRLERRRRTAGATAATAALGLTALELYRRREAKARVAAGGSQFTSHFWKKLQEEXGTRLNFSTAYHPQTDGQTERLNQILEDMLHACVLDFGKTWDKSLLYAEFSYNNSYQASIQMAPYEALYGRKCRTPLLWDQVGESQVFGTDILREAEAKVRTIRHNLKVAQSRSKSYADNRRRNLEFAVDDFVYLRVTPLWGVHRFQTKGKLAPRFVGPFRIIARRGEVAYQLELPASLGNVHDVFHVSQLKKCLRVPSEQADSEQIEVREDLTYVERPVKILDTMERRTRNRVIRFCKVEWSNHAEEEATWEREDELKAAHPDLFASSSESRGRDSV

SEQ ID NO: 156447 - protein, 407 aa, Oryza sativa
  unsure (1)..(407): unsure at all Xaa locations
  Clone ID: PAT_MRT4530_56113C.1.pep
MSWHRAGVLLLGXSILPACPGGSGRRXGVGSVLLSMARMGWKLCHVFRPYAVVMFNREKGKNVSGYASSNSSFQLNPPLASRELTRAHPWSIPSMLLSSQLPLVGSQDQNQYVFDRAFATQVNELSMPEEHVPFCHDCREQGHYALNCPWVYAKEAPSFGLAGQTSLNQPPRTKSSLQASVQSREPNGENPLNPRKCFPPSLSYHVGSRTKQAKGKKSKNQKRKALMRTEEEVRKMTITSTEWPPAGITIPRRQRGNTFRGARQLTQHLLSHGGRVSDSEGSDQVSSDDEDESPRHLGEEEMESKACTRCGEIGHVASRCLTLCPHCEEDHPPGECPTRKVTCFLCEXTNHSLHRQPQQRIVVDGRSCVSPRPTPGRAKGNQYPEGDTKQKTVIRFNQQSEGSFSCE

SEQ ID NO: 156448 - protein, 61 aa, Oryza sativa
  Clone ID: PAT_MRT4530_56114C.1.pep
EVRGQDLKLLMPIRGLGRKALRASPGYGHCHLPPLKSPCGGEERHLEKGRVGLPGISGRGL

SEQ ID NO: 156449 - protein, 126 aa, Oryza sativa
  Clone ID: PAT_MRT4530_56115C.1.pep
MPQRHSKNNNDLAFFTYEEKRKLGYGTQRERLGKDSIKPFDACCLCLKPLIHPLCCPKGHTFCKECILECLLAQKKDIKRKLAAHEAQKKLEKEEEDEKRMLQKSKELDAFDQQNHGAVPQYHDRS

SEQ ID NO: 156450 - protein, 127 aa, Oryza sativa
  Clone ID: PAT_MRT4530_56116C.1.pep
MARYHPTSIHDDIEAGFSGHSASPVKPAASPRRPGGRLFCDPCDDADDLLGHHHYLDICFRCRRPLGGNRDIFMYRGDMPFCSEECRQEQIEIDEAREQRSKQTGRAEQERQRQQKASHPRIPVWAW

SEQ ID NO: 156451 - protein, 66 aa, Oryza sativa
  unsure (1)..(66): unsure at all Xaa locations
  Clone ID: PAT_MRT4530_56117C.1.pep
GKRKGGXXKKKGRGLKKTPGGDLGEHKLGPKKLFYGEGEKGKKGAQGPGGWEGAQKYRGTLRGPLS

SEQ ID NO: 156452 - protein, 69 aa, Oryza sativa
  Clone ID: PAT_MRT4530_56118C.1.pep
MAGRSDNGDGALTKCVNQELHHDEHFSFIYKWKNKISSAGNARLYYHYGYNFEMISSKSELRKQIKRQY

SEQ ID NO: 156453 - protein, 1224 aa, Oryza sativa
  Clone ID: PAT_MRT4530_56119C.1.pep
MAAAAAAAEAKHRKEEEEDEEEMTLEDGDIEESPRRSFDDDYEDGGSGDDDRDDDGEGLGSPRSFQSRQWPQSYRETTDTYTIAASPSFGYLGPSTSKYSILDGGRSSLGSDLKLPLLSDKLDGKQDSVKSLRKTLGSAIDRKSSLLTQHTGEVYIAQGCSVTQTVFNGVNVLAGVGLLSTPFTIHEAGWVGLAVLAMFAIVCCYTGVLMKHCFESKDGISTYPDIGEAAFGRIGRLLISVSPGLVMALIGSLLSILVAVIMPALCFLKIRQNKATTAQVVASIGADAAFSLADGSIQRRSRLLAWISAASTTVFLFPFQAAAAGEPQRQAIDPAARLDAGCDWTSAAPEEEKDDPCSAGGRRGSLLTRQKEMRYDVRRIEPTESLKDTAARGAKPRPLPHLVLAILDDPSVARVMREASFSSTAVKAAMLRSLSDPAAPDSGVYVNARVLHRQVSHREEEVNKVVEVLKRGKKRNPVLVGDTVDVDAVVQEVVTMIQRQRLGNARVISFQREFGDLVDLDRAELAAKIKELGEAIRSELLSPASRSAGVVVNLGNLQWLVEERCVAPGEQEKRRDVVLDTARAAVAEMARILRQSGEREHRVWVIGTATCATYLKCQVYHPSLESEWDLQAVPITPRPPPPPPSSLGLSPSVNGVNRGILSSSVEVLSSAMTTSAMQSRSPSLCSACLDGYERERADMASSPGCGALHATEQPMSQWLQIGTPSSARPPFDRAQDKAREADELRRRWLDRCAQLHSHGGGGCGGGRPSSMVTCSEWNGASVLANMQAIPVRPPPPAAAAAPAAAVDTDLALGPAASTASRPPAYCDTDEKLLVKRLTEAVRWQPEAAAAVAAAITKARSGERKRRGMGPTRADTWVLFSGHDVAGKTKMAEALSMSVFGTNAVALRLAGNGGEPIASCRGRTALDCVADAIRANPLRVIVLDGFDHHDDDRVVQASILRAVESGRLVDSRGRDVALGEAIFVVMSLDDTRRCQEDHQFTDSPWNLELRVRNNARKRRPEPQPLDGAGDRRLKPRKDSPPLHLDLNLSMCEDHTDDDDSGGEESRNSSSDLTVEHEQEYGQPAAAAAKFSAPSSFSELTKAVDATVVFKPVDFGPLKRSVSDVVSAKLGDAAGAGAGLSVHVDDGVLDRLAGAAWTAGESATSLEAWADEVLCPTIRQLKRSLSANDVDGATTVSLSAVEGSGGRRRKDGEVFPTSVTVAVDGN

SEQ ID NO: 156454 - protein, 452 aa, Oryza sativa
  unsure (1)..(452): unsure at all Xaa locations
  Clone ID: PAT_MRT4530_5611C.1.pep
MFRHSSSASSAASYGSDVSFMNHSPAAALPAVPTQIPRVAGGYLDGNVSGGLPHFGGAVSSSSSSPPSYSSSLPSSYYNNIQRSISSHSLPHHLQLTDHFGGAFFSSSSSSSHQLPLPPPLSSSPSSSSGDLFEFTSPCPVRRVFSTGDLQGMNGSSPPRPLPSGESCGQDGSGPFSQKVGRYSAEERKERIERYRVKRHQRNFNKKITVTIPLLHAQKLHSDRPLFVLTLWLCLGAXYACRKTLADSRPRVKGRFARNGEADAEGDEREAFDASYSYDYSAAGYSDYRSGSNSSSVNSCYNYNRKDGAATEASVVGGSDNGEWWWRAPGATTAEAERQRQAGFDVDEEIWATLGDMLSVNLASWRDGEVKRVRIAVGEVAATGEASVTRNHLLDRSIDFPSPMAMMSDLGFVLHWMNDVVFPCLSHNSAVVATTASLSRDLRLRCIREDAK

SEQ ID NO: 156455 - protein, 548 aa, Oryza sativa
  Clone ID: PAT_MRT4530_56120C.1.pep
MAAAAAAAEAKHRKEEEEDEEEMTLEDGDIEESPRRSFDDDYEDGGSGDDDRDDDGEGLGSPRSFQSRQWPQSYRETTDTYTIAASPSFGYLGPSTSKYSILDGGRSSLGSDLKLPLLSDKLDGKQDSVKSLRKTLGSAIDRKSSLLTQHTGEVYIAQGCSVTQTVFNGVNVLAGVGLLSTPFTIHEAGWVGLAVLAMFAIVCCYTGVLMKHCFESKDGISTYPDIGEAAFGRIGRLLISIILYTELYSYCVEFIILEGDNMTSIFSHIGFDWLGVHIDGKHFFGVLTALIVLPTVWLRDLRVLSYLSAGGVIATLLVFLSVVLVGATDGVGFHLTGKAVNLGGIPFAIGIYGFCYSGHSVFPNIYQSMSDRTKFTKALFICFAICTAIYGSFAIIGYLMFGDKTLSQITLNLPKHSFASKVALWTTVINPFTKYALLLNPLARSLEELRPEGFLNETICSIILRTALVASTVCIAFLMPFFGLVMALIGSLLSILVAVIMPALCFLKIRQNKATTAQVVASIGIIILGTISAALGTYSSVLRIVENY

SEQ ID NO: 156456 - protein, 142 aa, Oryza sativa
  Clone ID: PAT_MRT4530_56121C.1.pep
MAGLNPEDLTANDLNAAVYRYLLESGFVYTAFNFYHESHLDIHDIEIKKIPQGTLIRVVLKGLEHIEFQANADVADDENFHHFIALDLLTKDLGELKMQITGRANPDFVETAKEKKNDAVKTVEPHGSDYAEDAIPRRMQPK

SEQ ID NO: 156457 - protein, 85 aa, Oryza sativa
  Clone ID: PAT_MRT4530_56122C.1.pep
EIIYLPPWSLLIQLSSCKYYLCPDGNLTTLAKVTCDGPKPSSLTASRMVSDQWSLVTPTSDGQVTRRPSEVLVSASLERVRTRHR

SEQ ID NO: 156458 - protein, 86 aa, Oryza sativa
  Clone ID: PAT_MRT4530_56123C.1.pep
LRRPAGRPLAVPGGDRSSSSLCFPVSVNRSICVFIFLFHGLSIWPTTSSVSVVISSYLARSPGVCFGEVVRHREAIKGLSMQKKKK

SEQ ID NO: 156459 - protein, 790 aa, Oryza sativa
  Clone ID: PAT_MRT4530_56124C.1.pep
MTTQAKEKCPLCTEEMDLTDKQLKPCKCGYEDIIIKDLTSILKELCADKSNFQKEQAKSQKQKPVKVQSGVTEESIDPYSVRVIQRRLVYIVGMPSEFASDKVLRQHNFLGQYGKIESIIIDNIGANQQIPDSGRVYVTFSREEEAFRCIEAVNGFILDGRPLKFAESQSVRTCIKKPHQKIFIRLQHLLGMDTKGLRSGNTLPPPGDCVSRTTVCNGNSKDKTCSDDYGVLHNHGNKNLGTLPATTLQEEKKRNSTPNNQQGLSASVSQELPPLGPKVHHLNDQLASCGDKPQASVQSANGNLNSKQVTAAGNGTVGTLSAKQYVNVVSQGSSGSGRRFTVLTRQTASSDTRSKATGQVGNASSDSQKLTSANNEHSDRIKISRSDNVKLVSQRPEEPSQMLANHLTGAIDKTHVDTDEKNARSDINEKTVCGIQMQLKESTAAHRSTVLQSLRDNPMSNNLPTLDVKSQISVVPDKPSDSQSASKTQLQPSNHKKTAVCSSDTANASDACGIANNQVLFPGGKHQTSSQGEDHSLYKRDKSQSGDQLSSQHPGNVFSPRLLTSLSSIDITAKENKGIKRHVCPPGFEELHRPSDSDKITSVSSPTSSIMCSGPDTLVQDSCSAKDQPDFISWVSECLEDGGETTQSNRSIPSTLSSTDATWRYMQYPASCFSGASNHFLVSPYPRGLSQHTVGRIENTMNCCCSHPSVSGIANHKPEYWSGSDHSYMSTGGYDVFSQSATLGMIAGMVGTSPQQPSPPVHYNDWTTGSADSDLKSPQVDHTYPMYSLF

SEQ ID NO: 156460 - protein, 40 aa, Oryza sativa
  Clone ID: PAT_MRT4530_56125C.1.pep
HGEVHVGAEDVAEDVDHRGHDHAPDDPLSDLQYQIRDATQ

SEQ ID NO: 156461 - protein, 140 aa, Oryza sativa
  unsure (1)..(140): unsure at all Xaa locations
  Clone ID: PAT_MRT4530_56126C.1.pep
SSPPGGRPRCGAPVGAAAXPGXGAAAAAGXWCXPXLALXRXRRXRWVPRXCLFXXXCXVPXRFPXGVPAACSXSVPSSSSSSSSAGWPLRPVPGWRLSLAWPWGWSVLSLWWFFFVLCFVPCAPCSCPRVPAPCPVSFFL

SEQ ID NO: 156462 - protein, 179 aa, Oryza sativa
  Clone ID: PAT_MRT4530_56127C.1.pep
MIISKKNRREICKYLFHEGVLYAKKDYNLAKHPKVDVPNLEVIKLMQSFKSKEYVRETFSWQHYYWYLTNDGIEHLRSYLNLPSEVVPNTLKKSAKPPSRPFGSGPPGDRPRGPPRFEGDRPRFGDRDGYRGGPRGAPGDFGGEKGGAPAEFQPSFRGSRPGFGRGGGGAFGGGASSME

SEQ ID NO: 156463 - protein, 321 aa, Oryza sativa
  Clone ID: PAT_MRT4530_56128C.1.pep
MPPPLLLRLRSPAPPAAVAAGSLSRRRRRRRAGLAPVRASWQELAGVLVFSAVPFTAVKALANSPLGARLRRRLDDRKAAAAAEADALRSAARQARTASSWYGDERPRWLGPVPYEYPAHLTGEYPGDYGFDIAGLGRDPVAFANYFNFEILHCRWAMLAALGVVVPELLDLFGVVHFVEPVWWKVGYAKLQGDTLDYLGIPGFRIAGGQGVIVIAICQALLMVGPEYARYCGIEALEPLGLYLPGDINYPGGALFDPLGLSKDPVAFEDLKVKEIKNGRLAMVAWLGFYIQAAVTGKGPIQNLVEHLSDPLHNNILSSFV

SEQ ID NO: 156464 - protein, 54 aa, Oryza sativa
  Clone ID: PAT_MRT4530_56129C.1.pep
PLLWPDLRRRHPDPTTPQQVERSRAHHPRGTLAAVMDPSQLGLALKRPSLRKPQ

SEQ ID NO: 156465 - protein, 59 aa, Oryza sativa
  Clone ID: PAT_MRT4530_5612C.1.pep
CRSIVKTLHQAEIYSRLREWRSSDTILSGKPRILHKLVLCLYKRLMMFSNHQDQGWPDP

SEQ ID NO: 156466 - protein, 354 aa, Oryza sativa
  Clone ID: PAT_MRT4530_56130C.1.pep
MCVEELEGAERLDFGGVAELETTPADFEMEKVCENTVSLDFKQARSSSFVPVIRSGDWSDIGGRDYMEDAHVCISDLANNFGHNSVDDEIISFYGVFDGHGGKDAAHYVRDNLPRVIVEDADFPLELEKVVRRSFVQTDSQFAERCSHQNALSSGTTALTAMIFGRSLLVANAGDCRAVLSRRGTAIEMSKDHRTCCLNERKRIESLGGYVDDGYLNGQLAVTRALGDWHLEGLKEVGEPGGPLSAEPELKMITLTKEDEFLIIGSDGIWDFFSNQNAVDFTRKRLQEHNDLRLCCKQIVEEAIRRGASDNLTAVMVSFHQEAPPQLRVNRTGRVERSISAEGLHSLRVLLEGQ

SEQ ID NO: 156467 - protein, 45 aa, Oryza sativa
  Clone ID: PAT_MRT4530_56131C.1.pep
MEGLNGGFNIASSDLRLLRLRNSFLEVFGLVTTHRVLRVTGAACG

SEQ ID NO: 156468 - protein, 894 aa, Oryza sativa
  Clone ID: PAT_MRT4530_56132C.1.pep
MEEVVSLPDLLQAEPRAINIRRAIPSRRPSSASTSNQKEASPAGPPAALADGWGPPVIAFLPPLPPLARALAPPPPRIPPHPAVPARHNEGGIIPRDSLSLSPRFSLSLSLGFVRNRSRKPRRRHQWRPRSPRPFPPSPAALSPSRRYISVPRALPLRFRHSPSLLPVGIEPAPSHLLSAVAAELRFAAVVAPDLLPTRRHLHRLCRVPVDLGHPSASLADRQSTVAHAVPNRAAAFLRFGRRSRRRRRPGVSRRPPFRFPLLSALSGAAPPRRWSPAVTIGARSCRLPSAVPARPPSGAPSRLPSGPGRQPPAPAGAADAWDPRRRPPPAACSRSTVDREADAWAPLPWTRLVLNKRTRIEMDEVVATMDISEANEGYASCGSVIEMSRQMKTTRRRWLELIKDYDVGIHYHPGKANVVADALSRKSHCNTLNVRGIPPELNQQMEALNLSIVGRGFLAALEAKPTLLDQIREAQKNDPDMHGLLKNMKQGKAASFTEDEHGTLWNGNRRVKAEHQRPAGLLQPLQVPEWKWDEIGMDFITGLPRTQGGYDSIWVVVDRLTKVARFIPVKTTYGGNKLAELYFARIVSLHGVPKKIVSDRGSQFTSHFWKKLQEELGTRLNFSTAYHPQTDGQTERLNQILEDMLRACVLDFGKTWDKSLPYAEFSYNNSYQASIQMAPYEALYGRKCRTPLLWDQVGESQVFRTDILREAEAKVRTIRDNLKVAQSRQKSYADNRRRDLEFAVDDFVYLRVTPLRGVHRFQTKGKLAPRYVGPFRIISRRGEVAYQLELPASLGNVHDVFHVSQLKKCLRVPSEQTDPEQIEVREDLTYVERPVKILDTMERRTRNRVIRFCKVQWSNHAEEEATWEREDELKAAHPDLFASSSESRGRDSV

SEQ ID NO: 156469 - protein, 297 aa, Oryza sativa
  Clone ID: PAT_MRT4530_56133C.1.pep
MASRALTPMQLIGTVFVALLATCHAGGIAVYWGQNDGEASLAETCASGNYEFVIIAFLPKFGKGQTPRVDLASHCDPASGGCTGQSKDIRACQRRGVKVLLSIGGGDGSYGLSSPGDARQVAMYLWNNFLGGSSSSRPLGDAVLDGIDFDIELGGAKFWDDLARDLKSLGRSGGRRVVLSAAPQCPFPDEWDGGAISTGLFDAVWVQFYNNPECQFSAGRGAFMDAWRKWESVPAGRLFLGLPASKDAAGTGFVPAGELNSRVLPLIRGSPKYGGVMLWSKYYDDQTGYSSAIKSHV

SEQ ID NO: 156470 - protein, 931 aa, Oryza sativa
  unsure (1)..(931): unsure at all Xaa locations
  Clone ID: PAT_MRT4530_56134C.1.pep
MAAAGDHRGAGAPPPAAAPAWSPSGAPSGLGRKEGVRRGAGLSAARGLRCGLNGGPTAPARCEPGVRPVHRGPWGCRVGPTPVDPVRAPLPSGWLYSVLLNFSQTQKRSPWKMKALVSSSCLPSSAFVTRVSASKQTHWDEIGIGXALALTIANSAKDEPLMAAATYFWSNTINAFLFNQGLMTPILIDITMIISLDVSSLANPMNLNTKNQYDFRTKSIGGWSGYVAAYMGQGSVTPREHVAFLLMWLEKFLFCGSSCGLTTNXQFVAEALVSKREFPVGKILLGYLYQLLNNASAMIAIDSVVGAGGPCMKVVNRPSVTEAEFPRLELIIEDDGEEHTHRRCMSYEEYASTPADAGAKLSAELLKVWFCSFYEGFQKDARVWFPYEDSVHLDLPSDFRFEDINHEKFQKSREVFSAAISPCILPVSVHQRRNIQVSYEFYHPMSSARQLGMGQLPIGLFFANKIQCRGEISSTLMMDRLLNLQGPPLGNIENVELARFRSKNFDIWWGEWKLHLFHQPASMYMTDLFPDITPQSNSGRDIEYAPCLIPNGGGPSPPIIGYHAPKTSTLLQGLIREPADAGKKRKTRASAVDTSAPAPKKKTKSKKTKPADDLPALDPSIEKALDEVEIGEDVDQAADEVSDTEQTPSASLKQTPPIPSATTHFLRQPPPPPSPVQQPSSDQTPSAVGSHHVEEEVQPAAPAIPVLADLFSFDIKDYFDETEEETTSKALAPLDDTVKKTLEDISLRLESSLDNLVADXGSIRARFAEIQALALDDSANTITPAVFLEQHQFKLKKAKQRIADRRERMNIEATIQSNRQLVHEEKAKLDHISVGPIQSNIDRLEARKIDLIAQFEECNAELDLEKQKLADLPNAIEEQKSRLRSAIKNVADMTKSLKIIPGTDAQDIQAIEEVDQIRQRALSAIQRYLSQ

SEQ ID NO: 156471 - protein, 63 aa, Oryza sativa
  unsure (1)..(63): unsure at all Xaa locations
  Clone ID: PAT_MRT4530_56135C.1.pep
PACXGXLXRPCXXXXXPXGXXXRTXAAXXPFKQAXLTLAINYPSFLCFXFVLCIRSRPCHSXA

SEQ ID NO: 156472 - protein, 110 aa, Oryza sativa
  unsure (1)..(110): unsure at all Xaa locations
  Clone ID: PAT_MRT4530_56136C.1.pep
YQLVTTGNNPTGVPDVRALILVPGGKAQHTQRQTRNSGRLGRRPQALDGRHELDTKAFIFKELLIWAWEXLSKTEYNHRTQQDTPTNATRHIFLTCNHVPHTTTVYGRKT

SEQ ID NO: 156473 - protein, 407 aa, Oryza sativa
  Clone ID: PAT_MRT4530_56137C.1.pep
AKWIKPKDIFFHPPLASRELTRVHPWSIPSMLLGSQLPLVGSQDQNQYVFDRAFATQVDKLPMPEEDVPFCHDCRERGHCALNCPWVYAKEAPSFGLAGQTSLNQPPHTKSSLQPSVQSREPNGENPWNPGKCFPPSLSYHVGSRTKQAKRKKSKNQKRKAPMRTEEEVCKMTITSTEWPPAGITIPRRQRGNTFRGARQLTQHLLSHGGRVSDSEGSDQVSSDDEDESPRHLGEEEMESKACTRCGEIGHIASMCLTLCSYCEEDHPPGECPTRKVTCFLCEGTNHVPKDCQLSVLLTKTAEIQRTTLRLSHQLVSSNSNIDDIIHSTNAPPAAPDSAINHSNNTFSTNHSLHRQPQQRFVIDRRSCVSPRPTPGRAKGNQPQEDDTKQKTVIRFNQQSEGSFPCE

SEQ ID NO: 156474 - protein, 1332 aa, Oryza sativa
  unsure (1)..(1332): unsure at all Xaa locations
  Clone ID: PAT_MRT4530_56138C.1.pep
MSSSFVDNSVNTNLNQVFPASTMLVWTQVGEIVFPVYTMMLISAGPSMTGNENAVATNQDDPMSKDPPAEAENGTSTTYKLEKDSNAAKPCHSDKNHEPTRMTSEATRFWCPIHKTRKHTLQACWVFLNVRAEIHACKERGIQLLHLLEDYGSSTTSAPREVLAIDDVGTSARTNAEAENQVATPAQHIRAVNTILRETPYDLVLNDDLAHWTERLRESVTNLSNAFEEAAAAAHPEQPPTGDANGENPERRESPHRATPPPRGTGDLRDHLNGRREARRTRDNEKRSRRHDNEDRGDRSNEDRDRDNRHNRHDHNDRERRMPGDTGQRRRHNDDDDGDRRRDNSGRRRQDSREPGRHPRNHLWQQFVTNFQGTYKRHAIEDDLHALTQNSGESLREYVRHFNECRNTVPEITDASVIRAFKSGVRDRYTTQELATRRITATPRLFEIVERCAHADDALRRKNDKPKIGGEKKPATDAPESSKKKNRKXGKRKAQAEVLAAEYANPPKRPDPQXLEKHIAFEKGKRVRVVEKDAEAAPQESDSAYPDSDLHVSHIFGGSTTYSSKQEYKKVEREVCSTWQGAAPKMKWSEQKIEFSEEDHPKTAVIPGRYPIVVEPTIRNIKVARFSSRPLGKITLPVTFGQANNFRTEQITFDVAEFNTAYNAIIGRTALAKFMAASHYAYQVLKMPGPNGTITIQGNAKLAVQCDKRSLDMVEQTPSPPATSEPPKKPSDMPGVPKEVIEHKLMVRPDAKPVKQRLRRFAPDRKQAIREELDKLLKAGFIREVLHPEWLANPVMVRKANGKWRMCVDFTDLNKACPKDHFPLPRIDQLVDSTAGCELLSFLDAYSGYHQISMAKEDEEKTTFITPFGVFCNVKMPFGLIIAGNTFQRMVQGALSDQLGNNVEAYVDNIVVKTKTGDSLIDDLRETFDNLRRYRLMLNPEKCTFGVPSGKLLGFLVSGRGIEANLEKTKAIENMKSATRLKEVQKLTRCMAALSRFVARMGERGQHFFALLKKQDKFVWTQEAEEAFVALKRYLSNPPVLVAPQPNEELFLYIAATPYSVNTVIVVEREKVQRRVYYVSEALHDAKTRYPQIQKLLYAVIMTSRKLRHYFQAHRVTVVSSFPLGEVVKNRDIVGRIAKWVVELSQFDIHFVPRTAIKSQVLADFVADGAWGSSPGDRAGPPLPVRPGALGRGPARTPRRLLSRGRRQVGPTCRVLPPPPTDLARAVAPATAAAPSSPPPPGHVDHARACAASPGHGRRQTAPSPPLGSRGRDPPRPPLLRRGHPEARPPTDVVLPWLAVAVRHRLPPRRPPSRAALSQAEPGARAPFLSSR

SEQ ID NO: 156475 - protein, 93 aa, Oryza sativa
  Clone ID: PAT_MRT4530_56139C.1.pep
MWQAADAASGKPAGDLAFNFRALLTFGHAKVSWIPSVNHRLHGRGQKKQDLVQQRNNVVFDKSPSITYMQVIFRATYWLRLWTQLQRSNEDAL

SEQ ID NO: 156476 - protein, 76 aa, Oryza sativa
  Clone ID: PAT_MRT4530_5613C.1.pep
MAIPSQCTWNDILIRSATPMSSGQKVQEASISPGVCVIMDGRRSGCGHAPSGFFSRSIEALLVTVIMLMVASQLDT

SEQ ID NO: 156477 - protein, 107 aa, Oryza sativa
  Clone ID: PAT_MRT4530_56140C.1.pep
LTHPGKGGRDGAGQALRRPLSLPDSPRHERGLPTALRGVGVKPEVWCAWLEGVMRRVLSRPLSDVDLNVNIVVCVPRPVLDGDFNAHSAWNSIREFLGLTSWYQSRP

SEQ ID NO: 156478 - protein, 1036 aa, Oryza sativa
  unsure (1)..(1036): unsure at all Xaa locations
  Clone ID: PAT_MRT4530_56141C.1.pep
MRMVGCAEIQTGPQFFLQLRLPAGIELAPSPSLSSVADDLRPVFSARRDRLPPRRRLLRLRRTAVDPVHPLAEPADRRNAVDPVDPSRAAAFLRSGRLFRRRRRPRVSQGSPPLFPLPFPSLGRRSAVPMAAAGDHRGAGAASCRLRRLGRPRARRVAAAWGPAVSRPRPRVRLTRGTHGAGRCEPGCTRSTVDPPRPYKDRSSGLCCKALPYFHMSSGTNEGYTSCGPVVEMSWHRAGVLLLGAQSCLPVPEVPAVGGVGSVLLSMARMGWKLCHVFRPYTVVVFCSITKMSNGXPGLAWDELGPRXSGCQFGLDHRRPWVKAVLDGQVSEEEDIVSCLPKLRKTAGSASEVEEAVKPAVKQDKRLRSVKVLSLVSNLSLPFVFPLFLSKPLQQMADNEKGNKVRSQDIGTSSSRVNEAPDTSCVTLVQHLINQNRLLIEILQQHQTPILNLSQIQPQVQLEAVQALTPQVSMPPASRRTHGDVPHVDSKEASIICFMCDEQGHYARECPQQKRKTPMRTEDEVRMTKRQRRNTFRGAPQLTEHLLANGGRVSDSEDSDQVSSDDEDEMERKACSRCGEIGHVASSCATTCVHCEEDHPPDRCPTSRITCFFCEGTDHVPKDCQFSLLLTKKMANQPASSNGEKHQGNTNPRQDYSFSLTPVPGQRNQNEKRKCRVREDICCFNCQGMGHFADKYPKPRDIAASTSVHATPCNQKLAPQRIVIHASRSSPIARVATAPTPASALPQGVNAQFQPQPPVDKTEASIGILPLDVPAQQPRNQVQDEEPKPMGMITVQLLLEEYEDFEKLVDKAIQLESEHNRMKNCKRRIVSIPVFPCGNQRQRTEPLQITGSSVAHQEFPPQEDGHNADNNISNTNDDDTTNNHASCPISDHSNQACNVNIIHQGVDDSINDGTQNDNPSNCDSEKDSNGDSNYGTTDANVSKDFQPPIPTPSQNDRPQTDSSAKKTLICYNCKGPGHYSRDCLQPRQSRSPHYRQFTRSRHPNRIVVTGANAVPVSLKGSKPKDLIVPRSVRNPH

SEQ ID NO: 156479 - protein, 146 aa, Oryza sativa
  unsure (1)..(146): unsure at all Xaa locations
  Clone ID: PAT_MRT4530_56142C.1.pep
HACSLLRLSRHLIPYLSACAAAAPSCASWCAPMSRPMSLLLLLLPVALAMTGYSSGSTTQVRRLLFKQVIXKESYIYTYLLDDVRDPEKIDVLNETVDRTRDRDLNLIKELGYKLDYAMHTHEHADHWTGTGIIKTKLPGVKNVIA

SEQ ID NO: 156480 - protein, 1705 aa, Oryza sativa
  unsure (1)..(1705): unsure at all Xaa locations
  Clone ID: PAT_MRT4530_56143C.1.pep
MAGSINRRGLDLTGFVLELRGMCVVLGYPHGVDYQGRQLPEQEGDDAELHAAWEVTAVILTGSPERTSLTVTAGGDSFFAACQNAALLAIGTLHQRYPDELQHSPYRYHPRRGGARDYATFRDASSEDDTTIMHLARMVEAYDAARIDFHQMVRRGMVENNMKILELRQENLQLKKDLDAVEAQLHQLKIAQGEVCRPKRRRVCRSQKITTRKSTSRPELVRQSLAWTCFVETPRAEPAPVVPQEGEASGVGSTEDALLLTFHXTTRRNANTGDGNQPEGSNHNNHGSPPLPPPPPPPPPPDTNAILTQILAQQANMMAAFLHHIQHPPQHNAPPPPPQHSKLAEFLRIRPPTFSSSNNPVDALDWLHAVGKKLDTVQCSDEEKVIFAAHQLQGPASLWWDHFQATLPEGQPITWARFTAAFRRTHVPAGVMALKKREFRELKQGNRFVMEYLHEFNNLARYAPEDVREDEEKQEKFLAGMDPELSVRLVSGDYPDFQRLVDKSIRLEAKHKELESHKRRLASFRNQQGANQRVRYTNPYPGGSSSQQQQPRSAPRPQFVVRVPQPQQQQSQQGTCAPRPPTPAAQLGQGRRDVQGPQRLCFNCFEPGHFADKYPKPRRQQGQAPPRSNNGGKDVIRGRVNHVTAEDVLTTPDVIVGTFLIHSIPATILFDSGASNSFISVPFVGRNQLGVERLRNPLLITTPGGVMTAKYYSPAVPIEIQGIPFPXDLILLDTKNLDVILGMNWLAQFQGVVDCARRTVTLYRGPEQPVVFFAPPTSVSSSELHQIGQSKIPIVREFGDVFPEELPGMPPKREIEFRIDLAPGTTPLYKRPYRMAANELAEVKKXLEELKEKGYIRPSTSPWGAPVIFVEKKDKTKRMCVDYRAFNEVTIKNKYPLPRIDDLFDQLKGATVFSKIDLRSGYHQLRIREANILKTAFTTRYGLYEFTVISFGLTNAPAFFMNLMNKVFMEYLDKFVVVFIDDILVYSQSEEDHQHHLRLVLGKLREHQLYAKLSKCEFWLSEVKFLGHVISAKXVAVDPETVTAVTDWKQPKTVTQIRSFLGLAGYYWRFIENFSKIARPMTQLLKKEEKFVWSPQCEKAFQTLKEKLVSSPVLILPDTRKDFMVYCDASRQGLGCVLMQEGHVVAYASRQLRPHEGNYPTHDLELAAMVHALKIWRHYLIGNRCEIYTDHKSLKYIFTQSDLNLRQRRWLELIKDYDVGIHYHPGKANVVADALSRKSHCNTLEVRGIPPKLNQQIKALNLSIVSRGFLATLEAKPTLLDQIREAQKNDPDMRGLLKNMKQGKAAGFTEDEHGTLWNGNRRVKAEHQRPAGLLQPLQVPEWKWDEIGMDFITGLPKTQGGYDSIWVVVDRLTKVARFIPVKTTYGGNKLAELYFARIVSLHGVPNKIVSDRGSQFTSHFWKKLQEELGTRLNFSTAYHPQTDGQTERLNQILEDMLRACVLDFGKTWDKSLPYAEFSYNNSYQASIQMAPYEALYGRKCRTPLLWDQVGESQVFGTDILREAEAKVRTIRDNLKVAQSRQKSYADNRRRNLEFAVDDFVYLRVKPLRGVHRFQTKGKLAPRFVGPFRIIARRGEVAYQLELPASLGNVHDVFHVSQLKKCLRVPSEQADSEQIEVREDLTYVERPVKILDTMERXSRNRVIRFCKVQWSNHAEEEATWEREDELKAAHPDLFASSSESRGRDSV

SEQ ID NO: 156481 - protein, 69 aa, Oryza sativa
  Clone ID: PAT_MRT4530_56144C.1.pep
KSSSVSLWRLLTARLRKQARGSGLSLTSKQKQLPEAGLRGWASLTSLSSLRELFIDNCPELDLMHPEEA

SEQ ID NO: 156482 - protein, 1765 aa, Oryza sativa
  unsure (1)..(1765): unsure at all Xaa locations
  Clone ID: PAT_MRT4530_56145C.1.pep
ARASVAKHYRXFHMSSGRXEKGPTCGPHMSVTRVRGGAAAAWAEFMLPLVKLYIVSTFGVPCLLGRGLIHARKERPLGYFRXDNVCXMAGNINRHGLDLTGFVLELRGMFVVLGYPHGVDYQGKKLPEQDGDDAEPRAAWEVTAVILTGSPERTSLAVTAGGDSFPAACQNAALLVIGTLHQRYLDELRHSPYSYHPRXGACDYATFRDASSEDDATIMHLARMVEAYDAARIDFHHIVRRGLVENNMKILELRQENLQLKKDLDAVEAQLCQLKIAKGEVCRPKRRRVCRNLKITARKSTSRPELVRQSLAWTCFVEIPCAESAPLVPQEEGASGVGSTEDVLLLTFHGXTRRSAVTGEGSHPEGSNPNNHDSPPPPPPXPPPPPPDTNPILTQILAQQANVMAAFLHHIQNPPQHNAPPPPPPLQHSKLAEFLRIRPPTFSSFNNPVDALDWLHAVGKKLDTVQCNDEEKVIFATHQLQGPASLWWDHFQATQPEGXPITWARFTAAFRRTHVPAGVMALKKREFRELKQGNRSVMEYLHEFNNLARYAPEDVREDEEKQQKFLAGMDPELSVHLVSRDYPDFQRLVDKSIHLEAKHKELESHKRRLANFSNQQGANQRVRYTNPYPGGSSSQQQQQQQPRPAPRPPYVVRVPQPQQQQNQQGTRAPRPPAPAVQPGQGRRDAQGQQRLCFNCFEPGHFADKCPKPRRQQGQAPPRPNNGGKDVTGGCVNHVTAEDVLTTPDVIVGTFLIHSIPATILFDSGASHSFISVPFVGRNQLGVERLRNPLLITTPGVVMTTKYYSPAVPIEIQGIPFPXDLILLDTKNLDVILGMNWLAQFQGVVDCARRTVTLYRGPDQPVVFFAXPTPAGTSVLHQLGLSVISIVSEFGDVFPEELPGMPPKREIEFRIDLAPGATPLYKRPYRMAANELAEVKKQLEELKENGYIRPSTSPWSAPVIFVEKKDKTKRMCVDYRALNEVTIKNMYPLPQIDDLFDQLKGATVFSKIDLRSGYHQLRIREEDIPKTALTTRYGLYEFTVMLFGLTNSPAFFMNLMNKVFMEYLDKFVVVFIDDILVYSESEEDHQQHLRLVLGKLREHXLYAKLSKCEFLLSEVKFLGHVISAKGVAVDPKTVTAVTDWKQPKTVTQVRSFLGLAGYYRRFIENFSKIARPMTQLLKKEEKFVWSPQCEKAFQTLKEKLVSSPVLILLDTRKDFLVYCDASRQGLGCVLMQEGHVVAYASRQLRPHEGNYPTHDLELAAVVHDLKIWRHYLIGNRCEIYTDHKSLKYIFTQSDLNLQQRRWLELIKDYDVGIHYHPSKANVVADALSRKSHCSTLGVRGIPPELNQQLEALNLSIVSYGFLAMLEAKPTLLDQIREAQKNDPDIHGILKNMKQGKAAGFTEDEHGTLWNGNHRVKAEHQRPARLLQPLQVPEWKWDEIGMDFITGVPKTQGGYDSIWVIVDRLTKVAWFIPVKTTYGGNKLAELYFARIVSLHGVPKKIVSDRGSQFTYHPQTDGQTDHPNQVLXKTWDKSLPYAEFSYNNSYQASIQMAPYEALYGRKCRTPLLWDQVGESQVFGTDILREAEAKVRTIXDNLKVAXSRQKSYADNRRRNLEFAVDDFVYLRVTLLRGVHRFQTKGKLPPRFVGPFRIIARRGEVAYQLELPASLGNVHDVFHVSQLKKCLRVPSEQADSEQIEVREDLTYVEKPVKILDTIERRTRNRVIRFCKVQWSNHAEEEATWEREDELKAAHPDLFASSSESRGRDSV

SEQ ID NO: 156483 - protein, 45 aa, Oryza sativa
  unsure (1)..(45): unsure at all Xaa locations
  Clone ID: PAT_MRT4530_56146C.1.pep
FLTVEKFKSPVEKFDKVFLGINQGKFVDPMLACLKEWXGEPLPIN

SEQ ID NO: 156484 - protein, 474 aa, Oryza sativa
  Clone ID: PAT_MRT4530_56147C.1.pep
MSNGQRVGALLLGAQSRLPVPGVPAVGGIGSVLLSMARMGWKLCHVFRLYTVVMDNPGNQGYGNDGSDDSRTQANGNERSINATSPELIQVVVNQTNMLATAFQLLQNWNNPAGATNVQVPTVQQQCKLSEFLKTEPPTFAIAVDPMEASEWLRTIEKKLGLIQCTDQERVGFATHQLVGPASEWWDSYEASRPEGHTITWNEFSSVFRRSHVPAGMITLRKREFRYLKQGDLTVTEYLHEFYRLARHAPEDVETDEEKQEKFLQGLKDELAVQLLLEDYENFEKLVDKAMQLESEHNRMTNCKRRIVNIPVFPGGNQRQRTEPLQIIGSSVGYHEFLPQEDERNVDNNNIIHQDIDDSINEGTQNGNPSNFDSEKDSKGDSNNGTTDANVSKDFQPPIPTPSQDDRSQADNSAKKTLICYNCKEPGHFSRDCPQPKRNLRHHSGHYARRRQVTRLVVTGANVIPVRPRVNHNP

SEQ ID NO: 156485 - protein, 107 aa, Oryza sativa
  Clone ID: PAT_MRT4530_56148C.1.pep
MGLGGRDKVDGHAVVWAAKDSQRWMANDIKDDEEYRGNDQKLMHSQDGAVAMKMVWWRSVDGNGDEAFLPEKTNARTIPCALALDEVLDGSCCPLHANSTTNLPPSP

SEQ ID NO: 156486 - protein, 173 aa, Oryza sativa
  Clone ID: PAT_MRT4530_56149C.1.pep
MAAESAAIGGREEDPRRDGEVGGGGGGDENGRGREGSESRAAGETASAAKEATRETKEGYDEEAYSCGGGRRRTSSRTRRGKVGEEGGGGPHTRNHPARAADANDDDELLRLLSLAETDLDASHLRAVHKHAHRAARLDPDSPRGSLLLTAVSVLVADHSSHRATLLLPDSDS

SEQ ID NO: 156487 - protein, 94 aa, Oryza sativa
  Clone ID: PAT_MRT4530_5614C.1.pep
MEETLTGGCLVELELYNLLVPEQQQQRIVAKILKETNPPSSSVAVTVDTAAAAPLLEPKPDTGNLSDLDSAVGTCACFAVMVIIILLVFYALLK

SEQ ID NO: 156488 - protein, 89 aa, Oryza sativa
  Clone ID: PAT_MRT4530_56150C.1.pep
LKDELRSEGKSPGPRPPKNLATCLDQCLSLHLWVRYLYEIAAKCYVSHEWSPIICQHLRMKTIDTRFLLDHLKGKIDDDDDNVLTSKRR

SEQ ID NO: 156489 - protein, 43 aa, Oryza sativa
  unsure (1)..(43): unsure at all Xaa locations
  Clone ID: PAT_MRT4530_56151C.1.pep
XXXXXXFFFFWGXVFFFFFLFFLFFFFFFLKKKNPGNLTLINY

SEQ ID NO: 156490 - protein, 59 aa, Oryza sativa
  unsure (1)..(59): unsure at all Xaa locations
  Clone ID: PAT_MRT4530_56152C.1.pep
MLAHLRTDVLEDNSSWTDLCIDHIKICASNNGLVCXDNNEGXELSLSLDTRGADDILER

SEQ ID NO: 156491 - protein, 787 aa, Oryza sativa
  Clone ID: PAT_MRT4530_56153C.1.pep
GLDEAGQGDRLRRRGLHRRVRPRPQPPKATHEEAHPRLTRHASLHIDPQLHALFAEEAQLVGIDEPRNELVSWLMEEDLRLRVLAIVGFGGLGKTTLARMVCGSPVVKSADFQCCPLFIISQTFNIRALFQHMVRELIQEPHKAMAIAGCKHGLITDDYLEGMERWEVAALTKNLRRYFQDKSIQRLSETTSRELFFKKIFGFADDKSPTDEFEEVSNSVLKKCGGLPLAIVNIGSLLASKTNRTKEEWQKVCNNLGSELENNPTLEGVKQVLTLSYNDLPYHLKACFLYLSIFPENYVIKRGPLVRRWIAEGFVSQRHGQSMEQLAESYFDEFVARSIVQPVRTDWTGKVRSCRVHDLMLDVIVSRSIEENFASFLCDNGSTLASHDKIRRLSIHSSYNSSQKTSANVSHARSFTMSASVEEVPFFFPQLRLLRVLDLQGCSCLSNETLHCMCRFFQLKYLSLRNTNVSKLPHLLGNLKHLETLDIRATLIKKLPASAGNLSCLKHLFAGHKVQLTRTASVKFLRQSSGLEVATGVVKNMVALQSLVHIVVKDKSPVLREIGLLQNLTKLNVLLRGVEENWNAFLESLSKLPGPLRSLSIHTLDEKEHSLSLDNLAFVESPPLFITKFSLAGELERLPPWIPSLRNVSRFALRRTELHADAIGVLGDLPNLLCLKLYHKSYADNCIVFCHGKFVKLKLLIIDNLERIEKMQFDAGSVTNLERLTLSFLREPKYGISGLENLPKLKEIEFFGDIILSVVTKVASCVKAHPNHPRVIGDKWNIVTEYA

SEQ ID NO: 156492 - protein, 81 aa, Oryza sativa
  Clone ID: PAT_MRT4530_56154C.1.pep
MPCGLAYWLCETVRFRGIPLQNLGASLLHVILVRWLCDSEEIKECKTFHVKIRSLKKLKRYDGNVENLCVEKFDVTEKLEV

SEQ ID NO: 156493 - protein, 77 aa, Oryza sativa
  Clone ID: PAT_MRT4530_56155C.1.pep
RVMTMPAHARVLEPVYLWIARPFFFFFILTKKLFSKQSFYMADYQLKIKVLEGKKKIITYTAPYSALPSCNRAILFT

SEQ ID NO: 156494 - protein, 52 aa, Oryza sativa
  Clone ID: PAT_MRT4530_56156C.1.pep
FMLALSMKSRKHRSGTREREQSHVVRPVSSLVTSKSYLPLALATITGLTIQG

SEQ ID NO: 156495 - protein, 814 aa, Oryza sativa
  Clone ID: PAT_MRT4530_56157C.1.pep
LPIRLTINLLFSDGTCAPIERDTLRSLVESGATESSGCLPGCHLGSDAPPLHLSTANALGDIFFPSSDLLQANEECALAALTKLPENDRSKQLQSTSSNLLSSLNNVVQALSNLQLKHKQLAEDYQNQRDSSARKRAEHRRLKEELASAASELEETNYKLAALKAQRDNTQGARIPYPTLGNTNMPEDKELISKRLVEIKRLHEERIEILNKIATFQNILMDFKSIRSSKAFQLVNDRLQKSQAELDHYQTLLEKLQVDKDKFVWQERQFNLKVDLAEIPERVSTYCESSIADLKKDIQKLCDEKNMLILKLEEASREPGAVVTIHFTKSNFQTCLAKAALVSSIPREMGAMQSEMTKHKEASLELNSLRAEVHSLSRILSRKERDNEEASCRSARAGSDITQLQSVISDLKQTNKELKLFADMYKRESTDSREIMESRDREFLEWAHVHALKSSLDESKLEQRVKAANEAEAITQQRLATAEAEIAESGQKLGTSRKDLVSLSHMLKSKQEECEAYRVEVECISLSHMLKSKQEECEAYRVEVECIGQAYEDIQAQNQQLLQQIIERDDDNTKDVRFGYIVNLIVPETQYFIEKLFTCVKLIFMEGVKAKQTQDALHLETYSLRRNLQQESSLMDLYNQKIVSLEDQLKMWSDRVGKLQEDGWQQSVSLSNYQRKLVDVHRDAQKLMQSLDGIQANVGSSRLEVADLLIELEKERFSKKRIEDDLEVMSRKASSLRAKARESAVLEKLRHEVKEYRGILKCGICHDRQKEVVITKCYHLFCNQCIQKSLGNRQRRCPSCSLSFGANDVKPIYI

SEQ ID NO: 156496 - protein, 979 aa, Oryza sativa
  Clone ID: PAT_MRT4530_56158C.1.pep
MSSGANEGYTSCGPVVEMSWQRVGALLLGAQSCLPVPEVPAVGGIGSVLLSMARMGWKLCHVVRLYTVVNKPNIHHNSKRLRSVKVLSLVPNLSLPFVFPLSLSKPLQQMADNEKGNKVRSQDIGTSSSRVNEAPDTSCVTLVQHLINQNRLLIEILQQHQTPILNLSQIQPQVQLEAVQALTPQVSMPPASRRTHGDVPHVDSKEASIICFMCDEQGHYARECPQQKRKTPMRTEDEVRKMIITSTEWPPPGMTKRQRRNTFRGAPQLTEHLLANGGRVSDSEDSDQVSSDDEDEKSPQGFNQNKMERKACSRCGEIGTDHVPKDCQFSFLLTKKMANQPASSNGEKHQGNTNPRQDYSFSLTPVPGQRNQNEKRKCRVREDICCFNCQGMGHFADKCPKPRNIAASTSVHATPCNQKLAPQRIVIHASRSSPIARVAIAQTPASALPQGVNAQFQPQPPVDKIEANIGIVPLDVPAQQPRNQNWNHPAGATNVQVPTVQQQCKLSEFLKTEPPTFAIAVDPMEASDWLRIVEKKLGLIQCTDQERVVFATHQLVALASEWWDSYEASRPEGHTITWDEFSSVFKRSHVPAGMITLRKREFRYLKQEDLTVTEYLHEFHRLAHYAPEDVENDEDQQEKFLQGLKDEIAVQLLLEEYEDFEKLVDKAIQLESEHNRMKNCKRRIVSIPVFPCGNQRQRTEPLQITGSSIAHQEFPPQEDGPNADNNISNTNDDDDTTNNHASCPISDHSNRACNVNIIHQDVDDSINDGTQNDNPSSCDSEKDSDGDSNYGTTDANVSKDFQPPIPTPSQNDRPQTDSSAKKTLICYNCKELGHYSRDCLQPRQSRPPHYRQFTRSRHPNRIVVTGANAVPVRPRATTVSLAFDEPLEGSLKGSRLKYHIVTRSIHNSWSEEYLVDKVQKVIDRRYQQSDHRGAGAPPPIGCAGVAAFGRALRLPCGARPSAARALGRCSFGRSALRGS

SEQ ID NO: 156497 - protein, 203 aa, Oryza sativa
  unsure (1)..(203): unsure at all Xaa locations
  Clone ID: PAT_MRT4530_56159C.1.pep
MAARPHPAPSRRSAVSRTHPATGVAAPRRASPLHRIRRPRRARSTAPCPLDRPHAAPHGVAPNGGKDGFTGYSAGRPLPFFLSARTRGPAREIGGERSGRQATAVLARLGTSPDTHRFHSECVAACYSSSPQEQASGGPKSSSCSASPTATHRANPPLSRAPPSLAVARPSRSSPAGRPCSLRGEXREREMRKGEEGKAREDA

SEQ ID NO: 156498 - protein, 47 aa, Oryza sativa
  unsure (1)..(47): unsure at all Xaa locations
  Clone ID: PAT_MRT4530_5615C.1.pep
AHIGMATGLHPPGFITPSPPPSXWKSPVPSPHPVLGEGFLPSPSPHR

SEQ ID NO: 156499 - protein, 51 aa, Oryza sativa
  Clone ID: PAT_MRT4530_56160C.1.pep
NVARIRAYSRILHNSRHMNPRLANVIEVHDMVVHYTIFIYKKSDATIGRVG

SEQ ID NO: 156500 - protein, 291 aa, Oryza sativa
  Clone ID: PAT_MRT4530_56161C.1.pep
MDEVGGRWTFSRANEGYTSCGPVVEIVTRRGLDMTGFVLELRGMCVVLGYPHGVDYQARPLPEQEGEDAEPHAGWEVTAVILSGSPERTSLAVTAGGDSFPAACQNAALLAIGTLHQRYPDELQHSPYRYHPRRGGASDHATFRDASSEDDATVVHLARMVEAYDAARIDFHQMVRRGMVENNLKILELRQENLQLKKDLDAVEAQLHQLKIAQGEICRPKRRRVCRSQKITARKSTSRPELVRQSLAWTCFVETPRAEPAPVVPQEGEASGVGSSEGALLLTFRPGPSQR

SEQ ID NO: 156501 - protein, 396 aa, Oryza sativa
  Clone ID: PAT_MRT4530_56162C.1.pep
MVTCCGAMSCGYSAPGLEWYIPGVEIELCSQDGCSEWLGLCNRIPPEAPEYGRPRPAASDNKDRPHRKVQRPVYFVSEVLRDAKTRYPQAQKMLYAVLMASRKLRHYFQAHRVFVMTSYPLGQILHNQEGTGRVVKWAIELAEFDLHFEPRHAIKSQVLADFIAEWTPVDDHVPSNVPFLPGDGGNPNADIRAGHWVMHFDGSLNLQGAGAGVTLTSPSGDVLRTLAGLRVAVGMGIRHLLVLGDSQLVVNQVSKEYQCTDVTTGINPTGVPYVRALFLVPGGKTEPQTKPYPLDMWKYGSALQQRPEDRSLYGRGATIKTMHPEPSLKPFLGILNRGGDDVTCLARFPKRRLQLPRRADLPKLQRLHDQRKRKGFYSNKLHITSWNKAQKWVLDF

SEQ ID NO: 156502 - protein, 62 aa, Oryza sativa
  Clone ID: PAT_MRT4530_56163C.1.pep
ECCVLNLTRGGPRVFHSRRSESTDKVHRQTKSSYASHWASAPEQKAVKSSRGTTRGDRESGR

SEQ ID NO: 156503 - protein, 1876 aa, Oryza sativa
  Clone ID: PAT_MRT4530_56164C.1.pep
MSSGANEGYTSCGPEKVSFASHQLHGPASEWWDHFRLNRTTAEPITWLEFTAAFRKTHIPSGVVSLKKKEFRSLTQGSRSVTEYLHEFNRLARYAPEDVRNDEERQEKFLGGLNDELSYPLMVGDYPDFQKLVDKAIRQEDKYNRMEQKKRRIAQFKTQQGNNQKPRLTLGPQSMPQGGSSSVVRPQRQFFNNNAGNNIRNQAPRPVAAPAQQQPAKREQGSKPVVCFNCGDPGHYADKCPKPRRVKVVPVQNNSAVPASKARVNHVAAAEAQDAPDVVLVREYPDVFPDDLPANELAEVKRQVDDLLQKGYIRPSSSPWGAPVIFVEKKDHTQRMCVDYRALNDVTIKNKYPLPRIDDLFDQLKGATVFSKIDLRSGYYQLRIKEEDIPKTAFTTRYGLFECTVMSFGLTNAPAFFMNLMNKVFMEYLDKFGVVFIDDILIYSRTKEEHEEHLRLALEKLREHQLYAKFSKCEFWLSEVKFLGHVISAGGVAVDPSNVESVTNWKQPKTVSEIRSFLGLAGYYRRFIENFSKIAKPMTRLLQKDVKYKWSEECEQSFQELKSRLISAPILILPDPKKGFQVYCDASKLGLGCLLMQDGKVVAYASRQLRPHEKNYPTHDLELAVVVHALKIWRHYLFGTRTEVYTDHKSLKYIFTQPDLNMRQRRWLELIKDYDIGIHYHPGKANVVADALSRKGYCNATEGRQLPLELCKEFERLNLGIVSRGFVAALEAKPTLIDQVREAQINDPDIQEIKKNMRRGKAIGFLEDEHGTVWLGERICVPDNKDLKDAILKEAHDTLYSIHPGSTKMYQDLKERFWWASMKREIAEYVAVCDVCQRVKAEHQKPAGLLQPLKIPEWKWEEIGMDFITGLPRTSSETTYSGSRLAELYMARIVCLHGVPKKIVSDRGSQFTSNFWKKLQEEMGSKLNFSTAYHPQTDGQTERVNQILEDMLRACALDFDGSWDKNLPYAEFSYNNSYQASLQMAPYEALYGRKCRTPLLWDQTGERQVFGTDILREAEEKVKIIQERLRVAQSRHKSYADNRRRDLSFEGDYVYLRVTPLRGVHRFHTKGKLAPRFVGPYKIVSKRGEVAYQLELPQSLAGVHNVFHVSQLKKCLRVPTEEANLEQIEVQEDLTYVEKPILAPAVRRRRSRRRRRSGRPPSWSPSMPRYKPEYLFGVEGFVQELRTMSFVIGFGTAPFYAQIPHDRHEEKCRVKVTLNSNSEDIPSVMFKAGGRNYIHACQEVARIAIGELRDRYSDQLADTEYRYHPRQPQGSDRGSYLETEGIENDATTRHLVEMLWAMDESRAEIVLAAQDREDRNRGKICKLEDKVDRLEKELAVLKGEAPPQKARIRLTARKRALFVPRYQLAPKVRVVEKEVAPTLADPPVIIMVNTRSNGNGPSNNNNGENPTLAQVLAQQTQLMNMMMQQLQNQQNQGNNHAPPQNKLAEFLRVRPPVFSSTTNPVEAGDWLHAIEKKLDLLQCTDQEKVSFASHQLHGPASEWWDHFRLNRTTAEPITWLEFTAAFRKTHIPSGVVSLKKKEFRSLTQGSRSVTEYLHEFNRLARYAPEDVRNDEERQEKFLEGLNDELSYPLMTGDYHDFQKLVDKAIRQEENAGNNIRNQAPHPVAAPAQQQPAKREQGSKPVVCFNCGDPGHYANKCPKPRRVKVVPVQSNSTVPASKARVNHVAAAEAQDAPDVILGTFLVNLVPATVLFDSGATHSFLSMSFAGNHGMEVEDLRRPLMVSTPSNQALSLQRSPSVRIEIQGVPFLANLILLESKDLDVILGMDWLARHKGVIDCANRKVTLTSNDGRVVTVHALSSESLRSRLNQITLEEISIVREYPDVFPYDLPGDPLESTCRHASLDDCQYGLHRGTA

SEQ ID NO: 156504 - protein, 71 aa, Oryza sativa
  Clone ID: PAT_MRT4530_56165C.1.pep
IILKSEYNVCYYHKKISEYPFHNSQQISEITQGPLLLICSGKPNFQLKMCVLLFDRLEKLKHMISHLEVAL

SEQ ID NO: 156505 - protein, 549 aa, Oryza sativa
  unsure (1)..(549): unsure at all Xaa locations
  Clone ID: PAT_MRT4530_56166C.1.pep
MPRYKPEYLFGVEGFVQELRTMSFVIGFGTAPFYAQIPHDRHEEKCRIKVTLNSNSEDIPSVMFEAGGRNYIHACQEVARIAIGGLRDRYSDQLADTEYRYHPRQPQGSDRGSYLETEGIENDATTRHLVEMLWARDESRAETVLAAQDREDRNRGKICKLEDKVDRLEKELAALKGEAPPQKARIRLTARKRALFVPRYQLAPKVRVVEKEVAPTLADPPVMIISDDEEEESKRNNSKIEWVATQDDEDEPNEPSIDLRCLEELEXLFPLVSLLVPCQMVNTRSNGNGPNNPNNNNGENPTLAQVLAQQTQLMNMMMQQLQNQQNQGNNHVPPQNKLAEFLRVRPPIFSSTTNPVEAGDWLHAIEKKLDLLXCTDQEKVSFASHQLHGPASEWWDHFRLNRTTAEPITWLEFTAAFRKTHIPSGVVSLKKKEFRSLTQGSRSVTEYLHEFNRLARYAPEDVRNDEERQEKFLEGLNDELSYPLMTGDYHDFQKLVDKAIRQEDKYNRMEQKKRRIAHFKAQQGSNQKPRLTLGPQPMPVEHSSSEMRP

SEQ ID NO: 156506 - protein, 42 aa, Oryza sativa
  Clone ID: PAT_MRT4530_56167C.1.pep
VMFKGTDFSTIKFYRRAQLGSQKTAKPGSMGCLDPVQKRCFP

SEQ ID NO: 156507 - protein, 1029 aa, Oryza sativa
  unsure (1)..(1029): unsure at all Xaa locations
  Clone ID: PAT_MRT4530_56168C.1.pep
SRLSSCCLPFSRCIYCPSGIXFTKNQKRRVQRLRNRERFQEVEQEISHRLKKTKPRQEWRVKNQVPAADEATTDEAKRLAKGKSVVTASVNMVFMLPTEFGVKQADVDDVEEESAKLILSPEQAVFEKPEGTENRHLKPLYINGXYVNGKLMSKIMVDGGATVNLMPYAIFRKLGRNAQDLIKTNMVLKDFGGNPSETKGVLNVELTVGNKTIPTTFFVINGKGSYSLLLGRDWIHASCCIPSTMHQCLIQWQGDKIEIVPADSRLKMESPNYYFEGVVEGSNVYTKDMAEVARLYDTGFIRPCRYAEWVSNIVLVIKKNGKVRVCIDFRDLNKAIPKDEYPMPVANQLVDAASGYKILSFMDGNAGYNQIFMAEEDIHKIAFRYPGAIGLFEWVVMTFGLKSTGATYQRAMNYIFHDLIGWLVEVYIDDVVVKSKEIGDHIADLRKVFERTRKYGLKMNPTKCAFGVSAGQFLGFLVHERGIEVTQRSVDAIQKIQPPEDKKKLQELIIKGASFEFAYTIKPYATINQAEYEAVLKGLQMLKEVEADAIEIMGDSLLVIGQLAGEYECKNDTLMVYNEKCRRLMDGFWLVTLKHVSREQNIEANDLAQGASGAAVPVDPSRAAAFLRSERLLRRRRRLGVSRGPLPRFPLSLPSLGRRSAVPMAAAGDHRGAGAASRQPRRHGRLRARRVSAAWGPAVSCPRPRVRLTRGAHGAGRCEPGCARSTVDREAAAWAPLPWTRLGSGCMVLIVTPRPYKDRSSGLCCKALSYFHMSSGANEGYTSCGPVVEMSWHRAGVLLLGAQSYLPVPEVPAIGGVGSPFRGWGMDMIGQINPLSGKGHKFILVATDYFTKWVEAVPMKKVDSGDAIQFVKEHIIYRFVPPYKLVYGHEAVLPWEVRIGSRRTDLQDTWTADEYYNLMADEREDLVQSRLRALAKVTKDKERIARHYNKKVVPKSFSGWELVWKLILPIGTRDSKFGKWSPNREGPFQIHKVVSKGAYMLQGLDGEVYGRALNGKYLKKYYPSVWVHS

SEQ ID NO: 156508 - protein, 200 aa, Oryza sativa
  Clone ID: PAT_MRT4530_56169C.1.pep
MDISEPSQELEVARGTRMFHINDLNVPPIWIETPEEEEDPEERVFEMQEHISMYADDQGDDEDPYSCSAPNTAASTSTPHAEFLHFAPTSLFTNPAEEEAQQDPNILMGAAGEGAGGTGTAAWRPAARRPSGHGREAVGAPAGGTARGGQPERHTTAQRRGAWRCGQASTVRRRCGGHGGVRPGSAGSAAATKACGRAAQ

SEQ ID NO: 156509 - protein, 156 aa, Oryza sativa
  Clone ID: PAT_MRT4530_5616C.1.pep
MASASEGIRSEELLDLDLARILLAAGYQRSGWRRLTIKTEVSTLKRCQGCEVISLLPSCHVLMNRRIQCITTMSYVTESFDVMKKLEVCVEIIGVYEGTQHASEEEDEPSRTNREQSRKALPKNLIAAFSRCRTSKEEVPETCSPDRRCTPASGVE

SEQ ID NO: 156510 - protein, 467 aa, Oryza sativa
  unsure (1)..(467): unsure at all Xaa locations
  Clone ID: PAT_MRT4530_56170C.1.pep
MDISRTNEGYTSCGPVVEMSWHRAGVLLLGXSILPTCPGGSGRRXGVGSVLLFMARMGWELCHVFRPYTVVLKCGMVGLGWLGTSWDPGSGCQFGLNHRRPWVKAGLKCLCNNMFNREKGKNVSGYASSNSSFQLNPPLASRELTRAHPWSIPSMRLSSQLPLVGSQDQNKYVFDRAFATQANELPMPEEHVPFCHDCREQGHYALNCPWVYAKEAPSFGLAGQTSLSQPPRTKSSLQPSVQSREPNEENPLNPGKCFLSSLSYHVGSHTKQAKGKKSKNQKRKAPMRTEEEVRKMTITSTEWPPAGITIPRRQRGNTFRGARQLTQHLLSHGGRVYDSEGSDQVSSDYEDESPRHLGEEEMESKACNRCGEIGHIASMCLTLCPHCGEDHPPGECPTRKVTCFLCEXTNHSLHRQPQQRIVIDGRSCVSPRPTPGRAKGNQSQEGDTKQKTVLCFEXQSEGSFSCE

SEQ ID NO: 156511 - protein, 198 aa, Oryza sativa
  Clone ID: PAT_MRT4530_56171C.1.pep
MAGYLHYGSSLFMRKLSVVCPVSALRGCLVAALSNMPEISVRLSGMREDNASSLVREKKREENAIEESNRSQIRASGAQPSDDSAQMCKCIWQPANRSAYYFARKAAWAASSMGGAAMLGSGKTATASPAGGSNTASQGSGKTAVASHASESSTASQGLQKTAGGGGFARIRQDGGRRRLRGSSAASLLESTSRGRFG

SEQ ID NO: 156512 - protein, 93 aa, Oryza sativa
  Clone ID: PAT_MRT4530_56172C.1.pep
NPKIFSLRFPWENVWGKGNSLKFICQTIKGAPQNKIPPLFLKKNKREGGPPSGGPKGKIGNKGTKFLFILGPNQNYFLRFGLEGGAFGGKEIL

SEQ ID NO: 156513 - protein, 1928 aa, Oryza sativa
  unsure (1)..(1928): unsure at all Xaa locations
  Clone ID: PAT_MRT4530_56173C.1.pep
MSSGTNEGYTSYGLVAKMSWHRAGVLLLGAQSCLPVPGVPAVGGVGSMYTSDQSIIYSNSRALGYGQAEQCTQMAGSINRRGLDLTGFVLELRGMCVVLGYPHGVDYQGKQLPEQEGDDAEPHAAWEVTAVILTGSPERTSLAVTAGGDSFSAACQNAALLAIGTLHQRYPDELQHLPYRYHPRRGGARDYATFRDASSEDDATIMHLAHMVEAYDAARIDFHQMVRRGLVKNNMKILELRQENLQLKKDLDAVEAQLRQLKIAQGEVCRPKRRRVCRSLKITARKSTSRPELVRQSLAWTCFVETPRAEPAPVVPQEDGASGVGSTEDALLLTFHXTTRRSAATGEGSHPEGSNHNNHVSPPPPPSPPPPPPPDTNAILTQIVAQXANMMAAFLHHIQNPPQHNAPPPPPQHSKLAEFLRICPPTFSSSNNPVDALDWLHAVEKKLDTVQCSDEEKVIFAAHQLQGPASLWWNHFQATQLEGQPITWARFTAAFQRTHVPAGVMALKKREFRELKQGNRSVMEYLHEFNNLAWYAPEDVREDEEKXEKFLAGMDPELSVRLVSGDYSDFQRLVDKSIRLEAKHKELESHKRRLANFRNQQGANQRVRYTNPYPGGSSSQQQQQQQPRSAPRPQFVVRIPQPQQQQSQQGTRAPRPPTPAVQPGQGRRDVQGQQRLCFNCFEHGHFADKCPKPRRQQGQAPPRSNNGGKDVIRGRVNHVTAEDVLTTPDIIVGTFLIHSIPATILFDSGASHSFISVPFVGRNRLGIERLRNPLLITTPGGVMTAKYYSPAIPIEIQGIPFPSDLILLDTKNLDVILGMNWLAQFQGVVDCARRTVTLYRGPEQPVVFFAPPTSVGSSELHQIGLSEIPIVREFGDVFPEKLPGMLPKREIEFRIDLAPGTTPLYKRPYRMAANELAEVKKQLEELKEKGYIRPSTSPWGAPVIFVEKKDKTKRMCVDYRALNEVTIKNKYPLPRIDDLFDQLKGATVFSKIDLRSGYHQLRIREEDIPKTAFTTRYGLYEFTVMSFGLTNAPAFFMNLVNKVFMEYLDKFVVVFINDILVYSQSEEDHQHHLRLVLGKLREHQLYAKLSKCEFWLSEVKFLGHVISAKGVAVDPETVTAVIDWKQPKTVTQIRSFLGLAGYYRRFIENFSKIARPMTQLLKKEEKFVWSPQCEKAFQTLKERLVSSPVLVXPDTRKDFMVYCDASRQGLGCVLMQEGHVVAYASRQLRPHEGNYPTHDLELAAVVHALKIWRHYLIGNRCEIYTDHKSLKYIFTQSDLNLRXRRWLELIKDYDVGIHYHPGKANVVADALSRKSHCNTLDVRGIPPELNQQMEALNLSIVGRGFLATLEAKPTLLDQIREAQKNDPDMHGLLKNMKQGKAAGFTEDEHGTLWNGNRRVKAEHQRPAGLLQPLQVPEWKWDEIGMDFITGLPKTQGGYDSIWVVVDRLTKVARFIPVKTTYGGNKLAELYFARIVSLHGVPKKIVSDRGSQFTSHFWKKLQEELGTRLNFSTAYHPQTDGQTERLNQILEDMLRSCVLDFGKTWDKSLPYAEFSYNNSYQASLXMAPYEALYGRKCRTPLLWDQVGESQVFGTDILREAEAKVRTIRDNLKVAQSRQKSYADNRRRNLEFAVDDFVYLRVTPLRGVHMFQTKGKLAPRFVGPFRIIARRGEVAYQLELPASLGNVHDVFHVSQLKKCLRVPSEQADSEQIEVREDLTYVERPVKILDTMERRTRNWVIRFCKVQWSNHAELRSTAVFAPDRFPPRRHLLRLRRTAVDPVHHLAEPADRRNAVDPVDPSRAAAFLRSGRLFRRHRRPRVSRRPPPLFPLSSPLSTAAPPRRWSPAATIGARGRRLPPAAPSGRLRACRVAATWGPAVSRPCPRVRLTRGAHGAGRCEPRCAWSTVDREAATWAPLPWTRSARPSPRLTQ

SEQ ID NO: 156514 - protein, 691 aa, Oryza sativa
  Clone ID: PAT_MRT4530_56174C.1.pep
MSSGTNEGYTSCGPVVEMSWHRAGVLLLGAQSCLPVPGVPAVRGIGSMYTSDQSKSIRIAEPSDMGKPSNVPKSVFQFLKFAQQLKCGMVGLGWLGTSWDPGSGCQFGLNHRRPWVKAGLKRLCNNMDNTGNKGYGNDGSDDSRTQANGNERSTNETSPELIQVVVNQTNMLATAFQLLQNWSSPAGATNVQVPTVQQQCKLSEFLKTEPPIFAIAVDPMEASDWLRTIEKKLGLIQCTDQERVGFATHQLVGPASEWWDSYEASRPEGHTITWNEFSSVFRRSHVPAGMITLRKREFRYLKQGDLTVTEYLHEFYRLARYAPEDVETDEDKQEKFLQGLKDELAVQLLLEDYEDFEKLVDKAMQLESEHNRMTNCKRRIVNIPVIPCGNQRQRTEPLQITGSSVVHQEFLPQEDGRNADNNTSNTNDDDTTNNHGSCPISDHSNKACNVSSIHQDVNDSINVGTQNDNLSNFDTEKDSNGDSNYGTTDANVSKDFQPPIPTPSQNDRPQTDSSAKKTLICYNCKEPGHYSRDCLQPRQNRPPHYRQFTRSRHSNCIVVTGANAVPAKSEIFNSVSDATRSEKCKHRLPGNAMTWEDDPMGKNTSSGNLSEVDSEDMNHEKFWNGSITELPQPSLSQPKGAPWSKLGEEKIPSATGGQAKQFRVVKFCWKFVKTQRKKSDKKRRPPNLSSC

SEQ ID NO: 156515 - protein, 65 aa, Oryza sativa
  Clone ID: PAT_MRT4530_56175C.1.pep
RVLALLWDKNLPKLLQVRGHKNKGLTYRAYWGTLLLQLLENHGKVFYKTGFLKRLCSRVPANDLP

SEQ ID NO: 156516 - protein, 877 aa, Oryza sativa
  Clone ID: PAT_MRT4530_56176C.1.pep
MAEQAKVHDLSPSVSGDDGEPNPRRRARTPPPPPHQNPKQGEALERVEKSAASPVAGDAGERRDGERRLLVYGDGSTPQGALQAVGALLRHPPVVPDPESPAQRWLDDVANLVMTAQQRLGAGGRSATTKTSGAATTGSVSSRRRARRAAAVARHSAATPSSAPPTREDQHGEPDARLDIERRRNSRRTPRATEGASSSRVSPRHGREDQPSVPPAGGVGCRAFVASLRNVRWPPRFRPTITEKYDGSVNPTEFLQVYTTGIEAAGGDDRVMANFFPMALKGQARGWLMNLPPASVHSWEDLCQQFTMNFQGTYPRPGEEADLHAVQRGDDESLRSYIQRFCQVRNTIPCIPAHAVIYAFRGGVCGTTACSKRSLPKSPRLPQSFFSSRTEWLARRRPGPRTPPVPEWQLRPPPDPPLRQGGVTGGGRRGQPIPTTRVMSSPSRALRGPPERGGLRATKRRKPTLPDLGYLEERRRRAALRAARYQQSLRRYHQRHVRARSLYVDDLVLRRVQTRAGLSKLSPMWEGPYRVIGVPRPGSVRLATGDGTELPNPWNIDHPRRFYPYLYKKGARRPRKKKEKVIQDWRGPGGSLRRARVTSLVVAVVRTTVTALLVGVEGEREPRGRTLEAVDDVVGGVPDLRACAVLSSGRELFQRCPRGEVRVREAPKPNGGPRPPTAGAGPLPACSTVPGAPDPQDGPEATAGRPRLSPSDPEVVGAEAEGAPRCLSEEERPGDAAPSEEDRPRRKVQRPVYFVSKALRDAKTRYPQAQKMLYAILMAPRKAPSPYLQAKQIGSPRFVRCSGNVAVLKRPPIIDSQVTITDVHGLRPLGFCPTMETGPTCHQALGVASCPTASLEKGDRPGITPGATVGDMGPGVS

SEQ ID NO: 156517 - protein, 34 aa, Oryza sativa
  Clone ID: PAT_MRT4530_56177C.1.pep
LTRLIDQLANLAHMGWKEAHMGGVYITQGSEASC

SEQ ID NO: 156518 - protein, 156 aa, Oryza sativa
  unsure (1)..(156): unsure at all Xaa locations
  Clone ID: PAT_MRT4530_56178C.1.pep
SAASQAASAASSPPSARPPARALSPSRPASPPPSPTSSSRTMTASSSPSPGAAAARPRRRRRPLRPPLPPPTSRHRCPVGGRSSRRRRLAASLSXPPGAPRRRRGGGARADGDLEQVVGGGRHRRLAVAVLDRVRQVLLLPPPATATVNSRGGDRR

SEQ ID NO: 156519 - protein, 153 aa, Oryza sativa
  Clone ID: PAT_MRT4530_56179C.1.pep
MCGGVVTGILSGSSTMMPLACGWCRYGGFPQFVDGGAIRASPRFADGDGGAPFLRVVTGCLTMGLGEEVIGWYGNDWAKQGSIEVASGRVSEPGERLDPVAWCQGQRSWTRLHGLDGGNATGRASALARPERSEKKGRRKGRKEGGPIAGSLA

SEQ ID NO: 156520 - protein, 152 aa, Oryza sativa
  unsure (1)..(152): unsure at all Xaa locations
  Clone ID: PAT_MRT4530_5617C.1.pep
MATVXAAAATSVVARAVLAGPLGLPXIXGEEERXGEVQLLXGXGDTGGGRXGSRRVPXGDCGDSGAXDGARPPXDXYRGHRAXPPAEQQPXGVDPAPGVRPHLVXLHHXHLXPPRGAGSXFPSYNSLAVLQPDWENLAPHIPLHTSPFPTGV

SEQ ID NO: 156521 - protein, 31 aa, Oryza sativa
  unsure (1)..(31): unsure at all Xaa locations
  Clone ID: PAT_MRT4530_56180C.1.pep
CIASLLGILVLVFLXVELKKILIVTSYYFNF

SEQ ID NO: 156522 - protein, 49 aa, Oryza sativa
  Clone ID: PAT_MRT4530_56181C.1.pep
PRSRPNAPAARSEESGEETAESAPRPLRARCCLEKERETRRWHRIGPDS

SEQ ID NO: 156523 - protein, 93 aa, Oryza sativa
  Clone ID: PAT_MRT4530_56182C.1.pep
GARFPGEKEEVGREEDNDPARGTHAGAPSAHARAWHGQEGAAWLGPGGGPGGEEGEAAREGEGGGGSWAEGKEGGEGRPRRRRRDRRKQRLGC

SEQ ID NO: 156524 - protein, 408 aa, Oryza sativa
  Clone ID: PAT_MRT4530_56183C.1.pep
MAACGCGHHAEIDSTTPPSSRCRRASAMAARGCGRRGRRRRGPHRSPVRMPRRRRHSPLRSGRGPANKRREAGGAAPPPRTSDKKPVVWRPHPKPPTTMRPSGAESSTPPLPIQVALRVAALKAAHPAPDELPRLMTLQFLAGQLSPVMTKLSSCLVGVAPPYDGDEATDSPVNYDLSSCEHILSLKMCVLDAIHGFYIWALAVLPSATIGRHGGHCCGPLESASNIILVTHVAADDDVHLRELRQRARAKREEVGTSTASTRREGGCGAGASRGSESARVHLHGARPCLHLRGHRRGAQPRPASTSVPTTAAPGPGSASAPNAAAPTRAGPFRRRRRRSAVAAVAGSREFLNPIAHEVVLKITSFGGCSGLVAAATTGGRRTRVGGRGRRRRRPPVVSVTWDREYRD

SEQ ID NO: 156525 - protein, 83 aa, Oryza sativa
  unsure (1)..(83): unsure at all Xaa locations
  Clone ID: PAT_MRT4530_56184C.1.pep
VPPRRXLGAAAPHRVPRRVSLSPCAAVEPEGVADPSEGXDLQDFEXGKSSLFFEHVDPNCEIILFTNKIACNDEHPTCEYAMP

SEQ ID NO: 156526 - protein, 88 aa, Oryza sativa
  unsure (1)..(88): unsure at all Xaa locations
  Clone ID: PAT_MRT4530_56185C.1.pep
VLLDTGVPKMGSIASTKHGWTSIVSDKYRYQSXGRYPLWVHTSVMFYERDETENNTVFGVDLCAHVIMIDFIEQDDLKKTQAHMDPAG

SEQ ID NO: 156527 - protein, 280 aa, Oryza sativa
  Clone ID: PAT_MRT4530_56186C.1.pep
MAMHHMHDVFAQTTSIIGHEEEEVTIDPTKWGAWAHRGHRLWASMSEDFWIHVYKVQRCPRSSSHDWTSCPYAHKGERARRRDTRRFAYAAVSCPDYRPREAAPGAVPSCAHGLRCRYAHGVFELWLHPSRFRTRMCSAGTRCPRRICFFAHSAAELRDDPNSIASAILTPMPMPMPMSIPMRTPDADHHPRVSAMRDQLDLIEEAMRNRLRLYSNANANANVGSSSATAVATTTIPVSTLANGEGSTGKRCGCRRCVEEEDALLNGYPHYDLIMDLVDE

SEQ ID NO: 156528 - protein, 59 aa, Oryza sativa
  Clone ID: PAT_MRT4530_56187C.1.pep
MRRGRVEGGGGRKDKVLGPPSQAGQTGYMRPVKPPGCGRSDWALEAGQTAATRPVRPRI

SEQ ID NO: 156529 - protein, 48 aa, Oryza sativa
  Clone ID: PAT_MRT4530_56188C.1.pep
MWQLQWLEGPSPSSTGLYVGVQLDGAAHSGSPHQGANVELGKKLRDLK

SEQ ID NO: 156530 - protein, 72 aa, Oryza sativa
  Clone ID: PAT_MRT4530_56189C.1.pep
PMDQVIHFQRLVHSATVCLFASQVFFLRSSPVQLGTVVSVSVQTVIYSLPAGGGLCIQPPVPALFLLVQVNV

SEQ ID NO: 156531 - protein, 435 aa, Oryza sativa
  unsure (1)..(435): unsure at all Xaa locations
  Clone ID: PAT_MRT4530_5618C.1.pep
MAEAATGATDTSLPPPPPHVVLMASPGAGHLIPLAELARRLVSDHGFAVTVVTIASLSDPATDAAVLSSLPASVATAVLPPVALDDLPADIGFGSVIISFISVVRSVVELHDGAAAGEYRDLPDPLVLPGCAPLRHGDIPDGFRDSADPVYAYVLEEGRRYGGADGFLVNSFPEMEPGAAEAFRRDGENGAFPPVYLVGPFVRPRSDEDADESACLEWLDRQPAGSVVYVSFGSGGALSVEQTRELAAGLEMSGHRFLWVVRMPRKGGLLSSMGASYGNPMDFLPEGFVERTNGRGLAVASWAPQVRVLAHPATAAFVSHCGWNSALESVSSGVPMIAWPLHAEQKMNAAILTEVAGVALRPXHTAAPGGVVSRKEVAAAVKELMDPGEKGSAVRRRARELQAAAAARAWSPDGASRRALEEVAGKWKNAVREDR

SEQ ID NO: 156532 - protein, 80 aa, Oryza sativa
  Clone ID: PAT_MRT4530_56190C.1.pep
MEECKGGGMSPSSSMDSSTHPALSTTSSAATARRDLSTDLRLGLSLSTSSSSSLLQAAAAAAAADDSIPSTPRLLDFFLS

SEQ ID NO: 156533 - protein, 93 aa, Oryza sativa
  Clone ID: PAT_MRT4530_56191C.1.pep
RSKTRTRRRGRSAARPRGDGYGDGDGIALFSGRHLLSSSMKSTGREIPDNLFDGSNCLKFLKIYCFRQHDESQGIIIVSPAAQLIPLINLFSL

SEQ ID NO: 156534 - protein, 115 aa, Oryza sativa
  Clone ID: PAT_MRT4530_56192C.1.pep
MMNDYEARSNIGAIANCWRKDAAQFLNLLIDSRPTRLKADYASMPYAATPRSPRAIDRSREHRTGVARPREMRSCMQDSPVDHTNRARTDEPAPAGVDHCPPLHPITENTRAFLP

SEQ ID NO: 156535 - protein, 111 aa, Oryza sativa
  unsure (1)..(111): unsure at all Xaa locations
  Clone ID: PAT_MRT4530_56193C.1.pep
MHAYVSLDPLERRVSRAEITAGNIVTADVTPLTSVVSTDKVYAYFDADERVYLKYTQLARQGKRVQTTPVSTSCLSNETXNLHQGVMNFCLTLGIPGRYLQAYSFPYSESY

SEQ ID NO: 156536 - protein, 1801 aa, Oryza sativa
  Clone ID: PAT_MRT4530_56194C.1.pep
RVGPTCHLPPRAAPAAARALAPPPPPNPPLPAFPARHKEGRITPRVSLSRFPLFSLSLSLGFVRFESRNHRRRLQWRPRSPRAIPSSPAAFSPFRRYKIVPRASLFRFRRSPLALAVGFVPAPCSSLSAVAAELRFAAVVAPVLLPTRRHLHRLRRVVADPVRRSASPADRRSTVVIVIPNRAAAFLRSGRRSRRRRCPGVSRRPPFAFPLPSALSGAAPPRRWSPAVTIGARARQLPSAVPARPPSGAPSRLPGGPGRQPPAPAGAADARDPRRRPPPAACARSTVDRAADAWAPTPVDPMPRYKPEYLFGVEGFVQELRTMSFVIGFGTAPFYAQIPHDRHEEKCRVKVTLNSNSEDIPSVMFEAGGRNYIHACQEVARIAIGELRDRYSDQLADTEYRYHPCQPQGSDRGSYLETEGIENDATTRHLVEMLWAMDETRAEIVLAAQDREDRNRGKICKLEDKVDCLEKELAALKGEAPPQKARIRLTARKRALFVPRYQLAPKVRVVEKEVTPALADPPMVLTRSNGNGPNNNNNNNNNGENPTLAQVLAQQAQLMNMMMQQLQNQQNQLNQGNNNAPPPQNKLAEFLRCTDQEKVSFASHQLHGPASEWWDHFRLNRTTAEPITWLEFTAAFRKTHIPSGVVSLKKKEFRSLTQGSRSVTEYLHEFNRLARYAPEDVRNDEERQEKFLEGLNDELSYPLMTGEYHDFQKLVDKAIRQEDKYNRMEQKKRRIAQFKAQQGNSQRPRLTLGPQSMPQGGSSSVVRPQRQIFNNNTGNNIRNQAPRPVAVLTQQQPAKREQGSKPVVCFNCGDLGHYADKCPKPRRVKVVPTQSNSTVPASKARVNHVAAAEAQDAPDVILGTFLVNLVPATVLFDSGATHSFLSMSFAGNHGMEVEDLRRPLMVSTPSNQALSLQRSPSVRIEIQGVPFLANLILLESKDLDVILGMDWLARHKGVIDCANRKVTLTSNDGRVVTVHALSSESLRSRLNQITLEEIPIVREYPDVFPDDLPGMPPKRDIEFRIDLVPGTTPIHKRPYRMAANELAEVKRQVDDLLQKGYIRPSSSPWGAPVIFVEKKDHTQRMCVDYRALNDVTIKNKYPLPRIDDLFDQLKGATVFSKIDLRSGYHQLRIKEEDIPKTAFTTRYGLFECTVMSFGLTNAPAFFMNLMNKVFMEYLDKFVVVFIDDILIYSRTKEEHEEHLRLALEKLQEHQLYAKFRGVAVDPSNVESVTNWKQPKIVSEIRSFLGLAGYYRRFIENFSKIDKPMTRLLQKEVEYKWSEECVTTGNNPTGFPDVRALILVPGGKTELQTKPYPLDMWKYGSALQQRPELNPYIGRGVTSHNWHAPKSHRKTGFRGFERGREGERPSEPSATTANHASGTSGTTEATRSTQAKLQAYKEAITIHKKKTEYTETVHGLTEADPVCQPRRVADKRTPLDTTRAAHVETTRLPSGHTNTVTTRTSERLPTPVHGRDAAGTRLDDAEPRTKTTTGAAATLTKHRGRTRTARRRDERHNDPERREDDDDDDRGRRGGDEGSRQQLHGGEDGEGHAAAMPTTMAAQPDDEPGERRDVDDENERRRRRWTAEGEPTSRGGGRGGRRDAGDEEDGEAGAGDGGLRTNQRAGRGGGRRGDAEEGDGAAGPHLSGAAGAAGGGTVAATPLDDGGNAPPAVTARNGGQAGGEEAAATLEEATARPDGARARRERRLEAGRHRRERRRRRGEVKMIFNFGMNLSGRDIAAAAWGPAVSRPRPRVRLTRGAHGAGRCEPGALGPPWTVRLPRGSHSRGPGPRALSPALFTLE

SEQ ID NO: 156537 - protein, 68 aa, Oryza sativa
  Clone ID: PAT_MRT4530_56195C.1.pep
MSSWLRSAVSRAGRNGVARAVRGYADAVAHHAGQAVADILQDRTGSEDRKKVCNVLHVGDNGLYKETS

SEQ ID NO: 156538 - protein, 462 aa, Oryza sativa
  unsure (1)..(462): unsure at all Xaa locations
  Clone ID: PAT_MRT4530_56196C.1.pep
RCPSTPDFVHLHPCTFVYNQTEPQTKPYPLDMWKYGSALQQRPELKPYSTRGTTNQTXHAPRAQPKTXFGGFEXRGRCGERTSEPSATTTNHASGTSRTTKTTRSTQAKLQAYKEAITIHKKKTEYTETVHGSMEADPGCQPRRVADKQSPLDTTRAAHVETTRLPSGHTNTVTTRTSERLPTPVHGXDAAGTRLDDAEARTKTTXGCSGTLDGRGRRTRTAXRRDERHNERNRERREDDDDDDRSRRGGDEGSRQRLHGDEDGVFHAAAMPTTEAAPRDDEPARRNDDDDDEHRRGRRWWRCGRPVHGXRRDGRPNNSGEADGEVXAMCGSFRAKPRGGRGGGLRHRAEGGDGSAGXRTGMAKGVAGGDVDEEEGKGDGGNAAPGVSAGNGGQAGEGEATAMLEEATARPDGAPARRERRLEAAGGTGERGGRRGEGKMIFXFGMNLSGRDRSSLGKILFT

SEQ ID NO: 156539 - protein, 42 aa, Oryza sativa
  Clone ID: PAT_MRT4530_56197C.1.pep
RTTSKNQTRVYRPPGPLQLLVFQHTLIYPRITRMSPKAETSE

SEQ ID NO: 156540 - protein, 537 aa, Oryza sativa
  Clone ID: PAT_MRT4530_56198C.1.pep
MWSSWAWTWSWSGAAAVAVAAAAAWVAVYAAAARAAEALWWRPRRVERHFAAQGVRGPGYRFFVGSSIELVRLMVDAASRPMEPPTSHDILPRVLPFYHHWRKLYGPMHLIWFGRTPRLVVSEPELIREVLLTRADHFDRYEAHPMICQFEGYGLSNLHGERWARRRRVLTPAFHTENLRMIAPFVAGTVTRMLDELAERARAGGAGEAEVDVAEWFQRVPQEAITFAAFGRRNYDDGAAVFRLQDELAGYATEAHSKVYIPGYRFLPTRKNRRVWQLDREIRSHLAKFVTGLQSCSSSHGDDADDGGDGGGGMREFMSFMAPAMTAGEIIEESKNFFFAGKETLSNLLTWTTVALAMHPEWQERARREVVAVCGRGDLPTKDHLPKLKTLGMILNETLRLYPPAVAMIRTAKEDVELGGCVVPAGTEVMIPIMAVHHDAAAWGDDAAEFNPARFAADDDGGRRRHPMAFMPFGGGARVCIGQNMALMEAKVALAVVLRRFEFRLSPAYVHAPRVLMILSPQFGAPVIFRPLTSAAA

SEQ ID NO: 156541 - protein, 455 aa, Oryza sativa
  Clone ID: PAT_MRT4530_56199C.1.pep
MAAPLLLSTIILALVVVASSTHGTMANGVFQVRRKFHIVDGVYKGSDIGALQTHDENRHRRRNLMAAELPLGGFNIPYGTGLYYTDIGIGTPAVKYYVQLDTGSKAFWVNGISCKQCPHESDILRKLTFYDPRSSVSSKEVKCDDTICTSRPPCNMTLRCPYITGYADGGLTMGILFTDLLHYHQLYGNGQTQPTSTSVTFGCGLQQSGSLNNSAVAIDGIIGFGNSNQTALSQLAAAGKTKKIFSHCLDSTNGGGIFAIGEVVEPKVKTTPIVKNNEVYHLVNLKSINVAGTTLQLPANIFGTTKTKGTFIDSGSTLVYLPEIIYSELILAVFAKHPDITMGAMYNFQCFHFLGSVDDKFPKITFHFENDLTLDVYPYDYLLEYEGNQYCFGFQDAGIHGYKDMIILGDMVISNKVVVYDMEKQAIGWTEHNSVEEACGGSEGLSPIGRMHGGL

SEQ ID NO: 156542 - protein, 427 aa, Oryza sativa
  Clone ID: PAT_MRT4530_5619C.1.pep
MEYERIHKVQMGVMSPTKLRMKLLGSHGGSIGRVDEAKKSPRASPARLDADEDDDDHPKNSLLPQELDEDYPKDQSDSSRSRSDASHGRAGNGYDSGGFEFYREERPPPPPPAAVAVVGGTFFRQVPSKWNDAEKWLAGRHVVHSNPIFSKKAAAAAAAVSGRVAPEASASSSPPSVASRQRQQKRLRVSSEAAAVSMRDVGTEMTPMASKEQSRSGTPAGAATPSLSPLCSVPTSPRGAASASSASSERELQIRTRREIAALGLQLGKMNIASWASKDDDDELPRASPEKRPRPRPRPHSGDGGGEAKKREFEARAMAWQETHKCKLALRFQRKEVKIQEWESCQKAKFEAKMRHAEVQAEQMKARAKQKLSRRLSALSHKAEGKQARVEARRSRQAARLARQVHRIRETGAAPSRLRRCCSWLFL

SEQ ID NO: 156543 - protein, 116 aa, Oryza sativa
  Clone ID: PAT_MRT4530_561C.1.pep
MDLNFQGSGTRYAILLPRWLSEMGECKLSASMDNYVGAKTSHTCLIWVHRAPTLYDHQGAEKCKANKKFLHVDGIIFIILKSKLYFALCKLHRVSLVFTWTQLLCGTAPAVGITDM

SEQ ID NO: 156544 - protein, 92 aa, Oryza sativa
  Clone ID: PAT_MRT4530_56200C.1.pep
MAELVPIISTNSSSIALSSSYIYGGSMPHGWMVQLNDANQTPVAIASKCKKQLSTMKKGSHLLSPEEEKEEDEDGIDRIHTKIGSLIEIGIM

SEQ ID NO: 156545 - protein, 1051 aa, Oryza sativa
  Clone ID: PAT_MRT4530_56201C.1.pep
MTIMMSLRLELSLVLILTPIVAAVAGGGSSSSSDEATLLAFKAAFRGSSSSALASWNSSTSFCSWEGVTCDRRTPARVAALTLPSGNLAGGLPPVIGNLSFLQSLNLSSNELYGEIPPSLGRLRRLEILDIGGNSFSGELPANLSSCISMKNLGLAFNQLGGRIPVELGNTLTQLQKLQLQNNSFTGPIPASLANLSLLQYLYMDNNNLEGLIPLDLGKAAALREFSFQQNSLSGIFPSSLWNLSTLTVLAANDNMLQGSIPANIGDKFPGIQYFGLADNQFSGVIPSSLFNLSSLTIVLLYGNRFSGFVPPTVGRLKSLRRLYLYGNRLEANNRKGWEFITSLTNCSQLQQLVISDNSFSGQLPNSVVNLSTTLHKLYLDNNSISGSIPEDIGNLIGLDTLDLGFTSLSGVIPASIGKLSNLVEVALYNTSLSGLIPSSIGNLTNLNRLYAYYTNLEGPIPASLGKLKTLFVLDLSTNRLNGSIPKEILELPSLSWYLDLSYNSLSGPLPIEVATLANLNQLILSGNQLSGQIPDSIGNCQVLESLLLDKNSFEGGIPQSLTNLKGLNILNLTMNKLSGRIPDTIGRIGNLQQLFLAQNNFSGPIPATLQNLTMLWKLDVSFNNLQGEVPDEGVFKNLTYASVAGNDNLCGGIPQLHLAPCPIIDASKNNKRWHKSLKIALPITGSILLLVSATVLIQFCRKLKRRQNSRATIPGTDEHYHRVSYYALARGSNEFSEANLLGKGSYGSVYRCTLEDEGAIVAVKVFNLRQSGSAKSFEVECEALRRVRHRCLIKIITCCSSINPQGHEFKALVFEYMPNGSLDGWLHPVSGNPTSSNTLSLSQRLGIAVDILDALDYLHNHCQPPIIHCDLKPSNILLAEDMSAKVGDFGISRILPESIVKALQHSDSIVGIRGSIGYIPPEYGEGSAVSRLGDIYSLGILLLEIFTGRSPTDDMFKDSVDLHKFASAAFPGRVLDIADRTIWLHEEAKNKDITDASITRSIVQDCLVSVLRLGISCSKQQAKDRMLLADAVSKMHAIRDEYLLSQVVKK

SEQ ID NO: 156546 - protein, 180 aa, Oryza sativa
  unsure (1)..(180): unsure at all Xaa locations
  Clone ID: PAT_MRT4530_56202C.1.pep
GRDLSLSLSEIILQAYQQNLISSNIILTVALLRIDACHASAQPASXLREKDTLYELQAHLLVLQQVLRPCSXDLRKQDSIVLTPFXEPPTSQWRNKQTLXTRAXQQLRLRPQQSHYHCINIEQAKAQNVLLHXMLEPYYXDQSQTQDQSLWTFNLPSIXEIYPKYYSDHTTIATVEGECY

SEQ ID NO: 156547 - protein, 731 aa, Oryza sativa
  Clone ID: PAT_MRT4530_56203C.1.pep
MSSRKKPSRIEPFRHKVETDPRFFEKAWRKLDDAIREIYNHNASGLSFEELYRTAYNLVLHKHGPKLYDKLTENMEDHLQEMRVSIEAAQGGLFLVELQRKWDDHNKALQMIRDILMYMDRVFIPTNKKTPVFDLGLDLWRDTIVRSPKIHGRLLDTLLDLIHRERTGEVINRSLMRSTTKMLMDLGSSVYQDDFERPFLEVSASFYSGESQKFIECCSCGEYLKKAQQRLDEEAERVSQYMDAKTDEKITAVVVKEMLANHMQRLILMENSGLVNMLVEDKYEDLTMMYSLFQRVPDGHSTIKSVMNSHVKETGKDMVMDPERLKDPVDFVQRLLNEKDKYDSIVTTSFSNDKSFQNALNSSFEHFINLNNRCPEFISLYVDDKLRKGMKEANEEDVETVLDKVMMLFRYLQEKDLFEKYYKQHLAKRLLSGKAASDDSERSMLVKLKTECGYQFTSKLEGMFNDLKTSHDTTQRFYAGTPDLGDAPTISVQILTTGSWPTQPCNTCNLPPEILGVSEMFRGFYLGTHNGRRLTWQTNMGTADIKAVFGNGSKHELNVSTYQMCVLMLFNSADCLSYRDIEQTTAIPSADLKRCLQSLALVKGKNVLRKEPMSRDISDDDNFYVNDKFTSKLFKVKIGTVATQKESEPEKMETRQRVEEDRKPQIEAAIVRIMKSRRVLDHNSIVTEVTKQLQPRFMPNPVVIKKRVESLIEREFLERDKTDRKLYRYLA

SEQ ID NO: 156548 - protein, 298 aa, Oryza sativa
  Clone ID: PAT_MRT4530_56204C.1.pep
MDGKDSTTTPAPAPAPAPAPAPAAEPQTTGNAPPPPPQQQQQQPEAAKWGTRQMGPPAAPGAHPENQQAARWTAARGDQELPPYVIMGEAAAAPPRGRPERGDSPMEHILDFFNTWSRKAEELASNIWFNLKTAPSMSDAAMGKLSLGAKALSEGGFDKLYKQTFAGAGADERLRKTFACYLSTATGPVAGTLYLTDRSVAFCSDRPLSFAAPSGQTAWSYYKVMIPVAKVAAAEPVTMKESPPEKYVHVVTVDSHDFWFMGFVSYDKAVHHLVQAVSSQQRGGAAADTAAAVPGDGK

SEQ ID NO: 156549 - protein, 308 aa, Oryza sativa
  Clone ID: PAT_MRT4530_56205C.1.pep
MGGAFTAAPALALVLLVALSVAATANVGDSCSTAVDCGGGQWCFDCQPEFAGSSCVRSAATNPFQLTNNSLPFNKYAYLTTHNSFAIVGEPSHTGVPRITFDNQEDTVTDQLNNGVRALMLDTYDFKGDEPALDTFKEIEAFLGANPSEIVTLILEDYVHAPNGLTNVFKASGLMNDMVASNQRLLVFTSIRSKQATEGIAYQWNYMVENNYGDDGMDAGKCSNRAESAPLNDKTKSLVLVNYFPSVPVKTPVWMPGCQGLLVSVDPGGQTGRVPLVRPQVLRRSDRPTRRSDRQDPVLLEASGECCR

SEQ ID NO: 156550 - protein, 82 aa, Oryza sativa
  unsure (1)..(82): unsure at all Xaa locations
  Clone ID: PAT_MRT4530_56206C.1.pep
FFFFFFXKQFLISAECLQSGQNSHVNGTLHNRIISLTRESCFCMXILLRVLTQGTQKTLFPKLLALGVHXCQQCSSQAVPQI

SEQ ID NO: 156551 - protein, 150 aa, Oryza sativa
  unsure (1)..(150): unsure at all Xaa locations
  Clone ID: PAT_MRT4530_56207C.1.pep
MAAHGEDDDDGDGGGCDGSGPPRGSGGGGHPPRGSSGATAAAAAPXAWIRRRRPPPVRXLAAALRRWRRRQEGGDDDGKATATMGRRRRRRREGSRSGHGDCDDDQKAADLAMATATMTGRRRRLGRTAPDGLKLRTRKSVRPHGKIFCV

SEQ ID NO: 156552 - protein, 128 aa, Oryza sativa
  Clone ID: PAT_MRT4530_56208C.1.pep
PASGYRQYQLQSPVLLQPQVFSPYIVFVGQPFGIAASPFLLSDAFHLRTTQVWPRLALVARPSPFGAFTIVRAMAQQLQLRQFGVLSFVRNWARAQALLAFAVPPAYGFPPRPYGAPGPFSPLGGVWS

SEQ ID NO: 156553 - protein, 280 aa, Oryza sativa
  Clone ID: PAT_MRT4530_56209C.1.pep
MAANTAWAACPTCTGAPPDAADISDPQQRHAGPVELPRREQVLGADPPQRAPLAARREDEHGVGGVPDPDAVPRGRFKVSIETRRGNKPQFRRLRLRLLHQGRKMSSFKEERSEGKVPATAIDPTNEKKKRTKMVRYTQDQIQYCFANSVELSDDDEDDFKLTEVLSKECLGRMSQEYLAKLYAMEIAEEKEKANLKKIQDVLRNERENIFNIREKPEDVLKQYHTKGYAEYEVVVDDDKGDEDNKVHARVAPPGRRRFRNGVAMKKNQSGGGSIIRKIN

SEQ ID NO: 156554 - protein, 98 aa, Oryza sativa
  unsure (1)..(98): unsure at all Xaa locations
  Clone ID: PAT_MRT4530_5620C.1.pep
NXFFKXQGSTPSTIKLAIGYSAYIHIXSYLPSTRIRTYTYXTYSLINXLIKLDVDEXRAGEELGEGERDEAEHGEPXXSRARXRXSSRXXSSXPRSRR

SEQ ID NO: 156555 - protein, 626 aa, Oryza sativa
  Clone ID: PAT_MRT4530_56210C.1.pep
MATGRGGAKSTPVPDPSGAPQPDRAPALDSISIQSEKKYKTFIKLAKTKIAHSGHTIKNRMNRRHRESLAAAAPVPSLGAAPLPQPRRPLRSCRNLAGHRALPHDRAYAPPRASFALPEGEVEVDSGGRGKGDGMGGQRGEERRGGKRATDDRRDSEVRHAPCIAPPSCALRNAAAVRDVDGREMGMGETRERIRWRGEQLHGRKPAGNNWAAVHELLRLAERAEGQRGDEGCLRDFLERANKDGGTTMEYRERGVFNASEMVVEIQSVEAMGNKDLFVEVLKEETAAGLWLKLEQICMTKDLTIDTWLILAKSIGKLFNGFSDTYVMFHERTKHIDVRYHFIRGVIAEGDVKYSPRDYLARGDFTYMRSPLLSVSIGLLLNTKCIIELVILNIARNKGIMSDQSFTVLGAGVRAGSESLITAMVSPFLAMVVKPPRRLVFYKRRTVAWAHPEPESELRILACVHVPRDVPALLTLLDVVTPSSRSPVGVHALHLIEFVGRSSSSTHPCRRRPPMTYDASVHGLSHMKMQFKHISHAFVAYEEQAVGVSMRTMAAVLRPCSSSPRRLRPAPPHASRARRRQPVQLLPTAARGDWRREERGREVERGEKEEADAWGPRGFHAESAAT

SEQ ID NO: 156556 - protein, 208 aa, Oryza sativa
  unsure (1)..(208): unsure at all Xaa locations
  Clone ID: PAT_MRT4530_56211C.1.pep
AVAAGMQAAAGAXEAWLWWWWRVEERGGEAGGVEAGAARGDAAGGVAWRPARQRGVGRRXESLAVPLAGSMTTTPLAPFPFLKALSWRSAICPTNLQVKTLLRPRTSGDDVTRRVLLGGIASGKFLTSMTIDGPFGSKAFFPWHSARPKPLGSASFYDGRHTLRLLLRMKLELLAVGVRRRLATMTCCSLFQRVGAGHVEEVALWWLG

SEQ ID NO: 156557 - protein, 237 aa, Oryza sativa
  Clone ID: PAT_MRT4530_56212C.1.pep
MATKRKCPANGDDGGVADLEPVAGGSFASPPPEKKAKLTVAVAVAVAPSSSSSATTAAAGEATAKREHGGFFAFARPENNTRLSVAVASSSSSASAAAEKAMAKLTVAGVAPSSSASAAAAGKATAKREYGGFCAFARPDDKTRWRVAVASSAAAAADASYSSSSPATGEQPEANRCATCRRKVGLTGFKCRCGGTFCGGHRYADEHGCGFDYKSSGRELIAKQNPVVVADKLAFRI

SEQ ID NO: 156558 - protein, 483 aa, Oryza sativa
  Clone ID: PAT_MRT4530_56213C.1.pep
MVRTPTIIPLRPNYSPPGDGAAFRREPATYSRFPPAAARNECDLTFGQERKREGMKGKPPISRKIIYNHRDFVSMGERFVALCFIFTMSPCIDATLFVRVVLDFVRREETRRDEMPRTKLVLKLIENEKKRKATFKNRRDGLKQKVSQFATLCGVEALLICVAPAVAGGEVTTWPPDRAAVLDLIARLRATPPEKIRQLHNTQSQLRDDLDKQQRLLLKVQKCGADDVLTPWHCSLYDLSLDGLNALHDTLSETLDRAHRRIAALGGGHGHVHDDAASSSEFSVPAPAPHAVALPDNAFDFPFAPSNTGPVVGAHYFYPLHDTLPLPLPLPQQVPGQHPPCIAYQMPPPPCLAYQMPPPPPPSLAAAPFDQCMSATGFMDSNPYATHIMHGGSTAAGLLDDHGQIFSAGAGYDDDDILGHGFGFAAGTGYDLDPRMATADVWPMNTLNNIPNDGGIGFQLQNDLKWMLPGGSNGSNLQGGFQI

SEQ ID NO: 156559 - protein, 205 aa, Oryza sativa
  unsure (1)..(205): unsure at all Xaa locations
  Clone ID: PAT_MRT4530_56214C.1.pep
ILIFKYLNVYSWSLICSKAPASPPARATRAATQATAAAVLPPSPLPRRRLSKRPARARGGGHPRSGAGESEGGGRPERRCRRGRRRAGRAGDGGRWSWWRQAAQGRGVGXAVGGGRDWRRGVGRGGEGSGGGVYDLGHHRIRVDHCRIWSXVREGRRVAAGMRWXAGMQAAAGAXEAWLWWWWRVEERGGEAGGVEAGAAVEGTE

SEQ ID NO: 156560 - protein, 204 aa, Oryza sativa
  unsure (1)..(204): unsure at all Xaa locations
  Clone ID: PAT_MRT4530_56215C.1.pep
YPQVSQLENNALVDEFTEKEIKDAIFKMEHIKSVGLYGFPAEFYQVFXNVIKSDLVDLFKDFHSESLNLYSLNFGTIILLSKCKEAIKNQQYRPICLLNVSFKIFTKVATNRISGVAXKVISPTQTTFIYGRNIMEGLXILHETIHELHKKMNGVIFKIDFEKXYDMIEFNLVINXNICMVLFSMRWCENGANNVHEDQAQLHV

SEQ ID NO: 156561 - protein, 118 aa, Oryza sativa
  Clone ID: PAT_MRT4530_56216C.1.pep
MAQPVALAASRLQGPMRFAFDLGDRGCVGGSSWPASAPVGSGNDDDGGVPPWRWTTGAADSGSSDGGGGECSDKAIEAAGRVVVMGGGDGVGQRWGLVFCPFLCRQWRGLAASKSDRG

SEQ ID NO: 156562 - protein, 349 aa, Oryza sativa
  unsure (1)..(349): unsure at all Xaa locations
  Clone ID: PAT_MRT4530_56217C.1.pep
MPPPPPPTAAEVPARHRARGGGHPRSGMGEFEGGGRSERRRRRGRRRAGRAGDDSRWTWWRQAAQGAGLAAAGGGGDWRRGVGRGGEGGGDGVCDLGHHRIHVDHCWIWSQVREGRRVAAGMQWRRQAAGMQAAAGAEEAWLWWWWHVEERGGEARGVEAGAARGDAAGGVAWRPARRRGVGCVTWSVEAGSAAWRRGWQREAGAVCRGVAGGVEAGDGAWLCGRRWQRRXESLAVPLASSMMTTLLALFPFLKALSWCSAICPTNLQVKTLLRLRTSGDGVTRRVLLGGVASGKFLTSMTIDGPFGSKGFFPWHSARPKPLGSASFYGGRHTLRLLLRMKSELLAVGW

SEQ ID NO: 156563 - protein, 260 aa, Oryza sativa
  unsure (1)..(260): unsure at all Xaa locations
  Clone ID: PAT_MRT4530_56218C.1.pep
GSGGARGGGHPRSGVGGSEGGGRSEWRRRRGRRRAGRAGDGSRWTWWXTRRRGTGLAAAGGGEDWWQGVGRGGEGGGGGVCDLGHHRIRVGHRRIWSQVRERRRXVAAGMQWRRQATGMQAAAGAEEAWLRXWWRVEERGGEAGAARGDAAGGMEASSVAWRRRGSGAATGGGCGRPFVGAVAASNSHRRLGGDAVRLWAFVATVASRVSMTGPLAALAGSFPFLKAFGGGVTRRVLRTSGGGVTRRVLLGGVASEKFVL

SEQ ID NO: 156564 - protein, 76 aa, Oryza sativa
  Clone ID: PAT_MRT4530_56219C.1.pep
KKAQKNLNSKKRGINKNAGIRRKQNNSALKRKTIGGRGTLIYKKGVNHGPIQPHISLPGLRGTMHTAHQGTKSGEK

SEQ ID NO: 156565 - protein, 137 aa, Oryza sativa
  Clone ID: PAT_MRT4530_5621C.1.pep
GREEHLRSSPRGSVQPKPGWGARWQQGDEGTARPGERKRTEGKTRYKRSKSNQYKNTSQGGGRRRTTRRRMEGTQGRSIDYGYKGKTKRNESTIRCIRGKGTRRHGKSGGGRAKVRANLRPTCMGKKERGNMYPSKR

SEQ ID NO: 156566 - protein, 64 aa, Oryza sativa
  Clone ID: PAT_MRT4530_56220C.1.pep
TLSPKNNATFKHQCAFKANFPPPLNQVLNKSPPLGPARQTLTLGGQKPVGARGTKNHPFVFENL

SEQ ID NO: 156567 - protein, 141 aa, Oryza sativa
  Clone ID: PAT_MRT4530_56221C.1.pep
MAMKKPDQPALDLPSSLSTVSYCCGACGYDLKLSSSARDTAGMVVAGGGGGYRRRRGVVRFGAIDDARFGHVDEFRCVDVRARRLFTRRTRLLCRKCGAHVGFAYDDRAARSPPSSSPPPPRYDIKIRALHPIEAPQPSDL

SEQ ID NO: 156568 - protein, 232 aa, Oryza sativa
  Clone ID: PAT_MRT4530_56222C.1.pep
MAARSLHHLLLLLFLAGFHSLSLSPAAALRFDLQSGHTKCISDDIKVGAMAVGKYHVVVPEGGGSTSSSSSSSSSAQPLLPESHRVSLRVTSPYGNSLHYSENVQSGNFAFTASEAGDYLACFWAPDHRPTATVGFEFDWRSGVSARDWTNVAKKGQVDMMEVELKKLEDTINSIHEEMFYLRAREEEMQELNRRTNSRMAWLGFFSLAICLSVAGLQLWHLKNFFERKKLL

SEQ ID NO: 156569 - protein, 99 aa, Oryza sativa
  Clone ID: PAT_MRT4530_56223C.1.pep
CCSSNSALLNCILRWACRICDMSSGRLRPCDFKYSKLLASLQTFRCTYNFEIRLPVVQAEPFKKVISKAISHLTKQVQNAKALIDGVLGDHYRQWLHWE

SEQ ID NO: 156570 - protein, 590 aa, Oryza sativa
  Clone ID: PAT_MRT4530_56224C.1.pep
MTEAIGRGPVDPVAPELHLLGSNGRSFGATTTLRLKGEGEKEGTMTLVSSLISAKKEINVLIRASAGECTVKSRKIKHKYIDQAAASDQSGWALAAIRPDRPESKTHEKSRGHRPYRSAPIHPCIYVMDLLPLVTLLLLAHAAAWVAWQAAARRRRATCYLLDYACHKPSDDRKVTTELAGAIIERNKRLGLPEYRFLLKVIVNSGIGEHTYSPRNVLDAREDCPTLRDALDEMDDFFDDAVAAVLARAAVSPRDVDLLVINVGSFSPSPSLADRVVRRFGLRDDVMAYNLSGMGCSAGLVSVDLARNVMLTRPRTMALVLTSESCAPNWYTGTDKSMMLGNCLFRCGGAAALLTNDPAFRSRAKMELRCLVRAHIGAHDDAHAAAVHREDADGRLGVSLSKALPKAAVRAFTENLQRLAPRILPAGELARFAARLLLRKLLRRKAAAGAAAKINFKTGVDHFCLHPGGTAVIEAVRKSLGLDSYDVEPARMALHRWGNTSASSLWYVLSYMEAKRRLNAGDRVLMVTFGSGFKCNSSYWVVTKDLADAGAWEDCIHDYPPANLVNPYMEKFGWVNDLPSQGQGGAFPFF

SEQ ID NO: 156571 - protein, 587 aa, Oryza sativa
  Clone ID: PAT_MRT4530_56225C.1.pep
MSSPPLGRAASATSIGSSFFPLCSSPPSSGSCTLRRSSSVCGASEPEASGATSLDTDVLRRVAGAADAGEALDIVAESGGGRGGQDASDFNAIAAAAVDRGNVELALSVFEAMRSGFARAGAWRWARPDVRTYALLVQRLAAALRVSDALRIIDYVSRAGISSAEEVPFGMIIRCPSCMVAVAVAQPQHGTQTVSCSKCRYQYELFSGDIMSIESEEVSMDISALDKALRFINVIKDGLPAAVHSIVIRTPSGTARTHRFATQTVELPAQEGERVTISLAAPSNVYREMGPLKISARSQGFRPGEPMSLTNHINRQVSRLLRAPSKNEGPFVFNPYLLVGALALLASGDAASAFIDPSLPRFITATAFASAAVGTALNQVILPEIRKLPQKTVDIIAVRQQLLSQYDMLQTRLKDLKQLSEKEVWMLARMSQLENKILAVGEPSYRARRGRVKRVLESLESTLLAKIELMESYAKVIEQILYMLCSMIEIEVEMDSDVIVAEAASSAERISEQIQQLMEIDSLEEASISYVHQLTFNRKCFCTRRKAGWIVRQLHRDTIRVQVTNVNSFREHHRSKSKRSGYWANLP

SEQ ID NO: 156572 - protein, 151 aa, Oryza sativa
  unsure (1)..(151): unsure at all Xaa locations
  Clone ID: PAT_MRT4530_56226C.1.pep
HDKPGQNSQVCREEQRRRPPAKNGLDWAGPRFGRILLSAIRSRALPGRCGLAPNDGWRDIRVVSGSLDVVSRLWDIIIWGYMLRMRGGPLMVTAQYGYSSARVYSSKLISWGRYSSVFSPGCMVMTGCRKKLDSXGWLHEVPGGHRIENIS

SEQ ID NO: 156573 - protein, 69 aa, Oryza sativa
  unsure (1)..(69): unsure at all Xaa locations
  Clone ID: PAT_MRT4530_56227C.1.pep
LTCRQTHFLLYVVDKVCMCILKSQILCSICXDCNSXNSTNVHTSRRAAYSSRAKRASSSFQTSRAELAF

SEQ ID NO: 156574 - protein, 246 aa, Oryza sativa
  Clone ID: PAT_MRT4530_56228C.1.pep
MMMENSREQQPESSPANNNSKKKKKKKTASRFRRVCVFCGSSPGKKASYQVAAVQLGQQLVERGIDLVYGGGSVGLMGLVSRAVHGGGGHVVGVVPNGVLPRELIGETLGEVRAVGSMHQRKAEMARESDAFIALPGGYGTLEELLEVITWAQLRIHHKPVGLLNVDGYYDSLLAFIDKAVHEGFVSPPARRIIVAAPTASDLLCKLEEYVPPPHDATALKLTWEMSTVSEQHAGSIYSPKPDMAR

SEQ ID NO: 156575 - protein, 154 aa, Oryza sativa
  unsure (1)..(154): unsure at all Xaa locations
  Clone ID: PAT_MRT4530_56229C.1.pep
GQHDENTTSSDIIMATLCINQPKHQLQTDLATDLEGISGPMNTCWKAYGVYFLMVLVPRXNSYXAAGNLQNKPRISLLGKVIRVSTRVITRVDVVLRLRGSRAXRLRSRIDLCRDSVQIXCLSEPFGRSXTYIPHQPRQFEPLHCSIRFCFIEF

SEQ ID NO: 156576 - protein, 46 aa, Oryza sativa
  Clone ID: PAT_MRT4530_5622C.1.pep
MDGSLGKKGEGCEGFEEERDRWGREARTGAVMAIYGDMPHLAQRVP

SEQ ID NO: 156577 - protein, 56 aa, Oryza sativa
  Clone ID: PAT_MRT4530_56230C.1.pep
FCFFFFTILNLTLQQCWLMTKKNGNWVRANHLLHDTCNWLDGSTQYQEPTMDALSL

SEQ ID NO: 156578 - protein, 78 aa, Oryza sativa
  Clone ID: PAT_MRT4530_56231C.1.pep
MALQAHNGLSWTAGPSKKKWGKLNTNSSGYAYAYHNPFLESTSKSSQTVDSDILQFFSVGKWVMLHSDMAPQTELNCA

SEQ ID NO: 156579 - protein, 431 aa, Oryza sativa
  Clone ID: PAT_MRT4530_56232C.1.pep
MAAADGGGEDYISELPDALLSVIFSLLGTAEAARTAALSTRFRGVWAATPLRLDDLDLPALAALGLGGGTRTTASSSPIAPWTARADAVTRVLASHPGPVALFRLSRTSFRGRVAAAEAWFRELAAKRAREVALLCAPEWCHLALADPLLGCATLESLALGECRVSDRGASAARLTELTLSSTHLSEAALQSVLSGCPALRTVMLKHVEGPRSIRVRSCRSLVLLGVWQYKNLEELTVEDAPCLERLLGDMRLTAAINVSGAPKLTAFGYVVISSSNFLLFDEVIEKDVCNGLRAPLLSVKILAISVKFSSKNDMDKLMNLLNFFPFVETLHVQASDTRFDLTQDSTDTVGSSYHEKLDHIGAQVLQLMTIQSKVFSTPQCVAGQQALLNQSHVASTEAEIVFEDMESHDLEHLSLELANTLPDPFDTYHR

SEQ ID NO: 156580 - protein, 388 aa, Oryza sativa
  Clone ID: PAT_MRT4530_56233C.1.pep
MESLHHDVIRLIHSRLPCLVDRRRMGRVCHSWHLAVAERQRSKLPSILVPRADGPSFACALAGCCATHGFAHPLKDDARAARYFGAYDGGWAFVAFGHTVGYALLSLRDGDRLHIPDIGMAVVAATLSSPPDDERCLAAAINLSFLIDDLRTHAFWPMRRQSAAAPEKAAKPAKVISGHALEDVVHHDDAFHFLTREENLHVFPVAGFREDDEGNLEIPPVEVHRFSRGGRDYGQNNAVRYLVESGENLLMVVRLVPHPPQLPPRTSAFKVFEMVEPPLGTPINNDEAPYAWNELESLGGRMLFVARGCSRSYDANNNPGSEFSEGVYFLDDGRLYDEELMLGEPDFREYPCRDTGKWLPAAEANPRVVEFLPEQAPSSYSPPAWLLP

SEQ ID NO: 156581 - protein, 113 aa, Oryza sativa
  unsure (1)..(113): unsure at all Xaa locations
  Clone ID: PAT_MRT4530_56234C.1.pep
MGRADGPVPPPPSYPPTLAAEPASVLPSPXSPASWPPAPPPVLTSPQRRPPPASPPTPAAPPPSHPAPLSPFESTXPPAPPLSILVVVAPWLAPLLPLDPAASPSPSSHPSSP

SEQ ID NO: 156582 - protein, 318 aa, Oryza sativa
  Clone ID: PAT_MRT4530_56235C.1.pep
MASLVQGVYVMERDRQWNRHGHDARAPAWWRFFHFEVREVLVDAADSSIFGAVYAFQPPWHLLDPAAAAAASAPHYVVAFRGTITKKASASRDLALDLQLVRNGLDRTSRFHAAMRTVHAVVAAAGHQHHHRVWLAGHSLGSAISTLAAKSMARAGVALPTFLFNAPFPSAPVERIGDRRVRQGVRIANSFVTAAAATLLHHGSGGGGYDAFAALARWVPNVFVNPGDPISAEYVGYFDHRKKMEDIGAGAVGRVATRNSVKDLLLGIGTAGGCEPLHLFPSAVLTVNRGASPDFKAAHGIHQWWRPDLALECAAHYY

SEQ ID NO: 156583 - protein, 86 aa, Oryza sativa
  Clone ID: PAT_MRT4530_56236C.1.pep
YNLIIANQELMIKISKGEYPHPANLVAYTHPASSWNIPSPGRPIHLRPPIKHTQKLDRHLPSRDIPPTKHTLKKTRGTHMSVTDTN

SEQ ID NO: 156584 - protein, 478 aa, Oryza sativa
  Clone ID: PAT_MRT4530_56237C.1.pep
MELGVPLPRRPVPGSYGVPFVSAVRDRLDFYYLQGQDKYFESRAERYGSTVVRINVPPGPFMARDPRVVALLDAKSFPVLFDVAKVEKRDVFTGTFMPSTSLTGGYRVCAYLDPSEPNHAKIKQLLLSLLVSRKDAFVPVFRSNFGALLDTVESQLASGGGKSDFTALNDATSFEFIGEAYFGVRPSASSSLGTGGPTKAALWLLWQLAPLTTLGLPMIIEDPLLHTLPLPPFLISSDYKALYAYFAAAASQALDAAEGLGLSREEACHNLLFATVFNSYGGFKLLLPQILSRVAQAGEKLHERLAAEIRSAVADAGGNVTLAALEKMELTRSVVWEALRLDPPVRFQYGRAKADLEIESHDASFAIKKGEMLFGYQPCATRDPRVFGATAREFVGDRFVGEEGRKLLQYVYWSNGRETENPSVDNKQCPGKNLVVLVGRLLLVELFLRYDTFTAEAGKKVVITGVTKASTSAVNRTA

SEQ ID NO: 156585 - protein, 62 aa, Oryza sativa
  Clone ID: PAT_MRT4530_56238C.1.pep
AYGRCSRSVTPKVGSNQLLSPFTAKEPNSLFQCNNRGRLKGVLLTPVEWRVIARLVALLRMV

SEQ ID NO: 156586 - protein, 156 aa, Oryza sativa
  unsure (1)..(156): unsure at all Xaa locations
  Clone ID: PAT_MRT4530_56239C.1.pep
MTTILVIALLAIVAGNASGRVDPLSQSYRQCHLQSHLLLQQQVLKPCIELCRQQYRIQATLLWTPASFQLINNQVMQQLMRQQLRLQVQLSHYQAIYLAQAIVQQIQLQLLIGVYFDQTXAQTQTLVTFNLTSICGIFPNYYSDYKSIATSGGAWY

SEQ ID NO: 156587 - protein, 90 aa, Oryza sativa
  unsure (1)..(90): unsure at all Xaa locations
  Clone ID: PAT_MRT4530_5623C.1.pep
STPWTRAVHDDVDVISFSISQEVKTTYDRDVVAIAAYSAMEKXPFVVCAGNQGPGASTVENDVPWMFTVGAGTVDRSLEAKLQSTTGGNP

SEQ ID NO: 156588 - protein, 46 aa, Oryza sativa
  Clone ID: PAT_MRT4530_56240C.1.pep
LLAFCLPPHPMAGLLVGVAARYRPCRFGGGEQRREISREDRRERRG

SEQ ID NO: 156589 - protein, 172 aa, Oryza sativa
  Clone ID: PAT_MRT4530_56241C.1.pep
MAVASPLIHRTSPPSHPFTLTASRDCPNHHTDTHCAVSLTTIDLLYGGRGSGASASLANDVTDAMDGVKDETLAKRRYLGSALRRVTVFKGVIVAAPVQHWARLLPRTPYNIDRARATVCPSQAVNPPLIIRPLPHGTNNPPQANFQSYYQQDRCCALLLAPFSVLRNHQFG

SEQ ID NO: 156590 - protein, 175 aa, Oryza sativa
  Clone ID: PAT_MRT4530_56242C.1.pep
MEGGATQCRCRRVPARAHATPLGLEHGGVPAAHSASAIACPGELPMSHGARSRGGGGTGAAAGAPAWLGRPSQRQTRTGEGTGWQRERWGGGDHDDGRSSGAGDGSRRIEVMTDGRLLSRVSLPSFSEGEQCPVSWFRGVIRSTAIVRGKLFLYNVTVGLYVMDWWERYLFSILN

SEQ ID NO: 156591 - protein, 121 aa, Oryza sativa
  Clone ID: PAT_MRT4530_56243C.1.pep
MNIFISNYQYNLDLMGVVREHSGDNRDCAEQVAFNPSHKKPDDQQQQSYNITQFSNSRALELRRKHAIERYASPIAEQKEDRTTYLLLTLLSTPDGQKRDVSDDYSSLSRRPIDVGNFYKD

SEQ ID NO: 156592 - protein, 83 aa, Oryza sativa
  Clone ID: PAT_MRT4530_56244C.1.pep
MAHRMDWRKTTLLRVEISSKRKSPRDRLCAGRVAGEEREKVSLERKEDWIKAKSEAEIEFGNRAGIGWSPDRLRLGSARSELG

SEQ ID NO: 156593 - protein, 417 aa, Oryza sativa
  Clone ID: PAT_MRT4530_56245C.1.pep
MSKAAAAASLPPPPPEVAHLVDQLQRHHLAPDASLLSSCAHSDLLQAREEVASERARYLEALAVYAEAIAMVEEYQHAISTGVANAGKKLNCSPQVYESLEHHLAVAEAAQRLRLPLLSQDGDVHEEEIEKLSTLSRSSFDSTMTSAAPSSSSISTSYNNYSSTASAATVAAAPGTGGSEPVEPGVGGVPDRFLGITSDYLYQVQQEQPAMTVDMVDYQRTLAREIEARLEAKCDALADLFAMDERDSSSISQISSARLPERVKLIIEEIEKEEALLLDDLASMDRKFAEHYNVLEQILAVLIQFVKDKKLEHQHQYDDLKKTWLIKRCRTMNAKLSYLEHHLLRDTYTKETVPALHRIRKYLVEATKEASNSYTEAVSRLREYQGVDPHFDKLEGMQWTIHQVEMDLKPHHDHADV

SEQ ID NO: 156594 - protein, 163 aa, Oryza sativa
  unsure (1)..(163): unsure at all Xaa locations
  Clone ID: PAT_MRT4530_56246C.1.pep
LLXXIEKEEALLLDDLASMDRKLPNTIMSWSKFLLYLYSSCKDKKLEHQHQYDDLKKTWLIKRCRTMNAKLSYLEHHLLRDTYTKETVPALHRIRKYLVEATKEASNSYTEAVSRLREYQGVDPHFDVIARQYHEIVKKLEGMQWTIHQVEMDLKPHHDHADV

SEQ ID NO: 156595 - protein, 82 aa, Oryza sativa
  Clone ID: PAT_MRT4530_56247C.1.pep
TCKWGGGKRKFPVPHGFGGGGPPTGSKEKFDRVFRSFCGLQKKSQIQTFFFFFGKNVKPIGFQNSGAKKKKKKRGPPPVFAP

SEQ ID NO: 156596 - protein, 363 aa, Oryza sativa
  Clone ID: PAT_MRT4530_56248C.1.pep
MMVAGVIRSNQDGGGGGGTVSGAARISPAVVFVLVILAVVLFVSGLLHLLVRFLLRRGRGRDGGGGGDAEAAEGVEESALQRQLQQLFHLHDAGLDQDVIDALPVFMYREVVVGVGGGGGAGGGAKEPFDCAVCLCEFAGDDRLRLLPVCGHAFHIDCIDTWLLSNSTCPLCRAALGADAAALFDAAFDEMADEEDRKQQEDAVFPVRLGKFKNLSRAVGPVHDRDDAAAAAAGVGVGGGIITREEGESSSSSLDARRCFSMGSYQYVLAEASLQVSVHRRHGDGNGRARLRGLAGANPAGNDAAAAADGKKIGAGSKGDSFSVSKIWQWPRQGKGKLPVLASDDSPAVDGRLPWPRRSPGAS

SEQ ID NO: 156597 - protein, 698 aa, Oryza sativa
  Clone ID: PAT_MRT4530_56249C.1.pep
LHLLRPMPSFVDGPTLRSLLRPSTNGRRTKASDGGGGGGGGGIFKMFKLMPMLTSGCKMMAALLGRHSGGRAAPLLADHAPTVTLFGHRRGRLSLAIHEDTRAPPAFLIELPMLASAMHREMATGTVKLALESDTRSARRRLLEEYVWAVFCNGRKAGYAIRRKDASDDDRHVLRLLRGVSMGAGVLPPPPADRRGGAGPDGELTYMRARVERVVGSKDSEAFYMINPDDGSDNGGAAGRDRECAPELSIFLVRKKGFSQGHKDSKRGRRDSKQGHSSNRGLKDFTRDHRDFSIGVFVLNNQGLWVELLGKIRYGKVEVKGEAGLIVQQKRESSNVEAMLNKEKKSEESKTEGDTKGTGVQISVKRWSHEAEAVGSNLGPVFEIDMELLKLEDCVRIKVGVMDPGALPLTFILTDTKGLMYAAHYHLEEIVEVGWFQGKEKLKQGEDDGHSEGLEVLGVGSSRKGKVVRQDIEKYCDDCCAFSGGKNKGGGLQGQLGQSMSKGEMVRNLSQIEKDRELAEALQMEEQLKVSTEVGQPSGMGGKIKNDGREMNEVMEQLEAEGERVQLIGSEEMESQELGGDNIKGKEDHKSEEEAEFEEGKKNKRLRDKEDKKILEMAMERKEAKNAFINKGQLDPEVTLDVEETDEENDLDFDLAEILMNHLKTPRSGKKKGRKGNLKICKGTPKINRDLGRRKTRK

SEQ ID NO: 156598 - protein, 56 aa, Oryza sativa
  Clone ID: PAT_MRT4530_5624C.1.pep
LHYKLQLSTTGVCLTHLFNWVIKLPNYAKPGTSTTRTLPTVDTMHASGPSIESIDV

SEQ ID NO: 156599 - protein, 56 aa, Oryza sativa
  Clone ID: PAT_MRT4530_56250C.1.pep
RAYLGLRTSRSTFLRWLGRSSHKASVVETNGLSDDLKWRDHGAHAPLKNQGSRWTY

SEQ ID NO: 156600 - protein, 39 aa, Oryza sativa
  Clone ID: PAT_MRT4530_56251C.1.pep
GLHWRTVQGHRTAGVSSSADLLSRASDLGAVITEQAASP

SEQ ID NO: 156601 - protein, 88 aa, Oryza sativa
  unsure (1)..(88): unsure at all Xaa locations
  Clone ID: PAT_MRT4530_56252C.1.pep
FFFFFFFFFFFFFXFXXXFFXFFFXEXIFXXTXMRKXSSXQKXYISXHXWFXNXXQXIXXKXXXITFXMLCXLKRGXDQIWGPQTDCG

SEQ ID NO: 156602 - protein, 292 aa, Oryza sativa
  Clone ID: PAT_MRT4530_56253C.1.pep
MATDRVEVDTARPFRSVREAVAVFGERILVGDGYSRRPSNGNAAAAAVVDIAIAKHEASGDSDDATVSSPDAMEAEPEVEEDAAPAVVPMMYSAPSSPQSSPPPPNDGGDADDERDGGVVDEGVTVAMMRSVKKLEAEVAETRQEVAQLKKRGSEMEMAVASLNAQLHRGLSKLAEMEAGDTAAAARRSVGGETDVSSTVATFRSERWAGVDAVGAAVSRATSCEYLPSFSHALSLGEVDDGELVGRRRKARKVKPIVPLIGDIIFSKRKSTKDKGGDGFYGNNGDLYSVLG

SEQ ID NO: 156603 - protein, 123 aa, Oryza sativa
  Clone ID: PAT_MRT4530_56254C.1.pep
ILIQPPATVLILNGCQVYIRAPFWVYEYLIETSWNSLSNRSGLITKFHPSHPQSQKQCIASPRMGLWACNFIWDQAQVGLMWGIRLICTGKINNPRRGVSIVKAQHNNVSYGCSQVVNISPKS

SEQ ID NO: 156604 - protein, 108 aa, Oryza sativa
  Clone ID: PAT_MRT4530_56255C.1.pep
MEHMWESHRHSTSTSTTGVGEELGEGRALLLPALQASARKKKALEPQARRWRTAEGADEPQQAKARGSGRKAMASSKRGKGQRSVGADAQRPGERSCRAAAAAAAAAA

SEQ ID NO: 156605 - protein, 83 aa, Oryza sativa
  unsure (1)..(83): unsure at all Xaa locations
  Clone ID: PAT_MRT4530_56256C.1.pep
VELDHTRDELITHLTNSIFGHVGQATATAYCSDKSQRLKNGPSYGVVIAXAEKSHSEEVDHGEDNGGCKCGTSCSCTYCKCGR

SEQ ID NO: 156606 - protein, 89 aa, Oryza sativa
  Clone ID: PAT_MRT4530_56257C.1.pep
QPPATVLILNGCQVYIRAPFWVYEYLIETSWNSLSNRSGLITKFHPSHPQSQKQCIASPRMGLWACNFIWDQAQVGLMWGAPQPGGARP

SEQ ID NO: 156607 - protein, 49 aa, Oryza sativa
  Clone ID: PAT_MRT4530_56258C.1.pep
TCSLFNALKLLLIYYPFKSVYSDHYLVDATITACMQIPFKDDILKYYHS

SEQ ID NO: 156608 - protein, 1251 aa, Oryza sativa
  Clone ID: PAT_MRT4530_56259C.1.pep
MEATALSVGKSVLNGALGYAKSAFAEEVALQLGIQKDHTFVADELEMMRSFMMEAHEEQDNSKVVKTWVKQVRDTAYDVEDSLQDFAVHLKRPSWWRFPRTLLERHRVAKQMKELRNKVEDVSQRNVRYHLIKGSAKATINSTEQSSVIATAIFGIDDARRAAKQDNQRVDLVQLINSEDQDLKVIAVWGTSGDMGQTTIIRMAYENPDVQIRFPCRAWVRVMHPFSPRDFVQSLVNQLHATQGVEALLEKEKTEQDLAKKFNGCVNDRKCLIVLNDLSTIEEWDQIKKCFQKCRKGSRIIVSSTQVEVASLCAGQESQASELKQLSADQTLYAFYDKGSQIIEDSVKPVSISDVAITSTNNHTVAHGEIIDDQSMDADEKKVARKSLTRIRTSVGASEESQLIGREKEISEITHLILNNDSQQVQVISVWGMGGLGKTTLVSGVYQSPRLSDKFDKYVFVTIMRPFILVELLRSLAEQLHKGSSKKEELLENRVSSKKSLASMEDTELTGQLKRLLEKKSCLIVLDDFSDTSEWDQIKPTLFPLLEKTSRIIVTTRKENIANHCSGKNGNVHNLKVLKHNDALCLLSEKVFEEATYLDDQNNPELVKEAKQILKKCDGLPLAIVVIGGFLANRPKTPEEWRKLNENINAELEMNPELGMIRTVLEKSYDGLPYHLKSCFLYLSIFPEDQIISRRRLVHRWAAEGYSTAAHGKSAIEIANGYFMELKNRSMILPFQQSGSSRKSIDSCKVHDLMRDIAISKSTEENLVFRVEEGCSAYIHGAIRHLAISSNWKGDKSEFEGIVDLSRIRSLSLFGDWKPFFVYGKMRFIRVLDFEGTRGLEYHHLDQIWKLNHLKFLSLRGCYRIDLLPDLLGNLRQLQMLDIRGTYVKALPKTIIKLQKLQYIHAGRKTDYVWEEKHSLMQRCRKVGCICATCCLPLLCEMYGPLHKALARRDAWTFACCVKFPSIMTGVHEEEGAMVPSGIRKLKDLHTLRNINVGRGNAILRDIGMLTGLHKLGVAGINKKNGRAFRLAISNLNKLESLSVSSAGMPGLCGCLDDISSPPENLQSLKLYGSLKTLPEWIKELQHLVKLKLVSTRLLEHDVAMEFLGELPKVEILVISPFKSEEIHFKPPQTGTAFVSLRVLKLAGLWGIKSVKFEEGTMPKLERLQVQGRIENEIGFSGLEFLQNINEVQLSVWFPTDHDRIRAARAAGADYETAWEEEVQEARRKGGELKRKIREQLARNPNQPIIT

SEQ ID NO: 156609 - protein, 70 aa, Oryza sativa
  unsure (1)..(70): unsure at all Xaa locations
  Clone ID: PAT_MRT4530_5625C.1.pep
REQKLELPTGGGRGSALEAMAAGRSCLSFXSFFLTGDVALICDLDLLDFGMIAACYLSSSFVKKKCQNYA

SEQ ID NO: 156610 - protein, 90 aa, Oryza sativa
  unsure (1)..(90): unsure at all Xaa locations
  Clone ID: PAT_MRT4530_56260C.1.pep
MPIGREEPDAAVLSHTVPAGQIGYALVPMIVWGVMLGADQPXSILFDIPPATESLNDLKTELPDAAFPLLKGIVATTDVVEACTVVNVAH

SEQ ID NO: 156611 - protein, 1143 aa, Oryza sativa
  unsure (1)..(1143): unsure at all Xaa locations
  Clone ID: PAT_MRT4530_56261C.1.pep
MRELAGNPGTWNGLSCRWASPVFSAASMCATAFPLGFAAYTDVTGDGIFAAIGLATAVARAAPTKSPPRPAARITLCRIATGCRRQSMCADVQTEVQEEGKARRGEVVVYDGGGSHLLTQQVNRVKDATNRTMEATTLSVGKSVLNGALGYAKSAFAEEVALQLGIQKDHTFVADELEMMRSFMMEAHEEQDNSKVVKTWVKQVRDTAYDVEDSLQDFAVHLKKPSWWRFPRTLLERRRVAKQMKELRNKVEDVSQRNARYHLIKGSGSKATITSAEQSSVIAAAIFGIDDARRAAKQDNQRVDLVQLINKEDHDLKVIAVWGTSGDMGQTTIIRTAYENPAVQIRFPCHAWVRVMHPFSHESQKGEARKVNPPRQSHNHERKECSLSGLQGSQNGEDSMKPVSISDVATTSTNDHTVAHGDIIDDQSMDADEKKVVRKSLTRIRTSVGASEESQLIGREKEMSEIIDLILKDNSQQVQVISVWGMGGLGKTTLVGGVYQSPKLSDKFDKYVFVTIMRPFNLVELLRSLAGRLHEGSSKKEELVENRVSSKKSLASMELDQLTKQLERLLEKKRSLIVLDDFSDTSEWDQIKPMLFPLLEKTSLIIVTTRKENIANHCSGKNGTVHNLLVLKPNDALCLLSEKSTIKLKLYQCQVFEKATYLDEQKNPELVKEAKQILKKCDGLPLAIVVIGGFLANRPKTPEEWRKLNENISAELEMNPELGMIRTVLEKSYDGLPYHLKSCFLYLSIFPEDQIISRRRLVHRVRHVGEDEVDVXNNFLGNLRQLQMLDIRXLQYIHVGLKRDCNGDKXDLMERRCKVGYLCATCCLPLLRDIDGPLHKALTRRDACTFACCVKFPSLMRGVYEENGTMVPKGIRNLKDLYTLRDVNIGRGNAILRDIGMLTGLHKLGVAGINKKNGRAFRLAISNLGKLESLSVSSAGMSGLCGCLDDISSPPENLQSLKLYGNLKTLPEWIKELQHLVKLKLVGARLLEHDVAMEFLGKLPKLEILVISPFQGEEFHFKPPQTGTAFGSLKVLKLADLWGTKSVKFEEGTMLKLERLQVEGLIKNEIGFSGLEFLLNINEVQLRFEFHFDEKRIRAARAAGADYETARAEEEQEARRKEGELKKKIREQLARNPNQPILF

SEQ ID NO: 156612 - protein, 47 aa, Oryza sativa
  Clone ID: PAT_MRT4530_56262C.1.pep
VPPNAVAATPFQLIYPLKIDPSQACPPLSMCLAASATPLLLSSRGGA

SEQ ID NO: 156613 - protein, 330 aa, Oryza sativa
  Clone ID: PAT_MRT4530_56263C.1.pep
MSLAYPLLRLPCRCSLAAAAVPAPPRASPGPTISVSMSVDGGEGELTGRERRKQRGERRELRARDWKEEVQERLIHEPARRRKKPPKRTWRENLNLDFLAEHGPQWWLVRVSMAPGTDYVDLLTKAISRRYPELSFKIYNPSIQVKKRLKNGSISTKSKPLHPGLVFLYCTLNKEVHDFIRDTEGCYGFIGATVGSIKRQIKKPKPIPVEEVESIIREEKEEQERVDREFEEMENGGIVESFNKPVEDSELMLMNKIKRQFKKPISKGGSNHNAFTPGASVHVLSGPFEGFTGSLLEVNRKNKKATLQLTLFGKESFVDLDFDQIEAVDT

SEQ ID NO: 156614 - protein, 226 aa, Oryza sativa
  Clone ID: PAT_MRT4530_56264C.1.pep
WTSRGSCSPPGTASRIRAGRRPPLHLQIPTRAGRHGGPTASPPSLKLLVPYAHPQPPCMGWVTIRLLALTPQLPAPPPSFGRVPVRLPRFVSPPTSTPPTSAPPPASHHASPLAGLPAGPRFQRLRLCRPCRLSVSTNWPDIPLVGTKPNVHDKGPLLHRREPKLEFFWREDERKMMEFWMAKNGMDWEGAASESNLVESLKFGLSLLSRSLLVPVVQVTPSASGA

SEQ ID NO: 156615 - protein, 77 aa, Oryza sativa
  Clone ID: PAT_MRT4530_56265C.1.pep
AVALAGVRFPLQPGRIHGGSCDDRRDHGRPLARPGRVLHRHLPNRPIASRTIASYKPVITIYREEKRRERRKWAADL

SEQ ID NO: 156616 - protein, 80 aa, Oryza sativa
  Clone ID: PAT_MRT4530_56266C.1.pep
AGLLEHHLLLLQPGCFSMAATIEIWCDCGAGLLATALPFLSFEVVFRTNCLLLLLLRLRLLRHGCALAVATTTATACCLC

SEQ ID NO: 156617 - protein, 351 aa, Oryza sativa
  Clone ID: PAT_MRT4530_56267C.1.pep
MAMKCLFLFFAFLVAFFPGAAVGAGLKVGFYNKTCPSAERLVQQAVAAAFKNNSGVAPGLIRLHFHDCFVRGCDASVLIDGNDTEKTAPPNNPSLRGFEVIDAAKAAVEAACPRVVSCADILAFAARDSVALTGNVTYKVPAGRRDGNVSIAQDALDNLPPPTFNATELVGRFANKSLTAEDMVVLSGAHTIGVSHCDSFTSRLYNFTGVGDADPAISAAYAFLLRAVCPSNSSQFFPNTTVDMDVITPAALDNKYYVGVANNLGLFTSDHALLTNATLRASVDEFVKSETRWKSKFVKAMVKMGGIEVKTGTTQGEVRLNCRVVNKRSANAELELELAAAMDDGDEVAAS

SEQ ID NO: 156618 - protein, 238 aa, Oryza sativa
  Clone ID: PAT_MRT4530_56268C.1.pep
MEQQQERPREVYRECMRNHAAKLGTYANDGCCEYTPDDGHPAGLLCAACGCHRNFHRKDFLDGRATAAAGGAGGAGVGVAPMLPAPGGGGPPGYMHMAAMGGAVGGGGGVDGGGGSGGRRRTRTKFTEEQKARMLRFAERLGWRMPKREPGRAPGDDEVARFCREIGVNRQVFKVWMHNHKAGGGGGGGGSGGPGAGGGAQTSSSTTRGGGDVGVGLSPAMGGDGEDDEEVRGSEMCM

SEQ ID NO: 156619 - protein, 265 aa, Oryza sativa
  unsure (1)..(265): unsure at all Xaa locations
  Clone ID: PAT_MRT4530_56269C.1.pep
MAGVQKPAKRLGGMAEALSIAADLGFPAPPPXQEDQGSSDKSDDLVRVLRELTVVQRNIANLQVELQGRKDDKNIAHLTHVSEMEKKCESLARITTILKDVIQNKDRIIARLQQPYSLDCIPVEAEYQKQFSELLLKAASDYGALTASVGDFQWSQNFRESPAVWGEMLRPIPAALASCTRFFEAMSAMRESFSTLQKLRVGHSSLSMTPGGSSDDSKFLTPPQWREGSMLDSWKQVDETIPESDGLDAINQRRLSWPSSIKREQ

SEQ ID NO: 156620 - protein, 49 aa, Oryza sativa
  Clone ID: PAT_MRT4530_5626C.1.pep
MAVALAKNRPLEMPPREGEGIMGKQAFVVKEWLECRLRRWDKAREIYGR

SEQ ID NO: 156621 - protein, 299 aa, Oryza sativa
  unsure (1)..(299): unsure at all Xaa locations
  Clone ID: PAT_MRT4530_56270C.1.pep
GISVKESTLKDMVKEGVIPAKEIIGWCPAFGYEFPTLNTGKIVVFTPFFYNGFGLPTSKFFRGLLDFYGIXIYHLNXNSILHLAIIIHLCEAFHGIRPHFNLLCRMLYLKAQLTKENPCAISNSGFXLYGALRKDYFSLPLKSSNKSWHSDWFYISNLAPSLPDFIGLAPIHQSHWNSSPEDQELTKVNILLXKILDLNKTGLLGEQVTRHFLKCXLPPIKEMSKPTFEYEDQTDPNREDPRSLDYKIMCSRLFKVFSSRIVIDYSHKLPVTPYNLHGPHLQQVDLSSADSFFAWIYKP

SEQ ID NO: 156622 - protein, 71 aa, Oryza sativa
  Clone ID: PAT_MRT4530_56271C.1.pep
MQIQTSKNHTMSPQETECSWDAGSGTGTLILSFNCSDSKKPRVILHHFMDCNPLINIKRPNGKENVLLTVS

SEQ ID NO: 156623 - protein, 250 aa, Oryza sativa
  Clone ID: PAT_MRT4530_56272C.1.pep
MAKNYPVVSAEYQEAVEKARQKLRALIAEKSCAPLMLRLAWHSAGTFDVSSKTGGPFGTMKTPAELSHAANAGLDIAVRMLEPIKEEIPTISYADFYQLAGVVAVEVSGGPAVPFHPGREDKPAPPPEGRLPDATKGSDHLRQVFGAQMGLSDQDIVALSGGHTLGRCHKERSGFEGPWTRNPLQFDNSYFTELLSGDKEGLLQLPSDKALLSDPAFRPLVEKYAADEKAFFEDYKEAHLKLSELGFADA

SEQ ID NO: 156624 - protein, 1060 aa, Oryza sativa
  unsure (1)..(1060): unsure at all Xaa locations
  Clone ID: PAT_MRT4530_56273C.1.pep
KTHKKRAEQKARRIARTQGFVTASSTALKYLCIVSGLWIACSWVAVARAQAQKPAGATTDPVEGMXKKXLDSCANVNAVAALNTILGRWGTKPPKTWNITGGDPCTGTAVDDTDIDNNPIVNPGIKCDCTFNNNTVCRIVKLRVYALNVVGQIPAELEKLTHLANLNLMQNYLTGPVPSFFGKFPMQYLSLAINPLSGPLPKELGNLTNLISLGISLNNFTGNLPEELGNLTKLEQMYIDSSGFSGPFPSTISKLKKLKILWISDNDFTGKIPDFIGSLTNLEDLRLQGNSFQGPIPASFSKLTKLTSLRIGDIVNGSSSLAFISNLTSLNVLIVSHSXCEVFTQVILLNIWHRDLSFNNITGEVPQSILNLNSLRYLFLGNNSLTGSLPDVKSSSLNNLDFSYNQLMGNFPSWATNNNLQLNLVANKFNIRSNNDRYLSGLNCLQQDTPCFLGSPEYYSFAVDSGSNRSVRGLDNTVYEADATSLGAASYYVTGQTRWGISNVGKFNEAPNGSYLMYSSQQFQNALDSELFQTARMSPSSLRYYGLGLENGNYTVLLQFAEFAYPDTKTWQSIGRRVFDIYVQGDLKEKNFDVRKTAGGKSFIAVNKRYNATVSKNFLEIHLFWAGKGTCCIPTQGYYGPMISALSITPNFTPTVRNGVPKKKSKAGVIAGIVIGASVIGSAALLGIFVLVKKRRKAARQQEELYNLVGRPNIFSSAELKLATDNFSSQNVIGEGGYGPVYKGKLPDGRIIAVKQLSQSSHQGKSEFVTEVATISAVQHKNLVKLYGCCIDSSTPLLVYEYLENGSLDQALFGHGSLNLDWPTRFEIILGIARGITYLHEESSIRIVHRDIKASNVLLDTDLSPQISDFGLAKLYDEKETHISTKIAGTFGYLAPEYAMRGHLTEKADVFAFGVVALETVAGRSNTDNSLDNDKIYLFEWAWGLYEREQGIKIVDPKLDEFDSEEAFRVIYAALLCTQGSPHQRPPMSRVLAILTGDIEMTEMVTKPSYITEWQLRGGNTSYISSNYSSGSTTGEFREQRETSPLTPSPTITGVTYDGR

SEQ ID NO: 156625 - protein, 167 aa, Oryza sativa
  Clone ID: PAT_MRT4530_56274C.1.pep
MASPSAPGPKLQKAMVAVDESEFSHHALEWALRNLAPTIAPPLLVLTVQPLLPLGYVSAASFGSPLGTPVVAPELIKAMQEQQQQLSQALLDKAKQICAQHGVAVETMIKVGDPKEMICQAAEESKVDLLIVGSHSRGPVQRLFLGSVSNYCMHHSKCPVLVVKKQE

SEQ ID NO: 156626 - protein, 65 aa, Oryza sativa
  unsure (1)..(65): unsure at all Xaa locations
  Clone ID: PAT_MRT4530_56275C.1.pep
KIMIHIIPTRPHSYRXTLPKFSRGIHNNKRFLHKEKNNTEQINKRLYKQKCNTPCWFSQNLQLAG

SEQ ID NO: 156627 - protein, 170 aa, Oryza sativa
  Clone ID: PAT_MRT4530_56276C.1.pep
MLTAVSAFSQEGRGVAATSGGGGPFTGWCSSRRRRPEAPAAMDRYNGGGGGGEEGDEQLDLNLSLQPSQANEPPGYFTCTYCDKKFYSSQALGGHQNAHKFERSVAKRTRELAAARRQQAADEEARRGAGTTTTREPTGNASSSYQRASPPAEARRRDLLTDDIDLSLKL

SEQ ID NO: 156628 - protein, 119 aa, Oryza sativa
  Clone ID: PAT_MRT4530_56277C.1.pep
IEHKIHVDHKHYAHPNCDLNYVLCLSISTKTLLHLYFMCPFAQNCWNILGISSNISLSLELMLVHARRRYHDLCSTRVRRHTGARARRAPLLRWSQPSTSRLLVGPCRLEIFLMTLGSQ

SEQ ID NO: 156629 - protein, 159 aa, Oryza sativa
  Clone ID: PAT_MRT4530_56278C.1.pep
MAAAVASSCCASTSARPLVRRAGSRNGKLWWAGGVRKARLLSISATAAAPSGVDYAAGTGAAADDDAVAALKVKLLSAVSGLNRGLAASQEDLDRADAAARELEAAAGGAPVDLERDVDKLQGRWMLVYSSAFSSRTLGGSSPGPPTGRLLPITLGQVF

SEQ ID NO: 156630 - protein, 103 aa, Oryza sativa
  unsure (1)..(103): unsure at all Xaa locations
  Clone ID: PAT_MRT4530_56279C.1.pep
NRKAACTPXRRHRRNVDPSNAAAXPTGRRRRNQPPCHQXTGGRPCPSYPSYLAXLLLSSSSSSSLSNATQIDEMYVLISRNLASFXSIDGSLIARGDGWIDLX

SEQ ID NO: 156631 - protein, 45 aa, Oryza sativa
  Clone ID: PAT_MRT4530_5627C.1.pep
MFSMFGFFVKEIVTGKRTLENLGNNLGGPVKKKAWAYATNFVPGK

SEQ ID NO: 156632 - protein, 930 aa, Oryza sativa
  Clone ID: PAT_MRT4530_56280C.1.pep
MAAAALRTPATRRPLLAPLSILRTPTPRHLSSSSPPSQPPSSPAGELLRLLSAAPTWTPDLARAVSSTFSASPTADVVISVLRSIRNPSLAAPFFLLASSSSASAPHPLPADAYHAVLPFLHHDLAALEKVLEEMAVLGYGLPNQACAHLAAALVRARRLDDAVLAVAVMRRLKFRPAFSAYTVLIGALAEARRPERALELLRQMQEVGYEVGVHLFTTLVRALAREGQVADALALVDEVKGSCLEPDIVLYNVCIDCFGKAGNVDMAWKFFHELKAQGLKPDDVSYTSMIWVLCKAGRLGEAEELFAQMEAERSVPCAYAYNTMIMGYGSAGRFEDAYKLLERLRERGCIPSVVSFNSILTCLGKKRKVDEALSLFEVMKKDAEPNSSTYNIIIDMLCLGGRVEEAYRILDEMEHASLFPNLLTVNIMVDRLCKARKLEEAYKIFESASQRGCNPDCVTYCSLIDGLGKKGQVDEAYRLFEKMLDAGHNANPVVYTSLIRNFFIHGRKEDGHKIFKELIRRGCKPDLTLLNTYMDCVFKAGEVEKGRMIFEDIRSYGFLPDVRSYSILIHGLTKAGQARETSNIFHAMKQQGFALDARAYNAVVDGFCKSGKVHKAYEILEEMKEKCVQPTVATYGAIVDGLAKIDRLDEAYMLFEEAKSKGIELNVVLYSSLIDGFGKVGRIDEAYLILEEMMKKGLTPNVYTWNSLLDALVKAEEINEALVCFQSMKEMKCPPNTYTYSILINGLCRVQKYNKAFVFWQDMQKQGLVPNVVTYTTMISGLAKVGNITDAYSLFERFKANGGIPDAASFNALIEGMSNANRAMEAYQATCGSFNGIKMVAWLRMVNQSSCSSSPLFGRFGSNLSFNRFLLRDFPSTRAFESGRPIFRGQPYHTCLGDRDHTEGALQHGGEFIPSRAWENVMEYKIPNL

SEQ ID NO: 156633 - protein, 40 aa, Oryza sativa
  Clone ID: PAT_MRT4530_56281C.1.pep
ERCDQRRLDNVKIFFDLRTTYTPVVRPPHSRQSDCRLASG

SEQ ID NO: 156634 - protein, 71 aa, Oryza sativa
  Clone ID: PAT_MRT4530_56282C.1.pep
RHPAQPAAPARILISNSPPQCKLRNGPEAFSRQIRPKSARDRRPRLAFGPNRSGAQLQIKASCAVGPNTSV

SEQ ID NO: 156635 - protein, 50 aa, Oryza sativa
  Clone ID: PAT_MRT4530_56283C.1.pep
MGNMYNDIKDYWTTNRSIRLVEFADPCLQAPRTPEVQNTSATIPNRDDKI

SEQ ID NO: 156636 - protein, 354 aa, Oryza sativa
  Clone ID: PAT_MRT4530_56284C.1.pep
EKHGEASGDRGGVRAHCLPRAALAVPYCRRHSHNEKVQVGPEDTIDARRSQHLDLGGSLVGPESVAFDGKGRGPYSGVSDGRVMRWNGEAAGWSTYTYSPSYTKNKCAASTLPTVQTESKCGRPLGLRFHFKTGNLYIADAYMGLMRVGPGGGEATVLATKADGVPLRFTNGVDIDQVTGDVYFTDSSMNYQRSQHEQVTATKDSTGRLMKYDPRTNQVTVLQSNITYPNGVAMSADRTHLIVALTGPCKLMRHWIRGPKAGKSEPFVDLPGYPDNVRPDGKGGYWVALHREKYELPFGPDSHLVAMRVSAGGKLVQQMRGPKSLRPTEVMERKDGKIYMGNVELPYVGVVKSS

SEQ ID NO: 156637 - protein, 329 aa, Oryza sativa
  Clone ID: PAT_MRT4530_56285C.1.pep
MRTTARPTAAATALALIVVLVFSPSPATAATARMFKTIDARRSQHLDLTGSLVGPESVAFDGKGHGPYSGVSDGRVMRWNGEAAGWSTYTYSPSYTNNKCAASTLPTVQTESKCGRPLGLRFHFKTGNLYIADAYMGLMRVGPGGGEATVLATKADGVPLRFTNGVDIDQVTGDVYFTDSSMNYQRSQHEQVTATKDSTGRLMKYDPRTNQVTVLQSNITYPNGVAIGVDRTHLIVALTGPCKLMRYWIQGSKAGKSEPFAELPGYPDNVRPDGKGGYWVALHREKYELPFGPDNHLVAMRVSAGGKLVQQMRGPKSLRPTEVMGEEGW

SEQ ID NO: 156638 - protein, 74 aa, Oryza sativa
  Clone ID: PAT_MRT4530_56286C.1.pep
AFEAPVAVSFGHQVCMNNIRKAPVEEDAALDEAVGLFFMDSSGLASTNVRVAFVIVSKRIFCHVSRKILNLLSV

SEQ ID NO: 156639 - protein, 76 aa, Oryza sativa
  Clone ID: PAT_MRT4530_56287C.1.pep
TAASCLVRPSSFCCSSSSIAVIHAAGTHLSQLALCRCIRLAGRQRRSQIRVGGGQRPSLVASLNVNSPTGLSRGAP

SEQ ID NO: 156640 - protein, 575 aa, Oryza sativa
  Clone ID: PAT_MRT4530_56288C.1.pep
MAAVALLSPAAAAAVVTEGEEKPPLEEVEVEVEVVVRAIVADGDGREANAAAPGANWCGEEEVPAHAAEGGTVAAMVDENAAAPAAEGDTVAAAKGEAPAAEGDMVVAAKGAAHAAAEGDTVAAAAVAGENEAAHAPAAGGNTVAAAADVKGEALQAIPVADEAAAVAEGVNAIAAAEREEDDEGVKWLKHYSSLQSILTVGDGDFSFSLALATAFGSGDNLVATSLDTIEDLRGKYSKAESNIMELKRMGATVLHGIDAKRMKDHTNLKLRRFDRIIFNFPHAGFKGKEDDLHMINLHRELVWGFFQNARHLLRPYGEIHVSHKIGLPYDRWCIEHLAYESSLTMIAKVDFRKEDYPGYNQKRGDSAKCDQPFELGACCTFMFMRDLTRLKRARRNRINASSLGIQAQHDMPFHPRPLVPAYPQPHFPSQVNAAHRQVPPEHYPLGIAHGQEPGFLDNFGGIERYPYQRGAIGTVIGMPGTPSPMRGITRSSFPAPQEQPWRQERYIMDPEVRDDHYHFAREYPRNLQEYEMERQVMPGGTRLRYVDFLENRYEESVRRQEHLRRLIAEYGGYD

SEQ ID NO: 156641 - protein, 163 aa, Oryza sativa
  unsure (1)..(163): unsure at all Xaa locations
  Clone ID: PAT_MRT4530_56289C.1.pep
HSLPSSLHISPLFIFLPSPSPGADGSTTWRRERFGGRRRGGDPLSDVLASVESVDSAASVLASIVLVHKSGHFVAATSDGIHVSQFSVGFTPALAHFRLAPVEYTLCAIPLGXYVGFPDDDPDFGFPPDDPSLLGNRPVLDHLLVVSVGVAANLLFAFLIIYA

SEQ ID NO: 156642 - protein, 54 aa, Oryza sativa
  Clone ID: PAT_MRT4530_5628C.1.pep
MAGHLLVRHVPYTTGTCNEDVDEEVNVDNSRMNVALAPSDDGSTIDPVDMMTSP

SEQ ID NO: 156643 - protein, 328 aa, Oryza sativa
  Clone ID: PAT_MRT4530_56290C.1.pep
MHKRSKSCEPSSEMDERRRRGGVGGNGATTCDDSACGARAAASSASSSSSSATTSHCSSVSVYRAKINGAPRHVTAVWHRTLINQSFTISIDGGGGGGAGAGDDGALSHKVELKPWPFWSKRGAKTLDVDGDRLDIVWDLRSAKFPASSPEPAAGYYVALVSRDEVVLLLGDGKKDAFKRTRSRPSLDDAVLVSRRESVSGRRTFAARAPLAAGRKDHEIVVDSAIAGPREPEMRITVDGVVLVHVRSLQWKFRGNETVIVDQSPVQVLWDVHDWIFAGGPAAQAVFVFKPGAPPPGGDRCGRRGGAGAGGIGDEGGYSFFLQAWKTE

SEQ ID NO: 156644 - protein, 73 aa, Oryza sativa
  Clone ID: PAT_MRT4530_56291C.1.pep
VPNRRTYSVVALIPIGCTTQIPCRSTLVVPWYPCSLSACTKYPAYTVDCRKLGKWVCEALKTRHVVSVCLKIK

SEQ ID NO: 156645 - protein, 90 aa, Oryza sativa
  unsure (1)..(90): unsure at all Xaa locations
  Clone ID: PAT_MRT4530_56292C.1.pep
LWELLACLLSSCLCALLLAPVFSRGVDAWQSRQGAARQCRFDRLQAFEPLRKVRAEAGDTDXLDERNEQRLCAGEFGIRQVIEPRGLGGP

SEQ ID NO: 156646 - protein, 109 aa, Oryza sativa
  Clone ID: PAT_MRT4530_56293C.1.pep
TPPEPAFQSARTLAVSCSAALTASNASASPSPSPAAAAGEERTSGGAAGATPAAAEEADTTRLRTSTASKEAAALRSSMASRARSSASRSFVGDSVSSRPERAIGYPGR

SEQ ID NO: 156647 - protein, 51 aa, Oryza sativa
  Clone ID: PAT_MRT4530_56294C.1.pep
FLKQLSKPTTLPLKTPPQDQVFMKPHILLKPNSQAAVLICAEVAITMSLWE

SEQ ID NO: 156648 - protein, 285 aa, Oryza sativa
  Clone ID: PAT_MRT4530_56295C.1.pep
MTPQRSPAAAAAGGGGTPALHYLSGPYGDTTYTKVFVGGLAWETRSEGLRAHFEGSGEILEAVVITDRATGRSKGYGFVTFRDPDSARMACMDPYPVIDGRRANCNLAILGRPGPDIPFAPLRPVIPYNGGVAVPGGIPSTYGPEYMYPQNAYGSYVGQQYVPVYGGPRTVGPAVYPYGQFGQPVPGDQPYSPGYVPGHILPLSNQNAANVVRMSTVQQQYPPGKKSIFDEWIENTFARTPYIINISNICHFCGNRSSTPSATALDPCSCTIHTKQHFGTNVGLT

SEQ ID NO: 156649 - protein, 73 aa, Oryza sativa
  Clone ID: PAT_MRT4530_56296C.1.pep
LHPFNQIENIISPISNSWLTNMVYSSCLSLPFRFPSTVRTRLLIYRESCPLFFYKRNPREKKKKKQSGRSPRA

SEQ ID NO: 156650 - protein, 216 aa, Oryza sativa
  unsure (1)..(216): unsure at all Xaa locations
  Clone ID: PAT_MRT4530_56297C.1.pep
LEAVVITDRATGRSKGYGFVTFRDPDSARMACMDPYPVIDGRRANCNLAILGRPXPDIPFAPLRPVIPYNGGVAVPGGMYVQSPTYQQPPYNYPQAFVYPSYGPSTYGPEYMYPQNAYGSYVGQQYVPVYGGPRTVGPAVYPYGRPGQPVPGDQPYSPGYVPGHILPLSNQNAANVVRMSTVQQQYPPGAPRPQQQLLIPARAQFTPNNISEQTSG

SEQ ID NO: 156651 - protein, 113 aa, Oryza sativa
  Clone ID: PAT_MRT4530_56298C.1.pep
DEFYKEMKEFYSGDRILPKKPVYYKTDELPELWFSAEQVWEIRGADLTLSPVHHAAIGLVHPSRGISVRMPRYIRSRPDRSPEDCSTATDVASLFKAQTRKMEVSSDGQDTSH

SEQ ID NO: 156652 - protein, 262 aa, Oryza sativa
  Clone ID: PAT_MRT4530_56299C.1.pep
MDEEMLTRHRREDDSAGAGNLAQHSAAGAKPIAADARQNDETNLFKTSPTEKNFISGVGEKSKTEYYPLYSASHTGRGGNGQPPFRAAVNPEADQPDTPADPTPSRPPSPGDGNRRREAAADGAKTAAAAEAAARAALAAALRGGLRGKGRERKRGRPILTEGLGRREGGATANGNDERREDDGDGLRVALREGKREIRGREGVYGERKPWPKAAAMVEAHRSREKRARTTDLAERTADATAQGMADAAAPMAGCGGDPSGC

SEQ ID NO: 156653 - protein, 184 aa, Oryza sativa
  Clone ID: PAT_MRT4530_5629C.1.pep
MGLSRRFLNLIVDNRIPGAKSLRCIDLTLARYKLFNTTTPAALILNGKISESERPQDSTPWAGADNNEKEAAATLKIGRKVLCTDQSGRACLFDADTCKVDTLPSLHKPKCLPYSIFIPSADDKDDHDDNSNGGGSVYIMDTCLNHIPRDNIQLSSQFEAFVYRRSTLTSFTKSWECQRPPPPP

SEQ ID NO: 156654 - protein, 44 aa, Oryza sativa
  Clone ID: PAT_MRT4530_562C.1.pep
MASWRCANGLSEQCCPTFDPEKSWRMPQDNWIRLGDEDGWGMRP

SEQ ID NO: 156655 - protein, 53 aa, Oryza sativa
  Clone ID: PAT_MRT4530_56300C.1.pep
VYFDQAQAQAQAYVGPKLCLNIGIYPSTTLSPCSIPTVGGICPPPIYSTRREK

SEQ ID NO: 156656 - protein, 236 aa, Oryza sativa
  Clone ID: PAT_MRT4530_56301C.1.pep
GLQASVCNYGESFISSISMGNIQAVQFHPEKSGATGLSILKNFLSPNSSGSKVPSRRKASNLAKRVIACLDVRSNDSGDLVVTKGDQYDVRDHSSSKEVRNLGKPVDLASQYYIDGADEVSFLNITGFRDFPLGDLPMLEVLRCASEKVFVPLTVGGGIRDFTDANGRYYSSLEVASEYFRSGADKISIGSDAVFAAEAYLQTGVKTGKSSLEQISRVYGNQAVVVSIDPRRVYVK

SEQ ID NO: 156657 - protein, 682 aa, Oryza sativa
  unsure (1)..(682): unsure at all Xaa locations
  Clone ID: PAT_MRT4530_56302C.1.pep
MELGRPGCPVDRLPDSPRHERGAARCLLGTGANPKGFNTQNSLEIWAKFLGVTSIFLKLKSGRGRYRRGPGCDDSGKSNPVRGGAPGQAAALRPKWFSAASRIEGEAGSSGARRSGINRCDAAAVTLLDYGAGNVRSVRNAIRHLGFGIRDVRSPEDILAADRLVFPGVGAFGSAMDVLTRSGMADALREYIRRDRPFLGICLGLQLLFDSSEENGPISGLGVIPGXVRRFDSSKGLIVPHIGWNALXITKDTQLLKGAEGHHVXYFVHSYHALPVRNSSFLDALSLVDLWNSDENKEWISSVCNYGESFISSISMGNIQAVQFHPEKSGDRIETCRFLSSDNLTGLDHQATGLSILKNFLSPNTSGSKVPSRRKASNLAKRVIACLDVRSNDSGDLVVTKGDQYDVRNLGKPVDLASQYYIDGADEVSFLNITGFRDFPLGDLPMLEVLRCASEKVFVPLTVGGGIRDFTDANGRYYSSLEVASEYFRSGADKISIGSDAVFAAEAYLQTGVKTGKSSLEQISRVYGNQAVVVSIDPRRVYVKNPEEVQFKTVKVSNKGPLGEEYAWYQCTVSGGRDSRPIGAYELAKAVEELGAGEILLNCIDCDGQGCGFDIDLVKMVSDAVTIPVIASSGAGTVEHFSEVFEKTNASAALAAGIFHRKEVPISAVKEHLVDAGVEVRV

SEQ ID NO: 156658 - protein, 199 aa, Oryza sativa
  unsure (1)..(199): unsure at all Xaa locations
  Clone ID: PAT_MRT4530_56303C.1.pep
MPKKATTMSSNHEVDGEARSKQRGGAAPASGPHRSAAQRRRSTVDRDHRGGPPPVHGIRRPGSAQSRSDGHEAARLGHGHGMKPARPRHGAAAARGRRQGGGGNRLQQPATWNGGGWPEDSGAHGDGDAPQEAAVGKKGDXEKRKGGEILTGSGGRRGGRGRRRRLPNGXGLRGRRADGVALDLQKXEEGVREGRTDAG

SEQ ID NO: 156659 - protein, 78 aa, Oryza sativa
  Clone ID: PAT_MRT4530_56304C.1.pep
MCGGAILAEFIPAPAGAAAVTKRVTASHLWPDCVKNAVRGKSKSRRLDKSFANCDDFEAAFEQIDDNYDFYDAKEEHL

SEQ ID NO: 156660 - protein, 426 aa, Oryza sativa
  Clone ID: PAT_MRT4530_56305C.1.pep
MVREEAWPLAAPQQQQQQPSAPPPQPQAQQQNGRIDLREVKLQLEKRLGPDRSTRYFSYLKGYLSNRLSKADFDKVCLQTLGRENLRVHNQLIRSVLYNAYHAKCPPPTPAPDVGRSVGATVKKVCQPGEALNSCNGDIRLLQMQGSRHMSTMQDHQSKDRMKSTGLSCRVDASANHSQITHGGAAVPENGTLSSSDLKRSVHFQHESAEPLAKHQRVEQSPTGNIIKLRRSMSNVSDHSAEASNSPVRAPLGIPFCSASVGGARKLPPPLISAGEDHCTSCCEHRELLNTEALHRRMEKTAESLGLAGVTLDCADLLNNGLDKYLKNLIRSSVELIGANVQSDARKGELYKQHAYGKHMNGVWLPNHVQMQSGSGPSGATNDIRNHHLISLDDFKVAMQLNPQQLGEDWPVLLEKICLCSPEEND

SEQ ID NO: 156661 - protein, 56 aa, Oryza sativa
  Clone ID: PAT_MRT4530_56306C.1.pep
YQNTKGYNLSEFITRGLSTHITHLTSKNFINTSHLTIYISSYFLYIQLLRIIKQTY

SEQ ID NO: 156662 - protein, 57 aa, Oryza sativa
  Clone ID: PAT_MRT4530_56307C.1.pep
SSPFLRNLNFTFVNSHAHIDVFIATRCVSVEHNRPILPYYIKGANSFMFFVMSSPAF

SEQ ID NO: 156663 - protein, 72 aa, Oryza sativa
  Clone ID: PAT_MRT4530_56308C.1.pep
VGSYLPESLQTRHPDLNYDHNNSIHAGRRGEKTYRSLVGAAIYAKVERRNDVLTGSNRLHALTWHCHGGTYV

SEQ ID NO: 156664 - protein, 309 aa, Oryza sativa
  Clone ID: PAT_MRT4530_56309C.1.pep
MGRQPCCDKVGLKKGPWTAEEDQKLITFLLTNGQCCWRAVPKLAGLLRCGKSCRLRWTNYLRPDLKRGLLSDAEEKIVVDLHAQLGNRWSKIASHLPGRTDNEIKNHWNTHIKKKLKKMGIDPLTHRPLQPPPSPSPEKKHAERKNTAAAAAVAEQHQHDELWEEESPGFCTDEVPMIHPDEIMVPLRDHPPPVCTAAGASTPTTSSSSSSSSVASSTTSCDEVDAAALLPVLEWPDDAMCLMELDELIAAAAPPSLLWDDDYRLPLPPPPLSPPAMYEELDAFQCYDQQRSAFEQEAAASAWNKLELF

SEQ ID NO: 156665 - protein, 422 aa, Oryza sativa
  Clone ID: PAT_MRT4530_5630C.1.pep
MGLSRRFLNLIVDNRMGLSRRFLNLIVDNRIPGAKSLRCIDLTLARYKLFNTTTPAALTLNGNGNGLKKRMEKICLPSPIFNLGAPGERIHMFPALDWYINCIPLAGRKVLCTDQSGRACLFDADTCKVDTLPSLHKPKCLPYSIFIPSADDKDDHDDNSNGGGSVYIMDTCLNHIPRDNIQLSSQFEAFVYRRSTLTSFTKSWQCQRLPPPPFVCDPKYKHASPHKITSYAVVDGGSHICISVDGAGTYCLDTVKHTWIQIGEWTLPFIGKVEYVPELKLWFGICANDWKQFGAADLSTILSTMDSQPQLVGSWKELEAPQEWTEMQHPHLVNLGSGRFCVARFYHSWTPTAGLFGSDLGELFFTVLTGTDVVQCVVHDGNGTGNASCNDMELRMIKHNSKCHMSYDQAQLKMPHVLWHRW

SEQ ID NO: 156666 - protein, 147 aa, Oryza sativa
  Clone ID: PAT_MRT4530_56310C.1.pep
MVLKKLVEARPSATTCGERLDRPVDDDGKVDGQGRRIRMPALCAARIFQLTRELSHKSDGDTVQWLLQQAEPAIVAATGTGTIPVSASRSASSTTRSAAPVPPVNCRTRTTITNTISSSRRTGRMSATTASPMRSPGSSRRTANCSS

SEQ ID NO: 156667 - protein, 231 aa, Oryza sativa
  Clone ID: PAT_MRT4530_56311C.1.pep
ARWLWPMAEVAAPEDSGWLVGGAAATRRRGRLCAARGEARVAELTATMAGRRKARQRLGGMVSDGGGTNGQTFMSRLVKKNTIETKEELKEGMAERKEELKETKAELADTKRVAYVAILKEQGNKKESFSYRELKSFQGNKMRRGGLWKPREPKLKKQRIRNMRKTESSCPGCQQVKELAQAKLAELRWKKEEENKAIEMSQTQAVGNDDGGQKEVYDEEEVNNTNDDSPN

SEQ ID NO: 156668 - protein, 162 aa, Oryza sativa
  unsure (1)..(162): unsure at all Xaa locations
  Clone ID: PAT_MRT4530_56312C.1.pep
RARPGEAPEVREVWGPSEDAAGARREGEDPLSVAVDAGGSGGGGGEEDLTRELSHKSDGDTVQWLLQQAEPAIVAATGTGTIPXVGADIRRTMPGLELGLSXDGHIGVLAAQSLSQFYHQVGGAGATGQLPHPHHHHQHHQQQQEDREDERDDGESDEESGQ

SEQ ID NO: 156669 - protein, 290 aa, Oryza sativa
  Clone ID: PAT_MRT4530_56313C.1.pep
MASKEEVAVETVEGGAAAAKAPYWDPPPAPLLDTSELGKWSLYRALIAEFMATLIFLYVSIATVIGYKNQRATVDACTGVGYLGVAWSFGATIFVLVYCTGGVSGGHINPAVTLGLFFGRKLSLVRTVLYVVAQCLGAIAGAGIVKGIMKRPYDALGGGANTVSDGYSAAGALGAEIVGTFILVYTVFSATDPKRTARDSFIPVLVPLPIGFAVFVVHLATIPITGTGINPARSLGAAVLYNQHAAWKDHWIFWVGPVIGAFLAAAYHKLVLRGEAAKALSSFRSTSVTA

SEQ ID NO: 156670 - protein, 319 aa, Oryza sativa
  Clone ID: PAT_MRT4530_56314C.1.pep
MVNHYGCGTPNFQKGRRNVKLEDLPEDVLCSILSKLPPKESRTKNLAFDLVPDILTGSHDRYMFPFHLLDEKSVSGLQSIQLSYISFKPPLGFKGFPSLRKLDLNLVHVNRESLEVMLHSCHNLQWLSLVRCYLDGKLHLVLSHLRYIKIFQCKTTMAAFQDAVATLLKGIPIVRNLTLHVCFQQIEARWLLDNRHSFSNLRHLQLLMNLKTEDANKIHYAVSLIRAAPFIEKLEVHFGCPHHVWFSDKGYVAPHLEQHEYSYLKNMHITGYKGERGQLEFLKDVVENVPALESVTIETTQIYICESSKLSPMRMSHVT

SEQ ID NO: 156671 - protein, 125 aa, Oryza sativa
  Clone ID: PAT_MRT4530_56315C.1.pep
MKRPAEAARREAGGARRRSSWPAAEGCGSARTSSWREPAARTWQMREPAACGSGAEGAVGGIATDHVRCAYENLFSQASLKWSACENRRTANFMPIYIFFRRSFGSQNHVYICDISTSTSITPHL

SEQ ID NO: 156672 - protein, 166 aa, Oryza sativa
  Clone ID: PAT_MRT4530_56316C.1.pep
WPPVPTSPPSPPPPRAPPCTPTTGPPSEASSPPRPLHADRRPTIRSFLSAAPPPSRSRSRLELPPIRALRRSPPTGSPPPLSACSASAARYRLVPLRHLPPGELCRRPPALPPPLPPAARGAPPRPPAARGAPPPPPVAPSTFVSAGRGRMRWRLTCGGSATCAAT

SEQ ID NO: 156673 - protein, 87 aa, Oryza sativa
  Clone ID: PAT_MRT4530_56317C.1.pep
HDRERLHNLVQHSVCMGHRDSTLRAAHEHAPCWLGYQGSHILQGNKTDPSEFCNSGQFDGSLRTTLLIKFPQVLELYRTFFCSLRRA

SEQ ID NO: 156674 - protein, 55 aa, Oryza sativa
  Clone ID: PAT_MRT4530_56318C.1.pep
LEPTLSVLFRFIVLSNISTYLRLVYFKTDGVNVNTDIEDLDSDLSLNNCVGVKIP

SEQ ID NO: 156675 - protein, 116 aa, Oryza sativa
  Clone ID: PAT_MRT4530_56319C.1.pep
ILFFKGIADQQGTLSSIPFPSLSLSLSLSLSLRARPVAAVGLCLACRSPCSVITSVLVRLPSPSSSSRSRDRISHDRSAVTFRHAVGGSFPRFPTVGCALARLLRLGTFSVCARPP

SEQ ID NO: 156676 - protein, 209 aa, Oryza sativa
  unsure (1)..(209): unsure at all Xaa locations
  Clone ID: PAT_MRT4530_5631C.1.pep
PCRAAPSVPGIRFSPSDPLPSPPNASSSSAVLASPMIASRAPTNSPTPPKPTSPPXKAEPPLKSLPLHSPPLPXPSLPPGCSPPSPXPSADKREKPRHSVVPTAPSSRPPSSSPAAPSWRRAAPVAATVPPRADNAIRPASASNPPRTSLPPARSFLPGELRSPSPAPXPPWPSPLPLAPSPPAFFAAAVRSCVPPSASLLSLIPGAAT

SEQ ID NO: 156677 - protein, 50 aa, Oryza sativa
  Clone ID: PAT_MRT4530_56320C.1.pep
SRGAPFAFLRGMVEFRRESTVKNPYSQSVAAVGKAAGDWEKSLTPAHKAP

SEQ ID NO: 156678 - protein, 117 aa, Oryza sativa
  Clone ID: PAT_MRT4530_56321C.1.pep
MDLHPAGDSHGSPPRLLGGHTAPHTQSRALRMHTPRWLFARATAGCGSQGDDQKKTPEIEVVGPTLITYGVRLRSGRRDEGKGGWNNSSSGWEGIVVWVERVGGGTTELHAASGGFG

SEQ ID NO: 156679 - protein, 49 aa, Oryza sativa
  Clone ID: PAT_MRT4530_56322C.1.pep
SAVNLPRFTLLVWGLLSGVNRGQPSSCTPNQVGIKLIYIKCPKIKKINQ

SEQ ID NO: 156680 - protein, 152 aa, Oryza sativa
  Clone ID: PAT_MRT4530_56323C.1.pep
MGKLWTILTHVHSLAGPTVMLLYPLYASVQAMESPSKLDDEQWLAYWMLAHAFALVEMLLESLIYWIPIWYELKLLFIAWLALPNFRGAAFIYNRFVREQLRKHGLAGAGAGAASSVGKKDKSSPSSSPKDKEKTKSKFLSFVTPKKDHEAY

SEQ ID NO: 156681 - protein, 548 aa, Oryza sativa
  Clone ID: PAT_MRT4530_56324C.1.pep
RAPGTRPSAAREPAQGGRRPLAGLEVASANALLCPISGCGAHLDCLENFEDHYRTRHTASCSVCWRVYPTSRLLSIHISEAHDSFFQAKVARGFPMYECLVGTLPRLSTSYKSRQQHLLDKHQFPKSFLFFKKARPSLETPWYSVEKHLGSKENEHSSCKEAKNNEMEVDKQVDELASAVSRLSTADSTPSSISFGHRRSRGLAFVPSAGVSCSLCGCMLFLPMLYFPRHLLTRQMVEATLEELVIYYPFSAMCLPLWLVLPSASLRGLVPRVDFDMSSVASSGWIRIRTIQVFPASLRLDERAIGKYRPIFTPRPHDGTRPSGEGGQVDGLCGLGPLDPTASAACRRGPPQLQPATDATCADLHARGGRPDALSLTHDDGLQGCSTLGGGKVQKIMGKLWTILTHVHSLAGPTVMLLYPLYASVQAMESPSKLDDEQWLAYWILYSFITLVEMLLESLIYWIPIWYELKLLFIAWLALPNFRGAAFIYNRFVREQLRKHGLAGAGAGAAASVGKKDKSSPSSSPKDKEKTKSKFLSFVTPKKDHEAY

SEQ ID NO: 156682 - protein, 45 aa, Oryza sativa
  Clone ID: PAT_MRT4530_56325C.1.pep
VIESCLDTINHTCGCTSLYDQKRMELVCYVLLISSVAYLYYYVVN

SEQ ID NO: 156683 - protein, 510 aa, Oryza sativa
  Clone ID: PAT_MRT4530_56326C.1.pep
MDRSDAFIYVIIMSVVVVLLPPPCSADDRLVPGKPLTSDATVVSDGGAFAMGFFSPSNSTPAKLYLGIWYNDIPRRTVVWVADRETPVTNGTTLSLTESSNLVVSDADGRVRWTTNITGGAAGNGNTTAVLMNTGNLVVRTRASDRLVSWRGPGDPSPGSFSYGGDTDTFLQVIMWNGTRPLMRDGPWTGYMVDSQYQTNTSAIVYVAIIDTDEEIYITFSVADDAPHTRFVLTYAGKYQLQRWSSGSSAWVVLQEWPAGCDPYDFCGPNGYCDSTAAEAPLPACRCLDGFEPASAAEWSSGRFSRGCRRKEAVRCGDGFLAVQGMQCPDKFVHVPNRTLEACAAECSSNCSCVAYAYANLSNSRSRGDTTRCLVWSGELIDMAKVGAQGLGSDTLYLRLAGLQLHAGGRTKSNAVKIVLPVLASSILVILCISFAWLKMKACKKRNREKHRKQILFGMSAAEEVGEGNPVQDLEFPFVTFEDIALATNNFSEAYKIGQGGFGKVYKVIQ

SEQ ID NO: 156684 - protein, 838 aa, Oryza sativa
  Clone ID: PAT_MRT4530_56327C.1.pep
MDRSDAFIYVIIMSVVVVLLPPPCSADDRLVPGKPLTSDATVVSDGGAFAMGFFSPSNSTPAKLYLGIWYNDIPRRTVVWVADRETPVTNGTTLSLTESSNLVVSDADGRVRWTTNITGGAAGNGNTTAVLMNTGNLVVRSPNGTIFWQSFEQPTDSFLPGMKLRMMYRTRASDRLVSWRGPGDPSPGSFSYGGDTDTFLQVIMWNGTRPLMRDGPWTGYMVDSQYQTNTSAIVYVAIIDTDEEIYITFSVADDAPHTRFVLTYAGKYQLQRWSSGSSAWVVLQEWPAGCDPYDFCGPNGYCDSTAAEAPLPACRCLDGFEPASAAEWSSGRFSRGCRRKEAVRCGDGFLAVQGMQCPDKFVHVPNRTLEACAAECSSNCSCVAYAYANLSNSRSRGDTTRCLVWSGELIDMAKVGAQGLGSDTLYLRLAGLQLHAGGRTKSNAVKIVLPVLASSILVILCISFAWLKMKACKKRNREKHRKQILFGMSAAEEVGEGNPVQDLEFPFVTFEDIALATNNFSEAYKIGQGGFGKVYKGMLGGQEVAIKRLSRNSQQGTKEFRNEVILIAKLQHRNLVRILGFCVEGDEKLLIYEYLPNKSLDATLFNGSRKLLLDWTTRFNIIKGVARGLLYLHQDSRLTIIHRDLKAGNILLDAEMKPKIADFGMARIFGDNQQNANTQRVVGTYGYMAPEYAMEGIFSTKSDVYSFGVLLLEVITGMRRNSVSNIMGFPNLIVYAWNMWKEGKTEDLADSSIMDSCLQDEVLLCIHLALLCVQENPDDRPLMPFVVFILENGSSTALPTPSRPTYFAQRSDKMEMDQLRHNIENSMYTLTLTDVEGR

SEQ ID NO: 156685 - protein, 146 aa, Oryza sativa
  Clone ID: PAT_MRT4530_56328C.1.pep
RLAAAGDGGGIRMVIRCFLTITQSSFSSIKTSEGGLLPSMPDMSAAQFIKCPSYGKLKISLLFRSATYKLGIDANEEAAGGSIGPPGWLQTQRPAVRARRPSRGEGLGRGWEGRGASGASSPAAACARRRGGGEDRRSLFFSGRVG

SEQ ID NO: 156686 - protein, 74 aa, Oryza sativa
  Clone ID: PAT_MRT4530_56329C.1.pep
MGSRPAGDSTSRSPSPSRGYLTPTGRGRDAWTLRRLGGFEYSAVAMCRAVHRAPTLVEDYRGDRAYAAALYNSR

SEQ ID NO: 156687 - protein, 292 aa, Oryza sativa
  Clone ID: PAT_MRT4530_5632C.1.pep
FFEKLKLFLPFVFTRIPEIVGESIPMKATFFITYVMVDGWAGVAAEVLRLKPLVMFHIKNTFLVRTERDREQAMDPGSLDFGTTEPRIQLYFLLGLVYAVVTPILLPFIIVFFSLAYLVFKHQIINVYNQQYESGAQFWPDVQRRLVIALIVSQILLLGLLSTQEAEKSTVALLPLPVLSIWFHYVCKGRFEPAFIKFPLQDAMVKDTLERANDPTLNLREYLKDAYVHPVFQKNDIYEFAGIDEEEKNPMVATKRQSRMNTPVDSKFNSSSGTNEGEFIDCEKIGGVKLNS

SEQ ID NO: 156688 - protein, 223 aa, Oryza sativa
  Clone ID: PAT_MRT4530_56330C.1.pep
MAAAAVACRRGLLLQQLQQQLWQAHRWVGPARSISQLVKTNGRRAFLVDTLALVRKLESQGVPTKQAEAITSAITEVLNDSLESISESFVSKAEMQKAEMLQESNISKFKSQVQSSQENHFSLLQRETEKLRGDIDKMRSELKYEIDKVTAGQRLDLNLERGRIRDELAKQNEETTELTTKLDKEIHSLKAQLEAAKYDVIKYCIGTIVSISAVGLAVLRIVM

SEQ ID NO: 156689 - protein, 89 aa, Oryza sativa
  Clone ID: PAT_MRT4530_56331C.1.pep
MGWKLDKEDREKIGLSYTEVATMWMQLSGPRRLPHLAQGRWGRPNTDLFLTPGIGARRRHYRAGVGRRAPAAVATAPIRESDVDPTMER

SEQ ID NO: 156690 - protein, 71 aa, Oryza sativa
  Clone ID: PAT_MRT4530_56332C.1.pep
FCFLIFFFFFFFFFFFFFLFFSFFFSGRRFMGGLNLGARKHQILPFKGGFGSFWGSLTPGKGGKKVLRVKT

SEQ ID NO: 156691 - protein, 104 aa, Oryza sativa
  Clone ID: PAT_MRT4530_56333C.1.pep
SHLTRITDHIVISSCINLFILTRNTYDLSWTVSKNMTYLGSGSVIVTSFSDIAVECLAMESVTGYGWEYVLEPILILPMISVKNAGLDGALAEIVLAVKHNIDH

SEQ ID NO: 156692 - protein, 445 aa, Oryza sativa
  Clone ID: PAT_MRT4530_56334C.1.pep
TFVLVQFKLVLVRTVILNSFLVQTNSIILLEIPLFEILCLFSGKKSKTGKILAIVLPIVAALLASAMICFCCWRRRTKATKLSLSYSSRSEDIQNIESLIMDLPTLRIATDNFAENNKLGEGGFGEVYKGSFPGGQTIAVKRLSQSSGQGIGELKNELVLIAKLQHKNLVRLVGVCLEQEEKLLVYEYMPNKSLDTFLFDPEKRKQIDWAKRFMIIKGITGGLQYLHEDSQLKIIHRDLKASNVLLDANMNPKISDFGLARLFGDDQSQETTNRVVGTYGYMAPEYALRGQYSIKSDVYSFGVLLLEIITGRKNSDSYNSEQAVDLLSLVWEHWAMKTITEMVDPYLRSDSSSLDEILRCIHVGLVCVQEDPMDRPTLSMINIMLDGNTVSAKAPSRPAFFTEMLGNINIGSSMYSQPYPVTDSTAKHSTAMSLNDVTVTEPEPR

SEQ ID NO: 156693 - protein, 124 aa, Oryza sativa
  Clone ID: PAT_MRT4530_56335C.1.pep
LEPDPFYFDHYRCKMHDLLRYLAQHLSREECYFDQLPLEPTTWSKLRRISIVNKTDMLSSVVEKGHCRVRTLMFCMSPNIDSDVFMRFPHLRVLDLTGSIVQRIPDSINSLIHLRLLDLDATDI

SEQ ID NO: 156694 - protein, 42 aa, Oryza sativa
  Clone ID: PAT_MRT4530_56336C.1.pep
MADVADAAFAVSDTKMRGQLWNISKSSNCLPVGYYSSRSTDK

SEQ ID NO: 156695 - protein, 46 aa, Oryza sativa
  Clone ID: PAT_MRT4530_56337C.1.pep
LFIQMKIVHSHTEFQVSLVLAAISSSDIPEKLAQADTDPSCAGFGC

SEQ ID NO: 156696 - protein, 62 aa, Oryza sativa
  Clone ID: PAT_MRT4530_56338C.1.pep
MRALVVVSPCDVFAKKISEFPVNYAPVSATPPSDLVLRLIWPYTCPAMVALSHPWDRWIANA

SEQ ID NO: 156697 - protein, 286 aa, Oryza sativa
  Clone ID: PAT_MRT4530_56339C.1.pep
MVYLWALGLSKVYVCSCKNATLNRSNDYYSKQIDNFVAKDQNRQATTLPQYYVAGLASSYYRRLFPKNSVHLFHSSYALHWRSKMFEMKNIKEPLNEGNIYISKTTPISTVKLYQELFEKDFSNFLELRSNELISSGQMLLTFLGRKNEDVSDGDQCTLHGLMEKKKLNNFNMPVYMPSTHEVKTIIMRSKLFIINQIQLSESNWDPYDDDLEGEVVLYPAQSGLNVARSLRPVLRRLFTTYFGESVQDVLFLRIASNVSKYLDKRKGKHNVIALSLARTYGDGVL

SEQ ID NO: 156698 - protein, 594 aa, Oryza sativa
  Clone ID: PAT_MRT4530_5633C.1.pep
INKISARERGFSVRKDYCRRDRFSGIIIHRRFTCSREGFRKELYMDVSNRSREPQALTRCGCKAQFEIKLYQKEGNWYVVRFVSKHNHPLCKGDQVPFLRSHRRITPAEQAKMVELRDVGLHQHQVMDIMERDHGGYEGTGFTSRDMYNFFVKLKKKRIKGGDADHVLKYMQARQKDDMEFYYDYEIDQAGCLKRLFWSDPQSRIDYDAFGDVVVFDSTYRVNKYNLPFIPFVGVNHHGSTVIFACAVVSDERVETYEWVLRQFLTCMCQKHPKSVITDGDNAMRRAILHVFPNSDHRLCTWHIEQNMARNLSPAMLSDFRTLVHSEFDEDEFERKWVEFKIKHKVSDDNKWLKRMYNLRKKWAATYTKGRVFLSMKSNQRSESLNSKLHRLLDRKMSLVILVEHYEHCLSRIHHQEAELDAKASQSVLSYLQLEAIPSFCIARRWTMQAKSAFPSDRYGEVYTWSDQMERYRQLRTVASEAFFRCSMTEESTLKVMKMLDNLMLEDDCSANCDNFEIQFGHVVRQSMRTDIESSEKVLDPELVVPKGAPTKRMRGFLEKRKRKLLSVHEDIRRLESEHGKLHEASTSQVTNRI

SEQ ID NO: 156699 - protein, 54 aa, Oryza sativa
  Clone ID: PAT_MRT4530_56340C.1.pep
IKRTTDALLLNGFFFAVKNGQKMLFTTAYFYIGPKNHHQGYLGWICRSAKIRFY

SEQ ID NO: 156700 - protein, 136 aa, Oryza sativa
  unsure (1)..(136): unsure at all Xaa locations
  Clone ID: PAT_MRT4530_56341C.1.pep
ASWEACCHRARPSGSPRVGRGPGGRRARPGASRPYPAAATGGPGKLPTITTTAWTGSAASNRNHHRTRAGXGGRPLLAPAGPPRRSRRSRAAAPPESRGDNPLPSGGTGPLPSGGGGGSGGFASSVLRQETEQCGV

SEQ ID NO: 156701 - protein, 54 aa, Oryza sativa
  Clone ID: PAT_MRT4530_56342C.1.pep
LQKACACHAQILDTLCDITLKNGEELREEDYHTMLDFMLSRLQSDVNPQALKEL

SEQ ID NO: 156702 - protein, 54 aa, Oryza sativa
  Clone ID: PAT_MRT4530_56343C.1.pep
RASYMSAGLDSVLTREFMPTSGVGLPKYWSSSENIGVSRARAACHLVPAKTNRQ

SEQ ID NO: 156703 - protein, 766 aa, Oryza sativa
  Clone ID: PAT_MRT4530_56344C.1.pep
MGRPSSTERLVCVVLAVLAVLSPLYIDRRRPAAWDSDDDEEGGGVSALLLPALLIVLILAINVTCFVDRRVVRFDPYWIHRVGGSSCGLMATLLLLGFVLKCPVQAFPVICATELFVLPLPFSQQIWAATRPDALLQSPISIPVLPPPDPSGCLLCPARPGAAPHLTRCASSASASASGTAHPPTRLHHLMTICPVSYRTPTLVNPYAAGPGAASRRSGSPDWVMLDKTAYISDRRNASTAESQTSEGQIVQPSVLAAEGSLVLFRVNLSPRPRRSGTYMSPCNYFVYTAGPGRPWLDLLPDPNAMPFNSQQFGLFPCRSGVSEHYDVAFLNSEWVASDEACQFELCTFSSKTGRWSSKPVLLDLSPSEIHKVAIEHETDKLITIGHDSLGLVDLWRGIILLEKLFDDYPVMRYMTFPKPVVYTIDAYGATVCGEIAPECARDVACCDGLIKFVDIEYCYSDDVNGNGWKATIWNRMLSWKDWRKRFSVDKFDILVDPSYSTVLPDLWDDNTKMMQLKKLICTIPTLSMYDDDFVYMMSTMTEEDKNAWIISVDMKQNTLQAVAPISAERFSVLCSDCRPCAFSKYLKITSGVVIPNPVGEYTKRNHLQDRVLEALRTQDSLNELDDCSEFERSNFEEYRSLVQSSPVSSLHSNIQNVAGYYASNDIEKAASKAVNICLRTLAQLVSGNVFLSLRASEDLNQVLQESTSYPSAHAEAIRSKINVVLRAIGSLVQTVPVQPRMTTVADSHGVSKIYSEEEKNNSHEP

SEQ ID NO: 156704 - protein, 58 aa, Oryza sativa
  Clone ID: PAT_MRT4530_56345C.1.pep
KDKISNLPRQSHNLFSCLPPFLFLIKAESALVISQTHHPPKHPLLPQLSHLRKLDSTG

SEQ ID NO: 156705 - protein, 126 aa, Oryza sativa
  unsure (1)..(126): unsure at all Xaa locations
  Clone ID: PAT_MRT4530_56346C.1.pep
LNYLSTGSGGLGSPTAAHPADQSGDARRSXGKPMHNRTVKKSLGKKRNXESTGLDXCTGRKGRKQERVLCGDLTEKTEEERMAKGGVYGPAERSFHQGTSTTVYGGRXRRPIRRAPYVVSAQIDAA

SEQ ID NO: 156706 - protein, 122 aa, Oryza sativa
  Clone ID: PAT_MRT4530_56347C.1.pep
WWCARGPATRQPWRRRGGGSCSVVGSARLGVAVVHPPSPATSSKGAPHPLPPAPVVVCYMDPSSSSSSTPTTAPFSLPPSSSYASTVAPSPSRSSGSSSSPLRWATTASPGPMQPRRPPGAY

SEQ ID NO: 156707 - protein, 84 aa, Oryza sativa
  unsure (1)..(84): unsure at all Xaa locations
  Clone ID: PAT_MRT4530_56348C.1.pep
KKYRAQYKIALPQGGKGPACQIPCPLAAHLQAAPHSXKIALAEGGKGSACKIPCPPSPPICRRPPAQYKIALAEGGKGATCKFR

SEQ ID NO: 156708 - protein, 177 aa, Oryza sativa
  unsure (1)..(177): unsure at all Xaa locations
  Clone ID: PAT_MRT4530_56349C.1.pep
SRRFLTRSSPRRWRKESYLHASSSIGRPLPVKSSLLQTPLKAQPGKKNPTVXRGSGIQIWPDRKKEFFELPLQTTNKGWRSKWFHCSNLIPSLPPFTGQSPVVKDCWFSLPNRDEMDQVVQFLESGMAITTENCLKPLSIKSARHEDGKVSAKKIVKSEEGDAKTKKIPLIQLITPR

SEQ ID NO: 156709 - protein, 93 aa, Oryza sativa
  unsure (1)..(93): unsure at all Xaa locations
  Clone ID: PAT_MRT4530_5634C.1.pep
RRDITSPSFHNILNSYGDHSSLSTIYFCGLLLXHGSMASYLAERKPWDTPRQXFSEWRFDRLQTFEPLXRVRAEAGVTEYFDEKNEQFQCTGT

SEQ ID NO: 156710 - protein, 515 aa, Oryza sativa
  Clone ID: PAT_MRT4530_56350C.1.pep
MASFLPWLPWLLAALLSVYLLDLLAHSRRLLPPGPRPLPLIGSLHLLGDQPHRSLAGLAKMYGPLMSLRLGAVTTVVVSSPDVAREFLQRHNAAFASRSVPDATGDHATNSVAWLPNSPRWRALRRIMAAELFAPHRLDALRRLRREKVQELVDHVARLAEREGGAAAVDVGRVAFATSLNLLSSTIFSRNLTSLDDHGESMEFKEVVVEIMEAGGCPNVSDFFPAIAAADLQGWRRRMAGLFARLHRVFDAVVEERLSERDAGEARKGDFLDVLLDVAARDNDSAGLDRDTLRSLFTARPCERLVRTAAREAGGGRRHVVRRAKQAGAGATRKGTGRWAPDTGGWRGGGAMEGAWLGGEASVAGGREGAAAGTADARTTSRPSRPLPDAASAVRHGGRWLFVILTIIDRIRKRTDIPMHWQPAAPRCRSTMYPDWEDLSDLEGCHHLYTYLNGSYDGCEKEKCPNCLATVTGRASGASTPNPRINDVGGIESAFNSRQQCGNENIVVSMNALQE

SEQ ID NO: 156711 - protein, 333 aa, Oryza sativa
  unsure (1)..(333): unsure at all Xaa locations
  Clone ID: PAT_MRT4530_56351C.1.pep
RNKELFLKRKRGLLHQRARLTERTAEIXLSTTDGRDLSAHDRSTGHSDDDVGDDVTTGGDSGSXCSPANDGAAAQTEDTNGLWALRXTHRXPKRRRTMTGRRRRRGRSGGDLRLDDNSGVPVVFGKTEDGTRMAMTWRTRRWPSRXRRRPERRRITARQAAATAAHGLTRLGRYRRRRAKARVATDRGGPGGLFIVARGXRWRPKATGDGKERLGFERERGIRFEIESTAFQTILADDSKREKIEGIPGIISPLLISPEKERRGRIWKETAARLGXGSARRRRKEDDGLDRWAPPVSGRTRTRERRLGCGPTWAGEERERVLGRLSAQIQKRI

SEQ ID NO: 156712 - protein, 80 aa, Oryza sativa
  Clone ID: PAT_MRT4530_56352C.1.pep
SPECNDIEPGHSNLCLQSQLLEIHLATTGHQTIKASIVITWSTKPPSKKHGLGSLKSEAASHHHGMRPAGARRKRGEKGP

SEQ ID NO: 156713 - protein, 65 aa, Oryza sativa
  Clone ID: PAT_MRT4530_56353C.1.pep
MAASSPAFGSLNDSPPLAGVSAPPLPPREPALPQIPSNPSAATAPSLCESAQARIPSLRVPPLPV

SEQ ID NO: 156714 - protein, 367 aa, Oryza sativa
  Clone ID: PAT_MRT4530_56354C.1.pep
MGRSPCCEQDADVKKGPWTPEEDKLLVEYIGKNGHGSWRRLPKLAGLNRCGKSCRLRWTNYLRPDIKRGGFSDDEERLIIHLHATLGNKWSSIATKLKGRTDNEIKNYWNTHLRKKLLSQGIDPVTHRPRTDLLAGLPNLLAAANLGGAAHQLPLDLNAIKLQADAAKFQILQGLLRVLASTTAPPPTAAVLPGTDLMTSILGATLAANSAGILGQQQQLAGVDLSRLGQYNGNYDNLPPLTNDSCTQQTQPAMSSMSPDSLLNRISSGISGDMLGSPELCHGGDGLSSPELGQGGPSASNMTTSPMAPPPPMVAADDHQCNTNTPSGGGDGMSCEQTPASSTFDGLNLDDIDMEGCCPMTHILRAD

SEQ ID NO: 156715 - protein, 166 aa, Oryza sativa
  Clone ID: PAT_MRT4530_56355C.1.pep
MAVGMATVVVELRESNDDAAFGNGLGRAAPSGGSRWRQGGWHLGASAVDALVDRGSEFINARFSPVFLKLTVPLSAPQGRGQQGRGKTVGVADTGSSDESGALNDGPTMALVEEHLAAMAMDMGQELSRKIPIIEISNVRLFALHLCGSALASNPQMYGGRATKIM

SEQ ID NO: 156716 - protein, 33 aa, Oryza sativa
  Clone ID: PAT_MRT4530_56356C.1.pep
HNNLTIINPLNIIPHLVLLYSKQYTYTTANQTL

SEQ ID NO: 156717 - protein, 114 aa, Oryza sativa
  unsure (1)..(114): unsure at all Xaa locations
  Clone ID: PAT_MRT4530_56357C.1.pep
VFLLLRNFFLRRTDXQRQSMDPVSIGSDCNDSXIQLYFLLRLVYAVGTPFLLSFLLIFCGIXISGMPLTQITSAHPXYQSATTFWPCDHGRIXVKINWXQMIMLGLLSTKGASQ

SEQ ID NO: 156718 - protein, 43 aa, Oryza sativa
  Clone ID: PAT_MRT4530_56358C.1.pep
VIDFVDRAGTTRCQSASSLRTWRVRVSDPCQRCQCCFHPNRQL

SEQ ID NO: 156719 - protein, 67 aa, Oryza sativa
  Clone ID: PAT_MRT4530_56359C.1.pep
RTRGRTRGRTRGRTRGRTRGIREVMDGDRKEDYRRSAARLMKKAKEAMHEGGRSDKNIAEFAAKYSK

SEQ ID NO: 156720 - protein, 477 aa, Oryza sativa
  Clone ID: PAT_MRT4530_5635C.1.pep
MGVDAAPDRMDAASSWMNPPVEVSSPVAGGGGGEDGAATKLQKVYRSYRTRRKLADSAVVVEELWWQALDFARLSHSTVSFFDDPKPETVASRWNRVSLNASKVGQGLSRDGWALKLAFQHWIEAIDPRHRYGHNLHFYYDVWCQSQAGQPFFYWLDIGEGKDVDLPECPRARLKKQCIKYLGPQERELYEYIVTEGKIIHKHSGEPLDTSQGPKGTKWIFVMSTTKKLYAGKKERGVFQHSSFLAGGATIAAGRFTAENGVIKSIWAYSGHYKPSAENLANFMNFLEENGVDLKEVEVRSSTNEDYYEDPVPNKQNPLATVMESNPPQLILPQNMIEEDKASEPFSQAEGAESDNVPKVQTKPTYQRTLSGGLKSPRAADVPREAILERVKSKGESKSYQLGHRLSLKWSTGVGPRIGCVKDYPMELRMQALEMVNLSPRASTPSPSWRLPACLSPTPNLPSSPLGPIQTSLPQPS

SEQ ID NO: 156721 - protein, 399 aa, Oryza sativa
  unsure (1)..(399): unsure at all Xaa locations
  Clone ID: PAT_MRT4530_56360C.1.pep
QGGKEGTEALYQGIIWRVGNGDNIKIWRHKWDDRLITLEKRVRNRLMYVKDLMDAGSRSWNENLIRHVMHKEDADEVLKIRLSNQQPEDFPAWHLEKTGLFIVKSAYRLAWNLSKNVVEASSSTATSGERKLWLALWKTRVQAKIKIFAWKLALDRLPTWVNKCRRKIERQSICQICGSAEEDGFHATVECTKAKALREAIREVWRLPPEIKLLXTGPDRLLLLLDGADEVERAHTLYMLWRAWHLRNEMVHGADSSPIAVSINFLVNYEACMLPVRQQIDDKKGKRPISATLAEALAFLEGVRLAMNWIHMPIILESDNADVVAGLNITQASRAEWGGIIAEIRVAMQCLLQVQVHKVKRDSNRIAHMLAQMVMTSGVEAEWRLCAPAEILELLNQEY

SEQ ID NO: 156722 - protein, 520 aa, Oryza sativa
  Clone ID: PAT_MRT4530_56361C.1.pep
MKCFNQALLARQAWRLIATPESLCARVLKAKYFPNGCLLDTAFPLVSSPTWKGIEHGLELVKQRIIWRVGNGDNIKIWRHKWVAHDDRLITLKKRVRNRLMYVKDLMDAGSRSWNENLIRNVMHKEDADEVLKIRLSNQQPENFPAWHLEKTGLFTVKSAYMLAWNLSKNAVEASSSTATSGERKLWLALWKTKVQAKIKIFAWKLALDRLPTWVNKCRRKIERQSICQICGSAEEDGFHATVECTKAKALREAIREIDDKKGKRPMFEELTEKVHASAVQIACMGTSTGRKETGDACAGIIVRDCRGLVLLAACKKLPRCSSATQAEALACLEGVRLAINWIHMPIILESDNADVVAGLNITQASRAEWGGIIAEIRVAMQCLLQVNLERHGLVPLGATSGRYKVQVHKVKRDSNRIAHMLAQMVMTSGVEAEWSVDATCFRSSIDATLAASALSWLHPLLVADSCLRCHSPSVVAVTVDVVVTATIPRVLGRASNVETKWWLGSGLVEPDPTRYMSLA

SEQ ID NO: 156723 - protein, 36 aa, Oryza sativa
  Clone ID: PAT_MRT4530_56362C.1.pep
LTPSWWQVTSISPRGQNEQADALAKSAAFGGPHSSG

SEQ ID NO: 156724 - protein, 345 aa, Oryza sativa
  Clone ID: PAT_MRT4530_56363C.1.pep
MSLRQLLLQARRFASRPPPPLSNMLVLCRGISDRGHKALPSAPPRHSTGQIQMPQTFHCSNANPLGNRFQIDVVDSDLWPASFDLSMDHAPKTGCPDDFQEHEDGEMHDSEDEIDDMRHRKKLFYKLDRGSKEFEENNVSLRHRRKREKGNVKNPKESKKVDPDESASVKLPKLKTKYTVREEDVVEAKRDRVPTFNQMTDPYHHPFCLDIHVTKGSVRACFVHRVSSRVVTVAHSISKDMKFDVGSRKGMKACAAVGALLAKRAIEDDIHNAIYTPRKGDRIEGKIEVVLRAIIDNGVEVKVKLKQRKPTKIHGIECTGYAAFSISLMAKLFIRMTPTRNAQKS

SEQ ID NO: 156725 - protein, 54 aa, Oryza sativa
  Clone ID: PAT_MRT4530_56364C.1.pep
PKAIWPFTTNSRKVQHHFFPAPTPGHKSNQTVCIDWGPNLIKMALATTFTTPNI

SEQ ID NO: 156726 - protein, 479 aa, Oryza sativa
  Clone ID: PAT_MRT4530_56365C.1.pep
MKDGGGGGGRGQQQQWPCDYCGEAAAALHCRADAARLCVACDRHVHAANALSRKHVRAPLCAACAARPAAARVASASAPAFLCADCDTGCGGDDGAALRVPVEGFSGCPAAAELAASWGLDLPGGCGGEEEEADDAFFSALDYSMLAVDPVLRDLYVPCDPPEVVVAGGGRRLKGEALGHQLAEMARREAETAHPHTQPHSDLSPRTPRRTSAAASGRLQEKQAPPPLPHAAATAAPLPYTSLLMMAPANCTELMENNRVGDEDENVLWESTAPSVPPTQIWDFNLGKSRDHNENSALEVGFGSNNGGFMIKSYNDMLKEISSGTTKDLEDIYDSRYFAAAEDIMSTNVCQLSSKNPSTRSNKRKASSCASTIDGPTTSTSHVPAASGALGGSSNDRGSALPKEISFCDQTVVPTGADQRPCTIKIDSETLAQNRDSAMQRYEKHIRYESRKLRADTRKRVKGRFVKSNGAPDDVSNGG

SEQ ID NO: 156727 - protein, 596 aa, Oryza sativa
  Clone ID: PAT_MRT4530_56366C.1.pep
MIDDEADFGNITDATEGQAAAKFRPKARAKPRKTSLPSRSLAPHPTVESTDENVETLNKDSTSQEQSVDKKAASLGCHGSETDGNACASGGILDTPSEDVVTVSLGLVNNPDVALDSSTVFASSAHKVSQNEENNDDVSHVATHKENMVVSDTQAPPTCCSARTIDDLADFEGLCDDTHVEEERVAKFQPKFRVKTSKAASKSQRTNQKAGVSTVDVLSQNKEDGKDQAGCNDKQLHSPTRHQESVQISYSQAHLGTHNSTIDDVANSDSIMEEPAQEEMAAKFQPRLRPKAGGASPGVAETIDAACVATPEFGVSSVDVVSQDTEEDSHREGLSDDSCQKYIDEEAITTSGTGPPQDLDDTVDLDSHAEMVNPHPDGSPLIIEELSDDQECNDPENQYHEGEPYDHVIEQEPERDARETGTSMKLRNRRKLQKDGIPEHTADDIMDEDFGEPPSDEQDNDSGDEYTARGKQKGRRKSREKNINKEPSRGTKRTSGDSTIEESQKQKLQKNKIIKKLNIEDVQPDINNTHEQEGTSNEEDPGNKNIPGGLINEEEENGLDWSDKELDMHRSEVEEKEHVSTNDDDDDDLGDVFDWY

SEQ ID NO: 156728 - protein, 58 aa, Oryza sativa
  unsure (1)..(58): unsure at all Xaa locations
  Clone ID: PAT_MRT4530_56367C.1.pep
PSPXPVLLLPPQILLRLRXSAAXLAPNRSNRRPESNVIYPTXLYEPRNAWVEPGKXRT

SEQ ID NO: 156729 - protein, 526 aa, Oryza sativa
  Clone ID: PAT_MRT4530_56368C.1.pep
MIDDEADFGNITDATEGQAAAKFRPKARAKPRKTSLPSRSLAPHPTVESTDENVETLNKDSTSQEQSVDKKAASLGCHGSETDGNACASGGILDTPSEDVVTVSLGLVNNPDVALDSSTVFASSAHKVSQNEENNDDVSHVATHKENMVVSDTQAPPTCCSARTIDDLADFEGLCDDTHVEEERVAKFQPKFRVKTSKAASKSQRTNQKAGVSTVDVLSQNKEDGKDQAGCNDKQLHSPTRHQESVQISYSQAHLGTHNSTIDDVANSDSIMEEPAQEEMAAKFQPRLRPKAGGASPGVAETIDAACVATPEFGVSSVDVVSQDTEEDSHREGLSDDSCQKYIDEEAITTSGTGPPQDLDDTVDLDSHAEMVNPHPDGSPLIIEELSAGTTVKFQPYVRRKKGKGKSVSFVPPNVSHAHAPTDTNFETSNSSHFCKDIATGESLSNLPQQASEKICISGEHHPDDQECNDPENQYHEGEPYDHVIEQEPERDARETGTSMKLRNRRKLQKDGIPEHTADDIMDEDF

SEQ ID NO: 156730 - protein, 195 aa, Oryza sativa
  unsure (1)..(195): unsure at all Xaa locations
  Clone ID: PAT_MRT4530_56369C.1.pep
IGTSGDTIVFSRSAYGPDKLLFIDCKKNNAAAAAQQSSRYXGVVXHPNXXWGAQIYQRHXRVWLGXFPHKKAAARAYXXAALXXRGRDXATNFPRAAASXAXLPFLSAHSKXEXVHMLXXHTYPHKLXQGLPXGAAXAPXPXHPSWAREXLFQKGVTPXXXXTQXLLVPQHTPKKXPPAGPISHKGFHFKRKSVL

SEQ ID NO: 156731 - protein, 119 aa, Oryza sativa
  Clone ID: PAT_MRT4530_5636C.1.pep
MPSRDAAVACSSRQAATAWTRAHLRLVPSSSRRRLACLDTRGLLLATIGWIGDGKKDGIVWLWLTRGTKIVHLISDEDYHHLFVGCDFTAAERNNARLFQHVSKTPDQLAEDIKEEIAV

SEQ ID NO: 156732 - protein, 300 aa, Oryza sativa
  Clone ID: PAT_MRT4530_56370C.1.pep
MPSSSVCPLPMAAKTNIELQHDFEEWGVESRPPGGFVNLINAPSNHMHHVAEGSPSQPINVENGDISRTKKRLLWTNDEDLRLISAWLNNSNDSIESNFKKNDKYWGDVAAAYNSTTPKSRVRQVKQVKDRFGKIKKKHAFFGVAGSNNDINVPNQSPLFLEQVRGEAPRVHFSVNGNEYNNGYYLADGIYPYWASFIKSISLPQTEKHKLFAKRQEGARKDVERAFGVLQARFNIVRRPAKKWKRKSVGKIMNMLCSVCPNHGAALLKDTDVGKDEGIVEELDVVIAGQDLLTGEEEFD

SEQ ID NO: 156733 - protein, 384 aa, Oryza sativa
  Clone ID: PAT_MRT4530_56371C.1.pep
MSDSSSNSNSSSYSNDLDPSKFLDKYISDQNVLDSFATRIKCTAAIRMLAYGTPADALDEYLLIGKSTSLECLDTFARGVVEVFGGQYLRRPTSEDIDHILQVNESRGFPGMLGSIDCMHWRWESCPRAWRGQFTRGDYKVLTIILEAVASYDLWIWHAFFGVAGSNNDINVLNQSPLFLEQVRGEAPRVHFSVNGNEYNNGYYLADGIYPEWASFMKTISLPQIEKHKLFAERQEGARKDVEQAFGVLQARFNIVRRPAKKWKRKSVGKIMLACVILHNMIVEDEREDAICDIDLNRIPRTSIVLPPEVTCDDNPCFSDVLRRRSAIRARSVHTQLKNDLIEHIWNRKMFSCPIHGAELLTANDGSSGNGHMMQWFNEESLFD

SEQ ID NO: 156734 - protein, 127 aa, Oryza sativa
  Clone ID: PAT_MRT4530_56372C.1.pep
KLFAERQEGARKDVEQAFGVLQARFNIVRRPAKKWKRKSVGKIMLACVILHNMIVEDEREDAICDIDLNRIPRTSIVLPPEVTCDDNPCFSDVLRRRSAIRARSVHTQLKNDLIEHIWNRFGNRQST

SEQ ID NO: 156735 - protein, 101 aa, Oryza sativa
  unsure (1)..(101): unsure at all Xaa locations
  Clone ID: PAT_MRT4530_56373C.1.pep
AHINASSHLCXRTAEGRKVLAPRRAGGVNVTATDARSGSDSARAAAKANGGLRQQRRSPHRLRPRRLAAKGDAAARCARLRPPRATALTGRVEPDAWADAW

SEQ ID NO: 156736 - protein, 310 aa, Oryza sativa
  Clone ID: PAT_MRT4530_56374C.1.pep
MPSSSVCPLPMAAKTNIELQHDFEEWGVESRPPGGFVNLINAPSNHMHHVAEGSPSQPINVENGDISRTKKRLLWTNDEDLRLISAWLNNSNDSIESNFKKNDKYWGDVAAAYNSTTPKSRVRQVKQVKDRFGKIKKKHAFFGVAGSNNDINVPNQSPLFLEQVRGEAPRVHFSVNGNEYNNGYYLADGIYPYWASFIKSISLPQTEKHKLFAKRQEGARKDVERAFGVLQARFNIVRRPAKKWKRKSVGKIMLACVILHNMIVEDEREDAICDIDLNRIPRTSIVLPPEVTSGTCSAQYVQIMVLHFSK

SEQ ID NO: 156737 - protein, 84 aa, Oryza sativa
  Clone ID: PAT_MRT4530_56375C.1.pep
CGKTVNGLFETFGFQLKDHWKGAVPFVINTSSNIGWADVTNFRMYGFLKSKVVNKNDLKKLYNQTIARFKKKKKKKKKKKKKRR

SEQ ID NO: 156738 - protein, 314 aa, Oryza sativa
  Clone ID: PAT_MRT4530_56376C.1.pep
FLSSSPPPTPSFSPQFAAASTPPPPPPPPLLLLLALTVSSTSMDVKPALAVLRKFFSAVRTVKVTNVSLSATVQDIKEFFSFSGDIEHVEMQSGDEWSQVAYVTFKDPQGAETALLLSGATIVDLSVIIAPAPEYQPPPTSSAPPMYSATSVPVSEDNNVVHKAEDVVSTMLAKGFTLGKDAVGKAKAFDEKHGFTSTAGAKVASIDRKIGLSEKFTIGTSIVNEKVKEMDQKFQVSDKTKSAFAAAEQKVSTAGSAIMKNRYVFTGASWVTNAFNKVAKAATDVGTMTKEKMAAEDQHKGSGPSGGHSYTPIQ

SEQ ID NO: 156739 - protein, 175 aa, Oryza sativa
  Clone ID: PAT_MRT4530_56377C.1.pep
MELEAEEEAMMTARENERLVESLYAAVAAGDGAAASAVLAGDVDWWFHGPRRCEHMRRRLTGEAEAASASSFVFVPRQVAAVGRGGGWVVAEGWEGPRAYWVHAWAVEGGRITRLREYFNTSVTVRDVGGGGHCRPQLDGGGVRRRAAVCWQSQRGRGGGDDDDDRSLPGLVLAI

SEQ ID NO: 156740 - protein, 563 aa, Oryza sativa
  Clone ID: PAT_MRT4530_56378C.1.pep
MSRGRARLQPPPPGTRTTTLAAVLVLVLLAVVALPLRCDAASAGGEEEEEQQPLDYREALRKSLLYFEAQRSGRLPHGQRVAWRDHSGLTDGLEQGVDLVGGYYDAGDHVKFGLPMAFTVTMLSWSLLEYGADVAAAGELAHALDAIKWGTDYFIKAHTKPHELWAEVGDGDTDHYCWQRPEDMTTSRQAYKVDRRRPGSDVAGETAAAMAAASIVFRQSNPHYSHLLLHHAQQLFEFADTYRGKYDSSIAEVKSYYASVSGYHDELLWAALWLHRATGRAAYLDYAVDNADEFGGTGWAITEFSWDVKYAGVQILAARLLMRGEHEERHRGTLERYREKAEHYVCACMGRNAAGGADANVERSPGGMLYVRQWNNMQYVTNAAFLLSAYSDYLAGAGDGDGDGGGGVATCVGGGGAGAGEVFAAAREQVDYVLGSNPRGMSYLVGYGERFPARVHHRAASIVPYKDSKEFIGCAQGFDDWFGRRGANPNVVVGAIVGGPDRRDRFRDDRENYMQTEACTYNTAPMVGMFAMLNRLSRQESPSTTTTTTATTSSPEMGLSVNR

SEQ ID NO: 156741 - protein, 46 aa, Oryza sativa
  Clone ID: PAT_MRT4530_56379C.1.pep
MLVMSDERSKANLKCVKGVLVDLIMQSAKKNKSRISRPIANRPIGR

SEQ ID NO: 156742 - protein, 693 aa, Oryza sativa
  Clone ID: PAT_MRT4530_5637C.1.pep
MSMSIALHAVLPPAAATPRRRPTRLRASSTEAPASGEKGQEDTDRKSGTGMRRRRRRAKKVQEVGLEALYDDGFGEATVRDYFDALRATPLDGGGGGGPPRWFCPVECGPPAVHAPPLLLFLPGIDGVGMELIMQHKSLGKVFEVRCLHIPVNDRTPYEGLLQIMEESVKYEHNLSPNRPIYIIGDSFGGCLALSLASRNPEIDLVLILVNPGSSCSNLFHTVKRPCLQTTQSCLSSAFSTIIPSCKGDPLKMAMVSIQNNTSPQDTLESFSDSLSSMLPLLSEFGHIVRMDTLVWKLKLLMSGVDYTNSRLNAVQAEILLLASGNDNLPPSGEADRLFKALKSCKVRYFRTSSDRLLMESSFNLLTVIKGASMYRQGKQRDTITDFLPPTISEFKRTFGEDFKLLHHLLSPVMLSTLRNGKIVRGLAGVPDKGPVLLVGYHQLLAMEITSMAEEFLREKKAVLRTLAHPVFFVGNYEILRQELSFFDVVPLYGGVQVSPINTYRLFERDEFVLLYPGGIREALHRKDEDYQLFWPDQPEFVRMAAQFGVTVIPFGCVGEDDMLEIVLDYNELKNIPYIRETIESFNQDCPGVRSTVKGEEGNQVLHLPAVLPKLPGRLYYLFGKPIEMKGMDGVQRDRESANQLYLDIKSEVENIMSYLKRKREQDPYRSITARTFYQATWGVTAQIPTFEP

SEQ ID NO: 156743 - protein, 658 aa, Oryza sativa
  Clone ID: PAT_MRT4530_56380C.1.pep
MAASLPRCPLVAAAAIALASGERRGDRSIAAVITPAINLRVTPPRPRSRRDINPPHLDPRKPPTPSPSSSSQSLDRHHPPPFARHGRRGLAAACSGEHGGWRRSSDGKGAGRSCFFTTGTASDDQAGRHSSAAGSDGQGARRSCFFTTGTASDDQAGRHSSAAGSDGQGGDAPQPRDANQGGTPTPMVKGGGAASPPPPGAHHLTTKEEEEDAQRDRDRARDEDDEAPARRCSWVILQAVTRVKDLPPGEDLAFKSEKPPGTSVLYVDKAIGFFNFVVPRAKPFSVNLSRPRPTTPLVVAVHGSGMVVASAFNGVRYFCDAHTRVATMIPPIPPMEPSLIPPVISIGVVQDPIRPDYTMVACLVCTNSSPQFMELRCWTYTSGSQWVVKPLTNCLQHPVWGSQGGVLSHMNKIWFVDLPLGLLFCDPFIEKPKLTYVALPEGCLMLVPDIRSRHNLEKRRCVKISQDKICYVQLDEGEACLWSLLYSESESPEWQLEYKAPLADIWGDKIYKTSGLTPGKVPAIAMIDPTDCAVLYFIEQDVLFSFDIRSKRVLMSKSLEMRTDFCYPSQFLHSWLLPSNMFEENGPVESDKLPSNDLDEQSDSDDDEESDNEDDEDEEHGRQNSWVCAQEVISSGQAAWEYFESQLEAVQGNQDGEQ

SEQ ID NO: 156744 - protein, 40 aa, Oryza sativa
  Clone ID: PAT_MRT4530_56381C.1.pep
SQNASRFDESSVGGAESLKKRIITTKQLPVTLTYMDILEG

SEQ ID NO: 156745 - protein, 62 aa, Oryza sativa
  unsure (1)..(62): unsure at all Xaa locations
  Clone ID: PAT_MRT4530_56382C.1.pep
MSAYCGKCKDXLIMNAAYIGTPGKGILAAXESTVSIGHRFVSIRVENLEDNRRSTTRSCSLT

SEQ ID NO: 156746 - protein, 65 aa, Oryza sativa
  Clone ID: PAT_MRT4530_56383C.1.pep
VRRGKPLPAKSLFLCSRSVFLLSVCFLLCILENSAKDETLMASATYFWSNTLNAFMFNQGPMSRL

SEQ ID NO: 156747 - protein, 126 aa, Oryza sativa
  Clone ID: PAT_MRT4530_56384C.1.pep
SMGHLQFGRPGFNKKRKIMVQANAQGRRLGIRDLMRDQGGAPAEIRQRSGEDAAERRQRGGGGASEEAGRVDGEEEGPGGGGSGVAAEERWRRRLRRGRGGAGRISCHDAGRRRSERGGVEERRLV

SEQ ID NO: 156748 - protein, 396 aa, Oryza sativa
  unsure (1)..(396): unsure at all Xaa locations
  Clone ID: PAT_MRT4530_56385C.1.pep
MATEAAPLPHLLPSFGSPATTPTTPRHHLAELRIERAHSAVAFSAPCDAGKKRRCLLPPSSPRKKVLLELHPFGSPTPTPSPATAPPLLSSRAGTRGSCPDSDFSFPLAVGGTGGGGGGGGGGNMFAFLEDAPRAPTTPTGSSGSSALSFLVSPAAPETPTGSTASGGFAFVASPKEPTAPPGAFSFFASPKQAAATTGPTANGGFTFLGAPEQPLTPTGSNASGGCGSLSPKELHGGSAIAPLPSPTPASTDSTGSGGXLLLPFASPSPPFVFTAWPAHKSGGRSSSNRRSRRNLRVATPRRGTPRPRDEQQPATPRPRKAAKTAAGEASRSSILSGSAGTPCCAFFASPAKAAKQVLLLHCFLLPLLDFCLLVAISCASHCSDLIAAGIQEFLQ

SEQ ID NO: 156749 - protein, 454 aa, Oryza sativa
  Clone ID: PAT_MRT4530_56386C.1.pep
MATEAAPLPHLLPSFGSPATTPTTPRHHLAELRIERAHSAVAFSAPCDAGKKRRCLLPPSSPRKKVLLELHPFGSPTPTPSPATAPPLLSSRAGTRGSCPDSDFSFPLAVGGTGGGGGGGGGGNMFAFLEDAPRAPTTPTGSSGSSALSFLVSPAAPETPTGSTASGGFAFVASPKEPTAPPGAFSFFASPKQAAATTGPTANGGFTILGAPEQPLTPTGSNASGGCGSLSPKELHGGSAIAPLPSPTPASTDSTGSGGFSFFPSPGPAFGTAASPGLAAANQSSPTGGTSPSPPFVFTAWPAHKSGGRSSSNRRSRRNLRVATPRRGTPRPRDEQQPATPRPRKAAKTAAGEASRSSILSGSAGTPCCAFFASPAKAAKQESKNSSSEASRSGATSPEKTITPEREVEVSSAEREAPRPSSPAAAAACTGGELVVRVTCKCGVHKEFSFDHSH

SEQ ID NO: 156750 - protein, 32 aa, Oryza sativa
  Clone ID: PAT_MRT4530_56387C.1.pep
LIVTFSRCRTSKTNVPETCSPDRQCMPMSGME

SEQ ID NO: 156751 - protein, 249 aa, Oryza sativa
  unsure (1)..(249): unsure at all Xaa locations
  Clone ID: PAT_MRT4530_56388C.1.pep
LLPSFGSPATTPTTPRHHLAELRIERAHSAVAFSAPCDAGKKRRCLLPPSSPRKKVLLELHPFGSPTPTPSPATAPPLLSSRAGTRALAVGGTGGGGGGGGGGNMFAFLEDAPRAPTTPTGSSGSSALSFLVSPAAPETPTGSTASGGGATADXTGSNASGGCGSLSPKELHGGSAIAPLPSPTPASTDSTGSGGFSFFPSPGPAFGTAASPGLAAANQSSPTGGTSPSPPFVFTAWPAHKSGGRSSSN

SEQ ID NO: 156752 - protein, 92 aa, Oryza sativa
  unsure (1)..(92): unsure at all Xaa locations
  Clone ID: PAT_MRT4530_56389C.1.pep
LCSPAVCSGPKLTHAGEPXVESWKPGCMMPGVMPVMLLLVCWSGAAVCVGTLVECWECDRDVLRMSSGTAIIAQTGHCIASGLCSIILKKKK

SEQ ID NO: 156753 - protein, 107 aa, Oryza sativa
  Clone ID: PAT_MRT4530_5638C.1.pep
DQRWGPPGPPFPRLGGPPFFGFRGGCPFGKFAPLRFPRDVQGLGFWGFPMERGGGHAFPPGGVVPFLEGGGPPKVGAFDVPGVAFFWKGGFKPGLTRGCPPPPGAFG

SEQ ID NO: 156754 - protein, 200 aa, Oryza sativa
  unsure (1)..(200): unsure at all Xaa locations
  Clone ID: PAT_MRT4530_56390C.1.pep
ESVEVAVKAWGEKSLTELEAEERLSYSCEKGPTRDEVIANLRSAFMKIMDEYKVYTEEEKKQVISAGGLHVVGTERHESRRIDNQLRGRSGRQGDPGSSRFFLSLEDNIFRIFGGDRIQGLMQAFRVEDLPIESKMLTRALDEAQRKVENYFFDIRKQLFEYDEVLNSQRDRVYAERRRALASDSLESLIVEYAELTXDD

SEQ ID NO: 156755 - protein, 1085 aa, Oryza sativa
  unsure (1)..(1085): unsure at all Xaa locations
  Clone ID: PAT_MRT4530_56391C.1.pep
MAMAPPAAATCATALRFAHPSSSSSSSSSSSSSSLPSPRPLGGACGGRPQHGRRSLRAPRRRGGGDRVAARAGLGGLLGGMFGGAGGDDGDAARKRYADTVARVNSMEPEVSALSDADLRARTAKLQERARAGESLDSLLPEAFAVVREASKRVLGLRPFDVQLIGGMVLHKGEIAEMKTGEGKTLVAILPAYLNALSGKGVHVVTVNDYLARRDCEWVGQVPRFLGLQVGLIQQNMTPEQRRENYLCDITYVTNSELGFDYLRDNLAMTVDELVLRNFNYCVIDEVDSILIDEARTPLIISGLAEKPSDRYYKAAKIAEVFERDIHYTVDEKQRNVLLTEEGYADAEEILDINDLYDPREQWASYDVSATSCWFEGLRPTRXLIEYKLEGYNLFLDMMAQIRRNVIYSVYQFKPVMXTENRRNLKRXDMTGTAATESQEFESIYKLKVTVVPTNKPMIRKDESDVVFRATNGKWRAAVVEISRMNKVGRPVLVGTTSVEQSETLSEQLHEAGIPHEVLNAKPENVEREAEIVAQSGRLGAVTIATNMAGRGTDIILGGNAEFMARLKLREMLMPRVVDPLDGVIISKKQASPKKTWKTNESLFPCELSKDALSYVKESVEVAVKAWGEKSLTELEAEERLSYSCEKGRSILIVEFGDILPKVAVIANKGLTNCIIGCLSTQEQWLDACIIVGQGPVGSKQPALLQTPVALRFLRTALGYQCTAPCGIEFGGGPTRDEVIANLRSAFMKIMDEYKVYTEEEKKQVISAGGLHVVGTERHESRRIDNQLRGRSGRQGDPGSSRFFLSLEDNIFRIFGGDRIQGLMQAFRVEDLPIESKMLTRALDEAQRKVENYFFDIRKQLFEYDEVLNSQRDRVYAERRRALASDSLESLIVEYAELTIDDILEANIGPDTPREDWDLSKLIAKLQQYCYLLDDLTPELLEGKSSSYEDLQEYLRTRGREAYYQKAEIVEKQAPGLMKEAERFLILSNIDRLWKEHLQAXTXKFVQQAVGLRGYAQRDPLIEYKLEGYNLFLDMMAQIRRNVIYSVYQFKPVMKNQEEEKSEKKGTKKKVDKGANKLGAAQAAS

SEQ ID NO: 156756 - protein, 145 aa, Oryza sativa
  unsure (1)..(145): unsure at all Xaa locations
  Clone ID: PAT_MRT4530_56392C.1.pep
GLQEFGTRELKKIPXGKSLYVGNMNYHHEALRTGKWAVTYEEWPEEDYPTYANGPGYVISSDIAASIVSEFTAHKLRLWEMEDVSMGMWVERFNNTRHVQYVHSIKFCQFGCIDDYYTAHYQSPRQMLCMWDKLQSGKAQCCNMR

SEQ ID NO: 156757 - protein, 70 aa, Oryza sativa
  Clone ID: PAT_MRT4530_56393C.1.pep
QLNTHIKKSYGLNHITLTSKLCGESIPFDPKFLVFVLGNLLMPIQTKLKEVFFTWFLPFYLVSLSTTPNN

SEQ ID NO: 156758 - protein, 103 aa, Oryza sativa
  unsure (1)..(103): unsure at all Xaa locations
  Clone ID: PAT_MRT4530_56394C.1.pep
MQLARQVSDWXSXHTVVAKKFLXXXXXXXXXXXXWASFYNVVTGKTCGNPLNRFEHIPFRSCGIAKSPHDRLSTSAHLMAMALMRFSPTHWGFTPICDSKTSV

SEQ ID NO: 156759 - protein, 106 aa, Oryza sativa
  unsure (1)..(106): unsure at all Xaa locations
  Clone ID: PAT_MRT4530_56395C.1.pep
SPSHARRRTTARRRKRRASTCCGRRDETYXGTNGGGRXPDDDGDEEEAAATFGLMTTAVLRXSTATTEGQTRSAATRRTRRWPSHATTTTGATAAHDWTNCGDGGA

SEQ ID NO: 156760 - protein, 241 aa, Oryza sativa
  unsure (1)..(241): unsure at all Xaa locations
  Clone ID: PAT_MRT4530_56396C.1.pep
MRASSSVRPGHGQRWGFRPSPGVCGGQRASRLLALRVQGRSGGLVHAGTRALRMHSPMSEHFRRLKLLTESGAISEIVKSNLSDRMRSYLEAGCTHHNXETIQNMNKLHSCQEKLNDHISKAKLLLEELHILEEDVYSTTLKACLSSLRHMDDCPDDNSLTNIFSEDEQQSGDLLDKAVSCASVMVLVHNMLKLDYPMQEKIVKALCIKTASSELEGYCQMWDLRPYIDDNVIQLAWQFVS

SEQ ID NO: 156761 - protein, 59 aa, Oryza sativa
  unsure (1)..(59): unsure at all Xaa locations
  Clone ID: PAT_MRT4530_56397C.1.pep
KGLXKGFNGREMERILVCYFKEKNLKSFVIPGXLFXXVVVFCPSLRXFENPNXKKKKKK

SEQ ID NO: 156762 - protein, 344 aa, Oryza sativa
  Clone ID: PAT_MRT4530_56398C.1.pep
MEAVVVDAGSKLLKAGIALPDQSPSLVMPSKMKLEVEDGQMGDGAVVEEVVQPVVRGFVKDWDAMEDLLNYVLYSNIGWEIGDEGQILFTEPLFTPKVIGFVVHLNVFIVLRCKPVDLADNWSKLILTHYFTCRNVKLRIFRVICMFPHLLLCSLQALREQLAQLMFEKFNVSGFYDSEQAVLSLYAVGRISGCTVDIGHGKIDIAPVCEGAVQHIASKRFDIGGTDLTNLFAEELKKSNSSVNIDISDVERLKEQYACCAEDQMAFEAIGSSCRPERHTLPDGQVITIEKERYIVGEALFQPHILGLEDYGIVHQLVTSVSNVTPEYRVFPRETLPGRGDFQK

SEQ ID NO: 156763 - protein, 337 aa, Oryza sativa
  Clone ID: PAT_MRT4530_563C.1.pep
MGSPPPHRLLLLLAVAAVLHRSAAAAEGVIRLPRGRACAAPTDPAAYDRPVIGIVSHPGDGAGGRVSNGTAASYIAASYVKFVESAGARVVPLIYNEPEERLLEKLSLVNGVLFTGGSVKSGPYFETIKKVFQYVLDKNDAGIPFPLFAQCLGFELVSMIVSKDNNILESFSATNQASTLQFPNYSSLEGSVFERFDPDLIKKLSTSCLVMQNHKYGISPKTLRENVALSSFFKILTTSPDENGEVYVSTVQANKYPITCTQWHPEKAIFEFGKQMIPHSEEAVQVTQNFANYFISQARKSQNRPPADKVLDNLIYNYSPTFIGKKSKSFDVVYIFS

SEQ ID NO: 156764 - protein, 59 aa, Oryza sativa
  Clone ID: PAT_MRT4530_56400C.1.pep
SAVSPITLSSPPPVPPWLAPPPPPPQPCLSWGPTLYPSSSPSFQGVHPPTTISSSASSA

SEQ ID NO: 156765 - protein, 286 aa, Oryza sativa
  Clone ID: PAT_MRT4530_56401C.1.pep
LARKPFHFSAMRLSSLLFLVCFFTVAMSQCAAAAKARHFRWEVSNMFWSPDCEEKVVIGINGQFPGPTIRAKAGDTIVVHLKNGLHTEGVVIHWHGIRQIGTPWADGTASISQCAINPEETFTYRFVVDKPGTYFYHGHYGMQRAAGLYGSLIVDVADGDEEPFKYDGEINLLLSDWYHESIYTQMVGLSSNPFRWIGEPQSLLINGRGQFNCSLAAAHTPGAKQCAAAGNRHCAPVILPVLPNKTYRLRVASTTSLASLNLAVGNHKLTVVEADGNYVEPFAVDD

SEQ ID NO: 156766 - protein, 117 aa, Oryza sativa
  Clone ID: PAT_MRT4530_56402C.1.pep
MDATPRGCGPSDRGIRRPRGVDGVARTAVQWETSSTSGGNKAVEEELTNDNIFSYEVGVERAPLEGSSRRQKPDDDATLAIREKEETMAMVMRNEEGGGGWLASPDLRAMACEGGGA

SEQ ID NO: 156767 - protein, 48 aa, Oryza sativa
  Clone ID: PAT_MRT4530_56403C.1.pep
QRRQFLWGHSFIHISSSLHDRFIHHTNHQFHLTPFFTIFLPLLIFAIS

SEQ ID NO: 156768 - protein, 328 aa, Oryza sativa
  unsure (1)..(328): unsure at all Xaa locations
  Clone ID: PAT_MRT4530_56404C.1.pep
GGANVDVTGSSRGSPGAWRREESAREVPTAVDCGGGNHRRXKRGKHNETTRIRFKGVGASPGFKESVSGVGWGGEALRRAGDEQRPPGADGNGGEAMPGDGGAREWFGEVLGSSRTVLARVVDELGPDDGARLRAAAETEQRRGARRIVRQAMACGGGHGIANGRRKGFGGELTDKRKRRRRIEGSRGAGCGASRGRNRARAIKERRWRTRGQVVTEAVTGGKGGDGVDALGGEGGGSSGGKSNRGSGRISAGWRGQGGGGELALASASLPPSASGQGVEAWRRCLGGKKRGRTVERGGFTMPGGGERQGGMGGRAAQAARADAAATG

SEQ ID NO: 156769 - protein, 69 aa, Oryza sativa
  Clone ID: PAT_MRT4530_56405C.1.pep
GYKNKLWETLGGVQKKKGLFFARKHINIGEINNELQCFFVLKKKKKKTPKKKKKKKKKKKKKKKNKKKK

SEQ ID NO: 156770 - protein, 223 aa, Oryza sativa
  unsure (1)..(223): unsure at all Xaa locations
  Clone ID: PAT_MRT4530_56406C.1.pep
MAEEEGGYWAKPKSKREEAAADWASADLVKRGRRLRWRQRGRHVGWGRERRSGGSXGARRDPANSGKPEGRLALAAGGGEGELIPSLGSGRRRATTAGGGGQSRWRADVAAREKSEGCAGSDLAEPXFKESVSGVGWGGEALRRAGDEQRPPGADGNGGEAMPGDGGAREWFEEVLGSSRTVLARVVDELGPDDGARLRAAAETEQRRGARRIVRRRARHSKR

SEQ ID NO: 156771 - protein, 907 aa, Oryza sativa
  unsure (1)..(907): unsure at all Xaa locations
  Clone ID: PAT_MRT4530_56407C.1.pep
MAVKDRFTRNPGRLTVLTTSGSGCRIHRGARGDCPLPFEGWGLALFSPTPELKFFSVGAVSERLVSLLPSRFACGVESPAAEVKLPEKRNMCGVLEKDIPKNIFDSLTRGANKKAEEEGGYWAKPKSKREGAAADWASADLVKWGRRLRWRQRGRHVGWGRERRPGGSSDGSRRAAXDPANGGKPEGRLALAAGGGEGELIPRLGSGRRRATTAGGGGQSRRHANVAAREKSEGHAGSGFTEPGRHGAEAKEKAGGLGTVRGSSRGSPGAWRREESAREVPTAVDCGGGNHRRXKRGKHNETTRIRFKGVGASPGFKESVSGVGWGGEALRRAGDEQRPPGADGNGGEAMPGDGGAREWFGEVLGSSRTVLARVVDELGPDDGARLRAAAETEQRRGARRIVRQAMACGGGRGIASGRRKGFGGELTDKRKRRRRIGGSRGEVVAMVGRNGTGWARPGRKRGELLVTRPRTHRFLRCSAADGDDEIESSGNRAAXGAGCGASRGRNRARAIKERRWRTRGQVVTEAVTGGKGGDGVDALGGEGGGSSGGKSNRGSGRISTGWRGQVGGGELALASASLPPSACGQGVEAWRRCLGGKKRGRTVERGGFTMPGGGERQGGMGGRAAQAARADAAATGRVAASGAAFSSSTETGMEPVVSSAVAAASWVLRLAGGEGIEVLMPPLLRLLGLVARVATALAFWEASSSSIETGRASSVVAAARESSSPARARAWSILRACLHVLRWEGPPTSKRGGGTPDRITGVASARRRCGPSGSTNSAIDTPSPSPSSATNDVVAHSAAGVVPPTTSSSTPSLPATAPPSPEKVSNDEDVGGGTTCDLYDGEWVRDGDEEARPLHAPGRAPRPTTRRTPARRTAGRTRRLHTVALGAAPVCMFNVTDFLARLCAAIG

SEQ ID NO: 156772 - protein, 823 aa, Oryza sativa
  unsure (1)..(823): unsure at all Xaa locations
  Clone ID: PAT_MRT4530_56408C.1.pep
MAASMGVEVVTAMDAPHPVVKVLMPPAKPTSTCCSRPFNSSSAEEEGGYWAKPKSKREGAAADWASADLVKWGRRLRWRQRGRHVGWGRERRPGGSSDGSRRRRRATTAGGGGQSRRHANVAAREKSEGHAGSGFTEPVWGCDAHAVTRDLMVTGDARAGRHGAEAKGEGRXLGTVRGSSRGSPGAWRREESAREVPTAVDCGGGNHRRAKRGKHNETTRIRFKGVGASPGFKESVSGVGWGGEALRRAGDEQRPPGADGNGGEAMPGDGGAREWFGEVLGSSRTVLARVVDELGPDDGARLRAAAETEQRRGARRIVRQAMACGGGRGIASGRRKGFGGELTDKRKRRRRIGGSRGEVVATVGRNGTGWARPGRKRGELLVTRPRTHRFLRCSAADGDDEIESSGNRAAXGAGCGASRGRNRARAIKERRWRTRGQVVTEAVTGGKGGDGVDALGGEGGGSSGGKSNRGSGRISTGWRGQVGGGELALASASLPPSACGQGVEAWRRCLGGKKRGRTVERGGFTMPGGGERQGGMGGRAAQAARADAAATGRVAASGAAFSSSTETGMEPVVSSAVAAASWVLRLAGGEGIEVLMPPLLRLLGLVARVATALAFWEASSSSIETGRASSVVAAARESSSPARARAWSILRACLHVLRWEGPPTSKRGGGTPDRITGVASARRRCGPSGSTNSAIDTPSPSPSSATNDVVAHSAAGVVPPTTSSSTPSLPATAPPSPEKVSNDEDVGGGTTCDLYDGEWVRDGDEEARPLHAPGRAPRPTTRRTPARRTAGRTRRLHTVALGAAPVCMFNVTDFLARLCAAIG

SEQ ID NO: 156773 - protein, 95 aa, Oryza sativa
  Clone ID: PAT_MRT4530_56409C.1.pep
MQLLLLLLAAVLVAAEPAAAISTMPMELYFSPGELARIAGYGEEPVSTVVVSGQVACELCLCPGSDLLTFELPDDPFLRCDYPGGKCMVTSHDKL

SEQ ID NO: 156774 - protein, 55 aa, Oryza sativa
  Clone ID: PAT_MRT4530_5640C.1.pep
LLVFLNDISRNTIPSNGAEILLVYYGYRVHPQAHGYTIVAFHPIVFQEYRIYLIP

SEQ ID NO: 156775 - protein, 419 aa, Oryza sativa
  Clone ID: PAT_MRT4530_56410C.1.pep
MSGGGGGGEGFPFHDELASLFAERPPNGAMPGMLQQQQPWSFIDYHHHLMQESAPTTPPLDYEAFAGEFDDDVAPLEEVKRELVVDGVGLFPGGGASAAAAAAAVAGPMTPNSMSVSSTSSEACGVGGGAGGDEESAGKCKKEEEGDGGDDDGKEGSSTTKGDGDGEDKNKKGGKGKGKGEKRPRQPRFAFMTKSEVDHLEDGYRWRKYGQKAVKNSPFPRSYYRCTTQKCPVKKRVERSYQDAAVVITTYEGKHTHPIPATLRGTAHLLGAAAAAHHHGGLQYHHPGHFAAAVGHRLPPQPHDALGGGLLAPPHAQHLHAMQHQMQLAAAAAASGGSLHAAAMQQMPQPDHAGLVAIIASTTGASTTPPPPPATGSAAAATTPLRMQHFMAQDYGLLQDMFIPSPFLHNDDANNNNHR

SEQ ID NO: 156776 - protein, 515 aa, Oryza sativa
  Clone ID: PAT_MRT4530_56411C.1.pep
MEHTNLPSHGAQAAEAEALAAAADLEQGLTRHLMEYHQSEASSDESARQRPRVGRVPPHVRNLDGGAEAYTPKFVSIGPIHHADATLRRHSHDLKVAYLHALIARRTPDPIDEVAVLAALIGYKAGVAAVEDRARRFYKEPVDEHLTAEAFVDLLVLDAAFLLEHMLNLATGYEDPLLHRTHWAPSQLHSDLIRFENQVPFFVVAELLALSPLHRDPELEACRSGRRDFLRSIGVHCLLRKDDEELKTLPPSDDIHHLLHLYSLSLTEARLRRPHAHAGLGATAWRALWKLPIVTLMPFAYLLCSGGADDGKGEEEDEAAAVKLPNIPSATDLQRVGIKFKRAPRKPDGGFLDVRLEDGDTLVIPMVNIEQFTAPQLQNLIALEQATPELPDDCSCYAFFMDNLVANPADVALLESEGILKSNLGSHKAVVTYFNKLCKGNKLEVEGNYLRSVFEALMERNRNPMYAWIRTLRKKYFSSPWGIIAMVVTLFVFASTVLQTYISIVQYYFANNGDY

SEQ ID NO: 156777 - protein, 462 aa, Oryza sativa
  Clone ID: PAT_MRT4530_56412C.1.pep
MYSLAGEMLHVAQAFIDKNYHPTVICRAYTKALDDALSVLDKIAIPVDVDDRVAMLGLVKSSIGTKFTGQFGDLIADLAIDATTTAGVDLGQGIREVDIKKYIKVEKVPGGQLEDSKVLKGVMINKDVVAPGKMRRKIVNPRIILLDCPLEYKKGENQTNAELMKEEDWQVMLQMEEEYIENLCAQILKFKPDLVITEKGLSDLAVHYLGKAGVSAIRRLRKTDNNRIAKACGAVIVNRPEELQESDVGTGAGLFEVKKFGDEFFAFIVDCKDPKACTVLLRGASKDVLNEVERNLQDAMSMARNIWKNPKLLPGGGATELTVSATLKQKSSSVEGVEKWPYEAAALAFEAIPRTLLQNCGLNVIRTMTQLQGKHANGENAWVGIDGSSGDIVDMKERKIWDSYSVKAQTFKTAIEAACMLLRIDDIVSGIKKKQAPGASSAPKQPQIEQEGDADNEQMIPE

SEQ ID NO: 156778 - protein, 134 aa, Oryza sativa
  unsure (1)..(134): unsure at all Xaa locations
  Clone ID: PAT_MRT4530_56413C.1.pep
RFLSDSGEWDKLVGMPSPLPARRTVDIDQEVVAFGDRLWWVDASWGAVTIDPFSXRPELRFVELPKESXLPDLNDVVMLRELGKYRRMGVSKGKLRYVEVSLGKQFLIRSFSLADDDEGGDFLTLGARGWLAPP

SEQ ID NO: 156779 - protein, 80 aa, Oryza sativa
  Clone ID: PAT_MRT4530_56414C.1.pep
VVTTPPEEIVYMVKFANHAQRIEVIREYVLHGGNTVGAHKLTVMDRTLLAVAYMNEIRARQASWLMRLILQTHRVAGNLA

SEQ ID NO: 156780 - protein, 53 aa, Oryza sativa
  Clone ID: PAT_MRT4530_56415C.1.pep
VPLGRVHAPVESPPTTPLPAALEEELAGGQEEEGCKGPYVTVRRSMSYKRVTN

SEQ ID NO: 156781 - protein, 80 aa, Oryza sativa
  Clone ID: PAT_MRT4530_56416C.1.pep
FSSTLSSRQLLSHLERPSEPSTVFNEHHCPSLCNHAVHVATETLYHLLSIHDRHKTLQHQLPFIPPVKLLLLLGAASGNR

SEQ ID NO: 156782 - protein, 150 aa, Oryza sativa
  Clone ID: PAT_MRT4530_56417C.1.pep
LFYLNAGIRYVQGGNDVMAPLFFAFRSDPDDKNAEFAEADSFFCFVELLSGFRDNFYQKLDNSAVGIRGTLAKLSQLVAKYDGELQQHLEITTEVNPQFYAFRWITLLLTQEFNFADTIHIWDTLLSDPGGPQETLLRICCAMLILVRKR

SEQ ID NO: 156783 - protein, 162 aa, Oryza sativa
  unsure (1)..(162): unsure at all Xaa locations
  Clone ID: PAT_MRT4530_56418C.1.pep
MSEYANKRTRGAFIAAVFAMQGSGILFDAIVALAVSAGFPHAYPVSSYSDNHAASLIPQADYVWRIIVMFGTVPAALTYYWRMKMPETAWYTALIARNTKQAVADMSKVLHTQIEESVGHAETVRRWSSAARPXGLFSRQFLRRHGLHLLATTSTPGRCRPT

SEQ ID NO: 156784 - protein, 111 aa, Oryza sativa
  Clone ID: PAT_MRT4530_56419C.1.pep
NGPFFFLEHHQWDRGLKPRSFGGSFLRGGPEHQNWMQNSLRPGALDPRNGRGSFLPKGDSSKFWLGKPCYQRPFYLGQARESCPGPLGAGEKPFVPSSRTLRYSLFKGGLF

SEQ ID NO: 156785 - protein, 555 aa, Oryza sativa
  Clone ID: PAT_MRT4530_5641C.1.pep
MTTSSSGSVETSANSRLGTFSFASASFTDLLGGNAGAGGGGVSRYKAMTPPSLPLSPPPVSPSSFFNSPIGMNQADFLGSPVLLTSSIFPSPTTGAFASQHFDWRPEVAAAQSADQGGKDEQRNSYSDFSFQTAPASEEAVRTTTFQPPVPPAPLGDEAYRSQQQQQPWGYQQQPAGMDAGANAASFGAAPFQATSSEMAPQVQGGGGYSQPQSQRRSSDDGYNWRKYGQKQVKGSENPRSYYKCTFPNCPTKKKVERSLDGQITEIVYKGTHNHAKPQNTRRNSGSSAAQVLQSGGDMSEHSFGGMSGTAATPENSSASFGDDEIRVGSPRAGNGGGDEFDDDEPDSKRWRKDGDGEGISMAGNRTVREPRVVVQTMSDIDILDDGYRWRKYGQKVVKGNPNPRSYYKCTTAGCPVRKHVERASHDLRAVITTYEGKHNHDVPAARGSAALYRPAPPAAAATSSHPYLPNQPPPMSYQPTGPQPYALRPDGFGGQGPFGGVVGGSSFGGFSGFDDARGSYMSQHQQQQRQNDAMHASRAKEEPGDDMFFQNSLY

SEQ ID NO: 156786 - protein, 878 aa, Oryza sativa
  unsure (1)..(878): unsure at all Xaa locations
  Clone ID: PAT_MRT4530_56420C.1.pep
ESIPIQEVFAVLKSSPQGLTSADGNGRLEIFGRNKLEEKKESKLLKFLGFMWNPLSWVMEAAAIMAIALANGGGRPPDWQDFVGIVTLLFINSTISFIEENNAGNAAAALMASLAPQTKARRACALLRDGKWSEQDAAILVPGDIISIKLGDIIPADARLMEGDPLKIDQSALTGESLPVNKMPGDSIYSGSTCKQGEIEAVVIATGVHTFFGKAAHLVDSTNNVGHFQKVLTAIGNFCICSIAAGMLIEIIVMYPIQHRQYRDGIDNLLVLLIGGIPIAMPTVLSVTMAIGSHRLSQQGAITKRMTAIEEMAGMDVLCSDKTGTLTLNKLTVDKNMIEARTAHTINLSVLPLIFFPIDRPFVKDLDKDAIVLYAARASRTENQDAIDASIVGMLADPSEARAGIQEVHFMPFNPVDKRTAITYIDTKDGSWHRISKGAPEQIIELCRLRDDVSRRVHAIIDKFADRGLRSLAVARQKVPEGSKDAPGTPWQFLAVLPLFDPPRHDSSETIRRALNLGVNVKMITGDQLAIGKETGRRLGMGTNMYPSSSLLKDGDTGGLPVDELIEKADGFAGVFPEHKYEIVRRLQERKHICGMTGDGVNDAPALKKADIGIAVADATDAARGASDIXVREPGLSVIISAVLTSRAIFQRMKNYTIYAVSITIRVVLGFLLLALIWRFDFAPFMVLIIAILNDGTIMTISKDRVKPSPLPDAWRLQEIFATGIVLGTYLALATVLFFWAVRDTDFFTRTFGVHPIGGSTEELMAAVYLQVSIISQALIFVTRARSWFFVERPGLLLVGAFLIAQLMATLIAVYANWXPFAKMKGIGWSWGMGIWLFSIVTFFPXDIFKFAIRYFLSGKAWNHAFDXKTAFANELDY

SEQ ID NO: 156787 - protein, 1041 aa, Oryza sativa
  Clone ID: PAT_MRT4530_56421C.1.pep
MSVSLEDLKKENVDLVSVLHHSANIAFIRESIPIQEVFAVLKSSPQGLTSADGNGRLEIFGRNKLEEKKESKLLKFLGFMWNPLSWVMEAAAIMAIALANGGGRPPDWQDFVGIVTLLFINSTISFIEENNAGNAAAALMASLAPKTKARRACALLRDGKWSEQDAAILVPGDIISIKLGDIIPADARLMEGDPLKIDQSALTGESLPVNKMPGDSIYSGSTCKQGEIEAVVIATGVHTFFGKAAHLVDSTNNVGHFQKVSCMHPSATSRRRGANCLLALLTINGGQVLTAIGNFCICSIAAGMLIEIIVMYPIQHRQYRDGIDNLLVLLIGGIPIAMPTVLSVTMAIGSHRLSQQGAITKRMTAIEEMAGMDVLCSDKTGTLTLNKLTVDKNMIEARTAHTINLSVLPLIFFPIDRPFVKDLDKDAIVLYAARASRTENQDAIDASIVGMLADPSEARAGIQEVHFMPFNPVDKRTAITYIDTKDGSWHRISKGAPEQIIELCRLRDDVSRRVHAIIDKFADRGLRSLAVARQKVPEGSKDAPGTPWQFLAVLPLFDPPRHDSSETIRRALNLGVNVKMITGDQLAIGKETGRRLGMGTNMYPSSSLLKDGDTGGLPVDELIEKADGFAGVFPEHKYEIVRRLQERKHICGMTGDGVNDAPALKKADIGIAVADATDAARGASDIVLTEPGLSVIISAVLTSRAIFQRMKNYTIYAVSITIRVVLGFLLLALIWRFDFAPFMVLIIAILNDGTIMTISKDRVKPSPLPDAWRLQEIFATGIVLGTYLALATVLFFWAVRDTDFFTVTTHHPTSHASPPRALTPCVCGQRTFGVHPIGGSTEELMAAVYLQVSIISQALIFVTRARSWFFVERPGLLLVGAFLIAQLMATLIAVYANWPFAKMKGIGWSWGMVIWLFSIVTFFPLDIFKFAIRYFLSGKAWNNAFDNKTAFANELDYGKSKREAQWAIAQRSLHGLQQAETSTALFDDNKDYLELSEIAEQAKRRAEIARLRELHTLKGHVESVVKLKGLDIDTIQNHYTV

SEQ ID NO: 156788 - protein, 298 aa, Oryza sativa
  Clone ID: PAT_MRT4530_56422C.1.pep
MAGNEADDHTSAAATVLRELSGTRVEVARAREAAVKAWLSAMPLGEELERLRAELAAAKNRLAATAAEMPPLKSAIASTNDAAVARKEAAGEKRAAAEELRRRVDRARDELRRLRSEAAAAREEIGAVERRVLVRRQAARALQLAERAVAAEAHTLAWSAAAAAEQAARAPGAGADAAHHDVVALPARMLEELRRGVEAEERKAEARVEEAEALRRAAKARRAAAAARLAEARARKREAAEQGRRRDAENERGDNAARRSRSGGTRLAARKLPSWLCAVGRSGGRSQATAMAAHGTNR

SEQ ID NO: 156789 - protein, 41 aa, Oryza sativa
  unsure (1)..(41): unsure at all Xaa locations
  Clone ID: PAT_MRT4530_56423C.1.pep
MQVSRKKKKKKKKKKKKKKKKKKKKKKXKKKKKKKKKKKKK

SEQ ID NO: 156790 - protein, 102 aa, Oryza sativa
  unsure (1)..(102): unsure at all Xaa locations
  Clone ID: PAT_MRT4530_56424C.1.pep
TPGYSQGASCYYWGQNVGILFTGRHXLPDGEGNLRAIKQAKTFHWPGQQASVEKIHRYLDEKNLPLRAVCPGGNVGYLRVEDWCLNPRESLESMLREFQAKV

SEQ ID NO: 156791 - protein, 65 aa, Oryza sativa
  Clone ID: PAT_MRT4530_56425C.1.pep
MRPDRQFRFGSYLARSHQSVSVAGVEASNEAFSRSIRLCYKNSGDGELLHESQITPTPQVVGQIN

SEQ ID NO: 156792 - protein, 810 aa, Oryza sativa
  Clone ID: PAT_MRT4530_56426C.1.pep
MSASAGGGGGGGGKRTVADVLMGNARDAARKAKKGAAPSPKKLKTQPQPAAEADGGAVAKPEEKPHSPVKPKRSSSPTKSNSPGEGKRSESVAAGAKPEAKEKPSPKKPKTLGAKSDTKSSAEGVEKEKRRSPSPTKAKALASESQDIKKPSSPKKTKALDAPKSEEKDTTLELKKKGSEFNPMAAAYWSPEEPVPFLFLARALDLISNESGRIVITEILSNVFRTVIATTPEDLLATVYLSANRIAPPHEGTELGIGDASIIRALAEAYGRREEHVKKNLKELGDLGLVAKASRLSQKMMYKPKPLTISHVLAKFRTIAKESGKDSQDKKRNHIKGLLVAATDCEPQYITRLLQSKMRIGLAEKTVQMALGQAAVYSEKHSPPSKIQSPFEEAAKIIKQVYSVLPIYDKIVPAILEVGVWKLPEICSFSIGVPVGPMLAKATKSVSEIIDKFQGLEYTCEYKYDGERAQIHCLEDGSVEIYSRNAERNTGKYPDVVDAVSRFRKPTVKSFVLDCEIVAYDREKKKILPFQILSTRARKGVTISDIKVSVCTFGFDILYINGKPLLQEQLKVRREHLYNSFEEVPGVFQLATSITSNDLEEIQKFLDTAVNSSCEGLIIKTLDKDATYEPAKRSNNWLKLKKDYMDSIGDSLDLVPIAAFHGRGKRTGVYGSFLLACYDEQNEEYQTICNIGTGFSEQQLEERSVSLRTKAIPKPKAYYRFADTMDPDVWFEPSEVWEVKAADLSISPVHRAANGIVDPNKGISLRFPRLLRVRDDKNPEQATTSEQVADMYRAQKIYHANNNNDDEDDD

SEQ ID NO: 156793 - protein, 1014 aa, Oryza sativa
  Clone ID: PAT_MRT4530_56427C.1.pep
MAEAAALFSLSAAAVVEDVLRQHGCRLSDRDLASRRAEEAAARRNEAAGWLRRTVGAVAARDLPEEPSEEEFRLGLRNGQILCGALNRVHPGAVPKACAHVVFVNLIRSRCAVCHCSVMVVVNTAADSVLQPDGAALSAFQYFENVRNFLVAAQEIGLPCFEASDLEQGGKSARVVNCVLALKSYGDWKQCGGTGPWKYGGNLKPSASGKSFVRKNSEPFRRCQSMNEGEVPYEEAGFSGDYHLDSGDMSTSRPLKMLVSAVLSDKRPDEVPQVKAALKNGTDGTKSFSKSKMDTIEVYSKHRQTKKEAYGEVTLKQYSMLQLQSKHVEELKADIRATKAGMEFMQMKYSEDINILGRHLFSLAHAASGYHIVLEENRKLYNQVQDLKGSIRVYCRVRPFLPGQVSSCAVGSIDEGNITIITPSKSGKEGRKTFSFNKVFGPSATQDEVFLDTQPLIRSVLDGYNVCIFAYGQTGSGKTYTMSGPKNMTEQTQGVNYRALSDLFKLAEQRKGAFIYDIAVQMIEIYNEQVRDLLVNDEIRNNSQNGLNVPDASLVCVASTMDVMELMNVGQKNRAVGATALNDRSSRSHSCLTVHVQGRDLTSGTILRGCMHLVDLAGSERVDKSEVTGERLKEAQHINKSLSALGDVIASLAQKSAHVPYRNSKLTQLLQDSLGGQAKTLMFVHISPESDALGESISTLKFAERVSTVELGAARLNKESGEVKELKEQIARLKSSLAMKDSGSEQNINRDPEAFNMKMPSPGFSNRRQGSCELVSSQTNFRQPMEDVGNIEVRANPTLRQKKPSFDLQDLLASNDSPSWPDSISRANFQMGEERVTIGGEWIDKVVVNNNNSVGDWEGDSAALPDFFYQRYHSGTRDKQYLRNNSRKKDGNEFEQQRPRFYSTNTDDSDDIDIATSDSSESDALWQFNVQSINSSISENGSKIKKPQTKLRESSDTRTPLHSQIPSASRKTSNGNRSGRQPLSGSDSRRLSSNGRHAVFVMRDCEVFLEYSNE

SEQ ID NO: 156794 - protein, 69 aa, Oryza sativa
  unsure (1)..(69): unsure at all Xaa locations
  Clone ID: PAT_MRT4530_56428C.1.pep
MAAAVPAIVISLDYRLAPEHCLPAAYVSAVLWLRDAAAGDPWIDAXTREVAGAGAVAARFYYFFYRIAT

SEQ ID NO: 156795 - protein, 366 aa, Oryza sativa
  Clone ID: PAT_MRT4530_56429C.1.pep
MAPTPDSVSATSPPPPLPPPHFVIVPFPAQGHTIPMVDLARLLAERGARASLVVTPVNAAHLRGVADHAARAKLPLEIVEVSFSPSAADAGLPPGVENVDQITDYAHFRPFFDVMRHLAAPLEAYLRALPVPPSCVISDWSNPWTAGVASRVGVPRLFFHGPSCFYSLCDLNAAAHGLQQQGDDDRILQLTMEAMRTADGAVVNTFKDLEDEFIACYEAALGKPVWTLGPFCLYNRDADAMASRGNTLDVAQSAITTWLDGMDTDSVTYVNFGSLACKVPKYLFEVGHGLEDSGKPFICVVKESEVATPEVQEWLSALEARVAGRGVVAACGTIFGVIPFVSRRSLGIISGMTGAGVNFGAGLTQL

SEQ ID NO: 156796 - protein, 38 aa, Oryza sativa
  Clone ID: PAT_MRT4530_5642C.1.pep
SASVAFWRRKHVSSLGASGSANNVNLDVSVKHGTKNPH

SEQ ID NO: 156797 - protein, 209 aa, Oryza sativa
  unsure (1)..(209): unsure at all Xaa locations
  Clone ID: PAT_MRT4530_56430C.1.pep
PRVRVNFGSLARKVPKYLFEVGHGLEDSGKPFIWVVKVSEVATPEVQEWLSALEARVAARGLVVRGWAPXLAILSHRAVDGFVTHCGWNSMQESIAHGVPVVTWPHFSDQFLNERLAVDVLGVGVPVGVTAPVLLFGDEAMAVTRGDVARAVSKLMDSGEAESDERRRKAKEYGEKARRAMEKGGSSYESLTQLIHSFTLQGAKNAPEQ

SEQ ID NO: 156798 - protein, 43 aa, Oryza sativa
  Clone ID: PAT_MRT4530_56431C.1.pep
IFPCQIHLAPTSIRPRPSSLYLTRCLKSKDLLKMFCMIPLKHK

SEQ ID NO: 156799 - protein, 177 aa, Oryza sativa
  unsure (1)..(177): unsure at all Xaa locations
  Clone ID: PAT_MRT4530_56432C.1.pep
HSSEWRRLRAWLGERRRARLGFVTRVAARGLVVRGWAPQLAILSHXAVGGFVTHCGWNSMLEXIAHGVPXVTWPHFSDQFLNERLAVDVLGVGVPVGVTAPVLLFGDEAMAVTRGDVARAVSKLMDSGEAESDERRRKAKEYGEKLASHGERRSSYESLTQLIHSFTLQGAKNAPEQ

SEQ ID NO: 156800 - protein, 45 aa, Oryza sativa
  Clone ID: PAT_MRT4530_56433C.1.pep
MSDRVRIGTGPARGLTDGEALVTAPARRVACWRCCSNPSRELAAA

SEQ ID NO: 156801 - protein, 511 aa, Oryza sativa
  Clone ID: PAT_MRT4530_56434C.1.pep
MAPTLESVSATSPPPPPPPHFVIVPLPAQGHTIPMVDLARLLAERGARASLLVTPVNAARLRGAADLAVRAELPLEIVEVPFPPSAADAGLPPGVENVDQITDYAHFRPFFDVMRDLAAPLEAYLRALPAPPSCIISDWSNSWTAGVARRAGVPRLFFHGPSCFYSLCDLNAAAHGLQQQGDDDRYVVPGMPVRVEVTKDTQPGFFNTPGWEDLRDAAMEAMRTADGGVVNTFLDLEDEFIACFEAALAKPVWTLGPFCLYNRDADAMASRGNTPDVAQSVVTTWLDAMDTDSVIYVNFGSLARKVPKYLFEVGHGLEDSGKPFIWVVKESEVAMPEVQEWLSALEARVAGRGVVVRGWAPQLAILSHRAVGGFVTHCGWNSILESIAHGVPVLTWPHFTDQFLNERLAVNVLGVGVPVGATASVLLFGDEAAMQVGRADVARAVSKLMDGGEEAGERRRKAKEYGEKAHRAMEKGGSSYESLTQLIRRFTLQEPKNSSSITVECSANRHI

SEQ ID NO: 156802 - protein, 45 aa, Oryza sativa
  Clone ID: PAT_MRT4530_56435C.1.pep
GQERHLAAPLLTVRIKNGRNGVEDRHDKVRRWHRGKFDDGIEGGS

SEQ ID NO: 156803 - protein, 77 aa, Oryza sativa
  Clone ID: PAT_MRT4530_56436C.1.pep
MTTIRRFCCDDLLRFSSVNLDHLTETFNMSFYMTYMARWPDYFHAAVSPGDRVMGYTSGKHENLGIFWGYSARLECG

SEQ ID NO: 156804 - protein, 97 aa, Oryza sativa
  unsure (1)..(97): unsure at all Xaa locations
  Clone ID: PAT_MRT4530_56437C.1.pep
GAPTENDQGSRRNISPLSLQCQLQRFRCSCHIFAGASGLHTNIHRTELFPITCNDTDIXVFPTKLGSFPCCYLGLPLHVQKLWKIDLLIYNKLYGCK

SEQ ID NO: 156805 - protein, 99 aa, Oryza sativa
  unsure (1)..(99): unsure at all Xaa locations
  Clone ID: PAT_MRT4530_56438C.1.pep
KAETXASLITIASVLLSTIKVXALFAFLCTRNCGXXLSNLSLLEFPFKESPAFIQTKIPTFPSHFRVKAKGRQSFVFEALGSWDPGLARKKSFPPKFFL

SEQ ID NO: 156806 - protein, 147 aa, Oryza sativa
  unsure (1)..(147): unsure at all Xaa locations
  Clone ID: PAT_MRT4530_56439C.1.pep
LKLLDIDKKDAPDVKPDPKNEMVRDLIKQTREMEAQLKERKEWAQQKAIQAARKLGTDLTELRVLRMQHDENQRRKKDKQEMEDETMKRLTHXENELKKKSGQLDRSNATVQKLEMENAEIRAEMEAXKLSASESXTACQKLVKKKK

SEQ ID NO: 156807 - protein, 952 aa, Oryza sativa
  unsure (1)..(952): unsure at all Xaa locations
  Clone ID: PAT_MRT4530_5643C.1.pep
MAIKDRFTGNPGRISRTYHKPAVANDRLGQLEAAQIDTNSKFSSSLERSLVAVNTSLAGILNTLERMSKDGHDGSARRNHNGHDANSSIAAREELEYAADTEHDEEWSEFVCSNPNNTPQTWDAMKRFMRSRFVPSYHARDLLHKLQQLRQENKSVEEYYQALQTGMLCCGLVENDDAGMDRFMGGLNREIQDILAYKEYNSIYRLFHLACKAEMEVQGRRAGFRTNISAGRASSWTPSNAAAPSTRAAAPSSSSNKLRPSTTNSTPCPSEPTRGVAATSSKSSSSVALSGRTRDIQCLRCKGFGHVRKDWPSTRVMIVRADGGYSSASDLDEETYALLATNNAGEGDAPHQDEEHIGAEAAEDYESLVKLALSTQPHPQPYYIQWLNSSGKKHKKKSTNSIQNNKNEIKLKGSCFIETKSDLDEVDTDTVVCYALVCKQTLFPIEDTPISLPPPVTNISQEYADVFAKEVPLGLPPIRGIELQIDLIPGASLPNRVPYRTHSEETKEIQRQVQELLDKGSIEDHHGHLPAIFDALRDARLFGNLEKCTFCTDRVSFLSYVMTPQGIEVDQAKVEAIHSWPVPTTITQVRSFLGLAGFYRRFVKDFSTIAAPLHELTKRNVTFTWSAAQRNAFDTLKDKLTHAPLLQLPDFNKTFELECDASGIGLGGVLLQEDKPVAYFSEKLSGPSLNYSTYDKELFALEAHGGGLMGNFGVKKTKDILTDHFFWPKMRRDVERAVLKKNIKMWEECLPHVEFSYNRSQHSTTKKCPFEIVYGLLPHTPIDLLPLPTSERVNFDAKQRAELMLKLHETTKENIERMNIKYKLAGSKGKKHVTFEPGXGCSWHGKNSNNVESVYRLLRRSTPVVVVVRPPTSYPSPNRSLPSSHRKIGNPRCCIMPILALIDNRSPRESRSEFLPRTHPIHSNMSKNHVLALFELFDSSRKHRTLVCQYWH

SEQ ID NO: 156808 - protein, 58 aa, Oryza sativa
  unsure (1)..(58): unsure at all Xaa locations
  Clone ID: PAT_MRT4530_56440C.1.pep
SGKSSVXLLDVKPWDDETDMKKLEEAGPQCQRWRFFTLGSIKSIVPVGYGIKNGARSY

SEQ ID NO: 156809 - protein, 134 aa, Oryza sativa
  Clone ID: PAT_MRT4530_56441C.1.pep
KHYKTRLDHGEFSKELQDLLLEYGIDSIAEVLVEGLSRVKRCTDEGRALMSLDLQVLINGLLHIVSANVRPKLQIVDTFIKAYYLPETEYVHWARSHPEYSKSQVVGLVNLVATMKGWKRKTRLETIERIEAGP

SEQ ID NO: 156810 - protein, 276 aa, Oryza sativa
  Clone ID: PAT_MRT4530_56442C.1.pep
HASGQLFGIFYHYIYETFGNQDRGQSGKSLPDHQSFRLRVALSKITQDSDQWIKPQSISYSPSSPVSMDVMPTAPPSSMFTLYGLKERCAAAETISLVARVLNRSRAHLHSVLSQSNTSILEEFFGTMVDSVPDLAEHIHRTSARMLLHINGYPDKIANAKWEVKELGMEHNGYVDLLLGEFKHYKTRLDHGGISKEGLINGLLHIVSANVRPKLQIVDTFIKAYYLPETEYVHWARSHPEYSKSQVVGLVNLVATMKGWKRKTRLETIERIEAGP

SEQ ID NO: 156811 - protein, 354 aa, Oryza sativa
  Clone ID: PAT_MRT4530_56443C.1.pep
ELAKASNNFAPDRKIGEGGFGSVYMGCLPDGRVVAIKHRGLNSPQGMEPFKAEIAILSAIRYKHIVPLYSYYVLVEEKQKRHLLRPSRKEKEEKEHLLVFEYMENGSLDHHLHGPTSSSSSPVFCGQQPIIHRDIKPSNILLDGNWTPRLKDFGLGFALTEEKAETDTVIGTHGYLAPEYHMERTLNLMTDVYSFGVVMMVVLTGKKSYLFDEESVERNREEWKEREKTEEFEEDEKREECAEEEGENTQDDKEESERQEEEKTTEEWHEWYKWDERSDRSLVSIALPLIEAGEVWKMLDRRPAAEPTPRQLEAVELVAQTAVHCVRLRWEERPPISVFVTNLEKALELARYDG

SEQ ID NO: 156812 - protein, 1023 aa, Oryza sativa
  unsure (1)..(1023): unsure at all Xaa locations
  Clone ID: PAT_MRT4530_56444C.1.pep
MRGDAPAASSSSSASSPPSLFGGGDGGGELFGSAPGPLVFLPLLLIQGGGMDLSRVGEKLLSSVRSARSLGLLPPTPPPPASRPEVPNHFLPPPPSSISHSVYPVLDPIEVPARAAAAAAAARAIAGLPPHEKISLPSNSEDLVSIYGSNPQGHAVDELEEVFFQEEFDPIKYILQSIPAEGDSSYFDKQSTLRLAQLDKIAERLSHHVMGHHEEMDIPVISIFLNFPKITCSVLCYQKCIYTDFLLRKSQITDNKFWPVKGMQLVMELEQDLKVANVICMNGRRHVSSSKNEVSRDLVVNVKSKKKQALLDVLPILTELRNAQDMQMELESFVEKENYFQAFQLLPEYLQILENYSGLSSVQEMGRGIEAWLARTIQKLDTHLLGVCQTFHEESYLTVIDAYALMGDIGGMAEKMQSFFLQEVLSQTHYVLKEMLEEEVGNNTQRNRFTYSDLCAQVPEPKLRPCLLRTFQSLFSLMCSYYTIMSFCPGVKSIESEGENSLTGRNNTSQSADESLGDSVVFSTSTYQFLKNYEDLTIFILAGEAFCGFEASEFRQKLKGICLNYSVAFHRQNIYALKMVLERESWTIMSAEASRIISLAGLTGDGAALISPTSRISTLPIHGSTMSDTGKEKNGFAAWTKIENPFFYKVENGTTESPKSNMMFNSVDNSSAHGSTNNGNGNKAPLDEENEDLLADFIDEDSQLPSRLAKTKIVKGNSSHWKDGDISSQTGSSLSLLRCDFFTGIRMMDKYARLMQKLEIVNVELFKGICQLFGIFYHYIYETFGNQDRGQSGKSLPDHQSFRLRVALSKITQDSDQWIKPQSISYSPSLPVSMDVMPTAPHXSFSAVLVXSRSMELLNKYEGRALMSLDLQVLINGLXHIVSANVRPKLQIVDTFIKAYYLPETEYVHWARSHPEYSKSQVVGLVNLVATMKGWKRKTRLETIERIEARTIGENGCNCFCFLQLHIELLCFALFPFLIISFFSCRFFHLSAHFEANPMIHPWCILKRRSLYHITGVSTQQQK

SEQ ID NO: 156813 - protein, 114 aa, Oryza sativa
  Clone ID: PAT_MRT4530_56445C.1.pep
MNGGSPVMTERERRAYRYGQASSPTARAVGQLGCIRKSWSNDSLSSYGGGGRAGGGGAQACVCAPTTHPGSFRCKHHRQNASNLGAAAAAPAQVVDVDADAKHQEAQEQEEKAT

SEQ ID NO: 156814 - protein, 55 aa, Oryza sativa
  Clone ID: PAT_MRT4530_56446C.1.pep
KTIADSSGPKNTNSSNQYCNIIDKKKEHFEISYMLHRQDSAFSSKKYQLLSLILS

SEQ ID NO: 156815 - protein, 197 aa, Oryza sativa
  Clone ID: PAT_MRT4530_56447C.1.pep
MLASAAEFTDNPAATATVAARHGVDGGGSRVVVPLFLVTVSLFFVTYQLFGVAAAAGAMVLDVCAVALAALNVTVTRARRFPFLRLSLGGEEGHGGGGGAGGGDVAPAAAGMDAAAIMALPAAFGYKREQTAAAAGGWAQCSICLGLARVGEAVRRLPSCGHLFHAGCVDEWLRAHATCPLCRAAVCAAGPEPELPV

SEQ ID NO: 156816 - protein, 150 aa, Oryza sativa
  unsure (1)..(150): unsure at all Xaa locations
  Clone ID: PAT_MRT4530_56448C.1.pep
LVTWDDYNAKLRSLGILVKARNFLVFQGDVESIASKNPKELTALLEQISGSDELRREYDELEDQKKXAEEKSALIFQEKRTIVMERKQKKAQKEEAENHLRLQQDLKLAKTEHLLWQLYTIEKDAEXIEVNLRRIGGLFSKCWRRTSPLI

SEQ ID NO: 156817 - protein, 55 aa, Oryza sativa
  Clone ID: PAT_MRT4530_56449C.1.pep
SWRSVSWSTACVFPGIGFVVLTTKGAVGVARADTGVAKRRRCKDGPVTRPARPRV

SEQ ID NO: 156818 - protein, 166 aa, Oryza sativa
  unsure (1)..(166): unsure at all Xaa locations
  Clone ID: PAT_MRT4530_5644C.1.pep
MFLTGFKKLEKHPYMIFGHIGVXIGCVRGKNSLRDSRGELLSINANLGIXMRPHGCDVFDRNEKVQKAPKHDFRTYWGVLGAFVAKTHFVIRAANFCQLMPILAPTGAMYFDRNKKVQKAPKHDFWTYWSVLGAFVAKTPFVIRATNFCQLMPILAYVEPPRVRCF

SEQ ID NO: 156819 - protein, 123 aa, Oryza sativa
  Clone ID: PAT_MRT4530_56450C.1.pep
RPGRTGATHDAGLCHSGAGHAPRGPLLENRGPVPHPPDAGKSADLALTREEGERERQRKDDPTQDDKGTTRPAENAGEAATPGPTTRRRARPTEATPPRDGTMAQEEGRSQPGTRRSMRKSPA

SEQ ID NO: 156820 - protein, 157 aa, Oryza sativa
  unsure (1)..(157): unsure at all Xaa locations
  Clone ID: PAT_MRT4530_56451C.1.pep
KQRXRAQXRQRDRPSPPCPTRTRRTPWASSACRALPVAPPRPRARRTPPSSASASPSXSSATSVRRXRGRPRARTPRAPASAPRARRRSRAGRCRRARRRRSSRRATRPTPGGSAGRRPTSSAVAGPGHGDLVYQAAEHGHRLVVVGEPMAVGWWYS

SEQ ID NO: 156821 - protein, 132 aa, Oryza sativa
  Clone ID: PAT_MRT4530_56452C.1.pep
MKDWDSLRVSAASPRNGTSAVLRLTHRHGPCAPAGKASALGSPPSFLDTLRADQRRAEYIQRRVSGAAAAAPGMQLAGSKAATVPANLGFSIGTLQYVVTVSLGTPAVAQTLEVDTGSDVSWVQCKPCPSPP

SEQ ID NO: 156822 - protein, 247 aa, Oryza sativa
  Clone ID: PAT_MRT4530_56453C.1.pep
MEGHPLLHHLQQPTLAYTWDPQLAPFDHVAGAGDQVAFSTALELRQALLRALAELDAARAAHQAELRRMESEAGRLAALVASAADERDELRRHCHSLLLLLHHQSQPAAPPTPTPQVSSLPAAHVVAVPAVADELAALDAADEAELEMALARRLPEKGRLVEAVVSAGPLLQTLLLAGPLPRWRHPPPPAPADIPPFNPTKAADADNNSFSSASATSSSPESNCSGGGGHAPLVSPALPYHMIPFCM

SEQ ID NO: 156823 - protein, 197 aa, Oryza sativa
  Clone ID: PAT_MRT4530_56454C.1.pep
MQRDRESEATGLQALQEVWQRFASCEGMGRRLGRRRGAPLLPSDAIKLHDLYRCFKIFALYIIGSKSNPMVCCNAALLLLDVFVFDQVHVFCKHSCILCYCLHHGKVVIVEHVLATLGIGGMGLLLVLVGPDSVAVLADNEFSAINMGVDDSEPDNEFSAINMGVDDSGGSDIFGFVPAWLDGIIVLIDEIASAAAA

SEQ ID NO: 156824 - protein, 37 aa, Oryza sativa
  unsure (1)..(37): unsure at all Xaa locations
  Clone ID: PAT_MRT4530_56455C.1.pep
XHIFLSQNLINNCNXKIIIISEYSYASVTPYILRITS

SEQ ID NO: 156825 - protein, 62 aa, Oryza sativa
  Clone ID: PAT_MRT4530_56456C.1.pep
IYKKKFDQITSSIVHCGTLDELRDTLAVMRRNLTTCVTGGREASGLDRDWTGMNGYMTKGVE

SEQ ID NO: 156826 - protein, 132 aa, Oryza sativa
  Clone ID: PAT_MRT4530_56457C.1.pep
GSSISASSLAFPMADAPRPPSPPPRGKKSSELVSDKKPSPPTPPASVPPAPGPARSGPSPSRAPARDEASTIQVHARLANSGFLLLRLRYELAPNSRAPPPRGRAQGVRRNAEADRRPLQRPLRWARAARGS

SEQ ID NO: 156827 - protein, 272 aa, Oryza sativa
  Clone ID: PAT_MRT4530_56458C.1.pep
LYEGKHRAETERVKAAAAAALAASSASDDDITVVTVTEDDNDNKAPLLQPHSHSHSHPHGHGHGHELAQPEGSGGEGEVPAQVRSVVVSQILEMGIVSHSVIIGLSLGVSRSPCTIRPLVAALSFHQFFEGFALGGCIAQVPLVLPYDYMSRSLGNLSLQASNWLSLSIATAQFKTLSAAIMACFFAITTPAGIAAGAGVASFYNANSPRALVVEGILDSVSAGILIYMSLVDLIAADFLGGKMTGSTRQQVMAYIALFLGALSMSSLAIWA

SEQ ID NO: 156828 - protein, 134 aa, Oryza sativa
  Clone ID: PAT_MRT4530_56459C.1.pep
PKEMGSAIIALMEDMELPPPSPLIEDEAVSMPLLSSKTTTDHHCRQVQGRIGEEVSFLLLMFDKFETPRSSAIGFGIDRAWRHHLQVPGLVLIGTTPSTIGYRPDCVAANSYARSTGNSLRFDQLENDLMGCGD

SEQ ID NO: 156829 - protein, 144 aa, Oryza sativa
  unsure (1)..(144): unsure at all Xaa locations
  Clone ID: PAT_MRT4530_5645C.1.pep
MFLTGIKKFKKHQNMIFGHIXCIGCVRRKNSLRDSRGELLSINANIGPHGCDVFDRNEKVQKAPKHDCWTYWSVLGAFVAKTHFVIRAANLCQLMLILAHTGAMFXDRNEKVEKAPKHDSWTYCSLLGAFVAKTHFVIRAANIS

SEQ ID NO: 156830 - protein, 137 aa, Oryza sativa
  Clone ID: PAT_MRT4530_56460C.1.pep
ARDPRSAKGGRRLLSLLLPWLQLQYCNTANPYPEKRLNSRSRVCAENACCFWNRFLPTFLLLPFGWAPLLSPPQLLLLLLVALFPVAAVAFCQLEPDCVGAVAGIVVAGAKNLILAKVFGWKAWVLANCHSKSRRHS

SEQ ID NO: 156831 - protein, 70 aa, Oryza sativa
  Clone ID: PAT_MRT4530_56461C.1.pep
MAKTVGAKVNVDQQPRKSSAGLMTPIWQCLSSTPPQAPGSRPSFASGRWGSGGSGAGGAVEVVALVVQES

SEQ ID NO: 156832 - protein, 142 aa, Oryza sativa
  unsure (1)..(142): unsure at all Xaa locations
  Clone ID: PAT_MRT4530_56462C.1.pep
GAKKNPGLRTLXLHHVATPARLISVILKXAPVLETLVFFYCMKYPFVVCWGPHXXNLLFXFSLEQLYVTVKMAGLMTITLYTLPKVQSVRLHPSPEIFKAYLHVARPLVKLFFLIRPFFHACTVFTCLTLKGLAFXLLVLCI

SEQ ID NO: 156833 - protein, 1125 aa, Oryza sativa
  Clone ID: PAT_MRT4530_56463C.1.pep
MAIGGKQLAVFGGLCSQLLSFVFHAHTRRDEDEEEEQELGLGGGDLLRPQIGGATSSRPRSRTARRLHLCRAESLSWSRRRRRRGPVVGAPQIAPLPWPSGSHPQIQHPGIVRLGTALRGTRAARVAVARAIVMMTSDNGKAPEKDGEPSGPPSAPQEGEISNEPKRRRPLNGTTGPTRRSTKGNWTPEEDAILSRAVQTYNGKNWKKIAECFPDRTDVQCLHRWQKVLNPELVKGPWSKEEDEIIVQMVNKLGPKKWSTIAQALPGRIGKQCRERWYNHLNPGINKEAWTQEEEITLIHAHRMYGNKWAELTKFLPGRTDNSIKNHWNSSVKKKVNSYMSSGLLTQVSCLPLNEYSANCNSSPAMTQQNSEDSGCFAVREVENSSGCSQSSLAKVSCSQVHDTTVPLGCDLQVNANFDKNEAHDSQSSMGPQACYTSAEAVASALPAVHCHVSSSNLDPDQHLQEDFAQGLNLDMTIDEMPTVPSFADNQTVCSIENHERSLEPYDVAMEVPLSMLSSDSGAEQKLHFMSEADFNSPNCLKSELWQDISLQGLLSGPDAVEADSISRSNHQSDVYSSEADTHFLAPPYMPQTSNSSSVMGLADDQSPQMSVPPSLICSNAMTDDAPFDNRPGRKEMPLSQAEVVTQSSSSSGDAEMFANPGCSNDRHVPSSTMESIPECGDQQVTNAEEPEASLEKEPSLTQSVTAPDEQDKGALFYEPPRFPSLDVPFVSCDLVTSGDLQEFSPLGIRQLMHSTMNVCTPMRLWGSPTHDESTGVLLKSAAKSFICTPSILKKRHRDLLSPIPDKRIEKKYGTEKDRGVSDTSSTGIQTSCINATKDDALITTVLRIERSASSKSLEKKLVFSDENKENLGYTTEQTKDGQSAGNDEHMDEQTTGERSSATNVATNDDLSGNLQPAGILIEHSGDDPISPDYGKNTMNQKLNTNVKSLSVCKEGVCAKSKPTELIVEKSSPCINVDYEYVNILADTPGIKRGLESPSAWKSPWFVDMHFQGSYFTSPADSYDALGLMKQINVQTAAALVEAREVLASGGQCDNISSDKENTGNPDAKKEPGTTKLQTKIMAEGRVLDFECTTPERSSDKNAGSNLGRYLSSPIPSSHLLKSFR

SEQ ID NO: 156834 - protein, 757 aa, Oryza sativa
  Clone ID: PAT_MRT4530_56464C.1.pep
MDIFRVVESILTKMCSVIDQDWELGGKLKNDLICIKEEMGMMNASIEQWEGNIQGPVQQQWVHQLQDLAYDIEDFIDGHRIGPQEPNHFMPRAARMIFGTDRRPQQVLDVKILKERVAILQKWQQTFGSTQAVGGAGNGSPPSGGFGGCEADEQLVGIDNAKRELLSLLSAAESQPDQQNKLKVISILGSNGIGKTTLARRVYDEGDIVEQFHRRAWVASWACEDSASLLKEIVRQLTSEEDGAQGSTSSTEQAGGAGAPNVRNLRQDVAAHLQSHSQIQLNEEDAEDRFKEFIDRNIIEAVDIGNELEAKHWRVHVMAVCYVDFPFTIELLKTQQLQRKWKFLVRSLTIRNSSVPNLKEYKSLRVLDLEECNGIDQRVVKNHICELLFLKYLSLRGTGVRLIPSKIKRLRYLETLDLRETEVEMLPLEVLKLPRLAHLFGSKLEMPQELSNDADLDLQRFFQHESELQVLAGFVMEDNKAFVHVIRHMSKLKKVKIWRKANAAPAKDLTEHLVVCIQRRLQGSRPLESLSIDFGDLSIDFLGDLAPPCALESLKLRGAMSSLPAFFTSPENQLRELHLWSTGLSGEALSALQNLPYLVYLTLKEDRRGFWSDTFAVQSGGFPSLRRLRFQAAMLPKGQPRFGQDALSAHSSVDIAMEDAEFTPRLLSDFDLDLTGDQEMQAYRMLKDWICWRMRTTGFAIKFGRSQVVKTEVVIALEITEVLPVRTRDETFPEAWKRLQEYGAACPHHGMDDWLIL

SEQ ID NO: 156835 - protein, 52 aa, Oryza sativa
  unsure (1)..(52): unsure at all Xaa locations
  Clone ID: PAT_MRT4530_56465C.1.pep
AGASLSMHXADYTNSSDITLTITFTSCITNVTLTIXXXTFTSQFLIYYSAGS

SEQ ID NO: 156836 - protein, 291 aa, Oryza sativa
  Clone ID: PAT_MRT4530_56466C.1.pep
GLARHHRRRPVSLPQAAACNGSPRRSSPLSPPPGGGLLLAAVSSRRRRRRRTRARARTRRTPRRRASPASAPRRLLMAPSWPGSAAAPPRGSRSWRRSSSCGGGGGGVRSSRRRTRRRRRRRWTRARARTRRTPRRRVSPASAPRRLLMAPSWPGSAAAPPRGSRSWRRSSSYGGGGGGGGGVRSSRRRTRPQRPLSWPPPPRCPRAPGGCSPPRTRRAASSASWPSSPTTPPTTTTSATPPPRRAAAAASSPPPPPPCRRTRRGVSSASSSPAAAAAAPPQRRAAAAAAS

SEQ ID NO: 156837 - protein, 182 aa, Oryza sativa
  Clone ID: PAT_MRT4530_56467C.1.pep
MWHLRGCHAGRREVDNDVGRNGRRTAAANGGANHGDTGESEHTGWLHETRGDEPTARIRRREFDGGGLRRRHPAAREEGNGDGATGDQFGRARASTRLRESIPCAGLGGNAPREAGDERRYRARAARAQARQRADCGGDWPVGHHGARAREATGGAAIWAASAGTAARAEREGEALGAALAH

SEQ ID NO: 156838 - protein, 110 aa, Oryza sativa
  unsure (1)..(110): unsure at all Xaa locations
  Clone ID: PAT_MRT4530_56468C.1.pep
MAATLVEIGVGGGQVDGVREGEGKGEEEXFTDLRGMAMVGGVLALVSGIGSPVGRWANVIGRGKAEGVVRRRWMVVADPNDGEPPVMGKTQRDGMVAAKEYEESVDQRRC

SEQ ID NO: 156839 - protein, 365 aa, Oryza sativa
  unsure (1)..(365): unsure at all Xaa locations
  Clone ID: PAT_MRT4530_56469C.1.pep
TARGGPRAXAGPEGAADWGRLDPVLAELVPTWRLRGCHAVQREVNDDVGXNGGANHGDTGESEHTGWLHETRGDEPTAWIRRREFDGGGLRRRHPAVREEGNGDSVTGDQFGDLSGLGPGKRRKTMRPKSPSRVLRTLRLSRCLAMNGGGETEGRQWRGGGERNGRRNRWEGGVTPAGEKREKGGEKGGLSSCLFRKRRRERGLRGRGRRSSASIPWKLARGVAGPTRDDGDDGGGGLERSGDTGGRRGLRRGRGLTVVATGRSATTXARAREAMGSAAIWAASAGTAARAEREGEALGAAHAHTRAAHGQSEGGEREXRERDGPRGNRPTEPEGGKIDFSRRIEIRDLNLTMDWGFEIWNWHGD

SEQ ID NO: 156840 - protein, 158 aa, Oryza sativa
  unsure (1)..(158): unsure at all Xaa locations
  Clone ID: PAT_MRT4530_5646C.1.pep
MFLTGTKKFKKCQNMIFAHIXCIGCVRGKNSLRYSRGELLSINANIGTRGXDVFDRNEKXQKMSKHDFCTYSSVLGAFVAKTHFVIRAANFCQLVQILAYIGAMFFDQNKKVQKAPKYDFWTYWSVLGAFVAKTPFVIRATNFCQLMPILAYVEPPRV

SEQ ID NO: 156841 - protein, 101 aa, Oryza sativa
  Clone ID: PAT_MRT4530_56470C.1.pep
CYTHKKSVLILGFIREPRARYPPYTIEKQKILRGLIIVSLFALILALLGFPKERRYKTFSSFRTVLVHLSECRPYCQCNPFRACCFTQVYIIFVGFSCVTY

SEQ ID NO: 156842 - protein, 674 aa, Oryza sativa
  Clone ID: PAT_MRT4530_56471C.1.pep
MQRCLKEQNNMHAVELGSTRVSEFQSAFVLGRLIIDSALVAYECLHSIKKQHCKKPFFALKVDMMKAYDRVEWSFLHGCLLKLGFADPWIQTVMRCVTSVRYAVRINGELTNPVTPSRGLRQGDPISPYLFLLCTEGLSSILQKKESMGVIQGIRNGRLGPPISHLLFADDSIFFARSDLHSVQGLKDALQAYCKASGQKINLQKSSIFFGQNCLEDIKNSVKETLQVSVEILQDTYLGMPTEIGRASTGSFHFLPERVWRRVNGWNDRPMSRARKETMLKAVAQAIPTYVMSCFKLPVSTCEKMKSCILDHWWGFEDGKKKMHWRSWEWMTTPKSLGGMGFRDLGLFNQAMLARQGWRIVTDLVSLCARVLKGRYFPNSDLWNAPKPTATSFTWPSILFGRDLLRKGVRWGIGNGSSVKILKDHWIPGIKPSMVRPLLPLPEDVTVDFLVNDAIGEWDEDKHIWEARNHSRNNPTLANPRQVIQKILAYVEMIEQHCCRAVQAVRGDALRPVPRWRPPPEGTILINTDAAVFQSVNSFGLGFLFLDHSGLCLFAANERHSGCIQPEMAEALAIRCALRTAMEEGHQKIVLALDCLAIIQKIQSGTRDRSMVGALVSDINFLAAGFLDCSFIHVNRVTNAAAHLLAQCSEQTVCNTYRTVIPETLREVLLSDLN

SEQ ID NO: 156843 - protein, 37 aa, Oryza sativa
  Clone ID: PAT_MRT4530_56472C.1.pep
NPYRAIFLRLIPIAQGEFQNSAGLNSPLPAELFRLGD

SEQ ID NO: 156844 - protein, 78 aa, Oryza sativa
  Clone ID: PAT_MRT4530_56473C.1.pep
GNQTHYSGHRRTRCARTEAKKHYRQDMSPHTRSGQEDNRTPGRRSSPGRRLGGRRLTRRRGPGRSTSPSGWSTGRRRE

SEQ ID NO: 156845 - protein, 72 aa, Oryza sativa
  Clone ID: PAT_MRT4530_56474C.1.pep
SHSLLLAGDTLGFISAKLQMAHVFSNDSSQMYSVAAPQFICAKLQMAHATCITVYLTTLCCPKRSGRNSCLQ

SEQ ID NO: 156846 - protein, 81 aa, Oryza sativa
  Clone ID: PAT_MRT4530_56475C.1.pep
TAYYQGNGGKHLPSKTINYYMINSTLHRQQKGNAKSLILWMLIPIVLGLGLKKRGTRLVQKPNQLTVRWLNHSCRNSDACG

SEQ ID NO: 156847 - protein, 46 aa, Oryza sativa
  Clone ID: PAT_MRT4530_56476C.1.pep
QTVLIMTGQTAPYLGQIMPLVAGLTISLTVGQTKYQAGHKYKRMIN

SEQ ID NO: 156848 - protein, 99 aa, Oryza sativa
  unsure (1)..(99): unsure at all Xaa locations
  Clone ID: PAT_MRT4530_56477C.1.pep
XAFXHAQGWXHGAKXHAKSLXAFRSPLRXSPTRRGKMRXSQSXXWSXVHEHLETLKFAFILPNQKPPXXKDSNXFCQXXPGILFKRPAXXLXLXXINXX

SEQ ID NO: 156849 - protein, 135 aa, Oryza sativa
  Clone ID: PAT_MRT4530_56478C.1.pep
MAGGDQRGDSPSSHELSGRLEGILADGEAPWARRACKAAALEVRLLAPIAAPAIVVYVPNNVLSISTQIFCGHLGNLELAASSLGNNGIQIFAYGLMAASFSPAISSAIKEALWRATNAYATLAEQATAPILRTF

SEQ ID NO: 156850 - protein, 60 aa, Oryza sativa
  Clone ID: PAT_MRT4530_56479C.1.pep
WSLEREFWWPTPSVLASLASLCVFNCGAFVIQFYIQPQYLHFLSMLGLHSGLYDPTSTFY

SEQ ID NO: 156851 - protein, 171 aa, Oryza sativa
  unsure (1)..(171): unsure at all Xaa locations
  Clone ID: PAT_MRT4530_5647C.1.pep
MFLTGLSKFKKHQNMIFVLIGVXIGCVRGKNSLRDSHDELLSINANIGIYXPPTGAMFFDRNKKVQKAPKHDFWTYWSVLGAFVAKTHFVIRAANFCQLVPILVYIGLHRCAVFDRNEKVQKAPKHDFWTYWSVLGAFVAKTHFMIRAANFCQLMPKLAKVEPPRLRCFWL

SEQ ID NO: 156852 - protein, 43 aa, Oryza sativa
  Clone ID: PAT_MRT4530_56480C.1.pep
MVVAITIMDIAETDTLVLGPVLRQCGQDNCHELLRPCRLVVVV

SEQ ID NO: 156853 - protein, 80 aa, Oryza sativa
  Clone ID: PAT_MRT4530_56481C.1.pep
WHLKALFKLAHSLFLLVLMLHEIIASICFCAQAWAFGYRIGFIVCLCHRHFILHKFPCLVYPALYKQIKCGNCLSGSVIR

SEQ ID NO: 156854 - protein, 111 aa, Oryza sativa
  Clone ID: PAT_MRT4530_56482C.1.pep
MARAEKGAAAAVARAAAARAHGGREEAAGKRSGVVAYIGGGEIGLGWGWLLCAQRRGGRGGARTGDGKWRSARLGRGEGFGIPDKGGMRCQIEKEWVNRCGEVLGKETETE

SEQ ID NO: 156855 - protein, 121 aa, Oryza sativa
  unsure (1)..(121): unsure at all Xaa locations
  Clone ID: PAT_MRT4530_56483C.1.pep
HNFCIYHINPQGHELGAAPIPSDVPVPSVEDLADQVADVLDFFGLGSVMCLGVTAGAYVLTLFATKYRERVIGLMLVSPLCXAPSWSEWLYNKVLLNLIYYYGTRGLVKECLLQRVLQARK

SEQ ID NO: 156856 - protein, 63 aa, Oryza sativa
  unsure (1)..(63): unsure at all Xaa locations
  Clone ID: PAT_MRT4530_56484C.1.pep
MSNIQTGAERMPHDLSHLGFLAGQIGRLITISTTPVIAGDSFEMDAVGXLRLSPLRRGLAYTL

SEQ ID NO: 156857 - protein, 75 aa, Oryza sativa
  Clone ID: PAT_MRT4530_56485C.1.pep
SRCLLPSPEKQSATQTQKRSISNASLPFAFQVTTTPLIYRHLGGDCTIKQCIFNPTPSSATVVPMNTHHHLTFFC

SEQ ID NO: 156858 - protein, 126 aa, Oryza sativa
  unsure (1)..(126): unsure at all Xaa locations
  Clone ID: PAT_MRT4530_56486C.1.pep
SFNSLQGVSPPVRLFPIYFPIGNLATGFFVIFALXAGVVGVSTSLTXLHDVSQGYPASMMSAAAASIVTWTLTLLAMGLACKEISIGWRPPSLRALETFTIILAGTQLLCAGSLHAGAHVAIIQNP

SEQ ID NO: 156859 - protein, 54 aa, Oryza sativa
  Clone ID: PAT_MRT4530_56487C.1.pep
MWDRPGVPTDNVASRIPTEKMPEDTRVETCSHPMVQVDGDGACGESSTEVAQRC

SEQ ID NO: 156860 - protein, 76 aa, Oryza sativa
  Clone ID: PAT_MRT4530_56488C.1.pep
MAMQEKMISQMTSGIRVRGVHALQIIKGYELVDQIHCEIVYRFPNKKIADKFHWSFKEKEKEWMARWFFSLPVMTG

SEQ ID NO: 156861 - protein, 152 aa, Oryza sativa
  unsure (1)..(152): unsure at all Xaa locations
  Clone ID: PAT_MRT4530_56489C.1.pep
PKIINDRTGSRPVRVXDVSSEQGQRDAIEGMNXKELDXRNITVNEAQSRRSGGGXGGGYGQRGGGGGYGXGYGGGXRGGYGQXREAATRCGATVAPWCAATRGYATPAXPTPTGTGGNLTGGPLHXKVIYLSNRATIIIIRSVIIVIFVETI

SEQ ID NO: 156862 - protein, 166 aa, Oryza sativa
  unsure (1)..(166): unsure at all Xaa locations
  Clone ID: PAT_MRT4530_5648C.1.pep
MFLTGMKKLKNHQNMIFGHIGVXIGCVRDKNSLRDSLGDLLSINANFCIXGPHGCDVFDRNENVQKAPKHDFWTYWCVLDAFVAKTHFVIHEAIFCQLMPILAHTSAMFXDQNEKVQKAPKHDFWTYWSVLGAFVTKTHFMIRSATFCQLMQILPYFGPHGCDVFD

SEQ ID NO: 156863 - protein, 48 aa, Oryza sativa
  unsure (1)..(48): unsure at all Xaa locations
  Clone ID: PAT_MRT4530_56490C.1.pep
MDGRTDRVYIEPSIWCLVYRVXVTEIDHLIHSIYFNSVPYILGPSNGN

SEQ ID NO: 156864 - protein, 336 aa, Oryza sativa
  Clone ID: PAT_MRT4530_56491C.1.pep
MAEQMGVAITDQVDLLSRMHSPYLVGLLGYCADQSHRLLVFEFMPNGSLKSHLHRRALAPAEQPPPLDWQTRLGIALDCARALEFLHEHSSPAVIHRDFKCSNILLDHNYRARVSDFGMAKLGSNKANGQVTTRVLGTTGYLAPEYASTGKLTTKSDVYSYGVVLLELLTGRVPVDTKRPPGQHALPRLTNREKLVQMVDPALIGQFSLKDLVQVAAITAMCIQTKADYRPLMTDVVQSLIPIVKSPLMSCTSTPLRPAHGHHHVVYMSPSRGSSNGEDSKSSLALRVGRIGHFVKIFPGVEHGWTVRYKDDDAAAVKSAEEALADMIDWFNKNLK

SEQ ID NO: 156865 - protein, 108 aa, Oryza sativa
  unsure (1)..(108): unsure at all Xaa locations
  Clone ID: PAT_MRT4530_56492C.1.pep
FPPVFKGPVNMVGPPGPPYPKGVFGFKSCAXPRGPPVVFRPPIFSLLGKEFSPKLKGPLXFYNFEIPPAPFCFPSFPKKVFGSQGPLDQRSLSPRPPGLESLPQKIWL

SEQ ID NO: 156866 - protein, 107 aa, Oryza sativa
  Clone ID: PAT_MRT4530_56493C.1.pep
MQQESSSGHSTTGKEREENWKRKAKIPTSLPLFPPSSVRRSIFFHKSSHPEMAAAAALLQSFATVASVQTVDGSSHLPISANNGIDNHPVRSRFKKKESYNRVVLRD

SEQ ID NO: 156867 - protein, 57 aa, Oryza sativa
  Clone ID: PAT_MRT4530_56494C.1.pep
MAPATGERGTSGGVGPTMERRLEAKAIGDHGRAEEAPMATDDLSLDFPEEAAVGDAR

SEQ ID NO: 156868 - protein, 69 aa, Oryza sativa
  Clone ID: PAT_MRT4530_56495C.1.pep
QNDLCQQVGMKIYIDPTNRPSYVPLRCYMQPVASLKVSKLSSLFLCPPTSVGVPFHASHHNHLIENRIA

SEQ ID NO: 156869 - protein, 378 aa, Oryza sativa
  unsure (1)..(378): unsure at all Xaa locations
  Clone ID: PAT_MRT4530_56496C.1.pep
MALPGRLRALILAVALPLLFLSASEAGTVGINYGRVANDLPNPAAVVQLMKQQGIAQVKLYDTEPTVLRALANTGIKVVVALPNEQLLAAASRPSYALAWVRRNVAAYYPATQIQGIAVGNEVFASAKNLTAQLVPAMTNVHAALARLSLDKPVKVSSPIALTALAGSYPPSAGVFREDLAQAVMKPMLDFLAQTGSYLMVNAYPFFAYSGNADVISLDYALFRPNAGVLDSGSGLKYYSLLDAQLDAVFTAVSKLGNYNAVRVVVSETGWPSKGDAKETGAAAANAAAYNGNLVRRVLSGNAGTPRRPDADMDVYLFALFNENQKPGPTSERNYGVFYPNQQKVYDVEFVLGGNSXLAAAAAAARTTAGSAGRTTAG

SEQ ID NO: 156870 - protein, 62 aa, Oryza sativa
  unsure (1)..(62): unsure at all Xaa locations
  Clone ID: PAT_MRT4530_56497C.1.pep
TCNSPYSESYYNSLAVVLQRRDWENPCVTQLNRLAAHPPFXANWRNSREGRTDRPFQQLGXX

SEQ ID NO: 156871 - protein, 329 aa, Oryza sativa
  Clone ID: PAT_MRT4530_56498C.1.pep
MSYYVDPYSNVPQYPLYLVYGYPLSTVARQVGGLGAQGSTTMSSSFVDDSVNPGINQGVSTSTMLVWTQVGEIVFPVYTTVPISTGPSMTGNENTVVTTLDGSISKDPPAEVENGTSTTSEPEKDPNAAKSCPSDENHELTRTTSEATRSWCPIHKTRKHTLQACWVSLDVQAKIHACKERGIQRTSPTRDVYCPIHKTKNHDLSSCKVLLSTMRTPPPRVQQSQISSRDADRERGATATSDRFVGLIDIDPHEPFVLHLLEDQASSSTSTPHDVFAIDGTSTSACANAEAEEQVVTPAQHIRAMNAILRETPYDPVLNRTTTGISGQP

SEQ ID NO: 156872 - protein, 750 aa, Oryza sativa
  Clone ID: PAT_MRT4530_56499C.1.pep
MASSSNPSNLPCSSDGVCMLCKVLTTEVEQLRCSTCATPWHTPCLSSIPPLTDVAHWVCPDCSGDVTASYPPSDVVRPESSLIAAIRVIEADPVLSIQEKARRRQELLGHAGDAGAAITEAVGENVEDSESNNPLSMLNKNINCSFCMLLPERPVTTPCGHNFCLKCFRRWIENGKRACVICRAPITQKVAQDLRINLALVQAIRMAKAANNASTTGETTVYHYKENEDKPDRAFTTERAKRAGMANASSGQIFVTIAPDYFGPILEDHDPRRNRGVRVGDHWKDRMEGRQWGAHFPHIAGIAGQSTHGAQSVALSGGYLDDEDHGEWFLYTGSGGRDLSGNKRTSKEQSFDQKFEKLNAALRVSCLNGYPVRVVRSFKEKRSPYAPESGVRYDGIYRIEKCWRKTGVQGTFKVCSDEHGDHPRPLPDIEELKNAIDITERKGNPAWDFDATDGWKWMITPPISRKAVVTGDPRGKKMQGAARHTNNLSMRERLLKEFRCSICRNVMEEPVTTPCAHNFCKKCLLGSYDNLSLTEERSRGGRTLRARKIVKKCPSCPSDIADFVQNPQVNRDIMNVIESLQKEAEKEDHARVSGEGSSAALVDSDDENDTAWENQDDGNLDEGGCNNPEDMITESVDLNSVTNVDNTENKVEVQQPHKRTAGAGKGKGGKWARTSSAPGDADARNVVTSTETLDGIAAENVADLVQIEDCTFTGVERADPNALEVDGKNMIPDFSEAEKVNPKQDQEVLP

SEQ ID NO: 156873 - protein, 163 aa, Oryza sativa
  unsure (1)..(163): unsure at all Xaa locations
  Clone ID: PAT_MRT4530_5649C.1.pep
LFITGTKKFKKHQNMIFGHIGVXIGCVRGKNSLRDSRRELFSINADIATRGCVVFNRNEKVQKAPKHDFWTYWSVLGAFVVKSHFATRAANFRQLIADIATRGSVFYDRNEKVQKAPEHDFWTYWSVLGAFVVKTHFATRAANFCQLMPIMPLAGAVLLTGTK

SEQ ID NO: 156874 - protein, 44 aa, Oryza sativa
  Clone ID: PAT_MRT4530_564C.1.pep
ASACKKFMQDPIEIDVDEDSTTTVHALTETYKTVDGPLSKVLRG

SEQ ID NO: 156875 - protein, 510 aa, Oryza sativa
  Clone ID: PAT_MRT4530_56500C.1.pep
MEYERIEKPFPTQGGGFSPKRLRAMLLGVEKRRKGQEEEEEGDAGEVDDEYGAVPKSSVRSDADSDARRGGSMCEEYKDVDVVSTISESSSSLETGSGHRSRDTHSMGSRVRVPEEDSCDSESVASNFEFHKERGASARSVTAAIVPPFSKPAPSKWDDAQKWIASPTTNRPGRAGGVPQRKMEKTSFGGGRLPATKVVLEATEEIDTKRVDPSQEKREIGWQKAVNWAPPDPYPEVETCAKSALAEEITVADSAVTFSRHDSSATLQSATTCIPPPPTVRSVSMRDMGTEMTPIASQEPSRTGTPVRATSPDCSRPTTPRKTIGPNAIGAVIGHGECSNVELSEQELQMKTRREIMLLGTQLGKTNIAAWASNKEEEKDASLSLKGVPMDQSTQKVTEIRAAAWEEAEKAKYLARFKREEIKIQAWEDHQRAKIEAEMRKIEVDVERMRARAQDKLMSQLASARHTADEKRAAAELKRSRAAAKTAEQADHIRRTGRMPSSIGCWNWCS

SEQ ID NO: 156876 - protein, 138 aa, Oryza sativa
  unsure (1)..(138): unsure at all Xaa locations
  Clone ID: PAT_MRT4530_56501C.1.pep
WSPPPPELPGLPCMRLFCPPTPPPRSRLIEPQPRAPTVPSLPATPPALPPCPTSPXPPPAPPQTAAPVRPPPAPPLVGHAARVAAPTGGPLVALPAPTYIYPPSSPTFIMHGEREAKTTRRTTSSLIGGSPTDVDLRR

SEQ ID NO: 156877 - protein, 50 aa, Oryza sativa
  Clone ID: PAT_MRT4530_56502C.1.pep
PLKYNHNLLHWGILKCGFTPQTNYLIIITTIFSFYTDIHHFNYYTSPIFF

SEQ ID NO: 156878 - protein, 121 aa, Oryza sativa
  Clone ID: PAT_MRT4530_56503C.1.pep
MKADLGANGESEGWAAAVGGMTCVGGGGTTTQAVEELELGGSGVRDDGWLRYERRTPKQQNLLDLGGRGMACGGSGTNEGASGYVGDFGGATRSRVRGKRKHENMRSSNSLVLQSSEKAQI

SEQ ID NO: 156879 - protein, 35 aa, Oryza sativa
  Clone ID: PAT_MRT4530_56504C.1.pep
GASRLVHGGDPGARGLERRRVLARRTLHHDITPRA

SEQ ID NO: 156880 - protein, 79 aa, Oryza sativa
  Clone ID: PAT_MRT4530_56505C.1.pep
HRPLPDRPPPPPRRPDPAGSAAPAFVAHSGAARRLSHRRRPTPILPPLVWSSLPRRHTSSLQPPPPTLPIHRRCPDPPS

SEQ ID NO: 156881 - protein, 245 aa, Oryza sativa
  unsure (1)..(245): unsure at all Xaa locations
  Clone ID: PAT_MRT4530_56506C.1.pep
MPPSSPPCASRPRRHPRHNLRPRPRACAPPPPRLLPPPPLSLPHPSPRLRPPCSPHSRAPSLTLTALPQPXSPPPPPRPVPLPPQSPXAPLLLSHRSLSPRPLSSPTAPLLSAPHPAPPPSSSPAIPPPLVRRRTVSVAPSPTIPHRHLRSPPPPPAIRWSSRRPLMVLPSSKDPWTSSTPHPAPRRSTKIPNVXPLAPSFVPLPPHAIPDTAPSQIDPLLPYARPPSLSRLSPSLKQPAAARRP

SEQ ID NO: 156882 - protein, 306 aa, Oryza sativa
  Clone ID: PAT_MRT4530_56507C.1.pep
MWANPIGLGSLMWLCSVEYPLECLVFGGDTELQPVRPSQRRSDRAVDGLTGHYTTVWLEGLMTYRQHYAFLHNDREAPVIISDKLSEDETQRLLTVLENHCSVLGYSLQDLRGINPVLCTHRIPIDPESTPSREPQRQLNNAMREVLPPPVDMKGIRSFLGYAGFYRRFIKDFSTIARPLTNLLAKDAPFEFDDACLKSFEILKKAPVSAPIIQPPNWTMPFEIMCDASDFAVGAVLGQTKDKKHNAICYASKTLTGAQLNYATIEKELLAVVFAFDKFRSYLVGAKVILPPSQNKCSHRYPCLAL

SEQ ID NO: 156883 - protein, 696 aa, Oryza sativa
  unsure (1)..(696): unsure at all Xaa locations
  Clone ID: PAT_MRT4530_56508C.1.pep
PEYVLLQHFHMGLDKEFAFYLDITAGGSFMHKTPSEGRTILDXFMMQHDEPQPEASVSKIEEPLMIEPLSEPSTSASSIDEKFPEQPSVENEEIQTLDRATILFRDGFDQDYNNVSILYSPTVGANLISESFAFAYLSDMTVTSTDKFFKHPNGNIIEGFGIVQDVHVCFEDREAILDFHIFEIQDFDILIGLPIELLLINTPRLDSLKITLGGNEFSVPFSRARIALTNPLLEIESAKEITAVPPHESPKALLEDEVPDIIKEEADPSETLDLPIMELPPRPPLELKPLPPGLRYAFLHNDKEAPVIISEKLSEDETQRLLIVLKKHRSVLGYSLQDLREINPALCTHRITIDPESTPSREPQRQLNNAMREVVKKEVSSNSYPSEGPMSFGLCNASASFQRCMMSIFSDIIEDIMEVFMDDFSVYGKTFELPPPVNIKGICSFLGHGGFYRRFMKDFSTIARPLTNLLAKDAPFKFDDACLKSFEILKKALVSAPIIQPPDSTLPFEIMSDASDFADGAVLGQTKDKKHHPICYASKTLTGGQLNYATIEKELXAVVFAIDKFRSYLVGAKVIVYTDHAALKYLLTKKDAKPRLLRWILLLQEFDLEIVRDSNPWYANIVNYMVSKYIPPGENQRKLKYESRRHIWDETYLYRVCSDGLLRRCVPTDEGLKIIERCHASPYGGHYGAFRTQAKI

SEQ ID NO: 156884 - protein, 118 aa, Oryza sativa
  Clone ID: PAT_MRT4530_56509C.1.pep
MENLSCLISSPLPMPMPEYELAACSPASPSSSASSTSTPPSPGGEAAARCGEKRGRGGGGGRHPTYRGVRMRAWGKWVSEIREPLKKSRIWLGTFPTPEMVAHAHELFALVVNMIISL

SEQ ID NO: 156885 - protein, 223 aa, Oryza sativa
  Clone ID: PAT_MRT4530_5650C.1.pep
MGNSGKAALPGGGASIPGVDATGGEEVVGGGAGLPGGGVWLPGGDTVVPGGGASAASAGLPGGGAVVLGGGASAAGAGLPGGGGAAVPGVDATGGEEVAGGGASVPGGGAGPLGSGASAAFVRMVVPGVDTTGGEEVAAGGGASAAGIRTTVPGIDALGERIKHLHPEGEFSIELATGGTVLAVLPTITSRTMTSDRRDDIEQSCRLVDINLTGATIPCASKA

SEQ ID NO: 156886 - protein, 62 aa, Oryza sativa
  Clone ID: PAT_MRT4530_56510C.1.pep
TDGYFFCLMIGYAFGLSCTYVGLYLMKSGQPALLYLVPSTLGTIVTLGAKRGELSQLWNAKV

SEQ ID NO: 156887 - protein, 172 aa, Oryza sativa
  unsure (1)..(172): unsure at all Xaa locations
  Clone ID: PAT_MRT4530_56511C.1.pep
PPPPPPKKVEPXPPLPPPPPPPPALDRPPPPPPGAPVQIFFAESPPPPPNPPGGGIFYPPPPPPGAAPPPPPPIFLNKQLWGAPPPPGIFFPPPPPFFPPPTSPXXGRGTPPPSSRKKKRGXPPPSKGVYILFSPPPSFCPPPLPPPNITPPPPPGPAQXFILKPPGLVSLG

SEQ ID NO: 156888 - protein, 71 aa, Oryza sativa
  Clone ID: PAT_MRT4530_56512C.1.pep
YRIESPPSVHHLVGGFSYYHYLTAGITTGSPHITISHPSTCPRIIGGTPYLEYTSLGGKAHIVFGIAHIYS

SEQ ID NO: 156889 - protein, 81 aa, Oryza sativa
  Clone ID: PAT_MRT4530_56513C.1.pep
SLLLRLPPIQEAEERARRRWREGSRSLWRRRDLGAAALWLLHRGIPAPAAASQPPPAWMSPTSHSFNLLHLAPGWSPRALR

SEQ ID NO: 156890 - protein, 54 aa, Oryza sativa
  Clone ID: PAT_MRT4530_56514C.1.pep
MSTITGRSTPPMTTHPWGRNKVRKGESYTQQQYMHSMENVETKMYDVDIRYDPR

SEQ ID NO: 156891 - protein, 136 aa, Oryza sativa
  Clone ID: PAT_MRT4530_56515C.1.pep
MVMDAGVHDVCTMLPGSKRDAHLPLPIYPQIAAANGFATAEEFDPLLFLSPDAVCGGGGGDYLNIVSAQPISAASTNRASPPRDVSVSASAASSAAAQHDDSEAFSDIVLGYINRMLMAEDIDEKFEHYPVNADDL

SEQ ID NO: 156892 - protein, 954 aa, Oryza sativa
  Clone ID: PAT_MRT4530_56516C.1.pep
MKQASPATSSPRVPLTDEERKAPLLPTPPTSSQAAAAEGGNKLASGRLQAHEHRGRVLGMNATLGPTPVKGAYESPSTSLKNFDQFELGGGEFDGDQFGRQYNHRVPKLDFPKFDGTDPEDWKMRCEHYFDVNNTFPGLWVRIATIYFLDRAASWLRSSKAHVRFPVWENFCIAVSHKFDRDQHETLIRQMDSIKQTGTVWEYYERFDELMNQLLTYDPVLNMRYLTHRFTEGLRQEIRNAVLLQRPKDLENALAVAMLQEEVISETMTVSVPNLKKSDGGNLQIRPNVAFKGALPLPLPPNLGSGSGVLNRSEDRKFLDNTKTGTSNDKISTLKAQRRAQGLCYICAEKWSPIHKCANTIQLHAVQELLTVLQSDLLSDQGISDESDGLDSPGLMSISVQAINGFETVGCMRMLGYVQGKEVLILVDSGSTASFISSKIAQTLQGVVTLEPPVQVKVANGSILTCLTSVPRCEWMTQGWVFYTDLKVLNLGSYDMILGMDWLMAHSPMQVDWVNKLLTVSWRKESITLQGILSETEQCSQLSSQQFLELKDRQAISHLIQLCTLSESSNKEQIPVEIQQVLAEFGQVFEEPSGLPPSRVFDHTIPPMPGATPVNVRPYRYTPAQKDVDRIFTSTLWATLFKLAGTQLRLSSSYHPQTDGQTERVNQCLETFLRCFVHACPSQWSRWLALAEYWYNTSFHSALGTTPFEVLYGHKPRYFGLSANAACQSTELADWLHEREQIQSLIRDHLLRAQARMKFQADQHRSERTFVVSDWVYLKLQPVVQQSVVTRANRKLAFRFYGPFQVLSRVGEVAYKLALPATSLIHPVVHVSQLKKALVPSEVVYSQLPRIQSTAGTSVVPSQVLDRRFIRKGSKMVEQLLVRWSVDDPHVVTWENAQELRHRFPDSEAWGQASTEGGGDVTAATSVAGSSKQKPAAQPVNRPRREKQPTPVSL

SEQ ID NO: 156893 - protein, 203 aa, Oryza sativa
  Clone ID: PAT_MRT4530_56517C.1.pep
YQYDMNTPGSPGQLRIASTRDLNMNISVSNTNMLSQAYASWNNISLGNELYRMETSSTSERSILDVHERRSYYVIPQNKLGQDIYIRTTEYRSSDVTLLSSGDDRSIKVPASRDLLDSHLKGRSVRLYRLMVTAIIANAEQQSARTCAAAGDQSSQNIRKVEWNEMFFFKVESEDNYVLEFVVLDAGGGCSFDVQHIYFSLFS

SEQ ID NO: 156894 - protein, 509 aa, Oryza sativa
  Clone ID: PAT_MRT4530_56518C.1.pep
MEEQNIDFGKVLMEIQESLVTLNRAQGETQAALVKLDHGVSSWRPQVEAAVQELHEEVGDLRQQLDLVGKMKQASPVMSSPRVPLMDEERKAPPLPTPPTSSQAATAEGLWIRNATIYFSGRAAFWLRFFKGYVRFPVWENFCIAVSHKFDRDQHETLIRQMDSIKQTGIVWEYYERFDELMNQLLTYDPLLNMRYLTHRFTEGLCREIRNTVLLQRPKDLENALAVAMLQEEVISEATTGSVPNLKKSDGGNLQIRPNVAFKGALPLPSPPNRGSGSGVLNRSEDRKFLHNTETGNSNDKISTLKAQRRAQFKLYKGFETVGCMRMLGYVQGKEVLILVDSGSATSFITSKIAQTLQGVVTLEPPVQVKVANGSILTCLSSVLRCEWMTQGWVFYTDLKVLNLGSYDIILGMDWLMAHSPMQVDWVNKLLTASWRKASDTLQGILSETEQCFHFFFPPFLELKERQAIFHLNQLGHIRFSDKEQIPVEIQQALAEFAQVFEKPFGLPP

SEQ ID NO: 156895 - protein, 1071 aa, Oryza sativa
  unsure (1)..(1071): unsure at all Xaa locations
  Clone ID: PAT_MRT4530_56519C.1.pep
MEEQNIDFGKVLMEIQESLVTLNRAQGETQAALVKLDHGVSSWRPQVEAAVQELHEEVGDLRQQLDLVGKMKQASPVMSFPRVPLMDEERKARXLPTPXTSSQAARRKGESKVAGGXLHAHEHXGKVLGMNTTLGPTXVKGAYESPSTSLKNFDQFXFGGGEYDGDQFGRQYNHRVPKLDFPKFDGTDPEDWKMRCEHHFDVNKTFPGLWIRIATIYFSGRAASWLRSSKAHVRFPVWENFCIAVSHKFDRDQHETLIRQMDSIKQTGIVWEYYERFDELMNQLLTYDPLLNMRYLTHRFTEGLCREIRNTVLLQRPKDLENALAVAMLQEEVISEATTGSVPNLKKSDGGNLQIRPNVAFKGALPLPSPPNRGSGSGVLNRSEDRKFLHNTETGNSNDKISTLKAQRRAQVLCYICAVKWSPTHKCANTIQLHAVKELLTVLQSDLLSDPDIFKGNDGLDIPGLMSISVQAIXGFETVGCMRMLGYVQGKEVLILVDSGSTTSFITSKIAQTLQGVVTLEPPVQVKVANGSILTCLSSVLRCEWMTQGWVFYTDLKVLNLGSYDIILGMDWLMAHSPMQVDWVNKLLTASWRKESNTLQGILSETEQCSQLSSQQFLELKDRQAISHLIQLCTLSESSDKEQIPVEIQQVLAEFAQVFEEPSGLPPFRVFDHTIPLMPGATPVNVRPYRYTPAQKDENRVKQLFAWPHLRTTVMQFVTACSVCQQAKSEHVKYLGMLQPLPVPEHAWQVVSLDFIEGLPKSATFNCILVVVDKFSKYSHFVPLSHPFTAMDVAEAYMQIFTSTLWTTLFKLASTQLRLSSSYYPQTDGQTERVNQCLETFLRCFVHACPSQWSRWLALAEYWYNTSFHSALGTTPFEVLYGHKPRYFGLSANAACQSTELIDWLHEREQIQSLIRDHLLRAQARMNFRLIXHRSERTFSVGDWVYLKLQPFVXQSVVTRANRRLAFRFYGPFQVLSLVGEVAYKLALPATSLIYPVVHVSQLKKALVPSKVVYSQLPRIQSTAGTSVVPSQVLDRCFIWKGSKMVEHLLVRWSGDDPHVVTWENDQELRR

SEQ ID NO: 156896 - protein, 162 aa, Oryza sativa
  unsure (1)..(162): unsure at all Xaa locations
  Clone ID: PAT_MRT4530_5651C.1.pep
MFLTGMKKLKKHENMIFGHIGCIGCVRGKNSLHDSRGELLLINANIGGHGCDVFDRNEKVQKAPKHDFWTYWSVLGAFVAKTHFVIRAANFCHLMLILAHTGAMFXDRNEKVQKAPKHDFWTYWSVLGAFVAKTHFVIRAENISPLMAILAYIGSHGCDVLG

SEQ ID NO: 156897 - protein, 87 aa, Oryza sativa
  Clone ID: PAT_MRT4530_56520C.1.pep
MEEQNIDFGKGESLVTLNRAQGETQAALVKLDHGQLDLVGKMKQASPVMSSPRVPLMDEERKAPPLPTPPTSSQAATAEGGSKVAGG

SEQ ID NO: 156898 - protein, 807 aa, Oryza sativa
  unsure (1)..(807): unsure at all Xaa locations
  Clone ID: PAT_MRT4530_56521C.1.pep
MPVEIQQVLAEFAQVFEEPSGLPPFKVFDHTIPLMPGATPVNVPPYRYTPAQKDENEMPVKEMLTKGIIQPSSSPFSSPMLLVKKKDGAHWFTKLDLRADEHKTAFKTHHGHFEFRVMPFGLTSALATFQGCMNNVLSPLLRKFFLVFVDDILIYSKTLGDHVKHLQAVLQILTKHQLKVKKSKCSFAQQRLAYLGHIVSPNGVSTDEEKLYVWTAETEQAFQALKQALITAPVLAMPDFNEPFVVETDASNKGIRAVSMQKNHPIAFLSRALGTRHQGLSTYEKESLAIMLAVEHWHPYLQHAEFFIRTDHRSLSFLDDQRLTTPWQHKALTKLLVVPDWIQEVIAGYDFDPDALSKVQTLCISAAAVPNFTLKGVLFSRTRMWIGTITLLHQKILATWHTAPVGGHSSFLGTIQRGKQLFAWPHLPTTVMRVGTAWSVCQQAKSEHVKYLGMLQPLPVPEHAWQVVSLDFIEGLPKSATFNCILGVVDKFSKYSHFVPLSHPFTAMDVAEAYMQFIHKLHGLPQSLISDRDRIFTSTLWTTLFKLASTQLRLSSSYYPQTDGQTERVNQCLETFLHCFVXHACPSQWSRWLALAEYWYNTSFHSALGTTPFEVLYGHKPRYFGLSANAACQSTELIDWLHEREQIQSLIRDHLLRAQARMNFRLIXHRSERTFSVGDWVYLKLQPFVXQSVVTRANRRLAFRFYGPFQVLSLVGEVAYKLALPATSLIYPVVHVSQLKKALVPSKVVYSQLPRIQSTAGTSVVPSQVLDRCFIWKGSKMVEHLLVRWSGDDPHVVTWENDQELRR

SEQ ID NO: 156899 - protein, 92 aa, Oryza sativa
  Clone ID: PAT_MRT4530_56522C.1.pep
MGEMNWVSRKIHLYNVTMGLYMLDCCFPLTGVDIMVLILLWFICFNGSRFASDVFESPSFAITVGSWQSETLLNIKIVDVLELVVNELEVKG

SEQ ID NO: 156900 - protein, 326 aa, Oryza sativa
  Clone ID: PAT_MRT4530_56523C.1.pep
MADGGGGGEAGSGGSAPVCSFVRKPPKNIRKRPTAPAGSDDDDEDGSGAIAAARAKKAPSSTSKLFFSSADGSSEPRRFQYESSRTIQASTDSRATATLETETEFDRDARAIRERQLKQAEESLKKNPSAPASSSGSGSGEVYKGIHGYTDYKAGFRREHTVSSEKAGGSHGPLRASAHIRLSARFDYQPDICKDYKETGYCGYGDSCKFMHDRGDYKSGWQIEKEWEEAEKARKRRIAMGGDGSDYEAGEEDDDDDEEALPFACYICREPFVDPVVTKCKHYFCEHCALKHHSKNKKCFVCNKPTLGIFNAAQEIRKKMAQDKKQ

SEQ ID NO: 156901 - protein, 136 aa, Oryza sativa
  unsure (1)..(136): unsure at all Xaa locations
  Clone ID: PAT_MRT4530_56524C.1.pep
MSKASLDCNNCKXSVHRFLRSCPKXCPFKLCLSCCQKIRDGNISAATPEDKFNQRLLQQESAHEDGSISCPSIELGGCGDSLLNLVYVPPSDQSEEVSSGDELDGPGNHSGVKDAVAESNGGPDRLSVGQQETVSS

SEQ ID NO: 156902 - protein, 58 aa, Oryza sativa
  Clone ID: PAT_MRT4530_56525C.1.pep
ISDLITLLVCLWCGLEQTCVCSRVVFYSHQSKNMVFSKDHRARMIFVFLTVDRFCVLA

SEQ ID NO: 156903 - protein, 111 aa, Oryza sativa
  Clone ID: PAT_MRT4530_56526C.1.pep
MAKTTRAWKAQAASDRKDKAGQKAAEDSFQCSCGRFYKGSTTRENEHTQRCLAKRKEVAAGRMAAEAAKEAANEPEVQTSGEKIWAEANPTGADQVAVCSMIPSDLGHGCR

SEQ ID NO: 156904 - protein, 139 aa, Oryza sativa
  unsure (1)..(139): unsure at all Xaa locations
  Clone ID: PAT_MRT4530_56527C.1.pep
QNLSGSAARPAEASTRLXDLRRSLPSEVAVGFSSTTGHPIQLHNILLWSFNSTLETKTRSSPLTQPDEETLVHQAPVTSNERRSFVSWKQLLVRLDPWNRSVELGLGFQFFERSWVRLKLVLNSNFNISLEYGIGNEWD

SEQ ID NO: 156905 - protein, 444 aa, Oryza sativa
  Clone ID: PAT_MRT4530_56528C.1.pep
MPRPPAATSSEEEIKKEVAAVDVVVAAPDDDVAADREEEEEQKKRKRRKEKKKRRRRAPSEEEEAALRSVLRWARRGEAGDEEADGQRPAATGRRRPRVAVELHAHSTCSDGSLSPAALVQRAHRNGVKVLALTDHDTMAGVPEAIESAKQCSIRIIPGVEISAMYSPSDGIGAEEPVHILAYYGSLGPAKPQELDRFLGSIRDGRYTRAKGMLLKLRSLDMPMELEDVCTIAGDGVAPGRLHVARAMVEAGYVENIRQAFSRYLYDGGPAYATGNEPAGESVVQLVCRNGGVAVLAHPWALKNPVAVIKDLKAAGLHGIEVYRSDGKLSGLSDLADTYGLLKIGGSDYHGRDDKDEPDVGSVDLPVLAVSGFLDAAQPIWHNATKEILANITERAPNGSKGLQRTNSAKDLCNLRLLSSDLEVTDSTEVEVLQTELSDVVLSN

SEQ ID NO: 156906 - protein, 145 aa, Oryza sativa
  Clone ID: PAT_MRT4530_56529C.1.pep
SIVNQGLRRAFMAAEPSLAPVRRTSSTQPQTPVADDASARNRNVAGVLGVLIWPGAASASRRRQYQLTLATLSTTSSGILIRRRPSSCRPAGARRGSPELPPTAMTSICSHAGSQASRIVSKPADDDGSQYSCSTGGRTTGGRRA

SEQ ID NO: 156907 - protein, 319 aa, Oryza sativa
  Clone ID: PAT_MRT4530_5652C.1.pep
MTSHRRRTTSPSPAQAQPLEDDDLLSEILLRLPAKPSSLPRASLVCKRWRRVVSDAVFLRRFRSHHGKPPLLGFFKVSYRNPIFIPTLDPPDRISAARFSLQLPLPGGGGGSPPVFGHFYHMFAFRHGRALIYDRSLLQITVWDPVTGDRRAVDIPEPFGRRPAYVSNWAMRCVDGHVHGGCHSSPFEVVVIGFNKYRRRLFTCVYSSDTGNWGKIDVLPEMHGDGGDQIAPAEDGGLLFLAVRDFSLNLWKHKINSDSAAAGWVLEKTIELDRLLPFEPRPDTDTPAPMNILGFAEEHNVVFLATAIGVFMVNLESAI

SEQ ID NO: 156908 - protein, 243 aa, Oryza sativa
  unsure (1)..(243): unsure at all Xaa locations
  Clone ID: PAT_MRT4530_56530C.1.pep
GRDTTFLSLSLSLSMSNNASKGVAPMSGSEYSSSDSEATLDDIPPIVIDADLEEEENMSDMSSMLNLQGPDKLGNNQPLDIVPLNSIPFRQEVAFHQKVDSSKEEVPVPQWMKQLDNYKDGDWTVFLQIRDDGHKDWFYYHQKYKKQLRSRSDVKLFLKTTLVNGTDMFKGQKLQKKRTMDSYGERSGTEASVFLSPIILKSGGSKSNKGEKKNTSSKKSKKALSNGDYPVMPKELTLPHXFV

SEQ ID NO: 156909 - protein, 169 aa, Oryza sativa
  Clone ID: PAT_MRT4530_56531C.1.pep
MAFMIHGRPSPCEIPPLTCSHTKEATGAAHSLHQCSSSAAVALNTHLLTVFVRAQKDQEKMRVPPLRATTALLATLLVAASFQDLTVAADGGGGVVPVPDSVCDAKCQKRCSLKVAGRCMGLCKMCCHDCGGCVPSGPYASKDECPCYRDMVSPKSRRPKCPFKEKVGN

SEQ ID NO: 156910 - protein, 282 aa, Oryza sativa
  Clone ID: PAT_MRT4530_56532C.1.pep
MAFADHHLHIPDRFVRADEVPAAGEVVVVGGDDESSEVPVVDMARLLDLEHREEEIAWLGSACRSWGSSSFSTDLSAITRVHNFSVFKLLIYQGSFRDSIDKYTVEMSNLTMRLLRFMASDLGVEQEPLLAAFRGKRQSTALHHYPPCRHPEKVIGIAPHSDGFGLTLLLQVDDTPGLQVSNGGRWHPVRPLPGAFIINIGETLEVLTNGLYRSVFHRVVVDTERDRVTVVVFQDVCIDGVLKPLPELGEPRYHAIGKSEYFKGHTTEVVGQGERFIDTLKK

SEQ ID NO: 156911 - protein, 276 aa, Oryza sativa
  Clone ID: PAT_MRT4530_56533C.1.pep
MAAAKRRVRDAEADLNLPPGFRFHPTDEELVAHYLCPRAAGRAAPVPIIAELDLYRHDPWDLPHRALFGRREWYFFTPRDRKYPNGSRPNRAAASGYWKATGADKPVLHNGRTAGIKKALVFYHGKPPRGVKTEWIMHEYRLAKKGGAAAAAGAGALRLDDWVLCRLYNKKNEWEKMQSRKEEEEAMAAAQSWGETRTPESEVVDSDAFPEMDYSLPAASFDDALLPKEEARDDDWLMGMSLDDLQGLGSLLQADDLSMLAPPPAAKTEPLGAPFF

SEQ ID NO: 156912 - protein, 102 aa, Oryza sativa
  Clone ID: PAT_MRT4530_56534C.1.pep
MRVPPLRATTALLATLLVAASFQDLTVAADGGGGVVPVPDSVCDAKCQKRCSLKVAGRCMGLCKMCCHDCGGCVPSGPYASKDECPCYRDMVSPKSRRPKCP

SEQ ID NO: 156913 - protein, 57 aa, Oryza sativa
  unsure (1)..(57): unsure at all Xaa locations
  Clone ID: PAT_MRT4530_56535C.1.pep
WKWLEFIIIMMRIIKVGESRCWYLXKEFIIRLXSSXEDHHTIEGLFVTPMVEFKCTA

SEQ ID NO: 156914 - protein, 136 aa, Oryza sativa
  Clone ID: PAT_MRT4530_56536C.1.pep
MAMDLGASNTDTAGMKKLSQRQDGVPTRGVSVDKSGVRCRRKSLRRQRQWSDWGRVAATHGHYEKVGDTAPRHQFSFPKALSSVLGTKRGPYCDQRVACDRRNARSVHRPRDISDLVAARCSLVRGGNAGGGLAPS

SEQ ID NO: 156915 - protein, 270 aa, Oryza sativa
  Clone ID: PAT_MRT4530_56537C.1.pep
MEDQMANLRLTDFEFFRIILPGSSKTKLKLPYKFARELGDRELREARLRVAGEGRRPWDVKVFDDDVSGDVYLGRGWQEFARAHDLRDGHFLVFRYDGAAAFTVTVFDETMCRRDYRRHHDAAGTGSSSSSDSSDAAAAVATAAAEGVGDVALSQFAVTLRQCNLEDKQAQYLNVPMEFQEAHEYARREKVVLRMRGEAWTVRLKHSRRERGQRTAFRYGWHRFCVDNGLAVGDTCFFRVLREGDLRRGGAADDHVLKVAVRKADGTTLE

SEQ ID NO: 156916 - protein, 111 aa, Oryza sativa
  Clone ID: PAT_MRT4530_56538C.1.pep
EVVAAPYHLLDALRHYLPSNEAAAALYSLPSTPTRLSPVTVTTASGATVTVEPLDLGLIEEEQPMERVESGRALREKVFERLSKEATVSTDAAAAAAGVAPDVGWVSDLIN

SEQ ID NO: 156917 - protein, 636 aa, Oryza sativa
  Clone ID: PAT_MRT4530_56539C.1.pep
MEVMPPNRTGTEGEPGPAVEPAPAGAGAAPVVKKKRNLPGTPDPDAEVIALSPGTLLATNRFVCEVCGKGFQRDQNLQLHRRGHNLPWRLRQRGPGAAPPRRRVYVCPEPGCVHHNPTRALGDLTGIKKHFCRKHGEKRWTCQRCGKRYAVQADLKAHTKTCGTREYRCDCGTLFTRRDSFVTHRAFCGALVEETGRVLAVPAPPSPRPPDLEAEENVDKDKDKEEEVKEKEKEKELEENEDSPVAEVDEPQPSQAVAEVPQQCAPSPPPPPPILQEHPQPVVAVVPNVDEQEVVAKPAVIAKIEVEDERDEEVCFQEVDRYKDAELEDSNLLDNDTPMLPCFLPSPSEAIGTDGSSTSCGTGSSVTNAIAPATTTSTFAGLFASVTTSSTPQSRSLRDLIGVDPTFLCLAIGAPSSLFPQTNASDPCSFAPPPAPHMSATALLQKAAEVGASQSSSSFLKEFGLAASTSSSPPSKLSQGRFTTGNTPTTSHPHPHPHPHPHPPQGRFMDNVPQPPPPAKLPHRMFTDNSVQQWHHRSNQQMEMEPGPMLPGGLGLGLTYDTGNSGLPDLMMGPSALYGPKPATLDFLGLGIGGTMGGSTANGGLPALMVGGELDMGSAQAPWEEAKRKTNGRTIL

SEQ ID NO: 156918 - protein, 162 aa, Oryza sativa
  unsure (1)..(162): unsure at all Xaa locations
  Clone ID: PAT_MRT4530_5653C.1.pep
MFLTGRKIFKKHQSMIFGHIGVXIGFVHGKNSLRDSRGELLSINANIGTRGCDVFYWNQKVQKTPKQDFWTYWSVLGAFMAKTHFVIRAANFCQLMPILAHEGAMFSTXNQKVQKEPKHDFWTYWSVLGAFVAKTHFVIRAANFCQLLPILVYIGPTQVQCF

SEQ ID NO: 156919 - protein, 184 aa, Oryza sativa
  unsure (1)..(184): unsure at all Xaa locations
  Clone ID: PAT_MRT4530_56540C.1.pep
MAMPFRLRRSSAGPAIQLLVFSHSLSSATAAASTRMCDAPSTPPVNFGVTTTVPEKKAIVVERXIGKYHKTLGSGMHVLVPVVDRIAYVHSLKIQAIPIPDQLAITKDNVVVQIDGVLFFKVDDAHLASYVVDDPNFEATQLALTTVKNPAASGAEDDEDDDDNEEEEEAAAAAAGSGAAAARF

SEQ ID NO: 156920 - protein, 772 aa, Oryza sativa
  Clone ID: PAT_MRT4530_56541C.1.pep
MGQCAMSPARSGTTAGSGGGPTPSSSSSRSASTIVAGTASGYHLLKIDDYSRTRDLFPTSTALKSRAFTIGGHRWRIQYYPNGNTPNCGDYISLFLHLDEEVTREVYAQLQFRLLDDELGDKLPPPPPPPSLDANKFFSHASWGQPKFIKKEELEKSRHLKGNSFTVRCDVVVITEFVAKDMPEAATATAARRRTPARGTGSFVSVPPSDLHRHLGELLLGEKGADVVFKVGGKTFTAHRCVLAARSPVFGAELLGSMKESRRKAVVRVVDMEAQVFKALLRFAYTDSLPEMKEKDEGAMCQHLLVAADRYAMERLKLVCEEKLCERIDVSSVATVLALAEQHHCDGLRNACFDFLSSPENLKAAMAGDGFEHLSRSCPSLMTELVAMLAAAATSDGPTLPPVMSHGALSPTTAAAVSASAIVANTSRGYHYLKIDGYSHTKATPTGEALFSCQFAVGGHRWRICYYPNGNVLEAADYISMFLVLDEIVVRNVKAQFQICFAGQVEKQAPSLAWKTVRAFNKQTSSSSSWGYPKFIRREDLEKSEYLRDDSFTIRCDIIVVDNYRAEDASSGAAGFVSVPPSNLHSHLGDLLKNEKGTDVVFEVAGQRFTAHRCVLAARSPVFNAELFGMMMESDTTTNDAIQIGDMAAPVFKALLHFVYTDSLPETMEEREDTMCEHLLVAADRYNLERLKLICEERLCKYIGIGTVMDILALADQHHCKGLKKACFDFLRSPANLSAVTGSESFEHLSRSFPSLMKELVDILGTSHNYAW

SEQ ID NO: 156921 - protein, 61 aa, Oryza sativa
  unsure (1)..(61): unsure at all Xaa locations
  Clone ID: PAT_MRT4530_56542C.1.pep
ARHCMGWEQISFSGYSLSVCLXXFFSYFPLGTAQFVYWILPVLVSQTFILKTISIQKLFKY

SEQ ID NO: 156922 - protein, 268 aa, Oryza sativa
  unsure (1)..(268): unsure at all Xaa locations
  Clone ID: PAT_MRT4530_56543C.1.pep
MGITGHWVVAEDIVADRGSQPVAASRLLRDIDGNVGKARADQPASYSLLTFTAPAPPPPPPSTKLAASAQRRAPAPPAASTAQRPIRLLPPPSSPPPPGAELASSLHRAPAPPAASTVPAPPPPPPFXSSPPPPSASAPPASTAPAPLPXPHGSTAPAPPPAPRRAPPPPSTSSRSATSRRLKLKWLCAPVVFDLPISFLDRAEDTAAPRPWYKGSRRHVGLLVTCGCEGKIPSCRATGQPLRRGAAAHPLRQGATEKPLRREPLTRP

SEQ ID NO: 156923 - protein, 603 aa, Oryza sativa
  Clone ID: PAT_MRT4530_56544C.1.pep
MAVEEAAESCGSHAAASAAGRRGGGGGGGGGATSSSSSASAGAAAAAAARKQQQQQRHKLEVYTEVLRRLHDSGVPEARREGFDDELWNHFNRLPARYAMDVNVERAEDVLTHKRLLEQAKDPAQRPAFAVRAVQVSPILDGNQTDADSNTAGEEVASRLLNRQQSIHPPPAFGSSTNLEALALEASKSQGQDHDSTSDNVNYRPMHEITFSTIDKPKLLSELTSLLGELGLNIQEAHAFSTNDGYSLDVFVVVGWHDEETEDLIESVRKEIGKIDETQGWSTTHSWSSPVENMQIGENSAADHVEIPRDGASEWEIDVKLLKFGNKVASGSYGDLYRGTYCSQDVAIKVLKPERINADMQREFAQEVYIMRKVRHKNVVQFIGACTKPPNLCIVTEYMSGGSVYDYLHKHKGVFKLPALLGVVMDVSKGMSYLHQNNIIHRDLKTANLLMDENGTVKVADFGVARVKAQSGVMTAETGTYRWMAPEVIEHKPYDHKADVFSFGILMWELLTGKIPYEYLTPLQAAVGVVQKGLRPTIPKNAHAKLSELLQKCWQQEPAERPDFSEILETLQRIAEEVGDEHDGKHKEKILGGLFSALRGRGH

SEQ ID NO: 156924 - protein, 112 aa, Oryza sativa
  Clone ID: PAT_MRT4530_56545C.1.pep
MAAITAGCAAGGVNAWEELAEDTAAPRPWYKGSRRHVGLLVTCGCENKSHHIGDERRGRGEREASAAPRRRGGPELRAKSRAAAPPGSRCVEAPQRTRCAREPQRSRCAGSR

SEQ ID NO: 156925 - protein, 157 aa, Oryza sativa
  Clone ID: PAT_MRT4530_56546C.1.pep
SFSHSPRRRPGRGLLEPRAGDSTQRRAPAPPAASTAQRPIRLLPPPSSPPPPGAELASSLHRAPAPPAASTVPAPPPPPPFTELAASTLRLGASSLHRASAGSCPHGSTAPAPTPAPRRAPTTPFTSSRSATSRRLKLKWLCAPVGFDLPISFLDRV

SEQ ID NO: 156926 - protein, 79 aa, Oryza sativa
  Clone ID: PAT_MRT4530_56547C.1.pep
SLALDDFAICGVCFPVGLDSCQANQQGCRVFLPPQNICSNQCTLPGSTSHGKYENRNKNRIYIPRSFFFKKKKKLKTPK

SEQ ID NO: 156927 - protein, 85 aa, Oryza sativa
  Clone ID: PAT_MRT4530_56548C.1.pep
MTSTIIITSGGDRKATRMMVTPTTYNDDREGSSTYCGGGYNRLPDLAIAIGEGGWGLVCSSNSRSSGDDDGSGKELMMDTGSNDY

SEQ ID NO: 156928 - protein, 76 aa, Oryza sativa
  Clone ID: PAT_MRT4530_56549C.1.pep
MAQPLVNFTSDTLAGSSIPSGFVLWVMKDIPHRQTVERPTQSRVVILFRDRPSPTQDPQWRTAVTSSNKALKSSPI

SEQ ID NO: 156929 - protein, 55 aa, Oryza sativa
  Clone ID: PAT_MRT4530_5654C.1.pep
MAPRTAARTVWTALSKDKPATPEHIWGRTRTPWCKHSRCRCEAAARTQDRANAAA

SEQ ID NO: 156930 - protein, 404 aa, Oryza sativa
  Clone ID: PAT_MRT4530_56550C.1.pep
MWPVRPCYSATARKLAIEELSEGPIGLAGQTGIEWAVRPATARSDRHRLGLTDYGSIGSVSATPSSTIPASKGPTAFLRLVRPARARRSDRHYVAGQTATDWSDRVIFDVTGWSGSVHDHRVLLSPIRKYPDQFPRLPPGEWCPRASLLLAPERSKVFTPETCQPKHPQRKLRNATCIPKKYLHYSHHLHDDRTPHHPTPTKDAPDLDLEEPDPTVLLAPSSPADATRVASGDGGHQCRTILPLLDAVLSPDPRTTPPPSPSLLPSPSPPPSATAVWSSSPLPPPDAAPSPDPRNSATAIAIPTTIAIPTAVALHAAGYAVPVPARSGWSGADLVVIAAASLGDSLGHPSVRERGAPPPLSLWPCASSHSGGSEAEEGEEVSSEFHESYVYILICMTNERVLGV

SEQ ID NO: 156931 - protein, 76 aa, Oryza sativa
  Clone ID: PAT_MRT4530_56551C.1.pep
ILVVAYKKQTGCVVGTCQFSVTFNTRRNKTFNPIRTVTNKSFDPTYKALSHVAKYSARSIDAVWSLEFPKSNIRQI

SEQ ID NO: 156932 - protein, 189 aa, Oryza sativa
  Clone ID: PAT_MRT4530_56552C.1.pep
MVRQTQRLKLISSDRKDALIQIRKPAKKLYSHMGWIISIFKRTRLHPYGENQTVHDALCRSDGIPYTGTEAIHGRIAILVEGRQHPYRRKGNGRTTQKANMNHMPRRLAPKTAQSRKAADPRVLGASNPLQVLYLAVRQLPPYFSPRLDRNFTSRIHSTPHASLVPSTRHRYTPVAAELAESQATCRGQ

SEQ ID NO: 156933 - protein, 48 aa, Oryza sativa
  Clone ID: PAT_MRT4530_56553C.1.pep
TDVASIGEACTLALVRCHVSVFLRRAARQRVAQAVYSYRGLGMLINNL

SEQ ID NO: 156934 - protein, 45 aa, Oryza sativa
  Clone ID: PAT_MRT4530_56554C.1.pep
GFVDFFAHHPESLHMVCLLFDDVGIPLNYRPHGVTMVRTHYTTSQ

SEQ ID NO: 156935 - protein, 44 aa, Oryza sativa
  Clone ID: PAT_MRT4530_56555C.1.pep
FSIFLNEIRFIYTYPNLPRICTAQILLCLYDQNLKVLYFLSAHA

SEQ ID NO: 156936 - protein, 188 aa, Oryza sativa
  Clone ID: PAT_MRT4530_56556C.1.pep
MNRSALPQACQRGKLETPRMPRKRTKSRQESNWNGPHNGAFKKVTTPMTPLSSALRTRAWFSPEESTKEGGNTTASHPTNTFDARPLTNAPQSAGKQAGGHLRGPPLRFIPQIPAMLPPRRYTRGGGRKSTDTRSSLKPYPPSHTIADNIILRSTIGEGLSPPTTAPFHRRLLPLPSLAGKQAHEERR

SEQ ID NO: 156937 - protein, 105 aa, Oryza sativa
  Clone ID: PAT_MRT4530_56557C.1.pep
MPVRSAPRVAPVGWSSTRHTRQSAHDITIGLGVQDSPSPAKTAPSSCQTTWSSPWRTQRSVGGWRRPSIISGSPAEDGAASGSVALRMFQGNETEKQRVWMNNNK

SEQ ID NO: 156938 - protein, 425 aa, Oryza sativa
  Clone ID: PAT_MRT4530_56558C.1.pep
MKSPPLLSPPLPPPVRTTPRLPPLLSQSTRWSLQFLASLLCWISSSCSASCSALVFGLSGRCAEAERFGRSQESLVRAGELSWEVGMERYEVIKDIGSGNFGVAKLVRDVRTKELFAVKFIERGQKIDENVQREIMNHRSLRHPNIVRFKEVVLTPTHLAIVMEYAAGGELFERICSAGRFSEDEARFFFQQLISGVSYCHSMQICHRDLKLENTLLDGSIAPRLKICDFGYSKSSLLHSQPKSTVGTPAYIAPEVLARKEYDGKVADVWSCGVTLYVMLVGAYPFEDPDEPRNFRKTITRILSVQYMVPDYVRVSMECRHLLSRIFVANPEQRITIPEIKNHPWFLKNLPIEMTDEYQMSVQMNDINTPSQGLEEIMAIIQEARKPGDGSKFSGQIPGLGSMELDDVDTDDIDVEDSGDFVCAL

SEQ ID NO: 156939 - protein, 369 aa, Oryza sativa
  unsure (1)..(369): unsure at all Xaa locations
  Clone ID: PAT_MRT4530_56559C.1.pep
MFGRDPWGGPLEISNADSATDDDRSRDLDRGALMRQLDETQQSWLLAGPGDQAGKKKKKYVDLGCMVLDRKIFMWTVGTILGVGLFIGFVMMIVKLVPHKRPPPPPPDQYTQALHKALMFFNAQRSGPLPKHNGVSWRGNSCMKDGLSDSTVRKSLVGGFYDAGDAIKFNYPMAWSMTMLSWSVIEYKAKYEAIGELDHVKELIKWGTDYLLKTFNSSADTIDRIVAQVGVGDTSKGGAQPNDHYCWMRPEDIDYPRPVTECHSCSDLASEMAAALAAASIVFKDSKTYSDKLVRGAKALYKFGRLQRGRYSPNGSDQAIFYNSTSYWDEFVWXGAWXMYFATGNNXXLSVATAXGMAKHAGAYWLDSP

SEQ ID NO: 156940 - protein, 72 aa, Oryza sativa
  Clone ID: PAT_MRT4530_5655C.1.pep
MGENWLLGYNSLLRKVQAAAGSGICGEGSGSQCAIVLVDVELRSIADNVGGSAVNEGPQLQVWPKVVTGCEM

SEQ ID NO: 156941 - protein, 692 aa, Oryza sativa
  Clone ID: PAT_MRT4530_56560C.1.pep
MGVAPSKIEDDRALVLCQERKRFVREAIDGRCALAAAHCDYIRSLRDTGFLLRKCFEHEASEESIPNNKSPSSFQASHMKAAMNSIRTYLEKVATPVTVTMVSASSQDPTGTSPLDHFDQIHPGDNQFSPKEKDRSGQCLDKVDDPRPFLEEGIPELEEEGERTPSNEEDGFAESKDDFANEEENFSESNDAFLSPSIETFVPVSNSNDVSDKNSSTDKAPEHHGHGSVASKDIALPNTGCQNDNPQNERRMTDIHTNENYSNSAVSPVNVVPPSGAAFPMVSKEPYPYLSISVKGLYTGMVEIERLFSRACDSGKEVTRVLDEDKLQFRALLPQETARGSASSSFLSTLFACCREDVPLPETPSQAEVKYLTWHRSVSSQLSLSRNPPGAITVMHTSTLDKLYAWEEKLYDEVKVNSAICRRYDEKCKQLRDQESRGKNQILVDFTRATVKDLHSRILVAIQKIDFISKNIEDIRDKELQPQLDELIRSLTRMWETMLECHHLQLAIMKLVSSKRSVKLSFQSESECQDALLLSAKLIKLCSDFQNWVASHKVYLSSLNLWLHKCMKPLKKRKGSRKQNVVDVSLTECAVAPIFTTCEIWIKLIDDLLTNELVKAIENLVADVGRSFPHQEQVLNGETGGEILRNNAPADVQSSLMAFLEKLEAFSAVSLQKYIDLQKNIDEAKDRFSRED

SEQ ID NO: 156942 - protein, 59 aa, Oryza sativa
  Clone ID: PAT_MRT4530_56561C.1.pep
LISKHSNPLTALFKLLTCFAKSIPLTNYHTRCYLNPSLGIYFHNITTNPVIKKKNNSKH

SEQ ID NO: 156943 - protein, 319 aa, Oryza sativa
  Clone ID: PAT_MRT4530_56562C.1.pep
MDPEVKDSRPSRSPGEPNLFLQWGSRKRLRCVKTRDDGSPSPARTDVLRRTIPRVNRPLGGDVAPFRSPRRPSTLNRRKTEPFVSDNRHSMSLSPEKDRYYSTRGSPFPFEGNGFDFGGGMEEKGTTALPRFFISLSNKEKEEDFMAMKGCKLPQRPKKRPKLMQKCLLMVSPGAWLSDLSHERYEVREKKCARKAAEIEHFVGRAEMVVVGRNWEPMKRNPACHGLPRSMPPQEFGPPFGLPRDRPSWSPTVQPSSAIGKSVDPWQPLAGKSVVSGTGKCTPLRHHFACYTSKTGTAWHVSTTKAPAVSGSASASSHF

SEQ ID NO: 156944 - protein, 714 aa, Oryza sativa
  Clone ID: PAT_MRT4530_56563C.1.pep
MTPTVLMEFGQQRQIKRGYDEMAFRGMASAAPRGYAETVGESEGAAGSPVRVDSEDSSAPKRKCISLNSDGFDVKREIFVPAKMSSSERRHLRKRFRTELDSVRNLLKKPEFAVPVPVNRAPALSSSAAPRGKKGQRGNHVVRGAKGRFLPTKPRPEASTVLTEDAIFKQCDAILKKLMTQKCSNIFDSPVDAVKLNIPDYFQIIKKPMDLGTIRNKLDSGSYTSPSEFAADVRLTFSNAMTYNPRGHVVHDYAIQLNKMFESRWRTIEKKLASIATEAHVEVDRADSKRRKTPPVDCSEVSTECVRPTESVRPTESVKPKMTFEEKESFGNCLASLSEDPEVPSHIIDLLQQCIDNNTDQLGDGEIEIDIHAVSDDLLFELKKHVDKYLQEREQSQQAKSEPSENEAANVSGLSHSSTNPCKGGDPVEEDVDICGNASPILIEKDAHNNPNKCGSPSSSSSDSGSSSSDSESGSDSESEQEKGGSPGKPKGSKRSEQLVEQEKSDVISPVDAIRPADDVELREQDNESKPAPEGENSKPDRQVSPDKLLRAALLRSRYADVIVKAQGILSQGGDKQEELEKLQKEEKARLLAEGNAAMEARRAEAEAEAKRKRDLEREKARQALQEMERTVEINDNLHLKDLEMLGTATTEHIVSSVDETSPEHSQDGMPSFLPGSGNPLEQLGLFMKADEEEEEEDPSSVPSTKDAEEGEIN

SEQ ID NO: 156945 - protein, 119 aa, Oryza sativa
  Clone ID: PAT_MRT4530_56564C.1.pep
MGGSESGSGRGREGREKKGGGSVGTWYPWECGTSSVAQTGVAEPNLSHGTAMQVGVARGTDRWPGRLRRTEAHFGLAAQNAAPSRSRGASVPHSYRVGSHYYSAPPFRETTPNVVLSTK

SEQ ID NO: 156946 - protein, 54 aa, Oryza sativa
  Clone ID: PAT_MRT4530_56565C.1.pep
MGLLCNIFFFFFFFFFFFFFFFFFFFFYFFFLNRRTSEFIIYSSPFSHDGRTLG

SEQ ID NO: 156947 - protein, 734 aa, Oryza sativa
  Clone ID: PAT_MRT4530_56566C.1.pep
MEFGQQRQIKRGYDEMAFRGMASAAPRGYAETVGESEGAAGSPVRVDSEDSSAPKRKCISLNSDGFDVKREIFVPAKMSSSERRHLRKRFRTELDSVRNLLKKPEFAVPVPVNRAPALSSSAAPRGKKGQRGNHVVRGAKGRFLPTKPRPEASTVLTEDAIFKQCDAILKKLMTQKCSNIFDSPVDAVKLNIPDYFQIIKKPMDLGTIRNKLDSGSYTSPSEFAADVRLTFSNAMTYNPRGHVVHDYAIQLNKMFESRWRTIEKKLASIATEAHVEVDRADSKRRKTPPVDCSEVSTECVRPTESVRPTESVKPKMTFEEKESFGNCLASLSEDPEVPSHIIDLLQQCIDNNTDQLGDGEIEIDIHAVSDDLLFELKKHVDKYLQEREQSQQAKSEPSENEAANVSGLSHSSTNPCKGGDPVEEDVDICGNASPILIEKDAHNNPNKCGSPSSSSSDSGSSSSDSESGSDSESEQEKGGSPGKPKGSKRSEQLVEQEKSDVISPVDAIRPADDVELREQDNESKPAPEGENSKPDRQVSPDKLLRAALLRSRYADVIVKAQGILSQGGDKQEELEKLQKEEKARLLAEGNAAMEARRAEAEAEAKRKRDLEREKARQALQEASEKNCIYWCRAFFFPLKFEWFNLMQMERTVEINDNLHLKDLEMLGTATTEHIVSSVDETSPEHSQDGMPSFLPGSGNPLEQLGLFMKADEEEEEEDPSSVPSTKDAEEGEIN

SEQ ID NO: 156948 - protein, 78 aa, Oryza sativa
  Clone ID: PAT_MRT4530_56567C.1.pep
MGGRPVAARRGAAASPSPHPDPAGGEAAGWVASQRQDGRLAGAGLQTGVKEGFSSSVRGHGSDCWARSPPSPCAGFRL

SEQ ID NO: 156949 - protein, 37 aa, Oryza sativa
  Clone ID: PAT_MRT4530_56568C.1.pep
TESYTPHISSSSYLIFNFRTTILLKLITTHQQRYQCY

SEQ ID NO: 156950 - protein, 66 aa, Oryza sativa
  Clone ID: PAT_MRT4530_56569C.1.pep
QKSTEPCASPPSSPISLIIPCPFDPTVLSIPSLSALSLSALASSIHSPLPFLPLLLSSSSSFHVRP

SEQ ID NO: 156951 - protein, 39 aa, Oryza sativa
  Clone ID: PAT_MRT4530_5656C.1.pep
IQTSLSSIMIAENRHEASTRATNKRSMSYKRAAMKQRMP

SEQ ID NO: 156952 - protein, 47 aa, Oryza sativa
  Clone ID: PAT_MRT4530_56570C.1.pep
STLRCHFILQISTQHPGSLQINSLQSSPITGFQLIQQIKLKTTGTKD

SEQ ID NO: 156953 - protein, 73 aa, Oryza sativa
  Clone ID: PAT_MRT4530_56571C.1.pep
SSTGSRSHRRRRAARRRRRWSGRTGRRSRGARGDPQGWEAAPPPPASPARPSSSGRCRRRSRPPTPRRPPGKP

SEQ ID NO: 156954 - protein, 107 aa, Oryza sativa
  Clone ID: PAT_MRT4530_56572C.1.pep
LRVKGSQLQTPPVADETERFGGGSGASMYSSSLSSGYVRRKSAKEDESLSLDPVSRRDSAAQPTSSYGSFTTYEKIPAKKRNKDDEAVTTPVRRSSRLRNQVKSPEA

SEQ ID NO: 156955 - protein, 663 aa, Oryza sativa
  Clone ID: PAT_MRT4530_56573C.1.pep
MQIMKIDDGRPYHSNVFHELVSNGGPKVDGEIERETKQHILLDTMVQQTNPSEYSFMKAGQQNVDKAIQIRPEDVSYDKDVVEIKLPDIMVSSNYGVQFVKDVCIDEGVLADQKAIAEKVSLNLNSSKGDTNGIRIKETADEPAKSVNDLKSQIVVLPEACVTDGDTVEQNHPCKLHDLEGNSSVDGLTVVNVEKSTPKQLVSNDNAEYCQQMGADVSESSENHGPNLNGEPVDQPRVRDSHETGASIASAITNVNGLSVESTADGHSGVVTEDGVSGVALNKTEINQINHYNPFIAYGSLEDTWEPKYSLPTIVDDVYSVPCPVEKTDSFSDIVYGALRGFNFLETGESIAEDSTLDSVVENSSMTDVQASEEKDEARSDDILSDERKIPVDQRSPVENSDSLSDPVDRALSSTETDGARNEDSRLDSTEASPSRSYVQPSEDRNDQVDNFVYGIRTDAAHGTSSGTSPLTGKTEPIDAKSENDPKCEIDSVQDGHDFNPREANDGTNISEDNKDSKSSTRQTGPVTEQNEPDSAKMTMQTEPVAQRNEPDSAKVTMQTESVAQPNEADSAKVTARNVIRNPFESSFSGPSIISGPLTPSGHIPYSGNISLRSDSSTTSTRSFAFPVLQTEWNSSPVKMAKADRRRLRRDRGWGYRILCCKF

SEQ ID NO: 156956 - protein, 84 aa, Oryza sativa
  Clone ID: PAT_MRT4530_56574C.1.pep
MAIWLDCVGRAVFRSKAKWVGSRVYNIVRGTERIMPRLSIVTREEHEGVSSAWTWTTMNTTTIESIDELTFPGRGLGGNDREAE

SEQ ID NO: 156957 - protein, 310 aa, Oryza sativa
  Clone ID: PAT_MRT4530_56575C.1.pep
MWILFRFVFILVPHKRHVDVTWGEGQVNPLLGNPLAAWSHERAASANRKSYELPVIEFISRKKWPMELYQVQQKGEKTSLYVSAWPKRSSAWRIYYRDNHRRAIPLANLHTLLSLCHEKPMYSCDHECTAPTHTAFGAKYQPCIGVSGRPDHHAVGRLQQPAGKAAAAAVVSAAAQPQRAAKKRHAAAPPPRPSASTSRRSSTTVVATDVSSFRSMVQELTGFPAAAIFRPLPRRIPVHAVNPSPAVRGYGGGALQGHGSDTATAAGSSSSSNPGVSTVQLMQCSPPGVFDGLPDLGSPEFDSWLDLSDE

SEQ ID NO: 156958 - protein, 98 aa, Oryza sativa
  Clone ID: PAT_MRT4530_56576C.1.pep
LPWWVWPFLAPSIWTLQFPWGPLRLALGKRAFKSLFFGQNLLFPLEILIFSRGVGHPLEGHVAGASNGPFGFPPAFFSAIESVVFGVDGLLCIHVGLC

SEQ ID NO: 156959 - protein, 155 aa, Oryza sativa
  unsure (1)..(155): unsure at all Xaa locations
  Clone ID: PAT_MRT4530_56577C.1.pep
HLTTGLLPSQPTGVLAYTVGWSYHRXWASSSSPTSCLICCRLVSSSIWLIGHTTVDRHLHHHRRLASVAADWCPRLYGWLVTPPLMGVFVFTIGLPLSPPIGVFTYTVGGLRHRXWASLSTPPACFRRRRLVSSLLLMDDCSHIGHPYMVRQLSK

SEQ ID NO: 156960 - protein, 59 aa, Oryza sativa
  Clone ID: PAT_MRT4530_56578C.1.pep
MQHEGHTDTSAPPHTALAGEHNVDHLVVHVEQGVTERRRGPACLGLWLRIVPALIVVAA

SEQ ID NO: 156961 - protein, 67 aa, Oryza sativa
  Clone ID: PAT_MRT4530_56579C.1.pep
YFGSSSTSRVYLRVFISSTKILLHVNCQPPLYSLSPPSVFPPPPKKTHSTDTSLLKGDFYVSLISFG

SEQ ID NO: 156962 - protein, 771 aa, Oryza sativa
  Clone ID: PAT_MRT4530_5657C.1.pep
MPRQHAPAFTPEAASASATGGAGERQSLPALQAKMKRDPEGYEEELRQLRRHFESSVFLFRQQAALASTSSSGGGGEVAKELGDLALFLAHVAPFYPDDLADLPDQIGGLLDTNARALPSGLRVHLVQALILLVNRKIVDLEDTMELFMELQVIGDRAVKKLAFSHIVHSIRRMNQTHKNEARNRKLQNILFTFLQGEEESRAKRAFTILCDLHRRRVWFDDRTANAICNACFHGSSRIMIAAISFLLGYENVEQEDDSDASSSEDEAQNPQIILSKEDVYKANHKGTAATKKKKKAKLQRVIRSMKRQQRKSTEDTGSNYYSPLTYLKDPQGFAEKLFSRLQKCNERFEVRMMMLKVIARTIGLHHLVLLNFYPYLQRYVQVPPDAVEPLFKQIVNQFVHDRSRPELMNEDLLQDLVLYKKSHEKAVSIAARSLITLFREICPSLLVKKDRGRPADPKARPKAFGEATIASDVPGAELLDEDFSSEGEGSDDESDAFDSNDEKELQSARGTKQNLDGSSEANKLDTDEGMKEEDQLSGDEDDTEELDEDQDISDNDSEENDDELELDSDMDEENDVSESDDDEELSEKLDDSDEGSDQDDDSDQDDKSKNSSRKANKRKLSDYIGQLNAADASLRALKKLAGAKKAEASCDEAGKILSDEDFKRIKELKAKKEAKLALAQHGLGKGHDTKSVTFKMPSSDQLSLKRVDPSKLEAHIKRKLTKEERLEMVKAGREDRGKYQARTAVKQKKLLLFLLYLYASHCVLDRWLEQ

SEQ ID NO: 156963 - protein, 76 aa, Oryza sativa
  Clone ID: PAT_MRT4530_56580C.1.pep
STSSAATTPEHTGGEGEEEKAPRGGRRPKLPQVAGTLGFPGGGGGAERGRPPDAAVRDLNGGQISGAKEASRSGLS

SEQ ID NO: 156964 - protein, 157 aa, Oryza sativa
  Clone ID: PAT_MRT4530_56581C.1.pep
ALLCSPRRPAPPRVCCLLPVPSSERMLATAARWAAKKGKPKMAPIELPAPPEQAQSITRTIFDVVREHGPLTISDVWDHVKDVGLRGLTSKRQMKIMMRWMREKQKLRLICDHDGPHKQFLYTTWFTNPKNAPQRPKRDHHRQQQQQQQFRGEPRKP

SEQ ID NO: 156965 - protein, 34 aa, Oryza sativa
  Clone ID: PAT_MRT4530_56582C.1.pep
SIRLPDCLVVGLIVHPSRFTTTSGVGVTIAKAQH

SEQ ID NO: 156966 - protein, 150 aa, Oryza sativa
  Clone ID: PAT_MRT4530_56583C.1.pep
MAPIELPAPPEQAQSITRTIFDVVREHGPLTISDVWDHVKMETVIPERSCVPLIATLIACIPDERENLWHFRVQDVGLRGLTSKRQMKIMMRWMREKQKLRLICDHDGPHKQFLYTTWFTNPKNAPQRPKRDHHRQQQQQQQFRGEPRKP

SEQ ID NO: 156967 - protein, 159 aa, Oryza sativa
  Clone ID: PAT_MRT4530_56584C.1.pep
DFGKILAEIQESLVSLNNKQAETQAVVAKLDAGVNGWHPQVESAIHDLRAEVGDLRQQLDLVGKMNQASSSALSPRVPLTDEERKASLLPTPPPTSQPAAAEDRKVPLLPTPPPTTQPMMAEGGSKWANGHHSATQLRGRVSGVHLTQNLAPDAWADAW

SEQ ID NO: 156968 - protein, 87 aa, Oryza sativa
  unsure (1)..(87): unsure at all Xaa locations
  Clone ID: PAT_MRT4530_56585C.1.pep
GIPGSTPRPSPPPSCPCATRIPSKRCSPTPHPHLYIASPPDLAIDADGRXKSRYELADAVSICIAVLLVPTSISCGGSTICDRGSRG

SEQ ID NO: 156969 - protein, 215 aa, Oryza sativa
  Clone ID: PAT_MRT4530_56586C.1.pep
MAGRIGGGMAALSVSEIEIVQECGMKIAEKCDGLPLAIKIWSKMGLPEELNKAIYLSYEDLSHNLKQCFVYYSLFPKDEIIGIDKIVSMWIAEGFIGKDGYSAQSAGLDYYKELIKRNLLEPQNDYYNEEHCIMHDVVHSFAQHVARDEALVLRDPQNNGILSSSKFRRLSISAEQIEWSNLQNQHCLRTLILFGNIKLKPGDSLRILPSLRTIH

SEQ ID NO: 156970 - protein, 127 aa, Oryza sativa
  Clone ID: PAT_MRT4530_56587C.1.pep
MLSCLSAWLVNLRRNPLARLHMNVVASHLHKYGLRYDDLFDAYQYHGLDIKEALARLPREVVDAHNQRLKRTMDLSTKHQYLPADEQAMQTTLRGYLSDAYLSSHRVWRERRRWDKPTTLFQAIWQF

SEQ ID NO: 156971 - protein, 60 aa, Oryza sativa
  unsure (1)..(60): unsure at all Xaa locations
  Clone ID: PAT_MRT4530_56588C.1.pep
LXLXLRGHSXCTRLNSCIITXSSCLTLNXLLLILRLILAXIHXXCGCKNSVILYXQILSL

SEQ ID NO: 156972 - protein, 69 aa, Oryza sativa
  unsure (1)..(69): unsure at all Xaa locations
  Clone ID: PAT_MRT4530_56589C.1.pep
IXXKVYXIXQTFGXNFSLPYXRLLKXXDXGGXLGEALLXXVAEVVXWVGXDXXDGLAXGXXXGWXGWSC

SEQ ID NO: 156973 - protein, 269 aa, Oryza sativa
  Clone ID: PAT_MRT4530_5658C.1.pep
MDRYQRVEKPREEAPIKENEIRITTQGRMRNYITYATTLLQDKGSDEVVFKAMGRAINKTVMIAELIKRRIVGLHQNTTTGSTDITDMWEPLEEGLLPLETTRHVSMITITLSKKELDTSSIGYQSPLPADKVKPLVEYENEEDAPSPAGRGRGRGGQGRGRGRGRGTRGNGYMDYADGGWEDDHAPPAYAGNGYTRGRGRGFRGRGRRGGGYGAQPDYQQDGGYYDEAPVHAPPRGRGRGRGRGRGPVRGRGRGGNVNGVMHATAVGA

SEQ ID NO: 156974 - protein, 42 aa, Oryza sativa
  Clone ID: PAT_MRT4530_56590C.1.pep
TNVYPLSDSSLHGQDAEYLSHLRAIMNIRFCRGFNSGVQYRY

SEQ ID NO: 156975 - protein, 928 aa, Oryza sativa
  unsure (1)..(928): unsure at all Xaa locations
  Clone ID: PAT_MRT4530_56591C.1.pep
SSAAPAALGPPVTVKLTRENYVLWRAQVLPALRGALLTNYLDSTAEEPAKTRTTVDKNDKEIVSNNSEYAMWMAQDQQVLAYLLNSLSKDVLQQVATLNTSAEVWAAITNMYTSQSRARITNLRISLTNSKKGSTTTAAYFSKMKGLADDLASAGKPIDDDELVSYILAGLDIDYNPLVSTVVGRSDPISLSDLYSXMVSYDNRMDHLQGGGQIQSSANAAFRGRGNNNNNFRGRGNGGCGRGNGGRGGGQQGPRPVCQLCGKTGHTVIKCWYRFDQTYQPEEKVAAAATNSAYGVDTNWYVDCGATDHITGELDKLSIREKYNGLDQVHATNGSGMNISHIGHSVISTPNKDLHLKNILYVPTANKNLVSANRLAFDNDAFVEIYPKFFNIKDQATKKLLHHGRSKGWLYPLAPEPGGQSPSLNKIALSIVKPSSIRWHYRLAHPSFQIVNRVVKSFKLPCSSESNNVEHICDSCQRAKSHQLPYPKSMSLSNVPFALVFSDVWXPAPTSIGKHDYCVSFIDDFSKYTWIYLLKKKSDVFQAFLNFQQYVERQFNTKILTVQTDWGGEYEKLNSFFQKIGIVHHVSCPHAHQQNGSAERKHRDIVEKGLALLSQASVPFKFWDEAFLTATYHINRLPSSVISFKTPYEQLFSENPEFSHLRIFGCACWLNLRPYNARKLSFRSIHCAFLGYSPLHKGYKCLEISTGRVYISRNVVFDETIFPFAALHPNAGARLRREISLLPTRLLPVTDQRGEITNDHMLTCSTNPSCGDQATGAQVVGENSAQNGENLVQNSDENHGAXASGAGHEDDLMADSSSGSEGSHSHAQSTPSTGTGSQEHSTPGSGQSGPNSALSSGSPATTSSTHGNPTGSAVDDTAGSGSSVQQSEPVRPRTRLQSGITKASWLDVDGTIKYSLACSTGEPANVQE

SEQ ID NO: 156976 - protein, 171 aa, Oryza sativa
  unsure (1)..(171): unsure at all Xaa locations
  Clone ID: PAT_MRT4530_56592C.1.pep
WQHGARRHGSTVVDGSTAPATVVPASAPRAPPRPPRRLPLSPPLQPSSLTISAVDPPPSTSSARESSGAAAAVAVLVVLRPLRDLPAXSVLVGGGGLARDRPRRXRLCSRPPPRPSSAAAXPLPDLPASVLAGGGYARARLRDLPRRRPCPSATVLVGGGKDRWLYVDWFS

SEQ ID NO: 156977 - protein, 467 aa, Oryza sativa
  Clone ID: PAT_MRT4530_56593C.1.pep
MSTQSVIAVKQFSGPDKIAQAYTVPQPSAHVLSNANYDYDLCGSTNSTSLSCAIQSSNIKTESISSSSLPKILPFSTDSNGESSLSRMSQAEFSDPILSSSSTFCTSLYTSSPMNSGSCRKTGYLPFLPQPPKCEQQQNSAGQSSSSLMLLDADLRNSGHADDEHTDDLKDFLNLSSDCSFHGKCSAMAYNEQMEFQFLSEQLGIAISNNEESPRLDDIYDRPPQLMSLPVSSCSDQEDLQDARSPAKVQLSSSRSSSGTASCNKPRLRWTPELHERFVDAVNKLEGPEKATPKGVLKLMKVEGLTIYHIKSHLQKYRLAKYLPETKEDKKQEEKKTKSVANGNDHAKKKSAQMAEALRMQMEVQKQLHEQLEVQRQLQLRIEEHARYLQKILEEQQKARESISSMTSTTEGESPEFAPMEKTEDKAETSSAPLSKCRITDTDAECHSKVDNKKTKPQADLEMVHDE

SEQ ID NO: 156978 - protein, 1012 aa, Oryza sativa
  Clone ID: PAT_MRT4530_56594C.1.pep
MKIATIGLYLLLLMVCSAVQIICSSLYGNETDKLSLLEFKKAITLDPQQVLISWNDSNHFCSWEGVLCRMKTPHRPISLNLTNQGLVGQISPSLGNLTFLKFLFLDTNSFTGEIPLSLGHLHHLRTIYLSNNTLEGAIPDFTNCSSLKALWLNGNHLVGQLINNFPPKLQVLTLASNNFTGTIPSSFANITELRNLNFASNNIKGNIPNEFSNFLMMEILILGGNMLTGRFPQAILNISTLIDLFLNFNHLSGEVPSNILYSLPNLQVLALDFNFLQGHIPSSLVNASNLRELDISSNNFTGVVPSSIGKLSKLYWLSLEGNQLQTHKKEDWEFMNSLANCTRLQIFSMAYNRLEGHLPSSLSNFSTHLQRLHLYGNEISGFLPSGIEHLSNLIDLSLGTNDFTGTLPEWLGNLKQLQMLGLYENYFIGFIPSSLSNLSQLVYLGLHFNKFDGHIPSLGNLQMLEVLNISNNNLHCIIPTEIFSIMSIVQIDLSFNNLHRKFSTDIGNAKQLISLELSSNKLSGDIPNALGNCESLEYIMLGINSFSGSIPISLGNISNLKVLNLSHNNLTWSIPASLSNLQYLEQLDLSFNHLNGEVPVEGIFKNATAFQMDGNQGLCGGLPELHLPACPTVLLVTSKNKNSVILKLVIPLACMVSLALAISIYFIGRGKRKKKSISFPSLGRKFPKVSFNDLSNATDRFSTANLIGRGRFGSVYQAKLFQDNIVVAVKVFNLETSGSQESFIAECNALRNLRHRNLVPIFTLCGSIDAEGNDFKALVYELMPRGDLHKLLYSTGDDGDASNLNHITLAQRISIIVDLSNALEYLHHNNQGTIIHCDLKPSNILLDDNMIAHVGDFGLVKFRTDSSTSFGDSNSIFSLAIKGTIGYIAPECAEGDQVSTASDVYSFGVVLLELFIRRRPIDAMFKDGLSIAKFTEINFSDRILEIVDPQLQQELDLCLEAPVEVKEKDIHCMLSVLKIGIHCTKPIPSERISMREAAAKLHIIKDAYLRGN

SEQ ID NO: 156979 - protein, 557 aa, Oryza sativa
  Clone ID: PAT_MRT4530_56595C.1.pep
REPEVATARRRKESKLLLERNRPAITTFMAIVHKGHDYVRSKIKYTYPICRAWMFSAGKLILLLLAVWFNCNIRGFDSLLRLGTNSLLTVLWCSTLSVFAMIGLKKMLILMVIAAAVVAFVGLGFAVLVIAVAAVVILWLYGSFWTTSGIIILGGASFFLKHERFALLVTCLYSMYCAKNYVGWLGLLLSLNLSFISSDVLVQLLKNNVDNNKSAGSSRNSEPDNTSQSEYAQPSDRGPGDPSTSGAEKELTSEDEVSRLLNCTDHYSALGFHRYENIDVSLLKREYKKKAMLVHPDKNMGNDKAADAFKKLQNAYEVLLDSLKRKTYDDELRREELLNYFRRFQSASQKVLLGSGIFRQGFSPSEGVDEGPYGLSRRIACKKCGDFHLWIYTGRAKSQARWCQDCNDFHQAKDGDGWVEQSFQPVLFGLLHKPELPHAYVCAESIIFDVTEWFTCQGMRCPANTHKPSFHVNASLLKQNSGKGSTSAQRGGGIPNGVNMDGGIDEEEFFEWLQNALQSGMFESFGAQNEPPSPGSGSNAKGSNSSSKKKKKGKKQW

SEQ ID NO: 156980 - protein, 725 aa, Oryza sativa
  Clone ID: PAT_MRT4530_56596C.1.pep
MARKGSQSKSVLNHASPNRQNAANCEVLNTPESDVMDGENRSSHVQGGSNVSGVNYGQKTKGIKKNNRSNGISSSGKSDDRASKKQSVDTNYDIGNSGENDNELSSSTSKARRDSKRSSRRGCGKNSSIEQTPMPVFAEKVLEKTRCIACMAASIFRASVMYIIEESKLLLERNRPAITTFMAIVHKGHDYVRSKIKYTYPICRAWMFSAGKLILLLLAVWFNCNIRGFDSLLRLGTNSLLTVLWCSTLSVFAMIGLKKMLILMVIAAAVVAFVGLGFAVLVIAVAAVVILWLYGSFWTTSGIIILGGASFFLKHERFALLVTCLYSMYCAKNYVGWLGLLLSLNLSFISSDVLVQLLKNNVDNNKSAGSSRNSEQNSGKSGFFGEFRQSSADNTSQSEYAQPSDRGPGDPSTSGAEKELTSEDEVSRLLNCTDHYSALGFHRYENIDVSLLKREYKKKAMLVHPDKNMGNDKAADAFKKLQNAYEVLLDSLKRKTYDDELRREELLNYFRRFQSASQKKGGSGIFRQGFSPSEGVDEGPYGLSRRIACKKCGDFHLWIYTGRAKSQARWCQDCNDFHQAKDGDGWVEQSFQPVLFGLLHKPELPHAYVCAESIIFDVTEWFTCQGMRCPANTHKPSFHVNASLLKQNSGKGSTSAQRGGGIPNGVNMDGGIDEEEFFEWLQNALQSGMFESFGAQNEPPSPGSGSNAKGSNSSSKKKKKGKKQW

SEQ ID NO: 156981 - protein, 194 aa, Oryza sativa
  unsure (1)..(194): unsure at all Xaa locations
  Clone ID: PAT_MRT4530_56597C.1.pep
PGPKARKTKKREPKKKKPEKKKKGEKQKTGGKKKAKKQNKRGKRPRKREQEHGEKQPKPPGKKSQXRGGTXSQXGGPKXKKANQRGPKANKPTGKKRKAPKANKMGKNKGYPGNAMENHGQKMENKGHQKTPKTGQRRGRKPETPKTAPPFFIFFFLFFFFFFFFFFFFFFFFFFFFFFFFFFFFLFFYLRNAW

SEQ ID NO: 156982 - protein, 158 aa, Oryza sativa
  Clone ID: PAT_MRT4530_56598C.1.pep
MLAVRASGDEGVSTPELEGVSLHPWPHRRVCFAFPPLRRRFDATAVTLLDYGAGNVRSVRNAIRHLGFSICDVRSPEDILAADRLVFPGSGAFSSAMDVLTRSGMANALREYIRRDCPFLGICLGLQLLFDSSEENGPSKAPFRSRLFVSLIANMFHF

SEQ ID NO: 156983 - protein, 67 aa, Oryza sativa
  Clone ID: PAT_MRT4530_56599C.1.pep
MCNGSSRNNSLARSPPAISGEVAPPSPSSSPVAVTTVGCEAEPATIMAMKILASAEAEARMKRRRPP

SEQ ID NO: 156984 - protein, 207 aa, Oryza sativa
  Clone ID: PAT_MRT4530_5659C.1.pep
MLHPNGDGDGDGGDDEGDASGGEEEQGGGIPLKKGPWTPDEDKRLREYVEAHGEGNWNRVQRNAGLNRCGKSCRLRWANHLKPDLKKGPFSKEEEEMIIKLHLWLGTKWAKMANSLPGRTDNEIKNFWNTRCKRIQRTGEPLYPKEFNHFKLTDLEVMNCESPDESRAKKRTNEVLQGNGQSYKEVFFDNFAADGRARSATLADGWG

SEQ ID NO: 156985 - protein, 182 aa, Oryza sativa
  unsure (1)..(182): unsure at all Xaa locations
  Clone ID: PAT_MRT4530_565C.1.pep
XXXXXXXXXXXXXXXXXXXXXXXXXXXXXXXXXXXXXXXXXXXXXXXXXXXXXXXXXXXXXXXXXXXXXXXXXGGAGFGETKVNDRGLGRKKFFYGAPKIKSRGGGLKTGGGENPGGTQIKGLGRKSPFGRGGKKQRGPTRRPFQKVANPKGKRGPPLKGPIKRGGGGGTPKGARYIGRGLR

SEQ ID NO: 156986 - protein, 86 aa, Oryza sativa
  Clone ID: PAT_MRT4530_56600C.1.pep
LSKRQSLRSWERKRDEDAKGIGERRKECQKGQKRKRKNGRALGEFVDGIRGESWSLGPLGSVSSLFSHHGDRLPLASETPPGPEAP

SEQ ID NO: 156987 - protein, 164 aa, Oryza sativa
  Clone ID: PAT_MRT4530_56601C.1.pep
MEAKIGKLVESVGSFFSGGDTIPWCTRDIIAGCEREVAEAANEEQKSDSIMRLSWALVHSKNQEDVNRGIGMLEASLGQSNSPLQTREKLYLLAVGHYRNGDYPRSRQLVDRCLEIQPDWRQALSLRKAIEDKIAKDGLIGIGIATTAVGLLVGGIAAIAARKK

SEQ ID NO: 156988 - protein, 122 aa, Oryza sativa
  Clone ID: PAT_MRT4530_56602C.1.pep
EHQPIEFAPGLGTASNFNKINCNTPFGEYKYAGIFIQLNLNIFKKNKSIVHNAHGFYALSYTTPSVPFYRAHKFFDSVLEYREYCALSCICSQDALLFCMRMIACNVTLGYLHATTQQAMHV

SEQ ID NO: 156989 - protein, 241 aa, Oryza sativa
  Clone ID: PAT_MRT4530_56603C.1.pep
MEAKIGKLVESVGSFFSGGDTIPWCTRDIIAGCEREVAEAANEEQKSDSIMRLSWALVHSKNQEDVNRGIGMLEASLGQSNSPLQTREKLYLLAVGHYRNGDYPRSRQLVDRCLERNSAVFVPYDAMEVRLTLSLSSFFTEFSQPKLTHVGYTIHGNVYLVFLVLVLFSCLTYVHNANGIESFNLSRQEHFHIQPDWRQALSLRKAIEDKIAKDGLIGIGIATTAVGLLVGGIAAIAARKK

SEQ ID NO: 156990 - protein, 49 aa, Oryza sativa
  Clone ID: PAT_MRT4530_56604C.1.pep
METSGFGGKRPIRIELDSTNFQNELADVSKREKGVTAGRLEEDDDPDRN

SEQ ID NO: 156991 - protein, 316 aa, Oryza sativa
  unsure (1)..(316): unsure at all Xaa locations
  Clone ID: PAT_MRT4530_56605C.1.pep
SNNNLLGELPPDLCSGFQLQKLLVSDSNQFTGMLPQEFCQLVLLNFLDLSSNQIYGDLPTCWSNLQQLFFLDLSSNAFSGKVPTSTSKSLPICKNLTMVDLRDNRLSAEISSRIWESLPSLKILQLCSNMFEGYIPWQLSNHSQLQLLDLADNQLVGSTSXTAHFANFRSMMQQNKRLNIGSTYVAFTYSNYFLSPYSNRIELIWKSRSYTFESTIPLLAVIDLQATFFLMXIPAEFANLKGLQFLKLSRNNISGSIPNDIGNMNALESLDLSCNAFSGHITTNISSLTFLSSLHLSNNHLSLCQEGHPQVASLRH

SEQ ID NO: 156992 - protein, 56 aa, Oryza sativa
  Clone ID: PAT_MRT4530_56606C.1.pep
MDINQEDESDGCRDARHGERETRDSLTPKALAFVLAVGDEDGKAASAMPCDDAAIE

SEQ ID NO: 156993 - protein, 67 aa, Oryza sativa
  Clone ID: PAT_MRT4530_56607C.1.pep
PLFVPRQTIEKRYRSHAMYRYIGSGSTYLVFTSGVTHLYLMSTYVLYDNKNNILQHLPYEVVLHACT

SEQ ID NO: 156994 - protein, 187 aa, Oryza sativa
  Clone ID: PAT_MRT4530_56608C.1.pep
MDELLLLLLLLRRRSPARRRAPPARPHRRIQMAAGWSVCPVGDVRRHVEAELAATVLESLTKEAAAPPACRIHPLPLVAPRPAEKRRGLAAWMVWFASLTSYLELSNEPSQAGFLARYDNEPSRASSYLNELDRAELARYPPLDIVLSMGRTKEYYTSFTKSTTRWNNSAGGHGWRGGFGLNAGPSG

SEQ ID NO: 156995 - protein, 253 aa, Oryza sativa
  unsure (1)..(253): unsure at all Xaa locations
  Clone ID: PAT_MRT4530_56609C.1.pep
RRPPDLLPPPGGARWRKPLPATSPVTPPPPPPAPPSSSGPPTGGGGPSPQXPPSSPALASQVSRNAAGGPPKFRRPRVSPPSANQERAGPPLPSPLPTHTQPATAPPVRPENPPSPSSPPPFSTPPPPRHSRTXPPPRPTTFPLPPSEPYPLAPPAPLLPTPSLPGXPPPATDPLSPSSPPLPLPAPLPPYPIPAPSLPPRCSRSPRHYSLPLSPSILPLSLPCPLVPRYSLRTAHLPRSPSPPSFLPLVRTT

SEQ ID NO: 156996 - protein, 552 aa, Oryza sativa
  Clone ID: PAT_MRT4530_5660C.1.pep
MEEEEEAARLAGSQGESPAMLHPNGDGDGDGGDDEGDASGGEEEQGGVARAGVRRRGGGGRVRVRGRIPLKKGPWTPDEDKRLREYVEAHGEGNWNRVQRNAGLNRCGKSCRLRWANHLKPDLKKGPFSKEEEEMIIKLHLWLGNKWAKMANSTHLTCCTLVNGLVKRSRQMLCHYSLFAENNKKRYCHQEKLTSRPQDKLPGRTDNEIKNFWNTRCKRIQRTGEPLYPKEFNHFKLTDLEVMNCESPDESRAKKRTNEVLQGNGQSYKEVFFDNLDYSRPENYIRPNCVTPNSLPVDATSPFGSAIATQDQSVPFGSAIVSGHPILDGNFSTSGTIQRPMNVELPSLQYPNYDFNNNNAWSYHDPLGHPIDQVDFGSLRSEYLSPNNNGLLDALVHGGHGQGELANSQGSFDACFPRVQCNQVIQSNAFSLSSSFPIIGDDLLENSCHAFVGINNNASSLFLDSQPPPLVDPTFWRHDVSLEPNLPVYCQFNEELPPSNEQFAKDADDAFGHGGLSDETNLAAAGQGDEHDLEDPWASMPGACDIPDFPSE

SEQ ID NO: 156997 - protein, 155 aa, Oryza sativa
  Clone ID: PAT_MRT4530_56610C.1.pep
MGNGDERMTEAGTACSGGSSVATCWRQCKERRLPRARRHGSGVVGGDGVATNGAGSDSISSGSSHGSPGIVTTAVHPWHTTRVVAAATNPSPASAGSPARPPHGLTKKMARPACALMAREAENGIDDPMKDQKRCFFLLSLRDLLRESESADNVL

SEQ ID NO: 156998 - protein, 502 aa, Oryza sativa
  Clone ID: PAT_MRT4530_56611C.1.pep
MQTSNFRKKNAAEVDFFMGYGDVNRYEVLEVIGKGSYGLVCSANDIHTGEKVAIKKIHNIFEHISDAARILREIKLLRLLRHPDIVEIKHIMLPPSKMDFRDIYVVFELMESDLHQVIKANDDLTREHYQFFLYQMLRALKYIHTANVYHRDLKPKNILANANCKLKICDFGLARVAFTDAPTTVFWTDYVATRWYRAPELCGSFYSKYTPAIDIWSIGCIFAEVLIGKPLFPGKNVVHQLDLITDLLGTPSLDAISQVRNDKARKYLTCMRKKQPASFSHKFLKADPLALQLLRKLLAFDPKDRPSAQEALADPYFNGLAKVEREPSCQPIPKMEFEFERRRATKEDIKELIFQEILEYHPQLLKEHISGTERPNFHHLSVVDQFRKQFTQVEENLNGSGAAVSLQRKHSSLPRSTIVHSAAIPAKDYKHVASSNPLQLLAKTGHHAIPTVALPEALSAGLQSRRDGLGIFGPILLHGLRKILNMVTTMFMKQAEHENRGN

SEQ ID NO: 156999 - protein, 81 aa, Oryza sativa
  unsure (1)..(81): unsure at all Xaa locations
  Clone ID: PAT_MRT4530_56612C.1.pep
AVAPTSSPXSPPQNPSRIPGNGAASAEIGHRLLHLRSPSPLPNPPPPSIEGIEPTPFNRSRAPSPSRSASHRCRQDLGKPR

SEQ ID NO: 157000 - protein, 250 aa, Oryza sativa
  Clone ID: PAT_MRT4530_56613C.1.pep
MANGHLGASRTGRRREEARGDGVASQPVPLGHDAQPTDMGSQQAREEDADPPPPPTTTTRLPFLFNLSRGELVRRQRLIDEAVERLRRCGCDIRRCRGGGVPCPERRQAELSLIVDHVNRALHHYNANNPVSTSLRRRVRPVKALGYASVSFRRALWVHVSFLARRRSSPVKPADEAAAAAADDDESDVKRGRKRRSRNKRNRAPPESPDKQFFAELRYDDYDSATVVTCTIIGLGRSNLGWGQYALDLD

SEQ ID NO: 157001 - protein, 183 aa, Oryza sativa
  Clone ID: PAT_MRT4530_56614C.1.pep
MASIILVVVVFVLDALAFVLAIGAEKRRSTATFSEDTSGRQYCVYSSDAATGYGIGALLLLLAGQAVVMVVTRCFCCGRALSPGRWRAFSGFCFIVCWFTFVIAELCLLAGSVRNAYHTKYSTLVISGPPRCAMLRKGVFAAGAAFTFLTALFAELHYLFFAKARHAAAVPPPIVGGIGMTRM

SEQ ID NO: 157002 - protein, 218 aa, Oryza sativa
  unsure (1)..(218): unsure at all Xaa locations
  Clone ID: PAT_MRT4530_56615C.1.pep
GGREVKGGRRLTGGGGGGDDGDGGARRRRTARRLRGDGAAASKVAARRHDNGGAXRRRRVEKGKREKRGEWSGVATAMAMRRACDGDGAQRGTRQRRGAGREARARGARRRDGTRRGSGDGTRAATGRRWRRRQRWRAAWGGMRWAATRRHGVTATMGRRGAARCGLAAAGDERGEKGGAGGARKKAGGEGRQQSSRHLPGSGRLDGVGGGQFLELEV

SEQ ID NO: 157003 - protein, 119 aa, Oryza sativa
  Clone ID: PAT_MRT4530_56616C.1.pep
SVGWARPGLPLPSSVTLPTSSPTPTCPLTSSTSPSPLQLAPPSLPPPILPPLPHRDGRPRSGRRGDDRRVAAFVHLSPLSTGEIDPPPPLSARIRPRLCSHPRRFVHGEYDKGQGGWWR

SEQ ID NO: 157004 - protein, 394 aa, Oryza sativa
  Clone ID: PAT_MRT4530_56617C.1.pep
MELLCDDLLDSILLRLDSPVCLIRAASVCKRWRRVVAADDAAGFLRRIRSLHRPTVYGHYSTGHEDSIEAYFHSCRRPVPFFLPSLPASVSTGHDFLRSYREILDSCGTLLLLRRLNFTYKGITVYEPLTRRCRVIDDPPAPWNGKEYRDWGAYLLGCRLPLIVTKSPKAVTKREKQRHITTGKLMREIEGTRRREIAGGESSVVQLTSRRTTTAHPIVTESSGDAPGTEECGADASRVNERTGAQPVARPVISMSGGRRGTGAVGMVVGGSPVLAAGANDEIGEEAMAGGGGSVGESDGQPTRPGSNAAGDGGACEGVKAATAGKLMREGEKLGFRSQLLPDLYLLDPSDLDPIVERRGELESRIEVMRRGRGVGKELKIQGRSDRESSPLIG

SEQ ID NO: 157005 - protein, 148 aa, Oryza sativa
  unsure (1)..(148): unsure at all Xaa locations
  Clone ID: PAT_MRT4530_56618C.1.pep
VPKCRYFMWLVAHRHCWSACILVNWRXRDLDHLDHHILCDQRQETIYHILIAVVALLSSLGLIYSFLSTEPPFSLLDLFELDMKVPKEKRHGFNTIVALGAWSIWKESNNXNKVFNQQHRSWAEVATAIAXEVTLWLLARPAEPALSL

SEQ ID NO: 157006 - protein, 67 aa, Oryza sativa
  Clone ID: PAT_MRT4530_56619C.1.pep
SLFVHLASSTRHISHLRLYRKLPSASLSHLVNDGTLIPTPTRLLNLRVTPNKSGGNWTFGLKKKKKK

SEQ ID NO: 157007 - protein, 116 aa, Oryza sativa
  Clone ID: PAT_MRT4530_5661C.1.pep
MPSSKDPMETPSGGRTSMAPLPWRQGYDESSRYTIHRSSRSIVNSHNHFSNPTLLSLPAVATTILHERVRALLRLCILHAVAGPPPCRLAAPLPSLAGWSEGVNGTGFLHLRPSLP

SEQ ID NO: 157008 - protein, 439 aa, Oryza sativa
  Clone ID: PAT_MRT4530_56620C.1.pep
MAASPAAGAAAATVSSFVSPSSFSSVNFRFEAFKTKVPRNANMAKLQAGYLFPEIARRRAAHLLKFPDAKIISLGIGDTTEPIPDVITNAMAKRAHALSTVDGYSGYGAEQGEKKLRAAIAATYYADLGIEETDIFVSDGAKCDISRLQVLFGSNVKIAVQDPSYPAYVDSSVIMGQTGLYQEDVQKYGNIEYMKCSPENGFFPDLSSVPRTDIIFFCSPNNPTGAAASRDQLTKLVKFAKDNGSIIVYDSAYAMYISDDSPKSIFEIPGAKEVAIETASFSKYAGFTGVRLGWTVVPKELLFSDGHPVAKDFNRIVCTCFNGASNISQAGGLGCLSPEGLKAMSDVVGFYKENTKIIVDTFTSLGFNVYGAKNAPYVWVHFPGRNSWDVFAEILEKAHVVTTPGSGFGPGGEGFVRVSAFGHRENIIEAARRLKQLYK

SEQ ID NO: 157009 - protein, 62 aa, Oryza sativa
  unsure (1)..(62): unsure at all Xaa locations
  Clone ID: PAT_MRT4530_56621C.1.pep
GCAAGQFGDTTLTKVFVGGLAWETQNEVMRXYFEQFGDILEAVVITDKNTGRCKGYGFDSFL

SEQ ID NO: 157010 - protein, 102 aa, Oryza sativa
  Clone ID: PAT_MRT4530_56622C.1.pep
SFALAINDQHLGFARPAQAAAAMGAQLYSLGDMHLHGGQRSALLQARTGTAYWLGCPRATPYRTSINAWAAARHAYGRELRQRLAPFMGRALYTHRRRMGKH

SEQ ID NO: 157011 - protein, 252 aa, Oryza sativa
  unsure (1)..(252): unsure at all Xaa locations
  Clone ID: PAT_MRT4530_56623C.1.pep
YAHALPAVNEHGHPRCMAACQSRRIRHARAILEHPSTDSLACPPPLPRRRXRAARRRLHARGPLMSWHGLAPPSGVPPGWRSRSRSMVVTARXHQLAXTAFAVVPLAHRRRGRGSGEKDLGARVLPXRRFIRHEDDRGRLSDRTAXFTPRQAAANYSAQWATEVHRVVAAYVGRARLLGLRAVELTRLARRLDGFKRPGPKVXEIKLIKNIFFPLQRTGTIANFFSQHQRHYIKFLIYLGQAVNSRVVSLPS

SEQ ID NO: 157012 - protein, 91 aa, Oryza sativa
  unsure (1)..(91): unsure at all Xaa locations
  Clone ID: PAT_MRT4530_56624C.1.pep
VWKTCTMGQGVEGHDLMRPRAGFIRDVMRLTGSAWACDVQGWGNWACXAAEDSLSRESVVGXTFGLILRLGYTLWRDTIDHGISLRVTSLK

SEQ ID NO: 157013 - protein, 58 aa, Oryza sativa
  unsure (1)..(58): unsure at all Xaa locations
  Clone ID: PAT_MRT4530_56625C.1.pep
GGATHYAXQLMDLQEWSCQHINDKQIQGKILHVQQRLMLLYDLILVSEDCAVVFISEG

SEQ ID NO: 157014 - protein, 89 aa, Oryza sativa
  Clone ID: PAT_MRT4530_56626C.1.pep
MAQLRRCIAIALLFLLAATFVASCVDGARTMQASYINRTPSTAPTAMMRSGRLFGYLPRAKLIPPSGPSERHNAIGPENGDGDELISKP

SEQ ID NO: 157015 - protein, 160 aa, Oryza sativa
  Clone ID: PAT_MRT4530_56627C.1.pep
KNRHGPHVSALSSSPLYFFSGIGKCMAAVPCGESFPCAAILRLRLRRYWSGRNMDLLVLSASDVTPSPPQTSPASLIPSRSSLLSHAGQHTEVSPSTPSAARAAITSKRMQATSQIVFAVGFASHRRAWLPSPGVMHNMSPSMMVGSHACSVVSSLVNNF

SEQ ID NO: 157016 - protein, 146 aa, Oryza sativa
  unsure (1)..(146): unsure at all Xaa locations
  Clone ID: PAT_MRT4530_56628C.1.pep
TNRSDIHEGYXPKLPKNHFLHTASNNNHIKRLXCVVVAKFCHIPTVKRLLLYSTVTKXNDGHPPASVPLHESTNDHNCMRKVFGARRGQRXTMPPRRGMTPNGGGGVMPSHGLARLRXAITNQDPTQPSCTTAIVGLPRMAACRSG

SEQ ID NO: 157017 - protein, 49 aa, Oryza sativa
  Clone ID: PAT_MRT4530_56629C.1.pep
MLVEGLAAQLGWGCAAGEGFRGWAGPGDLDHEGIWVLEAGAGPSPSCEF

SEQ ID NO: 157018 - protein, 76 aa, Oryza sativa
  Clone ID: PAT_MRT4530_5662C.1.pep
MAVANQEAMAPRTGNIATANPGCPNWEGAKEVEDTPDKWAPSEEGREKEEASRNNVESVEELQICDELEADNEDLE

SEQ ID NO: 157019 - protein, 30 aa, Oryza sativa
  Clone ID: PAT_MRT4530_56630C.1.pep
KLGQHSVRQRQWYIQSTCATSHEALYEGIA

SEQ ID NO: 157020 - protein, 911 aa, Oryza sativa
  Clone ID: PAT_MRT4530_56631C.1.pep
MPTSRRALAGGALSMHVAYFLAISCLGYGLLGVLKVREPGAAPRRIDRFFTAVSAATVSSMSTVEMEVFSNGQLVVLTVLMLLGGEVFVSLVGLASKWSKLRSDAMDRSRRVESHGDVALADIDGGDVENPTSSGEEAASRRRPMDADTLRHNAVRALFYIVLAIFAVVHVVGAVAVAAYVLASPGARRTLGDKSLNTWTFAVFTTVSTFSNCGFMPTNENMVVFKRDAPLQLLLVPQVLAGNTLFAPLLAACVWAAAAATRREELVEMAREGGRAAAAGYAHLMPARRCWMLAATVAAFVAVLMALVCGMEWGGALQGMSPWEKVVNALFLAVNARHTGESTVDLSILAPAILVLFVLMMYLPPYTTWFPFEENSTTKDSNAENQGIRLLESTLLSQLSYLTIFVIAICITERRKLKEDPLNFSVLSIVVEVVRQVRLNGFLPEKKNADQILKPRHKPTPRDLDLMFTSVSTAAVSSMATVEMEDFSNQQLWVLILLMILGGEVSISMLALHFNNAETNTNEVLPKRSPSTRRNIESFDAVNDSNQNSSQGFQSEATISLNWVQGSRTMKQKCRNMLAHIVTGYFIAAVVCSSLVIIIFAQIDSDTRQLLKSKDIKIWTFSIFTAVSSFANCGFTPVLAGNTILSPLLRLSIWILRKVSRREEYAYILQHPEDTGYRYYPSDNSALPINADNKPLTERGRNSNDQAIWKNFIISKSACLAIFTIIACITERKSISTDPLNFNIFSIAFKIISAYANVGYSLGYSCERLLKPDATCKATSYGFVGKWTDEAISTRAKTRAPRSGKCRAWKEGNYQEKRGCRGGRRRGRHGRALIGLVPVLGCAARRGAARRAEGDIVGGGKPSSHAPRQDRVQGDGHRARRRREERRRLPPPSSAVAADCSPSSGFPNDWA

SEQ ID NO: 157021 - protein, 275 aa, Oryza sativa
  Clone ID: PAT_MRT4530_56632C.1.pep
TENKEFKLKASEKRNFIAVGTMDPAIEIWDLDIVDEVQPHMVLGGLSKKKKKAKKYKKGSHRSSVLGLAWNKEVRNVLASASADKTVKIWDVSVGKCAVTLEHHDDKVQSVAWSRQSPEVLLSGSFDKSVAMNDMKDGGQSCNKWSVEADVESLAWDPHNEHSFMVSLENGMVQAFDKRTASSNSNSGRPTFTLHAHEKAVSSISFSPSTPNVKLWDLSNNQPSCIASLNPKLGAIFSVSFSNDSPFLLASGGSKGKLKVWNTLTEPAVANKFGK

SEQ ID NO: 157022 - protein, 197 aa, Oryza sativa
  Clone ID: PAT_MRT4530_56633C.1.pep
MEKGGFIAIFVAFGLINLGLHLYERAPGWLVWMLGGVTTLDRALGDCSMCRYGMVAGDVVRTLSCGHVFHKDCDYSVDKWLREHGLSCPECRKKARSVRVLPWRARPQQPLPEEQNPPPQETSASSSSSSSTHVRIAPEEPGDLDLEAQDQLLPPPATGSPKGPEEQHPPRPAAATSSSSADTSSLEEPLLRPSASP

SEQ ID NO: 157023 - protein, 482 aa, Oryza sativa
  Clone ID: PAT_MRT4530_56634C.1.pep
MEQSGRVAVPLTALALLAVVAAGVALPPAPSSGTGIQDGRGSEHSLRHVPDEPQKAPPTSVHARPINKKVTRGKIEAGLARSRAAIRRAARATPPSDESIRRRGSASTVVAAAGDDDYVPRGAIYRNARAFHRSYVEMERRFKIWTYREGEPPVAHIGPGTDIYSIEGQFMYEMDDPRSRFAARRPDDAHAFLLPISVCNLVHYVYRLNATGDLAPLRGLVADYVRVVAERYPYWNRSRGADHVIVSCHDWAPMVTSAHRQLYGNAIRVLCNANTSEGFRPRKDATLPEVNLADGVLRRPTAGLPPENRTTLAFFAGGRHGHIRESLLRHWLIGNKGGAAADGDGDGDMRVHEYLPAGEDYHAQMAAARFCLCPSGFEVASPRVVESVFAGCVPVIISEGYPPPFGDVLDWGKMSVAVPAARIPELRAILRRVSERRYRVLRARVLQAQRHFVLHRPARRFDMIHMVLHSIWLRRLNVRLPY

SEQ ID NO: 157024 - protein, 62 aa, Oryza sativa
  Clone ID: PAT_MRT4530_56635C.1.pep
GRDRTHVSLHPQAISLALAIGKKEMKKLHAGSISWPGCANLSCCVKDIRFLFCQSFPPDATA

SEQ ID NO: 157025 - protein, 58 aa, Oryza sativa
  Clone ID: PAT_MRT4530_56636C.1.pep
NVWFWWAANLKCPQRIGFREEWNGWSCTCPNPPDNCHFSAFFKLVQFVGTWPSDKQIS

SEQ ID NO: 157026 - protein, 53 aa, Oryza sativa
  Clone ID: PAT_MRT4530_56637C.1.pep
MDLTRRASLPARTTALYMYPAFSNRTTQQNVIPINACTHVNRTPMSIFKDWAE

SEQ ID NO: 157027 - protein, 719 aa, Oryza sativa
  Clone ID: PAT_MRT4530_56638C.1.pep
MAFREDKYVRFHDWRSEHSVGSEKTVLEGRHNVFDSLMDRTVGAFSFLGNSSHPETLNKPASEEKKSKTRVLDPQGPFLQRWNKIFVISCLIAVSVDPLFFYIPVIDGDNICLYLDKKLEIIASVLRFFTDIFYLLHIIFQFRTGFIAPSSRVFGRGVLVEDTFAIAKRYLSTYFLIDFLAVLPLPQVLVLVVLPRLQGSSVMTAKNILMVIVICQYVPRLIRIIPLYLQITRSAGIITETAWAGAAFNLLIYMLASHVLGALWYLLSIQREDTCWKDACSRHDGCDSGSLFCGSNAARNNSFLQDFCPTNGTDNADPTFGIYLPALQNVSQSTSFFEKLFYCFWWGLQNLSSLGQNLKTSTYTWENLFAVFVSTSGLVLFALLIGNVQTYLQSASVRIEEMRVKRRDTEQWMAHRLLPDNLKERILRHEQYRWQETRGVDEEGLLSNLPKNLRREIKRHLCLSLLMRMLVLDFLVLCQTFPLLGHSVPMFENMDEKLLDAMCDRLKPMLYTEGSCIIREGDPVNEMLFIMRGNLESMTTNGGQTGFFNSNIIKGGDFCGEELLTWALDPTSASNLPSSTRTVKTLSEVEAFALRADDLKFVATQFRRLHSKQLQHTFRFYSQQWRTWAACFIQAAWHRYCRKKLEDTLFEKEKRLQAAIVSDGSSSLSLGAALYASRFAGNMMRILRRNATRKARLQERVPARLLQKPAEPNFFAEDQ

SEQ ID NO: 157028 - protein, 506 aa, Oryza sativa
  unsure (1)..(506): unsure at all Xaa locations
  Clone ID: PAT_MRT4530_56639C.1.pep
MRVNPALFLPLMAEYAAPTWAILISGFFMLLSVSLSMYLIFQHLSAYNNPEEQKFVLGVILMVPCYAVESYVLLVNPDTSEYCCNLCVAYEPFSMYCFGRYFSVRLGGDERWIAVLKGEGGGDSGDPHLYGASEKEIILHHFPVXLVIETMVRSEYCKCRIPQFVPCFKGPSVIEFLSQKDSGXYQKKSKEEFNLRCGYPYFAAVLNFSQYWALYCLVEWYTATKDELAHIKPLAKFLSFKSIVFLTWWQGIMIAIMYSLGLVRSPLAQSLELKSSIQDFIICIEMGIASVVHLYVFPAKPYSLLGNHRSPENISVLGDYAATDPVDPDEIKDISRPTKLRLPQLEPDEIIVTNVKESVRDFVIGSGEYVIKDLKFTMKQAVRPVGKRFEKLMKKKGKFGQSRDDNWVSTSTPQRAIHGIDDPLICGSSSDSGIGRGKRHRRDVRSEYCKCRIPQIVPCFKGPSVIEFLYRSARYCTRTQVHNSLCNFVKVADTNWMYAKLLGSTP

SEQ ID NO: 157029 - protein, 312 aa, Oryza sativa
  Clone ID: PAT_MRT4530_5663C.1.pep
MGDRPGILWPRGDVPGLGLVDGDVFPVRTSEVADVAKRATSWCARVRWPGVNRRGTWRRGDVPGLGLIDGDVFPVRTSEDKPAEAEATAATAPSPSPDPGAAGGEAPAAGGVGASGAGGVGSGWRDGRIRRRAGWLEEGRRRRTRQRGRALPSARSGGRGGGGRGEPVSNKWYQSLREIYGRDVVLGLMAAQAIGGPIGGSDTSGGWLELSGTRLGVVVVLVLAGFDAGRLLSTEAATARFMVAVDVCMHAAEGSMGILWSQEEEVTKMAESLVTERHSAVFDLAGCGFEEKGYPVVDYESALQTAKSTTLR

SEQ ID NO: 157030 - protein, 37 aa, Oryza sativa
  Clone ID: PAT_MRT4530_56640C.1.pep
MMNAWHLAMAFGESTGSAGFGSGQTGVYRAVRPAQPA

SEQ ID NO: 157031 - protein, 131 aa, Oryza sativa
  unsure (1)..(131): unsure at all Xaa locations
  Clone ID: PAT_MRT4530_56641C.1.pep
NIIKKKKKKKKKKKKRQITHIYXSSATEFALKDADSSDPIHLQPFTWRSFEDGFPSLFINSVHSXRGKYGGSLASFRSPPGMLEQICGIFALPKLFIASFTLGLPFFRAVSFXRVKEEADGAPGFTLARIL

SEQ ID NO: 157032 - protein, 137 aa, Oryza sativa
  unsure (1)..(137): unsure at all Xaa locations
  Clone ID: PAT_MRT4530_56642C.1.pep
GPFPIPGNGEIWFPPKAKSRXGPLEKAVAGAYGIRRILYFRDKRPRSHGGVLSGDXDLDGGPRTSSRPAEHTGQSQSDVNAEELLCMFLGVGKLNTSXTASSQAEAESSSAATPATVAXXAAAAAHGARPKHQHSLS

SEQ ID NO: 157033 - protein, 56 aa, Oryza sativa
  Clone ID: PAT_MRT4530_56643C.1.pep
RRGNCCEIWDAKFVVPHFVKSENKKGLVKAQKKKKKKKKKKKKKKKKKKKKKKKTK

SEQ ID NO: 157034 - protein, 339 aa, Oryza sativa
  Clone ID: PAT_MRT4530_56644C.1.pep
MPRCGAGGPCVWIRALSQPQRHGRKPWRGVRVVVLLLHALFIGAVFLLDPTLQRQIHEAKWYIILYGLLVLLTLVQYLYTATSSPGYLPDMLTAGSRMHATFINTTTLSKQANSKSGSLNSAMSRSKIDQQNPQSTTALLLQQTMDLYPPGTSTRDFTCSYCRLIQPPRTKHCHDCDKCVLQFDHHCVWLGTCIAKRNYCRFWWYIFEQTVLTVWTVAFYIQFFYLGIVVSWWKFAIGIVLLVALILILVVLLPLLIFHAYLALTNQTTYEIARRKRISYLREVPSRVHPFSKGICRNLYDLCISKQRGFFLEAVPPLEVLQARARPYTCRDVISCRCC

SEQ ID NO: 157035 - protein, 152 aa, Oryza sativa
  Clone ID: PAT_MRT4530_56645C.1.pep
QHKSQVNATYKCHHLGKTSTSARINYPGEEVAVYRYCTKVSKTSNPYRIMYHLASWICLWSVGSSRKTAPMNSACSSSTTTLTPRHGFLPWRCGWDRARIHTQGPPAPQRGIVAPSAAAPYGRREDEEEADAAATTDEQRAVATSREASPAG

SEQ ID NO: 157036 - protein, 201 aa, Oryza sativa
  Clone ID: PAT_MRT4530_56646C.1.pep
MPPSSSPMGGGRLGAVLAVEARRLDEESNGEGEELEVEAKGTAAVEVDLAPPSPPPPRGARCVANASEEKGIMDLASANSGERGDPASRRHRRPRPDPCRRCSVHRSARLREEDEVTRLRSTETSMRTTARANNQGGIRKHTLQEQRRRWKIEGFRVCRVNWCSGSLNIVGGDGTRWPYNESGHILSYTYYNESRHNVIQI

SEQ ID NO: 157037 - protein, 308 aa, Oryza sativa
  Clone ID: PAT_MRT4530_56647C.1.pep
MKNKGSSCRYLPHSSAPCATDGARCFRCDHRPAIDEIVREQSLVTQLRAVVLPALETKADDGRAEIVAQLFGSILDCSRKVISALNSRYVGESPPDDDEIVDKRRAKRKNSEGKKGDDQVKVKPHEHKRSRRYTNSTSQITAVPHYDGHQWRKYGQKNINNSNHQRSYYRCSYKHEQNCKATKTVQQLDSAGETIMYTVVYYGQHTCKTNMSNAPLHVVETSTTQSISTTCCSDDLGDYSQKMENMHTPELAEVCSDELGSYHAIIGAEHSALGLEDEHMHKLLDTFACGALDLDSWEIDAIVRSGFC

SEQ ID NO: 157038 - protein, 306 aa, Oryza sativa
  unsure (1)..(306): unsure at all Xaa locations
  Clone ID: PAT_MRT4530_56648C.1.pep
IIKVGFLTPVANLIGTVRGPKYDGSFLHDKIKSLTHDVTIADTVTNIVVPAFDVKYLQPIIFSTYEAKNEPLKNAHLSDICISTXAAPTYFLAHFFKTTSPSGESREFHLIDRGVAANNPIPSIYHLTMVAMSMISKEVLRENQDFKLGKPADYRHYLVISIGTGTATMAEKYTAPACAKWGVLRWLYDSGFTPLIDIFSHASADMVDIHASVLFQSLSCEKSYLRIXDDSLVGHTSSVDIATEENMEALIKIGKDLLTKRVARVNIDTGVYEPVDGEGTNEEALARFAKKLSEERRLRRNNLSSS

SEQ ID NO: 157039 - protein, 689 aa, Oryza sativa
  Clone ID: PAT_MRT4530_56649C.1.pep
MEVADKIVEPKGPLVATAQLPNNVELLKSVVLNPSREGGSSQEQYEKDLLAEGEESFRSEESSDEGGRSSFSGVSHPPEPIDVDLMSTVYVAIDEEKPEPPECLMRGLSVKGASMEDLSVHAMDAKPDVIVCTVNVNGLVEERKVHCAVVAPDAVEAVSSTQASEEKDCVWDASFPPSGNVSPHSSSDSTGAVAATSIRGRSTSTCRSGVLTSESILTVEKTCESAKDSTRGNSMESTKTSMSRASDSSGVSDDSSWSNITGSANKPHKGNDPRWRAILAVRARGNVLGMSHFRLLKRLGCGDIGSVYLSELSGTRCYFAMKVMDKASLASRKKLNRAQTEREILQLLDHPFLPTLYTHFETDRFSCLVMEFCPGGDLHTLRQRQPRKHFSEYAARFYAAEVLLALEYLHMLGVVYRDLKPENVLVRDDGHIMLSDFDLSLRCAVSPTLIRASASDSDPRRAGGSFCVQPACMEPSSVCIQPACFMPKLFGQRSKKQGRRPRSELGQGGGAALPELVAEPTSARSMSFVGTHEYLAPEIIKGEGHGSAVDWWTFGIFLHELLYGKTPFKGSGNRATLFNVVGQQLRFPESPSTSYAGRDLIRGLLVKEPQQRLGVKRGAAEIKQHPFFEGVNWALIRCSTPPEVPRHVEAELPAKYGVAEPVASGGGGGKRVVGAEVRSGGKYLDFEFF

SEQ ID NO: 157040 - protein, 176 aa, Oryza sativa
  Clone ID: PAT_MRT4530_5664C.1.pep
MAAQAIGGPIGGSDTSGGWLELSGRSGFVGDEVRAAGTRLGVVVVLVLAGFDAGRLLSTEAATARFMVAVDVCMHAAEGSMGILCVGPRHRAEVASESVVGTNSISLGKTIVVIGEKVEHCCRWSQEEEVTKMAESLVTERHSAVFDLAGCGFEEKGYPVVDYESALQTAKSTTLR

SEQ ID NO: 157041 - protein, 82 aa, Oryza sativa
  Clone ID: PAT_MRT4530_56650C.1.pep
VPPRRHSRAAAPPFPCRRAAVPVPPRETEGAADPGEGQDPQDLEQGKSSLFLEHVDPNCEIVLFTNKIACNDEHPTCDYAMP

SEQ ID NO: 157042 - protein, 330 aa, Oryza sativa
  unsure (1)..(330): unsure at all Xaa locations
  Clone ID: PAT_MRT4530_56651C.1.pep
ELEKDWIIRLIEYSKDPSLRVDREIQRQAFKYTLLDGELYHRNIDGVLLKCLDNDRSKXSHKMNWLLKRVGFYWPKMINDYFRHYTGCEACQQFVNVQLVPAAVFNPIIKPSPFRSWALDFIGQIYPSSSKMHQFVPVVMDYFTKWAKLMLLSSLYYAQANGQAELSNKMSLKLVKKKIEEHPKRWHEVLSEALWDDRISEHGATKVTPXILSXAYGQEAVLPIEVNHGSLRYIKQDDLLVEEXKTFMGDNLYDVTDKCLKALEVIEKEKRRVAKSYNKRVKXKIFQAGDLVWKTILPLGSRFMEFPERFQRAINGKYLKKYFPSVWQVP

SEQ ID NO: 157043 - protein, 65 aa, Oryza sativa
  Clone ID: PAT_MRT4530_56652C.1.pep
MSTTKPPLHFGDQLAFLPCRHLQRECPPPPITIDNNLGQPCRRLHRLAKELPTTRRSRRGGAPRR

SEQ ID NO: 157044 - protein, 141 aa, Oryza sativa
  Clone ID: PAT_MRT4530_56653C.1.pep
YSILSTLKYLLFYTSDIVNCTTNSFRSDICHQFIPSSTMSSLISHQDSNSLFKNRRTSSTVSNESTLSTHEIEYMSLRDENLCYEDDADFHIFIDAMDRVDELVTQIASSPQGGRRHSMSRVIFSGLKLRRGSQDRHNSAN

SEQ ID NO: 157045 - protein, 98 aa, Oryza sativa
  Clone ID: PAT_MRT4530_56654C.1.pep
CAAGQTGLMRRSDRLLAAGQTGQGTPVRPPLCGWSDRPWSGRAECFTACCPSSSRRRVPCFTTTETAPVRKPRLKMKGAFSSQANSLRLVNQEFGSVK

SEQ ID NO: 157046 - protein, 80 aa, Oryza sativa
  Clone ID: PAT_MRT4530_56656C.1.pep
MSRSGQPPDLKKYMDKKLQIKLNANRVIVGTLRGFDQFMNLVVDNTVEVNGNDKTDIGMVVVRGNSVVMIEALEPVPKSQ

SEQ ID NO: 157047 - protein, 87 aa, Oryza sativa
  unsure (1)..(87): unsure at all Xaa locations
  Clone ID: PAT_MRT4530_56657C.1.pep
WPTARAGSPASDRGRGRRRVPGVLFGSSRARRLHQHARRRXDVRSAAARRQQWRSGGVREMPRENEMGRLGLGFIDGEEAVWEGEPT

SEQ ID NO: 157048 - protein, 53 aa, Oryza sativa
  Clone ID: PAT_MRT4530_56658C.1.pep
DGWPYSRLLVYKAGDTCYICRELKPLYESTYQSLISYQRGLPKNGMYMLHTAA

SEQ ID NO: 157049 - protein, 54 aa, Oryza sativa
  Clone ID: PAT_MRT4530_56659C.1.pep
DNFIVLAVISLTSPMWSLFLSTCQILTASGVYDSACIGFRHLLLWLRFEKVPAG

SEQ ID NO: 157050 - protein, 130 aa, Oryza sativa
  Clone ID: PAT_MRT4530_5665C.1.pep
PRSWVPPETLKKGRAKKGNARPNPSVFKVQGSFCLSPPLNVWKAPKKKSSPSPPVQKKPGSAFPPDQKKPGALSPPGHKKTVAPSPPDQKKPVARGQKAKAVGPPKAKPKAMKGGPQKKPPPLGGPSPRG

SEQ ID NO: 157051 - protein, 523 aa, Oryza sativa
  Clone ID: PAT_MRT4530_56660C.1.pep
MDVPSVVIPILVVLVSRLLTSALVHLLWKPYAITKLFRGQGITGPKYRLFVGSLPEIKRMKAAAAADEVAAGAHSHDFIPIVLPQHSKWATDHGKTFLYWLGAVPAVSLGRVEQVKQVLLERTGSFTKNYMNANLEALLGKGLILANGEDWERHRKVVHPAFNHDKLKFMSVVMAESVESMVQRWQSQIQQAGNNQVELDLSRELSELTSDVITRSAFGSSHEEGKEVYQAQKELQELAFSSSLDVPALVFLRKLPIIRGNTRAHQLVKKSRTMLMEIIEGRLAKVEAAEAGYGSDLLGLMLEARALEREGNGLVLTTQEIIDECKTFFFAGQDTTSNHLVWTMFLLSSNAQWQDKLREEVLTVCGDAIPTPDMANRLKLVNMVLLESLRLYSPVVIIRRIAGSDIDLGNLKIPKGTVLSIPIAKIHRDRDVWGPDADEFNPARFKNGVSRAASYPNALLSFSQGPRGCIGQTFAMLESQIAIAMILQRFEFRLSPSYVHAPMEAITLRPRFGLPVVLRNLQG

SEQ ID NO: 157052 - protein, 419 aa, Oryza sativa
  Clone ID: PAT_MRT4530_56661C.1.pep
MAVAAGSAAVACLLVVLGLAAVAGVDGATASSHPAPAPAPAPAVDCTAAEALKVGACLDYVTPGNPPRSQPSKACCGEVKGVLKDIAGVGCLCAAISTHALPLPINATRVLHLPAACGADASAFTMCLDVGELSGRQDVKNSNLAKSNTLMDKMQVELNVISATALATPRYLASALDRIGELQPCCDMLSAKSKDKRFEALEPGPESLFEAVKRRVHATYGVGVLGIDEAVAAVEAYGAIGADGAVAVFGAIGAVGGMAVAAVGWVATSGAAVTTVVGRIAEEDASRQMGRKFMWCSGAEEVLDGLPHGGGGAARGYDDAEYLLGDGAVDPGEDSVVHLSPVGVDGWRGGACRREVVRQLEEGTPMGVVGLGEVEDDRDERLDVDGDGLGPKLGTGCLGYFSSGGSGGGSASGGVVLSH

SEQ ID NO: 157053 - protein, 108 aa, Oryza sativa
  Clone ID: PAT_MRT4530_56662C.1.pep
SPPGFCPPGLFPFFRFRCVYCLVLGHSPHGAPAPVFTLAPVVGRHSFLQALVVPSAPFCVFSTSPADLCFTLSSPRPPPALPPPCSSGFPQREPVGILIYKKQTKNNT

SEQ ID NO: 157054 - protein, 41 aa, Oryza sativa
  Clone ID: PAT_MRT4530_56663C.1.pep
TAPSLSHTLTPTLFLFYLSLTLYQLIPLFISLLPDSLHLFS

SEQ ID NO: 157055 - protein, 296 aa, Oryza sativa
  Clone ID: PAT_MRT4530_56664C.1.pep
MAQRSPGPAHRTVTDLSVRPSCLVSPVAVRANGNTHENAEKGARRGRWTFWRQELRRQSCVSIVASQAATVALHYKASKPEQQTTCAAEETSMRWREMGWRPAEEGSSSGTSSTQITCAGGSRRCRRRAQPPYWGSRTPTQRTHGRGMARRAASEWSSSGPTPLALAPAEATTSGERWSAMEAERCLSPALAPNRGCGDVVATRMDVRWCGDSMHRSCPARHLAKQVAGGVLAGLGPGQAQWGSVSLRPRKEGGGKLGRPREGGQQDLGLAGLNKEKVHPRSLNLSTKYKIVRKTN

SEQ ID NO: 157056 - protein, 104 aa, Oryza sativa
  Clone ID: PAT_MRT4530_56665C.1.pep
SDYCDKFVFPAGLAVITVMLVTTCLTSLVIMLCWRRPPVLALCFLLFFGSVEALYFSASLIKFLEGAWLPILLALFLMAVMLVWHYTTIKKYEFDLHNKVTLEW

SEQ ID NO: 157057 - protein, 235 aa, Oryza sativa
  Clone ID: PAT_MRT4530_56666C.1.pep
MFRDGKEYCASVGKAWKRGYLLCGPPGTGKSNMIAALANFLEYNVYDLERGGLGEAAVGPRWRQSGQGNCYPVIAAYPTGKWYIGISVRLQILFVTVRITNNGHGEEYQYINDLADRIAKIIEEHFGIKPKQHIYVYRLPYPKWFDRVPLPHRYKVPDFSKFLGQNGTSTMEHFSQFLVLRVNFFPLSLTGSTFTWFSSLPSNSISGWADLEKKFHEYFFAGIIEMKFSDLISVQ

SEQ ID NO: 157058 - protein, 183 aa, Oryza sativa
  unsure (1)..(183): unsure at all Xaa locations
  Clone ID: PAT_MRT4530_56667C.1.pep
MALAVDDHEAIADDFRGATMWXSKTKALPNANVITWSPRNAERCNYRLTFHLRHRALVKNAYLCHVLAKGRAVTLRNRQHRLFTNNPSRXGMFRDGKEYCASVGKAWKRGYLLCGPPGTGKSNMIAALANFLEYNVYDLERGGLGEAAVGPRWRQSGQGGGGRARRRPGFEVGVEVVTALEIT

SEQ ID NO: 157059 - protein, 77 aa, Oryza sativa
  Clone ID: PAT_MRT4530_56668C.1.pep
LFCPVLMHFPLSLLSFPQFRLQMYQAHIEFLPSKTSVSSVSELTTKLMKDAPIAFRGYTVLSLEPIPWNNSGYAILS

SEQ ID NO: 157060 - protein, 60 aa, Oryza sativa
  Clone ID: PAT_MRT4530_56669C.1.pep
IRSFLGLVGYYRRFIENFSKIARPMTRLLQKDVKYKWTEECKANVVADALSRKSHCNMSE

SEQ ID NO: 157061 - protein, 109 aa, Oryza sativa
  Clone ID: PAT_MRT4530_5666C.1.pep
MGDRPGILWPRGDVPGLGLVDGDVFPVRTSEVADVAKRATSWCARVRWPGVNRRGTWRRGDVPGLGLIDGDVFPVRTSHSSRPPSTAKASPGDGYCGAVAPSWIRRRGA

SEQ ID NO: 157062 - protein, 67 aa, Oryza sativa
  Clone ID: PAT_MRT4530_56670C.1.pep
SGITCNGSSGSVPSTQLNNESIYKWPLRGAYDNNDNGSERGNTCSKWLSEHTGNFLWAYCSTEIQQC

SEQ ID NO: 157063 - protein, 339 aa, Oryza sativa
  Clone ID: PAT_MRT4530_56671C.1.pep
MQQLLAMKLILTTLVVAVLALSAGTATATCDTLTVGHYRQSCRAAETIVRDTVKLYFSKDQTVTAPLLRLHFHDCFVRGCDGSVLLNATAASGPAEKDAMPNQSLDGFYVIDAAKAALEKECPGVVSCADILALAARDAVSMAAGNINGASLWQVPTGRLDGRVSSAAEAVANLPSSFADFAKLKEQFGSKGLNVQDLAILSGAHAIGNSHCVSFAKRLYNFTGKGDADPTLDRAYAAAVLRAACPPRFDNATTVEMVPGSSTTFDTDYYRLVASRRGLFHSDQALLQDREAAATVRVMARSSRQAFFRRFGVSMVRMGNVGVLTGAAGEIRKNCALIN

SEQ ID NO: 157064 - protein, 315 aa, Oryza sativa
  Clone ID: PAT_MRT4530_56672C.1.pep
MGGFAPHPVVVPTAAMDGTSSVSARTASSLSSSSSSLDDGGRGRPPPAGSTLELPSRKHYRYPSRSARLFQKLRRSLPLLTLAPRCGRMQVGSASEVAAAAASGGGGGGAADSHLMSHVVSSFSGAARPMRRVTGTLFGHRKGRVALALQETPRCLPTLVIELAIQTNALLRELANPAGARIVLETERRAPSTDAAAGKHRRAPPLLDVAAWTMFCNGRKTGLAVRREATDDDLAVLETLRPVSMGAGVLPASNRSSSSSSQSPEKGAAAADDEVAYMRGCFDHFVGSRDSESLYMIAPQGGGTGPELAIFFVRL

SEQ ID NO: 157065 - protein, 748 aa, Oryza sativa
  Clone ID: PAT_MRT4530_56673C.1.pep
MGRAIDRPLEFPNNICMNLAVKRKKQHYSFALHKFQGRRFKHHPNLVKQHDFAESTSRTVCDRWQMDGTGNNAPTPRPVSGGVGAANPSLPDWLSACLVNLLENKLEDLLASGNLVIRQESNASSVLWQSFDDITDTWLPAPGMFSVEIDPDGSNQYIISWNKSVVYWGTGNWTGSSFPNMPELSPANTYPNTPYTYKFVNNDKETYFTYNVTDDRVLSRHAIGVSGQTQSLVWVESAQAWVLYFSQPKANCGVYGLCGVNSKCSGSALSSCSCLKGFSIRDPNSWNLGDQTAGCRRNVMLQCGSKSSAGGQQDRFYTIGSVKLPDKSQSIEATSIHSCKLACLSNCSCTAYSYNGTCSLWHSELMNLQDSTDGTMDSIYIRLAASELPNSRTKKWWIIGIIAGGFATLGLVVIVFYSLHGRRRISSMNHTDGSLITFKYSDLQILTKNFSERLGVGSFGSVFKGALPDTTAMAVKKLEGVRQGEKQFRAEVSTIGTIHHINLIQLLGFCSEGAKRLLVYEYMPNGSLDHHLFGSTGVSLSWSTRYQIAAGIAKGLAYLHEKCRDCIIHCDIKPQNILLDSSFTPKVADFGMAKLLGRDFSRVLTSMRGTIGYLAPEWISGEAITTKADVFSYGMMLFEIISGKRNGMHGGSFFPVLVARELVEGELHKLFGSESSDDMNLGELDRACKVACWCVQDSESSRPTMGEIVQILEGLVDVEMPPVPRYLQVLGQGVKSYEISSEMNQASN

SEQ ID NO: 157066 - protein, 374 aa, Oryza sativa
  unsure (1)..(374): unsure at all Xaa locations
  Clone ID: PAT_MRT4530_56674C.1.pep
MEPINLLIVDDAAKINECDLIIPLRLLVTHILMLGDDFNLQPSKVRENARFTMSPFKRLLNLGFRKHMLTEQYAIHPSIWQFRNEKFYEGRITNGATVXSPEYNKKFKGLKFPNYCFIDVTGTDGPSCKEKNTIELATIQYMLEIISKQXSEIKSSLRQKYASHNKINVHIESADSFEGETYQVVILSMLFKDENTILQIEKINAAITKARHCLWMFGEAASVSARGGVFRELVDDMIERKCILKWNTIATSQSKYALESDDFHGSSSASSNETIHQVASNFRIKSQPQLPIKKDQEIKTVFNTVKNGKFPVAHFRMSENFFSLRPGEIGHYDYQKPYLHPVCSLLASHAVMIIGSAMTMTEVNKRRENSALSI

SEQ ID NO: 157067 - protein, 1910 aa, Oryza sativa
  Clone ID: PAT_MRT4530_56675C.1.pep
MTGPRGGGGEDPPRTSSGAAASASASSGVPNEPLTPTSMLMSGQQAGLNRRGSRSAAMATFSMEVFDNEVVPSTLSSIAPILRVAAEIEPERPRVAYLCRFYAFEKAHRLDQNSVGRGVRQFKTALLQRLEKDNSPSLAKRVKKTDAREIESFYQQYYENYVRALDKGEQADRAQLGKAYQTAGVLFEVLCAVNKNEKVEEVNPEIVRLHRDVQEKKDIYTPFNILPLDAASASQSIMQMEEIKAAVAALRNTRGLTWPSTFEPERQKGGDLDLLDWLRAMFGFQRDSVRNQREHLILLLANVHIRLEPKPEPLSKACSFATFYFADLTIWISMWIMKSPQGAQPQEIQQRNILFLGLYLLIWGEAANIRFMPECLCYIFHNMAYELNGLLAGNVSIVTGENIRPSYGGDEEAFLKKVVTPIYRVIKKESGKSKHGKTPHSAWCNYDDLNEYFWTTDCFSLGWPMRDDGDFFKSVHDSRPVTTAGSSSQKGSTKSTGKMNFVETRTFWHIFRSFDRMWTFYLLALQAMLIFAWSDYTLSQILQKDLLYSLSSIFVTAAFLQFLQSILDFVLNFPGHHKCKFLDAMRNILKIIASAAWAVILPFFYISTASKVNLPIKDLDKWFQYVKGVPPLYILAVAVYLIPNILSAALFLLPCFRRWIENSDWRIVRLLLWWSQKRIYVGRGMHESSVSLFKYTLFWILLLCSKFAFSYFVQIKPLIKPTKDIMNVHNIHYEWHEFFPNASYNVGAVMSLWAPVLLVYLMDTQIWYAIFSTISGGVSGALGRLGEVSPSKRTEAAKFAQLWNEVICSFREEDLISDKEMDLLVVPYSSDPSLKLMQWPLFLLASKIPIALDMAAQFRPRDSDLWKRICADEYMKCAVLECYESFKLVLNLLVIGENEKRIIGIIIKEIEANIAKNTFLANFRMSALPVLCKKFVELVSALKERDASKFDNVVLLLQDMLEVITRDMMVNEIRELAEFGHGNKDSVPRRQLFAGTGTKPAIVFPPPISAQWDEQIKRLYLLLTVKESAMDVPTNLEARRRIAFFTNSLFMDMPRAPRVRKMLSFSVMTPYYSEETVYSRNDLDLENEDGVSIIFYLQKIFPDEWNNFLERIGCQRESEVWGNEENVLQLRHWASLRGQTLCRTVRGMMYYKRALKLQAFLDMASESEILEGYKAVADPAEEEKKSQRSLSSQLEAIADMKFTYVATCQIYGNQKQSGDRRATDILNLMVNYPGLRVAYIDEVEERDGEKVQKVFYSVLVKALDNHDQEIYRIKLPGPAKLGEGKPENQNHAIVFTRGEALQTIDMNQDNYLEEALKMRNLLEEFHENHGVRQPTILGVREHIFTGSVSSLAWFMSNQETSFVTIGQRVLANPLKVRFHYGHPDVFDRIFHITRGGISKASCGINLSEDIFAGFNSTLRRGNVTHHEYIQVGKGRDVGLNQISLFEAKVACGNGEQTLSRDIYRLGHRFDFFRMLSCYFTTVGFYISSMMVVIIVYVFLYGRLYLALSGLELAIMKQARMRGNTALQAAMGSQSIVQLGLLMALPMFMEIGLERGFRSALGDFIIMQLQLCSVFFTFSLGTKSHYFGRTILHGGAKYKATGRGFVVRHVKFPENYRMYSRSHFVKGLELMLLLVVYQMYGDVATDSTAYILLTSSMWFLVITWLFAPFLFNPSGFEWQKIVDDWDDWSKWISSRGGIGVPANKAWESWWEEEQEHLQSTGFFGRLSEIILSLRFFIFQYGIMYHLNISAGNKSISVYGLSWLVIVAVVMVLKVVSMGRKKFSADFQLMFRLLKLFLFIGSIGTLAILFTLLHLTVGDIFASFLAFAPTGWAILQISQASKPVVKAFGLWGSVKALSRGYEYLMGILIFVPVAVLAWFPFVSEFQTRLLFNQAFSRGLQISRILAGGKKQS

SEQ ID NO: 157068 - protein, 121 aa, Oryza sativa
  unsure (1)..(121): unsure at all Xaa locations
  Clone ID: PAT_MRT4530_56676C.1.pep
VSFRRAIVGKNLENWYVIVSKVANVNLTSEHDQFIWKINKEGVIPRKSLIWKLRIPLKIKIFLWYLKKRVIFKATHXGRLWSLLLKKVGEEVQVNCRILEKRVMEFFSWMVVTALTYCFLD

SEQ ID NO: 157069 - protein, 1907 aa, Oryza sativa
  Clone ID: PAT_MRT4530_56677C.1.pep
MTGPRGGGGEDPPRTSSGAAASASASSGVPNEPLTPTSMLMSGQQAGLNRRGSRSAAMATFSMEVFDNEVVPSTLSSIAPILRVAAEIEPERPRVAYLCRFYAFEKAHRLDQNSVGRGVRQFKTALLQRLEKDNSPSLAKRVKKTDAREIESFYQQYYENYVRALDKGEQADRAQLGKAYQTAGVLFEVLCAVNKNEKVEEVNPEIVRLHRDVQEKKDIYTPFNILPLDAASASQSIMQMEEIKAAVAALRNTRGLTWPSTFEPERQKGGDLDLLDWLRAMFGFQRDSVRNQREHLILLLANVHIRLEPKPEPLSKACSFATFYFADLTIWISMWIMKSPQGAQPQEIQQRNILFLGLYLLIWGEAANIRFMPECLCYIFHNMAYELNGLLAGNVSIVTGENIRPSYGGDEEAFLKKVVTPIYRVIKKESGKSKHGKTPHSAWCNYDDLNEYFWTTDCFSLGWPMRDDGDFFKSVHDSRPVTTAGSSSQKGSTKSTGKMNFVETRTFWHIFRSFDRMWTFYLLALQAMLIFAWSDYTLSQILQKDLLYSLSSIFVTAAFLQFLQSILDFVLNFPGHHKCKFLDAMRNILKIIASAAWAVILPFFYISTASKVNLPIKDLDKWFQYVKGVPPLYILAVAVYLIPNILSAALFLLPCFRRWIENSDWRIVRLLLWWSQKRIYVGRGMHESSVSLFKYTLFWILLLCSKFAFSYFVQIKPLIKPTKDIMNVHNIHYEWHEFFPNASYNVGAVMSLWAPVLLVYLMDTQIWYAIFSTISGGVSGALGRLGEVSPSKRTEAAKFAQLWNEVICSFREEDLISDKEMDLLVVPYSSDPSLKLMQWPLFLLASKIPIALDMAAQFRPRDSDLWKRICADEYMKCAVLECYESFKLVLNLLVIGENEKRIIGIIIKEIEANIAKNTFLANFRMSALPVLCKKFVELVSALKERDASKFDNVVLLLQDMLEVITRDMMVNEIRELAEFGHGNKDSVPRRQLFAGTGTKPAIVFPPPISAQWDEQIKRLYLLLTVKESAMDVPTNLEARRRIAFFTNSLFMDMPRAPRVRKMLSFSVMTPYYSEETVYSRNDLDLENEDGVSIIFYLQKIFPDEWNNFLERIGCQRESEVWGNEENVLQLRHWASLRGQTLCRTVRGMMYYKRALKLQAFLDMASESEILEGYKAVADPAEEEKKSQRSLSSQLEAIADMKFTYVATCQIYGNQKQSGDRRATDILNLMVNYPGLRVAYIDEVEERDGEKVQKVFYSVLVKALDNHDQEIYRIKLPGPAKLGEGKPENQNHAIVFTRGEALQTIDMNQDNYLEEALKMRNLLEEFHENHGVRQPTILGVREHIFTGSVSSLAWFMSNQETSFVTIGQRVLANPLKVRFHYGHPDVFDRIFHITRGGISKASCGINLSEDIFAGFNSTLRRGNVTHHEYIQVGKGRDVGLNQISLFEAKVACGNGEQTLSRDIYRLGHRFDFFRMLSCYFTTVGFYISSMMVVIIVYVFLYGRLYLALSGLELAIMKQARMRGNTALQAAMGSQSIVQLGLLMALPMFMEIGLERGFRSALGDFIIMQLQLCSVFFTFSLGTKSHYFGRTILHGGAKYKATGRGFVVRHVKFPENYRMYSRSHFVKGLELMLLLVVYQMYGDVATDSTAYILLTSSMWFLVITWLFAPFLFNPSGFEWQKIVDDWDDWSKWISSRGGIGVPANKAWESWWEEEQEHLQSTGFFGRLSEIILSLRFFIFQYGIMYHLNISAGNKSISVYGLSWLVIVAVVMVLKVVSMGRKKFSADFQLMFRLLKLFLFIGSIGTLAILFTLLHLTVGDIFASFLAFAPTGWAILQAFKPVVKAFGLWGSVKALSRGYEYLMGILIFVPVAVLAWFPFVSEFQTRLLFNQAFSRGLQISRILAGGKKQS

SEQ ID NO: 157070 - protein, 127 aa, Oryza sativa
  unsure (1)..(127): unsure at all Xaa locations
  Clone ID: PAT_MRT4530_56678C.1.pep
QIGSKIFLSPATISRLLRTLAPPPTPPSPPXPPSPPPPPSEPPLPPSPPSLPPRPPPRPSPPLPPPSLYIDRRRPSSSSSPASSPTRTAAPTKPGDVLPHRRRRRRPPPSPAPPPPSPPGRPQASPP

SEQ ID NO: 157071 - protein, 61 aa, Oryza sativa
  Clone ID: PAT_MRT4530_56679C.1.pep
LTFWSERLWKWPRFFVKEYLFTFVKYDSLYSVQANLSFALRCLNIYYVLFCYIYSIFNEYM

SEQ ID NO: 157072 - protein, 1080 aa, Oryza sativa
  unsure (1)..(1080): unsure at all Xaa locations
  Clone ID: PAT_MRT4530_5667C.1.pep
MEQPLFELSAPRDEFYEPPPSSXPIYTIGYEIRPELICMVRENPFXSSLDLENPYHHLWDFEQVCSCLKIRGMKQETVRWKLFPFSLQERAKQWYTSTVGCVDGSWEKLRDRFCLAFFPVTRITAHRVEILSFRQINNESIGAAXSRFTNLVQSRPTLSLPKYVLLQHFHTGLETESAFYLDITPGXSFMHKMSSEGKVILDRILENTSFMTQCDEPLLEAFVSKIEKPSTVESQPELSTSTDSTDEVVPEPPSIQNEEIQTSDCAPILFRDGLDEDYGNTLNYFSKKMLIVPLPPPDPMELAFLRQTVWDVTSIMSDERLREAELSSEEVLSHESPETLLENEVPNFIKEEAEPSETLELPIIEPPPRPPIALKPLPQGLRYAFLHGNKEAHVIISNKLSEDETQRLLAVLEKHRSVLGYSLXDLKGNNLALCTHRIPIEPESTPSREPQXRLNNTMREVVKKEVLKLLHTEIXYLVPYRIVLGHRVSEHGIKVDRAKIDVIDQLPPPVNIKVIQPPDWTLPFEIMCDASDFAVGVVLGQTKDKKHHAICYPSKTLTGAQFNYATTKKELLAVVFAIDKXYTDHAALKYLLTKKDPKPRLLXWILLLQEFDLELKDKKGVENSIADHLSRLQITNXSQEQSINGFLRDDMLMMVHDSNSWYANIVNYMVLKYIPPGENQRKLKYESHRHIWDEPYLYRVCSDGLLRRCFSCQRQGRIAARDAMPLTYNLQVEIFDVWGIDFMGPFPKSRNCEYILVAVNYVSKWVEAMPCSAADAKHAKKMFTEIIFPRFGTPRMVISDGELGHRAYKAIRNXNMDFEGVGDWRKMQLAELEEWREKAYHNSRIYKERMKRWPDKRIKIKKFKPGDKVLMFNSRVKLFGHGKVRSNWEGPFDIIDTSSHGAITLCDDSAPCDGAGLPCESRAHRRAPXSSEPGVRPNPSRPHSAARSLSPMHVTXTKVQGDSPARRPTMGELSLLKARRLFQDDEKAAPLPVEXYVVTLYTKAGDEVLHKYTTTTAAPSTPKRDRFCIQGVRTPGGGYGKGLLRPLTASEKKGVAESCIPPPMKVKRHLTHPPIIRAPR

SEQ ID NO: 157073 - protein, 141 aa, Oryza sativa
  Clone ID: PAT_MRT4530_56680C.1.pep
SAGARCAAASSRRRRPFPPSWQPPSSSSSSSTPSPSSSSPAAAAAKWPSTGTRLQARCCCFRGGGGSSWRTRWCSRRRWRSSELSSCSRAGPSAGSRRTSKSACRVTRAPRSPCPTPAMAASTEIIASSKLACYRAIDLIM

SEQ ID NO: 157074 - protein, 327 aa, Oryza sativa
  Clone ID: PAT_MRT4530_56681C.1.pep
MTMGGEEAAILLYVDVMIITSNDVEFIAFVKAHLSEQFLMSDLGSLRYFLVIEISSTPEGFYLCQAKYIQDLLDRASLTDQHTVETPMELNLHLSATDGELLAYPTRYRHIVGSLVYLGVTRPDISYSVHILKQFVSAPTQLHYSHLLRVLRYLRGTISRCLFFPRSITLHLQGYFDATWASDSSDHRSLSAFCVFLGGSLIAWKTKKQTMVSRSSAEAKLRPLALLTAEVTWLCWLLEDFGVSVTSPTSLLLESTSAISIARDPIKHELPKHIGVDASYTRTQVHDQVVALQYVPSKLQLADLFTKAQTRAQHRFYLSKLSVVDPP

SEQ ID NO: 157075 - protein, 57 aa, Oryza sativa
  Clone ID: PAT_MRT4530_56682C.1.pep
MKTEEVEKVDGFNNGCGLMGTENGRHVCGGLQNALARLPRHVGADKQDGKRELLSAA

SEQ ID NO: 157076 - protein, 123 aa, Oryza sativa
  unsure (1)..(123): unsure at all Xaa locations
  Clone ID: PAT_MRT4530_56683C.1.pep
SWSPKKDEALQRQVAKHGGXDWSLISKSIPGRSGKSWHIRWCNQLSPWVEHHPFTPEEDDTILHTHATGTPPSSASTTPRPMHSSHRRRCPPPMPLAAPLALTPATPATTASTPTCCPCRHTT

SEQ ID NO: 157077 - protein, 111 aa, Oryza sativa
  Clone ID: PAT_MRT4530_56684C.1.pep
AYGLTIQGLSLHSCIASSAPMEEATNAGPRISLRLIPSRSPPARAAWRGAARRRLLQMASARRRRELRLIESEASEPACCRRYWLPICCSWEGSPMAAEVGIGRATCAAWA

SEQ ID NO: 157078 - protein, 113 aa, Oryza sativa
  unsure (1)..(113): unsure at all Xaa locations
  Clone ID: PAT_MRT4530_56685C.1.pep
MAKGKTHINIEGIGPDDSGKSTTTGHLIYKPGGIDKRVSERVFXYSVEMNKRAFKXAGELDTLTAERERGISIDIALWKFETTKYYCTXIDAPGHRDFVKNMITGXSQLDCAR

SEQ ID NO: 157079 - protein, 114 aa, Oryza sativa
  Clone ID: PAT_MRT4530_56686C.1.pep
KGNPKPGLWFLGPYSPARGPGPPGGFLSPPWKNFLVGKGPLSSPKPGFSCGGGCSPPRGSPPPSPPLNLGPPFARSGGGGNPLVTPFLGFFSPQNPPSFFGSPRPNPIKKGGFS

SEQ ID NO: 157080 - protein, 686 aa, Oryza sativa
  unsure (1)..(686): unsure at all Xaa locations
  Clone ID: PAT_MRT4530_56687C.1.pep
MTIPSAEGFLHAASCLPCTAEEERDLVVALTREAEENVKDGDLRYLVSHSWWLNWQSYVGLIKPDENDADMLPQAPSRPGEIDNSKLVSEESSSIGDEPELQRTLREGDDYALVPQEVWRKLHEWYKGGPELSRRVICSSPTSRSYIVDVYPLRLKLLDGRDSFVCIGRSTXRSKLCEKYTIYXKSMPMTVLMKNLLRFARNKIKKKKILXIVDKFQGQYKSTLVCPDCKKISVTFDPFMYLSLPLPSTVTRMINVTVFSGTGXPSHALHCEGTKEWSLWRSYKISECLCVAYKVAKHCYLQRYMIIGFSGLHNLGNTCFMNSAIQSLVHYRLLVGSENLFYSREINTENPLGLQELLAFLLDGLHEDLNRVKKKPYIEAKDADGRPDEELAEECWNYHKARNDSIIVDKFQVYVCSQLFTTHHNGVSCEEDVSTSNVDEEAADELVLPFQLWLTDDKANKREHIDADSNGVPGSTMRLLMDWSDREHEVYDIKYMDELSVVFKPGFMSKKNRQEAVNLFSCLDAFLKDEPLGPDDMWYCPRCTEHKQASKKLDLWRLPEILVVHLKRFSYSRFMKNKLDTFVNFPIHDLDMSRYANHSRGXQTPIYAVRKMYLHQIFLGHTYTAEKIARNLICWFWAPEYWFMVGPSNRGGFEAYLLFYRRVGSSSCSVSKNVAVDTDMVDSLDT

SEQ ID NO: 157081 - protein, 557 aa, Oryza sativa
  Clone ID: PAT_MRT4530_56688C.1.pep
MASFHIATALSATLLLSLLVLGRSDATLPPPATPVPPSTACNGTTDPTFCRSVLPSNGTSNLYTYGRFSVAKSLANANKFLSLVNRYLSGGRLAAGAVAALQDCQLLSGLNIDFLSAAGATLNRTSSTLLDPQAEDVQTLLSAILTNQQTCADGLQAAASAWSVRNGLAVPMSNSTKLYSVSLSLFTRAWVRPSTKKPRTATPKPPRHGGRGRGLFDATDDEMVRRMALDGAAAAVSTFGAVTVDQSGAGNFTTVSDAVAAAPTNLDGTKGYFVIHVTAGVYAENVVVPKNKKYVMMVGDGIGQTVITGNRSVVDGWTTFNSATFAVLGQGFVAVNMTFRNTAGPAKHQAVALRCGADLSTFYQCSFEAYQDTLYTHSLRQFYRACDVYGTVDYVFGNAAVVFQDCTLYNRLPMQGQSNTVTAQGRTDPNQNTGTTIQGCAIVAAPDLAANTAFATTNYLGRPWKLYSRTVIMQSVVGGLIDPAGWMPWDGDYALSTLYYAEYNNSGAGADTSRRVTWPGYHVLNSTADAGNFTVGNMVLGDFWLPQTGVPFTSGLN

SEQ ID NO: 157082 - protein, 338 aa, Oryza sativa
  unsure (1)..(338): unsure at all Xaa locations
  Clone ID: PAT_MRT4530_56689C.1.pep
MQPRPPPASIFRFSSSLRVATIGKCHLQDAIVQMLHFPKLEHLGLEDVVISEGSLHSIIAACPVLECLLLVRAIGFRGLRINSASLTSIGVDILYFPAEQIELGELIIEHAPLLEKLLNFGVRNELDVSIISAPKLVTVGCLCQQFCHRHSRFTFGTTVIKGVKNESLPEVVHNVKTLAVSVLLLDVDKVVDILRCFPCLENLYFKSCELTSKVVWRKKYRNLTKSLDIRLKTVVLEDYRGIWAEVHFAQFFVLNARTLEAMKFFVTCKITIRGLLQNSERCXQLDKRASSGARFIFTTKGCFHDAACAKDGIRIWCFKIGEIVFGSSDIFSACQLLL

SEQ ID NO: 157083 - protein, 344 aa, Oryza sativa
  Clone ID: PAT_MRT4530_5668C.1.pep
MNPGRPAPASFRDRTNEFRAAVESAARYASSSAAAAPSSSSGGGVGGPLDVSRGAASAHSEFNRRASKIGLGIHQTSQKLARLAKLAKRTSVFDDPTVEIQELTAVIKKDITALNSAVVVLQVLCNSQNESGHLSKDTTNHSTTVVDNLKNRLMSATKEFKEVLTMRTENLLVHENRRQMFSSPAANNASNPFVRQRPLVTRDGPESSVPPAPWASDSATTPLFQRKKTNGDHGASSSSSQPFMQQQLVQQDSYMQSRAEALQNVESTIHELSNIFTQLATMVSQQGELAIRIDENMDDTLANVEGAQGQLLKYLNSISSNRWLMMKIFFVLMVFLMIFIFFVA

SEQ ID NO: 157084 - protein, 738 aa, Oryza sativa
  Clone ID: PAT_MRT4530_56690C.1.pep
MDDLKQILARPIQLAEQVIKWSDEAYTFRQECMELKAKVERLAGQLRQAARADLYERPARRIFDDTEKALDKAMALVDKCRAHGVVRRVFTIIPAGSFKKMANQLDNSIGDLSWLLRVSSSASDDDDFDAHIGLPPIAQNEPILFLIWEQIAVLYTGNLDARADAAASLVSLARDNDRYSKLIIEEDGVPPLLRLVKEGKLEGQENAALAIGLLGRDPECVEQMVHAGACTAFAKVLKEGPMKVQATVAWAVSELAANHPKCQDAFASHNVIRLLVGHLAFETVQEHSKYAVTSSKMSIHSVVMDKKNSTRGALIPDLMDAGEHGGTRHPGGHVSQSKNEMYSLVHSTMAAKPNGSSGKVSNGGVVASKQHNVSLSGATTRGREFEDPETKASMKANAAKALWHLAKGNAAICKSITESRALLCFAVLLEKGEGDVQYNSAMALMEICSVAEQNSDLRRSAFKPTSPAARAVVDQLLRVVDKAEYDDLLIPCIISLGCLSRTFRATETRIIGPLVKLLDEREADVSREAALSLTKFACTENYLRVDHSKAIISAGGAKHLVQLVYFSEQVVQLAALALVCYIAHNVPDSEELAQAEILTVLEWASKQSFMMQDPLIESLLPEAKIRLELYQSRDAITGSSLFISQLHQRLTLYWQRCSSISVAVHHCFLYILIYYEAADHIPMTYSAVYLSSGDGGMAGSSNFSLILCAQPLPKPASVKARRINIGGAGRQKDGRACN

SEQ ID NO: 157085 - protein, 104 aa, Oryza sativa
  Clone ID: PAT_MRT4530_56691C.1.pep
FGFFFFGVFFFFFFFFFLFEIYAKHILFYYSMRKAMSAMVLSYHVGGERQETKGRGQRGKKRVPPKGATKGTPKGTEKPLDQGEGIKQRPSNGPLHGGNTHYSP

SEQ ID NO: 157086 - protein, 584 aa, Oryza sativa
  Clone ID: PAT_MRT4530_56692C.1.pep
MSREPAAAAEAEDVVARLGTDEATGLTEEEAARRLKLYGPNLVVAHHPQVTYISSLMLVAFNIVLQVGGKLLATLKCIVLLWGWDHSFTEYIKYEIGWESWEHLIFPCSREMLCVMFINFSSWAALAAALVSLALNSAGQTTYELIVIVSLLVGSLCACCVAKLLANRAKAPLEAKAFARRTKVLRDGIWKHEDATNLVPGDIIYLKCGDIVPANAFVLNMAQIDTKTIRHERSVNYVMGSLIYYGWAVSCGEGTAVVTVTGNNIPMSTLKQLYPKRFSRPGQLRKGVMAAATFCFCLVLVGITSEALVKFFFHQSIGTLHSGHFMPLIGLIPMSIPAVLYLALALDSQRLSKLGVASRGTFALEDLASMDAMLFNMTGTLTCNKPYFDKDKIEVLTEGIDKDHAVLLAARASKAHNELYKEPIDAAILGLMDDPEQARVGINVIEHRSRMFVAMTLMYMTTYIDENGSKCSVLKGDPALMLRDCSCSEEVREHIRKRIDKLGLDGYQCIAVGRIVNSRLDIIILLPFIDDLRSDSAEAVDNLTDMGLSVIVLTESPMTITKHVCGRLGKLGLNVLHADSMREL

SEQ ID NO: 157087 - protein, 284 aa, Oryza sativa
  Clone ID: PAT_MRT4530_56693C.1.pep
MATESFRKNTISSLLDVDGTFLTSHDDKAVVAWRAYKSRMGVSMFEDMPFDLNSLIDAHEGLDILHTPFLKKEIDQLIKDLPTDRAPGPDGFSVLLNGVPGLDFHCKRGACGKELFVLKALLQTFAQGTGLKVNYHKSCLIPINVNDDKAEMLAGVFGCKIGTLPFTYLGLPLGTTKPRVIDFAPLVDRIERILSANSAFLSYGDRLTLVNSVFSSHPTYYMCTLQLPKTVIENIDRARRHCLWRGGDFNSSKKSLAAWDKVCKPKSFEVTTTLCLALEKQIHI

SEQ ID NO: 157088 - protein, 615 aa, Oryza sativa
  Clone ID: PAT_MRT4530_56694C.1.pep
MASSLLLPRATFAATTKHIAVLHPPVASACRPHPPRLIRCGAAAVPDDELLRSLYLVQADAASPVVSADTGNDGWAALLDEIRGSLQAEDSSSSIPAATSGGVVVPDELLTAPPSVDIPDEILGADPSSTLQAPGPGGGAIPEDLLAALHLDASNPVVRAAWGALSRLDELTSGLSGPQRWAAAAFAAATWAYLTARPGVLSGAVDAYVLAPLQLAVDSAVGRRSLRMSDFVVGERIGEGSFGVVYSGAVVPRGGAAPAARKGKAKTRLELDERYKEKVILKKIKVGTAGAKECGDYEEWFNYRVARAAPESCAEFLGSFVADKTKSEFVKGGKWLVWKFEVESLYLIFHYRNGGQSTWPNGQRKGDRTLGNYMSDRNFPFNLEGLMFGRAVRGLDDGSRAALVVKQVMRQLVTSLKRIHGTGIVHRDIKPSNLVVTRRGQVKLIDFGAATDLRIGKNYVPDRALLDPDYCPPELYVLPEETPQPPAEPIAAILSPILWQINSPDLFDMYSAGIVLMQMASPMLRSPSGLKNFNAELKAAGYDLNRWRETTRRRPDLQILDLDSGRGWDLATKLISQRGADKRGRLTAAAALRHPYFLLGGDQAAAVLSKLSLSK

SEQ ID NO: 157089 - protein, 152 aa, Oryza sativa
  unsure (1)..(152): unsure at all Xaa locations
  Clone ID: PAT_MRT4530_56695C.1.pep
STNYSVLFVFLSISKLSGKRKSNIFFLENFQSSNKKQRRFLWTRADNIMSEKCKVNXTRTCIPIAYRGLGXLNLKKFSRALRVRWLXAPVEGNEKDISXGWICDKSDKLLFTATTAITTGDGKTILFXNSAWMQGRSPRNVAPKVYAISDRK

SEQ ID NO: 157090 - protein, 100 aa, Oryza sativa
  Clone ID: PAT_MRT4530_56696C.1.pep
MPLGLILSSLGRSMRRKRLSSLGILSSKRAPRDYYKGKNCKPTGFHTRKGGYVMVDEKLPRFVVPDLTDFKLKPYVSQCARDITASSASSTSAETSENKK

SEQ ID NO: 157091 - protein, 562 aa, Oryza sativa
  unsure (1)..(562): unsure at all Xaa locations
  Clone ID: PAT_MRT4530_56697C.1.pep
MAAKAGSAREVRAAEMEAGLAREARLMEGGRIGVRGESGGGGRLGAAGGGGGDLGEWRSCWWVWRGLRRTKASRRRAPVQGSHMSAEVDWWWSIGVLAVVSQVIEGAYLEGNKSLSNWDVFTHLPGNIKDGSNGDIADDHYHRYEEDVELMNSLGVNAYRFSISWSRILPKGRFGGVNPAGIDFYNKLIDSILLKGIQPFVTLTHYDIPQELEDRYGAWLNAEIQSDFGHFADVCFGAFGDRVKYWTTFNEPNVAVRHGYMLGTYPPSRCSPPFGHCARGGDSHAEPYVAAHNVILSHATAIEIYKRKYQSKQRGMIGMVLYSTWYEPLRDVPEDRLATERALAFETPWFLDPLVYGDYPPEMRQILGGRLPSFSPEDRRKLRYKLDFIGVNHYTTLYARDCMFSDCPQGQETQHALAAVTGESNGLPIGTPTAMPTFYVVPDGIEKMVKYFMRRYNNLPMFITENGYAQGGDSYTDAEDWIDDEDRIEYLEGYLTKLAKVISFERRHHVCCEDXVVDNFEWLFGYTLRFGLYYIDYRTQERSPKLSALWYKEFLQNLHENQ

SEQ ID NO: 157092 - protein, 80 aa, Oryza sativa
  unsure (1)..(80): unsure at all Xaa locations
  Clone ID: PAT_MRT4530_56698C.1.pep
MXSRLLARSKALALALSRADXAAPGPAXGLQWLRTLSXLPRNPAAAASPAPAXRQPAVGSPXGLSXIPGYXQTSXLIGTK

SEQ ID NO: 157093 - protein, 456 aa, Oryza sativa
  Clone ID: PAT_MRT4530_56699C.1.pep
MTSTTTITTTNTTTTTTNNNNNPVSTTTTTTASHQRQSLPVAARPPHSSGSGSGSGGSHRGASGGGSGGGGGGGGGGGGGGGGTNQACAACKYQRRKCNPDCPMAPYFPADQQRRFLNAHRLFGVSNILKTLRHLKPELCDDAMRTLIYQAEMRAHDPVGGCCRVICDLERQLELDTAELNTVLHHLAMCRQAAAAGASGSVAAALPAGVLDDACADLDVTSSNQPLLLSAEHEVVDALYANQEADAAILHADGHHNQDESQREHHHGQPQQLYDYFYYDSTAGDDVSSKPHLDINVDGMQHFDFDTNYDAEHKVELTSDHQMPVGVDEHNQIDDKGFEIKSGPSLVDVFDLRQEEEQVQTVDVNTDIEVKEMVDMNADIDVKTMVDENSNIDIIKTMVDVNADIVDVVKTVVDVNGDIGVKEELPELDNGKIIAGDATQMAESSHCRLGLGVSSF

SEQ ID NO: 157094 - protein, 66 aa, Oryza sativa
  Clone ID: PAT_MRT4530_5669C.1.pep
FDAQEYKKRPPLIPLWRTDELFIVVVHPTGATCGGRRNSPVCQRSRVDIERHKCGMGKKEFTLLVA

SEQ ID NO: 157095 - protein, 84 aa, Oryza sativa
  Clone ID: PAT_MRT4530_566C.1.pep
SCLFIFKKLTTARAGERKQSHYQDINIVQAIAQQLQLQQFGDLSFDRNLAQAQALLAFNGPSKYGISPRDYGAPSPLPPLGGVL

SEQ ID NO: 157096 - protein, 140 aa, Oryza sativa
  Clone ID: PAT_MRT4530_56700C.1.pep
PTRPPTRPSSCAFCGRPFTLNFFFLPPRTLPRSKPFSTRATPHLSRILILPSCSSAHPPWRAPPRSPPSSGCWCPCTPPDSSPTSTCSRVARVASFELRRLTPRSTRCCWRRRRRWLPSTHPSHSSTPVSAAEAAVPWTG

SEQ ID NO: 157097 - protein, 224 aa, Oryza sativa
  unsure (1)..(224): unsure at all Xaa locations
  Clone ID: PAT_MRT4530_56701C.1.pep
SFATSSTMTTTRVLTSRHXVTKYDAVLFYYNKWCSNLQYFYQPISSVSTSWTTSSTFLQVKHXNSYNXQFDGLLSLTSSPAPLLHRPXTSALLLMDDYVFAXTYYFTFTVAIDWITDIVIFINILSSLFNIAHSTAIDGQLRHYIXSSXLLLIIITVGCLPCLSPTDYFTAMATQLYRWAPSSSLLADLTAADWFLCLHGCATSSLLIGITIFTTTNIFATSGG

SEQ ID NO: 157098 - protein, 694 aa, Oryza sativa
  unsure (1)..(694): unsure at all Xaa locations
  Clone ID: PAT_MRT4530_56702C.1.pep
LHQAHNVNKIRETNLHANQPRLYGWLVTPSLLGVYVFTDRLAFVAADWCHRLHGWPIMPPLLGIYDFTXRPAFAAADWCLRLHGWPXLCRRCWASTSSPTGXLRRRRLVSPPARLAXMPPLLGIYDFTAGLPSPPPTGVSAYTVGLLCRRCWASTSSPTGLPSSPXLVFPPARLAYYMLPLLGXPSTGVLAYTVGWSHHRTWASTSSPTGWPSPLPTSVSACTASLLYRRPASAATYWCFRLYVRTSPPACANWCFRLHGWPXLCHRCWASTSSPIGRLIRRQLVFPPARQAYYVTVVARLRLHRPAASSTADWCFRLHGWLIMPLLLGVYVFTDRXASFAADWCFRLHGWPXLCHRCWASTSSPTGXPRPPPTGVSACTASLXYVIVVGRLRLHRPAXLVRRRLVFPPCTTNWCFRLHGWPIMPPLLGVYVFTDRXASSAADWCFRLHGWLIXRRCWASTSSPTGXPRPPPTGVSACTAGLXYAAFVGHLRLHRPAASPTGCLXSVADWCHRLHGWPVMTLTDAIFFTAGYIAVTANRHQHLQHKLPTSAADWFLHFHGCMILLVLIGLIVFIAATTTDGHHRLPSSTGYVAADWCFYLHNCASSLPVCFCCRQLMFTSSRLCNFVTMVEQLHFYYLRHRQTLLPLLRKLCYFTNHDDYKSFNTLAYVTKYDAVLFYYNKWCSNLQYLSSLKQ

SEQ ID NO: 157099 - protein, 868 aa, Oryza sativa
  unsure (1)..(868): unsure at all Xaa locations
  Clone ID: PAT_MRT4530_56703C.1.pep
MRQPDRQINTHSADSNPQTGVSCATPFYYCRIHVSTVGAPGRGCVELPIEKCDGINYRRNGEINLDGSNLQSGAAPTDALRPPRHHGHMGAAAYSLLGEISRMHELIXQINIQDCFSLYMYCWSHRHRPVCLRRRRLVSPSTRLAYQATVVGRLRLHRPXAFVAANWCPRLHGWPIMPLLLGAYVFTXTGLPPSPPTGVLACTAGLLCRRCWVSTSSPPARLCRRRLVSSPARLAYYAAVVRRLRLHRPAASSAADWCPCLHGWPIMPPLLGDYDFTGSLPPSPPTGVLAYIRLVTPPFIGVHVFTXPAGLRRLVFPPARLAYYAAVVGRLRLHHRPASVAADWCPRLYGRLVTPPLMGIVIYTAGLPPSPPTDVLAYTVGWSHHRXWASSSTPPACLRRRRLASPPIRSVGHTTVHGRPRLHRPAGLXADWCFRLHGWPIMPPLLDVYIFTVGSPSLPSTGVSAYTVGLLCRHXWASSLSPSTXLRRRRLVPSPRGIXYKAKSSFILFFIXYFSFSSASLHQLADICIKGIHGFKLISYALGMDQSEHHHRLAFVAADWCPRLHGWPIMPPLLGVYVFTXRLAFVAADWCPRLHGWPIMPPLLGAYVFTDRPASVAADWCPRLHGWPIMPPLLGVYVFTDRLAFVAANWCPRLHGWPIMPPLLGAYVFTDRPASVAADWCPRLHGWPIMPPLLGVYVFTNRLAFVAANWCPRLHGWPVMTPTDAIFFTAGYITVTANXATTTDGHHRLPSPTGYAAADWCFYLHNCASSPPVCFCYRRLVFTSLQLCNFVTMVERLHLYYLRHRQTLLLLLRKLCYFTNHDDYKSFDTSAYVTKYDAVLFYYNKWCSNLQYFYSDILNTYLHSSYDY

SEQ ID NO: 157100 - protein, 63 aa, Oryza sativa
  Clone ID: PAT_MRT4530_56704C.1.pep
VSLRVLLLCTASSDAWPKVEVINITPGHTILSPMNNRWVAVSFCACLFYDFQLVGDLLCPVIV

SEQ ID NO: 157101 - protein, 282 aa, Oryza sativa
  unsure (1)..(282): unsure at all Xaa locations
  Clone ID: PAT_MRT4530_56705C.1.pep
MDLHRMSLRINSLQNYCTVMRLYQFLMVVISTYFVALMKTIMTIIMIDGPFFNAIIDGLCLKELQMSGRNFTWANNLAHPTYEKLDRVLVLTEXEQKYPLSSVVALNRDISDHTPLLLNKKSSSFSNAEHSFRFELGWLLCDGFVHMVKEVWSSVDEGNTPMERXQAEIRRLRQHLRGWAKHTSGIYKKEKKQILDRLDALDKKAETVLLSQEEIDIRWFFRNRLSAILREEEIKWYXRSKTKDILEGDSNTKYFHLVANGNNESDLQLDENNIADISQVSH

SEQ ID NO: 157102 - protein, 173 aa, Oryza sativa
  unsure (1)..(173): unsure at all Xaa locations
  Clone ID: PAT_MRT4530_56706C.1.pep
AALQVHRVKNANRSYKPVANELMITFTRWTTVEECIEVPIDFPTVVFSLTPFDDVAKFVDNNDFFIDVMGVITDISTPTMLRPRSRDADSLKRTIQIRDANNSTLNVSLWAEQASAFEADAIHKAGKSEPQIILFVGTLAKNYPGIGLALSXGSACXWYINIDVPAIVELKGQ

SEQ ID NO: 157103 - protein, 1155 aa, Oryza sativa
  unsure (1)..(1155): unsure at all Xaa locations
  Clone ID: PAT_MRT4530_56707C.1.pep
HLHRLACSVLLTSVSSIRLVGHTTVHGSHRLHRPVGLRRRRLVVPPARLAYYAAAVGSLRLHRRPASVAADWCPRLYGWLVTPPFMGVHVFTDRLAFATADWCFRLHGWPXLCRRCWASTTSPPACLRRRRLVSPPTRLAYYAAVVGHPRLHRPACLRCRRLVFPPARLAYYTTVHGRLRLHRPAGLRRRRLVFLLARLAYYAAVVGRLRLYHRPASAATDWCFRLYGWRTSPPLMGFIVYTTGLVPLAPTGVFVTIDGLLRSHIGYFCCHRGNTTKLSHHLFYSLYNILPFPLPHYINWIQIHICIKGIHGFKLISYALGMDQSEHHHRLASSAADWCFRLHGWPIMSPLLGVYVFTDRLAFVAADWCHRLHGWPIMPPLLGIYDFTAGLPSPPPTGVSAYTAGLLCRRCWTSTSSPTGLPSSPPTGVSACTAGLLCRRCWASTTSPXGLPSSPPTGVSACTAGLLCRRCWASTTSPPACLRRRRLVSPPARLAYYAAAVGHPPACFRRRRLVSPPARLAYYATAVGHLRLHRXDWYLRLHGWPIMPPLLGIHIFTDRPAFAAANWCLRLHGWPIMPPLLGIHVFTDRLAFVAADWCLRLHGWPIMPPLLGIYDFTXRPAFAAADWCLRLHGWPIMPPLFGIHVFTDRXPSSPPTGVSACTAGLLYAAVVGRSSTGVLAYTVGWSHHRTWASTSSPTGWPSPPPTSVSACTAGLLCRRCWASTTSPXGLPLPPLTGVFAYTVGGLRRRXWASSSTPXGLVPLAPTGVFGFMVLSLSLTLQEWISQNITDRPPRPPPTGVSACTAGXLCRRCWASTSSPTGRLVRCRLVFLPALLAYYAAVVGRVHLHRLAASSAADWCFRLHGWPLMLPLLGVYIFTDRPPSPTGRXRPSPTGVSACTAGLLCRRCWASTSSPTGXSHPPPTGVSACTTGLLCRRCWASTSSPXPACLRRRRLVSPPARLAYYAAVVGRLRLQRPAASCDANXCYRLHGWPXSLPPLIGVIIFNASCLYLPLTVXTATTTDGHHRLPSPTGYAAADWCFYLHNCASSLPVCFCCRRLVFTSSRLCNFVTMVEQLHFYYLRHRQTLLPLLRKLCYFTNHDDYKSFDTSAYVTKYDAVLFYYNKWCSNLQXYLHSSNDYSTTRSYSSRLYVQLFPN

SEQ ID NO: 157104 - protein, 1599 aa, Oryza sativa
  Clone ID: PAT_MRT4530_56708C.1.pep
MGFSVLLCWCGSCCLICPPELADRILHALDQIFSIGSTSRNLFFAPCCAASVFEGELTFLRRDFTLSARLRYKFRFGAASSGFHRGSSSRSHKDHAEALKASYPRRSYYGAPTYECPYCGAVFWYQERVKGASAISKRKIVYNLCCKSGKIQLPKLCKPPEPLATLLKFNGDARSKRFLRQIRSYNSMFAFTSMGAAVDKSINTGNSPYVFKINGVVHHRIENETQNRMNIYENDGSNADQAEPVVVDALCTMLDCHNTLVQKFRYARERLSEHGNHSLTLRLMGCNAKSDVQYNLPSSGELAAIIVGDYSAAEYTFDILVHESDIGLRRVFLAPMLNEPNPFTYIQSVVDVFSTIESSRLKYIADHQSDLRSECVQGIADAIDRGITNGDSVGKRAILPASFTGGRRYMVMNYQDAMALCRVYGSPDLFVTFTCNSKWQEIVESIRFEDGQLPSDRADMIVRVFNMKVHDFITDIREGKTFGPVLAVLYTVEFQKCGLPHIHCLVWLAASSAQVSVAVIDGFILAEIPDFETDELGYESVSEFMMHGPCGEHNKQCPCMKNGKCSKHFPKDFHDETFVDEYGFTIYRRRNDGRYITKNGVRLDNRSVVPYNIGLLKTYQAHINVEWCNKSNMIKYRFKYVMKVHDRSKIYFETTAANGNMSPNHDLAPLDEILEYMDARFLSTCEALHRIYEFDIHYRVSPVERLAVHLPGMNYVRYETGSDLRALLNSPAAKRTMLTEWFETNAKDEDARSLTYCDFPTKWTWDSTSRSWHKRTPAPKIGRMYYVHPAADSLVAQINTDQKTIFDTIVGRVVAEQPGFFFVCGHGGTGKTFMWNALIAKIRSRNKIVLAVASSGVASLLLPKGRTAHSRFKIPIEINETSLCNVKRGTMLAELLENTLLIIWDEAPMTHRRCFEALDRTLRDILSETCPSNGVVPFGGKIVVLGGDFRQILPVVPKGSRSTIIDASITNSKLWKHVVMLRLNVNMRLLNPSLPNTQKEELKQFSEWVLAVGDGTLPKKKDGLIPGDGKEYLSCDTISKCSEQIPDFDMLYPTELLNSIDANNFPTHRLVLKEVHRVKNANRSYKPVANELMITFTRWTTVEECIEVPIDFPTVVFSLTPFDDVAKFVDNNDFFIDVMGVITDISTPTMLRPRSRDADSLKRTIQIRDANNSTLNVSLWAEQASAFEADAIHKAGKSEPQIILFVGTLAKNYPGIGLALSGGSACKWYINIDVPAIVELKDKTGTNFQPINWIEAPARAAVEEVAENKTVRELLEINPHKCKVNANCDRSKQHVCLMLFRPALTLLIAPFVTEDASRLQNLMGPPINALAVPTSQWQYQAQRIVRRPVEALIEEAPADSDFIPDEITALVGKSFVWNVSFTENTLKFGDISFQVNSIVSIDAPGEPLMLMSPGASQSSSAMISPGPSGSLMSPSRGSELGIASPGSTAASSPLPRRVITTDKSQVVHTPTSKCSVSIDQDDISAAFSPPMSQKVQAPAIPDDDTLLAHASGSKSKSRKRGPPSQAPPAVKKLFKEGDSDEKETTVSYYFLVTFEIIVPISFGTIFSNVCKLIMVTLAIVQPRAQSPLQLPICQYGNGL

SEQ ID NO: 157105 - protein, 812 aa, Oryza sativa
  unsure (1)..(812): unsure at all Xaa locations
  Clone ID: PAT_MRT4530_56709C.1.pep
LIYFACTHANCLCRRCWASTSSPPAXLVCRRLVSSPARPAYYAAVFGRLRLHRRXASSAADWCPRLHGWPIMTPLLGVYVCTVGLLCRCRLVFPSARXYAAVDGRLRLHRPXAFAAADWCLCLHGSPIMPPLLGVYDSTAGLPASPPTDVLAYTVGWSHHRCXRPCLHRPAHLRRRRLLSPPTRLALLDVYXLHCCPASPAADXYPRLYGWLVTPPLMGVFAYTAGLPLSLSTGVFAYTVGGLRRHXWALSSTPPACLHRRCPVSSLLLMDNFAPTSATSAVIKRNITKLSHYFFSLYDIFLFLCLTMSTGSPLTSESGATDTHMHVWEVPRPTPDXLGAMTSRTECLNVQSHLLGEIEIEXEEKYIFINILKYLNIIYTSDTTHPICLFCRIQIQICIKGIHGFKLISYASGLDQSEHHHRLAFAAADWCLRLHGXPIMPPSLGVYVFTNRLAFVXANWCLRLHGWPIMLPLXGVYVFTDRLAFAAADWCLRLHGWPFLPPLLGIIIFTDRLAFAAXRLVSSPARLAYSAAVVGRLLLHRPACXAAADWCLCLHSXPILPPLLGVFVFTDRLAFAVADWCLRLHGXPILPPLLGVFVFTDRLAFTAADWCLRLHGWPIMPPLLGVYVFTXGHVAATANRHHHLQRKLSTYDADWFLHFHGCMVLLVLIGLIVFIATTTTEGCHRLHCWPPCLTSTIFFSGADRSIYLHDYTSSPPVFFCCCQLVFTSSRLCNFVTMXERLHLHYFRHWQTLLPLLCKICYFTNHNVYKSFDISACVTKYDAVLFYYYKWFSNLQYFYSDIPNAYLHSSDGY

SEQ ID NO: 157106 - protein, 107 aa, Oryza sativa
  Clone ID: PAT_MRT4530_5670C.1.pep
KYSLSPIAAGAFLADLAVASTAFANKPRLARAPSSPAERISESCSEWGNNGGACEMAQTLAASAKTFSAALALTTELLYSAAWHDLHIALSMNRAYCWPGRRNILHL

SEQ ID NO: 157107 - protein, 728 aa, Oryza sativa
  unsure (1)..(728): unsure at all Xaa locations
  Clone ID: PAT_MRT4530_56710C.1.pep
MSMGSTATECFTCIRLYGWLVTPPLLGVYVFTDRLAFVAADWCHRLHGWPIMPPLLGIYDFTAGLPSPPPTGVSAYTAGLLCRRCWASTSSPTGLPSSPPTGVSACTASLLCRRCWASTTSPXGLPSSPPTGVSACTAGLLCHRCWASTTSPPACLRRRRLVSPPTRLAYYAAVVGHPHLHRPACLRRRRLVFPPSRLAYYMLPXCWASVDWCPRLYGWLVTPPYMGVYVFTDRLSFAAADWCFRLHGWPIMPPLLGVYDFTADLPLPLLTXCFRLYGWRTSPPLMDFIIYTTXLGSTGVDWCFCHHXDGLLRSHIGYFCCHRGNTTKLSXIYFILYMIFCLFLCLTTSTGSSLTSESGATDVISYFLNNFHNIYLDCLRHILSTKVPIELWSXPSSYAFRLVCQWINITTDLPRPPPIGVSACTAXLLCHRCWASTSSPTGRLIRRQLVFLPARLAYYVTVVGRLHLHRPAASSAADWCFCLHGWPIMPPLLDVYVFTDRPPRPPPTGVSACTAGLLCRRCLASTSSPTGRFTDRPPHPPLTGVTACTAGLLXTPTDAIFFTAGYIAVTANRRQHLQHKLPTSAADXFLHFHGCMILLVLIGLIVFIAATTTDGHHRLPSPTGYAAADWCFYLHNCASSLPVCFCCRRLVFTSSRICNFVTMVEQLHFYYLRHRQTLLPLLRKLCYFTNHDDYKSFDTSAYVTKYDAVLFYYNKWCSNLQYLSSLKQ

SEQ ID NO: 157108 - protein, 86 aa, Oryza sativa
  Clone ID: PAT_MRT4530_56711C.1.pep
TSDATRNNLISVPSVELGLISYGVKSHPGVPLAWYSNQKVFTCRTHRLVIAVYMSYISIGKIVNTTSGPKNKLLALIVLCKLRKIF

SEQ ID NO: 157109 - protein, 159 aa, Oryza sativa
  unsure (1)..(159): unsure at all Xaa locations
  Clone ID: PAT_MRT4530_56712C.1.pep
QRYNVLNGTTDLFSDRLKGPITFRNSIIGTFALGVSVGYFIADLAMIFWLYPSLGGMEYIVHHTLSLVAIAYTMLSGEGQFYTYMVLISETTTPEINLRWFLDTAGLKKSSAYLVNGILMFVAWLVARIPLFNYVFYHIYLHYSQXMQMHAFGYYLTFI

SEQ ID NO: 157110 - protein, 69 aa, Oryza sativa
  Clone ID: PAT_MRT4530_56713C.1.pep
SNTLWACCIFLSTPPPRHRASPSRRLSVFDNSWYRNSSGSTLTISPSSNCYSVQLQCLYLSFLRAKDNL

SEQ ID NO: 157111 - protein, 69 aa, Oryza sativa
  unsure (1)..(69): unsure at all Xaa locations
  Clone ID: PAT_MRT4530_56714C.1.pep
NFVVFHSKQLSRTEGPHGXYIASLVITLKQVATPEYKAXIQQVKKNAKVLATALLRRKCRIVTILDDGK

SEQ ID NO: 157112 - protein, 188 aa, Oryza sativa
  Clone ID: PAT_MRT4530_56715C.1.pep
EDLLGARFGVFLEVITTVFSTHLGGIGEVKAPGVALERLTRLRRETTIFDVSKDTIDTTVAHIKIKMSKNKFSSIHRKIGPTTALSVLSGAQGLSIFKEDVVALNVVDKFVAGTLGRNSSPHCAEALLAATCAELLVCLSWRKKAVRPVAPLPPAGQPHPVAKEASMAEEVGQPLMKAMERGNNDDGR

SEQ ID NO: 157113 - protein, 43 aa, Oryza sativa
  unsure (1)..(43): unsure at all Xaa locations
  Clone ID: PAT_MRT4530_56716C.1.pep
CAGWRVGRGGRSSEPVPAVVPVAVAPPPRCRGDDXELGDRCGV

SEQ ID NO: 157114 - protein, 58 aa, Oryza sativa
  Clone ID: PAT_MRT4530_56717C.1.pep
MPASRFSRSPPLEAPPLHLSSMRGQARRPSELAGHLRHHPCPILTQLPRYGGAQRIPG

SEQ ID NO: 157115 - protein, 425 aa, Oryza sativa
  Clone ID: PAT_MRT4530_56718C.1.pep
MAAASSFTAAAKFLAPVSARSAGDYKPPLPLPASASLRPGRKPAPRLRTALAVSSDVLPGNKAAPAAAAHSAVTREEALELYEDMVLGRIFEDMCAQMYYRGKMFGFVHLYNGQEAVSTGFIKLLNQADCVVSTYRDHVHALSKGVPARSVMAELFGKATGCCRGQGGSMHMFSEPHNLLGGFAFIGEGIPVATGAAFAAKYRHEVLKQSSPDGLDVTLAFFGDGTCNNGQFFECLNMAQLWKLPIVFVVENNLWAIGMSHLRATSDPEIYKKGPAFGMPGVHVDGMDVLKVREVAKEAIERARRGEGPTLVECETYRFRGHSLADPDELRRPDEKSHYAARDPITALKKYIIEQNLATESELKSIEKKIDDVVEEAVEFADASPLPPRSQLLENVFSDPKGFGIGPDGKYRCEDPLFTQGTAQV

SEQ ID NO: 157116 - protein, 97 aa, Oryza sativa
  Clone ID: PAT_MRT4530_56719C.1.pep
MAASLACAFFFDAEPVGEQGRHALDACALCTKQLTRDSDIFMYKGDTPFCSEECRYEQMQLDAVYARSAGRRQQQQYSGRADSRRGHRETRKVSVAS

SEQ ID NO: 157117 - protein, 34 aa, Oryza sativa
  Clone ID: PAT_MRT4530_5671C.1.pep
NGHFYFTRCHGRQPLTTTMTTAYTVRLRLRLRLR

SEQ ID NO: 157118 - protein, 76 aa, Oryza sativa
  Clone ID: PAT_MRT4530_56720C.1.pep
CLPSPLLISGCFTNKGAVPRGAAPAAVGAAEDPDRGPPVSREEAKAPCQVHIPGDAQKRLETSAAQPEPPPLPQRR

SEQ ID NO: 157119 - protein, 1289 aa, Oryza sativa
  Clone ID: PAT_MRT4530_56721C.1.pep
MGRKKNVAIDDDEYSFPQEDAAPAPAADKDKPIKKGGGKKGKKGAKAALPDDDDYEPPAPPPPPGDDDDDEEPINLVLTGKKKKKKGGGGAVSSFSAFDALAADEDQGEDDDEAPAPAPAPVEPDAAAKSDAEDDDLDFDFSKAKKKKKKKDKGARPVPLEHDDLDLDKPAPPPPAAAADEADDDEAAAAAASKKPQKKKKKKGGFTVDNEDIDKLLAEIDDTSPPTEEAEPVEEVPAPDADDALGKKSKKKKKKGGFTVDDEDVDKILAEFEDQPPPVDDPEPEPEAVKDVGNVAASTSVDDAEGKKSKKKKKKSGRTAQEEEDLDKLLAELGEGPTPAEKEKEVLPQAPPAAAMVKEDTETAEDGKAGEGEVESAAAKKKKKKKEKEKEKKAAAKEADAKKEEEKAVEAPKGKVDMKKLPKHVREMQEALARRQEAEERKKREEEERLRKEEEERLKKEEEERKAEEAKRRKKEREKEKLLKKKQEGKLLTGKQKEEAKRLEAMRRQFLEQSELQVADGAVPETKKRPIYDSKKKKGQQKTLETAKVVEEQPQEVNETINDEEEYVLVDQESQLQVEESEKTEPDQDVEELKPEEEEDEDEWDAKSWDDIDVNLPKTSAFEEEEANPVAKKVAEPVQKQENSKAQSTVATVKKVANSNKGETEDGESSSANARRNRGASKKGPIKEDETKNGSDLRSPICCILGHVDTGKTKLLDCIRRTNVQEGEAGGITQQIGATYFPTENIRERTKELKADATLKVPGLLVIDTPGHESFSNLRSRGSSLCDIAILVVDIMHGLEPQTIESLNLLKSRDAVFIVALNKVDRLYGWKKCTNAPIGKALRQQNEDVKREFNMRLTDIVTQFKMQGVNTALYYKNKEMEDTYNIVPTSAISGEGIPDLLLLLVQWAQKTMEERLTFVDEVQCTVLEVKVVEGHGTTVDVVLVNGILHEGDQIVVCGMQGPIVTTVRALLTPHPMRELRVKGTYQHHKKIRAAQGVKISAQGLEHAIAGTALYVLKPDDDLDRLKDAVMEEMTRVRNRIDKSGEGVYVQASTLGSLEALTEFLKSPAVNIPFCDFSIGPVHKKDVMKASVMLERKKEYATILAFDVKVMPDARDLAEESGVRIFVADIIYHLFDQFTAYIKNLREEKKKESAEEAVFPCVLKIMPNCVFNKKDPIVLGVDVLEGIAKVGTPLCIPTKEYIDIGKIASIEINHKQVDMATKGQKVAIKIIGSNPDEQQKSFGRHFDMEDELVSRITRRSIDLLKENYRDDLSMDDWKLVVKLKSILKIP

SEQ ID NO: 157120 - protein, 78 aa, Oryza sativa
  Clone ID: PAT_MRT4530_56722C.1.pep
GRERDGVLYLGWKNRVLVVSSACVDMSLEEEAHVPSHLHLQLAGARCNTSFALQWCRPRAAITVDISSPQFSPCSPSI

SEQ ID NO: 157121 - protein, 61 aa, Oryza sativa
  Clone ID: PAT_MRT4530_56723C.1.pep
LDWRSLFVGGLLLSSSLVLCPASSCTLSVFVAPRDFNKAPPGVSPLSGARKNSAGWVGPGV

SEQ ID NO: 157122 - protein, 86 aa, Oryza sativa
  Clone ID: PAT_MRT4530_56724C.1.pep
RELWKLSHIDSDGIIHNTLAKTKVEVRAVICFGIIESGGHPISCSGRQAARRSTRNMKKGVRTLPLFHITTSHHGLSICQDNERCD

SEQ ID NO: 157123 - protein, 75 aa, Oryza sativa
  Clone ID: PAT_MRT4530_56725C.1.pep
MGCAILFAHRLRLRRSPSNRDSERAPSRLPSFVLLHPPASILVSTSSATAAYADPCNTPLAGVRDLAAASRHPPD

SEQ ID NO: 157124 - protein, 50 aa, Oryza sativa
  Clone ID: PAT_MRT4530_56726C.1.pep
DVIVMTSASELICQYDNMCIPRTLDLDDHKHSPNVTLCFGSIFAQTTSWL

SEQ ID NO: 157125 - protein, 90 aa, Oryza sativa
  Clone ID: PAT_MRT4530_56727C.1.pep
LTRGRTHVLHEPRANFGEGTPGCNHPFKNARTFRRLGARPDELHGHGPFVVVVLGELFAVLAGGGLGRLLVVDYVGRLLLRRQCGDHGAR

SEQ ID NO: 157126 - protein, 151 aa, Oryza sativa
  Clone ID: PAT_MRT4530_56728C.1.pep
MAALQLQALRAPAAAAAPLRSSSFCTPLSLPAPAPPRRGARASTASARITMRFGVASKQAYICRDCGYIYSDRTPFDKLPDKYFCPVCGAPKRRFKPYEPKVAKNANATDARKARKEQLKKDEAVGQALPIGIAVGILALAGLFFYLNSVY

SEQ ID NO: 157127 - protein, 101 aa, Oryza sativa
  Clone ID: PAT_MRT4530_56729C.1.pep
FLLRTGMISRPRRCSMCGTSARPSCPGHRVQRYEHRFLVLGRCIILCCVCAKCLLPNPSCERRDLYDLDIVNSPCDGFCKFCNFAMCVCALRMVGLIYMLY

SEQ ID NO: 157128 - protein, 146 aa, Oryza sativa
  Clone ID: PAT_MRT4530_5672C.1.pep
MDAPPPPPLHSIDDADSGSHLTGVDSATIVLSGRAARKPRQPRRRRQSGPRLRRRLRPAASASLAEDARDECLGGRCRPLHGLQATLLALALALAWLRGFQLRSSRIGAANPPTTTSPSLTAAAASTHRNREVGTVDGEWMENVMK

SEQ ID NO: 157129 - protein, 77 aa, Oryza sativa
  Clone ID: PAT_MRT4530_56730C.1.pep
MAIVTVIPRPQADAEGRYEANPNGASIVGNPPPMTKEVNVLVDVLLEKKTIAGTTRYKKNLLLFQLMTSSTNSELQP

SEQ ID NO: 157130 - protein, 130 aa, Oryza sativa
  Clone ID: PAT_MRT4530_56731C.1.pep
VCRRCHQLEEQQVLLVAGCAGYRLLLQRYIHKNVDLLCHRRWIFRERLRNQSIVKEISTSNYRGPIWVCFIASFCICLWSWNHRHYRHSCPRSGGEASKYLIAFSISFQFLLCKFQESKVIWPSVRGLSI

SEQ ID NO: 157131 - protein, 50 aa, Oryza sativa
  Clone ID: PAT_MRT4530_56732C.1.pep
AATGIVLGYGERARRIMRWRRSTARQPCGGDLPPTTVQCPARPSAVAPCR

SEQ ID NO: 157132 - protein, 359 aa, Oryza sativa
  Clone ID: PAT_MRT4530_56733C.1.pep
MASLAVPLRASATPAIAGTGSGGGSRAADPVKVSCVRSKVTCGFPSVGASSSLASSVEPVRATATQAPLATHQSSSTEKTKVGINGFGRIGRLVLRIATNRDDIEVVAVNDPFIDAKYMAYMFKYDSTHGPFKGTIKVVDESTLEINGKKISVTSKRDPSDIPWGNFGAEYVVESSGLAPLAKIVHEEFGIAEGLMTTVHATTATQKTVDGPSMKDWRGGRGASQNIIPSSTGAAKAVGKVLPALNGKLTGMAFRVPTPNVSVVDLTCRLEKSASYEDVKAAIKEASEGSLKGILGYTDEDVVSNDFIGDTRSSIFDAKAGIGLSSSFMKLVSWYDNEWGYSNRVLDLIGHMALVNAKP

SEQ ID NO: 157133 - protein, 80 aa, Oryza sativa
  Clone ID: PAT_MRT4530_56734C.1.pep
MATGAARARLHRRGGDRWPALQGLGPVLVAPVNDGVLGNETRLDEDWKGAHRPTRMLCVKLHKEIYAAALPGGCNDNTNS

SEQ ID NO: 157134 - protein, 183 aa, Oryza sativa
  Clone ID: PAT_MRT4530_56735C.1.pep
VDPRAEEFGTRGLWSGDGDSSKANLKPATRIFYSLALAQGTLYMLWFILNAGNAMMVRVVASKCDFEKSWGRKSVDQYLGDTKFKCLKDPSSIKDMNLIKFAAGLLDSDSEDDYITGARMLVSFIQKQKLPVKLLIRSSRIRTQKLITMLGWTDPADREIRMLAAIIVGHVASNIKLSQFPGA

SEQ ID NO: 157135 - protein, 291 aa, Oryza sativa
  Clone ID: PAT_MRT4530_56736C.1.pep
PGGRGDGVSSSFSPSSSSFSSPAPAILSHALPCCSVKTAGKQTAHDDLNPEQATNPTMPITVPSTNPAPIIITVPSTNPTITIPSLNPLPTPITAPSMVNPSTSPAPAAYPLPTPSTSPPSASLTNPTSNPMTPAISMPPPALTTTPPTAPGLSGQQLWCVAKADSADIALQNALDYACGIGGADCLAIQPSGTCYYPNTLGAHASYAFNSYYQRSPATSSCDFGGTAILVNVNPSSGKLCFGIVNVVTIKLRVWVQSCIDNSYGIIHYYSYYVIWFRSISAEPGWLRLRQ

SEQ ID NO: 157136 - protein, 372 aa, Oryza sativa
  Clone ID: PAT_MRT4530_56737C.1.pep
MLSSLLPFFLLRPSLLSLFLFLSSFSSPSAGGGWRQLERWWWALVTTAGGSNVGGLERRRRVGAAIDLNVLLRLGSSASVIARMDNSAPRSSYCSVASSRVKPRRSNTATGASWGAIIHSCNSGCRRAETKQQHVKIHVATIEMTTAICILRFLLLSLNCEGKNYKSNNIYRENIDFLLRTLPLKVSASDTLFAKVITNSTKEQVYTQCRGDTDISTCGTRATIWCNLRYEGYPFFTGPPMLDQLIYQATVKPKGTNHKNHTTILIVAIVVPSVVVIIVVLAPLFLLRKKHVLKKRTKLSSVELSGSKNIEGFVDSRGEKDAELTESKEIEGFGDSGDENDAELTRSKQIGDFGDSGGEKDADPTRSKERRS

SEQ ID NO: 157137 - protein, 366 aa, Oryza sativa
  Clone ID: PAT_MRT4530_56738C.1.pep
SHAPTTNPVRTYTILLPSSLLFTPPSSPLPSPATSSSGVQLGRSGGGDDEAGHTAAILMADKISTVVLNVDLECDRCYKKIRRVLCRIQDKANIKTISYDEKNNAVMVSGPFDADKVCKKLCCKAGRIIKDMQVKGKENKGGKDAAGDKAKPAEKDGGGGKAEKKDAAGGDKAEKKDGGGKPEKEAAKADKAAAAAAKPEKKVKFDVDDAPPPAAATAKPGKVQPFPAGMTQADLAPLLEKLKIAKQQQQQQQQAGPEPPRGEPIAPPMMMPAAQGVAVPSIWPAPAGSLSCYSYNPAAYDQSSYYGGGGYGYGGGAFQAPAGYYGVAPPPAAPYDHQGWYYGNRQPYYHQQQCYEDPNAGGCSVM

SEQ ID NO: 157138 - protein, 51 aa, Oryza sativa
  unsure (1)..(51): unsure at all Xaa locations
  Clone ID: PAT_MRT4530_56739C.1.pep
GNHXXXTXTIEWXGXGAXGGHSNXRRXPHHIKXRIGIRFVIWGLGFPLLDI

SEQ ID NO: 157139 - protein, 74 aa, Oryza sativa
  Clone ID: PAT_MRT4530_5673C.1.pep
RPSERFGIYTSLSADIRTLFNNPSLSLNRIPQLPLICGDSIDLEYMVGSTGRSDHPVCANLMYFDANIVGITVT

SEQ ID NO: 157140 - protein, 198 aa, Oryza sativa
  Clone ID: PAT_MRT4530_56740C.1.pep
MAAASPESRPPRSLFDLPADFFDSSSLLGSHPSSAPSAAEPSESIRPAAAPPLSQPSEAPGLRWTCNTCASEFESLQEQREHFKSDLHRLNVKLSIAGKTIIKEDDLDKADPDSLFDDLEVSSVSGSEDELENGPASDRGLSAKDKGEFRKKLYFRCHSGDTVSIWRCILLKEHEEPVFNSKSGQTESHGSTPFVQED

SEQ ID NO: 157141 - protein, 114 aa, Oryza sativa
  Clone ID: PAT_MRT4530_56741C.1.pep
NLTPPPTCTATGHPRSWPCKQAHRPHASARRPPAPPRLASSPGPAASSGPTASTRPCPTPSPRRRPPAAAAPRRRAPPSPRRGTRRRTTRRPPPSARRGTRRRPSRRGAPRRGR

SEQ ID NO: 157142 - protein, 442 aa, Oryza sativa
  Clone ID: PAT_MRT4530_56742C.1.pep
MKEKEVLVEIVEDDELKRSIGRNQLDLNEEVMDVESEEGEVGDDEDDEDEEDDDDDDDGGSTTDVAGSRSSSNNSSTNNVSESKLKGDKDSGGGRLEGINGGEQRVPSVRQYNRSKLPRLRWTPDLHMAFVHAVERLGGQERATPKLVLQMMNVRGLSIAHVKSHLQMYRSKKLDHEGRQIRGAIASVFSPMDFHLMRGDRRFHDMLLQRAAALSSSRQEHGGFFSSRSGGGGGGLPPEASRLYGLLQHRQSPAIATMQTLDFKNSSFRNQEWSFSFNHQRKETMNPSSSSSTTAAIRRWPSAAGAVAVVAGERQRLAERFGYYTGNGGASSTSLPLITRAAMAAPPPMFAAAVAPPGRDHHRLPFGWHAGGGGGGGGNKNRSSSDPVVIDEALDSRRLEHQQKHVEQPRMTPTTTTTPAGKRPPEWSPPDLQLTLSPTTAP

SEQ ID NO: 157143 - protein, 100 aa, Oryza sativa
  Clone ID: PAT_MRT4530_56743C.1.pep
MARSASPPPPSKRWPGAAPPSPRKVAADLVVGYAGGGGSGGGGTPPSRGGWPVGAVSAASRGGWSRSTGIPLQLDGIRSSRVLSLPVALCLPPAPLSGPS

SEQ ID NO: 157144 - protein, 72 aa, Oryza sativa
  Clone ID: PAT_MRT4530_56744C.1.pep
INIIYITIQLYNIRLQYINNLLLIKYYFFIIHIQVYYPTFYTKKIAYKVITYLNMSKNGNANHRSSLFPSHI

SEQ ID NO: 157145 - protein, 77 aa, Oryza sativa
  Clone ID: PAT_MRT4530_56745C.1.pep
YKQPAPIGLHEPKKRAGSNRAELIITFTAPCPTSSCLKSPNPHITDHPQITFEIHKSPHHRSSTNHRSKYIKKIIHK

SEQ ID NO: 157146 - protein, 737 aa, Oryza sativa
  Clone ID: PAT_MRT4530_56746C.1.pep
MTPSTSSTATSASSAGLWPFVAGILSNSLIAMPIVDVAGGFREQGLKYNVTTGDEVEDMFALLSEVKRQIPSITAVSSGAIASDYQRLRVESVCSRLGLVSLAYLWKQDQTLLLDEMIRRGIVAIIVKLVISPFVFLYPTRSYGINVCGEGGEYETLTLDCPLFRNARIVLDDFEVILHSPDSIAPVGILHPLKFHLEHKPNSFGTVGDSAIAQENSSYLYEVDGAIAHSDVEKKQETLSPVTTVDACTNIDLCISKTGKKLFSIGCWIQDPCGTSEGLKTDLVAVLSRIENQLKEEGSKSREFYMYKAFHAGLLVASDLIARAYVEIKPILYVPSPTNDDGVPTREQEAGGSLPASSEAFSAWSAQYSDLDDSCCQLAKILIDNGFSWDNLTMLRFYYSVEHPVTADVMSRVFSEAFAELEEGGVGSCTPDGVPIFNIVPVSASADHQQRPASSRLDPSCLFGRGSIWAVKMNRMMFMACCYNDPDMLIDPDTVYPIRPECREDAAKTRFKPRDPNSVDAEQQASDTPLPKEVIQWKLTLHQIGLDVNRTDRQLVYYESQENLARLWDILAVYSWVDKDIGYCQENLDGGEYLFAFRMLMVLFRREFSFVDTMYLWELMWSMEYNPGLFSMLESDNSTSQANTKDENALKQCGKFEQKNLQAAKKEEQIPLSVFIVASVIEARNKQILTDAIGLDDVVKSTAGGQPPVEPVKMKGLLKGLRYVSQIFDPSVKVPAL

SEQ ID NO: 157147 - protein, 194 aa, Oryza sativa
  unsure (1)..(194): unsure at all Xaa locations
  Clone ID: PAT_MRT4530_56747C.1.pep
MEVVALVSGGKDSCFAMMRCLDYGHKIVALANLIPEDDAVDELDSYMYQTVGHQIVVSYAKCMGLPLFRRRIRGSSREQGLKYNVTTGDEVEDMFALLSEVKRQIPSITAVSSGAIASDYQRXRVESVCSRLGLVSLAYLWKQDQTLLLDEMIRKGIVAIIVKVCRMGLKPSAHLGKELAELKCHLLQLNESME

SEQ ID NO: 157148 - protein, 214 aa, Oryza sativa
  Clone ID: PAT_MRT4530_56748C.1.pep
MRAITGAVLSSKPCSLAKAARILDLFADSAASNLPSSDAATYLHTAADATKNHHRFRLDLLNYYHRGDTASASDKKKRKRSEDHHQAATHVKQEQEAQQVAFAADLVAEEETDKETSKKNRKKKKHESQQENARDVKQNGGAPEQRFASPEKKRNKKNHPEEEEVKTVVKGIIVSAGDSVATEKKRKKKRERADDTDNDKEQVEHTRKKPRNRS

SEQ ID NO: 157149 - protein, 214 aa, Oryza sativa
  Clone ID: PAT_MRT4530_56749C.1.pep
RILHPLKFHLEHKPISFGTVGDSAIAQENSSYLYEVDGAIAHSDVEKKQETLSPVTTVDACTNIDLCISKTGKKLFSIGCWIQDPCGTSEGLKTDLVAVLSRIENQLKEEGLGWMNVLYVHLFISSMKEFGLANEVYVSFITEQKCPLGVPSRSTVELPLVQVGLGHAYVEVLVTKEQVKRVLHVQSISCWAPSCIGPYSQVREALCGYMSWVC

SEQ ID NO: 157150 - protein, 69 aa, Oryza sativa
  Clone ID: PAT_MRT4530_5674C.1.pep
AIGCRGLPLARFSQATHPRMVLPTVCLIFSLGVQFQHLLHLVTRCEHNLLFRESASLSFQCFDAFVKHT

SEQ ID NO: 157151 - protein, 143 aa, Oryza sativa
  unsure (1)..(143): unsure at all Xaa locations
  Clone ID: PAT_MRT4530_56750C.1.pep
KKLTSPPPLAAAAXKLDXSXXEXXFPAHAAGGXXXRGLFXAXAXLPXMELPTCPXHFXGFXKXTXEMLXPXXGTNXXXFIFXXXXLXXAXSXSFMGGYISSXTXRKIIEINXXLLGTMXXXAXDCSFWXXNXGPIPHSNRTNK

SEQ ID NO: 157152 - protein, 87 aa, Oryza sativa
  Clone ID: PAT_MRT4530_56751C.1.pep
MASAASSSSSSTQFDDAAARRQQQLQQQRKPPLLMLLPLIYAPVLPLIRIGLRHNPVWRDRLFYGVLAGAFAHGTYLISELYDVESK

SEQ ID NO: 157153 - protein, 74 aa, Oryza sativa
  Clone ID: PAT_MRT4530_56752C.1.pep
MSCSVNSCPLDAGQEARTTKAEVKESERAVPKSQSHDRSPIHRRSIETPRRTGIEGTYTACRACSQLQCKRIKI

SEQ ID NO: 157154 - protein, 46 aa, Oryza sativa
  Clone ID: PAT_MRT4530_56753C.1.pep
CNVCMNHCIFIALVWPLSRIGIGGYSWFCTLMQVIRLSWKLPTGDL

SEQ ID NO: 157155 - protein, 116 aa, Oryza sativa
  Clone ID: PAT_MRT4530_56754C.1.pep
MVNNPNVMKKAVDELDVVVGKERLVEESDIQNLTYLKACIREAFRIHPYHPFNPPHVAISDTIIAGYLIPKDSHVATCDGLAGRLQALTYPLLWRPERLHHAVFNVACSALNRSVT

SEQ ID NO: 157156 - protein, 1066 aa, Oryza sativa
  Clone ID: PAT_MRT4530_56755C.1.pep
MTKTQPQLVESEPVKKLQRLPPVFSRVLELPFPRDTNVRKLFTTNADLFFVPHGVGGEPDVVKVHIVRLERWDMTRVVVHIGPGEPDLRNDLVYDKWRFPLAETSILSMVMAGMDASGDGGNEGIPMWPNIDKRGGGGGGGGGFGLLAGASYIPTKFSRPRNSQKVEKCVLDKVKASKFKSARDYDSIPIEGQFISVANLKERIFESKHLGRGTDFDLMISNAQTDEEYADEATMIPKNTSVLIRRIPGRPRKPIVTEPEETKAMEGRVEETMPSGSAFLADASMKYPEESEWDDEFGNDLYVSDSVPSQLGSQAVDASENKVDEDSKIKALIDTSALDYSQIPDGYGGGRGYGRGMGGRMMGGRGFGHFIQHCPTNGDARFDMKRMKPPTGIPKSMLMATPDGSYALPSGAGAVLKPNEAAFEKEIEGLPTTRSLGDLPPELRCPLCKEVMKDAVLTSKCCFRSFCDKCIRDYIINKSMCVCGATSILADDLLPNKTLRETISRILEAPPTSSTENVGSMVQVQDMESAIPVQPKVRSPAVSAASKEEPKRTPAPVEESPDVESHSEVKTTNVDMSSSDKKVPALPDVVEGTMESKILKEKTPEATPVVKESQEKMPVVGEQVVKKKKKKKVRAPGNAEDWKPYQDFGAENFAGMPMGPAGGFNPYWGGGMPLPMDYMGAPFPGPMPYMGYPPGPFDPFGGGVLPQDPFMPPGYMMPAVPRDLSELAVNSMGMNMGPPVVSRDEFELRKPDNRRRREMERFNERERERGHSRERERERERERERERERERERERERDRDQNRDRDRDQERDRDRERDRERESRREARESSGANNDSTTSMRPKARSRSSQPADRSAPPPPASPDRHSRRSPHRSSGSGKKRSSSDRYDDLPLPPPPPPASRHEAAEHAHAKNTAAAADARSKAKGSVFSRISFPGGDGNPSDAKRSRRSSSDKPPASSSSSSKKARAAVAEDNDGRHHRRHHREAAAAAEERRRPAAGDYYGEEEEDDESEEEQHFKRRPSSSSRREREHQEAQEEPRRSRERRGGGSDGNHHHNHGGGGGHKRR

SEQ ID NO: 157157 - protein, 110 aa, Oryza sativa
  Clone ID: PAT_MRT4530_56756C.1.pep
MFEVAAGGEEEGSHDQQRRGRSLGYGAAAEFELTLGRLEAAASEGEMLEVKAAGDGAELACGGHRLEQQTLGRWWWRWRWMYANSRLSYSRSSTARPRPRVAANGITIAW

SEQ ID NO: 157158 - protein, 128 aa, Oryza sativa
  Clone ID: PAT_MRT4530_56757C.1.pep
CPPSPILFVLSPDFGRSVCGGLSPAKPRCKISALFARPLFGPQNDYGMFSPAPGLPSFPLGKGPGSPAGGGASVPLGVVPPNRVFRLWAWACMRSPLFLFSGGQPQLLFCFSPPGIFSPLPPELVFGG

SEQ ID NO: 157159 - protein, 191 aa, Oryza sativa
  Clone ID: PAT_MRT4530_56758C.1.pep
PKRESPCSFLLCARSKRGISLVAVTKTQPQLVESEPVKKLQRLPPVFSRVLELPFPRDTTVRKLFTTNADLFFVPHGVGGEPDVVKVHIVRLERWDMTRVVVHIGPGEPDLRNDLVYDKWRFPLAETSILSMVMAGYVNGQLIVVVPRMDASGDGGNEGIPMWPNIDKRGGGGGGGGGFGLLAGASYIPTK

SEQ ID NO: 157160 - protein, 305 aa, Oryza sativa
  Clone ID: PAT_MRT4530_56759C.1.pep
MAMHPLAQGHPQAWPWGVAMYTNLHYHHHYEREHLFEKPLTPSDVGKLNRLVIPKQHAERYFPLGGGDSGEKGLLLSFEDESGKPWRFRYSYWTSSQSYVLTKGWSRYVKEKRLDAGDVVHFERVRGLGAADRLFIGCRRRGESAPAPPPAVRVTPQPPALNGGEQQPWSPMCYSTSGSSYDPTSPANSYAYHRSVDQDHSDILHAGESQREADAKSSSAASAPPPSRRLRLFGVNLDCGPEPEADQATAMYGYMHHQSPYAAVSTVPNYCDPHTLGYWDYQNLTHKTGCSHAGAQLKNRTYKTL

SEQ ID NO: 157161 - protein, 158 aa, Oryza sativa
  Clone ID: PAT_MRT4530_5675C.1.pep
MDAPPPPPLHSIDDADSGSHLTGVDSATIVLSGRAARKPRQPRRRRQSGPRLRRRLRPAASASLAEDARDEPLAQCLGGRCRPLHGLQATLLALALALAWLRGFQLRSSRIGAANVRSERDGVSTELEAASLTAAAASTHRNREVGTVDGEWMENVMK

SEQ ID NO: 157162 - protein, 192 aa, Oryza sativa
  Clone ID: PAT_MRT4530_56760C.1.pep
IFHALLEISDDVNKGKIMNLRSAKKWKTIEPLVKSYLQNSLDLLSQLTDNQILAFVLTRLRASAVLFSAYPSTSRRLLKILIRLWASGDHNLSLSSFLMIREVASLLPECLDLCLNKSYNTYLASSKLVNEGNIKHIDFLMDCLVELYSLDVQKSCERATTSIGQLNSILRQACKTKEKEDLKKVDNWQYIN

SEQ ID NO: 157163 - protein, 836 aa, Oryza sativa
  Clone ID: PAT_MRT4530_56761C.1.pep
MAKKLGKKARKFARKHLQSAAKRNRKQRSQFARRPRRGGSGRGNERDGDGDDEMPQRAIDNVMNNGDAAALVNGLEFPEDECELNSDLSDSDGYLSEDSECLYYSDSEDGNAVNDCFVQDGLDGENDKMNTEIKKQKKKLNKLMDKDPEFVNYLEKWQSELKSDGSKEDSDEDEMDSVDNDADSSDENLSNDKILTRKTISEWCQLVAKEPKAPSLRSLLNAYRDACRFGVSKSPSVQRIQSTEVFHQIITFVLSEADNIFHALLEISDDVNKGKIMNLRSAKKWKTIEPLVKSYLQNSLDLLSQLTDNQILAFVLTRLRASAVLFSAYPSTSRRLLKHLFDCYAVEMRRNDGSIRWCLVIWTLCLYDSCMLLLNSFKPSISVNAFASFKTILIRLWASGDHNLSLSSFLMIREVASLLPECLDLCLNKSYNTYLASSKLVNEGNIKHIDFLMDCLVELYSLDVQKSCERATTSIGQLNSILRQACKTKEKEDLRKVDNWQYINCVNLWVRFLCCNYKDYNMHPLLSSVVQIIRGVAHLFPGTRYLPLRLRLVQMLNELSSCSQMFFPIPSLLFDCLEFRDTSQKEQGKKAKVNFSSLLKVPKNMLKSRDFHEECILSAIDVLSAHFAQWCYHVSFPEVATIPLILLKRLHEQTTIESLRRPIKRLIDQVDENKNIVERKRDGVSFSPNDTTSVESFVQDLQAEKSGAKISQFYKIVPKKLSGLYPNIPRLFAGRKRSAMKCEHTFLATGLSEEGCWEHECRTPYRSTHFSLGDIYESELITSYDINNGIARVVETGEVNEPLAEQSFERECYRLLMHWAMSLLLSKVLSVNVTIC

SEQ ID NO: 157164 - protein, 99 aa, Oryza sativa
  Clone ID: PAT_MRT4530_56762C.1.pep
PSLIAQRMRSPSYRKAVRTGAQSPLMVADHASRGRRTLKDILQTRSVERMQQNTNLGVVEALDNPNWNQGTGVDLLRESRELENGNIAWEEGKPNAVIH

SEQ ID NO: 157165 - protein, 69 aa, Oryza sativa
  Clone ID: PAT_MRT4530_56763C.1.pep
CFFYFLGFFFFFFFFFFFFFGAGNSPYILIPLKIKKASPILGPQPFFKIFFTQGGEPPPLWGPGDRPYP

SEQ ID NO: 157166 - protein, 46 aa, Oryza sativa
  Clone ID: PAT_MRT4530_56764C.1.pep
ACCSGAGPFFFLLRPCAYLRLKIDYIFGHDAQLTVLVMKIYLGCLR

SEQ ID NO: 157167 - protein, 300 aa, Oryza sativa
  Clone ID: PAT_MRT4530_56765C.1.pep
MGEASESMKKISRGRLGGSWMGEPSDHHRHGDEQEEEEKTLELSLGLPGGGWRAACRDKGTTTKHSIAAAAAADDDDGDKSSMLSLGYSTLVSHSQGKANKNKGSPEEEEAHPPPATGNNALASNNNGCFQTRSPSTPVVGWPPVRTFRRNLATSSKASLELQNGKKAAKAEEIKRAPFIKINMDGVPIGRKIDLNAFDSYEKLSLAVDKLFRGLLAAQRDPLTAGAKDCQQEDVAISGLLDGTGEYTLVYEDYEGDKVLVGDVPWGMFVSSVKRLRVLKTSDLSSSLITSGRKRTAAEC

SEQ ID NO: 157168 - protein, 110 aa, Oryza sativa
  unsure (1)..(110): unsure at all Xaa locations
  Clone ID: PAT_MRT4530_56766C.1.pep
LHRLMGXDSASPLLRRSRAFDDGYDSFESHGAXIKQXIQKKEFVRYLCSLLIPTKQDRKDQQFCDYVQEMDTLPASYYIFLSFRRFWDFNSEVLWLVILQSRYSNSLFLL

SEQ ID NO: 157169 - protein, 92 aa, Oryza sativa
  Clone ID: PAT_MRT4530_56767C.1.pep
MADIRSSGPGGGDFRGSVEAGGKGRDDLGDFWMGASSSPSVIVPSMASTSPRRWEVASRGPPGDRDSAQAWASAGGDDGSHRDVIDITAGLR

SEQ ID NO: 157170 - protein, 134 aa, Oryza sativa
  Clone ID: PAT_MRT4530_56768C.1.pep
VWFPSPKRTNQGRVLIGTTAPPEPEKTEEQELLHPLQEPVEGDVSGGGGADRTCGIATWALIRVHRWRGGAADSECDRAQSGAGARRPVGGGGPGLHAVVHAVREDGEHRVRAHDGDNHRGDDQEPGHGDAHRG

SEQ ID NO: 157171 - protein, 92 aa, Oryza sativa
  Clone ID: PAT_MRT4530_56769C.1.pep
MDGENDDEKTDALAGENGLAERDEAGHRRSMSSRQPTARRLSPNDDKKTETESSAKNAAATDKPTKRCRTLAAAADGVSHALYRPSFTSNSG

SEQ ID NO: 157172 - protein, 99 aa, Oryza sativa
  unsure (1)..(99): unsure at all Xaa locations
  Clone ID: PAT_MRT4530_5676C.1.pep
PKPXRHRAPPTXPRRKXSDAPXSXGHNRPXLVXIRISRGREGKGRVGRKXRADXXAAXSPXEXXXXQQFPXATXTKLQRAXRQAQXGECKHIXNSGDXE

SEQ ID NO: 157173 - protein, 111 aa, Oryza sativa
  Clone ID: PAT_MRT4530_56770C.1.pep
MADIRSSGPGGGDFRGSVEAGGKGRDDLGDFWMGASSSPSVIVPSMASTSPRRWEVPWGGSSGGWCLVGGGVSVEGHLVTATQLKHGLRRAATMAATETFAASSLFTDAAQ

SEQ ID NO: 157174 - protein, 84 aa, Oryza sativa
  unsure (1)..(84): unsure at all Xaa locations
  Clone ID: PAT_MRT4530_56771C.1.pep
MSFVISLTLLIIVKDAITDNNLISSWFGMVHSWXGDRTVQPGWLFRMVGPIQQGMLYSVGLILFNYXLTVLLNSQMFAKCCFCK

SEQ ID NO: 157175 - protein, 152 aa, Oryza sativa
  Clone ID: PAT_MRT4530_56772C.1.pep
LANQKESTSGPCTVIYVVCPFPEPSAVLETLVECSVALGSVMLSPERERKSFLYSQVAKALNCNASVDESSASNVVMLSGFSIPKLVLQIVTVETLLRLHKPNNELAVLKDMAFTVYNKARRIPKAISTSDMFQSPAYMGRSQSTMMHATSP

SEQ ID NO: 157176 - protein, 113 aa, Oryza sativa
  unsure (1)..(113): unsure at all Xaa locations
  Clone ID: PAT_MRT4530_56773C.1.pep
ILTQNPPDPGFFWGKPRPKPRKSPEPLTLAPPPGNPGSPMPPPENFQIRRPLPGSPAEKPYFPPHSREGPPPFTANGPXPAPAGVFQSKNPPNVPGGPPPLRGVSPPPEPIPP

SEQ ID NO: 157177 - protein, 331 aa, Oryza sativa
  Clone ID: PAT_MRT4530_56774C.1.pep
MGREGEELERRKRKGLWGREGEELEERRRRKMKRWDEEISDDSMMMGGEVRAIESRLPPGFRFHPSDEELVGYYLRNKQQQQQQQTAATSMLVEVDLHACEPWDLPEVAKVGSDEWYFFSWRERKYATGWRRNRASKQGYWKATGKDKPILHPTVAGARKTLVFYSGRAPNGRKTAWVMHEFRLLHHHHHPNPNIQNMQQQEGDDWVLCRVFRKGNNSNGQPLATSSPPAHHLVESLISSPAPTIMSDHDRLFTIQLPHHQHCDEQYFFLDDDEQHQQQLLDLSVLQAPTSFESEQAPGHGGMEINIAEMESFDTTCAALQDASDYCMQLY

SEQ ID NO: 157178 - protein, 53 aa, Oryza sativa
  Clone ID: PAT_MRT4530_56775C.1.pep
MGQRLIEPTYRGPGPCGRSTAGPRYRRPGSATAGATRRALGGGMRQRLAPDSG

SEQ ID NO: 157179 - protein, 483 aa, Oryza sativa
  unsure (1)..(483): unsure at all Xaa locations
  Clone ID: PAT_MRT4530_56776C.1.pep
MELPRMASRRLPLPLVAQLVVLLGLACGLRSSSAAAAAASGLAGERVTYLPGQPPVDFDMYSGYVTVDKRAGRSLFYWLQEAPAAAQPAPLVLWLNGGPGCSSVAYGASEELGAFRIRPDGATLFLNDYRWNKVANILFLDSPAGVGFSYTNTTSDLYDSGDKRTAHDSYKFLVKWFEKFPQYKYRDFYIAGESYAGHYVPQLSQLVYRNNKGVKEPLINFKGFMVGNAVTDDYHDYIGTFEYWWNHGIISDGTYRLLNASCVHDSGEHPXPACLAALNASTVEQGDIDMYSLYTPTCNETSTSSAAARQRRLKQGHYPWMTGSYDPCTERYSTEYYNRPEVQRALHANVTGINYTWATCSDILNDNWRDSPRSVLPIYHELIAAGLRIWVFSGDTDAVVPLTATRYSIDALGLPTTVSWYPWYDAMKVGGWSQVYKGLSLVTVRGAGHEVPLHRPRQALILFKHFLQGKPMPDAPTKVQNEA

SEQ ID NO: 157180 - protein, 145 aa, Oryza sativa
  unsure (1)..(145): unsure at all Xaa locations
  Clone ID: PAT_MRT4530_56777C.1.pep
YFSDDYDSDAGEKSSETSINHTLVKGLSIRLEALSVEQLIERARPLHXPVCIHAHLAIDWYNGVQPLMTDARTIGFYKXQLVHRELARLELEELYRRGTXPVPSDDQSSKWKGXRDSSDREICSTPMVVVMNNCLEHDEDDQWKG

SEQ ID NO: 157181 - protein, 95 aa, Oryza sativa
  Clone ID: PAT_MRT4530_56778C.1.pep
SGMSDSTSTGQCPPKRIPPIPQAYRIKSRTPCPWRTGLRGRPSSRWPCRMELRRGGCLPPQTGPASRSGSAKNRPNRLPSTSSSPSPADAAAPGR

SEQ ID NO: 157182 - protein, 117 aa, Oryza sativa
  unsure (1)..(117): unsure at all Xaa locations
  Clone ID: PAT_MRT4530_56779C.1.pep
MPANGDGPAKRSAAAAAXSLRRRRTTGGGGGAARGGTSTMPQFYTEQAAGCRMPPSAGLIMSIXGLFAGVARLRVFGLLYRTSSDYRDHAIIPAWQGQSSDALLRRGPSPAYRVAIR

SEQ ID NO: 157183 - protein, 671 aa, Oryza sativa
  unsure (1)..(671): unsure at all Xaa locations
  Clone ID: PAT_MRT4530_5677C.1.pep
MPIEIDWEEVMPTTTTASSSHGDDVEVRFVSTSTRSSVAQRLRPRGARTEEEAEIVRMRDDELRREMAFAGRLRPRFEGILCDGGEGNRRRRALLEAEARRRGIGPAAAKDGDDRHSTSRDVFSFDIEDQLGEDASRRFCGKPWPVSSTKENYGQLGIETRRSSRQIEQRKPISVDKMYSSKPCSSTLSGHKLRVHAIDPDEKADDEKSEPSTRYSFRNYIKNIAILVIVHEISKIEISRTFNPSNEKCNETFVSLIDLEFIHAQLCVQQGGRKNISRVSLIFKRWVQDVVLLDDEDVQPEGQVDCRMHDRRNETMIYYPSRDDPEAVELSSSDIKCLDPGVYLSSPVINFYIQYMKRTKLHDDDCREKFYIFNTYFYSKLEEALXGRAHWSLIIICFPSKEXYLEAEWCHLRKNPPPDISISETIWDDLPSNIQKEKVQVPQQKNEYDCGIFMLYYIERFIRLAPERFTRDNLSMFSRSWFQPEDASDLRQRIRELLLEEFESARLDEALSEADTSDRSDNEEDATKSAESEQAAAAAAPGNGSSEMIVEGGDTGISNEDIKGVAASKEASSSICRSADNLAGCVLLEEATLSDSVMKDEEDTTKADPVSSQDEQEVAVLSPGAWKNSEENTHKQPQPDICCDSSDSEMDDVKIIEDPYQRTNKQNCRIF

SEQ ID NO: 157184 - protein, 147 aa, Oryza sativa
  unsure (1)..(147): unsure at all Xaa locations
  Clone ID: PAT_MRT4530_56780C.1.pep
VSLDHLKSWCEDRCVIDVVVPQPSEVAVREIATYWFEDXRTCRIISRTPMEVAVXEIATYWFEDQRMCRIISRTPMEVAVREIATYWFEDQRTCRIISRTPMGVLELVYYMCVSCGQHDSRTQLIAYPDVRSQSCRVIKSMTFARII

SEQ ID NO: 157185 - protein, 308 aa, Oryza sativa
  Clone ID: PAT_MRT4530_56781C.1.pep
ELHPPSSCDDDAGSCQKTSVACNRQRHKILIVNLLYELMFFAFMFLCLYHALYDFPSEFSVQITAIHGLDRGLVWHRGPSFTRKLRVKHARPGSPPHPPSSCDDNAGACQKASETCNRQRRKIFVVYLLYEFTNFIFIFLCLYHALYDFPSEFSVQITAIRGLDDAAPASPTIISPAIDVTLHVNNRRGTARCYRGGEAVVSYEGFTVASGTVPGFCAQGKRAPEVPFLASADGVGLPQRLCGRMALERRIGAMQLEVEVKLFGRDGGTAPRPTWMSCGLRMDEAQLPNTAHCSVLALQNWFSQPLFG

SEQ ID NO: 157186 - protein, 74 aa, Oryza sativa
  Clone ID: PAT_MRT4530_56782C.1.pep
HVKNPCRVLLKMKASFVTERNSFEVQVSGGRLIGSVSEEHGSFLGIPYAAPPKEALRWKPPVADIGSDGARSYI

SEQ ID NO: 157187 - protein, 242 aa, Oryza sativa
  unsure (1)..(242): unsure at all Xaa locations
  Clone ID: PAT_MRT4530_56783C.1.pep
MAPNKISSMDAGAAFDDEDASSSNSLQELWPVGEIDPKRARFPCCIVWTPLPIVSWLAPYIGHAGICREDGTVLDFAGSNLVSMDNCAYGSIARYLQLDRKKCCFPVNLATHVCERSYKHAEAGTXAISWDDALQLGMRSFGHKFYNLFTCNCYSFVANCLNRLAYNGSVKWNVLNVAALVWLRGQWVDKMSVVRSFFPFLTVTCVGILMAGWPFLIGMAAFSSLLIGWFVFAVYCMKDLVC

SEQ ID NO: 157188 - protein, 337 aa, Oryza sativa
  unsure (1)..(337): unsure at all Xaa locations
  Clone ID: PAT_MRT4530_56784C.1.pep
WTNRHRXNKNSSNLQDPQNMGINQPMLLFEDPPQASRNKGRVQASLKPEDYTINLNHLKQYSSNERCHLTPAKRRINVTCYRCGEEGHCALDCPKKKLGNGQVRNIPRHPKRKMRAGIPPKPMPHSLYPKPMYQQFRRQGTTPHWWKGKRKRKASSRITYAELDLSKMGIEIGDLPEDVEELQLWQRKRDGCCFSCGQFGHYAIGCTQDTNEEQETLPSQIGPEEHRVPDPSKEVSKIKACSRCGEIGHYGSNCITQCPYCDEDHPNGECPTTKITCFLCEKTDHVPQDCQLSPLLTKTAEVQRVSLRFAHRLMTSRSHEDPGFPTFDLHVCLSNNI

SEQ ID NO: 157189 - protein, 86 aa, Oryza sativa
  Clone ID: PAT_MRT4530_56785C.1.pep
FFFFFLLCSELSFPSFRFKEGQASFNRRKMINEDILQALIDARVLHKYPQPEDAVIFYLSTRFSASFDVPFGKTISTLCCRSMLSS

SEQ ID NO: 157190 - protein, 249 aa, Oryza sativa
  unsure (1)..(249): unsure at all Xaa locations
  Clone ID: PAT_MRT4530_56786C.1.pep
TLRPQHEVHAAENRESFEKVMXVSLFVSSKPFFHLPETKRPSSPSIEPKPCHSGHRNVVLINHQETTRILHNTSLGKENLQVTDKLETSTLEDETKHSTNEYEXSFKIPKDSRSHKESSESCLISTAYLCEDHIHLTVLISNMFRSVVVNAYVYPKYYKISFLFVALILQHDVSVVKLVTINKALPGDSPDYRVGTCTLPKKISMLYLYSIVPTVRAFKAQGSCTXGNKVTTKEQCTITPTPIPRFLVL

SEQ ID NO: 157191 - protein, 79 aa, Oryza sativa
  Clone ID: PAT_MRT4530_56787C.1.pep
FFFFFNEMIDANLNSSCKVSKTIKGYIGPQNSTSKLISWVVLVVGVNFLFHFHAVCMFQTSPCPLLICSKLLPPFSYKK

SEQ ID NO: 157192 - protein, 96 aa, Oryza sativa
  Clone ID: PAT_MRT4530_56788C.1.pep
MMRKLAVLVLAVAMVAACGGGVVGVAGAGCNAGQLTVCTGAIAGGARPTAACCSSLRAQQGCFCQFAKDPRYGRYVNSPNARKAVSSCGIALPTCH

SEQ ID NO: 157193 - protein, 849 aa, Oryza sativa
  Clone ID: PAT_MRT4530_56789C.1.pep
MAPSSPSSAAAPTRTSTRKRAASASASAKATDEPSTKRTRRPKAETKPRKKKDEVKEEEKPPMEDDACGEEPDAEEMALGEEAEAEEAEAEQKQLDAPAPGVARKRVAQPSRVRHGSDGDHDPEFVGDPFPAKEARDKWPQRYQRNAATRRPDEEEDIKARCHYSSAKVDGTLYCLHDDVYVKAEEDKADYIGRITEFFEGTDHCHYFTCRWFFRAEDTVISSIMMENADDEKHDLKRVFLSEEKNDNVLDCIISKVKIVYIDPNMESEAKARRLADCDLYYDMSYTVAYSTFANIPLGKVVSDSEASSVGKATLLDLYSGCGGMSTGLCLGAALAGLNLETRWAVDFNSFACESLKYNHPRTEVRNEKADEFLALLKGWHSLCDEYVKKDIDFSSAGASENEEDDDEPLEKDEFVVEKLAGICYGGSGREDGLYFKVQWKGYGREEDTWEPIENLRDCPLKIKEFVQEGYRRKILPLPGDVDVICGGPPCQGISGFNRFRNRKEPLKDEKNKQMVTFMDIVAYLKPKYVLMENVVDILKFADGYLGRYALSRLVAMKYQARLGMMVAGCYGLPQFRMRVFLWGALPTMVLPKYPLPTHNVVVRGGAPNAFSVNNHQPNEVMEYGSSPKTEFQRYIRLSRKEMLDSSFEGKDGPDLGKLLDHQPLKLNKDDHERVQQIPVKKGANFRDLKGVRVGANNIVEWDPDVPRVYLSSGKPLVPDYAMSFIKGRSLKPFGRLWWDETVPTVVTRAEPHNQARVLTVRENARLQGFPDYYKMFGPIKEKYIQVGNAVAVPVARALGYSLGLAYQRESEGSSPLFVLPDSFTEVGRQAAPARASSVGIPVGEVVEQ

SEQ ID NO: 157194 - protein, 299 aa, Oryza sativa
  Clone ID: PAT_MRT4530_5678C.1.pep
MAAASSRSFSLCVLLLLLLLAPPISASFLFDGGKSKSAAAAAAVDMEWRPATATWYGDAEGDGSTGGACGYGSLVDVVPMKARVGSVSPVLFKDGEGCGACYKVKCLDHGICSRRAVTVIVTDECPGGLCAFGRTHFDLSGAAFSRMAVAGAGGHLRDRGQLSVVYRRTACKYGGKNIAFRVNEGSTNFWLSLLVEFEDGQGDIGSMQIKQDLVLCSNTSLHKRREHLRDRIANSVEWLDMKHVWGATWCLVRGPLVGPFSVRLTTLSAQKALTARDVIPRNWKPTATYTSRLNFEAAL

SEQ ID NO: 157195 - protein, 244 aa, Oryza sativa
  unsure (1)..(244): unsure at all Xaa locations
  Clone ID: PAT_MRT4530_56790C.1.pep
TPEPIHAEQPPPPLSPRRALPPLVLPPSPQXPPPRHRSPPPPRRLRQPAGARSIARTPRRHWMRRAHASVPPDPSPCRRASTGSILSASPLLLVVKPPPPLLRLIEPPLTLLLVWPPLLLLFVEPPPSLSXPPPPQPLLRLVEPPXRPSSSSSHRRRRAAAVAQGGRREEVRLRLPPPLPPSTSLRRRSLPPRASAARIPSLRAPWPPPRSICRNLSWFFRYRSFITNEAIRRTKRLQSSLFFF

SEQ ID NO: 157196 - protein, 253 aa, Oryza sativa
  Clone ID: PAT_MRT4530_56791C.1.pep
MARKDEAEGLKARLSLPKSKRCGDKGDGGGGRKRKKTYLNVLGVCCSKEGVEVLMWLPAPAMERLVAEIDHVSAAPCPPRRRPLPRPPPSTALSLSTVARLHPLPVLAIVAGSSASIAAHSHPPPSAASSLSTAAGQPPADQCNERSGGGGATVREGGRDGEGVAREGGRLYGGWLSRKTRLARNGSAIVVASRAWIRRRHSHRSHRPSLPVPLPLSSATCVAPVVLRRSRYSCRRHLHSRAALQRREEERGG

SEQ ID NO: 157197 - protein, 128 aa, Oryza sativa
  Clone ID: PAT_MRT4530_56792C.1.pep
KAFFRPKLLNKIKEMVVFRPLEKTQKLAIFNFLLQKIKGRLLPLGIAPEVSNANKALICEEGYAKNYGARPLRKPVPPLIEDVITQAISFGKPKPGDPILMEIDAAGNPCMTPLNKKVVQLFDPTRTF

SEQ ID NO: 157198 - protein, 169 aa, Oryza sativa
  Clone ID: PAT_MRT4530_56793C.1.pep
MLELVLLIVSRFGQKKKKKKKKKKKKKKKKKKKKKKKKKKKKKKKKKKKKKKKKKKKKKKKKKKMGFFFFFKGKFKKTGFLKKKKKGKKIFFWLTGKLKKFSEKKFFRALFFFEFLKPPNLKKFFRAMGFLWWPLENLGPFPTGNPFKFFLPQKPEKPFSGKLPPSNFF

SEQ ID NO: 157199 - protein, 74 aa, Oryza sativa
  Clone ID: PAT_MRT4530_56794C.1.pep
HTTRKSIIASGRKGSLQAGRPSACMPTTMKIADLRRRGGRPPAKIIFAGGRWLVRSACENRNRPPAKKKTSACE

SEQ ID NO: 157200 - protein, 96 aa, Oryza sativa
  unsure (1)..(96): unsure at all Xaa locations
  Clone ID: PAT_MRT4530_56795C.1.pep
MAGIVTSRVLPLLVDQDPRTLNWYHYSKTRPNYTHDLRTVMECAMHTDPICATVILAIHXPDCIVHAREGSGLLHDTITLIGETKAHQHVISMNGY

SEQ ID NO: 157201 - protein, 288 aa, Oryza sativa
  Clone ID: PAT_MRT4530_56796C.1.pep
MNIQNLNQYLDHKLAKPTSCLKNRRVVVDCIVTADARARERDKVERIRGGCGAIEVQKMVQYNLEHFERYQPTRCIVKNERGRCERRIFQVLTALCFQLVADVPVDSDAPVVTSSISPGFAGPVFEDAHTGRVYVRVHYECLRGITRGGAVREVLLTRWEGRDDQVLVYGLLLAGVDHGELMGRARFCLCPTGDDEGAAAASRRVVEAITVGCCAMDITVSFLRRRRRAPCRATGFASISSCQRRRSSRQPCAVTDEHRRATAMAEHGQGAMAALPPPPSLTSGCSRT

SEQ ID NO: 157202 - protein, 314 aa, Oryza sativa
  unsure (1)..(314): unsure at all Xaa locations
  Clone ID: PAT_MRT4530_56797C.1.pep
AQGRPWRSQWPTQHATIFHRWRPYKTRRKWLLSPCLSRSTKTLLXESPSSMIYDRSICRSVASLAPDLLFAVPQLLRGSRPVASGLVNNSWVSDIRGALTAPIISQFLFIWDAVLHVQLSPGIEDRLIWCWTSGHRYSARSVYQAFFHGXHSFACADLPWHXAKCRFFLXFAFQRHCWTTDLLQKRGINSHLACPFCGQDLETVNHILLDCVFARQVWLRVLSPPGWAALPLXPPRGSWFQDWXPSSRACLLEHLRAGFDSLILLVSWQLWKERKSKVFDSVLYSISVVLESIHSEGHLWSLAGIAVFGDLLGV

SEQ ID NO: 157203 - protein, 316 aa, Oryza sativa
  unsure (1)..(316): unsure at all Xaa locations
  Clone ID: PAT_MRT4530_56798C.1.pep
SCSPARPCPHRSVISRSVITCFLTDWQSQWLARVAFFAAGGGAMREVLLTRWEGRDDQVLLYGLLPAGVDHGELMGRARFCLCPTGDDEGAAASRRVVEAITAGCCAMDIAVSFLCRRRRXAPRPKPSFPRATASLSLPQFRPMPSVAAAPPPRHPRAPCRATGFASISSCRRXRSSRQPCAVTDKRRRAAAMAEHVQGAMAALPPPPLTSRRGAHHGRVLRHGHRRLLPVPPSPVSSKAEAFFPSRHCLFFFSPIPANAVRCRSATSTPSQSPMPRHRVRLHLLLPTLTLVAAAMRRHRQTPPRRRHGRARPGSH

SEQ ID NO: 157204 - protein, 115 aa, Oryza sativa
  unsure (1)..(115): unsure at all Xaa locations
  Clone ID: PAT_MRT4530_56799C.1.pep
CYGEGHIETHKAYFEILCVDRKDVKPNIPTLSSGKKAESFDGQVIHSMDYSNIGTKTYKEMIKGKRVTIDGYLKXVVYIAAQCAEVNGTEIPCTMVVRTKHWIIPNYFAWGVHIL

SEQ ID NO: 157205 - protein, 588 aa, Oryza sativa
  Clone ID: PAT_MRT4530_5679C.1.pep
MALSKRMLFIFQAMVCLCSFSLSQGNQQFSLRNLPTLQKASSFPAMRHETYDYIVVGGGTAGCPLAATLSLKYKVLLLERGGSPYGNRNVSYMENFHIGLSNMAPDSASQAFISTDGVINARARVLGGGTCINAGFYSRASSNFIQEVGWDEDLVNESFPWVEDKIVQWPKIAPWQAARAALRDGLLQAGVSPFNGYTYDHVSGTKVGGTIFDETGYRHTAADLLAAGDPNNLRVLLHASVNRIVFNSQRGQLKPRATGVQFTDENGGLHQAFLNSNCDSEIIVSAGAIGSPQLLLLSGIGPKNDLRSHKIPVVLHNKYVGKGMADNPMNSIFIPTKSPPRQSLIETVGITEAGVFIEASSGFGQSPESIHCHHGIMSAEIGQLSTIPPKERSLEKAQKYANTKLNLPKEIFHGGFILEKIDGPLSTGHLALIDTDVKKNPAVTFNYFSHPQDLTRCVYGIKTIERILKTNRFSELSANTDGHSMERVLNMSVQANVNLIPKHTNDTESLEQFCRDTVITIWHYHGGCHVGKVVDQQHRVLGVSGVRVVDGSTFSRSPGTNPQATVMMMGRYFGVMILRGRLGRAAGV

SEQ ID NO: 157206 - protein, 882 aa, Oryza sativa
  Clone ID: PAT_MRT4530_567C.1.pep
MAASPPNRKRRLAAAEAEAEPELSPPDALGALPVEVLDNILGRLHIYDVVRTSALSRAWRRRWESLPTVDLTRSPGVAASDVDAVLLRRSAPVRAFRLAARDPSWFVDALHDWLLYLSRSGVQALYLWFPTPSFRLHSCLFSCRELTSLDLEGCRLPPAPSGFEGFQNLKKLHLTKVSLPEHGDKALAALFAGSPLLEDVELMNALLVGDGADEWVIRAPNLRKLIMVAPFPYAGRVEDLPRLEEGILCGPNYAKFLTGMAHVTKLEFVCSFMRGQGDDAQDIDANDEFLNAQSTNDMFAKLHVVRMKKVACLCNEMHFMEFVLNKAGVLRVLSVYPSSGSTCSNEQTIITEHPRVSPDAQVIFMNRESANNGYMHTSSVNYELETIRSGTWLDVEHPRKIHRLDLDAVDQQKQLEKYLSEKSNIPIPPFPDSSSVSSSSQPVVRTSALSRAWRRRWAALPSVDLARSPGISEPDVDAILLRRPAALRTFRLVARARKGTWSVDALHHWLLYLSRSGVQALDLSFPELRFRLHPCLFSCGEFTSLALNSCRLPPAPSGFAGFPNIKTLRLEDVDVPRHGGKEVAALIAASPLLEDLGLLAVKLIGDGPDEEWVIRAPNLRNLTMVCETAFGGRVEDLPRLDEGRLFGPNCAKFLAGMSQVTKLDFFCNCMLGCTEGAKEFEANDKFLNAQLTDDMFVKLHVVQLKNIACVRNEMHFMEFVLSKARLLRKLYVRLSFYAICSNEEAVIDIAEYPRTSSDAEIIFMECGIDCPEFPELTAPHQPILNSSLIQLLMLKAMLRQGDITDPVSNGVGNAHVYSEEGHIVNHVANVNADSPEGHVWDREATDSHPIVHGSVSAVQIWSRPCLLVVGALAVFCDYTSIF

SEQ ID NO: 157207 - protein, 521 aa, Oryza sativa
  unsure (1)..(521): unsure at all Xaa locations
  Clone ID: PAT_MRT4530_56800C.1.pep
MEAPSSSPSSPSLKDHLSSPTGPLHLKVWEVICIVLGAFMVVIFFVTVWLTIRSRKRVRRASANIPITQIPAISKEIKEVRVEQVPTSDFAAHDGVLMTIQDKSSEKESDKVMVHLGVSKSKRGDESHSGSFRYMDKDLGFQSADEGGSGTFRHNSAHAITAPSPLVGLPEFSYLGCYDCITIQGVGFSTYEFIYIXYIYLTVVLTICCCKFLTVCTVVAXEYWSNPNICEKEIRDEVEAIGHVRHKNLVRLLGYCVEGTQRMLVYEYVNNGNLEQWLHGAMSHRGSLTWEARVKILLGTAKALAYLHEAIEPKVVHRDIKSSNILIDDDFDAKVSDFGLAKLLGAGKSHVTTRVMGTFGYVAPEYANTGLLNEKSDIYSFGVVLLEAITGRDPVDYGRPANEISVPFQKFCYYSILLKLTRRSEEVVDPTIETRPSTRALKRALLTALRCVDPDSEKRPKMGQVVRMLESDDPIPRGDRRSKHNRGGSTEMDSQRDNNSDTDKSDNPDSKPSRSRASSSK

SEQ ID NO: 157208 - protein, 158 aa, Oryza sativa
  Clone ID: PAT_MRT4530_56801C.1.pep
MDGSRGVCKSPNREKRCQYSRRFGGFLVDLTEYFDHYSSISQSLSIGHRCHHWNPGIQLRPATASACTIQMRTPCWESEFTTSTCFLGIPTIAQQSELCFNGLFAKDYLLPRNIILETIKPSAYVLCKWMLISVSQNDSEKQLGYVPRDQLIETLIFR

SEQ ID NO: 157209 - protein, 39 aa, Oryza sativa
  Clone ID: PAT_MRT4530_56802C.1.pep
LCQPSVWLSETLQSEIDTYYCRRMRLCQSLELRSCWIMQ

SEQ ID NO: 157210 - protein, 697 aa, Oryza sativa
  Clone ID: PAT_MRT4530_56803C.1.pep
MYDDGPRKGKPGGLSMDAATAAGLAAVWPEYFPEESEFAADGRSARLAADLVDLFSSPDASDLLSRNISVVAFLDNVYDFSGWTLQSLIEMFWKSQLKIQELASGESHEEGRVPRTIECELTEDLVDCCIPGETVTVTGIVKVLNNYMDVGGGKSKSRNQGLYYLYLEAISVRNSKVHAASGNSDAASGSFGFQAFTEKDLEFISKFKEEHGADVFRQILHSFCPSIYGHELVKAGITLALFGGVQKHSIDQNKVPVRGDIHAVVVGNPSLIEGLSFLVRIFLAFLTVQLKLLLNAILGDPGLGKSQLLQAAAAVSPRGIYVCGNTTTNAGLTVAVVKDSMSNDYAFEAGAMVLADRGICCIDEFDKMSAEHQALLEAMEQQCVSVAKAGLVASLSARTSVLAAANPVGGHYDRAKTVNENLKMSAALLSRFDLVFILLDKPDELLDKRVSDHIIALHSNDGGPFTANKRIRTVPQFNASTEFGVGRTSLASRLRLHPEKDKDFCPLPGPLLRKYISYARSHVNPRISMPSPAADSLQKFYLDLRKQSDSADGTPITARQLESLVRLAEARARVDLREEVTLEDAKEVIDIMTESLYDKCVDEHGVVDFARSGGMSNQKQSKKFLRALNEQCDLQKKDCFSMNEMYNLADRISLQVANLDAIVESLNNAGYITKKGSSMYQVVTSSYQGSQATWSRR

SEQ ID NO: 157211 - protein, 96 aa, Oryza sativa
  Clone ID: PAT_MRT4530_56804C.1.pep
MRTIYFGQAGSGELQLKWMTQGQQYKVTVSRFAGLDPDDLNRTNIHTEKPISINGTMFMYALGSPIYNNLLTVKFVKEIDLLKEAYPEETAWQVIY

SEQ ID NO: 157212 - protein, 77 aa, Oryza sativa
  Clone ID: PAT_MRT4530_56805C.1.pep
WIPGLQDQLTCGLKLVCCLLICTLTELVSMWNLTKVEIQLCNMLSPEGPKVSLGSYNWGLVFIAVLVDNFLYPISAF

SEQ ID NO: 157213 - protein, 172 aa, Oryza sativa
  Clone ID: PAT_MRT4530_56806C.1.pep
MQWKRKKRDKPEDLTPAAGDSIPQAILDGSDETNLFETSPTEKNFNSGVGEKESKTEYYPLYSASHTRRGGLTSSKGWGGADRRGPRVSGTRERVVTWRVGPTRWWLKGEEEDGLGRLSFKPAGRLWRGRRRQATTDGGGGKRPPMAATGEKTAAAGEKTAVAGDAGDGASR

SEQ ID NO: 157214 - protein, 171 aa, Oryza sativa
  unsure (1)..(171): unsure at all Xaa locations
  Clone ID: PAT_MRT4530_56807C.1.pep
MAAAAEVDAAPDLPNGSSATATTDDAAEEKPDVKPQVEVEVEYVPEQADLDDGLLADFKSIFDKFTFKDSSADAEDDEKKDEAGTDAAKKAAGSDSDDDEQGTQQKKEGGLSNKQKKLQRRMKIAELKQICNRPDVVEVWDATASDPSLLVYLKSYRNTVPXPRHWCKRPN

SEQ ID NO: 157215 - protein, 137 aa, Oryza sativa
  unsure (1)..(137): unsure at all Xaa locations
  Clone ID: PAT_MRT4530_56808C.1.pep
FVLLIDNFDAQXGGVENDGDEFTFLTNKSAPKNKLVRVNIKXPELWTDVLSEHEKDVLESADAGNNNQLLVNYMSDVKHILQIRDLTTGNFIHQVPLEIGSGSEISCTREDKEVFIGFTSFLSPGIIFRGNLTSTIP

SEQ ID NO: 157216 - protein, 582 aa, Oryza sativa
  Clone ID: PAT_MRT4530_56809C.1.pep
MAAAAEVDAAPDLPNGSSATATTDKKKSRESERRRRRRKQKKNKAASNAADADAAGDAGADDDAAEEKPDVKPQVEVEVEYVPEQADLDDGLLADFKSIFDKFTFKDSSADAEDDEKKDEAGTDAAKKAAGSDSDDDEQGTQQKKEGGLSNKQKKLQRRMKIAELKQICNRPDVVEVWDATASDPSLLVYLKSYRNTVPVPRHWCQKRKFLQGKRGIEKQPFQLPDFIAATGIEKIRQAYIEKEDSKKLKQKQRERMQPKMGKMDIDYQVLHDAFFKYQTKPKLTSHGDLYYEGKEFEVKLREMKPGMLSRELKEALGMPDGAPPPWLINMQRYGPPPSYPQLKIPGLNAPIPPGASFGYRPGEWGKPPVDEHGRPLYGDVFGVLQQDEPNYDEEPVDRSKHWGDLEEEEEEEEEEEEEEEEEPMEDEDMEDGMQSVDTISSTPTGVETPDVIDLRKLQRKEPEKQTEKQLYQILEQKEERIAPGAIYGSSHTYAIGAQDKAGPKRVDLLKNQKSDKVDVTIQPEELEVMDDVLAAKYEEAREEEKLRNQKEDFSDMVAENASKRKRKQEKDGKSKKKDFKF

SEQ ID NO: 157217 - protein, 109 aa, Oryza sativa
  unsure (1)..(109): unsure at all Xaa locations
  Clone ID: PAT_MRT4530_5680C.1.pep
MEPPERDHANDALEHAPERRRLXHRCRPAILVHPEASRCAKNLASTTSSRRLKNPSRKHQEHGEHILFFLDADPNSPPPSSSITTASLVVPFEPSPFTRGGASPSNRSN

SEQ ID NO: 157218 - protein, 108 aa, Oryza sativa
  Clone ID: PAT_MRT4530_56810C.1.pep
MAGKMKQQLGGEMEIDQLRVRDDLEEEEEDEMSWMARKLFLYNVTIGLYGLDCFFNSLRKFYEKHNLASQEVCSTKSEYNMMVLFESSEDEDKDKDEMFHAKRDINNV

SEQ ID NO: 157219 - protein, 238 aa, Oryza sativa
  Clone ID: PAT_MRT4530_56811C.1.pep
MCMYVTVRQGFVQSTRLLICSIFLTSIERKEKLAIKIGAAEARGPEASDFSNCRRAPARSILPVNLQMLYTYGLHALRLPQAQLDRRRLRLRRRRVVAAFVSGLPDFLSHFFPFAGRVVANPFSGLPEIHCNNQGAELVVGEVGVALASLDYGTMGASLRKIQLPHGKDVPLSVQMMKNTKSTRKEVGYGFDLDSKSGEINPINTRISWDCYNKKSNKIDQLVSTRTLISRTLEVSTF

SEQ ID NO: 157220 - protein, 222 aa, Oryza sativa
  Clone ID: PAT_MRT4530_56812C.1.pep
MKLSTVLCCYLLLLGLFAPEIISDSPPLQDVCPMAPQGERKLFMNGFFCKSPSTIMASDFKTLLLNHAGDLDNMVRSSANIITATEFPGLNTLGISMARTDIAVSGAVLPHSHPRASEMMFVHSGSVVAGFFDTKGKLFQKTLAEGDVFIFPRGLVHFIMNYGFGLATTFSVLNSQNPGVVGITHAMFAPDSEVAEGLMARMLSFRDMGMDDSSSVDSPWFY

SEQ ID NO: 157221 - protein, 281 aa, Oryza sativa
  unsure (1)..(281): unsure at all Xaa locations
  Clone ID: PAT_MRT4530_56813C.1.pep
TSQGTQTTIVDIQIHVLQKXYKRLQMQXKKIKRTKLGSLTSAVGQLHSTGILDGSDETNLSEVAPTGKNFNSGNQSLSNATPCCNRPNQPPELHHSQRCTSDQAVTHSRLWRLGTARLGTKPAGRPWRCSGGARGRGEKKGGEGSLTGEHGXPERRMKGGGDPAXEEGRTGGDDTYRKGGEGLGMERTTXAATIDGRGRRGMDSSPVREGDGVPXREAVAEMTHAAVKLAVAAAWRGGGSSGDGALPEAAVGGGASGKRRGRDRRHERERQARKKGEGTRC

SEQ ID NO: 157222 - protein, 254 aa, Oryza sativa
  Clone ID: PAT_MRT4530_56814C.1.pep
MASSSAAAPPLAEEDMKLMRIGRTIFRSQDFSGTCRRDSYCIRCGVAFCSHCCRYHHRHAAVSRWYDPLLRVDLHGGGRPVLPTRTADGRHALPRGVAACMAAQDYTSRLPRDAFCLPCGASFRADLCPHHGAHADAATGEPLADAVLRGIEEHGGGGRHCVRCTGSEWWADLMGVVLGDPVLTGVDEEGAYYELLPVLKATESKCLRCGDDMEGKLRIGFYCSLDCFREDQRTIEERRQRRVAMHAARHSGNN

SEQ ID NO: 157223 - protein, 56 aa, Oryza sativa
  Clone ID: PAT_MRT4530_56815C.1.pep
MARSNWEADKMLDVYIYDYLVKRNMHNTAKAFMTEGKVATDPVAIDAPGGFLFEWW

SEQ ID NO: 157224 - protein, 314 aa, Oryza sativa
  Clone ID: PAT_MRT4530_56816C.1.pep
FLSLVLLKKQEGEKLTFYDGPFKASAIADFVSANKLPLVNTLTQETAPSIFDNPIKKQILLFVVANESSKFLPIFKEASKSFKGKLLFVFVERDNEEVGEPVANYFGITGQETTVLAYTGNEDARNFFLDGEISVENIKRFAEDFLEEKLTPFYKSEPVPESNEGDVKIVVGKNLDQIVLDESKDALLEIYAPWRGHSRQLEPTYNKLGKHLRGIDSLVIAKMDGTANEHPRAKPDGFPTILFYPAGKKSFEPITFEGDRTVVEMYKFIKKHASIPFKLKRPDSSATKTEKDQSTASTNLRGERSSGTNFKDEL

SEQ ID NO: 157225 - protein, 518 aa, Oryza sativa
  unsure (1)..(518): unsure at all Xaa locations
  Clone ID: PAT_MRT4530_56817C.1.pep
MCTFVRFKGPRGRCADGPSPQARERGGGVGRLTGRRLDXQAGPTAEVAPTWTSCRIGKGEEAGRLIGRPTARGGIRRTAASRKGRLALAAGGGEGELIPRLGSGRGRATTAGGGSQSRRHADVAAREKSEGCAGSGLAEPVWCCDAHAVTRDPMVTGGARTAALCGGGSGDTARRQRRRPTALGQPGGGQGDPRERGGERNRRERSRRRWIVAAAITGEQXRGKHDETTRVRFKGMGASPGFMESVSGVGLDGAAPRLAGDERRPPGQSMAAGELVRGARATSGGSAVFHGDQGGRQREEIRWRAHRWRRTAVAGYVEQRRARCGERGREKKGGVFSAISGKDGEEADGKLTDERGAALATRREPWRGGRDGGAGASSWXRHQWRGCFERGEDETRGEGAGFIGEEERSVWRRETDIGGQGSSAGVHGRQRRLKRERGLAAWSGQGGGGELAWSRWWQAVTPMVVGQKEKGGEERELCSLLFRDKGKGEGARPRALPPYLGRMRTGGAGRRAVTGTEN

SEQ ID NO: 157226 - protein, 538 aa, Oryza sativa
  unsure (1)..(538): unsure at all Xaa locations
  Clone ID: PAT_MRT4530_56818C.1.pep
WTFVRFKGPRGRCADGPSPQARERGGGVGRLTGRXLTRSSGVXAEVAPTWTSRRMGKGEEAGRLIGRPTARGGIRRTAASRKGRLALAAGEGEGEIIQRLGSGRGRATTAGGGGQSRRHADVAVREKSEGCAGSGLAEPVWCCDAHAVTRDLMVTGGARTATLCGGGSGDTARRQRRRPTALGQPGGGQGDPRERGGERNRRXRSRRRWIAAAAITGEQXRGKHDETTRVRFKGMGASPGFKESISGVGLDGAAPRLAGDERRPPGQSMAAGELARGGGEGGRWPGRHGGSGRSRRTXRARQNGGMERGGLCRAAAGAMRREGGEKKGGVFSTISGKDGEEADGKLTDERGAALATRREPWRGGRDGGAGASSWXRHQCRGCFERGEDETRGEGTGFXARRRGRFGGGKPTLVVKGARLVFTGGSGDXKRERGLAAWSGQGGGGELAWSRWWQAVTPMVVGQKEKGGEERELCSLLFRDKGKGEGARPRALPPSLGRMRTGGAGRRAVTGGVRADAAATERLASSERARAGTSGTAEN

SEQ ID NO: 157227 - protein, 70 aa, Oryza sativa
  Clone ID: PAT_MRT4530_56819C.1.pep
FYNHCTTTKPSPKSIAQDPNRQNAANPKNLKIEENLEASVTQYPTGKPTDEGSKRHLISSRELSNRNETE

SEQ ID NO: 157228 - protein, 67 aa, Oryza sativa
  unsure (1)..(67): unsure at all Xaa locations
  Clone ID: PAT_MRT4530_5681C.1.pep
TLRPLVGCDLAMCTTHDTSSEDLIGKRIKVWWPLDKKXYEGVVESFDSSKRRHTVLYDDGDVEVLNL

SEQ ID NO: 157229 - protein, 148 aa, Oryza sativa
  unsure (1)..(148): unsure at all Xaa locations
  Clone ID: PAT_MRT4530_56820C.1.pep
LFTDDCSNACWGGXTAALFNCVNRDESSSWDXGRYGLAVCTDSAVHSQSPVGPTGCAVAVPXMFAPKASDNLESKSXRCNLGQGDGSHLPDLGSENPVXEDCLSQTSYLKTLXDSCYFVSKGSYEKTXGKPFPLHHAYYLGFHSPYNK

SEQ ID NO: 157230 - protein, 556 aa, Oryza sativa
  Clone ID: PAT_MRT4530_56821C.1.pep
MWRPFLREGGELETEDVDLSNSQIISDERNSLRRQLWIWIHPSALSEGLETLRAACHQQMQESGDTISCCSLEGKMARLEVMGSNAMQSLKSILKPVSNPSISTKLVNKNNVTTSTDPLYCSTGSHLLKRSVFDNADILQSGAILSMIIHDPRDNSVEGTDSSKTVSLDQNNQLMEEYQVPNADETPSGIGNILELWDSSLKINPPVDEKILCMEKHHRRMKFFCLDSGNDQGQTTSKLKMPCFPYDYPDSKAYSLFMAEEAAVLDKATNCRPSSMRPPRVPVPPLWHCVIASFRKGDGILSNLEDDLKSVATVLSESIPVNSNSGDAESSPTSAPTSFQLLVPRTIQVLRQYVKKIDEKYLNSSDMEAVTGKSSLVSGDNVKTGCSINRLCLVRVLIRAFKEGSFEEGAVVCAPLPSDLSAWNRKTRSEEEEEECLEKWELQLPQSHVSSYFSWLDPSTSNLQLPNGDSTRKAFRWPIGFVTTGFVHGSSGQDAVAVAFCEAKLLAVLRRQQWRTHESLKRKDICVLVRNARSAAYRRALATIVLEQQEDDLKFL

SEQ ID NO: 157231 - protein, 86 aa, Oryza sativa
  Clone ID: PAT_MRT4530_56822C.1.pep
ITRTDPSGLSFIRNLENYPFFSAKKSKTPFFQIQDGDHCFQHDTRWKMRFKQTQIQTQTPPFSDQNNNMPGSKVPVQAPPKIRGPG

SEQ ID NO: 157232 - protein, 943 aa, Oryza sativa
  Clone ID: PAT_MRT4530_56823C.1.pep
MAGVPPPPRQLDVRRFAAARAGELRSLHESVSARLAGRLTQPRSARRRTTGHLPSNKRRRRRSRDAEAADGTEEEEGRPSRRVRRRRELAGNTAEGFSAAGDGARRLRTHLWHAKRFSMERRWGFVLPIGAHGRGRGSRTVLKWLKNGTVVHDASYFTPVELDGPEDSLLSIVRMVLHPSPQDKTPGLKHLHGQVMRGVCYENAMLCRVGCPHLEIVGPVTYMWRPFLREGGELETEDVDLSNSQIISDERNSLRRQLWIWIHPSALSEGLETLRAACHQQMQESGDTISCCSLEGKMARLEVMGSNAMQSLKSILKPVSNPSISTKLVNKNNVTTSTDPLYCSTGSHLLKRSVFDNADILQSGAILSMIVHDPRDNSVEGTDSSKTVSLDQNNQLMEEYQVPNADETPSGIGNILSSIWLNPGNHDLALSDCRELWDSSLKINPPVDEKILCMEKHHRRMKFFCLDSGNDQGQTSQEKDSIGRSCPVILLKHAKGSLISVGWSVILPLSWVKPFWFYLVSHGAHAIGLRERRWIASKLKMPCFPYDYPDSKAYSLFMAEEAAVLDKATNCRPSSMRPPRVPVPPLWHCVIASFRKGDGILSNLEDDLKSVATVLSESIPVNSNSGDAESSPTSAPTSFQLLVPRTIQVLRQYVKKIDEKYLNSSDMEAVTGKSSLVSGDNVKTGCSINRLCLVRVLIRAFKEGSFEEGAVVCAPLPSDLSAWNRKTSFVSHCILLYEMSAGKYQFKKLIPVHTSNRSEEEEEECLEKWELQLPQSHVSSYFSWLDPSTSNLQLPNGDSTRKAFRWPIGFVTTGFVHGSSGQDAVAVAFCEAKLLAVLRRQQWRTHESLKRKDICVLIFKHHPPTPNMSSRIPTRANLTLAALLILLTVAATTVPLASAKCTVKNKPEGKVEKPGGTDAGLGLAAAHISPEKNAGFTSGLNHR

SEQ ID NO: 157233 - protein, 48 aa, Oryza sativa
  Clone ID: PAT_MRT4530_56824C.1.pep
SSITKQVGLMIVSGISSSKTNNRTTNSRSAWGLVNPQSANRASPYEVN

SEQ ID NO: 157234 - protein, 95 aa, Oryza sativa
  unsure (1)..(95): unsure at all Xaa locations
  Clone ID: PAT_MRT4530_56825C.1.pep
HSSGFSSTHPPLQTAATFPPGLGSQASPLSFPNSCSPIRYSPGTKGTKXXXPKKNTLPTFLTSKKMRGFVFFPPFCKKKKKKKNNIKKKKKNNYD

SEQ ID NO: 157235 - protein, 51 aa, Oryza sativa
  Clone ID: PAT_MRT4530_56826C.1.pep
ELAKLSITYSHVSLSYALCILYQTLNNSLTHACYIGMKVLNNSSHTTKSMP

SEQ ID NO: 157236 - protein, 112 aa, Oryza sativa
  Clone ID: PAT_MRT4530_56827C.1.pep
KNAALMQLLVSFLYALVNYTKAVIFRPHQTPQLSQYFRASMPTEYQTVQPTKMKILKWLHLDKMTFRALKNISLNEDSPSIFQPFKEVFLKKFRGLFSLSARCCAELRNFRS

SEQ ID NO: 157237 - protein, 77 aa, Oryza sativa
  Clone ID: PAT_MRT4530_56828C.1.pep
MARTGTILREEQRSSTVKRPCDKGGQAEQAQEKTTAHGIGTMRGHAATSNSARAGTGSTLFCTARRQEPYAWDPRAI

SEQ ID NO: 157238 - protein, 55 aa, Oryza sativa
  Clone ID: PAT_MRT4530_56829C.1.pep
RLGLVLGSCLLQLRVAPRHVPRERRPVQLLWGYCCALPPFSSRYSAPGSYGCKVE

SEQ ID NO: 157239 - protein, 43 aa, Oryza sativa
  Clone ID: PAT_MRT4530_5682C.1.pep
PTARAELEPRLTGENRLHTIASATGVPAFHGVAFLRAQRSGAH

SEQ ID NO: 157240 - protein, 148 aa, Oryza sativa
  unsure (1)..(148): unsure at all Xaa locations
  Clone ID: PAT_MRT4530_56830C.1.pep
FAIQSYIYQNTIIALTKPVTGXFICGARGHCSGCMNLAFTVSASAVTTPTPTASLYPPYTVTPATHLSDPGMDTPSLTPDATTTPTTTTTKSTVSTVGASGSXEARSVIGLLVWAVCLSMMGYARQEARLLIFIHFGYYFFPTFKLSL

SEQ ID NO: 157241 - protein, 59 aa, Oryza sativa
  Clone ID: PAT_MRT4530_56831C.1.pep
TWNTTGCNDCDKSFNYPLDRTLDSQSTLITVNMHTKDVQSYLMPPPEADQYLKSSTQGL

SEQ ID NO: 157242 - protein, 44 aa, Oryza sativa
  Clone ID: PAT_MRT4530_56832C.1.pep
IAVGRSDRSHTAGLTAGPTAVRPTPQGRSDRTPSVGLTGTSGRS

SEQ ID NO: 157243 - protein, 546 aa, Oryza sativa
  Clone ID: PAT_MRT4530_56833C.1.pep
MDMEMGKLLHRPWKWSLNSPLLLLLIVPVMIHVQLKLRRRRKNAAAGTRLPPGPWRLPVIGSLHHLAMNPKAVHRALADLARRCGGGGGVMYLRLGELPVVVASSRDAAREVLRTHDAAFATRAMSVTVRDSIGDTVGILFSPYGERWRRLRGICSLELLNARRVRSFRPIREEQVARLVGAIAAAAAAPGGDQPPPVNVSWQIAGALTDLTLRAIMGECGFRWREEFLETLGEAQRKASRFGVADLFPSSRLLRAVGSTAVRDVRALNAKLFELVDRAIEQHREAAATTAAGGDHDDGGDDDARDDNECLLNTLMRIQKEGGGTLSMSTVKAVILDMFAGGSETTSTILEWAMSELVKNPQVMQKAQAQIRLALQGRSRITEDDLINLSYPKNIIKETLRLHPVAPLLMPKECQESCKILGYNIPKGSIMLVNVWAIGRDHRYWDDAEVFLPKRFEEITVDFGGTNYEFIPFGGGRRICPGITFAHATLELALTALLYHFDWHLPPSVTPDGLDMEEEFGMNVRRKRDLHLHPVIHVGVEKGIMS

SEQ ID NO: 157244 - protein, 717 aa, Oryza sativa
  unsure (1)..(717): unsure at all Xaa locations
  Clone ID: PAT_MRT4530_56834C.1.pep
MGPLLRSSPPPRHLRLLLRRLLSTAAGRPSRLLPLPASSSARLLVRPRVAVAAAAAGAPLRRNGVAVRAFMASTAASEAMQEKRVAGEYTAANVQVLEALDGVRTRPGMYIGSTGSRGLHHLVHEILDNAVDEAQAGYATKVDVILHGDNSVSVTDNGXSCVETVLTLMHAGGKFGGSKSGYTVSGGLHGVGLSVVNALSEALEVTVWRDGKEYRQNYSRGKAITMLTSRTLSDESSSRQGTRIRFWPDKHIFTTTMDFDFNTIAGRIRELAFLNPELTIALTKEEDDLQVQHNEYCYAGGLVEYVKWLNTDKKSLHDPIAFRKEMDGITVDVSLQWCSDSYSDTVLGYANSIRTIDGGTHIDGLKTSLTRTINNFAKKSKTLKDKDISLSGEHVREGMTCIIAVKVPNPEFEGQTKTRLGNPEVRRIVEQSVQENLTEYLELHPDVLDSILSKSLNALKAALAAKRARELVRTKSVLKSSSLPGKLADCASSDPEESEIFIVEGDSAGGSAKQGRDRKFQAILPLRGKILNIERRDEAALYKNEEIQNLIVALGLGVKGEDFNKEALRYHKIVILTDADVDGAHIRTLLLTFFFRYQKALFDEGCIYVGVPPLYKVERGKQAHYCYDDADLKELVNTFPTNASYHIQRFKGLGEMMPAQLWETTMDPERRMLKQLKVEDAAEANVVFSSLMGTRVDVRKQLIQNAASMVNLEHLDI

SEQ ID NO: 157245 - protein, 86 aa, Oryza sativa
  Clone ID: PAT_MRT4530_56835C.1.pep
SHPDQTSVEMGGTSGTMNECINTTPSVDPKCDSYAATHTLSYNYAGCARMMQWHCTQEAYRSCAKMSCTFSSMLVSTLLSNPAIHA

SEQ ID NO: 157246 - protein, 42 aa, Oryza sativa
  Clone ID: PAT_MRT4530_56836C.1.pep
LGHRGRSFLTFQSQMGPISAAMQRGRRSGSSRARARLGRVLR

SEQ ID NO: 157247 - protein, 451 aa, Oryza sativa
  Clone ID: PAT_MRT4530_56837C.1.pep
MARWLSLRCLTGPSGKWVMLGVDIDECKEPDRCSTGSRCHDTEGGYYCKCRFPRRGDGKINGKGCHLPKDIVVTLATVCIVIFLVFFVCWYERRKRRRHFNNNGGRLLSGMEIKHFSKKDLDKMTKNRTTMLGEGYFGKVYMGTHKNQLVAVKYSKGKRKLAQMTHGKDIKCMNKKMFQNAFCWSKVPSSPEEDSSSRVSGPELVDELRVQSLIQHENVVTLLGCCMETEEPTLILEFIPNGSLEKKLHKDKQHPLSLSQRLDIAIGSAEALSYIHSSSDHQSIVHGDVKPANILLDDKLIPKVSDFGSAELTLKIKLVCGDLDYIDPVFLQTRNFTVKSDVYSYGVVLLELITRKRAKYDDGRSLPVEFVKHYKDNNERRKMYDQDMLSSMDALLQPYCTECLDRIAAIAVRCLKNKVEKRPTMAERAGCPSKCGEVDIPFPFGVGVGCA

SEQ ID NO: 157248 - protein, 94 aa, Oryza sativa
  unsure (1)..(94): unsure at all Xaa locations
  Clone ID: PAT_MRT4530_56838C.1.pep
RSGQSPHGYTTNRQIAVHYQNNNHPQAYNTQRQTTVHHQNQNNQQVYAAGRQTGDGNKKXNQAGTSTMRSTLAANLTITEHRNMHVTRRRNRAL

SEQ ID NO: 157249 - protein, 87 aa, Oryza sativa
  Clone ID: PAT_MRT4530_56839C.1.pep
MRRPSARAVFPSSVTPAITTLAIRESDPTSGTPDPGGAPPEPPPPCQVPLPAIGPPPPPPAASRRRATVAAPSRAPPPGRAAAPDPA

SEQ ID NO: 157250 - protein, 82 aa, Oryza sativa
  Clone ID: PAT_MRT4530_5683C.1.pep
MVIPESMTVVVQVAVWFGVHDQLELWFDSNEKHAEMCEDESIDVCSSCPTRAVRVVYEPDYVGGGGSGQGRQLVGSPEVTGR

SEQ ID NO: 157251 - protein, 109 aa, Oryza sativa
  unsure (1)..(109): unsure at all Xaa locations
  Clone ID: PAT_MRT4530_56840C.1.pep
VLPLSRSLPPLSRSLAPSPSQRRPPXPPPRRHPPSLAPPHRRPPPCPSSPSSTDLLRTVPKPAVVLHRPPPHHPSPSPSPSPHRPPSPSMPATDHLPRARPLPRLPPHV

SEQ ID NO: 157252 - protein, 598 aa, Oryza sativa
  Clone ID: PAT_MRT4530_56841C.1.pep
MTEVLSRPLEHRLSSPTLDGHYEEKRKSNVEYSEDEKKAKIISLKKKAMSASQKLRHSMKKGRRSSKVISISIADERDPEEVQAVDAFRQLLVLEELLPSHHDDYHMMLRFLKARKFDVEKAKQMWVDMLQWRKEFAADTILEDFEFEEADKVAECYPQGYHGVDKEGRPVYIERLGQINVNRLMQVTTMDRFIKNHVREFEKNFAVKFPACSIAAKCHIDQSTTILDVQGVGMKQFSKAARDLIGQLQKIDGDNYPETLCRMFIINAGPGFRLLWSTVKSFLDPKTTAKIHVLGNKYQSKLLEVIDASELPEFFGGTCQCEGGCMKADKGPWKDAEILKMVQSGAGWCGNLSLNHLDAEEKMMICEDDTMHTKRQESFKYEGCTLSRKISCARIEHPSLSPVCEELPPTILPTLGSAYSCDVPMVEKAIDAICQSKGLPDENVTVTKAIVNASNGSNPPLYGGIMALVMSIATMLRVSRNMPKKVLGATLGAQSTSKIQAQQLSEISVEAVSVAEYVSSTKRLSDIEEKVIAILTKPAEMPADKEEMLKTAVSRVSALEEELAATKKALQETLERQEEIMAYIEKKKKKKSKRLFRW

SEQ ID NO: 157253 - protein, 559 aa, Oryza sativa
  Clone ID: PAT_MRT4530_56842C.1.pep
MTEVLSRPLEHRLSSPTLDGHYEEKRKSNVEYSEDEKKAKIISLKKKAMSASQKLRHSMKKGRRSSKVISISIADERDPEEVQAVDAFRQLLVLEELLPSHHDDYHMMLRFLKARKFDVEKAKQMWVDMLQWRKEFAADTILEDFEFEEADKVAECYPQGYHGVDKEGRPVYIERLGQINVNRLMQVTTMDRFIKNHVREFEKNFAVKFPACSIAAKCHIDQSTTILDVQGVGMKQFSKAARDLIGQLQKIDGDNYPETLCRMFIINAGPGFRLLWSTVKSFLDPKTTAKIHVLGNKYQSKLLEVIDASELPEFFGGTCQCEGGCMKADKGPWKDAEILKMVQSGAGWCGNLSLNHLDAEEKMMICEDDTMHTKTLGSAYSCDVPMVEKAIDAICQSKGLPDENVTVTKAIVNASNGSNPPLYGGIMALVMSIATMLRVSRNMPKKVLGATLGAQSTSKIQAQQLSEISVEAVSVAEYVSSTKRLSDIEEKVIAILTKPAEMPADKEEMLKTAVSRVSALEEELAATKKALQETLERQEEIMAYIEKKKKKKSKRLFRW

SEQ ID NO: 157254 - protein, 564 aa, Oryza sativa
  Clone ID: PAT_MRT4530_56843C.1.pep
MTEVLSRPLEHRLSSATLDGHYEEKRKSNVEYSEDEKKAKIMSLKKKAMSSSQKLRHSMKKGRRSSKVMSISIADERDPEEVQAVDAFRQLLILEELLPSQHDDYHMMLRFLKARKFDVEKAKQMWADMLRWRKEFGADTILEDFEFEEAGKVAECYPQGYHGVDKEGRPVYIERLGQIDVNRLMQVTTMDRFIKNHVREFEKNFAVKFPACSIATKCHIDQSTTILDVQGVGMKQFSKAARDLIGQLQKIDGDNYPEVLGNKYQSKLLEVIDASELPEFFGGTCQCEGGCMKADKGPWKDDEVMKMVQSGVGWCGNLNLNHLEAEEKMMICEDDTMYTKKQESFKDEGRTLSRKISRARIEHPTLSPVCEELPPMMLPTPGSPYSCDVPMVEKAIDAICQSKGSRDENVAITKAIVNASNGSNPPLFGGVMALVMSIATMLRVSRNMPKKVLGATLGAQSTSKIQAQQLSKISMEAVSAAEYASSTKRLSDIEEKVIAILTKPAEMPADKEEMLKTAVSRVSALEEELAATKKALQETLERQEEIMAYIEKKKKKKSKRLFRW

SEQ ID NO: 157255 - protein, 87 aa, Oryza sativa
  Clone ID: PAT_MRT4530_56844C.1.pep
MEKARKVVLSMAAAALMILGEGGGGRCVSRGGERGGGRGWAWSGRTPCRPTAAEQSRKAMGQCWRVLTAISAGKVREEHVEEAGTFN

SEQ ID NO: 157256 - protein, 31 aa, Oryza sativa
  Clone ID: PAT_MRT4530_56845C.1.pep
NRLTLSDSNSADPGRSRFGLQPILALFLKQS

SEQ ID NO: 157257 - protein, 84 aa, Oryza sativa
  Clone ID: PAT_MRT4530_56846C.1.pep
PHPATPSLSTAPPPPRAGGGRGHPFFLHLLSRHNPLSRLLSVSSNPKRGSYSLPGVAECPPSRRGGGAPPLPTWSHGVYSPSRA

SEQ ID NO: 157258 - protein, 129 aa, Oryza sativa
  unsure (1)..(129): unsure at all Xaa locations
  Clone ID: PAT_MRT4530_56847C.1.pep
MRSTLILSDDVELYCRDRLNRLTLSDSNSADPGRSRFGLQPILALFLKQSXSWIPLQSNLYLRYLDYQICKPRLLFLRRSPRCTRRFQGDLLLAKLPLAAMSTSASPSAAPSAEYAEVRAHWLDPLFSQ

SEQ ID NO: 157259 - protein, 129 aa, Oryza sativa
  Clone ID: PAT_MRT4530_56848C.1.pep
TGGTDNHLLLWNLRPLNVTGSKVEKLCEKAEITVNKNSIVGDKSAASPSGIRLGSPALTSRGLKEEDFKQVAAFLDEAVKITIKAQEKSGKSLEDFVKFIEGDEAIKADIAALRSKVHAFASKFPMPGL

SEQ ID NO: 157260 - protein, 52 aa, Oryza sativa
  unsure (1)..(52): unsure at all Xaa locations
  Clone ID: PAT_MRT4530_56849C.1.pep
LWTYSLVKFNDCSSLHMSSWWIIWQEAFLLIPACKKKNKGDGSKQSXECMGR

SEQ ID NO: 157261 - protein, 100 aa, Oryza sativa
  Clone ID: PAT_MRT4530_5684C.1.pep
MEVRLHHWSDEDCIKILAQCKKAVPLQEERGKVIIIDIVVGSDSGPMLESQLLMDVAVMLVTKSRQRDENDWRDLFMKVGFRDYKIVKKLGPRCVIEVYP

SEQ ID NO: 157262 - protein, 779 aa, Oryza sativa
  unsure (1)..(779): unsure at all Xaa locations
  Clone ID: PAT_MRT4530_56850C.1.pep
MEGYNTLGYEIKLDGRQTIVATSPSMNARDVSTLVQQVLSSQMEKVEQKQCHNLFQTRLKEPLEIAGGKGKTPVTKPAAISNFQKNGHLLAQCNGPFRCRNCKASGHAARFCNKKSGESVDSQPKKKSTSTQRINAFATVPNSRDNGRGNGNFVWQPKKISPAILQPPHLLQYATEATILSPQSSLPMANLNPNPHRFLRQGHIVHLGGNVQVPRVDITIPHRPERRHEDFYLALVHPQVSEQDWDHYHLLILDHILDERLFEVRNSYRHAFVVGMFQLRSAMHRDEFVHSEPFVYDGVDTITFVKHDQGPNWRASQYNRDGWFLFLDFPLDFIDWDHLNLATASFGQHSYWLERDQMKGRVLIRAKFKDNDSVPRKIVLHDPVGMGGGGESWTISVFLLEGDFINMPPDEDLPPAGPQPNPAADDDEDPDGGQIWQMGMGHPQAGAGDWDDLVQQQNAANEQVEDAWGQDHPMGQIMEVNPDGLIESAAASPGKENGWKTLLYNPYRRQSARLQLNKEGSELKVDPRMGIGKPRVNLQESLKSWQNWLFLGDFNFYRSVQERNKDGDTNDIFIFNDIISSIEVEIPLKGRNFTWSNMQHNPLLERLDWVFTSGLGVYFGFMEIDSLISILPANKAPGPDGFNGYFMKKYWHIIAQDYYRLVAHFYAGCVDLEILNSSFITRVPKKSSPETVNDFRPISLMGISLKILTKLMADKLQGVILKLCQQSKREIVLLKLDFGKAFDTIEHSAILSVLHHIXFPPKWIEWVQKLPQSFCSDHV

SEQ ID NO: 157263 - protein, 196 aa, Oryza sativa
  Clone ID: PAT_MRT4530_56851C.1.pep
MSNKLRAHTPYPYENLRKTRPAYLEIDEVTTGASLSMAGRGPRGKAARGPEGHDVASRGPPAASAIREVRGYGHAAGWEAILLTLKHQDPIANLAYKRFDQQDCNGLCLVIAAEIILLKFGKQESNFRRAHIEGIVPEEMACKLQYFNCSFGPSSFFPGWYSFDTSPAKDFFIKAFDVSKGRFGLKPKRIPTKILD

SEQ ID NO: 157264 - protein, 66 aa, Oryza sativa
  Clone ID: PAT_MRT4530_56852C.1.pep
RRGWRPFGFALPPYSSARLALPPSAAAVAGARLLRHPPAPSRGRKGTPPSSAAVLRRHRPLTPPSS

SEQ ID NO: 157265 - protein, 68 aa, Oryza sativa
  Clone ID: PAT_MRT4530_56853C.1.pep
LKVGIPMGKIFIINPKGEVAVNRRVDTKSYTSLHALVNGMFPPISTSSEQEDYNTWNYWKMPLPAVDI

SEQ ID NO: 157266 - protein, 84 aa, Oryza sativa
  unsure (1)..(84): unsure at all Xaa locations
  Clone ID: PAT_MRT4530_56854C.1.pep
XXXXGVRFXSISTHYFXXVSGRARAGDRFPAFFCASAIFQRAKGGGQVRSEWGRCPSLVCSIFVTFARNFFKVWKRKKRKKGGP

SEQ ID NO: 157267 - protein, 172 aa, Oryza sativa
  unsure (1)..(172): unsure at all Xaa locations
  Clone ID: PAT_MRT4530_56855C.1.pep
RISNQPDGNLVMYPIGAIDPNSAYWNTGTYAQNFLLTLTLDPNGTLWLFNRKXPYRMVLFLTNQSLSASPESESYYHLTLDADGILRLYSHVFFKQGGAPKTKVEWLVPPSNDRCSVKGVCGPNSFCQVTSSGETRCSCLPGFEFLSANQSTQGCRRAQTAIFEVDTCSTTS

SEQ ID NO: 157268 - protein, 158 aa, Oryza sativa
  unsure (1)..(158): unsure at all Xaa locations
  Clone ID: PAT_MRT4530_56856C.1.pep
RRLPRLRRRRGPNXFANEPSXXXAXPAHLRXPRXGXXAXRSPPQPGXVRPKNPRRVTASXRRXXRDRAPALPRSRXRXXLLXSXAFRXSVKLPGXGAFSASTSGRNXRXPGXLXKTRVXNXPPXXPPTGXPXNXKRNYPXLXVHXQXXRVPXXPAXHG

SEQ ID NO: 157269 - protein, 295 aa, Oryza sativa
  Clone ID: PAT_MRT4530_56857C.1.pep
MGRSPCCEKAHTNKGAWTKEEDQRLIAYIKANGEGCWRSLPKAAGLLRCGKSCRLRWINYLRPDLKRGNFTEEEDEFIIKLHELLGNKWSLIAGRLPGRTDNEIKNYWNTHIKRKLLARGVDPQTHRPLNAAADHHQQQQLQAPRRFAAAPAGHHHHHPDHFAVLSNSPEACSHSSDDEPSSATPPPPPRHLGIDLNLSISLAPYQPQDQTSEPMKQEEDDEASATANGAGNAAMTTTATTAAVCLCLNRLGLHGGKVCNCGRGGAPSMQASTHMFRFITPLGGSPPPSSSPPMT

SEQ ID NO: 157270 - protein, 218 aa, Oryza sativa
  unsure (1)..(218): unsure at all Xaa locations
  Clone ID: PAT_MRT4530_56858C.1.pep
MLTRLHPVPTKILDLMKLRIGPMNDLELTRNSVSSYLXKYKAYLLKQEQKDQQLPVDDNTNTSSIKSQRGSASLQQQIMNYGENDSMDNQSIILSQTRYNEHSNKQPKLLTANYHGPRNMHHHHKNTNNMQPSNVXLIKAKGFNMSFNKEEVIEATYQNQLTTRRVSASHAIAKAQASQRVTMTKDMHPISQLHQQDYETTPDDSSNNTNSIYEKCQL

SEQ ID NO: 157271 - protein, 85 aa, Oryza sativa
  Clone ID: PAT_MRT4530_56859C.1.pep
GDVVAWVAAHDVPGGGRPVDPFPPARPGVGSQRRQLRRLAISHWRRRRPEPQASTWPGSPMASFRQEEEEEEEVVVAGGVGAAAV

SEQ ID NO: 157272 - protein, 67 aa, Oryza sativa
  Clone ID: PAT_MRT4530_5685C.1.pep
QDNRMIVRPCYPLPCTVSACIQLSPKCLKSVYICKTATNYNFLGKLKWKQATFFFPLLKDGRQGKFL

SEQ ID NO: 157273 - protein, 85 aa, Oryza sativa
  unsure (1)..(85): unsure at all Xaa locations
  Clone ID: PAT_MRT4530_56860C.1.pep
MNTTQTFLKIKXANKSTWRTLTISLIQTNINILINRYNCLKXDLSLCGNDDYLNRGPNQAQVELYWLLAISAQSNSDSVSSQYTP

SEQ ID NO: 157274 - protein, 76 aa, Oryza sativa
  unsure (1)..(76): unsure at all Xaa locations
  Clone ID: PAT_MRT4530_56861C.1.pep
VSEYTPQVLHRRDPPCVPSNQXFISGGHSEWSDAVPDAMNQGPKPVHVSVLSTRGRLQNTXLKTWAAYQENVKRSA

SEQ ID NO: 157275 - protein, 244 aa, Oryza sativa
  Clone ID: PAT_MRT4530_56862C.1.pep
MRTASTATRRVSAGAPLPTSLPFSSSPSRQPGMGFPVCCYSELLLPKQLLHLLLLLGYIRRFLLWAFHAVGLGDLLDLGDEQQAVLQDHAREHRAPAQALPPQQQHRRAEFRTVPAMVIEEVLPVVRFDELVAAAPAVCGGGDCAVCLSGIGGGDEVRRLSNCRHVFHRGCLDRWMEHDDQRTCPLCRAPLIPDEMASALWAAAGVPDASDFDFSYFGAPLTPMPTPTLLRPHELLLTGLGGYQ

SEQ ID NO: 157276 - protein, 75 aa, Oryza sativa
  unsure (1)..(75): unsure at all Xaa locations
  Clone ID: PAT_MRT4530_56863C.1.pep
FSFGTYCHNLEVLSVESKHVNENKGIISVXKGCQYLESLKMVWLGVGDEALEAIGSSCSALENLSLDNLNKCSDR

SEQ ID NO: 157277 - protein, 96 aa, Oryza sativa
  unsure (1)..(96): unsure at all Xaa locations
  Clone ID: PAT_MRT4530_56864C.1.pep
TSSPSLPPLLPPRRRLPSRAPPSPPYPLPXPTLASSPPSPSRHSATTSSPPLPPPSSPPPPXPPSPPPHLCIQSMRDVETVPVSLAAAPHGMKVAQ

SEQ ID NO: 157278 - protein, 93 aa, Oryza sativa
  Clone ID: PAT_MRT4530_56865C.1.pep
MGESSGKKKSPASGIMKPKPISAELREFVGGAEELPRTEALKIIWAHIKGNNLQDPNNKKIIVCDEKLKKIFGGRDRVGFLEISGLLNPHFQK

SEQ ID NO: 157279 - protein, 178 aa, Oryza sativa
  Clone ID: PAT_MRT4530_56866C.1.pep
MQLSRTIVAHSLAHRYRSSGVNGTTGGQQERLIQLHPINATPQRWGNTQNPATAEAAAGPSTKPAQPSPWPPPPPEKRPRNPHHHHQQDRRNPPSPRSKKPIKKTNPKHSESSRKAKGREGEKILLLLVRVGGIAAQAAAAAAVVYACLVVVATAASAAKRLTLRERERVGGEERRMG

SEQ ID NO: 157280 - protein, 170 aa, Oryza sativa
  unsure (1)..(170): unsure at all Xaa locations
  Clone ID: PAT_MRT4530_56867C.1.pep
YVFRDSLFTPPLGVISAFKRRGRWGRPGWRERRVXWRRPAWHERRGRQWRRRPRCEEELPVGVVWSSAHEGWPAGDAGAGVPHVGRACVVVEHRCVSRGFAGGEWQSSGRSGASLILGLCVGDVGVWVVVYFFXFFLVTTLQGCNLVIFSCSINGTSHLLVRVVQKKMFN

SEQ ID NO: 157281 - protein, 74 aa, Oryza sativa
  Clone ID: PAT_MRT4530_56868C.1.pep
NIIVRNIKKGWHIICPRCLCHIRANSMLSSAVSTSTEVQKRLITLLFSLKIALLLCCNHPAICMPNNYIGNTDF

SEQ ID NO: 157282 - protein, 49 aa, Oryza sativa
  Clone ID: PAT_MRT4530_56869C.1.pep
TNKGTHTRSPYSKGLPKQRLQEEKRRKTAAAVRQGSKEPRLGLRPATAL

SEQ ID NO: 157283 - protein, 102 aa, Oryza sativa
  Clone ID: PAT_MRT4530_5686C.1.pep
MLREEQRSCAVGIPCEKVTRVNILGGHLRSTVGIGTRLREELRSRRSRIPGDEVGYEMAHGGWTPRGRDLRSRLHEVCVQASVFAKEIGRNWRGVYDATFRV

SEQ ID NO: 157284 - protein, 91 aa, Oryza sativa
  Clone ID: PAT_MRT4530_56870C.1.pep
TEKSRANAVADCRGSDWSDLPADLLVTVFSSLEIPDLICCGVATHPPPATSTASRSPTTTTPSRTAIRHRQPLTTANSTMTIMMDCSTPSA

SEQ ID NO: 157285 - protein, 1398 aa, Oryza sativa
  Clone ID: PAT_MRT4530_56871C.1.pep
MPPALPSPLSFAPRLARALAAADAALRDRLLAGLAAFAESPARLRQLLLPTSAAHSPSLARALLSVPALQPGLLGLLLDKLPEHFDNVLDGMPLHDDVGRLIVAQFRWLDFLVDADAFVAKLMEVLSVAPPRLKKEIIGSLPEIIGDQCHATVVAALEKLLQEDSEVVVSALDALSDLNLSEQLQEQAVTVAISCIRTVHADQMPHLLRFLLLSATPFNAGRIISQIRKQLKFVSTVDPRAARGKKLKGKASANGTDGAILDALRSGLRFKNMLCEAFLKELKSVDNPRDHKVIDVWLIMLIYGNGGALQKSAEKILKSKILQLCIRETLFDQCIRGNTELVKDHFVSYLSVSDFLLACKEEKAREFAAYLFTALFEEFSDTFSRQELIGSLIAHIGSGVSLEVSSALDIMISLTSDKPEELIPLSSHITGILDYLESFHEDNLRKVYEIFCHLALAAGFNTGSGGSSVANELLMVVRKQVSNPDMKYRRMGIIGALRIVSTIADVNASMNCSSSQQPNYDEALELLKMAVNSCKFVMLPLILLYDELAVLLENSSLHSAIVEWVGEHVAEFDTVFLADLDDGELSKKYVCDGIEGELWMNLDGNISPVFQTCLQILPSQFSLLTIIERLGNQGSLGGINAVLGCPLHLPSTKLNAFSTQVATRVDNVSQRARNETAVKLLMRLRNLILLEGLLNAYLKIHPLSLPDLRYVGDHGSTSTSKFNLPKNMGDQNMEGNVSNKRQKGHKDKASSEKSNSDEKFKQPTILDAFKRAGVTISQETNRDSQPSPSGMMSRVTEHETNNPCKFGIVDLMAAPAQLDMQRFKFRTLHATCLSLLNYSEPQDTTVSYNESEMPLYVYLLRELQNKLDNLYPSSKPFFSSSQGKSTQAYCQKSMEEFLNKIQPLFSSVRKHLDGAVSMIKDGSDSCPDNWNSHSASAGNPDIPYVVVLKSSVATSVFKEVLGCYRKLLGIPDLLNQANISVLKELLQTFQPSENFDEVLAEFRPSLVPSNLDYLYCGAYTMFAAILDIVLNSVIMLFEKSGEQNGKNLHMGCSKEIIPFLRKHLGLSARKLLTSDLPSEDAENGWQSKGDLIQKILQIYLKNSDSTSDLLDELACSVLPKVPSFKTGSTQDMSHGFPTLCASTILSWYRVVHEENTGNLNKMIKQALKTKAQSERAVETSLEEIQKSVLVFVSLINMCKTHEKVVMHAMAVKHGGRFVDTFLKAFNFLETHFGQHNDIILQMIKSLQKATKTIQTICAEAKGHKRTMITSKIPVAKRSLERFVFQVKALLHNCSTEETFWMGTYILCTPNFCSWQRREIYIDGRHCCSNLLNRCMTGNLRHKDLQGQLVSSQVYGSVDDSPNDEQEQMETDPETPADENANAMDEDAAEDSNEAPLEE

SEQ ID NO: 157286 - protein, 306 aa, Oryza sativa
  Clone ID: PAT_MRT4530_56872C.1.pep
MAHLDPNSGSGATVAAASHSHVVVDMPQLDASSHSTASYDDKSGHVVIDIESEGRSGTTGSDIILSCVVCTEPLEWVAVGPCGHRAVCSMCVARVRAGPDADKRSCICRTRCYTVAVTKAATAADTLHAFPKTVPVTSRDWRIGKFWYYAAMSAYFDDRNHYKETKRAVRDFLEKQRAAPSPPPPCPDDDVTDENLEAQPPAPHHPRVSWCGILFVLVAFAFVCGPPALRAGVHRVETCATAATRTHQDEVLRISKAPKSQPSATHQDGSLPIAMEKLDGEDREEEEEEEEEEKKQAASISVMLTH

SEQ ID NO: 157287 - protein, 413 aa, Oryza sativa
  Clone ID: PAT_MRT4530_56873C.1.pep
MGNCGTREENAVVAAHAQVQQLHLLQHPVKNAVAERKHTRISSDMSDPSTPRKIEDAKNISIYNDVIDFTLFELETITKSFRADYVLGEGGFGTVYKGYIDENVRVGLKSLPVAVKVLNKDGHQGHREWLTEVRFLGQLRHPNLVKLIGYCCEDDHRLLVYEFMFRGSLENHLFRRTATPLSWATRMSVALGAAKGLACLHNAERPIIYRDFKTSNILLDSDYTAKLSDFGLAKAGPEGDQTHVSTRVMGTYGYAAPEYVMTGHLTARSDVYSFGVVLLELLTGRKSIDKSRPSREHSLVDWALPKLNDKRRLLQIIDPKLEGQYSVRAAHKACSLAYYCLSQNPKARPLMSDVVETLEPLQGSGGSDGAVQSVLGSGLPSYRVNRRLTTNSVHCRAIPNPKCSPAVPACRVR

SEQ ID NO: 157288 - protein, 203 aa, Oryza sativa
  Clone ID: PAT_MRT4530_56874C.1.pep
MGNCGTREENAVVAAHAQVQQLHLLQHPVKNAVAERKHTRISSDMSDPSTPRKIEDAKNISIYNDVIDFTLFELETITKSFRADYVLGEGGFGTVYKGYIDENVRVGLKSLPVAVKVLNKDGHQGHREWLVSCQLVQYSLWLLMSVMYMDTRNINNYSYKNMIYLNYVNYGKIFVDANYVFHNKSTMAHAAFSYTQVNKYASK

SEQ ID NO: 157289 - protein, 71 aa, Oryza sativa
  Clone ID: PAT_MRT4530_56875C.1.pep
ISEASKPRRGRAPRTRGLGRKPEPTGLTRSIYYPGRVSMGRSLRSSTSSSQVLGVACHFHQHRFMSDLDIE

SEQ ID NO: 157290 - protein, 81 aa, Oryza sativa
  Clone ID: PAT_MRT4530_56876C.1.pep
MTLDGFVDDFVDDFVMIYQRIGTADSMTVLNEGAESKVGAGVERPCHCRASRAQIGALSMAAAEDGGWRGCSAQGASSPSP

SEQ ID NO: 157291 - protein, 115 aa, Oryza sativa
  Clone ID: PAT_MRT4530_56877C.1.pep
SHYIASNPPTVASTIVHTHAVKLQLQWHTSLLPRHAAFFFFFFPNLARQASPDNLTRPLSSFFPAAGDPRGGGPGRERERPGGAGRQPKPDVPAPIALKLKKKKKAKPTTSQANR

SEQ ID NO: 157292 - protein, 77 aa, Oryza sativa
  Clone ID: PAT_MRT4530_56878C.1.pep
MVVVVVVEESASPLVIRGLFGTAPAPAPPLLELELSQTVSAPPELGVELGGALSQNALGIAAELDGAQNSMDENTPR

SEQ ID NO: 157293 - protein, 145 aa, Oryza sativa
  Clone ID: PAT_MRT4530_56879C.1.pep
MAGFDLNQPINWDEIDDLEGVVPYLNYDFVWDPGNEDGEGSGEERSDGDDDAGGGADAGDGAEAVDAAETTGINIRKRRHYPPDMKRSIYALCLERSTNGIIKEGVTKSVANDMRVGKLWRVVQRVWRPQKNFPLTLMHWWRNPL

SEQ ID NO: 157294 - protein, 65 aa, Oryza sativa
  Clone ID: PAT_MRT4530_5687C.1.pep
KAGKALHTRRAEIRVQFRRVPGNLYGRRRRSVGGGGTTATRELEKATNELVLRVQPDEAIYLKIN

SEQ ID NO: 157295 - protein, 59 aa, Oryza sativa
  Clone ID: PAT_MRT4530_56880C.1.pep
VLYCILNSATYLIEIVLTDFYLDFNNIMLILRPLSQKEIKSLLNFCMENVLKAFKSLLL

SEQ ID NO: 157296 - protein, 59 aa, Oryza sativa
  unsure (1)..(59): unsure at all Xaa locations
  Clone ID: PAT_MRT4530_56881C.1.pep
IVFFLERRVLYNYRSNIMLNVSHNLVEXMSKLAVSVTDYGILLFPNRVNGPLINQSKLV

SEQ ID NO: 157297 - protein, 95 aa, Oryza sativa
  unsure (1)..(95): unsure at all Xaa locations
  Clone ID: PAT_MRT4530_56882C.1.pep
MSVFQPHYRCYYALNEGQPLESPRDXRGDLDSAQLCRFEHLTALEATHHQRSEAGFTDYYYIEAKNHFHCASVTATGLPAQRTFLPSPMYANGHE

SEQ ID NO: 157298 - protein, 204 aa, Oryza sativa
  Clone ID: PAT_MRT4530_56883C.1.pep
MDHEGNDAYNNFFSSSSVLPLPWQARRQEQVPHLQKWTAINYNLKLRASIDRVKRDLLDLNVFFQLNIIQFEPTKSTEVTAGWRQRSVHKRHEATELLPTAFRLHGFFADSDGYFAVSPWKSRPIDATLLRRRPAGQRPRCSLASQLTKLQTTVVLCHELNITPIVYRHGAAASNGIANLLLKDEKYDEYELCVLLQSAENVYA

SEQ ID NO: 157299 - protein, 109 aa, Oryza sativa
  unsure (1)..(109): unsure at all Xaa locations
  Clone ID: PAT_MRT4530_56884C.1.pep
GGRPAAPRAGPVRDPAAWAAXARPGPAPAPAAPAGPAPTPRAAXAPAPTPAPTPASAPAPAPTPTWALAPAPPATTXAARNSAATAILFIFRAASARIDRRTRRLLLLR

SEQ ID NO: 157300 - protein, 36 aa, Oryza sativa
  Clone ID: PAT_MRT4530_56885C.1.pep
RHHERSVIHWEASVDVGTHPTGNRTPPPGRVVVSRG

SEQ ID NO: 157301 - protein, 875 aa, Oryza sativa
  unsure (1)..(875): unsure at all Xaa locations
  Clone ID: PAT_MRT4530_56886C.1.pep
MAGEEPARAEAGAELQEGEGGEEQAVAKLARTQAAPSTIQVLILKLRLRRWPPSSQAQLRRLPRPCFNETTKSPNLAVPDSIEKPCKRRRQGLTRQAAARGREERRLGPAGGGVGRGGPEEQRLRRRGGAAALWSGGSVGAAAPRVASAGRHGGRRPRDRGAAERSGAALSARRRGGSVGREXEKHSPSQLSSWLEVTPSLEPXLHLDRPVSSLAGISCNDCCKNDPSASSIPESSDITLAAQVDSFADRCKLLDILITNKAAAKAIFIKMDPDQVEIPFKVLQERVPGKKKYSLRVIKPSSSKKICRSVNSYPLVCLKREMADNDHVHCIMLTLNHRNILSMKALSRDKVESNGPSSLAAFVEPYTGLLSSLCFKHDCWGDRINHIPSPLLQSLLRQVIEGLDFLRKNKLYHGNLNWDSILYLQPSTVKLANFRKQETMSLEEAQWADWLCLIKMLEEILERAAEISSKLAQCDRYFCGHVESLTALLKTLDKTALPAIKEIVLGHPLFWDLMTRVNFFAKDISLRLNDDTFMSRVRASKIRKLPWNEGTTQDFKGLLFEMETYRKDEGIPAYDFRSLKDYVRCVCGAYAHWNKIKLNVDDIVRQNHPTICSDIWHLLGSSDMSHADSKKPVEEIKLISDVVRDSPHKIFIAGIPRVISSKMLRDIVSSFGQLAAYRFLFNEDLGGACAFLEYIDHSITSKACAGLNGMKLGGCVITAVGVLTDHPGQAGNEACPFHGIPANPKPLLAVPTQVLQLKNVFDQEEYSLLSKYEVDAVLEDVRVKCARYGAVKSINVVEYPAGSDNTKAPAVDARDNALASNNTALEAGCILVEFLCKEASFMAAHSLHGRPFGSRIVSAGYAPYDLLSLPEVEST

SEQ ID NO: 157302 - protein, 496 aa, Oryza sativa
  unsure (1)..(496): unsure at all Xaa locations
  Clone ID: PAT_MRT4530_56887C.1.pep
MAVAAPGQLNLDESPSWGSRSVDCFEKLEQIGEGTYGQVYMAKETETNEIVALKKIRMDNEREGFPITAIREIKILKKLHHQNVIQLKEIVTSPVEGNKYKGSIYMVFEYMDHDLTGLADRPGMRFTVPQIKCYMRQLLTGLHYCHVNQVLHRDIKGSNLLIDNEGNLKLADFGLARSFSSDHNGNLTNRVITLWYGPAVDMWSVGCIFAELLNGKPILTGKNEPEQLSKIFELCGTPDELIWPGVTKXMPWYNNFKPHRRVKRRVNESFKQFDGQALDLIEKMLTFDPSWWXHGQDALDAEYCWPDPLRCDPKSLSMRRLMSSKLNANSRGKQRKPQSARNCSILHHIPVCLQSRTQANHIPKSGLASLCIMHMHLWQLAQVITMQSREDLEALIGTHKAGTKEATIRTAVDREEAMGVAHIHSKDEVLPLILVVAWAEPVVRGVVVAVAMVLADQIINRVDLMVHLVQVEARTIIKVVLAINNSMETGNSTAVS

SEQ ID NO: 157303 - protein, 83 aa, Oryza sativa
  Clone ID: PAT_MRT4530_56888C.1.pep
GVGAPPPRGPNGSGPSPRGDRGRGGHVTLGPDPPEGVRATWVTAATQASSHDTNGPMSPTGAPGVMPERSPPSREALGCDATP

SEQ ID NO: 157304 - protein, 61 aa, Oryza sativa
  Clone ID: PAT_MRT4530_56889C.1.pep
ISHVGATSAKTVVLPWDLYCTGFDSRIWFSGSTTEFGFVENLRDQKLTYSKWKMRPVLRPS

SEQ ID NO: 157305 - protein, 381 aa, Oryza sativa
  Clone ID: PAT_MRT4530_5688C.1.pep
MGSSSSTSLVSLLLPCLLSLLLIRLSTHLNPDPTAAAPRFKRTPPFPLRFRHDGAFKILQVADMHFGNGAATRCRDVAPEVGGARCSDLNTTRFLRRVIEAERPDLIAFTGDNIFGGSASDAAESLLKAISPAIEYKVPWAAILGNHDQESTMTREELMVFMSLMDYSVSQVNPPGSLVHGFGNYHVSIHGPFGSEFVNTSLLNLYFLDSGDREVVNGVKTYGWIKESQLAWLRATSQELQQNLHAPAFAFFHIPIPEVRGLWYTGFKGQYQEGVACSTVNSGVLGTLTSMGDVKAVFLGHDHLNDFCGDLNGIWFCYGGGFGYHAYGRPHWPRRARVIHTELKKGQKSLVEVESIHTWKLLDDEKLTKIDEQVLWRHSSI

SEQ ID NO: 157306 - protein, 119 aa, Oryza sativa
  unsure (1)..(119): unsure at all Xaa locations
  Clone ID: PAT_MRT4530_56890C.1.pep
PTAAQSSRPPRRRIRRRRRPIRRSHRRPSSSAPDPRRDGPQTPDRHEVAPPPADRSRRXPQRRAGKSTATTEGGRGGGSARGRAADARSTPSSRRHRIHAETGRRRRIDARLRRHRRIH

SEQ ID NO: 157307 - protein, 44 aa, Oryza sativa
  Clone ID: PAT_MRT4530_56891C.1.pep
VVLQMAYHSIRVSPIHIRDPVIDSYSIAMHLFYASINAIQSATS

SEQ ID NO: 157308 - protein, 101 aa, Oryza sativa
  Clone ID: PAT_MRT4530_56892C.1.pep
MTGGNDDLDHGGGNNDDLDHHSDDVALGSAVTDWVALRRMKFHAPDESGSLTSHDPSIRCLLEILHLVLLALYTCVVLLLATGWHERYRVSYNLFRLLKGK

SEQ ID NO: 157309 - protein, 75 aa, Oryza sativa
  Clone ID: PAT_MRT4530_56893C.1.pep
NRRLHLMASLHNQKLFSPTSKNFLETLIFHKGFLHQKQPHPPPIQRRWQKKNPKIKAPPWGAILCPPHVYHPNIP

SEQ ID NO: 157310 - protein, 222 aa, Oryza sativa
  Clone ID: PAT_MRT4530_56894C.1.pep
MSSTQSFKSGATRSFTTTMRRGANGAPLCFSGSREGKRRALSLPNGSQGRSLRLRLCCAPPESKWWTTPLTPDDLIEPTGHGQEELEAIWNALVEEPLRPILTAFQEIKATNGNVFRCRCFHAGITSGLLVLVIRICQFHKLAPGLCVDFVLGYVCYRMSVLAAELKRNGKANNICARIQFVIMLLLFWANNPIKDWRPDHAQLIWIEALRYLTHLSSCFSS

SEQ ID NO: 157311 - protein, 52 aa, Oryza sativa
  unsure (1)..(52): unsure at all Xaa locations
  Clone ID: PAT_MRT4530_56895C.1.pep
MAKEPMRVLXTGAAGQIGYALVPMIXRGVMLGADQPXVIXHMXDIXPATESX

SEQ ID NO: 157312 - protein, 131 aa, Oryza sativa
  unsure (1)..(131): unsure at all Xaa locations
  Clone ID: PAT_MRT4530_56896C.1.pep
SRLCRWSPPPPPRNGWPPPPPPLYTXPHGSARAPPPPNHPSVSSAVSPARTPPPPSAAAAATAAHRPPMYCPPAAAAASTATAPSTLWSHPASATXSPPPAALPPPAPPTAPPXPAPAAPSSPPPRHRSAG

SEQ ID NO: 157313 - protein, 134 aa, Oryza sativa
  unsure (1)..(134): unsure at all Xaa locations
  Clone ID: PAT_MRT4530_56897C.1.pep
SAEERTKAERALEGVAPVVNIRRSDRWWRAFLPEGADRNHPAAHVTGDAGPEPELQEAFPPAMVVVGGLDPLQDWDRRYAGMLRRKGKXVRVVEFPEAIHAFYFFPEFAGDIRKLVGEIRAFVEDSIMSKQSIA

SEQ ID NO: 157314 - protein, 50 aa, Oryza sativa
  Clone ID: PAT_MRT4530_56898C.1.pep
MATASFDICAKVGLGISTGYSQRNQYSAMANAVAADKRAMYSISFLQAVS

SEQ ID NO: 157315 - protein, 107 aa, Oryza sativa
  unsure (1)..(107): unsure at all Xaa locations
  Clone ID: PAT_MRT4530_56899C.1.pep
MQLNPKARTRRNKTKAKRTLSICGNHLEAPQSNPTSHIKLYCXDRLHRLTXSDSDSADLIVADLDSSRSLLCFRXDLHLRLRFNLIFFPNADITKFACLVCFFFLLF

SEQ ID NO: 157316 - protein, 55 aa, Oryza sativa
  Clone ID: PAT_MRT4530_5689C.1.pep
LDALPMNHSLRFGLYLGPLLQGQCAGCQPMHHELWSPWFRQATQSLLVFRNFSRL

SEQ ID NO: 157317 - protein, 645 aa, Oryza sativa
  unsure (1)..(645): unsure at all Xaa locations
  Clone ID: PAT_MRT4530_568C.1.pep
MRTARRWRGRWVWTRRSGGAPAVRSNYHPESPPLPPIVPREKVSKRAMAASPPNRERRLAAAEPEPPPPDGLGALPVEVLDNILGRLHIYEVVRTSSLSRAWRRRWESLSXLDLTRSPGVAASDVDAVLLRRSAAAPVRAFRLVARDPSWFVDALHDWLLHLSRNGVQALELWFPTYNFQLHSCLFSCRELACLDLDSCRLPPARMGFEGFPNLKKLRLHEVTLPEHMGNMLAALISASPLLEEVELVSVFLVGDYPDEEWVIRAPNLRKLIMVAAFPYGGRVEELPRLEQGILCGPNYAKFLTGMAHVTKLEFMCHYMLSTEVDVLEQLPFLFENLRSLVISVNFCKMSHILFMFCLLRSAPVLEELDVVVMLNDHLQIHYAITCFKGQSNDAQDIDANDEFLNAQPTYDMFAKLRVVRMKKVACLCNEMHFMEFVLNKARVLRVLSVYPSSGVTCSNEQAFITEHPRVSPDAQVIFMNRESANNGYMDTPSVNYKLETTRTGNWIDLAHPCKINRLDLDAVDQHKHIEEMLLIRQKLLKERKEMAQALHEDKKLLLNYFAAVKKYFTSNLKYLSEQLNISIPPFPEPSSVSSSSHPTSPRLAEALTDPASRSADNVQADSRADQVAIGASSARANSPKPEDNV

SEQ ID NO: 157318 - protein, 164 aa, Oryza sativa
  Clone ID: PAT_MRT4530_56900C.1.pep
HEVTRHGTEASASDSTTTTTAEHEEGEGLGRAAAGVGDRGESRRVADPSRLVPRRRGGTEGPHAWCDGSTSPAAFLLAAAAICGQFATGLAGDTQTSKDDKKAQSKGHTGRTVLIVLLGIGAVVLLSFFLFKYWQKKKREEQHARLLKLFEEDDDIEVELGLRD

SEQ ID NO: 157319 - protein, 39 aa, Oryza sativa
  Clone ID: PAT_MRT4530_56901C.1.pep
GMRTKLSNSFWSPCFLFHFIPIDSNKQFKHHNQSVLNSW

SEQ ID NO: 157320 - protein, 89 aa, Oryza sativa
  unsure (1)..(89): unsure at all Xaa locations
  Clone ID: PAT_MRT4530_56902C.1.pep
FGMNIFDLIAWRKANATALYHYWQEQNADLLLWRTGTLPAGLLTFYGLMEPLDRRWHVLGLGYDVDIDDRLIESAAVVHXNGNMKPWLK

SEQ ID NO: 157321 - protein, 166 aa, Oryza sativa
  Clone ID: PAT_MRT4530_56903C.1.pep
FFFFFFWQAAMQGWVLAQPNQFHAPSILAHSQVRGAPIHQPVSHHGVTQHPFHHAHQPFNHHGHHTALWCTHPRSAVSCRGSGSIRGRRASTINQAPPFFCYSTFHPHQLTPMVSHPAPITEPALPILSPHLFKHFLWVISSITDSLHQVHSSISHLWLLCTLCVA

SEQ ID NO: 157322 - protein, 480 aa, Oryza sativa
  Clone ID: PAT_MRT4530_56904C.1.pep
MSDYNNNSNKSTSTAVNYTVWIDYDGIGHKISAYMANDGQLKPSKAIFAGHLTMSNRVPNKAYIGFFASGSDGETYGLLSWNITVDRVPDSGIAASKSKNKPFETGFTTVIVVFSFFSVSLIVILVFQSKKNSDAKQLLDEVLSQLARKLKYSEIRNATGNFTDARRLGRGSFGVVYMGTLTTQRNGRTQEQRQQQVAVKKFDRDENQQRRFTDFLVEIQVIIRLKHNNIVQLIGWCLEKRALLLVYEYKHNGSLDNHLFGNHSRQQQVLPWPTRYSIVRDVAAGLHYIHHELEDIKSSNILLDQEFRACLGDFGLARVISGGRSSASMELAGTRGFIAPEYAQNRVATRRTDVYAFGALVLEIVTGRKALDHSRPSDSVLIANWVRDEFHNNGKLLEAVDGSLTTEEGLQYDADDAERLLLLGLSCTSHSASDRPSMEMVVQIVAKPVPRPVVVVPRVEPAFVGSSSAEIDDASSLGRR

SEQ ID NO: 157323 - protein, 1063 aa, Oryza sativa
  Clone ID: PAT_MRT4530_56905C.1.pep
MAKAPGPVYLLFLLLALPCCLIPHRGAAQPAANEARLLLQIKRAWGDPAVLAGWNDTAAPAAHCSWPYVTCDTAGRVTNLSLANTNVSGPVSDAVGGLSSLVHLDLYNNNINGTFPTSVYRCVSLRYLNLSQNYLGGELPADIGVGLGENLTTLVLSGNYFTGTIPKSLSRLQKLEWLMLDNNNLTGTIPGELGDLTSLTTLTISTNKLGPGQLPESFKNLTKLTTLWARKCQLVGDMPAYVADMPDLVTLDLAVNNLTGSIPPGIWSLKKLQCLFLFANKLTGDIVVADGAFAAVNLVFIDLSANPKLGGPIPQDFGLLQKLEVIHLYFNNFSGEIPASIGRLPALKEIHLFNNSLTGVLPPELGQKSPDLWDLEVDFNKFTGPIPEGLCDGGKLNIFTAANNLLNGSIPERLAGCTTLQTLFLPNNKLSGDVPEALWTATKLQFVQLQNNGLTGTLPSTMYSNLSSLTVENNQFRGSIPAAAAALQKFIAGNNNFSGEIPESLGNGMPVLQTLNLSGNQLSGGIPKSVSKLKVLTQLDLSKNQLSGEIPAELGAMPVLNALDLSSNRLSGGIPSSLASLNLNSLNLSSNQLSGQVPAKFAIGAYARSFLDNPTLCTSGLGSSYLAGVRSCNAGSPGSASSGGVSPGLRAGLLVAGAALLLVIVALAFFAVRDIRRRRKRVAQREDWKITPFQTDLGFSEAAILRGLTEENLVGRGGSGSVYRVAYTNRYTGGDGAVAVKKIRTGAAKVEEKLEREFESEARILGNVRHNNIVRLLCCVSGDEAKLLVYDYMDNGSLDGWLHGRRAINDGRPVVAAVARARSARGGAPALDWPTRLRVAVGAAQGLYYMHHECTPPIVHRDVKTSNILLDSEFRAKVADFGLARMLAQAGTPDTVSAVAGSFGYMAPECGYTRKVDEKVDVYSFGVVLLELTTGKAANDGGEHGSLADWARHHYQSGESIPDATDQCIRYAGYSDEIEVVFRLGVMCTGATPASRPTMKDVLQILVKCSEQTHQKCKAESGQEEYEVAPLLLPQRGSRRKQPAKAKGADDDADERSDFDSIV

SEQ ID NO: 157324 - protein, 494 aa, Oryza sativa
  Clone ID: PAT_MRT4530_56906C.1.pep
MKFCSKDRSGVEQPRHEVPYLSWISLVPPKRLVTPGTRSPSQLLILGAMATRRTETKTSIQQEQVTIFGATSLAETNNLIQKEKTRHKLSIKGRGAQLGKNKNRKGWAIRSSARKDANVRKENADDTNKLLEFFSECMLQNPKFYWDAQLDEDGVLKNLFWSHASSQAEFADFGDAATFDTTYKTNKYEMPLAMFVDQDPAMAIMVGRMLDVIIDRKEKEAAETSASSLVADVDAGFFTCECKQWEHTGMFCTHLHLAFVHVQLEKIPVAYILKRYTKKAKSDMPFDRRDRDSTSPDGVEENYRSNMMIIEAFGVVKAACKSKVAYDIAMAVLKGLRSQSRTYQVTLQSPKSHTKGSMGVPDEEVTLGAKGKKLCTRECGWCHLRDGHYANTCPKNPVNFDKIRKVANRERGKRGRPRGSGRGRGCGVTTCGAARGNGARITRRNGGSDHTLRRCLEDEWESMGNDARNDELDKTDGDDVDPDETFGWEKNELY

SEQ ID NO: 157325 - protein, 133 aa, Oryza sativa
  unsure (1)..(133): unsure at all Xaa locations
  Clone ID: PAT_MRT4530_56907C.1.pep
ANSSSVPALLKALHPHWSHAALKSAIVTXDEYDTPILAEALPRKVADPFDYGGGNINPIGAADPGLIYDIDPKDYNKFFAYLRHPINVRRAVTNVGEVDAGGYTFGSLTWYNEHHTARIPIAVRITIQDFYAD

SEQ ID NO: 157326 - protein, 55 aa, Oryza sativa
  Clone ID: PAT_MRT4530_56908C.1.pep
TEGIRPSRWRHCRIHRPRAPLSVPAIVITPPRAEGAGSASPSSPPLPAALALLPS

SEQ ID NO: 157327 - protein, 63 aa, Oryza sativa
  Clone ID: PAT_MRT4530_56909C.1.pep
PGAFGELKVRQFENAPLPLFPVAGFFVHAVIRGEGPLGDSGGPLAAPGNNTAWAVPPNFVPHN

SEQ ID NO: 157328 - protein, 69 aa, Oryza sativa
  Clone ID: PAT_MRT4530_5690C.1.pep
VVSCGGCVVLLVACYSLRPVVSGFLSFAGVFASTTFGLLSSFALAHGVSEASPSLVFRALYRFVSLPPA

SEQ ID NO: 157329 - protein, 43 aa, Oryza sativa
  Clone ID: PAT_MRT4530_56910C.1.pep
KQVCFKRHHTFGHGNLATVTSRGALKPTYFFFSFSFQAGFSEH

SEQ ID NO: 157330 - protein, 70 aa, Oryza sativa
  unsure (1)..(70): unsure at all Xaa locations
  Clone ID: PAT_MRT4530_56911C.1.pep
MRGSDPICPRAVDMDGSIDIYTLSCDVXQLDGMQAELDLMNDDIHRLLWMLTHVTTSYHALEMHARDAHA

SEQ ID NO: 157331 - protein, 102 aa, Oryza sativa
  Clone ID: PAT_MRT4530_56912C.1.pep
MGPCPAFKNRHRGAKTVSFPFLSGKKNQAVKVCVFVKLGRKMNRIIMPPRQPKKKAFFLKKKKITHVLRPGGKIKKKKKKKKKKKKKKKKKKKKKKKKPPPN

SEQ ID NO: 157332 - protein, 63 aa, Oryza sativa
  Clone ID: PAT_MRT4530_56913C.1.pep
LHQQNNKKMVGPLWDPHFNQLPTLLHHLRHALQVPLHALAQPPPPPSPTCAPASPAMSPTASP

SEQ ID NO: 157333 - protein, 71 aa, Oryza sativa
  unsure (1)..(71): unsure at all Xaa locations
  Clone ID: PAT_MRT4530_56914C.1.pep
DDHGVVRXDVLLEAQHTSCSSLXYPYVAAEADSHVSDAISSRAGSMPQASMCPHRCQGQQRMIDFALLSDS

SEQ ID NO: 157334 - protein, 346 aa, Oryza sativa
  Clone ID: PAT_MRT4530_56915C.1.pep
VNSIQRVNCSLKKKTKKKKKQKKKKTFINKGVESFDVDNCLEEMLREQRTLVTKEKIMRDLPGWLQIRRLLCTYCKPKYTRLSAVLELMKLKTSNGWTDTSFTKLLDMLSDMLPEGNMLAKSTYEAKKPTLGNLSGQSNRGADACSECLEDTHSLWLKSSRKTVYMGHCRFLPQYHPYRNMMEAFNGQREIGVKPRHFTGRQLIKTPSDYSSCGHNWVLMDDLKLKGLEPVVKDGPYAVDMLEQATPCILKVEVIPSFAVEAAKWKAYPPLNTETIHHAQVRDGYARVSVDREARGSFVQWPKKHIIIEIVPHPSDKAPKVPALPSCPPIAARDDLSWDLGIDLDK

SEQ ID NO: 157335 - protein, 31 aa, Oryza sativa
  Clone ID: PAT_MRT4530_56916C.1.pep
MDPYLGDAIAGLTLEEARGLVDHLQERLGVS

SEQ ID NO: 157336 - protein, 53 aa, Oryza sativa
  Clone ID: PAT_MRT4530_56917C.1.pep
DSLACSELREILRSRFNLRRPLHKQWKLYSPALMNLQEPMAVAELLGMLMIIL

SEQ ID NO: 157337 - protein, 147 aa, Oryza sativa
  Clone ID: PAT_MRT4530_56918C.1.pep
FFFFFFQRRNGYLFNYLLANRNVVLACWVETCWRVNAANKENKRGVIVVVVLQKSNANTHRSQLPMLQLLGLEESPTCLYSFGGRWVLLYASCPMGPGSATTATAAPCVTTGDAVDEDVEDADDARNDGLDHGADGVDNATKAVADA

SEQ ID NO: 157338 - protein, 42 aa, Oryza sativa
  Clone ID: PAT_MRT4530_56919C.1.pep
MGGGQRPAGNQEFPRVHYRVARTIDASTLTTLRDLAPTKLAA

SEQ ID NO: 157339 - protein, 283 aa, Oryza sativa
  unsure (1)..(283): unsure at all Xaa locations
  Clone ID: PAT_MRT4530_5691C.1.pep
TRVTVTWDNSWPGRAGGFMDPSRDXDVCVQDDRKYAFEPLFILAEPGSVDYSSGMESSKSGVDASGSGIYSSRPGXGGSGRGASASALLEGSDNDNAASLHCCYGWTEDWRWLVCIWTDSKGELLDSLIFPFGGISSRQDTKVLQSLFIQILQHGCQIMSSAPESSNTRPRDVIITRIGGFLELEIQEWQKAIYSFGGHEVKKWPVQLRRSIPEGIPSNSNGPALQQQDMGLMQDRNMPAGPRPKSRGPAHPRHEKGALGPCGKPTRRLVEPGGMDSSKGSLH

SEQ ID NO: 157340 - protein, 85 aa, Oryza sativa
  Clone ID: PAT_MRT4530_56920C.1.pep
SVYFSATHDGQCFFLFTCTNEREKKSEKINQVIHLLNLMSSHECYRTSHGDEHKPWGPLPKPKAVSSHCFILTLHFCLDSGRCMP

SEQ ID NO: 157341 - protein, 284 aa, Oryza sativa
  Clone ID: PAT_MRT4530_56921C.1.pep
MTHQILVLIQDELGCLGLAGGNNFEGQISPDICNLQFLRIIDFSHNKLSGSVLACIGSILFNNVEDGDDRIFLNRFRLADIEMHDSDLSTTYYDLGFAFSTKWYQYAYGFNFVTMMSGIDLSANMLDGEIPWQLGNLSHIKSLNLSYNFFTGQIPATFANMKEIESLDLSHNNLSGPIPWQLTQLSTLGAFSVAYNNLSGCIPNYGQLASFSMERYVGNNNLYNTSQGSRCSPSGHVSKEEDVEERYDDPVLYIVSAASFVLAFCATVAFSFCHSYGRSVILKM

SEQ ID NO: 157342 - protein, 107 aa, Oryza sativa
  unsure (1)..(107): unsure at all Xaa locations
  Clone ID: PAT_MRT4530_56922C.1.pep
RNPTGAVRTSNTNHPSPSPPPYNRKPPTPPPTRDRVSPAPRLPSXSPRRAPPRAPRAVRPPPPPSSPPPSXPPPWRLRRQRSVPGRRRXPPSPPASASASAVTTRQE

SEQ ID NO: 157343 - protein, 842 aa, Oryza sativa
  unsure (1)..(842): unsure at all Xaa locations
  Clone ID: PAT_MRT4530_56923C.1.pep
SSCAVHSNGQCCEFISKAFHEYFMAMGIKAEHSICHVHTQNGLAEALIKRIKFITKPLLQGCKLPSTCWGHAALHVVILINFRXSPYTIHSKMKLVQGVTPKLSHLFKFGCLVYIPILPPQRTSNGVHXGKIGIYVGYETAYITKYLEPMTGDTHTVHLADCIFDEDHFPFLWGGNQPLDXENLEITWPDMGIHAHDPRTNEANGEVLKIIDLQSLVNQLPNHFCNLNSVTKSHVHARNAPERXEIPKEIGNPHPVWRPQNKRTRTPVSRSSSIKKPTERVVSDNVCAHIEPSKLKELSPVTENNRKQVEASEEVAHEEMAINTSGESFDRATANVDIYFAKKIASVVNLDCEPISLTECKKRFIYGHKWLFVRKKXQNNELVRYKAMLVAQGFTQRPTVDYKETYSPVMSRITFRCVISMVVNLNLEMKFMDVVITYLYGXLDTDIHMKVLGDFHVPNQDRASRNLYSVQLKKSLYILKQSGRLWYNRLSYFLSKKGYNNNEDCPYVFIRRSXDGICIIFVYVDDLNIIGTLKDIEEASSYLKSEFEMKYLGKTKYCLSLXLEHTPEGVLVHQSIYTQKVLEXFGFEKTYPSKTPMVGRSLQVDQDPYRPREEGKEVLGLEYPYLSAIGVLMYLANCTRPDIAFVVNLHARYNTEPTKRHWKGIKDILHYLQESKDMKLFYRKNQDLTLVGYADAGYLSNPHTAKLQTSYVFLYGGTKISXKSSKQNLVATSMNHLKIIALYETSHEYAWFRRMIHHIXQSCELNTIQTPIIIYEDNAACVAQGQMGYVKSNLTKHIXPSFFYAHELHKTNEIKVXAYKSCENIVDLFTKSLPTSPFERCI

SEQ ID NO: 157344 - protein, 1321 aa, Oryza sativa
  Clone ID: PAT_MRT4530_56924C.1.pep
MAVIEYVVAELRDEAAGAGAHVAALAALCDVLAVAADHLFDALPIAEFVARLPRLLASGEGDVPLFAARAIAEVCEGVRPWATSFARYGAIEALRDKLLAIDCIELAEECLRALGVISMECPKECLSHGVPAAVLQFFDFFSMHKQKLVLKIVANVLGDFSAKDAAKAMEAAPVLCNLLQSTDKTILDSAVSCLVLVSDGACDSAQHMEKLYELNAVQATMRLMENDGWKSLSDETLSGILGLLKDLASLSARAVKSLFELNICDLLKQMITYYTSSHSDHNKVQTLVELIYYLMPPLEMCDHRTELIIAKKNVITEQSGYIQQLASILTFIIQVAKSAALSSICYSCVVVIRNIVELSTPSSLVEVQKTVNLSSLLAGWLARKNRHIIFQTLNVSKTLLRKDQKFFFETFIREGLKHAIDAILTQEKGKSRLPESCLCFDLDLETSTDDACRINNGAILKLAEEIKKNFLVKVAKSPHKFGCAFKSIKEFFSRLNCHATAPPAKDQDLCKQLSDFSRQLLSDELPSTSTFEFVQSGSIKHLAGYLSNGTYFNSNLRNCQDLIGELKEVKIRLQKFTHLALSVDNESSVKPLEILVEKLIDALHVWYDSFPVILADEQCTRESTMIPLRDSGTEEPMSLYIKFSRSAREEELEDYGGVLPVDLSSTPESIEEVLLPEICKRTGNETSYKENTQEANGSRKSVGLRNGDGHKFSRLKFSYKGTQLQSSTPLFESILRSMHEGETDLQIDPSFWDKEHKIVYRRRNKSKKISSHSSYNIQLCRVHEKLEMSLLKDPFFSTILTGKLPGDLDESDPSYNFLFMLKVLEGLNRFSYHLSMDDKLCKFAEGCLQEFDDLKVAICPIPRDQFVSSLLTNKLEQQMQDSLFGDGLIPSWCIYLVETCPFLLSFEARWKYFCLTAHHSFMTDEASSSTETKKYSVTRSKILEDASSMLNKHGSDTKFIEVEFDGEVGTGRGPTFEFYTTVSHELQRVGLGMWRGDDTSQECEAGFVHAPFGLFPQPWSSANTSSQGISLSNVVQKFKLLGHLVARAVLDGRVLDIPLSKAFYKIMLEQDLDIYDIPSFDPKLGKTVMEFQALVKRKKFLEERASNPAADLSYKNVRLEDLCLDFTLPGNPEYELVPGGSEKMVTLDNLEEYVSSIVDATLKSGISNQIEAFKAGINKVFALKTLRLFSEDEMERILCGEQDSWASNKLEDHINFDYGYDANSASVISFLEILREFGREDQRAFLHFTTGAPQLPLGGLASLDPKLTVVRKQCDGKVDNELPSVNTCRHFFKLPPYSSKEIMRQKLKYAIKEGLGSFQLS

SEQ ID NO: 157345 - protein, 120 aa, Oryza sativa
  Clone ID: PAT_MRT4530_56925C.1.pep
MVGRSLQVDQDPYRPREEGKEVIGLEYPYLSAIGVLMYLANCTRPDIAFVVNLHARYNTEPTKRHWKGIKDILHYLQESKDMKLFYRKNQDLTLDQGCECRRKENISKPTLAVCGHAKNE

SEQ ID NO: 157346 - protein, 106 aa, Oryza sativa
  unsure (1)..(106): unsure at all Xaa locations
  Clone ID: PAT_MRT4530_56926C.1.pep
MAINTSGESFDRATANVDIYFAKKIASVVNLDCEPISLTECKKRSDWDEWKKAITIELISLNKREVFDPVSRIPPXYGHKWLFVRKKXQNNELVRYKENLKKGIYD

SEQ ID NO: 157347 - protein, 283 aa, Oryza sativa
  Clone ID: PAT_MRT4530_56927C.1.pep
MANANMVWAELPKECLAGILRYLPCLPDKAMCSGVCTQGRSVASAHLTPMQPWLFMPFATVISFFCVTCERTHHHQSPRLPDNARSARFCGTFLECWVADAEIPYDEPLPWNRFPALLNLRTGERVLLPRHLRTNNPGSTAINRIQTFVLSDSPSQTYRYWVAAIVSGKPNLMFWSNNMNEWAPPMLKWDSGFKIWQKMLPKDPIEDVKYFYGGPLGGGFYVLNNKEDLLVYTPKADDEHGELTMSSVKKFEVRRNPRSTMPGPGEVLGRYLVESQGDLAMVV

SEQ ID NO: 157348 - protein, 66 aa, Oryza sativa
  Clone ID: PAT_MRT4530_56928C.1.pep
MVKVEMAGERRKVANGGTNGGGRHAMGRRRGHGDGAAAAVTVVTRLLPAADFHRYLRLRQIRSLTH

SEQ ID NO: 157349 - protein, 244 aa, Oryza sativa
  Clone ID: PAT_MRT4530_56929C.1.pep
MGRGKVVLQRIENKISRQVTFAKRRNGLLKKAYELSILCDAEVALVLFSHAGRLYQFSSSSNMLKTLERYQRYIYASQDAAAPTSDEMQKINHQNNYQEYVNLKAHVEILQQSQRNLLGEDLAPLATNELEQLESQVVRTLKQIRSRKTQVLLDELCDLKRKEQMLQDANRVLKRKLDEIDVEAAPPQPPWNGNCSNGHGGGGGVFSSEPPQPEHFFQALGLHAVDVNQPPAPPPGGYPPEWMA

SEQ ID NO: 157350 - protein, 117 aa, Oryza sativa
  unsure (1)..(117): unsure at all Xaa locations
  Clone ID: PAT_MRT4530_5692C.1.pep
AAYYTTTLSSCKXGTKXRTXLTLHSXTNPXXYXKPHXRXXFHLXXXXKXCXXQMHIDXSXXVAXRLKHNXGXEFGXFHXNPIXGLXXYVXNXADXSXXGFAGLXXXXXXIXXXXKXL

SEQ ID NO: 157351 - protein, 495 aa, Oryza sativa
  unsure (1)..(495): unsure at all Xaa locations
  Clone ID: PAT_MRT4530_56930C.1.pep
MAKKKNPIVFMDVSIGDEPDERMVFELFADVAPRTAENFRALCTGEMGIGQTSKKPLYYKGSLFHRVIKGFMAQGGDFSNGDGSGGESIYGGTFEDENFVLRHDERGLLSMANAGPNTNGSQFFITFKHNSRLDRKSTVFGKLILGNDVLKRIEYVDVHGAGSTPVVPVRIVDCGELVDGKCLGSITVENDKKRSVKSKLSKDESSDEENNEGKRKRHHKKSSRRRRKKKRYSSSESESSSESESELSDSDSESDTCSSDSSDLSSSSDDRRRRRKRHSKKDKHKRGKRKRDRRRERKRRKRDRKSKQKSKRMLESDSETGNVSDSSLEDDKSKRHHRGRKSKASSQVSGENHTALAALKDAASTQQKSATPRSLAXRRQISKGEWRYPYKWSRSPVKARTRSISRSSARSLQRRSRSRSLERSPVRKSVSRSPPTMDKGRSISRTSGRLPLRRSISRSPDRPYRRIPSRSPRKNTRRSISRSPVRLSKRSISPV

SEQ ID NO: 157352 - protein, 130 aa, Oryza sativa
  Clone ID: PAT_MRT4530_56931C.1.pep
MMNRRRQRPTSPAPPLDNDDLLSEILLRLPPQPSSLPRASLVCKRWRRLVSDHGFLRRFRARHHFSLDLWKNKTNCDDATGWVLERTIQLDKLLSVEPGPRITSPCLGFVEEHNMLFVSTRIGAFLVHLE

SEQ ID NO: 157353 - protein, 52 aa, Oryza sativa
  unsure (1)..(52): unsure at all Xaa locations
  Clone ID: PAT_MRT4530_56932C.1.pep
FFFFFFFFFFFFFFFFFWXHXTLFNNIVGELQDTGLLKGSCDQHTWDPLISE

SEQ ID NO: 157354 - protein, 124 aa, Oryza sativa
  Clone ID: PAT_MRT4530_56933C.1.pep
MGSTGEPDRKRRLSSSVAPGGGAPVSPAKRLAVAPTSEDKKLDFTVLKYKNQKLSEQLEAHKFEYRALENKFAGLKEKQRTHNETLSLVNSSWEQLVADLKSRSFCKSGSPNSSPGSGHNNVQK

SEQ ID NO: 157355 - protein, 283 aa, Oryza sativa
  Clone ID: PAT_MRT4530_56934C.1.pep
MEQERREAKSRTSALPGQRRLRRRVQGEDYLPKEDDFAMASSPLRGPRKPFRPIKPRGYRAGDRQTAHQGPMSPYNIMYPCKCPFRKVVILTTTVLPSVTLLPRILFIHPTTVMFHMNRTSPQLIVFPEDGLFVSLLTESGNTKDDLGLPTETISWGRSRLDLVKARKEEEIYALKDIGTKVHVANILITGKYAEDLYVISANNKLRWREDHGNDEEDGGNRRGFLGDLLHPLSRWERRRPASSEQPAAMAVARLWAERLRTEAGLAMPLDAEETMDLASTSL

SEQ ID NO: 157356 - protein, 174 aa, Oryza sativa
  unsure (1)..(174): unsure at all Xaa locations
  Clone ID: PAT_MRT4530_56935C.1.pep
GYIVIKNRPCKVVEVSTSKTSKHGHAKCHFVAKDIVPSSHNCDVPHXRTNYQLIDISEDGLFVSLLTESGNTKDDLGLPTYDNLLGQIKTGFGEGKDVVVTVMSAMGRSRSDFTDKGLIPVFEDRTSPTKEIEISILLMALRVDRVHVANILITAKYAEDLYVISANNSAPMKD

SEQ ID NO: 157357 - protein, 100 aa, Oryza sativa
  unsure (1)..(100): unsure at all Xaa locations
  Clone ID: PAT_MRT4530_56937C.1.pep
FFFFFFFFFXXFXLXXLAPXFXLXKKKKKKKKKKKKKKKKPWRGCCXXCTGRSSTTXTGSDADRQPVXQRVAVXFAXGALXRXXRRRAGXFRRFRFAEVP

SEQ ID NO: 157358 - protein, 247 aa, Oryza sativa
  unsure (1)..(247): unsure at all Xaa locations
  Clone ID: PAT_MRT4530_56938C.1.pep
RPPRERHPYIPLLPRTPVTTSTLTRPNPRRAAPVKGAHPPSPPHPRSDRAPHLRDPARPPTLTPPPLARYIXPLRPPLPPAKIKPPLVQAHHEAHAAKHPTKTPPHPAPTPLTHPPPPDKPPPPPTKLTXNTPQQRPPPTPVPPHQDATAHTPPAAATTPPASREKQNPHDVIVAPRRENTPHTTTHRTGHTRPTTRPKTAPAPPPPTRTPRAGRTAEAHAFPATAPHGAGQVADGRLGRARRQRAA

SEQ ID NO: 157359 - protein, 332 aa, Oryza sativa
  Clone ID: PAT_MRT4530_56939C.1.pep
MLRAAKYLLGSPGANGFGSKSTAEDVCPDLGCITAIITGATSGIGAETARVLAKRGARVVIPARNVKAAEDMRARIRGECPGADVLVLPLDLSSLASVRAFADRFLSLGLPLHLLINNAGKFSHGQLALSEDGVEMTFATNYLGHFLLTKLLLGRMAETAAATGVQGRIVNVSSSVHSWFAGDWAEYLDLVTRRKIAYDATQAYAVSKLANVLHTKELAVRLKEMGANVTVNCVHPGIVRTRLNRDRDGLVTDLVFLLLSKLLKTIPQAAATTCYVAAHPRLAGVSGRYFADCNEALPSPAATNRHEAERLWQISESMLLCTNRHSKDASAP

SEQ ID NO: 157360 - protein, 62 aa, Oryza sativa
  Clone ID: PAT_MRT4530_5693C.1.pep
MATGGRWCTVPTATNEGVVMRVGRTAVARRVEAASSLATPIAGSTAAANDIDEGWIARCGGS

SEQ ID NO: 157361 - protein, 78 aa, Oryza sativa
  Clone ID: PAT_MRT4530_56940C.1.pep
VYELSYKLPRDNSTFGGAGNSGWRFPGGGGGNVSGGYDNNGVNSGYYDISAASPDSAGPCRWSQAAVAGAMAVLVVAA

SEQ ID NO: 157362 - protein, 143 aa, Oryza sativa
  unsure (1)..(143): unsure at all Xaa locations
  Clone ID: PAT_MRT4530_56941C.1.pep
NNSVRVTYVTPRNSRIEFQAECALKSPSRTGRGILDGTNEAFSSEKPPSDAYSNSXGWGKIEQDXVLPTVLSKSYRNGGMMQDITKGXLESQGGGGADMRAPLVGGSQLRAAMERLTGARRTAASDGGIRRRRGGRGGSRPRE

SEQ ID NO: 157363 - protein, 43 aa, Oryza sativa
  unsure (1)..(43): unsure at all Xaa locations
  Clone ID: PAT_MRT4530_56942C.1.pep
FLFFFLLXIILIYSYPQPMTIPNIYYKTHTXXCDTLFITTIYI

SEQ ID NO: 157364 - protein, 98 aa, Oryza sativa
  Clone ID: PAT_MRT4530_56943C.1.pep
MAVGGQWHRRLPLAEEDMAAASGRVLAAWWRRVTAQRRSAKAVSVAATTAAVIVEAVVMSAAGMELGMSGCGGGDRVCGHQRRDGLGRLAEGVGDGDI

SEQ ID NO: 157365 - protein, 110 aa, Oryza sativa
  Clone ID: PAT_MRT4530_56944C.1.pep
MDILEMLGFMLPQARRRQHGLALPSATPLTRLDLEAVPLTRLDPAVGGGDAAGSGGGLESWSRRRWAQEWRRRAQERWRSGGEGTAGSGSGRRACLEGGDGDSADKEGGS

SEQ ID NO: 157366 - protein, 134 aa, Oryza sativa
  unsure (1)..(134): unsure at all Xaa locations
  Clone ID: PAT_MRT4530_56945C.1.pep
LADAAVIAALASTGNGSWWAVASSAAVGGGGHGGGVGAGAGCVVAEGDGATAVCEGGVGGSDDGGRDCGGGGDVGGGDGVGDEEXDGDSEVAGCSATAAVVVVTVSAVIRGVTVSDGXPRAWEMATSDRCGIFW

SEQ ID NO: 157367 - protein, 42 aa, Oryza sativa
  Clone ID: PAT_MRT4530_56946C.1.pep
MDGLSDSHAGHVTETERRAVRFLTYGCYHYIMRRPSKGVNNT

SEQ ID NO: 157368 - protein, 63 aa, Oryza sativa
  Clone ID: PAT_MRT4530_56947C.1.pep
LRRQRTHDVARHLLVVCLLQLHANHPRTDLCICLLQTRELHRMKGLLLDRGVRLSGSSVGRDH

SEQ ID NO: 157369 - protein, 138 aa, Oryza sativa
  Clone ID: PAT_MRT4530_56948C.1.pep
LTRTEYWYYEDLTGQWVEQDHHEADRRDDRGKYNHGSGGVNVNHNEQRVSQNLRPGKNTTIPTETNILQNVCGGSTIPKLLHHARGEHSTTPASTSEYVHDTHDEDLHQAHADHDMRYYSVPSTARFIQRALTQHHAH

SEQ ID NO: 157370 - protein, 111 aa, Oryza sativa
  Clone ID: PAT_MRT4530_56949C.1.pep
MAEKTAADGELYYSNGRRSKDVLRMGVAVAERQLSDNDLLDELLSTANAASCDLVVQASATALPSSPASAPAHRRRQPKLGRAALAFLPPRATGRREEGERERRERRKKDD

SEQ ID NO: 157371 - protein, 498 aa, Oryza sativa
  Clone ID: PAT_MRT4530_5694C.1.pep
MEAKYIPLQCHTSRSQWRSRWLYLELKELDPILVVPEVQPERSEDWTSKPPLTPSLQAFVNAVNLSVDIVTQRVKEVLITAASTVDEPPVPLCDKSAAEKVATINDTGSLAPPKRRTLKLPAGKKASAISVQSGREEVTSGSPAAIIPRVEVAPVVAKSAGSATAPVTAPPPKIATWSDMVAECHRLLENSSRAVVAQMDRVVARATAADGRVAQLEAQLESSIPAHPDETSLTSALSELAGEMDAIPPRHIAHAAEEISNGIHMGACHVLFCVKLALHGVDLKEILLKGVANATGEDMMSNPEDIQQGGCPDVAMIDLPSSSDMPAPDIVKDGEVGTTSGPPSTDYITFFVFSALSRTLVHDIIPHTGDHYLVLLSADPWCQRDVKTIWETLDLAKEPDLETLVTSTVPLPCRQVTTSTELSQLSRWGVVGSSRGHWTWQVWGRSSHHHSRQRQDPVIASGLAHWKLELIEPSKLLVYSPHDQENQENTRKTTQSKG

SEQ ID NO: 157372 - protein, 72 aa, Oryza sativa
  unsure (1)..(72): unsure at all Xaa locations
  Clone ID: PAT_MRT4530_56950C.1.pep
VYCPCYGCALRRYYTLGPTLRAQDCDTXRPTVEVGRVEPERAFAYLQDDMNGAERYVQGLCKWFIEHCRGDR

SEQ ID NO: 157373 - protein, 66 aa, Oryza sativa
  Clone ID: PAT_MRT4530_56951C.1.pep
DSIEFHLNCAYIMQLTKGVMEGSTQILWYFGFHKSNYMCQAKIHNALAYFSSSLASNMLKKSFNRY

SEQ ID NO: 157374 - protein, 148 aa, Oryza sativa
  Clone ID: PAT_MRT4530_56952C.1.pep
MAAVEVGNGVGRQGHRARRCNRGQGRDGRADVVLQSNHYAGHHAVINSAPSQPGVDAPPLPSPSRSRSMTRCEPLSVLMPLPVPREKSKAKAKTKTKAKAKIAPRKNTNDSAATAPLAQVKQKGNSIPVSPDSPAMSTRSKRKSLNFN

SEQ ID NO: 157375 - protein, 55 aa, Oryza sativa
  Clone ID: PAT_MRT4530_56953C.1.pep
MVVSNVGSLVTVIESLWGAAMWKMAVRGAKAGAQLLGVQEGANTPLSDPPPCYTD

SEQ ID NO: 157376 - protein, 54 aa, Oryza sativa
  unsure (1)..(54): unsure at all Xaa locations
  Clone ID: PAT_MRT4530_56954C.1.pep
TKRAFFSASEAPPCDTNLGEKLTNKRVDKISRKTNVNGDGQINFXKFVKVLMAK

SEQ ID NO: 157377 - protein, 217 aa, Oryza sativa
  Clone ID: PAT_MRT4530_56955C.1.pep
MGRPAQEGGPTRARGRGGERESRWAGSNPRGPGWDPLVGDSAHPSRLAVDRAREGRREAADRGLLDPVAAEVAPTWRLRGYHAGRREVDDDAGRNGQRTAVAIGGANHGDTCESEHTGGLHGTRGDEPTARIRRRELDGGGLRRRQPAAREGGNGDEVMRGRFPAVRASTRLRESVASVGLGGATPSEAGDERALRSTGDDGGEHTASGGNGRGGAS

SEQ ID NO: 157378 - protein, 86 aa, Oryza sativa
  unsure (1)..(86): unsure at all Xaa locations
  Clone ID: PAT_MRT4530_56956C.1.pep
TSFDLLNNLLTYDLENPVITDAAFQHEWFPVEVPXPKIQGLFMXQTFPALNELDRRTKRYLKSPDPLEEQRLKELQGNIGNRGLFG

SEQ ID NO: 157379 - protein, 66 aa, Oryza sativa
  Clone ID: PAT_MRT4530_56957C.1.pep
TKAGTTSFVLGKISKIRERVVTSTKSSVYGSIVKGNLESVVMDDSLNPANFTSPLDPQQVNCKKKM

SEQ ID NO: 157380 - protein, 285 aa, Oryza sativa
  Clone ID: PAT_MRT4530_56958C.1.pep
MSLGIMAPPKRSLSARAGNRTPGRGLRERGGSAELNGPAGPRRRPKARAGGEGRERAGGPGPSRVVLGGTRLSVTRLTVSEVHAGCARVWEGRCGACARFAEDAVRQAHAQPHGSRWTARARGRREAADRGLLDPVAAEVAPTWRLRGCHADRREVDDDAGRNRRRTTAASGGANHGDIGEGEHTGMSHRTRGDEPTARIRRGMLDGGGLRRRQPAVGEGGNSDEVMRGRFPAARASTRLRESVASVELGGATSSEAGDERVLRSTGGDGGEHTAGGGNGRGGAS

SEQ ID NO: 157381 - protein, 120 aa, Oryza sativa
  Clone ID: PAT_MRT4530_56959C.1.pep
MDGIFESDIIYGLLELYNLESYVENSDRKQHPSERYKGQVRKGLASRVYDRESFSINHPNSRYQLSSPFNQLTPKSGQNRTVMQMERSIKSLYVRKLNESHFCGTSCQQLISVMFQALLE

SEQ ID NO: 157382 - protein, 268 aa, Oryza sativa
  unsure (1)..(268): unsure at all Xaa locations
  Clone ID: PAT_MRT4530_5695C.1.pep
GGVHQHAAHAIQRAVLLEEQAAAVRGGDGGGGGGGAAGRRRRPRGVAADDAPEDVVGDRASDGGLLRRQRRGVGDLQAAAGEHQERAEQLPVHGQLPRHHRLRQRRRRGDDGAARSRAEQXPFSDAATRSSFRRIHDRYSSILRAIKRSHGKVARKLKEQLDTAAKGTYVLGRDLDTVSHLVARLSDGIERENAMARRCAERVAADNVGAAAAAGGRFFPVQEMANELRRSCSSSRKLAEELEEHVCLCLATIHRARLLVIKEISKQA

SEQ ID NO: 157383 - protein, 249 aa, Oryza sativa
  Clone ID: PAT_MRT4530_56960C.1.pep
MGRPAQEGGPRRSCGRGGERAGGPGPSRVVPGGTRLSATRLTMSEVHAGRARVWGGRRGACARFAEDAVRRAHAQPHGSPRTMRIGGKRRERLAGSANPVAAEVAPTWRLRGCHAARREVDNDSGRNGRRTTAASGGAIHGDTGEGEHTGMLHRTRADEPTARIRRRELDGGGLRRRQPAAREGGNGDEVTRGRFPAVSASTRLRESVASVGLGGATPSEAGDERALRSTGGDGGEHTASGGNGRGGAS

SEQ ID NO: 157384 - protein, 422 aa, Oryza sativa
  unsure (1)..(422): unsure at all Xaa locations
  Clone ID: PAT_MRT4530_56961C.1.pep
MAAAGDHRGAGAPPPAAAPAWPPSVAPCGCRVGPGRQPPAPSDAAVSGDPLFVEVEADASRLAVDRAHKGGGNGGCGWPGQLIRSRPRWRRRGSHAGRREVDDDVGRNGRRTAVAIGGPSHGDTGESEHTGGLPGTRGDEPTARIHRRELDGGGLRRQQPAAREGGNGDEVTRGRFPAVRASTRLRESVASVGLGGATPSEAGDERALRSTGGDGGEHTASGGNERREALPCGARTGSSGTRDGGGRRERQRDGNGAGEKRGRLGGEKEGRAPGFIGRQCRFGNRPWAKEGERAXGGALPPFLGSTRGERRGRVDNDDDDGGXAVWNGVATWAADXGQARQRLTAAATRRSATTARARXGSNGRRGDLGGVGGXRQRERRGRARRGSRAERGEREREREREIGREGEMGREEFGPSNLREAK

SEQ ID NO: 157385 - protein, 96 aa, Oryza sativa
  Clone ID: PAT_MRT4530_56962C.1.pep
SPKTSSKLQWVEDLLGAHTECLSTRWSCWTPSWMFVIPQVVLASSTDLLPSKDQTAAGPGGHCLLVWDTFDFTLSISVRDEIKLKVNGLAQSRVFP

SEQ ID NO: 157386 - protein, 932 aa, Oryza sativa
  Clone ID: PAT_MRT4530_56963C.1.pep
MPPKSPRRPRTRAPWWPTGQSPPPSAPAAPAPRLPPVSPLHSKPPRRHRRRHRLGPASPRACLQGTEAELPPSAASPSLPPPFPQSGKEASPLSSSLFPFSLPPPASFPSSLSPIWPLAGAPARWLDRQKSVPLSQTDIVAHINPTFPPFLSSPIRLHSIVAASRALFAVAVRRRACRRSRHERFKGGVFRFRSHLFLSLPRSAAAAPLPTRLASSLRRRRRRHGPAGSHPAARFEVRSKPQPSQVRIAPNFFHHHHPSGRHQRGDSDPRCEADRRRDGGRSRGGRELSNGYGHRRSPPPRSRLSARLGDREPGEVLSGSASDDSGGRPHRARENGVSSSSRDGESVVAASASSPSKKRKFSPIIWDRDSPKPMHSDVAKGKKAVDSVPTELPLPPPPPLPPQDHIPERLAVEKSPMDVEPAVASESPEQLQEHAESRVMEEEEEYSTMRNISTSRWAGANDDEEEGAPHRKKKSASPADSAELGQRKKALSPELGEVVASDISGGRTMSRSSDSGRLGADENEDLEVDKDDYMDVDRDDDGNSDIANHQSGMDSEYEVRRSETPEPVKPPHRCINMLQGCRSVDEFERLNKINEGTYGVVYRARDKKTGEIVALKKVKMEKEREGFPLTSLREINILLSFHHPSIVDVKEVVVGSSLDSIFMVMEYMEHDLKGVMEAMKQPYSQSEVKCLMLQLLEGVKYLHDNWVLHRDLKTSNLLLNNRGELKICDFGLSRQYGSPLKPYTQLVVTLWYRAPELLLGTKEYSTAIDMWSVGCIMAELLAKEPLFNGKTEFEQLDKIFRTLGTPNEKIWPGYAKLPGVKVNFVKQPYNRLRDKFPAASFSGRPILSEAGFDLLNNLLTYDPEKRLSADAALQHEWFREVPLPKSKDFMPTFPALNELDRRTKRYLKSPDPLEEQRLKELQGNIGNRGLFG

SEQ ID NO: 157387 - protein, 91 aa, Oryza sativa
  Clone ID: PAT_MRT4530_56964C.1.pep
GNWYPQYRSGIPGSTHASADAWRRVGSATTHPASGGGTGFSTPEAGDEPARKRREKKLAALKAKKAHVIGTFCCRNFLLDGLVVVLCYQSA

SEQ ID NO: 157388 - protein, 503 aa, Oryza sativa
  Clone ID: PAT_MRT4530_56965C.1.pep
MDEGGMNGAKRGTLEYAREDNHGEDENERVDNQGDVMDEDNVELTADGGGYDSGESDGLDQMLRDGETTYDNDRQYEKFETMVEDSKTPLYPGCKEQHTKLHVILSLLQMKASNGWSDKSFTELLQLIGDLLPAGHILPETTYQAKKRKYIMMPLLIQGPKQPGNDIDVYFRPLVDDLKLLWHRGFGEGRRGACARFAEDAVRRAHAQPHGSRWTARARGRREAVDRGLLDPVAAEVAPTRRLRGCHAGWREEDEWEQWPWQWRQWRGGARANGRGKERGGNLGLYGRQCRFGRGEPTLDGQASELALRLAAKSATGRRGMTPAEEEKERKRKEEMGLASLPLWGKGGGREGDAAEGGGALPPSLGGTRGERRGRVDDDGDDGGAVWSGAATRAADAGQARQALTAAATGRSATTARARGRRGDLGGIGGNSRESGEGELDAAHGQSGERERERERESRGGRGRWAERSSAHRTRGRLNRLLRRDLIWEGFGFGIELGNRSGI

SEQ ID NO: 157389 - protein, 466 aa, Oryza sativa
  unsure (1)..(466): unsure at all Xaa locations
  Clone ID: PAT_MRT4530_56966C.1.pep
MRAVRGGRGAAAHAQPHGSPRTMRTGGGGERRERLAGSADLVAAEVAPTWRLRGCHAGRLEEDEGVGRNGRRTAAASGGANHDDTGESKHTGRLHGTRGDESMARICRGMLDGGGLRRRQPAAREGGNGKGATGDRFGRARASMRLRGSVASVGLGGAMPSEAGDERVLRSTGGDGGEHTTSGGNGREGXPESPSASXRAPAPSAHVTAAVGDRRDRGDGNGXGGARANGRGKERGGKLGFIWATMSVWERGTDFGRSSQRVGAPASSQIGDREEENDAGGGRKRKRKEERGLAPCHFGKRRRGWGRRGRGRRSSASVPWRLARGVAGAGSMMTAMTAGRFGAERQHGRQARAGAAGVGGGGDWPVGHHDRSLGTCMMVRVLGAASDARDWVTSSTVGVTTAIRLPYRYRTQLLRSVTGGRPSLGYDASGSGRQQVVYRQSAKPLKFAPLIGGNTAHNLTICHEPV

SEQ ID NO: 157390 - protein, 128 aa, Oryza sativa
  Clone ID: PAT_MRT4530_56967C.1.pep
LSVGPTIFFPSISPPSAHPCPCPPFLRLLLPRPSFLLPCLPPPREGGSPSQPARRPSPATPVTGDSLYPPPTSPPASPPPPSPPSSDDAVEAVLMLLFGAARRARQQERLDDARRLRRRRPVISIIIA

SEQ ID NO: 157391 - protein, 94 aa, Oryza sativa
  unsure (1)..(94): unsure at all Xaa locations
  Clone ID: PAT_MRT4530_56968C.1.pep
QYKCYYYCPESGELMGKICKXVYQNSEGHEYHYITRIATPSMLQLQIMNWTWATYIHDGYFMSKLTVGHXSSVSDSLSXDIDLCGHAAPAQKHP

SEQ ID NO: 157392 - protein, 328 aa, Oryza sativa
  unsure (1)..(328): unsure at all Xaa locations
  Clone ID: PAT_MRT4530_56969C.1.pep
MDTKSSGGKCSNNTQQQQQQQQEAAMQARVGVVTCVAVLNVFYPPSGPTARLRLFQVSVAPTLLGGKRPSLTSSKRSAPTGGPHESAAQEERPTVDSVHRGTGAGAPRGRPCGGHGGQAAKAGGSRLADRPAGKRRRAARWSPAASTGTAACARERRERGGGVAHGGRRWPSARWQREAATAELGADEDDDAPVTGGAREEADEQQLHPRMGGEVLGRTGRRHGLPERKGREEGLTGTRENGRPVSFRRWEEVAEVLLVLVEQREVTAWVGMDRSGVATRLEVAMATERGGAXWRRRSGGGMGKWSRGQGGDRHGDADGGVDAAWWWL

SEQ ID NO: 157393 - protein, 58 aa, Oryza sativa
  Clone ID: PAT_MRT4530_5696C.1.pep
HQRNRPLVLRTSSHVVTVRWFLNPLLDTGVSYQNESTPKQKVVLNGNQFHHFHRYVVG

SEQ ID NO: 157394 - protein, 368 aa, Oryza sativa
  Clone ID: PAT_MRT4530_56970C.1.pep
MGCMLPSPQRACPGAPPPSLPPAEDLLFEILLRLPPDPDCLHRAALVCRRWGRLIHGPAFLPRLRAFHRTPPVLGFYHNSRSLGPSFVALAAPAGPSLVFGDGDWSLLGCRHGRVLLRSGPGWLQLLVWDPVTGHRSSVRLGRLAGHVRACNAAVLGDQDTRRHGSFRVAFVFTGEGRASACLYSSETAAWGRLITAGTARCGDVGKKPSALAGDALYWALDDGRRRHPRARHGQGDPRRGRAAAARRSGSLWAREAGGADGVASTSSWVLLKSIDLDVFAPMPLPCAGGRVILVPPVRLLGVDEGGISAFIWTIEGIFMLHLEDEMLMKKVAASRVVDFVYPYSSVYVAGGGGEGEDAGAVHGSGRL

SEQ ID NO: 157395 - protein, 687 aa, Oryza sativa
  Clone ID: PAT_MRT4530_56971C.1.pep
MAILTVLPLVLVMLLLPLAAIASGDPPWQHYCGSSGNYTAGSKYQANLQALAATLPSTASSSSPALFAKDAAGGGDAEPDRVFALTLCRGDTASANASSSSCADCASRAFRDAQSVCPYSKEVAVYYDPCLLYFSGDDFLSSPANPAQVRLYDVDRSTRRGGGGADFVTLVRALLSYTMQWAVPYNSTGGGAAAVRWYTTVRMDVVTPPLFSLMQCTPDMSGGDCRQCLQDLVGNTTFNGSVSGVRNIGARCGYRYDTYKFYGGEPKLKIGSLSEINSTAPSSPPPPPPVTETRSGRKKVLTVALLVPLIALCPVVIFCFAWIRRLRNHKSMLRKKDTMAREEVLKLWRLEESDSEFMLFDFSQIEDATSNFSEDKKLGEGGFGSVYKGQLPNGLEVAVKRLAAHSSQGLVEFKNEIQLIAKLQHTNLVNLRGCCIQGEENLLIYEYMPNKSLDFFIFDLKRAALLNWKTRLNIIEGITQGLLYLHKHSRLCIIHRDLKASNILLDRDMNPKISDFGLAKIFDSNDVQRNTKRVVGTYGYMAPEYASEGCFSLKSDVFSFGVLVLEIISGKRNAGFHQYGDFFNLLGYAWQLWKDGSWHELVDPSLVSEGQMMEIKKCMKVALLCVQENAVDRPTMSAVVKMLSSELKILPEPKQPAFFNVRVKHGELSNTAPSSINDVTITIVNGR

SEQ ID NO: 157396 - protein, 353 aa, Oryza sativa
  unsure (1)..(353): unsure at all Xaa locations
  Clone ID: PAT_MRT4530_56972C.1.pep
MEKGGAESSIACARCGKPASLQCPKCAQLKLLREGAAFCTQDCFKEAWSSHKSVHIKLDALTLQQTPEGWQYCLKKGRTRTSQLPRFDWTGPLRPYPISKMCVVPDKIEKPDWALDGTPKIEPDSDLQKRVEIKTPEQIERMRETCRIAREVLDAAARIIKPGITTDEIDRVVHEETVARGLKEYDMLTLLSAXNSRKLEDGDIVNVDVTVYYKGVHGDLNETYFVGNVDEASKQLVRCTYECLDKAIAIVKPGVRFREVGEIINRHASMSGLSVVKSYCGHGIGELFHCAPNIPHYTGVWHDRLWPDEWTAVTADGKRSAQFEHTLLVTETGVEVLTARLPSSPDVFPWLKP

SEQ ID NO: 157397 - protein, 130 aa, Oryza sativa
  Clone ID: PAT_MRT4530_56973C.1.pep
FAFFLYCLPNPWGLGLALGFSFYGPHYFGLGPGFFPPLAPRLPPPLSQDQPGPPPPPSSQQPGGNGEVPPAWFSPLFWPGLPQGYAPPPPLFFPLPLAPSFLDPLFFLGYSPFLGVFFPLRAPLFFRYMV

SEQ ID NO: 157398 - protein, 435 aa, Oryza sativa
  Clone ID: PAT_MRT4530_56974C.1.pep
MARFSVAKPFAATATAAAPRLSPRRRRRRLLAANATTARGALPLPALRKPTKPPPPPPLHPRPSLPVPTTSSDDDGDIRRKPATGATASLCSSGAGDVLRLLDALRLPPDEDVYVSLLRDCADAAEVASVHAHIAGKFAVSGLPLPLANRLVLAYAACGDIGAARQVFDEMPVKNGITWATMVSAYSDGCFHHDALQLFVQMCHQVRGITGDHYTHAIVAVLRSCARVNELQFGEQVHAFVVKKNGVCGDVGSSLLQLYCDSGQLSSARHVLEMMRFSCQEPVPEAAWTSLITAYHRDGILDDAIDVFRGMASSGIARSSFSLSSILAVCAEAKNKGCYGQQVHADAIKRGLDMNQFVGSGLLHMYAKEGQLADAARAFEAIDGKPDAVCWNAMAMAYARGGMYREATRVVYQMKAAGMNPSKLTMNEVKLACFR

SEQ ID NO: 157399 - protein, 103 aa, Oryza sativa
  Clone ID: PAT_MRT4530_56975C.1.pep
TSPKWYRPVHRRQTLTTTRSSPVSRGTHSFHICPMKEQPTHMSKLFTNTKQTSWEAHICPGRTGLFPKQLYIFSENRHLQAYRASGNLASTDKLCAEHLMVFH

SEQ ID NO: 157400 - protein, 596 aa, Oryza sativa
  Clone ID: PAT_MRT4530_56976C.1.pep
METLTNEAGEVTRYSKREDATKELTEAVEEGDKDAIEKFSKRTVKVTKQHNEECKRLLRLMGVPVVEVYAVASEDMDSLTFGAPRFLRHLMDPSSKKIPVMEFEVAKVLEELELTMDQFIDLCILSGCDYCDSIKGIGGQTALKLIRQHGSIESILENINKDRYQIPEDWPYQEARRLFKEPNVTLDIPELKWNAPDEEAIEKIKFAKNKSSQGSDLPDDVLREILRRVNSRAALGKRWAGLARELPSLDLRVADILPRDYYLELRRRDEAKRSFWVYDYGKKYDAVIRRYERRAMRAMAACMKELSPSTPRRSVHRLAVEFIDTNSSNHINRLITTAVDAWGVEHLDVARVLLTSSSSAQLDYPAYRFPDGRIIDHPHGSRLRTLELPKCRPRDLRGFNPLTTLGLGGAAINVTDLALRLTGPQMWVVPESPFLEMPSLRRLLVADVPPRWDATWIRAVVEAAAPSLERLHVHFSQHYRQDDDDPAADRRRLEIVWENEPSRTQHCDNLEELVVIGFQSKKERQVQFVRYVMEEASMALRRVVLIKHGHVEDRGPGEWEMVSQKCTWSDEEKLAVKEQIMEGVCCSMDQVELVLE

SEQ ID NO: 157401 - protein, 223 aa, Oryza sativa
  Clone ID: PAT_MRT4530_56977C.1.pep
MGIKIVVGRTGMETLTNEAGEVTSHLQGMFNRTIRLLEAGIKPVYVFDGKPPDLKKQELAKRYSKREDATKELTEAVEEGDKDAIEKFSKRTVKVTKQHNEECKRLLRLMGVPVVEAPCEAEAECAALCINDMVYAVASEDMDSLTFGAPRFLRHLMDPSSKKIPVMEFEVAKVLEELELTMDQFIDLCILSGCDYGDSIKGIGGQTALKLIRQHGSIESILE

SEQ ID NO: 157402 - protein, 778 aa, Oryza sativa
  Clone ID: PAT_MRT4530_56978C.1.pep
MGIKGLTKLLADNAPKAMKEQKFESYFGRRIAVDASMSIYQFLIVVGRTGMETLTNEAGEVTSHLQGMFNRTIRLLEAGIKPVYVFDGKPPDLKKQELAKRYSKREDATKELTEAVEEGDKDAIEKFSKRTVKVTKQHNEECKRLLRLMGVPVVEAPCEAEAECAALCINDMVYAVASEDMDSLTFGAPRFLRHLMDPSSKNPVWKVAIPVMEFEVAKVLEELELTMDQFIDLCILSGCDYCDSIKGIGGQTALKLIRQHGSIESILENINKDRYQIPEDWPYQEARRLFKEPNVTLDIPELKWNAPDEEAIEKIKFAKNKSSQGSDLPDDVLREILRRVNSRAALGKRWAGLARELPSLDLRVADILPRDYYLELRRRDEAKRSFWVYDYGKKYDAVIRRYERRAMRAMAACMKELSPSTPRRSVHRLAVEFIDTNSSNHINRLITTAVDAWGVEHLDVAAVLLTSSSSAQLDHPAYRFPDGRISDDPHGSRLRTLELTRCRPPDLRGFDALTTLVLRGLPRTTRAAVYERAVASCPSLRALHLVSCRCRYSKVVIDAPLPDLRELVVVGGGDMSERIKRDAALSALGYLCRAAINVTDLALRLTGPQMWVVPESPFLEMPSLRRLLVADVPPRWDATWIRAVVEAAAPSLERLHVHFSQHYRQDDDDPAADRRRLEIVWENEPSRTQHCDNLEELVVIGFQSKKERQVQFVRYVMEEASMALRRVVLIKHGHVEDRGPGEWEMVSQKCTWSDEEKLAVKEQIMEGVCCSMDQVELV

SEQ ID NO: 157403 - protein, 102 aa, Oryza sativa
  Clone ID: PAT_MRT4530_56979C.1.pep
MESVYWFRPEGQEWCSSVHCYCLPAYGPFNSFWNINYPVLTSTRSIPLTRRYISNYKNLCLSSPSRSIKLQSCLLFLKKKSKLQPNLTNPPSFLLQQTLSLL

SEQ ID NO: 157404 - protein, 67 aa, Oryza sativa
  Clone ID: PAT_MRT4530_5697C.1.pep
FFFFFFTRHKNILFALQMICLLNRMYTMYHKHVTNSCTKFNRKIKTNYHPTVTSPPPPLFLKKKKPL

SEQ ID NO: 157405 - protein, 121 aa, Oryza sativa
  Clone ID: PAT_MRT4530_56980C.1.pep
GKKKGKLWLGEWGGVGQKKKKDPSPQIKGKGKKKNFVYGNHYRFKKNPGLETTPPKRGGTPVYPDPFFGGRGTPKTFCRPKRGGGFKFESGGFSGAGAKKPKKKGGPRGAPKKPKAAFWPH

SEQ ID NO: 157406 - protein, 53 aa, Oryza sativa
  Clone ID: PAT_MRT4530_56981C.1.pep
MWPCGEVTLACNEGLCAVHPFKYALIDEGGGAGKEQLQVVTSGGGHVVAGRDG

SEQ ID NO: 157407 - protein, 100 aa, Oryza sativa
  Clone ID: PAT_MRT4530_56982C.1.pep
DKIDLFDMELACLTDQVADVDSWSIRDRAAYMLLMDAVSKHSGRLCQHYIVLRCAHIRGPLDYKTQASDDMVYTCYPEVNTPAVHNHLSQGNPSPSCSEH

SEQ ID NO: 157408 - protein, 68 aa, Oryza sativa
  Clone ID: PAT_MRT4530_56983C.1.pep
AHTWYFTSVFLLPACGGNGTGNHFRFPRTGQRIRHAPQTWTVRHMRSSGYDLPHCTCTTGEQCAALQE

SEQ ID NO: 157409 - protein, 44 aa, Oryza sativa
  Clone ID: PAT_MRT4530_56984C.1.pep
TGFWFVLPEAYIFFLIINLHDGCLLDYQSCLLYEHISERKITYC

SEQ ID NO: 157410 - protein, 96 aa, Oryza sativa
  Clone ID: PAT_MRT4530_56985C.1.pep
SVCSVIEVAARSSATGAAGGEVDHGASPRMQPGYGYPEHAVGVFGRYPVGVRHCRQPKFPRGAPSATAASSVASLRSSSSVRMTRYIVSSTCTLIS

SEQ ID NO: 157411 - protein, 402 aa, Oryza sativa
  Clone ID: PAT_MRT4530_56986C.1.pep
MPGAGGKKKSPWASGERRPHFFKVLVGDFKQRLKIPPNFCKHIPWEESRKAKGLKEASMAATLEGPSGRTWLVVIRRTAEGTFFTSGWPKFVQDQALRELEFVVFRYDGNTRFTAMVFDRTACEREDLMGGGGGDRPRKKRGRPRTAAASRDAARPKKDSVGKEMVTYRASPSGGQPLQIVDSSWTPEPGSTAVKNEEDADELPVCELPASSASPPRHVPEGALDADGGAARRGAAKTRSLQDDLALASIPPSIRRYKGYVSRRRAVATAERQRATEIAHAFRSPLPYCVIRMSTMHVYYSFMMRFPTGFSRQHLPRERTDVVLRDPGGKVWSVLYIPNTRDRLSRGWCAFARGNCLEEGDYCVFELVAAAEFRVHIFRVVEPAVPAVRLRRVTVTCGRGPT

SEQ ID NO: 157412 - protein, 110 aa, Oryza sativa
  Clone ID: PAT_MRT4530_56987C.1.pep
RSKRTAHCDRVYKKRRNTLKYLYFLIMRMAAWRYISNLSLHEATSPELTKHLNKQTWQGRPGSAAPALGAGAAARARLMMLVLAEEVAEAAGGDARGGRLQSRVHVPLLV

SEQ ID NO: 157413 - protein, 93 aa, Oryza sativa
  Clone ID: PAT_MRT4530_56988C.1.pep
MPANPVLDISPDHRSHGRRRRAWPVRGASISIKPCSLCHLRHPEPHWCFRNPHMVFVSYCDTMRSPGVMYVRGRRKKRLDRQLGRRKHQSIRA

SEQ ID NO: 157414 - protein, 72 aa, Oryza sativa
  Clone ID: PAT_MRT4530_56989C.1.pep
FRKANFWLLQQHFHLLFPLQGNDKWGPYLNLKKPFSILVFYPTHGHTTCPLFLQNYFPFPTGAPTSVGGRGL

SEQ ID NO: 157415 - protein, 349 aa, Oryza sativa
  Clone ID: PAT_MRT4530_5698C.1.pep
MAAAAAARISSTASQLRLSWLMVMLMLVASNNNAAAAPPAAAAGQLRTGYYRETCPHAEEMVFRETARIIRASPDLAAALLRLHYHDCFVQGCDASVLLDSTRANAAERDSDPNKSLRGFDSVARVKAKLEAACPATVSCADLLALMARDAVVLAKGPYWHVPLGRRDGRSSTAASCGGQLPPLCGNVSRMVDSFAAKGLDVKDLVVLSAAHTLGKAHCPNFADRLYGPGADPPLKLDGAYADRLRKQCKEGAPPYDGNVTAEMDPGSFTRFDSSYFRQVVRRRALLRSDACLMDHPFTSAYIRLAATGRYDGHFFQDFAHSMVKMGAIGVLTGDQGEIRLKCNVVNST

SEQ ID NO: 157416 - protein, 105 aa, Oryza sativa
  Clone ID: PAT_MRT4530_56990C.1.pep
DAKSNEASCSPALAGSEKMGSTKKVGLRDSAIVIASLIARACEYSESLTLVCSSSHTVRTAICIHECTHVNRGMESVQEPVSKSCALCSSFRMTISNIVLSERLE

SEQ ID NO: 157417 - protein, 62 aa, Oryza sativa
  Clone ID: PAT_MRT4530_56991C.1.pep
SKFNLGLFFFTCVVTWTSEKVNFSLWTGMFTQSFNLDSLLLSPAPFLPLFLCTAQGLFLDQV

SEQ ID NO: 157418 - protein, 60 aa, Oryza sativa
  Clone ID: PAT_MRT4530_56992C.1.pep
TLIRELLAPNPLLHRLCNYQESNAARQKSCATGVLVFGDGATCTVVVRPCVPPGLLQEKG

SEQ ID NO: 157419 - protein, 974 aa, Oryza sativa
  Clone ID: PAT_MRT4530_56993C.1.pep
MEQVRRKSSLRSHGSGKSSPRVGSGVFDERSGLAADRDGGEEGEVVVRIDGEGPCREPFAFPGQDGGGAGNVSPNTDSTASTPRGASRTWSSWTNSPRSPPKVRRDGSVEFWKNDGGGDGGSDGGGGRGGGGGGGGGRRACEAFSFKNRAPPRPSSSQASSPSLSPQPAHAAGAVDGGEDPPTRLIGNFLRKQKASGAELSLDLDMEELGRPSQLHAQPSFSNSLEREARVSFQPKRRVASSSDSDSDTGGSRRRGGDDGEVVRCTSSSTAAGHLMRAKTRSRLMDPPPQPQPASAVPPVGDEERRSSVLRTPTKSGQFISGLMTGKSGQIAKSGPLEEEEEDPFMDEDIPDEFKRGKLDAITILQWLSLVLIIAALACSLTIKALSGKKVWGLHLWKWELLVFVLICGRLVSGWVIRIAVFCVERNFLLRKRVLYFVYGVRSAVQNALWLGLVLSSWHFMFDKNVQRETNSPVLPYVQKILFCFLVATLIRLVKTLLLKVLASSFHVNTYFDRIQEALFNQFVIETLSGPPLVDENQFLAEMHELQRAGATIPAELRSTVPTKNLSGQRSIRMSGVIPKGEGSKQLSKEKGEHQIEEGITIDKLHKLNQKNISAWNMKRLMRIVRFGTLTTMDEQIQQATGEGDESATQIRSEYEAKIAAKKIFHNVAKPGSKYIYLSDLLRFMRQEEAIKTMDLFEGAQEHSRVSKRSLKNWVVNAFRERKALALTLNDTKTAVNKLNQMVNVVVGIIVFALWLLILGIATTHFFVFLSSQVLVAVFVFGNTLKTIFEAIVFLFVMHPYDVGDRCEIEDCQVVVEEMNIMTTVFLRYDNLKIYYPNSVLATKPIMNYYRSPDMGEGIDFSVHVATPVEKLALMKERLLRYIDNKKDHWYPGAMIVLRDVDDTNKLKVSIWLRHTLNWQDMGMRFVRRELVLQEMIKVLKDLDIEYRMLPLDVNVRNAPPIQSTRMPTTWNYS

SEQ ID NO: 157420 - protein, 125 aa, Oryza sativa
  Clone ID: PAT_MRT4530_56994C.1.pep
PVLSDVPDTSSNTEVELSAHRPSFTTGSVRVGLGGGPPPRWHRCWEIQHSHLSNSGSLPVCARQDLRGRHASCHLCLLHIFHMFSMDGHWAPWPELVKLHRKYGILLFIDDAHRKLVCGNDGGGF

SEQ ID NO: 157421 - protein, 45 aa, Oryza sativa
  Clone ID: PAT_MRT4530_56995C.1.pep
PTRPAPHPKSVSYAMYRCDDLYLVNDLTGGVVGLHWSSTLLLVVQ

SEQ ID NO: 157422 - protein, 483 aa, Oryza sativa
  Clone ID: PAT_MRT4530_56996C.1.pep
MGCGRKHRSGAPNTRPSCGSRDIIGERCKFFMFCVMKSACLTADNLQRRGWHLAPICHLCSNGGESCHHIFSSCSFTQEVWGLVRGRLGHLQTTPSVDLSWWCDARYNMDTMSDNTSHNILSQVNGSSQIVITDSKVQKLGSSANYVKYYKGTVKFGKGLRIQTKASVLAFTSCDGEAADALYVRLVAVNSPFTVKPLSYGRGIRRYREYTFLAVPPPSCLLSNYTDGFNDKTVSMKRFTEEFIKITGDIVRAIITLHCQGYWCSGLKGKHICIYKMEKCTDAKIWSFCFAGGNEAKKSEDWVDLGKLLELAAKRNDSYTAEIEDLCKKLKNKTLRGMKVLKHSALLNVREKFENIIALNLFILVHVKSQPQVPSGDPEKDKIISELVKFMNASLQWAKAMPHWITQSSNYQAPTTETGLSFIDGLRDLFEHENEYIPEKVKQSQSKIQLVGRDPDLECQLRLNLEKIFLQAQNFVLELDIEY

SEQ ID NO: 157423 - protein, 2296 aa, Oryza sativa
  Clone ID: PAT_MRT4530_56997C.1.pep
MEERRATSPSRHSFCRDALGRRGGESGGGLVYIYRSPLRSPLQRHGLNREWRLERWRWRWRWEAATWRQRAAAHARIGGPSGLSAAYALAKLGYRNVTLFEKCHTVSGMCESIDIEEELGSDFEEMDTHKLSLIDSQTGNIRDLEVAEDYVSMVSLTLKLQDEANKSGRAGLHALSGLASDPTHEFLKQNGINSMPKSVAYGYTASGYGFVQDMPYAFIQEFTRTSMAGKIRRFKHGYMSMWERLSKSLPFEVFCDTQVLNVKRNSCGANVTIKNNNGEKQVLEFDKIILSGAVAFKNSKTYRSSSLTDGESEVVELNNLERELFSKVQTIDYYTTVVKINGFEHIPKGFYYFGEFMEDPTTIGHPVAMQRFFADTNIFLFWSYGNSADIKGSFVAKCVTDVVSSMGGNVQKVILQRRFKYFPHVSSKDMKDGFYERLESQLQGFQNTYYVGGLLAFELTERNASYSIMAVCKHFAIDGEGELTPYVKRLFPLSHNRNPSPPRDLGELEGVEFPDLPSLDGYLQYWGTHKVTEKNVIYTWINEEGKLMNRRTYQELHGNASYIAQKLLTSTKPVIKPGDRVLLIHLPGLEFIDAFFGCIRAGVIPVPVLPPDPMQSGGQALLKVENISKMCNAVAILSTSSYHAAVRAGYIKNIVTLAKRVQKCSAQWPDIPWIHTDSWIKNYRRSSDSFNSDTVLFTKPQPSDLCFLQFTSGSTGDAKGVMITHEGLIHNVKTMKKRYRSTSKTVLVSWLPQYHDMGLIGGLFTALVSGGTSVLFSPMIFIRNPLLWLQTINDYHGTHSAGPNFAFELVIRRLEAEKNKVYDLSSMVFLMIAAEPVRQKTVRRFIELTQPFGLSEGVLAPGYGLAENCVYVTCAFGECKPVFIDWQGRVCCGYVEQDDTDTLIRIVDPDSLTEHQEDGVEGEIWISSPSSGVGYWGNSEMSQRTFFNQLKNHPNKKFTRTGDLGRTIDGNLFITGRIKDLIIVAGRNIYSADVEKTVESSSEVLRPGCCAVVGIPEEVLAQKGISIPDSSDQVGLVVIAEVREVVRAAQKLSDFLGVPVGAIDIFTASCISELASFLENLVHKSQTQLAPWPKSKVKNSKVIIEFLTKIVSDQTGIPKDKISPMDSLPSYGFDSIAVVQAAQKLSDFLGVPVGAIDIFTAGCISELATFLENLAHKSQSQLAPGASCYIEDETQVDPMDAISPEFSVLGTGILQLLALTYVCFVLLLPAYLASSTYMSIFSTVSLVRSPLLSYLSSLVMAPIVWIFYISLTSLSLSILGKSFLQPNYVLIPDVSIWSVDFVKWWALNKAQALAAKMLAVHLKGTIFLNYWFKMQGARIGSSVVIDTVDITDPSLLTVADGAVLAEGALVQGHEVCNEVLSFRPIWIGCEASIGPYAVLQKGTVVEDGAVVPPLQKTGAGKSTRRTSRTSVSIKKEAAKANMILEHLVSIYAVGILGALSGAIVYTLYTHLSGKAASPLHFSFACIAGAFHWLPAAITAYAVIVQETPTSALSFALFTAFADLSYGVILSILTSITSRALAAKPGTKQNGIASLIHRRITISAHVRFAKMLSGTEAFCVYLRLLGAKIGRHCSIRAINPVANPELISVGDGVHLGDFCNIVPGFYSKGGFTSAEIKVQENTVVGSGSLLLPGCVLQENVILGALSVAPENAVLRRGGVYVGSQSPAMVKNTLLDEDERIEEMDQAYKKIVGNLAANLAITTMNVKSRYFHRIGVSGRGVLRMYEEIPSFPRHKIFASGKSFPVIVRHSNSLSADDDARLDARGAAVRILSDNDGEAPLLDLTLKSGKAFYARTIADFATWLVCGLPAREEQVKRSPHIRDAVWGSLRSTDSYTVLHYYSNICRLLRFDDGREMYAKFKLRPADPDVPEDSGKVVPRGILPPETGAIPRDEDDTRPLLFLADDFRRRVGSPDGVRYVFQLQLREVPTDAAARDVALDCTRPWDEAEFPYIDVGEVSIGRNLPTEETEKLEFNPFLRCPEVDVIPATSCAQSASIDHGRSLVYEICQRLRNGEPLPASWRAFLEQSDTKIDLSGCPVAAAATPTRSNAGDATKVTLARTWYQALWATLCQPLLQTLVPYSVLGLVIFLPLRGLLAVAAATRFPLYWLLPAFWAASGVAAMATCAAAKWALVGSRVDGDTVHIWSPAVFLDTVWQAVRAATAEYFAELTPGSAPFAAWMRVMGASVSPGDGVYVDSMGALLNPEMVRLERGAAVGRDALLFGHVYEGEAGKVKFGAVSVGEDGFVGSRAVAMPSVTVDDGGCLAALGLAMKGETVKHSM

SEQ ID NO: 157424 - protein, 245 aa, Oryza sativa
  unsure (1)..(245): unsure at all Xaa locations
  Clone ID: PAT_MRT4530_56998C.1.pep
MGCSTGVFRRDHSAASSSSSIMALLLPPIRASPRDRATRSTGESGSPSSLWASVSALIVLVGSHPTPSPPPLAVASDPHPPTLPPPSRLQPTSPLPPTPASASAKQQPPTPAXRHREPPPPPTQPLPATTLTQPPCPLSTSPAXPPPRQPRRRHQPSGPPPAAATATSHQPPSTWSSRARSAHMGGRIHPRGAGSASGVPGSGPPSPASPPPPSPPSTAPNNRRSSPSPTPSSPPPPSPSPPPAA

SEQ ID NO: 157425 - protein, 66 aa, Oryza sativa
  Clone ID: PAT_MRT4530_56999C.1.pep
CTIPSVGNQVCCLCASSVLLLVHSPQLMGVHVSHNKITKFKQAKNKLGLSQHSMYLHVGKGLVRCA

SEQ ID NO: 157426 - protein, 464 aa, Oryza sativa
  unsure (1)..(464): unsure at all Xaa locations
  Clone ID: PAT_MRT4530_5699C.1.pep
YHILWHKKDIILGTGTDAPRKPTRPPMKKRFNDKVEEXSHLGPLKAQKNKRRCKLHRKMNQWCKNRDVPQEDVQFLSSVGVDIEVVSGLEWDDAEPDVYEDPNLAKDVMDQTPXITRKPTEKSEVPRVLKSLNSKSKDDQKEKWRVTDFSGSKKRAKERKXPDYAIDEGPWEMTWLHKWYIDTSIEGLTNLTIRSPPDAVASKGFFWLNFADLHAINRREKMDVNFLGAWCLIQYMDAAKAKQSIGYLDPTRICQKQHTMTLSPNSKQLKDKTPKEIAEYKNGLYKQKLITVAXYIGRDFLHFQNKRVILATYNFNDHYICFIIXPKYGTVXILDPLDYHHKTNKQFLTILQYAYNCYKKKGVDQIQTKQKLLCHKQPRGTILYGCYACEFLTVNGRYKVNVEDLPRIEHRTSFDDTCITNVQRDLCHFIHREXCHIKVSEYPHDPSPLAPSLFHSLRHGGGFS

SEQ ID NO: 157427 - protein, 102 aa, Oryza sativa
  unsure (1)..(102): unsure at all Xaa locations
  Clone ID: PAT_MRT4530_569C.1.pep
MEEMVELLRSSSSNNGDGWIGAQQPSNKFPILVACWLVVVVVVXARVRRRLLPLFGDVQARGGAACRNTNPSRRLRRRQQPTGTRPAGSDRTARGKQRGAQP

SEQ ID NO: 157428 - protein, 81 aa, Oryza sativa
  Clone ID: PAT_MRT4530_56C.1.pep
MEKFSVVCNEGRSKEFKEDPATNNKHCVDICIILNKQLLGPLREKKNPTMEKFSVVCNEGRSKEFKEDPATNKKCVDSCIG

SEQ ID NO: 157429 - protein, 146 aa, Oryza sativa
  Clone ID: PAT_MRT4530_57000C.1.pep
MSLLLPIRSVLLQRLFLCRCWIGRWVAVLFRQGSAEWSSIRWVFRDATLLFIPCNDLAIAALFLFSHADSVESASFHFRLHDFCMGTCLGGATTTAAVGSVDDRTTIAAASGSVAVMGYSIATAIITHMLHSKQDLRGIGQTTGPR

SEQ ID NO: 157430 - protein, 228 aa, Oryza sativa
  unsure (1)..(228): unsure at all Xaa locations
  Clone ID: PAT_MRT4530_57001C.1.pep
MTKWDDGGALDTGNADERTTKSVPASSMWRRWRAWDPVGGGSAYTDPTVVDVNARIQRWRPSPHRLGFTVDQVHGGGLRKRTAEILSIYRRSTASVSADVSGDIITGGGSDTDARRLTTARQRKQRASTRCGRCGDPYRGTNGGGQRPDDDGDEEEAAATVGLMTTTVFRRSSAMTEGWTRTATTWXSRRCPARATTTTRATAVLGXTRGGIGGARLIAEAALQAAAS

SEQ ID NO: 157431 - protein, 116 aa, Oryza sativa
  unsure (1)..(116): unsure at all Xaa locations
  Clone ID: PAT_MRT4530_57002C.1.pep
TSNTTTVTIILALALLAIGACTASARFDPLSPSSSQYQLPTLLLLQEQVLSPCSELVRQQYTIVTNLFWLPATYQXINNQLIQQQRCRQLMLVAQQSHYQAITIRQAIVQHLQLQQ

SEQ ID NO: 157432 - protein, 69 aa, Oryza sativa
  Clone ID: PAT_MRT4530_57003C.1.pep
PCGTNCHMIQSMQQVISSGRGQHHTMKMSIQMPDMCYMRPSKRQSLCAGVAGDPMLVTCARATSGCKIW

SEQ ID NO: 157433 - protein, 203 aa, Oryza sativa
  Clone ID: PAT_MRT4530_57004C.1.pep
MEECKGGGMSPSSSMDSSTHPALSTTSSAATARRDLSTDLRLGLSLSTSSSSSLLQAAAAAAAADDSIPSTPRNSQVHADWPPIKPFLRSALQKASAAGGGGARRRRTLFVKVYMEGVPIGRKLDLLLLDGYDSLLIKLCHMFKTPITYADVMECHQQVPGQKAAHVLTYEDQDGDWMMVGDVPWELFLSSVKKLRIARMDKC

SEQ ID NO: 157434 - protein, 378 aa, Oryza sativa
  Clone ID: PAT_MRT4530_57005C.1.pep
MESGSEFYAGEGLQIDPKWLIDPKLLFVGPRIGEGAHAKVYEGKYKNQNVAIKIVHKGDTPEEMVKREGRFLREVTMLSRVQHKNLVKFIGACLEPVMVVVTELLVGGSLRKYLVGLRPRSLEPRVAVGFALDIARAMECLHAHAIIHRDLKPENLLLTADQRTVKLVDLGLAREETLTEMMTAETGTYRWMAPEVSVTAVHICQYNSFLSIFANPEIYPQLYSTVTLRHGEKKHYNHKVDVYSFAIVLWELLHNRLPFEGMSNLQAAYAAAFKNIRPSADNLPEELSEILTTCWKEEPNERPNFTQIVQMLLHYLSTLSPPEPLAPPRTFSSENAILPPESPGTSSLMASRGDLGDTPKGKMEDKPRGFFFCFSQCY

SEQ ID NO: 157435 - protein, 109 aa, Oryza sativa
  Clone ID: PAT_MRT4530_57006C.1.pep
RCGPCGCGSPEEKELYLNRNRAESGHDVGRTGRAGAGRRLELPGGQVLGGRGEEFEVRSQQRRRLRRRRLRRRLLINSIFILFIQPHHAYPCTSKFKLILISPHNNTYT

SEQ ID NO: 157436 - protein, 34 aa, Oryza sativa
  Clone ID: PAT_MRT4530_57007C.1.pep
LAFFFLACLMPMSYRYDGILDQVIVYLFSNPNNT

SEQ ID NO: 157437 - protein, 120 aa, Oryza sativa
  Clone ID: PAT_MRT4530_57008C.1.pep
LNSTMWFLKQQINCTSAPSPHRSSLPCRSHSNNAHLIPVQTQCSWGGIGPQALFPSWLHLYPLILITRLTTTSISTGSTHCTHRSRILAIRHIPTGSARVCVDPGNSGTGTCQGGTRLVP

SEQ ID NO: 157438 - protein, 644 aa, Oryza sativa
  unsure (1)..(644): unsure at all Xaa locations
  Clone ID: PAT_MRT4530_57009C.1.pep
MVTLLLAFRLSTLFLLLAAGAIAVDPDGAAAPDTAAAPDTEAAALLRLKASLIDPTNALEAWSPSSPSPPCDETHRWPRVQCYNGVLIGLRLARLNLSGDFDFAALSRLPGLHSINLIRNNFSGPLPASLAAVRSLRALYLSRNAFSGPVPGDVFAAMSWLKKLYLDRNDFSGELPAGAIAGAPRLQELHLDHNRIEGRVPSKLPATLRLFNVSHNRLTGVLPEAVAARFNESAFAGNPGLCGAPGSGAGACAAAAPGPAHTAMPPMSAADYFAVQEETSVFVVMGIIMLVVLLVAGAMLVTMEQGGSGAAGGAGGVGGVGGARKQVAEFVLMSNAAGEFGLPELMKASAEVLGNGTLGSAYKAAMRNGVTVAVKRMRDMNRVGRAEFEEHIRMLGELRXTPTSSPPSATITARKKSSSSPSSCHSPDRVVLDWPARMRIAVGVVRGLSYLHEKLGIPAMRLVSMTGADFDAPPPPPPHGNLKSGNILLDAHLEPRIVDYGFFPLVNTSQAPHAMFAFRSPEAASAAAAGAGAAAQRAALSARSDVYCLGIVLLELVTGKFPSQYLLTARGGTDVVQWAASAVAGGTEQEVVDPVVAAGAGPAAVRLLRVGVRCTIPEPESRPSMADVARMVEQVAGGGGGGAS

SEQ ID NO: 157439 - protein, 393 aa, Oryza sativa
  Clone ID: PAT_MRT4530_5700C.1.pep
MDAAALGAAAGAPNPAAPVGGDQQPRTERLSAGVQQQLNLEGMRARAVGLYKAISRILEDFDAIARANPNASAKWQDVLRQFSMASMELFNIVEDFKNVSKPLTELEAEASRNRDPLLSGTASLSRTGTMQTCNITMGYKERLILKMYLLLQCHMQTPGLGARQGANLGPTLDKAQAAKIQEQEGLLRAAVNYGEGVYPKNTSTFVPNVVNAQGNPMQVSGGQLLGRPAPSPGATGTPNFENVSTPPMPYANSPRSGTNMMNTPSPQQHLTAQQHRQKLMQTSQQQQLHAQQQLRPSAAGMLAQSAIPQLQDLQGQSQQKLQVPGQQQMQYNQALSQQYQNRQMQAGRMQPGMSQSQLNQGNQLRSHISQFTGAANSAMFTAAQASSNSQMVR

SEQ ID NO: 157440 - protein, 37 aa, Oryza sativa
  Clone ID: PAT_MRT4530_57010C.1.pep
MAGNGFAHSMAAGDQSEAMIALFGNITSILMEVILFP

SEQ ID NO: 157441 - protein, 59 aa, Oryza sativa
  unsure (1)..(59): unsure at all Xaa locations
  Clone ID: PAT_MRT4530_57011C.1.pep
MSRTRLMHEWATNSELTRQTGPKFTSLRRGTTERLLAEIXAGSGRPQVRPNQGVRPNPP

SEQ ID NO: 157442 - protein, 557 aa, Oryza sativa
  Clone ID: PAT_MRT4530_57012C.1.pep
MAFEVGYEVAPEYCQIPYDPNEEKCRVRVTLTSDREDLPSIKFEAGGRKYSHACQEAALVAIGELRHRFDEELESSAFQYHPHKPHGQDYGTYNCPEGEGSATVMHAVYMLSAMDAVGVEREKAAHDRENWNRGRICKLESKVYRLQKELAELKGEAPPPAPKLRLTARKRTRPPPRLQLASKTGVVGDAVPDHAKPVIHVLSDEEEEEDLEEREPATPEEEDPSLHSDARRDMLLTSMVGCNYMSLVLLLVRDSLCPRRCRTDEEHQEKFLEGLNDELSYALMAMDYWDFQQLMDKAIRQEDKYNRMEQKKRRAAHFKAQQGSSQRPHIALGPQAAPYPQGGSSSVARPQRQFYNNNTGNRSNDNRNMVTRPVAAPTQNHPVRKEQGSKPGVCFNCGDPGHYADKCPKPRRVKNAPVQNNSNAPAPKARVNHVAAAEAQNTPDVVLESNDLDVILGMDWLTHHIGVIDCANRNVTLTSSNGQTVSFFVSSPKSHGLTLNQVALQEIPIVRDYPDVFPEDLPGMPPKRDIEFWIDLVPGTNPIHKRPYRMAANELAE

SEQ ID NO: 157443 - protein, 437 aa, Oryza sativa
  unsure (1)..(437): unsure at all Xaa locations
  Clone ID: PAT_MRT4530_57013C.1.pep
MFQLMNMSADSNLSPEFRIKLIELLKEYRDCFAWEYYEMPGLSRSIVEHRLPIKPGIRPYQQPPRRCKADMLEAVKAEVTCLYDAGFIRPCRYAXWVSNIVPVMKKNGKVRVSVDFXDLNKATLKDEYPMPVAEQLVDAASGHKILSFMDGNAGYNQIFMAEEDIHKTAFRCPGAIGLLEWVVMTFGLKSAGVTYQRAMNYIFHDLIGWLFEVYIDDVVVKSKEIDNHIADLRKDFERTRKYGLNMNPTKCAFGVSAGQILGFLVHEWGIEVTQRSVNAIQKIQPSEDKKKLXELIGKINFVRRFISNLSGKLEPFTPLLRLKADQLLDAETRYSTVEKFCLCLYFCCTKLRNYLLSSECTVICKADVVKYMLSAPILKGRVGKWIFALTEFDLRYESPKAVKGQAIADFIVDHRDDSIGSVDIVPWTLFFDGSVCT

SEQ ID NO: 157444 - protein, 186 aa, Oryza sativa
  Clone ID: PAT_MRT4530_57014C.1.pep
MAAAQRNGVNVPRDAVRVAADRPVQLPREQGSGLNWNGFRLSRKHSMKQPPIAASWQALHSADSCQTNTPPPQISLNTHTAAVENTRTTGWTDEARISPSPPRTARTRGPVPAPPLPLLGEGEDGGGGGGGGVGGEREVGAGQPAIYMMRTSTPSIHPRLHKYNFMILFPALVHVNSTIRNKYPRG

SEQ ID NO: 157445 - protein, 32 aa, Oryza sativa
  Clone ID: PAT_MRT4530_57015C.1.pep
YTLDVTLKCSLLHGHTVRHSHNFRVCPKTHIA

SEQ ID NO: 157446 - protein, 583 aa, Oryza sativa
  Clone ID: PAT_MRT4530_57016C.1.pep
MALLFRISLLLLLVPLIPTAAASHHHSPAGGGGAAVPLHPRRHHRSVANTATALFYPAPSMHQNHIEAEEGQLLHVLADPFAAAPAAAEAPSGETAIAAVGAAAEEATPTLIDDSPQQAAAASPPPPPPPPPPPPPLFAKPDLDSTAPPQPKEEGVDGYGSTTATATVTAAPPLDEPAAATATTTTTTTTTLPLPRYSHVASPPPPPVHAGVAGLGDEQRLEQLARVLSSLGYNEMASAALLLANSALLAAWPGSITVFAAPDVFLRASCPMCSRRHVLLEHIALGYFPYTELAAASTAKLPSASPGLCLNLASDHGPFAIHHVRLYVDGVEVSHPELYNDGRYVVHGLHGFLPPLSHGSCSHGSNHRHHYHYQYHHHHHHIIASSAASSAATAASVVRIMIREAIARLRDSGYGFVALAMRVKFAELERLANMTVFALDDQAIFVGGGHDYVSAVRFHVVPGHRLTHADLQRLHPGTMLPTLAGEGQNLVVTQGASGSGSGPRDVRINYIPIKDPDVVINSRIALHGVYVTFPRLHLANLAAAVALASSNQINATCGVFGDCASAAATSTTVPAAHRYGEGQ

SEQ ID NO: 157447 - protein, 468 aa, Oryza sativa
  Clone ID: PAT_MRT4530_57017C.1.pep
MVVQLAGAGLAFKPPRETNKERVHFAMRMILGRLLVVAVLAAAAAAAESEPRLPAAEQEGVYAVLEAVNPGFPWRASFPDDLCLAGPHGVSCDDDDGGNASHVVGISLGYVSDFSANPSCAAPSAATLLTSGLLAASFPRLRSLFVYGCFVGDDDARPLPPLPWRLPPTLQDLVLVNNPALTGRLAISAASLPLLRRLVVASSGLSGDLPSTPFPRLEQLVLSGSRFAGRIPSALVQGLANVKILDLSSNLLAGGIPRAIGGLTQLVKLDLSSNTLAGPIPGELGGLASLELLDLSNNRLTGGVPAALRGMTAIREMYLSGNRRLGGRVPADMFAGLKGISAVGLSDAGLTGTIPASLGESLRNVTYLGLDGNLLEGEVPPALAKMAGRVRLHGNRAVCISPEFLAGAPRPRIAGVPSCNATQAARAARRPEVGEHERPVRPPEMCCDAAAADSMEWNAVYAACTKSP

SEQ ID NO: 157448 - protein, 305 aa, Oryza sativa
  Clone ID: PAT_MRT4530_57018C.1.pep
MPPPTALLPGRSAAPRPPPPPPPPPQLASAARLSRRPLFNAATAVVVRSRSKDEASFTDRILDYIEGGPKLRRWYGAPDLLPKDGSAEDGEDEPSEIDIEEPRDAVLVTNGDSEIGQMVILSLILKRARIKALVKDRRSTEEAFGTYVECMVGNMEDKSFTKKALRGVRAIICPADLRFNHQPYEILIRMQLSVYRGSGGLQAIMNSKLRKLAERDEEVVLASGIPSTIIRTGSMQSTPGGDRGFDFTEGAAAKGRMSKEDAATICVEALDSIPQTTLIFEEAYGDEKVTDWKAWFAERTKTVTS

SEQ ID NO: 157449 - protein, 99 aa, Oryza sativa
  Clone ID: PAT_MRT4530_57019C.1.pep
TRRGDDRPGTHCSQRHAGRRRRSSGGGGGAAAAAEVVVAGVGGVAGVLRGAEDHRREAGRDGVHVPRRRRPAAAGARPRPRRHLRRRRHPRLPDSRRRL

SEQ ID NO: 157450 - protein, 161 aa, Oryza sativa
  Clone ID: PAT_MRT4530_5701C.1.pep
GARQGANLGPTLDKAQAAKIQEQEGLLRAAVNYGEGLRVPGDQRQMYSSLPSHLVDVLPFGDGAHNFGDNSGVYPKNTSTFVPNVVNAQGNPMQQVSGGQLLGRPAPSPGATGTPNFENVSTPPMPYANSPRSGTNMMNTPSPQQHLTAQQHRQKLMQTSQ

SEQ ID NO: 157451 - protein, 124 aa, Oryza sativa
  Clone ID: PAT_MRT4530_57020C.1.pep
MAGDLHHPPSLRHHAAILLRHRGPRSYSPPLPQVTPLSSFIAAGERRRRRLLSPAAPAKEEDRLARAGSHAAAACGGRSASWHRHTAVVEGSARNVEATSAGGHCVSSSHQSLLQLWRSGEMRR

SEQ ID NO: 157452 - protein, 54 aa, Oryza sativa
  Clone ID: PAT_MRT4530_57021C.1.pep
KFTQNLHQKNSKLLGAHQLQLLIKVLRFIRRQSTTVHPIIGVGTPKNDIISKIG

SEQ ID NO: 157453 - protein, 79 aa, Oryza sativa
  unsure (1)..(79): unsure at all Xaa locations
  Clone ID: PAT_MRT4530_57022C.1.pep
KKTGFFVVKKFGTFPGGINLKSKVRPPPKAKFXIVLKKREKFFKFMAAPPEKRESSEVQDQALLGSGGVPLVGGMVPRV

SEQ ID NO: 157454 - protein, 484 aa, Oryza sativa
  Clone ID: PAT_MRT4530_57023C.1.pep
MASDGHLAAPLLDGGGGVDDAALLRRLYVGHFLARWGARMWEFSVGLYMIRIWPGSLLLTAVYGVVEASAVAALGPIVGAVVDRLAYLQVLRLWLLLQGASFVAAGVSVTALLVYGARLAAAGFPAFVALVVVTNVSGALAALSTLAGTILIEREWVVVIAGGQPAAVLTGINSVIRRIDLSCKLLAPVLSGFFISFVSMEASAAALAAWNLAAVWVQYWLFVSVYAGFPALSETSQISRRRADDDEAAAAAQPQKVERLWMTMLPCWESWAVYARQEVVLPGVALAFLYFTVLSFGTLMTATLDWEGIPAYVISLARGVSAAVGIAATWVYPAAHARVSTLRAGLWSIWAQWCCLLVCVASVWAGGAAPLASAWMLMGGVAASRLGLWMFDLAVMQLMQDGVPESDRCVVGGVQNSLQSMFDLLTYVMGIIVSDPRDFGELIVLSFFLVTCAAAMYTMHVYRVRKHLFHLDRILPKMNWIKAS

SEQ ID NO: 157455 - protein, 119 aa, Oryza sativa
  Clone ID: PAT_MRT4530_57024C.1.pep
QLAPGGGVPPGAHRQVGFLPEQPSGKAGALGPGGFFPPPLPCQKGGRGNLPFRHPQKVKGAFFFLPGAPVPGDLWVVVGPQSWAPQWVVLSPHPFGGEKGVFRPGPLKRWFSPGFSGLV

SEQ ID NO: 157456 - protein, 195 aa, Oryza sativa
  Clone ID: PAT_MRT4530_57025C.1.pep
MMKLAHLFGSSSSSSSSKKENKVSSKKRRSGAKSCSFGSTTSSSSLAASSSDDSAATTPRSVLPTSAAASSSGTKKPAAAAVTREDLEVALRRIVSSKEELAAMLAEADYAGELVLEEIAAAAADEGELKETFAVFDADGDGRISAEELRAVLASLGDELCSVDDCRRMIGGVDTDGDGFVCFDEFARMMMCGRA

SEQ ID NO: 157457 - protein, 72 aa, Oryza sativa
  Clone ID: PAT_MRT4530_57026C.1.pep
PLVAWSLQAPPFWSICCGHLSFILHKRVVWPPSVPLLCSPEAVFFRTVSSTCKLSIAYMICVPAVVRLTYIG

SEQ ID NO: 157458 - protein, 195 aa, Oryza sativa
  Clone ID: PAT_MRT4530_57027C.1.pep
MMKLAHLFGSSSSSSSSSSKKRRKKRRSGAKSCSFGSTTSSSSSSLAASSSDDSAATTPRSVLPASAAASSSGTKKPAAVAVTREDLEVALRRIVSSKEELAAMLAEAECAGELVLEEIAAAAADEGELKETFAVFDADGDGRISAEELRAVLASLGDELCSVDDCRRMIGGVDTDGDGFVCFDEFARMMMYGCA

SEQ ID NO: 157459 - protein, 546 aa, Oryza sativa
  Clone ID: PAT_MRT4530_57028C.1.pep
MGGHVLDRRPGGRHTLTPMGSGMYPSDGLQNAACIHAYLAIAYTGADQVDDPVNTIVTHPKCYDVKDDGPDLYRPGINVAFGGPGGYDCDHNYTQRRWKKPIDSARTRLEGRIRDHKLDKLMIQLKNLRLALDLHEFISQQRNGYASLQLLSRWRHEVGLNIEIGAFLKKYPHIFDIYVHPIKNNQCCKVTPKMADLIAEEDAAIWENEPAIVKRLKKLLMLSTDGTLNMHALWLIRRELGDENLAVADVEEWRVKEYTEKWLAESETKYSFPINFPTGFKIEKGFREKLGNWQRLPYTKAYENNELHPIHNVEQLEKHIVGILHELLSLTVEKMIPLERFSHFRRPFDMEVNLRELILKHPGIFYISTKGSTQTVLLRESYSKGCLVDPNPVYNITCKGNYNPTPISVATLRWLTSGPANGLGVHSPGAPSSAPVSARGSGLGAMSRALEPLSWLMGLWGPRTGAGASGGPWLGSGILRAFRLASNFPEPTALFGLGRLPRPSEWVLPTETGSAGCWRRASGRRPWPRPSHQGVNGARSQSFPQQ

SEQ ID NO: 157460 - protein, 70 aa, Oryza sativa
  unsure (1)..(70): unsure at all Xaa locations
  Clone ID: PAT_MRT4530_57029C.1.pep
SLRPQAGEEEGEGAAGADGGGDWPVGHHGARAXGGAAIWAASAGSGGEGGGRSARRGSRARAPRRNGRYN

SEQ ID NO: 157461 - protein, 273 aa, Oryza sativa
  Clone ID: PAT_MRT4530_5702C.1.pep
MRSMDYYEILHVDRSATDDDIRRAYRRLAMRWHPDKNHTGKKDAEAKFKDITEAYNVLSDAGKRALYDQYGEEGLRAGGAPPQPGGGGGGADDIFAEFFGSTPFTYCNTGAGTTARAKQQAAWDAGGGGAYFGRGGFARDHGGGGAAASPQPPPVESKLACTLEELYVGVTKNMKISRNVVDASGRMKTESEILSIEVKPGWKKGTKITFPGKGNQQWSQLPADLVFVVDEKPHDVYRRDGNDLVAEARVTLADALGGTVVVLATLDGRELDG

SEQ ID NO: 157462 - protein, 76 aa, Oryza sativa
  Clone ID: PAT_MRT4530_57030C.1.pep
MAADLATPIITAADPATPVVTAADPAFPVDAADGSSSKLAEKRRRQPAAAVVTAMEDGEGEGENAGEERRRLRWRW

SEQ ID NO: 157463 - protein, 103 aa, Oryza sativa
  unsure (1)..(103): unsure at all Xaa locations
  Clone ID: PAT_MRT4530_57031C.1.pep
MGERDSTATGEGWPEEERQHREEQRKEEGTKEEEXGGCRGGVCRCRRRGEXRASSASHRPTTPPPQAHCPDPVTAVPDLPPPGRDPSPSPLLAAGENLHLPYA

SEQ ID NO: 157464 - protein, 120 aa, Oryza sativa
  Clone ID: PAT_MRT4530_57032C.1.pep
KGDCFVYGKPVHWTKDCPDRKDKKSANMVVSEGGGTSGYGKSLPTVLCVCHSSDWWVDTGANIHVCADFSLFSSYQVGRVLTVVIGNGALPHRKRRWWRWRWWVNRRGSHSGRSPAPPVL

SEQ ID NO: 157465 - protein, 888 aa, Oryza sativa
  Clone ID: PAT_MRT4530_57033C.1.pep
MARGCGRPAWGGRGTASAFASLPLRALLSESQREVEMGEDLLVTCYYIDCGMNAYAISPAQLYSNTPSDFDFKLESLAQGFQSLFDFAQHLAANVDIVFPVIHGKFGEDGGIQELLEKANVPFVGTPSKNCLLAFDKYNASLELNAQGFLTVPNFLVEKDKLAKSKLEEWFQSINLDKENGKVVVKPTSAGSSIGVVVAYGANDAAEKAEGIISEGIDDKVIIEVFLEGGTEFTAIVVDVGTANNSEPVVLLPTEVELQSSSNIDIQEDTIFNYRRKYLPTRQVAYHTPPRFPSEVIDCIRQGVSILFRCLGLRDFARIDGWFLPTPVTSLPSAENTGKFGNTKYGAVLKYGAVLMTDINLMTGMEQTSFLFQQSSKVGFSHSRILRTVVQHACSRYPSLVPCSNAWTALSRKIQAAKQAEAIQKGTSKKKVFVIFGGDTSERQVSLMSGTNVWLNLQGFDDLDVTPCLLTSGNGYSSFHNQNMNGISRDVWTLPYSLVLRHTIEEVNAACIEAIDPERMELTSRLRDQVMNELGQSLSKYDWFAGFDIADKQPIKYSLQQWINHVKEAQAVVFIAVHGGIGEDGTIQSLLGSAGVPYTGPGQIASRTCMDKVATSLAVSHLASYGVHTIPKDLRATEEIPKSSSDDIWNDLKAKLQTETVCVKPARDGCSTGVARLCCPKDLEVYANALEGKLQRMPANCLSRAHGVIEMPVSPPESLIFEPFIETDEIIISTKSVDDSTRHLVWKGENKWLEVTVGVVGKRGEMLSLNPSITVKESGDILSLEEKFQGGTGINLTPPPSTIMSEEALQKCKSCIETLANTLGLEGFSRIDAFVNVQNGEILLIEVNTVPGMTPSTVLIHQALTEKPPIYPHKFFRTLLDLAFARAN

SEQ ID NO: 157466 - protein, 45 aa, Oryza sativa
  Clone ID: PAT_MRT4530_57034C.1.pep
MATLLLPPICEQPVAMARRRKGREELVYARHFPNYSLHPNKQTYD

SEQ ID NO: 157467 - protein, 292 aa, Oryza sativa
  unsure (1)..(292): unsure at all Xaa locations
  Clone ID: PAT_MRT4530_57035C.1.pep
LFLKRKKGLLRQRRGFTVDRVHGDGLRKRTAEIXRFKTNGRDRSNPSRSTGNGVDDVSCDVTTGGGSTSHXSLANDGAAAQTEGTYGLRATRRILPRHERRWRXNRXRRRRRCSGDPQQKRRGGRERRRLGDHDGGLPERXRRPERRRCTAGQTAAQELTRRQRYRRRRAKARVAIGARGRRRRPTAAGDGKERLGFGGEKRIRFKIEFGDFQRRIDDASKREKIEEIEKIVSPQSIRPEMERRGGPHLSAGGSARERRLGCGLSWAGERERAVLGRLSAQSQKVEFKNLFQ

SEQ ID NO: 157468 - protein, 107 aa, Oryza sativa
  Clone ID: PAT_MRT4530_57036C.1.pep
AGSRLVGRWLPRGWPGAVRDPVLGPSAWAVAARMGDPCSLRPRPLPRCQVAGLPPGVPRLSVPEMHTSLVCCPDVPRLVTLDISCSARRLCQRRRPLFRFQLTGVLL

SEQ ID NO: 157469 - protein, 24 aa, Oryza sativa
  Clone ID: PAT_MRT4530_57037C.1.pep
PLECFVYAGASALRITELGYDIFV

SEQ ID NO: 157470 - protein, 118 aa, Oryza sativa
  Clone ID: PAT_MRT4530_57038C.1.pep
AQKSKRAFLPIKKNFCPAFSVRQIYCLCSMYWDGQYGTPSVSAQVVSQIRDMVSNHAQNPVSNSFFLDGGLSIPFPPKEIAKEVPGIDMSNIEMPSSLCHGPFGQFLMQPLQATYPLR

SEQ ID NO: 157471 - protein, 39 aa, Oryza sativa
  Clone ID: PAT_MRT4530_57039C.1.pep
MHVRVLYMCDGGKRQCLGWDVHVFGRSDRRQVGGSTSGD

SEQ ID NO: 157472 - protein, 716 aa, Oryza sativa
  unsure (1)..(716): unsure at all Xaa locations
  Clone ID: PAT_MRT4530_5703C.1.pep
MGLPNLDSCHASRTFGRSSNGEAQRTNQQCAVRWLGSEKNLGGGNTANAEYVRVLEEPDEDRKLLFLAINQGPSPDLVHGHLHIILGLMLSKGHSTDPLDSSKSPSGLVKHLSLPNGDDQITTSVSGRVDDLAFRCSSDTYDLDDRALVSSRNWAVLSTEGSRPSPRFAHAAALVGSKMVVFGGDSGDQLLDDTKILNLEKLTWDSVAPKVQWGNSVILVGGKTEPASDRLAVWTFNMETEVWSLMEAKGDIPAARSGHTVTRAGATLILFGGEDTKGKKRHDLHMFDLKSSTWLPLNYKGSGPSPRSNHVAALYEDRILLIFGGHSKSKTLNDLFSLDFETMVWSRVKIHGPHPTPRAGCSGVLCGTKWYIAGGGSKKKRHAETWAFDVVEYKWSVCVVPPSSSIATKKDFSMVPLYHRDKIVLVAFGGNRKEPSDKVEILVVLQNEHSFSRRSAPDVDPLLYEYSPSTKELASHLNNCAPLYSNSSVARHSLASTVEHPPRRELLSEPLLQNPNLGASLHRQFHQSEACSLAQKLQKPIDDDKYDDTDDCSSCQASTPKEYRSKRTXLMLRLTWPEFYPARKKIWRPRDQVQEGXARCSSDISHLYNTKIVDLIKRSSALEDQLATALVSKEQAEKNLSSVINSREQLERRLANKEKEAEMLKEKIAGLELAQEESNNLSNTVHADNELHSTRRVLAGEQSRAFQLQDSLLALM

SEQ ID NO: 157473 - protein, 360 aa, Oryza sativa
  Clone ID: PAT_MRT4530_57040C.1.pep
MARQPALVVVVVAAVALAGGGSLGFEFHEATVDAIQLGFSNGSLTSTALVRFYLDRIARLNTLLHAVIEVNPDALAQAARADAERATGHRCGPLHGVPVLLKDIIATRDRLNTTAGSLSLLGAVARRDAGVVARLRRAGAVVLGKANLPEWANFRSSPGLRGWSARGGQSRNPYVLSADPCGSSTGPAIAAAANMAAVTVGTETTASILCPAAANSVVGIKPTVGLTSRSGVIPFTTRQDTVGPLCRTVADAVHVLDAIVGYDALDAKATKAASKYIPAGGYVQFLRIDGLKGKRIGIPDGFFDFPNGTVRKMVYKQHLNTMRKTTSTVISTTTTVIPIRDNFKNREFYSGRKKYYTNIL

SEQ ID NO: 157474 - protein, 406 aa, Oryza sativa
  Clone ID: PAT_MRT4530_57041C.1.pep
MARAAPSLSAAASTAASSSTTPAKKKVLLPIAMGTEEMEAVILAGVLRRAGADVTLASVEDGLEVEASRGSHIVADKRIAACADQVFDLVALPGGMPGSVRLRDSVILQRITVRQAEEKRLYGAICAAPAVVLMPWGLHKRKKVSGELTTSRGPGTAFQFALSFVEQLFGPCKAEDMDNTLLTKVDDNLERSIEVNEIEWSSDHNPHVLIPIANGSEEMEIIMLTDVLRRANVNVVLASVEKSTSIVGSQRMRIVADKCISDASALEYDLIILPGGPAGAERLHKSSVLKKLLKEQKQTGRMYEAGFTPGDILGLKTLGILYSLAWKITAIEIVDQDKTVTAHPSIVNQLTCEVIDRSKVVIDGNLITGMGLGTVIDFSLAIIKKFFGHGRAKGVANGMVFEYPKS

SEQ ID NO: 157475 - protein, 43 aa, Oryza sativa
  unsure (1)..(43): unsure at all Xaa locations
  Clone ID: PAT_MRT4530_57042C.1.pep
RVETSLGSQLCVHSLCRSLQLNNIFXCVVQLLSSNXLXALYTK

SEQ ID NO: 157476 - protein, 642 aa, Oryza sativa
  unsure (1)..(642): unsure at all Xaa locations
  Clone ID: PAT_MRT4530_57043C.1.pep
MPELRSGVRQARLKAKKVEDLAAQDPAENLVVVAPTVAGRRGRGRGGRGGGRATGRGRAGGRGRGVPVIDLDPDQPCEVLPGAAIGGVAAGGPHHIEELANKVVKMDGGSAEKIGGGEDDGNASPVPDKVQVGHSPQYKVERKLGKGGFGQVYVGRRVSGGTDRTGADAIEVALKFEHRNSKGCNYGPPYEWQVYSALNGCYGIPWVHYKGRQGDYYVLVMDILGPSLWDVWNSVGQTMTPSMVACIAVEAISILEKLHAKGFVHGDVKPENFLLGQPGSPDEKKLFLIDLGLASKWKETPNGQHVDYDQRPDIFRGTIRYASVHAHLGRTGSRRDDLESLAYTLIFLLRGRLPWQGYQGENKSFLVCKKKMATSPDLLCCFCPPPFKLFLESVTNMRFDEEPNYAKLISLFDELIEPQHLRPIRIDGALKAGQKRGRLLVNLEEDEQPKKKVRLGSPANQWISVYNARRPMKQRYHYNVADARLHQHIEKGNDDGLFISSVASSANLWALIMDAGTGFTSQVYELSPIFLHKDWIMEQWENNYYISAIAGATNGSSLVVMSXKGTPYTQQSYKVSESXFPFKWIHQEFHRGCSGSGGGGQKRMPSTYFASRCALLQSLLRCTARMTLIASLEAYNLRARCV

SEQ ID NO: 157477 - protein, 49 aa, Oryza sativa
  Clone ID: PAT_MRT4530_57044C.1.pep
LTVPQVELNAERQASQEVSMVGQHGGQPFLRPTAFIAVDWKHVHRKAPH

SEQ ID NO: 157478 - protein, 60 aa, Oryza sativa
  Clone ID: PAT_MRT4530_57045C.1.pep
MAVITFFTDLNILSYLPRHCPILPPNDLENVDLHTPGLSRDACRKMAATAPYGDGTTNQI

SEQ ID NO: 157479 - protein, 45 aa, Oryza sativa
  Clone ID: PAT_MRT4530_57046C.1.pep
VLCITRLLPSISRCWNVGTCICCSSSKKMLEYKMPCYMCVKCEQS

SEQ ID NO: 157480 - protein, 109 aa, Oryza sativa
  unsure (1)..(109): unsure at all Xaa locations
  Clone ID: PAT_MRT4530_57047C.1.pep
MASSTAAPPMLPCRLRLGCCSPCHPRQCRRRARAPAEGCTVAAGAIDGGKRGLRWRAGRWRQARLTAAGVGSSGGLRGGXRGGGGQERRHRLPVHARQPDPXVAAGVLP

SEQ ID NO: 157481 - protein, 96 aa, Oryza sativa
  unsure (1)..(96): unsure at all Xaa locations
  Clone ID: PAT_MRT4530_57048C.1.pep
RYNFLNRALSLIGNDSYSNLGPDXAQVILYRLYRPSATSTLINXTLYFLPIWCPADVQSDSKFNSIPHQNYFDLLPSSLNLMRNSVVNTRWLFHGV

SEQ ID NO: 157482 - protein, 317 aa, Oryza sativa
  unsure (1)..(317): unsure at all Xaa locations
  Clone ID: PAT_MRT4530_57049C.1.pep
MFPRSVSPPYMSFVRMYCQHPRVASDEGRMVDGVRPLPRLLDDAAGRHERVAASLVHAQFARRPDDVLLATYPKCGTTWLKVLSFAIANRRRXGDHPLLTQSPHDLVPFIEVPFHHLHPLAALDALPSPRLLSTHMPPQLLPRRVAELGCRIVYLCREPKDVVVSLWHYMNKGLRAVCRWLLPVRQYGPIWDHCLGYWKKSMEEPDMVLFLKYDDMMADPAGHVKKLAEFLRAPFTDEEVGAGVVEEVVRLCSFEKLSRLPVNSSGVVDRSSGRPMENSVFFRKGEVGDWKNYLTEEMAKKLDAVIEEKLKGSGLTF

SEQ ID NO: 157483 - protein, 1346 aa, Oryza sativa
  Clone ID: PAT_MRT4530_5704C.1.pep
MADASSSLLNLFVGRSVATVRRQFPRNIQAPRDRRRLTRVNIELWGIIEGIRSRFNKCRNTISEITDASVIRAFKSSVRDRYTTQELAIRRITTTRRLFEIVERCAHVDDALRRKNDKPKTGGEKKPAADAFESNKKKNRKNGKRKAQAEVLAAKYANPPKRPNPQGSDTKKSWCPIHKADRHSLEDCLVFKKSLEKHMAFEKGKRVRVVEKNEETPPHESDSAYPNSDLHISHIFDGSTTYSSKREYKKVEREVCSTWRVAAPKMKWSEQRIEFSEEDHPNTSVIPGRYPIVVEPTIRNVKVARVLIDGGSSIPQSELTPTDQPFHGITPQSSSRPLGKITLPVTFGQANNFRTEQITFDVAEFNTAYNAIIGRTALAKFMAASHYAYQVLKMPGPKGTITIQGNAKLAVQCDKRSLDMVEQTPTPPAMSEPPKKPSDMPGVPREVIEHKLMVRPDAKPVKQRLRRFAPDRKQAIREELDKLLKAGFIREVLHPEWLANPVMVRKANGKWRMCVDFTDLNKACPKDHFPLPRIDQLVDSTAGCELLSFLDAYSGYHQISMAKEDEEKTTFITPFGRTVQGALSNQLGNNVEAYVDDIVVKTKTSDSLIDHLRETFDNLRRYRLMLNSEKCTFGVPSAKLLGFLVSGRGIEANPEKIKAIENMKSPTRLKEVQKLTGCMAALSRFVARMGERGQPFFALLKKQDKFIWTQEAGEAFIALKRYLSNPPVLVAPQPNEELFLYIVATPYSVSTIIVVEREKVLADFVADWTMPDNKPDNQGDNETWTMAFDGALNSQGAGAGFILTSPSGDQFKHAIHLNFRATNNTAEYEGLLAGIRAAAALGAKRLIVKGNSKLVANQVYKDYKCSNPELSKYLSEVRKLERRFDGIEVRHVYRKDNVEPDDLARRASRREPLEPGTFLDVLTKPSVKEVSGEVGPNTPDISSEVTEVERAVVDIETTDDWRSPLIKFISSEELPEDDTEAEKIIRKAKIYCMVGNDLYKKAPNRIFLKCVSTDDGRQLLLDIHEGICGSHAAGRTLVSKAFQQGFFWPTALKDAYDMVQRCEACQFHSKHTKLPAQALQTIPLTWLFSCWGLDILGPFPRGHGGYRFLFVAIDKFTKWIEAVPTGEIKADNAINADFQDYCISLGVKICFASVSHPQSNGQVERANGIVLQRIKTRVYDRLMSHDKKWVEELPSVLWAVRTTPTTSNKETPFFLVYGSEAMLPGELRHQSTRVQKHSDESQENQREIDVNLLEKHRERVAIQAASYQQALRRYHEKRIRVCILSIGDYVLRQVQTQAGRNKLSPKWEGPYAITQVLRPGAFKMADGDGRELANSWNIDQLRKFYV

SEQ ID NO: 157484 - protein, 154 aa, Oryza sativa
  unsure (1)..(154): unsure at all Xaa locations
  Clone ID: PAT_MRT4530_57050C.1.pep
SSRSVVLCVLKRTVGSMGNQHKSCCAGEKCAAAITYCTYXLPQCXTSVRVQCAGRGASRISDYKFSTDCXQQIIPDHNGCTRCRGLDHMMYIMYRXLNASEVAHAMIDXLPXCQRRDSIRPMQSLPWFXNVDIPDGPCRGCYWMDYSMTPRTCH

SEQ ID NO: 157485 - protein, 99 aa, Oryza sativa
  Clone ID: PAT_MRT4530_57051C.1.pep
MASAGPGLESLVDQIISVITNDGRNIVGTLRGFDQATNIILDESHERVYSTREGVQQLVLGLYIIRGDNISVVGEVDEELDARLDLSNLRAHPLKPVIH

SEQ ID NO: 157486 - protein, 141 aa, Oryza sativa
  Clone ID: PAT_MRT4530_57052C.1.pep
MASAGPGLESLVDQIISVITNDGRNIVGTLRGFDQATNIILDESHERVYSTRYVLVNCDLLPGLLSNALIGSLVQNSAISNKFLSWCLKVSCQHEGVQQLVLGLYIIRGDNISVVGEVDEELDARLDLSNLRAHPLKPVIH

SEQ ID NO: 157487 - protein, 127 aa, Oryza sativa
  Clone ID: PAT_MRT4530_57053C.1.pep
MATAIGSVRERPSPSSSMQSAAHHCCRQDHVAPEAHDSEPSVAHYRRCLDPGAPKANDGGSARERAPAAGSVKERVVKRFVCPLTHKLDCLVKPMMKNQKEDKSEKKGTKKKADKGANKLGAAQAAS

SEQ ID NO: 157488 - protein, 61 aa, Oryza sativa
  Clone ID: PAT_MRT4530_57054C.1.pep
HRRHGRFSRIPSFGRTRGRPNKLKFWLAASSIASLRRLVNFGPISVNSEFLAHSYISLIVD

SEQ ID NO: 157489 - protein, 54 aa, Oryza sativa
  Clone ID: PAT_MRT4530_57055C.1.pep
ISNQKACKKILILKVGVLQHYSENLGLPPLVMIEIFCRWACIYIVVRLTDVYLF

SEQ ID NO: 157490 - protein, 1693 aa, Oryza sativa
  Clone ID: PAT_MRT4530_57056C.1.pep
MDPGRGGRRRAGFERACRLPNTVHSEIASALPLPTLPLNLGAGLLDDDDPLADPDRPDMIMQAANIARILADTDVSHLGFTEADNVETDPSQCSWLWREVLKHNPDAFTIKPRPLPPSQDPLEGQENQNQEHEKHFAHVAPNFNSMRKDHGFPRDDPIPHSEHLNNDLTQDPVASKKPKVRKKEIHNSASSSDPSIPNSQEVIANFCEMVEDFCGRVEIPDDADGDEWLSIPLNDAKVLVNEITFVRSKKILHEIPMDTLTRLLHVIDRQIRCSQGLSIDVKENADAADAEPLVFSALESIHAALAIMTHHDMPKQLYREELIERILDFSRHQIIDCMAASNPTFRALYKPAEKVTNDGDEDEEVMGNGPANKRRRTANLSMRKSSTNKTYHLADEEHKQIQMITALLVHLVQFSANVPDGLKGTVNWSTIVDASIDASYPIKCYEAATEACCLFWTNVLQRFTAAKSQDMSEAKGIIDNLVQDLLTILNLPEYPAAAPVLEVLCVLLLQNAGLKSKDTSARCFAIDLLGGIASRLKRDSVICSKEKLWILQELTDTESDGSKILKNKCCICLGGRDCVGAVSQENLQCDYACPLCFCKRQLSVLQSYYELQNKENGKRNAASHRKKSTVPDEVTAVDIVQQILLTYIQEGGPQDDGNLFTRWFYLCMWYKDDPHSQEKIIYYLARLKTKDILRDSGNGLVLSRDWAKKICLALGQKNSFSRGFDKILSLLLASLRENSPVIRAKALRAVSSIVEADPEVLGDKRVQSAVEGRFCDSAISVREAALELVGRHIASHPDVGLKYIEKVAERIKDTGVSVRKRAIKIIRDLCASNPNTDTTRAFVEIISRVNDEESSVQLLVTVTWQIVFHVKKSKPYRLFELDRDLVCKTFYELWFEEPTGSHKHLVADGSSVPMEIAVKTEQIVDMLRKMPNHLPLITIVKRNLALDFLPQSAKATGINSSFMASLRKRCELICKRLLERILQVEEGAASETEVHALPYVLALQAFCIVDPTLCTPATQPFQFVETLQPYLKKQLVSQLYCGDIYVLGVNVDNKSTAQLLESIIFVIDAVLPLIWKPPQSVVIELEQDLKQMIVRHSFLTVVHACIKCLCALSKAADRGPRLLEYLVNIFYKHLSGSNSSNSDSQLLGRSLFCLGLLLRYGSQLMAASENQLDFPKIISLLKKEYLLKDDFSLKVRGLQALGYILIAKPDFMLRKDISTLIESSLSSVVDYRLKIQGLQNLFEYLRDAESQLNAESTGKPTPNATNGGSEVPVAAGAGDTNICGGIIQLYWNSILERCLDINDQVRQTALKIVEIVLRQGLVHPITCVPHLIALETDPLEGNSKLAHHLLMNMNEKYPSFFESRLGDGLQMSFRFFESTISNHDMVATNMKSNPIAFVKPGISRIYRLIRANRNSRNKFVHSIVRKFEGDNRSYPTISFLMYCAEVLASLPFTSPDEPLYLIYDINRVIQLRAGAVEANLKNWTSMYQQQEMVGMPRDTGDVMHEPGGCSDQNLVDVSQMMLGNTCSTPVVNMAKLQEDCHGAIALQLLLKLKRHLKTVYSLTDARCQAFSLKDPPKSGETISKQNIPLNISNTNTSLPSCPQDAARVYQDFKTVLREDTVDYGMYTVSAQKKRPTPRSSSRVRRPAAVTRGRGGGGGGGDEDTDDEDWTGGGARVLDFSAQGGRVTRQRVQV

SEQ ID NO: 157491 - protein, 81 aa, Oryza sativa
  Clone ID: PAT_MRT4530_57057C.1.pep
WVGPIVGPALATIYHQVIIMSIPFNTRILSPKPRAAHPPFMQRNQGCPGFTHSTISASVCLSLSACRQDGYTILLLNVPPV

SEQ ID NO: 157492 - protein, 488 aa, Oryza sativa
  Clone ID: PAT_MRT4530_57058C.1.pep
MSRKDSPYAFIIVPYTCLQKQAARTAATMSGGSGFPGFHKHGYDRDYARPLFRVSSFSDNGGGEEQEHYTPSPPRGRSMSRTTSTAPRLSPSVSKLSMKKLQQVVNEKSLEDEEMELMKEKYTKLLLGEDMSGSGKGVCTAVAISNAITNLYATVFGTCHRLQPLPPEKKAMWNREMDCLLSICEYIVEFSPKVQAMPDGSTHDVMATSPRSDILMNLPALEKLETMLLEILDSFEKTDFWYIDQRKQSFSDSMKFQRSEDKWWLPEPCVPESGLSDRMHRELQQKRDQASQIHKMAMEINSGILSEMQVPLSYIETLPKSGKVGVGDAIYRYMSAGDQFSPDHLLNFLNLSSEHEALEIADRVEAAMYVWRRKASMTHVVSKWENVTELNADGDKNLILASRARSLLLCLKQRFPGLSQTTLDTSKIQYNKDIGQAILESYSRVLESLAYNIVSWIDDVLIADGNARKGHNIRMQKQEFSKLSPQQY

SEQ ID NO: 157493 - protein, 98 aa, Oryza sativa
  Clone ID: PAT_MRT4530_57059C.1.pep
RARPCPDCRPELRMASTCFRSAASMESSAWRWAASLSIPSCARSVAPTICRLSVELRCTARLSLLPLHIALAAVRLTSPFSTASLRLIALFKGTLCRT

SEQ ID NO: 157494 - protein, 328 aa, Oryza sativa
  Clone ID: PAT_MRT4530_5705C.1.pep
MMCLALLAFPNAGFNFHEERILRSCSVGAAGPTRQPHPRARAADGRAPRGSRSVRPKAATAARPAGGSALAPMVAAGDHRHGGAAAERGEGKGETKRRSTAHPESTATTKTAAGAEEGGGAARVDGVDGVPAVGERSGGVDEVGEDAAKPKEAAPGREMVRGDDGGGPELGGDGGERVRRRGLDSNPAYGRNPRDRQAGLSPKQQRTNPLPRHLDYRAAARVAFICPRSTATTGTAAETEEGGGAVRDDEDDGAPTVGERNGGADGVDDDAAKPKEATPRGEEVRSDGGGEPELVGDGGERGKRRERDSDGESERRTAETEERGTGNN

SEQ ID NO: 157495 - protein, 72 aa, Oryza sativa
  Clone ID: PAT_MRT4530_57060C.1.pep
ITASRPCMAMLATSCPKSCGNLSIHYPFGIGAGCFWQAGSPTSILPATTAGDRGIRERGISYWLVTLLVLVV

SEQ ID NO: 157496 - protein, 150 aa, Oryza sativa
  unsure (1)..(150): unsure at all Xaa locations
  Clone ID: PAT_MRT4530_57061C.1.pep
YVGISSFEVFEPRGTYVAILSGNIIKPRGSHVSHTQNNKNGGGXGRRHRRQXLAGVVQLDGLRTDVVISPAAGHDFACRRCYLAIAAKQPSLSTVSSRCRRVLLGDFHRNRHSPLRTTAAXHSNATVAAVFSLPQRPPPPLSLRSSTPLN

SEQ ID NO: 157497 - protein, 56 aa, Oryza sativa
  unsure (1)..(56): unsure at all Xaa locations
  Clone ID: PAT_MRT4530_57062C.1.pep
ARRGXGRRGGAAXAAAXGRXCXVIXAVASALGXSGPAFXLRYKKGFAXSSSSSRSS

SEQ ID NO: 157498 - protein, 79 aa, Oryza sativa
  unsure (1)..(79): unsure at all Xaa locations
  Clone ID: PAT_MRT4530_57063C.1.pep
FSCYQTARSKQRIFDRGIEFDQVDRERGWDDQILFNGLVFYAGYLAMPSVRRMPVWRTDGALVTALVHTGPVEFXYYWF

SEQ ID NO: 157499 - protein, 66 aa, Oryza sativa
  Clone ID: PAT_MRT4530_57064C.1.pep
ISSSLVNIGMHVSSNTMQPISRKQDPKVDLRCFRSFFASSVPLIYSTIPCGVTKGRTPLPKRVNQQ

SEQ ID NO: 157500 - protein, 289 aa, Oryza sativa
  unsure (1)..(289): unsure at all Xaa locations
  Clone ID: PAT_MRT4530_57065C.1.pep
SDATLRTQSGTFKDRYLLVNKIDHRIVSQHVLGEVLPXKPLDRILFSDDDLXAIKFIGKGSSGIVQLVRHKWTGQFFALKVLKGLMYLHHEKHIIHRDLKPSNILINHMGEVKISDFGVSAIIASSSAQRDTFTGTYNYMAPERISGQKHGYMSDIWSLGLVMLELATGEFPYPPRESFYELLEAVVDHPPPSAPSDQFSEEFCSFVSACMYTCKAQNISLEPVHASNFVLSPAGQQETDSEYGKRFYGAMPIPHFGMRRDWPIQSHRKPNIGTVPGNKCPLTALVCRL

SEQ ID NO: 157501 - protein, 588 aa, Oryza sativa
  Clone ID: PAT_MRT4530_57066C.1.pep
MAELVGYASSARGLIKMIMATVQTAKRNKKQCRELEERVRMVSAVLSRHRRHELQPSTTETTMAARLPPGAREAADGLDGVLREAHELAVAFSQSGGGGGKKTVRRRLVCWARRVVGARRDAERLASVLSRIDFYLSLYPAIAHADTACRVDRLLWTTTVNVVVSAAVAFAGFVVVSISMVSPEHDQNIGPSIMKAVEEIGGGSTTNNAAYAHGDRGYAAPGKSRAIEYGLELLKKGVIWRVGNGQQIRIWRDPWMPRCHSRRPITPKGTCRVKWVSELIGMDGRWNEQMVNQIFWPIDAEMILKIQLPTREAEDFLAWHPDRLGIFSVRSAYKLGLSLANVDSSSSSSEIETKKEDVAHALCRCPQAKRLWDVMEVAGKKAKDIVGSYTGASWILDQLQLVPGEEQPKFLMVLWRTWHVRNEITHGKRPPPIEASKRFLESYLSSLLEVKQHPRADLSKGKHVIQYGQQQKINLLKGPISAPCRWDKPPQGWMKLNVDGSFVPNTGKGGIGAILRNSLGEAELLACKEGLNMALQWTFLPIMLETDCLEAKNLLCSSNSERSEVAFIVSDIKELMSGNREVVVKKIQ

SEQ ID NO: 157502 - protein, 333 aa, Oryza sativa
  Clone ID: PAT_MRT4530_57067C.1.pep
MGKPGKLALPSHESTIGKFLTQSGTFKDGDLLVNKDGLRIVSQSEEGEEPLDHNQLSLDDLDAIKVIGKGSSGIVQLVRHKWTGQFFALKVIQLNIQENIRRQIAQELKISLSTQCQYVVACCQCFYVNGVISIVLEYMDSGSLSDFLKTVLKGLMYLHHEKHIIHRDLKPSNILINHMGEVKISDFGVSAIIASSSAQRDTFTGTYNYMAPERISGQKHGYMSDIWSLGLVMLELATGEFPYPPRESFYELLEAVVDHPPPSAPSDQFSEEFCSFVSACIQKNASDRSSAQILLNHPFLSMYDDLNIDLASYFTTDGSPLATFNTSNRYDDR

SEQ ID NO: 157503 - protein, 159 aa, Oryza sativa
  unsure (1)..(159): unsure at all Xaa locations
  Clone ID: PAT_MRT4530_57068C.1.pep
METISTTRIVSILVSLVLLGEGDTYGYKYKAPXKERGHRTIDQDTRSTYKPTYDKTRRRISTSKISMASPLRCLRILSGKTXALSLISPGTDSRRKTTLLSTSDDXFKPPSRQQLDRLPQILYCLAYILVPTIPILSKYRSRDIKRRHIFPMPIHVHEF

SEQ ID NO: 157504 - protein, 186 aa, Oryza sativa
  Clone ID: PAT_MRT4530_57069C.1.pep
LESTIGKFLTQSGTFKDGDLLVNKDGLRIVSQSEEGEAPPIEPLDHNQLSLDDLDAIKVIGKGSSGIVQLVRHKWTGQFFALKVIQLNIQENIRRQIAQELKISLSTQCQYVVACCQCFYVNGVISIALEYMDSGSLSDFLKTVKTIPEPYLAAICKQVLKGLMYLHHEKHIIHRDLKPSNILINH

SEQ ID NO: 157505 - protein, 106 aa, Oryza sativa
  Clone ID: PAT_MRT4530_5706C.1.pep
PTTPSALPVTDPSSLPSAPISATTRTRPAAPAPSPTPWPASAPAPTSPSPSVSATAPSPTPTWALGTRPSATSTSARNISATDILFIFRAAIVRIDRFLSWPVLPL

SEQ ID NO: 157506 - protein, 312 aa, Oryza sativa
  Clone ID: PAT_MRT4530_57070C.1.pep
MAGRALPALVSVVVFFISVRDAASKSFVITNNCEYTVWPGILSSAGSAGMDSTGYVLAPRQSWTMSVPTGWSGRLWGRTLCSTDDAGKFTCVTGDCGSGRQDCAGGGAAPPATLAEFTMDGSGGMDFYDVSLVDGYNLPMLVAPQGAAAGGNCEPTGCLVDLNGACPADLRVAPASASGGVACRSACEAFGSAQYWCSGEYGNPNTCRPSAYSQFFKNACPRSYSYAYDDATSTFTCPGSDTAYTITFCPSTTGVKSAGQSSAGLPLMNDTMVYLAGDQANCGCAAAPPCRPPRRRFVPGARHHALNPRGTR

SEQ ID NO: 157507 - protein, 199 aa, Oryza sativa
  Clone ID: PAT_MRT4530_57071C.1.pep
MAIQSEKNRWGPLVSAFFLSFSAPCSLGEQRRQLAGAKAAADGGGALLPPHPSEHPSAMHNPPRLTPPPPRLVTTTPDNSGSLLEFPAPAFVSRAGADRPPAFVSPHRGFHLHSNSALAVLHVRARMHHVQPKGFVDRMRHRAHARLAGSPAQPSGRCCSFLWAEAARGFRPPVAKDEGKHKIGEEKDREKLHHGIVRR

SEQ ID NO: 157508 - protein, 242 aa, Oryza sativa
  Clone ID: PAT_MRT4530_57072C.1.pep
MVSRKTTTATRHRNSTPMTPSAMNAIFCVEDQVVRRMIRWVLAMDAAITFTSFPFSPDASSSRRHSGGIAPAANAASISPSTTLLLLVVLILPPPNRRWINAPFVRTVSVANLYLCFVRSMSIAKRYVLRLFISLKYVTANVVDRQSGRVVVTASSVEKPLRDGLECGRTCNAKAAAAVGEVLAMRLKVDGLAREPIHADATKEVEKKGFKNRTKVWAILNALREHGVNLRLDDDGDHRPHV

SEQ ID NO: 157509 - protein, 115 aa, Oryza sativa
  Clone ID: PAT_MRT4530_57073C.1.pep
CGEHRCGETKAGGRSAPARETKAGAGNSRREPELSGVVVTRRGGGGVRRGGLCMADGCSLGCGGSSAPLLSSRGWRSVQPAHPAVGLSSSPAVRSRLRARQLPPLFTERARGREG

SEQ ID NO: 157510 - protein, 121 aa, Oryza sativa
  unsure (1)..(121): unsure at all Xaa locations
  Clone ID: PAT_MRT4530_57074C.1.pep
RCGVRLGYMRSLXFGYTLWRTSRRXNHIFYYFYINRATFFXHHTRKQSRVCLLLRNVPSLVVHSIQLDSMHSRSREQVSRNFAFDVLHREKMLIRFSESTLQDWSLVFHNGSSSSMFKGYT

SEQ ID NO: 157511 - protein, 57 aa, Oryza sativa
  Clone ID: PAT_MRT4530_57075C.1.pep
QNINVELQNTFQIKGTPIVQGSHAFEIIFYLRNGQASILPPQVPLLPCHCYLTKKIS

SEQ ID NO: 157512 - protein, 40 aa, Oryza sativa
  Clone ID: PAT_MRT4530_57076C.1.pep
MGGKKRKSGSSLWLAVASWFARLGSKVVASSGSAGGRAGY

SEQ ID NO: 157513 - protein, 111 aa, Oryza sativa
  Clone ID: PAT_MRT4530_57077C.1.pep
MERFRSAWGPSSVGSVGTASNARTRGPPSRRAARPPLRRGPPELAGRRAWRELAGTGLGGSEGCRTRRGLLPVGELEDERGAEEEDEGKGIEADLWVPHCFLGCKPRWYAT

SEQ ID NO: 157514 - protein, 85 aa, Oryza sativa
  Clone ID: PAT_MRT4530_57078C.1.pep
MKSLDSCLGWGLEDNSEERQKQPSTTNLSEQSRVAIQKNSNDDDDDDEDEWLEEEETGGAGDTMIPIADDEDVSFSDLEEDDATA

SEQ ID NO: 157515 - protein, 86 aa, Oryza sativa
  Clone ID: PAT_MRT4530_57079C.1.pep
MIAEKKEKEKGSEKKAAAPEKQAKAPPAAPIPSMPAPALALMSPERPHGATRHRFEDLSVPVPGRHRQGTPDPDLTPLRADLAAPH

SEQ ID NO: 157516 - protein, 1629 aa, Oryza sativa
  unsure (1)..(1629): unsure at all Xaa locations
  Clone ID: PAT_MRT4530_5707C.1.pep
DRGGRLSKDRGHDNRHNRRDHDDHERRGLGDTGRGRRHNDDDDGDRHXRHNRRRQQDSREPDRRPRNRAPEPSDPSSSSSSSSSSSSDRHPRRTYDRRQPTVPSAGCRAFGRSLRDVRWPERFRLGTIEKYDGSTDPEEFLQVYSTVLYAAGADGNVLANYLPTALKGSARSWLMHLLPYSISSWADLWQQFVANFEGTYKRHAIEDDLHALTQNPSESLRDYVRRFNECRNTIPGITDASVIRAFKSGIRDRYTTQELATRHVTTTRRLLEIVDRCAHADDALRHKNDKPKTRGEKKPAKDAPKSSKKKNHKSRKRKAQSEVLATEYADPPKRPDPQGSDAKKIWCPIHMSDRHSLEDCLVFKKSLAKHMALVKGKRVLVVEKDAEAVTQESDSAYPDSDLHVSHIFXVPRRQYPIVVEPTIRNIKVARVLIDGGSSINLLFASTLDAIRIPRSELTPTNQPFHEITPQSSSKPLGKITLPVTFSQANNFRTEQITFDVAEFDTAYSAIIGRTALAKFMAASHYAYQVLKMSGPKGTITIQGNAKLAVQCDKXSLDMVKHTPSPPATAEPPKKVSKTNKTPKPDGTIKIVPLSSTNPDKIELALITFLRDNADVFSWQPSDMLGVPREVIEHKLMVRPDAKPVKQKLRRFAPDRKQAIREELDKLLKAGFIREVLHPEWLANPVMVRKANGKWRMCVDFTDLIKACPKDHFPLPRIDQLVDSIAGCELLSFLDACSGYHQISMAKEDEEKTTIITPFGVFCYVKMPFGLITAGNTFQHMVQGALSDQLRNNVEAYVDNIVVKTKTSDSLIDDLRETYNNLRRYRLMLNPEKCTFGVPSGKLLGFLVSGRGIEANPEKIKAIKNMKSPTRLKEVQKLTGCMVALRRFVARMGGXGQPFFALLKKQDKFXWTQEAEEAFIALKCYLSNPPVLVAPQPNEELFLYIAATPYFVSTVIVVEREKVQRPVYYVSEALHDAKTRYPXIQKLLCAVIMTSRXLCHYFQAHRVTVVSSFPLGEVVRNKDVVGRIAKWVVELSQFXXXXXXXXXXKSQVLADFVADWTMPDNRSDNQIDNETWTMAFDGALNSQGAGAGFILTSPLGDQFKHAIHLNFRATNNIAEYEGLLARIRAAAAXRLIVKGDSELVANQVHKDYKCSSPELSRYLAEVRKLKKRFDRIEVRHVYRKDNIEPDDLAQHASRREPFEPGTFLDVLTRPSVKEASGEDSPVAPNISSGATEAEHAIADLETTDDWRTPLIKFIDSEELPEDDAEAEKISRKAKVYCMIGNDLYKKAPNRVLLKCVSSDDGRHLLLDIHEGICGSHAAGRTLVRKAFRQGFFWPTALKDACDMXTHKAASASTLDYPSHLTVLVLGARYTRAIPTRTXSYRFLFVVIDKFTKWIEATPTGEIKADNTIKFIKGIFCRFGLPHRIITDNGSXFISADFQDYCIRLGVKICYASVSHPQSNEQVERANGIVLQGIQDLLWAVRTTPTTSNKETPFFLVYGSEAMLPTELQHQSTRVQKYSDEDQEEQRYDDVNLLEEHRERVAVRAASYQQALRRYHEKRIRARTLSIGDYVLRRVQSQAGGNKLSPKWEGPYTITQVLRPGAFKIADGDSRELANSXNIDQLRKFYV

SEQ ID NO: 157517 - protein, 388 aa, Oryza sativa
  Clone ID: PAT_MRT4530_57080C.1.pep
MCVEESEGAERLDFGEPAAAAADAGKSKSKSPDELPSPRLVLIVPRLIVCVEELSFLHLLAAKFGGLMERVCENTTAADFKQNKSGNFVPNIRSGDWSDIGGRQYMEDTHVCITDLAKNFGYQSVDNEAISFYGVFDGHGGKDAAHFVRDNLPRIIVEDADFPLELEKVVRRSFVHADNQFAKTTLSSGTTALTAMIFGRTLLIANAGDCRAVLSRCGTAIEMSVDHRPCSLSEKLRVESLGGYVDDGYLNGLLGVTRALGDWHLEGMKEAGNPGGPLSAEPELKMITLTKDDEFLIIGSDGIWDVFSNQNVVDFARRRLQEHNDVKSCCREIVEEAIKRGATDNLTAVLVSFHLEAPPQVRVSRPGRVARSISAEGLNSLRTLLRNQ

SEQ ID NO: 157518 - protein, 373 aa, Oryza sativa
  Clone ID: PAT_MRT4530_57081C.1.pep
MDGQDRVVTIIGRNLWETGNDAGGEMSPPPPPPPPRVVICVGDVHGYISKLESLWANLQSALPPDAFATALVVFLGDYCDRGPSTREVIDFLLALPSRHPAQRHAFLCGNHDLAFAAFVGALPPPPDGTPFSSTWGEYIQNEENEGWYRGPGHEGMHCQGRRWGGIMKEKRNPKRGSSYMGSIYDARPTFESYGVAHGSPDLVKAVPEEHKKFLRELVWIHEEENVPIDTNEGQIICKLIAVHAGLERSIDLNEQFRILRTKDTKISKVAMLSGRQDVWNIPKLIYKLQLRRLLYRNRRKVGNATKIKDLAGKQTIVVSGHHGKLHIDGLRFVIDEGGGYADRPIAAIVFPSKELIRSTEGTSSQNRSRYHQE

SEQ ID NO: 157519 - protein, 104 aa, Oryza sativa
  unsure (1)..(104): unsure at all Xaa locations
  Clone ID: PAT_MRT4530_57082C.1.pep
IAXXKRXFVTLXGGLXNALXXXAXPGVRLDGRMNXXXGPELXXRRPXCPATRQGKVWRPXXAGPETXVDXSNFXRFXMLXGARXGXXKILRHFVRCRXLLFLXC

SEQ ID NO: 157520 - protein, 267 aa, Oryza sativa
  Clone ID: PAT_MRT4530_57083C.1.pep
MASSSTTNTSDGAGKPASSSSSACPRGHWRPGEDEKLRQLVEKYGPQNWNSIAEKLEGRSGKSCRLRWFNQLDPRINKRPFTEEEEERLLAAHRHHGNKWALIARHFPGRTDNAVKNHWHVVRARRSRERSRLLARAAAAAAHPPPFSSYASQLDFSGGGASSGARNSSLCFGFGMINRSSSSSSSPAAAPFLIKSFNGTSYGTLLPATTSMAAAAQPVSTITFSSTPMRETLELMDAGGHENHGDVDGGGDKRKGVPYFDFLGVGV

SEQ ID NO: 157521 - protein, 162 aa, Oryza sativa
  Clone ID: PAT_MRT4530_57084C.1.pep
MVSPPSSRIYEEMTGMSPVSGGGRRKAPPEARQPCCFRLKQRIADSSDGSTRTPRKEPSTTASIYSIERRSTCDVSRGCYLLYTSHTFVFADTTLPVVFINTSSPHRPQVWTHARPLTDTFAVCFISDIDRVLYDGNDRITDDGIDHVIYDDNDCINSASLL

SEQ ID NO: 157522 - protein, 135 aa, Oryza sativa
  Clone ID: PAT_MRT4530_57085C.1.pep
ALGMGINRGSGYGDGDDQLTTCTKLALDHIDIDLENVQGFDSNAFTMKLFDDNDDLIYFHVVFTGETPGRRGGGGKRYSFAEIVGKDKPEEVRMWKEMDEESENCTVENCIFCTGMWHPLSGGFCGYKRKKKNRR

SEQ ID NO: 157523 - protein, 65 aa, Oryza sativa
  Clone ID: PAT_MRT4530_57086C.1.pep
RDEISCTLITLEARLNEFNSVLIAHWYAGEPECLHFLWHQLRQCSNFHFVNTRAEAGDNLFLFSP

SEQ ID NO: 157524 - protein, 41 aa, Oryza sativa
  Clone ID: PAT_MRT4530_57087C.1.pep
GLGPGSTFQLQLCLACCLFGVFGFILFPVSFTFKGLRLYAI

SEQ ID NO: 157525 - protein, 190 aa, Oryza sativa
  Clone ID: PAT_MRT4530_57088C.1.pep
MDGDAGMIPTSSSAETSPSSSDVDTESTGSSFFRDRSTTLGTLMGVSFDDDEEQQQQQGEAARDGGEESERPRAAAAEEEEDGRRWRRRWRRRRWRGAGGSWWRLCRDDAGGTTSLGHFLHMERQLAGTGLLSGDGVEERKSSTPLFDNGRALPAREERAKWQLRRSAQATSSSLVRLPVLLTAICSGGA

SEQ ID NO: 157526 - protein, 48 aa, Oryza sativa
  unsure (1)..(48): unsure at all Xaa locations
  Clone ID: PAT_MRT4530_57089C.1.pep
GRSFHILHSHMPHPTTYSRSRYHSYIKSXRGGVKQKLNXSTACKIKRL

SEQ ID NO: 157527 - protein, 85 aa, Oryza sativa
  Clone ID: PAT_MRT4530_5708C.1.pep
MAWSEHGQRPELGSSDVIVRVKTGRYFSSPVRPHYFGTNSGTRDFSGTSDPSTGLFGGYRIGFGNVVSDGYELSVYAPVVLNDAY

SEQ ID NO: 157528 - protein, 166 aa, Oryza sativa
  Clone ID: PAT_MRT4530_57090C.1.pep
MTAAAAAGGGGRGDLSAAVSDEANAWSVRFKNAAVDDGGDDDDDVDDDGEEEGGEEGKGPGGGETEKDSCVEKERPRRSRGEEVSEDDYVQAGGGLERRKRKATVTPQKVQTSKVGIKNKKVQAQYLSDLAKEAERLSQENENLRWELKFKTKDLEHAVQTVEWKN

SEQ ID NO: 157529 - protein, 646 aa, Oryza sativa
  unsure (1)..(646): unsure at all Xaa locations
  Clone ID: PAT_MRT4530_57091C.1.pep
MAIPGSFCHPTALQVFVSVQFVFAVLVPHAAGRHHRHGCAPFSCGHLSDVSPPFRRRGDPPECGVASYELTCTDDKPATIQIDNGTYLVMDIKYKDSTFWVIDANISDSRNNCPLPRWNRDFGYYDQMLYERHGEDSRRRSIQAELMPPYQSTTATFVTCSQEILKSNGKYRPVACMSTNSSFVYVLTGMNSDSIGSLEPSCGYLAMTPLGAGDRPLVLENASYADVVKLMRGGFAIRFPYTSRFYVYSSKIKQCIAQSFXVQLIVGVIPLAMWTLKWIAXFILVPLVILTFLARNYWKIRITTDAVEKFLRMQLMNGPTRYAYTDLIAITGHFREKLGQGGYGSVYKGVLLPGNAHVAVKVLGNSNCNGEEFISEVSTIGRIHHINVVHLVGFCSEEIRRALVYEYMPRGSLDKYIFSSERSFSWDKLNEIALGIARGINYLHQGCDMQILHFDIKPHNILLDVNFVPKVADFGLAKLCPRDQSFVPLSALRGTIGYIAPEMISRSFGIISSKSDVYSFGMLLLEMAGGRRNSDMYAENSNQTYFPSWVYDQLTEQQVGVGEIPAGTVANMHELERKLCIIGLHCIQMKSHDRPTMSEVIEMLEGGVVGLQMPPRPFFCDDEPVSLAVNSHQFSSELSEILEEDE

SEQ ID NO: 157530 - protein, 767 aa, Oryza sativa
  Clone ID: PAT_MRT4530_57092C.1.pep
MGGVVEQIVVSALTGAMSPLLRKLTNLIEKKYMEVKGVRKKLEQLTKELMTIGIALEKYAAMDSPDVQVKAWMAEMRELAYDMEDSIDLFTYRIDHEPADTTNGVKRVLHKTLRKVKKFHHRHKFAKEIEELHVLVNEAYERQKRYRIEEGTSSKLCREIDPRLPALYVEKEKLVGIQGPMKEIINWFGSEEVEPIGQRKIVSIVGQGGLGKTTLANQVYQKIKGQFSFSAFVSVSQKPNMDNLLRELLSQIKSNEPTESYSDQQLIDKLRTCLKDERYLIVIDDIWKRSAWKTIQCAFPINKHASRIITTTRIKSVAQSCCGASDEGFVYQMKPLNKSDSENLFLTRTFGAEKKCPSQLEGIISDILYKCDGLPLAIITIASLLADKPRTREEWERVLNYIVSTSEKDNDLEVMNKILFMSYNDLPHHMKSCLLHLGLFHLRYLGLRWSRIDCLPVQIGKLEYLQTLDLRHTSLLVMPESIVQLKRLMRLVGHHLILPDGFGNMESLQELGFLGCCRSSTNLLKFQKDLQLLRNLRVLKVRFLSEGETGKEAMIPSLCKLGGNNLREVYITSCNGSGDCFADSWCPSPCFLEKFVYKSSCNIHYFSRFPKWIHPTLSRCLTYLDIDVKQMEREHVRILEDLPALIVLHLDIGEALVYGIRISHGAFQCLARLRFCNRSGPGLVFKGGMPKLEWLSVEFGAERAQSTYGSLEVGIRHITSLKHIDFSILVLTDDMEWKIKSSINSQVKMLPQRPEVNIKTVLLPSIK

SEQ ID NO: 157531 - protein, 543 aa, Oryza sativa
  unsure (1)..(543): unsure at all Xaa locations
  Clone ID: PAT_MRT4530_57093C.1.pep
MEKIQSDCPYPGCFFCVMKEANPSKRRASVLKFFRELPSQDDDGQVLPISGLWNTAMAHPNDPEFINLGIFECMSALIWKGLKNRRWLSHDQNIYIPYYAAHIIGSYTMNMEEFAERAVRAGVIPPLVELLRGRLTWVEQRVAVRALGHLATYPSTFPAVADHGEVLELAIQLASSSLEIVYSHFYQSVDRRIGYHCDLLTRGMGGVEMESRKAEEWASQLQCWSLQLINCFAFKSEFLHDICKADFLVKLPGMWGGLVNENSPAGVGLLRTICQSKLGRGHVANIPSVVEALCNIARSSDDWQYMAVDCLLWLVQDSNTCHKVIDRVASTLIDLANISMLGDYKKLGDTIVTVLQEWDNGXIAGAAAKYSEALALCPMKSKKERVVLYSNRAQCYLLLQQPLAAISDATRALCLHSPLNRHAKSLWRRAQAYDMLGLAKESLLDAILFINECSQSNDPDLSLKQNKVPDYAERLVKKQMRTAWLFREAALKHGGIHCEGEASDAFGQEADDSEWETASESDAENDATGEADDETEWKNDNQV

SEQ ID NO: 157532 - protein, 241 aa, Oryza sativa
  Clone ID: PAT_MRT4530_57094C.1.pep
HFINCFAFKSEFLHDICKADFLVKLPGMWGGLVNENSPAGVGLLRTICQSKLGRGHVANIPSVVEALCNIARSSDDWQYMAVDCLLWLVQDSNTCHKVIDRVASTLIDLANISMLGDYKKLGDTIVTVLQECMQQYANSRNSISTHTKEQIDELLSSKQSFKLEKNMPKEDLHIKQAAALVVKLEGNSLFSSGNIARAAAKYSEALALCPMKSKKERVVLYSNRAQCYLLLQQPLAAISDA

SEQ ID NO: 157533 - protein, 371 aa, Oryza sativa
  Clone ID: PAT_MRT4530_57095C.1.pep
MGKGRAPCCAKVGLNKGSWTPEEDMRLVAYIQKYGHANWRALPKQAGLLRCGKSCRLRWINYLRPDLKRGNFTAEEEETIIKLHGLLGNKWSKIASCLPGRTDNEIKNVWNTHLKKRVSPEQKKGGGKSKKKTTCTDVLVPSPSPSSSTTTTTNCSSGDSAGEQSNTSKEEEEETDKIEIPMLELDPCCFDFDMLVDPVVPDTYCPAVSASASASAPTSPCSSTSPSCARAGVDPLLDLPEIVDLGPELWSIMDGGAGDGCTEAPPPAWSNAAAAAAANATVATTTSLEEEEGKEWWLEDLEKELGLWGPTDDYHCHPGPQGQPGRAGPPPSAVVEDPVSCYFQAGPTAAATWQGHEPSAVITSNPMDYYV

SEQ ID NO: 157534 - protein, 72 aa, Oryza sativa
  Clone ID: PAT_MRT4530_57096C.1.pep
SMVVKADRPGSGEFERYSVFGSARVSLVVINLLTFRLSVVSGAISKEHAMSTVLAVLIYRYIIFSSLAFCLF

SEQ ID NO: 157535 - protein, 54 aa, Oryza sativa
  Clone ID: PAT_MRT4530_57097C.1.pep
MSLRAIGYLLTRSRRGFSPRGIPRAQAESSLATASLVGLAATILCFKQNTDKSG

SEQ ID NO: 157536 - protein, 423 aa, Oryza sativa
  Clone ID: PAT_MRT4530_57098C.1.pep
MSLRAIGYLLTRSRRGFSPRGIPRAQAESSLGILTRAGRPAAHSFHSVRLSSHPVLKSKIFSFVHSQLICLSSRYAIQMGFAVGGGSVVVATASLVGLAATILCFKQNTDKSGAREEDKEEVTKKLPAAQDAGKEPYLSKEAAIEAGFVDKDGKILWSSYLNYVEHGKTLPDDEAFAKEARDYQEAIKKQEVKVDEATMKARFHDLMKEYGRSYSTEEEKARRYEVFKEATLWADKVNALEPRTIPYGPNGYADFTDEEFKRMHCHCSAIDWERYIDELNTMAARGWTYFRDPDATTNVSEAVRKARLGARHKTSRSLHTQLAPGDTPQLSGVNFSGLMVTMFPSSTSVKHNFWIFSLTNPGLAEDGDGGSFSAMKKIAYLTPNLSHRACQKRVDEKHEAWEICLTPVQVQSSPSGVLACQLI

SEQ ID NO: 157537 - protein, 90 aa, Oryza sativa
  Clone ID: PAT_MRT4530_57099C.1.pep
MTRYRAPTCHHDMPERNCDMTLRITLPSQAHHTIGFALPLKPRRAPTINDTGGCVHRGAAVRPEGEGLIGTVATGAGKMTTTMVTAATVQ

SEQ ID NO: 157538 - protein, 491 aa, Oryza sativa
  unsure (1)..(491): unsure at all Xaa locations
  Clone ID: PAT_MRT4530_5709C.1.pep
HLDYRAAARVAFICPGECPSTPDFIHLXPCTFVYNQTEPQTKPYPLDMWKYGSALQQRPELNPYSGRGATSHNWHAPKPHRXTGFRGFERGRERERTSEPSATTANHASGTSGTTEATRSTQAKLQAYKEAITIHKNKTEYTEAVPGSTEADPVCQPRRVADKRTPLNTTRPAHVETTRLPSGHTNTDTTXVTTRTRERLPTPVHGRDVAGTRLDDAEPRTKTMTGXSGSLDERGRRTRTARRRDERHDDRERREDEDDDDRGRRGGDEGXSQQQLHGDEDDVEHAATMTMTEAAPRDDEPGNRWDVDRRGRTVTRKRRWQPAGRPAHRGRGRGGRRRNRGXQHHGCRRGGTSGGLRGKQRVGRRRGGGCGAGGGDGATGRRSGEAAQAAGGGRRGGKXKGDGGNAPPAVTARNGGXAGVEEVAATLEEATARPAGARSRRHRRLEASSGTGEGGRRWGGENDFYFGMNLSGRDRDRAPAVFWGNGAEVEG

SEQ ID NO: 157539 - protein, 71 aa, Oryza sativa
  Clone ID: PAT_MRT4530_570C.1.pep
MADGHGDYGCDKTCCNVPERLESRMEAAAGLEERKSSISLTTMLQLDSFGGLAPRYLEKITAQWLSLRWLG

SEQ ID NO: 157540 - protein, 80 aa, Oryza sativa
  unsure (1)..(80): unsure at all Xaa locations
  Clone ID: PAT_MRT4530_57100C.1.pep
FFFFFFFFFFFLXGNGYXPQAXXQXLXPXVXXXPSPPXXXXSXXTXMXXDLXRXENXXXFDLQSGFXPETKSTXPKXPKR

SEQ ID NO: 157541 - protein, 117 aa, Oryza sativa
  Clone ID: PAT_MRT4530_57101C.1.pep
GVERCIQPTIPFWWEQMTFLQGYSEGGGGVGDGDLHGADGLKHLVEPLVEKVVERVDVRPVQLPQRRVLVLLGGRRALPGRHGRACGGERGREGERRRRRRRRRAAVAASRFGGKEG

SEQ ID NO: 157542 - protein, 85 aa, Oryza sativa
  Clone ID: PAT_MRT4530_57102C.1.pep
FEHIWFQAKKIIAQYHYLLPLHRSILATLGRSKRKPFFCFNQHSYKIYQNYRSYLGVIRSITSMPIWWSMDISPSLLCASDSNLP

SEQ ID NO: 157543 - protein, 98 aa, Oryza sativa
  Clone ID: PAT_MRT4530_57103C.1.pep
PAAIAAIATLSNRVKPDNFIITGRAENGTETFRIPDLFSKTEFVGRNFFGIFGKRKRIRKYFLGNGIENDKGNFRRNSESQLIAGGDRSRNNNTATGH

SEQ ID NO: 157544 - protein, 2657 aa, Oryza sativa
  Clone ID: PAT_MRT4530_57104C.1.pep
MLEVRTLLKEFVVAEIKGDIQAAQKLRTKAANRCSSTASLRASTPTFAPKPPSPTVQHMEVGLLEALEAVSDNLHRHISHARHMDSPHPLRNYRRKYHKVQRLHQLVSSRIAQSSVPEEDWSLDTSILIGKVCKYPSILEPPYDLFPDEWAHEPTKIKEKVRRAIMKEYWKRRYGEHILLPGPTISFDYNTYAPCQQSTWEPCLHLSAVGGSSDYNNNRFVVLRPEAPAPRSEDLRQELHELQDRMAQLGRRLQDHEAPSTHAGGRSRRYQPSYRPQHNSRTLAPRHTPLPAQVTRQRQTAPPPRWNRWLRRQDHHASSRPAQEWRVRGAPPIQAPPHVPSSPRRGVQIPRLQHAPTENQRKRERRRNNRYALYRELEDLELKHTQVRVHPDGEVRQEDERITFRISPNLERDARYSYLIARLTPRPRRVRPVVDEKRETTAIQPRPVTILQRSKGQAQVSPSTSSPKNQFERNESTPMEGVEQAPIEHVDMAPRQVDAILEKDPSPVPPFGVKQKMGSENREETQENIVMCGALVAHSEIESSAVWVPPPVTQELTYPSDEEIVPNPRERDLRPKEIKISSQAAYPHRYVDITTHLPQDQSDLAQVASRPGANTRVKSIAIRSVEEVISQAREEQEDHIKDGELTEPESSSSSASSLEMNLNPLHYNDLNLSIPSDGERYPANFDSAPAHMVVDGEPKQDVVVLPGQDINPPPRNNASTSRVPPASLEEQIQEQRQVVDQLTAKLDRFIDIMTTSTSNPPRVDMAPAIIDPQIEELDAIAQHPTQTHDARRSTSTPTTLKDYHDIVEDLVNRRLKQISIEQTPRPMESELEKPYEAWHDLVAFPARWHPPKFRQFDRTGDAREHLAYFEAACGDTANNSSLLLRQFSGSLTGPAFHWYSRLPTGSIRSWASMKEVLKKHFVAMKKDFSIVELSQVRQRRDEAIDDYVIRFRNSFVRLAREMHLEDAIEIALSSAVAATKLEFENSPQIMELYKNASAFDPAKHFSATKPSGGGSKPKAPAEANVARVFSTAPQGQVPMLGAKNEQARGRQRPSIQDLLKKQYIFRRELVKDMFNQLKEHRALNLPEPWRPDQVTMVDNPLYCPYHRYVGYAIEDCVAFKEWLQRAVNEKRINLDADAINPDYRAVNMVSVEPGSREQEGADIWVPLNQVEHQIARMMLTTTPAAHREVTHDTNKKMWNTVRRRPQFTGPPPRHPQMKPQPRTAPTTRRWPDPSRRRLPPCFVPFSKGDESFPRQGRELPTLVQFLPKNWGQASPISTKEAEEVAGSTPTPDVVSCNVAPCNVVLTYNDTTGASSDDVFTTREQETLHAKSDQTRVEEAHMNLRGGKTLPDPHKAKPSKVDKPIKEASPPGEAPETKARSKEKPDIDYNVLAHLKRIPALLSVYDALILVPDLREALIKALQTPEVYEVDMAKHRLFNNPLFVNEITFADEDNIIEGSDHNRPLYIEGNIGPAHLRRILIDPGSAVNILPVRSLTRAGFTTKDLEPTDMVICGFDNQGKSTLGAITVKIQMSTFSFKVHFFVIEANTSYSALLGRPWIHKYRVVPSTLHQCLKFLDGKGAQQRIVGNSSSYTIQESYHADAKYYFPVEENMQQLGRTAPAADVLIQPGTAMTPEARRTPNKEATPTRSGVVKKRVAEIEEAKAGVQSICEDWWAQAEDFIKRKCKEQPKYGLGYINTDETDDEDEALDDHTFHCCTASVTTIADAQLPQHPFQVAAAEVEEELDTMQAPQQLEDGGQPTIDELVEMNLGTEDDPRPIFVSAMLTEEEREDYRSFLMEYRDCFTWTYKEMPGLDPRVATHKLAIDPQFRPVKQPPRRLRPEFQDQVIAEVDRLINVGFIKEIQYPRWLANIIPVEKKNGQVRVCVDFRDLNRACPKDDFPLLNTELVVASTTGYGALSFMDGSSGYKQIKMDPLDASDTAFRTPKGNFYYTVMPFGLKNAGATYQRAMQFILDDLIHHSVECYVDDMVVKTHDPKRHQEDLRVVFERLRRHQLKMNPLKCAFAVQSGVFLGFVVRHRGRLGKWALLMMEYDITFVLQKAIKGQALAEFLAAHPVPDDSPLVTDLPDEEIFSVELGTPWELYFDGASRGDEECSNNEAEYEALILGLLLALSMKVHSLRAHGDSQLVVRQINNIYEVRKPKLVPYYTVARKLMDKFEHVEVVHVPRSRNAPVDALAKLAAALVFQGDDPARIVVEERWLFPAVLELIPEEVETNTITTDAVDEEDWRQPFFDYFKHGSLPKDAVERRQLQRRLPSYIYKNKPPVPLYPTVPSWPFDAWRIDVIGLINPPSSRGHHFILAATDYFSKWAEAVPLREVKSSNVINFLERHIIYRFGVPHRITSDNAKAFKSQKIYKFMEKYKIKWNYSTGYYPQANGMAEAFNKTLGKILKKTIQLPSVRVAIHDELTRDEQVRLRFQELDAVEEERLGALQKLELYRQNMVRAYDKLVKQRVFGKGELVLVLRRPIVITHKTKGKFEPKWEGPYIIEQVYDGGAYQLIDHQGSRPMPPINGRPMEISSPREDYRRRARKGYLPQHKLWPSVQPLAIPVRIFASHLSETTLRSPRQHTSFSGKSESQLPFGHIRINKGHFREQSGAPPRLVLSCTPFNLADRHRIHQAITSKSIKLSSGAGWRTNAVSVKP

SEQ ID NO: 157545 - protein, 300 aa, Oryza sativa
  Clone ID: PAT_MRT4530_57105C.1.pep
MDADEAAGSSRRMDLNLYLGLPRAPRPRRSDLGSDLALSTPMPSSPSFSAASVDAPPPPPELSHPPYSPSHADLSPPLQEVYSLYNPDDPPASETHLPPYAPPPAPVVSELPDDLEFGLHPPPPLPVTGGFSSRLEADGSVRGGLGRTFRHSVLKLTQLGVMLPQSQNGPSSLLPDGIDWLRGLTLLGYEDTERFASAMSDFRRITGPSQYGASASSSNPPNLESTFDRTHVVAAPSADQASNSSTAAVIQGDAGISESAGEPSNAGSSRSLRRRGRSSALGSLDADGGGLQRNKRRRIN

SEQ ID NO: 157546 - protein, 68 aa, Oryza sativa
  Clone ID: PAT_MRT4530_57106C.1.pep
YDFADRLAFVAADWCPRLYGWSVTPPFMGVHVFADRLAFAALAWFHWRRLAFLSPLMDCFVPTSATSA

SEQ ID NO: 157547 - protein, 46 aa, Oryza sativa
  Clone ID: PAT_MRT4530_57107C.1.pep
GGCGGGYGQRYGGGGYCGGCGYGGGYGGGYGQSYEQCYGGGYCYGS

SEQ ID NO: 157548 - protein, 67 aa, Oryza sativa
  Clone ID: PAT_MRT4530_57108C.1.pep
KFLCDTNHRFSDHTMCLDCWMVLPIVNRNNLNILDEKELPLLIFIRYFCPQGFLNSPPQRAPDASKR

SEQ ID NO: 157549 - protein, 52 aa, Oryza sativa
  unsure (1)..(52): unsure at all Xaa locations
  Clone ID: PAT_MRT4530_57109C.1.pep
YPEAKLSSXAVVAVSRAAGEEVDRDYLXXKSQTRCSPQQACEDLGGEFCKAT

SEQ ID NO: 157550 - protein, 163 aa, Oryza sativa
  unsure (1)..(163): unsure at all Xaa locations
  Clone ID: PAT_MRT4530_5710C.1.pep
QPHLRARAADSRAPHGSRGALPKAATPAQPTGGGAPAPPGSTATTGTATGAEEGGGAARVDGVDGAPVVGDRNGEVDEVGEDAAKPKEAAPRWEVVRGDNGGGPELGGDGXERERRRELDSGGERDWRAAETVEGGTGRVYIGLREGRGGRRRGKRARESRPP

SEQ ID NO: 157551 - protein, 61 aa, Oryza sativa
  Clone ID: PAT_MRT4530_57110C.1.pep
LTSLIISGRKLASKASLGEWRSCRWVWHGFWRTKASRQRALVQGSHMSAEVDWWWSISVSA

SEQ ID NO: 157552 - protein, 309 aa, Oryza sativa
  Clone ID: PAT_MRT4530_57111C.1.pep
MAIPVIDFSKLDGDESEATLAELAAGFEEWGFFQLVNTGIPDDLLERVKKVCSDIYKLREDGFKESNPAVKALARLVDQEGEGLAMKKIEDMDWEDVFTLQDDLPWPSNPPSFKETMMEYRRELKKLAEKLLGVMEELLGLEEGHIRKAFTNDGDFEPFYGTKVSHYPPCPRPELVDGLRAHTDAGGLILLFQDDRFGGLQMIPNRGGDGRWIDVQPVENAIVVNTGDQIEVLSNGRFKSAWHRILATRDGNRRSIASFYNPARMANIAPAIPAAAADYPSFKFGDYMEVYVKQKFQAKEPRFAALANK

SEQ ID NO: 157553 - protein, 95 aa, Oryza sativa
  Clone ID: PAT_MRT4530_57112C.1.pep
QISISVDEDHRISYLKHLHWLHHPGSWLMILYDTAKNVGHANVLDRVNKHTFAIHGACMLIESSGSQPSQLVLCQENDVCCSLSPIINQSCAQSG

SEQ ID NO: 157554 - protein, 66 aa, Oryza sativa
  Clone ID: PAT_MRT4530_57113C.1.pep
MPAVCVVANDACSCTVAAIARPSPAAGLLLSRLVPACSRATDVLSPSGGGEQLGWATGEERRAGNN

SEQ ID NO: 157555 - protein, 82 aa, Oryza sativa
  Clone ID: PAT_MRT4530_57114C.1.pep
LRRRFRGPQTTANSLYPMRFLVSCDMPSQARDGQFRLGPGLSCEAGSVSDTTCETEGSHLLLIMGFLGMAICELYLVSIETT

SEQ ID NO: 157556 - protein, 124 aa, Oryza sativa
  unsure (1)..(124): unsure at all Xaa locations
  Clone ID: PAT_MRT4530_57115C.1.pep
SSHVCRICGTRSXVVTGAGYRCDHCDFDIHEAKACANFFPEKMITPPPNFFGHPWSHINLTLRQITXGSWRTTLCRGPFQHGHLAYRCAPQRCGXSPRTPLRTMLPGEIRSPLHREHALTHSGL

SEQ ID NO: 157557 - protein, 105 aa, Oryza sativa
  unsure (1)..(105): unsure at all Xaa locations
  Clone ID: PAT_MRT4530_57116C.1.pep
VRLSKNFEQPQHPTSSLHPTVHPMRTGLGLLRPATRRPPCHVQPKENXDWTALLRPPELPSLTSSHRQLPFHNRLSLAHCHQGSIVATGLDATNCHCCARRRRRH

SEQ ID NO: 157558 - protein, 371 aa, Oryza sativa
  unsure (1)..(371): unsure at all Xaa locations
  Clone ID: PAT_MRT4530_57117C.1.pep
DLASCCSPGRQGRCSPPAWAAPVGSPGASCNFGLITRLCARLRHTAAIVFEHVYYAINLLVATTLFPRAAVPLPMVXSTGCCNAERPXQRGLTVDLVLAVASIWSCSCVVLSDRSFAAFVFFLTVRASTTSSSALVIVSHSGYLYMATDVAVQAVGPATSPSSSSSMSHCQHRRIFLDYTSLFSGNCXVLLRQFCLYAVLACPWVWQTRRDVSYFTVRLHRLFGVIFLXTIIVIVSPSSSPARPRAPLVHDALPCVYNHSTAPHARPTARLPRHHRLPYFGYIDHGXSTHGFIDHGSLGSFALSTSTMAXKGYHRVEYSCWFFLQSKCPRCSCMDCGGMFEYMYSYIYRPXRLNTINPRYAVFSSLYTIQQ

SEQ ID NO: 157559 - protein, 152 aa, Oryza sativa
  Clone ID: PAT_MRT4530_57118C.1.pep
MAVGGFNAVAAGSGALAQRLHREASKPPDAALVTVRKGEAVVERELAVTTGQRGKLRRPKQRCPVTGSPLVEHGKEADGPTEGRCSLKASLIGSPSGIKLAARPPRAVPPRMDQALGTLPCADPSSVTTEDRGGGGCGASDDCRRQGWLIRR

SEQ ID NO: 157560 - protein, 506 aa, Oryza sativa
  Clone ID: PAT_MRT4530_57119C.1.pep
MVRVPFVTAVTTVFSYGVIFGFGHLRDWFRALLRSLFSGHSPAAAGTNLKGYAPICGGQEDFYYRRFVRRVQDCFWRPIASKPDAWFDVVERYSNDSNKTLPRSPRLLPQILDAGKSRCLNLGSYNYLGFAAADEYCTPRVIESLKKYSASTCSVRVDGGNTKLHVELEELVARFVGKPAAILFGMGYVTNSAIIPALIGKGGLIISDSLNHNSIVNGARGSGASVQVFQHNNPAHLEEVLREQIAGGQPRTHRPWKKIIVIVEGIYSMEGELCKLPEVIAVCKKYKAYTYLDEAHSIGAVGKTGRGVCELLGVDPADVDIMMGTFTKSFGSCGGYIAASKEIIDHLKHICPAHIYATSMSPPAVQQVISAIKVILGEDGSNRGAKKLAQIRENSNFFRSELQKMGFEVLGDNDSPVMPIMLYNPAKIPAFSRECLRQHVAVVTVAFPATPLLLARARICISASHSREDLIKGLEVISKVGDLVGIKYFPVEHEKTASVEKLKKLQ

SEQ ID NO: 157561 - protein, 2033 aa, Oryza sativa
  unsure (1)..(2033): unsure at all Xaa locations
  Clone ID: PAT_MRT4530_5711C.1.pep
MSPSPTWRPVDLRYKRDPPGGPXGIESHSQDNHHSLRNLRTSVPQYPLYPVYGYPPSTVACQVGGLGVQDSTTMTTSFVDNSVNTNLNQGVPTSTMLVWIQVNEIVFPVYTTVPISAGPSMIGSENTIATTQDDSMSKDPPAEAENGTSTTSEPEKDPSAAKPCLSDKNHEPTRMTSEXRSWCPIHKTRKHTLQACWVFLNVHTEIRAYKERGIQRTSSTRDVYCPIHKIKNHDLSTCKVFLSAMKTSPPKVQQSQIPLKDEDKEQGATLISDRFLGVIDIDPHEPSVLHLLEDYGSSSTSTPREVLAIDETGTSARTNAEAENQVTTPAQHIRAVNAILRETPYDPVLNDDLARWTERLRESVTNLSNAFEEAAAAAHLEQPPTGGANGENPEQRESPHRATPPPRGTGDLRDHLNGRREARRAXDNKNRSRHRVSSRRHDNGDNRHNRHDHDDREPRVLGDTGRGRRHNDDDDGDRRXDNNGRRQQDSRXPGRCPRNRTPESSDPSSSSSSSSSSSSDRHPRRTYDHRQPTTPSAGCRAFSRSLRDVRWPERFXPGAIEKYDGSTDPQEFLQVYSTVLYAAGEDDNVLANYLPTALKGSTRSWLMHLXPYSISSWADLWXKFVANFQGTYKRHAIEDNLHALTQNPNESLRDYVRRFNECRNTIPEITDASVIRAFKSGVRDCYTTQELATRRITTTRRLFEIVDRCAHADDALRHKNDKPKTGGDKKPAKDAPESSKKKNRKSGKRKAQAEVLATEYADPPKRPDPXGSDTKKTWCPIHKSDIHSLEDCLVFKKSLAKHMALEKGKRVRVVEKDAEATAQESDSAYPDSDLHVSYIFXVPRRRYPIVVEPTIRNIKVAQVLIDGGSSINLLFASTLDAVGIPRSELTPTDQPFHGITPQSSSKPLGKIMLPVTFGQANNFRTEQITIDVAEFDTTYNAIIGRTALPKFMAASHYAYQVLKMPGLKGTITIQGNAKLAVQCDKRSLDMVEHTPSPPATAEPPKKVSKTNKTPKSDGAIKIVPLSSANPDKTELALITFLRDNADVFAWQPSDMPGVPREVIEHKLMVRLDAKPVKQKLRRFAPDRKQAIQEELDKLLKAGFIREVLHLEWLANPVMVRKANGKWRMCVDFTDLNKACPKDHFPLPRIDQPMDSTAGCELLSFLDAYSGYHQISMAKEDEEKTAFITPFGVFCYVKMPFGLITAGNTFQRTVQGVLSDQLGNNVEAYVDDIVVKTKTTDSLIDNLREMFDNLRRYRLMLNPEKCTFGVPSGKLLSFLVSGREIEANLEKIKAIENMKSPTRLKEVQKLTGCMVALSRFVARMRERGPPFFALLKKQDKFVWTQEAEEAFIALKRYLSNPPVLVAPXPNEELFLYIATTPYSVSTVIVVKREKVQRPVYYVSEALHDAKTRYSQIQKLLYAVIMTSRKLRHYFXAHRVIVLSSFPLGEVVRNKDVVGRIAKWVVELSQFDVRFVPRTAIKSQVLADFVADWTMPDNKSDNQIDNETWTMAFDGAHNSQGVGAAFILTSPLGDQFKHAIHLNFRATNNTAEYEGLLAGIRAAAALGVRQLIMKGDSELVVNKVHKDYKCSSPELSKYLAEVKKLEKRFDGIEVRHVYRKDNIEPDDLARRASRREPLEPGTFLDVLTRPLVKDASDEDSPISLNNSSGATXIERAVADIETTDDWRTPLIKFIHSEELPEDDAEAEKISRKAKVYCIIGNDLYKNAPNGVLLKCVSSDNGRHLLLDIHEGICRSHTAGRTLVGKAFRQGFFXPTALKDACDMVQRCXSRHDSTERLQVPIXVAIDKFTKWIEATPTGEIKADNAIKFIKGIFCRFGLPHHIITDNGSQFINADFQDYCIRLGVKICFASVSHPQSNGQVKRANNIVLQGIKTLLWAVRTTPTTXYGSEAMLPTELRYQSARAQKYSNENQEEQRNDDVNLLEEHRERVAVRAASYQQALRRYHEKRIXARTLSIGDYVLRRVQSQAGRNKLSPKXEGPYTITQVLRPGAFKIANGDGRELANSWNIDQLRKFYV

SEQ ID NO: 157562 - protein, 126 aa, Oryza sativa
  Clone ID: PAT_MRT4530_57120C.1.pep
GLPVQSLREGPATGRDSIEATHCRHSWPLHHADNCRWPRQSPTATGCSDQIRRDNARSTRGVPGSGHTGTGSTALRAPSHHPHAKAGRHWGQASPPPSRLAAWFSSSALRRRRWEGQEGSEAAMGL

SEQ ID NO: 157563 - protein, 124 aa, Oryza sativa
  Clone ID: PAT_MRT4530_57121C.1.pep
KIIINVVRHFRSITTRLLLSPTLNSPEIDFCLHDWATMRKNNLKEPKVRRGTHMANTTSRFPFDFCTSSIAIIINKLIKSLTHHESVFSGELEDGGEDPDAAGGASCSNNHRGRDDGGGDGGAS

SEQ ID NO: 157564 - protein, 504 aa, Oryza sativa
  Clone ID: PAT_MRT4530_57122C.1.pep
MVRLPYVTALTTLFSYGLLFAFGQLRDFFRRILDAGKSSNLKGYAPICLGLEDFYTRRLYLRIQEVGISEPYRLITPAMDCFGRPIASAPDAWFDVVERYSNDSNKTLHRTTKTSKCLNLGSYNYLGFAAADEYCTPRVIESLKKYSASTCSVRVDGGNTKLHVELEELVARFVGKPAAILFGMGYVTNSAIIPALVGKGGLIISDSLNHNSIVNGARGSGATVRVFQHNNPAHLEEVLREQIAGGQPRTHRPWKKIIVIVEGIYSMEGELCKLPEVIAVCKKYKAYTYLDEAHSIGAVGKTGRGVCELLGVDPADVDIMMGTFTKSFGSCGGYIAASKEIIDHLKHICPAHIYATSMSPPAVQQVISAIKVILGEDGSNRGAKKLAQIRENSNFFRSELQKMGFEVLGDNDSPVMPIMLYNPAKIPAFSRECLRQHVAVVTVAFPATPLLLARARICISASHSREDLIKGLEVISKVGDLVGIKYFPVEHEKTASVEKLKKLQ

SEQ ID NO: 157565 - protein, 82 aa, Oryza sativa
  Clone ID: PAT_MRT4530_57123C.1.pep
MNHQERMSGRHRDQWEQPPAAQDGGDDEQIHPPVNCSIRRWLSAEEAAGSSTSRRRKGASIPLRRRRLSLPQVVHVQAEQST

SEQ ID NO: 157566 - protein, 116 aa, Oryza sativa
  Clone ID: PAT_MRT4530_57124C.1.pep
MPKPHDDTALAAAAKQNHTHDDAAAQLVLSRRAAWALRLPEHIAFMGASPSSHCPGASAVVAETFFRSPPPGLPSVCATALPRGVVDLNCRRWGGFIHYESPPRGAIDKLRHRSSI

SEQ ID NO: 157567 - protein, 52 aa, Oryza sativa
  Clone ID: PAT_MRT4530_57125C.1.pep
APGNGGAGAGAAVASPASMQAQMAMQKELATVGRLPHCRSAPSPFLNILGWI

SEQ ID NO: 157568 - protein, 101 aa, Oryza sativa
  unsure (1)..(101): unsure at all Xaa locations
  Clone ID: PAT_MRT4530_57126C.1.pep
TPTKLNIILGLALLGIVACNASARFEALSQSFXRCLLXSSSLLQQQRLNLCRGFLRHHHNLFASPYWHPGTYXIDRHXTMQYHCXHQLKLVVRQSHYHAYL

SEQ ID NO: 157569 - protein, 101 aa, Oryza sativa
  unsure (1)..(101): unsure at all Xaa locations
  Clone ID: PAT_MRT4530_57127C.1.pep
DADITPSDIHNNPPPVIXESIIRARARQLNLEVSSFLCSSLYEFENRLLPNDYIVIKNNVDNKETLREGLXMEDQQGRPSQGGGPNQXDFECNSESRTSPH

SEQ ID NO: 157570 - protein, 103 aa, Oryza sativa
  unsure (1)..(103): unsure at all Xaa locations
  Clone ID: PAT_MRT4530_57128C.1.pep
RKQRPPQPPLLXGGWXEFSADIISPHXGPAXXIPRGKVVSFPLPFFAAAXXFFREXGGVGGRISSASGQKXGGAQPGGRGXGCXXKMIAPAAHRLVPNXCSPQ

SEQ ID NO: 157571 - protein, 110 aa, Oryza sativa
  unsure (1)..(110): unsure at all Xaa locations
  Clone ID: PAT_MRT4530_57129C.1.pep
ALLPPPPPKGLAKRGAAPRGRRRLRASQAPPLPPPPQAPVTVSAPFAVLSSAAPALPQAPAERGAAPRERRRPQQPLRASRAPPPPPPPQAPATVSGPXPSRALLPPPPP

SEQ ID NO: 157572 - protein, 96 aa, Oryza sativa
  Clone ID: PAT_MRT4530_5712C.1.pep
MAARRSKNRGRRSIDRIAPSQAQRKQSGDTRREEAILPVPREENSLSLAIESKNPKGKEKEEKKTSPFNLQPKSHKAEQQNKPNVDGVTSAFISKL

SEQ ID NO: 157573 - protein, 63 aa, Oryza sativa
  Clone ID: PAT_MRT4530_57130C.1.pep
MTDVTGLIPVMSSADSHDSTSHLLPAKVETTSVSSTSTNRAVKNHGPHPRETELGEVDPQRLF

SEQ ID NO: 157574 - protein, 176 aa, Oryza sativa
  Clone ID: PAT_MRT4530_57131C.1.pep
LRKSLLVLWALLSLAFSLQFGFTLQYTGLCVYNSNVYVCHMKAQSEDIDTEIAAAGNVSETINTVIGSISVAEITFNVGTTPTFTGNATFGIHQTHTDHYIDYAGSLTPFYTEASSTLYCFGGAGNIVDGQGTWAGASGAYSFSGCVYSASLAASYIATSRIFVPVTPPPPPAVYF

SEQ ID NO: 157575 - protein, 376 aa, Oryza sativa
  Clone ID: PAT_MRT4530_57132C.1.pep
MAASASAAATLPTTLLLRRLLLLSPRRHPTTPAPRRFRSCCCSSSSSSPAAAPAHPHPPAGGRRLRGELRSRAMSSSTNSTVLAESVATGSSVDVELLPFVNDKHGGVIVEMTAPMDPQLFSASLKASLSKWREQGIRGVWIKLPISLANLIQYAVEEGFWYHHAEETYLMLAYWLPATTHTLPVNATHRVGVGAFVMNDKREVLAVQEKSGVLRGLGVWKFPTGVVEPGEDINLGAVREVKEETGIDTEFVEVLAFRQSHKAFFDKSDLFFVCILRPLSFDITKQDSEIEAAQWMPVEEFAAQPFVQKHELVKYILEVGLAKVDKDYAGFSPILIKSAFTDKKSFFYMNRRDLDKASESSSTQKKTEKPLFMEKL

SEQ ID NO: 157576 - protein, 189 aa, Oryza sativa
  Clone ID: PAT_MRT4530_57133C.1.pep
TPAATCQPVAAAPPPRRWPSTWLWLSPRWSPAARRCTGRAGTWSASAATCRCSPRGTGACTPAAAAPSRRPGRPPGTPSTARTSPTCFRRRRRRRPQGARTRTPGARRSPRRRARTSRTPPPRAPSPAPPPPPLLSSAAPPEPRRHPRTTARRSRRRRTAPRPPRRTRTPWRCSPWRRAPTAAAATRRP

SEQ ID NO: 157577 - protein, 465 aa, Oryza sativa
  Clone ID: PAT_MRT4530_57134C.1.pep
MTRASRASLLLFCFGGGDDDYECRACYGVSVACVSLLLFCVLAASVSVTKACAVAGLAVLLFGVIGWFVPLCGAGGPPARAGAAAGGGGRGAGAAGVTRCACRLVGAALIATLPAFVFEGPAEGGAGGGGGSKHGGSVLCAVCLEDVARGETVRRLPACGHLFHRDCVDMWLHSHTTCPLCRCEVLPRKPAAKPAPPPPAQAAESTSAYADPDALPPPRIPRARNLKTGRAAGPTPTPRARTRRATTGLQMFNGERRPAASQRGGDGGYLACYSVVMVCASLLLLSVLAATVSIAKACVFAAAAAVLFCAVGCVSRWCGDAGGAPAALPTTAAAAEEARARAPAAAACATCGLVGAAIDALPAFAYARPAADDGGGGGSKSGRCALCSVCLEDVQAGEMVRQLPACRHLFHVGCIDMWLHSHSTCPLCRCNVSPPATIVVKATATSTATAAAAAQQLPADTLPPV

SEQ ID NO: 157578 - protein, 360 aa, Oryza sativa
  Clone ID: PAT_MRT4530_57135C.1.pep
MAARSSSSPAKTTTTLALLLVVAAAAAAVAAEAAAVAADAARGVRQVNRRGPYLGVVVPNGFEMEPLLRSPAFSPAKKLPYLDVAGRRFRFGSIGEKKVIIVMTGLGMLNSGVTTQLLLTLFDVEGIVHFGIAGNADPDLHIGDVTVPRYWAHTGLWNWQRYGDGPEKELALESNGDYTRKYGALNFSDYGVAGGGGGNLLNGVWYQPEEVFPADGTPESRRHEFWVPVDGRYYQLAQKLEAMPLERCVNRTGTATSPATCLARAPAVARVERGCSASVFVDNAAYRQFLRSRLGVTPIDMESAAVALVAAQQGAPFIAIRSLSDLAGGGSAESNEAGVFAALAAQNAVAVAVKFISLLS

SEQ ID NO: 157579 - protein, 164 aa, Oryza sativa
  Clone ID: PAT_MRT4530_57136C.1.pep
TEPAADANPFQPASAASFGFGDTLGDLSFGSNAAPGQQDIFVPTSSHSEVPPANPSVHPEQAVPSYVSSQAPQPAAAGPQTHAAPASFASQAPPTSFASQAPQAGAPYPQAASTFPHSQASHPSYIPSQASQFAAPTNLQPSQPTFPPQTAMAASQATSISRGA

SEQ ID NO: 157580 - protein, 945 aa, Oryza sativa
  Clone ID: PAT_MRT4530_57137C.1.pep
MKKVFDQTVRDLKREVNKKVLKVPGIEQKILDATSNEPWGPHGSLLAEIAQATQNYHEYQMVMNVVWKRINDTGKNWRHVYKGLIVLDYLVAHGTERVIDDIREHSYQISTLADFQYIDSSGRDQGSNVRRKSQSLVSLVNDKERIQEVRQKALATRDKYRSAFATSGTHRSPGGYDNDRYEGSYGSRYDNRNGYGGEREYGYRDDDRYGVAGTTPNREGDRYSRDSNEQRYSRDREDEYKGSHSNHEYAEGSGRRSYGRDRDSYGDDEAYSSRGRQSNADGPTQDERPMERKPSNQQIASPPPNYEDVTRDTQDNNHDGRNGGTVPVPVAAAKVSSPPRTSVPPGQVNGVHDNTVEDVPAPPPTHPEVNGFDEFDPRGSVPDTSPPVNPSQAVNSLEMDLFGPDPINSLALVSVPQPTASPNVEPSANPGFESNSFMGMPPASTGFNEAFDATNPFGDPTPFKAVHEETPAVSQTNAAPAGSFHATEPAADANPFQPASAASFGFGDTLGDLSFGSNAAPGQQDIFVPTSSHSEVPPANPSVHPEQAVPSYVSSQAPQPAAAGPQTHAAPASFASQAPPTSFASQAPQAGAPYPQAASTFPHSQASHPAATNPSTIPQNVATPFAPLQMPQPVPSGQSNYFMQPVPGTGINGMSGAPSQNGAPSYIPSQASQFAAPTNLQPSQPTFPPQTAMAASQATSISRGASQPLAVPNSMPSGVNFPLQSSSSAPPETILSALQVSQSEPVKKFESKSTVWADTLSRGLVNLDISGPKANPHADIGVDFDSINRKEKRQEKKVSQAPVVSTITMGKAMGTGSGIGRAGASAMAPPANPMGASRGIGMGMGAAGSGYGGGMGMNRPMGMGMGMNQQMGMGMGMNQQAMGMGMNQQAMGMGMNQQPMGMNMGMGMNQGMGMNMRPPMGMGPGSGYNPMGTGYGGQQPYGGYR

SEQ ID NO: 157581 - protein, 89 aa, Oryza sativa
  unsure (1)..(89): unsure at all Xaa locations
  Clone ID: PAT_MRT4530_57138C.1.pep
MWTRVPDLPKGSDNQRFGQSHVTNRSGFLNEHVLEPRXTTSPLVITRVETRMRPKYGDAAPGQILDVNLFAQFPLTQKEFGRGTKTIRK

SEQ ID NO: 157582 - protein, 59 aa, Oryza sativa
  Clone ID: PAT_MRT4530_57139C.1.pep
MGSQNDMRDNQLLSGVEGLARSDPSNWSWIPRIYCVLEHGRSIDFTQYTRSCIRCLDSG

SEQ ID NO: 157583 - protein, 100 aa, Oryza sativa
  unsure (1)..(100): unsure at all Xaa locations
  Clone ID: PAT_MRT4530_5713C.1.pep
MAASNGNAGAGACALGLVLLAVGADAQGGGGGECLPQLNKLVACRAYXCPAPVTPAPIAWMRSTPSXPRVRPDAPXHHEQAAFHMPPXADQLLLLRRDES

SEQ ID NO: 157584 - protein, 204 aa, Oryza sativa
  Clone ID: PAT_MRT4530_57140C.1.pep
MGAYKYVSELWRRKQSDVMRFVQRVRCWEYRQQPAIVRLTRPTRPDKARRLGYKAKQGYVVYRVRVRRGGRKRPVPKGIVYGKPKHQGITQLKFQRNKRSVAEERAGRKLGGLRVLNSYWVNEDSTYKYFEIILVDVAHSAIRNDPRINWLCKPVHKHRELRGLTSAGKKYRGLRGKGHTHHKARPSRRATWKRNQTVSLRRYR

SEQ ID NO: 157585 - protein, 110 aa, Oryza sativa
  unsure (1)..(110): unsure at all Xaa locations
  Clone ID: PAT_MRT4530_57141C.1.pep
SPPQSDTLSAIHQHHEAFPAFGGAGAARRRCGQRGEDXGALSLSHSPSLQQLEXLEMAKQAEELRVRDDMINFNRQQQQXQQAAAAVSVQHLPMELHGQVGTLGQPLPSR

SEQ ID NO: 157586 - protein, 165 aa, Oryza sativa
  Clone ID: PAT_MRT4530_57142C.1.pep
MEGRRGRGRPVPREETAAPADARARRKGLPKELRRGGGRDRRGRRRSGEIRAMPWPGRGRGWRCCAGRGSDDGRRRSGKATQAAGGGTVAATPLYTSEEASPLVPVRNGGQAGVEGTPARPRKVVATSAAARERRHRRLEGSRRRGKRRRRRGEVVRPRGSSGRG

SEQ ID NO: 157587 - protein, 166 aa, Oryza sativa
  Clone ID: PAT_MRT4530_57143C.1.pep
RTLFYVRGTFDHGSPFLVHPTATTVSVPSLVSGPTAQCLCLLSGPFIDRDSGATPAAGELRPSHNAAGGKLSDDGSDNSSCWAEPSPSTSPADSGSTAFQSDLPAGFSVRQPELPSGWRGVAAPMNGWAREQAGTSRLRGLRQETGLKWLLPSDAQATTICGRTSL

SEQ ID NO: 157588 - protein, 93 aa, Oryza sativa
  unsure (1)..(93): unsure at all Xaa locations
  Clone ID: PAT_MRT4530_57144C.1.pep
LTPTLTHLDYLDLLTHHTHTTHTHGTSGTHLPTVDTDAHATSFVHHPTPTHHTTHDRYNTPHPPTTQTPLHTVTRPXHTLDXHTLTXXDSPIH

SEQ ID NO: 157589 - protein, 139 aa, Oryza sativa
  Clone ID: PAT_MRT4530_57145C.1.pep
MVPIEREFGTARSNKEEEEEEEEIDERARREERIPPIRGEGRAVQEPPGNRRGRRRRGKPPPPRAPPLLASAARTNGETDAELGRNGIPGCVRGMGRNGISSYYVRPILVGGEQDSDLWPIIIGPEGDFDYLRPNNGIG

SEQ ID NO: 157590 - protein, 268 aa, Oryza sativa
  Clone ID: PAT_MRT4530_57146C.1.pep
MSVIDILTRVDSICKKYDKYDVERLNGANVAGEDPFARLYGSIDADINECVEKAEAAKQEKNRATVVALNAEIRRTKAKLVEEDLPKLQRLALKKVKGLTKEELATRSDLVAALPDRIQSIPDGSSSAKKNGTWGASGSRTGGAIKFDTSDGNFDDEYFKGTEESNQFRREYEMRKMKQDEGLDIIGEGLETLKNMASDMNEELDRQVPLMDEMDEKVDRANTDLKNTNVRLKETVLQLRSSRNFCIDIVLLCVILGIAAYLYNVLKK

SEQ ID NO: 157591 - protein, 69 aa, Oryza sativa
  Clone ID: PAT_MRT4530_57147C.1.pep
MRPRFRSIHQLGVAVAVELEGSTALESRRTPGHGRQRADDKPNHGCMRRSDEMHCTYARTVAASADRSR

SEQ ID NO: 157592 - protein, 95 aa, Oryza sativa
  unsure (1)..(95): unsure at all Xaa locations
  Clone ID: PAT_MRT4530_57148C.1.pep
LWEVTFFNVSFNSLAGPLPPEVPGMXKVEXLDVAHNHLSGTVLEAVRPPPAQELHLSYNFTGKQSSCTRILPIDGNGKHWNCLAYPIAPPGRGQR

SEQ ID NO: 157593 - protein, 136 aa, Oryza sativa
  unsure (1)..(136): unsure at all Xaa locations
  Clone ID: PAT_MRT4530_57149C.1.pep
MATRRHARGSGRRRDXARRHWAQGAAAAPGLATARGRAGARGARRQARDTATGRRRWDGHAASGGDGNGARQQAATAATRRRGAELGAARHGARRDGDGDAMTTRRGARGGGATDQRRVGAGLGTSGVQEQELPGT

SEQ ID NO: 157594 - protein, 119 aa, Oryza sativa
  unsure (1)..(119): unsure at all Xaa locations
  Clone ID: PAT_MRT4530_5714C.1.pep
VAQVLLLRVXPTGREGGGHELGLVAGLGVIVRVLSSSVVAVGGRRGAFLGPDGVSSKAQESLSLVAYKRRQSRALDPKNLEKKTAEPMKLGKDSKFLKPPSGDYPRFFMDFSPRSDLSE

SEQ ID NO: 157595 - protein, 930 aa, Oryza sativa
  Clone ID: PAT_MRT4530_57150C.1.pep
MGKPPVVPHGEVALCAFVESSCHALTVGSHLSLPLHGGLPPSPHREEATHHSLAMGGLPPCHCEVGQYRIQPLPTAGGEGQCWIRPSRAPVGRGWDGEVQPPTRPAKSNGHEEEEFTIELHHGGFFCGVGSSRIYLDEKVDWFDHCDTDTWSSLWLDDFIEQLGYDNSKRKVKVYWLLPGKTFSDGLRRINSDASTNSMVALVPRFRSLLLYTDHQDIVESINWDDVALSAPTTLPIVASPRRVAMSQKVCDDQVAKGDKIDDEDDSELDPDFIDSDYEADKGDDDVFDNCVDQTENAEASKLVVELPACDPDDEGLLLPESSDEDYGGIKLKFKNFVADVDMESPIFKVGMLFNDAIEVRQAIKQYSVKNRVAIRFARNTKKRIEAKCSEECPWMLNASEDSRTKCFMIKQYVDGHKCQKEWELNYVLLDILQIVGIDPNDYIYPIAMAIVEVESRASWGWFLNTLKEDLLIDNTAPYTIMTDRQKGLVPAVRDKFPDSEQRFCVRHLYQNFHVLHKGETLKNQLWAIARSSSIPEWESNMEKMKYLSTDAYGYLEEIPPNQWCREFFSDFPKCDILLNNNSEVFNKYILEPRELPMLSMLEKIRSQIMNRIHNKQEECVKKWSGNICPKIKKKVEKNAEIANTCYVLPAGKGVFQVTEKEHQYIVDIIAKHCECRRWQLTGIPCNHAISCLRSERIKPKDVVSFCYSTEKFMEAYGFNIMPVRDKTAWAKMNGVKVNPPVYEKKVGRPSRCRRKQPQELEGGTKIFKHGVQLHCSYCQGVNHNKKGCKKRKEDIKSGKQQASAPSLQPVQEDVMPLQVMPDILNSQTSILTSQPNYNQLDNTILSSLIRENTINSSSRVAPGPLPESNFIATNRRAGVEPPMTTATKEGRATIRKRMAEPRKKNAPPNKKSIPNNEAEPKKRKETKKK

SEQ ID NO: 157596 - protein, 878 aa, Oryza sativa
  Clone ID: PAT_MRT4530_57151C.1.pep
MFSRSYTNLVDLANGNLSALDYGGGGGGGGGGNGAGGRPPRARRMQRTMTTPGTLAELDEERAGSVTSDVPSSLASDRLIVVANTLPVRCERRPDGRGWSFCWDEDSLLLHLRDGLPDDMEVLYVGSLRADVPSAEQDDVAQALLDRFRCVPAFLPKDVLDRFYHGFCKQTLWPLFHYMLPFTSDHGGRFDRSQWEAYVLANKLFSQRVIEVLNPEDDYIWIHDYHLLALPSFLRRRFNRLRIGFFLHSPFPSSELYRSLPVRDEILKSLLNCDLIGFHTFDYARHFLSCCSRMLGIEYQSKRGYIGLDYFGRTVGIKIMPVGINMTQLQTQIRLPDLEWRVAELRKQFDGKTVMLGVDDMDIFKGINLKVLAFEQMLRTHPKWQRKAVLVQIANPRGGGGKDLEEIQAEIDESCRRINAQFSRPGYVPVVIINRALSSVERMAYYTVAECVVVTAVRDGMNLTPYEYIVCRQGFPDLDGSGDDGPRRKSMLVVSEFIGCSPSLSGAIRVNPWNIDTTAEAMNESIALSENEKQLRHEKHYRYVSSHDVAYWSKSYIHDLERSCRDHFRRRCWGIGLGFGFRVVALDRNFKKLTVDSIVTDYKNSKSRVILLDYDGTLVPQTTINRTPNESVVKIMNALCDDKKNVVFIVSGRGRDSLEKWFSPCQDLGIAAEHGYFMRWTRDEQWQLNNQCSEFGWMQMAKPVMNLYTEATDGSYIETKESALVWHHQDADPGFGSSQAKEMLDHLESVLANEPVCVKSGQQIVEVKPQGVSKGFVAEKILSTLTENKRQADFVLCIGDDRSDEDMFEGIADIMRRSIVDPQTSLYACTVGQKPSKAKYYLDDTNDVLNMLEALADASEETDSQEDAEEITSIPDPE

SEQ ID NO: 157597 - protein, 116 aa, Oryza sativa
  Clone ID: PAT_MRT4530_57152C.1.pep
MLCLDLDYDDEVLATLVSCLLNSSPNLKDLKIHNHLSSVILFIDALSESNPCAGLCHFLVMNARILQKVSIEYLRSDVKPEHAAKLEAIRSDLHLWPRASSNVQLELCPLDHYPCY

SEQ ID NO: 157598 - protein, 163 aa, Oryza sativa
  Clone ID: PAT_MRT4530_57153C.1.pep
MFPFAIMLASTSDITTFMPPPPFAGDPTGGLRRPPLTTTTTSSRREQIGRHQHHLDSRPPLIRRSPLPSPTCAEVAAAASSSGARGRAYHALARRSVCCPPLFLVAIWGEELSVSDELRRRRCLSSQAQRRRRSSPDRATSSVAKGVVLRTALRPPPPLDAVM

SEQ ID NO: 157599 - protein, 63 aa, Oryza sativa
  Clone ID: PAT_MRT4530_57154C.1.pep
PIGALGDPGNIPLTSPHKRPFSHNPRSWAHIFYPLNNKGGKNILFKSLCSHFPNGTYSAGEPR

SEQ ID NO: 157600 - protein, 86 aa, Oryza sativa
  Clone ID: PAT_MRT4530_57155C.1.pep
MARFDGYASMNFETIWCIVNRARQRTPVALASRERGEVQRCTLYSALQVNAAEVQARQGSGNTLAVMRRSSGRIYGSYVRSWYIVR

SEQ ID NO: 157601 - protein, 483 aa, Oryza sativa
  unsure (1)..(483): unsure at all Xaa locations
  Clone ID: PAT_MRT4530_57156C.1.pep
MEGGGGGGSLPPFLSKTYEMVDDPSTDAVVGWTPAGTSFVVANQPEFCRDLLPKYFKHNNFSSFVRQLNTYDFKTVLVNNQGQLLFYQENSSSLLQCYCLLHPVEVVQKCLIMGFRKVDPEQWEFANEDFIKGQRHRLKNIHRRKPIFSHSSHSQGAGPLTDNERKDYEEEIERLKSDNAALSSELQNNTLKKLNMEKRMQALEEKLFVVEDQQRSLISYVREIVKAPGFLSSFVQQQDHHRKKRRLPIPISFHEDANTQENQIMPCDLTNSPAQTFYRESFDKMESSXLNSLENFLREASEEFGNDISYDDGVPGPSSTVVLTELHSPGESDPRVSSPPTRMRTSSAGAGDSHSSRDVAESTSCAESPPIPQMHSRVDTRAKVSEIDVNSEPAVTETGPSRDQPAEEPPAVTPGANDGFWQQFLTEQPGSSDAHQEAQSERRDGGNKVDEMKSGDRQHLWWGKRNVEQITEKLGLLTSTEKT

SEQ ID NO: 157602 - protein, 148 aa, Oryza sativa
  unsure (1)..(148): unsure at all Xaa locations
  Clone ID: PAT_MRT4530_57157C.1.pep
PRRPAAPPTAPPLRPAAPRTDAARPPPPLEGPTPPGRPHRFSTPPXPRPPATLSTVPRLLCTATPPPMPWLLRSATDRPRRSPPMTPPPVPWLLPPXPAADAAAPPPRPPVPRLLRSVSTAPPVLLRPATPRCSSAQRAPVAQPLPPP

SEQ ID NO: 157603 - protein, 412 aa, Oryza sativa
  Clone ID: PAT_MRT4530_57158C.1.pep
QGLGGVLMQEGKVVAYASRQLRPHEENYPTHDLELAAVVHALKIWRHYLIGNHCDIYTDHKSLKYIFTQSDLNLRQWRWLELIKDYDLEIEEAQKDNGEIQEVKERIAAGRAREFSMDEKETLWYKKRIYVPEQGGLRGLILKEAHKSAYSLHPESTKMYQDLKEGYWWPNMKRDVAEYVTLCDVCQKVKAEHQRPAGTQFTSHFWGKVHEALGSYLAFSTAYHPQTDGQTERTNQVLEDMLRACALDFSKDWERCLPYAEFSYNNSFQASLKMSPNEALFGPRCRTPLMWSETGERAVFGPDIIQEAEEKVRLIRDRLKVAQSRQKSYADTRRRNLEFKEGDYVYLKVSPMRETKRFKVNGKLAPRYVGPFQIIARRGEVAYQLQLPKNIADVHPVFHVSQLKKCLRVPEE

SEQ ID NO: 157604 - protein, 48 aa, Oryza sativa
  Clone ID: PAT_MRT4530_57159C.1.pep
MGLMAGVDSEWSYSMAHALALDARTYVTSGIRADSHGYTGACVAVAQA

SEQ ID NO: 157605 - protein, 323 aa, Oryza sativa
  unsure (1)..(323): unsure at all Xaa locations
  Clone ID: PAT_MRT4530_5715C.1.pep
FKIGFIASAEGRGARTGSTGVGPTRQPHGPRWTGCTRLTPAGAVGPTRQPHPRARAADGRAPHGSRGARPKAATPAQPTGGGAPAPRWSPPATTGAAEQRPREGREGGSETAVHGSPRVDGDDGNGDRSGGRRRRGSGRRGRRSSGGRRAKRRGGRGRRGCGEPEEGDAETGEGPGQRRRRTGARRRRQRERTTARARFRRGQRAASGGNGGGRHGECLYSVGRGRERPDEGESATEGPAAIDAPAKLXGETFRTNPREREREKWGERGRESRGVISLSLLRAGTAGGGGIRGGGGARARARRREQLEEGDDRWAPPVSEGGG

SEQ ID NO: 157606 - protein, 1490 aa, Oryza sativa
  unsure (1)..(1490): unsure at all Xaa locations
  Clone ID: PAT_MRT4530_57160C.1.pep
MGVPRSEGYVIELHRLMRRLRYPRFPIYRVRQCGSVWEARVEVHTLVPSELDYSFPTRHRRDLPETAMQDAAREAFLRLSSIHRAELASTEFAHHPFREESNSVCTVQDTPCCYNPIVTRLSRWAEVVDDFYEEALLEIDDQQRRVGELETEVTDLTAQQLQLEEEHQAWGSEIDSLKAQLQPGSSLETPIQVDSETEGTDTEPETEPDITDPSEDETLVPRITFLGGPRTLSTARKSTRPPGKKPKPDPEATTSEPWGLRVIEKKLTLVRVREADKVIFEANQLEGPAGDWWDTYKEAREEDAGEPNWEEFTTAFRDNFVPAAVMRMKKNEFRRLRQGNTTVQEYLNRFTQLARYATGDLADEEEKIDKFIEGLNDELRGPMIGQDHDSFQSLINKVVRLENDRKVVEHNRKRRLAMNRPPQPVPXRHKGTTSSVWRPTVVTTNRPTASSNFHRLITIQNRAPAPNQAATGSVRLGSCFNCGEYGHFANKCPHPNKTPICTGANATAIHGTATPAAGRGLFGTPQTNRTTTGFGRGQVNHVRAEEAQEDQGVLMGMFSINSTPVKVLFDSGASHSFISLKVSQQHNLTRVKLRQPMLVHSPGGEIAVDTACIDVPIRLRDVVFPSNLMVLMPQTLDVILGMDWLTKHRGVIDCRRREVTLTTPWGSDMRATMDQDPRLTERAGGIFTMLPQKGIPVVQRFPDVFPEDLPGMPPDRDIEFLIDLIPGTAPISKRPYRMPVNELEELKKQIRELQEKGFVRPSSSPWGAPVLFVKKKDGSMRMCVDYRSLNEVTIKNKYPLPRIDDLFDQLKGAKVFSKIDLRSGYHQLKIRTGDIPKTAFSTRYGLYEFTVLSFGLTNAPXAYFMNLMNKVFMDYLDKFVVVFIDDILIYSRDEEEHAEHLRLVLEKLRKHKLYAKFSKCEFWLKEVAFLGHVISAGGVAVDPAKVEAVTEWKAPKSVTEIRSFLGLAGYYRRFTEGLSKIARPMRQLLKKEKKFVWSEQCQESFEQLKEKLTSAPILVLPDIRKDFVIYCDASRQGLGGVLMQDGKVVAYASRKLRPHEENYPTHDLELAAVVHALKIWRHYLIGNHCDIYTDHKSLKYIFTQSDLNLRQRRWLELIKDYDLEVHYHLGKANVVADALSRKSHCNHLRTEGMAPELKEEIAQLNLHIEAHESAYSLHPGSTKMYQDLKDGYWWPNMKRDVAEYVALCDVCQKVKAEYQRPADRLTKTARFIPVKTNYSSAKLVELYMTRIVCLHGIPKRIISDRGTQFTSHFWEKVHEALGSYLAFSTAYHPQTDGQTERTNQVLEDMLRACALDFSKDWERCLPYTEFSYNNSFQANLKMSPNEALFGRRCRTPLMWSETGERAVFGPDIIQEAEEKVRLIRDRLKVAQSRQKSYTDTRRRNLEFKEGDYVYLKVSPMRAPPFSPLLTPSPPPLPLPLLHAPPSSCRRVAAFEPPRRRPRAVVPPHSCHRATASVCRAVRRRRRRRRR

SEQ ID NO: 157607 - protein, 1513 aa, Oryza sativa
  Clone ID: PAT_MRT4530_57161C.1.pep
MLATESAPYLVDPTVTQPPAPEIVHTPLISTPSPQLGFSLETPIQVDSKTEGTDTEPEIEPDITDLSEDETPVLRITFLGGPRTLSTARKSTRPPGKKPKPDPEATTSEPWGLRVMATQTQLLQAIVNNQGNRGGSSFGEFMRTKPPTFATAEEPMDAEDWLRIIEKKLTLVRVRKADKVIFTANQLEGPAGDWWDTYKEAREEDAGEPNWEEFTTAFRDNFVPAAVMRMKKNEFRRLQQGNTTIQEYLNRFTQLARYATGDLADEEEKIDKFIEGLNDELRGPMIGQDHDSFQRLINKVVRLENDRKVVEHNHKRRLAMNRPPQVAPQRPKGAASSVWKPTVVTTNRPAASSNFHRTVTIQNRAPAPHQAATGSVRPGSYFNCGEYGHFANKCPHPNKTPIRTRANVMAIHGTTTPAAGRGLFRTPQTNRTATGFGRGQVNHVRAEEAQEDQGVLMGTFSIHFTPVKVLFDLGASHSFISLKASQRHNLTRVKLRQPMLVHSPGGEIAVDTACIDVPIRLRDVVFPSNLMVLVPQTLDVILGMDWLTKNRGVIDCRRREVTLTTPWGSGMRATMDQDPRLTERAGGIFTMLPMKGMPIVQQFPDVFPEDLPGMPPDRDIEFIIDLIPGTAPISKRPYRMPVNELEELKKQIRELQEKGFVRPSSSPWGAPVLFVKKKDGSMRMCVDYRSLNEVTIKNKYPLPRIDDLFDQLKGAKVFSKIDLRSGYHQLKIRTGDIPKTAFSTRYGLYKFTVMSFGLTNAPAYFMNLMNKVFMDYLDKFMVVFIDDILIYSKDEEEHAEHLRLVLEKLRKHKLYAKFSKCEFWLKEVAFLGHVISAGGVAVDPTKVEAVTEWKAPKSVTEIRSFLGLAGYYRRFIEGFSMIARPMTQLLKKEKKFVWSEQCQESFEQLKEKLTSAPILVLPDIRKDFVIYCDASRQGLGGVLMQDGKVVAYASRQLRPHEENYPTHDLELAAVVHALKIWRHYLIGNHCDIYTDHKSLKYIFTQSDLNLRQRRWLELIKDYDLEVHYHPGKTNVVADALSQKSHCNHLRTEGMAPELKEEIAQLNLHIIPYGQINTLDIQPLMRTQIEEAQKDNEEIREVKECLAAGFAKEFSTDEKDVLWYKKRIYVPEQGGQRGLILMEAHESAYSLHPGSTKMYQDLKEGYWWPNIKRDVAEYVALCDVCQKVKAEHQRPAGLLQPLRIPEWKWNEIGMDFIVGLPKTTTGYDSIWVIVDRLTKTARFIPVKTNYSSAKLAELYMTRIEKVHEALGSYLAFSTAYHPQTDGQTERTNQVLDDMLRACALDFSKDWERCLSYAEFSYNNSFQASLKMSPNEALFGRRCRTPLMWSETGERAVFGLDIIQEAEEKSYADTRRRNLEFKEGDYVYLKVSPLRGTKRFKVKGKLAPRYVEPFQINARRGEVAYQLQLPENIADVHPVFHVSELKKCLRVLEEQATLEEIHISNDLTYPEHPVRILDEAEKRTRMKVWRMYKVQWSNHTKDEATWESEEFLKTE

SEQ ID NO: 157608 - protein, 204 aa, Oryza sativa
  Clone ID: PAT_MRT4530_57162C.1.pep
MRRLRYPRFPIYRVRQCGSVWEARVEVHTRVPSESDYRFPTRHRRDLPETAMQDAAREAFLRLSSIHRAELASTEFAHHLFREESNSVCTVQDTPCCYNPIVTRLSRWAEAVDDFYEEALLEIDDQQRRVGELETEVTDLTVQQLQLEEEHQAMNSCVPDYLIQGNSTVYTIDSCYKNEGPHYPTTCSQPCVYIINLVSLYHDP

SEQ ID NO: 157609 - protein, 212 aa, Oryza sativa
  unsure (1)..(212): unsure at all Xaa locations
  Clone ID: PAT_MRT4530_57163C.1.pep
YVGSYGDLGDTDRLTGVTLGPXQKTQAVNALAARTPADLTNGAVQQRTRDVVAVLLLMVHEAARFQTVSRLVAGFIHPKAASKSGAITTAMKTAATVGGRGWSSCSDALAGGEGLELAALGERGGSNGAFPSRPSSKVSLHRAFMVTAVSFFFAASDLPLRQTKTETHSVTTAVMLGRYLMYQLWPPATNVPNLTCSLTATPEPTANPLVPE

SEQ ID NO: 157610 - protein, 63 aa, Oryza sativa
  Clone ID: PAT_MRT4530_57164C.1.pep
LAMATSVNLLGTITKLLPVLENTIAKSINCHLPFRITIAFSCKKHHLLINKDATSSSTNNHHI

SEQ ID NO: 157611 - protein, 99 aa, Oryza sativa
  unsure (1)..(99): unsure at all Xaa locations
  Clone ID: PAT_MRT4530_57165C.1.pep
YFEQKATAAGPSRDGSATAGRRRRCIAHGAAGDALRVGAVRGGGGGLDFFASRSQPXHATRLVDLVTSPWPAHVIASKHAAASSRAPPRAARTARHRRH

SEQ ID NO: 157612 - protein, 611 aa, Oryza sativa
  Clone ID: PAT_MRT4530_57166C.1.pep
MGIVETWMREKPIRTFLAQLSTRRAAAGAAALLASSSAAAASADGEPGDRSIPQLSSIANSVVSRCSRMGFILLKRKDEAQSEISFCAVCFGVTKSLEAALEESICYSERIDAARATIDQVKVEGVDANLALMQELLFPFTQVVKLTYSLTKWEDPLKSFLFLAFTLYVIQRGFIAYMLPSFFLAFAVVMLWHKYNGREQLLGVLETTEMVAVAFLAAAAVLGGLTSPSAPTLAFVQWYEAPREPAGMAAASSPAAAITCRAAVAWAPGQALVMEEVEVAPPEAMEIRVKVVSTSICRSDVTQWQSTAQTDLFPRIFGHEASGVVESVGEGVTEFEVGDHVLTVFIGECMSCKHCVSGKSNMCQKLGLERRGVMHSDQKTRFSLRGKPVYHYCAVSSFSEYTVVHSGCAVKVGPTVPMDRICLLSCGVSAGLGAAWKVADISKGSSVVIFGLGTVGLSVAQGAKLRGASIIIGVDTNPEKQEKGKAFGVTDFINPEELNEPVQQVVKRLTNGGADYSFECVGDTGVVSTALQSCSDGWGLTVTLGVPKAKPEVSAHYALLLSGRTLKGSLFGGWRPKSDLPLLVDKYANKEIQVDDLVTHDLSTNKGRSDL

SEQ ID NO: 157613 - protein, 612 aa, Oryza sativa
  unsure (1)..(612): unsure at all Xaa locations
  Clone ID: PAT_MRT4530_57167C.1.pep
MPHPSAAAMLPSPSSLLRLLRRPHPRLLPPPPPLLTRFLSSSSPGDAAGWASYDPLTDSLAPPAAAAAASDSEAPAEGEAWGVFDAVTGRIVMKEHPPYSQPPPPGPDEERSKVGRRRSAGVKDEARWSSVAAVGKARGKAGKERASYVCGNCGEGFSQWWGTCRHCEAMGTLTKYVPGSDPGASVGSHHAFRSWIPQKSKEMVPQSLQQVTKGVDQSEWRIPLSGNFGMEIARVLGGGVVPGSLILVGGDPGVGKSSLILQLASIMSENIGAGESSAIVYVSGEESIEQIGNRADRMSIKSRNLYLYSSTDIEDILDKIQPLSPRALIIDSIQTVYLRGFAGSAGNMTQVKECTSALLRFAKLTNIPVILIGHVTKTGDIAGPRLLEHIVDVVLYMEGERCLSHRLLRSVKNRFGSTDEDXGLQPVLNPTEMFLTEHDLDSEILAGLAVAVVLDGSRTFAIEVQALCVSGSPRNGEVVGIPRNRADIIISVLMKQAGLKLQDNAVFLNVVSGFMLTETAGDLAIAASICSSFLEYPIPNDIAFIGEVGLGGELRTVPRMDKRVLAIAKLGYKKCVVPKTSEKLLRPLNLELEILPCSNLKEVINTVFRPQG

SEQ ID NO: 157614 - protein, 73 aa, Oryza sativa
  Clone ID: PAT_MRT4530_57168C.1.pep
MTVAPRHLARSHAIMPSCSPSRLATLDVDPPPLAADLASPGPDRGGAMVDFMATVAGEGDGCGDDGESPRGRG

SEQ ID NO: 157615 - protein, 179 aa, Oryza sativa
  unsure (1)..(179): unsure at all Xaa locations
  Clone ID: PAT_MRT4530_57169C.1.pep
AGIGEPKGSCSYTSKSTYNAYFLGSXKFAPWKRIWTSWVPLCCKIFIWLAINSRCWTSDQLAFNQGLPHPAACPLYDQSGETVHHILVSRVFSGHVWTLLLSKVGAGWXAPELSAAHFPGWWXKVIGIILAAWVIWKHGNDCVFSGATTNVLVLLKTAENDSSSLCLHVFLCRLFTPDG

SEQ ID NO: 157616 - protein, 334 aa, Oryza sativa
  Clone ID: PAT_MRT4530_5716C.1.pep
SPWTGTTRVVHRRSTEPTAQIALGADRTGGDRGGRRARLGIKADRPARANGGGTRASRCRRRHPAAARARRVAGDGIRRRRRRRKSDAKAAAADGGNDRRRRRARAAATHGELGKKKKGEGVLTGGDGGVRRRGATEGGRHAADGDRDDMATLIVARWERRSGGEPRRRRGGRGGSRPREPDGGDGAVRRRAAISGAGASWRERGVGAGNAAHVRAWSSWPEGGGDVGAAAVAGAAARRERREVGEGPDRWAPPVGDPGRGGRRGGLAGPRHGGLKFRLVVDNRVVFLLESVPDEIRDSAFVSPDSIRRQWRGCKCCIFPFVVNENLGNTKLDI

SEQ ID NO: 157617 - protein, 92 aa, Oryza sativa
  unsure (1)..(92): unsure at all Xaa locations
  Clone ID: PAT_MRT4530_57170C.1.pep
MGLAVVVAVAVAMVANGGGWRRWWLWQWRWRLSTVVPMAAMVEGHHPAXGIAGKSLAEPFGQLTTATPFGVVPLLGDVVLAYPSPFPTIFSG

SEQ ID NO: 157618 - protein, 61 aa, Oryza sativa
  Clone ID: PAT_MRT4530_57171C.1.pep
MQDADAAAVLILFTCLCSFALIHIDDNTTPIWSFGVQVQQQLGVSQKGFDEANLDDMNPKA

SEQ ID NO: 157619 - protein, 62 aa, Oryza sativa
  unsure (1)..(62): unsure at all Xaa locations
  Clone ID: PAT_MRT4530_57172C.1.pep
MVADGGGWRRWWLWQWRWRLSTMVPMAAMVEGHHPADGXRSPGAGAPSTAGTIVGGGLGRIV

SEQ ID NO: 157620 - protein, 155 aa, Oryza sativa
  Clone ID: PAT_MRT4530_57173C.1.pep
TGVSVAVAVAMVADGGGWRRWWLWQWRWRLSTMVPMAAMVEGHHPADGTSAAAAVCGGGEGVWRQEMRSPGAGAPSTAGTIVGGGLGRIVEGTMLLTDDDPSCADWWCGFGQGIAGESLAEPFDRLTTATPFGIVPLLGRVVFAYPFRFPTIFSG

SEQ ID NO: 157621 - protein, 120 aa, Oryza sativa
  Clone ID: PAT_MRT4530_57174C.1.pep
GSVRRPSAIFPKPSGPGSSAAAAVCGGGEGVWRQGRRSPVAGAPSTARTTVGGGLGRIAEGTMLLTDDDPSCADWWCGFGQRIAGESFAEPFGWLTTATPFGVVPILIGVVLAYPFPFPI

SEQ ID NO: 157622 - protein, 104 aa, Oryza sativa
  Clone ID: PAT_MRT4530_57175C.1.pep
MGIGGWAEHRELDVGLSIRRPSAPYLIIHGEKIEGGTQGGIHVYGGYSPPCIQVESASAKCQRGSIGSSVYFICRCRHRLPSSAAATAPSSTLDSFFSCDLLHR

SEQ ID NO: 157623 - protein, 76 aa, Oryza sativa
  Clone ID: PAT_MRT4530_57176C.1.pep
IVAVLHAPLRWTAPYVAPGSSTVHPGPRSRSVEFLHELCRLRILRQVGRQCRRSLDDSARSVPWKYITCLTRFDPD

SEQ ID NO: 157624 - protein, 419 aa, Oryza sativa
  Clone ID: PAT_MRT4530_57177C.1.pep
MICQPVAVASLEASVEATLDAISGDQWRARLQPFTIFRVPAYVRDGNRTAYEPRLVSIGPYHHGGAALRAMEDHKWRYLHDLLSRRAGDGAAAVVTASALVAEMRTLEPRARACYSERPVGMDSSDDFVRMLLLDGFFILEFFFKWHTKEADSLCDVGWGLTLVAADLLLMENQIPFFVLERLYEAVAGMQPDKESLFNLLIEYISDEEPIRRPSGDWDVHHLLHLYYECFVPKRPRPRLPESARKAPAAPTRTILRASELREAGVTLVRRSAARDREIDDMKRPLLVNLMAFEQTQAGEEPRLLTSYVALMGQLIVTARDVELLRRRGVLESLLADDEEAARFFSRLGEGAAMDFSRQAFAGLYEDVRGYCGSWWHRNRAALRRDYFGSPWSAISVVVAAIVVFLAATQTYFTVFPAK

SEQ ID NO: 157625 - protein, 328 aa, Oryza sativa
  Clone ID: PAT_MRT4530_57178C.1.pep
MENSAADAAAAAGGADVIYISSDDEDEEIRILSADPYSPEEIQIQEVILLSLDYSRAAAADADTAQSSASSSRPSAAASTFGEPSSLPDRKGKSKLLSEDGPSESTTTRRWRKRGFTCIICMDKVQASEEFLVNVCSHAFCKSCIGGYVAAKVSDNVAAIGCPDPGCEEGSVEIGQCRDIVPPELFGRWSVSLWESSMGETTKCYCPFKDCSAMLINDNGDGGDAEEIAETECPHCHRMFCASCRVPWHDGIDCKEFRKLGNDEKGKEDLMLKKLAGKKKWQRCPQCRMYVEKSAGCTFMRCRCGFFFCYNCAAPMTKLVHYCKKCNR

SEQ ID NO: 157626 - protein, 54 aa, Oryza sativa
  Clone ID: PAT_MRT4530_57179C.1.pep
MNEGVKRSMADRSGADLKPVEIDAVRLVISKAGEDGGGSHQALRPLPPPRHRPK

SEQ ID NO: 157627 - protein, 264 aa, Oryza sativa
  unsure (1)..(264): unsure at all Xaa locations
  Clone ID: PAT_MRT4530_5717C.1.pep
RSKQRKINKRRKRLHSTGSLTKATPNPPHHQPHXRTLPLMNDCKEKGIYCVSGLGFGGPGARAAVHANGRPRSNQSKMDGRDRSGPRRLTTNGPDDVGNDVTDGGGGSAAXTARAAHARRRTAALGRKRRAPRRSGRHGELTGDQNGGGRPTDGDGDKEEAAGTFGSTAAMTLRRSSAATKGXDEDGDATANRRKDREERIRDELESNAFQSDLAKDSKGEKVEEIPENVSPLLIRPKKERNGRIWKGNERQRETRVSGGGGRR

SEQ ID NO: 157628 - protein, 1292 aa, Oryza sativa
  Clone ID: PAT_MRT4530_57180C.1.pep
MAEYEKPRYVTKMAAKVLDQDSKLDLLLKKMEDAECKQEESEKRREQSTEKSRAEFLVLKVVVESRFPEMEKRVDLLQDSVLELQEQVDKIQALVKSPDGMKSPPSSSPSSPTTDNSVSLGGSMGISGHVPPMSCPQFNGDSPQMWKSNCEEYFEIYGVHPRNWVRVAGLNFTGNAAFWLQSIRSTLVGLSWQAFTDLVCLRFTKARQEVLIRQWFHLIQDSSVSDYVVKFDGIMHQLLAYKSALPLNYFVTKFVEGLKPVIRSSVLMQKPQDLDSACSLALLQEEILEGDQSSQYKRPELSVTYRHTNRLSSQAATSIPVTTVAAADDKKSIVTPVRPRDDKLAALKAYRRAKGLCFTCGERWGKDHKCAPAIQLHVVQELLEVLQVDDSLSDSLEDDSPQTAPTLMAISQQAISSTESPVSFRIRGWVQGVEVLMLIDSGSSHSFVDSALSQQLQGVQTNHCLGIPGEQLQGMLKMGYNPAQKDEIERQVKEMLLAGVIQPSSSVFSSPALLVKKKDGTWRLCIDYRVMSFGLTGAPATFQGAMNATLASVLSLHLSFFDDILIYSPDLTSHLDHLRQVLTLLSEQQWKVKMSKCSFAQTQLSYFGHIISDKGVTTDQSKVEEVVNWKVPTTLKKLRGFLGLAGYYQKFVRNFGIISRPLTLLLKKDVPFVWSSEADQAFQSLKMALVSAPVLALPDFSQPFIVETNACDVGIGAVLSQQGHPIAYISKALSLKNRGLSTYEKEYLAILLAVDHWRSYLQQAKFIILTDHHSLMHLNEQRIHTPWKYSEDSSKLNAVYSCTPVWLQEVSDGYLSDPYSAQLLSDLALCPTARPLFSLCSGIIKYKGRVWLGNHLALQHKIIDALHSSPMGGHSGFPVTYRRIKALFAWPKMKQGIKDAIAGCSVCLQSKPDRSRYPGLLQPLPVPDGAWQVLTMDFIEGLPKSGRYNSILVVVDKFSKYSHFVPLCHPFTAFDVVQAFMSNIYKLHGLPQFIISDRDKIFMSQFWEQLFSRSGTKLHLSTSYHPQTDGQTKRVNQCLEIYLRSFVHAMPSKWSLWLYLAEFWFNTSYHSALLKSPFEVLYGYPPGHFGIREDACSISDLNTWLSERKMMTQLLQQHLNRAQQQMKSYADKKRNFREFAVGDWVYLKLQPYIQSSVARRANHKLCFKYFGPFQVLNRVGKVAYHLNLPDHSAIHPVFHVSQLKPAIGFKHAIQPRLPTLSLHQVPVSILESHQVKKGNSSSTQVLVQWSDAVAGEETWEDLVELKQRFPGALAWGQGQSQGEGIVSVPDLL

SEQ ID NO: 157629 - protein, 109 aa, Oryza sativa
  Clone ID: PAT_MRT4530_57181C.1.pep
MECQLEIKLPYVLFCTSPIVVTADGMQLNVSQAEHCQTATPHLVSGVDVLFYIIEQDFYFAGEIPFFCLAGFADGGVVGERYQSLVRSYSFSKTISSKNVGIGYLICAA

SEQ ID NO: 157630 - protein, 306 aa, Oryza sativa
  unsure (1)..(306): unsure at all Xaa locations
  Clone ID: PAT_MRT4530_57182C.1.pep
FRIRGWVQGVEVLMLIDSGSSHSFVDSALSQQYXGVQQLPNTVSVKVADGGLLSCSQFIPHCEWCTQGYVFHTEFKFLPLGTYDVILGMDWLMQLGPMSVDWTAKWMSFXRAGCQVQLLGIQVQTNHCLGIPGEQLQGMLKMGSVMHVLQLQEILSVTEVPLPPDIGQLLQEFQSIFEEPXGLRPKRACDHQIPLLPNSKPVFIRPYRYNPAQKDEIERQVKEMLLAGVIQPSSSVFSSPALLVKKKDGTWRLCIDYRXLNAITVKWKFPMPVIDELLDELSGARFFSKLDLRAGYHQIRLVEGEE

SEQ ID NO: 157631 - protein, 165 aa, Oryza sativa
  Clone ID: PAT_MRT4530_57183C.1.pep
PPFFDFPFPPPCARSPDSYSISSGMTSTAYSRPSKLPGGGNGSDRRLPPRLMRGLTTKIEPKKLFAIYSPVFASTANTSALMQNSPPSSPETGPIPPQETAAGAGNNDSTVDPVDLPEDKSLVEAQPQEPGFPSAESQEPVLPAALSKKEDDAERAAAAAASEIK

SEQ ID NO: 157632 - protein, 566 aa, Oryza sativa
  Clone ID: PAT_MRT4530_57184C.1.pep
MTSTAYSRPSKLPGGGNGSDRRLPPRLMRGLTTKIEPKKLGVGLLAGCCLALLTYVSLAKLFAIYSPVFASTANTSALMQNSPPSSPETGPIPPQETAAGAGNNDSTVDPVDLPEDKSLVEAQPQEPGFPSAESQEPGLPAALSRKEDDAERAAAAAASEIKQSEKKNGVAAGGDTKIKCDENGVDEGFPYARPSVCELYGDVRVSPKQKTIYVVNPSGAGGFDENGEKRLRPYARKDDFLLPGVVEVTIKSVPSEAAAPKCTKQHAVPAVVFSVAGYTDNFFHDMTDAMIPLFLTTAHLKGEVQILITNYKPWWVQKYTPLLRKLSNYDVINFDEDAGVHCFPQGYLGLYRDRDLIISPHPTRNPRNYTMVDYNRFLRDALELRRDRPSVLGEEPGMRPRMLIISRAGTRKLLNLEEVAAAATELGFNVTVAEAGADVPAFAALVNSADVLLAVHGAGLTNQIFLPAEAVVVQIVPWGNMDWMATNFYGQPARDMQLRYVEYYVGEEETSLKHNYSRDHMVFKDPKALHAQGWQTLAATIMKQDVEVNLTRFRPILLQALDRLQQ

SEQ ID NO: 157633 - protein, 53 aa, Oryza sativa
  Clone ID: PAT_MRT4530_57185C.1.pep
KLVLLPRRVPSSNSPYSESYYNSLAVVLQRRDWENPGVTQLNRLAAHPPFASW

SEQ ID NO: 157634 - protein, 130 aa, Oryza sativa
  unsure (1)..(130): unsure at all Xaa locations
  Clone ID: PAT_MRT4530_57186C.1.pep
MYQAIRGNANRAWPAASRPATAAPPPPPPRGEEEEVRRAVAECPVVVVGRSGCCLXGVVKRLLQGLGVNPAGDEVAGEAELAGVVAGGGGVALPAVFVGGRLLGGLDRLMAVHISGELVPILKEAGALWL

SEQ ID NO: 157635 - protein, 108 aa, Oryza sativa
  Clone ID: PAT_MRT4530_57187C.1.pep
MPHPGQRPFALTAGGSELTFAGASDFSGGACGGGDGAVRWGRRRRRMGGRGDWPEDSLEGGVEAPGAGEHLAAPPPPPPLRDRRSGARHERTRTSCSTKGRARDRADN

SEQ ID NO: 157636 - protein, 318 aa, Oryza sativa
  Clone ID: PAT_MRT4530_57188C.1.pep
MMVPSSRKVRVFCSDPDATDSSDEDDQNKKERRFSREILIPMENSKASKPVKTLVQCGTKTVKDSEKEPTSKYRGVRRRAWGKWAAEIRDPVRKSRKWIGTFNSEEEAAAAYLAQSNQFHEELMALKIQSSVSEQEDLSSSVTISCVSSSQSCDQKIQAKPQEHKRVSVVVNRETVEQKFKAQPQAQKIKAQPEVQKRVSVKISHETEDEHLLNLPSTPKGKEISMGAVLGRIDEIPVSNCVGHIDEFPPDDFTRLADAFPVSDFIGMADVPLGDDYIGLADISHLPLPITDLKFDLNAELNWDGFDFASLEQELNCL

SEQ ID NO: 157637 - protein, 119 aa, Oryza sativa
  unsure (1)..(119): unsure at all Xaa locations
  Clone ID: PAT_MRT4530_57189C.1.pep
XCITXNXTXXXYLXTXCKXXIRXVISSXXXLVXXVCXXRXAXXHXRSFXXXXXXXXXXXKXXXXXQXXPQTIXXXNQXFAXXINTXXXXXXXXTPPTXXXXHHXCLXTXLXIPELXMXL

SEQ ID NO: 157638 - protein, 335 aa, Oryza sativa
  unsure (1)..(335): unsure at all Xaa locations
  Clone ID: PAT_MRT4530_5718C.1.pep
PFPNGPPAHSLLSSPXPCWAGRRPRPSQAAPPPSSPGVADRWGPPVGSFPNLRRRTRRRACNRRHAHVSASFGPRRPRXRACAAFPTPTPLSHPLAPAPEMAGIRFSNPASLSSPTSXLAGEVPPLPATSGPPLPYLSFSVAPSRFFPISPNSLVRPIAPAPCNHPPPPSPLLRPPLAAARLAAAPRRRCRRVRVAEIHPVHPSFVEGVPVAVRRMSTSLRRSSSADAAVPSGEDSLPFPFLPQFPVRRRRSRSPSPSVVAAVHCRRFRIAFAPSPPPPDAVAGNTTRACRRHXPSRSSSLSKSGAPPSPGLPSPSLADRWARRPHLSAPSPTSS

SEQ ID NO: 157639 - protein, 185 aa, Oryza sativa
  Clone ID: PAT_MRT4530_57190C.1.pep
PGLQAHRYRLPTLPSAPPRWLRPPPPAGTPRPRLSAQSHCRRRQPSIRWRPHAPGPLPVAVPLSLFRSGAASVVKAVGGSARKEVARPGMRWQRELLELNLDGDRLLPSSSLPSPPSLAALPLPSLLPPPPCRRRDARTARQRSFHRKAKSTAVPSTRRTTGSALAVTALEARKQVLQSHCWLAY

SEQ ID NO: 157640 - protein, 67 aa, Oryza sativa
  Clone ID: PAT_MRT4530_57191C.1.pep
HVELFNGLPMGTTRPRVDDFAPLVDRVERSLNASSMFLPYGGRLTLVNSVLCAIPAYYICSLQLPVT

SEQ ID NO: 157641 - protein, 70 aa, Oryza sativa
  Clone ID: PAT_MRT4530_57192C.1.pep
LLLSHLSPPASVGELDVATLGWSSLSLSLRRRKRGGARRRDARSALGLDPILIGADPILVGATPSRRRIA

SEQ ID NO: 157642 - protein, 72 aa, Oryza sativa
  Clone ID: PAT_MRT4530_57193C.1.pep
MASGRCCTFLEILLAIILPPLGVFLRFGCCSMEFCICLLLTILGYVPGIIYAVYVLVALDSDQYQREYHTLA

SEQ ID NO: 157643 - protein, 152 aa, Oryza sativa
  Clone ID: PAT_MRT4530_57194C.1.pep
MSLIAGEDFQHILRLLNTNVDGKQKIMFALTSIKGVGRRFSNIACKKADIDMNKRAGELTPEELERLMTVVANPRQFKVPDWFLNRKKDYKDGRFSQVVSNALDMKLRDDLERLKKIRNHRGLRHYWGLRVRGQHTKTTGRRGKTVGVSKKR

SEQ ID NO: 157644 - protein, 55 aa, Oryza sativa
  Clone ID: PAT_MRT4530_57195C.1.pep
LIKFEHRRRHAEALKKGFPSAVGLSFILFKWHKSVLSIALMFCVHLYLDGVPHHA

SEQ ID NO: 157645 - protein, 75 aa, Oryza sativa
  Clone ID: PAT_MRT4530_57196C.1.pep
SHPCGRVGLPVRAPSWSVPPPSLAGDGKLQLGGCRRRRGTRPGAALERAPQPAEMEPLRRSPPHARATSPDRHRH

SEQ ID NO: 157646 - protein, 422 aa, Oryza sativa
  Clone ID: PAT_MRT4530_57197C.1.pep
MDDAGRASAPAVVTLPATAAATDEPSHDPAALYGEGMWQQMTMSGSGAMQPGPYPERSGEPDCTYYLRTGLCRMKGEYPERMGQPECQYYLKTGTCKFGPTCKFHHPREKAGIAGRVQLNTLGYPLRPSEKECAYYLKTGQCKYGNTCKFHHPELFNAMASSRGSPIYPSVHSSATAGPPYTGTMASWAFPRGSFIPSPRWQNPSNYAPMIVPQGLVQVPSWNSYTGQMMPVSSSESRLQSPGAQQTYGTSQQVDASAGNQGMLSPYRSSSYPVPQYALQRENVFPERPDQPECQYYMKTGDCKFGAVCKFHHPRVRSMPTPDCVLSPVGLPLRPGEELCKFYSRYGICKFGANCKFDHPTMAPPMGVYAYGSASTNVPMIVGIGFSGSWQQGAKDPTDSSGAPPNTHVLGEDPIPYRKIAV

SEQ ID NO: 157647 - protein, 67 aa, Oryza sativa
  unsure (1)..(67): unsure at all Xaa locations
  Clone ID: PAT_MRT4530_57198C.1.pep
FKANIHKKDVLXGATAIHFAALKGHTRCRRLLVADYVPSLPEFWSVMHAKCTDETNKEAFDAVYVKF

SEQ ID NO: 157648 - protein, 156 aa, Oryza sativa
  unsure (1)..(156): unsure at all Xaa locations
  Clone ID: PAT_MRT4530_57199C.1.pep
GELGTGPPLEFFFFFFLLXXGXQXKLXNXIXTTXXPAXXXQYXLXXDILPXISTHISHVSTKXTCXSILQXMWRSYSGXTLDXLLXNXAQGGGSXXGIXDVPPRRXAXVRIXMVXFXLXVXIXLPLSCLXXXXSPTPGDPXXLKPXXVXXXSLLXX

SEQ ID NO: 157649 - protein, 245 aa, Oryza sativa
  Clone ID: PAT_MRT4530_5719C.1.pep
MSVSSASTNRAVKGPKASSSALGAVICSCIQPEQRRPLAKYTLELCVSTPPPVAAAAMKECVLDEYATKHRISIDRFLQLRIFVKVHDRFNASRIFLYMYSCSMKMLSFGVPCKEKAEYECNRLPAMIDAHLFRDYHLAFWFGLFCAWGQPQDGDLHLWLPHQCRCHLVYFVHFDALLLCKPWLLNALFWLDSQLQGRVTRSEGRMGLDCGDSLVWPCVTRFAKLGKKKEVEENNYTMEVTKQTM

SEQ ID NO: 157650 - protein, 491 aa, Oryza sativa
  Clone ID: PAT_MRT4530_571C.1.pep
LRHNLSMSMPMPILLLLLLLPQGQGHGGAGDICIVGSGISGSSTAFFFTNYTTALSGAQLRVFERRAKVGGRLATVTVSGDHFEAGGSIIHPRNLHVRRFADLLGLEAKTDGDDDWLGIWDGHRFVFQTLRPLPPGTSWLRRKLHTLVNSLRLFKRYGLSLLKMDRFVQEMLQRFMLYYNGFESRPVFDTVEEMLKWSGLYGLTRRTLEAELLDAGLNSQTISELVTVITRINYGQSVSISGLAGAVSLAGSESGLWAVKGGNWQLAAGLLEAANATLHLQEGIDSIEYAGDHYILKSNKGLEYNCVATVVATPLDEVNITFSPPISIPARKTQHTHATFVRGILNPKFFGLSSVSDIPKLIGTMEVPEIPFSSISILKKYSEQDMTYKVFSRVKLNESLLDQIFSGRKETIRINWPAYPHYEAPEVFAPIILDGKQLYYVNTFESAASAMETGAVAAENVARLLIARLRLPLPSRPAAPAPDHHDQRADL

SEQ ID NO: 157651 - protein, 132 aa, Oryza sativa
  unsure (1)..(132): unsure at all Xaa locations
  Clone ID: PAT_MRT4530_57200C.1.pep
GGLGQLAEGVADGCIWPARHRLVEGSESGLAQRGAADGXGRLGARGTGGEDGGRIGARGASGGGGWLGTRGAAXRWRGRPRCEEELSVGVAWSSALEGXPTGDAGAGVLHVGRACMVVELRCVSRGFAGGER

SEQ ID NO: 157652 - protein, 112 aa, Oryza sativa
  unsure (1)..(112): unsure at all Xaa locations
  Clone ID: PAT_MRT4530_57201C.1.pep
PWCKRFHIFFLADGERNKEFELQRDLAQSRLGDLLQVVGDNHVHVSKQSSVXGRNFTFDVPQTCEDEQSTTESSEVVDSXKILGXKAGEWDIGNISLSRLEIMCGLLPHFGI

SEQ ID NO: 157653 - protein, 39 aa, Oryza sativa
  Clone ID: PAT_MRT4530_57202C.1.pep
FPKALSSLATCYRSIHTHNHGLGSLPSTYAKHMNGIDRT

SEQ ID NO: 157654 - protein, 249 aa, Oryza sativa
  Clone ID: PAT_MRT4530_57203C.1.pep
MRFGAVEGEILTSRLTTVAQKIVNVRQTAFISGRYILDGAVILHEVLHELKSKNQPGIILKLDFEKAYDKIQWGFLFDVLQRNGFGEKWIGWMKQATMNGRVAVNINGVGEEFFKTHKGLRQGDPLSPLLFNLVADALAEMLELAIEKGHLHGLGPHLVQWGLTHLQYADDTILFMEPSDSNILTVKFMLSLISNSTLVPGRMALPRGAARFEDVNLMREISRCDRATDSSTPWSLGVQPNGPSSHTGP

SEQ ID NO: 157655 - protein, 342 aa, Oryza sativa
  Clone ID: PAT_MRT4530_57204C.1.pep
MPPPAWGWGSNPLEPVVHTVAAFSRRLLIAPDAAPDEARLRPLLSLSLSPPPTPPSPPPPPPEVLKKDSKAAPLTKEEVGRATWMLLHTIAAQFPDEPTRQQRRDARELMAIISRLYPCKECAEHFKEVLKANPVQAGSQAEFSQWLCYVHNVVNRSLGKPIFPCQRVNARWGSSERRKVQKHLKLRCCRGDEDEASSSVGFATLCISWRRKHVARDRFGCKKKHYDILRLIVLAFVCLDYVVAINNVLTMDDIFATFIADHQTYGSIELNGRRLQERRLSSTNRKTRALENVRIDDYRPVDPSPSSKATIGAGPIEHGTPLLPYVPRPKPPPDHPAQSPAT

SEQ ID NO: 157656 - protein, 84 aa, Oryza sativa
  Clone ID: PAT_MRT4530_57205C.1.pep
MSGTPLPPPAQPPPPPGAAGPDGAAALPPPPGTDMTGICFRDQLWLNTYPLDRNLVFDYFALSPFYDLTCNNESLRSGQIHPLD

SEQ ID NO: 157657 - protein, 59 aa, Oryza sativa
  Clone ID: PAT_MRT4530_57206C.1.pep
INLRQFLTAYKHNSFPNFLKLIRDKAWCLFLFTVSDFQPISPWSRGLYTVNLQGCLRPL

SEQ ID NO: 157658 - protein, 283 aa, Oryza sativa
  Clone ID: PAT_MRT4530_57207C.1.pep
MSGTPLPPPALPPPPGTDMTGICFRDQLWLNTYPLDRNLVFDYFALSPFYDLTCNNESLRSRQIHPLDMSHLTKMTGMEYVLSDVMEPHLFVIRKQRRESPEKSNAMLAYYILDGSIYQAPQLCSVFASRISRAMHHISKAFTTACSKLEKIGHGMVQNRYTIYNSGNTSKAEVSILQIISFKNWHFQQIPLINDVETEPDTAASESKTQKEAIDLKELKRVDHILMSLQRKLQPAPPPPPFPEGYVPSEQEKASDDLLASEALPPQVDPIIDQGPAKRPRFQ

SEQ ID NO: 157659 - protein, 46 aa, Oryza sativa
  Clone ID: PAT_MRT4530_57208C.1.pep
YFTTIYYFFLKRRDFKVFNFPLSLFHRDGCLKVQPSTLNLTRYHIF

SEQ ID NO: 157660 - protein, 166 aa, Oryza sativa
  Clone ID: PAT_MRT4530_57209C.1.pep
NSPNINFFLGKVPIIRFRETVQSIHTPMDMSTFHELVRLSCNEEIIEPFRNAGNLGTSRRGIHRRPSTTPGRSSYGWRRRPRRRGPCRWRWSRCPRPRRSPPPCRRTWNRSCTSSRRTWTRPWPPTGAPASTSSSGTAPCPAAAPRRTAAAPAGGRRRRRRPASVS

SEQ ID NO: 157661 - protein, 211 aa, Oryza sativa
  unsure (1)..(211): unsure at all Xaa locations
  Clone ID: PAT_MRT4530_5720C.1.pep
RRRGADKRGPLVSGSRESGSPWTGTTQVVHRRSTGPTAQIALGXDRTGGDRGGRRARLGIKADRXPGLAAAARARRVAGDGIRRRRRRRKSDAKAAAADGGNDRRRRRARAAATHGEMGKKRKGEGVLTGGDGGVRRRGTTEGGRHAADGDRDDMATLTYARWEWRSGDEPRRKRGGRGGSRPPEPDGGDRPVRRRAPKPNSARPQAPTCP

SEQ ID NO: 157662 - protein, 56 aa, Oryza sativa
  Clone ID: PAT_MRT4530_57210C.1.pep
LQLGQPVWFGLSFQYVTFGVKPCVRLGNVIPWLMSSTPEIWGCLWFLHSIQIGLHL

SEQ ID NO: 157663 - protein, 519 aa, Oryza sativa
  unsure (1)..(519): unsure at all Xaa locations
  Clone ID: PAT_MRT4530_57211C.1.pep
MGGLCSKGSAVDKSPSDTTLGPDRVVRGHERGGAGVGVGKEERKTVAREAAAKRIQEQQQQQRQQPASVQEAPASRAPIDARELPWDGVPNLARLPSQKSGMGVAKASAAKASAFNLVRIAIVNRFGLGSHTLDKFMHQNRFVSEVSSILGRASTVGLGKAVEVLDTLGSSMANLNINSGFGSGTTTKGNKISILAFEVANTIVKGCNLMRALSKESIKHLKEVVLHSEGVQNLISKDMDELLKIYAADKRFASERTPQHHLKEEAESVMQQLVTCVQCTAELYHEMHALDRFEQDYQRKQQEEDGSSVHQRGENLNILKQEVKSQRKHVKSLQKKSLWSKNLEEVMEKLVDIVHFLHLEIHNAFGRSDNEESQEPTKRRNRLGPAGLALHYANIISQIDTLVSRSYTKGPXTMRSYLQTKASSSSSPLLTQEDQDMLRDVKYWKFIPGISKSQEFETKSRHSKQSRLSKSNSHSPSSGNMKELLSIRRMLPVIDFEIDRTKAMDLIDRVDNLKSTVRT

SEQ ID NO: 157664 - protein, 169 aa, Oryza sativa
  unsure (1)..(169): unsure at all Xaa locations
  Clone ID: PAT_MRT4530_57212C.1.pep
CRAPPASPSPSPSTVFRRHLFWPSRAAMAPPPPPPTLAFAASEGASSRSRGPLISLYYCSAPPPPSLRRPHRAPRTRRPGASWAAATPPHPPPPTRRHXSSSSSSSPSVRHYHYYPPSPTRSSSPPTPAAHTTSCPICPYVLLAAAVGITIIFLCTLASNQKTTVVKLQ

SEQ ID NO: 157665 - protein, 1060 aa, Oryza sativa
  unsure (1)..(1060): unsure at all Xaa locations
  Clone ID: PAT_MRT4530_57213C.1.pep
MLVCTQVGEIVFPVYTTMPISTGPEITRIKNDVVTTPVDSMSKDPPTGAENGTSTTSAPKKDSNAASSYLSNKNHEPTRTTSEATRIWCPIHKTKGHDLQACSVFLDVQAEIRACRERGIRRASPTRDVHCPIHKTRTHDLSSCKVFLNAMKTSPPKVQQSKISPREADKERGAAAVSDRFVRVIDIDPHEPSVLHLVEDQASSSTSTPRDVYAIGGTSTSAGGNTEAEDQLATPAQHIRTINAILRETPYDPVLNADLDQWTERLRESVANFSNTFEEAAARAPPEQPPTGXHPRRMYDRRQPTAPSGGCRAFSRALRDVRWPERFXVLYAAGADDNALAXNYLPAALKGSARSWFVHLPPYLISSWADLWQQFVASFXGTYKCHAIEDDLHALTQNXGKSLRDYIRRFNEGRNMIPEITDASVIRAFKSGVRDRYTTQELVTRRITTARKLFEIVDRCADAYDTLRHKNDRPKIGGEKKPAKDATESIKKKSRRSGKRKAQTEVLAAEYADPPKHPDPQGDDTEKIWCPIHKSDKHSLETCFVLKMALAKQLALEKGKRITFDVAEFDTAYNAIIGRIALAKFMAASHYAYQVLKMPGPKGTITIQGNAKLAVQCDKRSLDIVEHTPNPPATAEPPKKISMAKEDEEKTAFIMPFGVFCYVKMPFGLITAGNTFQRMVQGALNDQFGNNVEAYVDNIVAKTKTSDSLIDDLRETFDNLRRYRLMLNPEKCTFGVPSGKLLGFLVSGRGIEANPEKIKAIENMKSPTRLKEVQKLTGCMAEADDVFITLKRYLSNPPILVAPQPNEELFLYIAATPYSVSIVIVVEREKVQRPVYYVSEALHEAKTRYPQIQKLLYAVIMTSRKLRHFFQAYRVTVVSSFPLGEVVLADFVADWAMPDTSRVRRLLAGIRAAAAVGVKRLIVKGNSELVVNQVHKDYKCSSPELSKYLADVRKLEKRFDGIEARHVYRKDNIKPDDLARRASRREPLEPGTFLDVLTKPSVKEANDEDSTVVPDIGSGATVSEHVVADIETTDDWRTPLIKFLSSDELPEDDTEAEKIT

SEQ ID NO: 157666 - protein, 52 aa, Oryza sativa
  Clone ID: PAT_MRT4530_57214C.1.pep
MVNPIYHAPCLKSRTPRGPTKSLPGEANHPPRLSGWVVENVHALGYRARIRP

SEQ ID NO: 157667 - protein, 86 aa, Oryza sativa
  Clone ID: PAT_MRT4530_57215C.1.pep
MRTSHMMIFSLLLLVLSSGDLAMADGKLSDADCKMILFPAYCDDIKTCIPLCTNNSPLKPAPSQLSTVVCLDLGCQCTFCPKTARN

SEQ ID NO: 157668 - protein, 106 aa, Oryza sativa
  unsure (1)..(106): unsure at all Xaa locations
  Clone ID: PAT_MRT4530_57216C.1.pep
LQSPLLLPCAPNLLLGGARRQXRRPRLXGSPLPGRTGAGRTDPPQXRRGCARXRRRLXTATTATXTEAATTATTKEXAGPXPPIPSSPLSQIGPRGGGCRREERAL

SEQ ID NO: 157669 - protein, 212 aa, Oryza sativa
  Clone ID: PAT_MRT4530_57217C.1.pep
MEQQEEVPPPPAGLGLTAEEYAQVRATVEAHHRYAVGPGQCSSLLAQRIHAPPAAVWAVVRRFDCPQVYKHFIRSCVLRPDPHHDDNGNDLRPGRLREVSVISGLPASTSTERLDLLDDAHRVFGFTITGGEHRLRNYRSVTTVSQLDEICTLVLESYIVDVPDGNTEDDTRLFADTVIRLNLQKLKSVSEANANAAAAAAAPPPPPPAAAE

SEQ ID NO: 157670 - protein, 1293 aa, Oryza sativa
  Clone ID: PAT_MRT4530_57218C.1.pep
MAAEPEERLDVLTAGGEKTGASKARHAAATPYPAYSRRRFGWIPFDRIASEVHRDGDYHRAVHVWIYSESTGELLLQRRADCKDTWPGQWDISSAGHISAGDSSLSSAQRELDEELGIKLPSDAFELLFVFLQECVINNGTYTNNEYNDVYLVTTLTPIPLEAFTLQESEVSAVRYMHLDEYKSCLAKESGEYVPYDVNGTYGQLFSIIEERYKDNIESRSLTLQKQINRYAPIHLEPELTSLSEGDREALGYILKASIVIDDIFYEQVWNSNCTLRDWLKARANYSSFDKLKWLYYSINKSPWSCLDENKAFLSTADSAVKLLTDATKSVSGWKGIEYRAAFPRDNPPGANFYPPDMDKMEFELWKNGLPEKEQKYATGFFTVIKRHDALLPSILAQSDGSNQTKTSDDLFVVPYSEEYKSSLEKAAELLHKASECSDSPSLKNLLKTKANAFLSNDYYESDIAWMELDSNLDVTIGPYETYEDGLFSYKATFEAFVGVRDDIATSQVKLFGDQLRDLEKHLPLDNIYKSDNVSAAPIRVINLLYNSGDVKGPQTIAFNLPNDERIVNERGTSMVMLKNISEAKFKHILKPIANACIREEQEDYVDFEPYYTHIVCHECCHGIGPHSITLPTGKRSTVRMKMQHIHLAMENNFANTQELQEFHSALEEAKADIVGLWALNFLIKKGLLPKSLSESMYVSFLAGCFRSIRFGLEEAHGKGQALQFNWLYEKGAFVLHSDGKFSVDFTKVEDAVESLSREILTIQAKGDKPAAQSLLQSHASLTQPLRVALDKIEHMQVPVDITPIFGTANKLLANDHGALWAHTRKLTPRPPSTSSFLLKTKRPWRPPPPLISPTPPLLFFNPRSSLDTHVHIGDRRPNATTTAEDAQIQVSISPASPPNPSRLFVRRLNRDTVSLLYEDAQIVSAADGLLLLRVTIVTTTAPSRLENDYFVYSYQWPGRPSLRRLPSPPFPFHDDEAGILPLPVPGGEQQFKIAVLSVRLNGFNLRLFDSASWSWTNVGKVIVASPQRPFPIKIPRNAARLNQHITTTAITLGGEDGTMGWVDLYRGILFCDVLSGGDHPTLVGVPLPLPRRLVDRGAEVEGCPKANRGIAVLDGCLRMVELEVHGEILPTRDPETGHLDREIKNWELYMYTNSKITGAWEDWQLVHGVEASQINIDQAIHDSLLQPGLLRDKMQDGKERKLHNLLTSQPALSLDGEGVVYLLTKAKFMQRQAWVLAVDVKGNKILGLAEFGTDTYLGLSLAYCPSRISSYMDAWTVQTISYILVLYKFLVL

SEQ ID NO: 157671 - protein, 426 aa, Oryza sativa
  Clone ID: PAT_MRT4530_57219C.1.pep
MAAQAGRLGVVASVAFNLAALAFYLRRRYFGGDDAAAVRKKAEAEVAPSSGKPPVTKDSIINLDHGDPTMYEAFWRGGAGERATIVIPGWQTMSYFSDVGSLCWFLEPGLEREVRRLHRLVGNAVADGYHVLVGTGSTQLFQAALYALSPPGPSAPMNVVSPAPYYSSYPAVTDFLKSGLYRWAGDAKMFDGDTYVELVCSPSNPDGGIREAVLKSGDGVAVHDLAYYWPQYTPITSAAAHDIMLFTVSKCTGHAGTRLGWALVKDRAVAQKMSKFIELNTIGVSKDSQLRAAKILKAITDGYDRAPAAGDDDDDSSRLFHFARRKMVSRWAKLRAAVAASGIFTLPDELPGHCTFANETVSAYPPFAWLRCGKEGVDDLEGYLRERKIISRGGGKFGADGRVVRISMLDTDEAFAIFVDRLAAMN

SEQ ID NO: 157672 - protein, 425 aa, Oryza sativa
  Clone ID: PAT_MRT4530_5721C.1.pep
MALAVDNGNSLHTRAVPRRPVDPRGSDPVFFHPAPPCDGWASPIRRYKDDLLSDPTARGHSVHRAQGFEARLPPLRSARLPSPEAEPSRRSSAAEKPSRFPHHLSHHNQTLTPPTPTMEFARRATAPVDADDGCGVPHPSPRETKQRWGWGVSVQVTMDALRRELWEEGIRQEVIAAEIAEQRELEAKVQRDTGLLCDVPSRLSVSFQPVRGDTFPSPHGELWLGGPMAMPAGASMFRVPVKDRIEEWYRPPWDRTADEENASFNALYKEATRISLNDHICCLEHSAGHRNEENNALESRKEAIGTKKKVETESLSVTRHYPPTWNYGICKANCSSELDLKNHLRGRRHQENLEALKREDKEMEAKVYAKEVAQFVEKNQKFVPRWSCSTCKANCTSASDLENHFRGRRHQQNVGRSSNVVMLRA

SEQ ID NO: 157673 - protein, 586 aa, Oryza sativa
  unsure (1)..(586): unsure at all Xaa locations
  Clone ID: PAT_MRT4530_57220C.1.pep
GIWPWLPRPARRPRWPRRRSPPPAAAGGGAGARIPGCGWGWGCGARSTATSPTWXRQRSERXLFPPEPEHYRGPKLKVAIIGAGLAGMSTAVELLDQGHEVDLYESRPFIGGKVGSFVDRKGNHIEMGLHVFFGCYSNLFRLMKKVGADNNLLVKEHTHTFVRPRGPIGELDFRFPVGAPLHGIQAFLRTNQLKVYDKARNAVALALSPVVRALVDPDGALQQVRDLDDVSFSDWFLSKGGTRESITRMWDPVAYALGFIDCDNISARCMLTIFTLFATKTEASLLRMLKGSPDVYLSGPIKKYITDRGGRFHLRWGCREVLYDKSPDGETYVKGLLLSKATSREIIKADAYVAACDVPGIKRLLPSEWRQWDTFDNIYKLDGVPVVTVQLRYNGWVTELQDLEKSRQLKKAVGLDNLLYTPDADFSCFSDLALSSPADYYIEGQGSLIQAVLTPGDPYMPLPNEEIISKVQKQVLELFPSSQGLELTWSSVVKIGQSLYRESPGNDPFRPDQKTPVKNFFLSGSYTKQILSRKDYIDSMEGATLSGRRTAAYICGAGEELLALRKKLIVDDSEKARGKVEALQTS

SEQ ID NO: 157674 - protein, 111 aa, Oryza sativa
  Clone ID: PAT_MRT4530_57221C.1.pep
AVSTARRGSGGGMVGSAAYSAASAIVVVMAKGKGRGGRGGPSGANKVSERRPPRITSNVKQSLRILKFWKDYERRQTSGPQPATRYRKKKVIKEVLPDDTDFYDDASSTLH

SEQ ID NO: 157675 - protein, 68 aa, Oryza sativa
  Clone ID: PAT_MRT4530_57222C.1.pep
LPLIYTNTYNPTGGGLHTTRRCTKNLTNKPYNTLHNNMEPTNHPLIHLLHRILIKSHYSYTQTHPFKP

SEQ ID NO: 157676 - protein, 44 aa, Oryza sativa
  Clone ID: PAT_MRT4530_57223C.1.pep
IKLNKSFRSICSSAQMYRSDGPASSYAEVEHQRHHDIHHGQEFV

SEQ ID NO: 157677 - protein, 137 aa, Oryza sativa
  Clone ID: PAT_MRT4530_57224C.1.pep
STPSGFSCSVQTQRMNWVEFLKPVVAMLVFDTLFALMTALVKKALADGLNHVVFITLRQFVAAVLLAPIAYFKERNTRPRFTTEIFAYMFMSALLGGLCAQYLFFLGLSYTTATLTATFSNMTAGFTFLIAIPLQLE

SEQ ID NO: 157678 - protein, 38 aa, Oryza sativa
  Clone ID: PAT_MRT4530_57225C.1.pep
MAGTPIGHFCRHLLRDILEEGGPVDPVSRAVPHAFRGA

SEQ ID NO: 157679 - protein, 281 aa, Oryza sativa
  Clone ID: PAT_MRT4530_57226C.1.pep
MTSQPHAGEDGGDRLSALPDCLLHAIMSLLPARHAVQTCALSRRWRDLWRSMPCLDIVGDEFTSSTTGSVRWDKFESFATNLLLNHDAPFLDRFRLRLPSSWHVRGGVQQRDIKSHSQPDVRQIERWINRGVRFYRPVELEITIGVGYDLKLPILGAVVFSHRLKSLRLSRLVLDRGFGYTIRSWCPVLEAMELNSCIFEFDEITGNALRSLAIDGCSRRGLQVPDDALCVTAPKLTSLRLKFSIHDFSVFLVDRMGFLVDASICKMFSSTTNFGNNVCNL

SEQ ID NO: 157680 - protein, 337 aa, Oryza sativa
  Clone ID: PAT_MRT4530_57227C.1.pep
LALLKVLRVLAFAWIRNSLGLYSYVRVATTAHGVAQRGGFVAAARRLEGGGAAARRRRRVEKGGEKRERRRGWSGERGEWWAFIGERGEKGEEGREGRGGEGGDATAARRRGALVTGGDATGGDVTARDARAAMATTRRGSGRKAARHGARRGATGDAMATRRGSGVGRKATGRRAARQRHGSRRGATARGAAAAMGWRRRQTAMATSARRQATMATARGGSGREAARRDGQRRVVTVATERGERGGGWGVTPLASPVGGCSWCAAVAASLNALLSSWFMSEGQGLAVSKSFLSLDVVDIPFSVSTGGFFDMESPWFVATTFSSPVIGGPVEIGVVI

SEQ ID NO: 157681 - protein, 231 aa, Oryza sativa
  Clone ID: PAT_MRT4530_57228C.1.pep
MDGDTTFTKLFVGGLPWETRGDAVRRHFEQFGEIVEAVVIADKHTGRSKGYGFVTFRDPDGAARALQDPTPVIDGRRANCNLAAFGAARRVHPVAAPFGMARLRPAMIASSSSYQGSAPSYFPQVLYAYPYCYGYHGGYSPEITHQAHMGYYGGYGVSAAQAQQQQAQLHAYYAAARPAGAYQFQAAGEQTRSALAPTVLPKDRLISGPRHDNFPDPSNKPIIPHGSHPPE

SEQ ID NO: 157682 - protein, 85 aa, Oryza sativa
  unsure (1)..(85): unsure at all Xaa locations
  Clone ID: PAT_MRT4530_57229C.1.pep
GAGRALRRPLSLPDSPRHERGLRVARWGRGVXVRVRWWFLRGEGFVRAVEDACGGAFPLPFKVPHRAPRARGAGSPRGPRSTAAW

SEQ ID NO: 157683 - protein, 602 aa, Oryza sativa
  Clone ID: PAT_MRT4530_5722C.1.pep
MPPPVSSPSAPRLSPSAARAAEQHCLRLLAASSTPTSLLQSVAFLLKSGLHANSLVLTRLFAASASAAPALLDPLVTALLRPSVPLDAFLANTLIRAHATSPIHSLRLRAAAFFPLMLRGAVVPNKFTFPFLLKACAALPGSPDVGLQAHAAALKFGFATDQYVSNTLIHMYSCFGGGFLGDARNVFDRMPKESAVTWSAMIGGYVRGGLSSDAVDLFREMQANGVQADEVTVIGVLAAATDLGALELARWVRRFVEREGIGKSVTLCNALIDTLAKCGDVDGAVAVFEGMQQRSVVSWTSVIDALAMEGRGKEAVRVFEEMKVAGVPPDDVAFIGVLTACSHAGMVDEGCGYFDAMKVEYGIEPKIEHYGCMVDMFGRAGMVERAMEFVRTMPIQPNPVIWRSLVSACRAHGRLELGESITRSLLHEYPAHEANYIMLSNVFALTQRWKEKSEIRREMSKRGIKKVPGCSIVELDGEVHEFIAGDESHPQYKDIYRMVEEMARELRRVGHIAATSEVLLDLDEEDKEGALQWHSEKLAIAFALLRTPPGTQVRVVKNLRVCSDCHAAIKCISQVYRREIVVRDRSRFHRFKDGSCSCKDFW

SEQ ID NO: 157684 - protein, 109 aa, Oryza sativa
  Clone ID: PAT_MRT4530_57230C.1.pep
TFVINSARITMSLKLTYSTLPEWKELGSTVQDYPRNYSRLNHSLPDRGRVLDTASVAQCRHCFAVALWMQPCKNFEVLRSGYFTKYLIIPRPSTLSLTPEGFFFGAFSW

SEQ ID NO: 157685 - protein, 107 aa, Oryza sativa
  unsure (1)..(107): unsure at all Xaa locations
  Clone ID: PAT_MRT4530_57231C.1.pep
MWRVERAGRGPRLNSHQCAAPQLSLTAFNAVRADVRRDQSVTGLSPVTSDXTGGYAPPHVASVSSGVEVERMTGLPPVPSGRLRWVPLQEGLLLSFQAKARIVTWSR

SEQ ID NO: 157686 - protein, 79 aa, Oryza sativa
  Clone ID: PAT_MRT4530_57232C.1.pep
MGMPSVQDALRCLPPLIRPHCALRCLLPLFSPPRPPQKCVKVYVEGVEHKNVAYVACHISGQTWSKNNWTKGGASASTT

SEQ ID NO: 157687 - protein, 72 aa, Oryza sativa
  unsure (1)..(72): unsure at all Xaa locations
  Clone ID: PAT_MRT4530_57233C.1.pep
XFXXXDNIYIXNXXXLRXXAXRTQTXGGLXEXQXXQXTLXXSYXSRXXFYXXWESRVDIDANXVDXXXRPSK

SEQ ID NO: 157688 - protein, 1036 aa, Oryza sativa
  Clone ID: PAT_MRT4530_57234C.1.pep
MKITAVGQLILVLMACSSHAVICSTFGNGTDQLSLLEFKKAISLDPQQSLISWNDSTNYCSWEGVSCSLKNPGRVTSLNLTNRALVGHISPSLGNLTFLKYLALLKNALSGEIPPSLGHLRRLQYLYLSGNTLQGSIPSFANCSELKVLWVHRNNLTGQFPADWPPNLQQLQLSINNLTGTIPASLANITSLNVLSCVYNHIEGNIPNEFAKLPNLQTLYVGSNQLSGSFPQVLLNLSTLINLSLGLNHLSGEVPSNLGSALPNLEIFELPVNFFHGRIPSSLTNASNLYFLELSNNNFTGLVPRTIGELNKLQMLNLEWNQLQAHREQDWEFLQSLGNCTELQVFSMTGNRLQGHVPSSLGNLSDQLQELHLAESKLSGDFPSGIANLQNLIIVALGANLFTGVLPEWLGTIKTLQKVSLGSNFFTGAIPSSFSNLSQLGELYLDSNQLVGQLPPSFGTLPILQVLIVSNNNLHGSIPKEIFRIPTIVQISLSFNNLDAPLHNDIGKAKQLTYLQLSSNNISGYIPSTLGDSESLEDIELDHNVFSGSIPASLENIKTLKVLNLSYNNLSGSIPTTLGNIKTLKVLKLSNNNLTGSIPASLGNLQLLEQLDLSFNNLKGEVPTKGIFKNATAMRVDGNEGLCGGSLELHLLTCSNKPLDSVKHKQSILLKVVLPMTIMVSLVAAISIMWFCKRKHKRQSISSPSFGRKFPKVSYHDLVRATEGFSTSNLSGRGRYGSVYQGKLFEGRNVVAVKVFNLETRGAGKSFIAECNALKNVRHRNLVTILTACSSIDSAGNDFKALVYEFMPQGDLHNLLYSTRDGDGSSNLRNVSLAQRLSIAVDVSDALAYLHHNHQGTIVHSDIKPSHILLNDDMTAHVGDFGLARFKSDSATSSFVNSNSTSSIAIKGTIGYVAPECAEDGQVSTASDVYSFGIVLLEIFIRKKPTDDMFKDGLSIVKYTEINLPEMLQIVDPQLLQELHIWHETPTDVEKNEVNCLLSVLNIGLNCTRLVPSERMSMQEVASKLHGIRDEYLRGD

SEQ ID NO: 157689 - protein, 155 aa, Oryza sativa
  Clone ID: PAT_MRT4530_57235C.1.pep
AVEAEAAGKDGGEEVREYKSDARKLEELFKKLNPSAEEFVPLARRRGGGDGARRLSADAPVFVSPAIDFYSQHPVQQPPPIQVLPVVVGGGGGAGLDSSSDGSTNGQPNRRRRSSFNQGRRRMGGRPRRTDWEDSVRRTVLVSDIDQHGTEQKLA

SEQ ID NO: 157690 - protein, 373 aa, Oryza sativa
  Clone ID: PAT_MRT4530_57236C.1.pep
MVAVAAEAPIRADAVPAAAAAAAAAAPDAAPGEGADAAAAVEAEAAGKDGGEEVREYKSDARKLEELFKKLNPSAEEFVPLARRRGGGDGARRLSADAPVFVSPAIDFYSQHPVQQPPPIQVLPVVVGGGGGAGLDSSSDGSTNGQPNRRVIDRLIALLGSRRSSFNQGRRRMGGRPRRTDREDSVRRTVYVSDIDQHVTEQKLAEVFSNCGQVVDCRICGDPNSVLRFAFIEFADDVGARAALTLGGTVLGYYPVRVLPSKTAILPVNPKFLPRTEDEKEMVSRTVYCTNIDKNVPEDAVKSFFEGMCGEVARLRLLGDYVHSTCIAFVEFVQADSAILALSCSGMVLGALPVRVSPSKTPVRPRSPRVTSH

SEQ ID NO: 157691 - protein, 118 aa, Oryza sativa
  unsure (1)..(118): unsure at all Xaa locations
  Clone ID: PAT_MRT4530_57237C.1.pep
MSPRIQQLAAVLLAAVVVVAAAQDEPAAAKNYQTQWDTVMSILNCKSDSLIPSYICSVISKSRWGWASDDPNDDDQYTPDHPLPAPGRGAAGRGSAMTXSLNLTKYVDALSRIAKIRG

SEQ ID NO: 157692 - protein, 52 aa, Oryza sativa
  Clone ID: PAT_MRT4530_57238C.1.pep
MARHMRPAAHAQSAQRPRANSSSSSSRGPWPACICGSAICNASLHLGLHCPG

SEQ ID NO: 157693 - protein, 78 aa, Oryza sativa
  Clone ID: PAT_MRT4530_57239C.1.pep
MATQLYRWAPSSSLLVDLTAADWILRLHGCATSSLLIGITIFTTTNIFATSGGPLGGMSTYDHQIRLREATDAAVGRV

SEQ ID NO: 157694 - protein, 288 aa, Oryza sativa
  unsure (1)..(288): unsure at all Xaa locations
  Clone ID: PAT_MRT4530_5723C.1.pep
SPPAHVNDYRHRYTGTGVDNRTTGTGRHRKDEDGAAXERSLPPRDEAWERQRRTGAAETDGKGXDFSGDPXTKARHGRHEAXRRGGEDEDDDGXGCTKTRMAWNTPLRCRRRRRRRETTSRATDGTSTTRTNRDDEDGPRRGSVEGETRPRATLPLRCRRWRRRXSAGALARQKGGRCRGLAGEEDGVPVPGEVVATSAGAQGTRQRRPEAEQWWQRHCCRRGCTSGGLRGKQREGRRRGGGCDAGGGDGTAGRRANAAAGAAEDGRRHGRGDDGGEVARDHGRSREG

SEQ ID NO: 157695 - protein, 91 aa, Oryza sativa
  unsure (1)..(91): unsure at all Xaa locations
  Clone ID: PAT_MRT4530_57240C.1.pep
ARGCPRSRLHLSPPPPPXSSPRVPPPXSPPRPQPPXSXASRGPPSSPPPPSPPPPPLSLPPPLQPGSPPRXLPPRHLAPPPPAVMRDDDQR

SEQ ID NO: 157696 - protein, 96 aa, Oryza sativa
  unsure (1)..(96): unsure at all Xaa locations
  Clone ID: PAT_MRT4530_57241C.1.pep
XRWQPFVETQSSXQCFPKFGFWGVSFQLVIRGLFLQVGIQFMVGFRRVFLSHKXCCEIFEYVWHFIPGNLLFPIVPWWFCFSPLSWGWGNCFFKGF

SEQ ID NO: 157697 - protein, 93 aa, Oryza sativa
  unsure (1)..(93): unsure at all Xaa locations
  Clone ID: PAT_MRT4530_57242C.1.pep
MSGGISGFGGDKPKNWGAWRRIACHGLRGRGTSSKERNFGVGGRRPCCFCQEXMLXGRFXTLDCGHXFHVGCVRQWLVXKXTCPXCKXXXLKF

SEQ ID NO: 157698 - protein, 72 aa, Oryza sativa
  Clone ID: PAT_MRT4530_57243C.1.pep
MEPKRQIASSAEDPNGATYTTSWASSSSYATFVGKGWLVIYYAYAMRYVEDIRGSDCEEFRLEQWMNKAGVF

SEQ ID NO: 157699 - protein, 61 aa, Oryza sativa
  Clone ID: PAT_MRT4530_57244C.1.pep
ELKIPYPLYFNLLPPNKQATTHCTDWADAQTLVRDSKNSRVLKHIASSLRCGNAPNTRRPN

SEQ ID NO: 157700 - protein, 114 aa, Oryza sativa
  Clone ID: PAT_MRT4530_57245C.1.pep
PSPSRNATYGPAATRPVPSRPHGRANERSHTDTPPRPPPTGEPHTTSKTIQLRRSREAERGRRQEPEDLENPRQARGGVSPGGPPDRRTHELAKELRRHVRVEASPCEIQQAVL

SEQ ID NO: 157701 - protein, 57 aa, Oryza sativa
  unsure (1)..(57): unsure at all Xaa locations
  Clone ID: PAT_MRT4530_57246C.1.pep
ESTLSIKTTCGNRDRICDHLHDIFGSLIIMPNCFWLHTXNFLRTCMPMYHTDRILQS

SEQ ID NO: 157702 - protein, 326 aa, Oryza sativa
  unsure (1)..(326): unsure at all Xaa locations
  Clone ID: PAT_MRT4530_57247C.1.pep
MEAQNQEVAALVEKIAGLHAAISKLPSLSPSAEVDALFTDLVTACVPASPVDVAKLGPEAQAMREELIRLCSAAEGHLEAHYADMLAAFDNPLDHLARFPYYGNYVNLSKLEYDLLVRYVPGIAPTRVAFVGSGPLPFSSLVLAAHHLPDAVFDNYDRCGAANERARRLFRGADEGLGARMAFHTADVATLTGELGAYDVVFLAALVGMAAEEKAGVIAHLGAHMADGAALVVRSAHGARGFLYPIVDLEDIRRGGFDVLAVYHPDDEVINSVIVARKADPRRGGGLAGARGAVPVVSPPCKCCKMEAAXGAFQKAEEFAAKRLSV

SEQ ID NO: 157703 - protein, 51 aa, Oryza sativa
  Clone ID: PAT_MRT4530_57248C.1.pep
MAISKAWISLLLALAVVLSAPAARAEEAPKADDYAHRNELSRANEAPAHQQ

SEQ ID NO: 157704 - protein, 147 aa, Oryza sativa
  Clone ID: PAT_MRT4530_57249C.1.pep
ARGESQNQAEAMEERKWRSTSSWPPMLPVIMMAMAILAVSFNGAAAQPPPDTNVLCVSKCGTCPTVCSSPPPPASGNYNPVLSPPKGTGSGSVGGSSSSPSAPLAKGGQPGGSNYYYFFTSGGSSHGCAAALLLPPLVSLAVAALSQ

SEQ ID NO: 157705 - protein, 211 aa, Oryza sativa
  unsure (1)..(211): unsure at all Xaa locations
  Clone ID: PAT_MRT4530_5724C.1.pep
TTQVVHRRSTGPTAQIALGXDRTGGDRGGRPGLAAMARARECVAGNGIRRWRRRRKSDATAAAADGGNDRRRRRARAAATHGESGKERKGEGVLTEWDGGDRRRGATEGGRHAADGDRDDLKNEKKXIREEERGHRRRECRPKAADMATLTVARWEWRSGGGPRRRRGGRGGSXPRXPDXXDGAVRRRAYRRVAAAGVAETAAGGCTARDH

SEQ ID NO: 157706 - protein, 199 aa, Oryza sativa
  unsure (1)..(199): unsure at all Xaa locations
  Clone ID: PAT_MRT4530_57250C.1.pep
MAHIYTQIKFTESLIYITPPAAAPAASRQTKTAGNHLLEATSHRNTAVTVKTKVKTVHPFVAAKERRTPPSPWTRPRRCLKLPLPSVVVELPLVLCRPTIYHGRMCALSFQDLFFLSQDVTVGLGPNGELRYPSXRREVGEFQCYDTSXMLQQLRRHAAEAGDPLWGLSGPRDSPDACGFFNDDGILPTRRPCAKKREK

SEQ ID NO: 157707 - protein, 222 aa, Oryza sativa
  unsure (1)..(222): unsure at all Xaa locations
  Clone ID: PAT_MRT4530_57251C.1.pep
MGMYAIDLADKPAVLQPHLAKRRPPATISSKPQATGTPLSLSSVNSIDLLRLRPSLTGIPIDAKIRCRLRWIRRTKVKTVHPFVAAKERRTPPSPWTRPRRCLKLPLPSVVVELPLVLCRPTIYHGRMCALSFQDLFFLSQDVTVGLGPNGELRYPSXRREVGEFQCYDTSXMLQQLRRHAAEAGDPLWGLSGPRDSPDACGFFNDDGILPTRRPCAKKREK

SEQ ID NO: 157708 - protein, 994 aa, Oryza sativa
  Clone ID: PAT_MRT4530_57252C.1.pep
MPPTLLLLLLLLPPSLASPDRDIYALAKLKAALVPSPSATAPPPLADWDPAATSPAHCTFSGVTCDGRSRVVAINLTALPLHSGYLPPEIALLDSLANLTIAACCLPGHVPLELPTLPSLRHLNLSNNNLSGHFPVPDSGGGASPYFPSLELIDAYNNNLSGLLPPFSASHARLRYLHLGGNYFTGAIPDSYGDLAALEYLGLNGNTLSGHVPVSLSRLTRLREMYIGYYNQYDGGVPPEFGDLGALLRLDMSSCNLTGPVPPELGRLQRLDTLFLQWNRLSGEIPPQLGDLSSLASLDLSVNDLAGEIPPSLANLSNLKLLNLFRNHLRGSIPDFVAGFAQLEVLQLWDNNLTGNIPAGLGKNGRLKTLDLATNHLTGPIPADLCAGRRLEMLVLMENGLFGPIPDSLGDCKTLTRVRLAKNFLTGPVPAGLFNLPQANMVELTDNLLTGELPDVIGGDKIGMLLLGNNGIGGRIPPAIGNLPALQTLSLESNNFSGALPPEIGNLKNLSRLNVSGNALTGAIPDELIRCASLAAVDLSRNGFSGEIPESITSLKILCTLNVSRNRLTGELPPEMSNMTSLTTLDVSYNSLSGPVPMQGQFLVFNESSFVGNPGLCGGPVADACPPSMAGGGGGAGSQLRLRWDSKKMLVALVAAFAAVAVAFLGARKGCSAWRSAARRRSGAWKMTAFQKLEFSAEDVVECVKEDNIIGKGGAGIVYHGVTRGAELAIKRLVGRGGGEHDRGFSAEVTTLGRIRHRNIVRLLGFVSNRETNLLLYEYMPNGSLGEMLHGGKGGHLGWEARARVAAEAACGLCYLHHDCAPRIIHRDVKSNNILLDSAFEAHVADFGLAKFLGGATSECMSAIAGSYGYIAPEYAYTLRVDEKSDVYSFGVVLLELITGRRPVGGFGDGVDIVHWVRKVTAELPDNSDTAAVLAVADRRLTPEPVALMVNLYKVAMACVEEASTARPTMREVVHMLSNPNSAQPNSGDLLVTF

SEQ ID NO: 157709 - protein, 1378 aa, Oryza sativa
  Clone ID: PAT_MRT4530_57253C.1.pep
MVSRGLFGWSPPHVQPLTPVSEASEPPESPSPYAADLAGDAAPPPEDDAAAALDDGDDEPDPPPAAVPFKRLFACADRLDWALMSAGALAAAAHGVALVVYLHLFGTAIHSLHGRHNHDLFHHINQVSCWILTGERQTAVIRSKYVQVLLNQDMSFFDTYGNNGDIVSQVLSDVLLIQSALSEKVGNYIHNMATFFGGLIIGLVNCWQIALLTLATGPFIVAAGGISNIFLHRLAENIQDAYGEAASVAEQAILYIRTLYSFTNETLAKYSYATSLQATLRYGILISLVQGLGLGFTYGLAICSCALQLWVGRFLISHGKANGGEVVVALFSIILSGLGLNQAATNFYSFEQGRIAAYRLYEMISRSTSVVNQDGRTLPSVQGNIEFRNVYFSYLSRPEIPILSGFYLTVPARKTVALVGRNGSGKSSIIPLMERFYDPTLGEVLLDGENIKNLKLEWLRSQIGLVTQEPALLSLSIRENIAYGRSATTDQIEEAAKTAHAHTFISSLEKGYDTQVGRAGLSLTEEQKIKLSIARAVLSNPSILLLDEVTGALDFEAEKAVQEALDILMLGRSTIIIARRLSLIRNADYIAVMEEGQLVEMGTHDELLNLDGLYAELLRCEEAAKLPKRTPIRNYKEPSSFQIERDSSASHSFQESSSPNMSKSPSLQKTHGFLAFRNSDANHNSHESPNIQSPPSEQMAETRLPTVASERAPSIKRQDSFEMKLPDLPKIDVPLHRQSSNTSDPESPISPLLTSDPKNERSHSKTFSRPLDMFDNFHAEESKKQKTKAPSFWRLVELSLAEYFYALLGSAGAACFGSFNPLLAYTISLIVVAYYRIGVRDVHDEVNKYCSFIVGMGIITVLANFLQHFYFGIMGEKMTERVRRMMFSAILRNEVGWFDEEENSADILSMRLANDATFVRAAFSNRLSIFIQDTAAIFVALLLGMLLEWRVALVALATLPILVISAVAQKMWLSGFSRGIQEMHRKASLVLEDAVRNIYTVVAFCAGNKIMELYRLQLGNILWKSLVHGMGIGFAFGLSQFLLFACNALLLWYTAVAVKNGHLSLVTALKEYIVFSFATFALVEPFGLAPYILKRRKSLTSVFEIIDRAPKIDPDDASGLKPPNVYGSIEFRNVDFCYPTRPETMVLSNFSLRVNGGQTVAVVGVSGSGKSTIISLIERFYDPTAGQVLLDGRDLKLFNLRWLRSHMGLVPQDPVIFSTTIRENIIYARHNATESEMKEAARIANAHHFISSLPHGYDTHVGMRGVDLTPGQKQRIAIARVVLKNAPILLLDEASSAIESESSRVVQEALDTLIMGNKTTVLIAHRAAMMKHVDNIVVLNGGKIVEQGTHDSLVQKNGLYVKLMQPHFTKGFRQRRLI

SEQ ID NO: 157710 - protein, 52 aa, Oryza sativa
  unsure (1)..(52): unsure at all Xaa locations
  Clone ID: PAT_MRT4530_57254C.1.pep
YPEAKLSSSARDAVSRTASEVLDRYYXSYDEPRTVFSEQACIHLAAELCKAT

SEQ ID NO: 157711 - protein, 906 aa, Oryza sativa
  Clone ID: PAT_MRT4530_57255C.1.pep
MSSIILTQTPSVPRRLLLLLQLSFLLLLSSASNAVTPAGVPCRPDQAAALLRLKRSFAVTSNSVTAFRSWRAGTDCCGWEGVGCAAGAGANNGRAVTSLHLGDWGLESAGIDPALFELTSLEYLNLAYNNFGGSKIPSDGFERLIRLTHLNLSSSGFTGQVPASIGNLTSLVSLDLSTYFMIVEIPDDAYETLISQTANSIWLIEPNFETFISKLTNLRDLHLGYVDMSNSGAQWCDALANSSPNLQVISLPFCSISGPICRSLSLLQSLAALNLQHNNLSGPIPDFLSNLSNLSVLRLNHNELEGWVSPAIFGQKNLVTIDLHHNLGISGILPNFSADSRLEELLVGQTNCSGLIPSSIGNLKFLKQLDLGASGFFGELPSSIAVVDGEYNSSVSLPQIVLLYLPGCSMSKFPIFLRHQYEINGLDLSDNEINGTIPHWAWETWNYISLLGLSGNRFTSVGYDPLLPLQVDLLDLSNNMLEGSIPIPRGSSTSLKYSNNGFSSMPSNFSAHLRDVTFFMADGNEISGNIPLEFCSAKSLQLLDLSYNNFNGSISSCLMDSVSTLQVLNLKGNELHGVLPDDIKEGCSFQALDISGNLIEGKLPRSLVACKNLEVFDVGFNQISDTFPCWMSTLPRLQVIALRSNKFFGQVAQSAVEKNSCEFPAARIIDLASNNFSGPLPQDQWFKKLKSMMIGYSNTSLVMDHEVPRVGRYKFSTTITYKGSAVTLTKILRTFVFIDVSENKFHGSIPGTIGELILLHALNMSHNFLTGPIPSQLGHLNQLEALDMSSNELSGVIPQELASLDFLAILNLSYNKLEGRIPPQSPHFSTFSSISFLGNKGLCGLPLSTGCSNTTSLNVIPSEKNPVDIVLFLSAGLGFGLGFAIAIVVAWGIPIRKRSTVRQRAL

SEQ ID NO: 157712 - protein, 184 aa, Oryza sativa
  Clone ID: PAT_MRT4530_57256C.1.pep
MKKNANADHHRGPAVLPLQHQDPESPLLHARARRVGDREDRVREGHGGGVRPFDAEKLSCKLWCKAGKIIKDIKIKPPEEKKKPEPKPDEKKPDPKPKPDPCKLIPFPYPYVYPPPPPCGGCATPHCCDCHPKPPPPAPAPAKPACGCPAWSSPCHCYPPPAMPPYPPVLVCDEGPQYGACAVM

SEQ ID NO: 157713 - protein, 640 aa, Oryza sativa
  Clone ID: PAT_MRT4530_57257C.1.pep
MREGGAGEGQGAAVDEATGFEVGIVVPKLYRGAAAGCGEVENCVARLVRELEDVGLIVERVRGVPAEFIKLSAPMGTLGRVAAEMNMKKLTYIGMELQFEWDQVGAFVRQPDGSLFSWRERFACFRHLIYSIVNKTDSDITLSFDDKEFHWTQNESLLTRLEDEGIVKLVFPLHDEIKRKQLLRSWALKWFDFTWQPIDEIYSYFGTKIAIYFSFLGMYTRWLFFPAVFGLATQLIDFGSLQWLVLPAFFFFVISWAVFFLQFWKRKNSAVLARWGINYSFSEYKTMGNELDPLSFSMADDNVQQRKFGAPKEKSIVQRNEWFGVLLRIRNNAIIVLAIICLQLPFELAYAHLYAITKTEALRYVLTAVYLAAIQYYTRIGGKVSVTLIKYENNQGEQSSADSLVYKVLENLIENSIPYLNYSYKKYRAVQPIQRCKKSLPSCSKKKHEKESPAGKSVRLSTRVEKEYLKPSYTASIGEELEDGLFDDFLELTLQFGMIMMFACAFPSIFCFAALNNVTEIRADALKLLVMLKRPAPRDAATIGAWLNIFQFLVVMAICTNCLLLVCLYDEEGKWKIEPGLAAILIMEHALFLIKFGFSHFVPEEPAWVKANRGRYVAQAQNVCSKQLLRSIAKLDAKLE

SEQ ID NO: 157714 - protein, 268 aa, Oryza sativa
  unsure (1)..(268): unsure at all Xaa locations
  Clone ID: PAT_MRT4530_57258C.1.pep
SRVDPRVRPAFFFFVISWAVFFLQFWKRKNSAVLARWGINYSFSEYKTMGNELDPLSFSMADDNVQQRKFGAPKEKSIVQRNEWFGVLLRIRNNAIIVLAIICLQLPFELAYAHLYAITKTEALRYVLTAVYLAAIQYYTRIGGKVSVTLIKYENNQGEQSSADSLVYKVFGLYFMQSYIGLFYHASLHRNIMALRQVLIKRLIVSQVLENLIENSIPYLNYSYKKYRAVHKKKHEKESPAGKSVRLSTRVEKXYLXPSYTASIGEEL

SEQ ID NO: 157715 - protein, 92 aa, Oryza sativa
  Clone ID: PAT_MRT4530_57259C.1.pep
IFQFLVVMAICTNCLLLVCLYDEEGKWKIEPGLAAILIMEHALFLIKFGFSHFVPEEPAWVKANRGRYVAQAQNVCSKQLLRSIAKLDAKLE

SEQ ID NO: 157716 - protein, 126 aa, Oryza sativa
  unsure (1)..(126): unsure at all Xaa locations
  Clone ID: PAT_MRT4530_5725C.1.pep
MFTIXXXACILTXMNYLNKALDTFNTAVVSPIYYTMFTSLTILASVIMFKDWDRQNPTQIVTEMCGFVTILSGTFLLHKTKDMVDGLPPTLPIRIPKHDEDGYAAEGIPLRSAAEGLPLRSPRAAE

SEQ ID NO: 157717 - protein, 130 aa, Oryza sativa
  Clone ID: PAT_MRT4530_57260C.1.pep
MGRNGVVAATAAACILLLILLTSGQLQLASAESEIGRCYDDCLPDCEQGSSRAGCKLFCFTCCVLKPIHNCTRGGESTAAAAAPVFAGDAGCRELCTSSIGDAATGESARATDADVAACVDSCNSYKEKN

SEQ ID NO: 157718 - protein, 290 aa, Oryza sativa
  Clone ID: PAT_MRT4530_57261C.1.pep
MSSTTCLISRGAFLLLAAAVAVALPCAAALQELQLQDAVLIDDVVQEAAQAWYHGRHRRTGVTYPLSLPGSLSGVAADVARFRAGSLRRYGVRRFGEFAVPPGLAVRGQASHLLAVRANLGNLSSVFDEYAASGGYRIASPVLGLTFYGLARRGGTARLEVLVTAAAIRVNFSMAAGSNTCHVWDQGHFALVLGGAGDGGGVVAEAGEVSKWKLALFGAALGAGGTVLLGLVLVAVLSIQRRKSEVAEMARRAYEEEALRVSMVGHVRAPSAGGSRTTPDALENEYCAAL

SEQ ID NO: 157719 - protein, 66 aa, Oryza sativa
  Clone ID: PAT_MRT4530_57262C.1.pep
PMPILMQASLCASQVLMHNMASAITPVLHEASAWQSDRLNTAVLELSNCREGGFARAHASGIQFGV

SEQ ID NO: 157720 - protein, 51 aa, Oryza sativa
  unsure (1)..(51): unsure at all Xaa locations
  Clone ID: PAT_MRT4530_57263C.1.pep
QPRPHDAAPQQPPPDDXARRRRRPLLXALTGLVPLRHDXXHVERQLXHTTT

SEQ ID NO: 157721 - protein, 419 aa, Oryza sativa
  Clone ID: PAT_MRT4530_57264C.1.pep
MTSGLVTAGGGGGGKVMSLRLQYYVVLGGVTAVVLLACLRYTPTAAAVAAVGYGFWGNGDGASLAAAGAAATTVGGTGTSAAATTGGGGAGGGRSPSRVVIFNFGDSNSDTGGMAAAMGLNIALPEGRTYFRRPTGRISDGRLVIDFICESLNTPHLSPYLKSLGSDFSNGVNFAIGGSTATPGGSTFSLDVQLHQFLYFRTRSIELINQGVRTPIDRDGFRNAIYTIDIGQNDLAAYMNLPYDQALYGHGGRKFWVHGTGALGCLPQKLSIPRDDDSDLDGNGCLKTYNAAAREFNAQLGAACRRLRQRMADAAVVFTDVYAAKYDLVANHTLHGIERPLMACCGNGGPPYNYNHFKMCMSAEMELCDMGARFASWDGVHYTEAANAIVAARVLTGEYSTPPVRFASLVNSTAVPNDG

SEQ ID NO: 157722 - protein, 300 aa, Oryza sativa
  Clone ID: PAT_MRT4530_57265C.1.pep
MWPLASFQHEEKREKEKKGMPVMLQRLLCAPGINPIDLTASGAPLQPSDRQREEPAAVAGATTGAAPLSQAEANKKSKQRIPAPIGEIQNVSLSEQNNTYNMHILWCFSASAIFANEIIDSPPSRGEWDGLVLGEEYSSQIRDQPIRPNLADELVPPGTSGWRDDALLALGRWWARAKADGSSDGGGGGLGDGGSRGGEGGSGDGDGCGNRAPPPGRPRWWPRPGPRSRPTAPSSARQRWGLTAMRPWEAKEKEREPGKERRRHLLAVAEREVRAEAEAAIVALPACPLVPLLHLLVVRL

SEQ ID NO: 157723 - protein, 193 aa, Oryza sativa
  Clone ID: PAT_MRT4530_57266C.1.pep
MKVYNGWWAVEKRQSGSIYSGTYLGGKVAAASSRVKPVSVKDLALPSRTHRLLLVRSMADLAGCLHTSPYPALISPRPTSTSSRLGSTSPVASSSHLLARRLDLIGHVVLQRPRAPLRPHRACRPPTSFASHLPCAGEVGLGKAGEEEARDGPVGSLHECDKERRSSLRHHPRSSSPYPSSPTSVATASEGHC

SEQ ID NO: 157724 - protein, 265 aa, Oryza sativa
  unsure (1)..(265): unsure at all Xaa locations
  Clone ID: PAT_MRT4530_57267C.1.pep
MSTAASRARRGGGGGGGRHFPVGGGRWRHVPVVDTGCGCRPRRPRQLLMSLPSFLRPSALKPPVPRSTSSHSSSFFPSSASTASFSSSSAATYTTTYSSSSATNQYPYYGKAAAAAAAAPVTXRRTTTGSRRRRRRRRRRRRRRGGGRAGRRGTRRWRRRRRXEDVGVAVEKESSDPRADFRESMVQMVVEMGLCGWDDLRCMLRRLLALNAPRHHAAILTAFAEVCAQLAAPPAPAPPPPPQPTAAYHYHYYRISMEKKNNLAS

SEQ ID NO: 157725 - protein, 454 aa, Oryza sativa
  Clone ID: PAT_MRT4530_57268C.1.pep
MAVSVSWSWAPRFLACVAVAVLLVTSGLGGAAAGGGGRRHGHTKGLRPGKAAAKPYYPVNATAVEAIERQFTRWVRSMVGRRHSTFQRALYRGLLPTRTLVVDKNPAAGNFTSIQAAVDSIPLINLARVVIKVNAGTYTEKVTISPLRAFVTIEGAGADKTVVQWGDTADTVGPLGRPFGTFASATFAVNAQFFVAKNITFKNTAPVPRPGALGKQGVALRISADNAAFLGCNFLGAQDTLYDHLGRHYYRDCYIEGSVDFIFGNALSLYEGYSRGKPLLSATLAPRSCDWPYYSYTNQMVPMRCACPCGTSFNAKSNANGMLMSPLGCHVHAIARNYGALTAQNRMSILEDTGFSFVNCRVTGSGALYLGRAWGTFSRVVFAYTYMDNIIIPRGWYNWGDPTREMTVFYGQYKCTGPGSNYAGRVAWSRELTDQEAKPFISLSFIDGLEWVKL

SEQ ID NO: 157726 - protein, 76 aa, Oryza sativa
  Clone ID: PAT_MRT4530_57269C.1.pep
MARPSLLQPIGPRLTLGLKVHISSLRPMAGSVYKPSTYLVFDPAVSSSSHYEVFVIPSAPRKQKTEMVTCHRHSHH

SEQ ID NO: 157727 - protein, 205 aa, Oryza sativa
  Clone ID: PAT_MRT4530_5726C.1.pep
MGNPEKLMTQIFDLKFTSKSLQRQARKCEKEEKEQKLKVKKAIEKGNMDGARIYAENAIRKRTEHMNYLRLASRLDAVVARLDTQAKMQVIGKSMANIVKSLDSALATGNLQKMSETMDNFERQFVNMEVQAEFMEGAMAGSTSLSTPETEVNSLMQQVADDYGLEVSVGLPQAAAHAIPAAKEKEKAVDEDDLSRRLAELKARG

SEQ ID NO: 157728 - protein, 113 aa, Oryza sativa
  Clone ID: PAT_MRT4530_57270C.1.pep
LSRGLLPLLSAPDARARRRKGHGGEEGFFLRQLLRFPHPPNRARIRSFPAAAGGAQDRAARLMGKACSWRSFLGAASRPGSVAAGDILGRGRVSRIRFLLIRSESERMGSAMD

SEQ ID NO: 157729 - protein, 592 aa, Oryza sativa
  Clone ID: PAT_MRT4530_57271C.1.pep
MVHKLAGAATPRAASFAPVDVNAAAPPPPPQRKEVKTKKKEERRKHEAAAAAANLWDDPDSYVVTIGGRVLGRGAAGTADAATDNVRDVVVEDSDVWVQGVALFEGASLRVAHGRRYGLVGPNGKGKTTLLKLLHWRKLPVPRGIRVTLVVQEDDNRDPRPVIEVVLAADEELATLRAERDQLEASSAAAAANGARLAEVYEELTQRGWDTAPARAAKILAGLGFDQASQARPASSFSGGWIKRIALAGALFMQPTLLLLDEPTNHLDLRAVLWLEEYLTAQCKSTLVVVSHEEGFLNAICDEVVHLQDKKLHAYRGGFDSFVGSYEQKKAKAMKESERLAKAARKSGRRAPKKWHDYTVEFHFAAPTELAGGGPLLRLAEAGFTRGGFQLSAIDADVSMGQRVAVVGPNGAGKSTLLKLLAGELTPTSGEARRNPKLRIGLYSQHFCDALPEEKSPVQHGQCHRECLDTHPHLKSKPWEARAKLARFGLAKESHLTTIGKLSGGQKARVALASVALGEPHNIDALADALDEFAGGVVIVSHDSRLVSRVCDDEERSALWVVQDGTVRPYDGTFAEYRDDLLDDIRKEMAAD

SEQ ID NO: 157730 - protein, 606 aa, Oryza sativa
  Clone ID: PAT_MRT4530_57272C.1.pep
MVHKLAGAATPRAASFAPVDVNAAAPPPPPQRKEVKTKKKEERRKHEAAAAAANLWDDPDSYVVTIGGRVLGRGAAATADAATDNVRDVVVEDSDVWVQGVALFEGASLRVAHGRRYGLVGPNGKGKTTLLKLLHWRKLPVPRGIRVTLVVQEDDNRDPRPVIEVVLAADEELATLRAERDQLEASSAAAAANGARLAEVYEELTQRGWDTAPARAAKILAGLGFDQASQARPASSFSGGWIKRIALAGALFMQPTLLLLDEPTNHLDLRAVLWLEEYLTAQCKSTLVVVSHEEGFLNAICDEVVHLQDKKLHAYRGGFDSFVGSYEQKKAKAMKESERLAKAARKSGRRAPKKWHDYTVEFHFAAPTELAGGGPLLRLAEAGFTRGGFQLSAIDADVSMGQRVAVVGPNGAGKSTLLKLLAGELTPTSGEARRNPKLRIGLYSQHFCDALSEEKSPVQHGQCHRECLDTHPHLKSKPWEARAKLARFGLAKESHLTTIGKLSGGQKARVALASVALGEPHVLLLDEPTNNLDMQNIDALADALDEFAGGVVIVSHDSRLVSRVCDDEERSALWVVQDGTVRPYDGTFAEYRDDLLDDIRKEMAAD

SEQ ID NO: 157731 - protein, 52 aa, Oryza sativa
  Clone ID: PAT_MRT4530_57273C.1.pep
MVLNSAYSAVGALERSAEVDIAGEGVVVTGNRPWSRRKARGGCRGRLGKVFG

SEQ ID NO: 157732 - protein, 219 aa, Oryza sativa
  Clone ID: PAT_MRT4530_57274C.1.pep
MAASLGLCHETSYAYSYPASNTSSSLCFPPLMADHIVDGGGGGGCSFGEFLELGHSVYSLPLPPPPSQPVVVAGGNNDQYGVSSSSSAAATTSRIGFRTRSEVEVLDDGFKWRKYGKKAVKSSPNPRNYYRCSAAGCGVKKRVERDGDDPRYVVTTYDGVHNHGTPGCVGGGGHLPYPTSAAPPWSVPAAAASPPPAQEQAWGAPLHAAAAAHSSESSF

SEQ ID NO: 157733 - protein, 119 aa, Oryza sativa
  unsure (1)..(119): unsure at all Xaa locations
  Clone ID: PAT_MRT4530_57275C.1.pep
WLGLPVFLYNYCTHXQMHGMLQAASFGGTNIRPTGGEDKKCPGESRLPEQAKVATRKIYDPLEEDTFRTILDHCDGPMLRLEVSVAEALSLTRRTPAATVSLMLLVEEYQGTAAEGHKA

SEQ ID NO: 157734 - protein, 120 aa, Oryza sativa
  unsure (1)..(120): unsure at all Xaa locations
  Clone ID: PAT_MRT4530_57276C.1.pep
KTYFINRQKTYTKNGPFXDARVAGAVVXGTSSCYRGGSAMRWQGDAXEHTRINHRKVKLKWMKYVTCRIFQSSTEKLLALKTQSXCKRNFEVLISPNPAKWGRIGCIFCRCPWIYYLPDS

SEQ ID NO: 157735 - protein, 735 aa, Oryza sativa
  Clone ID: PAT_MRT4530_57277C.1.pep
MSGQERDDVPMLELQRFPTRSVSMCIPVRDDIYEDSIISHSGPIFTPAPTQYTSVAIPSGNRDMLDKLPRPKVKSKPHVVTPEEVGISNWPYDQHVPKNKHLMMYSEPLGLCDNPDCVDCPRACKNKRHFQRSLAPFDNKFHNILYGYGDRWKKKAGHYLSYIPIMKPHDKAVHRWNQFFVISCLLAIFNDPLFFFLLSVDKDYKCIVFNWNFAIALAVGRSVTDAIYFLHMLLQFRLAYVAPESRVVGTGDLVDEPMKIAMRYLRGFFVLDLFVVLPLPQVMILLVIPKYVGLSSANYAKNLLRATVLLQYVPRIIRFVPLLGGQSTNGFIFESAWSTFVINLLMFVLAGHVVGSCWYLFGLQRVNQCLRDSCAASNISKALCNNCTDCGITGINRTNWLNNSDLTGCFDTKSGNFPYGIYQQAVLLTTEPGLKRYIYSLFWGFQQISTLAGNLIPSYFVWEVIFTMAIIGLGLLLFALLIGSMQNFLQALGKRRLEMQLRRRDVEQWMSHRRLPEDLRRRVRSAERFSWVATRGVNEEELLSNLPEDIQRGIRRHFFGFLKKVRLFNLMDNATWDAICDKLRQNLYITGSDILYQGGPVEKMVFIVRGRLESISADGNKSPLQEGDVCGEELLSWYLEQSSVNRDGGKIKLHGMRLVAIRTVRCLTNVEAFVLRARDLEEVTSQFSRFLRNPLVLGTIRYESPYWKNLAANRIQVAWRYRKRRLKRAEMQRLQ

SEQ ID NO: 157736 - protein, 308 aa, Oryza sativa
  Clone ID: PAT_MRT4530_57278C.1.pep
MGTAATSRIYEALKMLQPPPWVHARPHLCLYHVTLVVLTTNLSSPLFWPPFPLALHFAGSSSVTIARAFIPDTINKAIGTDKKATDPQSPLSSLDSSAALHSSICSSLDLGVSIFAAQREICDALPVPHLLQSLMLLGPAAGSAAHDTFARRIRKTTPIFPSRCDYRRKNLVVSFGAGQSTMPSLFFLPGFNGFGKSVLGRAFSRVTPVGEIEAFRKGSSMAAGGTGEGEVAGRMPAVGRAAMGKRGCGRQASAGCNFALHITPLWTYSRGHVQTLPAPCVVIRACGGGLAAMSPYEAMGVAAAGTQL

SEQ ID NO: 157737 - protein, 51 aa, Oryza sativa
  unsure (1)..(51): unsure at all Xaa locations
  Clone ID: PAT_MRT4530_57279C.1.pep
ITAAXXPAQWPPLLSRTGFDWSVLPFCSEVTTTVALGGGGEELGFEPPEXG

SEQ ID NO: 157738 - protein, 203 aa, Oryza sativa
  Clone ID: PAT_MRT4530_5727C.1.pep
MRGPPVSGSGEGGKGRRHAGPTGQRLKGECGSPRTGTTRVVHRRSTGPTAQIALGVDRTGGGDPARLKAGQAATATATARARERVAGNGIRRRRRRRKSDAEAAAADGGNDRRRRRARRGDAWGNGEGKKRGGSPHRRGRRRPAMGSDGGRSTRGGRRPGRPSLDGNGAPAADLDEGGVDGVDLGHANPTAATGRCGGDPNGG

SEQ ID NO: 157739 - protein, 136 aa, Oryza sativa
  Clone ID: PAT_MRT4530_57280C.1.pep
MERNSVKHPIPLTPQGKLGGGPAGRGTEDHGGAITRDGNGCVPIGFAYPIPTPIEMKCSRFITHTRSRLGFAPRPAPARVPAFVHAARASGVRVTASFPSHGMAARGWRGQRPAAGWAPYRTFYDPAHPMGEVYAR

SEQ ID NO: 157740 - protein, 127 aa, Oryza sativa
  Clone ID: PAT_MRT4530_57281C.1.pep
TLYRVSLSSPWETQCSLGHANTFYLHYLYSSLNSNNGLLGDLTRYQPHNMSYNAHCLSHRSQICDANGSRTCVISRRKRSDRSITVCREGLTCPGRCGGLLPKSWSPGSNALLRVSSNSGDCARWNL

SEQ ID NO: 157741 - protein, 151 aa, Oryza sativa
  unsure (1)..(151): unsure at all Xaa locations
  Clone ID: PAT_MRT4530_57282C.1.pep
DLLHHEDESSQSKSIPEPLLSPFWNINAHSFVYITQXRARVQVLPRTLLIIPQPYPVVKKXQEKDVAYIPFKTNPNSMVTHIPGKSSIFRXALPNDVLPNAYRISREEAQRLNHNXRGDDFGPFTPIQYTELPRLYNPPRILLVAFRIKNN

SEQ ID NO: 157742 - protein, 332 aa, Oryza sativa
  unsure (1)..(332): unsure at all Xaa locations
  Clone ID: PAT_MRT4530_57283C.1.pep
FRSKSQMAKIKIGINGFGRIGRLVARVALQSDDVELVAVNDPFITTDYMTYMFKYDTVHGQWKHHEVKVKDSKTLLFGEKEVTVFGCRNPEEIPWGETGAEFVVESTGVFTDKDKAAAHLKGGAKKVVISAPSKDAPMFVVGVNEKEYKPDIDIVSNASCTTNCLAPLAKVINDRFGIVEGLMTTVHAITATQKTVDGPSSKDWRGGRAASFNIIPSSTGAAKAVGKVLPALNGKLTGMAFRVPTVDVSVVDLTVRLXEKPASYDQIKAAIKEESEGKLKGILGYVEEDLVSTDFQGDNRXSSIFDEKAGIALNDNFXKLVSWYYNEWGAGL

SEQ ID NO: 157743 - protein, 404 aa, Oryza sativa
  Clone ID: PAT_MRT4530_57284C.1.pep
WSDFFAFFSDFLLVGFLASAAKIKIGINGFGRIGRLVARVALQSDDVELVAVNDPFITTDYMICEFGIWISVCRPVDQIVIDMSSDAFAHAKSQIVPVALKFRTAICFAVTYMFKYDTVHGQWKHHEVKVKDSKTLLFGEKEVTVFGCRNPEEIPWGETGAEFVVESTGVFTDKDKAAAHLKGGAKKVVISAPSKDAPMFVVGVNEKEYKPDIDIVSNASCTTNCLAPLAKVINDRFGIVEGLMTTVHAITATQKTVDGPSSKDWRGGRAASFNIIPSSTGAAKAVGKVLPALNGKLTGMAFRVPTVDVSVVDLTVRLEKPASYDQIKAAIKEESEGKLKGILGYVEEDLVSTDFQGDNRSSIFDAKAGIALNDNFVKLVSWYDNEWGYSSRVVDLIRHMYNTQ

SEQ ID NO: 157744 - protein, 708 aa, Oryza sativa
  unsure (1)..(708): unsure at all Xaa locations
  Clone ID: PAT_MRT4530_57285C.1.pep
MASQTADATGFVASDPLSWGKAALEMTGSHLDEVKRMVAQSREAVVKIEGSSLRVGQVAAVSAAKDASGVVVELDEEARPRVKASSEWILNCIAHGGDIYGVTTGFGGTSHRRTKDGQALQVELLRHLNAGIFGNGSDGNSLPSEVSRAAMLVRINTLLQGYSGIRFEILEAITKLINTGVSPCLPLRGTITASGDLVPLSYIAGLITGRPNAQAVTVDGKKVDAAEAFKIAGIQGGFFRLEPKEGLAIVNGTSVGSALAAMVLYDANVLAVLSEVLSAVFCEVMNGKPEYTDHLTHKLKHHPGSIEAAAIMEHILAGSAFMPHAQKVNEVDPLLKPKQDRYALRTSPQWLGPQIEVIRAATKSIEREVNSVNDNPVIDVHRGKALHGGNFQGTPIGVSMDNTRLAIANIGKLMFAQFSELVNEFYNNGLTSNLAGSRNPSLDYGFKGTEIAMASYCSELQFLANPVTNHVQSAEQHNQDVNSLGLVSARKTAEAVDILKLMSSTYLVALCQAVDLRHLEENLKSAVKNCVTTVAKKVLTTGPAGGLHSARFSEKALLTAIDREAVYSYADDPCSANYPLMTKIRAVLVEHALANGXRREGRRLLRVLQDHRVRGGAPRGAAQGDGGGARGVRDRXTAPITNRIKESRSFPLYRFVREELGCVYLTGEKLKSPGEECNKVFLAISERKLIDPMLECLKEWNGEPLPIC

SEQ ID NO: 157745 - protein, 159 aa, Oryza sativa
  unsure (1)..(159): unsure at all Xaa locations
  Clone ID: PAT_MRT4530_57286C.1.pep
MSAMGFSSVWLGWVEKIFSSTSSSSVLLNGVPKKNFHCKRGVRQVDPLSFLFVLGVTSLXSVINRXYILGLLSKPILIEGDQNFHIIQHTDDTLLYPKACGRELITLRALLQTFAQGLGLRVNYHKSXMIPINASDEKAQILAGVFGCFSPIQHLRFAF

SEQ ID NO: 157746 - protein, 47 aa, Oryza sativa
  Clone ID: PAT_MRT4530_57287C.1.pep
MSPSPTWRPVDLRYKSDPPGGPKASNLTANTSTIAYEAGAYRSQVAG

SEQ ID NO: 157747 - protein, 119 aa, Oryza sativa
  unsure (1)..(119): unsure at all Xaa locations
  Clone ID: PAT_MRT4530_57288C.1.pep
ISAFLAPNTFNSSTFAFTFSXISIWSACAVFLSSPKLLSTAAFWXDTIRISSFVTSNCSPVHPSHRTARSCSSXSAPPWPPISRPCGTRTXPPPPSRGEASGHGPSPRRRPRGARXXRP

SEQ ID NO: 157748 - protein, 82 aa, Oryza sativa
  Clone ID: PAT_MRT4530_57289C.1.pep
GRVGSVQHMNRHPRTLVNVLLGMVARQHLRYARQTTFRGKNYIGHYRKSGRYSRSVLKVSPVNPSTSLVTLIINFFKKKKKK

SEQ ID NO: 157749 - protein, 425 aa, Oryza sativa
  Clone ID: PAT_MRT4530_5728C.1.pep
MAYGKPHEKLGTKYCKKFLEARAFKFSSYLLVIILTEERTQIERVTFRCITRGEEELLAKEYLFEEAFEGYEILLGCLITVVIVGVVSISCHLRRRAHNLKRSKKDIEVTAVSVEYEEVTCKQMCTKEIYDATENLSPLNVIGQGIAGKVYKGVLANGWPVAVKHIVKNEHAETFLREVTSLSHVRHPNLVSLRGYCDGQEECFLVYELCINGNLSEWLFGKDKNLSWIQRLQIALGSACGLWFLHIYPEGCIVHRDVKPTNILLGVDMEPKLSDFGLSRVIDIGVSHVSSEVRGTFGYVDPEYRHNHKVNAAGDVYSFGMVLLQLLSGKRAINIMNTAKPMSLDRMASMLIREGNVLEFADPRLNGEYSTEAFDLSLKLALSCTGHKKQRPSMEQVVSHLEKALKISMRDDDKHNSISIIESHS

SEQ ID NO: 157750 - protein, 235 aa, Oryza sativa
  Clone ID: PAT_MRT4530_57290C.1.pep
MATVSDDYAQIDISTEEKDKLVAEVMRHVLFKTHQTAGCPIKREELTQIVTKNYRQRVLPALVIKEAGDRLAATFGYEMRELQRTRAPSTRSGRPSQQQVNVDAKSYVLVSKLDPEVYSKYVEHKEAAHVSGFAFVVISIVHLSGGKISEEDLWHQLRRLGLNESDENHPVLGNNKQALELLVQQRYLLKEKLSGPEGHSMMYELAERALDESISGKLKDYISQVVSTSTAAEVD

SEQ ID NO: 157751 - protein, 54 aa, Oryza sativa
  Clone ID: PAT_MRT4530_57291C.1.pep
HEGLMKLLSSSNLSVMSLILHMCFHVEMGAGRQQSNKPQAYISAASWQSLLGFS

SEQ ID NO: 157752 - protein, 504 aa, Oryza sativa
  Clone ID: PAT_MRT4530_57292C.1.pep
MAGGRAFRPSAPRRAAFAALLTLLLLATLSFLLSSPPPTHASHRSSYLGASPPSRLAAIRRHAADHAAVLAAYAAHARRLKEASAAQSLSFATMSSDLSALSSRLASHLSLPEDAVKPLEKEARDRIKLARLLAADAKEGFDTQSKIQKLSDTVFAVGEHLARARRAGRMSSRIAAGSTPKSLHCLAMRLLEARLAKPSAFADDPDPSPEFDDPSLYHYAVFSDNVLAVSVVVASAARAAADPSRHVFHVVTAPMYLPAFRVWFARRPPPLGVHVQLLAYSDFPFLNETSSPVLRQIEAGKRDVALLDYLRFYLPDMFPALQRVVLLEDDVVVQKDLAGLWHLDLDGKVNGAVEMCFGGFRRYSKYLNFTQAIVQERFDPGACAWAYGVNVYDLEAWRRDGCTELFHQYMEMNEDGVLWDPTSVLPAGLMTFYGNTKPLDKSWHVMGLGYNPSISPEVIAGAAVIHFNGNMKPWLDVALNQYKALWTKYVDTEMEFLTLCNFGL

SEQ ID NO: 157753 - protein, 77 aa, Oryza sativa
  Clone ID: PAT_MRT4530_57293C.1.pep
MSSAGWRCKVAAPPPPCPRPVRRFASRKPRAREREGADSKAVQLVLGGHAHDDGSESELLSAYNEKVALNGVRGTIA

SEQ ID NO: 157754 - protein, 203 aa, Oryza sativa
  Clone ID: PAT_MRT4530_57294C.1.pep
MSLVRGFMLPTSCINRGGASDRRHRGGPTGGSTTVRPASATGAAGDIGGQTIYTGQTGGIHSVRPADQSRSDRSPSNSRLSLCCYGSHECDSESLTFTARTHECMHAKPCKDTPWLPRICWHASRSPGAIRVRIRSPNRRRCHCYCSNCFLVTYTHAEKIDQMTWQLAKAQMVVQIYCKLREEIKRGDVSTAKLSTRAYIETS

SEQ ID NO: 157755 - protein, 158 aa, Oryza sativa
  Clone ID: PAT_MRT4530_57295C.1.pep
MRAAFACGCVAGDGAPRPIDRSNEPTRRVRVSPRTQHMKLVDRSSRRFVSRHASLDRQLAARGKGETKSRCNLPPDMHALHAYPVKTQRGSTASLFQVWTTWFITSTNLGARCARRRMKGVVWVCGWSEGKLQKPAGALRCGRRWTWYVMLLATVVHA

SEQ ID NO: 157756 - protein, 39 aa, Oryza sativa
  Clone ID: PAT_MRT4530_57296C.1.pep
GKIKRFAFLLILHMGAQGGSTQIVKQTILGHYTKKRRVT

SEQ ID NO: 157757 - protein, 416 aa, Oryza sativa
  Clone ID: PAT_MRT4530_57297C.1.pep
MQQEQADGREIVIAGAGLAGLAVALGLHRKGLRSVVLESSPTLRTSGLAFITWTNAFRALDALGVGDKMRSQHQQIQRLNVMSSATGEIVQEIDLRAQGKRGTHEARCVSRTALLLALEEELPRGTIRYSSKIVSIEEDGNAKILHLSDGSTLRAKVLIGCDGINSVVARWLGLAKPSDSGHTATRGRAKYPDGHGFEPRFLQLVGQGFRAGMVPCNDTDVYWFFTWSPSPDDKDVDKSSAATKQFVLTKLRSTNVPPQVLEAVERSEMNDVLAAPLRFRSPLSLPFASISKGNVCVAGDALHPTTPDLAQGACTALEDAVVLARCLGEALLLRTGDCAAEESHRVVEAALRRYADARRWRSAQLTGASYAVGFVQQSDHPAVGFLRDKLLSGVLAKTLLMMPDYDCGTLSSSGAC

SEQ ID NO: 157758 - protein, 160 aa, Oryza sativa
  Clone ID: PAT_MRT4530_57298C.1.pep
MEDKLGLPENKLRDFIQGADKAKWIAKNNHNIKYFTEDEIKRTTSNYSTSLGNGSFGKVYNGIIDDNTAVAVKRYSRIDSEEEFAKEVIVHSQVNHKNVVRLIGCCTEKNAPIMVFEYVSNGTLCENPHGSNVPVYLDKRLSIAIQCAEALEIVLHILPT

SEQ ID NO: 157759 - protein, 62 aa, Oryza sativa
  unsure (1)..(62): unsure at all Xaa locations
  Clone ID: PAT_MRT4530_57299C.1.pep
MSDKCGNCDCADKSQRVKKGTSYGVVIIEVENEPLXEVPAGEENXGWKXAPTCSCTDCXCGX

SEQ ID NO: 157760 - protein, 361 aa, Oryza sativa
  Clone ID: PAT_MRT4530_5729C.1.pep
MPIPPPVALHHHQCIGALTAGGEDPLEYKEYNVLLRPQPDDDGVQRSWHLLFLPGNTTAGRKPRLVQSYKHVVDSFAAPLTEVDRDGSSVQEACLLVLLPGRHRSLASKPSKNSFACIAGLSRKEDGNLAGSGHGAAHGGGSTPTELLRMRRDSGDGDSAACAAEVDEAGEARGRRRSGGDACSGSNGGDVEEDQEGVGRRPLRVELAEEERDEGEESVELVGRLLSSEFIGTRRASLPLLKIDGREGEGARMSHPEVLLPSLSGPSPTSRRSRRAAAPATAAAPTSPPPSGHDDHARTCAAFPAPTPLSLQLAPAPEMAVIRFSNPASLSSPISRVSHRSRAVQPPAAAVSATPAAASCR

SEQ ID NO: 157761 - protein, 620 aa, Oryza sativa
  Clone ID: PAT_MRT4530_572C.1.pep
MEHHHHKPGLRVRLRITAARRRAWLSAGLQPACRKPPRRDPSDSVHKVARREIGGGHRRPPRPAAPSSSAFSCPEKFRNFQLQEEYDTYDDEVHCQCQLRFLWYIATIVVIWLVNWQCYNIAPVAEKEKIFVDFGCLYVCHWKPLIWKFSSGKRTCARPMLYANDMEEDICSCYCGTIEDIDVNATEEEYDTYDDEVHFLVQLPFLWSRTKIIEIVAAKDVIFALAQSGLCGAFNRGKSHSSMLTGFAFVRFMFLTKLLLMLAATNKRICYLNISPDEVIRSLFYNKNNESLITVSVYESDRFSSLKCRTTPIEYIRRGQLNDGFPLFETESLKYPGFVEFDDVNGKVLTFSAQDSTYKVFDLKNYNFLYSICDKNIQEIKISPGIMLVIYQKSANHVPLKILSIEDGTPLKTFTQLLHRSRKVDFIEQFNEKLLVKQDKENLQIIDVRNSNLIEVNKTEFMTPSAFIFLYENNLFLTFCNRTVAAWNFRGELVTSFDDHELWHSNCNTNNIYITADQDLIISYCKASKEVRDSGGCEGIAPPTGSINMSNIFTGKCVAKISPLDPTLTIAPRKRGDSSRSTIRSTVSDALEDITALFYDEDRNEIYTGNSKGLVHVWSN

SEQ ID NO: 157762 - protein, 41 aa, Oryza sativa
  unsure (1)..(41): unsure at all Xaa locations
  Clone ID: PAT_MRT4530_57300C.1.pep
PEVLTKSXLIDAPQCYYSGMATYFASSSTLFGIEFILFHYL

SEQ ID NO: 157763 - protein, 240 aa, Oryza sativa
  Clone ID: PAT_MRT4530_57301C.1.pep
MASPQCCANPPTLNPAGGEGKVVESFGGIKAYVAGAAESKAAVVLISDVFGFEAPNLRKIADKVASSGYFVVVPDFLHGDPLVPESTEKPFQMWIKEHGPDKAFEEAKPIIAALKEKGVSSIGAVGYCWGAKVVVELVKAHEIQAAVMCHPSFVTVDDMKEVKCPIAILGAEIDRMSPPEVVKQFEQVLSSKSGIGHFVKIFPGVEHGWTVRYKNDDAAAVKSAEEALADMIDWFNKNLK

SEQ ID NO: 157764 - protein, 287 aa, Oryza sativa
  Clone ID: PAT_MRT4530_57302C.1.pep
MAAVANTVTTLPLLPSPHAFAVPAMGSLPFLRRRMRSRRLAAVQQDAAVWTPAPVSSFGPATADGSLVHFSVDLSDATDLAASYTTPGQYLLIRVPGEDELKPAFMAIASPPGGAAFEFLVKTVPGTTAEKLCGLRDGDVLELGAIMGNGFPISRINPPDEAQTVLLFATGTGISPVRSLIEFGFAADQRADVRLYYGARNLQTMAYQDRFTNWESTGLKIIPVLSRADDSWKGERGYVQDAFLKAQNIANHFSTGAVLCGQKQMSEEITSALVADGVSPDKILTNY

SEQ ID NO: 157765 - protein, 962 aa, Oryza sativa
  Clone ID: PAT_MRT4530_57303C.1.pep
MDAEASELRARLAAAVHALNHGGGGHHDPSARLAANQWLLALQRSPQAWGVATSLLAAPPPGHPPPPADLLFFAAQMLRRKIQCPPAAAGGCPTPQEVAHLLDALLLAVGRFCLGPPRLLTQISLALAALALRAEGGVDGLFARMRHLPDPAVMELLTVLPEEVVQDQSGDTGVDAAARCRFTRELMAHAPAVLEFLLAQSENTAAAADGVPLHERNRRILRCLLSWVRVGCFSEMPAAALAAHPLLTFAFNSLQVSFSFDVAVEVMTELVSHHQDLPQAFLSKMPYIREALLLPALANRSEKTIAGLVCLMCEVGQAAPALVAEGSVQALALADALLRCSLAHFILDSDAQTEKRNAAQEIFSPVFSSLLDALLFRAQIDTDEHGTDGELCIPDGLAQFRMNLEELLVDICLLLGAPAYINKLFSGGWGLASQSIPWKEVEVRMYALSMVYKSFGDVIGSYSKLLASSQSNIKPLLLFCASGISKSISSNACSLALRKLCEDGSSFMNEPQNLEILFWISEGMDAGNLRIEDEEEIITAITHALCSVLDKELRKSSLARLLCSSYTAVEKLIDIDRDQSLRQNPAAYTEALNLAVHGLYRMGALFGHLATSITSSLIDDDTVLVLLGIFWPLLERLSRSSHMENVSLSAAACRSLSSAIHSCGQHFQILLPKVLECLSTNFLLFQRHDCFLRTAASVIEEFGHKEEYVALCVRTFEALSSAASISTLNSSYTCDQEPDLVEAYANFTSTFIRCCPKEAIVASGSLLELSFQKAAICSTAMHRGAALAAMSYMSCFLDVSLAAALESREHPSDGSPGVVLAQILARCGEGLMSNVLYALLGVSALSRVHKSATILQQLAAVCSLCERTTWKAIISWDSLCRWLQSAVKSMPSEYLRQGEAEMIVPLWLSVLHDAASDYLHSRTGDNVRNNHAYMQGKGGRTLKRIVRDFAESHRNAPMPCPS

SEQ ID NO: 157766 - protein, 161 aa, Oryza sativa
  Clone ID: PAT_MRT4530_57304C.1.pep
SEAMSTRSSDDSKCSMGEISDDDIEEYIEDFIEGFITSGLVRPQKGTTSRAPTDWPTASDILQFKYNLVSYEVSALEAEAVAFSCELCQGVKLIGEQTIGSKDRVNYFQIFLPLLRAIARMADWSDRVIFDVTGWSGSVHDHRVLLSPIRKYPDQFPRLPP

SEQ ID NO: 157767 - protein, 77 aa, Oryza sativa
  Clone ID: PAT_MRT4530_57305C.1.pep
TPAKKKTPKLVKEFLEKKEKPPPGPPQIRGPPGGRGGPPIFPTIHPLGSPKKGGPGETQFWPLGGGPTAIFPKGGFS

SEQ ID NO: 157768 - protein, 170 aa, Oryza sativa
  Clone ID: PAT_MRT4530_57306C.1.pep
RVEHGTDGELCIPDGLAQFRMNLEELLVDICLLLGAPAYINKLFSGGWGLASQSIPWKEVEVRMYALSMVADTILQDGSPFDFSIIMHFVNILSSRAHSELNGCLSLVYKSFGDVIGSYSKLLASSQSNIKPLLLFCASGISKSISSNACSLALRKLCEDGSLFMNEPQN

SEQ ID NO: 157769 - protein, 41 aa, Oryza sativa
  Clone ID: PAT_MRT4530_57307C.1.pep
MTAGSGNDRSGSASVDAGCDELGGSGRGGSSGDRLRSQGCR

SEQ ID NO: 157770 - protein, 55 aa, Oryza sativa
  Clone ID: PAT_MRT4530_57308C.1.pep
MDHERPNDKGGTIDLGNGKGRTQLREASTDWAACGGWAVVSGRADEICSLTKGKR

SEQ ID NO: 157771 - protein, 46 aa, Oryza sativa
  Clone ID: PAT_MRT4530_57309C.1.pep
LHNEGGQVGDPRGGGGGGGGHRLQSGGGRQLVREGVRRPGGAAAVT

SEQ ID NO: 157772 - protein, 173 aa, Oryza sativa
  Clone ID: PAT_MRT4530_5730C.1.pep
LAATARARERVAGNGIRRRRRRRKSDAKAAAADGGNDRRRRRARAAATHGESGKEKKGEGVLTEGDGGDRRRGATEGGRHAADGDRDDARAWSTWPGGGGDVGAAAVAGAAARRERREVGEGPDRWAPLVGDPPRHTDGRRDIVPTHPSHKQEYRPSPAYGRNLRDRQAGLSP

SEQ ID NO: 157773 - protein, 86 aa, Oryza sativa
  Clone ID: PAT_MRT4530_57310C.1.pep
EVQESRGGENRVIRWLRHQIHQIFPPLTDVAHWVCPDCSGDVTASYPPSDVVRPESSLIAAIRVIEADPVLSIQEKARRRQELLGH

SEQ ID NO: 157774 - protein, 39 aa, Oryza sativa
  unsure (1)..(39): unsure at all Xaa locations
  Clone ID: PAT_MRT4530_57311C.1.pep
MSDSVRGPRRPPPPPRPPPXGPPPGPPPPGPPSHFLPEP

SEQ ID NO: 157775 - protein, 54 aa, Oryza sativa
  Clone ID: PAT_MRT4530_57312C.1.pep
RWLPPPKLSKVGFFRGSHGRRPTFASLPAGNSGGCPHQVVMLSTKSISILSQYL

SEQ ID NO: 157776 - protein, 52 aa, Oryza sativa
  Clone ID: PAT_MRT4530_57313C.1.pep
LQQDMVGLTNTGYHKNELGGHTHTLKELLMINRDECLYMHWSTNYLLKLGGI

SEQ ID NO: 157777 - protein, 164 aa, Oryza sativa
  Clone ID: PAT_MRT4530_57314C.1.pep
TLRARSPGLAGQAARVHDIRVEWSVKIGEMQFVFVLEMFRKIRCVQTAWSPDKLRATYAQWRWCGRPDQATLLYINRAAAFTQHTRNQSRVCLLFCAAPSLVGYSIPLAGVHLRLGEQVSGTSAFDVLHREKATIRFLGSALRDCSLFVRDGSSSSSLACCVPS

SEQ ID NO: 157778 - protein, 162 aa, Oryza sativa
  Clone ID: PAT_MRT4530_57315C.1.pep
NMDDSLWDPVMNVHARGTYKVTKAAWPYFLKQKYGRVLNTTSTSGIYGNFGQANYSAAKCAILGFSRALALEGVKYNIFVNTIAPNAGTAMTKTILPEELVQAFKPDYIAPLVLALCSDKVPKNPTGGLYEVGSGWAGQTRWQRTGGHGFPVDVPLTPEEVI

SEQ ID NO: 157779 - protein, 168 aa, Oryza sativa
  unsure (1)..(168): unsure at all Xaa locations
  Clone ID: PAT_MRT4530_57316C.1.pep
MWKRDLAVCVHRRSRHRSCFVLESYRINKLISHLSSERQQHAEHSASCRVRISYARLIRFGYAQXRSCGRPDQATLLYINRPAVFTQHLRNQSRVCLLLCTAPSLVDYSIPLAGVHRRSGEQVSGTSAFDVLHREKAAIRFLGSASRDCSLFVRDGSPSSSLACFVPS

SEQ ID NO: 157780 - protein, 174 aa, Oryza sativa
  unsure (1)..(174): unsure at all Xaa locations
  Clone ID: PAT_MRT4530_57317C.1.pep
MVRQNWFLTLRSFCSFVLLQIRIXFVLETFRKIWCMQTAWSPDKLRAPAIGRRGVRISYARGVRISYAWSXRSCGRPDQATLLYINRLAVFTQHTRNQSRVCLLLYTAPSLIDYSIPLASVHRRLGEQVSGTSAFDVLHREKAAIRFLGSVSRDCSLFVRDGSPSSSLTCFVPS

SEQ ID NO: 157781 - protein, 207 aa, Oryza sativa
  unsure (1)..(207): unsure at all Xaa locations
  Clone ID: PAT_MRT4530_57318C.1.pep
HEGTTEDDERLTDPLLEPKPAINGGGGGSNEEEEEVGSLGRRLVEENKKLWVVAGPSICARATSFGATVVSQAFIGHIGATELAAYALVSTVLMRLSVGILXILLPIYLFTTPLLIALGQDPDISVVAGTISLWYIPIMFSYVWGLTIQMYLXQSQSKNMIVTYLSLLNFGLHLFLSWLMVVKFHLGLAGVMGSTVIACWIPIFGQL

SEQ ID NO: 157782 - protein, 179 aa, Oryza sativa
  unsure (1)..(179): unsure at all Xaa locations
  Clone ID: PAT_MRT4530_57319C.1.pep
FSTIVTCAVQAEAEFHVSFCSFVLLQIQIXFVLETFRKIRCVQTAWSPDKLRVTYPVSCGVRISYARLIRFGYAXWKSCGRPDQATLLYINXPAVFTQHTRNQSRVCLLLCAAPSLIDYSILLAGVHLRSGKQVSRTCAFDVLHREKAAIRFLGSALHDCSLFVRDGSSSSSLACCVPS

SEQ ID NO: 157783 - protein, 117 aa, Oryza sativa
  Clone ID: PAT_MRT4530_5731C.1.pep
RLRCRRRGTPRLWPSATICPRWWSPRRWPSARRCRRGRRRCSATSRRVVRTPARQRPARGAGAGVAARRPTSPAAAAVAEEAVPPRRPPWVGWKRSERKTLPRLRADAWADAWADAW

SEQ ID NO: 157784 - protein, 347 aa, Oryza sativa
  Clone ID: PAT_MRT4530_57320C.1.pep
MERTTEDDERLTDPLLEPKPAINGGGGGSNEEEEEVGSLGRRLVEENKKLWVVAGPSICARATSFGATVVSQAFIGHIGATELAAYALVSTVLMRLSVGILIGMASALETLCGQSYGAKQYHMLGIYLQRSWIVLFCCAVILLPIYLFTTPLLIALGQDPDISVVAGTISLWYIPIMFSYVWGLTIQMYLQSQSKNMIVTYLSLLNFGLHLFLSWLMVVKFHLGLAGVMGSTCRIMVQHHIGAPHWLYEECRGVAIGSGWQTIVAYVNVASYYLIGIPIGAILGYALGFEVKGIWIGMLVGTLVQTLVLLFITLRTDWEKQVEIARERLNRWYTDDNGRSQNSRGNP

SEQ ID NO: 157785 - protein, 158 aa, Oryza sativa
  unsure (1)..(158): unsure at all Xaa locations
  Clone ID: PAT_MRT4530_57321C.1.pep
MFLFCCKFGFVFVLETFRKIRCVQTAWSPDKLXACKRRGVRISYARLIRFGYAQXRSCGRPDQATLLYINRAAAFTQHTRNQFRVCLLLCAAPSLVGYSIPLAGVHLRSGEQVSGTSAFDVLHREKAAIRFLGSALRDCSLFVRDGSSSSSLACCVLS

SEQ ID NO: 157786 - protein, 705 aa, Oryza sativa
  Clone ID: PAT_MRT4530_57322C.1.pep
MSASRVASDVIAPLPYARPCFMMVVEIGMASALETLCGQSYGAKQYHMLGIYLQRSWIVLFCCAVILLPIYLFTTPLLIALGQDPDISVVAGTISLWYIPIMFSYVWGLTIQMYLQSQSKNMIVTYLSLLNFGLNLFLSWLMVVKFHLGLAGVMGSMVIACWIPIFGQLAYVFFGGCPQTWTGFSSSAFTDLGAIIKLSISSGVMLCVELWYNTILVLLTGYMKNAEVALDALSICLNINGWEMMIAIGFLAATGVRVANELGARSARRAKFAIFNVEVVDAVADLAPLLAFSILLNSVQPVLSGVAIGSGWQSVVAYVNVASYYLIGIPIGAILGYALGFEVKVKLSSTQMAAPVRSVLPVVLLGCGGVGRHLLRHIVSCRPLHANQGVAIRVLGVADSSSLLVADDLHSNGFDDALLADLCAAKSAGSPLSSLLARGQCQLFNNTEARRKVIDTASVLGKTTGLVLVDCSATYDTVGMLKDAVDCGCCVEDFEKLVSNFRRIRFESTVGASLPVIASVTRIIASGDPVSRIVGSLSGTLGYVMSELEDGKKFSEVVKTAKSLGYTEPDPRDDLSGMDVARKVESLYPSELGPDAMSTKDFLESGLVQLDKSIEERVKAASLKGNVLRYVCKIESTGCQVGLEELPKNSALGRLRGSDNVVEIYSRCYESAPLVIQGAGAGNDTTAAGVLADILDLQDLFHKTA

SEQ ID NO: 157787 - protein, 225 aa, Oryza sativa
  unsure (1)..(225): unsure at all Xaa locations
  Clone ID: PAT_MRT4530_57323C.1.pep
SFCSFVLLQIQIRFCFGNAVLFCCKFRFVFVLETFRKIRCVXKRCGVRISYARLIRFGYAQWRWCGRPDQATLLYINRAAAFTQHTRNQSRVCLLLCVAPSLVGYSIPLAGVHLRSGEQVSGTSAFDVLHREKAAIRFFGSALRDCSLFVRDGSSSSSLACCVPSXTPTKSFDRAAGLYATSVRPSSGGGGWPARDPSACTRAYTTPVTIYTCIQPAATVAISYS

SEQ ID NO: 157788 - protein, 343 aa, Oryza sativa
  unsure (1)..(343): unsure at all Xaa locations
  Clone ID: PAT_MRT4530_57324C.1.pep
MSASRVASDVIAPLPYARPCFMMVVEIGMASALETLCGQSYGAKQYHMLGIYLQRSWIVLFCCAVILLPIYLFTTPLLIALGQDPDISVVAGTISLWYIPIMFSYVWGLTIQMYLQSQSKNMIVTYLSLLNFGLNLFLSWLMVVKFHLGLAGVMGSMCXELWYNTILVLLTGYMKNAECGARRAKFAIFNVVTTSFLIGFVFFVLFLFFRGSLAYIFTESQEVVDAVADLAPLLAFSILLNSVQPVLSGVAIGSGWQSVVAYVNVASYYLIGIPIGAILGYALGFEVKGIWIGMLVGTLVQTLVLLFITLRTNWEKQVEIALERLNRWYTDDNGRSQNSRGNP

SEQ ID NO: 157789 - protein, 57 aa, Oryza sativa
  Clone ID: PAT_MRT4530_57325C.1.pep
LVRPCLMLLYGSYTYKGDSGLSFVIDSTSQLISHLVSYFLPVVLVDPESLVLTQREY

SEQ ID NO: 157790 - protein, 442 aa, Oryza sativa
  Clone ID: PAT_MRT4530_57326C.1.pep
MERTTEDDERLTDPLLEPKPAINGGGGGSNEEEEEVGSLGRRLVEENKKLWVVAGPSICARATSFGATVVSQAFIGHIGATELAAYALVSTVLMRLSVGILIGMASALETLCGQSYGAKQYHMLGIYLQRSWIVLFCCAVILLPIYLFTTPLLIALGQDPDISVVAGTISLWYIPIMFSYVWGLTIQMYLQSQSKNMIVTYLSLLNFGLHLFLSWLMVVKFHLGLAGVMGSTVIACWIPIFGQLAYVFFGGCPQTWTGFSSSAFTDLGAIIKLSISSGVMLCVELWYNTILVLLTGYMKNAEVALDALSICLAYIFTESQEVVDAVADLAPLLAFSILLNSVQPVLSGVAIGSGWQTIVAYVNVASYYLIGIPIGAILGYALGFEVKGIWIGMLVGTLVQTLVLLFITLRTDWEKQVEIARERLNRWYTDDNGRSQNSRGNP

SEQ ID NO: 157791 - protein, 132 aa, Oryza sativa
  Clone ID: PAT_MRT4530_57327C.1.pep
GFIASAEGEGRADRVHGSGTHAAASRSTVDQVHPGSHLPTPWAPHVSRTRGRGRLTAGPHAAATRCARGRPCRRARQRGWRSGPPVSGARVGREAEWAAWERRERGGRGRWAEPAQRREGGLLGFFFFIKPF

SEQ ID NO: 157792 - protein, 60 aa, Oryza sativa
  Clone ID: PAT_MRT4530_57328C.1.pep
MSAAYAYANANRVAEIVEQIISIIRSHVGGEARAVEECIFHVHNVALLLLLIGNNDHTAN

SEQ ID NO: 157793 - protein, 48 aa, Oryza sativa
  Clone ID: PAT_MRT4530_57329C.1.pep
FFFFSIIVHDIYMKIIQTRLHDIGLKIVVQNPYKRVIQSNNSSELKIK

SEQ ID NO: 157794 - protein, 54 aa, Oryza sativa
  Clone ID: PAT_MRT4530_5732C.1.pep
QGLSLGYPLDILGRPLHCSAFFAIRPQVAIWLMHSRAGRDYASVMIHVEMRVQS

SEQ ID NO: 157795 - protein, 132 aa, Oryza sativa
  unsure (1)..(132): unsure at all Xaa locations
  Clone ID: PAT_MRT4530_57330C.1.pep
FVDTGRPGRRASITWFLQPLAQLKEKKEKVYFYSLNSGPSGGGCSRAVAAAASGRAGAAXRRSGDEAPSRRSYGSSSSRRSDGSRXHACRDACAAVAALIEGERRGKDEREGRGVRMTRGAICRWVPLFFFC

SEQ ID NO: 157796 - protein, 121 aa, Oryza sativa
  unsure (1)..(121): unsure at all Xaa locations
  Clone ID: PAT_MRT4530_57331C.1.pep
VRVPRAPXQEGGQAGGEVRRGGGGGGVRLRRPRRRGEEEAPPLRLMIHRSIAPCMRRRRRHGRRPRARVRCGHGRVQLNKSRGFCTYGLSMCTPRIWYGCTYKRIVCTIPIKLSVALCLCV

SEQ ID NO: 157797 - protein, 292 aa, Oryza sativa
  Clone ID: PAT_MRT4530_57332C.1.pep
MAAGGGRSRSQRRLAVGGGDGCGRRAGEERSVCANGRCRSSPVGDSVTAKANALLATATAKAKAATRSNRELRKASDGGTSDRRPAAEAPGRLVTEAKADLAAGGGGEGGPGGRRRRRPGSRLRRRSSLGRPRALRAKVVALPATAFPAQTTTVTALQESRGEREKRRWRPSALPFAGGGAAPSLPATPSQCPPAAARPPSHARRVSSINARPSPAAAVPVPPPPLPPPRPSTTVAAAVVVAVYKGRLQESPDTCACGLRVRHMAYGAGIGRYGRAPREGGVFDSSTGSSNP

SEQ ID NO: 157798 - protein, 212 aa, Oryza sativa
  Clone ID: PAT_MRT4530_57333C.1.pep
FFFFFFGGRRQGGPGVMHPSFSPACQHSRFTLLHSSHSNTAPFPPHATHHHHTHHFTSAPSSVTMPSHITSTQGHTGADSSCSGWGASPPHIRYASYQGRHAALSPFLGPRHTTAASFPLSKWGREGRPRDIAAPGPSQAHHRAFRQPEAARQPAARGESMDRRGSPGEPQHDQPPPGTATHQRSRTAPAVSKASSFHSHNHKAKSVSIISV

SEQ ID NO: 157799 - protein, 1485 aa, Oryza sativa
  Clone ID: PAT_MRT4530_57334C.1.pep
MEATVVSVGKSVLDGALSYAKSAIAEEVTLQLGVQQDQGFIKDELEMMLSFLRAADKEQGHNEVFQTWVKQVRDVAYDVEDCLQDYVVRLEKPSWWRRRLSCTTLRERHRIATVMKEMRGKVEDVSLRNSRYKLLGGPAAASEPSPLTAAELQSTTFDDIEATRVAKQQEKVDLVDLITKDGDGLQEIAVWGTSGATGVASVVWVAYQKVKDRFPECHAWVKVMHPFDAKEFIGSLVRQFKANSHEGTSNTPQGTPSGVSALNEMEAKDYNLLDDFCKYVANKKYLIALNGLCNIEEWDWIKTYLPNKHNGSRILVCTPQAEVAICWKNKDGYKVSEIRQEGSFVTPLYVFYEEVKDSPTEQTDKTKSSSNATASTEGRKSPPVPNERKDPESQVIDLISKGGQVIAVWGMENDGVRRTALVRKVYERSVDRFLRHAWFGMTSQFNHDELVMELARQLNPDNCEDTCLKKKEDSQDTEGSTHRKQQEDGQNSSNKSKRGTTESTRNSLTTILSGHKCLLVFDKISSNAEWDSIRKSLPIESNADSRIIVTTKDSNVAIYCSGEKQYTYNYKLGSQNDGTAVGSEWVGLDSNEINSETKPSMASSSTGGDNHPEGLRESSSPSLNKDPNAAVKKLTRCTAMVPKRSRTVVAAEEAQLMIGRRNEKDKLIKMLDSGCDAKHRVISVISVWGMGGIGKTTLVKSIYQSSELEKLGFERRAWVPVSRPFRRIELLRILAQRLVKDSPGKKVESTPGLARSGLSMMGSKELIDKLKQDLTGKKYLIVLDDLSTTTEWDFIKTIFPENSSSRIIVTTRPKLVAQHCSEEEEYMHRIGDLKDKDALDLFLDKFLIYLFGNYKVCKKGDESELKPDMMDILKKNPDMIAEAELIVKKCGRLPLAIVAVGGFLSTRPPNIREWRKFSDHISTELDENPSLEMIKKILISSYEGLSYHLKSCFLYLSIFPEDHDIRYGRLLRRWIAEGYSRAKRNNNAEKEAEEQFTALLNKSMIQQSRTVTTGKTGFCQVHDLMREISIAKSEEENLVLVLDEHSISSSKDKVRHLVISQSWSREQKKNNDMQNIVDVSHIRSLTVFGEWKSFFLSKKMRMLRVLDLEDTDGLEDHDIVPIGKLHHLKYLSLRGSATILNLPSSFGNLLNLETLDIRGTWVTKLPATIGRLQNLKYLHAGMPPDDEDDTRSWVPTPPSAILEAFREYWTNQEEVGMGIKLFVSVLMFLISGWLRNMDLFGVKVPRRIGRLRSIHTLSVVNISRGKAMLKNLKKLTQLRKLGVTGINKNNCEELCSVIVKHGCLQSLLLRAEGKDGLEGCLDGLSPPPKDLESLQLYGNLVKLPEWVKELENLQKLSLRSTNLEADATMQVLGGLPMLDILRLQDKACKENELRFHPDCFTNLRALELISWGSLKSVIFEEGATPKLEVLLVDHCSSIDEAGFPGIENLATLKEVSLQGYYYTEFKKKLQQQLNMIEPRPNLRIL

SEQ ID NO: 157800 - protein, 90 aa, Oryza sativa
  unsure (1)..(90): unsure at all Xaa locations
  Clone ID: PAT_MRT4530_57335C.1.pep
NNQPAVQPIAPNAPSAQPTAPVSDPAPAAPSSAPGQFQNYQGGNLNYQXQPPSPQVQYQQGGSAQPQFAPQYNQFEHMPQQAQGAPQQRP

SEQ ID NO: 157801 - protein, 834 aa, Oryza sativa
  Clone ID: PAT_MRT4530_57336C.1.pep
MAGVGGSSSGGGDVEMGGWSELLHSSTKLLEQAAPTPHFPPLQRNLDQLEVLSTKLKAKTVRAEAPVQSLSATRLLAREGINAEQLARDLKSFELKLHEMAIVSSIQEAQKDNLRSFNNYMMQVLEDDWQKEKRDFLQSLSRLSTLPKRNTNLMASGISRPALMPSSASSPQSSSGLPSKEVMPIPNKTIIENKSSVYAAVVRDLNDARGRSLPFGPATAFRAAYESLSVGAIGTKSVTMHKVWHLIQALVGEGSTHRNISRKMSLVIGARRHLEWGHEKYILETINSHPALAALGGSVGNLQKIRAFLRVRLRDHGVLDFDATDLRRQPPVDTTWQQIYFCLRTGYYDEARQVAQSSRAAFNFAPLLVEWITTNGAVSPETALTASEECDKMLRMGDRPGRPGYDRKKLLLYAMICGCRRQIDRLLKDLPTLFNTIEDFLWFKLSALREYTSASSSNVSNEGLVPYTLEDLQSYLNKFEPSYYTKNGKDPLVYPYVLLLSIQLLPAILYLSKEVGEEGYHVDAVHISIALSDHGVLPDGVGSGQKMGIMDACAEAASIIRQYGSIYLRNGNLDLALEYYAQSAAAMGGGEVSWIGRGNADQQRQRNLMLKQLLTEILLRDGGIQLLLGPSGMGEEGELKKYMMDWRSRQQFLLEAAHQCHEAGLYDKTINKCLSDAICAMARSMLDGESRAAALIHSGNEIMETARYSEASVQDKDLISEQQTVLRQLEAILHIYRLARAGQTLDALRETIKLPFLHLDPQAPNVTVDVFRNLSPHVQACVPDLLKVALNCMDNVRDTDGTLRAVKSKIANLVASNMSRNWPQDLYQKVAQCI

SEQ ID NO: 157802 - protein, 336 aa, Oryza sativa
  Clone ID: PAT_MRT4530_57337C.1.pep
MGFAVSLISAMFRRMFASAGLRPGSAVVDDDGTTLHFWAHSSLLILPSKNGAAAAAAAAGRRPVVVLVHGFGPDPTWQWGAQVGPLSRHFDLVVPTLLFFGASTTSAAPRSDAFQAAAIAALLTSGGAHLPGLGGERRELHIVGTSYGGLVARHLARALSTSAGDGQVEVGKVVLCDADLAKGAEDDAALAAKGGVAEVTELMAPADGKAFRRLMALCVHRPPKYIPDFLVRDLLRKYFADKREEKIRLIKEIVTEEQDSQLNSPLPQEILIIWGEFDQIFPVEKAHKVKEMLGEKATVKIIPNTGHLAHQEDPKMFNDILLKFLLPSPAVANGAK

SEQ ID NO: 157803 - protein, 120 aa, Oryza sativa
  Clone ID: PAT_MRT4530_57338C.1.pep
MNSGIFDLRWLEGAHFAELGEVIDLDAVRRTFNEYLVTTPKAFKEENRKWQDPLPSPQKKYAFNPLQDKPFIEIEAGTTVAPWVQAILMKALPPSIYFVGLRAYGNAFSRDLGHIYQHYV

SEQ ID NO: 157804 - protein, 313 aa, Oryza sativa
  Clone ID: PAT_MRT4530_57339C.1.pep
MAAVQRLLRASASGGAAAAAAAARRRMSTAVAPEQTPAAAAFPFAAAAGRARQRVAEERNVQWVFLGCPGVGKGTYASRLSRLLGVPHIATGDLVRDELASSGPLSVQLAEIVNQGKLVSDEIIINLLSKRLKKGEEQGESGFILDGFPRTVKQAEILDGVTDIDMVVNLKLREDVLVEKCLGRRICGQCGKNFNLACIDVKGENGLPPIYMAPLLPPNNCMSKLITRADDTEEVVRNRLQIYNDMVFNVVLGRYKSCTMLICSVGSQPVEGFYRQQGKLLEFDLPGGIPESWPKLLHVLNLEDQEEMKLATA

SEQ ID NO: 157805 - protein, 340 aa, Oryza sativa
  unsure (1)..(340): unsure at all Xaa locations
  Clone ID: PAT_MRT4530_5733C.1.pep
MKALGPFAVSAVSRGRTGLGLVIIIGTCEVMSVSDEWPSLEVSHREKHPHIPAKGLTSARRGCGAGKRSPLVSGSGESGSPWTGTTQVVHRRSTGPTAQIALGXDRTGSDRGSRRARLGIKAXGRPGLVAAARARRVAGNGIRRRRRRRKSDAKAAAADGGNDRRRRRARAAATHGELGKKRKGEGVLTGGDGGVRRRGATEGGQHAADGDRDDARAWSTWPEGGGDVGAATVAGAAARRERREVGEGPDRWAPPVGDPRRGGRRGGLAGPRPAAGLEKAKDLRQQYVARKPKPCLEEHGEYNRPVVAGLRHHGLPRGESLPLHHRARADQLCQLVLIHK

SEQ ID NO: 157806 - protein, 81 aa, Oryza sativa
  Clone ID: PAT_MRT4530_57340C.1.pep
GWLAWFVFRCVFMLLLDFICYVFFFYHAASNSYLCLEHLWYVWVHMSFLLGPCLFVKGFSPVISLCVFLADVLSPIKLFRP

SEQ ID NO: 157807 - protein, 533 aa, Oryza sativa
  Clone ID: PAT_MRT4530_57341C.1.pep
GTSGELIPCCLASAASTSSSSTSTSPMATTPAPVSLSAAASTVPARLLVGRGAAAAPVARRRARMVVVRAKIREIFMPALSSTMTEGKIVSWSAAEGDRVAKGDAVVVVESDKADMDVETFHDGIVAAVLVPAGESAPVGAPIALLAESEDDLQAALAKAQELSKAHPQQAPPPSDAAAPPPPPPPPAAAPAAPAPVAAGTKGIATPQAKKLAKQHRVDLAKVAGTGPFGRITPADVEAAAGIEPKPKVVPAASAAPVPLSAPAIGAVPQAAELPPVPGATVVPFTGMQAAVSKNMVESLAVPAFRVGYPIVTDKLDELYEKVKSKGVTMTVLLAKAAAMALAQHPVVNASCRDGKSFTYNTNINIAVAVAIDGGLITPVLEDADKLDIYLLSQKWKELVKKARAKQLQPNEYSSGTFTLSNLGMFGVDRFDAILPPGQGGIMAVGASKPTVVADKDGFFSVKSKMLTPCITDSQWQRQELCLVINELPHVYNLGWLGVVNVTADHRIVYGADLAAFLQTFAKIIEDPESLTL

SEQ ID NO: 157808 - protein, 145 aa, Oryza sativa
  Clone ID: PAT_MRT4530_57342C.1.pep
MAFVRSRANASSGIGVAAECKQTFLELQRKKSHRYVIFKIDDKCKEVVVEKTGSSTESFDDFMDSLPESDCRYAIYDFDFVTEENCQKSKIFFVAWSPSVSRIRAKMLYATSKERFRRELDGVHYEIQATDPSELDIELLRERAH

SEQ ID NO: 157809 - protein, 247 aa, Oryza sativa
  Clone ID: PAT_MRT4530_57343C.1.pep
MELDDASRHGFGRMGFGCKHYRRRCRIRAPCCNDVFHCRHCHNESTVICLVCDTEQPVAQVCYNCGVCMGEYFCSACKFFDDDVRCRCCLLCFCWIWLTGNTSTAKIAASAGSCYSVSLRDKHCCIENSMKNNCPICYEYLFDSLRETSVLRCGHTMHLQCFHEMLKHDKFSCPICSMPIFDMDKFLRALDAEIEANMLHIDYMGKGWIVCNDCRDTTQVYARVAGHKCCHCQSHNTCRVAAPVLPA

SEQ ID NO: 157810 - protein, 133 aa, Oryza sativa
  Clone ID: PAT_MRT4530_57344C.1.pep
GGSQFLREGGLDYLGNPSLIHAQSILAIWAVQVVLMGPVKGYRIPGGPLGEVVNPLYPGGAFDPVGLADDPKGFPELKVKEIKNGPLAMFSMLGFLVQAMVTGKGPLKNLADHLADPVKKKAWGYATNLVPGK

SEQ ID NO: 157811 - protein, 176 aa, Oryza sativa
  Clone ID: PAT_MRT4530_57345C.1.pep
MVSEPTLAVSRARVSQLRSVVLNHRTERSGIHPKAEIDKAAEFRQRHAIATGNDRTKTYWTPSSSSPSCGGGGREGEGGRLSDGSSGDDGGGDGGVRRHRSGGTVAQERRHGGAGTAARRHGNGGAAARERRRGGTGTAARRHGNGGAAARERRRNGEGRGETKGEMEWREWGRGD

SEQ ID NO: 157812 - protein, 448 aa, Oryza sativa
  Clone ID: PAT_MRT4530_57346C.1.pep
MGWAVALHGGAGDIPRSLPPDRREPRLATLRRCLDLATAALRSGRAALDVVELVVRELENCPHYNAGVGSVLTADGTVEMEAAVMDGNTLRCGAVSGLSTVVNAVSLARLVMEKTPHIYLAFDGAEAFAREQPARSPYSPSGAAVDTGGLDDSDRGRGGLSDVDGDRSGLSDGSRGGLGDGDHGRGRARLGDRGGLDDGRWRRIRVLCLLAAGLLLQPHPCSPVRAPPLFVRLLAILRRSSSSPPACSSNRTPARPSVLLLCSSACSQYCAAPPPRRQPSSHLRSLSSFSLTVDYTQPIPKDDNSRVGTVGCVAIDSAGNLATATSTGGLVNKMAGRIGDTPVIGAGTYANALCAVSATGVGEAIIRHTVARDVAALLEHAPPAGLSLGDAAARVVAGVPPGKVGLVAVSAAGEVAMAYNTTGMFRACATEGGRHEVAIWPDDADGAN

SEQ ID NO: 157813 - protein, 550 aa, Oryza sativa
  Clone ID: PAT_MRT4530_57347C.1.pep
YPILATDGTCYGIGCCCFDGPAGRGYACKCRSGYDGNPYMPNGCQDINECMLPNPPLCFGKCINTVGSYECIFLTNPGLIIGIGLGGSLIIVVLILTGIVVRRKFKSRRAKKLKEFFFKQNRGLLLHQLVDKDIAERMIFSLEELEKATNNFDESRKLGGGGHGTVYKGILSDQRVVAIKKSRYAIKREIDGFINEVAILSQVNHRNVVKLFGCCLETEVPLLVYEFIPNGTLHEYLHVNSAQSVPWKERLRIALEIARSLAYLHSAASVSIIHRDIKTTNILLDDRFIAKVSDFGASRGIPIDQNIVTTTIQGTFGYLDPEYYRKSRLTEKSDVYSFGVILAELITRRRPTSYISPEGFNLTEQFILLVSEDRLLEIVDSQITKEQGEEEAREVAEIAVMCLNLKGEDRPTMRQVEVKLEGLQGAVNTIRGRRAVQLNSPLTEESDSNIGVSKRHFPTVSLFKTYIQLALSSNGHGHLHDCPFWLCHSSMTTLIISSTCVKLNSNVLSLSLSLSLSLSLPHTHIQSTRLSSMLPLAFAWTRVCKLDPRG

SEQ ID NO: 157814 - protein, 551 aa, Oryza sativa
  Clone ID: PAT_MRT4530_57348C.1.pep
MEEDQGGKPPAPDAGGGGGGGESKKGSPCEECGEQPWKYRCPGCSRLTCSLPCVQSHKRRTACTGKRPRTDPVPLANFDDHQLLSDYSFLEETKQVAESAHRLIGAFGRNYGGFGGAQLPKWLFYLRKAAQRRGIWLQFLPRGMARREQNRSRHNHRKDCIYWTLEWKFNSTDVVLTDHNIDEHTSLLSSLEKHLSPGPWKNQLTPYRNTDLRDLKLFIQKSAKESTSPYRQLNIEEPLGPQLRSIKIVEYPTINVFLPSDSCDFEVEKFVNKLPASEKPPGSSTDSPDLEGTEFHEEEIEEGELAPETQVIDLKECGASHASNLASAKDTSGSKVDTKRDSSVLSYIRSLGLDGQQKALTERSKMAPNTTSGASKTKNCMKVYPMDMEESGDAGVISERQGIECKNQAASHPGNLTPVEGTTVSKIDSNTDSLVPSSISILASDGFSCPQVEHNQQSRLTPNSTPEALKRKSCMKVYPLDTEKNLGLFSEVPNLGFEQEIGNAYSDLFGDINPDDFLNFDLEMMDEDELAGITSPLKLWDDLEEGEIPTA

SEQ ID NO: 157815 - protein, 164 aa, Oryza sativa
  unsure (1)..(164): unsure at all Xaa locations
  Clone ID: PAT_MRT4530_57349C.1.pep
SGAAVDTGGLDDSDRGRGGXQRRRRRPQRAQRWQXAVGSATATTAVGGLGSVTAGDWTTVTGGGSATATAGGSATATEDLVVGRAVEADPRPLPARRRPAPPTAPLLARPCSSSVRPPARNIAPLLLLAAGLLLQPHPCSPVRAPPLFVRLLAILRRSSSSPPA

SEQ ID NO: 157816 - protein, 226 aa, Oryza sativa
  unsure (1)..(226): unsure at all Xaa locations
  Clone ID: PAT_MRT4530_5734C.1.pep
MAKQSLVQSLVMLXPQADKGTWYNSSMAMTIGLTSARRGCSAGKRGPLVSGSGESGSPWTGTTQVVHCRSTGPMAQIALGPIGRAAIEAAAGLGSASKPTGRPGXSGGGTRASRCRRRHPAAEATAQKRRXGRRQRPKATASASGGDARGIGEENXKGREPSPEGTAASGDEERRREVDTRRTATGTTVARWEWRSGGGPRRRRGGRGGSRPREPDGGDSAVRRRA

SEQ ID NO: 157817 - protein, 405 aa, Oryza sativa
  Clone ID: PAT_MRT4530_57350C.1.pep
MGFLCRRRSSAAPAESFSLLCEEDSESVFGSDDDGVEETATMAPELGKMMSLGFSASHHLGDGGGGGEELVGSFMEKEVEQMVETARGEYLTKLSNGGIELSCRIAAIDWICKVQAYYSFGPLCAYLAVNYLDRFLSSVEFSVTNDMPWMQQLLIVACLSLAAKMEETAAPGTLDLQVCNPEYVFDAETIHRMEIIVLTTLKWRMQAVTPFTYIGHFLDKINEGNRITSELISRCTEIILSTMKATVFLRFRPSEIATAVALSVVADGGRVLDFGGVLESSKLPVDKDNVGRCHQAMQEMALVMQNSTASPSDSLCYDMTNPVLDCHILRRRECVSLQSGPRDELEMGWAPFAITVSEKEESERRCDDGWRRGGEAAQYCEQADEQRRSTDGRAGVRLEEQAGGE

SEQ ID NO: 157818 - protein, 179 aa, Oryza sativa
  unsure (1)..(179): unsure at all Xaa locations
  Clone ID: PAT_MRT4530_57351C.1.pep
SGAAVDTGGLDDSDRGXAGSATSTATAAGSAMAAAAXGGLGDGDRGRGGSARRPRGARRQRLWRLDDGDRRGLDSATATAVVGXLGSVTAGDWTTATGGGSATATAEGSATTTADLVVGMALEADPRPLPARRRPAPPTAPLLACPCSSSVRPPARNIAPLLLLAASHRRTSARSPLSR

SEQ ID NO: 157819 - protein, 47 aa, Oryza sativa
  Clone ID: PAT_MRT4530_57352C.1.pep
STQITASRAVNIEARCLQLGGERTCFARKHSCGSSPLTSNNFQASKA

SEQ ID NO: 157820 - protein, 320 aa, Oryza sativa
  Clone ID: PAT_MRT4530_57353C.1.pep
IHGVGGRAARRRRGHPALAAARPQGAPPRHAPPLPRPRHRRAPFRPRCPRRRRARREGAGELPALQRRRGLRAHRRRHRRDGGRRHGRQHLALRRRLRTLHRRQRRLPRQARHGEDAAHLPRAAVNTGGLGDGDGDRGCGGSARRPRGLDDGDRGGLGSATATAGGWTTATGGGLAMAADGLGDDDRGHGGSARRPRGARRRRPWRLGDGDREGLDSATATVAVGWLGSVTAGDWTMATGGGLATATAGGSATATADLVVGRAVEVDPRPLPARRRPAPPTAPLLARPCSSSVRPPARNIAPLLLAASHRRTSARSPLSR

SEQ ID NO: 157821 - protein, 761 aa, Oryza sativa
  unsure (1)..(761): unsure at all Xaa locations
  Clone ID: PAT_MRT4530_57354C.1.pep
MAEERESFESQWAPSDVTEENLKEMVVHSVLPAKEIIGWRLACGETFPTPDTHEVVVFSHFFYGGFSLPTSRFFQGILDFYGISLHHLNPNSVLHIANFIHACEAFLGVRPHFALFRRIFFLKPQPNKSKLCVVGGAGFQLRVTLSQKYFSMPFKTSNKGWHANWFFVQNPEPAFPGYSCLPPVYRDTWNSLPIGEEAAQALALLDRMLKLKEQGLQGEQIKERSRTAFEFDGKQDPNREDPESLEFKIMQERMYKIFSNVIVVGYSHLLPVVPYNAFNPPPPEFALMKSDPPIAQRRSPRRQTGQASGGPKIQSDVQPNTSKSINQSDSRKRKLVSSDDEGDDVEKVGNKGATEKQPRQANPKKKTSSRPIPKIRKSSRKPYDIDPSRKNSETTSTETGPTTETGPTAEDRPSNNQPATDNVQSSNEPPTGNQSAEAEIGADQEPPTGNQSGIEQNEDIPEVEAQTSSPLRKDTSADPRLGSPVRVQGPARPRPEVITGPMVGDEEEVLRIRLAEDSCPPILVKWWDDEMQPQGIVINKQKEDEEVCLLKKTLSQATRLVNRIHLRNKAKTATLERLVPHLGTLEATRDQLREAKELARKTEHDLRDRIAELQDSNIERSGSSKXKIKKLEGARDEVANATTPXVQAMFFNNNGPSSIDAVEIFDKLRSTLDTYFKNIKEAGNIGVSLALAMTKSWYPKIDIDAVDGFADGTSEEAALDLISDVQKAADKIAADVVERFHDNDLKPTGSDNSDDEKTESD

SEQ ID NO: 157822 - protein, 76 aa, Oryza sativa
  Clone ID: PAT_MRT4530_57355C.1.pep
YVKVPFPIKLILLPHLTSSSIDLRKRFSHLFCQILPGVAHTLDFVNSSAPIFPSKKKSFSRKQSKSKPKGGAFLPI

SEQ ID NO: 157823 - protein, 67 aa, Oryza sativa
  Clone ID: PAT_MRT4530_57356C.1.pep
MEGLLEPPPAKIELFFMAGLLAWPPVKIDFRWQEAKIRKSRINKEEKYIVACRGESSRECANHRRAT

SEQ ID NO: 157824 - protein, 328 aa, Oryza sativa
  unsure (1)..(328): unsure at all Xaa locations
  Clone ID: PAT_MRT4530_57357C.1.pep
MEPQSIFQSSAPWGEFYEPPPSSEPIFTTGYEIRPEFIHMVREKPFFGLHQENPYHHLWEFELLCSCLKIRGMSQGTIRWKLFSFSLEERAKQLYTSIVGCVNGDWKDCGTVSAKESSPKPSAPKNEEFQSSGCALDFRDGLHNDHENTLTDIPPGNAPIEEXSLLEQDVYHFIQKEDSGETLEVLSIEPPSQPHLEPKPCPSGPRDVVLDSCQETTSIMHDTSFGKENLQAMDKLETSALVDKRNHSTNEHETFSFKIPHDSCSYKETPDSCSISTTPSCEDHNHFTILFSNMLEKWSWILLFIINTANLVYVFTLILHDDVPKVKL

SEQ ID NO: 157825 - protein, 51 aa, Oryza sativa
  Clone ID: PAT_MRT4530_57358C.1.pep
HDHRYLYPHFSLITKESKSNLSSMLPIYMQCTQLCEKCETLNPPYNKNNTT

SEQ ID NO: 157826 - protein, 51 aa, Oryza sativa
  Clone ID: PAT_MRT4530_57359C.1.pep
NRRQNCVVHAKHITVGSAGSTATLAYTTVDRKDASPSRKQVYPDCVLPVTD

SEQ ID NO: 157827 - protein, 69 aa, Oryza sativa
  Clone ID: PAT_MRT4530_5735C.1.pep
SVRDGSRVHLYLVSGALHCYAMQACHLVCCLVAYVRNFFIPMMTKVAVNSLGTCFRKILRIFLKSLCFP

SEQ ID NO: 157828 - protein, 139 aa, Oryza sativa
  unsure (1)..(139): unsure at all Xaa locations
  Clone ID: PAT_MRT4530_57360C.1.pep
VGSDNFEVDFDQEDTLRHAESEVLASRYSTRIRQLEGAKEVSEGSXFYDESKGCNKNFMVLRLAFKLLRLKGRHGWSDGSFNDLMDLRVCFLSLISCXSNTCQAKKHICPLSLGVEKIHVCVNHCVQCRKEYVDLDSCP

SEQ ID NO: 157829 - protein, 414 aa, Oryza sativa
  unsure (1)..(414): unsure at all Xaa locations
  Clone ID: PAT_MRT4530_57361C.1.pep
MWAASCLASCCAACACEACRTAVGSIGRRSARIAYCGLFALSLFASWALREVAAPLLQSIPWINHFHKTPDREWFETDAVLRVSLGNFVFFTILAIIMAGIKDQKDPRDKIHHGGWMAKIFCWVVIVFLMFFVPNGVVSFYESISKFGSGLFLLVQVVLLLDFVHGWNENWVAKDEQFWYMALLVVSVVCYIVTFSFSGLLFHWFTPSGHDCGINLFFIVFTLILVFVFAIVALHPKINGSLLPASVIALYXTYLCYSGLSSEPRDYECNGLHNHSKAVSTGSLSLGLLTTILSVVYSAVRAGSSATVLSAPDSPRAGADKPLLPFSKADEEAEKKDVPRPVTYSYSFFHLIFSLASMYSAMLLTGWSTSVGESGKLVDVGWPSVWVRIATQWATAGLYIWSLVAPLLFPDREF

SEQ ID NO: 157830 - protein, 84 aa, Oryza sativa
  Clone ID: PAT_MRT4530_57362C.1.pep
PSHAHELASVALAFPSVARKSIDSPVTHALSVIVNHAFGPAPPVITGTPATPYNGRWTDQDLNSACTPRPVTQDPSAEGSQFSR

SEQ ID NO: 157831 - protein, 578 aa, Oryza sativa
  Clone ID: PAT_MRT4530_57363C.1.pep
MPRQYKSLRSKYILTTRLSNFAFSLSGDSSDAKGDPKAIPSPARSPPVVVSSSASPSAPLAEYAEHLSNLVAIPSLSHENHYFLGPIGNLDPTEFIVGEPNRVPFRLANPDLGHWKNTFKSWPSLEKTPPEKSWITWYKRVSASKKVHWNEIGIGQALALTIANSAKDEPLMAAATYFWSNTINAFLFNQGSMTPTLINITMITGLDITSLANPMSMNTKNQFYFRTKSIGGWSGYAATYMGKGPVTPREHTTESSPPHQSNSGRDIKYAPGLIPNGGGLSPPVIGYNAPKTSTLLQGLIREPSDAGKKRRTRSSATDTLALALKKKAKLKKPKPADDLPVLDPSIEQALDEEDIEDDVDQAVAEVSDTERTPSASPKQTPPTPYAPTHFSRKKKIAVKRKLAATILKPVPPQSSSDRTPSAVGSHHIEEEIQPAAPTIPALADLFSFDIKDYLDEEAEEDTTSKSLLVHEEKTKLDQLSEGPIKSNINRLEARKIELLAQLEECNAELDIEHKKLADLPKSIEEQKARLKSAIKNVAVLTKYLKIIPGTNAQDAQAIEEVEQIRQRAISAIQHYLSQ

SEQ ID NO: 157832 - protein, 64 aa, Oryza sativa
  Clone ID: PAT_MRT4530_57364C.1.pep
KFPLGPPPLGSREKPGKKPPPGGFPGGGGGPPPQNGVLAPSFGENGSLRSGAPWGSFGTKRGKI

SEQ ID NO: 157833 - protein, 181 aa, Oryza sativa
  Clone ID: PAT_MRT4530_57365C.1.pep
MEGRAVNEPSSSELACLGSSSTQARAELESSQSSFELLSRLGSSSAVDSLTCKNTFQRIKTKPHHPQAPPLASPSGRRLFSVRHRPHKRRPRHVGAIVVAHLLPLPIGGAVVVARRREREEPNRVTVAGRGRIRMPGASRRRIHMRQRRPLQPVVEAARRRAAADPHAWGEPAADPQASAP

SEQ ID NO: 157834 - protein, 120 aa, Oryza sativa
  Clone ID: PAT_MRT4530_57366C.1.pep
MKKKKIHLLFNEVDLGAFTNCSSALGTLKPSRLVLRLFIDSETLTMMEGPSQTVLRTFIDLIKDLHKLFFSPSLSDDDVNSDGEMREVADEDGQEMVYCLLFRREENKKPLILDSMDGVD

SEQ ID NO: 157835 - protein, 133 aa, Oryza sativa
  Clone ID: PAT_MRT4530_57367C.1.pep
MLGAPPPPVQGIGPGFQQERPARERKKGGFTTKPPRGDVTPKGTVIANKKDDLLAVRSLPSLPNAATLALPTKQPSPTRELHYTSFDCGEGPLGPPTSTAIVPTPLRRNLRNINAPAASLSPLHDTTTYDPCH

SEQ ID NO: 157836 - protein, 58 aa, Oryza sativa
  Clone ID: PAT_MRT4530_57368C.1.pep
MPTRPMSHMASNTVLISVLLLAILSVLAAAMATMADHHQVYSPGEQCPAGISYPTYLL

SEQ ID NO: 157837 - protein, 83 aa, Oryza sativa
  unsure (1)..(83): unsure at all Xaa locations
  Clone ID: PAT_MRT4530_57369C.1.pep
YQDVFRSSEKIRRRKPRRRPAGLQRVITSAVLPQHLQAPALDVERPDXGQPPVRLPREELQLVREVGRGPLRFXPPGXAHGRG

SEQ ID NO: 157838 - protein, 148 aa, Oryza sativa
  Clone ID: PAT_MRT4530_57370C.1.pep
MALRRIIKELKDLQRDPPTSCSAGPVSDDMFHWQATIMGPNDSPYSGGVFLVTIHFPPDYPFKPPKVAFKTKVFHPNINSNGNICLDILKDQWSPALTISKVLLSICSLLTDPNPDDPLVPEIAHMCKTDRLRYESTARGWTQKYAMG

SEQ ID NO: 157839 - protein, 100 aa, Oryza sativa
  Clone ID: PAT_MRT4530_57371C.1.pep
SARCCRGRRRHRRRICRGREARGAAGSALGHRHRGPRPLPPPPEIGRLRILPHQAAVPGPPHNWAISAGAVHSIRGRRAWVRRRHRSAKSQPLSLLISSA

SEQ ID NO: 157840 - protein, 55 aa, Oryza sativa
  Clone ID: PAT_MRT4530_57372C.1.pep
PPRVAAQPNPPPFVARPRCANSDLVISVLAAGGSLPIPGLKARGFSKISGLAFVF

SEQ ID NO: 157841 - protein, 51 aa, Oryza sativa
  unsure (1)..(51): unsure at all Xaa locations
  Clone ID: PAT_MRT4530_57373C.1.pep
ISTKVVEMFFCIDIKFDLMISKSAFVLWYVXRACSSGXFSKAREVLAALDK

SEQ ID NO: 157842 - protein, 230 aa, Oryza sativa
  Clone ID: PAT_MRT4530_57374C.1.pep
MEIQVEVEEEVQPKATLAILLAEYEVKAKKTWMEVTYASAVEQEICTAFLFVSQVHGVEYAFGAHDYPSSGVFEVEPRQCPGFRFRKSIFLGTTCLDPIQVRQFMELQSVNYNGDTYHLITKNCNHFCKDMCYKLTGNKIPKWVNRLARIGAICNCLLPESLKISPVGHDPNSRPEDCEKRRLRNPLSCFSSISSQRQLPPSSPFPTSPVKEPLAYSSSRKSSAPSLRNR

SEQ ID NO: 157843 - protein, 247 aa, Oryza sativa
  unsure (1)..(247): unsure at all Xaa locations
  Clone ID: PAT_MRT4530_57375C.1.pep
MKLRPKRPGWKSLMPLQLSRKSALRFFLFPKVQAAGQSPDDTPVYLNVYDLTPMNGYVYWAGLGIFHSGIEVHGVEYAFGAHDYPSSGVFEVEPRQCPGFRFRKSIFLGTTCLDPIQVRQFMELQSVNYNGDTYHLITKNCNHFCKDMCYKLTGNKIPKWVNRLARIGAICNCLLPESLKISPVGHDPKQXPEDCEKRRLRNPLSCFSSISSQRQLPPSSPFPTSPVKEPLAYSSSRKSSAPSLRNR

SEQ ID NO: 157844 - protein, 80 aa, Oryza sativa
  Clone ID: PAT_MRT4530_57376C.1.pep
VPHKLSPLGLKPKSSLGGPLKGKAFKRAGIFSKQFPQMIEQKTLSRKNKDFPQFVRVKTKLFALGVAFMGGPPGAFWGPF

SEQ ID NO: 157845 - protein, 824 aa, Oryza sativa
  unsure (1)..(824): unsure at all Xaa locations
  Clone ID: PAT_MRT4530_57377C.1.pep
FLSTNTPDPLSSRLSVPSGELNLYRAAVALRLVLLAAFFRYRVTRPVADAHALWVTSVACELWLAASWLIAQLPKLSPANRVTYLDRLASRYEKGGEASRLAGVDVFVAAADAAREPPLATANTVLSVLAADYPAGGVACYVHDDGADMLVFESLFEAAGFARRWIPFCRRHGVEPRAPELYFARGVDYLRDRAAPSFVKDRRAMKREYEEFKVRMNHLAARARKVPEEGWIMSDGTPWPGNNSRDHPAMIQVLLGHPGDRDVDGGELPRLFYVSREKRPGFRHHGKAGAMNALLRVSAVLTNGAYVLNLDCDHCVNNSSALREAMCFMMDPVAGNRTCFVQFALRDSGGGDSVFFDVRDEILVQIEMKCLDGIQGPVYVGSGCCFSRKALYGFEPAAAADDGDDMDTAADWRRMCCFGRGKRMNAMRRSMSAVPLLDSEDDSDEQEEEEAAGRRRRLRAYRAALERHFGQSPAFIASAFEEQGRRPTVAPARSLLKEAIHVVSCAFEERTXWGKEIGWMYGGGVATGFRMHARGWSSAYCSPARPAFRRYARASPADVLAGASRRAVAAMGILLSRRHSPVWAGRRLGLLQRLGYVARASYPLASLPLTVYCALPAVCLLTGKSTFPSDVSYYDGVLLILLLFSVAASVALELRWSRVPLRAWWRDEKLWMVTATSASLAAVFQGILSACTGIDVAFSTETAASEEEAALASEITMRWTNLLVAPTSVVVANLAGVVAAVAYGVDHGYYQSWGALGAKLALAGWVVAHLQGFLRGLLAPRDRAPPTIAVLWSVVFVSVASLLWVHAASFSAPTAAPTTEQPIL

SEQ ID NO: 157846 - protein, 206 aa, Oryza sativa
  Clone ID: PAT_MRT4530_57378C.1.pep
NPPGFSLPRNQTTQPNPTKIPPSAMPRLHLLLLAVLAVAAAAAEAAAEKKPTAYEVLESYDFPVGILPKGVTSYTLEATTGDFTATLDTGDDDDSSSSTCEFAIEGSYSLRYQRAITGRIATGHLTDLRGVAVKVLFFWLNIVEVTRRGDRLEFSVGIASADFTVDNFLESPQCGCGFDCDDDGISSSSSLPPPLEPSLLRLRGAF

SEQ ID NO: 157847 - protein, 77 aa, Oryza sativa
  Clone ID: PAT_MRT4530_57379C.1.pep
EVCAYIAFKTNPNSMVSPIAGKSSIFRALPTDVLANAYRISREEAQRLKHNRGDEFGAFTPLQYKSYQDVYNVAESS

SEQ ID NO: 157848 - protein, 190 aa, Oryza sativa
  Clone ID: PAT_MRT4530_5737C.1.pep
NHLTYLNKKKKKKKKKKKKKKKKKKKKKKFKKKKKKKKNIIKKKKKYNINEQKIKKKKRGGVSLGCTHLNSPCFPILIFFFLGAPFFQASGPFFFPPLARGQTMRFPLFFVLGLFPLLLWGFLAGWPLSLAPPLLPVPLVWFRAPPFTCLFFSGGGVFPPLCFFFFSCLFGPLFFLFSFFFLGFLFCFPN

SEQ ID NO: 157849 - protein, 136 aa, Oryza sativa
  Clone ID: PAT_MRT4530_57380C.1.pep
MTTKATTLLLLLAAAAAAALLCHVHVAVAGEDPEPCDPSDITIATVKTGRVVGGLPEFQVTIGNECSCPEGDVVVSCLDGVPAGVDRSKIHTAGSDGLCLVNDGLQIVKGSPVVFTYAASAPISLAFDNASPRCQR

SEQ ID NO: 157850 - protein, 66 aa, Oryza sativa
  Clone ID: PAT_MRT4530_57381C.1.pep
MAPWGGSPSRQRGGGGGFGRHGFFAGEGRRRRRRAGATARKKQRGMAGAAAAAGDGWRGSKGGAAT

SEQ ID NO: 157851 - protein, 58 aa, Oryza sativa
  Clone ID: PAT_MRT4530_57382C.1.pep
MVGVPRLLPTGVLFGAFCLKRPTHRFQCSSCRFHHRFLAVAAGVPISLGFVRHNSTTA

SEQ ID NO: 157852 - protein, 497 aa, Oryza sativa
  Clone ID: PAT_MRT4530_57383C.1.pep
MQGTWNARPHSGSRRRSSPSRNSPRQTGQSVAPSMPAPYVAVPREGNGFDRGLIELLLLVLVPTVDEAVDFLNDDEAVDGRVRGAATRRRRPCRCWPSHYASYGVINMSDISALSYLKVFMDAHCQLGDLVDAVVPFMGESITDGTLATFLKKPGDRVEADEPIAQIETDKVTMDVASPEAGIIEKFVASEGGIVTPGVKVAIISKSAAQSKTHTQSSEDTSQKHSTKPPSTKENKVEAKPPKVESSTTHESKLTSSSEPQLPPKERERRVPMPRLRKRIANRLKDSQNTFAMLITFNEVDMTNLMKLLSDYKDQFVTKHGVKLGLMSCFVKAAVSALQNQPIVNAVIDGDDIIYREYIDISVAVGTSKGLVVLVIHDIDAMNFADIEKGINNLAKKATEGAQSINNMAGGTFTISNGGVYGSLISTPIINSPQSSILGMHSIVQRLVVVNGSVLARPMMYLALMYDHRLIDGREAVLFLRRIKDVVEDPRRLLLDI

SEQ ID NO: 157853 - protein, 46 aa, Oryza sativa
  Clone ID: PAT_MRT4530_57384C.1.pep
HFLESSHACTFPPGTARPTHAFLRNQTRLSNSCALFWHGECGTTPA

SEQ ID NO: 157854 - protein, 65 aa, Oryza sativa
  Clone ID: PAT_MRT4530_57385C.1.pep
KAVIFLPAIEVGQLTRAPPLSLGLKKPDRKWCEMVKDITRSLSKHAMSRVKITPAHCTIIGSFRA

SEQ ID NO: 157855 - protein, 158 aa, Oryza sativa
  Clone ID: PAT_MRT4530_57386C.1.pep
MHERVLLSEYNDKEKIGAFHNQPLHCMPGKQKEKTHPSLPVRRRMFSDKKFAENMRANQSLSFDVQSHVVHFTVVLLASSVLAYSGKREKSTPRDQGRGVSRTSVATSCSDCRAYIPSVVWNVILPIQLSSGMEDRLVCTPLFVPICFGKQKVPPNVS

SEQ ID NO: 157856 - protein, 205 aa, Oryza sativa
  Clone ID: PAT_MRT4530_57387C.1.pep
MAISGEVSGTTATLVVINGFTVTVESVGDSRCILDTQGGEVQLLTVDNCLEKNAEERERVSASGGEVGRLNLFGGQESPWLGDPRLVLAGWISQLEKVLVPCLPLRLLPDTQGPSAKTCEGAAVMQFFKQVDKSSKYYEFRCKTRLVKPSILHFQNLYKEGLLEQLLQSTALLVSWSLGRHLSVEMYIREAPRTAPITNKTVTSH

SEQ ID NO: 157857 - protein, 84 aa, Oryza sativa
  Clone ID: PAT_MRT4530_57388C.1.pep
EYTIITTRICEYPKCVFIGITSQEQDDRCRRTLPESTAILLSDRYCFQIKLHLHILSKIVLSDHRSGHAAAPKQTTTCIVTCVN

SEQ ID NO: 157858 - protein, 89 aa, Oryza sativa
  Clone ID: PAT_MRT4530_57389C.1.pep
PESLQGLPAAAAPPLPERRRFVVRRGPPDHHRQRRVKRAHRRRAAAAAINLPPRLRRRAGRHVPDLGARPRRRPPPPPPPEQPQREPLQ

SEQ ID NO: 157859 - protein, 109 aa, Oryza sativa
  Clone ID: PAT_MRT4530_5738C.1.pep
QQEYFSTSVSTLVNASVMSGPIFVFPLFPLIQYLLCLHTVWLVMRCLFILFTTFGFIFLTFIRTAKHVTLGKEKKTASVRAHRLRQHHHDNTSASFIHDRGYSNCSICA

SEQ ID NO: 157860 - protein, 80 aa, Oryza sativa
  Clone ID: PAT_MRT4530_57390C.1.pep
MEVHGLGEGSFLRVGGGDGSPVREMLVSMIMMTRLAPKLESTRSADDGEDNSLRSHNERVVARCRTHSSTTVATTGASAS

SEQ ID NO: 157861 - protein, 53 aa, Oryza sativa
  Clone ID: PAT_MRT4530_57391C.1.pep
SEKDQCIRHQAISDAKVYSLITTYGTVRSPSGFQQDGERVRPNEANDKKLAGS

SEQ ID NO: 157862 - protein, 119 aa, Oryza sativa
  Clone ID: PAT_MRT4530_57392C.1.pep
PSGTPAAKTAGHLRTKQGTPSSLKGKLHQGKQPLKTNGTNATTGRVKPQVIDPSTQNGGKFKTNRLREGGPPKTFRDPALGKVAEPKEKGRPKAPGKKAPGRPKLHVGLNKGGGLNPQE

SEQ ID NO: 157863 - protein, 184 aa, Oryza sativa
  Clone ID: PAT_MRT4530_57393C.1.pep
RRHERGRLGASASPYLMAISNSMASNKQQITTSSSGDGAAAAARAGTIDAEKALGSGARELKIQNHREYNAAATTTQFSEHFFLAIKRTAAAPALTAKEERDLEVFREAHRRIDGEEEDQIQAHEPPLPPPLCLLTQLFDWPELVVALSISTRRAASPLLHGSGLDLDHLVLKWRCSNVRKEEI

SEQ ID NO: 157864 - protein, 362 aa, Oryza sativa
  unsure (1)..(362): unsure at all Xaa locations
  Clone ID: PAT_MRT4530_57394C.1.pep
MNGASSGGGGGAGAGGDGPLVYQRWKGNNDMFIFGPDARSLYVTMFLIIAPASIFCLFVAKELMNNFSYGLGLPVMISAVVFTAYDLSLLLLTSGRDPGIIPRNALPPESEGLDGNAEVGSNQTPPMXCPWVGQCIGLRNYRFFYMFVFSTTLLCLYVFGFCWVYIVKIRNSEQITIWKAMAKTPASIALLVYTFIAVWFVGGLSVFHLYLMSTNQTTYENFRYRYDQRANPYNRGVMENIKDIFFSAIPASKNNFRARVPVPQEQGLRPRPTNGFMSPNMGRAVGDIEMGRKPVAWDEPRMAADIGDLGAGLGNLLEDKDGRFRSASPDLSRDALAIGGLDDQGSSVMNPGRTSWGVEAGR

SEQ ID NO: 157865 - protein, 81 aa, Oryza sativa
  unsure (1)..(81): unsure at all Xaa locations
  Clone ID: PAT_MRT4530_57395C.1.pep
YSRYFVYSNYFHIVIVLIEILKLIEKHGIQEKRDRERTWRRALRIEYFSIVSTIVIQFQVQKVVTYSLLPISPILPLSHLX

SEQ ID NO: 157866 - protein, 75 aa, Oryza sativa
  Clone ID: PAT_MRT4530_57396C.1.pep
KKHMLHPASYLDLPETHRNQRVQFYYDPDMLAISLPFCLARVIAIVSRRHASRLRSTRRRLRFHSGARSRGGLQA

SEQ ID NO: 157867 - protein, 195 aa, Oryza sativa
  Clone ID: PAT_MRT4530_57397C.1.pep
TVGYGYGHANPGTAYGNYGAGGFGGVPAGYGGHYGNPNAPGSGYQGGPPGANRGPWGGQAPSGYGTGSYGGNAGYAAWNNSSAGGNAPTSHAAGAGTGYGNQGYGYGGYGGDASYGNHGGYGGYGGSGRVGGNPAAGGGSGYGAGYGSGNGGSGYPNAWADPSQGGGFGASVNGVSEGQSNYGSGYGGVQPRVAQ

SEQ ID NO: 157868 - protein, 948 aa, Oryza sativa
  Clone ID: PAT_MRT4530_57398C.1.pep
MAAPAPAPAPAQLRRCPCSAPLWAAPSPFRCCGGRRGRSPFIGGGRQDYSHSSSGLGVTDNSAFKIGVYTNFNVQSNAQEWLEESKRISSIKTRNNVGNTIYKGSTHLRTGILHHEPLEDHKSSNYSSLYNVRERMTPNSLANRHANMELAKHNTRNQAASAVSALTSVVNDDIKPLNRSSGSELKTQWQPDSKTDASVLKISKVETSLQFDDKARDGYDGDEHECTAKNTVQDSPAKAPMSKESKDARKALATVYDKVLVVDNVKSARSVVQLLTSKYKNFIHACDTEVANIDVKQETPVSHGEVICFSIYSGNSDAEADFGNGKTCIWVDVLDGGRDVLMEFAPFFEDPSIRKVWHNYSFDSHVIENYGIKVAGFHADTMHLARLWDSSRRIDGGYSLEGLTNDHRVMGVVPKELQKIGKRSMKTIFGWKKIKKDGSAGKIISMEPVEVLQRDDREMWICYSSLDSMSTLRLYESLKSKLEKKHWTFDGCPRGSMYDFYEEYWRPFGALLVKMETAGMLVDRGYLSEIEKVAVAQRKLAADKFRKWASKYCPDAKYMNVNSDTQIRQLFFGGIENRCKPGETLPKSRTIKVPNDGSLIAEGKKTPKYCTIELFSIVEDLKTDLFTASGWPSVSGDALRSLAGKLPTDLVYTTDDVEDDDSGDSEISEHDLNDTASYGTAYEAFGGGKKGKEACHAIAALCEICSIDSLISNFILPLQNQPALEKDRYKIRQAFVAAPGNSLIVADYGQLELRILAHLASCKSMLDAFKAGGDFHSRTAMNMYQHIRDAVEEKKVLLEWHPQPGQEKPPVPLLKDAFGAERRKAKMLNFSIAYGKTPVGLARDWKVSVKEAKDTLKLWYRDRKEGSAADVAMCAMLEIDRNARLKELGWRLLLQVHDEVILEGPTESADLAKSIVVECMSKPFYGTNILNVELAVDAKCAQNWYAAK

SEQ ID NO: 157869 - protein, 101 aa, Oryza sativa
  Clone ID: PAT_MRT4530_57399C.1.pep
FGQIWRGGRRVVERRGPGLALRGGGSMKSADGRASVWCGGCCVLPYGLRQKPSSVVHRAGSGYAFGWAMAAFLDVVTTVVASFLEPLLCGVAVGLAASGHA

SEQ ID NO: 157870 - protein, 94 aa, Oryza sativa
  Clone ID: PAT_MRT4530_5739C.1.pep
SSPPKKRGAPSKRGLLGFPKRNLPIPPKSHLKKKARPPKNRNFFGKAQSAKCPPQKIVFIRKAQTVRAEKLGKAKSFKRKNMHAQGAPPGTQFF

SEQ ID NO: 157871 - protein, 60 aa, Oryza sativa
  Clone ID: PAT_MRT4530_573C.1.pep
SKVPVDNVGITEVLPIHISETKSVYSCIFGDAGILHQVLCKAMPFLLDYYASLKMIVRVG

SEQ ID NO: 157872 - protein, 266 aa, Oryza sativa
  Clone ID: PAT_MRT4530_57400C.1.pep
MAAAAAAAEEERRMRGVYPSVWIQSMDSVCGSVILLSPHPPQTKPHFFYEPGPAFEENSEEAMLDISQTESTELWLIQWPLNQLDASDFHGQEVTLKLHRDGKLSSLDSSSGKSYDLVSFAAQQPDATVFLPSGPEAKAVGKIARRVSLVRYPDPEEPEKPGLGSLTPSSKKSAGSSKKTRSRFSSGSKNRSSQGSALSLGQQSAEPAHKHNQKRKDESSLGHSNVSGKSAEGSQVRGGDSGTTLEVPQTPGEKSKKKNKKVRIAE

SEQ ID NO: 157873 - protein, 241 aa, Oryza sativa
  Clone ID: PAT_MRT4530_57401C.1.pep
MSLWMEAADDMYEQALEHMDMQRQRLEEAERKEADIRYKYRVLQNLYDEKEKQNSILHICVAGASFCLHQVPGLDSDDDDEDDGGHLSPVHGDEPQGPNPQDMGEGVLQGLPPSPSPLYPIHSDDEAEAEATPSAMDISEASQEPETTRGTRMFHINDLNVPPVWVETQEEEDPEERIFETQEHITVHPKTCEDHDDGIPYSCPTTNTMDIATTYNAGFSQFAPTSLFPNPAEGTGGWLDD

SEQ ID NO: 157874 - protein, 74 aa, Oryza sativa
  unsure (1)..(74): unsure at all Xaa locations
  Clone ID: PAT_MRT4530_57402C.1.pep
MSPGGKTALPYYVSEELIAKEGEGRGLAKDGFLLTEINLLKEADPEVTKLXTNEVSGHCIGLQGLHASKSTSEL

SEQ ID NO: 157875 - protein, 439 aa, Oryza sativa
  Clone ID: PAT_MRT4530_57403C.1.pep
MVSQVASPRPRRVRRAGGGGSDWASLPADLMSSVLRRLAGDRERARFGAVCKGWGAAAARLPSRPWLVGSRADDWTGLSGATMSSFWLSLGQRGLVPFAVDVPAGSEYLSSSRGYLALSNPTGNPRVITLFNPVTGRRIPLPPIGFFKKWHDVATIVLSADPDTAEAWSAVAVGFPANCLAYYSSATNDWKPIRFNYSSGYAGVEHFRGRFYVAFKSEISVLEVDVATPAAIKIEIAHDDDDEDADVFDIDLNLDHETSNSDDDDDDDDDCADTLAGLGDEDYPLKCLVETHLVDCGGELLVVSMHDEVAYKKPSPESAVGRKPRSHDDERWVDVHRVEWLESGAARLVRMEDLGGYALFVGRNHAFSLSPEEFPACQPNCIYSVEQQGHPDGLVRVVNFNDDTTEWACPDEDIFPDDDMRGSPTAGWARRGWVFPKYS

SEQ ID NO: 157876 - protein, 175 aa, Oryza sativa
  Clone ID: PAT_MRT4530_57404C.1.pep
HLQALSLPAGSPSSPRGGIWSCTSATAQLEQSTGWSGLGSGTDWTRRRWYTSGQSLVRIYFRQASRPDLGPCSGNHWIWGLRGWMPSPASSLRWQSPDLGPLRLDSVDGSFGARMEVCLRIITPRLLTRPHRPTGPRGSGNMHRGVSAWRVHSVGVQLRQLRGVRCLLWGALCCG

SEQ ID NO: 157877 - protein, 73 aa, Oryza sativa
  Clone ID: PAT_MRT4530_57405C.1.pep
MGYPSPTVFHISNGSLAHQRPRRLPCLQTTQDSWSPLPPLPTMELVGEEDMEALPAVTGPSANGEVTVEEWQW

SEQ ID NO: 157878 - protein, 107 aa, Oryza sativa
  unsure (1)..(107): unsure at all Xaa locations
  Clone ID: PAT_MRT4530_57406C.1.pep
FFFFFFFFGNTKVAAFSFCTLQFPPKLXKHRNPPVTQLNLYTDLFLLVIQDRETKQRSHTWGQPQSQTLGAGAGVVXHXEVLAVAAXERQVARREPDXHGDXHPAVE

SEQ ID NO: 157879 - protein, 200 aa, Oryza sativa
  unsure (1)..(200): unsure at all Xaa locations
  Clone ID: PAT_MRT4530_57407C.1.pep
MAGVGSAVRRLYLSVYNWAVFFGWAQVLYYAVTTLLESGHEAVYAAVERPLQFAQTAAFLETHSHILVTSLVISWSITEIIRYSFFGMKEAFGFAPSWLLWLRYSTFMVLYPTGISSEVGLIYIALPYMKASEKYCLRMPNKWNFSFDFFYASILSLAIYVPVAGIKIGSDKNTALXGSPHMFTYMLAQRKKALAKAKAA

SEQ ID NO: 157880 - protein, 74 aa, Oryza sativa
  Clone ID: PAT_MRT4530_57408C.1.pep
KVAFKKRGGKGFDRKKKKKKKKKKKKKKKKKKKKKKKKKKKKKKKKKKKKKKKKKKKGGALSKESNFTPPGCHQ

SEQ ID NO: 157881 - protein, 47 aa, Oryza sativa
  Clone ID: PAT_MRT4530_57409C.1.pep
MEGFTQFLYDQFPDIYHSYYGLAALSLLQEEGLEPLCAELGILSAAL

SEQ ID NO: 157882 - protein, 320 aa, Oryza sativa
  Clone ID: PAT_MRT4530_5740C.1.pep
MAASSEVSIDPDQWFYIYSLERVAYVCERVGSPVMEEAELRRRRRKRPFLTTTHDELELQMEDLVDELYGVDEQGSSSAAARKRRLTAEQVRALERSFEEEKRKLEPERKSELARRLGIAPRQVAVWFQNRRARWKTKQLELDFDRLRAAHDELLAGRTALAADNESLRSQVILLTEKLQANGKSPSPSPAPAEQTAVPAAPESAKSFQLEEGRRLYDAAGSTTTTNGGGGGVAMPAARVAAARAASNDSPESYFAGARSPPSSSEDDCGGAGSDDDYPSSSVLLPVDATLVGDAFEHAVAATVAADEEAPLNSWEWFWN

SEQ ID NO: 157883 - protein, 529 aa, Oryza sativa
  Clone ID: PAT_MRT4530_57410C.1.pep
MGMGTPSGPSPIFLGKLLWPGEVTITLRWIGHRVKNGWKFRVTAYGPFKHEYYSQDAYFVTASLISIAFFLWYASRLRRTAILLPPGPPGLPVLGNLLSVHQFTHRGLAKLSKIHGGFFHLRVGQPNVFVVSSPETVREIIHENDSVFSHCPVTAAMVYVSYDLADMAFAHYGPFWRQMRKLCVLKLFSPRRDVSWRVVRGEVDALVRSVAELRRVAGSVGDLVFKFATNVTFRAAFGAQSREDEKVFVDIILELSEIFMAFNMGDYIPCLGWLDLNGIGKRMAAARHALDVFIDRIIDEHLAKLRNGDVSASDMVDDMIAYLVDAPGGRHKRADGVELGDLHLTRDNIKGLIMARNDIMFGGTKTVASTVEWALSELLRNPDELKRAQDELAGVVGLRRRVNQDDLDNLPHLRCVTKEAMCRDEALWGTDAAAFRPSRFADESARVEFKGGDFQYLPFGSGRRSCPGMQLGMFAVELGLAELLHCFDWSLPAGTEPLELDMDDVFGLTAPKAERLCAVPSPRLSCPLL

SEQ ID NO: 157884 - protein, 304 aa, Oryza sativa
  unsure (1)..(304): unsure at all Xaa locations
  Clone ID: PAT_MRT4530_57411C.1.pep
SSFVCLGRQVIPHSQHQLRPPPPPASSGRAVLLRQIRATGLSISGTXRDEGSPASERRPVMAEPEQPEFARERHVLFLEAMASELPADYASQEVNHLTLAYFAVAGLSLLRELDSDPCHNGSHLASTYSALAILKIVGYDLANIDNKVLLSSMRNLQQPDGSHAMSFDKLDIGKYLLSGLAFLGSSSSLLAAAECSAMTGVGSAVRRLYLSVYNWAVFFGWAQVLYYAVTTLLESGHEAVYAAVERPLQFAQTAAFLQLYRRLYEMLLPGASGRAARTCAHLSLLLPCPSAGPSPRSLDIPSLA

SEQ ID NO: 157885 - protein, 66 aa, Oryza sativa
  unsure (1)..(66): unsure at all Xaa locations
  Clone ID: PAT_MRT4530_57412C.1.pep
AYFILGSGRDGLITKSYMVLHPSRSVLISFRGVLYSSCSYDHSAAPCYTRXYSPXATXRGGGXHRI

SEQ ID NO: 157886 - protein, 171 aa, Oryza sativa
  unsure (1)..(171): unsure at all Xaa locations
  Clone ID: PAT_MRT4530_57413C.1.pep
QFAQTAAFLEILHGLVGLVRSPVSATLPQIGSRLFLTWGILWSFPETHSHILVTSLVISWSITEIIRYSFFGMKEAFGFAPSWLLWLRYSTFMVLYPTGISSEVGLIYIALPYMKASEKYCLRMPNKWNFSFDFXSYASILSLAVYVPGSPHMFTYMLAQRKKALAKAKAA

SEQ ID NO: 157887 - protein, 99 aa, Oryza sativa
  unsure (1)..(99): unsure at all Xaa locations
  Clone ID: PAT_MRT4530_57414C.1.pep
GACVVPRPXGRLRWFPRRLRWPVGLFPRLRLSSPLLGLFFGGSFCLCSWRGVVFCPFRFGSCSLXSLVLSSLSCFLAPSLCPVLLRCPFFPLFLGRSLA

SEQ ID NO: 157888 - protein, 684 aa, Oryza sativa
  Clone ID: PAT_MRT4530_57415C.1.pep
MDEMIPKPLISNDNEMMHGHGYTTMVHGNNEILNGNELAVHAEVIPSASTRGQKRKSAIWEHFTLVDVSDGCKRASCIHCNQSLAYSSGSKNSGTSHLTRHIAEWCRVLKDRQKSRRYTTYNSSNENASFDQERSCLRLAKMIILNDYPLHIVQQPAFLSFVDSVQPNFKMVDIGTIETEVYAIYLKEKDHLQQALANIPGRISLTVGSLTTNQSIRYISLAAQFIDSEWRLHRRVLKVMMAPWPQSENAVSRAIIKCLSDWNMQDKLFTITLEHDCSSHDIYSANLRNHLSGDNILMLKGQTFAVRCYANILNAVAHGVLASVHNVIYLIRESIKFIKADDAHENKFAEIAVELKITSNNSLCLDVTSEWNTTYLMLLAALDYRQVFTLLESYYDNYGTAPSTEDWKKVEAACGFLKLLYAFTLNIMSAEGNHQTANMFFHDAWVLQLELQNGMAHGDDVIRGIVIGIHEKFDKYWKDCNVVLAIAVAMDPRFKMKMVEFAYSKIYGPTDAAKYVKLVDDAILDLYKEYAAQPELLPLSPIYVDQVPADGLPFIETGGAPATASPSTAAAGAGLVDFDMYLSEVTTMGQPFKHELELYLEEALTQRTPDFDVLKWWQDNTLKYPTLSRMARDVLAIPMSTVGVGSSVFLPDNGSRSLDDYRSSLRPELVEALLCAKDWLQYSP

SEQ ID NO: 157889 - protein, 77 aa, Oryza sativa
  unsure (1)..(77): unsure at all Xaa locations
  Clone ID: PAT_MRT4530_57416C.1.pep
ATSXHRGCXXAPAXXPSRLISTAGDLLTLLVAXNPFPAAXTPPETPPTRGGGGGGGGAPXRAXRSVPLRPXRAAXXG

SEQ ID NO: 157890 - protein, 586 aa, Oryza sativa
  Clone ID: PAT_MRT4530_57417C.1.pep
MAPALPRRLLPWLRTPPSSSSAAAFSSAPSRGCPLHAALARRGAPAAASLALYARIREEASPPTPFTFSLLLAALASSSSSSPSPSPSAGCARLAAACLAHAQAFKCGALAHPVVTNSLLKLYCSLGLLDRARRVLYSGGAALDVVSWNTMVSGYGKGGDLGAAREVFARMPERNLVSWSAMVDACVRAGEFGEALWVFDRMMREEFRPDVVVLVSVLKACAHLGAVERGRWVHRYLETGSFGGRRGNLMLETALVDMYCKCGCMEDAWQVFDGVHRRDVVLWNAMIGGLAMNGYGERALELFRRMLQKGFMPNESTFIAVLCACTHTGRVDEGKRVFKSMQDYGIKPQREHYGCLADLLGRAGNVEEAEALLLDMPMEPHASQWGALMSSCQMHNDINVGERVGKRLIELEPYDGGRYVVLFNLYAVNGRWEEARTIRQMMEDRGAKKETGLSFIELNGLVHEFISGDTRHPLTRKIYALLEDIERRLQLIGYVKDTSQVIMDMDDEEDKGIALSYHSERLALAFGILNIPQGVPIRIVKNLRVCRDCHVHSKLVSKLYEREIIVRDRHRFHVFRDGVCSCNDYW

SEQ ID NO: 157891 - protein, 80 aa, Oryza sativa
  unsure (1)..(80): unsure at all Xaa locations
  Clone ID: PAT_MRT4530_57418C.1.pep
LPRSFSPLQVFEGYVGVLLLKTALHGLASEWQVVVCGILLVVMAVGNFVNTMETLIVKXRFKAKMKRAKSRQVFSRQPQN

SEQ ID NO: 157892 - protein, 256 aa, Oryza sativa
  unsure (1)..(256): unsure at all Xaa locations
  Clone ID: PAT_MRT4530_57419C.1.pep
MGDKRQPDCSSKQRGVQLFLRWAIMQGIAMHLQNRYQRQRLRTRIALGKAKRMDVVAGETAGVEGQLLLLYPVLFTLQVFEGYVGVLLLKTALHGLASEWQARIINYAYMVGEHGDSSVAIWSSMSVAGMPVLKSLRESHQSFDEEALEGIRRAVVDSAYEVISLKGYTSWAIGYSVASLAASLLRDQHRIHPVSVLASGFXHGIPQDHEVFLSLPARLGRAGVLGVAEMELTEEEARRLRRSAKTLWENCQLLDL

SEQ ID NO: 157893 - protein, 655 aa, Oryza sativa
  Clone ID: PAT_MRT4530_5741C.1.pep
MASNSSAAAVAALFGIRDGDHEDQIKPLFAQQQQHHHHQPPMAPSNAAAAASAAGSAAGQAAVAAPPAKKKRTLPDPDAEVIALSPKTLLATNRFVCEVCNKGFQREQNLQLHRRGHNLPWKLKQKNPLEAVSRRVYLCPEPTCVHHDPSRALGDLTGIKKHFCRKHGEKKWKCDKCSKRYAVQSDWKAHSKICGTREYRCDCGTLFSRRDSFITHSAFCDALAQESARAGRAGREGGGAAGRRGARRLGGEGGAGSREATRGGPEGERLPPAAAGHLYGSAGAANMALSLSQVGSHLASTLQDHGHHHHHHGASPDLLRFGGSGGGAMAARLEHLLSSSSASAFRPLPPPQQQPPAPFLLGAAPQGFGDGGDGSGPHGFLQGKPFHGLMQLPDLQGNGTGGPSPSGPGLYNLGYIANSANSSGTSSHGHASQGQMTNTDQFSEGGGGGGGGGGSETSAAALFGAGGNFSGGDHHQVSPAGMYANDQAMMLPQMSATALLQKAAQMGSSTSSANGAGASVFGGGFAGSSAPSSIPHGRGTTMVDQGQMHLQSLMNSLAGGGNADHQGMFGSGSMIDPRLYDMDQHEVKFSLQRGGGGGGDGDVTRDFLGVGGGGFVRGMSMARGEHHGGGGSDMHGPLEAEMKSASSSFNGGRMQ

SEQ ID NO: 157894 - protein, 103 aa, Oryza sativa
  Clone ID: PAT_MRT4530_57420C.1.pep
MRRRARPQPLCAGMGRRGATVKGEAHAPAISSRCVVTAGRFLLHRAPSAASPPRSRELEVGEDGVKRSDQNAAPTRQFNFSERFHALRSSFEHIWTVWLDSSS

SEQ ID NO: 157895 - protein, 361 aa, Oryza sativa
  Clone ID: PAT_MRT4530_57421C.1.pep
MATDGDALESQAAAAAEAARELREAAASLVARRSADEDALRRRATALDADLRRLQASLSTLAPTTLDKVEEELERARVTISDSDVAAFLPSKRNGKFLKTFVGPVNVRVARKEDKLRVKDEYNNYRDRAAYMFLLFPSILLLLRWWIWDGCLPALAVQMYQAWLLFLYTSFALRENVLIVNGSDIRPWWIYHHYLAMLMALVSLTWEIKGQPDCSSKQRGVQLFLRWAIMQGIAMHLQNRYQRQRLRTRIALGKAKRMDVVAGETAGVEGQLLLLYPVLFTLQVFEGYVGVLLLKTALHGLASEWQARIINYLIVVCGILLVVMAVGNFVNTMETLMLKLRFKAKMKRAKSRQDLSRQHQN

SEQ ID NO: 157896 - protein, 353 aa, Oryza sativa
  Clone ID: PAT_MRT4530_57422C.1.pep
MKKASSLSELGFDAEGASSGFFRPVADGGSTPTSHRRRLTKISVIGAGNVGMAIAQTILTRDMADEIALVDAVPDKLRGEMLDLQHAAAFLPRVRLVSDTDLAVTRGSDLAIVTAGARQIPGESRLNLLQRNVALFRKIVPALAEHSPEALLLIVSNPVDVLTYVAWKLSGFPASRVIGSGTNLDSSRFRFLLAEHLQVNAQDVQAYMVGEHGDSSVAIWSSMSVAGMPVLKSLRESHQSFDEEALEGIRRAVVDSAYEVISLKGYTSWAIGYSVASLAASLLRDQHRIHPVSVLASGFHGIPQDHEVFLSLPARLGRAGVLGVAEMELTEEEARRLRRSAKTLWENCQLLDL

SEQ ID NO: 157897 - protein, 229 aa, Oryza sativa
  Clone ID: PAT_MRT4530_57423C.1.pep
MASFPTTAAAAAAQAFAFALAPKPSSSAAAPSALFPRTAAAAAFPTLAVRGSGKARQPVVAAAAGAGTGSEQRETILLPGCDYNHWLIVMEFPKDPAPTREQMIDTYLNTLATVLGSMEEAKKNMYAFSTTTYTGFQCTVDEETSEKFKGLPGVLWVLPDSYIDVKNKDYGGDKYINGEIIPCTYPTYQPKERRTSKYESRRYERRRDGPPASRRPRPQTAQPESASSS

SEQ ID NO: 157898 - protein, 40 aa, Oryza sativa
  unsure (1)..(40): unsure at all Xaa locations
  Clone ID: PAT_MRT4530_57424C.1.pep
TSGTIWXKNPSVSLYNKPWLXCLRAPSEASRNCTGCYRRY

SEQ ID NO: 157899 - protein, 700 aa, Oryza sativa
  Clone ID: PAT_MRT4530_57425C.1.pep
MAEERESFEGQWAPSDVTEENLKEMVAHGVLLAKEIIGWRLACGETFPTPDTHEVVVFSHFFYGGFSLPTSSFFRGILDFYGISLHHLNPNSIVHITNFIHACEAFLGVRPHFALFCRIFFLKPQPNKSKPCVVGGAGFQLRGTLSQKYFSMPFKTSNKGWHANWFYVQNPESALPEYSCLPPVYQDTWNSLPMGDEAAQALALVDRMLKLKEQGLQGEQITRHFIKSRLAPIKERSHPPIAQRRSPRRQTGQASGGPKIRSDAQPHTSQPTNQPDSRKRKLVLSHDEDDNAEKTGSKGMTGKQPKQANPKNKTASRPIPKIRKSSRKPSDIDLSDKDPEPTGTETGPSKETGPTAEDRPSDDQPATDNVATSNKPPTGNQSADTGVSADQEPPTGNQSGTEQNKDIPEVEAQTNSPPKTDAGADSGTNSPVRVQGPARPRPEIITVKWWDDEMQPQGIMINKQKKDEEVCLLKKTLSQATRLVNRIHLRNEAKTATLEKLVPHLGTLEATRDQLREAKELARKTEHDLRDRIAEFQDSNFELSGSSKGNTVQATKISELEKRIKALEKHKGELTKQRDSALKDVEAMFFNNNGPSSFDASEIFDKLRIAPDTYFKNIKEAGSMGASLALAMTKSLYPKIDIDAVDGFADGTSEEAALDLINDAQKAADKIAVDVVERFQDNYLRPTGFGNSDDEKTETD

SEQ ID NO: 157900 - protein, 77 aa, Oryza sativa
  Clone ID: PAT_MRT4530_57426C.1.pep
RLRTQLHLQTKTSIRQVTSRKKKEITTKSSNVTDRFKRFVPFVFTCQPNHYKSYKVTVCESRGSLFVVTYMRSCIQK

SEQ ID NO: 157901 - protein, 55 aa, Oryza sativa
  Clone ID: PAT_MRT4530_57427C.1.pep
MMGCGRGGKKVAKKRRKKRMMGEMVDKRCGHPEYYTIQCPTRPPHTIGEVGSIHA

SEQ ID NO: 157902 - protein, 473 aa, Oryza sativa
  Clone ID: PAT_MRT4530_57428C.1.pep
MSIVGGSHGKTKETASSENEANRPDGLHSTIGTSDKDKLGSIPENSAAEEELNKEEHPKLQKGLGFEISLCGHMLRPGMGQASAEEVFQQHLVLEEDFKLSGSSIMKNVNLVVKFDSQYFLWSKISHIILGKAVFGPNFCTEHIDAIPVEHQETPTSRDSLGLSPSSRRWRLWNIPFRISRSLQRSNSDSSEDIFLDTETVLSPMDEQTPENNINQSPRKQFVRTLIPTSEQVASLNLKEGQNIVTFSFSTRVLGKQQVEAHIYLWKWNAKIVISDVDGTITRSDVLGQVMPLVGRDWSQSGVARLFSAIKENGYQLLFLSARAIVQAYLTKNFLFNLKQDGKVLPNGPVVISPDGLFPSLYREVIRRAPHEFKIACLEDIKALFPSDYNPFYAGFGNRDTDELSYKKMGIPKGKIFIINPKGEVAINSSVDVKSYTSLHTLVHDMFPPTTLVEQEDYNSWNYWKMPLPDVDL

SEQ ID NO: 157903 - protein, 290 aa, Oryza sativa
  Clone ID: PAT_MRT4530_57429C.1.pep
MAAAEAELLVCFCECECECECSLQFGGNRSAVTAGAGARMEKNKYIGGGYLLSEEEALGGSQLIDEAKEMARKKDLELEAEELIADNVDDEIHLEEVNDSTLNESSFPCTAMTISWRTDRRNLITGTERFMLRNVSHSSQRREKERDKMIQSEGFIEAECFVSASTSRMLLVEVFSGELVHMDGELAVALNNVNYFIIGSGFRGSVLGCGPVSKSYYCCILLFLHFASLNFTSLPIEIVDEGFGLLIRSRRGMMCQGAGTSRMLLVTLEVFNGVTGSGTHGCCLLGCGQI

SEQ ID NO: 157904 - protein, 274 aa, Oryza sativa
  Clone ID: PAT_MRT4530_5742C.1.pep
MEKQENGGEAPELKLFGSWASSYTHRVQLALRLKALEFVYAEEDLGNKSEALLRLNPVHKKVPVLVHRGRPLAESVIILQYLDDAWPESRPLLPSDPFDRALARFWCHFADDKLGPAVGAVFASTGREQEAAVQQVHDNLALLEAELREGAFKGRRFFGGDQVGLLDVVLGCGSYWLAVFEEVTGVRLVDADAFPLFHAWLRDFEAQEEVKETIPSVDRLLEYARGLRQMLLALAAGAGAGAAAAAGSSPVTTAVDAPAPAAPPAAPQAAAVDI

SEQ ID NO: 157905 - protein, 351 aa, Oryza sativa
  Clone ID: PAT_MRT4530_57430C.1.pep
LWQQFITNFQGTYKRHAIEDDLHALTQNPGESLRDYIRRFSECRNTIPEISDASVIHAFKFGVRDRYTTQELATRRITTARKLFEIVDRCAHVDDTLRRKNDKPKTAGEKKPAKDAPESSKKKSSRSGGKRKAQTEVFAAEYANPPKHPDPQGDDTKKIWCPIHKSDKHSLETCFVFKKALTKQLALEKGKRVSVVEKAAEAATQDSDSAYPDSDLHVSHIFGGSTMYSSKREYKKVEREVCSTWQGATSKMKTALAKFMAASHYAYQVLKMPGPKGTITIKGNAKLAVQCNKRSLDMVEHTPNPPATAEPSKKVSKTNKTLKPDGAIKIVLLSSANPDKTVKIGASLDEK

SEQ ID NO: 157906 - protein, 189 aa, Oryza sativa
  Clone ID: PAT_MRT4530_57431C.1.pep
GHGMRAPLFPSPSLLLTLLASLQAFSSIVVSPSMAVRPTSIAIGAASIDSIISMVCELELEMWYFPISCESFEPSGCQLLKRPGRIRLHRQALLLFKQADLPSLLSSYIVQVVIHYFDKQSAEFINSAAGAITVSYVMQLLTGYFFPSISLSSFSIAFCNTYFDGIIEVFIIIFSYPSFKTELLAMSSE

SEQ ID NO: 157907 - protein, 101 aa, Oryza sativa
  Clone ID: PAT_MRT4530_57432C.1.pep
NYSKTHFSEKKYRACPERKREVKMESMVAGDLVQAYVLKKACKEKMRAETNAGEAAAAAMTGKKTAVGGGSSEKKTAPEVSKGERRGFSGLMMMKKKVHPK

SEQ ID NO: 157908 - protein, 117 aa, Oryza sativa
  unsure (1)..(117): unsure at all Xaa locations
  Clone ID: PAT_MRT4530_57433C.1.pep
MELVVAVAGAVVVALSLCIGGVQGQLQVGFYDQSCPQAEVIVRDEVGKAVXANVGLAAGLVRMHFHDCFVKGCDASVLLYSTANSTAEKDAIPNKSLRGFEVVDSAKRRLESACKGV

SEQ ID NO: 157909 - protein, 135 aa, Oryza sativa
  Clone ID: PAT_MRT4530_57434C.1.pep
MIEIIDLSQYIGPELDKKKAKLEKAKSKLLELEKKADIEENTRVTAVESVMQALVFLDSEHDVNMIVSDYCMPEMTGYDLLMEVKKSPRLVHLPVIIASSDNIPERIRKCFDGGAKDYILKPVKIADVPRILNYI

SEQ ID NO: 157910 - protein, 57 aa, Oryza sativa
  Clone ID: PAT_MRT4530_57435C.1.pep
FNFLVLIFQIQSFLSRINVDPVAELNILKPIYSPTQLQFFFLYLLLLLSGKILTSTE

SEQ ID NO: 157911 - protein, 477 aa, Oryza sativa
  Clone ID: PAT_MRT4530_57436C.1.pep
MEVALSAIASDLINRLTSFLMKKYMESTSIDDKMKRLKELLLRVHIVVEEADGRCITNPMMLMQLKMLAESMYRGYYMLDTIKYKSPKDEEVRKFCTMSVSLKRSRTIFDTPRSPADDNELEIVLNNLEAAISNINEFVVLLVGCERVCRRPYDAYLYTDNFMFGRHAEKQQIINILLQNPCQQGGPLVLPIIGGCRVGKKALVSHVCGDERIRSYFRSILYINGDNMWGMEHTNFKRERTLIVGEFFTDIDEDDWVKFYSTISQKTDRGSKVIIISRIGKLARFGTVKTVCLNSLSQEEYSYLFKMLAFGSIDEKDHPKMAMVANDLAVVLGGSLITANVVADLLRRNHDFQLWNSVLQRFKEMVKSNLSKYGEHPKDIIEKEHPIDITRFGSSYRTRLHLMPPRVERDDSPNRKKPSLLFRDLIAGCAAIPDGDFELVTWESRIPPHTMYVQSVVAFVNVKNGCTTSTRKRRSNA

SEQ ID NO: 157912 - protein, 55 aa, Oryza sativa
  Clone ID: PAT_MRT4530_57437C.1.pep
SFLEQIQDVLTADFGTALLMMHMVTEVFLRQYPGNHSLVDVLLEVCLDVDHWIRT

SEQ ID NO: 157913 - protein, 220 aa, Oryza sativa
  Clone ID: PAT_MRT4530_57438C.1.pep
MPWQCQVLLMLPSDMASAPSTGFDGDGDRIGTYAKFSGPKLRGLRIWPQYHLIYRTKRGCHNHIASVARSPDLTSGNGKTQRQCSTIVTSRLPPGRAHLHLIAFIGQARLTLEFFGDWLPEKKLQLVDMSILLILLSPRPGCYNYEELQGPREVGLLLELAPSLLRGFPSNNGEDLNCSPSSSNQAQGPITSSPGGALLCVFVLGFLDFCGKGNVWEFVF

SEQ ID NO: 157914 - protein, 91 aa, Oryza sativa
  Clone ID: PAT_MRT4530_57439C.1.pep
VTSRLPPGRAHLYLIAFIGHRLPSQTNTCLFCTLCPHSCAPGKFESQIAPGLARLTLEFFGDWLPEKKLQLVDMSILLILLSPRPGCYRSA

SEQ ID NO: 157915 - protein, 78 aa, Oryza sativa
  unsure (1)..(78): unsure at all Xaa locations
  Clone ID: PAT_MRT4530_5743C.1.pep
PRVHFAGQGQDDXHCTQGVYSFEXKSLSRQVDTFCVHGGPDGYITGILRRVQCLSQKDIASAETDLERQGRRPGTCWR

SEQ ID NO: 157916 - protein, 193 aa, Oryza sativa
  Clone ID: PAT_MRT4530_57440C.1.pep
MISAKLPLIFALLSSATLISVAPSVRAARLPSSVLVRGAGEFLEHIGKEIANQLSGSRDYPNEGDQSNSTRRGLSSTPGGVQEKHVEPHVFLGIGTPAMNVTLVFDTTSDLLWTQCQPCLSCVAQAGDMYDPNKTETYANLTSSSYNYTYSKQSFTSGYFATETFALGNVTVANITFGCGTRNQGYYDNVAGV

SEQ ID NO: 157917 - protein, 135 aa, Oryza sativa
  Clone ID: PAT_MRT4530_57441C.1.pep
MATGAARDGRERRRLEAVKDGGFGLHCGNGAAGVEGENGVDAGVRTAAAVPERATAQCGVDGSGGAALLEFAGERRLESRRGGRLATDLKGERGAGDVDARGGAATWAARAAMAVAGPGWRLGMTGGAHGSHLSA

SEQ ID NO: 157918 - protein, 100 aa, Oryza sativa
  unsure (1)..(100): unsure at all Xaa locations
  Clone ID: PAT_MRT4530_57442C.1.pep
NFQFSPGRAHLHLVAFIDHRLPSQTNTCLFCTLCPHSYAPGTXKNFPVGHPSQIAPDQARLTLEFFGDWLPEKKLQLVDMSILLILLSPRPGCYTYTSIS

SEQ ID NO: 157919 - protein, 53 aa, Oryza sativa
  Clone ID: PAT_MRT4530_57443C.1.pep
MASRFRRTAPLVRHDAELRITGAIDETRQESGDAGRRLRKKAVSAPTNLTRRR

SEQ ID NO: 157920 - protein, 134 aa, Oryza sativa
  Clone ID: PAT_MRT4530_57444C.1.pep
WRSSPGEDDGGAPTAADGRRVTAGGLRDLERGKAGSRGISAARGGNRGAARRGDAEDGHGCGSGRPGAAVNGGRGGESGGGLGLAVEVTAWRSIGGEERPIGLSSRRRSRRAHTRAGNGRRAGRGGDVGGSGGH

SEQ ID NO: 157921 - protein, 122 aa, Oryza sativa
  Clone ID: PAT_MRT4530_57445C.1.pep
FKYNFLLNYSSDLRSDYTSRLPPGRARLHLIAFIGHRMPSQTNTCLFCTLCPHSCAPGKNFSVGHPSQIAPGQARLTLEFFGDRFPKKKLQLVDMSILLILLSPRLGCYILTPLRLWQVPGT

SEQ ID NO: 157922 - protein, 290 aa, Oryza sativa
  Clone ID: PAT_MRT4530_57446C.1.pep
SGGHEAGRPEHGHGSEPARPRHDARRRTATGGERRREKAREGRRKGEEEGGCSPSGTAPDGGEDDGGAPTAADGRRVTAGGLRDLERGKAGSRGISAARGGNRGAARRGDAEDGHGCGSGRPGAAVNGGRGGESGGGLGLAVEVTAWRSIGGGERPTGLSSRRRSRLRWWQGAGAATAEGGGARGGGVSELGRGKGLGVGGGSSGRLGRRTAVEARPRGGNGAAGVEGENGVDAGVRTAAAVPGRATAQCGVDGSGGAALLEFAGERRCKGSARGERGRAWRLGENGGNG

SEQ ID NO: 157923 - protein, 165 aa, Oryza sativa
  Clone ID: PAT_MRT4530_57447C.1.pep
MPHPHPLKKDQRPRRSTSGQERPLLATSVCLVPAHVPCCVTTPGPHQPCAPCLRNCDTRARETALGRARLHLIAFIGHRLPSQTNTCLFCTLCPHSCAPGKNFPVGHPSQIAPGQAHLTLEFFGDWLPEKKLQLVDMSILLILLSPRPGCYTLTPLREILSAGIR

SEQ ID NO: 157924 - protein, 171 aa, Oryza sativa
  Clone ID: PAT_MRT4530_57448C.1.pep
KDQNVKNPGPPHLALIAFIGHRLPSQTNTCLFCTLCPHSCAPGKNFPIGHPSQIAPGQARLTLEFFGDWLPEKKLQLVDMSILLILLSPRPGCYNYEELQGPREVGLLLELAPSLLRGFPSNNGEDLNCSPSSSNQAQGPITSSPGGALLCVFVLGFLDFCGKGNVWEFVF

SEQ ID NO: 157925 - protein, 43 aa, Oryza sativa
  Clone ID: PAT_MRT4530_57449C.1.pep
AAVVEDGASVLELLIIHIFGVNLIQVTTFVTCVDISFVITRIS

SEQ ID NO: 157926 - protein, 49 aa, Oryza sativa
  Clone ID: PAT_MRT4530_5744C.1.pep
QIFVSFPGPVSLFQLVSLFSVGVTLVVEGLRVLGIIGPPLCARFGRRAP

SEQ ID NO: 157927 - protein, 722 aa, Oryza sativa
  Clone ID: PAT_MRT4530_57450C.1.pep
MAAMILIAVAVVVQQALILAARAIGDGQPITLAGCPDRCGDVSIPYPFGMAPGCFLDGFEVTCNRTFDPPRAFLAWGSPDSPFQGNADGYYLSDNDSVTLKDYWSLPVELVDVTLSRGEARAYGAVTTDCAATNGTYHEFRRQLTVLSGSPFVFSASRNVLTGVGWDMEAQLTTSLASTGYRLNCASRLMFPETAENGSCSGMGCCEANVTAGLRIASVTFAHKKNVFWSSNPCSYGMIVQKNWYNFTKEDLYGNQTLSRKHPRGVPFVLDFAIANVSCPAQGQPPLDNYACRSSNSFCVNATSSPGYICKCSDHYDGNPYIADGCQDIDECQLRIQFPELRDVYPCSSDGICKNRPGGYDCPCKPGMKGDGKAGTCTEKFPLVAKVIVGVVAGLLVLATLVFVFLLRKEKQKMREFFIRNGGPILENAKSIKIFRKEELKRITKTYSHVLGNGAFGMVYKGFLDEQHPVAVKKSMKVDKTQKDQFANEVIIQSQVIHKNIVRLIGCCLEVDVPILVYEFVSNGSLQDILHGENKVPLTLDKRLAIAAESAEGLAYMHSKTSTSIQHGDVKPANILLDDQFNPKISDFGISRLIARDVTEHTNDVIGDNNYMDPVYRETGLLTNKSDVYSFGLVLFEIITGKKAVYGGESSFVRNYLDTYLTEIRANKMLFGKEAEEKDIEHLHNLVVISKECLDNNVDQRPEMTDIAERLQGIIRSRKFLN

SEQ ID NO: 157928 - protein, 215 aa, Oryza sativa
  Clone ID: PAT_MRT4530_57451C.1.pep
MGSFSTPACGHDSIISSSPFMPLKPCSLSLNSGATREAPPAGAPPSLPISLLDLTAPRAGYQKLRGRQDGGGGAIPSPRGRGIEAHDPDQIQGNRGRGGGKEATRSSPSARIQPPRRREPILELVAAGRRWGAAVWRWWTSEVVGQTFGGGKARCCTIDGMVALGDAPDEVGLWESNVARAEAVKGHQGLWKVGANGVMVRAWHGWCAVAVWLPW

SEQ ID NO: 157929 - protein, 119 aa, Oryza sativa
  unsure (1)..(119): unsure at all Xaa locations
  Clone ID: PAT_MRT4530_57452C.1.pep
SIRFRSISSSSSSSSIRSHTCRSLTINNLPPLPFCFNSYLTLLQQALXQPPEREIDTARSASRIRLAAADDVEPEVVALLRVGGGDQRAHLQVQSSSQFRRRGXTSVDDEAAEGDXSKL

SEQ ID NO: 157930 - protein, 73 aa, Oryza sativa
  unsure (1)..(73): unsure at all Xaa locations
  Clone ID: PAT_MRT4530_57453C.1.pep
LIINSVLFLPLFPLFLGEFFFCKVSTLXVCYGLCICDTIVAAVLGRKVFQKQNKEMIRKRVSFVFIRQETGGG

SEQ ID NO: 157931 - protein, 188 aa, Oryza sativa
  Clone ID: PAT_MRT4530_57454C.1.pep
MALGHDNLVSEPLTMASDADRVLRITVSHLVYPVDEYLLHQLFDGYRAERKIEVRQMGTHVEASVPFQTRAAAEHAWNLNGRAIYDGCCWLDIQWEQQSNNSMTPVTYLSTIITVTPQWKEDIKELRAIMQDLAALLQELAKEKEEEAATGLAMMPTVDMPSIQLIPPAACMVEHEVAVQQKNIDEYD

SEQ ID NO: 157932 - protein, 73 aa, Oryza sativa
  Clone ID: PAT_MRT4530_57455C.1.pep
MDPVVVELVEEKEVVLVEKEVDPRWWLLTRGAVAVEDVGSGLLRSATTMTPIEAITKRSSDSGAERYFRRKTT

SEQ ID NO: 157933 - protein, 67 aa, Oryza sativa
  Clone ID: PAT_MRT4530_57456C.1.pep
MAAVTGDDDDSTAANAAAAAAAMDGRRKRALRGGKTYVGPTCKRHARLGGGETWREIWPSDVGVMDG

SEQ ID NO: 157934 - protein, 304 aa, Oryza sativa
  Clone ID: PAT_MRT4530_57457C.1.pep
MNYIIGAFKAPCDVFITFADERSRKQVAIKKDNGKTLMVPAFQSLETIAGEVSVAPVPGKRVEHQGVKIELLGQIELYHERGHFYDFTSLVRELEVAGEIYERKTYPFEFSTVEMPYESYNGTNVRLRYILKVTIGRPYATSVVECRDFCVRNYTPLPSINNSIKMEVGIEDCLHIEFEYSKSKYHLKDVIVGKIYFLLVRIKIKNMELEIRRRESTGSGPGTYIETETLAKFELMDGAPVRGESIPVRLFLTPYELTPTYRNINNKFNVKYYLNLVLVDEEDRRYFKQQEITMYRLQETPQSS

SEQ ID NO: 157935 - protein, 240 aa, Oryza sativa
  Clone ID: PAT_MRT4530_57458C.1.pep
MGSSDGDKPLRRIAASFEELEAVAKQQAPGPAMEVGSFARACSNVSVLFGCLGIAFKFAEMDYVAKASPRRHPRSLVFALPCPRGVRSAINCLLLPPFQVDDLLEASKSISKLPEMVELDIQKGTVRQAGSHTRNMLRVKRGIDMVKILFEQILVTEGNSLRDAASKAYAQVFAPHHGWAIRKAVAAGMYALPSKSQLLKKLNEDENSAKVQMQTFIRASGPVILYVEDLFTSRNLGMDW

SEQ ID NO: 157936 - protein, 76 aa, Oryza sativa
  Clone ID: PAT_MRT4530_57459C.1.pep
MKWPKSGLTSSREGAAPASGPRMSAARGGRSTVDRDHTSGPPPAHGIDGPDRPEADRMAQVAARHGSARHKAGRPA

SEQ ID NO: 157937 - protein, 83 aa, Oryza sativa
  unsure (1)..(83): unsure at all Xaa locations
  Clone ID: PAT_MRT4530_5745C.1.pep
PPRRLNDEDFGGGHPLPNLHYLNDLDDRIDLENFLNAEPSVFDAAADFDSDLNMILFKRFFXTPLDSVAIIAINAFQFIPHFS

SEQ ID NO: 157938 - protein, 330 aa, Oryza sativa
  unsure (1)..(330): unsure at all Xaa locations
  Clone ID: PAT_MRT4530_57460C.1.pep
MAFHGHLPHEMTMQALGADDAAVAAAAAAXTTSDSSASPSGAAAAAARVRXGGDAVAAAMGGGGEADAARCKAEILAHPLYEQLLSAHVACLRIATPVDQLPRIDAQLAQSQGVVAKYSALAAAAAGDDGRELDQFMTHYVLLLCSFKEQLQQHVRVHAMEAVMACWELEQNLQSLTGASPGEGTGATMSDGEDDQADSEANMYDPSLDGADNMGFGLPTESERSLMERVRQELKHELKQGYKEKLIDIREEILRKRRAGKLPGDTTSTLKAWWQSHAKWPYPTEEDKARLVQETGLQLKQINNWFINQRKRNWHSNPSSSTSVKTKRKR

SEQ ID NO: 157939 - protein, 113 aa, Oryza sativa
  unsure (1)..(113): unsure at all Xaa locations
  Clone ID: PAT_MRT4530_57461C.1.pep
CFLTANKGFIGVSADEVSGRCIGLQGLHPIGFYXIILLLYCXYHQLIAFILVFISSVRIYIGYISGSSESYHYRLDQTDWHTRISSTFGPALELSGSPRPVCVFRVNTSLARL

SEQ ID NO: 157940 - protein, 266 aa, Oryza sativa
  Clone ID: PAT_MRT4530_57462C.1.pep
MPYRLLRGSCRKPCGDQGRQQQGTSFLHPCPLRQGEGRHGDVPQGAEMAMSMMVGDDMVASELWPNKEMAAKTVAMEATARVGENGQIRLPYGHIQSPLGQIRGVGWLRRGSGSGEATPALAAERLLVSGEVAARQWYGDVGGDRRGRQWAWRCGDFGTGPRGGRRAGWTVIAQTLSSWRWQSSVLAGSLMEGLLHSCRQPPNLPVELLTSFCKELHWEVEGGILTSGIVLGCQGIAPRSWLILARSSEVAGRIRSLTTHKGGAAG

SEQ ID NO: 157941 - protein, 259 aa, Oryza sativa
  unsure (1)..(259): unsure at all Xaa locations
  Clone ID: PAT_MRT4530_57463C.1.pep
MADGLAEVAPREHPRGAAQGGHVDGPDRLGRSIERPRAGAARQRGRAATGEQGGGSRPESGGARPDGRRQWAAAALDVAAHTGGSGEGRGXAHQEDGDGEAKSGRRPTTRIGGGASRVGVGDGAPATPDRGGGAAXGQQDLGSKEEGLEEGEASRHGEEHQPSTTFVARLTGETITVAPGGEEXWPRVLSSLRGRGRRRRTARRSGTAGISDRRQQMRWRPRIDGESGAPAVDWANKVAAGLALATAKSMAQAASHGGG

SEQ ID NO: 157942 - protein, 109 aa, Oryza sativa
  Clone ID: PAT_MRT4530_57464C.1.pep
FFFFFFLLSIAISMDYFYYIGDKSCRVKCCSYFGTAVNIYNSVCCTHLGTSPFQQWVSQATVQPVAQRSPVHVPCPSRRTMPVLASLPLRQLRAAQWHAQYARATVRSC

SEQ ID NO: 157943 - protein, 126 aa, Oryza sativa
  Clone ID: PAT_MRT4530_57466C.1.pep
MAPLSPHLHPASCCAIVLLLPPHTLCWVFGMAAMRKEAVCSGASRERWWLTLISAFSEPFLDASHVVLHIGMEATALAAADVEVPVAEGVGTVEAVSALAFCLRVVLVPRMVIPINDNQGRSIYIS

SEQ ID NO: 157944 - protein, 99 aa, Oryza sativa
  unsure (1)..(99): unsure at all Xaa locations
  Clone ID: PAT_MRT4530_57467C.1.pep
MTASALHQTTSFLGTAPRRDELVRRVXDSGGRIXMXRXVKSAPXSXWYXPDRXKXXGPXXEXTXXYXXGXFPGXXGXDXAGXLAEPETXXRXKGAGDPI

SEQ ID NO: 157945 - protein, 58 aa, Oryza sativa
  unsure (1)..(58): unsure at all Xaa locations
  Clone ID: PAT_MRT4530_57468C.1.pep
MASATLLKGSFLTKKSEWAVIXQGFCPKPGTVSMVVRAGAYDDELGKTAKTIASPGKG

SEQ ID NO: 157946 - protein, 60 aa, Oryza sativa
  Clone ID: PAT_MRT4530_57469C.1.pep
CWPKEIGLSFRSEPPTAVVRRLIRNHHLNISGTWLPPHPTDVPPPAIFQSCQRQDCHHTT

SEQ ID NO: 157947 - protein, 83 aa, Oryza sativa
  Clone ID: PAT_MRT4530_5746C.1.pep
ATRHGTAQAQADLNVKLCRACPWATPTAQARPNKTQAVFGRSEGRHGPNTSRAVLCQSAMPRAGLSGHGPGHGNMVTFLVLTK

SEQ ID NO: 157948 - protein, 362 aa, Oryza sativa
  Clone ID: PAT_MRT4530_57470C.1.pep
MASATLLKSSFLPKKSEWGATRQAAAPKPVTVSMVVRAGAYDDELVKTAKTIASPGRGILAMDESNATCGKRLASIGLEKHRSQPPGLPDPPCHRTGLGTVHLRCYPLRGELYHSTVDGVRMVDILTEHKIVPGIKVDKGLVPSAGSNNESWCQGLDGLASREAAYYQQGARFAEWRTVVSIPNGPSELLRSFSTVSMASTGSFQVAQKVWAENFFYMAENNVMFEGILLKPSMVTPGAECKDRATPEQVSDYTLKLLHRRIPPAVPGIMFLSGGQSEVEATQNLNAMNQGPNPWHVSFSYARALQNTCLKTWGGQPENVKAAQDALLLRAKANSLAQLGKYTSDGEAAEAKEGMFVKNYVY

SEQ ID NO: 157949 - protein, 200 aa, Oryza sativa
  Clone ID: PAT_MRT4530_57471C.1.pep
MDRDESLGTQPLTGRRVRADTRHPVYRGIRLRSGKWVSEIREPGKSSRIWLGTYPTPEMAAAAYDAAALALRGADAALNFPGTATSRPAPASGSPDDIRAAAAAAAAMIGSGHRGNQRAADASTSRAATAAPEAAVAAGAGDQKRVVDEDDVFEMPRLLVSMAEGLMMSPPRLSPSTDGVGGVSPEDDEDEDGMSLWNHS

SEQ ID NO: 157950 - protein, 204 aa, Oryza sativa
  Clone ID: PAT_MRT4530_57472C.1.pep
MDSDSMDPSGVVPSLKSLQGCFGYHVDAERAYAYDDLVAGDPTPGTTAGGRATPSAAVHLHKLVSAWAISEKVRMVVSLVSRIRQLEGPYLKRQSSKLLGKLINPPVNARSGGDGRASAARASVERSWQRAGKGEVREHRRQAGEGGGPRRLTSGAGGTVGEVQRWQLRVEERRRGQTTTTVVCGVRRPPGAEARSVEERRRAE

SEQ ID NO: 157951 - protein, 47 aa, Oryza sativa
  Clone ID: PAT_MRT4530_57473C.1.pep
AGAAGAASRDDEACAGAACVRAIRAFSIVSLSMLFGNNKIIPLVSSS

SEQ ID NO: 157952 - protein, 602 aa, Oryza sativa
  Clone ID: PAT_MRT4530_57474C.1.pep
RELEALIAIRQGLVDPHGVLNNWDEDSVDPCSWAMVTCSAHNLVIGLGAPSQGLSGTLSGRIANLTNLEQVLLQNNNITGRLPPELGALPRLQTLDLSNNRFSGRVPDTLGRLSTLRYLRLNNNSLSGAFPSSLAKIPQLSFLDLSYNNLTGPVPHFPTRTFNVVGNPMICGSSSGSHAGNANAAECATVVAPVTVPLSKGGGGAARLPIGVGTSLGASALVLLAVSCFLWRRRRRHRCLLSDVEDGGGGEVMARLGNVRQFGLRELHAATDGFSARNILGKGGFGDVYRGRLSDGTVVAVKRLKDPTASGEAQFRTEVEMISLAVHRHLLRLVGFCAAASGERLLVYPYMPNGSVASRLRGKPPLDWQTRKRIAVGTARGLLYLHEQCDPKIIHRDVKAANVLLDECHEAVVGDFGLAKLLDHGDSHVTTAVRGTVGHIAPEYLSTGQSSEKTDVFGFGILLLELVTGQRALEVGKGSGVIQHQKGVMLDWVRKVHQEKLHDLLVDQDLGPHYDRIEVAEMVQVALLCTQFQPSHRPRMSEVVRMLEGDGLAEKWEANHRPAAISNGSVFFNDFHDNDSSLSSDEVRSIDMVEEMELSGPR

SEQ ID NO: 157953 - protein, 220 aa, Oryza sativa
  unsure (1)..(220): unsure at all Xaa locations
  Clone ID: PAT_MRT4530_57475C.1.pep
MICGSISGSHAGNANAAECATVVAPVTVPFPLDSTPSSSSRAAAAAVGRSKGGGGAARLPIGVGTSLGASALVLLAVSCFLWRRRRRHRCLLSGPSSVLGILEKGRDVEDGGGGEVMARLGNVRQFGLRELHAATDGFSARNILGKGGFGDVYRGRLSDGTVVAVKRLKDPTASGEAQFRTEVEMISLAVHXHLLRLVGFCAAGFRERLXXYPYMPNGSV

SEQ ID NO: 157954 - protein, 775 aa, Oryza sativa
  Clone ID: PAT_MRT4530_57476C.1.pep
MDALTNSVQIWKLFQTASIFLVQPDPQDATDTLREVSKQKLFDLARVRDRRHRRMRLFAFDPYASPCKPRRTVVVDAGALDLFITQRHQSSHGVFSGKFVGCSPAGNRHSVRDGSGVSLEPGHSERDGSGVSLEPDTIHSAGHVVSTLTHDLHSTALPLSPQTNQGNMEYETTTTIGDANIAEDTYVGEETDLAENGQDSGNEHDSDDALNNSSDDDISEPRVTHSVNAFPLMRASGQDAIKAFSDISVLRKTTADENFFGCKNQFDNPLAEAKTFDSKEHLQIAIGEFHINKNSEIKYSTSSQSKLIAQCTDTSCMWRLYATPIGIGSCWMIRKCPYAHTCRAPADRFDHAQLSSAMIANVIRDALRDDLELSIKNVRSLVQQRYRNVKPSYRRYKGRLLIACGYDANNQLLPLAFAIVEKEDSTNWGWFMRWLRKEQPHIGWNEGAGECVHRLCSQHVAENLWKACRNDMVLKTFKWAVKKKKPRKFEEGMSSIANICPEAITYLEKVGKYLQEDKDEQEKPEKVFQCKDGGYRWGIMTSNGSESLNNVFKFSRRLPVAAIVEETFSKCLEWFVERRRIALNLVHSGKLWSQRVEKLLVKRGDKARRMSVISYGEEVGIYEVKVDNELVPMQQGNHVFYTRRDFKYKVVLQPNIPPSCDCLKPNLTGVPCAHVLAVCKHRNLSENELIVPFYSSQSLANTWVGQFHPYGNQTEWPPFTGPIIVPDRRLINLGRRQHNRIPMYMDEMQGRRLRHQARRSTRDSDHSELGRNQFE

SEQ ID NO: 157955 - protein, 323 aa, Oryza sativa
  Clone ID: PAT_MRT4530_57477C.1.pep
MAEAAITRYWCHECEQAIEEAMVDEIKCPSCGGGFVEEMTDEEIERLTNRQPEPGFSQWNPIEHPGETMDSDDEDNDLGREFEGFIRRHRRASTLRRVLDSIHDDLADDQERDSSILINAFNQALALQGSVLDPDEGQGDQGGSTNDDGLLEEYVLGAGLSLLLQHLAESDPSRNGTPPAKKEAVEALPTVKIEEVVSCSVCLDDLEVGSQAKQMPCEHKFHSSCILPWLELHSSCPVCRFELPSEETKDLNEPSNIGRVEDSHEEVRADGPGNVSESSNRPWAIVPWLNELFSTREAQNAGGVSTDQQSPHTSGTNPNAGHS

SEQ ID NO: 157956 - protein, 574 aa, Oryza sativa
  Clone ID: PAT_MRT4530_57478C.1.pep
MEDGMDFSPHKNSTEQNRTSFEEDDQFSIRSAPSKPSPDKKSKPKNKPNHHSDKTANPPPQRPETTAALVTTTAAAATAGTNRGEAVSNGSLDSISSGSTRSNSLESSSTGAAAAPTVLTTSASTASVSASGQNVKRHTGGDSRWEAVQAATARDAPAPLSLAHFRLLKRLGYGDIGSVYLVELRGTSAFFAMKVMDKASIASRNKMARAETEREILGLLDHPFLPTLYTHFETDKFYCLVMEYCSGGNLHSLRQKQPSKHFSEPAARFYVAEVLLALEYLHMLGIVYRDLKPENVLVRDDGHIMLSDFDLSLRCTVCPTLVKSSSVHATGSGGGIGSRGDAIDGGESMPANQGCIQPSSFFPRILPRRSRKASKSDMGLLLNGAAAVEFNAEPTEARSMSFVGTHEYLAPEIIRGEGHGSAVDWWTLGIFLYELIHGATPFKGAGNRATLCNVIEQPLRFPSDGGASAVARDLIRGLLVKEPHKRIAFTRGATEIKQHPFFDGVNWALVRSLTPPSVPEPVDFRQYAAAASATTPKDKKPPENAAAAAAPAAADGGGAANSSTGESYTDFEYF

SEQ ID NO: 157957 - protein, 121 aa, Oryza sativa
  Clone ID: PAT_MRT4530_57479C.1.pep
MIRMTARTRWRPAARLRRMASLSASAASKTARLRRTPARSPPPPPPSVCRRPRRHTCTTICRGCRRRGVTDTTCIIATAPMATVTAPAAATTRRRTTPTTALTSGSGICSAMKIPTLAASC

SEQ ID NO: 157958 - protein, 35 aa, Oryza sativa
  Clone ID: PAT_MRT4530_5747C.1.pep
MDASLEVCGHSVQYAGVGYWKNHDADGVYRAPTQA

SEQ ID NO: 157959 - protein, 310 aa, Oryza sativa
  Clone ID: PAT_MRT4530_57480C.1.pep
TLVSSTHILSFSGHQLLFHSSPRRRARGDPRRGRHARRAQSLGRQVGYSVPLDDRSLDADTVVKYTSHGALLRELAADPILTRYGAVVVDDAHDGMALTGVVLSCVKAAAARRLDLRVVVCLNHYSTLCKGVVHGFFSGSGMDGKELWLRTYSGLIDQHYLPEPVTDYLGAAVDAVCRIHATEPPGDVLVFLPGCTDVEAAEHALNGLRKVVLATDVAVCSVFVDGIKYIVDSGYCGTDNAPVHLIGGGGSAAARLVRGLKAVVHKWCHIRRKLIHWAVRTLKAAGVLSQDGEVTETGRRIAREISGRYY

SEQ ID NO: 157960 - protein, 86 aa, Oryza sativa
  Clone ID: PAT_MRT4530_57481C.1.pep
SSTRTTTRTFTRSSTRAYKFRLQMICIHIDMASNRVQTSWVILIIDYVLAAYGYHGGPPQTPVGCADSTSVERQEGGTRCTRCHSA

SEQ ID NO: 157961 - protein, 49 aa, Oryza sativa
  Clone ID: PAT_MRT4530_57482C.1.pep
KKEIFVSSLSDMVDDIENFRDGYHDSDLVRDAVRRHGWTPAEEDDDAHK

SEQ ID NO: 157962 - protein, 600 aa, Oryza sativa
  Clone ID: PAT_MRT4530_57483C.1.pep
MSSPPPAAAASPSSELTKSKKKKIKSKDAATAAAVDPPSLAEAEAKTDGYLIKPQSLVPSLDTSTWPLLLKNYDRLNVRTGHYTPLPSGHSPLKRPIAEYLRYGVINLDKPSNPSSHEVVAWIKRLLRVDKTGHSGTLDPKVTGNLIVCVDRATRLVKSQQGAGKEYVCVARFHAAVPDTARVARALEALTGAVFQRPPLISAVKRQLRVRTIYESKLLEHDADRHLAVFWISCEAGTYVRTLCVHLGLLLGVGAHMQELRRVRSGILGEQDNMVTMHDVMDARWAMDNYNDETYLRRIVMPLEVLLTSYKRLVVKDSAVNAICYGAKLMIPGLLRFENDIDVGEEVVLMTTKGEAIAIGIAEMTTAVMATCDHGAVAKIKRVVMDRDTYPRKWGLGPVALKKKKMVAEGLLDKHGKPNEKTPAEWIRNVALPTGGDAMIASIAAAPEEAKVKAEQDVVATEEVKEKKKKKKHKDEEDAADEGRKRKIEDDDASASVPVKKIKVEESAEEVEGEKSEKKKKKKKDKGEQGSGDAEVKEEKADISDGEKVGSEKKKKKKKSKEGGDVVDPESAANGDGVEAEKSEKKKEKKKKKSRDTEEA

SEQ ID NO: 157963 - protein, 288 aa, Oryza sativa
  Clone ID: PAT_MRT4530_57484C.1.pep
MAVADRVWRMIEESGSERHSRCQRKVELNSRTDGYSREVCTHAGSPSTRLRTRGHRPKVTHASKSVAAPFPSHASLRNLHPLIAAYPSRPPRVRLDRRWVVAWIKRLLRVNKTGHSGTLDPKVTGNLIVCVDRATRLVKSQQGAGKEYVCVARFHAADTARALEALTGAMFQRLPLISAVKRQLRVRTIYESKLLEHDAERHLAVFWISCEAGTYVRTLCVHLGLLLGVGAHMQELHRVRSGIHGEQDNMVTMHDVMDARQEFTSEIPDALNKLNTYFALNPRQTIGP

SEQ ID NO: 157964 - protein, 328 aa, Oryza sativa
  Clone ID: PAT_MRT4530_57485C.1.pep
MFQSFSVSPILSLKLAFAVAFAVSFSVSCCAAPPSPRAVAADLLAVLAGPGAAARVPPAAESARLRACLRFLSPVLPLPAAAAISEGRAARKVLVERGGADEADGMVMWPPAPVMELARLAVDSGGDPGAIHRALDPTMLPVPDVQRAKRNKCQLTRTPYGRRFANKDINSYLAFLFELIAARGPSVGLNVSLSRYDFFHGHLFLASGTGRLGILFHAKEYPAFDKELFPYSLGFCQAGSNVVYDDSMNLRNILWLAPLPSNETKAWLSPGVLVVLDAHPDGIIYQDMIRDYVRDVRTIYEDDFGEVSVDVNYLNVANSAPANRVFIC

SEQ ID NO: 157965 - protein, 141 aa, Oryza sativa
  unsure (1)..(141): unsure at all Xaa locations
  Clone ID: PAT_MRT4530_57486C.1.pep
SKLGLLSPHGYKYVHPGHCKLSPRSIILLXAHRHPLYRGFYLSSSGIWHLTRGCISSVRSLAKGXVQRSTGLGNCLVYVGIVQGCISTFDLXIALVWMIYLPTYLSDVSVNLVLAYQFSSIGCFSFXGFCRHRLNCVARLD

SEQ ID NO: 157966 - protein, 136 aa, Oryza sativa
  Clone ID: PAT_MRT4530_57487C.1.pep
GESKTNRGDLNSEGAALNIRAKQTMKQSEGPPRPKNWRSHGSPPLKKGPKTHWKWDKLPKFSLDWEAKQPNHPGGQREQPEEQRIPGEPFPPLGEKTPESFLDKKPLGGYPTPFKIPLTWGREQGHYRARGNGACK

SEQ ID NO: 157967 - protein, 173 aa, Oryza sativa
  unsure (1)..(173): unsure at all Xaa locations
  Clone ID: PAT_MRT4530_57488C.1.pep
TRRRPRRTRSRGSPEPSSAPAATPTPPSRELPQTSSQAAALAPNAPPSAPAGTPSAAAAVGAATSVSRTXSSSSSSPSPAPATTTAGGAEASSSATAAAVVGASSSRRRPLSPVRSTEAEASTTPSPATAVVEAAPASDAAPSPETTTTTASSPPPRTGAASAAWSSPQTRVS

SEQ ID NO: 157968 - protein, 218 aa, Oryza sativa
  Clone ID: PAT_MRT4530_57489C.1.pep
MAYDGDEEQSQDYLFKIVLLGDSSVGKSNLLARFARNEFYPNSKSTIGVEFQTQKLVIDGKEIKAQIWDTAGQERFRAVTSAYYRGAVGALLVYDISRRQTFDSVGRWLNELHTHSDMNVVTILVGNKTDLKHAREVSTAEGKALAESQGLFFMETSALDSSNVAEAFQTVVKEIYGILSRKSPGVMPWDWETHLSMYCFRFGLVKQTVVPTFFSRAQ

SEQ ID NO: 157969 - protein, 241 aa, Oryza sativa
  unsure (1)..(241): unsure at all Xaa locations
  Clone ID: PAT_MRT4530_5748C.1.pep
TSVPQYPLYPVYGYPPSTVACQVGELGAQGSTNMSSSFVDNSVNPGINQGVSTSTILMWTQIVFLVYTTVPILTGPSMTESENAVVTTLDGSMSKDPPAKVENRTSTTSEPEKDPSAAKSCPSDENHEPTRTTSEATRSWCPIHKTRKHTLQACWXIQRTSPTRDVYCPIHKTKSHDLSSCKVLLSALKTSPPKVQXSQISLRDANKQRGAMVISDXFVGVINIDPHEPVSRPPKLFVEIL

SEQ ID NO: 157970 - protein, 148 aa, Oryza sativa
  Clone ID: PAT_MRT4530_57490C.1.pep
MTIGGASSSVVVVPRNFRLLEELERGEKGIGDGTVSYGMDDDGDDIFMRSWTGTIIGPLNSVHEGRIYQLKLFCDKDYPDKPPTVRFHSRINMPCVNPDTGLVESKKFHMLANWQREYTMENILTQLKKEMAAPHSRKLVQPPEGTFF

SEQ ID NO: 157971 - protein, 80 aa, Oryza sativa
  Clone ID: PAT_MRT4530_57491C.1.pep
LLSINKSEKMLHEPIQKNYLTASRGDGIVVLPYLLFPSLCVSSSPLALSLSLPLHSISLSVTTTHEHGGGDDDDDDDDGA

SEQ ID NO: 157972 - protein, 105 aa, Oryza sativa
  unsure (1)..(105): unsure at all Xaa locations
  Clone ID: PAT_MRT4530_57492C.1.pep
MAAAAAEECGGGGGXAVYNPSYVPDSVKTLVEHMYRHVSDKNVYEIHQMYEXGFQRLYDRLLRDAPWTRDEVVXAYWDRYHVFLLLYRELWYRHAYAQAFSWSNG

SEQ ID NO: 157973 - protein, 74 aa, Oryza sativa
  unsure (1)..(74): unsure at all Xaa locations
  Clone ID: PAT_MRT4530_57493C.1.pep
GCDCXPQERXPFQCLCLEGRASIRSIRYLARLALFCRCVMCCTHKKTAWKPWNVTYLYGAXPSVCYCVDHVLGL

SEQ ID NO: 157974 - protein, 949 aa, Oryza sativa
  Clone ID: PAT_MRT4530_57494C.1.pep
MTPWNTDSDSDSDTRKKPIWRTYIFEFLSSHLLQPLAPASTCAQVLDQQLAPRHGSRHPAPPSLRDLNADPPAEDDDHIVHLHGEPLPQPPYFPEPKPPPTSTVVEAVAVAVVVAAAAASPATCHYIWRLIQAIKPLLTIGQRNNRQDMFRLLHYLADCPILRIILVKWLGFGHLVNFIMENYLKRKVPDSSNNARTSCPEVNDLNWKEEIKYDPGLRKPIDAYHPNLRDRIQSEDAKKAYFTRLNGSISVARRLLKQGLPFRGYDESKDSYNKGNFLEFHDMLLEHDHALGKAVGKYGAGNSLMTSSDIQKDIVECFAKEILHSIMEELGHDVFCLLVDESRDVSYKEQMAVVLRYVDKCGFVKERFIEVVHVKETTSSYLKAAIDSLFAGFKLSLKQVRGQGYDGASNMRGCGMLQTGTGLNQEQCLQRPGDTRWSSHYKTLKSLLDMFPTIVKVLEFVEKDDKDRTNRDQANGLLVYFQSFEFVFYLHLMSTILIITNTLSLALQRKDQDIVNAVKCVKSTRCHLDDLRRDGWENLLGDVYAFCDKYDIIKLELAVASPNPKKQRQKTGITNQHHYEVDCFNDVIDWLLQELDSRFNETSSELLLCSAAFSPRESFHDFNVENLMRLAKLYPNDFNSGELRDLRHHLCLYTADVREDDRFSNIQTIASPLDPAPPSLRDLNADPPAEDDDHIVHLHGEPLPQPPYFPEPNAAADLDGGLDGDAEASFPGSNPEADGRELDGDLEQDHSLFMFLDPGEVRCRKRLRASEEDDVDVGDARGAPGRCYDDDVAEDGRSTQSRYSWRPRNADDQSYTHDDDTPAAQEISGEQIAADDTYYDSYYYMDGEYGGAYDEEEHQQDDMAAADFHDGNQLSPEHQRVLYRLFGEADGSTRQEEQEAAAQGSGGEHVPPEEDSYEAAAVLAGDDVDEEQLQRQEQVDMTDGTDETF

SEQ ID NO: 157975 - protein, 865 aa, Oryza sativa
  Clone ID: PAT_MRT4530_57495C.1.pep
MEETSTPPQPQPQPAHPSPQFPAVFTPPPPPTSGFSSRGSPSPGTGSAAAQAQFSTPPGPPVFSSPLRPAAVPFRATPASPQPVPFASRGGGYSSSSSSAAVSLPTSSGPHFLNGVATPTSHLPSSAAAPPPPPPPPPEESPYVLFSAHKVLKQKKLLNAPSLGFGALVSPGREVAPGPETVERDPRRCLNCGAYVNLYCDVLIGSGQWQCVICKKMNGSEGEFVVSSKHDLLQWPELASSAIDYVQSGNRRPSFVPVPDTRVSGPIFILIDECLDEAHLQHLQGSLHAFVDTLPPTARIGIISYGRTVSVYDFSEGAAVSADVLPGNKSPTHESLKAIIYGTGIYLSPVHASLPVAHTIFSSLRPYQLSLPEVSRDRCIGAAVEVALGIIQGPAAEVSRGIIKRSGGNYRILVCAGGPSTFGPGSVPHSVQHPNYAYLEKTAMKWMERLGHEAQRHSTVVDILCAGTCPVRVPVLQPLAKCSGGVLLLHDDFGEAFGVNLQRASTRAAGSHGLFEIRCSDDMLVTQVIGPGEEASPDSHETFKHDTSFCIQMHSVEETQSFSVSMESKGDIKNDFVYFQFAVHYSNMYQTEITRVITMRLQTVDGLSAYLASVQDDVASVIIGKRTVLRARTASDAIDMRLTIDERVKDLALKFGTQVPKSKLYRFPKELASLPGCLFHLRRGPLLGSIVGHEDERSVLRNLFLNASFDLSFRMLAPRCIMHREGGTFEELPAYDLAMQSNAAVVLDHGTDIFIWLGAELAAQEGQSAAALAACRTLAEELSELRFPAPRILSFKEGSSQARYFVSRLIPAHKDPTYEQESRFPQLRTLTPEQRSRLKSSFIHFDDHSFCEWMRSLKLVPPEPS

SEQ ID NO: 157976 - protein, 54 aa, Oryza sativa
  Clone ID: PAT_MRT4530_57496C.1.pep
NGWAASRCPINKGGPAKGPLASKTSGPPLTEPFYPGGERNMARAYFIILANQAK

SEQ ID NO: 157977 - protein, 343 aa, Oryza sativa
  unsure (1)..(343): unsure at all Xaa locations
  Clone ID: PAT_MRT4530_57497C.1.pep
MGEEEAAAAAARVAEQARELQDAAAGLLSRSSAEEEALRRRAAALGAELARLRKAAAHADSDKVEEDLDRATCLISDGDIAALLPSKTHGTFLKMFLGPVNLRAPRKEVQLKVKEEYNSYRDRTALLFLGFPMILLVLRSWLWNGCFPVLPVQLYQAWLLFLYTTLALRENILRVNGSDIRPWWMCHHYCAMLMSLISLTWEIKGQPDCXENMMLQNRYQRQRLYTRIALGKARRMDVVWGETAGVEGQLLLLCPVLFLLQGFEGYVGFLLLRTAHTGIVPEWQVVVCGVLLIAMAIGNFANTVDTLMAKSRFKAKKRSRGKRDPDTCNSPTGLSPTNSTARA

SEQ ID NO: 157978 - protein, 188 aa, Oryza sativa
  unsure (1)..(188): unsure at all Xaa locations
  Clone ID: PAT_MRT4530_57498C.1.pep
HASDGSDIRPWWMCHHYCAMLMSLISLTWEIKGQPDRVRKRVGVELFCXWAIMQGFAMMLQNRYQRQRLYTRIALGKARRMDVVWGETAGVEGQLLLLCPVLFLLQGFEGYVGFLLLRTAHTGIVPEWQVVVCGVLLIAMAIGNFANTVDTLMAKSRFKAKKRSRGKRDPDTCNLPTVLLPTNLTARA

SEQ ID NO: 157979 - protein, 282 aa, Oryza sativa
  unsure (1)..(282): unsure at all Xaa locations
  Clone ID: PAT_MRT4530_57499C.1.pep
GTSDMFMASTFFVPGDGASTLFWTYKXIEGRSVASLVRDLHFTVPLRSVASTLINNSWVRDIRGALTMYVLSQHLMVWDAMLLVXFSPGTEDRPVWRWISNQRYSAHSAYQACFLGXAILYLRADLLGWAKGPTKHNLFIWLAFQQCCWIGDLLEKRGIDNHSPCPFCVQELKMANHILLDCVFAHQVWHRILSAPSWHDLTPARGSSLQVWWPTSRACMHKHCXKGFDSLVLLVSRXLWKEQNFRVFDYSLSXVLVVLESILHEGHRWSDGIASFVDLLEV

SEQ ID NO: 157980 - protein, 90 aa, Oryza sativa
  Clone ID: PAT_MRT4530_5749C.1.pep
MIMDANIGASSVLAVATQQSFFLRFTIGVAQPHSTAQHSTSANQPHASEFRSAGWPHVARVRASASERGTAAPAPSGGGTVGSSMSEYRS

SEQ ID NO: 157981 - protein, 101 aa, Oryza sativa
  Clone ID: PAT_MRT4530_574C.1.pep
MADHDDEQILYDTIAKGSSQYWNKKEGNEDPNQYLNEEGNVERDAKGNEEGNGNVERDAEGNEEEAVGSHPSAGQKRARGKRGAAKKIEGRHIITEVDAKG

SEQ ID NO: 157982 - protein, 111 aa, Oryza sativa
  Clone ID: PAT_MRT4530_57500C.1.pep
MHAAIPRRPVVSHRLRHHRRRGLQFPFPGHCLALLLAAMLLVNSSSAAATTTTTNSRKLLVAPARTSPETASGGQKQEMDVGRWRTAAPFRRPGASLGRHVPGSNANPSHN

SEQ ID NO: 157983 - protein, 888 aa, Oryza sativa
  Clone ID: PAT_MRT4530_57501C.1.pep
MAFAAPATCACRMAPPPPLAAASVSGRGRSPSSASSYRAAARWWPGARRGRRRRWAGLRARCAGQSVVKPGSESAAGEGLVGEDPPRPPFDLNLAVVLAGFAFEAYTSPPEDVGWREIDAAECQTVFLSDSFLREVYDGQLVVRLKKGVNLPVMDPWIVISVIDQRRTKEPTWNEEFTFNISLSRENLLQVAAWDANLVTPHKRMGNAGLCLESLCDGSNHNVTVELEGLGGGGTIDVEVRYKSYDDIEREKQWWRIPFVSDFLVKSSLGSALRTVLGSESINASQFVQSAFGQLSSFTYTYLPKPPSLDIRAEAPKRAEQSVDNSAGSNELEQYKMDSKASGDDSDCCSEAESTATVVNTEGSSSPNMKETDEYFWKAFTSVLNQNVLQNFGFSLPEVKQLDGFDLLSSLGLKSSEIAEKEYLESGLATVDASISEGHETTPKDAIDVDKEDGTIPIKENLPKEEVQAPFPDVSKVSRDVLSQTENILGALMLLSRSLSPQDKESVMVDDGSNKEDSVKEEQCASDYTDNDDDAVSTEVFTDAQKAEDRQRLFESAETAMEAWAMLATSLGRNSFIKSDFEKICFLDNVSTDTQLKSLKVAIWRDCSRRRLVVAFRGTEQSKWKDLLTDLMLVPAGLNPERLGGDFKQEIQVHSGFLSAYDSVRNRIIALVKYAVGYQDEEDGENIPKWHVYVTGHSLGGALATLLALELSSSLMAKSGVIFVTMYNFGSPRVGNRRFAEVYNAKVKDSWRVVNHRDIIPTVPRLMGYCHVEAPVYLKFGDLKDALVDEETIDDEGDSIGEYTPDVLVSEFMKGEKQLVEKLLQTEINLLRSIRDGSALMQHMEDFYYVTLLEGYCRSASLADRYQETLQTMEPVQDQFRGYGRTRK

SEQ ID NO: 157984 - protein, 71 aa, Oryza sativa
  Clone ID: PAT_MRT4530_57502C.1.pep
IRRHQLVCLGPARLRSSLHSHSAWQYVLQRSDRFLRLCHVSSFVLEQLLFSLPFTSLNVLAALTIADNARH

SEQ ID NO: 157985 - protein, 95 aa, Oryza sativa
  Clone ID: PAT_MRT4530_57503C.1.pep
MTARMELAVAVRSTGSTGWLLMEDAGTGSGEAWWRMQDGAVLERRARGDVRMRSASGGKRTVGELRFRFGEAQNLSMFEDGTVVSKSEEAGFTYC

SEQ ID NO: 157986 - protein, 548 aa, Oryza sativa
  Clone ID: PAT_MRT4530_57504C.1.pep
MMTASLHPCVCKASPAFRPASSLGARTQPKSTATNPKRPLFQELQRRLSFRIDEASKALETAKQGLLDALVDSTFKFSDQPMLPSENNFAPVNEISEAIEILQIEGEIPEDFPEGSNPLFGALHSTVSIFGKSSEIWVEGEGMLHAIYFTKNSSDTWSVSYANRYVQSETLKIEKTRQKPCFLPAIMGDSAAIVAAYILNYMRFGKVNKNISNTNVFEHAGKVYAVSENHLPQEISIQNLDTGDSWDINGEWKRPFTAHPKVAPGSGELVIFGSDAKRPFLMVGVVSADGTQLKHKVDLKLDRCILCHDIGVTVKYNIIMDIPLTIDISRLIRGNQLIKFEKDSYARIGVMPRYGDAESVMWFDVEPFCMFHFINCFEEGDEVVIRGFRAADSIIPGPRISLNKNDLLSDPSKCSVKQGINEEFFSRLYQWRLNTKTKAVSGQYLSGTEFSMEFPVINDHYTGLHHSYAYAQVVDSLESSYGVNEKVILKYGGLAKLCLEEADNVIAEVHIIDAQTFEGAPVAKIVLPQRVPYGFHGTFRSSLANTMT

SEQ ID NO: 157987 - protein, 117 aa, Oryza sativa
  Clone ID: PAT_MRT4530_57505C.1.pep
MASLSSFRLAVAVAALLVVGSCATELTFKVAEGSSASSLELVTNVAISEVEIKEKGGKDWVALKESSSNTWTIKSEAPLKGPFSVRFLVKNGGYRVVDDVIPESFTAGSEYKSGIQL

SEQ ID NO: 157988 - protein, 61 aa, Oryza sativa
  Clone ID: PAT_MRT4530_57506C.1.pep
MSSLPSVAASISEQLRLHKQKQPKSVLPTARTKRPKKAKGLAKPQDMKAFKPKRPSTVVDS

SEQ ID NO: 157989 - protein, 131 aa, Oryza sativa
  Clone ID: PAT_MRT4530_57507C.1.pep
MAGAAWVPSCPAFILHNDIGHYSLLINTRSSLSDPFPSIFSDFPVVSELEVVVKPSMNLFLRTSLGDVGGGLRYYCYSPTRPKATCSFSGDPPALATVFFLDYDDGLYVAMIKPVAAGHGFQDTRGNLLVA

SEQ ID NO: 157990 - protein, 115 aa, Oryza sativa
  Clone ID: PAT_MRT4530_57508C.1.pep
RIGAYHGGDGRGAAADDRTRAQMGGEEADGGRRSSRALLRVSDGGSAAVDQATAGGQPGRGWLTAGARAMAKPPDLVRLFLPTFTALWLHQPVYHGVACSFRKRAGARDGCGGWD

SEQ ID NO: 157991 - protein, 50 aa, Oryza sativa
  Clone ID: PAT_MRT4530_57509C.1.pep
ATRTGGNGRWPTTGQAPLIDLSPFAEIQITWASSTSSQLSRAHVRRPSMG

SEQ ID NO: 157992 - protein, 222 aa, Oryza sativa
  unsure (1)..(222): unsure at all Xaa locations
  Clone ID: PAT_MRT4530_5750C.1.pep
LQDQINWHANIAEGELWTCTGVKQISQATCFLSTRFWHARWDLXEVRRQFLLMAEKQPPPPSSLGSVKGKALKLGLTDIIDDNVMPIDPEKFTPAQKEEFEATLQQARDQFLNSFMQTRKGTLVQKYKINVVADSPGTGSSKDGEVKQALGNSAQPSTKGATDGSPSDQGDNSEGVHGVQGDGAHNFQDRVDYAMHHALINQSGVFVTPGISIQNSKEDGFQ

SEQ ID NO: 157993 - protein, 83 aa, Oryza sativa
  unsure (1)..(83): unsure at all Xaa locations
  Clone ID: PAT_MRT4530_57510C.1.pep
PSRLAASPSIKPPPSGTRFRALVTCGQRPARGNLXPAAARVFPRPVLHSYLHPAARPLSAGRRPAAARRTAWRGRSAGREGQA

SEQ ID NO: 157994 - protein, 82 aa, Oryza sativa
  Clone ID: PAT_MRT4530_57511C.1.pep
RHANVMFIFSSKHDAYRRGTLPLIITVTSLVHDTVNTLSLHWTFFSLRESIGHDDPGDFQYAPCCPNGSCSDKHQEQISYGN

SEQ ID NO: 157995 - protein, 359 aa, Oryza sativa
  Clone ID: PAT_MRT4530_57512C.1.pep
MEINKKAQDSPSLMESRLAPLLLFGHGEAGDKFLYSIPSRRQLTAAAAAFVDLIGHYSWITPRGWVLTLQPAGRRGGGDAPAEAFLRDPFSSRRVPLPPPDEEISGLAAKALGGGDDDAAWCVLSHDAADPRSVVVVVHPTEPVLFYCRPGPGDSAGRRRWLRHEYQPEAIIAPANHDDDDDLDAVVIESMGWLTASGGKLFADLEWSGKMATLEFSPSPATPTLASAPLAMVPCPAWCNHWNSSLVDSRGELFVVHFRNSLLCQRTVLLVQVHLLDSTRRAWVKADGLGSNRVFLVTSQFGVSMAADEAGLEENCIYFTKSDDKGLYVYDVGQGTTALYDPGEDIPDSMEPILLMPVS

SEQ ID NO: 157996 - protein, 131 aa, Oryza sativa
  unsure (1)..(131): unsure at all Xaa locations
  Clone ID: PAT_MRT4530_57513C.1.pep
ASSSCRSCPPPRPRDAIPPAPSRAXPPRPSAGAPSPPVLAHPNTAATPDRACPNAAATPDRAPTTRPPPHDCRLATPSPRPPFPPSIAATLNSPRLASFGPWRRSEERRQKGEENGRRKEKMEKAGERWEK

SEQ ID NO: 157997 - protein, 57 aa, Oryza sativa
  Clone ID: PAT_MRT4530_57514C.1.pep
TRLLCSPMSLPVHLMVGVNFGRCSLFGLNSLPLIHHISRVCGSLTLFLQSTFSGMLV

SEQ ID NO: 157998 - protein, 665 aa, Oryza sativa
  Clone ID: PAT_MRT4530_57515C.1.pep
MIPSVHEAIPRRFPLRPTFCPQRCRPPPVHPPHLQPSTQRLANPNLGHWKNTFKSWPALEKTSPEKSWTTWYKRVSASKQTHWDEIGIGQALALTIANSAKDEPLIAAATYFSSNTINAFLLNQGPMTPTLIDITMITGLDVTSSANPTSLNTKNQYDFKTKSIGGWSGYVAAYMGQGSVTAQEHVAFLLMWLEKFLFCGSSCGPTTNWQFVAEALESKRQFPLGKIILGYLYQMLNNASTKIVVGSVVGAGGPWWLLQTWLNLVVMKAVNRPSVIEAEFPRLQPIVEDDGEESTHRRCMSYGEYAFTPADAGAKLSAELLKDWFCSFYEGFQKDARVWFPYEDSVHLDLPSDFRFEDINNEKSQKSKEVFSAAISPCILPVGIHQGRNIQVSYEFYHSMSSARPLGMGQLPIGLLFADKIQCRGEISSTLMMDRLLNIQGPPLGSIENIELARFRSKNFDRWWGEWKLYLFHQPASIYVTDLFPNVIPQTTESSPPHQSNSGRDIDYHAPKTASLLQGQMIEPADTGRKRKPRAPTIDPLVLAPKKKTKKQKPKVADDLPALDPSIEQALDELEIEEDVDEAAAEKKKFAVKKKSAATQSKPTLPKTLEDISHQLEASSLDTLVVDCGSITTRLHEVQALIPEELADVLTPAAYLEKHQFKLEK

SEQ ID NO: 157999 - protein, 903 aa, Oryza sativa
  unsure (1)..(903): unsure at all Xaa locations
  Clone ID: PAT_MRT4530_57516C.1.pep
TSASPSAASSTEYAEQLSNLIAVPSLSHKNHYFLGPIGNPNPTEFIIGETNRIPFRLANPNLGHWKNTFKSWPALEKTSPEKSWTTWYKRVSASKQTHWDEIGIGQALALTIANSAKDEPLIAAATYFSSNTINAFLLNQGPMTPTLIDITMITGLDVTSSANPTSLNTKNQYDFKTKSIGGWSGYVAAYMGQGSVTAQEHVAFLLMWLEKFLFCGSSCGPTTNWQFVAEALESKRQFPLGKIILGYLYQMLNNASTKIVVGSVVGAGGPWWLLQTWLNLVVMKAVNRPSVIEAEFPRLQPIVEDDGEESTHRRCMSYGEYAFTPADAGAKLSAELLKDWFCSFYEGFQKDARVWFPYEDSVHLDLPSDFRFEDINNEKSQKSKEVFSAAISPCILPVGIHQGRNIQVSYEFYHSMSSARPLGMGQLPIGLLFADKIQCRGEISSTLMMDRLLNIQGPPLGSIENIELARFRSKNFDRWWGEWKLYLFHQPASIYVTDLFPNVIPQTTESSPPHQSNSGRDIEYAPGLLPNGGXPTPPVISYHAPKTASLLQGQMIEPADTGRKRKPRAPTIDPLVLAPKKKTKKQKPKVADDLPALDPSIEQALDELEIEEDVDEAAAEKKKFAVKKKSAATQSKPTLPPPPPPSPPVQHMSSEXTPFAVGSHNIEEAEQPAAPTIPVIADLFSFDIKDYLXEEDTTNKPLAPLSDDVKKTLEDISHQLEASSLDTLVVDCGSITTRLHEVQALIPEELADVLTPAAYLEKHQFKLEKAMQRLAKRRERKENESTIXANRQLVHEEKSKLDQLCEGPIKSNIDRLEARKIELLAQFQECNAKLDLEHKKLADLPQAVEEQKARLXSAIKNVADMTKSLKIISGTDAQDAQAIEEVEQISQRAISAIQRYLSQ

SEQ ID NO: 158000 - protein, 71 aa, Oryza sativa
  Clone ID: PAT_MRT4530_57517C.1.pep
MGKRTRCGGSSRTNGGGGDPARSLRNGWGDRRRLRVAGGRAHQGDGCGGSSRTNDGRPARSRDRWGSAEAN

SEQ ID NO: 158001 - protein, 1160 aa, Oryza sativa
  Clone ID: PAT_MRT4530_57518C.1.pep
MPAKYLQMLGEERRPELHRQQAGCVTGILQAFDRRYPLAAHHSHNRLLPPAHALSSSPSVGEERTRYSSQIVLDKNMSKSWIDNQRAPLTVELSQGSYSSSSCSSSSSLDGNRSGQQDLSSTDRMLFPEKPFKSSPKLKSSSDSDCGVDYYLDDALAKLSAQPSYPTLGIRNLVKDSIYRDTRDFSIRTFTKEAEKDHLFNCGDPPRILNEPPNSAIQEKNKGTMDIDESLRVLAKLRNPSESVQQPRLSYDAPRFSCEGRESASKLREVPRLSLDIKESPLRNREIDVRPKPSMTDEDRRSSISKDYSPPLETQQEHNACKRLPSVVAKLMGLEDLPEHKDNTAISSQVSKSVTERSEEPTMLRPLSLSSQNEATPRQQRNLDATIKNVPNSKFPVETAPWKQQEKIVLPRKLPKGSKGAHGKEQHAASVYSEIEKRLKDLDFQQSNKDLRALKQILDSMQAKGLLQNKKREEPSMPKIYDGDHDNGDVTDVNLRLNSTSNTKQAPEGTPSFTTEEDSTTERSFKSPIVIMKPAKSADLLSDVTEDSAVGPLGGLSELPQLRTANSADKRKSSKKVTREAVEQHTKSSSRAPTPQHLASFDKRANGRNEEISRKQKSTSQLMTENSARRQQMQRENNGSLLKHKNSTSPRVQQKKPDSERRARPPIPSPDSSKNQRQSVERSHLDSVSPRSKFRRKPAQAQGEDFHQNGVSRRTRSLNQEGNDMSARSDGSISVASELDVEVTSTDRSAEVNILRSQHGTQTPSGRNPQKVKTSYDANKDLPSMDPAATITERPSPVSVLDSSFDQEEFFHTSKTTNSSNVDDEHHPSPSEESCKPSEKKSTELPTQPKNSKLANIASLLKKLQQLSVNKDEAPPVDHIAFLCETPSPDHRYVSEILLASGLLMKDLGSGLSQMQLHTSGYPINPDLFFVLEQRKSGWTSKPEGIHQSRSTTKPDDPKRAHRKLMFEAVNELLLDKFEKETTLITGVAARDPVMSSGQQLVKMICSGIECLKTERSRMCQEDSSVIPDAEILNRLEGWSPSFIRRELPGMVLEIERSIFKELVDEVVRGESADVAAMDPSDEQQGIQFSDGCLREFPSVITRKNNLCKFPKNLNDTKKNWVKGDLVRESTESLILDRQKKIGACNLRNVWVAAGVAFAE

SEQ ID NO: 158002 - protein, 331 aa, Oryza sativa
  Clone ID: PAT_MRT4530_57519C.1.pep
MDSLRLRPSLLAARAPGAASLPPLRRACVSNHHAIDITCLCVGKITFYHLYVLSIEMVNGQFLCPAKGPKVLPSINVRNSLVGNPPTTGYHIDQHLVPLTLRDNLYNLQLKHMIHQALSIVSVSLLAVENLSDVSPLFLTGLLEAVVAALFMNIYIVGLNQLFDIEIDKVNKPTLPLASGEYSPATGVALVSAFAAMSFGLGWAVGSQPLFLALFISFILGTAYSINTFVFRRPAVFTRPLIFATAFMTFFSVVIALFKDIPDIEGDRIFGIKSFSVRLGQKKVVGHAILAAILWNRSRSIDLTSKTAITSFYMFIWKLFYAEYLLIPLVR

SEQ ID NO: 158003 - protein, 793 aa, Oryza sativa
  unsure (1)..(793): unsure at all Xaa locations
  Clone ID: PAT_MRT4530_5751C.1.pep
MDNTGNKGYGNDGSDDSRTQASGNEKSINKTSPELIQIVVNQTNMLATAFQLLQNWNNPAGTTNVQVPTVQQQCKLSEFLKTEPPTFAIAVDPMEASDWLRTIEKKLGLIQCTDQERVGFATPQLVGPASEWWDSYEASRPEGHTITWNEFSSVFRRSHVPAGMITLRKXEFRYLKQGDLTVTKYLHEFYRLAHYAPEDVETDEDKQEKFLQGLKDELAVQLLLEDYXDFEKLVDKAMQLESEHNRMTNCKRRIVNIPVFPCGNQRQRTEPLQITGSSVVHQEFLPQEDGRNADNNTSNTNDDDTTNNHGSCLISDHSNKACNVSSIHQDVNDSINVGIQNDNLSNFDTEKDSNGDSNYGTTDANVSKDFQPPIPTPSQNDRPQMDSSTKKTLICYNCKEPGHFSRDCPQPKRNLRHHSGHYARRRQVTRLVVTGANAIPVSLKGSKPKDLIVPRSVRNPHXEYHLLEISRKDSSRKKSIREIKNSVLEINSKTSSIRIRYSTISSDFWGSANFAGVIDGXRSPAPASPSSSSTSPPAAPSTAPVHQPALPSPPSASPHRPXPGCSSVSPERRRSAGLSILFIASVLSAAPSTSPARRLAAPLPSSASQPRRRPRPRLPSDRTPPVSVVVFTVHPRRLAVSRRRLRRRHRSGVFHAILASVQPLPAALVVSSLAPVVVVVVLSSFPVVVAFVPPSSRSRXRPRFVKCAAAPSSSSSSPPRRQASCRPCLAFVPGSLPKSFPRRXAAPVRRCRSHASSRGGKDPSSRCPVLVLLVSXPVPVVRSSTPVPVYRCR

SEQ ID NO: 158004 - protein, 182 aa, Oryza sativa
  Clone ID: PAT_MRT4530_57520C.1.pep
MDAAPPPGFSLLRLGGCCCFDLLAQAWDEADSESTDARFLFVASALHRLPLASSASSLIPSAVTSATVVDIFFPSVEERGSRCYNAETKRRCGKWYHRSYDDLGKSTARRQVKVTRSLKGGRTCSSPGTGDLTQAHEVEEKCHPANGLLWKVPWDHLNLHCHQLAPNVTRDHQNVPKCPYRS

SEQ ID NO: 158005 - protein, 59 aa, Oryza sativa
  Clone ID: PAT_MRT4530_57521C.1.pep
ARACLWSKYATVVGHAILAAILWNRSRSIDLTSKTAITSFYMFIWKLFYAEYLLIPLVR

SEQ ID NO: 158006 - protein, 356 aa, Oryza sativa
  unsure (1)..(356): unsure at all Xaa locations
  Clone ID: PAT_MRT4530_57522C.1.pep
MSEILWLEILPPRIPHRPTSSSADASGQPLQSSAEAHDSSTRQPPIGFAESRGNSGHNGLGSFYRFSRPHTVIGTALSIVSVSLLAVENLSDVSPLFLTGLLEAVVAALFMNIYIVGLNQLFDIEIDKVNKPTLPLASGEYSPATGVALVSAFAAMSFGLGWAVGSQPLFLALFISFILGTAYSINLSFLIWKRSAVVAGLXALCVLAVRAVIVQLAFFLHIQTFVFRRPAVFTMPLIFATAFMTFFSVVIALFKVIXLYLSGTKPFGIRSFKETISLYKTIFFCVTIPTASFAETLMSPSPSPPSFYFLFQVVGHAILWNRSRSIDLTSKTAITSFXMFIWKLFYAEYLLIPLVR

SEQ ID NO: 158007 - protein, 358 aa, Oryza sativa
  Clone ID: PAT_MRT4530_57523C.1.pep
MATAGVTEHLLSPRAGAGDDMSAGDGEGWCNALAKYEALASSLPSCHGLGSAPYRRYGGFWYPAHLMPATLAARDTFVARPSDVILATMPKSGSTWLKALAFCVVHRGRHAPAAGQHPLLHSSPHDLVPFLHSIYEISRSCRVAPGHRLDAMPSPRILAVHEPLSSLPASVKASGCRVVYLCRDPKDAFVSLRHYLDEIKPEGSTMTPFDEAFELLCDGVSPYGPMWDHAAEYWKESLARPEEVVFLRYESLKEDGVGSVRRLAGFLGCPFTGEELAGGVPETIVELCSMERMRNVEANRDGEHGATWSSFKNSAFFRKGEVGDWKEHMSPEMARRLDDVVEEKLRGSRMSLIRHRQY

SEQ ID NO: 158008 - protein, 914 aa, Oryza sativa
  Clone ID: PAT_MRT4530_57524C.1.pep
LILSVLAVAALATTNHEVEAAVAALPRGATRRPAPAHGNVATAAGCSPRERDALLTFKAGITEDIMGLLDSWKYDGAGPGQAEEEADCCRWRGVRCGAGGHVVGLHLRNVYADQSNDYDFITSGYDLAGEISPSLLNLTYLEHIDLSKNQLQGQTGRVPEFLGSLQNLRYLNLSGIPFSGEVLHLAYCNLVYADQSFSHFNLTNLEELDLSVNYFNHPIASCWFWNAQGLKYLNLGSTKLYGQFPNVPGQFGSLRFLDLSSTCNIDIVTTNLTNLCNLRIIHLERSQIHGDIAKLLQRLPRCSYNRLNELYLSDNNISGILPNRLDHLTSLVILDISHNKLSGPLPPQIGMFSNLTYLDLSSNNLNGVITDEHFTSMRSLKTLDLSGNSLKILVDSEWLPLFSLEVALFSPCHMGPRFPGWLKQQVNITYLNMSFAGITDRLPNWFSTTFLNAQLLDVSNNEINGSLPANMEVMTTLSRLYMGSNKLTGQIPLLPKALEIMDISRNSLSGPLPSNFGDDLVLSYLHLFSNRITGHIPNSMCDLHHLVYLDLADNLLEGEFPRCFQPVFLSKLFVSNNILSGKFPPFLRSRHNLEMLDLASNDFYGGLPIWIGELSNLAIVRLSNNNFSGNIPTSITNLTRLVQLDLSNNSISGVLPLHLSNLICMKKSGHCDIVMVFDRYSISGRYGRNVGIANMSVDTKGQKLYYKLPIVLDIVTIDLSLNYLTGEIPEELTLLDGIKNLNLSWNQLSGRIPGNISVMQSLESLDLSKNNLSGEIPSNLSNITSLSRLDLSYNHLTGRIPSGGQLDTLYAENPSMYNGNTGLCGYPLRRNCSDNSSASKHGVEQRRERDSEPMFLYSGLGSGFVAGLWVVFCTILFKKTWRIAYFRLFDKVYDKVYVFVVVTWATLSQKSGTR

SEQ ID NO: 158009 - protein, 168 aa, Oryza sativa
  unsure (1)..(168): unsure at all Xaa locations
  Clone ID: PAT_MRT4530_57525C.1.pep
KKXXXXXGXXKRKGXEXLXXYXXTEXWEXRXXXXXLXRGXXXVXKXKKKKKNLVVXQKEXRXLXCFXGAEXVXTFXXEXVKVXAXXGETAXXXLDXFGDGXSDGAXAAVXXXXPPXXMYXXLAPLXXKXXXXXXXXXXSXRXHSXXTEDGGDGXVXXSCSXXXWXXXX

SEQ ID NO: 158010 - protein, 48 aa, Oryza sativa
  unsure (1)..(48): unsure at all Xaa locations
  Clone ID: PAT_MRT4530_57526C.1.pep
MAVAAVRAAAADGVVTFLWVLCMSTLWASTATVTXDLRIHEVIHYTLL

SEQ ID NO: 158011 - protein, 112 aa, Oryza sativa
  Clone ID: PAT_MRT4530_57527C.1.pep
QPGLLKSVCMHGINSGWWDQGKKRVRICGLFHRHAFLGRTLPGNLPVKTLGYSFLSWGFKEKKWRAFFSSPLEFLELIPSNVCGSSPCVNCCSKKSQALQLFYASPALPSCN

SEQ ID NO: 158012 - protein, 847 aa, Oryza sativa
  unsure (1)..(847): unsure at all Xaa locations
  Clone ID: PAT_MRT4530_57528C.1.pep
MGRGIGSKRRVEDDDGENMPGRKKKEEEEEEEDDDGEEEYEVDVVRDRIGSSRGSRLALFGSDLRLGRFRPRRRRVAPVDGDDGIFQDFVIDPDNKWYRLWTRFILVWAVYSSFFTPLEFGFFRGLPRNLFFLDIAGQIAFLIDIVLRFLVAYRDPDTYRMVHNPTSIALRYCKSSFIFDLLGCFPWDAIYKACGSKEEVRYLLWIRLTRAMKVTEFFRSMEKDIRINYLFTRIVKLIVVELYCTHTAACIFYYLATTLPESMEGYTWIGSLQLGDYSYSHFREIDLTKRYMTSLYFAIVTMATVGYGDIHAVNVREMIFIMIYVSFDMILGAYLIGNMTALIVKGSRTERFRDKMKEVIRYMNRNKLGKDIREQIKGHLRLQYESSYTEASVLQDIPVSIRAKISQTLYKPYIESIPLFKGCSAEFIQQIVIRLQEEFFLPGEVILEQGSAVDQLYFVCHGALEGVGIGEDGQEETILMLEPESSFGEIAVLCNIPQPFTVRVCELCRLLRLDKQSFTNILEIFFVDGRRILSNLSESSEYGSRIKQLESDITFHIGKQEAELTLRVNNAAFYGDMHQLKSLIRAGADPKNTDYDGRSPLHLAACKGFEDVVQFLLHEGVDIDLSDKFGNTPLLEAVKQGHDRVATLLFSKGAKLSLENAGSHLCTAVARGDTDFVRRALAYGGDPNARDYDHRAPLHIAAAEGLYLMAKLLVDAGASVFATDRWGTTPLDEGRRCGSRTMVQLLEAAKSGELSRYPERGEEVRDKMHPRRCSGVXGPHPWDGGERRREGVVLGAGEARPRRLRRGAXLLGEDGARVLDVDMVHDGQKLYLVVGGGGDDGGTEARQ

SEQ ID NO: 158013 - protein, 585 aa, Oryza sativa
  Clone ID: PAT_MRT4530_57529C.1.pep
MADDAYDDLPMAGAEEEVDDVMKDELDEEGDSSSPVAMKVGEEKEIGKQGLRKRLLKEGEGWDRPESGDEVQVHYTGTLLDGTKFDSSRDRGTPFKFSLGQGEVIKGWDEGIKTMKKGEQAVFTVPPELAYGEAGSPPAIPPNATLRFDVELLSWASVKDICKDGGIFKKVLAEGHKWENPKDLDEVLVKYEARLEDGTVVSKSDGVEFAVKDGYFCPALSKAVKTMKKGEKVLLTVKPQYGFGEQGKPASGAEAAVPPNATLYVDLELLSWKTVTLIGDDKRILKKVLKEGEGYERPNDGAVVRVRFIGKLEDGTVFSKKGHDGDEPFEFRTDEEQVIEGLDRTVVTMKKGEVALVRLPPQHAFGSTETKQDLAVVPANSTVWYEVELVSFEKEKESWDLKDNAEKIEAAAKKKDEGNVWFKMGKYAKASKRYEKAAKYIEYDSSFTDDEKKQSKALKVSCKLNNAACKLKLKEYREAEKLCTKVLELESTNVKALYRRTQAYIELADLELAELDVKKALEIDPDNRDVKMVYKTLKEKIKEYNKRDAKFYGNMFAKWRKLEHMENKKVPGKQEAQPMAIDSAA

SEQ ID NO: 158014 - protein, 104 aa, Oryza sativa
  Clone ID: PAT_MRT4530_5752C.1.pep
MRATARHGRKATGRKRFTHLPTERTSGGGGVGRPQPPECRINRSAPAGMRRREGKGKGNHVPGRYRSSGPTASALKCFSLLKLQGQKETPRGQACNAYMQGLLP

SEQ ID NO: 158015 - protein, 58 aa, Oryza sativa
  Clone ID: PAT_MRT4530_57530C.1.pep
MAKGSKEETEVHRAQRWRSDRVAMKRTAAMRRLERRHVQTPLKTEDRRQRQQLSAWER

SEQ ID NO: 158016 - protein, 74 aa, Oryza sativa
  Clone ID: PAT_MRT4530_57531C.1.pep
SCEDPLSLFSRALVKPHTTTGVDHVVVTTVSSGGHYRCVSHKTLFSLLALFRSLPSPQSGSSIHSVGIFLAIYI

SEQ ID NO: 158017 - protein, 39 aa, Oryza sativa
  Clone ID: PAT_MRT4530_57532C.1.pep
MMDRMRRVVASGVDGPTGGVDVVMDRAKTEMKLFVGCGA

SEQ ID NO: 158018 - protein, 177 aa, Oryza sativa
  Clone ID: PAT_MRT4530_57533C.1.pep
MSLLLQLSSSYAPPREHSRVVVGAALRVAATPACRHLLHLHTVVVEALSPAHAAAVAPVCRHRSSREPSPPKPSISRRLRHSRSPLCAPPPQPPPSVDAAGPQLPSRAAAAALTNGRASGDWSDMQLPRQKSLMGRGGGRKLRQVDSLPRSPMALASRASLAKTESIVDMQELGVVD

SEQ ID NO: 158019 - protein, 123 aa, Oryza sativa
  unsure (1)..(123): unsure at all Xaa locations
  Clone ID: PAT_MRT4530_57534C.1.pep
WELWSSGVDARWGLRWRRTERASAVAVAAGAAVVARGGXCNGGRRAVGTAEXSAWRELRRRRTQRASAATARESCGGGIRVLQRRHVREADERASATTVRGCSNGGMQELQRRVGAAPTTTRE

SEQ ID NO: 158020 - protein, 47 aa, Oryza sativa
  Clone ID: PAT_MRT4530_57535C.1.pep
LCQKSQMRGRCTMKIEEIRLILNQASASSLAVSTTVLVCVVPSPDWP

SEQ ID NO: 158021 - protein, 253 aa, Oryza sativa
  Clone ID: PAT_MRT4530_57536C.1.pep
MEVKCRRLEGKVAVVTASTQGIGLAIAERLGLEGAAVVISSRKKKNVDEAVVGLRAKGITVVGVVCHVSIPEQRKNLIDTAVKNFGHIDIVVSNAAANPSVDNILEMKEPILDKLWDINVKASILLLQDAAAYLRKGSSVILISSITGYNPEPALSMYAVTKTALLGLTKALAAEMGPNTRVNCIAPGFVPTNFARFLTTNDTIKNELIDRSTLKRLGTVEDMAAAAAFLASDDASFITAETIVVAGGTRSRL

SEQ ID NO: 158022 - protein, 249 aa, Oryza sativa
  Clone ID: PAT_MRT4530_57537C.1.pep
ALLATSCRRRCLLVDFLSQALLHPLLARSTPSGEGARDMCRRVAEGRDTTGFASLGLVTHKSSGHGALGGVGDQDGEVNGLDEAVRVLVPRPGHCHDLRRSLLRHRATGVAAGEQLNCWLQPRKERTHRRVGNDVVVGELATEAVGDMEDIHEPPPILGEQLVLRLLPTAAASSPPPPLPFPTAAATAVAALDCRRRRSHCHSRRSSPPSSSPPPPPPLPTTPSSPPPPPLPTAVPAAALAKMKRKAGG

SEQ ID NO: 158023 - protein, 310 aa, Oryza sativa
  Clone ID: PAT_MRT4530_57538C.1.pep
MEVKCRRLEGKVAVVTASTQGIGLAIAERLGLEGAAVVISSRKKKNVDEAVVGLRAKGITVVGVVCHVSIPEQRKNLIDTAVKNFGHIDIVVSNAAANPSVDNILEMKEPILDKLWDINVKASILLLQDAAAYLRKGSSVILISSITGYNPEPALSMYAVTKTALLGLTKALAAEMGPNTRVNCIAPGFVPTNFARFLTTNDTIHPKWAIMNFKEKLDLWYVTDSPKFIVCIPFVLEFLGGARVDFRSKPFLDYVKRLNYKKNELIDRSTLKRLGTVEDMAAAAAFLASDDASFITAETIVVAGGTRSRL

SEQ ID NO: 158024 - protein, 173 aa, Oryza sativa
  Clone ID: PAT_MRT4530_57539C.1.pep
MEAGGGGGGELARLLPPPRPNEAAGKARQAYELVAGKTAGVAPCRGQPAVHHQCLKESYVSTHQAASSTVQLCSAALRDSVICTVTVSRLTYTGHLFNDDDAAAVALATAEMTPLWTPARSHSHSPGPAAPSRHRGRITDSSFAANNGDDNYSAASAGGGAQQQVDRKAADDQ

SEQ ID NO: 158025 - protein, 372 aa, Oryza sativa
  unsure (1)..(372): unsure at all Xaa locations
  Clone ID: PAT_MRT4530_5753C.1.pep
MSRVSTSWGFVXSRVNKAEGRGARTGSTGVGPTRQPHGPRWTGCTRLTPAGAVGPTRQPHPRARAADGRAPRGSHSARPRAAKPARPAGDGAPASRWSPPATTGTVERRPIEGRVGGKEATVHGSPRGDGGDGGGGRSGGRWWRGSGRRGXVRRTGGRRPKRRGGXVDRVCGXPKEVAAEVGGGPGXVGSGPELGRRRRRDXRATSRARIRRAGRAARGGTGRRRCGEGLNRAGAXRGWPGREETGAGXSAAFNGAGEICGGXIRPFERGREREKWGERERESRGIIPPTLMCAGTAGGGGIRSGGGARARARRRERREVGDDGWAPPVSEGGGRARPSAARARGKAGWAAGRRREREGAGPSRPKRGKGGG

SEQ ID NO: 158026 - protein, 73 aa, Oryza sativa
  Clone ID: PAT_MRT4530_57540C.1.pep
LFFFFFGFFFFFFFFFFFFLDPLKRSYFRLGIQQGEGFTVFTFKKKGPLLHFRRETPRVFRLAPQGDGLAGLG

SEQ ID NO: 158027 - protein, 86 aa, Oryza sativa
  unsure (1)..(86): unsure at all Xaa locations
  Clone ID: PAT_MRT4530_57541C.1.pep
TGLPGEIGHVYASASPSAVRDSNKKRGNRSSAXLKLCKLDARREQWLSQVKDCMVAXAFTSPTGSEPNAGFITRSLPHPSLPWRRL

SEQ ID NO: 158028 - protein, 164 aa, Oryza sativa
  Clone ID: PAT_MRT4530_57542C.1.pep
MASSVPEDGASAAAAAATADPAAAAAEAPGRRIVVAVDESEESTHALTWCLANVVSSSGGDTLVLLHARRPRPVYAAMDSSGYMMTSDVMASMDKYAAAVSAAAVGKAKHICAAFPHVTVETMVESGDPRDVICDATEKMAADLLVMGTHGYGLIQRYYCKLID

SEQ ID NO: 158029 - protein, 41 aa, Oryza sativa
  Clone ID: PAT_MRT4530_57543C.1.pep
KMAGVMHYQVAGLNELFSGQCLHWCGRIKFVNEQHWGWLMC

SEQ ID NO: 158030 - protein, 76 aa, Oryza sativa
  Clone ID: PAT_MRT4530_57544C.1.pep
MAVFTTTAAGSAVAFARPAKAITVSSESFAELKHNDVDFTLRPETQRFAGLRAAEKETMEKDGDIEKNELAHCSRD

SEQ ID NO: 158031 - protein, 423 aa, Oryza sativa
  unsure (1)..(423): unsure at all Xaa locations
  Clone ID: PAT_MRT4530_57545C.1.pep
RRTPCSSAWTAAPTTSRRRWRTSARSPASSPTPSSSRSRPGSPPRSAAPPPARTPARTPPSAXQEPRPPAPCPPTSPSRPPPAXAAAAMAMNPAAPPPRRRLPSPTPTSAPAQAPPPARRARAHPTTPATAAPPAAHPAAHPAAPPAAPPAAPPAAPPAAPPAAPPAAPPAAPPPAALHLDRRRTAPPLAPPKGRRRPAPPLAPPKGRRRPAPPAPPKGPRRTAPPKGRLHRRRRPAPPTRRDPAPAPLPXPXXPXPPPXXXLLPPXSLXFPXPPWFXPXXXPXPPFSPPFXPLXPPXPPPGXVSXSXXXPXSXPXPXPPPPPXXXPXXXRPXXXFFPPGXXPXXXXXXXPAXRPXPPXPXPPPRPGAPPXAPPXPPRRXAPRGFXPPXAXAARIPPPPSAALSSAFGPGVRPARLGGRRPGE

SEQ ID NO: 158032 - protein, 275 aa, Oryza sativa
  Clone ID: PAT_MRT4530_57546C.1.pep
RRTPCSSAWTAAPTTSRRRWRTSARSPASSPTPSSSRSRPGSPPRSAAPPPARTPARTPPSARSRTPSSPRASSSRSSSGSRSTSSPRPPAPCPPTSPSRPPPAGGGGGYGYESSSAAAAPAPSESDSDVGSGSGSAASAPGPSPSDDTGYGGSSGSPSSSPSSSPSSSPSGSPSSSPSGSPSGSPAGSPAGGPTAGGPASGPSSYGAASGPAEGPSSSGAASGPAEGPSPSGAAGPAEGPSSYGSTEGPSPSPSSSGSADAPGPGASAPDSEEY

SEQ ID NO: 158033 - protein, 104 aa, Oryza sativa
  Clone ID: PAT_MRT4530_57547C.1.pep
RCFDAISAKSAKKDESSHTRDRPYKRILLALIIDKSCSPLMLRLSWHSSDTIYLSPNTVGPFATINTPHELLHAANALLYISARMLYPIMEDIPTIFYSDFYHL

SEQ ID NO: 158034 - protein, 131 aa, Oryza sativa
  unsure (1)..(131): unsure at all Xaa locations
  Clone ID: PAT_MRT4530_57548C.1.pep
ELHRCKCNKXMRQGDKRFFTEVRKLAGFLLPVEASPTPLLNHEATARPIRQGVGKAGESPNSVYCRSDRRCVAGQTVLLCPARPPNCRRSDRPCXTGQTGPSHKIKCKPRSLLPLLTSRTKKASLLWRRRR

SEQ ID NO: 158035 - protein, 110 aa, Oryza sativa
  Clone ID: PAT_MRT4530_57549C.1.pep
MAHRAFGPARHGPRRVGPCLGCECGTGRASCPSAPTPPRRVVVVAGEAIKDEEQRGTGPKASTVVGGGGRRPPGNQDDGHRAAAGSGGNEGDDDADEEERIPSGGAGLGE

SEQ ID NO: 158036 - protein, 111 aa, Oryza sativa
  Clone ID: PAT_MRT4530_5754C.1.pep
PPPPPFQPPLFFFPDPKFFPPLSRFFFVPTAFFYRIVSSPAGFLGSPLPSSLMDLCIRSVPFPPVIVFPPRPLFGPHAPSCLRAIPFFSMVTFGGGFPLFIPPGFFPPTLV

SEQ ID NO: 158037 - protein, 206 aa, Oryza sativa
  Clone ID: PAT_MRT4530_57550C.1.pep
MAVTGGAAPFLIVIAVLFLVVAILPRTRRRDGDAAPSQPVLGHLHLLKRPPLHRSPRRRGQGAAGVAAAGPRGGRCSRRRTPRRGGALHGVRRRDGGEAPGCSPWTSSVCEFFQGSHQYILENPNNCTFEEEREKSQRRNFIYLLDKGICMTNPPHLLTVVKKVCSFITWDGYQYMSNQFGRTNAVALPLKKGAGFELILQQDLHY

SEQ ID NO: 158038 - protein, 80 aa, Oryza sativa
  Clone ID: PAT_MRT4530_57551C.1.pep
MGLCPCRVCLWGLRVTRNPACMRAAYVRGVGMRRKEDDEAIDGRRCIAGRLGGSEPVNVTHSLRGRYQQLYEQRFLALRN

SEQ ID NO: 158039 - protein, 138 aa, Oryza sativa
  Clone ID: PAT_MRT4530_57552C.1.pep
MEVVEGSEESKGSSSPLMKLLFVEMGVGYDQHGQDITVAAMRACRDAISSNSIPAFRRGSIPGVSFDQMKLQIKLGVPHSLQNSLDIEKVKSVFPYGEILNVEVVDGGLICSSGVLVEEMGDKNDDCYIVNAAVYVGY

SEQ ID NO: 158040 - protein, 103 aa, Oryza sativa
  Clone ID: PAT_MRT4530_57553C.1.pep
WLDCPSPFYSGNLLHVGYHKINIPIWGVWLVVLTCYFCCGTCTPFFSFFFLSATYGVINLDGAVPLQAHRNRHTVIGALKLKLENSTSAIQSTYRYRETDFTP

SEQ ID NO: 158041 - protein, 51 aa, Oryza sativa
  unsure (1)..(51): unsure at all Xaa locations
  Clone ID: PAT_MRT4530_57554C.1.pep
RTTSITGGLHPILSLLVKVLPGVRERGPKQXLRLNSHRPPPSTTTVPSSSS

SEQ ID NO: 158042 - protein, 54 aa, Oryza sativa
  Clone ID: PAT_MRT4530_57555C.1.pep
AVTTKAFSSPLLFRPSHYVPKDHAHHHGFTTCANSLTIPVACGVFPPESPQNWT

SEQ ID NO: 158043 - protein, 193 aa, Oryza sativa
  unsure (1)..(193): unsure at all Xaa locations
  Clone ID: PAT_MRT4530_57556C.1.pep
RPKHADNSRVGGAGAAREEGGEEAREWAEEGAGRRGGGKAGRVVGVIXPPPPLSSFEPLPPEYEDSSHPRCCGDHLWLWPNDDRHAPLPFLDACSLGSGWRRRSRGSPTSSSLSLLAPLAHELVCREEHRAAWRRGGRGEERSVTRLLPLGTLAASPPQALAGIPASLRCPLLRCPKRRWLRVPSLPPPTPPA

SEQ ID NO: 158044 - protein, 77 aa, Oryza sativa
  Clone ID: PAT_MRT4530_57557C.1.pep
GLLSNLPRVWFDLGEEKAKGPCPYEWSTRLRAPPPGFLQMGQGSFFFEGPPFFFFSPKKKKKKKKKKKKNQKKKKNN

SEQ ID NO: 158045 - protein, 314 aa, Oryza sativa
  Clone ID: PAT_MRT4530_57558C.1.pep
SEEEIRNFMVQILQGLAYMHNNGYFHRDLKPENLLVTDGTVKIADFGLAREVSSSPPYTDYVSTRWYRAPEVLLQSSAYTPAIDMWAVGAILAELFTLSPLFPGGSETDQLYKICAVLGTPDHTVWPEGMNLPRSSSFNFFQIPPRNLWELIPNATLEAIDLIQVLMYWVPRPLHASHTKTIETRPNPRLELNLWDFGTEPEDNYLDLTLSLKPSFPGTDFSNNVPEHTKEEILLYPGFENPPVQSGFWPLVASDRPMGDVPAMSSWPQAYVVDGQATLPAVGFSGSPFGLSPLQPNLFENRSFATPIRQVNFF

SEQ ID NO: 158046 - protein, 136 aa, Oryza sativa
  Clone ID: PAT_MRT4530_57559C.1.pep
QQQSYINEDITECVLPAIDEWQELMHDLDGLSQRCLTIQLRLHLLLQHQCAQTHAVDDQKRNRLRCMRQPQFCVPATVQLINNRVMQRTAVATAQAGSATISLPGHYYAIRRLGSNYTVGRAVLSTLSKLKIKLKT

SEQ ID NO: 158047 - protein, 2077 aa, Oryza sativa
  unsure (1)..(2077): unsure at all Xaa locations
  Clone ID: PAT_MRT4530_5755C.1.pep
MESTDGKSPTQIELGRHYIVSGPMSPSPTWRPVDLRYKRDHPGRPXGIEFQSQHIHHNLRNPHTSVPQYPLYPVYGYPPSTVARQVGGLGAQGSTTMTSSFVDNSVNTNLNQGVPTSTTLVWTQVDEIVFLVYTTMPISAGPPMAGNENAAATTRGDSMLKVPPAKAEIGTSTTSEPEKDPSAAKPCLSDRNHEPTRITSEVTKSWCPIHKTRKHTLQACWVFLNVHSEIRACKERGIQRTSPTRDVYCPIHKTKNHDLSSCKVFLSAMKTPPPKVQQSRIPIRDEDKEQGATPISDRFVGVIDIDPHEPSVLHLLEDYGSSTSTPREVLSIDDVGTSARTKAKAENQVTTPTQHIRAVNAILRETPYDPILNDDLTHWTEXLRESVTNLSNAFEEAAAAAHPEQPPTGDANGEDPERRESPHRATPPPRGTSDLRDHLNGRREARHTQDNENHSRRHISSRRHDNGDNRHNRHDHDDRERRVLGDTSRGRRNNDDDDGDRRRDNSGRRRQDSREPSRRPRNRMPEPSDPSSSSSSSSSSSSDRHPRRTHDRRQPTAPSAGCRAFGRSLQDVRWPERFRLGAIEKYDGSTESEEFLQVYSTVLYVAGADDNALVNYLPTALKGSARSWLMLLPPYSISSWANLWQQFVANFQGTYKRHAIEDDLHALTXNPGESLRDYVPRFNECRNTIPEITDASVIRAFKSGVRDRYTTQELATRRITTTRRLFEIVDRCAHVDDALKRKNDKPKTGGEKKPAKDAPESSKKKNRKSGKRKAQSEVLATEYVDPPXRPDPQGSDMKKAWCPIHKTDRHSLDDCLVFKKSLAKHMASEKDKRVRVVEKDADAPTQESDSAYPDSDLHVSHIFXVPRHTPQSENTRKWNVKSVRHLIHHGSTADVALMSTMTSSPAAARHLVXSQRMMARRRKRRAPTRRGRRGELTEGSDDGGRQRTATAARSKRQRRSGAIIGRTALAKFMAASHYAYQVFKMPGLKGTITIQGNAKLAVQCDKRSLDMVEHMPSLPATAEPPKKVSKTNKTPKPDGAIKIIPLSNANPDKTEVALITFLRDNADVFAWQPSDMPGVPREVIEHKLMVRPDAKPVKQKLRRFAPDRKQPIREELDKLLKAGFIIEVLHPKWLANPVMVRKANGKWRMCVDFTDLNKACPKDHFSLPRIDQLMDSTAGCKLLSFLDAYSGYHQISMAKEDKEKTAFITSFGVFCYVKMLFGLITAGNTFQRTVQGALSDQLGNNVEAFVDDIVVKNKISDSLIDDLRETFDNLRRYRLMLNPEKCTFGVPSGKLLGFLVSSRGIEANPEKIKAIENMKSPTRLKEVQKLTGCMAALSRFVARMGERGQPFFALLKKQDKFVWTQEAEEAFIALKRYLXNPPVLVAPXPNEELFLYIVATPYSVSTVIVVEREKVQRPVYYVSEALHDAKTRYPQIQKLLYAVIMTSRKLRHYFQAHKVTVVSSFPLGEVVRNKDVVGRIAKWVVELSQFDIHFVPRTAIKSQVLADFVADWTMPDNKLDNQIDNEIWTMAFDGALNSQGAGAGFILTSPSEDQFKHAIHLNFRATNNTAEYEGLLARIRAAAALGVRRLIVKGDSELVANXVHKDYKCSSPELSKYLAEVRKLEKXFDGIEVRHVYRKDNIEPDDLARRASRREPLKPSTILDVLTRPSVKEASGEDSPVAPDTSSGATEAERAVADIETTDDWRTPLIKFXSHEELPEDDAEAEKISRKAKVYCMIGNDLYKKALNGVLLKCVSSNDGRHLLLDIHEGVCGSHAVGRTLVGKAFRQRFFWPTALKDACNMXTHKAASTSTPDYPSHLAVLVLRARYTRAIPTRTRRLQVPIXVAIDKFTKWIEATPTGENKADNAIKFIKGIFCRFGLPHRIITDNGSXFISADFXDYCIRLGVKICFASVSHPQSNGQVERANGIVLQGIKTLLWAMRTTPTTSNKDTPFFLVYGXEAMLPTELRHQSTRVQKYSDEDQEEQRYDDVNLLEEHRERVAVRAVNYQQALRRYHEKRIRARTLSIGDNVLRRVQNQAGHNKLSPKXLRPGAFKIADGDGRELANSWNIDQLRKFYV

SEQ ID NO: 158048 - protein, 89 aa, Oryza sativa
  Clone ID: PAT_MRT4530_57560C.1.pep
IYAGPIEPRHPHDLLLNEEHRRLAPGTNCNPILRVACLFTSITISMVTTRLVQGIYPGYTFLLIIIYYPEGAEKINVRITGLEAQQKGE

SEQ ID NO: 158049 - protein, 78 aa, Oryza sativa
  unsure (1)..(78): unsure at all Xaa locations
  Clone ID: PAT_MRT4530_57561C.1.pep
KRLSNCKMPDLKIARMTQSEIQSDLCYQSQAVLDLXKSXETYLVGLLEDTNLCAINDNRVPIFFQVIQLARRICGERS

SEQ ID NO: 158050 - protein, 192 aa, Oryza sativa
  Clone ID: PAT_MRT4530_57562C.1.pep
ASATSFRELIGVQPSSASPTDSVLIIIDAQNEYAEGKLQVTNVAESRKVIAALLEKYRAANGSIVHVVHATPEGAPVFTPGTKLAQEFDELKPKDGEAIIQKNYPGSFAKTDLQEVLDKTGKKKVVLTGYMAHVCVSTTARQAAERGFDVLIPEDAVGDRNIPGVGADQLVKVALSEIGDAFGTIIKSSDIA

SEQ ID NO: 158051 - protein, 576 aa, Oryza sativa
  Clone ID: PAT_MRT4530_57563C.1.pep
MPMRRQCARGVVVRCAGAGAGRSFGGASCGGGGGGGGGAEDQEEEGTRFVGWFREAWPYVRGHRGSTFVVVVSGEVVAGPHLDGILQDISLLHGLGIKFVLVPGTHVQIDKLLSERGKKAKYAGRYRITDSDSLEAAMEAAGRIRLTIEAKLSPGPPMLNLRRHGVNGRWHEICDNVASGNFLGAKRRGVVGGIDYGFTGEVKKIDVSRIKERLDRDSIVVVSNMGYSSSGEVLNCNTYEVATACALAIEADKLICIVDGQIFDEHGRVNRFMSIEEADMLIRTRAKQSEIAANYVEVVGEEDISYARNLPIKEEKELGLIGRDFVDGYTASFRNGVGFNNGNGLSGEQGFAIGGEERLSRSNGYLSELAAAAYVCNGGVQRVHIIDGTVGGSLLLELFTRDGVGTMIARDMYEGTRMAREEDLSGIRKIIRPLEESGVLVRRTDKELLEALKSFIVVERDGSIIACAALFPFLEDKSGEVAAIAVSEECRGQGQGDKLLDYVEKKALSLGLEKIFLLTTRTADWFVRRGFKECSIESLPAQRRKRIDLSRGSKYYIKRLRAAEIGQMAVNNFAVR

SEQ ID NO: 158052 - protein, 387 aa, Oryza sativa
  Clone ID: PAT_MRT4530_57564C.1.pep
MPTSAMSTGGVSAYGGLNSHRIFPPSVPYNNSVNNFGVNGLGTQSHLNIEKRLFGRDERVVYDEALKGLGKTISTIALIQKERVEQSKFMSADVGSMKSVANLDEDDEVVIVMDKKQLKGESVNMLQDSTLFPSSEAASDAADLKPWASLPGSAVDRMDPPEDVVVATCADKLESGATTSSSVEADGSPSICESSYISSKIRATTDILNSIVNTPALTWSDTMESSPSEVAPSKAIVFSQWTGLLDLLELSLDSSRIKFRRLDGAMSLNLREAAVREFNTDPEVRVMLMSLKAGNLGLNMVAACHVIMIDPWWNPYAEDQAVDRAHRIGQTRPVTVSRLTIKDTVEDRILALQEKKRKMVQSAFGEDKPGGSATRLTIDDLQYLFGI

SEQ ID NO: 158053 - protein, 175 aa, Oryza sativa
  Clone ID: PAT_MRT4530_57565C.1.pep
MAEEAKKVEVTKDIAEEKAVVPLPTPPATEHDDSKAIVLVKEAEATGGSAERDAYLAKIVSEKRLVLINAWEESEKARAENRAAKKLSYITSWENAKKAEMEAELKRIEQELEKKKAAYEEKLKNKLALLHKTAEEKRALTTAKRGEELIMAEEMAAKYRAKGEAPTKLFGLLKA

SEQ ID NO: 158054 - protein, 102 aa, Oryza sativa
  unsure (1)..(102): unsure at all Xaa locations
  Clone ID: PAT_MRT4530_57566C.1.pep
DGFTAFKDLISSTTGYAXFAKEKXXGGWXIGXEXEXVDDXXLCCAKPPDCEWKKQAGNVCAASFDWSCSGICKSVDRMRAIHSACGEGDGAVSNNFAAAAAA

SEQ ID NO: 158055 - protein, 1037 aa, Oryza sativa
  Clone ID: PAT_MRT4530_57567C.1.pep
MDIIDLCSDSEEYFSPYSDTEDNLDFDDPNDGVNQVVLHNTAFGNNSSELLVGLDDDNWLNNTHALSSHRPAENRSDIIESSSGVNTDCQNSAWQYRTLPHTFMSSSYKSRPLSLTGGNNVESTHPTVKPNTVHYNGIGFPSPAIASGYKPYVSYGQGVSIDDDDDDVYEVLHQPFPFSHSSLGDKKIEEESTWKYNGFQTSSAYGIEMPTSARSTGGVSAYGGLNSHRIFPPSVPYNNSVNNFGVNGLGTQSHLNIEKRLFGRDERVVYDEALKQISQETTEENLPEGVMSVSLLKHQRIALAWMVSRENSSHCSGGILADDQERVEQSKFMSADVGSMKSVANLDEDDEVVIVMDKKQLKGESVNMLQDSTLFPSSEAASDAADLKPWASLPGSAVDRMVNAVKVEPKKKARVRPSSSSTLRSANRSTAGTLVVCPASVLRQWASELAAKVTESSKLSVLVYHGGSRTKDPTELTKYDVVVTTYTIVANEVPKQNSDEDMEEKNSETYGLCPAFSIGNKRKKDSEPKKKKKPKNSDADLDGGPLARVRWFRVVLDEAQTIKNHNTQVARACCGLRAKRRWCLSGTPIQNTIDDLYSYFRFLKYEPYSVYGSFRSMIKYQISRDATRGYKKLQAVLKIVLLRRTKETLIDGEPIIKLPPKTIQLSKIDFSKEERTFYMMLEEGSREKFKEYASAGTIRENYANILVLLLRLRQACDHPLLLKGKEKDLIDTGSVEVAKKLPKETVINLLGQLEGDYAICSRCSDPPEDVVVATCGHVFCYQCVHKSLKSDENVCPSPSCGKKLSAQSVFSPGVLRFCIADKLESGATTSSSVEADGSPSICESSYISSKIRATTDILNSIVNTPALTWSDTMESSPSEVAPSKAIVFSQWTGLLDLLELSLDSSRIKFRRLDGAMSLNLREAAVREFNTDPEVRVMLMSLKAGNLGLNMVAACHVIMIDPWWNPYAEDQAVDRAHRIGQTRPVTVSRLTIKDTVEDRILALQEKKRKMVQSAFGEDKPGGSATRLTIDDLQYLFGI

SEQ ID NO: 158056 - protein, 112 aa, Oryza sativa
  Clone ID: PAT_MRT4530_57568C.1.pep
SLKGISLVVCFRRPPPPPKPRRRAAADQAAVLYKTPCSATTVTFRYPTDATTVRLGTRQTRDVDLLLTDIDFTHAGTLVLFLLMTRGNDPPSIWTHHDDTLDTLRTRTELHR

SEQ ID NO: 158057 - protein, 412 aa, Oryza sativa
  unsure (1)..(412): unsure at all Xaa locations
  Clone ID: PAT_MRT4530_57569C.1.pep
RRGSGTHGGSRSSLADLRSGAGXGGGGGRDANCDTLVPPSFVRTDGCGRGDHSPPVHTFGFGKDHDAVAMHTIAEVTGGTFSFIENEAAIQDGFAQCIGGLLSVAVQELHFDAETWRGPDXHERGRRRGGGVRRRRALRGGGPGXVRVEAIDDIALELKSRVFADSSVVVSFMQRPVGSYHHVTCHDGFKEFDDDLGFTLCNDYYSPPPKLVDFVADHPRCCDRPPRRATPCEDDGLRPLLDDEALQGRGARPPPLLLCSASPLRPLVHASPPRCCPARRPPRALVGLPPSPFSSLRRMREAGSERARQRSASGRRTGGGQSGGGRAQQLPAAFPLPHLAISRRPPLPLPSSPRTRRAGGRGGGAPHRRPRVVRKKAAAGGGGGGGGGGKGVVATTTAPTCSSASQRGSTWR

SEQ ID NO: 158058 - protein, 112 aa, Oryza sativa
  unsure (1)..(112): unsure at all Xaa locations
  Clone ID: PAT_MRT4530_5756C.1.pep
TEPQTKPYPLDMWKYGSALQQRPEDRSLYGRGATIKTMHPXAQPKTILGVLKGRSDDVSCLARFPKRRLQLPRRADLPKLQRLHDQRKRKXFNSNKFHITAEIKHKNGFLTS

SEQ ID NO: 158059 - protein, 628 aa, Oryza sativa
  Clone ID: PAT_MRT4530_57570C.1.pep
MYSILRRAAPLRRRAVSALAAAVLRREEAAAEVVVSRRATIPAAWFHSSPAWLGFRETGAAGAAARPQYAADEGLFYEEDKRGAKAGGVAAGGAEEGLEVAKLGISPKIVSQLASRGITKLFPIQRAVLEPAMQGKDMVGRAKTGTGKTLAFGTLILDAIIRHNEKNSPGKFPLAIVLAPTRELAKQVEREFSDSSNVETICVYGGTPISQQIRQLNYGVDVVIGTPGRVIDLLKRGALNLSEVRFVVLDEADQMLSVGFDEDVETILDRVPPKRQTLMFSATMPTWIQRLTQKYLKNPVTIDLVGEDDQKLAEGISLYSIASEGHAKPAVLGELIKEHAKGGKCIVFTQTKRDADRLSYTMGRSFQCQALHGDITQAQRERTLKGFREGHFNILIATDVAARGLDIPNVDLVIHFELPNSSELFVHRSGRTGRAGKKGKAIVMHSYQQSRAIRMVENDVGCKFTELPKINVEGSDLMSGGFDSFGGGGFGREGGGSYGRRGSFGSSSSRGGGFGDSGFGRSGGGFGRSGGGGFGRSSGGGFGDSGFGRSGGGGFGDSGFGRSGGGGYGDSGFGSSGGGSGRSGFGRSGGFGDSGSGRFGGGFGNSGSGSFGNFGGNNSGQSGGFGSS

SEQ ID NO: 158060 - protein, 89 aa, Oryza sativa
  unsure (1)..(89): unsure at all Xaa locations
  Clone ID: PAT_MRT4530_57571C.1.pep
VLCHDPTGVFEFSKYTVGSVCIAKKRSVLIGKESPLIIDEGCTAMAVEMVSGVSVLKRASRAAGSSMQVLEGXARPGVFALDPCGTAPV

SEQ ID NO: 158061 - protein, 79 aa, Oryza sativa
  Clone ID: PAT_MRT4530_57572C.1.pep
VLRLETWNSQQKRRIVMWSCARASLGKFYLVPTLLLGLLANHSPNLARSSASASQVTHLIHCSSFHNVNLNMIGLALRM

SEQ ID NO: 158062 - protein, 294 aa, Oryza sativa
  unsure (1)..(294): unsure at all Xaa locations
  Clone ID: PAT_MRT4530_57573C.1.pep
MRTVALGIVAMACLVAIAHGGNFFQDAEVSWGQGRGKIVDGGRGLDLTLDRSSGSGFQSKSEYLFGKIDMQIKLVPGNSAGTVTTFYLSSQGSTHDEIDFEFLGNVTGEPYTLHTNVFTQGQGQREQQFRLWFDPTQSFHTYSIIWNPQHVIFAVDGTPIRDFKNHEARGVAFPKSQPMRVYASLWNADDWATQGGRVKADWSKAPFVASFRDFNADACVWSNGAQRCVPXGTMETVAAPAGGRRGGAMGWWNKETSRDRHRXTGGAERRIMIYNXCTDPKRPQPRPVPAECSM

SEQ ID NO: 158063 - protein, 355 aa, Oryza sativa
  Clone ID: PAT_MRT4530_57574C.1.pep
LVAGWLKGLFVLFELEQRRRMAALLVVVLVAMSAMVATANFNQEFDITWGDGRGKILEDGQLLTLTLDRTSGSGFQSKHEYLYGKIDMQLKLVPGNSAGTVTAYYLSSQGPTHDEIDFEFLGNVTGEPYTLHTNVFTQGQGQREMQFRLWYDPTKDFHTYSILWNPKHIIFMVDDMPIRDFRNLEGKGIAFPKNQPMRLYSSLWNADDWATQGGRVKTDWTHAPFSASYRGFRADACVVAAGGRTRCGATVGTDAAPGTGAAAAAGGWYNQELDLTRQQRMRWVQSKYMIYNYCTDPKRFPQGVPAECSMTEDDEKGHEYEYTRRTRARNDPSGLQTLSCLAGHWAIDVKCVFNF

SEQ ID NO: 158064 - protein, 71 aa, Oryza sativa
  Clone ID: PAT_MRT4530_57575C.1.pep
GKPLPGIFPPIALKGKGVSVGVFNFLGLAMFCRESLLSRWVIQRVNLYIRGTGKEPKIKRQPARSTERGAF

SEQ ID NO: 158065 - protein, 112 aa, Oryza sativa
  unsure (1)..(112): unsure at all Xaa locations
  Clone ID: PAT_MRT4530_57576C.1.pep
LXAXXIPXLATFXVGXSQXQGAXLLFKKWXKSFKKNVHXAANKXTPVXGLNVXXWWYXGRHPGLGTPPXXPXXKNLFEGRTLPXGWLNFLPMXPXKLGFXRLRXAPXVXNQN

SEQ ID NO: 158066 - protein, 256 aa, Oryza sativa
  Clone ID: PAT_MRT4530_57577C.1.pep
MASKKSSTQASPMAAAAASLLLGLLLVLPVPAVSSSDAEEAVVSRFREYLRIDTAQPAPDYAAAVAFLRGQAGAAGLEARTLELVAGKPLLLLRWPGRRPSLPSLLLNSHTDVVPSEPHKWDHPPFSAALDEASGRIYARGSQDMKCVGMQYLEAIRRLRSAGFIPDRNIYLTFVPDEEIGGHEGIEAFVASKEFKDMNVGLVLDEGLASPGEEYRVFYGERSPWWLTIKAKGAPGHGAKLYDGSAMENLMKSVEA

SEQ ID NO: 158067 - protein, 487 aa, Oryza sativa
  Clone ID: PAT_MRT4530_57578C.1.pep
MASKKSSTQASPMAAAAASLLLGLLLVLPVPAVSSSDAEEAVVSRFREYLRIDTAQPAPDYAAAVAFLRGQAGAAGLEARTLELVAGKPLLLLRWPGRRPSLPSLLLNSHTDVVPSEPHKWDHPPFSAALDEASGRIYARGSQARFDFLSPRLLKISIFGCLVNSSYVVSMFLDMKCVGMQYLEAIRRLRSAGFIPDRNIYLTFVPDEEIGGHEGIEAFVASKEFKDMNVGLVLDEGLASPGEEYRVFYGERSPWWLTIKAKGAPGHGAKLYDGSAMENLMKSVEAIRRFRTSQFDLVKSGAKAEGDVVSVNFAYLKAGTPTPTGFVMNLQPSEAEIGLDIRLPPSVHTEALEKRLAEEWAPSSRNLTFEFKQKTSVLDNFGKPAVTPADSSNVWWALFEEAVKRAGGKLGKPEIFPASTDARYFRVLGIPAFGFSPMTNTPILLHDHNEFLSKDEYLKGIGIYESIIRTLATLKDSNVDYESRAEL

SEQ ID NO: 158068 - protein, 103 aa, Oryza sativa
  Clone ID: PAT_MRT4530_57579C.1.pep
MEVTACGGTFEHACEEAALRVMAHLRELHDDTLNATAYRFHPRRGSSSNTSTFKSAWGENDVTFGHMSDVMEGYDKLHAMLHKATKRLNDQKLVRIAELQDEL

SEQ ID NO: 158069 - protein, 384 aa, Oryza sativa
  unsure (1)..(384): unsure at all Xaa locations
  Clone ID: PAT_MRT4530_5757C.1.pep
MSRVSTSWGFVYSRVNKAEGRGARTGSTGVGPTQQPHGPRWTGCTRLTPAGAVGPTRQPHPRARAADGRAPHGSRGTRPKAATPAQPTGGGAPAPLWSPAAAIGTAERRPREGREGGSETAVHGSPRVDGDDGNGDRSGGRRRRGSGCRGRRRSGGRRAKRRGXRGRRGRGEPEGGDAEAGEGPERRRRRTGARRRRRRERATARARFRRGERAASGGNGXRRHGECLYRVGSERGRPEEKETGAALSGSINGAGEICGSXIRPFEREREREKWGERERESRGVISPSLLRAGTAGGGGIRGGSGARARARRRERREVGDDGWAPPVSEGGGRARPSAARARGKARWASGDRTETEGAGPIRPNRRRGGGXKRTFRVFLFIKPF

SEQ ID NO: 158070 - protein, 112 aa, Oryza sativa
  unsure (1)..(112): unsure at all Xaa locations
  Clone ID: PAT_MRT4530_57580C.1.pep
ASYWSAWSARDALCEHEKLLRDGRXDLLNVENGSSSGMIDINVASAIMLCVVASCLLIMLYKMMSYWLAELLEVIFCVRGDEGLTTCLEALLSTWIRAASECFFKVPLCGAV

SEQ ID NO: 158071 - protein, 57 aa, Oryza sativa
  Clone ID: PAT_MRT4530_57581C.1.pep
KRIIFFFIGESQGSINIDLLVQSKDIYRLIDDTQKEMHTPYLVKQRRRVQRESSDAR

SEQ ID NO: 158072 - protein, 1066 aa, Oryza sativa
  Clone ID: PAT_MRT4530_57582C.1.pep
MEFTNSDEAWAFWLSYSGQKGFEVRKRYTNRSKSDGSVTSCRFVCANEGHRLQDKRDHLTKCPRAETRTDCQVHMNLKMNRKKGNYIVSDLILEHNHALHLPETIHLMVSQRKISDLQAFQIETADDAGIGPKAAHELASRQVGGSLNLSYTLRDHRNYLRTKRQREMAYGQAGSMLKYFQDKIAENPSFQYALQMDCEEQIANIFWADAKMIADYARFGDVVSFDTTFGTNNESGVKNEESKEDTSVLSDFSACIYEYEDMAAFEQKFDIMRAKVSKQTWLDSIYKLKEKWAECYMKDVFTLGMRSTQLSESLNNDLKNHFKSDFDIIRFFKHFERVVQGKRNTKLNSEFESRKKLPKICMRRPPPMLVQASKLYTPIIFEAFQGEYEKSLAACSKELDGNNEYLVGDFTYEEEYKVIGDPLKQTVQCSCRRFDRIGILCAHALKVLDLMNIKSLPPHYVLKRWTREARSGTIQDNLGRNIIENPNMDAMLRYRFMSHKFLNLAHRAANFPECTMLVDSALDILDVSPPNDLLSNARLKKKEVKTRSSKRTRGWLDKNQKTRKKRGKNEKTKQKKSVIQKVREEVGDAEEQLADDSAPMDKWKEPEDYEAIDSFTQLLTWPMVVASNQEALRPTSSTETADLDIHGGAAEFPHGEDAGLRVGESVAAEGTYSTRASAGGQEATSGGESSFSLLCFSPSASATDNWAERWTATGPKDDEKGNRAVAVGFGMDADEAKYIPLRSASGGDRWGRRESSGADAADGARGPRLGARHSPRRVHPHRLERGDVDDGETCCPLAVAGRPERAVREALVVVPAAARADGEAVVAAADDVGAHLVSGDRPRRAARSGGGEGGASGLAPWSSCSRSRPELCSALALAAVLALDLAAVAFFSSAASLTERRTRPPRSPVSASLPAARPPRASSAPRGRGPRAPPPPLRSRVVGGGGVCQVGEEGAQFPPRPARAKRAMKAAPREADAAAQIHPRGPAAAGLPPPPPASSRTSPPAGCRCSAGEKRRGERERWRGVKRRLARGIHAESAATSDKIGVKTTEGSTYPVLWFEDDFVTR

SEQ ID NO: 158073 - protein, 54 aa, Oryza sativa
  unsure (1)..(54): unsure at all Xaa locations
  Clone ID: PAT_MRT4530_57583C.1.pep
PVRQPESHPAKRGRQGTILYSRGIESASDMIRXLITLWXTGHASSTKLECLPPY

SEQ ID NO: 158074 - protein, 649 aa, Oryza sativa
  Clone ID: PAT_MRT4530_57584C.1.pep
MATAAVFSASARRLLSTVAGGAGAGSAAELPVLIGHLRSLARAGRLADIDAALAPHLASHSVAAVSALSSVGLPDRASALLATIRNPTAAHLNALLAPLLRRHRLVGLIPTLLAAHPSVPRDDATEGIHAKALCIATGADSALHLLQRESPPPSLQLFTSVIDSYYKQRKPHRAEQLWREMVEDHGIVPDAAAHNVRITYKAATGTVEEVKELIRAMREDAGLQPDIVSHNGLMRAMARHGRVDEMMEVYKRLEKGSASAAAEGKSAPDCATYTCVVAALCKAGRWSEADDVFYEAVKRRKLADLGTARVLVRGLKEAGKGRAARRVVIGLRKKFPDRFDGPWKDLEELAGIAGEDEESDVEGEDDEQPPATTTTTAALNTSPILELGTTPPPPTTRLLSGGGGARGPLPLGADDALGGRAAGSEAETGERGGRVRRSVREAAEEKKATAARSKAKTAAKAKAEQSSGRDREQDDHGAKPLAPPSPPPLLAARLAVFRAVARRQPRLPLDWEINGIDRSGLDAQVAEAYSANLVQIASPRTLRPVLVLTPVTADEVRAYVVCCRDHGLTVRARSGGHDYEGLSYCSLRPSGDGEGAARFAVVDVAALQAVRVDAARGVARTKAGATRAVCRIGAAGLPPPPPVSSGSRS

SEQ ID NO: 158075 - protein, 150 aa, Oryza sativa
  Clone ID: PAT_MRT4530_57585C.1.pep
KKGDPGGPPHNQKNKKKGPKGPRKKPCRTGEKGPPPEKKKKKKMGAGPPGEPQRKGNKSLPRQRPGGPKRMLIFSRGDFVNRTFPPKGVNLVPGKFEQLYPLDKKTPFPQKRGTPNQNGAGGVFFLGSHRNKKTGKQGFFGPLHWKGHQS

SEQ ID NO: 158076 - protein, 291 aa, Oryza sativa
  Clone ID: PAT_MRT4530_57586C.1.pep
MEPSRSRLPLIHFSLLASLCSARWRDDSRGFLWCPASRPPRRGPLAIVVYAHDETAMSPEQEDWEINGIDRSAYSANLVQIATPRTPRPALVLTPVTADEVRAYVVCCRNHGLTVRARSGGHNYEGLSYRSLRSSGDGEEAARFAVVDVAALWVVRLDAARGVACTKARATRAVRSVVAAGLPPPPPISSPPGGCAAPALHHRQDELRGLSSCTAAASSSEKAMTAGSDDPFFPASGSGWLDDNLDNEQMAISERRWARGNIWSAHLGGSRKGAFCLFGDVAINDIDFFIN

SEQ ID NO: 158077 - protein, 93 aa, Oryza sativa
  Clone ID: PAT_MRT4530_57587C.1.pep
MYNMVPRNSLKRRKGELEAIDELTGWRSSPPAHASLWPVPPGREEREPNGGSEQIDATSGKTLTTAVARPDPASMTPDLWISLVLELGQIQRA

SEQ ID NO: 158078 - protein, 616 aa, Oryza sativa
  Clone ID: PAT_MRT4530_57588C.1.pep
MASAFGSTSACGIKITPTAFATKKHLCLVPPPVVSLPRKNRPQRKCNFRVNAAKELYFNKDGLAIKKLQNGVNKLADLVGVTLGPKGRNVVLESKYGSPKIVNDGVTVAKEVELEDPVENIGAKLVRQAAAKTNDLAGDGTTTSVVLAQGMITEGVKVVAAGANPVQITRGIEKTAKALVSELQKMSKEVEDSELADVAAVSAGNNYEIGNMIAEAMNKVGRQGVVTLEEGKSAENNLYVVEGMQFDRGYISPYFVTDSEKMSVEYENCKILICGLYAFDANVDSITQLLLVDKKINNARDLITILEDAIRGGYPILIVTEDIEQEALATLVVNRLRGALKIAAIKAPGFGERKSQYLDDIATLTGGTVIREEVGLSLDKADRDVLGTAAKVVVTKDSTTIVGDGTTQDEVNKRVTQIKNQIEVAEQEYEKEKLNERIAKLSGGVAVIQVGAQTETELKEKKLRVEDALNATKAAVEEGIVVGGGCTLLRLASKVDAIIETLENDEQKVGAEIVRKSLSYPLKLIAKNAGVNGSVVTEKVLANDNFRYGYNAATGKYEDLMAAGIIDPTKVVRCCLEHAASVAKTFITSDAVVVDIKEPEKAAAAGNPMGGSGFGF

SEQ ID NO: 158079 - protein, 141 aa, Oryza sativa
  unsure (1)..(141): unsure at all Xaa locations
  Clone ID: PAT_MRT4530_57589C.1.pep
KXXXXXXRKKXXREKREXXXFILLXXPXXVGRMXGKXVRXRXXGKXXXGGXRGAFIIICLWXGRXXXPXXGXKPGKKKXPFGKETXXXGXGVXXXVIRSQXARMEPDXXXNXGXEGXFRGRNXKXSCSSXGXXXAESCTQR

SEQ ID NO: 158080 - protein, 196 aa, Oryza sativa
  Clone ID: PAT_MRT4530_5758C.1.pep
EGSRQQLHGGEDGVGHAAAMPTMVAAQPDDKPGDRRDVDDENERRRRRWTEEGKPTSRGGGRGGQRDAGDEEDGKAGAGDGGLQTNQRAGRGGGRRGDAEGGDGAAGPHLSGAAGAAGGGTVAATALDDGGNAPPVVTARNGGQAGGEEAAATLEEATARPDGARARRERRLEAAGAGEREGRRRGGVIRPRGGSG

SEQ ID NO: 158081 - protein, 95 aa, Oryza sativa
  Clone ID: PAT_MRT4530_57590C.1.pep
MGSCASKKMRTTASAAAVHPWSPPPAAGQLTVRMRASEFNALAAGGDIGRAILDGCIAGLRAVVAQLSNAQQINAQDYRRRHQLAAAKASRSVKT

SEQ ID NO: 158082 - protein, 124 aa, Oryza sativa
  Clone ID: PAT_MRT4530_57591C.1.pep
MMKRMVILRRCEPPPPQPAAAVVAAMGGCCGRVRYGECRRNHAARMGGHAVDGCREFLAEGEEGTGGALRCAACGCHRSFHRRVVVVQQCCACDTAAAAAAAGGWEWRDCSPESSSSASSTTAS

SEQ ID NO: 158083 - protein, 477 aa, Oryza sativa
  Clone ID: PAT_MRT4530_57592C.1.pep
MPAPAPAATCFVFAASGVDQVQGILYADHQERAEACSSKKRHSDMAPGGFKARKKTALAVRPVNGVLTRGRKSLLPSEVPRAGPADESDGLEEQNIHVASRGDGIDQGHGGNQVASGGDVDGIAQGHGDNQVASGGEGDGLAQGHGENQVGSGGDGIAQTHGDNLMACEDDGTAQLEEEEPWIRGNNKGAALQRLSRSRRGKLPVVIKEGDIRPLQPVVAAKFATECNIIVRNHVPVFPKWKDYKNQSAIRRMFRMKLAAKFDIDIRATHVKFACVEMMKKAVRQHRYHLKRIFFNPFPLHLRNSELNKTNRSKVKYHHTTGSRSYKVHLENLGDKYKDQELDAVDMFKECHYSKKKGYTPDVQLAIDEMENKLSEHAEDEEAPSMTEVVAGVLAEKTKKPTFLQTVGIQSRKKGTLKEQLAAEKLAKDDLKSQVQELAKKLQESEQARVAEQQDMARKQAETNAKLDLLLSKIGHH

SEQ ID NO: 158084 - protein, 261 aa, Oryza sativa
  Clone ID: PAT_MRT4530_57593C.1.pep
MGIGGKDVSKIGMAKAWGMGGEGSTTASRPAAGLPPPPHPPPALLPDLMEVGRHRLSSRRRVAPPFRCRMPPLGRPSTAAAGPPLPRFGGEEGAAATAASAGHGQRERVKRGGCCRQAASASRPAAASPLPSTAACRLPPMTPLGHPSPDLADGMAGAAPPPLPAASSERGLASGGNMENMVTSLDGNKHLFAWLVVDEGMEARPATLPWLGTKQVTGKRRGHAETSSKGNKKSMTWHGGMEAGGEDSRRRGGRALLAPTV

SEQ ID NO: 158085 - protein, 123 aa, Oryza sativa
  unsure (1)..(123): unsure at all Xaa locations
  Clone ID: PAT_MRT4530_57594C.1.pep
GGGATTQEARGGRRARXARATTAGTTTQSGPVFLGLGTTGGGGQYMMXTLGMGSSTAMFISQPMAPLQQHCCVQLPGVMPDCSCGTRYQMMQSMPQVICAELGLQRMMMNMAMPMPYVCNMGP

SEQ ID NO: 158086 - protein, 176 aa, Oryza sativa
  unsure (1)..(176): unsure at all Xaa locations
  Clone ID: PAT_MRT4530_57595C.1.pep
PLWGGLVIPNVQGRGSVSSREGLALPEHDXLMEKFGSGVCRVASVSLAVSNPTIGAAPLMFLDGXKNVLAVAVETQYSSPHADKIKEYLQAPIKFAVPAPVAPGSGASAPSPAKEEKKKEEPGEESYGGLGISLFGLASYHFAAPPPSFVSSSEHRGLFLIFSKLILNKTKKVSNK

SEQ ID NO: 158087 - protein, 816 aa, Oryza sativa
  Clone ID: PAT_MRT4530_57596C.1.pep
MEIEAVGADGNPMLALINAYLQAYKFQTSYDCSSDTIVMAFCKPCLVFYSVLTFLILNGGPSHVLAKVFMVVMEDDPIISPKSSQKKVMRGEEAQKYKAMTTTKHDIFLDSFLPAGSYKKLYSYTHLLNGFAIYAKSEKAIKTLSGAKGVRLIQEDIKMAKMTTYTPRYIGANVVWPLLGGAEKAGDGVVIGMVDTGIDPSNPSFLSTSDQAKPPPASFKGTCQTGERFPPDSCNGKIVGARWFARAGQATGEFNATMHYASPYDPDGHGSLAIYKAAYSFGGYMSDVIAAVDKAVEDGVDIISLSLGPTTITSGPASFLNLLETQLLLATKAGISVVQAVGNGGPDANSVVSFSPWITSVGASTTDRKYNKSIIIGNGQVFSCGGLSPSTPGETMYPLALADDVCNTNSTGGSSNCQDPDVFIRSLVQGKVIICMFVSSNYYEGDFLAGIVDTIQKIGAAGVIITDRSSSDSDIEYHPTFPTSIPSAIVVNSADAQALLEYYDDNLVRDKEGSVTKFGATIRILDGRRAIYTREAPVVAEYSSRGPDVDDMQMQAADVLKPNVMAPGHHIWGAWSPTSDAMVEFQGESYAMLSGTSMATPHVAGVVALIRQRHPKWSPAMVMSAIMTTADVTDRSGRPLMARRDGGVLERATPFDMGAGAINAARAVDPGLVFDAGYRDYLQFLCAVPGVDDAPVLRAVGVPCPPSRARWCSDLNAPSVTVASLVGSRRVDRRVTSVGAENETYMAHVQAPDGVAVRVSPDTFAVAPGATATLRIVLNTTAPGNTFSFGEVVLRGDKKHTVRIPLAVFPAAALSP

SEQ ID NO: 158088 - protein, 96 aa, Oryza sativa
  Clone ID: PAT_MRT4530_57597C.1.pep
MGNRGRDQDPILSAAREVRRKLDAGGKEARRRLRSSPRRLAAARSPPPTPLPAAWPPLAAAYPSPARRREELRPSPLAVATAWLPPHDSGRVDLCA

SEQ ID NO: 158089 - protein, 1831 aa, Oryza sativa
  Clone ID: PAT_MRT4530_57598C.1.pep
MASPAALTAAAAREHVERIRRERFYIGREERNPLAEDIHQAVTYLSQELYSKDLHFLMELIQLRLAAFFTCVISSSALNAEDNEYPSDVEPALEFVIIKKDITATGAASTLLVFNNERGFSAANVESICRIGKSTKKGNRHLGYIGEKGIGFKSVFLVSSQPHIFSNGYQIKFNEEPSEDCDIGYIVPKWVDEKPSIDDIHAVYGYSKKLPTTTIILPLKSDKILPVKNELSSTHPEILLFLSKIRQLSVREINDDPKASKLSQISISSEVDYKTQKDINAESYTLHLAMQENKRGDKEECTYYMWKQKFVVKPECRDKKRMEVDKWVITLAFPHGQRLSRGARSPGVYAFLPTEMVTNLPFIIQADFLLASSRESILLDSQWNRGILDCVPYAFVSAFEALLKSSSNAPSFALPPIFRFLPVATSSIPVFDSVRLSIKNNIATKDIMPCESFDTQKVFCKPSEVARLDGAFWRILIMAKKRGINLQNLCSHGTSVLNSYLDSKEYNDVLGFLGVGYVNHEWYGKFIDGSNLVTQAPEDIYLEILSFIADNWWLKFSNTSMSDVPLIKYVTGADCPSYCSVSGANMHHKRICIASNVNDLPWIIGWSKELSTTSNMFFLPLNTQKSLNTFCRRTQIIEWLQKIAKLEIRNLYEYAFAASKTIYKASSAIAYCHFLYHSHANKYITEGSIINLSHAMPLVDKCGSVIKQKNALLVPAEGSNWFTLIGTNPWRSQKYIDLSADYMSSGTYAGNYTPEGQLITFLRTYAQAMDVPFMHPPNASFPSVSSPLARENALLLLQWIKNIRSSNISLPHNFLSCIRNGKWLKTSVGYKSPSESFLSSVGWGSKLQIQFIFSGVPIVDEEFYGSKLRGYVEELRAIGVQFEFANANLHIADQPLSMENVILLLQWIKDLRSIGVQLPHNIRSYIRNGSWLKTSIGYSSPSRSFLLPAHSGNLGQIISVFSDVAIIDQEFYENKISAYKDELHGIGVQFEFADASVHIVNYLMSKSSNGALSRVNMFAMLQFIRNLTENNLTSVNFIEKIKKGCQFKTCLGNRLPVNSILFNSEWENASVISSLPFIDTLFYGEDILEYKPELELLGVHVAFKQNYQLLVDNFSLIRDQITPDVTILMLKCLRYAEIPQHFAKKLKELKWLKTCLGFRAPPGTFLVNDDWKCLLNIVDDVPLLDLKFYGDEIRVYAGELRKVSVIVGFIEASKAIACRVTKLLCSSLFTEERGVAMLECYRELSTKHGKLPVDLANCMKYERWLHTSLGFRAPQEAIIFGSEWEHVSKISNLPFIDDYYYSEYGQGKGISIYRDELMALGAKAELKHGAPFVISGLKIPHDASAITPEAVISLLKCIRSWKMLGSALPDNFMSSINLRWVKTTAGYRHPKNCLLFGPACSSLHRDDGPFVDEVFYGQEILSYESELHTLGVIVDARAGCALMAQCLKSCSNGDAISRIYSYLEALRWKPRNANDNWIWVPQGSDNGQWVSPDRCVLYDRNSLFGSQLHVLVTWYDYKLLRFFKTVFGVKGHPTIGDYCRLWIMWQNSKSTPTPKDCAAFFEFVDKNWNTEIGKYLAGSITKVPVCSEDRILLLPKQDVFIPDDLLLEDLFRMQAEQPLFVWYPPASLSLLSPAKLNEIYSTVGVQKISKVVTRDESEDLKLDHSLTMVQKGTVIKPGLLRIILAFLADPALDFPAEKRHEMVSCLTNVVVYETAMPLTVSYQVGLSSGRSLNVKSARIFRWEREESRIFMTRNFGSASLENAERVQCAAYFAEEISKGLLFERTDQVPALAELIMAGFLLDFDVPAVRFLLKFKNVRLLEDDEQFCSYLA

SEQ ID NO: 158090 - protein, 126 aa, Oryza sativa
  Clone ID: PAT_MRT4530_57599C.1.pep
SSVLSATSATADASLQAAATSPPRPSATSPPRAVDDPPRPTAADPPRHVAASPLREANAPPRPVVTLSPPPLLRERPPRLSSTTGHLPSRSSARLPVGRHHSSFRRSHQLAAGIERGLTVATNGVH

SEQ ID NO: 158091 - protein, 60 aa, Oryza sativa
  Clone ID: PAT_MRT4530_5759C.1.pep
MALTPLTTSKIITPKIITNFHIHPSKRLRPSFGIPFLLRIQTLTPVALENWRSFLSRRRG

SEQ ID NO: 158092 - protein, 65 aa, Oryza sativa
  Clone ID: PAT_MRT4530_575C.1.pep
NRTADYIYTQAVTETIAYKITNTGHRGQQYEHTFYLQMALAHKWLKTPQSMLGSTSTYNRNWLTP

SEQ ID NO: 158093 - protein, 46 aa, Oryza sativa
  unsure (1)..(46): unsure at all Xaa locations
  Clone ID: PAT_MRT4530_57600C.1.pep
GAQVRSYESGPXRIRRGFPPSMEKMGNFAQLTGTQGQIRLVCSKVY

SEQ ID NO: 158094 - protein, 73 aa, Oryza sativa
  Clone ID: PAT_MRT4530_57601C.1.pep
RSRRRLRPDDPGQAPAPARAAAAARGGCGRVEADGDGGGGTWEKAVVVLRESDEACEVEWRWRRWGLCEGRRR

SEQ ID NO: 158095 - protein, 121 aa, Oryza sativa
  Clone ID: PAT_MRT4530_57602C.1.pep
QITGRLSIIIAYIAFIPKNVEKSIDQSKDAGAFVDDRSIENTTTLTHRSGLGDMHRMSYTYAGTHVCRHAWCTYKLAEPSRVVVCVLIVGADLQYNDRYRVTPTTFGKTYSKTVYPYVIIP

SEQ ID NO: 158096 - protein, 49 aa, Oryza sativa
  Clone ID: PAT_MRT4530_57603C.1.pep
MVGGDLTGAFPLRPCLQGHHAPGARGALPHYDPQLLCATHYRYALLLAV

SEQ ID NO: 158097 - protein, 69 aa, Oryza sativa
  unsure (1)..(69): unsure at all Xaa locations
  Clone ID: PAT_MRT4530_57604C.1.pep
IHKLATQVKKLHKENIELRDRNAELGVELAELRNNFDTLSRGLCTKIKRAFIEMGKENMYYANXMFPFP

SEQ ID NO: 158098 - protein, 1462 aa, Oryza sativa
  unsure (1)..(1462): unsure at all Xaa locations
  Clone ID: PAT_MRT4530_57605C.1.pep
MAAAAEGGRHDQGMALRKAEESAARRCEAARWLRQMEAAAAESLPERPSEEEFCVALRNGLVLCNVLNHVNPGAVPKVVENPIVAVQSSDVAAQSAIQYFENMRNFLVAVSEMNLLTFEASDIEKGGSSMKVVDCILCLKAYHEWKLSGGIGIWRYGGIVKIASSSKRLPSYSSRGGGSADLNQQMLEFVHLLSEVSLEESRVGESQHSLFQQFVLRVVRAFLQEWGEAEGLPLDDMVLETILEQACKEFTILLASHRRWNLXLKGSLAGARRPTVIEPTSPYRRPGAAKEISLPRGKMALVLKNLVFSSGEXIVPCDPAISXVFYGWVDEPERNTIIHWFVLFFFLSFLKFVXCFVQTSRPFVQCKCNNSHYYLLFSVAIALLVYCRVKPFLKMQTDQRSTVDHIGENAEVFADTQPLIRSVMDGYNVCIFAYGQTGSGKTYTMSGPDITTEETWGVNYRSLNDLFAISQNRADTTTYDVKVQMIEIYNEQIRNSSHVNGLNIPDANLVPVKCAQDVLDLMRVGHRNRAVGSTALNERSSRSHSVLTVHVQGKEIASGSTLRGCLHLVDLAGSERVDKSEAAGERLNEAKHINKSLSALGDVIAALAQKSSHVPYRNSKLTQVLQDALGGQAKTLMFVHMNPEADAFGETMSTLKFAERVATVELGAAHANKEVGQVKDLKEEISXMKLALDDKEREASKLRDIANRVASEKRNARTRSPLTTTLSSKPEAGQDSSVDTCTSEIRSSSSGKQRRFRSPLSVRELDEKSPVINRELYLSAKFKTPSPPVRSSLSAERVGIAKSVERSENIDCTPVSRIEVPPKVQHSSSRKTPSSVLTAQSLRKFRDSEENRSAKPSVRESMTKTRLDSATKPPQKEEQTANKNTGTRVRSEAKIPRNISDIENEFANSEPTFHSNRKAWKLPPQSTRQSQSIDLRASVREMEPLTEGKPRRSKAPHALHLPPINLSSLTKVPTSLRAQIRAMEEAAAPERKRPRDGDVGPSTAASGEAQYVYLPIADALKAPGARVCLFAAVSEIGAAVRSRGTDFTLTLRIVDHSRASAISVTFFADNTALLPCVRSSGDVISLHNVVITMHHGEFFVTYNKRFSSFALFEGKVSTGCIPYQHSMKYHGSKHDSEFLTHLRMWIVYNPPGLKDLELQLRSIKSDSTFDLVCKVLDVHEASNGVWILYVWDGTDTPVTEFPTLDNESVSPPPLHLEGAPLPREVLCTLPCVGSVLRVFSNRFFKEMLHLQKGIYWARFCNMTCKQQFGMWKGILLPSSRVRLLSNEDGSVADRLKLFDSRIATQIHRQPMASLPNASDIADVEYERAGYTTLMESLTHGEVTHKFKTLVRVVAAYPRGASHLCSLLAGNCCLRLTLEDPTARIHAYIHKDDGAKFFGGFLTAEAVIRKMNKLLGIPEDTEEGAPSNRNPPWIWCCLKSYRLDKNDPWGSRRYRIFGTEIRD

SEQ ID NO: 158099 - protein, 77 aa, Oryza sativa
  Clone ID: PAT_MRT4530_57606C.1.pep
MGAVAKSPNPLSPPPPPPHGSSCRLARSNVGGDLLHGGAGCDLLCVVPAQVGNSDCAARLAVLLSRQAIDGIDDDQI

SEQ ID NO: 158100 - protein, 131 aa, Oryza sativa
  Clone ID: PAT_MRT4530_57607C.1.pep
LGLDGEENWGKCRNGLSCSWPSCPASELLRIKRCTTIWSAAVDYGRQHQMKQRVDGGCSGGGRRCEAAERREVVREYRRGCFRGGEACRRRLERCRRRSGLPAAEARCRRRRRRGCGECRTRGRTRGRTRG

SEQ ID NO: 158101 - protein, 635 aa, Oryza sativa
  Clone ID: PAT_MRT4530_57608C.1.pep
MNPAADRWARPGTPHGGQRSTRLPEWKRIALLLGSRTLGVRENEKGSGSRLIKWNGSGSREAAGKVTLRSEPKEKAIPSNEERKEWPVLVHVVAPAKTERFPIDLVAVLDVSGSMTKATSMHGWTRLDLVKGAMKMVTNKLGAGDRLAIVPFNGKVVAAGATRLMEMTTKGRADANAKVNQLKAGGDTKFLPALKHASGLLDSRPAGDKQYRPGFIFLLSDGQDNGVLDDKLGGVRYPAHTFGMCQSRCNPNGITSAVAVNARVQLHVADNSGVLINKIDSGAYDKTIESGNGKASSKGTINVGVLSAEEDKKFIVYLDVPKLENAQAKPPQLLLTVAGEYSTPAGGRKVENMEESSVQVERPAPAGGATKTGDHLVTWSEAVMVEMVRVKVVSIVKEVLKKHEHDEEPDQKQMAKDLMEEWDKFIKETPAGKDAAERLKEKLPKHHVEDMRRSLTKEEHDGVLYLYSWLASHQTQQATTMASSPPAGVSGWFHQQYMKQVAVDAEFDACGIQPGVETTEIDATADCGCVVGLQDRIDRRLELWSNLKREAPLMFQPSEDAESHHLTAVFREASLDAINRAMHHDMYLAVVHASNLRRCYSGAGKQQLHGYGSSELPAHDDEALPATRAVEKHSE

SEQ ID NO: 158102 - protein, 68 aa, Oryza sativa
  Clone ID: PAT_MRT4530_57609C.1.pep
RSLSVSLNSTWLVVEVLCTLCAFGINDVSQCHQSMGETICHSIVVHSSYMMKLMYKDPSSQVHRLSTS

SEQ ID NO: 158103 - protein, 257 aa, Oryza sativa
  unsure (1)..(257): unsure at all Xaa locations
  Clone ID: PAT_MRT4530_5760C.1.pep
LAGERRHXDANEAHQHVEDDRANSPVTKTAAEDQRTATATRRKRRKLSGRRRRXSSGDLRRQRRGGRGRRRLGDHDGGLPERRRWLKQRRRTAGAAAATAKLGHTALERFRRREAKARVAAGRGDTGEAFKGARRRRQRPTAAXTRKERSGRMNPRQTRIQRFPKRFSQRFQRRKGRGDPGDCFPSINSTGEGKERPDWKXGGGGGALGFRPEXTTGLTGGPHLSAAARARXARTGPAWAEGERESGFGPTFGPKGC

SEQ ID NO: 158104 - protein, 65 aa, Oryza sativa
  Clone ID: PAT_MRT4530_57610C.1.pep
EIEILEPCAKHWPKHWAFTFRESLPRPRLKRAFKDLKTFPSYISVHYTPRVLDRKHPCISNQTLG

SEQ ID NO: 158105 - protein, 773 aa, Oryza sativa
  unsure (1)..(773): unsure at all Xaa locations
  Clone ID: PAT_MRT4530_57611C.1.pep
MASADPFLAASSPAHLLPRTLGPAAPPGTAASPSAARGALLDGISRPLKGSKELVEQARMAMKAVGDIGKLYGGDGAGVAAAAADGKNNQLGRRPAPDRKRFRLKTKPPANKPVQNVDYTELLNIEDPDEYFLTLEKLERADKEIKRLRGEVPTEGTYNNRGIEPPKLRPGLXKMMSVHSYKFSASSDAPDAIEAPASQTETVTESQTTQDDVHGSAHEMTTEPVSSRSSQDAIPDISAREDSFVWKDNSFTLNYLLSAFKDLDEDEEENLLRKTLQIKEISIGKVCLPDFNVPGDTPASNTTEQKNPMSDHALERTAPGSVVARISQLEKRIFVGDALEDKHADLSKDDESDGSPESLLCKQSPVRRSSDAVGLMINEGSTAMETPSPSIKSPEHVLESESNPPDGVTTDEQPTENSPIGVDRDSELVKEKGTSSRHSVSLEEDVMPIDCTVSPPDHLEGGSTEVLTNITSRNVSPLHHGDGNSEHQEIVGGDVAQDNPIHTLETPPEDTPQNQSEIHRGSIEKLAVDKSNALSPSQGKQHRGKNKKQPSKRGKRETDNPIHTSETPPMDTNPQNQSEIHRGSIEKLAVDKSNALSPSKGKEQRGKNKKQPSKRGKRKTDNLIHTPEIPPEDTDNTVHTPEIPPEDTYPQNQSEIHRGNTEKLAVDINNALSPSKGKEQRGNNKKQPSKRQKRAAGEAGDLETHAPNFEPEIQPHVQDTDVEMRVLLGKRVLDEAHEYGQNLCSIGLVKDLYMGVYMEEYITGANQTFRFGP

SEQ ID NO: 158106 - protein, 43 aa, Oryza sativa
  Clone ID: PAT_MRT4530_57612C.1.pep
TDPQYIFLKKNISPTFENAINFVLTNNRRRATTCLDILGLKIF

SEQ ID NO: 158107 - protein, 234 aa, Oryza sativa
  Clone ID: PAT_MRT4530_57613C.1.pep
MGLGVRAAPFTYVAHALAVAAATMVLVWCIHFRGGLAFEATNKNLIFNVHPVLMLIGYIILGSEAIMVYKVLPTWKHDTTKLIHLILHAIALVFGAVGIYCAFKFHNESGIANLYSLHSWLGIGTICLYGIQWIFGFVAFFFPRASPSVRKGVLPWHILFGLFVYILALATAELGFLEKLTFLQSSGLDKYGAEAFLVNFTALIVVLFGASVVVAAVSPARVEEPHEYAPIPES

SEQ ID NO: 158108 - protein, 160 aa, Oryza sativa
  Clone ID: PAT_MRT4530_57614C.1.pep
PEIPPEDTDNTVHTPEIPPEDTYPQNQSEIHRGNTEKLAVDINNALSPSKGKEQRGNNKKQPSKRQKRAAGEAGDLETHAPNFEPEIQPHVQDTDVEQQPASWQMRVLLGKRVLDEAHEYGQNLCSIGLVKDLYMGVYMEQWPQSSVLNHSLLVRKAKAH

SEQ ID NO: 158109 - protein, 303 aa, Oryza sativa
  Clone ID: PAT_MRT4530_57615C.1.pep
MATAGISFSPVGPVPFEDVDGELPASERPAPEGIDDGDDHLADMVSSLPSKMEVNLPLKLRLYRGFWLAEIHVPAAVALRRRFVPRPDDVIVASLPKCGTTWLIALTFATMARHVHHPPTSAPASASSHPLHRLNPHQCLPFLEGLFAPVLMPDVSFAETLESYRDDDGGAKIYGPFWDHILGYWHASTEVPDNVLFLRYEELLRDPAGNVRKMARFVGLPFSEAEEEAGTVEAIVELCSLDRMRGFEANRTGYVDAQRKIPRETLFRKGVVGDWVNHMTPEMARRVDDIVADKFSGTGLTFK

SEQ ID NO: 158110 - protein, 122 aa, Oryza sativa
  Clone ID: PAT_MRT4530_57616C.1.pep
MVEKKGGAARKEEVVTREYTINLHKRLHSCTFKKKAPNAIKEIRKFAQKAMGTTDVRVDVKLNKHIWSSGIRSVPRRVRVRIARKRNDEEDAKEELYSLVTVAEVPPEGLKGLGTKVVDETD

SEQ ID NO: 158111 - protein, 140 aa, Oryza sativa
  unsure (1)..(140): unsure at all Xaa locations
  Clone ID: PAT_MRT4530_57617C.1.pep
SCHARLRWRAGSRRRRAGGGGDKESRPEVGSTRTPTCTTSASQTSLRGVEAFEQLAAKFCNGVKLDLTPITAAPLRCAAERLGMSDDHSDNNLISILXADRFMSHTVLRNPRDAIRALWSCEGLLPLADDLGLVSRCVDA

SEQ ID NO: 158112 - protein, 110 aa, Oryza sativa
  Clone ID: PAT_MRT4530_57618C.1.pep
PQNHPQGPRGPSPFSWGPPPLNFQCGSFSSSPCKGRWGPFFGVFSFSRPEKIAWFSFPPGPPQGVPGRNQIVNFALPPHCGMLLCSVGASAPFFVAVCEATAPGFFPSSS

SEQ ID NO: 158113 - protein, 107 aa, Oryza sativa
  Clone ID: PAT_MRT4530_57619C.1.pep
MPSDGVAPDAESYSPMRRAGVAPSVVTYNTMLRVYGDAGLFGEAVHLFGLMRSAASDGSDRGGSIIKPNVVTYNTMIAIYGMSLGDEKAGSLVQDMQANGIGVQKFR

SEQ ID NO: 158114 - protein, 63 aa, Oryza sativa
  Clone ID: PAT_MRT4530_5761C.1.pep
MTPLADCMNEEEEGTALPAGLPPVCGTACGHATTGRWREEGHRGILPPVGLISPSHSHDGINR

SEQ ID NO: 158115 - protein, 273 aa, Oryza sativa
  Clone ID: PAT_MRT4530_57620C.1.pep
ARDRSHAPDVEARLLAASSKPATAAAASLPRRNKYPFFCAVLASMTSVLMGYNVAVTSGAQIFMAEDLGVSDAQIEVLSGAINIYSLVGALLAGWTSDRLGRRLTIVLTNGFFLAGPLVMSLAGGYAALMAGRFVAGIGVGYALVIAPVYAAEISPASSRGLLSSLPEIFINGGVMLSYVSNFAFSGLPVHLSWRLMFAAGVVPTVFLAAGVLTMPESPRWLAMKGRRGEARVVLDRTSDTPAEAEQRLQEIEDVVAASGGGGGGAGAPGRRG

SEQ ID NO: 158116 - protein, 158 aa, Oryza sativa
  Clone ID: PAT_MRT4530_57621C.1.pep
CQWRGRCRAPRGHRRRSAAARPRTCGATARRTPRRTSRALARQRGRRRGRGRTRRRRRWRPPPPARRTPRRTRRSRTRVRRRRPAAGAVARRRGRRRRGGEGTRRRSRHWTTPPWRRRSRPRSRCRRRAASPAPSSTTPSSSGGSGWSPTRRTTWKGR

SEQ ID NO: 158117 - protein, 74 aa, Oryza sativa
  Clone ID: PAT_MRT4530_57622C.1.pep
MSRLDQLPRVLDPFAGGDCEAGVAVSGGWCVRRRGLRGGGDAVERQGAAEVLHVVLTPKRGVWWSIDTGMALAL

SEQ ID NO: 158118 - protein, 171 aa, Oryza sativa
  unsure (1)..(171): unsure at all Xaa locations
  Clone ID: PAT_MRT4530_57623C.1.pep
IGPSSAPRLAAILFSSSKRISKLSRRCQWRGRCRAPRGHRRRSAAAQPRTCGATARRTPRRTSRALARRRRRGRGRTRRRRXMKRATSAXRGRGRAAAAACSGAGAPRRWRPPPPGGAAAAAGRRPGSTCGATARRTPRRTRRSRTRVRRRRPAAGAVARRRGRRRRGGGR

SEQ ID NO: 158119 - protein, 60 aa, Oryza sativa
  unsure (1)..(60): unsure at all Xaa locations
  Clone ID: PAT_MRT4530_57624C.1.pep
HLHAGFFSLPSTXRLQHALAPXXLSRPAVAFGFPRXWRSAFPFPGIALRXPAETFASAIS

SEQ ID NO: 158120 - protein, 90 aa, Oryza sativa
  unsure (1)..(90): unsure at all Xaa locations
  Clone ID: PAT_MRT4530_57625C.1.pep
MGRPAQEDPAQSARGRXEERGGRWTGLTTRGPGWDPLVSGSAHRAEGVRGSCARAGEGRGARARTREPRPAPLRFSPAQLRSASLARRAL

SEQ ID NO: 158121 - protein, 258 aa, Oryza sativa
  Clone ID: PAT_MRT4530_57626C.1.pep
MARCTLLVLLVAAAVAVVPLAAGQPWATCGDGTYEQGSAYENNLLNLALTLRDGASSQEILFSTGSNGAAPNTVYGLLLCRGDISRAACYDCGTSVWRDAGSACRRAKDVALVYNECYARLSDKDDFLADKVGPGQLTTLMSSTNISSGADVAAYDRAVTRLLAATAEYAAGDIARKLFATGQRVGADPGFPNLYATAQCAFDITLEACRGCLEGLVARWWDTFPANVDGARIAGPRCLLRSEVYPFYTGAPMVVLRE

SEQ ID NO: 158122 - protein, 245 aa, Oryza sativa
  Clone ID: PAT_MRT4530_57627C.1.pep
MARRKRAVAGDGDRRAAARHGEEAEEAEREVRGGGVSPRDAGDGMTMRGGRRSSGGGRRRCSGDGRAREEADEGSRGLGNQMRVVREKEELRRGEKHRPEWTMATRLTGRRGETSPATIWPGGVVAEERHGGKWGGCRGGARRGDAGGGGVTAWERLGLGQLPAGDRRQEAEGGYTVGRWFRWRLEETEWRPVGGIIQRSRWRRWRGAVEAREAVVYGWSTPAGSGARACVGRAGEGAGSLGNWG

SEQ ID NO: 158123 - protein, 122 aa, Oryza sativa
  Clone ID: PAT_MRT4530_57628C.1.pep
MVVVAVVVMVLVVVVVTMVVVGIMRGRVVVWRLLPLAEVALKVLHCETEGPHVTHQKSCVGYEKKHNKVSGGCIEGNSDVRREAKSYVHIRSRCFTENAFYLRKRHSAKENQVNTSTYVGLE

SEQ ID NO: 158124 - protein, 44 aa, Oryza sativa
  Clone ID: PAT_MRT4530_57629C.1.pep
PRIFTGSDQAEISALVPQLSAKDDSFILNYIQNSRININIRQVY

SEQ ID NO: 158125 - protein, 66 aa, Oryza sativa
  Clone ID: PAT_MRT4530_5762C.1.pep
IPHGDLGAFVKGHVAATLPDPDPVMMDVPTQNVFDNAYYPKASGGTHGGDQRKHGLVEEGNGGGKA

SEQ ID NO: 158126 - protein, 298 aa, Oryza sativa
  Clone ID: PAT_MRT4530_57630C.1.pep
MESGANARRRRRLVDRGSDRLAFITGQAQSLPSDPSPDSPLYTVDAASLQRSERQLNEVGIGDDIFNYITQLQKSESGVQPTSEAHLETHKEKHQGNESDLQKLKTSNVVPEIQPVNEKAFQRHSEETLRKKNSHDRSASTQPMREMETRSRYVPPNQSNQSDSAGWSVETLKEILNFAPHEITQAISATEYNRFLASVIIGFLVVLSNWGLDVGGTITKVLVATRPILFLIVTNITIVFTLLMENKDPNVRGRPAGSNLGSADNLGQMLEIGLLLQKALSTLLIDCSVCAVIMICFI

SEQ ID NO: 158127 - protein, 135 aa, Oryza sativa
  unsure (1)..(135): unsure at all Xaa locations
  Clone ID: PAT_MRT4530_57631C.1.pep
GFLNHCGWNSIIGIPISAGVPTPRTWPICAPXQFLNEVFLVRRLRXGVRVREAAGNXAMEAVVPAEAVARAVGRLMGDDDAAARRARVDELGVAARTAVSDGGSSCGDWAELINQLKALQLTSSRDRRTDAVTRD

SEQ ID NO: 158128 - protein, 86 aa, Oryza sativa
  Clone ID: PAT_MRT4530_57632C.1.pep
VTLDLAKGVYAKFIDWDEQMFDRETCTPAHSANTAISEDLGQVEYVLSDRTGTLTENIMIFRRCCMSDTLYGENNGDALQGYPLMF

SEQ ID NO: 158129 - protein, 43 aa, Oryza sativa
  unsure (1)..(43): unsure at all Xaa locations
  Clone ID: PAT_MRT4530_57633C.1.pep
TTSRSTAPLLPSRSRPXTSAATIHKRQYPPLLQXSXSQRDEVL

SEQ ID NO: 158130 - protein, 786 aa, Oryza sativa
  Clone ID: PAT_MRT4530_57634C.1.pep
MGTKVESKTYLPGYFTMADSSVNSNGNWLSYHEESKPSGHVSDSFTITTANASPDYDKEMLKRTMLVHEATFRKQVYELHRLYKTQKDLMAQFQREECNGYPRSADMLQARSYSSQATSRDVKRVWQVMPPTSGNDIKQSSINFAKGSEYARNGAPLMNNNNGRSTKKMLDLQLPADAYADDDDDDDDDVEILEEKPAKILPRINGSVVGGIVKLNVGNSEGSSHMEKSWIAGLHPQHVSTVNVLNKAVEESSSMKMPDFLGVGTSTSQSQRYSSGRVNLNHLSLEDTMKEKRIGEASGSNFFGANEEVKRNSSFNNKTDYQNVSMGWFKQEPNGINFSAAHYLPRCNPFNQLIDAPTSSNAAVKSPWQSSNTSYTANGYYGSVYTPFAQNGFFNGFSVDSINTPMATNHYHNQRSSKFPGEPQYQKHSPLHGVNLNDTPQDVTAIQEQGSENSPVDISWLRKDPVDLMKSQVQPSCANGQSQISLGSTAYSEGSTRVLGFPINAAAERNTEPLIKREADMEMHKKDDANARNLIDLNAAPSMDEPDIDVHQSEGGTVPQQPDDPSEDSLARTAAESLVALCKDVFQAGSPLADILHWFADLAIASKEDAVVCSSESDSDDEFEALTLQLEETKGYELYSTPKTPVEHKSNEDHGSVAASLLQTKPRRGRARKRPQKKDFQKDILPNLASLSKHEVSEDLHTLGRSTPSKRGGRNGSQSRGRRRARSVAIAVEEVEVSPPPAPAPPPPPPADLDANALGITGWGRTTRRCRRPRCPPANNASLRLA

SEQ ID NO: 158131 - protein, 122 aa, Oryza sativa
  Clone ID: PAT_MRT4530_57635C.1.pep
SYFKGSNHISKFWNTGRRGFLAGEARTTLSVFFISRRLGGGLLRNSFPAFAAFLLLFSLSVSVHRISRTGDEVLAARRRSAWLRRARQLLRRFQRPGGDLATGGSSSEYGRLGFGAGSGGSP

SEQ ID NO: 158132 - protein, 73 aa, Oryza sativa
  Clone ID: PAT_MRT4530_57636C.1.pep
PKGRRVITSIKSHLFYTDPHLAMCHWICFPYMWPSQSLLRPLTPVIGRNGPTVHDATFLRPILVPPKKLHTVD

SEQ ID NO: 158133 - protein, 80 aa, Oryza sativa
  Clone ID: PAT_MRT4530_57637C.1.pep
MEATSTTTASAASSSSLSSAAEALKPYMHLSRLMEEQPVVNHHRLRKELGPAALSSLCTGIETLVTEGRHHKARDVFRGA

SEQ ID NO: 158134 - protein, 376 aa, Oryza sativa
  Clone ID: PAT_MRT4530_57638C.1.pep
MLMDPPVMQVDCQLQNDLEKTTPITYNMTHALSHDDHGWQGSDAHPASETVSCKPVEVNNCSRTSIYENLDGSSEKSHANLSDLPQKMHAEPPKEMNGSDAYFNDVRFQLSLSTENDAPQSTSVDVNQQSVSNQDAPHSREETHPPANIVTVLRPCQSNGDAQPSQDKDITEEQVKGNKEVGSDMEENETSVSPKNNMDQLVLNNSCNGNTHYRSGHPNTGNVGAEDQTVALWVKWRGKWQTGIQCFRVDCPLSTLKAKPTHGRKSYIIVFFPRTRTYSWVDMLLVRPIEEYPLPLVNGTHRKWRKLVKDLSIPRRFIMQKLAISMLNFSDELHTEAVVENARMATTWKEFAREASCCRDYTDLGKMLVKLQNDIS

SEQ ID NO: 158135 - protein, 160 aa, Oryza sativa
  Clone ID: PAT_MRT4530_57639C.1.pep
MKLSARSTQKDENTEGGVDCLFCRRNENRASYASTCAESATVNIDTDNNNTMDGSPGGNPVNVQHREGDGVQSNSGSTAPGDTNNMRRSRSFDEYMRDRPARVDDDGCRALRTNGLPGGAAAADRLVSATPFLPKQNQCCSGSVDHHLCSFSKSSPSTKL

SEQ ID NO: 158136 - protein, 363 aa, Oryza sativa
  unsure (1)..(363): unsure at all Xaa locations
  Clone ID: PAT_MRT4530_5763C.1.pep
TSRGESARGPGPRGWGPRGSLTVHGGLGAPGLTPAGAVGPTRQPHSRARAADGRAPRGGHSARPKAATTARSAAGGTRAPMVAGSGHRHGGAAVERGEGKGEKRRWSTAHPRSTATTKKAAKTEEGGGAARVDGVGGVPAVSELGVGVDGVDAGAANPKKPTPGRKTVLASGEARPEVVGDGEERGQRRELDSGEEKARQRVETGEGGAGRVXIGLEGGEAGRRGRKPAREVRPPSMAPARFAGANXPFERERERGKMGGKGEGIPGSDFPHFIARGDGGXAVDLAAAAAALGAGGGGGSGGRKGMTGGPHPSARVADGPARVRRARGXEAEWAAGERRERXGRDGPGRPKGGKGDFLGFFFL

SEQ ID NO: 158137 - protein, 660 aa, Oryza sativa
  Clone ID: PAT_MRT4530_57640C.1.pep
MASPAAETSPPSTPSTASCPTPRPDAAAAAPSMSPSLLRAARSGDERRFVKALLADPAAPDLDAVATAGGNTLLHVAAWGGHPALASLLLRRAPGLLAARNAALDTPLHLAARAGAHKVVALLVAAFSSSSSSSAAADASSPSLRALTRATNRRGETPLHDAVRGGHEAAARALTAADPGLAGLCGGAGESPIYMAAAAGSLGMVRLLTKTYRNDEEEEEELPVLCSCTGPGGRTVLHAAVLTSNVIEMTQGLLQWNPTLVKEVDDSGSTPLHYVASVGNIPALKLLLGYDTSPAYVPDSNGLFPVHIAAKMGYGQLIYELSRYFPDCDEMLDSKGRNFLHIAVEHKKWKVVWHFCGTQELERMLNVMDYEGNTALHLAVKNADQMIVSLLMANKAVLPNIVNNQGLTALDLAVLATDKGISYTLNPQVIILRCLAWTGAVLSPRRLDHFIDEFNIGKASGNELKKFTNISQNLVVGSVLISTVTFAAVFTLPGGYISDGHPHAGAPILWHRYTFKAFVMANTLAFVGSTLSTIWLTYAGSEHVHPLLRALYMFFSVISMEQATRSMVAAFALGAYVVLSPVSERIALVLYLLALKLKSITVGLPPLLQTVPVTVNARVLPQPRRWQEMLQRSFSSSPIKEKNMPKYDSISLSSSAPFSK

SEQ ID NO: 158138 - protein, 131 aa, Oryza sativa
  Clone ID: PAT_MRT4530_57641C.1.pep
PARPGTQATPPPPPTLHAAVDSAHRRPAPLRPADSSSSSFCPSAAVRPSPADASPPRPSTPPAGFRCGLLPLLGWRIGMVAAAATALNALVALGSASGTASKSSFVKSIVKAHDVVIFSKSKSEGLLKLFC

SEQ ID NO: 158139 - protein, 104 aa, Oryza sativa
  unsure (1)..(104): unsure at all Xaa locations
  Clone ID: PAT_MRT4530_57642C.1.pep
HWPSLHVVLYTVEFQKRGLPHIHCLLWLAAENTEFSAPIVDGFIFAEIPDVLTDPLXFALSDEFMIHGPWGNXDRACPCYKKGECSQHFPKFFPEEIIVVDFGF

SEQ ID NO: 158140 - protein, 60 aa, Oryza sativa
  Clone ID: PAT_MRT4530_57643C.1.pep
CSTELWSRCDPPADQQAPWIDRTVAQSPPVCAGIGPILMLMPPQTSSHRVQASVDALRSA

SEQ ID NO: 158141 - protein, 136 aa, Oryza sativa
  Clone ID: PAT_MRT4530_57644C.1.pep
MAAGLETGGGGVNRSGGGASGSGGGATSGGVWSVRRRQPTSPVAGDGGERRTADLGFRSRSGAFSVGVKGGAESGHCAGGVHSAAPSDAVHLLEGVAFGALVSTPLQGNSSGENLGFVRIGRCRRSVSVTFLKDSF

SEQ ID NO: 158142 - protein, 156 aa, Oryza sativa
  unsure (1)..(156): unsure at all Xaa locations
  Clone ID: PAT_MRT4530_57645C.1.pep
MVVVSGDGDELGTKASSPVVPPSTSHARAHCRRPHPPPSVPRRSSSPAAASSGIHAPHRSSSPTAASSTVHATSEXSPAAASSTASTSXPGTYSSCSAPMMAARAAPSRSTSLSAAASALGSSPAPARSSRSRGSASMVWAWAPQPASPPRSSRSR

SEQ ID NO: 158143 - protein, 168 aa, Oryza sativa
  Clone ID: PAT_MRT4530_57646C.1.pep
PDSAPPLTPTENAPDLDLKPKSAVLLSPPSPATGEVGCRRRTLQTPPDVAPPPDPDAPPPDLFTPPPPVSNPAAIGRCRHYRRHLHPRHRRPSPPRQIRPKRRESGGLPPPPLRRDPRSPKSGAREEPRRRRPCGRAALPAATRAAARRRREVGEREGVAESSPPVPP

SEQ ID NO: 158144 - protein, 1146 aa, Oryza sativa
  Clone ID: PAT_MRT4530_57647C.1.pep
MDGVDKDKGNGKVHFRDSSPQEAFRTYKRRRQPRPEPQQQPQPQPQSEPEPQQQPQPQPQPQPQPEAEAEAEAEAKAADVLARQVTETFWKSRDIGWKHGIMIDENRQHWKCMYCHLTRYGGGVSRLKRHLAGDLDVKMCPKVPADVSEKIREHLRKKRERRKKRAAQNRDNCVTAKSTSDDIKSGKDPLPVDSEVLTGVDTVLEEVTNQTNHDNQDLTYPKATMLLRGIRDIGWEHAVDLDGNKRRWKCKWCSLCRSGGVTTLKAHLTDSSCPNIPKEISKKVLNFIEEKRAARHLFNSAAKSPFNVKFDEDAVNLSEIQVEGTPPLTDDRQPLGNSLHIQTSECTINEFEKVAAGSNQQGAEHSNQLLNHGEQLMKSSDQPEEHCTLEHGRCQVLDNNKQQTMDNKTDNPEHKEVLKHPKKTRFNIRKHIVIVDESARHWRCRYCGLDGYGKTSRLHFHLAAVFRHPKCPSVPKEVFAKARHHIHLKRRLNVKKAGQQARSRPHILGQSSQQQQNNNPVLSNYPTRLRDNAWEHSLIHDKEKGHWKCKWCSLEGYHGITRLKWHLVGWQNRPQCLNVPEDVAKTIRDKMISREKQKEGRLNLDVIDSCNMPCSSESLQFDQENFAEVMQGKGSSEDFNQAERQSNTLNTVCNTTHPPQNSNNYQGLQENGLYSSKNKSEKQTERYDCWSHWRYVLDGLMHLPGALEGPGIQSCIRDVLLYGSAEFGTVGDKVEMDSNRKVSSDGNIAKCQSVLVDVLKSENFALLCNVLGRTVHQDEQRTKYFDFTMIDSRMKNGDYGRAPLLFKHDLKMVERERGSDDSEENLKGAAATNLEPMNMVKSNALVLSTSQGFNQLDQPDPMDVCDEQNGTNCNECGKVAKIDSILTCKRCMLAFHVSCIEPPVPSTSTGSWCCKTCSTICNESAEVGMALVHYEPNRLHGHCVACKDLEFCRPPRCEETASERAPADNSRAIVIPSAEPVEDVELSDIDVRGLCKMCGNPEEKDKRFLVCGHTHCLYKYYHISCLKATQIASDKQLDKPCWYCPSCLCRVCHSDRDDDLTILCDGCDEAYHLYCITPRRTSIPKGKWYCSSCAIERAKEGMARHEKRMLKLHRKDDPGLQGMRYEMVDMILAAAEMLSDDEQQGT

SEQ ID NO: 158145 - protein, 475 aa, Oryza sativa
  Clone ID: PAT_MRT4530_57648C.1.pep
MAPPPPKVSSDIEAIAELPGFYYDPDKNRYFPIRGPIPGAATRRPALPPPAQPPPPQAAAAGCRKTARQPELVHAREMYGGGVIFSNKRKSTFMRQCQYAQASQPMVWKYKGTALVADKALEELYVTIQTPIGLKESKVLVTGSMNGIVRMTVGSFNSKRQDTYLPSFDVILRLHYFNDTLVLIGSGESGGSIHIMDLSDTIDVAMGSMNAYGGNIIGNIIPVASFNRTIWTADCNSDGTQAVIGTNSGAAFFDLERRALSWMYHCKSDILSQQFMQSGNVVLCGLRNGSIFPLDVRQKQHNRPTELASPGTARRTIPLTPRRHNRWRNQADNAKSSRAISMSSAVCSLVVLSSDEHYFLGSSMDGSIKLFDLRLIQKGPIQSYAGHINSHTHLPLVVDPSETLLMSGGEDRMVRIWSIKTGEQIFAQSVAGSLFTALCWPESGCDLHNSSLFGVNHSWGAWMGSRDGLFYVHGT

SEQ ID NO: 158146 - protein, 275 aa, Oryza sativa
  unsure (1)..(275): unsure at all Xaa locations
  Clone ID: PAT_MRT4530_57649C.1.pep
PTIGGVPAAASTWSCTCVVLSDHSLAAFVVFIAVRVLTTSSSALVIVSRXGYIYMATDVAVQAVGPATSTSSNMIHRQRRRIFLDYASLFSDNYVLLRQFFLYAVLACPRVWQTRRDVSSFMVRLHQLFGVIFLXTIAAIVSPSSSLARLHAPLVHDALLCVHDHSTAPHALPAAQLSRHQLLDFGYIDHGYSTHGFIDHGSLGSFALATSTTAQRAIIRIEHSCXFFLPSKCPRCSRLDCRRIIEYMYSYIYRPXLRLNTSVSXFAVFLFLYYP

SEQ ID NO: 158147 - protein, 362 aa, Oryza sativa
  Clone ID: PAT_MRT4530_5764C.1.pep
MVTSKEFARDQAAMDQKIKSDVGEVVLAGDEEEDGDVVLPGFRFHPTDEELVTFYLRRKVARKSLSIEIIKEMDIYKHDPWDLPNASTVGGEKEWYFFCLRGRKYRNSIRPNRVTGSGFWKATGIDRPIYSAAVNSNSGESIGLKKSLVYYRGSAGKGTKTDWMMHEFRLPPAIAAADASPCMQEAEVWTICRIFKRSITYRKQQQQQAWRPPATVTVKAPPPGDSSSNTGSFESDGGGDEFMNCGLTPAISQQQQHGGRHQMMSTMSCNGGYFFNDGIHHSHSHHKLHSQWGSLQMAPPEPKPEPEQKPLSSPAMTIAFHQNDHGFPAAAADFYKDGYLEEIARMMEVADPSPTGFYDCRY

SEQ ID NO: 158148 - protein, 64 aa, Oryza sativa
  Clone ID: PAT_MRT4530_57650C.1.pep
ILRKRVIAYSHQEFDLSLKWKGFMVKTAVSRVCALEQYIVTRSIEFSETLEWKNYNPPGIKNHK

SEQ ID NO: 158149 - protein, 49 aa, Oryza sativa
  unsure (1)..(49): unsure at all Xaa locations
  Clone ID: PAT_MRT4530_57651C.1.pep
LXXFFXKNFNLPISXVLYPVKTKQSSCTIVHHPIPLSSSISCLISSIHN

SEQ ID NO: 158150 - protein, 55 aa, Oryza sativa
  Clone ID: PAT_MRT4530_57652C.1.pep
SLRYYKANIGFYLRLHLHLHWSNPSIHFILPHIGGHLSRSPRGTTRKGKFLARHI

SEQ ID NO: 158151 - protein, 341 aa, Oryza sativa
  Clone ID: PAT_MRT4530_57653C.1.pep
MTRRRRSPSLPCAVRVQAAGFALGHRRDGSVRRLVFSLLDIHVRAKRRAGVRSVDVTIDASRGLWARVFSPPPTKGEAAQALPVVVFFHGGGFVLFSAASCYYDRLCRRICRELRAVVVSVNYRLAGPARRFPAAYDDGLAALRYLDANGLAEAAGVAAVDLSSCFLAGDSAGGNMVHHVAQRWAAASAASPSSSTTLRLAGAVLIQPFFGGEERTEEELELDKAALTLSLARTDYYWREFLPEGATRDHPAAHVCGGGEHDVEVAEAFPAAMVAIGGFDLLKGWQARYVEALRGKGKAVRVVEYPGAIHGFCLFPELADSGEFVEEMKLFVQEHRTKRVQ

SEQ ID NO: 158152 - protein, 81 aa, Oryza sativa
  Clone ID: PAT_MRT4530_57654C.1.pep
KPLAFEYKGYIHIHLGCQLLFVDSNIFYCNSGWSKLRLNLHCSSHSEFTCGSSSEALLWMNASKLEWCEGILPAQALALVR

SEQ ID NO: 158153 - protein, 132 aa, Oryza sativa
  Clone ID: PAT_MRT4530_57655C.1.pep
LPPPLCLLLTCITLSTKMGAFPRCLYPRTPRQAKERNFFFLGGESEQVSNQPSEQEEEDVAMADGVTLWWASLLPPPRFLYQPKVVVDWWWQSTSRAERRDETSGVADAAVARNCVRTRGGVGRVGGGSDAW

SEQ ID NO: 158154 - protein, 112 aa, Oryza sativa
  Clone ID: PAT_MRT4530_57656C.1.pep
LDTIRSAGFLVSVIHGRSDIIAQLCHARRLAERLIPVARMVELHGAHLVSHERPEEVNNALMELIKATKSMMKPEEWSSQPENSSGVILMGFEHMRNIVKVMKPVRVAAIES

SEQ ID NO: 158155 - protein, 221 aa, Oryza sativa
  unsure (1)..(221): unsure at all Xaa locations
  Clone ID: PAT_MRT4530_57657C.1.pep
MPYCEVDRYQNGDEWDGVRLFYRRFGRGATKVLLVIGLAGTHDSWGPQIKGLTGSLEPAADDEESGDAAAAEGDDGDGIEVCCFDNRGVGRSSVLPHKSYYSTVIMARDALALMDHLGWKKAHVFGHSMGAMISCKLAAMAPHRICSLALLNVTGGGFQCFPKLDGQMLSLAFRYLRARNPRKKKQLSYKNKKKTDGXYLDEKVGSCTRRTILHHTNGTDK

SEQ ID NO: 158156 - protein, 281 aa, Oryza sativa
  unsure (1)..(281): unsure at all Xaa locations
  Clone ID: PAT_MRT4530_57658C.1.pep
TRTAEHAWNLNGRAIYDGCCWLDIQWVRCSRXRRQHQQYPGTSNNPPLDRPNSTTIPQITKELKEEVLELKAMLQMMDSMAKVEERRSKQAERRSEDAVIGTVLSRPAVAQSTPHRTPSSLRPRAKHRLQGALPHATSSKTKPYVHRSNGCLNNVAPVRGGDDAEDTGEPPPRAWPWQRQRHHHARWSRRRQRRLMRRGGSHCSIWFVGGDAISGRRGSVSLGSSAISGRRKEVTASATQLHHLALEVRLLQAVGPALARFPGDPRGCASRGGASSSRMAA

SEQ ID NO: 158157 - protein, 104 aa, Oryza sativa
  unsure (1)..(104): unsure at all Xaa locations
  Clone ID: PAT_MRT4530_57659C.1.pep
MCEDSLHSEFARCNYFCHRPSRSASVPHGATSVGDQLKALKWGTFPHMLAYPVWSEXASSVPLWPPAAAPGKAVPRSSTRFCKAGTCPLPYMACDGSVVSDEAS

SEQ ID NO: 158158 - protein, 87 aa, Oryza sativa
  unsure (1)..(87): unsure at all Xaa locations
  Clone ID: PAT_MRT4530_5765C.1.pep
MSDLATLQSPPSIPTKHFRVFFLLCFWGLWNHRHDVIFRGMQKSXSPLVAKCLDEASLWAERLNVSDRIVVSAWKETISSSLRTSSP

SEQ ID NO: 158159 - protein, 220 aa, Oryza sativa
  Clone ID: PAT_MRT4530_57660C.1.pep
MSVIKDCGGHKGCECEKEKVPRRLCWALVALVLLTLFIVLVVWLALRPHKPRFYLQDLSVLCLNVTPPASAYLFTTMQATVAARNDNGRVGVYYDKVDVYAQYKDVAITVPTRLPVEYQGHYDQSVWSPFLQSLDHVVLPPNLAVALAQDETAGYVLVDIRLDGWVRWKVGTWISGHYHLRVNCPALLTVNDGKGSYGVNYGGGDGYFRFQQAAACAVDV

SEQ ID NO: 158160 - protein, 63 aa, Oryza sativa
  Clone ID: PAT_MRT4530_57661C.1.pep
MLVVELGVWLIPLTLFFVPCRRIVLLLKQLQGFHRSMTRPRRRASADMLSRFSGLNDNMVFVL

SEQ ID NO: 158161 - protein, 41 aa, Oryza sativa
  Clone ID: PAT_MRT4530_57662C.1.pep
PCCSLPAMTRASAPAPSPPAGTSAMWIWLFSAVATMAALAS

SEQ ID NO: 158162 - protein, 181 aa, Oryza sativa
  Clone ID: PAT_MRT4530_57663C.1.pep
MRRRKVTGCATPLPTLHPLVLALHPLITASARAQPGSRAKLNSGSMDVLNTLPVRFHFNGDFLVSGREKHYVGGSEAMSYLDQDNIPLPEIVGHLCDHCKVAEGTMLHLLFPGKDLNSELRALLDDSVCQYMNDCIVGGGVAEVYADAPILVDLSYEDEGSDYELEMEEDMGDESDGNEIE

SEQ ID NO: 158163 - protein, 232 aa, Oryza sativa
  unsure (1)..(232): unsure at all Xaa locations
  Clone ID: PAT_MRT4530_57664C.1.pep
MAYDPDNPCMDLGRIYPNMEEFRLAMRQFAINKEFELDVVTLLRDYHTCTSSSMRRTTTATSKWVASKAVKIMKNNPEGCRPYISVDSTALNEWLETYHPLKWMRSAFNPAIKCDYITNNLAESFNNWIKDYKELSVSEVVDNSTTHGKYIVKACLQYCSCEEWQHIGKPFQHALALITAQQSRDVNIEDFVNPYYLVQMFKNAYKRVIEPXGDRSHRPEVDLXWVLSAPLP

SEQ ID NO: 158164 - protein, 244 aa, Oryza sativa
  Clone ID: PAT_MRT4530_57665C.1.pep
MEQGGPCDGLCRFRIHLGMRGDCPLPAGDGVDAMVGNRIWFGGLFTSSGRRRQINAEKTFELSPVQEALRALWSASFPDAELSSLISEQWKDMGWQGPNPSTDFRGCGFVGLENLLFFATTYPASYQRLLLKKQGMRATWEYPFAVAGVNVSYMLIQLLELNAERPKSLPGINFIKVLSEHEEAFDVLYCIAFEMMDAQWLAMRASYMQFKDVLEATKQQLERELSLEDVNGIRDIPAYNLLYK

SEQ ID NO: 158165 - protein, 255 aa, Oryza sativa
  unsure (1)..(255): unsure at all Xaa locations
  Clone ID: PAT_MRT4530_57666C.1.pep
FVFFDGHSSLSAPTPTVDAMVGNRIWFGGLFTSSGRRRQINAEKTFELSPVQEQRLQKLKERLNIPYDQTRRDHQEALRALWSASFPDAELSSLISEQWKDMGWQGPNPSTDFRGCGFVGLENLLFFATTYPVXASYQRLLLKKQGMRATWEYPFAVAGVNVSYMLIQLLELNAERPKSLPGINFIKVLSEHEEAFDVLYCIAFEMMDAQWLAMRASYMQFKDVLEATKQQLERELSLEDVNGIRDIPAYNLLYK

SEQ ID NO: 158166 - protein, 123 aa, Oryza sativa
  Clone ID: PAT_MRT4530_57667C.1.pep
MAMAVVAAASRVQARLAARLAPRRLLSSGGKVLGEEKAAENIYIKKMEQEKLEKLARQGPSPGEQGSSTPAADVKAEGGPTAGASTVKNKNYTLIAGAVGVLGASAIAWYRLSKPEKSEEVAN

SEQ ID NO: 158167 - protein, 109 aa, Oryza sativa
  Clone ID: PAT_MRT4530_57668C.1.pep
MSSSWTTKQNKLFERALATYDKDTPGRWQNVARAVGGGKTAEEVKRHYDKLLQDLHHIESAGRQGSQYGGSSSSKSKGGSSSGEQRYRNRDWKQQPGLHSGAVKRASQY

SEQ ID NO: 158168 - protein, 101 aa, Oryza sativa
  Clone ID: PAT_MRT4530_57669C.1.pep
VVGSKLFFQLWTSVDPVVRLLLGRVKWIGQIRPLPAIRPRCPLSFNSATRSRTWASPVVLTTGSAPPDRGILSGARQRHRACPLTMLRGLRLGVEFTVAGG

SEQ ID NO: 158169 - protein, 125 aa, Oryza sativa
  Clone ID: PAT_MRT4530_5766C.1.pep
ARLKLVFVITSGYYRAVPTSTGADMASLRSIITLVEGLTIDLLLLEVGAQIVVDDQGEVLRSLTGHHGFNDLVDLYLEAAVHDGLSQAVVGWSSHPSSDLGAIDLCSLQLGAVMQSLDADQSPPV

SEQ ID NO: 158170 - protein, 51 aa, Oryza sativa
  unsure (1)..(51): unsure at all Xaa locations
  Clone ID: PAT_MRT4530_57670C.1.pep
RGYNTARDWXISPRQRSLTRHHLGFAVCCLLLLLLGLGFGVGRGXXAWAGG

SEQ ID NO: 158171 - protein, 55 aa, Oryza sativa
  unsure (1)..(55): unsure at all Xaa locations
  Clone ID: PAT_MRT4530_57671C.1.pep
NYKAGKHNKGGESYNNFTTTIDYIRCTIDHVSSSLRLGQVVIXWAELXRSTAXHP

SEQ ID NO: 158172 - protein, 169 aa, Oryza sativa
  Clone ID: PAT_MRT4530_57672C.1.pep
MAPKVFVPLCVVVLAAALAAGPPVADAASAHLHFYMHDVLGASAVQVVRGPRGMFGNTVVMDDVLTEGPAATSSVLGRAQGQYIVASTGSMDLMVTMNVVLSSGPFAGSSVTVVGRDDTGAAVRELTVVGGTGQFRMARGYVLWRTIRPDLLELDVVRTRRKDKRDDVR

SEQ ID NO: 158173 - protein, 66 aa, Oryza sativa
  Clone ID: PAT_MRT4530_57673C.1.pep
LWLPALSMYHNLSSRCISTISFLGVEVVDSDSGSSHAGGTTNISEIKWDSAPALAGCVLCRISASR

SEQ ID NO: 158174 - protein, 74 aa, Oryza sativa
  Clone ID: PAT_MRT4530_57674C.1.pep
RVSLSNVYTVVGRWKDSANISTEMKRVGLKKKPGCSFVDVGGVEGFKFVAAHTRHGDSEQIYAVLPRCTYPWQM

SEQ ID NO: 158175 - protein, 92 aa, Oryza sativa
  Clone ID: PAT_MRT4530_57675C.1.pep
MDSAGVARKCPLLAVCADGVSTGSWRRHNAVTNIATTSVGSHGDKERLLAHSHAAKFWRESSPHDTLASLPPSMSFPTVHECRAHPVGLRLQ

SEQ ID NO: 158176 - protein, 88 aa, Oryza sativa
  unsure (1)..(88): unsure at all Xaa locations
  Clone ID: PAT_MRT4530_57676C.1.pep
FTXIHGXLGXGGLIPLRGKRFMGGKLIGGKDXXHYRLXVRNQVEASDDPRMMRVLTKXKGSRXWSKAVLLPLHPSEPXGKTSXTXIKQ

SEQ ID NO: 158177 - protein, 187 aa, Oryza sativa
  Clone ID: PAT_MRT4530_57677C.1.pep
MEMIRSASPFALLIALSGSELNWVRLHGTGFWQCEELQQQERGMWFQAPLQCSDPCTVVFSLLQKDQPKEGLKGEGGVKVDVVEKLRGLFAKGEAKRRAQWLCGRGTDAPLLGPVDILLLGTGHVKAEQSMMMAHPEMRIDKITKVLVFVGLVTRGKDSKYIVICNKIKDVLLLYLFQNISIYNDDT

SEQ ID NO: 158178 - protein, 92 aa, Oryza sativa
  unsure (1)..(92): unsure at all Xaa locations
  Clone ID: PAT_MRT4530_57678C.1.pep
AVFRCPSPXPPVXMSRAPPHRRAAPAAPAWPACTARRVAPAXAPXAAAXXXXAWPACTALANATDTISAXPPAMAAAVVADRDEVVLLVEET

SEQ ID NO: 158179 - protein, 130 aa, Oryza sativa
  Clone ID: PAT_MRT4530_57679C.1.pep
RSPAWSPDLPRPPPRPACRRSRTLPPRRGRWGTRGSGAATSRRTGRGTRARTSAARGTGRPPGTPPGTPRTRRRRRHRRLPCARGREARRSRRASGRRPAGPGAPPPGTRRAGTRPGAAPRRRRRRAARA

SEQ ID NO: 158180 - protein, 38 aa, Oryza sativa
  Clone ID: PAT_MRT4530_5767C.1.pep
FPPRGYRIITGTICLCSTKLYLGTRAPRWLVAPLMKIG

SEQ ID NO: 158181 - protein, 86 aa, Oryza sativa
  Clone ID: PAT_MRT4530_57680C.1.pep
LKNNRLVRLRSAVAAAALREHAIFVGQNHSVCLPIRDFPELRSNCVYFTTPCLCNDDHFPSRREGWKGVGIYDFQNQIFEGCFPFL

SEQ ID NO: 158182 - protein, 180 aa, Oryza sativa
  Clone ID: PAT_MRT4530_57681C.1.pep
PCADVRIPAHSPPPMTACTARAAGRGNSLLQRAPCREAGTDKHTTHGRTACTNDYQDPDTPPEDNRHLFFMTEAKEMMKGALRPSIPPDVNRPWKRGLWPRMGRRNRLPAAQRWILRTQRGTTACSTTTAGSTTEDPFGGQPLGSLDDLHGDIQKSHTLTTINEPYTDSDAILDELTPVQ

SEQ ID NO: 158183 - protein, 61 aa, Oryza sativa
  Clone ID: PAT_MRT4530_57682C.1.pep
GTVGTSGTRENLLPRCSRSILRPNWCTQDGTIMPKSPKMKSSWRRPCLVFALIHTNKIFQN

SEQ ID NO: 158184 - protein, 43 aa, Oryza sativa
  Clone ID: PAT_MRT4530_57683C.1.pep
NSNAKINRRTPLFFLNWHNRSSACLLQLEVKLHMLLHPTMVVD

SEQ ID NO: 158185 - protein, 76 aa, Oryza sativa
  Clone ID: PAT_MRT4530_57684C.1.pep
MPVDKLEYNAVHDERTQCWEDFATGFTRSSVQVSGFAKSNLDIYKRSMKHDKSNKVISLASFHAIQKKLKSKQSNA

SEQ ID NO: 158186 - protein, 61 aa, Oryza sativa
  Clone ID: PAT_MRT4530_57685C.1.pep
SKVYHRSLNLYRCVIPVPKLANRPFRFSNLFDCVIPVPKLVDHSFRSSNLFSCVTSVPKLG

SEQ ID NO: 158187 - protein, 50 aa, Oryza sativa
  Clone ID: PAT_MRT4530_57686C.1.pep
ETSASRGASRCVLSTPRVYRHTRLFIGTGTHVIEGPTLYSLGPLDSLSKP

SEQ ID NO: 158188 - protein, 116 aa, Oryza sativa
  Clone ID: PAT_MRT4530_57687C.1.pep
TAAGRGARRRQQRQRDPPSPVAAPSAARASPASPVALAWAGRGCCGGGNGGKGGGLWYNATVAGVISYSRIASLSGVSVQDLFLWFPVRGIHVDVPSSGPIYFDVGVVFKHWAGAR

SEQ ID NO: 158189 - protein, 57 aa, Oryza sativa
  unsure (1)..(57): unsure at all Xaa locations
  Clone ID: PAT_MRT4530_57688C.1.pep
SNLVKTLPDWSXQVKLHYVKFGTDAKYISLCSXDRNLHIFWHPGEDYQIYDSYPSEE

SEQ ID NO: 158190 - protein, 302 aa, Oryza sativa
  Clone ID: PAT_MRT4530_57689C.1.pep
MGKEEQPVTKDESSPKDDMDVDMVCMLHMEFCAMDKAEVAQFLVGPKDAVFEKPDESNRHMKPLYLKDHIDGKPVSRMLVDGGAAVNLMPYSLFKKLGHGDDELKKTNMILNGFNGEPTEAKAREGEERTSGAPALRWPKRGDVGNITCSPSTRIRGRQRSAVEVRYEAGTAAAKACSGRQARWREGLSGNAPVREIGNSRDRRRWREAVRRRRSTKTRLRRRGEDKHVADFLATTVGGGVRRARHAHLEEGGSAELGRLCRYAEWVSSIVPVEKKRSVGCHDFWIEERRCNISKDNEFDLP

SEQ ID NO: 158191 - protein, 86 aa, Oryza sativa
  Clone ID: PAT_MRT4530_5768C.1.pep
ASQRIYNAFSFDFAWSMKMCQFTYKYPIVLDAATAAVSRKGATFLAKWADIMTGRVPKIHLFKPEYSIPVAFELFKMLAFGVPKKA

SEQ ID NO: 158192 - protein, 119 aa, Oryza sativa
  Clone ID: PAT_MRT4530_57690C.1.pep
MDHEPQYIYVWARNLGRMDMIAYGYDWANENEVPPLITAHSANSDILYAALFSSLPYAASGRPCRPSALCRLLIEAAAPPPSHRGCHRECPHLGFATFMSVPSPPSLAALASRCPNPAI

SEQ ID NO: 158193 - protein, 40 aa, Oryza sativa
  Clone ID: PAT_MRT4530_57691C.1.pep
QRRWPAGLPFPHNDWFPPQQGTTTGCCEHCLGKAACQAAL

SEQ ID NO: 158194 - protein, 77 aa, Oryza sativa
  unsure (1)..(77): unsure at all Xaa locations
  Clone ID: PAT_MRT4530_57692C.1.pep
ISASLDDALAAADASTSESLAALDAREAAVPAFLAEAEAALSAAVADSXGGFATAADVRSALWWMCGHMDAAALWCF

SEQ ID NO: 158195 - protein, 884 aa, Oryza sativa
  Clone ID: PAT_MRT4530_57693C.1.pep
MAADNNSTASAPIFLNCGASGVQPDSYNRSWDGDASSKFAPSVKGNVARASYQDPSLPSPVPYMTARFFTSNYTYSFPVSPGRILKLTFAPSTRNGSYAFVNGIEIVPTPDIFTTPTPTSANGGDNVQYGIDPVMGLQTMYRLNVGGQPISPQGDSGFYRSWDNDSPYIYGAAYGVTFSKDGNVTIKYPNTEPNYTAPVAVYATARSMGPTAQINLNYNLTWILPVDAGFTYLLRFHFCEIQYPITKVNQRSFFIYINNQTAQNQMDVIVWSGGIGRTTYTNYVVTTVGSGQTDLWVALHPDLSSKPEYFDAILNGLEVFKLQDLGRNNLAGLNPPLPPKPGVNPNGGSSRGKSKSVAPAAIGGAVGGLAVLLIACVGLCIICRRKKKVAKDTGKSDEGRWTPLTDFTKSQSATSGKTTNTGSHSMLPANLCRHFSFAEIQAATNNFDKSFLLGKGGFGNVYLGEIDSGTRVAIKRGNPLSEQGVHEFQNEIEMLSKLRHRHLVSLIGYCEDRNEMILVYDYMAHGTLREHLYNTKNPPLSWKQRLEICIGAARGLYYLHTGAKQTIIHRDVKTTNILLDDKWVAKVSDFGLSKAGPNVDNTHVSTVVKGSFGYLDPEYFRRQQLTEKSDVYSFGVVLFEVLCARNALSPSLPKEQVSLADWALRCQKKGVLGEIIDPLLKGKIAPQCFLKFAETAEKCVADRSVDRPSMGDVLWNLEFALQLQESTEDSSSLTEGTSASTSPLVVARLHSDEPSTDPAAAGADLHLLLIESPVPVLRAPPLPIGPLPPLEPTAAAAWVDLRLFLAKSLAPELRSLLSWAAAVAKVDLHLLLDKILAPDIDTQAAAVRKDSAVDTSLLPTALSIVPPQLARITHAACFRRRISS

SEQ ID NO: 158196 - protein, 622 aa, Oryza sativa
  Clone ID: PAT_MRT4530_57694C.1.pep
MAADNNSTASAPIFLNCGASGVQPDSYNRSWDGDASSKFAPSVKGNVARASYQDPSLPSPVPYMTARFFTSNYTYSFPVSPGRMFVRLHFYPTNYNGNLDSANAYFGVTTNNLILLDNFNASQTALATSSAYFFREFSVNVTSSSLKLTFAPSTRNGSYAFVNGIEIVPTPDIFTTPTPTSANGGDNVQYGIDPVMGLQTMYRLNVGGQPISPQGDSGFYRSWDNDSPYIYGAAYGVTFSKDGNVTIKYPNTEPNYTAPVAVYATARSMGPTAQINLNYNLTWILPVDAGFTYLLRFHFCEIQYPITKVNQRSFFIYINNQTAQNQMDVIVWSGGIGRTTYTNYVVTTVGSGQTDLWVALHPDLSSKPEYFDAILNGLEVFKLQDLGRNNLAGLNPPLPPKPGVNPNGGSSRGKSKSVAPAAIGGAVGGLAVLLIACVGLCIICRRKKKVAKDTGKSDEGRWTPLTDFTKSQSATSGKTTNTGSHSMLPANLCRHFSFAEIQAATNNFDKSFLLGKGGFGNVYLGEIDSGTRVAIKRGNPLSEQGVHEFQNEIEMLSKLRHRHLVSLIGYCEDRNEMILVYDYMAHGTLREHLYNTKNPPLSWKQRLEICIGAARGLYYLHT

SEQ ID NO: 158197 - protein, 195 aa, Oryza sativa
  Clone ID: PAT_MRT4530_57695C.1.pep
LTEKSDVYSFGVVLFEVLCARNALSPSLPKEQVSLADWALRCQKKGVLGEIIDPLLKGKIAPQCFLKFAETAEKCVADRSVDRPSMGDVLWNLEFALQLQESTEDSSSLTEGTSASTSPLVVARLHSDEPSTDPAAAGADLHLLLIESPVPVLRAPPLPIGPLPPLESTSALLLAGSVVPVLKPLPSRVPVSRCP

SEQ ID NO: 158198 - protein, 135 aa, Oryza sativa
  Clone ID: PAT_MRT4530_57696C.1.pep
GDTPPSIRPQRPEPPATGHLPQRPIATELSTGPWPKRHPPGEALRTKMDPAEAVLCEVCSTPASKVPAAGGGGRCWWSGGEGHERQRWRETARGRWSVVGGGRARCESSVGCGSRQGHARAVAEAVGRHQPGVQL

SEQ ID NO: 158199 - protein, 105 aa, Oryza sativa
  unsure (1)..(105): unsure at all Xaa locations
  Clone ID: PAT_MRT4530_57697C.1.pep
MELNSLGGWLGLLQRGVALDSGWLILINYYNCFSAFNYCLXMLALCKRTSMAILXIIPCIIPLFRYDLLSTVIVLXSCSIFPKPQSXVCVRWLFLRGVDSVRAVE

SEQ ID NO: 158200 - protein, 304 aa, Oryza sativa
  Clone ID: PAT_MRT4530_57698C.1.pep
MASGAGMCGGGRGWWLGGVGAGGRRGCAGGGGRGWWQRLTMVQAVVAGAGGGVHAFGPPDSAAARHGSFRSGGGWLQDHCIRLQRVAAGSPDKRMTPSSHRAAAIHGSMLGWRRRSPSDPVAAGSLTSVKGRAASILKPYSRRASDKEEDNCGGRSSGGVHRELQIRWWLSSIALDPVAAVVGGGENKTRLLPPLNGSAEDGGKGSNDLGGFHLFGDAAVDGIDFSTAVGGTVGVDPAVGDARLAGAWAILETVKEVDPAVAGTTMTTDGLLQLPPLSQIRQAGGSGPPGGCGSARAWASVGQR

SEQ ID NO: 158201 - protein, 92 aa, Oryza sativa
  Clone ID: PAT_MRT4530_57699C.1.pep
QHLVPDAEQESVHNAKGSNFAGKAVYHTLMNISPCKIQTGELTAELGSCSSHENVTVQMQFLNKRFGILPILFKIDHSKLWSVIVVISCQSL

SEQ ID NO: 158202 - protein, 144 aa, Oryza sativa
  Clone ID: PAT_MRT4530_5769C.1.pep
MRGFFPILHIIAKVNVNTKYFFVGQVEGAFVQGIGFFTNEEYATNSDGLVIHDSTWTYKIPTVDTIPKQFNVELINSARVHKRVLSSKGRRSIRAARKEFAGAGGSAMTFQMDVPATMPAVKELCGLDVVESGPKDYSRSYDKC

SEQ ID NO: 158203 - protein, 67 aa, Oryza sativa
  Clone ID: PAT_MRT4530_576C.1.pep
MEGAREGRSDGREGVGTDRRWEEIQVYIQRFQPLRHRGATGSGLLSDDGEEEACGAAERQWGRFQAR

SEQ ID NO: 158204 - protein, 147 aa, Oryza sativa
  unsure (1)..(147): unsure at all Xaa locations
  Clone ID: PAT_MRT4530_57700C.1.pep
PSEKKIREKEPIVWEILQEVMRENPVLLNRASILNXLGIPAFQPTLVEGRTICLHPIVCKGFNSDFDGXDQMVVYLLLSLEAXVEARLLMFSYTNLLSPTIRDPICVPTQDMLIGLYVLLIVTRRGICGNRYNSCGDYPNQKVNYNN

SEQ ID NO: 158205 - protein, 56 aa, Oryza sativa
  unsure (1)..(56): unsure at all Xaa locations
  Clone ID: PAT_MRT4530_57701C.1.pep
PTHPPRSRHEEDXLARXLCVLHEIACVCASFSVPARSLSLAQHHNSFCPHITTCLE

SEQ ID NO: 158206 - protein, 817 aa, Oryza sativa
  Clone ID: PAT_MRT4530_57702C.1.pep
MPSIRAPASKQTATLQVAVKCRPLTDSEQRRSRHIIQVIDDKNVVVLDPDLSKDYLELIQNRTKERRYSFDHVYAPGCSNALPKTDVYKNISSTIAGVVQGLNATVFAYGSTGSGKTYTMVGTHSDPGLMVLSFRTIFDLVKKDDSKDTFEVSCSYLEVYNEVIYDLLEKSSGHLELREDPVHGIMVAGLRSIKVHSADKILELLNIGNSRRKTESTEANSTSSRSHAVLEITVKRKQKGQYGSQVLRGKLALVDLAGSERASETNNFGQKLRDGANINRSLLALANCINALGKQNKKGLAYVPYRNSKLTRILKDGLSGNSRTVMVATISPADDQYHHTTNTLKYADRAKEIKTHVHKNIGHLDTHVEDYKRMIDNLQVEVSQLKKELAEKEHQLSVKPTEKAADNELSWLNILSQETGENVQERINLQKALFELEETNKRNRMELQHLDDAIARQQVKDKDSAVLQALTSRRQVILDNIRDNDEAGAGYRKDIELNESRKRQLQDMIEEATSNNGNRTYLHILSQYRLLGMTNAELQIEMAMRDQVIYNQRESLRSLWNIIYGTGLNQKQISKLAAKQGLTIEGCPLPVSSPDVTTPPSFSPHGRLSPFMSFPSPQSQPYSPSACFVQHGFSTMSYLRNQHETPTVCRQEHLSSYYMMSECSPFDGDGKQKTNGRSMPYFSTPGKPKEMYNFSPGTESERTPCSKEYPTSYSRNGDSLVQIKDSWTHGRWAQACVVHGLLVVAGRISISSGSFNNLLGVTHLTYSGDHHSCQLSLVDECYAAAVAAARRAHCNCTKCHIHNDSQLGLVQSGYLLN

SEQ ID NO: 158207 - protein, 138 aa, Oryza sativa
  unsure (1)..(138): unsure at all Xaa locations
  Clone ID: PAT_MRT4530_57703C.1.pep
TPRTMQGLLNQALIAEVMDTLKVLYVSISTEIWYQTLMTPVHIDRKIEFPNSNEDSRAHILNIHSXTRSLLRGTDIQKIPQDIIVAXRAELNAPCTEAGVIALGDITVHVIQEDFEMAPTXVMRRDTDNNMYLHKLCK

SEQ ID NO: 158208 - protein, 331 aa, Oryza sativa
  Clone ID: PAT_MRT4530_57704C.1.pep
MAAVPEVALRHGAGRPMPAVGVGTADSAATSPETKRGAALAALEVGFRHFDTAALYGTEAPLGEAIAEATRRGLVASREEVFVTTKLWCTQCHPGLVLPSLRESLRNLQMEYVDLYLVHWPISVKPGPPMLPVKREDAVPFDFEGVWRAMEECHRLGLAKAIGVSNFTTKHLDKLLAVATIPPAVNQVEMNPVWQQRTVREYCAAKGIRVAAYSPLGGQNWIGEGNDVMESPVLADIARARGKSIAQGRIQIPGQVSLRWIHEQGVTPIPKSYNKERLKQNLEIFDWELTKEDRLKISQIPQKKIVTAARMFSPDGEFASVDLSDMEIVEE

SEQ ID NO: 158209 - protein, 127 aa, Oryza sativa
  Clone ID: PAT_MRT4530_57705C.1.pep
MGAALRSRRRQWRTSPRVPVANELATTSDYLRPSAAALGIDANGGCRRNAGWVQALGKLELAAMKDDADGMLSQKERRTLPPPYYAHRRYPTRRLPSLHHPLSRSLAATPSSVAGEAPVVGKILLKG

SEQ ID NO: 158210 - protein, 409 aa, Oryza sativa
  unsure (1)..(409): unsure at all Xaa locations
  Clone ID: PAT_MRT4530_57706C.1.pep
MKPRVYHDARLGLDNKQWRVQAARRTGAKQTEALQARQQSSMQPRPSIFFLHLVFIISNGSCSIVVFQAYSNLWGDSTPQAILDGSDETNFDKTAPTRKIFSSGVGEKRARLSTTHCTQQVIPEEEKINYVFTTKEKSLINFIAQYYPGLTSARGEAAPTGGPRLSAVQGEREGVPTYGPHRLQLKKGKGEGGAGRARLGLKADRPTKARRQRGTATDGDDRRRGXGGDGRKAAAHGRSSGVAXALTGRGRKGWEGGPTSDTAAEAEGEGGDDDPARGGADERWRHLEEGRRGVRDGEDDRDDQSGRPEMDENGELTGERGKRGFGVIGGSQAAAEERAALTSTTAAVAWRGGGSSGGGARPEMGGGGGARWGDSTPQAILDSSDETNFDKTAPTMKIFSSGVGEREQD

SEQ ID NO: 158211 - protein, 265 aa, Oryza sativa
  unsure (1)..(265): unsure at all Xaa locations
  Clone ID: PAT_MRT4530_57707C.1.pep
AAWXNICYSQNLTGGNLEDVRVECARFGAVKSINVVKYPASSDNTTGDTITECEDGSTKIEPKEYGGNVSCTETGVECSVLNQSTDVPDPSICEVQDPVELDTDSIPKGRDHKNLDTRGECDAPTAGDENTDQGVEADQTDSTDAQDDARGTIERGHADADPASLETSCSTAPGDGADKSGRENEQQGGAGVSESNTEKAPAVDARDNALASNTSALEAGCILVEFLRKEAACIAAHSLHGRRFGSRIVSAGYAPHDLYLQKYPR

SEQ ID NO: 158212 - protein, 509 aa, Oryza sativa
  Clone ID: PAT_MRT4530_57708C.1.pep
MAVAAPGQLNLDESPSWGSRSVDCFEKLEQIGEGTYGQVYMARETETQEIVALKKIRMDNEREGFPITAIREIKILKKLHHQNVIQLKEIVTSPVHGNKYKGSIYMVFEYMDHDLTGLADRPGMRFTVPQIKCYMKQLLTGLHYCHINQVLHRDIKGSNLLIDNEGNLKLADFGLARSFSNDHNGNLTNRVITLWYRPPELLLGSTKYGPAVDMWSVGCIFAELLNGKPILTGKNEPEQLSKIFELCGTPDELIWPGVTKMPWYNNFKPQRQLKRRVKESFKHFDRLALDLLEKMLTLDPAQRISAKDALDAEYFWSDPLPCDPKSLPKYESSHEFQTKKKRQQMRQADEAAKRQKTQHPQPHGRLPPIQQTGQPHPQIRPGQPMNNPHAPMAAGPGHHYAKPRGPGGSSRYPQGGNQGGGYPNRGGQGGGGSYGNAPYPQQGRGPPPPYPGSGMAGTGGPRGGVGGGYGGGSNYPQQGGPYGPSGPGRGSNYPQQGGSRNQQQYGNWQ

SEQ ID NO: 158213 - protein, 113 aa, Oryza sativa
  Clone ID: PAT_MRT4530_57709C.1.pep
ARGSRVFFVFFFLQRFNCNKSPTVQLNLRPDKWLNIKNHLNLKINHRKSLLIRLIHPLFAQPMHTWRHAMNTTRKLIFAGGQNQFSQARERSADTTTAVKIDDFRSRGNGPLA

SEQ ID NO: 158214 - protein, 224 aa, Oryza sativa
  Clone ID: PAT_MRT4530_5770C.1.pep
MALFDDDDDEFPQLKDNIDCWVLKRVYTFVELTVKAVSLCISVSKLGGWNLTILRRPLEDTWIIIETELRKASPNESFIVSNESSTNCDDYTEDGSSGSSDDNGDNYTDGNASDDGTEAVDHDIDATFRTPCRDHIKFPSAPQIERVKDLARKKVKVTDIRNTDEVSPESAELSTKPSREEGLGLGTLLAPFFGSGPGSGLATTVGVEECGVKLWKLVTTGDCN

SEQ ID NO: 158215 - protein, 479 aa, Oryza sativa
  Clone ID: PAT_MRT4530_57710C.1.pep
MSSPPPPPPPCPAAACDDGWLSLSVSTVSGESNQKRLKRGGGGGGGGVGGGAVEDDGCPLHDEVLLLVFAECSLETDDLVRCAATCRRWRRLVAGDAEYICRRKPPSRRYVGALAVGFVQQRRQENSSSSSGAPPPPRFIPLPSYSSRFAGGGELDKVFDSGLLSNSRLIASRKGLLVLELRRSSRAAAVRLVVCNPMTGDMATLPILAGKDRPGHYACALITFDDHEGAPDRLGFVHDPAAFRLLLVYKRRNFTACRSYWSDTKAWDAEGKLSGAKIGGRRLGEMTGAVAVRGSVFWLLKNLLFVVRLGALKATTETFPSKWCSKLCFCYGSPVQNRQLAVTPDGRLCAVQVDRHVTSNNTVRINVISRHDGYGPPTWECDNARDVELNRVLPMANVRRVCLRGVCERSGVVFLAIGTDLYNQQPDLALYALDMDKKEARKVAAPPGHCRRLSSSFFGYEMDRVAYLASLSGGESIAS

SEQ ID NO: 158216 - protein, 217 aa, Oryza sativa
  Clone ID: PAT_MRT4530_57711C.1.pep
MDEEEEKKKKNKQMDQEDGTKKMKLTKETKLPGTISAAETTKDIKLQTKKKEPIQIKGNTQSKTCIRDIIESEELKIKKTVEVPGSRYLQDFEKGKKSETIESEIGENKAQLLYDQYIFLNENERLLDQFAKYETWSWSSVLISPYIYETQCRIQINLQQMLSLLCSVHTRIKAKRNPYKFNRKTSPVSLSTEKCLPICNQTLGLESHKRIEPHANK

SEQ ID NO: 158217 - protein, 586 aa, Oryza sativa
  unsure (1)..(586): unsure at all Xaa locations
  Clone ID: PAT_MRT4530_57712C.1.pep
MAGRMRKAVKLRLMVRPDAKPVKQKLWRFTPDRKXPYENXLDKLVKAGFIREVLHPEWLANPVMVRKANGKWRMCLDFTDLNKPXPKDYFPLPRIDQLVASIAGCELLSFLDAYSRYHQINMAKDDEEKTPFITPFSVFCYTKMPFGLISASNTYQREIQGALGDQLGXNVEAYIDDVVVKTKTRDTLIDDLRETFNNLRRHRLKLNLEKCTFGVPSXEANPEKIKAIENMKSPTRLKEVXKLTGCIAVLSRFVARIARMGERAQPFFALLKKQDKFEWTQDSENAFLALKRYLSNPPVLVAPQPNEELYLYIAATPYSVCTIIVVEREKVQHPTYYVSEALHDAKAKYPHIQKLLYVIVMTSRKLGHYFXAHKVTVVSSFPLGEVVRNKDVIGRIAKWVVELSQFEVHFVPRTSITSQVLADFVADXTIPKNRTSSQTDNETWTMAFDGALNNQGVGAGFILTSPTGDQFKHAIHLNFLTTNNIVEYEGLLIGIRAAVALGVKRLIVRGDSELVANQVXKDYKCTNPELANYLAEVKKLERNFDGIEVPHVYRKDNIEPDDLARRASKREPLEPGTFLDALIKPF

SEQ ID NO: 158218 - protein, 456 aa, Oryza sativa
  Clone ID: PAT_MRT4530_57713C.1.pep
MASCGQWPVDLAADVVLITVEVVHGITVRISEVLLDIGLAVDLLAGHALDVGLLAAEHRAAPCGRARRPGARRPRGNPRSRKPPAARWRSAWPRPATAAHLPQLAGCPYSSPRCGDQQQQQLTKTGAEHRHRRFRGRPGSCSIASGRADVNYAGVVWLKARRVAEAALVRALLAMSSYSTGHGHRPKKKLYHREPGLDKAMDLQKKPALLLRLRELILSQKTNSILIRYLEKEVGFVQKWNFLSLIKRHPNIFFVSGGSASREPISVTLTEKAKKISSEETLARELMEPILVKNLRKLLMMSLDCQIPIEKIELIQSELGLPKNFKSNLIPRYPELFSVREVKGLDHLCLESWDSSLAVTAREEKLNFDGFHMDCRGIPKDGNVFGPFAFKLKYPAGFRPNRKYLEEVVRWQKLAFPSPYLNARRVEPATPQARKRAVAVMHEILSLTMERRLTSD

SEQ ID NO: 158219 - protein, 136 aa, Oryza sativa
  unsure (1)..(136): unsure at all Xaa locations
  Clone ID: PAT_MRT4530_57714C.1.pep
AGPTGQXLKGERGALAGGPHXQRTKGAGPPWTKSTGPRMVRHVAPTGHHAGHGMDGHDLPRGRSGGWGWAASRPARAWRTAGTGDRPTAASGDAGNGTDSGADXQRACGERRRVRKRRGRGGKGSXPASIVAGAKD

SEQ ID NO: 158220 - protein, 41 aa, Oryza sativa
  Clone ID: PAT_MRT4530_57715C.1.pep
KVAVADVMTHISTVGGASLSLLEAQHRVAVIALDQSVAVAV

SEQ ID NO: 158221 - protein, 483 aa, Oryza sativa
  Clone ID: PAT_MRT4530_57716C.1.pep
MTTPHGLLQYSSGAFSDQVPADDSAEEHGVKDHAMLAPFTAAWQTAISPPLVIERSEGCYVYDVNGTKYLDALAGLLSTALGGSEPRLVKAATEQLNKLPFYHSFWNHTTRPSLDLAKELISMFTAREMGKVFFTNSGSEANDSQVKIVWYYNNALGRPKKKNIISRTQSYHGTTFISASLSGLPTLHQDFDLPGRFVLHTDCPHYWRFHLPGETEEEFATRLADNLENLILKQGPETIAAFIAEPVIGAGGVILPPKTYFEKIQAVVKKYDNLFIVDEVITGFERLGTMFGSDLYNIKPDLVSLAKALSSAYAPIGAILVSPEISDVIHSHSNKLGTFAHGFTYSGHPVSCAVALEALKIYRERDIPGHVTHVAQRFQEGIKAFAAGSPIVGETRGVGLLIATEFTDNKSPYELFPFEWGVGEIFGQECKKRGMMVKVLGNLIAMSPPLIITREEIDKLVSIYGEALKATEERVAELKSKKN

SEQ ID NO: 158222 - protein, 140 aa, Oryza sativa
  Clone ID: PAT_MRT4530_57717C.1.pep
MAPLAWRSSGDGGSNSMRRRPWIKDNIGGFLGPIIHKRCYKLPVTTSRKKAATTALPVAALDRHRSTPALAYHRFTRHPPPATMLACRPPALLPLPAARVRSRPSPLRSLPASLTEEEKRREKREKRREGEEKRRKKMCR

SEQ ID NO: 158223 - protein, 594 aa, Oryza sativa
  unsure (1)..(594): unsure at all Xaa locations
  Clone ID: PAT_MRT4530_57718C.1.pep
MVLPETAAEGKALTDAWDYKGRPAGRAATGGWGCAAMILGAELNERMTTLGIAVNLVXSMTGTMHLGNAAAANTVTNFIGTSFMLCLLGGFVADTYLGRYLTIAIFEAVQATGVMILTISTAAPGLRPPACGDPKGASAECVAADGTQLGVLYLGLYLTALGTGGLKSSVSGFGSDQFDESDVDGERKKMMRFFNWFYFFVSLGALLAVTVLVYVQDNVGRRWGYGICAAGILAGLAVFLSGTRRYRFKKLVGSPLTQVAAVTAAAWSKRSLPLPSDPDMLYDVDDAAAAGHDVKGKQRMPHSKECRFLDHAAIIDRSAAESPATASKWRLCTRTDVEEVKQVVRMLPIWATTIMFWTIHAQMTTFAVAQAELMDRRLAGGFLIPAGSLTVFLIASILLTVPFYDRLVVPVARRATANPHGLTPLQRVFVGLSLSIAGMAVAAAVERHRATASASAAAAAPTVFLLMPQFLLVGAGEAFTYMGQLDFFLRECPKGMKTMSTGLFLSTCAIGFFFSTLLVTIVHKVTGHGARGGGWLADNLDDGRLDYFYWLLAVISAINLVLFTVAARGYVYKEKRLADAGIELADEETIAVGH

SEQ ID NO: 158224 - protein, 35 aa, Oryza sativa
  Clone ID: PAT_MRT4530_57719C.1.pep
VNITVKVSILYTHKRRSYTQHNKRERQETRKQVLQ

SEQ ID NO: 158225 - protein, 83 aa, Oryza sativa
  Clone ID: PAT_MRT4530_5771C.1.pep
GDHRLPPPSSPPGPFLLPPPPPPLPSPPPPLATDPPPPRRPPPPPRRRRRRPGRPPLGRRPLGRRRVLPGRQGRGRRRRGGGG

SEQ ID NO: 158226 - protein, 344 aa, Oryza sativa
  unsure (1)..(344): unsure at all Xaa locations
  Clone ID: PAT_MRT4530_57720C.1.pep
MQKTREAHPHLVTAAGAAICAPAIAAKAALTTSPNAVEPVIAASPTTVRPPATRIDVNSVSHRVSQGSSASRWPRRRRPPAAARHDLPRRRRPLRSKRRATRDGGGAGGGGGGGEGGGGGGVGSGSGGEXVVETTGDFADHGHDAASFLLRRRLNVYTPPTYASIYASSNASRIVAKLHRSRSIDPTDQYTATIGRRRRAAPPSRSMGWRKRNDDGGGGGGAAVPRGCVALLLVGDGGGGGEEIRXVVEVRALGQPRVGMLLERAAGEYGYDQEGVLRVPCSADEFRRALAADAAAGARDRDFSLFCSISLNIHYSDSRRTHARAQGVRMDNDGSIDAPSRVGV

SEQ ID NO: 158227 - protein, 65 aa, Oryza sativa
  unsure (1)..(65): unsure at all Xaa locations
  Clone ID: PAT_MRT4530_57721C.1.pep
HASADRRQDVKXIVTXLNXAEVPSXDVXXVVVSPPFVFLPQXKXXLRPDFSFAAQNXWXRKXGAS

SEQ ID NO: 158228 - protein, 291 aa, Oryza sativa
  unsure (1)..(291): unsure at all Xaa locations
  Clone ID: PAT_MRT4530_57722C.1.pep
PLHRGFRDIRNRTLFLATPSNARSQGPHTHSHXHPYHTXAXNTITNPHTKPRHRGSPHILHNQPXNFSPPSPSHFLGHHALAARPALTKLPTPNITPXTIAHLPLSPXPVSWATHPHRPPHAHPLLLLHLHKGPPPPGVHTFRSNPTTLXQRTGCFTPGTTPSAPLGTRPTLTSVPTKTPNXYXWVTRTRAPKRRTRTVCLTTICQFSKAPKTPXTTLLLGVTRPTNFGQGEPTDRFPHSLLPRLGPPSPHNPWALVFPYTPXKLAAFTSGKFSFQRNXHSTGPFNERGPH

SEQ ID NO: 158229 - protein, 41 aa, Oryza sativa
  unsure (1)..(41): unsure at all Xaa locations
  Clone ID: PAT_MRT4530_57723C.1.pep
LSKSYNTXYTRARTLNPLRALPSFFFFSKLFSPHLKTWGPF

SEQ ID NO: 158230 - protein, 188 aa, Oryza sativa
  Clone ID: PAT_MRT4530_57724C.1.pep
MNLDEEFKQNTPRGRQAADGRAQQGSRLGAHSAPPAFKGKSQVSQGGKTMKKLASKKDSLLTVMEGTEISIITSERKAPEVCANIPMVKECTTMVLWQEENLQESQEIQDPVVQSQEDVGGFAADILVLESFLLDDDNERCQIPTDSDIERIREEEEKEEEDSFQEVSHKKKHREKRSEPAVTSRMSL

SEQ ID NO: 158231 - protein, 113 aa, Oryza sativa
  Clone ID: PAT_MRT4530_57725C.1.pep
MKEATSSGGGGGGGAGVNDPRQPSTARQYTPPKLSPQDLPIDYAGFLAVVFGVLGVMLRYKVCSWIAIIFCAQSLVNMKNFENDLKQLSMAFMFAVMGLVTNYLGPPRPGTKR

SEQ ID NO: 158232 - protein, 43 aa, Oryza sativa
  Clone ID: PAT_MRT4530_57726C.1.pep
GAARHERRAARDGERGKAAARAPLRPISAVTVSFLNIIKHRGL

SEQ ID NO: 158233 - protein, 133 aa, Oryza sativa
  Clone ID: PAT_MRT4530_57727C.1.pep
GRGKGGYSQKNRAGPATSGKLDLSQPGWGHKRTGPPRSPRGLIPGGKPKSGEKPPGLGESQTPGLIIFGPPKTGVLRVPEKRFPTNEGLLPWPSPKNPLPLIIMGASIIIGIGVSGSCKKRKVPTRAKGSSGI

SEQ ID NO: 158234 - protein, 101 aa, Oryza sativa
  Clone ID: PAT_MRT4530_57728C.1.pep
LLWLRACQPETDGEWPVVALVAAVHLFHHACRGQIIPPAFLCNVLDADWRNHQSRIVECNQRCPDFVVTKVVIPASPGFRVAEVIVGQITRTKIRTPAIFV

SEQ ID NO: 158235 - protein, 192 aa, Oryza sativa
  Clone ID: PAT_MRT4530_57729C.1.pep
MAAVPALIFAMDPGSLPHIFLMTAMASHDAQKLPPPLSIGSLTFSFRVTPQVDRTPVQWHHMQLEVLRMMKGRYCAKFIPNQNHPFPIRIVMLSALSKHNPTIDAGQYPQGPYMQYSLIDSFLAYEQKGLRADTLSAAKRMEDNMMYPIKDQETMLAVPMDMNRQQDTVCSKEILQHQNSTILASISCLFAL

SEQ ID NO: 158236 - protein, 1340 aa, Oryza sativa
  Clone ID: PAT_MRT4530_5772C.1.pep
MGSEAAAAARAVVVAVNGERYEAVGVDPSTTLLEFLRTRTPVRGPKLGCGEGGCGACVVVVSKYDAVADEVTEFSASSCLTLLGSLHHCAVTTSEGIGNSRDGFHAVQRRLSGFHASQCGFCTPGMCMSIYSALAKADKASGRPAPPTGFSKITAAEAEKAVSGNLCRCTGYRPIVDACKSFAADVDLEDLGLNAFWKKGVDDEHADINKLPAYSGGAAVCTFPEFLKSEIRSSMGQANGDTSAVVVTGDGWFHPKSVEEFHRLFDSNLFDERSVKIVASNTGSGVYKDQDLHDKYINISQIPELSAINRSSKGVEIGAVVSISQAIDILSDGGAVFRKIADHLSKVASPFVRNTATIGGNIIMAQRLSFSSDIATVLLAAGSTVTIQVAAKRMCITLEEFLKQPPCDSRTLLVSISIPDWGSDDGITFQTFRAAPRPLGNAVSYVNSAFLARSSVDGSSGSHLIEDVCLAFGPFGAEHAIRAREVEKFLKGKLVSAPVILEAVRLLKGVVSPAEGTTHPEYRVSLAVSYLFRFLSSLTNGLDEPENANVPNGSFTNGTANGIVDSSPEKHSNVDSSYLPIKSRQEMVFSDEYRPIGKPIEKTGAELQASGEAVYVDDISAPKDCLYGAFIYSTHPHAHIKGVNFRSSLASQKVITVITLKDIPTNGKNIGSCSPMLGDEALFVDPVSEFAGQNIGVVIAETQKYAYMAAKQSVIEYSTENLQPPILTVEDAVQHNSYFQVPPFLAPTPIGEFNQAMSEADHKIIDGEVKLESQYYFYMETQTALAIPDEDNCITLYVSAQLPEITQNTVARCLGIPYHNVRIITRRVGGGFGGKAMKAIHVATACAVAAFKLRRPVRMYLDRKTDMIMAGGRHPMKVKYSVGFKSDGKITGLHVDLRINCGISPDCSPALPVAIVGALKKYNWGALSFDIKLCKTNVSSKSAMRAPGDAQGSFIAEAIVEHIASTLSVDTNAIRRKNLHDFESLKVFYGNSAGDPSTYSLVTIFDKLASSPEYQQRAAVVEHFNAGSRLRPSPGKVSIMNDGSIAVEVGGVEIGQGLWTKVKQMTAFALGQLCDDGGEGLLDKVRVIQADTLSMIQGGFTGGSTTSETSCEAVRKSCAALVERLKPIKEKAGTLPWKSLIAQASMASVKLTEHAYWTPDPTFTSYLNYGAAISEVEVDVLTGETTILRSDLVYDCGQSLNPAVDLGQVEGAFVQGIGFFTNEEYTTNSDGLVINDGTWTYKIPTVDTIPKQFNVELINSARDHKRVLSSKASGEPPLLLASSVHCAMREAIRAARKEFAGAGGSSLTFQMDVPATMPIVKELCGLDVVERDLESFAAKA

SEQ ID NO: 158237 - protein, 330 aa, Oryza sativa
  Clone ID: PAT_MRT4530_57730C.1.pep
MAAAAAAPSSSTSGSPGAAAAAARPTMPYRSRFGDTTLTKVFVGGLAWETPSEGLRRHFEQYGEILEAVVIADRLTGRSKGYGFLKPPPPPPPPPPPPPPPPRARTNLLPRRAGRASPGAQFQAPPPAFQGPPYIARGTPPPPAQMMPQPQHHGPPATIYHPSQSWYWYPPDYQYQQGLMNSQVLQSYYAAALQAQAQAQAQLYGMAASPTAPSPYQYLGYMPAPAPAVTPTAVLPPAQQQITGPPPPFVQQPAQHVTAPPPFVHHPTAAAQIQGSFVPLPSLPHNFRLQLPPNAMSILPPTPTALQPADLQAAPAATGATNPNNTPTGA

SEQ ID NO: 158238 - protein, 43 aa, Oryza sativa
  Clone ID: PAT_MRT4530_57731C.1.pep
SPPHSKVGMNHDGQSNSGGHFIACARYSDDGDLWTVRMCGRRI

SEQ ID NO: 158239 - protein, 56 aa, Oryza sativa
  Clone ID: PAT_MRT4530_57732C.1.pep
RPQKFVFVFSYSDLYREENNNCPVTELSLVYSRPTSCVSILNLLVLQLEPDNVQLT

SEQ ID NO: 158240 - protein, 500 aa, Oryza sativa
  Clone ID: PAT_MRT4530_57733C.1.pep
MDALLVEKVLLGLFVAAVLALVVAKLTGKRLRLPPGPAGAPIVGNWLQVGDDLNHRNLMALARRFGDILLLRMGVRNLVVVSSPDLAKEVLHTQGVEFGSRTRNVVFDIFTGKGQDMVFTVYGDHWRKMRRIMTVPFFTNKVVAQNRAGWEEEARLVVEDVRRDPAAATSGVVIRRRLQLMMYNDMFRIMFDRRFDSVDDPLFNKLKAFNAERSRLSQSFEYNYGDFIPVLRPFLRRYLARCHQLKSQRMKLFEDHFVQERKRVMEQTGEIRCAMDHILEAERKGEINHDNVLYIVENINVAAIETTLWSIEWGIAELVNHPSIQSKVREEMASVLGGAAVTEPDLERLPYLQAVVKETLRLRMAIPLLVPHMNLADGKLAGYDIPAESKILVNAWFLANDPKRWVRPDEFRPERFLEEEKAVEAHGNDFRFVPFGVGRRSCPGIILALPIIGITLGRLVQSFDLLPPPGMDKVDTTEKPGQFSNQILKHATVVCKPIDA

SEQ ID NO: 158241 - protein, 249 aa, Oryza sativa
  Clone ID: PAT_MRT4530_57734C.1.pep
MRPASPVLAGCCAPASLARCWAREKRRTEEAVSRADQEEEEDRRMKGRHSGKAAAAAARSMAGGSERGGVVEDPRLVKQVRELRRLVPCRREPCGLGELFQDAASHIEDLQVQVKLMRMLLEKLSEECGGGSAQQGCGGEGTTATSGMIPAMMARGGRGGEGASRERWHEGMCTAEDTECTEDEEEEEERENPAALVATEPPAPAANFLSLREVATGAAGGKSKRKKGVDAGALEASPKVVEMRACQSV

SEQ ID NO: 158242 - protein, 95 aa, Oryza sativa
  unsure (1)..(95): unsure at all Xaa locations
  Clone ID: PAT_MRT4530_57735C.1.pep
IPSHLSDNTWCEKEASLQHTSSSHXHNHTCGSDWARIPLLGRFRIQLRACSVSSQSMWIERDWMGLNPKQLXLLHNFFNPIQSMCIGNNRTSPKM

SEQ ID NO: 158243 - protein, 494 aa, Oryza sativa
  unsure (1)..(494): unsure at all Xaa locations
  Clone ID: PAT_MRT4530_57736C.1.pep
MDGSHGRGEDKKVAMMRRVLNDSILCRLGHARQGMRLKEYFRLYACCHMNNPIILDKVNIGKVAIVEIPRTRGAWRTHRLTEERESMALAGKPSRQPRRRRLDGLEYAVGRDSREIRTEAGGWWGYMGIAWGNLEIGIGFRRAAPIPRLRREPQHMLMHAETTLVDGAIGSYLDDHGAAAPMPQPLRSAPLIHRPPVRHRREAPLPELRHHHVAHVPPGLVAGPVGGEHHVAGLRRHAGAGAPEPVEVPLLEVVVAGGHLAPRLQVGDRQRRPAGGAHLQRDAGVGAGVPPAVGLDEDLERALRGGGGRRREEEEEAGQGDGKLHVSSPRAHVHAFTHDYYVPLHQLVHILAALFSVXRCNNNDXDGYYPSIISRQYIGHTRMCINFRCENLRCTTKKKNPRGGVGRGIGSSDRWHFRICDGLSVSGFTRTVAPSNFHFNRLYAPVVELQFPGEGHPCPHFHENQTLTVLVYAVSLMVGMLGSNRFWWQICNYV

SEQ ID NO: 158244 - protein, 84 aa, Oryza sativa
  Clone ID: PAT_MRT4530_57737C.1.pep
FEVSQFCDSPRCSPRIIKHRLTTTMDEPSQGGDQKLSAMEHVKKRHEEKGFLYACLFMLCCCFCCYETCEHCLECFCCCCKKDN

SEQ ID NO: 158245 - protein, 539 aa, Oryza sativa
  Clone ID: PAT_MRT4530_57738C.1.pep
MAETGDQHGPVIGIDLGTACSCVAVWQNGRAEIVTNEHGGRATPSYAAFTDTERLVGDAAKSQASRNPTNTVFATKRLMGRRFSDASVQDGLKLWPFKVVPGRGDKPMVAASYKGKQKLLAAEEVASMLLSKMKAEAEAYIGGPVKNAVVTVPASFDVLQRRATKHACAVAGLDVLGVIHGPAAAAVAFGIHEIAGDKNVLVFDLGGGHTSVSLLAVASGKIAVRATAGDPHLGGEDFNGRMVEHFVAQFKAEHKKDVGRNARAILRLRAACEQAKRTLSSASWAAIELERLHDGADFYSTITRDQFDELNLDLFCKCLDPIKKCLTGAKMDRSSVDDVVFVGGSTRIPRVRRLIQDLFDGKELRKDISSDEAAACGAATMASLGSDDSLVDLFLFDATPHSLGVAAAGGAMAVMIPKNTPIPVMARENTISIQPNHKKGHKQVRTLSSARSKLPGAHSKAKPGVKLSVSVCFSIDADGVLTVSARDKVNGHKNQMRVMEQSQLSKEEIERMTMEAKEYMAADEEKERIKAKNLLEEFL

SEQ ID NO: 158246 - protein, 169 aa, Oryza sativa
  Clone ID: PAT_MRT4530_57739C.1.pep
LQHQHHETKSDLNPPPIFAYKEPNKGQKPKNNSSVPYGAKFQPTTTTISRKTTKGPMNPSGGPLGQTPWCPPRDGAPRQARRGRTKPTEDWNKREEKVGSGGNRDERGGPSGEAPRRCPLRQGREKGKALLRRADVGGDLLEHLEEEILQGPELFLELLLPERPFFPSP

SEQ ID NO: 158247 - protein, 135 aa, Oryza sativa
  unsure (1)..(135): unsure at all Xaa locations
  Clone ID: PAT_MRT4530_5773C.1.pep
VEGAFVQGIGFFTNEEYATNSDGLVIHDSTWTYKIPTVDTIPKQFNVELINSARVHKRVLSSKASGEXPPPLLASSVHCAMREAXSIRAARKEFAGAGGSAMTFQMDVPATMPAVKELCGLDVVERYLESFTAKA

SEQ ID NO: 158248 - protein, 43 aa, Oryza sativa
  Clone ID: PAT_MRT4530_57740C.1.pep
SRLCIHFVCGLKNATSYLVIAAYVLVPCETRTVLPPKKKLGML

SEQ ID NO: 158249 - protein, 190 aa, Oryza sativa
  Clone ID: PAT_MRT4530_57741C.1.pep
MDGSMFTCTRVVNELTNERGNDFVVWYVLTTAFSILPASILRGEKNVHFRQRAKGGFGSSIGIITHELYLKITCPCFQRRCTCRGMYQMSINENVQPQGPSFLEMLGQVDWLFSQPPIMQPQITGMYTADQMMGYAGSTLSYGEPCSYGGGSSTAQHEIGPSQLDEPPPITQPTQDYGYINFSGVEVAHI

SEQ ID NO: 158250 - protein, 53 aa, Oryza sativa
  Clone ID: PAT_MRT4530_57742C.1.pep
KPPPPPPPGARSRGAVEAAPPAPPPRAAGGRRPPPPPPTRGSSPPAPTLFTTD

SEQ ID NO: 158251 - protein, 83 aa, Oryza sativa
  Clone ID: PAT_MRT4530_57743C.1.pep
FTTPADLATWRSLSNSVPSPYAGRGSSKTFVFSAASGLSGALVGTSGSSITSSMSSAASVTAGVSDFSSGRTSITGASGRDST

SEQ ID NO: 158252 - protein, 293 aa, Oryza sativa
  Clone ID: PAT_MRT4530_57744C.1.pep
MFVMVKLDLSYLDGFHDDMDFCCRLAKEESVIVLPGTNSINVQPLADEGVCPWEHGRRHERARAVEPLELVGVTERAEMHRSKVKLSGVLHMGFKPDKCKTALRMALARIKLLRNRKEVQVRSPVSAEKTATPPSRLPGLSRAATKSARRHSSITRFYTRTAPPSDAARTAISSPAALPATDAASRSPHVGHVGRAAPAAAERLQHLPPRGVPGPRGGKDVPRERQAEGALRRGQLLPTATPLLPLLSLAAAPRAATLRRRARHRAGRLSPSPATAAPASMPAASRRVCRRAC

SEQ ID NO: 158253 - protein, 91 aa, Oryza sativa
  unsure (1)..(91): unsure at all Xaa locations
  Clone ID: PAT_MRT4530_57745C.1.pep
MAPMKLYGSTLPWNVTRCMSGLEEACANDEIVPLEFSKVXHMAREHLARNPFGQVPSLQDGDLLLWQSRPFCKXVCRSNNHSCRRMSIFRS

SEQ ID NO: 158254 - protein, 122 aa, Oryza sativa
  Clone ID: PAT_MRT4530_57746C.1.pep
MGNEKFYNTFHRAGSVFTEILFAIPKFQGRFHLFGFNRKKRPEKPCPNLKEKKNFPVNVFGSQGPIKQQMADFNWHNLAGAVSTKTRWGAFFYNHIHPCRPQSKQQANWMAQFHAKKKNFFF

SEQ ID NO: 158255 - protein, 52 aa, Oryza sativa
  Clone ID: PAT_MRT4530_57747C.1.pep
KLLMFGCTDASQVLKEFEEAKKAYPNAFVGIIGFDNVRQVQLMSFMAYKPSG

SEQ ID NO: 158256 - protein, 35 aa, Oryza sativa
  Clone ID: PAT_MRT4530_57748C.1.pep
MTLLFSTKSYGAELRHLSATSTGAECRATVDIWEA

SEQ ID NO: 158257 - protein, 519 aa, Oryza sativa
  Clone ID: PAT_MRT4530_57749C.1.pep
MGTGRKPVDGDGDGAASAVVFLVPFPAQGHVTPMLHLARALAARGDVAPTVVLPDFIHRRVVRAGGNGGGGGVALASFPSGIPGGDDGDGDPGFASIVHAMENRMPAHLERVLMLMRDDDDDRLAAAGRRAACLTVVVDVLASWAVPVATRCGVAAVGFWPAMLASYRVVAAIPELIDRGLVSEYGIPILANGFNKNQGQVKANLQAEIISLFPEELELSTTDLPWLVGDAATQKSRFAFWLRTMERVKTLRCILVNSFPGEAIAAGADQQQPLPQDQQILQVGPLLATIVTDRAKGNSNLRCSPMKTTKNDTSTCQADDRTSCMEWLDQQRPGSVAYVSFGTWVAPIAPGEITELAVGLEATGRPFLWVLKDDPSWRAGLPAGYTDQYSGRGKIVAWAPQEDVLAHGAVGCYLTHCGWNSTLEAIRHGVRMLCYPVAGDQFINCAYIVRAWGIGIRLRSADRGEVVDCVGRIMEGEDGRRLREKLDELRERVMAGEALCVAKRNIEEFIRGISGQRLQ

SEQ ID NO: 158258 - protein, 96 aa, Oryza sativa
  Clone ID: PAT_MRT4530_5774C.1.pep
SRVPAPHHGRTAMDEHPSSHARACVKAPQIEANHKSRDGNGEAEHPKPKTKSKAQLKQTYESSIHRAVVAQISAWARRGSRTAPPPTPRANGSQNP

SEQ ID NO: 158259 - protein, 197 aa, Oryza sativa
  Clone ID: PAT_MRT4530_57750C.1.pep
MHIITFFDHHTRSAAPLTRSPSIARFGPFYFSYKKTIALTPFLCSNCVFVHSTPMQYIYTCESCVVCVQEYVLPVSYIPKYVRVRQYSTYVLVHLIERTLVPHELINVDTLGRINLSRSIRRNISTILNNNGSGIPIEEIQCTIIKYNTSKKNPCNIYQNPTSSSAKRYCNASCPLLQQGLNHSQPPRTLTILNKYQ

SEQ ID NO: 158260 - protein, 437 aa, Oryza sativa
  Clone ID: PAT_MRT4530_57751C.1.pep
MVAPRQCADSGGDGGDDGDLLERDAPLRLALSVLHDLLGVAAFAASHPLHAAYALFFARHLLALACFFSPLLATTALLLAVLVTLCDTGDSCLILEHKPAVLFDHTELELPWHQAAIDAQISMDQEVLDEIKDGIEEKKVVLEDLNQLSAPHFSSENCSSRSDTSPEMQDQEYKDVEPVKELQDQEYKFLQPEEEEEQQEQDSENDAQPEEQLQEQDCDNGVQPEEEEESQEHEMRLQESHDDQEEEFKDAADQESPREDPLRPSTSIARRVHSRTSSEHLLVVGEGSPRKEKEWKRTLACKLYEERMQLKLRRDRAVVESSSDNMDMLWEAYEVGGGGGGATSTKGGASKAKRKQERATVERKQEHATADEEDDDDDGDEEEGSVRQLCCLQALKFSTRKMSFGGGGGKPSLAKISKVLRRVAALSRSGSRRSTKG

SEQ ID NO: 158261 - protein, 159 aa, Oryza sativa
  Clone ID: PAT_MRT4530_57752C.1.pep
NEGPFSRGKGAPPRRLLFFFKKVVFPPKKKNARLFFVFGSPNKQVLFCVKKGGSPFFFAPGRGNYSKPLPKLGFPIGGFLSVPIYWGPLLPKKGLFSLPPLLNPAFLWGDPAFLGGGNFLWAKSRDPQPVFFGGTPGIPPVFRGGWPLKPFYVVGFFSP

SEQ ID NO: 158262 - protein, 831 aa, Oryza sativa
  Clone ID: PAT_MRT4530_57753C.1.pep
MPPAAMAPPPPPQGSSTGDPLYDELWHACAGPLVTVPRVGDLVFYFPQGHIEQVEASMNQVADSQMRLYDLPSKLLCRVLNVELKAEQDTDEVYAQVMLMPEPEQNEMAVEKTTPTSGPVQARPPVRSFCKTLTASDTSTHGGFSVLRRHADECLPPLDMTQSPPTQELVAKDLHSMDWRFRHIFRGQPRRHLLQSGWSVFVSSKRLVAGDAFIFLRGENGELRVGVRRAMRQLSNVPSSVISSQSMHLGVLATAWHAINTKSMFTVYYKPRTSPSEFIIPYDQYMESVKNNYSVGMRFRMRFEGEEAPEQRFTGTIIGSENLDPVWPESSWRSLKVRWDEPSTIPRPDRVSPWKIEPASSPPVNPLPLSRVKRPRPNAPPASPESPILTKEAATKVDTDPAQAQRSQNSTVLQGQEQMTLRSNLTESNDSDVTAHKPMMWSPSPNAAKAHPLTFQQRPPMDNWMQLGRRETDFKDVRSGSQSFGDSPGFFMQNFDEAPNRLTSFKNQFQDQGSARHFSDPYYYVSPQPSLTVESSTQMHTDSKELHFWNGQSTVYGNSRDRPQNFRFEQNSSSWLNQSFARPEQPRVIRPHASIAPVELEKTEGSGFKIFGFKVDTTNAPNNHLSSPMAATHEPMLQTPSSLNQLQPVQTDCIPEVSVSTAGTATENEKSGQQAQQSSKDVQSKTQVASTRSCTKVHKQGVALGRSVDLSKFSNYDELKAELDKMFEFDGELVSSNKNWQIVYTDNEGDMMLVGDDPWEEFCSIVRKIYIYTKEEVQKMNSKSNAPRKDDSSENEKGSVKRDDTRGRSHGVLRERCHSAGPSQVNPLMCW

SEQ ID NO: 158263 - protein, 843 aa, Oryza sativa
  Clone ID: PAT_MRT4530_57754C.1.pep
MAPPPPPQGSSTGDPLYDELWHACAGPLVTVPRVGDLVFYFPQGHIEQVEASMNQVADSQMRLYDLPSKLLCRVLNVELKAEQDTDEVYAQVMLMPEPEQNEMAVEKTTPTSGPVQARPPVRSFCKTLTASDTSTHGGFSVLRRHADECLPPLDMTQSPPTQELVAKDLHSMDWRFRHIFRGQPRRHLLQSGWSVFVSSKRLVAGDAFIFLRGENGELRVGVRRAMRQLSNVPSSVISSQSMHLGVLATAWHAINTKSMFTVYYKPRTSPSEFIIPYDQYMESVKNNYSVGMRFRMRFEGEEAPEQRFTGTIIGSENLDPVWPESSWRSLKVRWDEPSTIPRPDRVSPWKIEPASSPPVNPLPLSRVKRPRPNAPPASPESPILTKEAATKVDTDPAQAQRSQNSTVLQGQEQMTLRSNLTESNDSDVTAHKPMMWSPSPNAAKAHPLTFQQRPPMDNWMQLGRRETDFKDVRSGSQSFGDSPGFFMQNFDEAPNRLTSFKNQFQDQGSARHFSDPYYYVSPQPSLTVESSTQMHTDSKELHFWNGQSTVYGNSRDRPQNFRFEQNSSSWLNQSFARPEQPRVIRPHASIAPVELEKTEGSGFKIFGFKVDTTNAPNNHLSSPMAATHEPMLQTPSSLNQLQPVQTDCIPEVSVSTAGTATENEKSGQQAQQSSKDVQSKTQVASTRSCTKHMKFFLLVVDMLKFSFCKFLAKSQFYPLCGMVHKQGVALGRSVDLSKFSNYDELKAELDKMFEFDGELVSSNKNWQIVYTDNEGDMMLVGDDPWEEFCSIVRKIYIYTKEEVQKMNSKSNAPRKDDSSENEKGSVKRDDTRDGGSTPESCLY

SEQ ID NO: 158264 - protein, 118 aa, Oryza sativa
  unsure (1)..(118): unsure at all Xaa locations
  Clone ID: PAT_MRT4530_57755C.1.pep
RRGSPNAVDLIRLQAFEPIRSVRSQPGKTXESFNVFNELFQDRISVVRRVFEPKSLLLPHYTNGASLVYIIQGRSITGXDFXQGCPETYXQQFQQSGQAQLTEVKAKAISSRDEHXKI

SEQ ID NO: 158265 - protein, 244 aa, Oryza sativa
  unsure (1)..(244): unsure at all Xaa locations
  Clone ID: PAT_MRT4530_57756C.1.pep
DEYNAMLVNHTWELIPNTPDTNFVTSLRXDGSLDRYKAHWVLCGFTQRLGIDFDETFTLIVEPASFSSRLGPIHLPAVKNALLHGTIQEXIYCSQPVGFVDPTMLDMVCRLNKSLYGLXQAPRSWYSXFANILLSLGFTEAKSNASQFAYHRGFSVIYLLLYVDDIVPIYSFXGDLLRMIITALQSEFSMKDLGKFHHFLGISARPTDIHLSPCXYCLEVLEHAGMTGCYRIELQELSQPERGG

SEQ ID NO: 158266 - protein, 342 aa, Oryza sativa
  unsure (1)..(342): unsure at all Xaa locations
  Clone ID: PAT_MRT4530_57757C.1.pep
MEKGVNPAFIDRRQHPPRGGFRMPPPNPTXPYREDCWSEGETEALVRAWGSRYVELNRGNLRQKQWQEVADAVNSRRGAAARRRPPRTDVQCKNRVDTLKKKYKAERARVMPSTWSFFPELDRLVGPTLSASASKRPSPSPSPVPPPPYFAMPIHPSAVRKPPSPSPSPSPPPPMALPLPSYRRGSPLPAAALIQQEAAAAAAAAVSDSEDSEGPGDNNNHNAQRSPSQSVSSRSGNSNKRSRQEVDGGFRELARAIEAFAEMYERVESAKQKQALEIERQRIDFLKQLEVKRMENFVDAHVKLARAKRIKKHAGTAPDGIGAAELVSSVAALPFLSTSTYI

SEQ ID NO: 158267 - protein, 552 aa, Oryza sativa
  Clone ID: PAT_MRT4530_57758C.1.pep
MAEERESFESQWAPSDVTEENLKEMVAHGVLPAKEIIGWRPACDEAFPTPDTHELKEQGLQGEQITRHFIKSQLAPIKERSRTAFEFDGKNDPNREDPESLEFKIMKERMYKIFSTGIVVSYSYLLPVVPYNAFNPPPPEFSLMKSDPPIAQRRSPRQQAGQASGGPKIQTVAQPSSPKPTNQPGSRKRKLVLSDDEGDNVGKAGSKESTDKETGSTTAKETEPTEENHPTGSQSATDNVETGKVPPTGNQSAEVETDAHQERPIGDQPGVEPNKDIPETERQTSSPPFNNTNVGSETSTFDKVQGPARPPPKRIHLRNEAKTATLEKLVGHLGTLEATRAQLHETRELARKTEHDLRDRIAELSGSSKAAKITELEKRIKALEKDKGELTKKRDSALKDVEDRKIKSQAQFDVLVNKIKKLEGARDEVANAATPLIQAMFFNNNGPSSFNAVEIFDKLITAPNVCFKNIKEAGCMGASMVLAMTKSLYPKIDVDTVDGFADGTSEEDVLDLINDAQKAADKIAVDVIEIFQDTNLGPTKADVSDDERTESN

SEQ ID NO: 158268 - protein, 419 aa, Oryza sativa
  Clone ID: PAT_MRT4530_57759C.1.pep
MAVLAGPLWAAALLGLLLGWAWRPRWAAGLVATADSHPAPLTFATLEFWRTQLPARIRAPLAQYVGAAGPAPPPQQEDDSSLLGSSEMANEQLAVGKDDLMNLWRLVEGRDGGPAWIKMMEKALPAMTYQAWRRDPQTGPPQYQSSTIFENANPEEVRDFFGDDQFRMSNKWDDMLIYHKTLEECQTTGTMKVHWVRKVDYLDMIFPFFCSDREYIIARRIWKLGGAYYCVTKRRIWKLGGAYYCVTKGVPCSSIPRRNKPRRVDVYYSSWCIRPVESRRGNSGLTACEVLLFHHEDMGIPYEIAKIGIRQGMWGCVKRIEPGLRAYQKARAAGEPLSQSALMAHINTKVGDNFVRGLESNDDQSDIVEAEEKPAKNRVARFLVLGGAVALACTLDQGLLTKALIFGVARKFVGQRNTL

SEQ ID NO: 158269 - protein, 455 aa, Oryza sativa
  Clone ID: PAT_MRT4530_5775C.1.pep
MQQQQQPRMADIDLDAVRAVRVLGRGAMGTVFLVAAAADDAAGGGACYYALKVFDKRSVVASAARQGDAARRARWEVSVLSGLAHPHLPSLLGRAETGDLVAWAVPYCHGGDLNELRHAQPDRVFSPAAIRFYVAELVSALAELHAAGIAYRDLKPENVLLRADGHVTLTDFDLSRLLPPVSPSASTSTSSSSCSATSSPPPQLQGHGRSQLRRIFARSESSVAATTSTSSPGQYTHNLAWFLKRSDGGGGAADHLKKAKSARVSPVSRGKKQASFCSAASASGGAAAACERSFSFVGTEEYVAPEVVRGEGHEFAVDWWALGVLVYEMAYGRTPFRGRSRKETFRNVLLREPEFSADSRRRWPELTDLIARLLDKEPTKRLGFAGGADEVRAHPFFAGVAWDLLGELSRPPYIPPPADDIAACEGFSVVEYFNKLHEPSPEPEEEELTEFLPEF

SEQ ID NO: 158270 - protein, 110 aa, Oryza sativa
  Clone ID: PAT_MRT4530_57760C.1.pep
MAERHCPFVWNMLKSMSTSVPATIERFIIDFSELNGAGRGAGKTERQGADDDDQIQRQDARIRYPYGRICCFRAAATRVGKSRRRRRGGGGLRRRWMATVAAEAGEGDDG

SEQ ID NO: 158271 - protein, 85 aa, Oryza sativa
  Clone ID: PAT_MRT4530_57761C.1.pep
FNCQYSTTKVGRLINQTGQKAPANNFGLTSASYLKITRGSFGCNPLISVHTRALVPVLADILASAISVKTACSLPSRAPVSHPWA

SEQ ID NO: 158272 - protein, 49 aa, Oryza sativa
  Clone ID: PAT_MRT4530_57762C.1.pep
MGMGVAALARCEVETWRQRERFGLSNSPRSIGWAVELPQFDRVAFSIYL

SEQ ID NO: 158273 - protein, 115 aa, Oryza sativa
  Clone ID: PAT_MRT4530_57763C.1.pep
AEDEDDGEEGEGDHWRRRKGYDRANKNEVSSLPSAAVAHRGHRAAVSHRGCCRRRASRPPRRRHRRASRPPRCRHASRLLPPSCIEPADAAAVPLPSCIEPALLGGTQFEFAALI

SEQ ID NO: 158274 - protein, 63 aa, Oryza sativa
  Clone ID: PAT_MRT4530_57764C.1.pep
GEISPRPPPCPIFFWGGFRSWNSPFMSCIPRGVDPRALNRTNLFVCPQGGLELGGGFYACSPS

SEQ ID NO: 158275 - protein, 276 aa, Oryza sativa
  Clone ID: PAT_MRT4530_57765C.1.pep
MPTDDATATGNGDGAAPRPAAAEPAAPLSSVWTRRDEKLLEMLLWRWQLDPHWDRLAAELGGKTATQVFDRYVCLADELRLVMAAPAVDTPPAWDVQDEREAAVAPLPGLEADAAAGAGESAEVTAIGIAAAASPNAAATSAPTIGGGVVLKSRELKNPRKTRMAGGGPRKKAEMWTREEHSQFLHGISTYGKGNWKALASEFVKTKSSTQIASHYQKFCIREEKRRLSKCKRASIHDIVSPTTTTSAPESAGAGPSAPPCALIESGALIAGDDDA

SEQ ID NO: 158276 - protein, 48 aa, Oryza sativa
  Clone ID: PAT_MRT4530_57766C.1.pep
KFNPPMRCCLAPSCHTYADAQITRVTNVTILLYDNVKKDSPYTLPFFP

SEQ ID NO: 158277 - protein, 178 aa, Oryza sativa
  unsure (1)..(178): unsure at all Xaa locations
  Clone ID: PAT_MRT4530_57767C.1.pep
QAGPTGAAPRGGETPAWPGIKPAGLPWQGRRRARXGDGNRRRKTAARRRRRMAEAAARPGSARREREGKRGGGMPHRELAGXGRTTANGDGDDRGTTVNGDDLRDTLREGNXEIRGREGVHGERKPWPMAAVMERLTGARPKRPPMAELGGGGVDEVELGLANPTAATARCGGDPNGG

SEQ ID NO: 158278 - protein, 37 aa, Oryza sativa
  unsure (1)..(37): unsure at all Xaa locations
  Clone ID: PAT_MRT4530_57768C.1.pep
VPKPLVGKRIKSLFAKHHLLLHLSXVHNTNSIIISSH

SEQ ID NO: 158279 - protein, 819 aa, Oryza sativa
  Clone ID: PAT_MRT4530_57769C.1.pep
MSDSELSQSTVVFGLHLWELVGIGVGAAFVLLLVLLSLLCLVASRRRRRRRGVAVATPVLHLATAVAPPKHPGKPPKDIQEVPSRAAAAAAAPKAQPAQVIQAPPPQPPPSESIQIETGKEHRITFREQQHQPPQPPPYHQRSGGPSSRGGSGESRGGGGGGGGGGAEPGVPEVSHLGWGHWYTLKELEDATAMFADEKVIGEGGYGIVYHGVLEDGTQVAVKNLLNNRGQAEREFKVEVEAIGRVRHKNLVRLLGYCAEGNQRMLVYEYVNNGNLEQWLHGDVGPVSPLTWDMRMKIILGTAKGLMYLHEGLEPKVVHRDVKSSNILLDKTWNAKLSDFGLAKLLGSERSYVTTRVMGTFGYVAPEYAGTGMLNETSDVYSFGILIMEIISGRVPVDYNRPPGEVNLVEWLKTMVSNRNSEGVLDPKMTEKPTSRALKKALLVALRCVDPEARKRPKIGHVIHMLEVDDFPYRDERRGGKAPGQVKSGEIPPVEAGDSSGNNTPKETPKETPEWHPAPGKLTSSKQEPRQTCSAYYSYEGGQRWAERRRSSTATGRAAVGKRVSGAAGGYGRARRLVEQRGASAAAVNYISKRGGGGGHRCRVVHGHPDRNPSLSWSSPSSTSLLKSRSISRSSPIIPKKNRNEICKYLFQEGVLYAKKDYNLAKHPQIDVPNLQVIKLMQSFKSKEYVRETFSWQYYYWYLTNDGIEHLRNYLNLPSEIVPATLKKSARPPGRPFGSGPPGDRPRGPPRFEGDRPRFGDRDGYRGGPRGAPGDFGGEKGGAPAEFQPSFRSSGGRPGFGRGGGGGFGAGPTSSSSME

SEQ ID NO: 158280 - protein, 327 aa, Oryza sativa
  unsure (1)..(327): unsure at all Xaa locations
  Clone ID: PAT_MRT4530_5776C.1.pep
LQLGRSARGISCVPITYDVRLRTTLGKVSIMNDGSIAGGFEIGQGLWTKVKQMTAFALGQLCDDLDKVHVILIQADTLSMIHQGEGWYPTMEILDCPGEXLSLVNVLFKKKKSNSCDIFVAIISFFLXQASMASVKLTEHTYWTPDPTFPSYLNYGPAVSEVEVDMLTGATTILRSDLMYDCGQSFNPAVDLGQVKGAFVQGIGFFTNDEYATNSDGLVIHDGTWXDTILKQFNVELINSARDHKRVLSSKASGEPPPLLASSVHCAMREAIRAARKEFAGAGGSALTFQMDVSLRPRRCRVVPRVANLIGSHRNAEISKILVRYFK

SEQ ID NO: 158281 - protein, 121 aa, Oryza sativa
  unsure (1)..(121): unsure at all Xaa locations
  Clone ID: PAT_MRT4530_57770C.1.pep
RTWRRPAFALRGWQNDSICPLCRRNQETALHLLGGCRYMKRIWTALAEXTACGQLRTTXWQNALTLLEWWEATVNTKDASKKAWRTLMLLVVWEIWNGRNRSTFQQKELPSTSLLAKIKGE

SEQ ID NO: 158282 - protein, 87 aa, Oryza sativa
  Clone ID: PAT_MRT4530_57771C.1.pep
MVEMANEPPSRRWGEQHQRRGKGRAAQAGGGAAERRESCCGGQRRGVMLEIVEKGSCPGLDPAAPSSLRPMPSPLRPASSPLGHLST

SEQ ID NO: 158283 - protein, 351 aa, Oryza sativa
  Clone ID: PAT_MRT4530_57772C.1.pep
MAAAAAAAVACGMSTSFLIRLSPSPPASSHVPLPRSPASSARPRRASSVSLSTAPRPRARAAGSDSPSNFGGQTSLMPPFSLMLDEGSRSKKPYRWQRVLLKVSGEALAGDHTENIDPKITMAIAREVASVTRLGVEVAIVVGGGNIFRGASWAGCSGLDRSSADYIGMLATVMNAIFLQATMESIGIPTRVQTAFRMSEVAEPYIRRRAVRHLEKGRVVIFAAGTGNPFFTTDTAAALRCAEINAEVVLKATNVDGVYDADPKRNPNARLLEAVSYHEVQTRDLSVMDMTAITLCQENNIPVVVFNLQKPGNIAKAIVGEKVGTFIGCTKDQDQIVGNALDQERRLVNEL

SEQ ID NO: 158284 - protein, 72 aa, Oryza sativa
  Clone ID: PAT_MRT4530_57773C.1.pep
GEHHLHDPPKTMPNQLHHQRHNARNQPPHLSPRREPINRGRRPGYATTVQRRHRHGGVYSCGVGRREVDVKL

SEQ ID NO: 158285 - protein, 265 aa, Oryza sativa
  Clone ID: PAT_MRT4530_57774C.1.pep
PRVRENPATDENNLEQKRVPVSIDVPDPDFYDFDKDRTERTFDNDQVWATYDSEDGMPRLYAMVQKVISRKPFRIRMSFLNSKSNIELSPINWVASGFSKTCGDFRVGRYQIFETVNIFSHRVSWSKGPRGIIKIVPKKGDTWALYRNWSSDWNELTPDDVIYKYEIVEVIDDFTDEQGVTVIPLLKVAGFKAVFHRRTDSDVVRRIPKEELFRFSHRVPSRLLTGEEGNNAPKGCHELDPAATPVDLLKVITEVKEVATTEISE

SEQ ID NO: 158286 - protein, 299 aa, Oryza sativa
  unsure (1)..(299): unsure at all Xaa locations
  Clone ID: PAT_MRT4530_57775C.1.pep
DGLELLGADPTIPEDQLIDQNLKIMYRQMISGARKKELFMGHPYSAGDQPKPGAGTVEFVLHNTVHNWTGDPRQPNGEDMGMFYSAARDPVFFAHHGNVDRMWYIRHGLFPRDTDFTDPDWLDATFLFYDEEARLVRVRVRDSLDEAALRYTYQDVGPLPWLNAKPSTGPAGALPGTLDKTVRVALTRPKTSRSRKEKDAEEEAPVIEGIEVPDHSAYVKFDVFVNAPENADVAXALTPHGVHREERKRSPRKTVARFGISDLLEDIGADGHKTIVVSIVPRSGCDSVRVSGVSIGYVR

SEQ ID NO: 158287 - protein, 144 aa, Oryza sativa
  Clone ID: PAT_MRT4530_57776C.1.pep
MTILFSAISIGAACRTTADRRLSWCANVHSTPCYLVLRCKWIQTRIESDLRKHMDVFDQLVKDLNYLDVKLDDKDKVIILLSSLPTPHEHVVTTMTYGKVKHDNDTGTSKGKEKRVMRPRLKTTGAGRESPNRRRPWSSCETSY

SEQ ID NO: 158288 - protein, 106 aa, Oryza sativa
  Clone ID: PAT_MRT4530_57777C.1.pep
WCFFFFLGFFFFFFFFYKSHNDFQRSKRISQTEATEAARGKAGNAPCTDGVHARSLRPLQAPRERPQNYCRNHPKPPDTPAIPRAPCGPKGNKPSRKRGPPGTRPA

SEQ ID NO: 158289 - protein, 90 aa, Oryza sativa
  Clone ID: PAT_MRT4530_57778C.1.pep
RQNGVGRSPTGRMASYPSAAIRTFLCYGMTDRDLKVPQQIDDRCRKATVAETLYLTLHSDNTQVRNPFNRLSLNDPTPSQHQGQHVTLYQ

SEQ ID NO: 158290 - protein, 408 aa, Oryza sativa
  Clone ID: PAT_MRT4530_57779C.1.pep
MQKYEQVGSKIVPQQLASDHHTSNSATMQEASVLLMLIVFHAMAISTTTSEPAISLPGCPGKCGNVSIPYPFGIGAGCSATSLSSYFTITCNDTFQPPRPMVRDLLSETEVIDISLERGEVRVYGPVSYICFSSNTTIPENHTTGFTLEGTPFVPSTTRNRFMAIGCHTLGIIGGYMHSNSNLYVAGCYSYCQSINSTSNGAPCTGMGCCETTIIPDLKDFAAILVMNQSAVWEFNPCFYAMLVEAGWYSFRQQDLVGHLRFVNGRANRGVPVIHDWAIRNGSCPEGKKVPKDYACVSSNSKCVQASNSQGYLCKCSEGYEGNPYLPKGCQGNEESKLRKEDPKYKELYPCRHGMCQNIPGNYLCKCGVGKRPDGTNYGCQTVLNQVERVIAGLSVSAVVLMALICLL

SEQ ID NO: 158291 - protein, 200 aa, Oryza sativa
  unsure (1)..(200): unsure at all Xaa locations
  Clone ID: PAT_MRT4530_5777C.1.pep
RPGRPCCTLLLLLPPPLYTPCKKLRALASQSQAKARKLATCHCHQQEQRGRRRGEKEQRYYRYLDQTTRNKAANNDRYTHTHVVVQVHALHGYLIMLWISSAKVTGRAVMLVAGWMDWDMGVVSGGAVQCSAAIIAEICSCLHSMQHPKKCCAMYGRSYRKGCVGRPARCTYTALYTVHSLGLLMLNIXAMLNKFCITYY

SEQ ID NO: 158292 - protein, 62 aa, Oryza sativa
  Clone ID: PAT_MRT4530_57780C.1.pep
ATSVTEVHGVNFKQFNDGNFSYLAVCYGDIKQLFNPFLSPGLNELSFSMHNRTTCSCKKKKK

SEQ ID NO: 158293 - protein, 199 aa, Oryza sativa
  Clone ID: PAT_MRT4530_57781C.1.pep
MASRPASSTATTACRAQICFQGIDSFTSPFFVKSGGCGFWEWCDDKAEPYMKQLLLDLRNAVWSAREQVNGLEAALRDRTVAQHNLQSTPKKESNEVQGLRAAVEKMEAANCVLVDRINKQQTSVLLEFVIANWNECKIVVLFEMTVKNQPYWVTGNQGMLWQLEIMETAKVMINNDIYCHIWNPLYLITSASKQEWWQ

SEQ ID NO: 158294 - protein, 107 aa, Oryza sativa
  Clone ID: PAT_MRT4530_57782C.1.pep
MEKKPEGDAIVGLLKLHSSTTNTNTHIYADVASGAHMGEDGGNDSTTRANEERYLLSFDDPIVAAHSYAITWTPATVIFYVDGTVIFYVNGHHHLLRRRPPSSTSDL

SEQ ID NO: 158295 - protein, 49 aa, Oryza sativa
  Clone ID: PAT_MRT4530_57783C.1.pep
WPLTSPLPPLTLPRTPAMPPRMPPMPDPPWTPSRLPPTLPHTPQTPDPT

SEQ ID NO: 158296 - protein, 111 aa, Oryza sativa
  unsure (1)..(111): unsure at all Xaa locations
  Clone ID: PAT_MRT4530_57784C.1.pep
RLCKKRAWAVKPXRXDSVLXFNLQPDGTPDPLSLHGSCPVIEGEKWSAPKWIHVRSYDNASSMKQSEECSDLSENCAAWAASGECNNNAVYMIGTEDAPGQCQKSCNACSL

SEQ ID NO: 158297 - protein, 94 aa, Oryza sativa
  unsure (1)..(94): unsure at all Xaa locations
  Clone ID: PAT_MRT4530_57785C.1.pep
RASXAPPSLXPPRRAMVCEXXXGXKEGXLGRERQYVVDGAAEGDARRSGPGEEGAAMDRVLGGSRRFAKGLVXEARGRRGRGGWVGTXRCSTSV

SEQ ID NO: 158298 - protein, 57 aa, Oryza sativa
  unsure (1)..(57): unsure at all Xaa locations
  Clone ID: PAT_MRT4530_57786C.1.pep
XXXXFFFFFFFFFFFRVFLTTQAFPGIHHRKFNLTCHILHAKSVGEEKGPPNWGSPF

SEQ ID NO: 158299 - protein, 94 aa, Oryza sativa
  Clone ID: PAT_MRT4530_57787C.1.pep
LHFFLLIGIKGTLFFSRNIYICTQYWQHGHTIMIHRQEVRSCAKHGGQMVEVTPRSPTSWCRPGVRNPQRASDFWRTELELQHPVIDPLTLTIV

SEQ ID NO: 158300 - protein, 1396 aa, Oryza sativa
  Clone ID: PAT_MRT4530_57788C.1.pep
MQRRWQVWGKPDGSLVWVPASDGPPPPAAAAASEAPLPRPDPQPAATELGEARSGDAIPEALDKLVAADGMAEAIEDSGKGAVFCTGLGGSVAVSERAVERAKALVGEVAEEISNERRQPFGDGSNLECGLGESNVSFKGGVHKDSLSPMFQTGSGKMVSLSKGSIQKARAVLEGNAENSSVIAVQSMFHTGLVRPDPVSRSSTDNAMTVLEGQTNPKQGDVADVYDKENFPLFQTGSGKAVSVSVASIQKAKAVLEQNNTGHGDTNVSTTTFQTETPTSVLMSGGLTMNDRSVTPEGGVSMQGNFLEADGHLPLFQTGLGRSISVSKGSIKRASALLEPRNITKELEDEAHSDDGCATPMFKTGSGRSITASENSRKKAHVVLEGEEPVKNVNNDTGEAIAPMLHAGMQKFAPQNRNSSHKAITLMEQGSSMKEEYIDRGNEPPMFRTGSGKSVLISHSSVQKARAVLEEEGNMKKENHKQLSNVDKYIPIFTSPLKTSYARTVHISSVGVSRAATLLGLEENTLSTQLLGHVGDKLGTKITVERENSEHQFGVASVSGISGGCPISSGPAENQVLMDPHQHFAFSKTTFSDSSEQAIRFSTAGGRTMAISSDALQRAKNLLGESDLEVSPNNLLGHSSASACKENIQNSTGLRKEGEPDLLKSRGNSKTEPAQFSIPAKPDRKHTDSLEYAVPDATLANGNSVRLHAARDFHPINEIPKISKPSSRCSFGTENASDTKDKARRLQMPSGPLIDITNYIGTHSVNTDYLAGEKRRFGGRNSISPFKRPRSSRCTIFFTLLTYNSCDQTEDVTDEVKLMDAKKAEKYKFKTDTGAEEFQKMLLACGASLTYTTKEWVSNHYKWIVWKLASLERCYPTRAAGKFLKVGNVLEELKYRYDREVNNGHRSAIKKILEGNASPSLMMVLCISAIYSCPDLNNSKPEDDRAHTDDDNSENKSLRPAKRNMSTKIELTDGWYSLDASLDLALLEQLEKRKLFIGQKLRIWGASLCGWAGPVSFHEASGTVKLMIHINGTYRARWDETLGLCKHAGVPLAFKCIKASGGRVPRTLVGVTRIYPVMYRERFSDGRFVVRSERMERKALQLYHQRVSKIAEDIQSEHGEHCDNTDDNDEGAKICKMLERAAEPEILMSSMSSEQLLSFSYYQEKQKIVRQNEVAKKVENALKVAGLSSRDVTPFLKVRVTGLISKHSATKSGCREGLITIWNPTEKQVRPFFTPRKAVELSHFGEVPLTSEFDIAGVILYVGNVYLLNNQNRQWLFLTDGSKFISGEKYEEQDDCLLAVSFSSKTTGEDSAFFNYALSGHIVGFSNLVKRDKDQMRHVWVAEATESSTYSLSHEIPKKSHLKEAATSAEKWASNSHPMIQHLKERVLQIVGDSGG

SEQ ID NO: 158301 - protein, 125 aa, Oryza sativa
  Clone ID: PAT_MRT4530_57789C.1.pep
DSILAAKCIAYIQQYNVQQQELDLNIVDSGRTVTYVVCSRCFAYILQMGCYRLSGISIHHSGTSCKWVVTGSLESAFTVQEPITFCTAKCQLLFPLLLLLKKDGYTSHRPYFILAKSFFRIFLLG

SEQ ID NO: 158302 - protein, 1361 aa, Oryza sativa
  Clone ID: PAT_MRT4530_5778C.1.pep
MGSEAAAARPVVVTVNGERYEAVGVDPSTTLLEFLRTRTPVRGPKLGCGEGGCGACVVVVSKYDAVADEVTEFSASSCLTLLGSLHHCAVTTSEGIGNSRDGFHAVQRRLSGFHASQCGFCTPGMCMSIYSALAKADRCSSRPSPPPGFSKLTAAEAEKAVSGNLCRCTGYRPIVDACKSFAADVDLEDLGLNAFWKKGADDERADVGKLPAYSGGAAVCTFPEFLKSEIRSSMGQANGGAPAVAVTGDGWFHPKSVEEFHRLFDSNLFDERSVKIVASNTGSGVYKDQDLHDKYINISQILELSAINRSSKGVEIGAVVSISKAIEILSDGGAVFRKIADHLSKVASSFVQNTATIGGNIIMAQRLSFPSDIATVLLAAGSTVTIQVAAKRMCITLEEFLKQPPCDSRTLLVSISIPDWGSDDGITFQSFRAAPRPLGNAVSYVNSAFLARSSVDGSSGSHLIEDVCLAFGAFGAEHAIRAREVEEFLKGKLVSAPVILEAVRLLKGVVSPAEGTTHPEYRVSLAVSYLFRFLTSLANGLDEPENANVPNGSCTNGTANGSANSSPEKHSNVDSSDLPIKSRQEMVFSDEYKPVGKPIEKTGAELQASGEAVYVDDIPAPKDCLYGAFIYSTHPHAHIKDINFRSSLASQKVITVITAKDIPTGGENIGSCFPMLGDEALFVHPVSEFAGQNIGVVIAETQKYAYMAAKQAVIEYSTENLQPPILTIEDAVQHNSYFPVPPFLAPTPIGDFNQAMSEADHKIIDGEVKLESQYYFYMETQTALAIPDEDNCITLYVSAQLPEITQNTVARCLGIPYHNVRIITRRVGGGFGGKAMKAMHVAAACAVAAFKLRRPIRMYLDRKTDMIMAGGRHPMKVKYSVGFKSDGKITGLHFDLGMNGGISPDCSPVLPVAIVGALKKYNWGALSFDIKVCKTNVSSKSAMRAPGDAQGSFIAEAIVEHIASTLSVDTNAIRRKNLHDFESLKVFYGNSAGDPSTYSLVTIFDKLASSPEYQQRAAMVEHFNAGNRWKKRGISCVPITYDVRLRPTPGKVSIMNDGSIAVEVGGVEIGQGLWTKVKQMTAFALGQLCDDGGEGLIDKVRVIQADTLSMIQGGFTGGSTTSETSCEAVRKSCAALVERLKPIKEKAGTLPWKSLIAQASMASVKLTEHSYWTPDPTFTSYLNYGAAISEVEVDVLTGETTILRSDLVYDCGQSLNPAVDLGQVEGAFVQGIGFFTNEEYATNSDGLVIHDSTWTYKIPTVDTIPKQFNVELINSARDHKRVLSSKASGEPPLLLASSVHCAMREAIRAARKEFAAVGGGTGGSDQVTSFQMDVPATMPIVKELCGLDVVERYLESFAAKA

SEQ ID NO: 158303 - protein, 125 aa, Oryza sativa
  Clone ID: PAT_MRT4530_57790C.1.pep
STSSMGMLSLKRLMARQRQREWRRRRQKAQKPRDGSIASERKGNNYQCGKRLRYSWPNFPELPIPRSIRKLFSTRKNHHRTKALKTKKEDMIQPQRSIFRSTPTMKTFRVSGLVPKPCLWNKLIT

SEQ ID NO: 158304 - protein, 321 aa, Oryza sativa
  Clone ID: PAT_MRT4530_57791C.1.pep
MVGRMERQSASSSASCSPSSSAAGTSSSSSACGGKKRPDILNMIRSATCLNSSSTDTGKGRSKQSSNKVTHGFHLVEGKSGHDMEDYHVAEYKYDKSHELGLFAIFDGHLGDSVPSYLKANLFCNILKEPIFWTNPQEAIKNAYRSTNKYILENAKQLGPGGSTAVTAIVVDGKDMWVANVGDSRAVVCERGAANQLTVDHEPHTTNERQRIEKQGGFVTTFPGDVPRVNGQLAVARAFGDQSLKAHLSSEPDVRHVPINSSIEFVILASDGLWKVMKNQEAVDLVKSIKDPQAAAKRLTTEALARKSKDDISCIVIRFRC

SEQ ID NO: 158305 - protein, 50 aa, Oryza sativa
  Clone ID: PAT_MRT4530_57792C.1.pep
MHRSRGVSSSMYNQEHPSDMNLACLIKIFCFLHTFDFDCLSNKYHKYQGF

SEQ ID NO: 158306 - protein, 87 aa, Oryza sativa
  Clone ID: PAT_MRT4530_57793C.1.pep
LKNPINMVSNEWDMPAHPLGGFESVPVMYLCPLSKNGCTMSPYWRRSHGIVFILSLWGLFFTINPWYHLSSPPVVEALVKRISPFGP

SEQ ID NO: 158307 - protein, 60 aa, Oryza sativa
  Clone ID: PAT_MRT4530_57794C.1.pep
MALSGNFALLDPMEAATTVQLRIGGGPSDEWGRGMRRGERLGDGDNGGEGVFPFELISRL

SEQ ID NO: 158308 - protein, 43 aa, Oryza sativa
  Clone ID: PAT_MRT4530_57795C.1.pep
LYFYILKLCNNGYIFILIISYDCVYRLNVQCSIVKVLSSSFNN

SEQ ID NO: 158309 - protein, 49 aa, Oryza sativa
  Clone ID: PAT_MRT4530_57796C.1.pep
VTRVMRVTSTREGQGSCLVPGQWSISTPILWSVRVGFYPTQCVSRSMNL

SEQ ID NO: 158310 - protein, 76 aa, Oryza sativa
  unsure (1)..(76): unsure at all Xaa locations
  Clone ID: PAT_MRT4530_57797C.1.pep
MAADHELLAASEDLVEVVVLGMVSAHSMHKLEGANNTTSPNAVDIVYKEMNRXLSEPTELADPELRIFLLDCYLAR

SEQ ID NO: 158311 - protein, 157 aa, Oryza sativa
  unsure (1)..(157): unsure at all Xaa locations
  Clone ID: PAT_MRT4530_57798C.1.pep
SRHASRSRDPIERTHAGLQERERPAGGAPTHPKAKTXXXXPQREPXXXGGRXAPXGKTARXKHGAXPKXTTAPPXXPRXPDPRARPPTHDRXHPQGGDXPXXTPQPRAPAXXXNXGXXPAGGAXRAAPKKRRKKRXRASPAGQXPSRXQQXQQHRPS

SEQ ID NO: 158312 - protein, 80 aa, Oryza sativa
  Clone ID: PAT_MRT4530_57799C.1.pep
FFSSFSISLFSFLHSLFHISLLSFHHMISTIFYTLYYHLFHTFKLRIIFSFFLLITIIFNYFYIFFPFIYLLIFFTLYFF

SEQ ID NO: 158313 - protein, 141 aa, Oryza sativa
  Clone ID: PAT_MRT4530_5779C.1.pep
MAVHSVSRCVILPRLANSKIPLQIRPAELLEGRAGIGAGEERGEAAARRWRRQIRSTKLPGSRAGTGGERGELPPAPEGRGSRSSLGVARSAPLSSREAAPVPEGRGERPPLVTDVRGADWGDHLNGGDKHGRHHESRGIE

SEQ ID NO: 158314 - protein, 90 aa, Oryza sativa
  unsure (1)..(90): unsure at all Xaa locations
  Clone ID: PAT_MRT4530_577C.1.pep
MFGNHCEVHQPNPTTYAVSYCRIQLNQLTLSNLDFADPDHSRFRLXPIFTLFPGRSPSRTPFRFLLHLRYSDYQIWSNFSFLFLFVGKSK

SEQ ID NO: 158315 - protein, 65 aa, Oryza sativa
  Clone ID: PAT_MRT4530_57800C.1.pep
SCCSYMLLQREHSYYMDWMHVSKKTISAIQLQLAISDLVRFIPPSHWSTWISVSPISRSTAKSIG

SEQ ID NO: 158316 - protein, 275 aa, Oryza sativa
  unsure (1)..(275): unsure at all Xaa locations
  Clone ID: PAT_MRT4530_57801C.1.pep
KGDENAAGGCSLIVWDKLCLPFHSGGLGIKDLRLMVVAMRTRWAWLRRAHLARPWTNMAPPLDKKVAHCLAAGCSIILGNGEQALFWTDNWMPGKGSIXFMPILFSFVQDKKRSVAKSLQDNRWVDDIRGGLLAQALVEFFALWDLVSPLIPEQGASDVFSWWLSANGKFSVKSAYSLLSXAAHDASXGKTIAKSSAPERCKFFMFCAMKGACLTTDNLQRRGWHLASICHLCSREEETCAHIFQGCSYTQEVWSDVRGRLGLRCSLPAVNFPSW

SEQ ID NO: 158317 - protein, 498 aa, Oryza sativa
  unsure (1)..(498): unsure at all Xaa locations
  Clone ID: PAT_MRT4530_57802C.1.pep
MAFSNRSYTLNLLQFKMIEMSFVPLLIFHLQARCNNWGGRRSHGADRVNEMMVDPLSQYHVCSSVIRHALSLPPTTLELHKGQLVHEHDEKGQPTLEFRETRNLRRLWLHRSLTRTMMHGLEEITTRELDEDDNVEAKGGGRAGAGAGAAMDVDSVECLSLPDSSSSSGAGAGGGGGGGGGGGVGAMDAADDVGLALHAHGALLAAAAAARAAACSKGGGGGGAAAGSGVHELLECPVCTNSMYPPIHQCQNGHTLCSTCKARVHNRCPTCRQELGDIRCLALEKVAESLELPCKYCSLGCPEIFPYYSKIKHEAQCMFRPYNCPYAGSECAVVGDIPYLVAHLRDDHKVDMHSGCTFNHRYVKSNPREVENATWMLTVFHCFGQYFCLHFEAFQLGMAPVYMAFLRFMGDENEARNYTYSLEVGANGRKMVWEGTPRSVRDSDRKVRDSNDXGLIIQRNMALFFSGGDRKELKLRITGRIWKEQQTPDGACIPNLCS

SEQ ID NO: 158318 - protein, 56 aa, Oryza sativa
  Clone ID: PAT_MRT4530_57803C.1.pep
KIQLFSALPDKVVSNGYRFSREQVRSFKNNRGKEPGSFVLIFQQQCYPGLWIESES

SEQ ID NO: 158319 - protein, 357 aa, Oryza sativa
  Clone ID: PAT_MRT4530_57805C.1.pep
MAAKAAALSSSPFVSSRRLSSPAASLRARTPRCVMGSEQVRVVVEEEGKTKKRMGVAEPRSAPPAVWTPRAPAQEARLAALRTDGRDSRLKIFSGTANRPLAQEIASYLGVDLGKVLIKRFADGEIYVQLQESVRGCDVFLVQPTCSPVNENLMELFVMIDACRRASARSITVVIPYFGYARADRKAQGREAITAKLSANLLTEAGSDRVIVCDIHSTQALGYFDIPVDHIHGQPVILDYLASKTISKDLVVVSPDVGGVVRARAFAKKLSDAPLAIVDKRRQGHNMSEVMHLIGDVKGKVAIMVDDMIDTAGTITSAAALLKQEGAEAVYVEASFSKLLSQAPFCCQSSNVAPIFE

SEQ ID NO: 158320 - protein, 64 aa, Oryza sativa
  unsure (1)..(64): unsure at all Xaa locations
  Clone ID: PAT_MRT4530_57806C.1.pep
HCLCSPPAIERLSGGIFEEVIVTNSILLPEHKCFPQXTVLSMANLVAETIWHVHRDGSVSSIFQ

SEQ ID NO: 158321 - protein, 735 aa, Oryza sativa
  Clone ID: PAT_MRT4530_57807C.1.pep
MLRLLRHARRHSTSSSSSAAAAAVPLTSPAFAVFGANTGVGKTLVSAGLVASLLASPSPSPSTVAYLKPLQTGFPDDSDARFVFDRAPALLRRLRLAGGGASTRLVASNHTLFPSPAVDPLPERQDTVVNYGGEEGVEEKALVCRTVYAWREPVSPHLAAEREGMPVEDEEVRWLVDRWLAEEDGGGEVWKVLETAGGVASPGPSGTLQCDLYRSSRLPAVLVGDGRLGGISSTLSAYETLLLRGYDVGSVILEDRGLSNDRFLLSYLRKRVPVHVLPPIPEDPKDDLTDWFSESSSAFSSLKDSLQSFHSRRVQRLNSMQRKSKYLLWWPFTQHDLVPVDSVTVIDSRFGENFSAYKVKDKTIVPQFDACASWWTQGPDSNLQIELARDMGYAAARYGHVMFPENVHEPALRCAELLLGGVGKDNGSTAIEIALKMAFRKYACDHGIIVDSEKDIRSEGSVHFKVLALNGSYHGDTLGAMEAQAPSAYTSFLQQPWILTSLTLIHAVIQGAGGMHLIDPLFQRLLVKECKNRKIPVIFDEVFTGFWRLGVESASELLGCFPDISCYAKLMTGGIVPLAATLATEPIFEAFRSDSKLTALLHGHSYTAHPMGCTAAVKAIQWYKDPSTNSNIDLDRMKLKELWDSALVNHLSSLPNVKRVVSLGTLCAIELKAEGSDAGYASLYASSLIRQLREEDNIYARPLGNVIYLMCGPCTTQDSCTRQLAKVHRRLQKLN

SEQ ID NO: 158322 - protein, 115 aa, Oryza sativa
  unsure (1)..(115): unsure at all Xaa locations
  Clone ID: PAT_MRT4530_57808C.1.pep
EVMHLIGDVKGKVAIMVDDMIDTAGTITSAAALLKQEGAEAVYACSTHAVFSTALXPPAIERLSGGIFEEVIVTNSILLPEHKCFPQLTVLSMANLVAETIWHVHRDGSVSSIFQ

SEQ ID NO: 158323 - protein, 97 aa, Oryza sativa
  unsure (1)..(97): unsure at all Xaa locations
  Clone ID: PAT_MRT4530_57809C.1.pep
SSPHPPAKTLIPPPPPPPMAAKAAALSSSPFVSSRRLSSPAASLRARTPRCVMGSEQVXVVVEEEGNTKHRMEEGVLYTRSSVAITRLGQSHGICPE

SEQ ID NO: 158324 - protein, 93 aa, Oryza sativa
  Clone ID: PAT_MRT4530_5780C.1.pep
SWMPLADAFVGAGSSGDGDGAAAGAGGCAFVPSVELLDIVQHPISGYGVLVALIFSPDDRSMVFLYSPDGTLYRNVYVFDPVQRRQELLFGPP

SEQ ID NO: 158325 - protein, 353 aa, Oryza sativa
  Clone ID: PAT_MRT4530_57810C.1.pep
MGCCFSVIDDDGYEHDDAVSGSVNEVPRVTGVHQFTIRQYSGVKGKGVGNSVLSRNFTVAGREWFVRFYPDGYNSDTSDHVAFFLQSLYRPSCGSVYHVEFSFALLGGGGGGGAVLHDVRIDRPCRFDNRNNSWGIRKYIAREQLEGAALGAIHDDALTVRCTMHVIQRRRGAGRPVVTGAGGPVRVPVPPSCHARNAMEFLLSGDAPFDLEIHVGDATFGAHRLALAGQSLYFRKLLYGQVGNEASSPAIRLREMSPEAFGAVLHYVYHDSLPPEANKGRNAAAMAREVFEAADMYAMERLKLMCASNLCRFIGDDTASGIMELAKAHSCDPLKKACENYMKRRRIPFNPDS

SEQ ID NO: 158326 - protein, 77 aa, Oryza sativa
  Clone ID: PAT_MRT4530_57811C.1.pep
LLEGLSEAKTLGLISEHGSFILKRDLKWCPTFTKLKTLLLNEYWCVPDDFSALSCILLRAPVLGNLILQIYSLGLIS

SEQ ID NO: 158327 - protein, 49 aa, Oryza sativa
  Clone ID: PAT_MRT4530_57812C.1.pep
FPRPVCHDQKFYCLFHLCRFQFILNVLSIYACILLIYDTVFHERIIVTC

SEQ ID NO: 158328 - protein, 878 aa, Oryza sativa
  Clone ID: PAT_MRT4530_57813C.1.pep
MSQLVLLRRIPVRRHCGPSSSRLLSSAAAGAGGVGRRGPYQQQQQEEEESKAVKVSVWWDFENCNLPNGVNPGRVAPRVTAALRAAGIRGPLSITAFGDVVQLARPSQEDLVATGVSISHVPNSCVRSPFPTSIPPCGGKNSSDRSFMADLVYWIAQNPPPAHFFLISGDKDFANILHRLRMSNYNILLASPGTATTSVLCSAATIMWPWEALVKGEDFSPKRFNHPPDGLAGSWYGHYKGALDDPFVDTEPEELVVVPSDLKHGSIPKYVVNAIQQVLKSYPNGVNLSDLRLELKKKNIYLGNDFFGHKKFSCLLQSLPNFVEFISPPVGANQPCVVAANRKLMAIHNDKPPPLPVSTSFSEKNAKTENSSQNIAKKLQTASENPPTFAVLSSRSDVLPEDQKEHPAANLNAQIESPEDHKEVDPTTASGIPSSSGVEDNVNKEGLFKRIWLLWKGPESAKSEVSHLEIYKKSCRNGSTDGSDSVTTGSASTSSHDDRSKKLKHVDDMRSLERDTSNSEPCDRSVSVSVDKAEKGDGISKMDKGLFSWVTGWLKFGKSDADNVTANRNVIDEASTDSLKGPESLKVSACGSGEEEVHEIFTKSFFWDVLQQQLSKPLGSELVSKAKTREELVHQLHKLDCWPLKGLAEKDLHQLVNILVSEKKWVEETPSSIFKLRFAQKHGYELDPQKLGYPDLKSLLQIMPGVRVKFPRVLPAENGNGQAGSKGNGNQSNGDDFVWEELGPVSATTETVQTVDKEMCYRPPTLSDDDFSEDENHADQQPRKEAEASSLLQIIDSWHNSKDVSSKKTQDIDGLVDCSRSDHGYLDNLTGGNAPKPTRPQHKQYSFVSDSEEDTEKGKLVESVLGSLQKARTSKLHN

SEQ ID NO: 158329 - protein, 82 aa, Oryza sativa
  Clone ID: PAT_MRT4530_57814C.1.pep
LMPPLPVQSTLVEVLAAANAPPASVTDVVLAVIRSRKHQHHLHSNFSSSESPMLIDADAPGPQEPCIYGAIQFSRAESRVEK

SEQ ID NO: 158330 - protein, 104 aa, Oryza sativa
  unsure (1)..(104): unsure at all Xaa locations
  Clone ID: PAT_MRT4530_57815C.1.pep
HTYYLIEYMLLSKRVPSMEFIKDRXNYRENHYYDGYYYSMYWIMMKLCMYACTDLTELLKEIKEDNKAYPHIIVCIIGWHNQMMMQIINXIAYKHECCEEYAGN

SEQ ID NO: 158331 - protein, 319 aa, Oryza sativa
  Clone ID: PAT_MRT4530_57816C.1.pep
HYRILKLACLQGVTPLPRIDQLVNSTARCELLSFLDAYSGYHQISMAKEDEEKTAFITPFSVFCYVKMPFRLITAGNTFQLTVQRALNDQLGNNVEAYVHDIVVKTKTSESLIDDLRQTFDNLRRYRLMLNPEKCTFGVPSGKLLGFLISGRGIEANPEKIKAIENMKSPTRLKEVQKLTGCMAALSRFVAMMGERGQPFFALLKKQDKFVWTQEAEDVFIALKRYLSNPPVLVAPQPNEELFLYIAATPYSVSTVIVVEREKVQRPVYYVSEALHDAKTRYPYIQKLLYAVIMTSRKLRHYFQAHRVTVVSSFHLGEV

SEQ ID NO: 158332 - protein, 130 aa, Oryza sativa
  Clone ID: PAT_MRT4530_57817C.1.pep
MGDLWANNVGQHLVGTHNGKVRENPPAEFIKIDRIEVGYKLNTKVVEESKGAGRGGRRSAGPCTPAGQRALRAHACATEHPRMRTRVSVDAAGVRRTCRALYLCRYDRLRETGSSIASAWAPDASGFVLS

SEQ ID NO: 158333 - protein, 1022 aa, Oryza sativa
  unsure (1)..(1022): unsure at all Xaa locations
  Clone ID: PAT_MRT4530_57818C.1.pep
DVPKHIYSARVLIDGGNSINLLFTSTLDAMGTPRSELTPTDQPFHGITPHSSSKPLGKITLPVTFGQANNFRTEQITFDVAEFDTTYNAIIGRTALAKFMAASHYAYQVLKMPGPKRTITIQENAKLAVQCDKWSLDMVEHAPNPPAIAEPPKKLSDMPGVPREVIEHKLMVRXPDAKLVKEKLRRFASDRKXHMXEELDKLLKAGFIREVLHPEWLANPIMVRKANEKWRMCVDFTDLNKECPKDHFPLPRIHQLVDSIAGCDMVKEDEEKTTFIMPFGVFCYIKMPFGLITAGNTFQRTVQGALNDQLGHNVEAYVDDIVVKTKTSDSLIDDLQETFDNLXQYRLMLNPEKCMFGGPSGKLLGFLVSGRGIEANPEKIKAIENIKSPTRLKEVQKLTGCMAALSRFVARMGERGQPFFALLKKQDKFVWTQEAEDVFIALKCYLSNPPVLVAPQPNEELFLYIVATPYSVSTVIVVKREKVQRPVYYVSEALHDAKTRYSQIQKLLYAVIMTSRKLRHYFQAHRVTVVSSFPLGEVVRNRDVVGCIAKWVVELSQFDVHFVPRTTIKSQVLADFVADWTMLDNRSDSQTDSETWTMAFDGAFNSQGAGTGFILTSPSGDQFKHAIHLNFRATNNTAEYEGLLIGIRAAAALGVKRLIVKGDSELVANQVHKDYKCSSPELSKYLAEVRKLEKRFDGIEVRHVYRKDNIEPNDLARRASRREPLEPGTFLDVLTKPSVKKQMTKIAHTDELPEDDAEAEKITRQAKIYCMIGNDLYKKVPKGVLLKCISFDDGKHLLLNIHKGMCGSHAAGRTLVGKAFRQGFFWPTARKDACDMVQRCEAFQFHSKHTRLPAQALQTIPLTWPFLCWGLDILGPFPRGQGGYKFLFVAIDKFTKWIEAMPTGEIKADDAIKFIKGXFCRYRLPHRIIIDNGSQFINADFQDYCIGLGVKICFASVSHPQSNGQVKRANSIVLQGIKTRVYDRFMSHDKKWVEELPSDLWAVRTTPTTFNKETPFFLVYGS

SEQ ID NO: 158334 - protein, 37 aa, Oryza sativa
  unsure (1)..(37): unsure at all Xaa locations
  Clone ID: PAT_MRT4530_57819C.1.pep
MDTPXFXXXVSXXYHLXXHXCNKHGHVNSRINTMSIX

SEQ ID NO: 158335 - protein, 58 aa, Oryza sativa
  Clone ID: PAT_MRT4530_5781C.1.pep
NFSQIMFSENLSLKSDHLAYPTVEMALIPTCHARKFTSNFRTYLCIKSPSRNQPRYTN

SEQ ID NO: 158336 - protein, 179 aa, Oryza sativa
  Clone ID: PAT_MRT4530_57820C.1.pep
MAEMTGCRSCGDEQQEHGSAFEVTELDSVGDDDEDDAADIQQNSFALCSSFSNVKRSRITNFIFGGGDDADVGFPMRVLHPPGARVEEPRPPVVEDKEPRHPSVAAGNSRLLQRATTRSDRHEGAAEHPVTDSAIAKFPMLTPEPATDRPRAHRSRSSQSPVARSPMPLGSCDPLSTQP

SEQ ID NO: 158337 - protein, 113 aa, Oryza sativa
  unsure (1)..(113): unsure at all Xaa locations
  Clone ID: PAT_MRT4530_57821C.1.pep
MASGDRRRRRGRRTGRRRGCGSWRTGWAPTAARGTPSACTRSPPARGITPAAAAAGGAATTTAPXTAPATPAAAGAAAAASSPRRQHQPAPSPAPAPSGAAEPRRPWRRRRWT

SEQ ID NO: 158338 - protein, 299 aa, Oryza sativa
  unsure (1)..(299): unsure at all Xaa locations
  Clone ID: PAT_MRT4530_57822C.1.pep
MKSRKSYGHLLSPVGSPPLDNESGEAAAAAAAGGGGCGSSAGYVVYGGGGGGDSPAKEQDRFLPIANVSRIMKRSLPANAKISKESKETVQECVSEFISFVTGEXASDKGHREKRKTINGDDLLWAMTTRGVRGLXGRVKSYLNRYREAEGEKGXLARRRRRRPPGSATARAVVETRRRRRRRWRRHRRALPARRRPVTLTPWSSAAGRRRRRRAHDGRRRRRRRVQRRGRVDDDGVLRAGGDGGVREQGVLRRRRVEGDGVRGHRRRGGERRRRRRRREGVVSELFSFFLKWHANMAI

SEQ ID NO: 158339 - protein, 72 aa, Oryza sativa
  Clone ID: PAT_MRT4530_57823C.1.pep
SRLALSPHARNSFSKCLHIRSVIRMKHSVSAVSFFMRCSDHRLSSGCNRSESRVVLLGIFGCHGPHHGLTLR

SEQ ID NO: 158340 - protein, 346 aa, Oryza sativa
  Clone ID: PAT_MRT4530_57824C.1.pep
MSSSSVQTSPSPSHEVDAETDEELYKQFTDSVSSWPSSEPMPFLPLYRHDKGWYSSLMPMVGAMVADARFAARPSDIIVATLPKSGTTWIKALLYATVHRREHPADAAADHPFNSLGPHECVNFLEYQLYTNNRVPDLGRLPDPRLFATHVPFTSLPSAAAASGCKVVYVCRDPKDNLISMWDFANKFRAREGQEPMSPEAIAELFCLGVSPSGPYWDHVLGYWGAHVARPEQVLFFRYEEMKLDAAAHVRRLAEFVGLPFSAEEEEGGVVDAIVRLCSFDHMIGLEATKSGKTELVVGTAANSSFFRRGQVGDWANHLSPEIAQRIDAITEARFNGSGLRPSGTK

SEQ ID NO: 158341 - protein, 82 aa, Oryza sativa
  Clone ID: PAT_MRT4530_57825C.1.pep
IFLSFTPFFFFLERGGCFLLGPGKPHPNSQAGRVKKSTLQLQHNGGHPANKEARHVFRRNIQSNTTAGKQAQLTHYIYFIPW

SEQ ID NO: 158342 - protein, 176 aa, Oryza sativa
  Clone ID: PAT_MRT4530_57826C.1.pep
MAVTVSTTVNFAWVHQGNARYSRIKPRAASTSSSMHNCNSCCGGEAQLGASDHLPRGHRRREADCRIGRSHCGLGGPRAPNPGKVRDATRLGGASVPLQSRPRWRGGHFTTADIRENVGPGPNAALQAAGAAAARRCRGLRGGGSCEAQNHPDRRRKDADRAFESAAQAVSGAAAG

SEQ ID NO: 158343 - protein, 62 aa, Oryza sativa
  Clone ID: PAT_MRT4530_57827C.1.pep
MLRDMMTWKKEEPEKEEAAHRARMLTARLFQWRFANARMEKAMARAAITAESSSTKRMDIPL

SEQ ID NO: 158344 - protein, 172 aa, Oryza sativa
  Clone ID: PAT_MRT4530_57828C.1.pep
MACRCLNSAALPSSVFGMYSRPLGTPRGRRRASNLIANTPTKVYEAGVRGADLPGGLVESLDYDLVDPCSNVPQYSIHPVHEYHSSTVARQVGRLGAQGSTSMTSRLSDNNVTASIDQGASTSTPLVWTQVGSIVFPVYTITPMSTGPIIIGNERGTTTTERNDNPPTIPPT

SEQ ID NO: 158345 - protein, 661 aa, Oryza sativa
  Clone ID: PAT_MRT4530_57829C.1.pep
MREIGVFFLSPESGLWLSPLPCRFPPPRGYPLHHRHYPGLPVPRPRFGPKSLRHPSHQRRRLLHGSSAGSSDNRTSADEDRASADDAVVPPLTIDTDAIATLHNQAIAVLNVKALVPVTLNLDTDNCSHRRGLFVVALGKFALTEHVFSDSIKDRSLVLMLIGSLNDKFDNLRSLLPLQVPFPTFAKAHAQLLLDELTKGHRPAGTAMALLAASSTNAHPATSSNTSNSNSRNNNHRRSRGNGGGGSGGGGGSTGTSGGGGNGSSSAQGNAGAQAAPRANQGWPTAFNPWTGSIHISPQAGPVHGSNHCSAKSSCSTSTVPFPVDWVLASAYNTDYPTKAEIVREFDNSSARSFFLTNGVSLRMSCPHTSPQNAPIPAPIGHRSRLPRSGPAACESDKPTTPGWGAASSTRPAGAPTEPASPVGPSSLARSSEFSMKDLGSLHHFLGISVTRQSSGLYLSQRQYCLEILEHAGMTDYKPCSTPVDTNAKLSAIVGAPVADPTDYRSLVGALQYLSFTRPGISYAVQQICLHMHDPHEPHLAALKRILCYVRGTIDFVVHLRRSTTVLDRSPIPNRTPPESQHSRLPPRPRCVRVAPLPYVALHCAPRRARALNAAHPFPRAASIRSQSQADCATPSRAPLRRVSHQHHVRTVSNPEPDQLP

SEQ ID NO: 158346 - protein, 375 aa, Oryza sativa
  Clone ID: PAT_MRT4530_5782C.1.pep
MAACFRCAPSVTAASVPAGPSHLPPDGTALSFAVHDAVTASTARISSSAMLQGTWPTNSRTLSPSLSSASPTITRGTRRFRAAGDRRVDLAWDLTCTRFPGLGSPEPSRGAAPQTQQLCGWNSGAGLFSSSSSSGEYRWTDYVDVVRACMLQSWRLNFMHGSYEGRGRTAMMACLDVEMPFLRGIDVNWPAPAGETTTVRGRGGRGAAAARRTRSPARPPPTLRHTLQPATTTRTPAVAADLVYRSRGRDGSSSSSSRREKRREKRERRRKEMKIRYAADILAVRAWRPVSESVETSGSMELLRATVSAYLFHAVFLSPPPAPPNMHPSTPPALRARRRNPHPAAAALEALSSTLKAAAEGTTEVGGEEDDEDEA

SEQ ID NO: 158347 - protein, 702 aa, Oryza sativa
  unsure (1)..(702): unsure at all Xaa locations
  Clone ID: PAT_MRT4530_57830C.1.pep
KDYPTKAEIVRCNSSGDLYPLPADAYSSAASARAFVTTSTNIDLWHCRLGQFGHEALIRFAQASVIPPPRVTTSLCYTCQLGRHVCLPFPTSTSWAKANFDLVHCDLWTSPIPSVSGFKYYLVILDDCSHYVWTFPLRFKSDTFSTLSHFFAFVKTQFATTIHSIXCDNGREFDNSSARSFFLTNGVSLRMSCPHTSPQNGKAERMLHSLNNITRSFLFQANLPAQYWVEALHTATHLINRHPTKNLQHRTPFFALCGAHPSYSHLRVFGCKCYPNLSVTAPHKLAPRSIPRVFLGYRLHHKGYQCLDLATDRVIISQHVVFDETSFPLAEMTNNEIAIDLEFLEDFTAPIPAPIGHRSRLPRSGPAACESDKPTTPGWGAASSTRPAGAPTEPASPVGPSSLARSVGAPTGPASPAGPSLXFVDPTKPDLVWRLNKSLYGVKQAPRAWYSRFASFLLSLGFVEAKSDTSLFIYHHSADNTVYLLLYVDDIMLTASSDALLRWTIRSLQSEFSMKDLGSLHHFLGISVTRQSSGLYLSQRQYCLEILEHAGMTDYKPCSTPVDTNAKLSAIVGAPVADPTDYRSLVGALQYLSFTRPGISYAVQQICLHMHDPHEPHLAALKRILCYVRGTIDFVVHLRRSTTVDLWPPRPKKPWPAVAAHVPPNPAPSRSRPRAQTEWNRLPSIPPVTPSLCTAPRVVPVR

SEQ ID NO: 158348 - protein, 138 aa, Oryza sativa
  unsure (1)..(138): unsure at all Xaa locations
  Clone ID: PAT_MRT4530_57831C.1.pep
RQERQRRAVGELQRAAQLGLARGEREKARRAREIWGNGRGEHEDRFYGLGVVRSWLWRVESAGNGRRRGXHCGRSGDSIWRKKLRKSGGFGGGDGGEPISLGLGARARVGGRRIRRDVGGNGRPWAASAWEAEGSRRT

SEQ ID NO: 158349 - protein, 76 aa, Oryza sativa
  unsure (1)..(76): unsure at all Xaa locations
  Clone ID: PAT_MRT4530_57832C.1.pep
VSMPAVKPVASGGXHVWHKPALSEIFGDDSGMQFGEGTLGHPWGXCPWCTTLPGVALWALCSSPVTKGSDLARQGN

SEQ ID NO: 158350 - protein, 155 aa, Oryza sativa
  Clone ID: PAT_MRT4530_57833C.1.pep
MSHGSTKVFLMAYSGRQSPSPGSGEGSLDGGSACLSDPCCIRLEVVGAKVEKVSSSGHVASVRAKGLCLVDAHATSIDGFLKMESLGSSAGSAEHDHHRVRVRRPLDDDMLALTDDHPDASRTLLVSRTIATMSKHQLLVWIRPKHNPCHKPGPT

SEQ ID NO: 158351 - protein, 112 aa, Oryza sativa
  Clone ID: PAT_MRT4530_57834C.1.pep
MVRDTRSVRDASGWSSVRASMSSSSGRLTRTLWKPSIEVAWASTRQRPFALTLATWPDDETFSTLAPTTSSRMQQGSSAGGRLGGKYSYQRGRRNRRRGIPRRSLEKGTADR

SEQ ID NO: 158352 - protein, 244 aa, Oryza sativa
  Clone ID: PAT_MRT4530_57835C.1.pep
MPPSRTNHHPPRVPPTCRATREDAGTRGPWRRRGGGTTAWAHGDGSGSSEARRRRLRRGEAAAAPLLQAPARDPSTAVPPASLVHRPPAEDPCCIRLEVVGAKVEKVSSSGHVASVRAKGLCLVDAHATSIDGFLKMESLGSSAGSLLSCLFWVYEVHRAEHDHHRVRVRRPLDDDMLALTDDHPDASRTLLVSRTIATMSKHQLLVWIRPKHNPCHKPGWEMEDRGSKIKLGRGVVNENNGKG

SEQ ID NO: 158353 - protein, 633 aa, Oryza sativa
  unsure (1)..(633): unsure at all Xaa locations
  Clone ID: PAT_MRT4530_57836C.1.pep
MASDLSQSLHFDLSDLSICRHKEYILLISTADRDQINWHAHTSEGEFWTCTGVKQISQAAVFDFHVNTLLARPVGPIRSQTTTFLMAEKLPPSPSSASPASVKEAIQKLGLSDVNEGNVVTVDPEKFTPDQKRDFEAMMQQARDQFLKSFTQTRKGTLVQKYKVKVVPDEPETSTSKEGEGKRAPESAQPSDKGAADRNNSQGNNSQGTCGVQGDGVHGLQGGNPNQDVETPQDFFNNFQDRVDYAVHNALINQSGVLVNTLSNMMKSIADGSIAEHQAAGPVYLQGGVFPNCRPLITGAQPFAQPVPPIASSAQPTVPPLTPLPAPAASAPGQPIQLLTREQPQHTGQATNQPTQDQPNYQNYQGGNLNYQYRPPSPQVQYQQGGLAQPQFTRQYNQYEPMQQPSQGAAQQRPWADVIADVMREQFGLRPKETGWFERLPLPNRFKVPDSSKFSGQDGVSTYEHISRFLAQCGEASAVDALRVSLSHLIQEVTLHEQRFAEARKNAKKVNHVYPYMYGSDDDDDDSEIAVAEWVRSKKVIPCQWEKHSGKEERYDFDITMADMIFDLLLREKQIQLPPGHTIPSAEELGKKRYCKWHNSGSHSTNXCKVFRQQIQVAIEGGKIKFDDSKRPM

SEQ ID NO: 158354 - protein, 91 aa, Oryza sativa
  Clone ID: PAT_MRT4530_57837C.1.pep
EYAVGAAGPPAPPRVRGGTAGMHSFKSAPNTAAPSPTQRTSHGSKASSGTEGVGEGSSSSDGASRFSMIDGASNGYSGAGRRVPAGRRRSK

SEQ ID NO: 158355 - protein, 74 aa, Oryza sativa
  Clone ID: PAT_MRT4530_57838C.1.pep
RYANGQTEIPLQCSSTHRLHEHIEEGDDDGLTIARAILVNIWPLLSTPNWDHIQVMNLQYFYTMIWSMEKYYIG

SEQ ID NO: 158356 - protein, 117 aa, Oryza sativa
  Clone ID: PAT_MRT4530_57839C.1.pep
MSEDKVPGRVGTLQFGNNFPIGDIVPECAQCAEKTCVGLRLLSLVAQVRTKCAEKTCVGLRLLSLVGSGRVGTLQFSEGLALGNNFPSAHELGRVGTLQFGNNFPTGDIVPECAQRF

SEQ ID NO: 158357 - protein, 348 aa, Oryza sativa
  Clone ID: PAT_MRT4530_5783C.1.pep
MGLDVGEIGMGLDLSLDLKMFAARSAVRMAAAAAKEATGVEACIRSLEEERRKIEMFRRELPLCARLLADVIELMKEEAGKRRKDGDDAEAKAEDGDKTKWMSTAQLWVDSRGSDADSENDRRSGSTSPASRLLGGAEESSSRAVAPPPYFRREERVVLRPAMPLLPPASHRSPPPAAAAAATAAGDDHRHVVASSFATAVPSPVPAALSLQAQAQQQQQQARKSRRCWSPELHRQFVAALQQLGGPQVATPKQIREVMKVDGLTNDEVKSHLQKYRLHNRKSPGTASASHSIVLVGDLWASQEVSCSQSGSPQGPLQLSGSGVAVSAATAGDSCCEDDDKSEGYVRK

SEQ ID NO: 158358 - protein, 100 aa, Oryza sativa
  Clone ID: PAT_MRT4530_57840C.1.pep
LFACVRGACHGLSVLVWLYPPRWVCAGGLHVGLPTGVGPGGRGAQRPVRGGPLGPQRCSGRGVGCLLGVCLFFLEQEWFSRWMGSVCNGTSAVSHKVTDS

SEQ ID NO: 158359 - protein, 286 aa, Oryza sativa
  Clone ID: PAT_MRT4530_57842C.1.pep
VCVACNTQVVLGVGPEGDVATPPSVSPRGRIFPSPPQRPVSHPQPLDRSERPAQHATHDFNPKHPPPPPFAMFLGPLNPKPLPPIPSPPPKPAETTKTHPPRDHHPPPPPHTKQPQVSSPPPRNAAPSPPGIFIPPQPRAKEAPPRTHRPNPPPPNPRTPKHPEKPPPPKHPRRRTPHSPPPPPFPSKNPDPQKPVKPPKKSPIKPPPPLPPKATPPHRTVTPPTEQPKPPSPLPPCGLRPPANLPIPPPPVHPTPPHVSPLLPHPPPQSLVISMPYVFHGPPPHR

SEQ ID NO: 158360 - protein, 984 aa, Oryza sativa
  Clone ID: PAT_MRT4530_57843C.1.pep
MGSERAELARVCGGRNWSKAIRILDAHLARSPSSIHDLCNRAFCYSQLELHKHVVKDCDRALELDPALLQAYVLKGKALSALGKREEALAVWEQGHEVAVRDTMDLKQLLELEELVSSVKICETIECEDRVVDASPCDTKVVISEDRVVDTSCTATTMADTKTVVCEENIGNSGVISNGAVILANDNKADNNKECSSPTKDTTGTHHTPKKTTKPDKKSKAKGRKEINSQIEDVADSISSGETVAVDQTLFASKISKSSKSISLDFRLSRGIAQVNEGRYDQAISIFDQILRETPTYPEALIGRGTAYAFQRELDSAISDFTKAVEDLTKALEFEPNSPDILHERGIVNFKFKDYNAAVEDLSTCVKRDKKNSSAHTYLGLTLSALGEYKRAEDEHLLGIKYDENFLDSWAHLSQLYLDIGCPEKMLNNVEKVLQIDVSFGKAYHLRGILYHGMGRHRSAIKDLSVALKHESSNIECLYLRASCHHAIGEYKAAIKDYDDVLDLELDSMDKFVLQCLAFYQKEIALYTASKANLEFSQFNIDDDVDPLFKEYWCKRLHPKNVAEKVYRQPPLRISLRSGRLNKQDFKFTKHQTTLILAADSIGKKIQYNCRGFLPNQRQYRMAGLAAIEIAQKVSKAWRFLRNPKNNAKLVRRRDKLNACQNRGGYCSTSTLSGSPTSSPNEDRISSGISLSWHDVYNIAVKWRQISEPCDPVVWINKLSEEFNSGFGSHTPMLLGQAKIIRYYPYYQSVLEAAKNIMLDLKYVNNAEDRAIFLTDIEKLKKIEVASSCSELYHIVGETYWVSTRCDSIAFQGRRLEGTRITTQNMGKTGFDFAIRTPCTPSRWEEYDEEMSAAWEAICEAYCSDTNPTRDPDMLDAVKAAILRMTYYWYNFMPLSRGSAVVGYVVLLGLFLAANMDVTASIPHGVQVDWEAILSQDPDTFVDKIKPWLYPSIKTSRNLKDYADVSVAFSTTGSVVAALTCVDT

SEQ ID NO: 158361 - protein, 130 aa, Oryza sativa
  Clone ID: PAT_MRT4530_57844C.1.pep
LLLAPSPAPRPLAFQCRSSSGGCCRRRGRVRRGAAIVASNLASSSGDAGSSQSAAAVYVLARRGLLLGVSALPLLRAREAAAAAAVATPSSGDLASPLQEFVEFRSRFVFLLAGRAGVGGGLRREQQRRA

SEQ ID NO: 158362 - protein, 116 aa, Oryza sativa
  unsure (1)..(116): unsure at all Xaa locations
  Clone ID: PAT_MRT4530_57845C.1.pep
DLGRDTSGVRARQRRREASGVPWRRGGXAIAARRRGKLEGGRRSWQWRRRHRRRRPRRSSAVEREREIEIEIDRNRERERQRRLSXKKCGGGVCGGGGEDHRATARDDGGVGAGLP

SEQ ID NO: 158363 - protein, 119 aa, Oryza sativa
  Clone ID: PAT_MRT4530_57846C.1.pep
MAVVKVPRRTKPGSKPPRDLGPIPGRKASGRKFNGPNLLVHLEAYKTMPPSLLQRDALTGPPYSVYPYRSIPLSLDLGLRSEVMEEATYRIRPNPLAPLDAGFLLDGVDHSPMTVGEQF

SEQ ID NO: 158364 - protein, 378 aa, Oryza sativa
  unsure (1)..(378): unsure at all Xaa locations
  Clone ID: PAT_MRT4530_57847C.1.pep
MEGLLSKLRSLDAYPKVNEDFYSRTLSGGIITLASSVDMLLLFVSELRLYLHAVTETTLRVDTSRGETLRINFDVTFPALQCSIISLDAMDISGQEHLDVKHDIFKQRIDVHGNVIATKQDAFGGMKVEQPLQRHGGRLEHNETYCGSCYGAEESDEQCCNSCEDVREAYRKKGWGVSNPDLIDQCKREGFLQSIKDEEGEGCNIYGFLEVNKVAGNFHFAPGKSFQKANVHVHDLLPFQKDSFNAGKLLFPCEHSFFNXSNWMQHSSYGMYQYFIKVVPTVYTDINEHIILSNQFSVTEHFRSSESGRIQAVPGVFFFYDLSPIKVTFTEQHVSFLHFLTNVCAIVGGVFTVSGIIDSFVYHGQRAIKKKMEIGKFN

SEQ ID NO: 158365 - protein, 50 aa, Oryza sativa
  Clone ID: PAT_MRT4530_57848C.1.pep
CQTYISSCMIYLIYSTYIFTCMHIYAFILVMKALRHGVRDHCVICSVFFS

SEQ ID NO: 158366 - protein, 408 aa, Oryza sativa
  unsure (1)..(408): unsure at all Xaa locations
  Clone ID: PAT_MRT4530_57849C.1.pep
MADKTLRELAAPSADNVAIGPQINMGDVDFNLKSSLITMVQASPFCGKPNEDANAHLQQFLEIYGTYTIKGVSPDTVRLRLFPFSLLGRAKHWFYANSAAVNTWDKCSMRGMHTVKETELLTAKLDLLMKRLDDHDKRPQGTVQALDSHVTCEVCDHTGHSGNDCPETREEAMYMGNNNNGYHRQGGQGWNQPRPYHQGETQLAQLASLVPANETGRIPGQPDTSVENVKAITTREGTNGIAREASSSESADKEVQPEKTVPQEYCNTRLLPFPQRSRKPNPEDPHQRAIVGCYASANICPLSQGYPQQQETTPNNGGGXADRAVQQRHTSQAPGKEEEXGCPTITCSIGVHQFDQALCDLGASVSVMPKDVFDKLNFTVLAPTPMRLQLADSSVCYPAGIVEENIFL

SEQ ID NO: 158367 - protein, 101 aa, Oryza sativa
  unsure (1)..(101): unsure at all Xaa locations
  Clone ID: PAT_MRT4530_5784C.1.pep
GQYPPRFRENNGSRAKRNLRLFGGPNRRGGREKSGPVDNRAAAQPGRKNDKTPTTTMASTPPQPPXRAADEAAASSLLLQELEELIGASAFPXTLESWGMI

SEQ ID NO: 158368 - protein, 61 aa, Oryza sativa
  Clone ID: PAT_MRT4530_57850C.1.pep
GGALLGGRRRPYNRRAGLHHRGLFQVRARVQERTASGWQFQGPLLAPVKAFFYIRVVLPPQ

SEQ ID NO: 158369 - protein, 423 aa, Oryza sativa
  Clone ID: PAT_MRT4530_57851C.1.pep
MAGGEYTPADAEADLLLPPPAGSEPDEPAARPAPADTLGVAYAIFFTLGTGFLLPWNAYITAVDYFSYLYPGAPVDRVFSVSYMLACFLPLVLIVLCFPKSSAPARINTGMSLFTVALLVVPVMDAVYVRGVPGLYGAFDVTVAATVLCGVADALVQGGVIGFAGELPARYMQAVVAGTATSGVLVSVLRVITKGVYPQDANGLRKSAILYFVVSIVVMIICIVCYNVADKLPVVIYYKNIKKRAQKAEEDGGMSGSAWRSTLWSIVGRVKWHGIGIALIYAITLSIFPGYITEDVHSEALKDWYPIMLITAYNVFDLVGKSLPAFYFLENANIAVAGSFARLLFYPLFYGCLHGPSFFRTEIPVTILTCLLGFTNGYLTCILMTLAPKAVPIQHSETAGIVIVLFLVAGLVVGSFVAWFWVI

SEQ ID NO: 158370 - protein, 209 aa, Oryza sativa
  Clone ID: PAT_MRT4530_57852C.1.pep
MLTGGGGPPDAGCRPGGGRRPPGRDARADARRGGRRRCNRNGACHRHEGQSAVAPSRPHGMRERWRLHRASERRRVHVRLGVGMAISPTGAGRGSPAAALSLRLRLLQLCRVSPAVVPSSHVAGCFAFVFIARRRLLHLRQISATLASSMSHRVLAATVLGSRTGPFLSNPAPPRPVAIPNWEAGRRLVGKAILGLPGLPSGYVPVVYC

SEQ ID NO: 158371 - protein, 48 aa, Oryza sativa
  Clone ID: PAT_MRT4530_57853C.1.pep
MLLPPFHNIWKERNGRVFEGVATSSSLLCAAIEDEWESWKAAGLLTAL

SEQ ID NO: 158372 - protein, 180 aa, Oryza sativa
  unsure (1)..(180): unsure at all Xaa locations
  Clone ID: PAT_MRT4530_57854C.1.pep
AGFGRGXXXFXFIFFFFFFFFFFFXFFLNXXXRXXHXFHSHXXXPTTXXXSKYHSYXXSKKNXXKQKQXXXXXGXIXKQXTNWEXXKXGGKPPXIXNXQXNKXXXXXXGXFAXKXXQPGGXXXKKXINCTXLTXXKXXXRTNXXGXPXLAXPXXLNPWVXSVPQTWAXPXVXYLPPYFPG

SEQ ID NO: 158373 - protein, 84 aa, Oryza sativa
  Clone ID: PAT_MRT4530_57855C.1.pep
RLKPNNGPNLKHFELLVNVQLELVMPNSPNSNLKLASSPIHPNSGPPPPVRPRPDPTRSNSRLRQHRERNLTEAAASSGEEEGR

SEQ ID NO: 158374 - protein, 33 aa, Oryza sativa
  Clone ID: PAT_MRT4530_57856C.1.pep
IDSYCKRFGEKAIMISVSFFRLFTDCFVTLTAF

SEQ ID NO: 158375 - protein, 67 aa, Oryza sativa
  Clone ID: PAT_MRT4530_57857C.1.pep
NLPQFTKVIAFFSCNMVFSLCYRMVYFLFLFARPKFLGFFVFFFFLLFIFLFFLFCLLPPHHIVCIP

SEQ ID NO: 158376 - protein, 266 aa, Oryza sativa
  Clone ID: PAT_MRT4530_57858C.1.pep
MTFGISYSLFRTFRSPPQGTKGDGENYMLNSKVNEELVAAAGVEEGDVVLEIGPGTGSLTAALLDAGATVFAVEKDKHMATLVNDRFGSTEQLKIIEEDITKFNVRSHFLPFLEEKSHHTRKYAKVVSNLPFNVSTEVVKLLLPMGDVFSVMVLLLQDETALRFADASIQTPEYRPINVFVNFYSEPEYKFKVERTNFFPQPKVNSAFNGKRKMLRKSLQHLCSSSEIEAALANIGLPVTVLLADTASARPIFSSRCTAFRLQLQQ

SEQ ID NO: 158377 - protein, 85 aa, Oryza sativa
  Clone ID: PAT_MRT4530_57859C.1.pep
SGIPLLFWVFPQEKVLVIYINPSGMGRAPPWGPVSLGNFGFQLGFVSFFIYQKRECRQELFAFLKKKKKKKKKKKKKKPKKKKKH

SEQ ID NO: 158378 - protein, 105 aa, Oryza sativa
  Clone ID: PAT_MRT4530_5785C.1.pep
PPNPSFFPPPPIKIKPPFLNFEGATPFFFFLPRKFFSTKKKKNNFFLKKKSCFKLFFKKKKKKKKKKKKKKKKKKKKKKKKKKKKIKKKFKNKKQKKHNHQLLCF

SEQ ID NO: 158379 - protein, 96 aa, Oryza sativa
  Clone ID: PAT_MRT4530_57860C.1.pep
KKPIGGKGPFLYKQRHSKTLNNGYPSKDLAKKKFTRGQKKYCPEKKKLPFFRLPPLLFHIILVAKIFSTLYPFREMRNKTNLHNGKVSNTINFVGL

SEQ ID NO: 158380 - protein, 120 aa, Oryza sativa
  unsure (1)..(120): unsure at all Xaa locations
  Clone ID: PAT_MRT4530_57861C.1.pep
YASIQTPEYRPINVFVNFYSEPEYKFKVERTNFFPQPKVDGAVISFKLKNSGDYPPVGSHKGFFSMVNSAFNGKRKMLRKSLQHLCSSSEIEAALANIGLPXSDLLLDDFVRLHNHLTKA

SEQ ID NO: 158381 - protein, 496 aa, Oryza sativa
  Clone ID: PAT_MRT4530_57862C.1.pep
MRWADDGGEGDDDDDLRLPGAGRRSPSLGILAFEAASTMTKLLSLHRSLSEKEVARLRSNTMRAAGVEYLSSTDQAFLLRLACAEAVAALDAAAAAVARLGARCGLDFAGPYASLKAGAPDARLDQFVAKGLKVKAKRMERLVAATAKLCAEMEALDKLEAAEQKLARRGWGRLSVPIPSPAAAAVDAVGSDSLRLGIRAQRARVRRLKEESLWSQSYEKAVILMARAACAVFVRVCVVFGAHVPGLPPPLPPAEAVHSRLSKLLLHPMSAAAQPRSLSGPIQRRDVPLRIEMSSNSCPIIRSHCQQPWQTSPPGVDWRKLLEPPPGTVGGAGLDLQYANVITTAERLLLETDHAEGRQRHEEARAELYAMLPSKLRAAVRAKLRGWWRERGAAAAVAVELDAGLAEGWRSAAGRILAWLAPMARDTARWHAERSLDRQRRFEVGGGGGGSARAWALQTLRWADAEKAEAAVVEVLVALSCVGWYDERRRVASLRF

SEQ ID NO: 158382 - protein, 41 aa, Oryza sativa
  Clone ID: PAT_MRT4530_57863C.1.pep
MSSGDKASGPLACLGSDKALSALGVPSRRSLGFLGGLVETA

SEQ ID NO: 158383 - protein, 75 aa, Oryza sativa
  unsure (1)..(75): unsure at all Xaa locations
  Clone ID: PAT_MRT4530_57864C.1.pep
VRRQSNAFCHLDQYDSXSIIRAVGCSEHSHGTKQYPXGSQETTVHPSTNGXDCLSFVNNLHRSLIRLPHLCRSFP

SEQ ID NO: 158384 - protein, 161 aa, Oryza sativa
  Clone ID: PAT_MRT4530_57865C.1.pep
MNPAAMAALGSKLATLGSAAREAARVAARQGCAYNKAVVEGSRQLQSRACEATRSAAKHGRAFHEELMERNKRYVIDPPTIQTCQELSKQLFYTRLASIPGRYESFWKEVDGAKLLWKNRKNLNLKAEDIGVATLFGIELIAWFAGGEVVGRGFTFTGYHV

SEQ ID NO: 158385 - protein, 68 aa, Oryza sativa
  Clone ID: PAT_MRT4530_57866C.1.pep
MVTLFFGMFEAVGEEARRSLWQGASRHPPLRAAKKIATLSSAPPRGSSPSSLLAIHLVAVSLFSAALI

SEQ ID NO: 158386 - protein, 193 aa, Oryza sativa
  Clone ID: PAT_MRT4530_57867C.1.pep
GAFQTAGQRPLTSAGSRAATDSSNNAKLCKSSSRKKGHKQEEAEQQQQSLAAFHGDLLRLPASIAVLFPAGGGGGFLSPATCSSATRHLEQEETTLLKGGDVADGEMRADGEARRRHRRRRRRRVAEPPRHGQLLHRRRRRGLHRRRPRRELGRGDAGADAGAGGDVTRRRPRRLLHLPGRLPQLKKQTELNR

SEQ ID NO: 158387 - protein, 90 aa, Oryza sativa
  Clone ID: PAT_MRT4530_57868C.1.pep
MAATLMKKPRVTADEDTKYSWPHRLSPDDLAQGMRIWPDLGTARPARVKPMPTRIMGCRAFEPTRHDPSLIGPCLGHGCSPWTGKGRLGV

SEQ ID NO: 158388 - protein, 97 aa, Oryza sativa
  Clone ID: PAT_MRT4530_57869C.1.pep
MDKEGIEEILHEYPHDGDIYRGNQCLLSYGPANSFLGLPQASGEQPSRTDPERSCIPLYRKGMPSYFAMSFAMYFVFMHRHGLRLHPDLASGHFIDP

SEQ ID NO: 158389 - protein, 470 aa, Oryza sativa
  unsure (1)..(470): unsure at all Xaa locations
  Clone ID: PAT_MRT4530_5786C.1.pep
RCPSTPDFVHLHPCTFVYNQTEPQTKPYPLDIWKYGSALQQRPELNPYSTRGTTNQTXHAPRAQPKTILGVLNRGGERERPSEPSATAANHASGTSGTTEATRSTQAKLQAYKEAITIYKKKTEYTETVHGSTEADPVCQPRRVADKRTPLDTTRAAHVETTRLLSGHTNTDTTXVTTRTRERLPTPVHGRDTAGTRLDDAEARTKTMMGLRHLTKRGRRTRMAXRRDERHDNRERREGDDDDDRGRRGGDVGSLQRLHEDEDGVEHATAMPTTEAAPRDDEPGDRRDVDDENEXEMTRMDRGGVRSKGRRGRGRPCRCDAGDETEGEAXAQRRSGEIRAMPWLGRGRGWRSGAGRGGGDVGRRTGDAAEAAGGGTVVATPLXAGGDALPEVFAGNRGKAGGEEAAATLEEATAQLAGVLTRRQGRLKTAGXARERGRRRGGGKMIFXFGMNLSGRDNWTPRDFSRNYLP

SEQ ID NO: 158390 - protein, 70 aa, Oryza sativa
  unsure (1)..(70): unsure at all Xaa locations
  Clone ID: PAT_MRT4530_57870C.1.pep
SSEYYAGKGSFLDQGYYGKGSSEEGFYGEQQQQPGMTRVRFTRARQXGGQLPSMCRVEPQQCSIFAAGQF

SEQ ID NO: 158391 - protein, 1031 aa, Oryza sativa
  Clone ID: PAT_MRT4530_57871C.1.pep
MAETRKFLMPNQPPDISQMVLEARKRWLRPTEICEILSNYRSFSLSPEPPNRPGSGSLFLFDRKTLRYFRKDGHNWRKKKDGKTVKEAHEKLKAGSIDVLHCYYAHVEDNEKFHRRTYWLLEEDFAHIVLVSYLEVMGVKQSFSRAKEEIMPLSGADSPSCSNSITSQNQMTPQIMDAAESPISGQISEYEGAEPAKFGAADNCPASSRYNPLIEMQQPLDGIVMDNILYPSSSAICNQVSGYHGELPPGTSNLNGHTFSHSDIARMFDDSSSGLRDISRTLFDSMPYDEHFSGYANGFMEPTLHSSFSMIEANNLEDSSLLETYTSEALYTNNLSQKEADALSFAGISSPEVNGNKYTEGSTKHPLLKQLSLDLFKIESSGLKKHDSFSRWMSKELGEVVDLGIKSSSDALWSSIEIVNAADGPSAPTNEQLDAYAVSPSLAQDQLFSILDISPSCSYIGLKTKVLVTGTFLASKENVENCKWSCMFGDVEVPAEVLADGSLRCYAPEHQSGRVPFYVTCSNRIACSEVREFEYRDSDAQYMETSHSQANGINEMHLQIRLEKLLTLGPDDNQLLVCGNEKLELINAINSLMLDEKWSDQGSPSGSKDVVTPRNQSLKKLMKEKLHCWLIYKIYDCEKGPNILGKEGQGIIHLAAALGFDWAIRPILVAGVNVNFRDAHGWTALHWAASCGRERTVGVLIANGAAAGALTDPTSEFPSGRTPADLASTNGHKGIAGFLAESALTSHLSALTLKESKDSNADEACRLTIPEDLPEMNYGQLAVQDSHAESLKDSLSAVRKSAQAAARIFQAFRVESFHRKKVVEYGDDDCGLSDEHTFSLISLQKVKQGQHDTRLHSAAVRIQNKFRGWKGRKEFMIIRQRIVKLQAHVRGHQVRKNYKKVVWSVGIVEKVILRWRRKGRGLRGFRPEKQLEGQTQIQPAKTEDEYDYLQDGRRQAEGRLQRALDRVRSMTQYPEAREQYRRLTTCVAEMQQSRMMQDEMLSEAAGADGSDFMNGLEDLICRDDPQMSAIW

SEQ ID NO: 158392 - protein, 271 aa, Oryza sativa
  Clone ID: PAT_MRT4530_57872C.1.pep
MPAAAAAAARGPLLHLRRNPAPRLAAARRSFSSSGMRCVSAAAGAGGGGRERRSSPAFGGLLLDAGGTLLQLARPVAQTYASLGRRYGMSKSEESIKEGFKRAFSAPWPKTLRYQGDGRPFWRIVVAEATECTNNDYFEEVYEYYAHGDAWRLPAGAYETLRDLKDAGVKLAVVSNFDTRLRKLLKDLHVSDMFDAIVVSSEVGHEKPAPEIFKRALDQIGVEASKAVHVGDDETADKAGANAIGLECWLWGQDVRTFSEIQDRILTRFPQ

SEQ ID NO: 158393 - protein, 199 aa, Oryza sativa
  Clone ID: PAT_MRT4530_57873C.1.pep
MMRMDKLVRQCDMEVMKMAMLKHEETFRQQVHELHRLYRIQRQLMSDLTMAELSSGHRRRQPRRSSKQPRRALNLQLPADEYIVSADAADDNDDTAELDLTLAVGGGRSSRKCNAAIAAAAAAAGGSSPFASDCSGSGLSSSPSSAEYSDGAAMFLHAPPPMPPPCQRAMAFDLAMGDAMKQQQSPWLVQCQYLSLRMT

SEQ ID NO: 158394 - protein, 1019 aa, Oryza sativa
  Clone ID: PAT_MRT4530_57874C.1.pep
MAAVEGEVESLTTRVAELTTSLNSILGSLQGMEKWIPAVDEGIKDLRQAVEQVASRVTTLEAKAPATTMPVTIPPVGHGAALNHQGAATGTPVDQGRALVKGKLQFHNSPVHFDLGDCSEKGMGGLQSPGRSSGSRLPKTDFPKFDGDNPKLWKTNSEKYFSMYQVPYETWSSFATLHFVGNAALWLQTYEELHCVESWPELCVVVHGKFGKDKYQQHLEELEGLSQVGGVDEYYTKFEELMHRVLVYNKRYDETFFVTRFMGGLKTEIKTTIKLHKPRTVDLTLSLAKTQEELLLESSRKNYSKEGYKDAYKPVIKPVYQGKGILGASPEEAKKPEEKPKWEERFDTLKAARRARGECFKCGEKYGLGHKCPKSVQLHVLEELLEVLQLQEDGSQGDDEEEHKSDEELVLSEFAVAGTMGRKTIRFHGMIQKQQLLILLDSGSSSNFLAENVVNKLGLQCETVPATQVTIADGGKMQCNQLVSGVEWWCQGHTFTIDFKVLNLGGYDMILGMEWLESFSPMWIDWRRKRIRFTYMGDRVSLNGVKPNLSQTTMLSVKQLKGLHKDGAISQMVQLCAIEEVPDIKQELPAAVELVVKEFQDRFKKPTELPPHRQFHHHIPLLPTAKSVTKKPYRYAPQQKDEIEQQVVQMLQQGIIQASSSPFASQCCWGLNDITVKNKYPMPVVDELLDELAGAKWFTKLDLRSGYHQIRLAEQDEHKTAFRTHQGLYEFRVMPFGLTNAPATFQGLMNTIFTAAIRKFVLVFVDDILIYSRTLSEHVEHLRWVFTLLRQHQLFMKASKCSFAQQELEYLGHIIGVRGYYRKFIQGYGLMTKPLTNLLKKEVKFVWEETHQQAFESVKKALTTAPVLALPDFSQEFVVEIDASDKGIGAVLMQQGHPLAFISKALGVKAQAMSTYEKECLAILLAVNKWRPYLLHSAFVIQTDHKSLTHLGEQQLNTSMQHKAFVKLMGLQYKIRYKKGVDNQVADALSRKVEDEEVLVMSISSPKWMEIVTEGYECR

SEQ ID NO: 158395 - protein, 35 aa, Oryza sativa
  Clone ID: PAT_MRT4530_57875C.1.pep
CRCPCLSLNQTLLSWWPADLRPLRQSPAFSYRRSV

SEQ ID NO: 158396 - protein, 59 aa, Oryza sativa
  Clone ID: PAT_MRT4530_57876C.1.pep
MSPLDRGTALMGLNAPLIQCFIVATSQGEQGSQRQGNVVSRGSSVSGLRAYVVRRSGEE

SEQ ID NO: 158397 - protein, 50 aa, Oryza sativa
  unsure (1)..(50): unsure at all Xaa locations
  Clone ID: PAT_MRT4530_57877C.1.pep
VRTGNEYLITQRARXSLYLVHLYWYLSGRHLIDSXNLLVHFWYYVMWIXL

SEQ ID NO: 158398 - protein, 49 aa, Oryza sativa
  Clone ID: PAT_MRT4530_57878C.1.pep
VPRTCSTMIIFFNTSLICLLRDGRKSQGGQHKSNQTTISRKTVVTFLYL

SEQ ID NO: 158399 - protein, 60 aa, Oryza sativa
  Clone ID: PAT_MRT4530_57879C.1.pep
MVQQATALTEVVTMVGEIAKEGDYGGDDPHVEQSPTSEVLPIDIEVVVMTRDSTDTSGKR

SEQ ID NO: 158400 - protein, 52 aa, Oryza sativa
  Clone ID: PAT_MRT4530_5787C.1.pep
RLYIIRHPWQGGLVDLPRVRRSSTHYTCINHHTTLTATADITILSTTLQTCI

SEQ ID NO: 158401 - protein, 77 aa, Oryza sativa
  Clone ID: PAT_MRT4530_57880C.1.pep
IISCIREDINVLEVCSWSLQMHISKKPPTMIFQRGLWIIFWFSRPDIIESVSNHHSFVSPCDYLIVNEIHSLKNFTL

SEQ ID NO: 158402 - protein, 76 aa, Oryza sativa
  unsure (1)..(76): unsure at all Xaa locations
  Clone ID: PAT_MRT4530_57881C.1.pep
MMVTSSTIATFWNVVSSSASIMCXGQCTYLTNSFTISSSTPSTAPPAAMAAAVMAASSTPDAPPRKASRAVASVLH

SEQ ID NO: 158403 - protein, 67 aa, Oryza sativa
  Clone ID: PAT_MRT4530_57882C.1.pep
CKKIKALIKVFFESSSFLSKNFFAAGEKKKLFYFQEQKEHPFKFGPHFQVLKPKPPFFPFFTAFFFF

SEQ ID NO: 158404 - protein, 553 aa, Oryza sativa
  Clone ID: PAT_MRT4530_57883C.1.pep
MMAFGSLLLSPPPPPPPPPSLPLPARPSAASYLVAVRRRRPPEPRCRSQEMASSGGGGSSGGLGSEGESAAASAIGSLDLDGAAASSDNRPVISVTLSAGETSSNGDSERWQTRQHSTDDISRSKSKPRYIKAFGVDLSADNVAVAIVYFVQGVLGLARLAVSFYLKDDLHLDPAELYCFDFHCSDSIPLFGYRRRSYLILSGLLGALSWSLMATIVDDKYSAALSIILGSLAVAIADVVVDSMVVERARGEPQSTSGSLQSLCWGSSAIGGVMSAYFSGSLVDTYGVRFVFGVTAFLPLMTSTVAVLVNEKRLPLGENATSSSDSGLIESSKEHIMQIWSSVKQPNIFLPTLFIFLWQATPQSDSAMFFFITNKLGFTPEFLGRVTLVTSIASLVGIGVYNSFLKEVPLRKIFFVTTIFGSALGMTQVLLVTGLNRVLGISDEWFSIGDSLIITVLGQASFMPVLVLAAKLCPPGVEATLFATLMSISNAGGVTGGLLGAGLTQFLGVTKDNFQNLALLIVVCNLSSLLPLPLLGLLPDESPGVDNEQTKVD

SEQ ID NO: 158405 - protein, 152 aa, Oryza sativa
  Clone ID: PAT_MRT4530_57884C.1.pep
MLGRSRFRFTPTPPKEIAKSALISVEEMAGSKQTDRMYTGGKASRMQLATIVERKSVTTTGGVKKPHRYMPGTVALREIRKYQMSTELLIQKLRLQLLVREIAHDFKTVLLFQSHAVLVLQEAVKAYLFGLFEDTNLCVMHSKRVTIMPNDI

SEQ ID NO: 158406 - protein, 512 aa, Oryza sativa
  Clone ID: PAT_MRT4530_57885C.1.pep
MKKRPLSSVPPLGCALLGPPSSASLNPPLRPAGQLAGSPLSDGDGTSGDRGSSRAMYIFLALSAALVMETMRRIRSHHGHRHLLKPIAVVTLGEAAGSALPSSLAADPCERGAERRRESCERGRDRRIRTSHHHPRRIRATVGRRDDRIQARRSEAAHRIRAGGEGVAGSAPPVADDGGSAREGGRETMGSRRGGVNPSQYGNAPSKKLNAIAGGGMVDLVGNDGFEQEWLLAIYEEDGEIPNSSYEHPTLALAGARRHLRLAESKASGGTAKLEELLVEETWLEALPGELHKPYALELCRFVAHERLHSPVPVYPPPHLVFHALHATPFDRVKAVIIGQDPYHGPGQAMGLSFSVPEGIKIPSSLANIFKELQKDLGCTVPSHGNLERWAVQVVLKATSEAGTVFGSAPAPERVKLELKLCQTVPSFETISCYCWWVDLSPVALRTTVGQRPAAWEGQASASALAAIKRSGGGPPREISPAILRHANANANAHGLAMQRCSVMEASTVARA

SEQ ID NO: 158407 - protein, 241 aa, Oryza sativa
  Clone ID: PAT_MRT4530_57886C.1.pep
MRPPSPPRPLAFPTLDSLAAFLGSRLPASALASWGTAPGTKTLLNLFLELSQGECVLISAAAAAAPPSQQQQQHPVVRAVHVASVRIRNGRGALLMETGQLLSDGTLRSRGGLRPLSEKMRPGETPEAAAVRAVREELGERVRVRILGGEEARVEERDSASYPGLHARYVLHAVDAEVVEGVPEDGEFDTEEGGEHEDEVVVDGAAAAITVKRHYWKWVDDNDNDEEDVAGAEEGARQSAH

SEQ ID NO: 158408 - protein, 64 aa, Oryza sativa
  Clone ID: PAT_MRT4530_57887C.1.pep
MLSSRSFLASGHHDAPIGSTGRRTISPGADATEFVLLRTSSRSPKAEAAAASVQERTGEEEEEE

SEQ ID NO: 158409 - protein, 106 aa, Oryza sativa
  Clone ID: PAT_MRT4530_57888C.1.pep
WLFRRRPLPASRSCAPSSGRWSGSAASRYAPSRRCGTPPRCTLPSPPSPSTTSGRSRTATSSASPTSPSSPASSTSCSRSTSRSSSSSSSTSTCGAGSSTTSSASA

SEQ ID NO: 158410 - protein, 302 aa, Oryza sativa
  Clone ID: PAT_MRT4530_57889C.1.pep
MLRNRRRKLFTNAGGDRYRKSAWSYVAFEHPSTFDTLAMDPAKKKDIMDDLDAFRDGKDYYARIGKAWKRGYLLHGPPGTGKSTMIAAMANYLDYDIYDVELTSVATNTDLRRLFIETKGKSIIVIEDIDCSVDLTGKRKKRSPHAAAAAAEPVDAAKDESASKVTLSGLLNVIDGLWSACGGERIVVFTTNHVGKLDPALIRRGRMDKHIEMSYCCFETFKILAKNYLAIDAHHLFDDVRSLLQDARIKITPADVAEHLMRKCATAAADEAAACLASLVKALEKKAKGKETVEEEETVVDE

SEQ ID NO: 158411 - protein, 2073 aa, Oryza sativa
  unsure (1)..(2073): unsure at all Xaa locations
  Clone ID: PAT_MRT4530_5788C.1.pep
GLIPPSSMRRPPHLRYKRAPRGVXDIESQSQHNLHSLRNPCTNVPQYPLYPVYGYHPSTVARQVGGFGTQGSTTMSSSFVDNNVSTSLSQVLPASTMLVWTQVGEIVFPVYTTTPISTGPPMTGDENAVATNQGDSMSKNPPIETENGISMASKLKKDSDMAKPCPSDMNHEPTKMTSEATRSWCPIHKTKKHTLQDXWVFLNVRAEIRACKERGIQRTSPTRDVYCPIHKTKNHDLSSCKVFLSAMKAQCPKSYVPIRDNGKEQGATPTSDRFVGVIDIDPHEPSVLHLLEDYGSSTTSAPREVLAIDDIGTSAHANTEAGNQSTTPAQHIRAVQAILRETPYDPVLNVDLERWTERLRESVTNLSNAFEEAATAAHQEQPPTSEANGEDPERRESPQQATPSPRGTGDLRDQINGRWEARRTRDNVNRSRRHVSSWRHDNGNRGDRSNEDRDHNNHHNHNNRERRVLDNTGHGRRRIDDDDGDRRRDNSGRRRQDSXDPGHHPRNRMPEPSDPSSSSSSASSSSSDRHPXRTHDHRQPTTPNAGCRAFGRSLRDVRWPERFRPGAIEKYDGSTDPEEFLQVYSTVLYAAGADDNALANYLPTALKGSACSWLMHLPPYSISSWADLWQQFIVNFQGTYKRHAIEDDLHALTQNSGESLREYVRHFNECRNTIPEITDASVIRAFKSGVRDRYTTQELATRRITTTRRLFEIVERCAHADDALRRKNDRPKTGGEKKPATDTSESSKKKNRKNGKRKAQAEVLAAEYANPPKRIDPQSSDTKKSWCPIHKTDRHSLEDCLVFKKSLEKHMAFEKGKXVHVVETNEETAPHEPDSAYPDFDLHVSHIXAVPQRRYLIVVEPTIRNIKVARVLIDGGSSINLLFANTLDAMGIPQNELIPTDQLFHGITPQSSSRPLGKITLPVTFGQANNFHTEHITFDVAEFDIAYNAIIGRTALAKFMAASHYAYQVLKMPGPKGTITIQGNAKLAVQCDKRSLDIVEQTPSPPATTEPPKKVTKTNKTPKPDGAIKIVPLSSANPDKTELALITFLRDNADVFAWQPSDMPGVPREMIEHKLMVRPDAKPVKXRLRRFAPDRKQAIREELDKLLKAGFIREVLHPEWLANPVMVRKANGKWRMCVDFTDLNKACPKDHFPLPRIDQLVDSTAGCELLSFLDAYSSYHQISMAKEDEEKTAFIMPFGVFCYVKMPFGLITAGDTFQRTVQGALSNQLGNNVEAYVDDIVVKTKTGDSLIDDLRETFDNLRRYRLMLNPEKCTFGVPSGKLLGFLVSGRGIEANPEKIKAIENMKSPTRLKEVQKLTRCMAALSRFIARMGERGQPFFALLKKQDKFVWTQKAEEAFIALKRYLSNPLVLVAPQPNEELFLYISATPHSVSTVIVVEREKVQRPVYYISEALHDAKTRYPQIQKLLYAVIMTSRKLRHYFQAHRLTVVSSFPFGEVVRNKDVVDRIAKWVVELSQFDVHFVPQTTIKSQVLTDFVADWTMPDNKSDNQGDNATGTMAFDGALNSQGAGAGFILTSPSGDQFKHAIHLNFRATNNTAEYEGLLAGIRAAATLGAKRLIVKGDSELVANQVHKDYKCSNPKLSKYLAEVRKLEKKFDGIEVRHAYRKDNVEPDDLARRASRRESLEPGTFLDIVTKPSVKEVSSEVSPNTPDISSDITEAERAVADIETIDDWRIPLIKFISSEELPEDDTEAEKITRKAKIYCMVGNDLYKKAPNGVLLKCVSTDDGRHLLLDIHEGICGSHAAGRTLVGKAFRQGFFWPTALKDACDMXTHKATHASAPNYPSDLAILVLGARYTWAIPTRTGRLQIPIXVAIDKFTKWIEAVPTGEIKADNAIKFIKGIFCGYGLPYRIITDNGSQFISADFQDYCIGLGVKICFASVSHPQSNGQVERANGIVLQGMKTLLWAVRTTPTTSNKETPFFLVHGSKAMLPGELQHQSTRVQKYSDENQEGQQDIDVNLLEEHRERVAVRAASYQQTLRRYHEKRIRARILSIGDYVLRRVQSQAGRNKLSPKWEGPYTITQVLRPGAFKIADGDGRELANSWNIDQLRKFYV

SEQ ID NO: 158412 - protein, 46 aa, Oryza sativa
  Clone ID: PAT_MRT4530_57890C.1.pep
GGRVFFFFFFFFFFFFFFFFFFFFFFLRGNHPLLKKENKGPKQRAF

SEQ ID NO: 158413 - protein, 127 aa, Oryza sativa
  Clone ID: PAT_MRT4530_57891C.1.pep
WRRSGGCPTRTVSWTTPALASWAAPPPARSPTCSRASATSPAAATSPAPPRPSATAPPASPPAGPPASPSTAPPATPCRRRPTGTTTRSSPSPPAPPRGPSPACATARSPWAAPRSSAPPRWPPWSS

SEQ ID NO: 158414 - protein, 99 aa, Oryza sativa
  Clone ID: PAT_MRT4530_57892C.1.pep
AVGSAPSALALRLAVSAPTGLALTLCHRGGRADPLADVAATSAPTASALMCPTSAPSKLALRPVLAIDGTFLTGKYQGTLLTAIGVDAGLHLVPLAFAM

SEQ ID NO: 158415 - protein, 78 aa, Oryza sativa
  unsure (1)..(78): unsure at all Xaa locations
  Clone ID: PAT_MRT4530_57893C.1.pep
LIYKXHFQSXIWRYXLXMRYRGXXXXXVEWILVQSPNYSXAXLQRGGXTQKRNRGSSGVVWLGPRDAWMLASPMVRRL

SEQ ID NO: 158416 - protein, 69 aa, Oryza sativa
  Clone ID: PAT_MRT4530_57894C.1.pep
SIIFDIESLSDYCIHAGKAITFIRMLVESVWSLLLKRKNLINILCSWDHLCICHKRYLINMSSFILRMV

SEQ ID NO: 158417 - protein, 72 aa, Oryza sativa
  Clone ID: PAT_MRT4530_57895C.1.pep
KGANPNFFKFLNSGWVILNSLPRVPIWAKFGPWCHEKRETPTMGVDPLHTAVIHRGGAHPPIILIWAVFIAD

SEQ ID NO: 158418 - protein, 90 aa, Oryza sativa
  unsure (1)..(90): unsure at all Xaa locations
  Clone ID: PAT_MRT4530_57896C.1.pep
KWXXXSTNXLFXXKKXFSLXXLAKLVFXXFFLTPXXIXRPGGXXFPKTAPXRGTPFXSLIXVYFNLGLPRXYXSXXNFXPPXPXXXRXYF

SEQ ID NO: 158419 - protein, 253 aa, Oryza sativa
  unsure (1)..(253): unsure at all Xaa locations
  Clone ID: PAT_MRT4530_57897C.1.pep
EGSAAPSRSRRSRRRSTPSVRISSDSLTWRHSSTPPSPASAGAARLPTPPFSGASSRSAAPRSSASSXPTAATPSPTAAPTTTSSAPPPVSPTWRPPPPIATSSSKTSLISIRASNAAVATSTSGASAAATAVASSCPAAAAGLTRRLRSPRADCHLLLRRKTSMGRSSRSGTRLSSTTPTPRSGSSASTATCSSPSSPPAPVNGPCSTTRQTCTNSPAATACPPAGSCTGGPTTRSAATMEWTVTVAPFPVG

SEQ ID NO: 158420 - protein, 155 aa, Oryza sativa
  Clone ID: PAT_MRT4530_57898C.1.pep
MTAQQTGWLMAQRTSRQRSTSSSENGGNSVKFLEGDVRASNFGHVFLGQIQGKRREERALAHVVESISKKSCQMREGVPASRCVIPELIPQERGGIRRLSARGHRRFDHLSARAPPLRSPLPARGAELVARFPPTPRRGRWRDSPAEMRRKSGAD

SEQ ID NO: 158421 - protein, 235 aa, Oryza sativa
  Clone ID: PAT_MRT4530_57899C.1.pep
MSPLPSPVTPPSPVLQCGSGLGGEVSSGGGPGGECGGGGPNGEGRSGGEWVAGTARRAAAGERAICRVWHQPRIRHRHPSHPIHLLHHASNLRRCHRTAWMSSASTAHYTEPMLISPRSECIEDRKLQQTAVSNSKNSIRTCIIRYSVWGRKKEMKKKGDGNARRERGPSHSAKPSRKLVSGPCVDTDMQMEAGKEGGDSGTETEAMGRHGGSGSGDDEDDCGHEEGGGGGGFLG

SEQ ID NO: 158422 - protein, 140 aa, Oryza sativa
  unsure (1)..(140): unsure at all Xaa locations
  Clone ID: PAT_MRT4530_5789C.1.pep
SAATPPPSXGAAPSPHLPPDRPSLPXPLSPPSHDGSDDVDRGWIRPRWWRSRTDPAAAVPADPSRLPPAVDLTAAAASAPSPAWRRDQERRWAWEPVVAESGDADDDNDNDDDNSDDEAARVRVWILFLIWDVDFVGIVD

SEQ ID NO: 158423 - protein, 131 aa, Oryza sativa
  Clone ID: PAT_MRT4530_578C.1.pep
MAASPALAPTRTVPVLPPRGPSRHRNAAAPPCRPATARIGASPGDGAAAAAAAAVEQGSRSEEKDRKRCLRCGSLYLDEDNSPTDCAFHGHVTVLKGGTTFAVGVRNFHINRRKKKKTKSRVQVEIQFKNI

SEQ ID NO: 158424 - protein, 149 aa, Oryza sativa
  unsure (1)..(149): unsure at all Xaa locations
  Clone ID: PAT_MRT4530_57900C.1.pep
TRQHQPTQYPTSEELSIGKIKVRAFDLGXHQIARRVWEDYYAKGDAVVYLVDAYDKERFSESKKELDALLSDDSLATVPFLILGNKIDIPYAASEEELRYHMGLSNFTTGKGKVSLGESNVRPLEVFMCSIVRKMGYGDGFKWVSQYIK

SEQ ID NO: 158425 - protein, 160 aa, Oryza sativa
  Clone ID: PAT_MRT4530_57901C.1.pep
MEAKGVVVITLVLSLAAAAGAARPKETTMGLTRRGLASEPMTHLHFYFNDKLYVMDDALTEGPEPESQPVGRAQGMYMSTGLAKLGLLQVMNLVFTHGPYNGSVVTVLGRNGPFGNVREMPVIGGTGTFRFSRGYAQLKTHTLDLKKNDAIVEYNVYIMH

SEQ ID NO: 158426 - protein, 58 aa, Oryza sativa
  Clone ID: PAT_MRT4530_57902C.1.pep
MGVSIPTVGGGADMRQGGSNITEDGGGLASAIATFWSAGKARRWRMGWWSPFSMSKLG

SEQ ID NO: 158427 - protein, 162 aa, Oryza sativa
  Clone ID: PAT_MRT4530_57903C.1.pep
MASLKALEPRILASYPLRERGRMVSYTPLAWCPSSSRNEELEASTSTRSNDDDDEDSTQVTVASWRSPSCRPLEDYSEPLFRNLITFEQTRPFTPGHVTAYAIFMDSLVTSPEDMRLLLIISSVLVNQMNGERDATTGFFGRLCTEAHLDADRNYLAASSTR

SEQ ID NO: 158428 - protein, 53 aa, Oryza sativa
  Clone ID: PAT_MRT4530_57904C.1.pep
DMSENIKHLMEVILVPSRFRYFAFLQGTIRLSFGVERGRFSRGFFWATWIFVL

SEQ ID NO: 158429 - protein, 79 aa, Oryza sativa
  unsure (1)..(79): unsure at all Xaa locations
  Clone ID: PAT_MRT4530_57905C.1.pep
KRTCWQRAEAEARLEASLAEAAEVETAAAVGPRPPPLLPSAATAPQFXDPSSATAPPLXPAGSGGRTAALVPNSARGLV

SEQ ID NO: 158430 - protein, 102 aa, Oryza sativa
  Clone ID: PAT_MRT4530_57906C.1.pep
MMSSRGTSAMLSRAARMRQKLQSSLEASAIDIEDVPYKHAGHTAVKDNANETHFNIRVISPKFEGQSLVKRHRMVYDLLTDELNSGLHAISIVAKTPKESGS

SEQ ID NO: 158431 - protein, 97 aa, Oryza sativa
  unsure (1)..(97): unsure at all Xaa locations
  Clone ID: PAT_MRT4530_57907C.1.pep
LRLRDRRCGLARLPRSHAAVLRSPRAKHPHAFARRSRRRQRRCQGNGLGRGECGVACGAEASAXAEAAELDVEGRLRLQRGGQHGGADHTSKRAALA

SEQ ID NO: 158432 - protein, 490 aa, Oryza sativa
  Clone ID: PAT_MRT4530_57908C.1.pep
MTVASSDEASRSVLRPAPPLKWEDEEAHGSSPGEGGAAGWAVDSGDQENGADLGPVIAVEGLGGLVPQPEVAVVAVELLPQLVQEPGKVSPRIHEKANSGEGENGDGKYRVVYTAGRRKRCLISPGGSDGDRITPRDLAVAFHGQEAGQVAPEAATAAIADGAGVAVDSVLTKMQELVNHGSCGNGKNNVRKSRRIHMKQATAVPVSDELKNLHSQEAEAAHGKITDQSDCEIKKEPRESCMSSIVGSDDSHISGLSIRLQSLGINITSVTPILSKNVSSTDCHPNQARLLLSRHAVEGSPLLGMLTPLEDALVHSSGLPIEVVDRYGCSYDMFLRYLDSTTSYRLIVQWRNFLEMSHMIPGDLVKLGAFRFEGQLALTLLHYGNAGKAKKVLDRKLKEKKVESNSTVTEKSKELTSRETEESKEELTSRKTDANDAESASIVMLMHALRQINNQSVSSRGDHFPHEEQMLEDDLKIALFAGDLKMKFLC

SEQ ID NO: 158433 - protein, 449 aa, Oryza sativa
  unsure (1)..(449): unsure at all Xaa locations
  Clone ID: PAT_MRT4530_57909C.1.pep
GVLPCMDAKARSQLLPRYWPRITDQELQHLSGDSNSVITPLFEKMLSASDAGRIGRLVLPKKCAEAYFPAISQAEGLPLKVQDATGKEWVFQFRFWPNNNSRMYVLEGVTPCIQSMQLQAGDTVTXIDKGALPQKEGPGTSSSSPLPVKRKATSVGPKIKRFHMDSEESMELKITWEEAQELLRPPPKAPSIVVVDGHEFEEYEEPPILGRRTYFVTDQSGENHQWAQCEDCSKWRKLPVDALLPSKWTCSDNKWDSERXPAILEPFSLLYAVFMISYNRKSAAKKTKGKVDTDNIDVSDGLDTLANLAILGEGESLPSQPTTRHPRHRPGCSCIVCIQPPSGKGPKHKQTCTCNVCMTVRRRFRTLMMRREKRQQSEKDSXGASQKRARSIQRASSTNNKRTSSPVKNQIDLNSQPEREDDLEIVKFSSASSASGAVFTTSGTVTSTG

SEQ ID NO: 158434 - protein, 146 aa, Oryza sativa
  unsure (1)..(146): unsure at all Xaa locations
  Clone ID: PAT_MRT4530_5790C.1.pep
KFLTGIKKFQKLQNKIFGQMEXIGCVRGKKXLRDPRGEHLSINANTGXIGTRGCEVFDRNEKVQKAPKXDFWKIWSVLGAFVAKXNHFAIRAANFFQLMPKLAHVGAMFFHQNAKVRKAPKPDFWTYWSVLGHTWLRSFSPECKSS

SEQ ID NO: 158435 - protein, 289 aa, Oryza sativa
  unsure (1)..(289): unsure at all Xaa locations
  Clone ID: PAT_MRT4530_57910C.1.pep
MGFRKATNLSAEQDQPTKPANGVLPPPEANNKVVVPDSSPNAAVPRPIKVNTESKSSSPVEQATACKIDKGALPQKEGPGTSSSSPLPVKRKATSVGPKIKRFHMDSEESMELKITWEEAQELLRPPSKAPSIVVVDGHEFEEYEEPPILGRRTYFVTDQSGENHQWAQCEDCSKWRKLPVDALLPSKWTCSDNKWDSERSSCDSAQEINMEELGEMIPIKPGAAKKTKGKVDTDNIDVSDGLDTLANLAILGEGXSLPSQPTTRHPRHRPGCSCIVCIQPPSGKGPKH

SEQ ID NO: 158436 - protein, 67 aa, Oryza sativa
  Clone ID: PAT_MRT4530_57911C.1.pep
MPGGGVGVGLVEVERSRFAVRRLAQGVRRNAREAVQFRSGADCGRRRSRGGGLVDQATEGPCFVTPC

SEQ ID NO: 158437 - protein, 62 aa, Oryza sativa
  Clone ID: PAT_MRT4530_57912C.1.pep
VQVEALHLPCLGNDLIGGECAQDQRLLVFVCNFRPQTPRDPNFLCCWCTFGDCTMFLCQPQA

SEQ ID NO: 158438 - protein, 82 aa, Oryza sativa
  Clone ID: PAT_MRT4530_57913C.1.pep
SIWHDQAVTGLSPVTADRTGGCAPTIAPVPGGVGAGMLRPIEASSGAPGLSPVSGGGRRWVPLKDGRLLSFRAKIRIVVRSK

SEQ ID NO: 158439 - protein, 422 aa, Oryza sativa
  Clone ID: PAT_MRT4530_57914C.1.pep
MSGEVECRVCHAKVQVPMAAAAVSKAYDIHRSSVSSRQRALNVLLVSGDCVLAGLQPILVYMCKVDGKFKFSPVSVNFLTEITKIIFAIIMLCIQARRLKVGEKPFLTVSTFMQAARNNVLLAVPALFYAINNYMKFVMQLYFNPATVKMLGNLKVLVIAVLLKVIMRRRFSTIQWEALALLLIGISVNQLKSLPEGSSTLGLPVAAGAYLYTLFFVTVPALASVYNEKALKSQFDTSIYLQNLFLYGYGAIFNFLGLVITAIIQGPSSFNILEGHSKATMFLICNNAAQGILSSFFFKYADTILKKYSSTIATIFTGVASAVLFGHTLTINFVLAISIVIISMHQYLSNQIKDEVPSSKIEMGDAHEHRSKESVVVNVSDSIATEAKYRNELPTDTIQLGSTPRRSSIHLTNTVLIREVES

SEQ ID NO: 158440 - protein, 111 aa, Oryza sativa
  Clone ID: PAT_MRT4530_57915C.1.pep
PPPARACAGRCSRRWPRSTRRSSRPPPCHPPSSPPPSSPAPTCTSVAPVAAPTSTSCPPRRSRRRRRRLPLLLPSPPLALARMPSLLASPRAALPPPPTPSATCGERARRS

SEQ ID NO: 158441 - protein, 728 aa, Oryza sativa
  Clone ID: PAT_MRT4530_57916C.1.pep
MARRRRRRRRAAPSPTSALDGDDILREILVRLPTSPSSLPRASLVCKQWRRVVSDPAFLRRYRAHHGEPLLLGFFADHCGYPVFRSIHDAPDRIPPEHFLMPRDKGAGRCNWDVLGCRHGRVLVYNRTRNEITVWDPATGHRSCAAAPPELGDDKEKIVFNGAADVWGDLITLECPPVYDTCLPSTLIGYSLYWLFSGEEEGILEFDLGRQSLATIEMPSEFLHYNSHRSFQIMPAEDGGICLAILSYQIMELWERKISSDGVGVAEWTMLKKIELGVILGLGHMGGWQNLIVAYDEDYQLIFVRTINGVFMIHLESMQFKNLGKDNFDGILHAYSAFCTAVGDLPRAERRVGTISEIMGFDEDDSNSADPPKGAGTVEGNAAAPSCETIPDEGMVDNENLDYVWNHGERIGEGFKCKYCKMTRKSGRGTRLKEHLAGRRHNVIACSGVPPKVRKAMRISLNKVKQRTKAAKNRRAKMKKPNTQNMVRHGVHNNSKEQQMQMAKQLSLEEFHYRQKMEKRGSTFEYGGGSDSRSAPDACCNVAGSCVGGGVVLPQPSSKTRLKLHGMDADDVYRGASAQTEIGTSELRKAWAEWFHNNGIPGIKADCPYFRRAMELTQQLGFNVAVPTGAEIDGAYLDADEEEINVDAINAEKSCEAVLDMPLITWTKKHIGKNHKANKKYHEMANTLTQDLGSPGSKRKRVEVKQGKQPMNNKEEFMGSDDMSNMPR

SEQ ID NO: 158442 - protein, 351 aa, Oryza sativa
  Clone ID: PAT_MRT4530_57917C.1.pep
MAGHMEARRRGGARRRRGAGGDDTGAREQGSGSSLLSVRRRGSRGARRRRQRPLRGAASRHVVRRERRQRREQDNDAAVAGEQGVGGGTMGGRSPHSLGRPCASPLGRCRLSLLLAVLTSPTPRARRPTPSHAPCPASSPRTLARSLAALPTRPCSQRRLLPQPLRPRLLPHRHHQPGHAQTPASPRLIATDKPTPTPASPRLATTDKLTPCFPTRPPTPPPPSLSRRRPHPLPLAPARLQIRLQLEQIAVTSARPRARPAGRLQTCSCSIVGEANGRAAGAGDKEKAWPERRAYSWLLALAKISGMREFLVDLRSQEEPVVADPNGRHGTQIQNKNSHRKHKIICNQDQT

SEQ ID NO: 158443 - protein, 48 aa, Oryza sativa
  Clone ID: PAT_MRT4530_57918C.1.pep
MEGNGIREEAEVDDNGEGTVEDGALATVTSKMSHPMEGATMEGDDNID

SEQ ID NO: 158444 - protein, 37 aa, Oryza sativa
  Clone ID: PAT_MRT4530_57919C.1.pep
RDSETPPLSSSRYQKPLNSRIDGGTIGNELKPSPSHK

SEQ ID NO: 158445 - protein, 549 aa, Oryza sativa
  unsure (1)..(549): unsure at all Xaa locations
  Clone ID: PAT_MRT4530_5791C.1.pep
MLPENLDPAVSGDGDGDGRAAGNFTSTASSTAPSTWSGEQVCHAPLLLALGCSDCRDRENCLFPNASVLIPVPGKAGECPSTPDFIHLHPCTFVYDQTEPQTKPYPLDMWKYGSALQQRPELNPYSGRGATSHNWHAPKPHRXTGFRGFERGRERERPSEPSATTTNHASGTSGTTEATRSTQAKLQAYKEAITIHKKKTGYTETVHGSTEADPVCQPRRVADKRTPLDTTRPAHVETTRLPSGHTNADTXTVTTRTRERLPTPVHGRDTAGTRLDDAEPRTKTMXGCGGSLDERGRRTRTARRRDERHNDRERREDDDDDDRGRRGGDEGSRQWLHGDEDDVGHAAAMTMTEAAPRDDEPGDRRDVDDENDRRRRXWTAEGRLTHGHGEKGSRRXDAAEEEGEAGAGDGXRRNSGEEEVMPGXGRRRGAEGGGGDVGRRTGNATVAAGGGTVAATPLGDGGNAPPAVTARNGGQAGVEEVAATLEEATARPGGAQARRXGRLEASSGTGERGRRRGGVKMIFXFGMNLSGRDTYRHTVGSLGGGSARH

SEQ ID NO: 158446 - protein, 113 aa, Oryza sativa
  Clone ID: PAT_MRT4530_57920C.1.pep
PRVRFSMKLTYRTPEYDYYNEETLVSEANESIAESEVANHPKKQWDDDCSWAEWYSAEDPVKGFELTAIWGERVFEETLEMAEVENASSFDADRWLLHPIVSPYMVDDSIGKF

SEQ ID NO: 158447 - protein, 83 aa, Oryza sativa
  unsure (1)..(83): unsure at all Xaa locations
  Clone ID: PAT_MRT4530_57921C.1.pep
CRCAAALSATAPRRVPRRASXLAVAAAQPEGVADPSEGQDPQDYEQGKSSLFFEHVDPIYKIILFTNKIACNDEHPTCDYAMP

SEQ ID NO: 158448 - protein, 59 aa, Oryza sativa
  Clone ID: PAT_MRT4530_57922C.1.pep
LASIMSPLCFHRVPRQVISRAEKQHGAGYGFAGGHKRAPGGYVAPSGLLCSRFSLSSLL

SEQ ID NO: 158449 - protein, 62 aa, Oryza sativa
  Clone ID: PAT_MRT4530_57923C.1.pep
MANGDVDPGPALGLGRSSGDRLGGKERVDSSAGPHRESREETKRQSVTRAASLRCLIAAPMP

SEQ ID NO: 158450 - protein, 102 aa, Oryza sativa
  Clone ID: PAT_MRT4530_57924C.1.pep
MAAAGGGGAGAAGGGKVSFKIILTSDPKLPFKVFSVPEAAPFTAVLKFAAEEFKVPPQTSAIITNDGVGINPQQSAGNVFLKHGSELRLIPRDRVGALAAPF

SEQ ID NO: 158451 - protein, 133 aa, Oryza sativa
  unsure (1)..(133): unsure at all Xaa locations
  Clone ID: PAT_MRT4530_57925C.1.pep
NALDCIGIRAPLREGPGRPFSVLWLVPPFFGPTWEGSNFVHPSSIPLRCPSVVILHQFDSGLGTLSRXPPSXSSLFPPWRVPSWQLLSPLFVGHATWPCLYLGLXCLALRHSGAYVVRVRIXHLSQVFLXAAT

SEQ ID NO: 158452 - protein, 179 aa, Oryza sativa
  unsure (1)..(179): unsure at all Xaa locations
  Clone ID: PAT_MRT4530_57926C.1.pep
MVLTIMEAKGKDAWGLLLVLLLGQLVAFSMAVSSFTSSLIATLGVDAPLTQSFFAYLLLTLVYVPILLKRRQKLQIPWYWYLALAFIDVQGNYLVVKAYQYSYITSVTLLDCWTVVWVVILTWYALGTRYSFWQIVGAGTCVAGIALVLXLDSKSADGQDPSKIPLLGDAPVLAATYFL

SEQ ID NO: 158453 - protein, 107 aa, Oryza sativa
  Clone ID: PAT_MRT4530_57927C.1.pep
MESSLGGWPSYNPQNFSQVVPADPSAQPLNVVPATYIATHRTGPPPGQVITTDPKNILLRHFYQKSEEKLRPKRAAPDNLTPQNNGKQPRGPLSDGGGSQATASGRS

SEQ ID NO: 158454 - protein, 192 aa, Oryza sativa
  unsure (1)..(192): unsure at all Xaa locations
  Clone ID: PAT_MRT4530_57928C.1.pep
MILSILKYTGPILECVFTCTFDECEKLVVTLSLLRHTFKGGYTDRVCIYVCICPPRIHGRWKRVEKPRGGVAGVGVGDVTASSAAAMESSLGGWPSYNPQNFSQVVPADPSXSPWSNVVPATYIATHRTDPPPVITTDPKNILLRHFYQKSEEKLRPKRAAPDNLTPQNNGKQPRGPLSDGGGSQATASGRS

SEQ ID NO: 158455 - protein, 1088 aa, Oryza sativa
  unsure (1)..(1088): unsure at all Xaa locations
  Clone ID: PAT_MRT4530_57929C.1.pep
MASRGXGQHQRHQQQQQQPGGYGRGGGGGRGRGRDGAPYSGGRGRGQDGSYPGGRGGGYGGGGGGGGPPYYGGGGGGGGGGGGQGRGYYDDGGDGRGYQRGMEGGGGRGGYRGDGDGGYGRGGGGYHGDGERGYGRGGGGGGGGGGGYRGDDEGRSSYGRARGGGGGGGGYHGDGEAGYGRGRGGRDYDGGRGGGGRRGGRGGGGSSYHQQPPPDLPQAPEPRLAAQYAREIDIAALRAQFKGLTTTTPGAASSQFPARPGFGAAGEECLVKVNHFFVGLKNDNFHHYDVAIAPDPVLKGLFRTIISKLVTERRHTDFGGRLPVYDGRANLYTAGELPFRSRELEVELSGSRKFKVAIRHVAPVSLQDLRMVMAGCPAGIPSQALQLLDIVLRDMVLAERNDMGYVAFGRSYFSPGLGSRELDKGIFAWKGFYQSCRVTQQGGRVGADMSSTAFIEPGRVLNFVEKAIGRRITNAITVGYFLNNYGNELMRTLKGVKVEVTHRGNLRKKYRIAGFTEQSADVQTFTSSDGIKTVKEYFNKKYNLKLAFGYLPCLQVGSKERPNYLPMELCNIVPGQRYKNRLSPTQVSNLINITNDRPCDRESSIRQTVSSNQYNSTERADEFGIEVDSYPTTLKARVLKAPMLKYHDSGRVRVCTPEDGAWNMKDKKVVNGATIKSWACVNLCEGLDNRVVEAFCLQLVRTSKITGLDFANVSLPILKADPHNVKTDLPMRYQEACSWSRDNKIDLLLVVMTDDKNNASLYGDVKRICETEIGVLSQCCRAKQVYKERNVQYCANVALKINAKAGGRNSVFLNVEASLPVVSKSPTIIFGADVTHPGSFDESTPSIASVVASADWPEVTKYNSVVRMQASRKEIIQDLDSIVRELLNAFKRDSKMEPKQLIFYRDGVSEGQFQQVVESEIPEIEKAWKSLYAGKPRITFIVVQKRHHTRLFPNNYNDPRGMDGTGNVRPGTVVDTVICHPREFDFFLCSQAGIKGTSRPSHYHVLRDDNNFTADQLQSVTNNLCYLYTSCTRSVSIPPPVYYAHKLAFRARFYLTQVPVAGGDPGAAKFQWVLPEIKEEVKKSMFFC

SEQ ID NO: 158456 - protein, 382 aa, Oryza sativa
  unsure (1)..(382): unsure at all Xaa locations
  Clone ID: PAT_MRT4530_5792C.1.pep
MNRVPTSWGFIFXGVNKAEGRGARTGSTGVGPTRQPHGPRWTGCTRLAPAGAVGPTRQPHPRARAADGRAPHGSHGARPKAASPAQPTGGDAPAPRWSPAATSGATERRPREGREGGSETAVLGSPRVDGDDGNGDRSGERRRRGSGRRGRWCSGGRRAERRSGRGRRGRGEAEGGDAEAGGGPGRRRRRTEARRRRRRERTTARARFRRRERAASGGNGGGRHGECLNRGGSERGRPERNEIGAAISGSIDAPAKISGGIPNEXRGREREKRGERERESRGVISPSLLRAGTAGGGGIRGGGGARARARRRERREERDDRWAPPVSEGGGRAHPSAARARGXEADWAAGERREREGGGPSRPKRGRGGKRIFRVFLFIKSF

SEQ ID NO: 158457 - protein, 213 aa, Oryza sativa
  Clone ID: PAT_MRT4530_57930C.1.pep
MATTTTAEFMSHHPFVLVPPYDNVSRHQQRRETMDAAAARKTRALLLPTCGARSRGEWQQQRLTSRQPGGRPEGFLWITASPRASPSRRGERGARRLARAGSVPSFVTAARGASHRNRPAPGPGCLPRPVRIVRLNQRGGKGKDRVDPAVDVASQGRRRGLVVSARAEAASHKSQLAGNDGWWFARGRTLVLSLWNKAIAIVADRSRARQHHQ

SEQ ID NO: 158458 - protein, 68 aa, Oryza sativa
  Clone ID: PAT_MRT4530_57931C.1.pep
SPSTGRYVVARAPVAAPEERAGEHGRRAKEVSSPGPALGVMGQVEPPELLHATQTLPGCCLLLAPPNG

SEQ ID NO: 158459 - protein, 1961 aa, Oryza sativa
  unsure (1)..(1961): unsure at all Xaa locations
  Clone ID: PAT_MRT4530_57932C.1.pep
GIECHHQHTHRILRNPRTSVPQYPIYPIYGYPPSAVARQVGGLGAQGSATMPSSLVDNNVNPGINQGVSTSIMLVWTQVGEIVFPIYTTVPISTGPSMTGSENAVLTIPDAFMSKDPPAEVESRTSTTSEPEKDPSAAISRPPDENDEPTRTTSKVTRSXCPIHKTGKHTLQACWVFLDVQAEIRACKEHGIQRTSPTRDVYCPIHKTKNHDLSSCKVLLIAMRTSSPKVQQSQISLREADKERGATVISDRFVGVIDIDPHEPLVLHLLEDQASSSTSTPRDVFAIEGTSTSARANTEAEDQLATPAQHIRTINTILRETPYAPVLNDDLAQWTERLRESVANLSNTFEEAAARVLFNGELPEQRVSPRQATLPPRGTSDHRDHLNGHREARRTRDNENHSXHHVSSQHRENLDNRHNRREHDNREQRMPGDTGPGRRRNNDDDKDQHRDNNGGRRQDSREPVRHPCNRTPEPSDSSSSSSSSSSSSSDRHPRRTHDRRQPTXPGDGCRAFIRALRDVQWPERFRPGAIEKYDGSTDLEEFLQVYSTVLYAAGADDNALANYLPAALKGSARSWLVHLPPYSISSWADLXQQFIANFQGTYKRHAIEDDLHALTQNPGKSLRDYVRRFNECRNTIPKITDASVIRAFKSSVRDRYTTQELATRXITTARRLFEFVDRCAHVDDTLRHKNDKPKTEGDKKPAKDTPESSKKKSRKNGKRKAQTEVLVAEYADPPKHPDPQGDDTKKIWCTIHKSDRHFLEACFVFKKALAKQLALEKGKRVRVVEKAAEAATQYSDSTYPDSDLHVLHIFGGSMAVIXPIVVEPTIRNIKVARVLIDGGSSINLLFVSTLDAMGIPRSELTPTDQPFHRITPQSSSKPLGKITLPLTFGQANNFRTEQITFDVAEFDTAYNAIXGRTALVKFMAVSHYAYQVLKMPGPKGTITIQGNTKLVVQCDKRSLDXVEHTPNPPTTAEPPKKVSKTNKMPKPDGAIKIVPLSSANPDKTELALIAFLRDNADVFAWQPSDMPGXPREVIEHKLMVRPDAKPVKQKLQRFAPDRKQAIREELDKLLKAGFIREILHPEWLANPVMVHKANGKWRMCVDLTDLNKACPKDHFPLPRIDQLVDSTAGCELLSFLDAYSGYHQISMAKKDEEKTAFIMPFDVFMPFDVFCYVKMPFELITAGNTFLRTVQGALNNQIGNNVEAYVDDIVVKTKTSDSFIDDLRETFDNLRRYRLMLNPDKCTFGVPSGKLLGFLVSGRGIEANPXKIKAIENMKSPTRLKEVQKLTGCMAALSRFVAWMGERGQPFFALLKKQDKFVWTQEVEEVFIALKRYLSNPPVLVAPQPNEELFLYIAATPYYVSTVIVVEREKVQRPVYYVSEALHDANTRXAXIQMLLYAVIMTXRKQRHYFQAHRVTVVSSFPLGEVMRNKDVVGRIAKWIVELSQFDVHFVPXTAIKSQVLADFVADWTMPDNRADSQTDNETWTMAFDGALNSQGARTGFILMSPSGDQFKHAIHLNFSATNNTAEYEGLLAGIRAAATLGVKRLIVKGYSELVANQVHKDYKCSSPELSKYLAEVRKLEKRXRHVYRKDNIEPDDLAQHASRREPLEPGTFLDILTKPXVKEANGEDSTVVPDISSGATEAEHVVADIETTDDWRTPLIKFLSSDELPEDDAEAEKITCXAKIYCMTGNDLXDLYKMAPNGVLLKCISSDDGKHLLLDIHEGNCGSHATGRTLVGKAFRQGFFWPTALKDACDMXHTMLPAQALQTIPLTSLFSCWGLDILGPFPRGQGGYRFLFMAIDKFTKWIEATPTGEIKADNAIKFIKGIFCRYGLLHRIITDNGSQFICADFQDYCIGLGVKIYFASVSHPQSNGQVERANCIVLQGIKTLLWAVRTTSTTSNKETPFFLAYGLEAMLPTELRHQSTRVQKYTDEDQEEQRNDDVNLLEEHRERVAVRAASYQ

SEQ ID NO: 158460 - protein, 282 aa, Oryza sativa
  Clone ID: PAT_MRT4530_57933C.1.pep
MRHQGYVQVVTSMAPTGASSPGFRGCSGGGASTWCSVRCSGCSAECGSLELRLCRSPLGRSCRESSPSPASVPQQQRGRVKEQQFIQKVQEMLMEEEQQRIHIAQGLPWTTDEPECLIKPPVKETTEPVDLVLHSDVRAIERAEFDQYVSERNKFAEQLRLERERQQKLEEEEMIKQLRKELVPKAQPMPYFDRPFIPKSSTPALSYHLHKLLILSSISGLFSKRSAKPATVPKEPKFHPRPEKQSCLCRQRCMDTGMLISSCLHDQSTVLAEKSKALPRMF

SEQ ID NO: 158461 - protein, 52 aa, Oryza sativa
  Clone ID: PAT_MRT4530_57934C.1.pep
KNPTVALLPLGFVSKHTFFYRPLFFEGKRKGNCAYVLQKTRIFLARRAYHHQ

SEQ ID NO: 158462 - protein, 605 aa, Oryza sativa
  Clone ID: PAT_MRT4530_57935C.1.pep
MKYVLVTGGVVSGLGKGVTASSIGVVLKSCGLRITSIKIDPYLNTDAGTMSPFEHGEVFVLDDGGEVDLDLGNYERFLDIKLTRDNNITTGKIYQSVLEKERKGEYLGKTVQVVPHITNAIQEWIERVAMVPVDGKEGPADVCVIELGGTIGDIESMPFIEALGQFSYRVGPGNFCLVHVSLVPVLNVVGEQKTKPTQHSVRGLRGLGLTPNILACRSTKELEENVKEKLSQFCHVPAANIVTLYDVSNIWRIPLLLRDQKAHEAILKVLNLDSFARGPKLDEWVARATLFDALQDTVRIAMVGKYTGLSDSYLSVLKALLHASVDCRRKLLVDWVASTDLEDSTAIEAPDAYKAAWDLLKGANGVLVPGGFGDRGIQGKILAAKYARENNVPYLGICLGMQLAVVEFARSVMNLPEANSTEFDPNAKTPCVIFMPEGSKTHMGGTMRLGSRRTFFEVADCKSAKLYGNVSYVDERHRHRYEVNPDMVPEFENAGLQFVGKDETGRRMEIIEIPNHRYFVGAQFHPEFKSRPSKPSPLFVGLIAASSGQLDRLLQGSCNGHVVSTKHSLSNGAYTSTVHQNGHAKKLANGLSNGTYYPNGNGVHA

SEQ ID NO: 158463 - protein, 111 aa, Oryza sativa
  unsure (1)..(111): unsure at all Xaa locations
  Clone ID: PAT_MRT4530_57936C.1.pep
SSTASKDACFVAVLMAGMEDISVAQLNQSHMRFMDRQLHRHVQDSPVDACLLVLDRQLTVRQRLQPMLRLLGALXGLRMQCFQQLQDPSLECRCADILLMVRNYEESMPMP

SEQ ID NO: 158464 - protein, 119 aa, Oryza sativa
  unsure (1)..(119): unsure at all Xaa locations
  Clone ID: PAT_MRT4530_57937C.1.pep
RLKPLQSSSVPILRSRMVHLSCMPWRFSQRSDRRPKTLVVXFLGKPDTTPSETPKTRGKLVPRVSRSXSRAXSRVPHGTLRASERCSNPCAGRCPPLGGGFGVSGVSARRQEDGDEILG

SEQ ID NO: 158465 - protein, 92 aa, Oryza sativa
  Clone ID: PAT_MRT4530_57938C.1.pep
PLNSNTSSSTSKTILSTFHSNCITSGIPSVAPFLESILKYNIHQPFLSPITISIPILIIILILLNACHDASNAARIAYIIDYPSQFPSPHVK

SEQ ID NO: 158466 - protein, 108 aa, Oryza sativa
  Clone ID: PAT_MRT4530_57939C.1.pep
MMPAQSSIALLDGKLDAAPTWRANCRNMNSAIIKGGSARDLKVDGCGDKGFRQVQALSMRGKRVGRRHNSPMHCTESGWLVTTVAYTNTVDRETTDEKRMLTMRTAGH

SEQ ID NO: 158467 - protein, 144 aa, Oryza sativa
  Clone ID: PAT_MRT4530_5793C.1.pep
MWNREGAPEGGLAGAAEGRGTRPRPDGHRRRPPARRSGTRERGGKGEARGTVFGSPRSTATTGTAAEAEEGGGAVRDAEGDGAPAVGGRSGAADGVGNHSAKPMEVAPSREEVRSGGGGGTEFGGDGGERGARREHESDGESER

SEQ ID NO: 158468 - protein, 89 aa, Oryza sativa
  unsure (1)..(89): unsure at all Xaa locations
  Clone ID: PAT_MRT4530_57940C.1.pep
ENLDTIEVVSFLISSTCGSSSGASAGFINGPXDLFQSTRISVVRRVIDTRGLLLPHYTNGASLAYIIQGRGITGPTFTGCPETYQQQLQ

SEQ ID NO: 158469 - protein, 130 aa, Oryza sativa
  unsure (1)..(130): unsure at all Xaa locations
  Clone ID: PAT_MRT4530_57941C.1.pep
SCSNAHVEAWVPIVDGVHAXGRILFCQSWLVGRVSNHTFQPXGRLQFPAPTKSLKPALMSQXFDVATLSSPRLLETDEIPSAGVTTRVAARNAFKAXTDGIEIHRAYGYMLEPVLNDLANERSDQLWSKL

SEQ ID NO: 158470 - protein, 119 aa, Oryza sativa
  Clone ID: PAT_MRT4530_57942C.1.pep
VVWRYLHTLDGPDVPTTKNALVWVVLFQYIPRLLRIFPVTKDLKRTAGVFIETDWLGAAYYLLWFMLAGHNVGTLWYFLTIEREDSCWRSNCHSNDGCNKSYLYCSDNHTGNYTSMIIT

SEQ ID NO: 158471 - protein, 98 aa, Oryza sativa
  Clone ID: PAT_MRT4530_57943C.1.pep
WRPPPPPQGAFFSRAGRPPDPVSSLVLDNKPPNKFQCSCYLPACACIIIGQRKTFISFTKPLNVGYDPPVKPCVVSCHFVPVTNDVVLCMRGVQLCLD

SEQ ID NO: 158472 - protein, 55 aa, Oryza sativa
  unsure (1)..(55): unsure at all Xaa locations
  Clone ID: PAT_MRT4530_57944C.1.pep
NFGPISIYHLSCNCISTILVYIFSQTSKLISYLITTSEYMPAIFCFDLSVXSDAW

SEQ ID NO: 158473 - protein, 119 aa, Oryza sativa
  Clone ID: PAT_MRT4530_57945C.1.pep
PTRPDGKVQRTFEALDGILERVIDDHRRRREGGRRMDDDGGGDHRDFVDVLLDVNETDKDAGIQLGTVEIKAIIMDMFVGGSDTTTTMMAWTMAELINHPRAMRKAQNEIWAVVGNTSH

SEQ ID NO: 158474 - protein, 551 aa, Oryza sativa
  Clone ID: PAT_MRT4530_57946C.1.pep
MAVSLLPAVLVVLAIVAPLLYLVLLPAVKYTTRNGAARWEDDGGDGRRRRRLPPSPRGLPLLGHLHLLGALPHRALRSLAAAHGPVLLLRLGRVPVVVVSSAAAAEEVMRSRDMEFASRPRMAMAELLLYGGRDVAFAPYGEYWRQARRICVVHLLSARRVLSFRRVREEEAAALVGRVRAAAADVVVDLSDLLIAYSNTVLTRIAFGDESARGGGGGGDRGRELRKVFDDFARLLGTEPMGELLPWFWWVDALRGIDGKVQRTFEALDGILERVIDDHRRRREGGRRMDDDGGGDHRDFVDVLLDVNETDKDAGIQLGTVEIKAIIMLICFLLHGHEQDMFVGGSDTTTTMMAWTMAELINHPRAMRKAQNEIWAVVGNTSHVTKDHVDKLPYLKAVFKETLRLHPPLPLLIPREPPADTQILGYTIPAHTRVVINAWAIGRDAAAWGQQPDEFSPEKFLNSTIDYKGQDFELLPFGAGRRGCPGIVFGVSAMEIALASLLYHFDWEAAATDHRRRGSQAWALPVDMSEVNGIAVHLKYGLHVVAKPRMP

SEQ ID NO: 158475 - protein, 172 aa, Oryza sativa
  Clone ID: PAT_MRT4530_57947C.1.pep
MRELTHLHISVFEVNESDFEVLGRMPSLIVLNLTSASSAQRICHIDIYDDGFRSLEVFWFRCLDDGWLRLRFWGAAMPRLRRLRLYLRANGLRLHGNYFGMRDFRSLTRVHVTVDCRDATVVDVEEAEAAITSLVKDNPNEPGARVAGAVVQQDGASLFGAVPPPTWRGDAE

SEQ ID NO: 158476 - protein, 134 aa, Oryza sativa
  unsure (1)..(134): unsure at all Xaa locations
  Clone ID: PAT_MRT4530_57948C.1.pep
APQARCPCLLSGPFVNRGSGAAPAAGELRPPRAEAGGELAGDGSENSSRWAMPSPSTSPADGGSTASXSDLPTGSSVRRPELSGGRRGTAVPINEWARERENYIALWGLRQRTGLKRLLSSDAQGTAIHGRTSL

SEQ ID NO: 158477 - protein, 271 aa, Oryza sativa
  Clone ID: PAT_MRT4530_57949C.1.pep
MVKIVGSPIDLSEKQRGTLKYLFLFDCPIALLEILLLRWGGYKTPELRIVLRGNLIRVPGEFVGMRELTHLHISVFEVNESDFEVLGRMPSLIVLNLTSASSAQRICHIDIYDDGFRSLEVFWFRCLDDGWLRLRFWGAAMPRLRRLRLYLRANGLRLHGNYFGMRDFRSLTRVHVTVDCRDATVVDVEEAEAAITSLVKDNPNEPVLELTRKLDFSHFGPFEKLISQIDPYKNLSQKWSFLGRQSGWRRRSTGRRQPLWRRPTADVAGRC

SEQ ID NO: 158478 - protein, 170 aa, Oryza sativa
  unsure (1)..(170): unsure at all Xaa locations
  Clone ID: PAT_MRT4530_5794C.1.pep
QEKCVESIKNGFVPRFSSLIACLQCLPCMSLDSGSYDAPVYFKIVTEVPPAAEQGKSCLSLEHVDPILQMLYCKGGRDGXGWALRRPMRLPDSPRHERGLPAALRGVGLKPEVWCVWLERVMRRVLSRPLSRMSCSGGWLGLLHRGVALDSGWLILINYYNGFTAFNCCR

SEQ ID NO: 158479 - protein, 91 aa, Oryza sativa
  Clone ID: PAT_MRT4530_57950C.1.pep
RTRLCNLTAKSNAPKKGHAGAEAEENSTHSRHTEEEINARNTVPKTGTRKATRRARRIYTQRWEPAGGDAPRLGAIAGVHGPTGESSWTAQ

SEQ ID NO: 158480 - protein, 107 aa, Oryza sativa
  unsure (1)..(107): unsure at all Xaa locations
  Clone ID: PAT_MRT4530_57951C.1.pep
PRPSLLPQSISNQLVLSRSKDCRGGSNLGHGGWVQLNPPKLFWGEQTTNCYLYTLKLREELLPPQIRIPSAALLAGWRSAPLPCSAAARLAAGSGGDDEXGRSFPPS

SEQ ID NO: 158481 - protein, 94 aa, Oryza sativa
  Clone ID: PAT_MRT4530_57952C.1.pep
CEDAHAPLPRRVLEERFSWTVHGGDGLFLKLRRCATNIELTFLRGAMPMLMLSNSACWRAGRMVLPMTSLAWGTCQCSRRLVFTSTARVQRPVR

SEQ ID NO: 158482 - protein, 44 aa, Oryza sativa
  Clone ID: PAT_MRT4530_57953C.1.pep
MSQVQAVKEKTSNDGVRYDYASLGLVVVYLFACVLCFLYTEARG

SEQ ID NO: 158483 - protein, 85 aa, Oryza sativa
  Clone ID: PAT_MRT4530_57954C.1.pep
FTNALQFTSYAILLSPKIKFRMIVFFLNTLYPVDISTFLQICLLFPLMLVPREWYCQFSSHHVSFPCNAIIYKHRIILSYMHFLT

SEQ ID NO: 158484 - protein, 78 aa, Oryza sativa
  Clone ID: PAT_MRT4530_57955C.1.pep
MSKKLISSSGLVAFHGHQRATRLLKTSFAGARLPAAARNPTVSVAPDTGGSICNSISRTMANPPYYLNAIRFSLIQEP

SEQ ID NO: 158485 - protein, 92 aa, Oryza sativa
  Clone ID: PAT_MRT4530_57956C.1.pep
AVTVVHACSQADGVQAVGRDSMTGRSTTWADRRVAGVPAAQLTTFVSLISIWNYLGRISHQGSRRRRSWRAPLPRRFRDPSVNACMPRHSSS

SEQ ID NO: 158486 - protein, 115 aa, Oryza sativa
  unsure (1)..(115): unsure at all Xaa locations
  Clone ID: PAT_MRT4530_57957C.1.pep
LLLRSKGCSHIGPSARSTPSEVTTLRTTSSGGTSSKKDADDFTRAGGWGGGGGAFSXMVSHRDLLRSAGAGVVSTVAFLLVKLRRFTSLGWSRSDLDASFATEIYFARLEPERSQ

SEQ ID NO: 158487 - protein, 93 aa, Oryza sativa
  Clone ID: PAT_MRT4530_57958C.1.pep
RIGQDCHVGAMSAETIMFEGHESYPGAIVEGAKIYCFPFPFRLDPSSFSFVERPKSERVGRSDGLLGPTLSFCLFRMVFFESVRFKIYKVYKG

SEQ ID NO: 158488 - protein, 262 aa, Oryza sativa
  Clone ID: PAT_MRT4530_57959C.1.pep
MFASRPAVHPVEAPPPPPPPDPAEQPRGVLMKDLPGMPGTAGGLGLRLAQFAFAAVALAVMASTNDFPSVTSFCFLVAAAILQCLWSFSLAIVDIYALLVKRCLRNRRAVCLFAIGDGITAALTFSAACASSGITVLIDNDLDLCSENHCASFESATAMAFLSWGWPVLQVFNVELSKSLLSKPQHHYITRVVPNFHGTFQLKVVLKEPLKLVENLLSSADILVCNTHPWLLAKSSALTRANCGAVIYHTDPSVDGTLLFSH

SEQ ID NO: 158489 - protein, 56 aa, Oryza sativa
  unsure (1)..(56): unsure at all Xaa locations
  Clone ID: PAT_MRT4530_5795C.1.pep
MASYRLLXILXFXALXALAAGDTYPADCPYPCLLPPPTPVTTDCPXPPSTPXSGYS

SEQ ID NO: 158490 - protein, 57 aa, Oryza sativa
  Clone ID: PAT_MRT4530_57960C.1.pep
KNLYEETIGTINSLLERVYTHRSGCSLRVRGLNKVGRCPSVHPNTSQEASSIKKCRT

SEQ ID NO: 158491 - protein, 1672 aa, Oryza sativa
  unsure (1)..(1672): unsure at all Xaa locations
  Clone ID: PAT_MRT4530_57961C.1.pep
MAEQGKAHDLSPSVSGDDGEPNPRRRARTPPPPPRQSPKQGEALERVDKSVASPVAGDAGERRDGERRLLVYGDGSTPQGALQAAGALLRHPPVVHDPESPAQRWLEDVANLVMTAQQRLGAGGRSATTRTSGAATTGSVSSRRRARRAAAAARHSAATPSSTPSTREDQHGEPDARLNIGRRRNSRRTPRATEGASSSRVSPRHGREDQPSVPPAGGVGCRAFVASLRNVRWPPRFRPTITEKYDGSVNPTEFLQVYTTGIEAAGGDDRVMANFFPMALKGQARGWLMNLPPASVHSWEDLCQQFTMNFQGTYPRPGEEADLHAVQRGDDESLRSYIQRFCQVRNTIPCIPAHAVIYAFRGGVRHNRMLEKIASKEPQTTAELFQLADRVARKEEAWTWNSSGSGVVASAAPGSAAQTGRRDRRRKKRPDRSGDEGHVLAVEGAPRATRKGRPASDKKNEAGTPSRERLAGRWCSVHNTSLHDLADCRAVKNLAERTRKWEEDRRQERREGKSPAVPSGKRRSEAKQKAPAVDIDDGDDDLGFQEPGATIATVDGGACAHVSRRSFKAMKRELLAMAPTHEAMRRARWSEVALTFDQTDHPPCIARGGQVAMVVSPTIYNVKLGRVLIDGGAALNILSPAAFDAIKAPGMVLQPSQPIIGVTPGHTWPLGHIDLPVTFGGPANFRTERVSFDVADLSLPYNAVLGRPALVKFMAAVHYAYLQMKMPGPGGPISVRGDLKVALACMEQRADRLAAASKPEGGDERLGPSAPTAPRQRMATCDEVPEDALVSFLRANADVFAWRPADMPGVPREVIEHRLAVRPGARPVRQKVRRQAPERQAFIREEVARLLEAGFIREVIHPEWLANPVVVPKANGKLRMCIDYTDLNKACPKDPYPLPRIDQIVDSTAGCDLLCFLDAYSGYHQIRMAREDEEKTAFITPVGTYCYTSMPFGLKNAGPTFQRTTRISLGSQIGRNVEAYVDDLVVKTRNQETLLSDLAETFENLRSARIKLNPDKCVFGVPAGKLLGFLVSARGIEANPEKIRAIERIRPPSKLRDVHSPPVLVAPEPNEPLLLYLAATPQVVSAALVVERDEDNPHSAHPHSVPTWPGSRQGGEAPEPNGGLRPLMTGVGPLPARQTVLGAPDPQEGPEATAGRPHLWPSDPEANPVPIRPGREQGEEAPEPNGGLRPLTTGVGPLPACPMTPGAPDPQDGPEATVGRPLLSSSDPEVIGAEDGCAPRGHSDEERPGGAAPSEEDRPRRKVQRPVYFVSEALRDAKTRYPQAQKMLYAILMASRKLRHYFQAHRVTVVTSYPLGQILHNREGTGRVVKWAIELSEFDLHFEPRHAIKSQALADFVAEWTPAPETASIPEASTDPSQLPQTAHWVMQFDGSLSLQGAGAGVTLTSPNGDVLRYLVRLDFRATNNMAEYEGLLAGLRVAAGLGIRRLLVLGDSQLVVNQVCKEYRCSDPQMDAYVRQVRRMERHFDGIELRHVPRRDNMIADELSRLASSRAQTPPGAFEERLTQPSARPDPLGETDAPDRPPRPVGVQASGPEGSVPSSLRLIAWISEIQTYLTDKTLPEDREGSERVQRISKRYVLVEGTLYRRAANGILLKCIPQKQGVELLADIHEGECGAHSASRTLXCQFHAKQIHQPAQALQIIPLSWPFAVWGL

SEQ ID NO: 158492 - protein, 238 aa, Oryza sativa
  unsure (1)..(238): unsure at all Xaa locations
  Clone ID: PAT_MRT4530_57962C.1.pep
EDREGSERVQRISKRYVLVEGTLYRRAANGILLKCIPQEQGVELLADIHEGECGAHSASRTLVGKAFRQGFYWPTALNDAVDLVRRCRACQFHAKQIHQPAQAPRSNGQVERANAEILKGLKTKTGETPFFLVYGAEAVLPSELTLRSPRATMYCEADQDQLRRDDLDYLEERRRRAALRAAAXAEPMWEGPYRVIGVPRPGSVRLATGDGTEPSVTTFPAWPVSTCGSPQALAPTRA

SEQ ID NO: 158493 - protein, 180 aa, Oryza sativa
  Clone ID: PAT_MRT4530_57963C.1.pep
ILPLGHSILTPGDDASAHKSSRSQQEALTQTRIHNSLLLVFLMTTEKSTSARNTAVALHLRVTLKGYRTQGRITSVGFRAVTTCRLPLTNPCDTEQTKKKFSEPGAECTDSSGTPPEFLLRSYTRRGRSRMGAKLPGTPPELSLTLYQSLMYKRYNRASYNLAQSCVLEMRVSYSFYRQV

SEQ ID NO: 158494 - protein, 1825 aa, Oryza sativa
  Clone ID: PAT_MRT4530_57964C.1.pep
MAEQGKAHDLSPSVSGDDGEPNPRRRARTPPPPPRQSPKQGEALQRVDKSVASPVAGDAGERRDGERRLLVYGDGSTPQGALQAAGALLRHPPVVHDPESPAQRWLEDVANLVMTAQQRLGAGGRSATTKTSGAATTGSVSSRRRARRAAAAARHSAATPSSTPSTREDQHGEPDARLNVERRRNSRRTPRATEGASSSRVSPRHGREDQPSVPPAGGVGCRAFVASLRNVRWPPRFRPTITEKYDGSVNPTEFLQVYTTGIEAAGGDDRVMANFFPMALKGQARGWLMNLPPASVHSWEDLCQQFTMNFQGTYPRPGEEADLHAVQRGDDESLRSYIQRFCQVRNTIPCIPAHAVIYAFRGGVRHNRMLEKIASKEPQTTAELFQLADRVARKEEAWTWNSSGSGVAASAAPGSAAQTGRRDRRRKKRPDRSGDEGHVLAVEGAPRATRKGRPASDKKNEAGTPSKERLAGRWCSVHNTSLHDLADCRAVKNLAERTRKWEEDRRQERREGKSPAVPSGKRRSEAKQKAPAVDIDDGDDDLGFQEPGATIATVDGGACAHVSRRSFKAMKRELLAMAPTHEAMRRARWSEVALTFDQTDHPPCIARGGQVAMVVSPTICNVKLGRVLIDGGAALNILSPAAFDAIKASGMVLQPSQPIIGVTPGHTWPLGHIDLPVTFGGPANFRTERVSFDVADLSLPYNAVLGRPALVKFMAAVHYAYLQMKMPGPGGPISVRGDLKVALACMEQRADRLAAASKPEGGDERLGPSAPTAPRQRMATCDEVPEDALVSFLRANADVFAWRPADMPGVPREVIEHRLAVRPGARPVRQKVRRQAPERQAFIREEVARLLEAGFIREVIHPEWLAKPVVVPKANGKLRMCIDYTDLNKACPKDPYPLPRIDQIVDSTAGCDLLCFLDAYSGYHQIRMAREDEEKTAFITPVGTYCYTSMPFGLKNAGPTFQRTTRISLGSQIGRNVEAYVDDLVVKTRNQETLLSDLAETFENLRSARIKLNPDKCVFGVPAGKLLGFLVSARGIEANPEKIRAIERIRPPSKLRDVQCVTGCMAALSRFISRLGEKALPLFKLLKRSGPFVWTEEAEHALTQLKAYLSSPPVLVALEPNEPLLLYLAATPQVVSAALAVERDEDNPHSAHPHPVLTWPGSKQGGEAPEPNGGLRPLTTGVDPLPARQTVLGAPDPQEGPEATAGRPHLSPSDPEANPVPIRPGREQGEEAPEPNGGLRPLTTGVGPLPACPMTPGAPDPQDGPEATVGKPLLSSSDPEVIGTEDECAPRGHSDEERPGGTDPSEEDRPRRKVQRPVYFVSEALRDAKTRYPQAQKMLYAILMASRKLRHYFQAHRVTVVTSYPLGQILHNREGTGRVVKWAIELSEFDLHFEPRHAIKSQALADFVAEWTPAPETVSIPEASTNPSQLPHTAHWVMQFDGSLSLQGAGAGVTLTSPNGDVLRYMVRLDFRATNNMAEYEGLLAGLRVAAGLGIRRLLVLGDSQLVVNQVCKEYRCSDPQMDAYVRQPAQALQIIPLSWPFAVWGLDILGPFKRAPGGFEYLYVAIDKFTKWPEAYPVVKIDKHSALKFIKGITARFGVPNRIITDNGTQFTSELFGDYCEDMGIKLCFASPAHPRSNGQVERANAEILKGLKTKTFNILKKHGDSWIEELPAVLWANRTTPSRATGETPFFLVYGAEAVLPSELTLRSPRATMYCEADQDQLRRDDLDYLEERRRRAALRAARYQQSLRRYHQHHVRARSLCVDDLVLRRVQTRAGLSKLSPMWEGPYRVIGVPRPGSVRLATGDGTELPNPWNIEHLRRFYP

SEQ ID NO: 158495 - protein, 2017 aa, Oryza sativa
  Clone ID: PAT_MRT4530_57965C.1.pep
MAEQGKAHDLSPSVSGDDGEPNPRRRARTPPPPPRQSPKQGEALERVDKSVASPVAGDAGERRDGERRLLVYGDGSTPQGALQAAGALLRHPPVVHDPESPAQRWLEDVANLVMTAQQRLGAGGRSATTKTSGAATTGSVSSRRRARRAAAAARHSAATPSSTPSTREDQHGEPDARLNIERRRNSRRTPRATEGASSSRVSPRHGREDQPSVPPAGGVGCRAFVASLRNVRWPPRFRPTITEKYDGSVNPTEFLQVYTTGIEAAGGDDRVMANFFPMALKGQARGWLMNLPPASVHSWEDLCQQFTMNFQGTYPRPGEEADLHAVQRGDDESLRSYIQRFCQVRNTIPCIPAHAVIYAFRGGVRHNRMLEKIASKEPQTTAELFQLADRVARKEEPWTWNSSGSGVAASAAPGSAAQTGRRDRRRKKRPDRSGDEGHVLAVEGAPRATRKGRPASDKKNEAGTPSRERLAGRWCSVHNTSLHDLADCRAVKNLAERTRKWEEDRRQERREGKSPAVPSGKRRSEAKQKAPAVDIDDGDDDLGFQEPGATIATVDGGACAHVSRRSFKAMKRELLAMAPTHEAMRRARWSEVALTFDQTDHPPCIARGGQVAMVVSPTICNVKLGRVLIDGGAALNILSPAAFDAIKAPGMVLQPSQPIIGHIDLPVTFGGPANFRTERVSFDVADLSLPYNAVLGRPALVKFMAAVHYAYLQMKMPGPGGPISVRGDIKVALACMEQRADRLAAASKPEGGDERLGPSAPTAPRQRMATCDEVPEDALVSFLRANADVFAWRPADMPGVPREVIEHRLAVRPGARPVRQKVRRQAPERQAFIREEVARLLEAGFIREVIHPEWLANPVVVPKANGKLRMCIDYTDLNKACPKDPYPLPRIDQIVDSTAGCDLLCFLDAYSGYHQIRMAREDEEKTAFITPVGTYCYTSMPFGLKNAGPTFQRTTRISLGSQIGRNVEAYVDDLVVKTRNQETLLSDLAETFENLRSARIKLNPDKCVFGVPAGKLLGFLVSARGIEANPEKIRAIERIRPPSKLRDVQRVTGCMAALSRFISRLGEKALPLFKLLKRSGPFTWTEEAKHALTKLKTYLSSPPVLVAPEPNEPLLLYLAATPQVVSAALAVERDEDNPHSAHPHPVLTWPGSKQGGEAPEPNGGLRPLTTGVGPLPARQTVLGAPDPQEGPEATAGRPHLSPFDPEANPVPIRPGREQGEEAPEPNGGLRPLTTGVGPLPACPMTPGAPDPQDGPEATVGRPLLSSSDPEVIGTEDECAPRGHSDEERPGGTVPSEEDRPRRKVQRPVYFVSEALRDAKTRYPQAQKMLYAILMASRKLRHYFQAHRITVVTSYPLGQILHNREGTGRVVKWAIELSEFDLHFEPRHAIKSQALADFVAEWTPAPETVSIPEASTNPSQLPHTAHWVMQFDGSLSLQGAGAGVTLTSPNGDVLRYLVRLDFRATNNMAEYEGLLAGLRVAAGLGIRRLLVLGDSQLVVNQVCKEYRCSDPQMDAYVRQVRRMERHFDGIELRHVPRRDNMIADELSRLASSRAQTPPGAFEERLTQPSARPDPLGETDAPDRPPRPVGVQASGPEGSAPSSFRLIAWISEIQTYLADKTLPEDREGSERVQRISKRYVLVEGTLYRRAANGILLKCIPQEQGIELLADIHEGECGAHSASRTLVGKAFRQGFYWPTALNDAVDLVRRCRACQFHAKQIHQPAQALQIIPLSWPFAVWGLDILGPFKRAPGGFEYLYVAIDKFTKWPEAYPVVKIDKHSALKFIKGITARFGVPNRIITDNGTQFTSELFGDYCEDMGIKLCFASPAHPRSNGQVERANAEILKGLKTKTFNILKKHGDSWIEELPAVLWANRTTPSRATGETPFFLVYGAEAVLPSELTLRSPRATMYCEADQDQLRRDDLDYLEERRRRAALRAARYQQSLRRYHQRHVWARSLCVDDLVLRRVQTRAGLSKLSPMWEGPYRVISVPRPGSVRLATGDGTELPNPWNIEHLRRFYP

SEQ ID NO: 158496 - protein, 132 aa, Oryza sativa
  Clone ID: PAT_MRT4530_57966C.1.pep
MGVVLATEALFMAAVALGVLLGAHTHQRRSLIVGILCVIFGTIMYSSPLTIMSQVVKTKSVEYMPLLLSVVSFLNGLCWTSYALIRFDIFITIPNGLGVLFTLMQLILLSCKDDDINGSTASHVIINITKEP

SEQ ID NO: 158497 - protein, 262 aa, Oryza sativa
  unsure (1)..(262): unsure at all Xaa locations
  Clone ID: PAT_MRT4530_57967C.1.pep
GSFAKTTFSKHLRERTHEPSQRRKRQARRQTTNDDGRRRGGRRRRLGRRWRRSSGDRRRRGEGGRGSSPPCAPNGSEGKRRRRRNRRRDLAEGWPAAAAGWVVWRRRYKARETTGEGANERGGLGGALYRLGLKRSDSKREESKPENKNSVLEINSKTSLIWIKYPTICSDSWGXKIEENERIKTPQKSGRNGVGLERIWRRKGDAARGSGSARQPAGGEVVMIKEQELSAASKSISGSRADYSIFAKAVAGFTVHQSGDPL

SEQ ID NO: 158498 - protein, 2074 aa, Oryza sativa
  Clone ID: PAT_MRT4530_57968C.1.pep
MAEQGKAHDLSPSVSGDDGEPNPRRRARTPPPPPRQSPKQGEALERVDKSVASPVAGDAGERRDGERRLLVYGDGSTPQGALQAAGALLRHPPVVHDPESPAQRWLEDVANLVMTAQQRLGAGGRSATTKTSGAATTGSVSSRRRARRAAAAARHSAATPSSTPSTREDQHGEPDARLNIERRRNSRRTPRATEGASSSRVSPRHGREDQPSVPPAGGVGCRAFVASLRNVRWPPRFRPTITEKYDGSVNPTEFLQVYTTGIEAAGGDDRVMANFFPMALKGQARGWLMNLPPASVHSWEDLCQQFTMNFQGTYPRPGEEADLHAVQRGDDESLRSYIQRFCQVRNTIPCIPAHAVIYAFRGGVRHNRMLEKIASKESQTTAELFQLADRVARKEEAWTWNSSGSGVAASAAPGSAAQTGRRDRRRKKRPDRSGDEGHVLAVEGAPRATRKGRPASDKKNEAGTPSRERLAGRWCSVHNTSLHDLADCRAVKNLAERTRKWEEDRRQERREGKSPAVPSGKRRSEAKQKAPAVDIDDGDDDLGFQEPGATIATVDGGACAHVSRRSFKAMKRELLAMAPTHEAMRRARWSEVALTFDQTDHPPCIARGGQVAMAVSPTICNVKLGRVLIDGGAALNILSPAAFDAIKAPGMVLQPSQPIIGVTPGHTWPLGHIDLPVTFGGPANFRTERVSFDVADLSLPYNAVLGRPALVKFMAAVHYAYLQMKMPGPGGPISVRGDLKVALACMEQRADRLAAASKPEGGDERLGPSAPTAPRQRMATCDEVPEDALVSFLRANADVFAWRPADMPGVPREVIEHRLAVRPGARPVRQKVRRQAPERQAFIREEVARLLEAGFIREVIHPEWLANPVVVPKANGKLRMCIDYTDLNKACPKDPYPLPRIDQIVDSTAGCDLLCFLDAYSGYHQIRMAREDEEKTAFITPVGTYCYTSMPFGLKNAGPTFQRTTRISLGSQIGRNVEAYVDDLVVKTRNQETLLSDLAETFENLRSARIKLNPDKCVFGVPAGKLLGFLVSARGIEANPEKIRAIERIRPPSKLRDVQCVTGCMAALSRFISRLGEKALPLFKLLKRSGPFTWTEEAEHALTQLKAYLSSPPVLVAPEPNEPLLPGGEAPEPNGGLRPLTTGVGPLPARQTVLGAPDPQEGPEATAGRPHLSPSDPEANPVPIRPGREQGEEAPEPNGGLRPLTTGVGPLPACPMTPGAPDPQDGPEATVGRPLLSSSDPEVIGTEDECAPRGHSDEERPEGPLGRRTPRGATRTKNAPVYFVSEALRDAKTRYPQAQKMLYAILMASRKLRHYFQAHRIAVVTSYPLGQILHNREGTGRVVKWAIELSEFDLHFEPRHAIKSQALADFVAEWTPAPETVSIPEASTNPSQLPHTAHWVMQFDGSLSLQGAGAGVTLTSPNGDVLRYLVRLDFRATNNMAEYEGLLAGLRVAAGLGIRRLLVLGDSQLVVNQVCKEYRCSDPQMDAYVRQVRRMERHFDGIELRHVPRRDNMIADELSRLASSRAQTPPGAFEERLTQPSARPDPLGETDAPDRPPRPVGVQASGPEGSAPSSFRLIAWISEIQTYLADKTLPEDREGSERVQRISKRYVLVEGTLYRRAANGILLKCIPQEQGVELLADIHEGECGAHSASRTLVGKAFRQGFYWPTALNDAVDLVRRCRACQFHAKQIHQPAQALQIIPLSWPFAVWGLDILGPFKRAPGGFEYLYVAIDKFTKWPEAYPVVKIDKHSALKFIKGITARFGVPNRIITDNGTQFTSELFGDYCEDMGIKLCFASPAHPRSNGQVERANAEILKGLKTKTFNILKKHGDSWIEELPAVLWANRTTPSRATGETPFFLVYGAEAVLPSELTLRSPRATMYCEADQDQLRRDDLDYLEERRRRAALRAARYQQSLRRYHQRHVRARSLCVDDLVLRRVQTRAGLSKLSPMWEGPYRVIGVPRPGSVRLATGDGTELPNPSLVLNLALGGSVRSAKIAKRGPEPSRAPGHGELRGGIGKNPQSGHPYPSVTTFPAWPVSTCGSPQALAPTRAIQGHEPLFQAKTQKDHGTDHPHL

SEQ ID NO: 158499 - protein, 212 aa, Oryza sativa
  Clone ID: PAT_MRT4530_57969C.1.pep
MVSPDLIRNMVGIVGNIISFGLFLSPVPTFYRIIKNKDVQDFKADPYLATLLNCMLWVFYGLPIVHPNSILVVTINGIGLVIEAVYLTIFFLFSDKKNKKKMGVVLATEALFMAAVVLGVLLGAHTHQRRSLIVGILCVIFGTIMYSSPLTIMSQVVKTKSVEYMPLLLSVVSFLNGICWMSYALIRFDIFITIPNGLGVLFTLMQLILLSW

SEQ ID NO: 158500 - protein, 92 aa, Oryza sativa
  Clone ID: PAT_MRT4530_5796C.1.pep
LQALLHVQVGVETKGNPKHAFPSKKTSRPNETQSDSDLPVRSATHRRSDRPSTGGLTAQHTAVRPAHSEETGRLPNLVSPLNPLRILTESPL

SEQ ID NO: 158501 - protein, 117 aa, Oryza sativa
  Clone ID: PAT_MRT4530_57970C.1.pep
NACGRTEGVTLVGIQVAKRGCKQKDGGVKEETTDDDTHLDIYQDSFNLTPADSVLATPPAADYRPLVALPPVSSKKPSSTTKLGGYPAGLEGHLKCHILLSPLVSYSEMMLGDGTSN

SEQ ID NO: 158502 - protein, 149 aa, Oryza sativa
  unsure (1)..(149): unsure at all Xaa locations
  Clone ID: PAT_MRT4530_57971C.1.pep
MLLERRLQLAGARVAVAGAGATTVACERGLERRRALERQRLREGEGGGGGGVWRGPKWQRPARGGHWSVHHPLPLRLATSXSISVSSAIEFHTLYYHIKTTKRVRWIRREVHRRHGGGRDDPGRKGRGHHLRVAKMERTRTSFLEQAAQ

SEQ ID NO: 158503 - protein, 76 aa, Oryza sativa
  Clone ID: PAT_MRT4530_57972C.1.pep
MVGLIGGDLPGGRRATRYQGRISGAKKKSSSSVVVDSLPASIRAGQVNKPRSTSPEPATPVRSRVAIRAIPTGKGH

SEQ ID NO: 158504 - protein, 151 aa, Oryza sativa
  Clone ID: PAT_MRT4530_57973C.1.pep
MEVSKPFPFVAMLFLSPAGLVTASLLHRAPKSPTPSLYSFPCVDFDIRALLPPSITSTTLLLALCRLGPLRPSPFPSPSLPLRLPSPPLPPILAVAAHSQTGPARAPPHGAPWPPPPPPLMPVANPGSRLLPASPHSSSSAPTPSVFALPA

SEQ ID NO: 158505 - protein, 136 aa, Oryza sativa
  unsure (1)..(136): unsure at all Xaa locations
  Clone ID: PAT_MRT4530_57974C.1.pep
SRLAPLAIKRTKAEKKAAYDKKLWPLLDEYTNVLIDDVDNVGSNHLHEIRKGLMSDSIALMVNNTLIRRCIKEHADHTVYRELLELMPLLVGNVGLIFTKGDLKEVXEEVDEHKVVAPARVGLAAPDDVAVPPADT

SEQ ID NO: 158506 - protein, 117 aa, Oryza sativa
  Clone ID: PAT_MRT4530_57975C.1.pep
TTPRRGTSSAPRRLRATRGRRGWGRRAHLQRGRCRVVAAVPLPRGPRGRRPGGEPARRSSQPPARAPPLPAARPPLHPPPSRRPSPPSPSPRRPSPAAGHRRPPPPASYFCAWRTIL

SEQ ID NO: 158507 - protein, 67 aa, Oryza sativa
  Clone ID: PAT_MRT4530_57976C.1.pep
GRAHQVSEGGSDMEPKKRLASPRHRRNRHPKLPVWFRLFQWGSDLETSNGSGISQKGKARLTKEDQA

SEQ ID NO: 158508 - protein, 37 aa, Oryza sativa
  Clone ID: PAT_MRT4530_57977C.1.pep
QQWRQVQDGDCDVVVGTINHPPDCNCRHCQPQVFANL

SEQ ID NO: 158509 - protein, 102 aa, Oryza sativa
  Clone ID: PAT_MRT4530_57978C.1.pep
MWIRRGGVGEDPWASWHTWRSPDVADPHGLGDPVAEEDEVDPADEEFFQEQVNLERHGLVPVGTSSGRDTKSLRYLLGAPDKSMSEEIECDSSSCFALLDRG

SEQ ID NO: 158510 - protein, 50 aa, Oryza sativa
  Clone ID: PAT_MRT4530_57979C.1.pep
TLHKNIIKTLGLLSIDHTVIKLCIICSSTPHQEKFKVFHFLILLNTSFTY

SEQ ID NO: 158511 - protein, 201 aa, Oryza sativa
  unsure (1)..(201): unsure at all Xaa locations
  Clone ID: PAT_MRT4530_5797C.1.pep
PGRETVRGDDGGGPELGGDCGERERRRVLESGEEEGGREAETDGGGAGRVXIRLEGGEGGRGGRKPARRFRAPSMAPAGLGEGFQTNPRERGRENWGERERESRGVFPPTLLHAGTAGCGGFGGGGGAXARAERRERREVGDDGWAPPVSEGGGRARPSAARAWGGRPTGPRGRGERERXGERWAGPAQGRGGGLLEFFFL

SEQ ID NO: 158512 - protein, 96 aa, Oryza sativa
  Clone ID: PAT_MRT4530_57980C.1.pep
LCVDEDGAGAQPGVRRWLLPWPQVTLLKLTIWASGISSCSGTGGEHKSGSRNRIPQPADMHDFCSFNSSSFTAHLPPNPSLSLLSSLPSKPSSREH

SEQ ID NO: 158513 - protein, 106 aa, Oryza sativa
  unsure (1)..(106): unsure at all Xaa locations
  Clone ID: PAT_MRT4530_57981C.1.pep
FFFFFFFLCKMNSSSNNWIEVQRKKEKNLGGQLVISPFNPVFCNLVTKWENRIGXGKIVTMGFKKERKTERXKXRXTKEPKKANFQNSFGPRTSFXWEGGFWIRIR

SEQ ID NO: 158514 - protein, 75 aa, Oryza sativa
  Clone ID: PAT_MRT4530_57982C.1.pep
MAPGARSAARPGSTRKSRSASTAAEELNVTAAPHSVLVRRQCPTPDPAGGWTHLIIYFADLDLSTMAIRDRGDSW

SEQ ID NO: 158515 - protein, 620 aa, Oryza sativa
  Clone ID: PAT_MRT4530_57983C.1.pep
MAAEAPPSSSTSSSAGPPAAAGSSGGGAAASPDSYIGSLISLTSKSEIRYEGILYNINTEESSIGLRNVRSFGTEGRKKDGVQIPASTKVYEYILFRGSDIKDLQVKSSPPPPPPPQPAAPHNDPAIIQSHYSQPASASSSLPSAGSAVLPDLSSQAAQYGLQRPSFQSNIPLYQPGSVPWGSSAPPSAGNASGLSVPPMYWQGYYPPGGLPPHLQQPPLLQPGLSVPQGLQYAGLNPTLSSGPQKLSELQPPLLQPPGTTQGPSSGILPTTTAPSSANLLSPETSKPLLPNMGPLFTPPVPSVGATLPLASLPTSIAESSAMAPHNFSSLVSNKTADIPGSTLAYQSVSQAVSSTVASSSSAHMDMPVPLLASSGQLLQNAPSMLSSSQSMQTPLQMSSKDFKAVESKTRVVEPLLPDPPSRALPENNEPILPLPKQTPQKYNGAGSHSNHHYRGRGRGRGSAFSQSVTNFTEEFDFMAMNEKFNKDEVWGHLGKKSHSRDKDGELGDDVFDEDLEDEETENPELAAKPVYVKDDFFDSLTSGTFGRGGQNGRSRFSEQRKLDTETFGDFPRHRQPYRGGGRGYRGGGRARGSYYGGRGYGSMGARGGQGNSYPHRGSY

SEQ ID NO: 158516 - protein, 51 aa, Oryza sativa
  Clone ID: PAT_MRT4530_57984C.1.pep
WLRPYHSHTVSCMSLRKMHLHITLHFSPWCRLRYIQYCSLAYQLNNSGRVG

SEQ ID NO: 158517 - protein, 110 aa, Oryza sativa
  Clone ID: PAT_MRT4530_57985C.1.pep
MMRRRRKGEETATGVGPAVGGGPVSLARGVPRDTGRGGEEARGRRARDAGEGEDSAYVWRVVARRGAKRVDPRGGIVPRHGTATDAAYPGPPTDEGYYDCNFRSYSAADG

SEQ ID NO: 158518 - protein, 142 aa, Oryza sativa
  Clone ID: PAT_MRT4530_57986C.1.pep
MAQRPCVDVRRSHKWLDNAGTTDGQRQRASSSVSAWAPSGCIGRLNLSDHHHRTPTKSFALVPGADNCNTTTPPSSRPTRYAAEWGDRPRHSQRTGAGEAGGDEAEIGGDAGDKDHAGSCLCGLGATMTQATPDRWRRDGDG

SEQ ID NO: 158519 - protein, 213 aa, Oryza sativa
  Clone ID: PAT_MRT4530_57987C.1.pep
MKSAQQAQPKKQLSAMIQQPYIVYRGGERGTHHSGGEEPLDESRGEEVRAGLTPWSLELRATMTDDGVGVGGVGGGRRGWRPTRGRPWRGGPCRSRRWRATAAALAGGRRWIRRRRLQQIGGRGGVRIQPMLWVLGTECVVMHVNKWTKNDSYLKKLADAMNGVLPMPGMNLAGTDVPTPGVTTPAPARDECLETLIIPMGRGETSVRPPVAT

SEQ ID NO: 158520 - protein, 82 aa, Oryza sativa
  unsure (1)..(82): unsure at all Xaa locations
  Clone ID: PAT_MRT4530_57988C.1.pep
RVISYYYWRLPSPRRLVEVLPGDLSEEIVQEARRRXVSGLEFTTFEVKEELPLVIEVWVVLSVDRLPPCPPLDEGGVRWLRG

SEQ ID NO: 158521 - protein, 191 aa, Oryza sativa
  Clone ID: PAT_MRT4530_57989C.1.pep
PPHPSLPSPSLAVSLSTLPAADSPNRHHRAATDLESPGSSSPPSRIGTTRRGPCRQRRHQSPPRPLPRRSSPRTHDLASAVSSVARSLSSYVPPASPAPVRCECRGLSPHSAAYRVGREEGGVVVLQLSAPGTSANDLVGVRWWWSDKFSRPMHPLGAQADTEEEALCRWPSVVPALSSHLWLRRTSTQGR

SEQ ID NO: 158522 - protein, 1790 aa, Oryza sativa
  Clone ID: PAT_MRT4530_5798C.1.pep
MSYYVDPRTSVPQYPLYPVYGYPPSTVARQVGGLGAQGSTTMTSSFVDNSVNTNLNQGVPTSTTLVWTQVGEIVFPVYTTVLISAGPPMAENENAVATTRDDSMSKDPPAEAEIGTSTTSEPEKDPSAAKPCLSDRNHEPTRITSEVTRSWCPIHKTRKHTLQACWVFLNVYAEIRACKECGIQRTSPTRDVYCPIHKTKNHDLSSCKVFLSAMKMPPPKVQQSRIPLRDEDKEQGATPISDRFVGVIDIDPHEPSVLHLLEDYGSSTTSMPREVLAIDDVGTSARTNSEAENQVTTPAQHIRAVNEILRETPYDPVLNNDLARWTERLRESVTNLSNAFEEAAAAAHPEQPPTGDANGENPEHRESPHRATPPPRGTGDLRDHLNGRREVRRTRDNENHSRHRVSSRRHDNEDRGGRSSEDRGHDNRHNRRDHDDRERRVLGDTGRGRRHNDDDDGDRRRDNNGRRQQGSLEPGRRPRNRTPEPSDPSSSSSSSSSSSSDRHPRRTYDRRQPTAPSAGCRAFGRSLRDVRWPERFRPRAIEKYDGSTDPEEFLQVYSTNPGESLRDYVRHFNECRNTIPEITDASVIRAFKSGVRDCYTTQELAMRHVTTTWRLFEIVDRCAHADDALRRKNDKPKTRGEKKPAKDAPESSKKKNRKSGKRKAQAEVLATEYVDPPKRPDPQGSDAKKIWCPIHKSDRHSLEDCLVFKKSLAKHMALEKGKRVRVVEKDAEAVTQESDSAYPDSDQHIQTPISMFRTSSEEAAPKMKWSEQKIVFSEEDHPKTAIIPGRYLIVVEPTIRNIKVARVLIDGGSSINLLFASALDAMGIPRSKLTPTDQPFHGITPQSSSKPLGKITLPVTFGQANNFRTEQITFDVAEFDTAYNAIIGRIALAKFMAASHYTYQVLKMPGPKGTITILGNTKLAIQCDKRSLDMVEHTPSPPATAEPPKKPSDMPGVPREVIEHKLMVRPDAKPVKQKLRRFAPDRKQAIQEELDKLLKAGFIREVLHPEWLANPVMVWKANGKWIMCVDFIDLNKACPKDHFPLPQIDQLVDSTAGFMAKEDDEKTAFITPFGVFCYVKMPFGLITAGNTFQRTVQGALSDQLENNVEAYVDDIVVKTKTSDSLIDDLRETFDNLRQYRLMLNPEKCTFGVPSGKLLGFLVSGRGIEANPGKIKAIENMKSPTRLKEVQKLIGCMAALSRFVARMGDRGQPFFALLKKQDKFVWTQEAEEAFIALKRYLSNPPVLVAPQPNAELFLYITATPYSVSTVIVVEREKVQRPVYYVSEALHDAKTRYPQIQKLLYAVIMTSRKLRHYFQAHRVTVVSSFPLGEVVRNKDVVGRIAKWVVELSQFDVRFVPRTAIKSQLSDNQIHNETWTMAFDGALNSQGAGAGFILTSPSRDQFKHAIHLNFRATNNTAEYEGLLAGIRATAALGVRRLIVKGDSELVANQVHKDYKCSSPELSKYLAEVRKLEKRFDGIEVRHVYRKDNIEPDDLAQRASRREPLEPDTFLDILTRPSVKEASGEGSEELPEDDAEAKKISRKAKVYCMIGNDLYKKAPNGVLLKCVFSDDGRHLLLHIYEGICGSHAADRTLVGKAFRQGFFWPSALKDAWDMVQRCEAYQFHSKHTRLSPQALQTIPLTWPFSCWGLDILGPFPRGQGGYRFLFVAIDKFTKRIEATPTGEIKADNAIKFIKGIFCRFGLPHRIITDNGSQFISADFQDYCIRLGVKICFASVSHPQSNGQVERANGIVLQGIKTRVYDRLMSHDKKWVEELPSVLWVVRTTPTTSNK

SEQ ID NO: 158523 - protein, 435 aa, Oryza sativa
  unsure (1)..(435): unsure at all Xaa locations
  Clone ID: PAT_MRT4530_57990C.1.pep
MASEKHFKYVILGGGVAAGYAAREFAKQGVKPGELAIISKEAVAPYERPALSKGYLFPQNAARLPGFHVCVGSGGERLLPEWYSEKGIELILSTEIVKADLASKTLTSAVGATFTYEILIIATGSSVIKLSDFGTQGADSNNILYLREVDDADKLVAAIQAKKGGKAVIVGGGYIGLELSAALKINDFDVTMVFPEPWCMPRLFTADIAAFYESYYTNKGVKIVKGTHWSRTDADAEDHVTXVTMVIPVPWCMPRLFMVVGAAFYESYYTNKGVKIVKGTVAVGFYADXESGVYAVGDEEWHXMKTDIVVRSVGHIPHARKSAEQAVKAIKGKESGESVVEYDYLPYFYSRSFDLGWQFYGDNVGDTILFGDSDPTSAKPKFGSYWIKDGKVLGAFLEGGSPDENKAIAKVAKTQPPVANIEELKKEGLQFASKI

SEQ ID NO: 158524 - protein, 447 aa, Oryza sativa
  Clone ID: PAT_MRT4530_57991C.1.pep
MASEKHFKYVILGGGVAAGYAAREFAKQGVKPGELAIISKEAVLLLTGTIPVLVVAPYERPALSKGYLFPQNAARLPGFHVCVGSGGERLLPEWYSEKGIELILSTEIVKADLASKTLTSAVGATFTYEILIIATGSSVIKLSDFGTQGADSNNILYLREVDDADKLVAAIQAKKGGKAVIVGGGYIGLELSAALKINDFDVTMVFPEPWCMPRLFTADIAAFYESYYTNKGVKIVKGTVAVGFDADANGDVTAVNLKNGSVLEADIVVVGVGGRPLTTLFKGQVAEEKGGIKTDAFFETSVPGVYAVGDVATFPMKMYNELRRVEHVDHARKSAEQAVKAIKGKESGESVVEYDYLPYFYSRSFDLGWQFYGDNVGDTILFGDSDPTSAKPKFGSYWIKDGKVLGAFLEGGSPDENKAIAKVAKTQPPVANIEELKKEGLQFASKI

SEQ ID NO: 158525 - protein, 163 aa, Oryza sativa
  Clone ID: PAT_MRT4530_57992C.1.pep
PLGPKDGQPRVNCQPPNVWVFSLVVGKKSTVGAESFTRCALGIVWTWKPHVKVKKCQTLDAKPRAPYGRPQHATATRPQRLGAAKHTQQGATVRTHRPQRRAPGKTQHSAQPSTAEAAHMCRNRQPGLECHSGSDLIRAGHCKWQSAILPRSTGDPAPLRTDS

SEQ ID NO: 158526 - protein, 48 aa, Oryza sativa
  Clone ID: PAT_MRT4530_57993C.1.pep
MPSFAAAGSIRCFPGPPRSLADIACMHARSLCDAVPSLMIRASRPAGR

SEQ ID NO: 158527 - protein, 81 aa, Oryza sativa
  Clone ID: PAT_MRT4530_57994C.1.pep
RSICASSALAQRPTPGGLRRLPSPGRRGLSQGRRMSKPAQWTARVRHKNSAIRRSTSAARAGRIKLAVRHVRVWFGLWKWG

SEQ ID NO: 158528 - protein, 143 aa, Oryza sativa
  unsure (1)..(143): unsure at all Xaa locations
  Clone ID: PAT_MRT4530_57995C.1.pep
LRHPPINSEPETPVQRWLDNMTNLVTTAQRXQAAGGRPAASGTSRXPTALSSSARRRARRSALTSRWSTAPTSSRISGSRGRHGGLYXRDARINIEQHRDEHWAARMGXGASCRAFQASLQXVRWPPKFPPNLTEKYDGSTII

SEQ ID NO: 158529 - protein, 458 aa, Oryza sativa
  unsure (1)..(458): unsure at all Xaa locations
  Clone ID: PAT_MRT4530_57996C.1.pep
MVEVLEEEVVAHTPTPSGSDDASGSRGPHHRRNNSPTPAHRDPPTEGGXLSPPPRGEKPRSVGARGRLTYGNGGSSRGALXAAGALLRHPPINSEPETPVQRWLDNMTNLVTTAQRXQAAGGRPAASGTSRXPTALSSSARRRARRSALTSRWSTAPTSSRISGSRGRHGGLYXRRDARINIEQHRDEHWAARMGXGASSSGVPRFFTRGGPPLTFTXLGGTSCRAFQASLQXVRWPPKFPPNLTEKYDGSTIIMMRGATTRXHGEYFPMALKGQVRGWLMTQPPDSIHSWEDLCQQFITNFQGTYPRPGEEADLHAIQRKDDESLRSYIQRFCQVRNTIPCIPAHAGVYVFXNGVRHNCMLEKIASKEPKTIAEHFELADKVARKEEAWAWNSPGTGAAAAAAPEPXPPPPRGKRKPAHSDDEGHVLCGRWAFWAPCKERATRNKPSSTLPNGAGQE

SEQ ID NO: 158530 - protein, 65 aa, Oryza sativa
  Clone ID: PAT_MRT4530_57997C.1.pep
TSNSSCEILIKYSFAWMNIVEEYCYIFHIFDLLQLLAGYFLEKGIILPPLYIQLNICYIVNLALK

SEQ ID NO: 158531 - protein, 94 aa, Oryza sativa
  Clone ID: PAT_MRT4530_57998C.1.pep
SSSGSSWRRPTRRHYPTTPSTTTQQARRRRAPPPPPPPPPPPHATGRRRRSSRRRSPRCTASSPPRWRPGGACAPSATRGGASAPSSPPPCWSP

SEQ ID NO: 158532 - protein, 78 aa, Oryza sativa
  Clone ID: PAT_MRT4530_57999C.1.pep
PRRVSRYFPGQGFLGHKGAGVGGFRPRRRRRPRFRFRGRGSPRAVLLQGRFKGVGGRINFHNKMNFLNRVFWTWELFK

SEQ ID NO: 158533 - protein, 63 aa, Oryza sativa
  unsure (1)..(63): unsure at all Xaa locations
  Clone ID: PAT_MRT4530_5799C.1.pep
MSDKCGNCDCADKNQCVKKGXSYGVXXXEAEKXHFXXVAXGXXNGGCKXCGTXCSCTDCKCGK

SEQ ID NO: 158534 - protein, 75 aa, Oryza sativa
  Clone ID: PAT_MRT4530_579C.1.pep
MDRRVAMEDGCRGAFGGRGWGGLEEQLSANGYAMQKFSFALLLAQCTQAERRHYGIGTLVPHGIEKRASTFALTA

SEQ ID NO: 158535 - protein, 81 aa, Oryza sativa
  Clone ID: PAT_MRT4530_57C.1.pep
VPGADYASCQRSDTLNSSQSCIICTETLSRQAEKYTYVGFCFRRLHTDQQISLALLNVEALGWSQFTFRSCSHINSYVTSF

SEQ ID NO: 158536 - protein, 318 aa, Oryza sativa
  Clone ID: PAT_MRT4530_58000C.1.pep
MATLLSPSPASGSSSSSDGGGARRLSELLEEQQEPFSLHLFLLDKGCSPALLDAACWPAAARAMRRRRRRPASALLSVILSKFLPRGAAAAKKVGGKRQQQQQPAAAAAIGEDDMEDEEEEEEEKQLSPVSVLEQSPFQPPASPAYSKSKQTCTLTSRLLRLRRGGAIAAATWIAQSSLAPRTSSIAEAIVIFRELLAAAYTPALPDHPVNNHTASSPSTSSSSSSSSSAAASRYWEEEEKLEAEIAKVHGLIAAEMAAGWSVCPVGDARRRVGAELAAAVLESLTEEAAAALMLTWSNGRPRCDDDDDDDAIDDDAS

SEQ ID NO: 158537 - protein, 236 aa, Oryza sativa
  Clone ID: PAT_MRT4530_58001C.1.pep
GRTHRRLGETAPVRRHQAVKHGQLLAMVTTRGMAATASAAEGYEREREARIQENMERMQKLGIRDLANRFNQSATGFAGGGSWSGSDRWRRKVPVTAGPASPSPARRSLRLKSLDPVNYCEIRTRKGKDVEGGSSVPIEVGSEEEVNAEDAAPVAKEDQGHSEAIQDEDADHHQVNDPADDDGDEDDRESVVTSSSQDCEVNLEDIIGCATSSKPAGPKKRKLIERNPDYVLRELA

SEQ ID NO: 158538 - protein, 140 aa, Oryza sativa
  unsure (1)..(140): unsure at all Xaa locations
  Clone ID: PAT_MRT4530_58002C.1.pep
TPPDIDIRNXPRQTQSGACGGCXEGSSVISDLNEFVFEEXDYPIIGYLLMNKAXHRLHPTGXRAITCQIRGLNLYKNHSLHLFYLNLAYTLVPTISIPSKYHSRDLKYRQCCVAQRISRSYADMGLHSSKASRVPSHIKY

SEQ ID NO: 158539 - protein, 94 aa, Oryza sativa
  Clone ID: PAT_MRT4530_58003C.1.pep
LFTEHLVHQSLECCRRVREAQGHHKELVEAVGCAEYVIFAMFSSPHCCRPSSTCPCTVVHIMVGAVHEALVSVDGSSGGTLARTPGRAGPHRLH

SEQ ID NO: 158540 - protein, 399 aa, Oryza sativa
  Clone ID: PAT_MRT4530_58004C.1.pep
MARRLFSATRALLRAVPSPSPSSSAAAAAAAASLLPLLPCKRRRKLRKKLSSPRVAPIEPEAARRVPELDAVLDREAAFRFLARARSFLASLPPPHRIPLAEAGKLYRELGFPRGRSVSRAAARHPLLFHLPRVDSVPHLALTPLMCSLLEEERRLHDQLLPTRVRAVRKLLMLADHRRIPLAKLHHCRAVLGLPDDFRDRVREFPGDFRVAVDPDGRDVLELARWDPALAVSALERDFVVDERRVRRTFRFAVPHSRSMPLDAEDADRLDAATTFPLVSPYTSGALLRPWTPEAEKYRVGVVHEFLSLTLEKRALIHHIFEFKEELGLTRHMHASLRKQSRAFYLAGTEMNWAVFLRDAYGGDGDLREKDPLVLFNEKLRRYACMTKMDSSESIATAY

SEQ ID NO: 158541 - protein, 102 aa, Oryza sativa
  unsure (1)..(102): unsure at all Xaa locations
  Clone ID: PAT_MRT4530_58005C.1.pep
RXXMXXSNXXMTXYXXXXNGRXLXXIRAXXKVXPXLXXKKXXGGXRNPXPPKXNGKKTPGXHFTXSXXRKXSFXQXXXXWGXXPXXXRXXNKKXXXHCPPPP

SEQ ID NO: 158542 - protein, 227 aa, Oryza sativa
  Clone ID: PAT_MRT4530_58006C.1.pep
RSAANSLLQEIKKLGGIAIMHTLMACLHQTEPEHRVLAANLLLQLDMLDKPDGKSVFRDEAMEVLLDSLSSQENCTVQALAASFLCNLGGNYSWSGESYTAAWLAKKAGLTSTSHRNMIRNIDWVDPCLQDTEIGPWSSKSARTIIRTGVPVLRALAKGIQSKAKGTSHDCLVCAAWLGSELAALGENNMRYSACEILLHDIARHLHPRFELDERLLACMSLYTYTS

SEQ ID NO: 158543 - protein, 119 aa, Oryza sativa
  unsure (1)..(119): unsure at all Xaa locations
  Clone ID: PAT_MRT4530_58007C.1.pep
ARKASAYARTARVGDDGRNAWVFDVDETLLSNLPXYADHGYGLELFDHREFDKWVERGEAPAIPSSLKLYNEATPAINGATCWVSPRALAPSSFPIQCTIFHDGPEEGKRGRVRNAAFI

SEQ ID NO: 158544 - protein, 620 aa, Oryza sativa
  Clone ID: PAT_MRT4530_58008C.1.pep
MDRIAGRLAAVDGLYYPTTFLLADPPPSAPDRKAALLALLSRDAPLFLERYGGSLSRDELAAFDALAGDYEVGWHLRRLRAASEGGPSASRVRNRRRAYLDRLVREGEYFSEEAMREREPYLHHEYLGRFQDPTGRAMARPGERWSETLMRRAEEAVIVEKIRGEQIRRGVDPSEWVGGGAEEAMEEQEEEEEEEEEEEEEEEESEEEQGMDMEEKGRGADNSSENPSVTEVVDSNKTAGASKQTLSAEDMEDQLEQFTSLMQQKFLSGEDSEHMDYSRIDNDEMLDDHWSKEANYDAEEKPTSSSTPPISDAADPGGRSSFAPFIAMTRHAGARRRGGAGVVSLIVVVVAVLSAAAIAAEGVDAAVFDDAHLLPRPLVIELPTTTSSSSPALAEEGEGEAVPAEVRCASWRLAGEANNLAPWKSLPEECAAYVREYLTGVAYRSDLEVVAREASAYARTARVGDDGRDAWVFDVDETLLSNLPYYADHGYGLELFDHREFDKWVERGEAPAIPSSLKLYNEVRDLGIKTFLLTGRSEGHHGVTVDNLKKQGFHDWDKLILRAPADRKKTATIYKSEKRKEMEEEGYRILGNSGDQWSDLLGFSTSARSFKLPNPMYYIP

SEQ ID NO: 158545 - protein, 468 aa, Oryza sativa
  unsure (1)..(468): unsure at all Xaa locations
  Clone ID: PAT_MRT4530_58009C.1.pep
KKKENVGQELESLCQKALFLWTTSCYYVTDPEMSKGYXFYCPDRVKAKNVVFLENNEVWGSLHKREINLEXIRANVTQEIXEKNIPINLIPPIVPVTQTVXSTSENSGDTDSVENNNELNNDTKXTSETHNEXIPQERSQLLVIENEPLRISXRERRSDIPNYYEVYXGEGIGKIDDHSSFKEAITSEHSFKXLEALEDEKKIHEXNGLWDLVEIHRGAKIVGCKWVYKTMLDFKGKIKRFKARFITKXFFSQRDVIVYNETFSPISKKESFRIVMSLVAHNLGLYXINVKTAFLNGYLHXMYTWHNPIVLFWKARTIWLANLRNLSMNLNKRQXLAFVNGMLGRLISDSRIRSXKTLKKCRWRPEGHRYPATDRQQTLQDQAGNFIHTTTMIISPTPTITXVVQGTSYSTSTPATPADGIIEEMTRMAPMASNDDFNESRXIYMSRFININMNVENARMTYIVKRRE

SEQ ID NO: 158546 - protein, 195 aa, Oryza sativa
  unsure (1)..(195): unsure at all Xaa locations
  Clone ID: PAT_MRT4530_5800C.1.pep
PPRGAPLLPGPWTRSAVDRPPRVTAMRVPLASAAPRLDDVXPGIYCAINDLSSLIACLQCLLCMSLDSGSSDAPVYFEIVAEVPPAAEQGKSCLSLEHVDPILQMLYCKGGRDGXGWDLRRPMRLADSPRHERGLPAALRGVGVKPQSMSMCQMEVSPRSRLRPCRRGCLWSGVPGGSECQHCRLCTPAGPGRGF

SEQ ID NO: 158547 - protein, 137 aa, Oryza sativa
  unsure (1)..(137): unsure at all Xaa locations
  Clone ID: PAT_MRT4530_58010C.1.pep
FFFFFFFCVQXKRXYXXXXAVTELMDMNXKHXTTTYDXRCNKKXIXPFXXCXRVXXXXXXXXXXXDXFXXDSNGXXXXLAXEGXXXXRXXFSCQLLGXAKPPKWLQKPDHXPGGTPLIETLXHXRRRXXPWVTFHXP

SEQ ID NO: 158548 - protein, 62 aa, Oryza sativa
  Clone ID: PAT_MRT4530_58011C.1.pep
MEAPLKTGFSDLPPDPGRSRIDKPTIKSSALPAAPDLCSYGRKKVRPSSPFPSMTAFFHSFY

SEQ ID NO: 158549 - protein, 98 aa, Oryza sativa
  unsure (1)..(98): unsure at all Xaa locations
  Clone ID: PAT_MRT4530_58012C.1.pep
RNAPHSPSSAILNCASQMEQQSPLCTLHSSVCSXACIAPPPRFVDRXSQFXNPPPPPRKTRXKKKKNIVSLSDERARVPKFPFKEIPVTCPRTHIPSS

SEQ ID NO: 158550 - protein, 81 aa, Oryza sativa
  Clone ID: PAT_MRT4530_58013C.1.pep
FSSTPMRETLELMDAGGHGNPGDVVSAAAYTAEGPCPYFDFPRRSACSRRRPAAASRRWIDSVIHMDMLLEKKLRLIFVVN

SEQ ID NO: 158551 - protein, 101 aa, Oryza sativa
  Clone ID: PAT_MRT4530_58014C.1.pep
MPQKKRQGPVLAAAEWSRGRGGKEQSEGGRSARWGAHRSPRTSPERRKGMKETEGEMKKKGKTFPTFRRRAFPLRKVPKRLRKLKASHTVPKQPFEHVDPI

SEQ ID NO: 158552 - protein, 59 aa, Oryza sativa
  Clone ID: PAT_MRT4530_58015C.1.pep
NSKLFQKVSKKGTSVYPWNGTAVEKHKLSDLNHNFYISVSELQTHVVPTPLWSISLMHY

SEQ ID NO: 158553 - protein, 135 aa, Oryza sativa
  Clone ID: PAT_MRT4530_58016C.1.pep
MAISRRLLLSLFLLRAFSSLPAQAAARGASHPSGTSGNYGSFLRNLLQDNPMITEELVRGYMSNSELEIAAHAIGSRYPNISRIYSIGKSVNGVTLWVIEISDKPGQKEAEPAFKYVGNVHGDEPAGREALIKLA

SEQ ID NO: 158554 - protein, 193 aa, Oryza sativa
  Clone ID: PAT_MRT4530_58017C.1.pep
PQQHGRVVGRHGRRRGRLRRSSRAAAAAQRRQQPRRRRGLPQLLRLLFLRALRGRRLGRRRRGRRPALLAAAVRSEPAGLVPIRRRRRRSRRDGLALRHAAPPLACTRPAVSSNLRRTLAYDDHDHDQPASSKNRRTGTGLLCSNPTIAIAATAKKLSTISSIDTDNYFFFFSFCFRFLLSLFHHSGFDTPLM

SEQ ID NO: 158555 - protein, 571 aa, Oryza sativa
  Clone ID: PAT_MRT4530_58018C.1.pep
MAISRRLLLSLFLLRAFSSLPAQAAARGASHPSGTSGNYGSFLRNLLQDNPMITEELVRGYMSNSELEIAVHAIGSRYPNISRIYSVISHFYVLYAHTFKLCLPIIYSLFEGLHDHVISIGKSVNGVTLWVIEISDKPGQKEAEPAFKVHLTSSPTVGTRKSMQPNHALGATLVKCRMYVGNVHGDEPVGREVLIKLANWLCDNYLKDPLATLIVKNMHLHILPTMNPDGFALRRRGNANNVDLNRDFPDQFFTNNDEINYRQPETRAIMNWVKQEHFTASASLHGGALVANYPWDGSRDQSKQYYGCPDDKTFRYMASVYSQSHYNMSLSKEFKGGITNGAFWYPIYGGMQDWNYIHGGCFELTLEISDVKWPKAAELPVIWEQNRMSMLNLAASLVKGNLSWRSREFLDCQSYDPAKVYNFIQTGVHGRIFAADTGHPIPGSLTIKGIGSEIRASRTYGDYHRMLAPGENYEVMASMEGFRTKATRIVVEEKAVSLDFILDRDGANGQVVRNDLGCPCDDDKLFHVQGARLELYLFVLLIIIALYVLFKRKTTSKFTIHRHSPKRPIAV

SEQ ID NO: 158556 - protein, 159 aa, Oryza sativa
  Clone ID: PAT_MRT4530_58019C.1.pep
MARPPGFQSCGCGIRSGKAAARPAAMAQRGRRAAQEEQRQRQRQGEDSTIKCTMTQFEDQFSTIKPDGIQVRCHKQFCIIRCSTVPVPPRAVVAAAVVAAAAVETEGAADPGEGQDPQDLEQGKSSLFLEHVDPNCEIVLFTNKIACNDEHPTCDYAMP

SEQ ID NO: 158557 - protein, 482 aa, Oryza sativa
  unsure (1)..(482): unsure at all Xaa locations
  Clone ID: PAT_MRT4530_5801C.1.pep
MDPYKHRPSSGSNSTFWTTNSGAPVWNNNSALTVGERGPILLEDYHLIEKLAQFDRERIPERVVHARGASAKGFFEVTHDISHLTCADFLRAPGVQTPVIVRFSTVVHERGSPETLRDPRGFAVKFYTREGNFDLVGNNMPVFFIRDGMKFPDMVHAFKPSXKISFAHHPESLHMFSFLFDDVGIPLNYRHMEGFGVNTYTLINKDGKPHLVKFHWKPTCGVKCLLDDEAVTVGGTCHSHATKDLTDSIAAGNYPEWKLYIQTIDPDHEDRFDFDPLDVTKTWPEDIIPLQPVGRMVLNKNIDNFFAENEQLAFCPAIIVPGIHYSDDKLLQTRIFSYADTQRHRLGPNYLMLPVNAPKCAYHNNHHDGSMNFMHRDEEVNYFPSRFDAARHAEKVPIPPRVLTGCREKCVIDKENNFQQAGERYRSFDPARQDRFLQRWVDALSDPRITHELRGIWISYWSQCDASLGQKLASRLNLKPNM

SEQ ID NO: 158558 - protein, 167 aa, Oryza sativa
  Clone ID: PAT_MRT4530_58020C.1.pep
AWCTWDKNNIEFTVPEDLAEGEYLVRPQHVGVHGAHDGQAEFYYGCAQIKVTGGGNAIPKDTIKFPGSYKKTDPSWNFSVWGGYQGLPLPCPVCLQGWYAAALLSLLPHLALLLPALPLPRFLLPLLLSPRLPSLRPPSPSLLNPSLSPAPLPRSPSAMAARAGAPL

SEQ ID NO: 158559 - protein, 227 aa, Oryza sativa
  Clone ID: PAT_MRT4530_58021C.1.pep
MASSLTPSPATSRAMHQERLTNEEVDEMIHETDGGSFSDHGHMGNLLSIAAYGLMLGFFLVGVRVECIFSSEGPPSALPPLGRAPVTPALPPPGHAPLHGCAAAARDTPPADHLLFGHVGLAGVAELFGYATLTDVSRQNCHARYRAMTGRKRKKASVTWEVEGVHGATERRFERGSSTTTYGGKPAMEPANPASAIPGERCSYRRGAVASEPRPHRRQDRRTESTG

SEQ ID NO: 158560 - protein, 82 aa, Oryza sativa
  Clone ID: PAT_MRT4530_58022C.1.pep
MTKQCWHSINRKVFACDRTSLGTTVACALSREAGGKGGWVKVLGDYVSLLFMGKGLVYALGGVIGGKGRCFNKTVHTFGMEA

SEQ ID NO: 158561 - protein, 416 aa, Oryza sativa
  Clone ID: PAT_MRT4530_58023C.1.pep
MERAADEEAAAEALRAKIELLRQAMQSSEAMQKEAAVIGTRLNNHMVAIDEAMRPAHKRTYNACRVHDNIRRSLTAAGAIVRHLDLVREAEHVILLDRPNEDLNAYLEAIDKLTSVEYFFTSKIRCRVGNDVHERVNELLSKAIHGLENEFHRLLTKCSYQSSIKQIFGDPCVEDEKDTDVVSQIVGAIHALETNLAMKAKQYKDLALGHLFLMNNIHYIVKYIGRSELKDLLGADWIERQRRIVQQHATRYRRVAWLKVLECLSTQGLTSSVGSSIDVTQGSFRNIKNSTTSRSVIKERLKCFNMRFEEICQKQMNWGVPDRDLRDSLILMIAEILLPAYRSFLKHFGPLVENSHSALKYMKYTPESLEQALGNLFAKKLRSDQVFSLHLFAACIVHVCIGRTYSFSKPGGSDQV

SEQ ID NO: 158562 - protein, 51 aa, Oryza sativa
  unsure (1)..(51): unsure at all Xaa locations
  Clone ID: PAT_MRT4530_58024C.1.pep
SNYMNCSPGKFTVTKGQLTMLPVCSSCGIQLRNQSSLTLKTPICIQNFXSK

SEQ ID NO: 158563 - protein, 528 aa, Oryza sativa
  unsure (1)..(528): unsure at all Xaa locations
  Clone ID: PAT_MRT4530_58025C.1.pep
VAGTCSGMETLAQRAALLRESLQKSQSVTDAVVSILGSFDSRLSALDAAMRPIQVRTHAVRTAHENIDRTLRSADVILTQFDRTREAEREIQKGPHENLQGFLDAVDRLRSIERFFSSNRSYRSSDGVRSDMLETRVSAFIIQXDEFQKQLTQRSFGEAIAMSKRSPEKLFVLLDMYEIMCELQADIDTIFVGESCSQMRESALSLTKCLAQTAQKTFSDFEEAVEKDATKNIHIDGTVHPLTSYVLQCLSGQGLTSSGGSGQVGSEGGNSNEKDTDVVSQIVGAIHALETNLAMKAKQYKDLALGHLFLMNNIHYIVKYIGRSELKDLLGADWIERQRRIVQQHATRYRRVAWLKVLECLSTQGLTSSVGSSIDVTQGSFRNIKNSTTSRSVIKERLKCFNMRFEEICQKQMNWGVPDRDLRDSLILMIAEILLPAYRSFLKHFGPLVENSHSALKYMKYTPESLEQALGNLFAKKLRSDQAKSANEVAGSKPYSSSAIAKAHGNHEGIFPNANLERSCTEVVKRKN

SEQ ID NO: 158564 - protein, 499 aa, Oryza sativa
  Clone ID: PAT_MRT4530_58026C.1.pep
MQSSEAMQKEAAVIGTRLNNHMVAIDEAMRPAHKRTYNACRVHDNIRRSLTAAGAIVRHLDLVREAEHVILLDRPNEDLNAYLEAIDKLTSVEYFFTSKIRCRVGNDVHERVNELLSKAIHGLENEFHRLLTKCSKPVDLENIFNCLSSLNRQLSSEDLIGPSAVISDYLFEQVDAIFEGNACSENQKSALTLTKSLAQTAKKTIGDFMEYILNHSVTSTTVDGAVHYMTSYVTDYIKFLFDYQSSIKQIFGDPCVEDEKDTDVVSQIVGAIHALETNLAMKAKQYKDLALGHLFLMNNIHYIVKYIGRSELKDLLGADWIERQRRIVQQHATRYRRVAWLKVLECLSTQGLTSSVGSSIDVTQGSFRNIKNSTTSRSVIKERLKCFNMRFEEICQKQMNWGVPDRDLRDSLILMIAEILLPAYRSFLKHFGPLVENSHSALKYMKYTPESLEQALGNLFAKKLRSDQVFSLHLFAACIVHVCIGLTYSFSKPGGSDQV

SEQ ID NO: 158565 - protein, 651 aa, Oryza sativa
  Clone ID: PAT_MRT4530_58027C.1.pep
METLAQRAALLRESLQKSQSVTDAVVSILGSFDSRLSALDAAMRPIQVRTHAVRTAHENIDRTLRSADVILTQFDRTREAEREIQKGPHENLQGFLDAVDRLRSIERFFSSNRSYRSSDGVLNHVNALLSKALVKMEDEFQKQLTQRSKPIEPDRLFDCLPSTLRPSSESHPEGGKNQSHSENQQNSEAAVYSPPALIEPRFIPFLAKLAQQLVQAGCQQQCSEIYSEARASALESSLKSLGVEKLSKDEVQKMPWEILESKIGNWIHFMRIAVKLLFAAERQLCDQVFECSQSLRDKCFAQITRNSLATLLSFGEAIAMSKRSPEKLFVLLDMYEIMCELQADIDTIFVGESCSQMRESALSLTKCLAQTAQKTFSDFEEAVEKDATKNIHIDGTVHPLTSYVINYVKFLFDYQSTLKQLFQEFKREDGTGSELATVTMSIMQALQNNLDAKAKQYKDPALMHIFLMNNIHYIVKSVRRSEAKDLLGDDWIQRHRRIVQQNANHYRRIAWSKVLQCLSGQGLTSSGGSGQVGSEGGNSSGASRAAVKERSFNVLFEEIYQKQCGWSVPDTELRESLRLAVAEILLPAYRSFLKRFGLSNTQEFLSLELMRLVIYRPLIENSKAPGKYVKHTPEQVELLLANLFEGKQERT

SEQ ID NO: 158566 - protein, 59 aa, Oryza sativa
  Clone ID: PAT_MRT4530_58028C.1.pep
WQRRGGRGSRAGCRRRCGSRGTGTAGFFCFYSGSGGSTCAHRQGGGRSSGQGRRHKWLM

SEQ ID NO: 158567 - protein, 95 aa, Oryza sativa
  Clone ID: PAT_MRT4530_58029C.1.pep
MELTELSSYLHHRKRKNGPDSAVSSSSDPASELGDMENNEFLVYSYVSKKLDNIENLLDKMETLRKESDEADARFAQLRPYKAFACVSGHTREDF

SEQ ID NO: 158568 - protein, 897 aa, Oryza sativa
  Clone ID: PAT_MRT4530_5802C.1.pep
MGIPRSELTPTDQPFHGITPQSSSKPLSKITLFVTFGQTNNFRTEQITFDVAEFDTTYNAIIGRTALAKFMAASHYAYQVLKMPGPKGTITIQGNAKLAVQCDKRSLDMARHRASVVVRLSAVWPVAGVIGVVRVGGVGIVASSVVVVAAKMPSDMPGVLREVIEHKLMVRPDAKPVKQKLWRFAPTSHTRRARQASQSWFHQREKCTFGVPSGKLLGFLVSGRGIEENPEKIKAIENIKLPTRLKEVQKLTGCMAALSREKVQQLVYYVSEALHDAKTRYPHIQKLLYAVIMTSRKLRHYFQAHRVTVVSSFPLGEVVRNKDVVGRIAKWVVELSQFDVHFVPRTAIKSQVLVDFVADWTMPDNRSDNQIDNETWTMAFDGALNSQGAGAGFILTSPSGDQFKHAIHLNFGANNNTAEYEGLLAKIRAVAALGVRRLVVKGDSELVANQVHKDYKCSSPELSKYLAEVRKLEKRFDGIEVRHVYRKDNIEPDDLARRASRREPLEPGTFLDVLTRPSVREVSGEDSPVVLNNSSGATEAKCAVADIETKDDWRTPLIKFIGSEELPEDDAEAEKITRKAKIYCMIGNDLYKKAPNGRCEACQFHSKHTKLPAQALQTIPLTWPFSCWGLDILGPFPRGQGGYRFLFVVIDKFTKWIKAVPTGEIKADNAIKFIKGIFCRYGLPHRIITDNGSQFISADFQDYCIGLGVKICFTSVSHPQSNGQVERANGIVLQGIKTHVYDRLMSHDKKLVEELPSVLWAVRTTPTTSSKETPFFLVYGSEAMLPSELRHQSTRVQKYSNEDQEEQRNVDVNLLEEHRERVAVRAANYQQALRRYHEKRIRARILSIGDYVLRRVQSQAGRNKLSPKWEGPYMITQVLRPGAFKIADGDGRELANC

SEQ ID NO: 158569 - protein, 380 aa, Oryza sativa
  Clone ID: PAT_MRT4530_58030C.1.pep
MDPSYRRRSQNEDEFMLFVLPTIEGDSSQPSSSRKPMHTSKLSGACRVNEILTGHQSLSKRNFRMEVNVFRALVDKLREKQLLADARDVSVEEQVAIFLYALAKNASNETLQDQFQHSGQTISKYFGVVLDAVTQLTCVYIRPPFLHPHHILRRPKFHPFFENCVGSIDGTHVPMILPLDQQEPYRNRKQTISQNVMVACDFDLKFVHVHAGWEGSASDARVLQDALNHGFEVPPGKFFLVDAGYANTTQFLAPYRGTRYHLKEQGRANQKPQNYKELFNLRHAQLRNHIERAIGVLKMRFPILKTGSHHPARKQVDISVACCVLHNFIRLHNGDMVWPSNCRLEIDPDHIVDVPNGDEGNRKRDDMAQRMWNHYVARRK

SEQ ID NO: 158570 - protein, 169 aa, Oryza sativa
  Clone ID: PAT_MRT4530_58031C.1.pep
MAGLGAVHVVAISAAPWGMGSCRLFFFPLKLDHGWEDKGSQQCMSPLLTPHRGDWGLPILFFPLKHDRGWEDKDCSAEDMMKQTAMDETTTIYEPEQVFKQNKPQKQAEAFNIQGSYLSLSSRDAEHLLDLPSQGEEIFEPPKTKNMDLFDEFKTASKQGAHIKLSSLQ

SEQ ID NO: 158571 - protein, 714 aa, Oryza sativa
  Clone ID: PAT_MRT4530_58032C.1.pep
MKHGSCSMDLEAGSIRPRSDGEGGGPAAGRETDDSNVWKDLFLAYKTLGVVFGGLVTSPLYVYPSMNLSSPTEADYLGIYSIMFWTLTLIGVVKYVCIALNADDHGEGGTFAMYSLLCRHADIGILPSKRVYAEEDPLLHSQSAIARRPSRLGKFFEQSITARRVLLFVAVLGMCMLIGDGILTPAISVLSAIDGIRGPFPTVSKPVVEALSAAILIGLFLLQKYGTSKVSFLFSPIMAAWTFTTPIIGLYSIVHYYPGIFKAISPYYIVHFFLRNKRQGWQLLGGTVLCITGAEAMFADLGHFSKKAIQIAFLSSIYPSLVLTYAGQTAYLINNVNDFGDGFYKFVPRPVYWPMFVVATLAAIVASQSLISATFSVIKQSVVLDYFPRVKVVHTSQHKEGEVYSPEINYILMVLCVGVILGFGGGKAIGNAFGVVVIMVMLITTVLLTLVMIIIWRTPLVLAGLYFVPFFIMEGAYVSAVFTKIPEGGWLPFAVSITLAMIMFGWYYGRQRKFEYEMTNKVSLEHLGELLARPEVQRVPGLCFFYSNIQDGLTPILSHYIKNMSSLHTVTIFVTLRSLLVAKVDQSKRILINRLGPNGVYGCTVQYGYADNLSLEGGDDLAAQVTSCLQWHIQMDTDGRRSPEEEMAQLEAARLAGVVHVRGKMRFYVGEDAGWFDKIMLGFYEFLHGICRSALPVLGMPLQQRVEIGMLYKV

SEQ ID NO: 158572 - protein, 145 aa, Oryza sativa
  unsure (1)..(145): unsure at all Xaa locations
  Clone ID: PAT_MRT4530_58033C.1.pep
GAEDCRGGLAMAAASGSGRQRRQAYGGRRRDLGRGERPTARERALRPRAGEWEEEGWPESSSRVHARTGLRRVRRRRDEGKRWERRQGVNNGAVXSHDQRPRFGHERLGPWMTSAVGLPLSALEASGVERRSGSAAGHDACGAGV

SEQ ID NO: 158573 - protein, 282 aa, Oryza sativa
  unsure (1)..(282): unsure at all Xaa locations
  Clone ID: PAT_MRT4530_58034C.1.pep
MRTPAIPLLPIPRPEAGELAPEPSAARHCLARDLELDPQNPRTAGLRAPKLAWSRVGPACRRHGSPCGGSTRRGTRVWAGRGARARLAGDAGAAGPRAASRLAVDRAHGEGGTEGAADQVSRLGCAEVAPTWRLRGCLAGRLEQDEDAGRXNGRRAAAASGGANHGDTGESEHTGWLYDTRGDEPTARIRRRELDGGGHRRREKGXNGDEVTRGRFPAARASTRLRESVPCAGLGGNASREAGDERRFRARAATAASTRRATAKVGAAPASYGEATRATTRV

SEQ ID NO: 158574 - protein, 385 aa, Oryza sativa
  unsure (1)..(385): unsure at all Xaa locations
  Clone ID: PAT_MRT4530_58035C.1.pep
MGSTLGVDDFAFPLGLVXRFNNFDFITDEFANISLLDSDSNQSERDRDHSVSFGLPNTVEIYSKVFFSGLASNYSGESSTSAXFVDSPPEPPRILRSPCEFLCSLPIRSVPDPFPXRRSRSEQALALPGLGFSEVFVMLQPLXPVQIWRLSTFLAPLRTTTITPLKAWEVRSSMTTIPPLLFGVFMADTVDEEAQAWLASEAEEERIRLEEERKHREEEERRRRNXLMSDEPLTMQLSRPXVDNTNVFVTPQQNAVTAITLFDTIIDKAPTNVTPIMNKVKAMIATTVPMDAGGSRWPDESTVETPVGTHLPPLHSRDYWVPERSRGHIGSNLHVLNSESRHQHDPPSRHRRGRPTTTTGFRRGSHRRRRRTSGSSCSSAGTDRA

SEQ ID NO: 158575 - protein, 495 aa, Oryza sativa
  Clone ID: PAT_MRT4530_58036C.1.pep
MELLPTVRRREAVRAAHVRRIEAAAWLGARRATRREDAAARCAAAGEVVGSAAGVGRSAGMEVAIATAAVVAMGTGNRVLYKLALVPLRDYPFFLAQLATFGLCDGCLVLGVHLSGRITGRDFLLVNISIPVRLCAFFLVGGRARELAFQASWRLYQQHQGWLLETYLVWQLLLSAIFLKRRYRINEITGCFLVTVGVIITVASGSSAGASLKGTGILWPLLMIISFFLQAADTVLKEIIFLNAAKKLKGGSVDLFVVNSYGSAYQALFMCLLLPFLSKLWGVPFHQLPTYIRDGTACFLNMGSLSSGCEGAPLLPLLFVLVNMGFNISLLHLLKISSAVVSSLASTFSVPLSIYAFTLPLPYIGVASTLPPGFVAGAMFLDGTRTREKRRSIITTGMKSKNGGGGGSGGNTNGSHRRITAAAAINIIRTLLSILASPAAVDWTASSGRRLTGCSTLRCSSVDLWVPSLGRRGFRWSPGVRQGGHDPDKHRVMGI

SEQ ID NO: 158576 - protein, 362 aa, Oryza sativa
  Clone ID: PAT_MRT4530_58037C.1.pep
MALDTLCSAGGDVLIYDTFNASAAAAAAVVPPASFLFGNNNAGGAAGTETRVQVAAGAVPEVDQLLKQAQQPGRRKRRRRARSCKSREDAESQRMTHIAVERNRRRQMNEYLAVLRSLMPESYVHRGDQASIVGGAIDFVKELEQLLQSLEAQKRTLLMQPPPPPQQQREPKCDAADSTSAADQETPAAAAAAAAADGPPFARFFTYPQYVWCHNPAQDGGGGGGAAAENRAGVADIEVSLVETHASIRVMAARRPGQLLKMVAGLQALRLTVLHLNVTALGSLALYSISVKRFHGGKAIASLGPLGVFFLCALYLWYSTTVVEEGCGMATVDDIAAAVHHVLCIIDAEAASQMLLAGEASG

SEQ ID NO: 158577 - protein, 178 aa, Oryza sativa
  Clone ID: PAT_MRT4530_58038C.1.pep
MAKAALQLLLLLCVAAVAWAMDDGGGGGAGMTKIKVYWHDVVAGPNPTAIRVAQAASTNASSTYFGAVVAIDDPLTSSPAAAAAGEVVGRAQGTYTFADQRVIGLLMDMNFVFTAGDHNGSSLAIMGRNEVMSPVREMSVVGGSGKFRMARGYAEARTVDSGFKSGETIVEYTLFVKA

SEQ ID NO: 158578 - protein, 69 aa, Oryza sativa
  Clone ID: PAT_MRT4530_58039C.1.pep
MVDLRPAVPSPSSTSSPPLLSLLPPPMNANRMPSSRLELVAVSTLTSSTIRSMRTCCFTLHRKATMSSC

SEQ ID NO: 158579 - protein, 81 aa, Oryza sativa
  Clone ID: PAT_MRT4530_58040C.1.pep
MAPVIDTNALMQFLFSVSLFYIPDLMIDWIDPLTNKSTFKIKDTTTSFVEEKKNELEKAKSKLNVISSNKICDVPMVEYAN

SEQ ID NO: 158580 - protein, 430 aa, Oryza sativa
  Clone ID: PAT_MRT4530_58041C.1.pep
MVMFLLIPGGHLLFLISFWFVSLVHQVAVDTEHDDSIGVTDESGWPCIELDRRMRRMNGRNPEKNIKMEHENDSSLAWVFHAPYREHENEFPDIPEEKEGNGFAPKSDDPTKAPPPIEVPELSFDELKEKTDNFGSKALVGEGSYGRVYYATLDNGKQVAVKKLDASTEPEVDNDFLTQVSIVSRLRHENFVEMLGYCVEGNQRLVAYEFATMGSLHDILHGRKGVPGAQPGPALDWMQRVRIAIDAAKGLEYLHEKVQPSIVHRDIRSSNVLLFEDYKAKIADFNPSNQSPDMAARLHSTRVLGTFGYHAPEYAMTGQLTQKSDVYSFGVVLLELLTGRKPVDHTMPRGQQSLVTWATPRLTEDTVKQCVDPRLKGEYPPKGVAKLAAVAALCVQYESEFRPSMSIVVKALSPLLQHKPPPPPAVAPET

SEQ ID NO: 158581 - protein, 132 aa, Oryza sativa
  Clone ID: PAT_MRT4530_58042C.1.pep
MELLRSISYCIPLPQMESLGMLAEYAAARLHLGEFRMPPPRQQQQQQGQTVLDFSQDTHGAGAGGGSGVFGACSAGLQESAVGMLLFPFEDLKPVVSAVAGDTNSGGDHQHDDGKNQGGDGGVIGGHETTGF

SEQ ID NO: 158582 - protein, 46 aa, Oryza sativa
  Clone ID: PAT_MRT4530_58043C.1.pep
NVRKPVKVFWTFGFQKGIIGLASPFFLKIGSLWGWAGGAFFRMFGV

SEQ ID NO: 158583 - protein, 34 aa, Oryza sativa
  Clone ID: PAT_MRT4530_58044C.1.pep
MSKCNDNSDICIKSSTKQVMINFRGTNSSHYTLK

SEQ ID NO: 158584 - protein, 716 aa, Oryza sativa
  unsure (1)..(716): unsure at all Xaa locations
  Clone ID: PAT_MRT4530_58045C.1.pep
MPLPSGLFTPISFSVEMMEFRPVAGFLPALSDRCHQLPAIGRASTGMAITDGYEKRLLIAASGLPFYGMRKLNGSPLTRILQVLVTSSKKRQAAVIHVIELQEISTSDHVDEDGEDKCDSKNICTTRVDEKTEAITRMLPIFISCIFAYLPFTLLMTRILIPLLRIFTGHTNGITPLQHIGVASACGIMAACIAMLVEAKRLMVVEQQGLTLVADGVPMSVFWLVMQFFLLSIMDIAYIGGLVQFIKSEAPEAKHIAPAVQSLLVGIAAWSGCAFVQLVNRMTRLGDNGRGWLDGTNFNRTRLDRFFLLLATFELVAFINYAFWARRYANKKRGYALYISAFGDGFMRACMPPLGADQFDHEDPSESRQQSSFFNWYTFGISFGGFIGLILIVWLENSKGWDVGFGVCAFLILLGLLVVAAGLPLYRNHVPEGRXLQLPEKLEEAQEERSTEQGGSTEXKNVEETKAVLRVLPVFISSLIGYMSNPLLFTFTVQQGGLTNTRLGRIHVSPATLFIIPSAFQMALLPVYDRFLVPLLRRRTGYASGVTHLQRVGAGFAAVILASAIAAVVERKRRADAAAAGQMSLFWLAPQFFLLGVSDVTSFPGLLELFSSEAPRGMKSIASALFWCELGLSSWLATLLVQVVNRATRRHGGGGGGGWLEGATLNTSRLDLFYWVVAAVGLLGFVNYLYWASRYIYRQDPRVVVDVEPSADHDSP

SEQ ID NO: 158585 - protein, 418 aa, Oryza sativa
  Clone ID: PAT_MRT4530_58046C.1.pep
MRACMPPLGADQFDHEDPSESRQQSSFFNWYTFGISFGGFIGLILIVWLENSKGWDVGFGVCAFLILLGLLVVAAGLPLYRNHVPEGSPLTRILQVLVVAFKNRKLQLPEKLEEAQEERSTEQGGSTEVTEIASQTNSSLKFLDKACINGGKDGAWSVCSTKNVEETKAVLRVLPVFISSLIGYMSNPLLFTFTVQQGGLTNTRLGRIHVSPATLFIIPSAFQMALLPVYDRFLVPLLRRRTGYASGVTHLQRVGAGFAAVILASAIAAVVERKRRADAAAAGQMSLFWLAPQFFLLGVSDVTSFPGLLELFSSEAPRGMKSIASALFWCELGLSSWLATLLVQVVNRATRRHGGGGGGGWLEGATLNTSRLDLFYWVVAAVGLLGFVNYLYWASRYIYRQDPRVVVDVEPSADHDSP

SEQ ID NO: 158586 - protein, 73 aa, Oryza sativa
  Clone ID: PAT_MRT4530_58047C.1.pep
LEGISGPISICWKAYGVYFQMVLVPHQNSYRAVGNICELDCWSQSMEILGESSRKLNKRPRSTTYTSTRRVVF

SEQ ID NO: 158587 - protein, 151 aa, Oryza sativa
  unsure (1)..(151): unsure at all Xaa locations
  Clone ID: PAT_MRT4530_58048C.1.pep
XKXXPPXXXVXKRXXPGPXELAXXFXXFGXGGXFXXARVQXXERFXXRGXKFQTXWNAXNTGGKAWXPXXMXXXAGRVLVVLLLQXQAXVFDCSLIXKXVFTXIPGEWRXXXEFILFXEVIAFXCPXEVFVCLWGETSXIRVVXXXRSFCC

SEQ ID NO: 158588 - protein, 128 aa, Oryza sativa
  unsure (1)..(128): unsure at all Xaa locations
  Clone ID: PAT_MRT4530_58049C.1.pep
RGREEGEKKSSREEGDGGWNTTTKENPESKNFVGRGKGGGKRSTRNPSVFFRFEKKKKKKTLPRTKKPQKLKIKSKKRIKKKKXLNKXVKKKKKKKXKHTKXNKXNFKKQKXKKKKKXXXKKKKKXKN

SEQ ID NO: 158589 - protein, 116 aa, Oryza sativa
  unsure (1)..(116): unsure at all Xaa locations
  Clone ID: PAT_MRT4530_5804C.1.pep
SRACFLTANKGFIGVSADEVSGCYISLXGLHPIGFYWIILLLSCIIISRLXYIVIYTSSVKIYIRIIADSSKPYYYRLSQTDWHARISSTFGPALKLSRSPGPPPFYATGSSLPSL

SEQ ID NO: 158590 - protein, 61 aa, Oryza sativa
  Clone ID: PAT_MRT4530_58050C.1.pep
TLWPADRRPPRPTPCRPPRPTPAAPPPRPTPHPSPTTPDAAPPPPRLTPPPRPGHHRRPRS

SEQ ID NO: 158591 - protein, 837 aa, Oryza sativa
  Clone ID: PAT_MRT4530_58051C.1.pep
MVKAVMCQLFCHVLNGLLHVGPDSGLQKKWAWPRSHARGASQLAALQIYALQPRNRALMKNQHNEGIRLVSSFRLLFVGPGFKRLGNHMCSQYQLPKSVVPEYCPSLDDDGVCKTAFELIFAFDEAISLGNKEKVTVQQVKEYCEMDSVEEMDEEDAGIVRMVDVMKRKFQDYWNISCLTLSVPVILDPWFKYSYVKFRFVQAFGDVANNKLSEVKKAIEQLFSDHSPKVNDQNNELTGGRTDIEAGILQENALLLRWSYHRKKVCNLWTWAVNSSGTDKVVLAASIISKSGKALVSRQYVDMTRIRIEGLLAAFPKLVGNGKQHTYIETENVRYVYQPIEGLYLVVITNKQNLHSPLTTKGVICRELDLSVNFYECCYAFVVSYLLATIHSHGLLNLNNVKVPEYCPSLDDDGVCKTAFELIFAFDEAISLGNKEKVTVQQVKEYCEMDSVEEMEYKQMMQEKIKETKDFMKKKVIEIEKTRMEKGKHNKGGYSSISGPQVIEKSFNDMSISCTGFGSGSGLGGLNTDTDTFTSRPKGRTSGGTTGAGKGIGMKLGNTKKTNQFLESLKAEGEVIMEDFQPCSLQSRSSPLPPSDPVTVAVEEKLNVAVKRDGGVNNFDVQGTLALLVLNDADGLILLQIESQDIPGLSFKTHPNINKDLFNSQQILGAKDPIRPFPSGQNETPLVKWRIQGMNESSLPLSVNCWPSILGNETYVNIEYEASEMFDLHSVIISIPLPALREAPRVRQIDGEWKYDSRNSVLEWSIILIDQSNRSGSMEFVVPPADPSMFYPISVGFSASNTFSNVKVTGIRPLNEGSNPPKYSQRVRLVADNYQVV

SEQ ID NO: 158592 - protein, 75 aa, Oryza sativa
  Clone ID: PAT_MRT4530_58052C.1.pep
MVVARRRDKGVEVDKLFLGNRRCTGIGTGTARKRRKEEAVEKQEKEVEEEAQWQCSIMKQVWYLIDIRLILEHHA

SEQ ID NO: 158593 - protein, 129 aa, Oryza sativa
  Clone ID: PAT_MRT4530_58053C.1.pep
MATRDSGGDAQLRHPAAAAAAARLGQQQRRTAVAQQGGSAAVAVAAAARRQRAAVHGTTHSSGGALAGSGARVYRGDTTTRQTLGHAVRVNAKRSRHHLNKEGLEKISHRGKQRQRQGFGTAVTVTLRG

SEQ ID NO: 158594 - protein, 129 aa, Oryza sativa
  unsure (1)..(129): unsure at all Xaa locations
  Clone ID: PAT_MRT4530_58054C.1.pep
MQQDQRKKSSTEADFFTEYGDASRYKIQEVIGKGSYGVVCSAIDVHTGEKVAIKKIHDIFEHISDAARILREIKLLRLLRHPDIVEIKHIMLPPSRRDFKDIYVVXELMESDLHQVIKANDDLTKEHYQ

SEQ ID NO: 158595 - protein, 780 aa, Oryza sativa
  unsure (1)..(780): unsure at all Xaa locations
  Clone ID: PAT_MRT4530_58055C.1.pep
MQQDQRKKSPPPARAGRGPPPPLALAPSPPWPRAAPSPVPVLALVLRAPGPRPLPARPAPRVRPSPRPRPPSFPPMAVKMRIGRRRAIQQGIAEGGFEWRRVWGCREADSRGALWELVWGERSVRERNAAGAAEEVIALFIMDEMCDPASNLEYVVEKAKCDVHRTSSAEEFFTEYGDANRYRIQEVIGKGSYGVVCSAIDLHTRQKVAIKKVHNIFEHVSDAARILREIKLLRLLRHPDIVEIKHIMLPPSRRDFKDIYVVFELMESDLHQVIKANDDLTKEHYQFFLYQLLRALKYIHTAGVYHRDLKPKNILANSNCKLKICDFGLARVAFNDTPTTIFWTDYVATRWYRAPELCGSFFSKYTPAIDIWSIGCIFAEVLTGKPLFPGKNVVHQLDLMTDLLGTPSMDTISRVRNDKARRYLSSMRKKDPILFSQKFPSADPLALNLLQRLLAFDPKDRPTAEEALTDPYFKGLSKIDREPSCQPITKLEFEFEQKKLSKEDIRELIFQEILEYHPQLQKNYRNGRERATFLYPSAVDQFKKQFSNLEESNGSGSAIPMERKHASLPRSTTVHSTPIPPKEQPLAASLKSSRPVSDEPCKNPWVMGGFSGNIPTSSQVSQVAKPVAPGRPVGSVFPYETGSTNDPYGPRGPVMSSGYPPQQQISQAYGYHQVPARMNCVEQSQAMDAYKMHSQSQTQAYAYPNSKVTADVALDMRGSTFHHSAGSKNGSLDRMVTQTXVYTRSLNGIVAAATSGMAXGTNRKVGAVPISTSERCISSG

SEQ ID NO: 158596 - protein, 206 aa, Oryza sativa
  unsure (1)..(206): unsure at all Xaa locations
  Clone ID: PAT_MRT4530_58056C.1.pep
RMAVKMVFSNSAQNGGNADAPDAALRAILPLEHLXHDVRRKQLVXIPEDRRELSWKPPTRKEPVWSEVGSSHPDVPRSSSNIIDTIAGTGGGGGGPWAHRSHHLRGACLLPATARCRVTVEPXALRSIPPVAINRLDLAGCTGFLRPHHRRRDGLLTLRRVGAAAERSSHAHPPSSLVSLIATMCHLLRLFLSSPGAPCSMATWLP

SEQ ID NO: 158597 - protein, 66 aa, Oryza sativa
  Clone ID: PAT_MRT4530_58057C.1.pep
ESAGLISSEVRGKKKLSLIVFDKEKVYLDSLNYRLEYDSYPPTIKPDISAPPTIKTSTNNVPRWFS

SEQ ID NO: 158598 - protein, 652 aa, Oryza sativa
  Clone ID: PAT_MRT4530_58058C.1.pep
MQQDQRKKVGFGFGSGDLSLLVSSVLCFGVNWFRALPLALPFLCEQLRFASSSTEADFFTEYGDASRYKIQEVIGKGSYGVVCSAIDVHTGEKVAIKKIHDIFEHISDAARILREIKLLRLLRHPDIVEIKHIMLPPSRRDFKDIYVVFELMESDLHQVIKANDDLTKEHYQFFLYQLLRALKYIHTANVYHRDLKPKNILANSNCKLKICDFGLARVAFNDTPTTIFWTDYVATRWYRAPELCGSFFSKYTPAIDIWSIGCIFAEVLTGKPLFPGKNVVHQLDLMTDLLGTPSMDTISRVRNDKARRYLSSMRKKEPILFSQKFPSADPLALDLLQKLLAFDPKDRPTAEEALAHPYFKGLAKVEREPSCQPITKMEFEFERRRVTKEDIRELIFREILEYHPQLLKDYINGTERTTFLYPSAVDQFRKQFAHLEENGGNGPISTVLSLTFRSTIVHSTPIPAKEQPRIGPSRDKPSDEPYSNPREFDRFSGNAPRTSQAPQRVPTARPGRVVGPVLPYENGATKDSYDARRLAMNSGYPPQQQIPQAYGYYHMPRVRSACSELSQAERYTLHQQAYTCANSATVTDVALDMRAPPFHLSGGPKSDSSERLAAETNLYTRSLNGLAATAAGVAASAHRKVGVVPYGMSRMY

SEQ ID NO: 158599 - protein, 43 aa, Oryza sativa
  Clone ID: PAT_MRT4530_58059C.1.pep
PSPPPSGKTPPFPVPIPAHGAWFSPVPVPVRVLDTRWVPHPRR

SEQ ID NO: 158600 - protein, 74 aa, Oryza sativa
  Clone ID: PAT_MRT4530_5805C.1.pep
RLDHGPRSESRPLRPTDGLVFPLSFLRGGGVLHFFPPHSFLLCWGPLKICSSPRRFLLLYVCDLPVLAGRVLGR

SEQ ID NO: 158601 - protein, 205 aa, Oryza sativa
  unsure (1)..(205): unsure at all Xaa locations
  Clone ID: PAT_MRT4530_58060C.1.pep
EISSNSILESLQTQKAGRLGKWLWKMMNEEGLLQSLLKAKYLKKNTLKQCVFKPGVSFFWNGFMSIKDDFMKFCSKKIGNGEDTLFWQEKWLENSSLVEMYLELYNITLSKIRIVDKVFKGGLDRLQFRRDLIEGKAVAWGKLQRDCENVVLNNEKXALMWDLDKRKCFSVKSLYNNSQLQCLNFPFRKLWNFKIPVKARVLPGC

SEQ ID NO: 158602 - protein, 72 aa, Oryza sativa
  Clone ID: PAT_MRT4530_58061C.1.pep
TASMKTVKLVKVSYISIPYNYPWLEAANVTSNSGAFQQKASPNQNRAHSMSPPVTGMLMRSKQQSKTQLTSF

SEQ ID NO: 158603 - protein, 101 aa, Oryza sativa
  unsure (1)..(101): unsure at all Xaa locations
  Clone ID: PAT_MRT4530_58062C.1.pep
PSTSQSIAKRTDRQPKQTIAQAIASTSXXHKPKRHRDRQRXXNRQRQTANSPRLAHTKRTHTRHRIRSVQFRSGTLPXQSQSRQXEIKIQIKXTPKKRDNP

SEQ ID NO: 158604 - protein, 37 aa, Oryza sativa
  Clone ID: PAT_MRT4530_58063C.1.pep
MAAAMGGDGHRVAPVTKFGDGNTLNTLPFQNAVFYVR

SEQ ID NO: 158605 - protein, 76 aa, Oryza sativa
  Clone ID: PAT_MRT4530_58064C.1.pep
SPSSTKAPAVPPAASLPHSCSCCSSTSSTCPNPLRRCIGFLQPTCSLLHASNNWSTQPFLPFHLIGLVGNADHLLL

SEQ ID NO: 158606 - protein, 106 aa, Oryza sativa
  Clone ID: PAT_MRT4530_58065C.1.pep
MVPWPSMFFVVGARPCAPMGGSQCSCLAVGLVSLARAYHIYMASQADDLILNVCRACASDRLPCHLDREPTVAPTAVISIDHTYDVSSRPNRTFENANAFRWPVAS

SEQ ID NO: 158607 - protein, 104 aa, Oryza sativa
  Clone ID: PAT_MRT4530_58066C.1.pep
MTLYSYRDNSGLFGTAPVSAPSKLGVELGGALSQNELELYQTGPSIDLRLKLLFVHILEHLPLAFCPGLPLCDPQDRFNYLVFLLVLHNVSQHIGVGNFGSLAF

SEQ ID NO: 158608 - protein, 71 aa, Oryza sativa
  Clone ID: PAT_MRT4530_58067C.1.pep
GLKLCSTRICTYRQKRLIPKVVNNYTTKIGRSPSPKVKGVRSTQRTRKNIVKALLRTNKRKTIPSIRGKTK

SEQ ID NO: 158609 - protein, 211 aa, Oryza sativa
  Clone ID: PAT_MRT4530_58068C.1.pep
MATVFPYRWSRTEHLTLRPPCHGGDPLDAHQPLPWILLDVRAYIADRRNSTTAAADLGNGHHLYRPTAAGILHLCLVHLTNKLLPKLEGRPAMAKLQVDASDEKAVVLAVDMANKRLQTVSVYDAERIVDDFDYSYTQSTISQYFTTAAGVKGNLKRPLKFHAQYPHKRLGETISRSDNPMDLHEPLQLDIGFGLGTKDETEDSDNPMDLE

SEQ ID NO: 158610 - protein, 481 aa, Oryza sativa
  Clone ID: PAT_MRT4530_58069C.1.pep
MATVDRYMWNKTEHLTLRPPCHGGDPLDAHQPLPWILLDVRAYIADRRNATTAAADLGNGHRIEITIFTAPPPQVSYICAWCPTGDPARIFANEPLVGCVNADLVFLRLYSEVVYDLVYRAGGRPSLTLIRDPVDVDAASLQRDYLRSLHNIALLRRALWIWTSIESHHLRQLTNSASTSPPSMAMATGNPHLQRARPWLSWKLPATAARAHQLSNELLCRDIAIVNGLLTIVGLRTFFDSDTDCWSWDLSTWSKPVAHLDNSKDWQKGFMVDSSDITVDATCCNVELLPKLEGRPAMAKLQVALPTLSLTDANVVYVMGKVDASDEKAVVLMVDMANKRLQMVSVYDAERIINDFDYSYTQSTISQYFTTAAVKCNCILDSRLPSYENFLVSARYIKNIHINKVFFLSYSHRAWDEGLGVKGNLKRPLKFHAQYPHKRRGETISRSDNPMDLHEPLQLDTGSGLGTKDETEDSVIPMDLE

SEQ ID NO: 158611 - protein, 85 aa, Oryza sativa
  Clone ID: PAT_MRT4530_5806C.1.pep
LFLGGEITPNYTGNNARKTTPTPNKKKGCGHTGTNTLQHQRQCNAPHTKKGKHGPPWIIRMIMKHEAAFLKLENHYRTDKALNQF

SEQ ID NO: 158612 - protein, 114 aa, Oryza sativa
  Clone ID: PAT_MRT4530_58070C.1.pep
SVHIFHVGASDGENLCIFAQMCILFYLLRALISIQYPSLRRPVHKSSSVPLPLCPLTENPKSNQSIQPCPSFRFGIPFPRFPDARPNSSSPSGSGWSPFVRASSTEISTAKKKK

SEQ ID NO: 158613 - protein, 414 aa, Oryza sativa
  Clone ID: PAT_MRT4530_58071C.1.pep
MRTTVGASLFPRPPHHAAQLALELCVILAAPPPPLSDEAYSEFLQLQGVLDTLNLQSGMGDAWNFIWGSDKYTAKKFYKLNYSSLQPPRPMIWLWKTKCVMKIKVFAWLMFCDRLNTRDMLDRRYCAKEDDDLTCVLCNANCRETRLHLFFLCPFSIRTMAEVHEQELIETAITIHDNDCIDQLINLMTKLKINEKPEFYSHAYQRGERWEYDMTVKINPPRDYCTLQNVDYHEQPVKATMSIWMEAVDDMYEEALEHMDIQRKRLEEAEHREAVLKHKYRILHELYEEREKQNSILNICVAGAAFCLHQIPSMGSDDEDDEGGMEGHISPVREGEPHGPNPQDNGEEFYKVYHHHHHRCILFILMTKQKKCIQPWISVNLAKNLKYSGQIGCFISITKILPQFGLNLQRKRKI

SEQ ID NO: 158614 - protein, 317 aa, Oryza sativa
  Clone ID: PAT_MRT4530_58072C.1.pep
MTKADDYQQVMDCGIMAEEHEQELIETAITIHDNECTDQLINLMTKLKINEKPEFYSHAYQRGERWEYDMTVKINPPRGRLFYVSIIFTKTGCNTLSYSYHPMREPGEDYCTLQNVDYHEQPVKATMSIWMEAADDMSSLLSSSNPKYGSDDDDDDDDDDGIEGHISPVREGEPDGPNPHDNGEGVLQCLPPSPPPLYPIHSDDEAEEMHSAMDISEPSQEPEILRPNRVFHINELNTAPIWTESPEEEEDPEERELETQEHLSIHTNDQENNEDPYSCSAPNITASTSASPHEFSHFAPASLFTNPAEGSGGWLDK

SEQ ID NO: 158615 - protein, 218 aa, Oryza sativa
  Clone ID: PAT_MRT4530_58073C.1.pep
MAEEHEQELVETAITIHDNDCTDQLINLMTKLKINEKPEFYSHAYQRGERWEYYMTVKINPPRGERDMYYFQTHHRWDTMRAALYDVSREAFLRLNHIYRDRLQHSRYSYHPMREPGEDYCTLQNVDYHEQPVKATMSIWMEAADDMYEEALEHMDVQHKRLEEAERREAVLKHKYRILHELYEEREKQNSILNICVVGAAPLAIAVLADPRLWPTLV

SEQ ID NO: 158616 - protein, 267 aa, Oryza sativa
  unsure (1)..(267): unsure at all Xaa locations
  Clone ID: PAT_MRT4530_58074C.1.pep
MSIPSTLNYLVLLVFSSYMCTSYPNLFAVTMYKSDSVKAMCSRPLEDSFALPLSDEAYSEFLQLQGVLDSLNLQSGMGDAWNFIXGSDKYTAKKFYKLNYSALQPPRPMIWIWKTKCVMKIKVFAWIMFCDRLNTRDMLDRRHCAKEDDDLTCVLCNANCRETRLHLFFLCPFSIRCWQYLGIEWNNNLEFFQMISLARIKFAQKGFLEIFFLAAWHIWKQRNGFIFQNIQPTFQAWRSLFVKEVLLHMCRMNDPLKQTVFNWVQTL

SEQ ID NO: 158617 - protein, 359 aa, Oryza sativa
  Clone ID: PAT_MRT4530_58075C.1.pep
MERYELLKDIGAGNFGVARLMRNKETKELVAMKYIPRGLKIDENVAREIINHRSLRHPNIIRFKEVVVTPTHLAIVMEYAAGGELFDRICNAGRFSEDEARYFFQQLICGVSYCHFMQICHRDLKLENTLLDGSPAPRLKICDFGYSKSSLLHSKPKSTVGTPAYIAPEVLSRREYDGKTADVWSCGVTLYVMLVGAYPFEDPDDPKNFRKTIGRIMSIQYKIPEYVHVSQDCRQLLSRIFVANPAKRITIREIRNHPWFLKNLPRELTEAAQAMYYKKDNSAPTYSVQSVEEIMKIVEEARTPPRSSTPVAGFGWQEEDEQEDNSKKPEEEQEEEEDAEDEYDKQVKQVHASGEFQLS

SEQ ID NO: 158618 - protein, 77 aa, Oryza sativa
  unsure (1)..(77): unsure at all Xaa locations
  Clone ID: PAT_MRT4530_58076C.1.pep
GAPREGAGRRVLLVWCAVVFHPAHXEQLWMVLGGLVLLGTALVAWLSLFTSGKCGRLGASAPSSFSQNQKLSKQFSF

SEQ ID NO: 158619 - protein, 544 aa, Oryza sativa
  Clone ID: PAT_MRT4530_58077C.1.pep
MAAAAASSESADAAAAGPSTLSIYKAARRIKRRESTLYNALRSVADDAAFVAEIAALWPALPLVANLRCGLWYLPPRAVAATCYFKSTDGHAGNWAFSTARLNLHLALLAGERGGCIIVDSTRRGKRFPDSMSKTIPIWCCVLNRAIERYRLQTNNKSAAVANKDAEKISESSNWDNSVHLPVWVLETEKNAIEGRIEEWTTQFESCGADIRSLALSLKKPLRPLWISQRTRIWLNEVPELESWDFTPIILVSASASGAVATQRMTSEFSWHYIPGAGDDEESWARGLTPTLFWKHSYDLLDGGPDLCNQLVADIVEKDRVYRAQRGEYSPQITAKPLKCSSHDGPFSNGDHTSIVQPMDSDPPTVTAMDKQNSSDGHILFWIGTSNLAVASTLQVGDSLAEVDCILNCDSTSNLPLTSSENSYLELPMVGSKDDRFSLMKNLPKAVSFANRNLIAGKKLLICCQNGEDISICVALAIITRLFDCDGFFDHGNSFLKGDVTKLEMRKRLVFVCKYAVNARPSRGNLKQVYGFLCSEKEQFSCLT

SEQ ID NO: 158620 - protein, 249 aa, Oryza sativa
  Clone ID: PAT_MRT4530_58078C.1.pep
MKKKKKSKGSVEKMTRRYWNINLKEMIEAGVHFGHGIKKWNPKMAPYISAKRKGTHIINLARTTRFLSEACDLVFDAASQGKSFLIVGTKKRAADLVASAAIRARCHYVNKKWFSGMLTNWSITKTRLSQFRDLRAEEKMEKFHHLPKRDVAILKRKLSTLQRYLGGIKYMTRLPDIVIVLDQQKEYIALRECAILGIPTISLADTNCDPDLANISIPANDDTMTSIRLILNKLVFAICEGRSLYIRNH

SEQ ID NO: 158621 - protein, 35 aa, Oryza sativa
  Clone ID: PAT_MRT4530_58079C.1.pep
MTNMKMILLIRVKIKAPNNNDRAVGGDESKLTMKT

SEQ ID NO: 158622 - protein, 125 aa, Oryza sativa
  unsure (1)..(125): unsure at all Xaa locations
  Clone ID: PAT_MRT4530_5807C.1.pep
RPTLAFLDKAVKPVLVAGPKLRVAKAGGAFVDLADASXHXXXAXPSAKGLVPETLPRFIGTYWGAVSTAFCAEIVESADAYLFAGPIFNDYSSVGYSCLLKKEKAVVVXXDRVNVGNGPRSGCVM

SEQ ID NO: 158623 - protein, 590 aa, Oryza sativa
  Clone ID: PAT_MRT4530_58080C.1.pep
MAPAPATTSSSKRSKKRKQPVAPPPESDSESEELSYDTAAADEEEGEEEAPNQMEELEEEQEEEKKEKKQKKEMSKEKKRKKEKGNEGGSGILTNMLFSELGVSEPTARAIREMNYTYLTQIQARSIPHLLNGKDVMGAAKTGSGKTLAFLIPAIEMLHHAHFMPRNGTGVVVVCPTRELAIQTHNVAKELMKYHSQTLGYIIGGNGRRGEADQLAKGVNLLVATPGRLLDHLQNTKGFIYRRLKCLIIDEADRLLEQNFEEDMKQIFKRLPLNRQTVLFSATQTEQVKEFAKLSFEKNEESTSKPVYVGVDDAETNATVEGLQQGYCVIDSARRFLVLYAFLKKKQNKKVMVFFSSCNSVKFHAELLNFLQIECSDIHGKQKQQKRTTTFFNFCKAEKGILLCTNVAARGLDIPDVDFIVQYDPPDEPKDYIHRVGRTARGEKGKGEALLFLLPQELKFLIYLKAAKISLTELVFNENKVPNLQSHLENIVGENYFLNQSAKEAYRSYILAYDSHSMKDIFDVHNLNLKDVAASFCFKNPPKVNIDLESSASKHRRKMRKVDGGRRHGISAANPYGRKGGDDKRQFARF

SEQ ID NO: 158624 - protein, 81 aa, Oryza sativa
  Clone ID: PAT_MRT4530_58081C.1.pep
MRFSNKALIPSSFAWNPLASSFASTLVLSASSYQSSGAPTSAPSRKEPKCWFYPGQASKVNPGGKERPGGRSCQHFYNPVS

SEQ ID NO: 158625 - protein, 137 aa, Oryza sativa
  Clone ID: PAT_MRT4530_58082C.1.pep
MSYWKTNCMAFLGDIWENETYKATGLPNQVPILAGIHPSNPDLVYFLLEHHLFGVNLYKKMVIHFVDEHYQLLQPIVRSRSLQPLSWRQVQLWKLPPSLHAGSIELSAQHASDLGNLRLKAAQLRRQEHALKRREKM

SEQ ID NO: 158626 - protein, 74 aa, Oryza sativa
  Clone ID: PAT_MRT4530_58083C.1.pep
MQQVASTAMSLRTVMSTDINLLPVKRQAFDVGIDDVGLELKNGYRQQQLKTAIAASLQQLAFPIRPCFFWVRKD

SEQ ID NO: 158627 - protein, 111 aa, Oryza sativa
  unsure (1)..(111): unsure at all Xaa locations
  Clone ID: PAT_MRT4530_58084C.1.pep
MRECISIHIGQAGIQVGNACWELYCLEHGMQPDGQMPGDKTVGGGDDAFNTLLSETGAVKHVRGAVYTDLEPSVIDEVRTGDYRQVFHPEQVIXGKEDATNKLCPGHYTIG

SEQ ID NO: 158628 - protein, 275 aa, Oryza sativa
  Clone ID: PAT_MRT4530_58085C.1.pep
MERAARRGSSGGTGLGGAARHGARGDDGDGSAVATGRCAVRWDGATGWRRATRGGTAVAAVRGARRWTAARRRDGNDGDGGAGLGAARCGDGDGVGRGEAERRAGREGNAAKEGLGLGDLVEHFRPARCGAHVNTDCSKGTRCSTSSQAAHTGRRPGLWLDSQSWGEEMAINVGGEVETIGPSANDSGFLLCNFVGRCTFSSGSPTRPYRPAGLAHLHALHAALANLLLLPKKRVAQTTSSSTASSLLDGFFVFADMYGTFQEAILNLRKHAPNV

SEQ ID NO: 158629 - protein, 41 aa, Oryza sativa
  Clone ID: PAT_MRT4530_58086C.1.pep
IVNLFTSLKLNKIKDLSGKNHNRYCNITQGVPRPVYDQHHK

SEQ ID NO: 158630 - protein, 100 aa, Oryza sativa
  unsure (1)..(100): unsure at all Xaa locations
  Clone ID: PAT_MRT4530_58087C.1.pep
PTPPPYDILTTGPAAREAFICTGECPSTPDFIHLQXCTFVYDXTEPQIKLYPLDMWKYGSALHKRPKLXPYSGRGAISHNWHAPKPHRXTGFRGFEKEKE

SEQ ID NO: 158631 - protein, 65 aa, Oryza sativa
  Clone ID: PAT_MRT4530_58088C.1.pep
MAKIHLEVDDHEMFAAVKRLLPEVDLVPADVGEHLTAKNPRDDAGACLARLVNALQEAKAKKDAA

SEQ ID NO: 158632 - protein, 185 aa, Oryza sativa
  unsure (1)..(185): unsure at all Xaa locations
  Clone ID: PAT_MRT4530_58089C.1.pep
MATAAAADDLDLLLSLDADGGEAVLETPPSSPRRDAATAAAFTPPRAVRPGGTDMSVFRDAVKDYLDATPAAVATSLPKGKRPPKSTETIVDAHSGLRIRSLTASPLEITNRFADIRFVRISAIRNLAGGDSFSGCWATAGVVLDKGAPRVSAQGKEYSIWKMGALDDADVXSVFLFGDAHAHHS

SEQ ID NO: 158633 - protein, 144 aa, Oryza sativa
  Clone ID: PAT_MRT4530_5808C.1.pep
MAHSKNTTRARTAVTASRRTRDWLLRPAEVGLHVAGGGGWRGMASGWSLMASIGYDRIGRGLRRPLRLPSAPARACAIEQRWRPPRITRKLAGRDTANAGRGRQAANHVAVAKHNRRVTDRMQAEEIECCQRVGARKNDYKGCV

SEQ ID NO: 158634 - protein, 122 aa, Oryza sativa
  Clone ID: PAT_MRT4530_58090C.1.pep
TRETMPKRLIEPLTPPSSASVADDRIYGLPPSCHQEQHGTYIHHVDGWICRPQPPPSPKSSSTTTATSACHLSSARLRRRPWNLHGLYVDLDQNPPRRTLRWHHRLPSAEALTRRPLEALPA

SEQ ID NO: 158635 - protein, 84 aa, Oryza sativa
  unsure (1)..(84): unsure at all Xaa locations
  Clone ID: PAT_MRT4530_58091C.1.pep
PPVFKGPVNIVLDTXPPTPRGVMGFSLSPPGGPPVYFPPPFFTLEDKGFPPKSKGPLKFSNSGIPPASFCFPSFAKKVFGSKAT

SEQ ID NO: 158636 - protein, 610 aa, Oryza sativa
  unsure (1)..(610): unsure at all Xaa locations
  Clone ID: PAT_MRT4530_58092C.1.pep
MDLDKSTSTGASLKKLQEDGALPGCGAMEREPGGTDPEPVLGRMVAVEDYILCGFLPPPSEFLLLVLNFYGLSLLHLNPNSIAFLSIFSHLCEAYIGVEPFLDLFRFYYELRWMKSNRIENSDPVFVVPEEQPDKISSCTAKPALTPSLQSFIDIIDDLRVQGLSGETVEHRVGQVMISGPTTASNVPVPLCEKEPAEREAAINALPLTDIIGPLVDHQAAASLKVDVAKEASDVAAAAATMSGGNVPKRGRKFSSVLGNRRKTPTPSELQIEIRRILQASARGIGREIAEARAAAAASANERVDKLARYLAEVREDLQKMRELVAGNERQQQGLEHRMSELENNLSEFRGLLRLTYTGLHQFAGECGVTTTIPANPDEFSLTTSITELXTAMEAIPSKHAARIREDMSNGIYIGACHVLACXIDVEDVQQCGQPELPVIVPALAFESYVLQDDRTKFEVAELERTMLEVKKDQAVEALRGREVWFNSYLRSCCTAMAGVCRELQVSRGDPEESVAGYISWLNGACAQLEGIGKRIDEALKQECRRSSRYAGGHVLACIRDNRPQLHLEFLHEGFARSRWTPAEIDHLAKSMAPLAEKIFQSMDWRWTCW

SEQ ID NO: 158637 - protein, 66 aa, Oryza sativa
  Clone ID: PAT_MRT4530_58093C.1.pep
VSPRSLRKKNWGYKSYTKYISSMKHFPLELPNFPLVSITHLFSMASIKFYFLRLPKSKPFYNQELN

SEQ ID NO: 158638 - protein, 67 aa, Oryza sativa
  Clone ID: PAT_MRT4530_58094C.1.pep
MVYNVVAIPVAAGALFPFTRLQMPPWLAGACMAFSSVGVAENRSEHSRLGFGRTLTEAVGPGPSSVR

SEQ ID NO: 158639 - protein, 120 aa, Oryza sativa
  Clone ID: PAT_MRT4530_58095C.1.pep
TNLSDVVLAVSSAFNGGFYPPPPPPPARPRPPRHTTDDDAAVFAPAKRTPTCEWLGSDEPASQPAVFFFFDAPIQFARGDRGGAACAHTFLPSCSLFIPREERDRFSWAGGDWDGAGVCV

SEQ ID NO: 158640 - protein, 20 aa, Oryza sativa
  Clone ID: PAT_MRT4530_58096C.1.pep
YTPTTSNKKTPFFLMYGSEA

SEQ ID NO: 158641 - protein, 44 aa, Oryza sativa
  Clone ID: PAT_MRT4530_58097C.1.pep
EKGKTNNMTYCTEELKRDQETHLIFTHGRCLHTKTLYWFATSIK

SEQ ID NO: 158642 - protein, 172 aa, Oryza sativa
  Clone ID: PAT_MRT4530_58098C.1.pep
MAGGDGATYKGGIKAYWKRRGYGRLDPASSAHRRPRLPTAELGDGRGAAGGAGRWRRGWRVRRRGLGRRILRALSPRRLLARLRDAYVRGMLRLASSAAVAGGGSALYGGPAGGADPFGRPRPLREYDEKALVEIYRSILARGGGGGGGVVPVAGDAAAVVAVARLPTVAGA

SEQ ID NO: 158643 - protein, 39 aa, Oryza sativa
  Clone ID: PAT_MRT4530_58099C.1.pep
MAGGTMDISCPALAGKATAKVFGEGRITIRKWTAKPNPV

SEQ ID NO: 158644 - protein, 195 aa, Oryza sativa
  unsure (1)..(195): unsure at all Xaa locations
  Clone ID: PAT_MRT4530_5809C.1.pep
MAFASSLLPAPPASVAPELASFLPPQAKRGAVSLAATRRRGARIGVRAEVNESGSALAADAFAQVKHVLLPVTDRNPYLSEGTRQAAATSASLAKKYGANITVVVIDDKPKEEFPEHDTQMSSIRWHLSEGGFTEFGLMERXLGEGKKPTAIIGEVADELELDLVVLSMEAIHSKHVDGNLLAEFIPCPVLLLPL

SEQ ID NO: 158645 - protein, 60 aa, Oryza sativa
  unsure (1)..(60): unsure at all Xaa locations
  Clone ID: PAT_MRT4530_580C.1.pep
PLQGLEEIKALKPEAPKPGXGFKFSGQVPGLGRIEVNHVYTEGINLQANRPLVWAISIGR

SEQ ID NO: 158646 - protein, 66 aa, Oryza sativa
  Clone ID: PAT_MRT4530_58100C.1.pep
VIPIPPGHGNSFGSLDEANIPQLLQKQKNFISQYAIVGHNIPLNESLLNIKHKDKHLLFPDKDLPE

SEQ ID NO: 158647 - protein, 240 aa, Oryza sativa
  Clone ID: PAT_MRT4530_58101C.1.pep
MGDWDPRGPPAFAALGFFPCSSAPPPPPPSLPLPTMTAAEIGKQEEELRAQIEEQKLNEGDEPVVVEDDDDDEDDDDEDDKDDDDAEGGDASGRSKQSRSEKKSRKAMVKLGMKSITGVSRVTVKKSKNILFVISKPDVFKSPTSDTYVIFGEAKIEDLSSQLQTQAAEQFKAPDLSSMLSKPEASTAAQEDDEAVDETGVEPKDIELVMTQATVSRSKAVKALKAANGDIVTAIMELTT

SEQ ID NO: 158648 - protein, 188 aa, Oryza sativa
  Clone ID: PAT_MRT4530_58102C.1.pep
MERSPEVVQHKAANRAAEDDHTTSIPWLKLGVVDALTAEAGKLPESNPKPAVAAPHRTFSCNYCMRKFFSSQALGGHQNAHKRERCAPRKSHGFQQQHLMVGLSPTAPSSFLHHMRVNPHATILKVNRGYSSADGVVVAKFHGGQMSSSWVPFAVEHGRGSVWPGSFKASSQEQKKRTEEDLDLSLRL

SEQ ID NO: 158649 - protein, 736 aa, Oryza sativa
  Clone ID: PAT_MRT4530_58103C.1.pep
MASYGVDTRPAAAAAGGGGAGAGAAGEGALSFLSRGLREDLRLIRARAGELETFLTAPVPEPELLARLRRAYSSSAGTTRLDLSAIGKAFGTGVVGRGSRGARWGWEEVQEAEEWEPIRMVKARLREMERRRQWQATDMLHKVKLSLKSMSFVPEASEEVPPLDLGELLAYFLKQSGPLFDQLGIKRDVCDKLVESLCSKRKDHLAYNSFPASEPSAFSNDNAGDELDLRIASVVQSTGHNYEGGFWNDGHKYETADKRHVAIVTTASLPWMTGTAVNPLFRAAYLAKSSKQDVTLVVPWLCKSDQELVYPNSMTFSSPQEQEAYMRSWLEERVGFKTDFKISFYPGKFQKERRSIIPAGDTSQFIPSKEADIAILEEPEHLNWYHHGKRWTDKFNHVVGVVHTNYLEYIKREKNGVIQAFFVKHINNLVARAYCHKVLRLSGATQDLPKSMICNVHGVNPKFLEVGERIAAERESGQHSFSKGAYFLGKMVWAKGYRELIDLYAKHKSDLEGIKLDIYGNGEDSHEVQSAAMKLNLNLNFHKGRDHADDSLHGYKVFINPSISDVLCTATAEALAMGKFVVCADHPSNDFFRSFPNCLTYKTSEDFVAKVKEAMARDPQPLTPEQRYNLSWEAATQRFMEHSELDKVLSSSNRDCTTSTSGCGKSGDNKMEKSASLPNMSDMVDGGLAFAHYCFTGNELLRLSTGAIPGTLNYNKQHSLDLHLLPPQVQNPVYGW

SEQ ID NO: 158650 - protein, 519 aa, Oryza sativa
  unsure (1)..(519): unsure at all Xaa locations
  Clone ID: PAT_MRT4530_58104C.1.pep
MGTRRVGLLLLLLLAAVLLQPLLAAAAAEGVVRIALKKRQVDETGRVGGHLAGEDAQRLLARRHGFLTNDAARAASRKARAEAEGDIVALKNYLNAQYYGEIAIGTPPQMFTVIFDTGSSNLWVPSSKCHLSIACYFHSRYKAGQSSTYKKNGKPASIHYGTGAISGYFSQDSVKVGDVAVKNQDFIXLRGSQVLHSWLQSSMAFLGLDLRKSRXGNAVPICRFPVTDIAKQTHRYNMVRQGLVVDPVFSFWFNRHADEGQGGEIVFGGIDPNHYKGNHTYVPVTRKGYWQVDLILKLVGILCSWVCSNSRFWNFTAYWSHGMAIITQINEKIGATGVVSQECKAVVSQYGQQILDQLRAETKPAKVCSSVGLCTFDGTHGVSAGIRSVVDDEVGKSSGPFSSAMCNACETAVVWMHTQLAQNQTQDLVLQYIDQLCDRLPSPMGESSVDCSSLASMPDIAFTIGGNKFVLKPEQYILKVGEGTATQCISGFTAMDIPPPRGPLWILGDVFMGAYHTVL

SEQ ID NO: 158651 - protein, 69 aa, Oryza sativa
  Clone ID: PAT_MRT4530_58105C.1.pep
MDAIDSVVDPLREFAKDSVRLVKRCHKPDRKEFSKVALRTAIGFVVMGFVGFFVKLIFIPINNIIVGSG

SEQ ID NO: 158652 - protein, 191 aa, Oryza sativa
  Clone ID: PAT_MRT4530_58106C.1.pep
IASGTGQSSRRRAPRCPCHRRPTSRRKSNHPASGGGGAPAGPSSQLLPTRRRRRDPRRREQQQAARSRRRQAPPPPPPSSCLAAADPPRKRPPRPPRRRRRRERRRPRGPAWRGCAAACARSGGRRAPASSGTSSGSSSRRRAPGTSAATAAATGSASALPPPPPPPRPPPSQTPYELEARENNNNNKKKL

SEQ ID NO: 158653 - protein, 346 aa, Oryza sativa
  Clone ID: PAT_MRT4530_58107C.1.pep
MASLSVPPVPTDPRRDAIDLHRAFKGFGCDATAVTAILAHRDASQRALIRRHYAAVYHQDLLHRLAAELSGHHKRAVLLWVLDPASRDAAVLHQALNGDVTDMRAATEVVCSRTPSQLLVVRQAYLARFGGGGGGGLEHDVAVRASGDHQRLLLAYLRSPRYEGPEVVDMAAAARDARELYRAGERRLGTDERTFIRVFSERSAAHMAAVAAAYHHMYDRSLEKVIYRSCTAAYALALVFSLSEFNGGRAVKSETSGNFGFGLLTILRCAESPAKYFAKVLHEAMKGLGTNDTTLIRVVTTRAEVDMQYIKAEYHRSYKRSLADAVHSETSGNYRTFLLSLIGRDR

SEQ ID NO: 158654 - protein, 318 aa, Oryza sativa
  Clone ID: PAT_MRT4530_58108C.1.pep
SISCSDIDSTQSSDRSTSGGAPSTDSKLNDIRSIQDADRADSDEKCVTPEDLRGNKNISGAELKRQDSSKSVHQHHRGESKQPKIIEKIMTTLREESRLRENNSPVSSSGVKLTSAVSNKNQAEQSSESSRPHSGVSYSSKFGDISSNGWTNTSDECVDPVQAPLQLKQLSPTVEHCPKLKNSGSSTPEPAKQIAENGSSASGMSKTKSSPSSSRRPSPQRQTGAGIPIVPFTVSKRAHIKAESEKTPPRPAHSPNNSLHNLPPLIPISTNLSEENIKLGNSQAMPAPLEFVTAASKEDISFYSNSVVDCVEKAEPSE

SEQ ID NO: 158655 - protein, 73 aa, Oryza sativa
  Clone ID: PAT_MRT4530_58109C.1.pep
STWLSGDWWGFRHAPVYRASQSPWAQLWKSAQEHLTQLQFWWTPSQLSWLSHFVGFASMLRIFHLKTHASGYI

SEQ ID NO: 158656 - protein, 961 aa, Oryza sativa
  Clone ID: PAT_MRT4530_5810C.1.pep
MRVFFLFLMFDWCLIPTATVHRLLLLCFASLPCAPRPHENPLLFLTLPLSVLASFFEDSPAQQKEAKDDPVLNDQFRRICARKIAAPSICSRNTISMEAPKLRFVRCPGCLQLLVEYPTIAVYQCGGCGTILRAKNQVAPAVNANAESGEHNEFSNNSTGGSQNNKLICTDGQKIPPSSDAQPGVLQEKITFASEEKTMSSSNSIDSSEHVNIECSLLDGDASNHDVRTEGINDEDKVTVSNSSLDSVRKVENVETDGNEKGSFTDDGSISNEVATTQSMVHMDGAGSDNNFTEVQSAAEGKCALSDANLDSQEIVAICQPDNISVGTKERVQPYEGFNVESHEDLIEELVRSLSLSDDEEEFVDIAENSELNDALCSQMGSCRFSLGSKMNEGPRTDPHGRLIEELEMSFSDAEEPLDQNIMVSLNDIEKPTLDEVSKENHILEEDGKESHILDVDGKESHILDVDGKQNHILDEHGKENHILNEDDKENLILDKGGEDTLDAGGANSYEERVLPSDDGLLKSGQSFQQCELVAVNMAEKDEGHLEETNMANHAEANSGIAAVLSNLSNDKFCAILPPSCDGRKEEKSNIHRGRELCQGLSLDSVDFRSIQNFIESQMDGTSSSLSSGSPSHGDLEHNRSNRFKKIDRLERLRKMDDLRDQLNRLSSQKGLENRYKNKGPGVLQEQISYRHLEQHPCGFDGDSILDSDIIDSYYDQGNPPRYPPPDPFSPTHSHYHCGHGQPHIPYNCSAWEFNSYYQSSYAGSTVLEHVSLRSSYKEQKRAVKKSILRSLSGASPFTICNGCFNLVQVPSDIYVSKKKIAKFQCGRCSKALMLSFPATNSDDAKLSNKEVNRKPNKPVHNSVVGMEGGYSFSAECSRGDPVSISEECGASISRSFSGRTRAAVAASGSGKKVSDSALHRLMGYDSASQLLRRSRAFEDGYDSFESMVPVSNRVSRRKNL

SEQ ID NO: 158657 - protein, 308 aa, Oryza sativa
  Clone ID: PAT_MRT4530_58110C.1.pep
MGNAAAVPSSCASADAAPSTTPTIKLLIAKEAQVVLFAEAGKDVVDFLVGLLAMPVGAVVKLLAGENALGGVANVYASVRRMDAAYMQSAEARDALLNPAPAHPCLAATAGGFPSLVQPPRVQAPYVAPPPPPPPPPGHPAYQCSTIRPTTPSLPSLKAAFPPFGAGMSSDTGCRCSTCLAAAQTGKGFVRDVVTYTVMDDLTFMPMSSISSIALLSKLGVEDLSALEEKTVKIGYQEGLEILKASLQSKTVLTDVFLNRKKKARAGDKHHRSGDKNVDARATSEKKDAAAAVQMEKSAPPMPHDFDV

SEQ ID NO: 158658 - protein, 156 aa, Oryza sativa
  Clone ID: PAT_MRT4530_58111C.1.pep
MRSGLTLPLCVGPTTPHVSSRLRTLWIPAANPNPCNPESDARRVDGVGIRFRPLGSRRIVRRLKSPLLHAVGSLTYNCPTSGLINLCAAVAVPLRLTPGHVRQLMAAAGSARASIRQRKKVDPPPNQMVKLRSFHPWKSFANAETVAMKEQANDRI

SEQ ID NO: 158659 - protein, 161 aa, Oryza sativa
  unsure (1)..(161): unsure at all Xaa locations
  Clone ID: PAT_MRT4530_58112C.1.pep
WGGRAARASTTAGGTGPPCSLPPAARPATTSPQVSLLPAPAQPPQPQPRQRSVSPSLPPPSPSPLSVAPPPPPPPRTSPXRHPPRPAALACAVTPPNCVGTTSPPALPTEPCWPSPCARPRSAAPAEAPHRPLPLLLWPPRPAEPGPYARPRNTIPIKAPH

SEQ ID NO: 158660 - protein, 42 aa, Oryza sativa
  Clone ID: PAT_MRT4530_58113C.1.pep
RLGNSLYYGGHRCEAFPICGRRTLKIGVVDSESYSSDKCVKT

SEQ ID NO: 158661 - protein, 228 aa, Oryza sativa
  Clone ID: PAT_MRT4530_58114C.1.pep
GCRQCQPSLMSFPKMAGIFNRNMYKSRKKGTPLYISGKRMFTAREIKVITNNNSTIIGRGAFGNVYLGILENDRKVAVKRYIKGTEHEEDRCGKELNLPELIHKNIIQLLGFCCKLDAVILVYEFANKRLCDILHGTSNFPFPLDLRLDIAVGSAEGLAYMHSRSKPILHGDVKTTHILLDDNIVPKISGFGSSQIGEDSTWVVAADINYIDRMYIQTGLFTRKSDVY

SEQ ID NO: 158662 - protein, 45 aa, Oryza sativa
  Clone ID: PAT_MRT4530_58115C.1.pep
QLKCQSFKSIQKYSIKSRRAHSTKKSKGSLLATENQPFSSFRTRG

SEQ ID NO: 158663 - protein, 34 aa, Oryza sativa
  Clone ID: PAT_MRT4530_58116C.1.pep
LIRIPPIRLIRRRRARNAGLLLLQGWGGARASAS

SEQ ID NO: 158664 - protein, 177 aa, Oryza sativa
  unsure (1)..(177): unsure at all Xaa locations
  Clone ID: PAT_MRT4530_58117C.1.pep
MKRQKGTTKVYLETSNGFHSHPYSFISLDLASLTTWIFHILVLFEKLISQIDLRKTYPRNGPFLGARVAGAVPTPTWRGDAEELKRTNHXKNKLKRTKYVACGIFQSSTEKLLSSKTQSCKRNXGCNFFCRYSWIYYLLDSESRNRNGDEGWVXGGDANMAGALLQPHRFACATVAG

SEQ ID NO: 158665 - protein, 66 aa, Oryza sativa
  Clone ID: PAT_MRT4530_58118C.1.pep
GQGYRASQPGLDLLLMPRPLWNNEFTPPSPESFNHITDDGHPRRISRARCVLLLQGRSAAYIPICG

SEQ ID NO: 158666 - protein, 113 aa, Oryza sativa
  Clone ID: PAT_MRT4530_58119C.1.pep
NEGDNISYLKILFRLEFRTVGSVTFACVEELPCLGVGAAGPSDGNDGQKAQVAREEQGGRCTSPIVYSYARHRPLAARMIARVRLDDKATYCPTKTSLFYKYFGRVGSTREFR

SEQ ID NO: 158667 - protein, 124 aa, Oryza sativa
  Clone ID: PAT_MRT4530_5811C.1.pep
MLRKGEAPGHQTPPHLHKDDGDDDDDAPSGFVKLISAEGFEFVVDKKAAMVSNTLRNMLTSPGGFSETREGEVRFPEISTPILEKICQYFYWSLHYSSGKETSEFQIEPEITLELMMAANYLDT

SEQ ID NO: 158668 - protein, 291 aa, Oryza sativa
  unsure (1)..(291): unsure at all Xaa locations
  Clone ID: PAT_MRT4530_58120C.1.pep
MCLPMRRTAEAWVDGGAGEAEKYLSTRGVVAAALEGSQMAPEILARHRSLRRPLPAPPPDRRDRAAHLRARPLPEPPLHLRHRRIDATTMEGPRGRGEKSSSGERGLSPVRRMLEVVDDGRRGHAFTVRIRDGGYRRRGGQAFTAQLMVGRAVRRGRRRGRRGAGASQTGVGGAADAPLNRPKVFLIYQCSDPWRHAAYALSYAQHASGTGTPNSAAPXRVSAALGCTLAMPPPPPPPHQRQPPPPPPPRRRQPPPPSPRRRIVAEYTNNDIDDVVVIIIIIDVFFVYIRG

SEQ ID NO: 158669 - protein, 52 aa, Oryza sativa
  Clone ID: PAT_MRT4530_58121C.1.pep
LKKWGAKTNDPIVTRPVRWESKLHFSAGVVMLHKPSLKIYRLFGLKKIFLDI

SEQ ID NO: 158670 - protein, 82 aa, Oryza sativa
  unsure (1)..(82): unsure at all Xaa locations
  Clone ID: PAT_MRT4530_58122C.1.pep
LLSRIPLRGANWGXYLRGGFPAGFTXGLFHHPRQPCGLSLGFLGTPNXLYSSHAVSTGSNTYPALRREGLVPSFXALISSSR

SEQ ID NO: 158671 - protein, 68 aa, Oryza sativa
  Clone ID: PAT_MRT4530_58123C.1.pep
AEHSHIVATKCFTLGKRPALLVQKIFRLPSWLAGFIFGRQNTITIHVAHLLTYRSSSPLFFKVAPNFT

SEQ ID NO: 158672 - protein, 42 aa, Oryza sativa
  Clone ID: PAT_MRT4530_58124C.1.pep
RIMGSFGTRRPLSCQPPPACLIPTDDVPELVFSPSAPRPHAQ

SEQ ID NO: 158673 - protein, 780 aa, Oryza sativa
  unsure (1)..(780): unsure at all Xaa locations
  Clone ID: PAT_MRT4530_58125C.1.pep
MDQSTIDRSWMYAKNLKRYSTEYRKGVINFMNAAEEDRIRRSSDYMCCPCADCKNENMFDSGEDVHGHLIQRGFMEGYTCWVKHGEQESESGAAANRSGAHNQEDENEHDMFIPSPLGGEMVDVDHDLLQDMLRDIEDPAQNERDGMKFSRLVSDSETPLYAGCKAKHTKLSVTLDLMKLKASSGWTDKSFIDLLGILKAMLPVENTLPETTYEAKQVLCPLGLEVRRIHACPNDCILYHKQYADLDTCPVCKASRYKRKKSADEGNKSKRGGPAKVVWYLHIIDHFKRIFANPNEAKLENFKLRVLLFCTINDYPALGNLSGQTIKRKKACSDCKEHTRSLWLKKSRKMVYXGHRRWLPLRHTFRRKKKIFNEKNDGLNARLDLQDMNIRSELQPIRDAETGKVYLPPACHTLSKDEKITMLSCLKDIKVPSGYSARIIAIRGILPPKVRHTIQRLCAFFNAIGHKVIDPEDLDGLQTDIVNTLCHLEMFFPLAKPEGSIIEGYTTEEAIEFCVNYMSDADPIGVPASRHEGRLSGVGTIGRKRIRPDQASYAQAHYAVLQHMAEVGPYFEEHLAKIRDENLGRSDAWINREHNSRFNEWFKNRVTMSTDVPNETVQLLRMGPSWTIDTWQGYDINGYTFYTVKQDDKSTVQNSGVRIDAFQDQVGSNTYYGRIEEIWELNYVKSKEGFTLVDLSKVGYADEPFVLAKQVEQIFYIKDPSNKKMHIMRDGKRRIVGVDNVVDEEEYNHNLHVRPHIDLDDDPQEPVAYARSDHTKGITL

SEQ ID NO: 158674 - protein, 43 aa, Oryza sativa
  Clone ID: PAT_MRT4530_58126C.1.pep
PDLLSTGSSTGDPAKRFHGSDRNKDERERERSNGLIPRRLRRG

SEQ ID NO: 158675 - protein, 1400 aa, Oryza sativa
  Clone ID: PAT_MRT4530_58127C.1.pep
MVYMGHRRWLPLRHAFRRKKKIFNGKRELQPAPKDLSGDEVHNMVKDISNEFGKKRKCRKTKEKAYHTLSKDEKIAMLSCLKDIKDPLGYSARIIAIRGILPPKLRHTIQRLCAFFNAIGQKVIDPEDLDGLQTDIVNTLYHLEMFFPLSFFDIMVHLPVHLMKQTKLCGPAFLREMWLFERYMGVLKSYVRNRAKPEGSIIEGYTTEEAIEFCVNYMSDADPIGVPASRHEGRLSGVGTIGRKRIRPDQASYAQAHYAVLQHMAEVGPYFEEHLAKIRDENLGRSDAWINIEHNSRFNKWFKNRVTMSSDVPNETVQLLGMGPSWTVDTWQGYDINGYTFYTVKQDDKSTVRNSGVRIDAFQDQVGSNTYYGRIEEIWELNYVKFKVPLFRCRWVNLRTGVKANKEGFTLVDLSKVEQIFYIKDPSNKKMHIVRDGKRRIVGVDNVVDEEEYNHNLHTMSQQGEPMSTTTSGSLRACTPRTGNKIPKERFRITAVDAVGLPTSPRKILSRFRSICGVIGRQKFSILQDDIKLVPAAEKDIAWLTFKESFDYPAEHEDHLRRAAFKVMGNAWKNFKTKLVGEFVYNPANPDPRKKFPWITEQVWEEFHAKKSTPESRARSEAYRLLQTRNQHPHRLGTAGYASKEEEWQREDEEAEESNTPLVFSDIPHPRARNWARARYQKNDDGTIFMPNAEDQRVYEAIELVAEQQASQEACSQRCEDDLLTKSLGNKEHRGQTRGVGSSIPWKYGFPNYAWQYKKRTSNKAEKDARLEAKIRASIRAELTSEFNEKLKSMRAKIRQEIREEQQNPQLAAAAAHEELGSPTQKRSSCASTELAKNPTSADSAVDHITPRDLRTRVHGVQLRGDYTKVQVDSVKPEYELFPLKYPPNDEVLSLGNARGTFIQWPKDLIEIRVTARPTTAPGGRPPKRPASAPSAPPAQDRHAQSYDVQLQYDTDFGEDRTEADSKAIHEPPLMKKSRKAHSSPQRITLDKPEAKGRGRGGEVQASLLAPRKLDLGKGQEETKGKEVKKKYVAPQEFQLGMPLVGDDVLAAMGTACKDLHLYYMEKSNARKPNKATDILGEHDGKPFLGPTNYIVVDFKDLFDLYRLRAVDTSLLKCYSLLSCQWCQKNAPEVAFLDPQVVTVTNLQNVRQGMVNYIYDTLWSRRDKEYIMCAYNQYAHWILLVITPKWSTCHYLNSRIDKNAYDWTPIQLAIDEAWAQYVQRGGLRKTGHDTLIHKKDFPVKQQIGDQCGFHVCHNMRLLYREKVKTLAEFEMCHTYSSSSIVQVTGRIQIFSVNITDLGSAMRNSGGSTALPLSPPLHETRHCHRMKPEATTLTINDLPGYRSTAPMHAGGVFTQSEATTLKPTPLPMRGEDSGREWEREERESGTRGEEWERGNKW

SEQ ID NO: 158676 - protein, 195 aa, Oryza sativa
  Clone ID: PAT_MRT4530_58128C.1.pep
PRVRPRVRPRVRPHIMTSKSLLVEILKTLKNTFWPFQSNQSGSLFLNAVSANQHGPGNVGDNQTTPHGNISTIEMAAAKAAQHRLMRGVWTNVRFGDMRRALAACERLILLNHDPRELRDYAALLYHCGGWAALEQSAGDHGGRSGEHPESAGKLDFSRGWLEQPQITCHELLDEELRAVVELDRTMRYMCIRFY

SEQ ID NO: 158677 - protein, 129 aa, Oryza sativa
  Clone ID: PAT_MRT4530_58129C.1.pep
SSHNTSSCVRVCYIRVSCSAISRGISKHKPISAADDRDQTIYPSTSVCRACICADLITDRVHSPWLEPCIKIVPGKNNLIICSIGVREDDACGSYTGYDGADAPSRSSTRIVLQASGAACPRLGNDDPQ

SEQ ID NO: 158678 - protein, 103 aa, Oryza sativa
  Clone ID: PAT_MRT4530_5812C.1.pep
KHPRHGGVPERRRVPTPAWTRRAVGALDNSYYHNNLQNRVLFKSDWVLRTDGDAAADLAEYRDNATKWDVDFAAAMAKLSKLPAEGTHFEIRKTCRCTNQNYY

SEQ ID NO: 158679 - protein, 74 aa, Oryza sativa
  Clone ID: PAT_MRT4530_58130C.1.pep
HPLFLHSVCIPQRRPGVRIVGTTDVTHNMTQTTDSQPRGSSLPPNTVPVADTSQLERVKHLLLRQTWNTGPTNI

SEQ ID NO: 158680 - protein, 368 aa, Oryza sativa
  unsure (1)..(368): unsure at all Xaa locations
  Clone ID: PAT_MRT4530_58131C.1.pep
TLAPPPTQLSPPPPPRPSPAATEPSTASTEPVASTDRRRPPPNLAPPPPSPPPPPSPSLPPSPPTLSPRLPPPSLLGPXIRTTATSSLTTPTEPAPPPPSLYTDWTGNKIPKERFRITVVDAVGLPTSPRKILSRFRSICGVIGRQKFSILQDDIKLMPAAEKDIAWLMFKESFDYPVEHEDRLRRAAFKVMGNAWKNFKTKLVGEFVYNPANLDPREKFPWITEQVWEELHAKKSTPESRARSEAYLLLQTRNQHPHRLGTAGYASKEEEWQREDEEAEESCTPLVFGDIPHPRARNWARARYQKNDDGTIFMPNAEDQRVYEAIMELVAEQQASQEACSQRREDDLLTKALGNKEPRGRTPGGWAS

SEQ ID NO: 158681 - protein, 425 aa, Oryza sativa
  Clone ID: PAT_MRT4530_58132C.1.pep
MSCAAVWVPSPCSPSPVPPRHRRGRWRRGSASSSSSSAFRACAGGDASGDGGGGGRPARMVLHDSLEGAGVSTEHARAAREGFAKQVGRLTRLDAETSIAISRGADLARAALCVAAEDDSLVSHSSVPLPVEAFVSRLDDLSTGFLADGYLPPAGAPPQVFLDHLDRYLYVHKVLTCRLGSALMLSLIYSEILKMLRLYGLLEFNVEIFFPHDLNSLPRGYDKHKSKLGDEPHIMTSKSLLVEILKTLKNTFWPFQSNQSGSLFLNAVSANQHGPGNVGDNQTTPHGNISTIEMAAAKAAQHRLMRGVWTNVRFGDMRRALAAVPNQRFVPFIFMAACERLILLNHDPRELRDYAALLYHCGGWAALEQSAGDHGGRSGEHPESAEGGNNQTGVPTMTCHELLDEELRAVVELDRTMRYMCIRFY

SEQ ID NO: 158682 - protein, 1078 aa, Oryza sativa
  unsure (1)..(1078): unsure at all Xaa locations
  Clone ID: PAT_MRT4530_58133C.1.pep
FYFVTIDRSWMYAKNLKRHSTEYRKGVINFMNAAEEDRKRRNSDYMCCPCADCKNENKFDSGEDVHGHLIQRGFMKGYTCWGKHGEXESGNRAAADRSGAHNQEDEDEHDMFKPSPLGGEMVDVDHDLLQDMLRDVEDLAQNERDGMKFSRLVSDSETPLYAGCKAKHTKLSVTLDLMKLKASSGWTDKNFTDLLGILKSMLPVENTLPETTYEAKQVLCPLGLEVRRIHACPNDCILYHKQYADLDACPVCKASRYKRKKSADEGNKSKRGGSAKVVWYLPIIDCFKRIFANPNEAKLVRWHATERRNDGLRQPGNDIDVFLEPVIDDLEILWKEGVETWDAYGQENFMLRVLLFCTINDYPALEKNVCESLVGLMLNIPKKTKDGLNTRLDLQDMNIRSELQPIRDAKTVETSNIDRVYLPLACHTLSKDEKIAMLSCLKDIKVPLGYSARISKYVKLDDLKLVGMKSHDCHVLITQILPVAIRGILPSKVRHTIQRLCAFFNAIGQKVIDPEDLDGLQTDIVNTLCHLEMFFPLSFFDIMVHLPVHLVKQTKLCGPTFLREMWPFERYMGVLKSYVRNRAKPEGSIIEGYTTEEAIEFCVNYMSDADPIGVPASRHEGRLSGVGTIGRKRIRPDQASYAQAHYAVLQHMAEVGPYFKEHLAKIRDENLGRSDAWINREYNSWFNEWFKNLVTMSTDVPNETDQVGSNTYYGRIEEIWELNYAKFKVPLFHCRWVNLRTGVKADKEGFTLVDLSMVGYADEPFVLAKQMHIVRDGKRRIVGVDNVVDEEEYNHNLHFIYMLRLFISDIQFIVIDCSTELCIFVILKKRRRCLSKACSQRREDDLLTKVLGNKEHRGRTRGVGSSVPWKYGFPDYAWQYKKQTSNKAEKDARLEAKIRASIRAELTSEFNEKLESMRAKIRQEIREEQQNPQAAAAAAHEELGSPTKKRSSCASTEVAENPTSVDSAVDHIAEPTSCTLTIRLMPTFTVPAAEGLAYKPTPETRVHGAQLKGGRAKVQVDSVKSEYKLFPLKYPPNDEVLSLGNARGTFIQWPKDLIEIRVTARLSRPEIHEPEFLS

SEQ ID NO: 158683 - protein, 1133 aa, Oryza sativa
  Clone ID: PAT_MRT4530_58134C.1.pep
MSTTTSGSSRARTPRTGNKIPKERFRITVVDAVGLPTSPRKILSRFRSICEVIGRQKFSILQDDFKLVSAAEKDIAWLTFKESFDYPAEHEDRIRRAAFKVMGTARKNFKTKLVGEFVYNPANPDPREKFPWITEQVWEEFYAKKSTPESRARSEAYRLLQTRNQHPHRLSTVGYAGKEEEWQREDEEAEESCTPLVFGDIPHPRARNWAKARYQKHDDGTIFMQNAEDQRVYEAIKELVAEQQASQEACSQRREDDLLTKALGNKEHRGRTRGVGSSVPWKYGFPDYAWQYKKRTSNKAEKDARLEAKIRESIRAELTSEFDEKLESMRAKIRQEIREEQQIPQAAAAAAHKELGSPTEKCSSCASTELAENPTSIDSAVDHITEPTSCTLTVRVMPTFTVLAAEGLAYKPTPETTVHGAQLRADCAKVQVDSVKPEYELFPLKYPPNDEVLSLGNARGTFIQWPKDLIEIRVTARPTTAPGGRPPKRPASAPSAPPAQDRHAQSYDVQLQYDADFGEDRMEADSKAIHKPPPMKKSRKAHSSPQRITLDKPEAKGRGRGGKVQASLLAPRKLDLGKGQEETKGKEVKKKYVAPQEFQLGMPLVGDDVLAAMGTTCKDLHLYYMEKSNARKPSKATDILGQHDGKSFLGPTNYIVVDFKDLFDLYRLRAVDTSLLKCYSLKTGHDTLIHKKDFPVKQQIGDQCGFHGTITKSLTTSFEEAMMNTYYATVVIVTFLDAMWLIAPPVERVFFYRLGDGGGGATCDVDVALSRLVDSLARALHVFYPLTVRLRRTPGKANRYELFYQPGDAIAFTVAEHTASVSMSWPRMTRGRLPGLSRSCRSSRMAARCWPCRPPCCCGRRRRAASPSASPCTTPPATARAPRTSSTPGPPSAQAPPPPVIDRTSIPEREDIHHVKTRTTNSPDPDVVDSKLLTTFTLSRENLQSIRDRVSAAACCLRGAGGDVEAEPRNHGRRAHLVFATDLRSRMEPHIPDKYLGNCIGTCFASAPRMDIAATGADGLFAACAAIAAAVDEGMRYDQGYWDRCREHRAEVTTWPLSVAGSPRFRVYDVDFGFGSPAKVEIVSVAKTGAMSVAEGRGGCSGGIEIEVGIALSPERMERFRRCFRDEVAWLSS

SEQ ID NO: 158684 - protein, 174 aa, Oryza sativa
  Clone ID: PAT_MRT4530_58135C.1.pep
EEGGTEDERVVGELPPARRAARDDEDLWKLKPTRSSRASPPPPSSSRPRGRSVPPPAPTPAPSALRCPPPRRIPSTAASSASHSRTAFSSCPSSAARGSGGRGPLRRRERGRRGQRKRQRTSTCASVRRRRQSSARLASPPSAAGGSLPGEELCALCPPRTAVDPAPSAHRRRP

SEQ ID NO: 158685 - protein, 1691 aa, Oryza sativa
  Clone ID: PAT_MRT4530_58136C.1.pep
MDQSTIDRSWMYAKNLKRYSTEYRKDCKNENMFDSGEDVHGHLIQRGFMEGYTCWVKHGEQESGSGAAADRSGAHNQEDEDEHDMLIPSPLGGEMLKASSGWTDKSFTDLLGILKAMLPVENTLPKTTYEAKQVLCPLGLEVRRIHACPNDCILYHKQYADLDACPVCKASRYKRKKSADEGNKSKTGGPAKVVWYLPIIDRFKRIFANPNEAKLVRWHATERRNDGPRQPGNDIDIFLEPVIDDLEILWKGVETWDAYGQENFKLRVLLFCTINDYPALGNLSGQTIKGKKACSDCKEHTRSRWLKKSRKMVYMGYRRWLPLRHAFRRKKKIFNGKRELQPAPKDLSGDEVHNMVKDISNEFGKKRKRSKTKEKGMWKKKSIFWRLPYWKDLDVRHCIDLMHVEKNVCESLVGLMLNIPGKTKDGLNARLDLQDMNIRSELQPIRDAETGKVYLPPACHTLSKDEKIAMLSCLKDIKFPSGYSARISKYVKLDDLKIVGMKSHDCHVLITQILPVAIRGILPPKVRHTIQRLCAFFNAIGQKVIDPEDLDGLQTDIVYTLCHLEMFFPLSFFDIMVHLPVHLVKQTKLCGPAFLREMWPFERYMGVLKSYVRNRAKLEGSIIKGYTTEEAIEFCVNYMSDADPIGVPASRHEGRLSEVGPYFEEHLAKIRDENLGRSDAWINREHNSRFNEWFKNRVTMSTDVLNGTVQLLGMGPSWTVDTWQGYDINGYTFYTVKQDDKSTVQNSGVRIDAFQDQVGSNTYYGRIEEIWELNYVKFKVPLFCCRWVNLRTGVKAEKEGFTLVDLSKVGYADEPFVLVKQRLVTREGYQVLAQSEGKELGPIKRRTRRLMSTTTSGSSRARTPRTGNKIPKERFHITAVDAVGLPTSPRKILSRFRSICGVIGRQKFSILQDDIKLMPAAEKDIAWLTFKESFDYPVEHEDRLRRAAFKVMGNAWKNFKTKLVGEFVYNPANPDPSEKFPWITEQVWEEFHAKKSTPKSRARSEAYRLLQTRNQHPHRLGTAGYASKEEEWQREDEGAEESCTQLVFGDIPQTRARNWARARYQKNDDGTIFMPNAEDQRVYEAIKELVAEQQASQEACSQRREDDLLTKALGNKEHRGRTRGVGSSVPWKYGFPNYAWQYKKRTSNKAEKDARLEAKIRASIRAELTSEFDEKLESMRAKIRQEIREEQQNPQAAATAAHEELGSPTQKRSSCASTELAKNPTSVDSAVDHIMEPTSCTLIVRVMPTFTVPAAEGLAYKPTPETRVHGAQLRADCAKVQVDSVKPEYELFPLKYPPNDEVLSLGNARGTFIQWPKDLIEIRVIARPTTAPGGRPSKRPASAPSAPPAQDRHAQSYDLQLQYDTDFGEDRTEADSKAIHEPPPMKKSRKAHSSPQRITLDKPEAKGRGRGGKVQSSLLAPRKLDLGKGQEETKGKEVKKKYVAPQDFQLGMPLVGDDVLAAMGTACKDLHAYYMEKSNARKPNKATDILGEHDGKPFLGPTNYIVVDFKDLFDLCRLRAKNAPEVAFLDPQVVTVTNLQNDRQGMVNYIYDTLWSRQDKEYIMYAYNQYAHWILLVITPKWTIDEAWAQYVQRGGLRKTGHDTLIHKKDFPVKQQIGDQCGFHVCHNMRLLYREKVKTLAKFEGTITKSLPTSFEEVREKIASFILREIINPKGMSKNKGSNNKIDKLQN

SEQ ID NO: 158686 - protein, 72 aa, Oryza sativa
  Clone ID: PAT_MRT4530_58137C.1.pep
PRNPQPQKNLGFIKMNSGARLMPPLLFLGPWPFLFSAFRNNLLGPELWWPPPEGNNNVLKFPKKFWAPLLSR

SEQ ID NO: 158687 - protein, 930 aa, Oryza sativa
  Clone ID: PAT_MRT4530_58138C.1.pep
MRRDDASTRGDAAFVRDFGGLVGRWAHAGVAWHTARARCKVTGRAHRSCATRSQLGAIDRSWMYAKNLKRHSTEYRKGVINFMNTTEEDRKRRNSDYMCCPCADCKNENMFDSGEDVHGHLIQRGFMEGYICWVKHGEQESGRGAAADRSGAHNQEDEDEHDMFIPSPLGGEMVDVDHDLLQDMLRDVEDPAQNERDGMKFSRLVSDSETPLYAGCKAKHTKLSVTLDLMKLKASSGWTDKSFADLLGISKAMLPVENTLPEMTYEAKQVLCPLGLEVRRIHACPNDCILYHKQYADLDACHVCKASRYNQKKSADEGKKSKRGGPAKVVWYLPIIDRFKRIFANPNEAKLVRWHATERRNDGPRQPVNDIDVFLEPVIDNLEILWKEGVETWDAYGQENFKLRVLLFCTINDYPALGNLSGQTIKGKKACSDCKEHTRSRWLKKSRKMVYMGHRRWLPLRHAFRRKKKIFNGKRELQPAPKDLSGDEVHNMVKDKSNEFGKKRKRSKTKENGMWKKKSIFWRLPYWKDLDVRHCIDLMHLEKNVCESLDMNIRSELQPIRDAETGKVYLPPACHTLWKDEKIAMLSCLKDIKVPLGYSARITFLREMWLFERYMGVLKSYVRNRAKPEESIIEGYTTEEAIEFCVNYMSDADPIGVPVFRHEGRLSGVGTIGRKRIRPDEASYAQVHYAVLQHMAEVGPYFEEHLAKIRDENLGRSDAWINKEHNSRFNEWFMNRVTMSTDVPNETLQLLGMGPSWTVDTWQGYDINGYTFYTVKQDDKSTVQNSGIRINAFQDQVGSNTYYGRIEEIWELNYVKFKVPLFRCRWVNLRTGVKADKEGFTLVDLSKVGYADEPFVLAKQVEQIFYIKDPSNKKMHIVRDGKRRIVGVDNVVDEEEYNHNLHVRPHIDLDDDPQEPVAYARSHHTEGITL

SEQ ID NO: 158688 - protein, 578 aa, Oryza sativa
  Clone ID: PAT_MRT4530_58139C.1.pep
MSTTTSGSSRARTPRTGNKIPKERFRITAVDAVGLPTSLKKILSRFRSICGVIGRQKFSILQDDIKLVPAVEKDIAWLTFKESFDYPAEHEDRLRRAAFKVMGNAWKNFKTKLVGEFVYNPANLDPREKFPWITKQTKNQHPHRLGTAGYAGKEEEWQREDEEAEESKTPLVFGDIPHPRAKNWARARYQKKDDGTIFMPNPEDQRVYEAILESMRAKIRQEIREEQQNPQAAAAAAHEELGSPTQKRSSCASTEVAENPTSVDSAVDHITEPTSCTLTVRVMPTFTVPAAEGLAYKPTPETRVHGAQLRGDCAKVQVDSVKPENELFPLKYPLNDEVLSLGNAHGTFIQWPKDLIEIRVIARSTTAPGGRPPKRHASAPSAPPAQDRHAQFYDVQLQYDTDFGEDRTEADSKAIHEPPPMKKSRKAHSSPQRITLDKPKAKGRGRGGKVQSSLLAPRKLDLGKGQEETKDKEIKKKYVAPLEFQLGMPLVGDDVLAAMGTACKDLHAYYMEKSNARKPNKATDILGEHDGKPFLGPTNYIVVDFKDLFDLDGAWGSSPGDRAGPPLPVRPGALGSGR

SEQ ID NO: 158689 - protein, 100 aa, Oryza sativa
  Clone ID: PAT_MRT4530_5813C.1.pep
MKFLIPPPLVRPPPPDLSYINRSYRSVRRREDRDDNLSGDFLLAVLQKHSGAPIPFEESQILEYYKKFLAQYSDYEDEDSEEDSDEEDSEEGEKGKKNVC

SEQ ID NO: 158690 - protein, 63 aa, Oryza sativa
  Clone ID: PAT_MRT4530_58140C.1.pep
WNVGHLQHPALTFCGCPGEAVHGAFSFKYRTSSPAVHIFPAGSSRLTWRPFYLIKKKKKYITT

SEQ ID NO: 158691 - protein, 264 aa, Oryza sativa
  unsure (1)..(264): unsure at all Xaa locations
  Clone ID: PAT_MRT4530_58141C.1.pep
MGTAWKDLHLYYMEKSNARKPSKATDIXGEHDGKPFLGPTNYVVVDFKDLFDLYRLRXLSWQWCQKHAPEVAFLDPQVVTVTNLQNDRQGMVNYIYDTLWSCRDKEYIMCAYNQYAHWILLVITPKWSTCHYLNSRIDKNAYNWTPIQLAIDEAWAQYVQRGDLRKTGHDTLIHKKDFPVKQQIGDQCRFHVCHNMRLLYREKVKTLAEFEREHHSTSILDGTDEAYSSEKPPSDAYSNSGVWGKYSKTEYYPLYSASHTGIGV

SEQ ID NO: 158692 - protein, 77 aa, Oryza sativa
  unsure (1)..(77): unsure at all Xaa locations
  Clone ID: PAT_MRT4530_58142C.1.pep
HVGPLAHRESVKCNKSFELMQHSTISNFRFDSINGYHDRCMAGRXSISNRALHSYMSTVGSFVSPAVLSSRAFKLCT

SEQ ID NO: 158693 - protein, 127 aa, Oryza sativa
  Clone ID: PAT_MRT4530_58143C.1.pep
MRGVYRGRGDRWPIIHTLASLESNRRSLGGGVGIGWPLGSNASNLRDLLSRRFAAAPGRGVGFEISSGGWSCQPSGQVRATPTRQLGGVVAMTTDLVDRDETTTSPRSGNRDALEKAARLSCVHVAS

SEQ ID NO: 158694 - protein, 852 aa, Oryza sativa
  unsure (1)..(852): unsure at all Xaa locations
  Clone ID: PAT_MRT4530_58144C.1.pep
MSQQGEPMSTTTSGSSRARTPRTGNKISKERFRITAVDAVELPTSPRKILSRFRSICGAIGRQKFSILQDDIKLVPAAEKDIAWLMFKGSFDYPADHEDRLRRAAFKVIGNAWKNFKTKLVGEFVYNPPNPDPREKFPWITEQVWEEFHAKKSTPESRARSEAYRLLQTRNQHPHWLGTAGYASKEEEWQREDEEAEESCTPLVFGDIPHPRARNWARARYQKNDDGTIFMPNAEDQRVYEAIELVAEQQASQEACSQRREDDLLTKALGNKEHRGRTRGVGSSVPWKYGFPDYAWQYKNRTSNKAEKDARLEAKIWASIRAELTSKFDEKLESMRAKIRQEIREEQXNPQAAAAAAHEELGSPTQKRSSCASTELAENPTSVDSAVDHITEPTSCTLTVRVMPTFXETRVHGAQLRADCAKVQVDSVKPEYELFPLKYPPNNEVLSLGNARGTFIQWPKDLIEIRVTARPTTAPGGRPLKRPASAPSAPPAQDRHAQSYDVQLQYDTDFGEDRTEADNKAIHEPPPMKKSRKAHSSPQRITLDKPEAKGRGRGGKVQASLLAPRKLDLGKGQEETKGKEVKKKYVAPQEFQLGMPLVGDDVFAAMGTACKDLHLYYMEKSNARKPSKATDILREHDGKPFLGPTNYIVVDFKDLFDLYRLRAVDTSLLKCYSLLSWQWCQKHAPEVAFLDPQVVTVTNLQNDRQGMVNYIYDTLWSRRDKEYIMCAYNQYAHWILLVITPKWSACHYLNSRIDKNAYDWTPIQLAIDEARAQYVQRGGLRKTGHDTLIHKKDFPVKQQIGDQCGFHVYHNMRLLYREKVKTLAEFEGTITKSLPTSFEEEMMNTYYATVMM

SEQ ID NO: 158695 - protein, 179 aa, Oryza sativa
  Clone ID: PAT_MRT4530_58145C.1.pep
MLNQSKASSVCSYTSPPKPSVPDKGRSDEDDRQRLNKEQSGQVSRSRHKSTQPTTTRSRMGCSCGGCHRSTPYAHHLTTKTQENVASLHTMAVASSSRWRKLETSRRGRVIEAPDLTNQRTNTSQVEHHRVDSLQGHRGIRTPPPSKTAACNSTTHHHGRSSHSGKNWENGINLHNRRT

SEQ ID NO: 158696 - protein, 108 aa, Oryza sativa
  Clone ID: PAT_MRT4530_58146C.1.pep
LGALPLWLSFLVRGEESVSELALSLTPFVLCCGGGERRRFFVVSVSVFSSGTAYYTSFEFIYRAALEFGSPFFFCYLAKLLCAKSKKFAEDEVLLKLPCFAAAVSCQF

SEQ ID NO: 158697 - protein, 167 aa, Oryza sativa
  unsure (1)..(167): unsure at all Xaa locations
  Clone ID: PAT_MRT4530_58147C.1.pep
MSAPANVFMDISIGGNPAGRMVFKLFDTEVPKTAENFRTLCEGKDSSLAYAGSGFHRVIRGFMAQGGDFTRHNGTGGRSIYGEKFADENFSHKHTKRGQLXMANAGPNTNGSQFFITFGATPHLDGKHVVFGELIEGQDVLNAIEGNPTRHGDAPIKAVKIEASGTV

SEQ ID NO: 158698 - protein, 341 aa, Oryza sativa
  unsure (1)..(341): unsure at all Xaa locations
  Clone ID: PAT_MRT4530_58148C.1.pep
WRKRYIILPGQQAASRAPSPPAPPSPPAPSPPAPLPPPPAPSPPAPLPPPPAPSPPAPPPPPPPPPPCPPAPPKTRKAYYKKSNPVPXLGKQPHQVVEPLVTGEDFGITDFISDTGLTVALLVGGAPIPKAEVAYKFELGKPLVRPERLQSLPTQMYKFHERYMEMSANGREMFGARIRNPDFLQGEDVLWIHFKDVFDLYHRDALDVSLLSAWILMEIQRARRRGVYDTGFIDPRKINTEMLDKYEKDTEDNLVHLLTQQHFKTFILLSYNTEFHWVLFFFDLDACRVTVYEEKVFDKXVFQLIDRAWDRFRQLVRGTWKEKLGSRFHFPVSTCMIQNYI

SEQ ID NO: 158699 - protein, 44 aa, Oryza sativa
  Clone ID: PAT_MRT4530_58149C.1.pep
LLLICGENHQNVAAGLLFLKPQKRELVTFALLLLRMGVAAYGNF

SEQ ID NO: 158700 - protein, 422 aa, Oryza sativa
  unsure (1)..(422): unsure at all Xaa locations
  Clone ID: PAT_MRT4530_5814C.1.pep
RCPSSPDFVHLYPCTFAHDQTEPQTTPYPLDMWKYGSALQQRPELNPYIGRGATSHNWHAPKPHRKTGFRGFERGRDREQPSVPSATTTNHASGTSGTTKAXRSTQAKLQAXKEAITIHKKKTGYTETVHGSTEAGPVCQQRRVADKQTPLDTTRAAHVETTWLPSGHTNTVTTRTHERLPTPVHRRDEAGTRLDDAEPRMKTTTGXAAYLTKRGRXRTRLDEGRADDERNQERGGGDNGSQQQLHRDENGVEHATTMPMIVAAQRDDGPARMDGRLXEVVDEDERCRRSWWCGAADXSHGRGGRDGRRDTGKDGVEATCGGFPTKERLGQGRGRRCDAEGGDGDVGRSRAPLSRRLTGGAHLSGPSSTSGRPPPSRTLAVVSRSKSGHAAATRRTSAAAAGHLRHRRRAVSAVAFGRRHRR

SEQ ID NO: 158701 - protein, 145 aa, Oryza sativa
  unsure (1)..(145): unsure at all Xaa locations
  Clone ID: PAT_MRT4530_58150C.1.pep
ILPGRQAASRAASPPAPPSPPAPSPLAPPPPPPPCPPAPPKTRSRQAPPXCSQVELDAYVAGEVKRQLKPRSPMAQLVGGAPIPKAEVAYKFELGKPLVRPDQLQSPRGGGHRRRLQQRCRQDEHHHDEHLRQPPAAGGPERRRH

SEQ ID NO: 158702 - protein, 1338 aa, Oryza sativa
  unsure (1)..(1338): unsure at all Xaa locations
  Clone ID: PAT_MRT4530_58151C.1.pep
MGSPDCDGVEDLSRRRRRWRLRSRRIRGGVPRFFRETRQGREGEKVGRPVGLSMVAGGDGQEELALSRARRVLTRVACEFRQWARVERNVRLTMGSRHAALAHMAATSVYGKSKDTLEARNDLKHMEQCGDLHPEPKEKGSHYFQPATLLARQRRKLLPVIIRGILPDNVWATIRKLYAFMNAISQKVINPDRLEALQNDVRQASPRGGTEEVIEFCIEFIEDLRPIGVLESHHEGRLRRKGTLGRKAIMTVDNNLFRKAHFTVLQQSSLVAPYIEEHLALIRARNIGKSDAWITRHHIDTFSEWLRQHLMGNETINQQLAFLVRGPSGSIATFQGYEINGYTFFTRAQDMKSTNQNIVIRIDAMGHDGTTSTYYGAIEDIWELDYEPLKVPLFRCQWVRLTGGGVTIDDSGMTTVDLNKDMSSKGKKGKGPDEPKRHVVFPGKRKIVKVEDKTDEDYDQFDGKPPFTVTIDPSTLLSNEDTPYSRSDHKKGTIVRRNLLQMADRNEEQILYDTIAEGSSQYWNEEEGNEDPNQHLNEEGNVERDAEGNEEEEASGSHPSAGQKRARGQRGAAKKIENRHIITEVDEDGRPSAPAEAAKNFIRHSGWVVRDNVPVNMRKRSCGLWTTMLETFTLPVGTENIVKQWTLKKMAKQFQSFKGDLNNKYILKGLTPNFDVFPKLRDHWDEFVAYKTGQQGQAMMARNKENAANKKYHHHLGSGGYSVAMPKWEEMEARLIERGIEPATAKWLDRSKFWSRMRSKRDTEAKIVDLEYRVSSYELSMQEEVARKVDERMATHRSQDPQPYIPPAMVSPSGNRSSCASTGQVGSQSMDAMQTQDKTTCPVDEITQRTPCELHIPFKNLSIKVASGMAIPTDPSGTYHCRPIPAGYSRVEVELVEAAYEDLELDYPGGDSETHLRDTSHAIILXDKRYIILPGRQAASRAPSPPAPPSPPAPSPPVPPPRPPAPSAPAPPPPPPAPSPPAPPPSCLLRLLHXPPCPPAPPKTRSRQAPPPARTRATKKAKVDATNNKEPQYDCSQEELDAYVAGEVKRQLKPRSPEKKIPIDPSMKNFFKGMSTTNKEASQISDYDRTLQKAYHKKSKPIPQLGEQPNQEVEPLVTSKDFGITEFISNTGLTVDQLIRGAPIPKAEVAYKFELGKPLVTPEQLQSLPTQMYKFHEGYMEMSAKGREMFGARIRNPDFLQGEDVLWIHFKDLFDLYHLDALDVSLLSACILVTVYDSMNKEEKIFDKVFQLIDRAWDRFRQLVHGTWEEKPGRRFHFPRIHMRDNLPHKDFITAVQEQLMGFINKEVLNPNGEFYYDGSTIHNVGPSSSDITPASKS

SEQ ID NO: 158703 - protein, 155 aa, Oryza sativa
  Clone ID: PAT_MRT4530_58152C.1.pep
MGAQSGAFVYSTTSILLSHRSLGVKADSDRGPGNSTEKRQQPAASSRARSTTSAAAVGRRCFPAPSLQGVYDLERSVALSLHGPMRRRPWVFGYFNVTKASSAPFLEAGLESEMAPCGNGKEKGRHKPMEKASDEFSMVRQASEQSDADGEQLVH

SEQ ID NO: 158704 - protein, 871 aa, Oryza sativa
  unsure (1)..(871): unsure at all Xaa locations
  Clone ID: PAT_MRT4530_58153C.1.pep
MASCASPSSRLHGNAAGGGAGGSATAMMLPGPPGRGNGGCIDLSPAGLLAHGAGSSVLPLIPPPAILRRHTRRISPAPSFSPLSVSRFHAAGIDDDDDERRPLRLAAGDRHGRIAVWDARARLVLHWLNLDETRGVAPGSGGGVQDLCWIHHASGWLLASIHGPSLLCIWETSNNPSVLWMFDASPEYLSCLRRDPFDARHLCAIGLRGFLLSAIPRPDSDISLQEHRVTCGASDITELQRLEKEIAAPPPSPALAAFPAFTPKLCFSPLWRNILYVTFPRELIVFDLNYSTALSVTPLPRGFGKFSDVMSDPDFDLLYCTHIDGKLSIWKRKEGEHVHLLCAVEDLMPSIGTIVPPPAVLATTIWQSEAVFRNIEKQSRDLGQIQSTHSVISDTNTNQNMYQGTMTYLTSISEDGKIWSWHLSFDKSACARKDKLGANQWDQINLMGQLHLLSSTVTTLAVPSPSLLATVARGGNNPAPAVPLVAVGTQNGTIEIVDVLANAISVSFAVHSSTVRGLRWLGNSRLVSFSYSQANXSADPLAIARLQPQSPGMLVLELDGLSTRTKKDEPLVLCIAGADSSFRLIEVNIDPRASSTLRPVTTRERFRPMPLCLPILFPTAHALALRMILQLGVKPSWFECNSGDKLASSSFREAPATFGDLRSXRIETTLPPIGDSVVAELLLKVLEPYRKDGFILDDGRAKLYSAIVNKGTCARFAFAAAIFGDIQEALFWLQLPQALHHYLDKSXSRSSEKGSESIKTSTLNRSSSSTERSAPENMAKVAENCGQLSSMAFRQEQLMVXQMNRIPWHEKLXGEEALQKRVHVLVSLGNLETAVSLLLSTPPEGSNFYPNALRVVVLSSAVSRSLHWRSS

SEQ ID NO: 158705 - protein, 493 aa, Oryza sativa
  Clone ID: PAT_MRT4530_58154C.1.pep
MADRDEEQILYDTIAEGSNQYWNEEEVNEDPNQYLNEEGNVERDAEGNEERDAEGNEEGNGQTLNFNTFPKLRDHWDEFVAYKIGQQGQAMMDRNKENAAKKKYHHHLGSGGYSLAMLKWEEMEASLIERGIEPATAKWPNRSKFWYYTHGGTLNPVDGSLVFSDQIREAASRLTDAVEASSQGTSRMRRKRDTEAKIADLEYRVSSYKLSMQDEVARRVDERMAAHRSHDPQPYIPPAMVSPSGNRSSCVSTGQDETTCPVDEITQRTPCELHIPFKNLSIKVASGMAIPTDPSGTYHCRPIPVGYSRIEVELVEAAYEDLELDYPGGDAPSMSRSHQDPPPTRTRATKKAKVDAAENKEPPYNCTQEELDAYVVAEVKRMEIQRARRRGVFDTGFIDPQKCTKQDQGTNLCGYYVCEYCHCLTTQIITTRELDVIRMRDNLRHKEFIAAVQEQLMGFINEQVLDPEGEFYYNGNTIHKSLASEITTTTSKL

SEQ ID NO: 158706 - protein, 762 aa, Oryza sativa
  Clone ID: PAT_MRT4530_58155C.1.pep
MDRQWMYADQRSKEFIDGVHYFLRVAEANKQKGFICCPTNKCKNQKEYSASRTIHFHLFESGFMPSYNCWTSHGEQGVEMEEDEVEDNNIPDFAQYVGFDGNQTGEEDIDADYNDVANDLGQMLQDAKEDCESEKGAHKLDKMLEDHRTSLYPGCEKGHKKLDTTLEFLQWKAKNGVSDKAFGDLLKLVKNILPEGNKLPETMYEAKKIVCPLGLEVQKIHACPNDCILYRGEEYENLEACPVCKALRYKIRRDDLGEVDGQLTKKRIPAKVMWYFPIIPWLRRLFRNKVNDRMMRWHAEERQQDGMLRHPADGSQWQNIDRKFKDFGKDARNKRFGLSTDGMNRFGEMSSGHSTWLVTMCIYNLPPRLCMKRKYIMMPIIIQGPKQPGNDIDVFLRPLVEDLKLLWKKEGVLMWDEDKQEEFNLRALLFVTINDWPALSILSGQSNKGYKACTHCMDETESTYLKHCRKVMYMGYRRFLAANHPVWKKGKHFEHKTDHRTKPKHHSGKTVFAMVKDLKVVFGKGPGSQPIECEDGHAAMWKKNSIFWELPYWEFLDVRHAIDVMHLTKNLCVNLLGFLDNVRATITKLCSFMNAISQKVIDPDRLEALQNDVLQCLVRAQDMKSTNQNSDVRIDAMGHDGTTSTYYGAIEEIWELDYGPLKVPLFRWQWVRLTGVGVTIDDSGITTVDLNKVGYSDEPFVLANDVTQVFYVKDMSSKGKKGKGPDEPKRHVVLPVHPRLLHQHLDVFPSRSSIGFSFAATA

SEQ ID NO: 158707 - protein, 709 aa, Oryza sativa
  Clone ID: PAT_MRT4530_58156C.1.pep
MEEDEVKDDNILDFAQYAGFEGNQTDEEERDADGNDVADDLGQMLQDAKEDCESEKGAHKLDKMLEDHRTSLYPGCEQGHKKLDTTLEFLQWKTKNGVSDKAFGDLLKLVKNILPEGNKLPETTYEAKKIVCPLGLEVQKIHACPNDCILYRESTYLKHCRKVVYMRHHRFLAANHLVRKKGKHFEHKADHRTKPKHRSGKTVFAMVKDLKVVFGKGPGSQPIESEDGHAAMWKKNSIFWNLPYWEFLDVSHAIDMMHLTKNLCVNLLGFLGVYGKSKDTLEARNDLKHMEQRGDLHPEPKEKGSHYLSPASYTLSKAEKEKIGILSPVYLHNMFPFERYMGVLKKYVHNRARPEASIAKGTIEDIWELDYGPLKVPLFRCQWVRLPGGGVTIDDSGMTTVDLNKVGYSDEPFVLANDVTQVFYVKDMSSKGKRGKGPDEPKHHMVLPRKRKIVGVEDKTDEDYDQFDGQPPFTVTIDPSILLSNDDIPYSRSDHKKETIMADRDEEHILYDTIAEGSSQYWNEEEGNEDPNQYLNEERNMERDAEGNEEGNEEEEASGSHPSAGQKRARGQRGAMKKIEGRHIITEVDEDGRPSAPAEAAKNFVCHSGWVVRDNVPVSMVYWRRTRARGGNDSFVSESEKEMLWTTMLETFTLPAGTENIVKQWTLKKMAKQFQSFKGDLYKKYILKGLIPNFDVFPKLRDYWDEFVA

SEQ ID NO: 158708 - protein, 1386 aa, Oryza sativa
  unsure (1)..(1386): unsure at all Xaa locations
  Clone ID: PAT_MRT4530_58157C.1.pep
MSSGYSTWPVTMCIYNLPPWLCMKRKYIMMPIIIQGPKQPGNDIDVFLRPLVKDLKLLWKKEGVYGKSKDTLEARNDLRHMEQRGDLHPEPKEKGNHYLSPASYTLSKAEKESMFECLESIKVPSGYSTNIKRIISTKEKKFTNLKSHDCHVLMTQLLPVIIRGILPDNVRATITKLCSFMNAIPQKVIDPDRLEALQNDVVQCLVSFELIFPPSFFNIMTNLLCHLVKEIGILGPVYLHNMFPFERYMGVLKKYVCNRARPEASIAKGYGTEEVIEFYIEFIEDLRPIGVPESRHEGRLRGKTTGKGDSRKESNNDGGQQFIPKAHFTVLQQSSLVASYIEEHLALVRATNIDKSDAWITWHHIDTFPAWLRQHLMGNEAINQQLAFLARGPSGLIVTFQGYEINGYTFYTRAQDMKSTNQNSVICIDAMGHDGTTGTYYGAIEEIWELDYGPLKVPLFRCQWVRLTGRGVTIDDSGMTTVDLNKVGYSDESFILANDVTQVFYVKDMSSKGKKGKGPNEPKRHVVLPGKRKIVGVEDKTDEDYDQFDGQPTFTVTIDPSILLSNEDTPYSRSDHKEGTVVRRKYVRTTVTADVLPCPRLKLAMPPPRRHAAHATGLRHAAATPRRRRDTLQPRRRAATPPDRARHATTMPRRRRRDTLPPRRRSAAATAAPSLPNMADRDEEQILYDTIAEGSSQYWNEEEGNEDPNQYLNEEGNVERDAEGNEEGNVERHVEGNEEEASGSHPSAGQKRARGQRGVAKKIEGRHIITEVDEDGRPSAPAEAAKNYVRHSGWVVRDNVPVSKVYWRRTRARGDNDSFVPESEKEMLWTTMLEKFTLPAGTENIVKQWTLKKMAEQFQSFKGDLYKKYILKGLTPNFNVFPKLRDHWDEFVAYKAGQQGQAMMVKNKENAAKKKYHHHLGSGGYSVAMLKWEEMEARLIERGIEPATAKWPDRSKFWYYAHGGTLNPVDGSLVFSNQIREAASRLTDAVEASSQGTFRPDREKDELSLALQTPEHPGRTRGKGVIPWKIGFKEDIHTYRSRMRSKRDTEAKIADLEYRVSSYELNMQEEVARKVGSQSMDAMQTQDETTCPVDGITQRTPCELHIPFKNLLIXGTYHCRPIPAGYSRVEVELVEAAYEDPELDYPGGDGETXSTRHKPRHYTMAQAVHHPPWATSGVSCTISSAPPSPPAPSPPELDAYVAGEVKRQLKPWSPKKKIPIDPSVKKFFKGMSTTNKEVLKLSDYDRTLRKAYYKKSKPVPQLGEQPNQEVEPLVTGEDFGITDFISDTSLTVDQLVGSAPIPKAEVAYKFELGKPLVRPEQLQSPLTQMYKFHERYMEMSAKGREMFGARIRNPDFLQGEDVLWIHFKDVFDLYHLDALDVSLLSA

SEQ ID NO: 158709 - protein, 87 aa, Oryza sativa
  Clone ID: PAT_MRT4530_58158C.1.pep
MSSRRSSRSSVSEEEINELISKLQSLLPSSRRRGANQASTTKLLKETCSYIKSLHREVDDLSDRLSDLMAGMDHNSPGAEIIRSLLR

SEQ ID NO: 158710 - protein, 414 aa, Oryza sativa
  unsure (1)..(414): unsure at all Xaa locations
  Clone ID: PAT_MRT4530_58159C.1.pep
SSLHACRSTLEDPPPSPPAPPSPPLPPPAPSPLAPPSPPPVPSPPAPPAPPPPPPPPCPPAPPKTRSRQAPPPARTRATKKAKXKVKRQFKPRSLEKKIPIDPSVKNFFKKMSTTNKEALKLSDYDRTLKKAYYKKSKPVPQLGEQPNQELIRGAPIPKTEVAYKFELGKPLVTPEQLQSLPTQMYKFHEWYMEMNAKGREMFGARIRNSDFLQGENVLWIHFKDVFELYHLNALNVSLLSAWILMKIQKTRRRGVCDTGFIDPQKINVEMIDKYEKDTEDNLVHLLTQQHFKTFIVLPYNTEFHWVLLLFDLDACRVNVYDSMNKEKTFDKCAKRDQGTNLCGYYVYEYAHCLSTQIYTTRELDRIHMRDNLSHKDFITAVQVLNPKGEFYYDGSTIHNVGPSSFDITPASKS

SEQ ID NO: 158711 - protein, 337 aa, Oryza sativa
  unsure (1)..(337): unsure at all Xaa locations
  Clone ID: PAT_MRT4530_5815C.1.pep
MVCCLNKSLYGLNQAPRAWYSRFANFLLTLGFTEACFDTSLFIYTRGSDVVYILLYVDDIVLTASSDSLLRWTIAALQAEFSMKDLGTLDHFLGISVCRTSASMYLSQRQYILDILDRAGMSDCKPCSTPVDTNAKLSAVDGDSVADPTDFRSLAGALQYLTFTXPDISYAVQQVCLHMHDPREPHLAALKRILRXDLVAYSDADWAGCPNMRRSTSGYVVFLGDNLVSWSSKHQNTLSRSSAKAKYRAVAETCWLRQLLNELHSPPSKATVVYCDNVNAVYLFTNPEQHQRTKHVEIDLHFVRDRVDAGVVRVLHVPTTSQYADIFTKGLPSSVFS

SEQ ID NO: 158712 - protein, 55 aa, Oryza sativa
  Clone ID: PAT_MRT4530_58160C.1.pep
HKRHYRLAVSRNRVDMHNAVREQVIMHVWMLRQGENIFSGLFNSADVDDPSQRAY

SEQ ID NO: 158713 - protein, 845 aa, Oryza sativa
  Clone ID: PAT_MRT4530_58161C.1.pep
MADRDEEQILYDIIASGSSQYWNEEEGNEDPNQYLNEEGNAERDAEGNEEGNVERDAEGNEEEASGSHPSAGQKRARGQRGAAKKIEGRHIITEVDADGRPSAPAQAAKNFVRHSGWVVRDNVPVSKVYWRRTRARGGDDSFIPESEKEMLWTTMLETFTLPAGTENIVKQWTLKKMAEQFQTFKGDLYRKYILKEQTPNFDVFPKLRDHWDEFVAYKTEKDELSLALQTPEHPGRTRGKGVIPWKMGFKEDIHTYRSRMRSKRDTEAKIADLEYRVSSYELSKQEEVARKVDERMAAHRSHDPQPYIPPPMVSPSGNHSSCASTGQVVSHSMDAMQTQDETTCPVDEITHRTPCELHIPFKNLSIKVASGMAIPTDISGTYHCRPIPAGYSRVEVELVEAVYEDLELDYPGGDASTRAMKKAKVDTTKNKEPPYGCSQEELDAYVAGEVKRQLKPQSPEKKIPIDPSVKNFLKGMSTANKEALKLSDYDRTLRKAYYKKSKPVPQLGEQPHQVVEPLVTGEDFGITDFISDTGLTMAQLDGGAPIPKAEVAYKFELGKPLVRPEQLQSLPTQMYKFHERYMEMSANCREMFEARIRNPDFLQGEDVLWIHFKDVFDLYHRDALDVSLLSAWILMEIQRARWRRVYDTGFIDPRKINTEMLDKYEKDTEDNLVHLLTQQHYKTFILLPYNTEFHWVLFFFDLDARRVTVYDSMNKEEKVFDKVFQLIDRAWDRFRQLVRGTWKEKLGWRFHFPCAKQDKGTNLCGYYVCEFAHCLSNQIYTTRELDRIHMREKLPHKDFITAVQEQLMGFINEEVLNPDGEFYYDGSTIRNVGPSSSDVTQALKS

SEQ ID NO: 158714 - protein, 50 aa, Oryza sativa
  Clone ID: PAT_MRT4530_58162C.1.pep
KRRNGKNPGVTQLNGLEENPLFASGGNSKKARTNRLSKQLPTQKGNGNAP

SEQ ID NO: 158715 - protein, 63 aa, Oryza sativa
  Clone ID: PAT_MRT4530_58163C.1.pep
MSLCNKFGFVTYIKKKKKKKKKKKKKKKKKKKKKKKKKKKKKNRIKTKIGHNAHNNKNTKSEN

SEQ ID NO: 158716 - protein, 66 aa, Oryza sativa
  Clone ID: PAT_MRT4530_58164C.1.pep
TGKQIYTESLDSHSQDFIRVSHVRKMVLYDKKICQEKFGSNHTDVCTVLMCPCSNSGIPVPIPAAR

SEQ ID NO: 158717 - protein, 410 aa, Oryza sativa
  Clone ID: PAT_MRT4530_58165C.1.pep
RRRNTHLNTQFTPHYITWYCPEAFVVSKQCKSQCINHGRYCAPDPEQDFSQGYDGKDVVVQNLHQICVFKAANESGKPWLWWDYVHDFSIRCPMKEKKYTPECAVHVIKSLGLDVEKIKKCVGDPEADEENPVLKAEQDAQIGHDKRGDVTILPTLVINNRQYRGKLDKSAVLKAVCAGFEETTEPAICLSEDVQTNECLENNGGCWQDRDNNVTACKDTFRGRVCECPVVKGVKFVGDGYTNCEASGIGRCEIKNGGCWKETRNGKTISACSNEVSEGCKCPPGFKGDGIKSCEDIDECKEKLYCQCKGCSCENTWGSYECSCGGNNMLYMREHDTCLSKEATSAVGWSFLWVIFFGLVLAGVGAYAVYKYRLRSYMDSEIRAIMAQYMPLDNQEAANQHHVAHAGDDI

SEQ ID NO: 158718 - protein, 1017 aa, Oryza sativa
  Clone ID: PAT_MRT4530_58166C.1.pep
MSATTTAPSPTPIPITTIAELRQHHSQLVRLGLASHPPHARRLLAFLARDPAHLPYAARLLAHHPDPRPALLNPLFASLPPRAAASLLALMLSLPLLPDHFTFPRLLPAAPLPLAAQLHALLLKLNLHSHAHSLNALLAAYLAAARPDLARVLFRTSGGGALDVVSWTTMVGGLCRLGLVDDAREVFDAMPARNLVSWNSMISGYVKADRFLDALEVFDEMRALGVEGNGFVATSALVACTGAGALGRGREIYRWVEQSGIEVDAKLATAVVDMYCKCGCVDEAWGVFDSLPARGLTTWNCMIGGFAVHGRCDDALELFHQMEAAGVAPDDVTLLNVLTACAHAGEVSEGRRYLNHIVSRHGIEPKGEHYGCMVDLFGRAGQLDEAKKVIDEMPMDPDLAVLGALLGACKIHGDVDLGEAIGWRVIDLDPDNSGRYVLLANLLAGAGRWDEVGKVRRLMDERNVSKEAGRSVIEVDGEACEFRCGNLRHPQAREIYAMAVDMVSRIRAEGYVPDTGEALHDVAEEDKEAALLCHSEKLAIAFGLLRARPRETLRITKNLRVCRDCHEATKYVSRVFGREIVVRDRSRFHHFKDGMCSAAARLQHLRELLLSCVATFRGRMGYARKVFDGIPRPDLFMHNAMVRGYAHAGAPGDAFAVYRRMTEASRLRPDAFTFCYLLRACAGLPGSRAGRQVHGAVVKLGFLKDAYVRNALINMFAKCGDLRNARELFDRAPEKDVVSWNTIITGYAAQGMLKHALEVFDEMRAAGWTPDEATIVSLLSCCANTGLLDAGRMIHHQLHLERRPWISIVVGNALVSMYAKCGDLHTAVEGFNTMKDTDVWTWNSVIGGLAFHGQAEQSVRFFKKMLEKRIHPNEISFLCVLGACSHAGLVEDGQKFFYLMKDRYGIEPNARHYSCIVDMLGRAGLLDEAYAIVSNMRCEPSAVVWRTLLGACRTHGNMTLGKLVREKLLNMNEDASADYVLLSGIYASSGEWLGVETERRSMDRRGIRKAAGYAQID

SEQ ID NO: 158719 - protein, 1043 aa, Oryza sativa
  unsure (1)..(1043): unsure at all Xaa locations
  Clone ID: PAT_MRT4530_58167C.1.pep
MDQSTIDLSWMYAKNLKRHSTEYRKGIINFMNAAEEDRIRRNSDYMCCPCADCKNENMFDSGEYVHGHLIQRGFMEGYTCWVKHGEQESGSGAAVDRSGAHNQENEDEHDMFIPSPLGGEMVDVDHDLLQDMLRDVEDLAQNERDGMKFSRLVSDSETPLYAGCKAKHTKLSVTLDLMKLKASSGWTDKSFTDLLGILKAMLPVENTLPETTYEAKQVLCPLGLEVRRIHACPNDCILYHKQYADLDACPVCKASRYKRKKSADEGNKSKRGGPAKVVWYLPIIDRFKRIFANPNEAKLVRWHATERTNDGMLRHPADSIEWRNTDRKHKDFAVDPRNMRICLCTDGMNPFNDMSSTHSTWPVLIANYNLPRWLCFKRKYIMLCLLIQGPRQPGNDIDVFLEPVIDDLEILWKEGVETWDAYGQENFKLRVLLFCTINDYPALGNLSGQTIKGKKACSDCKEHTXSRWLKKSRKMVYMGHRRWLPLRHAFRRKKKIFNGKRELQPAPKDLSGDEVHNMVKDISNEFGKKRKRSKTKEKEKNVCESLVGLMLNIPRKTKDGLNARLDLQDMNIRSELQPIRDAETGRVYLPPACHTLSNDEKIAVLSCLKDIKVSSGYSARXKYVKLDDLKLVGMKSHDCHVLITQILPVAIRGILPPKVRHTIQRLCSFFNAIGQKVIDPEDLDGLQTDIVNTLCHLEMFFPLSFFDIMVHLLVHLVKQTKLCGPTFLREMWPFERYMGVLKSYVRTRAKPEGSIIEGYTTEEAIEFCVNYMSDADPIGVPASHHGGRLSGVGTIGRKRIRPDQVSYAQAHYAVLQHMAEVGPYFEEHLAKIRDENLGQNDAWINREHNSRFNEWFKNHVTMSTDVPNETTVDTWQGYDINGYTFYTVKQDDKSTVQNSGVRIDAFQDXVGSNTYYGRIEEIWELNYVKFKVPLFRCRWVNLRTGVKADKEGFTLVDLSKVGYADEPFVLAKQVEQIFYIKDPSNKRMHIMRDGKRRIVGVDNVVDEEEYNHNLHVRPHIDLDDDPQEPVAYTRSDHTEGITL

SEQ ID NO: 158720 - protein, 1006 aa, Oryza sativa
  unsure (1)..(1006): unsure at all Xaa locations
  Clone ID: PAT_MRT4530_58168C.1.pep
MDQSTIDRSWMYAKNLKRHSTEYRKGVINFMNAAEEDRIRRNSDYMCCPCADCKNENMFDSGEDVHGHLIQRGFMEGYTCWVKHGEQESGSGAAANRSGAHNQEDENEHDMFIPSPLGGEMVDVDHDLLQDMLRDVEDPAQNERDGMKFSRLVSDSETPLYAGCKAKHTKLSVTLDLMKLKASSGWTDKSFTDLLGILKAMLPVENTLPEMTYGAKQVLCPLGLEVRRIHACPNDCILYHKQYADLDACPVCKASRYKRKKSADEGNKSKRGGPAKVVWYLPIIDRFKRIFANPNKAKLVRWHAMERRNDGLRQPGNDIDVFLEPVIDDLEILWKEGVETWDAYGQENFKLRVLLFCTINDYPALGNLSGQTIKGKKACSDCKEHTRSRWLKKSRKMVYMGHRRWLPLRYTFRRKKKIFNGKRELQPAPKDLSGDEVHNMVKDISNEFGKKRKRSKTKEKGMWKKKSIFWRLPYWKDLDVRHCIDLMHVEKNVCESLVGLMLNIPGKTKDGLNARLDLQDMNIRSELQPIRDAETGKVYLPPACHTLSKDKKIAMLSCLKDIKVPSGYSARISKYVKLDDLKLVGMKSHDCHVLITQILPVAIRGILPPKVHHTIQRLCAFFNAIGQKVIDPEDLDGLQTDIVNTLCHLEMFFPLSFFNIMVHLPVHLVKQTKLCGPAFLREMWPFERYMGVLKSYVRNRAQPEGSIIEGYTTEEAIEFRVNYMSDADHIGVPASRHEGRLSGVGTIGRKRIRPDQASYAQAHYAMLQHMAEVGPYFEEHLAKIRDENLGRSDAWINREHNSRFNEWFKNRVTMSTDVPNETVQLLGMGPSWTXVDTWQGYDINRYTFYTVKQDDKSTVQNSGVRIDVFQDQVGSNKYYSRIEEIWELNYVKFKVPLFRCRWVNLRTGVKADKEGFTLVDLSKVGYADEPFVLAKQVEQIFYIKDPSNKKMHIVRDGKCRIVGVDNVVDEEEYNHNLHVRPHIDLDDDPQEPVACARSDHTEGTTL

SEQ ID NO: 158721 - protein, 936 aa, Oryza sativa
  unsure (1)..(936): unsure at all Xaa locations
  Clone ID: PAT_MRT4530_58169C.1.pep
CSCADCKNENMFDSGEDVHGHLIQRGFMKGYTCWVKDGEQESGSGAAADRSGAHNQEDEDEHDMFIPCPLGGEMVDVDHDLLQDMLRDVEDLAQNERDSMKFSTLVSDSETPLYTGCKAKHTKLSVTLDLMKLKASSGWTDKSFTDLLGILKAMLPAENTLPETTYEAKQVLCPLGLEVRRIHACPNDCILYHKQYADLDACPVCKASRYKRKKSADEGKKSKRGGPAKVVWYLPIIDRFKRXFANLNEANLVRWHATERRNDGMLRHPADSIEWRNIDRKHKDFAADPRNMRICLCTDGMNPFGDMSSTHSTWLVLIANYNLPPWLCFKRKYIMLCLLIQGPRQLDNDIDVFLEPVIDDLEILWKESMETWDAYXFKLRVLLFCTINDYPALGDLSRQTIKGKKACSDCKXHTQSQWLKKSRKMVYMGHRRWVPPRHAFRRKKKYFNGKRELQPTPKDLFGDEVHNMVKDISNECGKKRKRNNTKEKEKNVCESLVGLMLNILGKTKDGLNTRLDLQDMNIRSELQPIXDAKTGRVYLPPACHTLSKDEKIAMLSCLKDIKVPSGYXARISKYVKLDDLKLVGMKSHDCHVLITQILPVPIRGILPPKVRHTIQCLCAFFNAIGQKVIDPKNLDGLQTDIVNTLCHLEMFLPLSFFDXIMVHLPVHLVKQTKLCGPAFLREMWPLGRYMGVLKSYVRNRAKRKGSIIEGYTTEEAIEFCVNYLSDADPIGVPASHHEGRLSGVGTIGRKRIRPDQVSYAXAHYAVLQHMAEVGPYFEEHLAKIRDENLGQSDEWINXXHNSRFNEWLKNRVTMSMDVPNETVQLLGMGPSWTVDTWQGYDINGYTFYTVKQDDKNTVQNSGVRIDAFQDQVGSNTYYGRIEEIXELNFVKFKVPLFRCYWVNLHAGVKADKEGFTLVDLSKVGYCDGPYGNARLR

SEQ ID NO: 158722 - protein, 741 aa, Oryza sativa
  Clone ID: PAT_MRT4530_5816C.1.pep
MAEQGKAHDLSPSVSGDDGEPNPRRRARTPPPPPHQSPKQGEALERVDKSVASPVAGDAGERRDGERRLLVYGDGSTPQGALQAAGALLRHPPVVHDPESPAQRWLDDVANLVMTAQQRLGAGGRSATTKTSGAATTGSVSSRRRARRAAAVARHSAATPSSAPSTREDQHGEPDARLDIERRRNSRRTPRATEGASSSRVSPRHGREDQPSVPPAGGVGCRAFVASLRNVRWPPRFRPTITEKYDGSVNPTEFLQVYTTGIEAAGGDDRVMANFFPMALKGQARGWLMNLPPASVHSWEDLCQQFTMNFQGTYPRPGEEADLHAVQRGDDESLRSYIQRFCQVRNTIPCIPAHAVIYAFRGGVRHNRMLEKIASKEPQTTAELFQLADRVARKEEAWTWNPSGPGVAASAAPGSAAQTGRRDRRRKKSLYKKGARRPRKKKEKAIQDWRGPGGSLRRARVTSLVVAVVRTTVAALLVGVEGEREPRGHTLEAVDDVVGGVPDLRACAVLGSGRELFQRYPRGEVRVREAPKPNGGPRPPTAGVGPPPACPTVSGAPDPQDSLGATAGRPRLSPSYPEDIGAEAEGAPRCLSDEERPGDTAPSEEDRPRRKVQRPVYFVSEALRDAKTRYPRAQKMLYAILMAPRKAPLPYLQARQIGSPRFVRRSGDVAVLKRPPIIDRQITITGVHGLRPLGFCPTMETGPTCHQALGVASRPAASHKKGDRPGITPGATVGDMGPGVS

SEQ ID NO: 158723 - protein, 1320 aa, Oryza sativa
  unsure (1)..(1320): unsure at all Xaa locations
  Clone ID: PAT_MRT4530_58170C.1.pep
MDQSTIDRSWMYAKNLKRHSTEYRKGVINFMNAAEEDRIRRNNDYMCCPRADCKNENMFDSREDVYGHLIQRGFMEGYTCWVKHGEQESRSGAAADRSGAHNQEDEDEHDMFIPSPLGGEMVDVDHDLLQHMLRDIEDPAQNERDGMKFSRLVSDSETPLYAGCKAKHTKLSVTLDLMKLKASSGWTNKSFTDLLGILKAMLPVENTLPETTYXKQSRFCVHWGNKSKRGGPAKVVWYLPIIDRFKRIFANPNEAKLENFKLRVLLFCTINDYPALGNLSGQTIKGKKACSDCKEHTRSRWLKKSRKMVYMGHRRWLPLRHAFRRKKKIFNGKRELQPAPKDLSGDEVHNMVKDISNEFGKKRKRSKTKEKSMWKKKSIFWRLPYWKDLDKRMCESLVGLMLNIPGKTKDGLNARLDLQDMNIRSELQPIRDAETGKVYLPPACHILSKDEKIAMLSCLKDIKIPSGYSARISKYVKLDDLKLVGMKSHDCHVIITQILLVAIRDILPPKVRHTIQRLCAFFNAIGQKVIDPEDLDGLQTNIVNTLCHLEMFFPLFFFDIMVHLPVHLVKQTKLCGPAFLREMWPFERYMGVLKSYVRNRAKPEGSIIEGYMTEEAIEFCVNYMSDADPIGVPASRYEGRLSGVGTIRRKRIRPDQASEHNSRFNEWFKNRVTMSSDVPNETDQVGSNTYYGRIEEIWELNYVKFKVPLFRCRWVNLRTGVKADKEGFTLVDLSKVEQIFNIEDPSNKKMHIVRDGKRRIVRVDNVVDEEEYNHNLHLEIYFDNMTNLNSICEYYIISNGNMLESMRAKIRQEIREEQQNPQAAAAAAHEELGSPTQKRSSCASTELAENPTSVDSAVDHITEPTSCTLTVRVMPTFMVPAAEGLAYKPTLETRMHGAQLRADCAKVQVDSVKPEYELFPLKYPPNDEVLSLGNARGTFIQWPKDLIEIRVTARPTTAPGGRPPKRPASAPSAPPAQDRHAQSYDVQLQYDTDFGEDRTEADGKVIHEPPPMKKSRKAHSSPQRITLDKPEAKGRGRGGKVQASFLAPRKLDLGKGQEETKGKEVKKKYIAPQEFQLGMPLVGDDVLAAMGTACKDLHLYYMEKSNVRKPSKATDILGEHNGKPFLGPTNYIVVDFKDLFDLYRLRAVDTSLLKCYSLLSWQWCQKHAPEVVFLDPQVVTVTNLQNDRQGMVNYIYDTFAHWILLVITPKWSTCHYLNSRIDKNAYDWTPIQLAIDEAWAQYVQRGGLRKTGHDTLIHKKDFPMKQQIGDQCGFHVCHNMCLLYREKVKTLAEFEGTITKSLPTSFEEAMMKTYYATVMM

SEQ ID NO: 158724 - protein, 664 aa, Oryza sativa
  Clone ID: PAT_MRT4530_58171C.1.pep
MSDSGGNSEGDFGGDSAAGARAPPTLERRLVAVDNRTEHRTYRDALLAPPTSPSSTSNLAPRKAPLSMFHRCFRCLSHDHTVEYCRDPVVCAACRGMGHRQSDCHASLSPGQIPRVPVPPILFNQQLAHPFSKAAGSKNPAPPPLRLQHHFQKKPYPNSLHSVKMESATAQVLSGEDAVLAATFAADMLAGDQTAASEGQDGGLNYWDNEVSFDLEQLFASAPLPHPCLAILAAHRTAVAGPSRPKGKSPLSIVGAALPVISEPDEVKDIFMCESGTASRPARVPVVSFNSRSPPPPASRRARLPHLGSGGSRPTGTPSSSSSIEVESDDISSADSPQTGQLNQFLAQLNPAFAELLRMYPLHYDMFAPYADMRITAHYASAFLYPAASEPSRVIWEAMREYLPHIHFSLNPARRGAMFVRFSTPEDRDAAVDFPGTMMAEGHILVLEKPEDNETCFHQPLDKLTELEVLDWPPEHRIPGRIRNLFIGVAFVIEIDDECVYGDDMSFLCLVVQQYPGQPVLPAMFVWLRNGDIAVAKIKIIRTWDASQNFDDNGTYTHHFPVLVVPNPGRHFSQAPLPPPPINPAPPPQFEDNLHVWSSVHITELVDDPVIGHLKDLSLPTLTEHLPHEDTEPDQTYSVRKTKGDKKRANEEIVKRRQSSRLAA

SEQ ID NO: 158725 - protein, 34 aa, Oryza sativa
  Clone ID: PAT_MRT4530_58172C.1.pep
KSIHHTEGEPSKRGTYAMKRVSCSTIQSDSEVHI

SEQ ID NO: 158726 - protein, 1748 aa, Oryza sativa
  unsure (1)..(1748): unsure at all Xaa locations
  Clone ID: PAT_MRT4530_58173C.1.pep
MEQSTIDRSWMYAKKLKRHSTEYRKGVINFMNAAEEDRKRRNSDYMCCPCADCKNEKMFDSGEDVHGGEMVYVDHDLLQDMLRDVEDPAQNERDSMKFSRLVSDSEMPLYAGCKAKHTKLSVTLDLMKLKASSGWTDKSFTNLLGILKAMLPAENTLPETTYEAKQVLCPLGLEASRYKRKKSADEGNKSKRGGPAKVVWYLPIIDRFKRIFANPNEAKLVRWHATERRNDGPRQPGNDINVFLEPVIDDLEILWKEGKKACSDCKEHTRNRWLKKSRKMVYMGHRRWLPLRHAFRRKKKIFNGKRELQPAPKDLSGDEVHNMVKDISNEFGKKKKRSKTKEKEKNACESLVGLMMNIPGKTKDGLNTRLDLQDMNIRSELQPIRDAETGKVYLPLACHTLSKDEKIAMLSCLKDIKVPLGYSARISKYVKLDDLKLVGMKSHDCHVLITQILPVAIRGILPPKVRHTIQRLCAFFNAIGQKVIDPEDLDGLQTDIVNTLCHLEMFFPLSFFDIMVHLPIHLVKQTKLCGPAFLREMWLFERYMGFLKSYVRNRAKPEGSIIEGYTTEEAIEFCVNYMSDADPIGVPASRHEGRLLEVGPYFEEHLAKIRDEKLGRSDVWINREHNSRFNEWFKNRVTMSTDVPNETVQLLGMGPSWTVDTWQGYDINRYTFYTVKQDDKSIVQNSGVRIDAFQDQVGSNTYYDRIEEIWELNYVKFKVTLFRCRWVNLRTGVKADKEGFTLVDLSKVGYADEPFVLAKQVEQIFYIKDPSNKKMHIMRDGKRRIVGVDNIVDEEKYNHNLHVRPHIDLDDDPQEPVAYACSDHTEVSRLLRTLAPPPTPTSPLSSSLAATATETATAATEPAAAATEPAASTDWRRPPPSPAPPPXAPDADPQMMSQHGEPMSTTTSGSSRARTPRTGNKIPKERFRITAVDAVGLPTSPRKILSRFRSICGVIGRQKFSILQDDFKLVPAAEKDIAWLTFKESFDYPAEHEDRLRRAAFKVMGTAWKNFKTKLVGEFVYNPANPDPREKFPWITEQVWEEFHAKKSTPESRARSEAYRLLQTRNQHLHRLGTAGYAGKEEEWQREDEEAEESCTPLVFGDIPHPRARNWARARYQKHDDGTIFMPNAEDQRVYEAIKELVAEQQASQEACSQRREDDLLTKALGNKEHRGRTRGVGSSVPWKYGFPDYAWQYKKRTSNKAEKDARLEAKIRESIRAELTSEFDEKLESMRAKIRQEIREEQQIPQAAAAAVHKELGSPTEKRSSCASTELAENPTSVDSAVDHITEPTSCTLTVRVMPTFTRQECMERNSGXDCAKVQVDSVKPEYELFPLKYPPNDEVLSLGNARGTFIQWPKDLIEIRVTARPTTAPGGRPPKRPASAPSAPPAQDRHAQSYDVQLQYDTDFGEDRTEADSKAIHEPPPMKKSRKAHSSPQRITLDKPEAKGRGRGGKVHASLLAPRKLDLGKGQEETKGKEVKKKYVAPQEFQLGMPLVGDDVLAAMGTACKDLHLYYMEKSNARKPSKATDILGQHDGKPFLGPTNYIVVDFKDLFDLYRLRAVDTSLLKCYSLLSWQWCKKHAPEVAFLDLQVVTVTNLQNDRQGMVNYIYDTLWSRRDKEYIMCAYNQYAHWILLVITPKWSTCHYLNSRIDKNAYDWTSIQLAIDEAWAQYVQRGGLRKTGHDTLIHKKDFPVKQQIGDQCGFHVCHNIRLLYREKVKTLAEFEGTITKSLTTSFEEAMMNTYYATVMM

SEQ ID NO: 158727 - protein, 33 aa, Oryza sativa
  unsure (1)..(33): unsure at all Xaa locations
  Clone ID: PAT_MRT4530_58174C.1.pep
MEHRESGCHQPXSPILCVNNCGFFGSAATMNMG

SEQ ID NO: 158728 - protein, 39 aa, Oryza sativa
  Clone ID: PAT_MRT4530_58175C.1.pep
LLRQIIFSTHSLIINHREISKHLILTISRPSCPTRPSTY

SEQ ID NO: 158729 - protein, 128 aa, Oryza sativa
  unsure (1)..(128): unsure at all Xaa locations
  Clone ID: PAT_MRT4530_58176C.1.pep
STLYPVKVVVADRGDYFXFKSGKNAHIEXYAPWCGHCKKLAPILDEAATTLQSDEEVVIAKMDATANDVPSEFDVQGYPTLYFVTPSGKVTSYDSGRTADDIRDFIKKSKGTVVFXHHHPGATGIREG

SEQ ID NO: 158730 - protein, 60 aa, Oryza sativa
  Clone ID: PAT_MRT4530_58177C.1.pep
MGVCLARTVSLTTSVFYRALQRLATICCTGFSPGSNTGTTPTTGGGANVVSPGYTKGDRL

SEQ ID NO: 158731 - protein, 93 aa, Oryza sativa
  Clone ID: PAT_MRT4530_58178C.1.pep
MDGQQLRSSESPASGGGGVTGGGAPHLFHALGPALLISIGYIDLGKWVAAVEAGSRFGLDLVLLALLFNFMAILCQYLAACIGTVTGRSLAEW

SEQ ID NO: 158732 - protein, 76 aa, Oryza sativa
  Clone ID: PAT_MRT4530_58179C.1.pep
DKLSNMRIGRRPGRPQGVRVGRFINAAGTTGFPTGKRAVPKHKTKTELLTTFQEVAIVDEVTIIEDKASCGADPYI

SEQ ID NO: 158733 - protein, 96 aa, Oryza sativa
  Clone ID: PAT_MRT4530_5817C.1.pep
KLDFLAQSNYDCEFSGFLIIWLLYHIALYDLLHRPYILESYILLITLSSFYQPCLYTTFSLAVLHNLKSYIFLKKKLNLLHLYDTFTHLSYMSLFI

SEQ ID NO: 158734 - protein, 139 aa, Oryza sativa
  Clone ID: PAT_MRT4530_58180C.1.pep
EDVEPVEEDDGEGLNKNSGCYHKHQGWNSTSIHVHVRAENFGRISPRKTKEIQSNIGQSFCSPRRQSLVKISAGRRPEKALFTGRKFQQSVALNSRILPPEIWAEFHPEKRGFAPKFRAEFCFGERLAYIRACKMTAKL

SEQ ID NO: 158735 - protein, 118 aa, Oryza sativa
  Clone ID: PAT_MRT4530_58181C.1.pep
LKIFQQISLTSVPQEAKGNAKALVHMPKKGVLFINPPPFVITLAHWGLPGCFFVWLDVWLGVSALPEGRVHVACPPRDVGGVVLGGNILGGPPQGRRFVYQEASGGPVHFLLLLVLLL

SEQ ID NO: 158736 - protein, 135 aa, Oryza sativa
  Clone ID: PAT_MRT4530_58182C.1.pep
MAAFTTTAAGSAVAFARPAKAINVSSVSFAGLRKNNVAFTLQPVTQRFAVLRAAKKETVEKVCDIVKKQLVLPEGTDVTGASKFTDLGADSLDTVEIVMGLEEAFKISVDESSAQSIATVEDAAELIDKIVSNAK

SEQ ID NO: 158737 - protein, 78 aa, Oryza sativa
  Clone ID: PAT_MRT4530_58183C.1.pep
MAETNGDAAAAAWIGAGVAAWSGDVGVRGLGGRARRCGAARCDGRRGLAVAVTAVRVGNRGGEEGLGSDQARKASAAT

SEQ ID NO: 158738 - protein, 72 aa, Oryza sativa
  unsure (1)..(72): unsure at all Xaa locations
  Clone ID: PAT_MRT4530_58184C.1.pep
LELAPIGVADPSKVFGKFLAPDAAASPRSAAENVRRRPARAPLPTXAPPPAHAPPPARAPPTSPRAAELYGR

SEQ ID NO: 158739 - protein, 103 aa, Oryza sativa
  unsure (1)..(103): unsure at all Xaa locations
  Clone ID: PAT_MRT4530_58185C.1.pep
NLNLPSIPLPXSRHQHTVLRTVDTMLATADAIDKAVVQSPPGVQISVEPTVLKFSXGKNTQSFKITFTMTHKLQGGYLFGSLAWYDGGAHYVKIPIAVRPRGI

SEQ ID NO: 158740 - protein, 53 aa, Oryza sativa
  Clone ID: PAT_MRT4530_58186C.1.pep
GGWPEFFRYRPFFPGFKFFCPSQPFFELFCRGLGDQFANSCLRPAVNCRFSPT

SEQ ID NO: 158741 - protein, 174 aa, Oryza sativa
  unsure (1)..(174): unsure at all Xaa locations
  Clone ID: PAT_MRT4530_58187C.1.pep
VQFVGKPLAPDIEDDPSILISYTPPPLNPLPPRSTHDYIPPPPPHPSPPPPPPPPPPXPPPPPPTPPPPPPPPPPPPPPSPPLPPAPPASPPXPRPAPPPPPPPPPPLPPPPPPPSPPPPPPPPPPPPPPPPPPSPPPPPPSPPPPRPPPPPPPPPPAPPPPPPPPPPPPPPPP

SEQ ID NO: 158742 - protein, 68 aa, Oryza sativa
  Clone ID: PAT_MRT4530_58188C.1.pep
MAVQAHYHHHHHHQQQHQPPPLFLARGVVVSPETTRPAGMEYHYQQHQQPPLFLDFSHGDGDGGNSRK

SEQ ID NO: 158743 - protein, 128 aa, Oryza sativa
  Clone ID: PAT_MRT4530_58189C.1.pep
DREYMESAVASALLKSVMGRLFTVLEKEYSKHRELAQETNSLQQDLRIVAAAMDDQLLSIRRSDARTAVARLHSKEMLDLAHDIEDYVDRFIHHLTCRQQCASAGRNSLLDRVAHELKRVQSRSSFSF

SEQ ID NO: 158744 - protein, 193 aa, Oryza sativa
  Clone ID: PAT_MRT4530_5818C.1.pep
GAEIPAADSFLSGRSLSLPALYNRSSCFAPPFPSLAAHSPRRNCARTVAPSLRRRRRAPVRRRRRSGPPPDSASPPSASPRPRRPRPRLRFARRPPEHRRPRSPEPRRRLPPLRSSLPPPSSTRGEPWTAPFASPFPPLSRVPLRRAVGRRRRPSGRECAASRRPCRRGHLRARPAAARWGPAVSRPRPRVRL

SEQ ID NO: 158745 - protein, 92 aa, Oryza sativa
  Clone ID: PAT_MRT4530_58190C.1.pep
VVAQSLAASDPPANYTWIVDGAAATVECPTTASLIIHLSQAGRFLNSPQLSLIGVCPNHCWYRSLYSDLKYATKHFGQGKSTQGNDISSQHI

SEQ ID NO: 158746 - protein, 88 aa, Oryza sativa
  Clone ID: PAT_MRT4530_58191C.1.pep
VGGASGGNSGGNWRNLFVGPLVASYPYPSGSKIFFSPNQIVFVSNGPPKSKNPLSIHPMLRVLRPGCYQKLNSLWVRCLNPLLLSSGI

SEQ ID NO: 158747 - protein, 1099 aa, Oryza sativa
  unsure (1)..(1099): unsure at all Xaa locations
  Clone ID: PAT_MRT4530_58192C.1.pep
MVDGPSPRTGGRGEVAVRLRWRPRVCQAGVDGRKGERELARDRTAHGGREAPANGGEPERVASTEGKRRGQGTHSAARIGGGGCDGGRRRRRSSLDVRCGRARGGRRERRMGLSQTAEKRRFGRGNRHRAVKEREMAVALARLAVTGDARTADDEDARSGEDGGSGGRNRTAGAGGAARGELALSQGGGRRRRQVGPTCRVRVRENYLGRPSFFAADHRSSPPTSNPSRRLCPLVAGRRRSSVDVVSFSSFCVLACRFRRCEVCQTVKWREVHGGRWGVHASGCRGGDYDPGMVHCVFFLVRTKCLLIITVTNVMRGSGSERWEPTSDRKISHPQPQEIMRCVDDQVRMRQVQRSKNKQINMSELVNSMTQELDYYWSLGTDIDRGTESCLIYKVQQHIRDIDRFSYEPCIVSVGPYHHGSADLQSMEKVKWGYVDVIVKLNYIWFSNGSMDIPCIVVDEYTGSLFRNLIAFEQTCPQFGDDFTAYIVFLSQLISMPEDVTLLIQRKIIVHQLDSDERVSDLFTTLSKDVVFDFNAASATVIVLICTIVQTVFGILAYVNPPKYQIMVVGSSQIQRLTELAPLCRRRSCRLLHRRRLLRRRHLLLLLRCGVASTIPDGSSYAPPTLLFFLPIVPLRNCTVRFVLVPTGTSTRRSSTLSVQKTTSFFLITFILHSLYFSFKKRNTHAGVHNASSLTPINTHAHLQKSLFYLTYATVGKNANIQHGYDHAFMRFKVQVFKKPLRMREYQTKNLLIAVHASAQRDPRVHEKIYDPPPPSRPSPPPHPRAITSSRRHSTPPSPHRSXPTPAPAASSPTFPAPMTTPSAPPPCPHLAAYRHTTRSTXRSLQPAALRVTARSARPEIRREXRELPRCSPCSSPTSSSSRXLYACLSCAAVFCPTHAASHASASTSGGHQIAVDVDRAELFCGACGDQVYDPDFDHAVVLAQSSSLPPPSASPSPSPSPAAPRKRRRVEYRAWAPDPAEFALISSADPTTSASAAAPAGLRGLNNLGNTCFMNSVLQALLHAPPLRNYFLGDRHNRYLCPRQTPMRRRSAEANDKAACLACDLDEIYSAAFSGERTPYSPAKFLYRSGSSALFALG

SEQ ID NO: 158748 - protein, 269 aa, Oryza sativa
  Clone ID: PAT_MRT4530_58193C.1.pep
MATAVSPREFPSTACKAVPAVAGFDLNVRLEEDEDGNVPFHLNEPILEDHNVNGFDLNMPLDEFGVVDLDFFTKPRCHKKGRSGRKAIPLDLEQLRNIPLKQRMTIEDVSSKLGISKSRIQRYLKKGLLRRHSSSIKPYLTDANKKTRLKWCVDMIDQSLVGDPRFKDFFDYVFIDEKWFYLSQKSEKYYLLPEEDEPHRASKWPREDVNKPIFIQQDNAPSHLILDDPVFCEAAREEGFDIRLVCQPPNSPDFNILDLGFFRAIQAIQ

SEQ ID NO: 158749 - protein, 65 aa, Oryza sativa
  Clone ID: PAT_MRT4530_58194C.1.pep
MVVLHLAGGGGGRRKGEQQRQEDRGGANPTNSEALWYYLKVEQNQFVVCNSEAIDIGFQGKMPSN

SEQ ID NO: 158750 - protein, 337 aa, Oryza sativa
  Clone ID: PAT_MRT4530_58195C.1.pep
MAVPAVAGFDLNVRLEEDEDGNVPFHLNEPILEDHNVNGFDLNMPLDEFGVVDLDFLQNHAEHAVQNQAPVEGQHRRKDMTEEVTKQVYQALLNDNKNGKLGKKDTRRVADQFGVRIRSVQRLWKRGKIQLTHNIPVVVASHKKGRSGHKAIPLDLEQLRNIPLKQRMTIEDVSSKLGISKSRVQRYLKKGLLRRHSSSIKPYLTDANKKTRLKWCVDMIDRSLVGDPRFKDFFDYVFIDEKWFYLSQKSEKYYLLPEEDEPHRTCKNKNYIPRFMFLCVCARPRFRNGECVFDGKIGCFPLVTYEHAVRSSQNRLRGELVIKPITSITRDVIRDFM

SEQ ID NO: 158751 - protein, 238 aa, Oryza sativa
  Clone ID: PAT_MRT4530_58196C.1.pep
LIGGEAGEGPDLGTEEEDYVFKVVVIGDSAVGKTQLLGRFTKDEFFIDSKSTIGIEFQTRTVEIGGKRVKAQIWDTAGQERYRAVTSAYYRGALGAMLVYDVTSRRSFHHAARWLHDLRAHADNSIVVMLIGNKADLSHARAVAADEAAAFAEDQGLFFSEASALSGDNVEEAFLGLLREIHAIVSRRSLLEMDGINGDAAANANAALMLRGTKLSLSDELSIMETSAIKRVSRCSCS

SEQ ID NO: 158752 - protein, 80 aa, Oryza sativa
  unsure (1)..(80): unsure at all Xaa locations
  Clone ID: PAT_MRT4530_58197C.1.pep
FPSAPDKNGYGYLSDRKFLGXFGYGYEYGYFLPGMVSGFPSDIDNNSDIRKKYFHIRVRSYSILIPIRFSVFVFVSGKKI

SEQ ID NO: 158753 - protein, 52 aa, Oryza sativa
  Clone ID: PAT_MRT4530_58198C.1.pep
SGYFLTVACRHTQQTPRILAKFFESLHHGLKIHKTLHSPNLKTVGNLVVEFV

SEQ ID NO: 158754 - protein, 1030 aa, Oryza sativa
  Clone ID: PAT_MRT4530_58199C.1.pep
MTSARHLFFTLSFSFLALLSCIAVCNAGDEAAALLAIKASLVDPLGELKGWSSAPHCTWKGVRCDARGAVTGLNLAAMNLSGAIPDDILGLAGLTSIVLQSNAFDGELPPVLVSIPTLRELDVSDNNFKGRFPAGLGACASLTHLNASGNNFAGPLPADIGNATALETLDFRGGFFSGGIPKTYGKLQKLKFLGLSGNNLNGALPAELFELSSLEQLIIGYNEFSGAIPAAIGNLAKLQYLDMAIGSLEGPIPPELGRLPYLNTVYLYKNNIGGQIPKELGNLSSLIMLDLSDNAITGTIPPELAQLTNLQLLNLMCNKIKGGIPAGIGELPKLEVLELWNNSLTGPLPPSLGKAQPLQWLDVSTNALSGPVPAGLCDSGNLTKLILFNNVFTGAIPAGLTTCSTLVRVRAHNNRLNGTVPLGLGRLPRLQRLELAGNELSGEIPDDLALSTSLSFIDLSHNQLRSALPSNILSIPALQTFAAADNELTGGVPDELADCPSLSALDLSNNRLSGAIPASLASCQRLVSLSLRNNRFTGQIPAAVAMMPTLSVLDLSNNFFSGEIPSNFGSSPALEMLNLAYNNLTGPVPATGLLRTINPDDLAGNPGLCGGVLPPCGASSLRSSSSESYDLRRSHMKHIAAGWAIGISAVIAACGAMFLGKQLYHRWYVHGGCCDDAAVEEEGSGSWPWRLTAFQRLSFTSAEVLACIKEANIVGMGGTGVVYRADMPRHHAVVAVKKLWRAAGCPEEATTVDGRTDVEAGGEFAAEVKLLGRLRHRNVVRMLGYVSNNLDTMVIYEYMVNGSLWDALHGQRKGKMLMDWVSRYNVAAGVAAGLAYLHHDCRPPVIHRDVKSSNVLLDDNMDAKIADFGLARVMARAHETVSVVAGSYGYIAPEYGYTLKVDQKSDIYSFGVVLMELLTGRRPIEPEYGESQDIVGWIRERLRSNTGVEELLDASVGGRVDHVREEMLLVLRVAVLCTAKSPKDRPTMRDVVTMLGEAKPRRKSSSATVAATVVDKDKPVFTTSPDSGYL

SEQ ID NO: 158755 - protein, 69 aa, Oryza sativa
  Clone ID: PAT_MRT4530_5819C.1.pep
FCFLFFFSFFFFFFRNNSFVGFKTSVSICPRGKRPNLATESQAQGPFFFSPTGPLTEGRAVLVGQLYMD

SEQ ID NO: 158756 - protein, 223 aa, Oryza sativa
  unsure (1)..(223): unsure at all Xaa locations
  Clone ID: PAT_MRT4530_581C.1.pep
MAAAAVLRSHGARRILSYPQQPPPLAGTLWARSMATFTRTKPHVNVGTIGHVDHGKTTLTAAITKVLAEAGKAKAVAFDEIDKAPEEKARGITIATAHVEYETAKRHYAHVDCPGHADYVKNMITGAAQMDGGILVVSAPDGPMPQTKEHILLXARQVGVPSLVCFLNKVDAVDDPELLELVEMELRELLSFYKFPGDEIPXIPGSALSALQGXNDEIGRMPF

SEQ ID NO: 158757 - protein, 303 aa, Oryza sativa
  Clone ID: PAT_MRT4530_58200C.1.pep
MQGRLNLENRIIDSDERAVYQEALQNIIQDKREDDLPEGVLSVPLLRHQKMALAWMVSKENSSHCAGGILADDQGLGKTVSTIALIQKQRIQQSKFMSVDSDRLKAEALNLDDDDEAAPVADNKGEQTKNDEPRKDLGAGSSSTAAGTGDVETCASLMNTAPDKTVERNVERKKKSKASTSSTMQSMTRPAAGTLVVCPASVLKQWANELTDKVGESAKLSVLVYHGGSRTKDPNELAKYDVVITTYTIVANEVPKQNADDDTDQKNGEESSAGNKRKQPPKAQSKSKKKKKKLETSSLPRAD

SEQ ID NO: 158758 - protein, 696 aa, Oryza sativa
  Clone ID: PAT_MRT4530_58201C.1.pep
MAEGLQRPEICARSERPEEEEEGASDPASLPALHAVAVTTGLHGFAAVTNSLAARYAKTGSFPSAVGVFAAARARDVSSYNTILSAFPDPAEALDFASWMLRSGAVRPDAVTCTVALSLAAGRGEGFLVRQLHALAWRSGLAADVFVGNALVTAYSRGGSLGEARSVFDDMPARDLVSWNALICGLAQDGDCPAEVIGVFLRMLRDGDVQPDRISVCSVIPACGGEGKLELGRQVHGFAVKLGVEGYVSIGNVLVAMYYKCGAPGSARRLFDAMSERDVVSWTTAISMDGEDALTLFNGMRRDGVPPNEVTFVALMSALPADCPARGAQMVHAACLKAAVSGEAAASNSLITMYAKARRMDDARMVFDLMPRREIIAWNAVISGYAQNGRCNDALELFSSMARCLTPNETTFASVLSAVTAVETVSMAYGQMYHSRALSMGFGDSEYVAGALIDMYAKRGNLEESRKAFHETEQRSLIAWTAIISANARHGSYGAVMSLFGDMARSGVAPDGVVLLAVLTACRYGGMVDAGRDIFDSMAADRGVELWPEHYSCVVDMLGRAGRLAEAEELMMRMPAGPSVSALQSLLGACRIHGDAEIGERIARILTEKEPTESGAYVLLSNIYADVGDWDGVAKVRRKMRDRGVKKEIGFSWVDAGAGEALHLHKFSSDDTTHPPEAIAICDFRVASKAQLTSFV

SEQ ID NO: 158759 - protein, 135 aa, Oryza sativa
  unsure (1)..(135): unsure at all Xaa locations
  Clone ID: PAT_MRT4530_58202C.1.pep
MAQQHPCAHRDPGGVEMGVPAVYPPLPNPNGQAMDQERLGGGGPNHWVGNDANTLLVVATLITTLTYQLGTNIPGGYWQDTKGXHRARAPAMRAPPPPRAPGFPGPRGVGCARSWVPPLPLPVRVPVDSRNVRWS

SEQ ID NO: 158760 - protein, 122 aa, Oryza sativa
  unsure (1)..(122): unsure at all Xaa locations
  Clone ID: PAT_MRT4530_58203C.1.pep
MHLSENEGIEGVRFAVTGGQGFVGSALCLELLRRGAREVRSLDLRAFFPWSDQLLGAGVRFFQGDVRKKEDVGKALRGVDCVFHLALYGMSGKEMVQAGRADXVNINGTCNVLDACHQHCVR

SEQ ID NO: 158761 - protein, 56 aa, Oryza sativa
  Clone ID: PAT_MRT4530_58204C.1.pep
RAVGHLSVLIQGNTKKFFFNTPIMLRITIFFSPKGRGTGIEYTCWWLLQGPLHDFF

SEQ ID NO: 158762 - protein, 506 aa, Oryza sativa
  Clone ID: PAT_MRT4530_58205C.1.pep
MHLSENEGIEGVRFAVTGGQGFVGSALCLELLRRGAREVRSLDLRASSPWSDQLLGAGVRFFQGPPSRVHPHYSGFGFSFTVTDAVTEFFLRRDVRKKEDVGKALRGVDCVFHLASYGMSGKEMVQAGRADEVNINGTCNVLDACHEHGVRRLVYVSTYNVVFGGEPIVNGNEALPYFPVEDHVDAYARSKSIAEQLVLKSNGRQTKSDKSSRLYTCSIRPAAIYGPGEERHLPRILSLAKLGLAFFKIGDPNVKSDWVYVDNLVLALILASMGLLDDIPDRKGIPVAAGQAYFICDGSPVNTFEFLSPLFQSLDYTVPRVRMDTSVALAISRFFVFMYTLLYPWLDSKWIPQPLLLPAEVYKVGVTHYFSYLKAREEIGYVPMVSPREGLAATISYWQERKRKELDGPTIFPWLFVTIGMLALFSAAYLPPVGPLKWVLDLHLFVFRSKLVIRLVFVIATALHVGEAVYAWFLAKKYDPRNATAIYLPLNWKSQELQAYYSLMAE

SEQ ID NO: 158763 - protein, 137 aa, Oryza sativa
  Clone ID: PAT_MRT4530_58206C.1.pep
GLLNLRWQYDVNETIFLQSLKCSSYCASSSSDPRTSLAESSDVTSNMASSTSQTTTTNSEVSHAFSLETSTELATESTSTDAQSTGPFSGLTSWLLVEFLDKERSLNLGNNLGGTETLQFGLPISSGIGINIGIVGE

SEQ ID NO: 158764 - protein, 88 aa, Oryza sativa
  Clone ID: PAT_MRT4530_58207C.1.pep
MSTTGRALLVALAAVLLVTGDALLAPAGGQEQYTKAPAEAHKGYSIVRGQDVKAHDHEKFSILGRCRPSFLGLLAKIKCSICSYQFNI

SEQ ID NO: 158765 - protein, 145 aa, Oryza sativa
  unsure (1)..(145): unsure at all Xaa locations
  Clone ID: PAT_MRT4530_58208C.1.pep
IGEGVSPATARHGGRRRWPPPPPPHPPPHPRXRRAGVAHGAPHPPRRVGGLALPTGAPRAPPPRPPPLXPPPPPRRTPSPRPPPRSPPTRSPPPAPAQFGLCSACALGFGLSHTLVCCCDRVQVGSDVAFPRGDGRGGVPLRRRR

SEQ ID NO: 158766 - protein, 564 aa, Oryza sativa
  Clone ID: PAT_MRT4530_58209C.1.pep
MEISTVLGAILAEYAVTLVAMAVGFLVVGYLYEPYWKVRHVPGPVPLPLIGHLHLLAMHGPDVFSVLTRKYGPIFRFHMGRQPLVMVADAELCKEVGVKKFKNFPNRSMPSPITNSPVHQKGLFFTSGSRWTTMRNMILSIYQPSHLATLIPSMESCIERAAENLEGQEEINFSKLSLSFTTDVLGQAAFGTDFGLSKKLASSDDDEDTRKIAADTCAEAKASSEFIKMHVHATTSLKMDMSGSLSIIVGQLLPFLHEPFRQVLKRLRWTADHEIDRVNLTLGRQLDRIVAERTAAMKRDPAALQQRKDFLSVMLTARESNKSSRELLTPDYISALTYEHLLAGSATTAFTLTTALYLVAKHPEVEEKLLREIDGFGPRDRVPTAEDLQTKFPYLDQARQTLPRRVYIVRHEFLTAHRARMQVLKEAMRYYPSSPLIARELNQQLEIGGYPLPKGTWVWMAPGVLGKDPKNFPEPEVFRPERFDPNGEEEKRRHPYALFPFGIGPRACIGQKFAIQEMKLSAIHFYRHYVFRPSPSMESPPEFVYSIVSNFKNGAKLQVIKRHI

SEQ ID NO: 158767 - protein, 1032 aa, Oryza sativa
  Clone ID: PAT_MRT4530_5820C.1.pep
MAVKDRCDNTAVIPGRYPIVVEPTIQNIKVARVLIDGGSSINLLFASTLDAIGIPRSELTPTDQPFHGITPQSSSKPLGKITLPVTFGKANNFRTEQITFDVAEFDTTYNAIIGRTALTKFMAASHYAYQVLKMPGPKGTITIQGNAKLAVQCDKRSLDMVEHTPSPYATTEPPKKPSDMPGVPREVIEHKLMVRPDAKPVKQKLRRFALDRKQAIREELNKFLKAGFIREVLHLEWLANPVMVRKANGKWRMCVNFTDLNKACPKDHFSLPRIDQLVDSTAGCELLSFLDAYSGYHQISMAKENEEKTSFITSFKVFCYVKMPFGLITAGNTFQRTVQGALSNQLGNNVEAYVDDIVVKTKTSDSLIDDLRETFDNLRRYRLMLNPEKCTFGVPSGKLLGFLVSGRGIEANPEKIKAIENMKSPIRLKEVQKLTGYMAALSRFVARMGERGQHFFTLLKKQDKFVWTQEAEEAFIALKRYLSNSPILVAPQPNEELFLYIAATPYSVSTVIVVEREKVQRPVYYVSEALHDAKTRYPHIQKLLYAVIMTSRKLCHYFQAHRVTVVSSFPLGEVVRNKDVVGRIAKWVIELSQFDVHFVPRTAIKSDNQIDNETWTMAFDGALNSQGAGAGFILTSPSGDQFKHAIHLNFRATNNTAEYEGLLAGIRAAATLGVRRLIVKGDSELVANQVHKDYKCSSPELSKYLAEVRKLEKRPSVKDASGKDSPVTLNNSSGATEAERAVADIKTTDDWRTPLIKFIGSEELPEDDAEAEKISRKAKVYCMIGNDIYKRTPNGVLLKCVSSDDGRHLLLDIHEGICGSHAAGRTLVVKAFRQGFFWPTALKDACDMVQRLGVKICFASVSHPQSNGQVERANGIVLLMSHDKKWVEELPSVLWTVRTTPTTSNKETPFFLVYGSEAMLPTELRHQSTQVQKYSDEDQEEQRNDDVNLLEEHRERVVVRAASYQQALRRYHEKRIRARTLSIGDYVLRRVQSQAGQNKLSPKWEGPYKITQVLRPDAFKIADDDGRELANS

SEQ ID NO: 158768 - protein, 53 aa, Oryza sativa
  Clone ID: PAT_MRT4530_58210C.1.pep
MGYLFRYKSIEVHILAINHILTKQTIDKKIGEFSNCHIVYSGIDFQKRQIKVL

SEQ ID NO: 158769 - protein, 378 aa, Oryza sativa
  Clone ID: PAT_MRT4530_58211C.1.pep
MVSLLLQWKPALLSDYDSSKSSPLHFASSDGDCSIIQEMLTHAPPSTAFMLDNEGLSPLHVAALMGHAAIVHLLLQFCPSSADIRDNYGRTFLHAAAMKGHSSIISYAIKKKILEHLLNAQDKEGNTTLHLAVIAGECKVVSKLLSSGKMQANIMNNVGHAPTDLIKNCKGFYSMDIMKWRETTSKNLAVVSTLVATIAFSAAFNIPGSYGNDGRANLAGNSLYSAFLILDTFSVVTSVMATILLVYGRASRSQRSWLGFMVTMHFLWLSLNSMVLGFFAALAAVMSKEKGIKIAMSQVIYYGMYILTTLLSILAMPGSFTSIVKFLISAPKERQRHTKRQISRQYPFAIFYIVNAVLFVIINSLAMASFEVARNLSY

SEQ ID NO: 158770 - protein, 311 aa, Oryza sativa
  Clone ID: PAT_MRT4530_58212C.1.pep
MGRPPCCDKEGIKKGPWTPEEDIILVSYIQEHGPGNWRSVPINTGLMRCSKSCRLRWTNYLRPGIKRGNFTAHEEGIIVHLQSLLGNRWAAIASYLPQRTDNDIKNYWNTHLKKKLAAAANSTSSSNRHPIFADATFPSAAGGSYTVSSNSDVTQMAAIARRSPFADCPSSSYASSMDNISKLLDGFMKTNSPSPPPPPLQHYDGGYYDDVKPAVDVGGNPLLSSFDCMSGADLDCCFDVHQQHQQQPPASFMEYGGYGGGYGDESKQQLMNQAAPPLSSIEKWLFDEAAAEQVADLMDLSDGCCSVPMMF

SEQ ID NO: 158771 - protein, 405 aa, Oryza sativa
  Clone ID: PAT_MRT4530_58213C.1.pep
MSIHLRAHAFAASPLRGLSASTAAVSPSAAADALRSLLDAGAGAADAAHPHPHPHLSKILPFRRGRPLARSYDSPPPPAAAAAAPPPPPAWRLAWLPPARVPDVPSDAFVFLGAHGEEEGKEAAAYWAVDVSERDGEGAGDGSAFVDLRTLMVATDWRDKDAMGDLAIAGHARALLEWHSTAKFCGACGSRAVPAEAGRRKQCSNESCKKRIYPRVDPVVIMLVIDKENDRALLSRQSRFVPRMWSCLAGFIEPGESLEEAVRRETWEETGIQVGEVIYHSSQPWPVGPSTMPCQLMVGFFAYAKSLEIHVDKKELEDAQWHSREDVKKALTFAEYEKAQRTNALKVNQICKGVEKRQSISADLKIESEEPAPMFVPGPYAIAHHLISSWSFEGAPKAPSSFSNL

SEQ ID NO: 158772 - protein, 56 aa, Oryza sativa
  Clone ID: PAT_MRT4530_58214C.1.pep
PPVVSPFKKKLPGQQSISPTLFSPFPTVAKAVLPKAFQIYDKGVAKIKAQFSPQKT

SEQ ID NO: 158773 - protein, 188 aa, Oryza sativa
  Clone ID: PAT_MRT4530_58215C.1.pep
MRQNCPSCPPSPLLRKRSSSSLANLHVHHKQLTVFLPDGEVAGESSDIFLSLDLATSADYLAAVDDEAEGDAVERQQQLLASLAGDGGGGGRGGEAAAVAGEMERKPPPPRGLLDDLASASASALLVLSGGGGQGQPPVVPSLRAPAHPNALVGSGGGLIQRRCRPSRPRRRRLRKGKDAKHVFKIAF

SEQ ID NO: 158774 - protein, 64 aa, Oryza sativa
  Clone ID: PAT_MRT4530_58216C.1.pep
RTPPAPAGRSCTGHMNGDRRMGRTNSSASTYYGPITRDGCRTHSTAAARFSSESSQDFDTCDGS

SEQ ID NO: 158775 - protein, 55 aa, Oryza sativa
  Clone ID: PAT_MRT4530_58217C.1.pep
VVVIVGRARVSKDFMGNRLRVLFLKFLRKPYSLWKFGSGYSEKIGGQKKPCVIIL

SEQ ID NO: 158776 - protein, 250 aa, Oryza sativa
  Clone ID: PAT_MRT4530_58218C.1.pep
MSPAPPPSRGRIRPWLVVGDLVVAAMWVCAGALVKLAVYGVLGLGGRPEADAVKVALSLVYMFFFAWLEGFTGGASYNPLTVLAGALASRAGPSLYLFAAFVRMPAQVFGSILGVKLIRAALPKVGKGAPLSVGVHHGALAEGLATFMVVIVSVTLKKKEMKGFFMKTWISSIWKMTFHLLSSDITGGVMNPASAFAWAYARGDHTTFDHLLVYWLAPLQATLLGVWVVTLLTKPKKIEEEADESKTKKE

SEQ ID NO: 158777 - protein, 539 aa, Oryza sativa
  Clone ID: PAT_MRT4530_58219C.1.pep
MALLSPPSPPPPLPPLRRRPASPTLLAVATRPSSLLSLPHCHCGLPLPSTANARAYSRSSRRRRRVAASLGQDEPGVSDTAVAPEGEGDSEPPASSDGAAGDIASSAEQPEASPEDLEDIRQVKRVLELLQKNRDMTFGEVKLTIMIEDPRDIERKRLLGIEDPDEITRDDLADALVEVNEGRIPENRVALQLLAKEMTEWPDLEMEAPKKKSKPGKSVYAKATDTGIDPETAAKRLNIDWDSAADLDDEEEEDDETEVPSAVGYSALYLLTAFPVIIGISVVLILFYNSLQKQSEHLVHAVHFWYGDAMSFSQEDDSFREKHASFKKEAGAAGIDDEEDQDRRSHASADGSNAARGAATGRRSRVASSVTDISSNSSINYRRARQDRFAGDGFWCGALCLPLPGLSRRRPMQQQQSMSLSEPGARASTAETRASVASKGASMERFKYSSSSSSSIVFERAGGEEEEQEQEQEPSAYFDLPLELLRSSNVDTESPVTAAFLFDGRRGLGPKKFTMPELPELDFSFPAPPELSNPSSPRT

SEQ ID NO: 158778 - protein, 56 aa, Oryza sativa
  Clone ID: PAT_MRT4530_5821C.1.pep
APANATSICGDCCRNIWGAQRQRGVWRTLTIRIRFLEMVLGPSLGTSYRGALCACQ

SEQ ID NO: 158779 - protein, 342 aa, Oryza sativa
  Clone ID: PAT_MRT4530_58220C.1.pep
MEILVEESNVQRVDAPVTVTAPLPPPFPFHLSFVRFASDDFWAITMSFADEDSRALVKIAGIICGDIHGQFYDMKELFKVGGDCPKTNYLFLGDFVDRGFYSVETFLLLLALKVRYPDRITLIRGNHESRQITQIRVIDRKQEVPHDGAMCDLLWSDPEDAVDGWGLSPRGAGFLFGGNVVSSFNHTNNIDYICRAHQLVMEGFKWMFNNKIVTVWSAPNYCYRCGNVAAILELDENLNKQFRVFEAAPHESRGVPAKRPAPDYFLKFCSWHLYKLSEECISIPARKCQAPPEEDKVLKERLKLNRSSNGSSMKVKTSRTLLSPILRGIPIKANKGPWTPDL

SEQ ID NO: 158780 - protein, 103 aa, Oryza sativa
  Clone ID: PAT_MRT4530_58221C.1.pep
KRKIFTKGNDAARKTEKEIRQEVKPVASVNANDCRVVRGFPPHLVVHVRPRTADDSSQQVSARRPSSTGEPLRSIRIPPDFGVPFVDSVDRSVEDGVEGALLP

SEQ ID NO: 158781 - protein, 40 aa, Oryza sativa
  Clone ID: PAT_MRT4530_58222C.1.pep
LPRLVAHRATSLVPFAVPPHSAWVLNVAGPDRRHHRPEGP

SEQ ID NO: 158782 - protein, 107 aa, Oryza sativa
  unsure (1)..(107): unsure at all Xaa locations
  Clone ID: PAT_MRT4530_58223C.1.pep
DYRGGTRAELVREDRPPGAGDRLGRRLPGGASARASGAALAGGVLQSALDAVRVERPYTVQHVVRXFRCSYCSTRCRGAPGRSCTAPCPRAPTRSSTTPGAPPRASN

SEQ ID NO: 158783 - protein, 146 aa, Oryza sativa
  Clone ID: PAT_MRT4530_58224C.1.pep
RSHSLFSITIHIKEATPEGEELIKCGKLNLVDLAGSENISRSGAREGRAREAGEINKSLLTLGRVITALVEHLGHVPYRDSKLTRLLRDSLGGRTKTCIIATVSPFVHCLEETLSTLDYAHRAKSIKYRPRVNQKMMKSTLIKELY

SEQ ID NO: 158784 - protein, 50 aa, Oryza sativa
  Clone ID: PAT_MRT4530_58225C.1.pep
NQSPTQVTKSNDRTVDGKLTSSLRPRLGNFQSNPLLQQPNTAKGRPPDAW

SEQ ID NO: 158785 - protein, 146 aa, Oryza sativa
  Clone ID: PAT_MRT4530_58226C.1.pep
FGFRNLHQEELKKKMAEELKQLNYSLQDADQSIIVQTMTVAESRRSRRLKTSPNVGGRPPRRLRSQATTSMIRCSSCTSLTILLTGATSSVNGSNQMPTSKISMIDRSIGFSLSSSSSDPVSSWILAFLLAMIMMNSNSNKNLQFC

SEQ ID NO: 158786 - protein, 328 aa, Oryza sativa
  Clone ID: PAT_MRT4530_58227C.1.pep
MGGGGGAEEELTAQETALYDRQIRVWGVDAQKRLSKAHVLVCGMNGTTTEFCKNIVLAGVGSLSLMDDHLVTEDDLNANFLIPHDESIYGGRSRAEVCCESLKDFNPMVRVAVEKGDPSLIDGEFLDKFDIIVVSCAPIKTKLLINDNCRKRSKHIAFYAIECKDSCGEIFVDLQNHSNVQKVGGEPKPKELAYPSLQEAISVPWKNLPRKTTKLYFAMRVLENYESSEGRNACEASLSDRPAVLALRKDMCDKMSLSESQIPTALLERLLAAGKKQHPPVCAILGGILGQEVIKSISGKGDPIKNFFYYDAADGKGIAEDIPPLSSD

SEQ ID NO: 158787 - protein, 64 aa, Oryza sativa
  Clone ID: PAT_MRT4530_58228C.1.pep
MAICVGSFGATVCLFTGLNALNMMVLIYQMFMQIILCTKKLTGLVWTSHVHLQSVTMHKLIREF

SEQ ID NO: 158788 - protein, 174 aa, Oryza sativa
  unsure (1)..(174): unsure at all Xaa locations
  Clone ID: PAT_MRT4530_58229C.1.pep
QWYTSGQSKTIRIAVPAVMAPGLEWYIPGLEVELCSRVWLFRMVGPMQRMPRFKPEYLFGTEGFVQELRTMSFAIGFGTAPLXAQIPHDRDEEKCRVMVTLNRDGKDRYSDQLADTEYRYHPRQPQGSDRGSYLEPAWIDNDATTWHLDEMLCAMDESRAEVVLPAQDREDWNR

SEQ ID NO: 158789 - protein, 348 aa, Oryza sativa
  unsure (1)..(348): unsure at all Xaa locations
  Clone ID: PAT_MRT4530_5822C.1.pep
MNPSKWLLCRRARPPLSLTGGTHLSSPSSRRARRRARALAPPPPRIPPHPAFPARLNEGGITPHVSLSRFPLFSLSLSLGFVRIHPAKFAGVFNGARDLRARFPLSPAALSPSRRYIFAPRASLLHFRRSPLALAVGFVLAPCSSLSAVXAELRSAGRTAPDLLPTRRHLHRLRRVVADPVRRSASPADRRSAVAIVIPSRAAVFLRSDRRSRRRRCPGVSRGPPFAFPLPSSLSGAAPPRRWSPAVTIGARARRSRRPRRRGRPRACPRGCQVGPAVSRPRPRVRLTRGTHGADRRQPRAPGPPWTERLTRGPHFPWTRANEGYTSCGPMADNKKGNKVISQDIDAS

SEQ ID NO: 158790 - protein, 128 aa, Oryza sativa
  Clone ID: PAT_MRT4530_58230C.1.pep
MSFLIGFETAPLYAQIPHDRDEEKCRVKVTLNSNREDIPSEVARIAIGELRESYNDRLADTEYRYHPRQPQGSDRGSYLEPAGIENDATTRHLVEMLWAMDETRAKIVIAAQDREDRNRGKICKLEDK

SEQ ID NO: 158791 - protein, 156 aa, Oryza sativa
  unsure (1)..(156): unsure at all Xaa locations
  Clone ID: PAT_MRT4530_58231C.1.pep
NTTPQVSPLLSTGSGQFPLVPRXSXKPHRPSXGLSELHHAHPCLDASTRGKLYFKLGSYPFPLVASAVCLPVYPTNRTLIAMGATSKTMHPQPTIQSHFNWIIMTXKHGRMSQAXAARHDIKRSNTTIIPSTVLVPACAAAPRVVVGRGGVDRWSR

SEQ ID NO: 158792 - protein, 313 aa, Oryza sativa
  Clone ID: PAT_MRT4530_58232C.1.pep
MATTAAASPPAIATALSALLRRQRRRSSRCVGASHARCLAADANAEAVAPSRRGGHGGTRLEEAVPAGEGRSRIDAWISARLGGGGVSRARIQASIRAGLVVVNGRPVSKVSHMVKGGDIVSCTVLELQPLRAEPEDIPLDIVYEDDHLLVVNKPAHMVVHPAPGNANGTLVNAILHHCKISTFTCLARNSIDDECPDSSDDDIDVFDIDQFTTGEVSSEVREALVRPGIVHRLDKGTSGLLVVAKDEHSHAQLAEQFKLHTIRRVYISLTCGAPNPNSGRIEVPIARDPNNRIRMIATPGSGHRYARHAASR

SEQ ID NO: 158793 - protein, 516 aa, Oryza sativa
  Clone ID: PAT_MRT4530_58233C.1.pep
MAQLRAKMPRFKPEYLFGTEGFVLELRTMSFLIGFGTAPLYAQIPHDRDEEKCRVKVTLNSNPEDIPSVMFEAGGGNCIHACQEVARITIGELRERYNDQLADTEYRYHPRQPQGSGRGSYLELAGIENDATTRHLVEMLWAMDETRAEIVLAAQDREDRNRGKICKLEDKVDRLEKELAALKGEAPPQKARVRLTARKRALFVPRYQLASKWYTSGQSKTIRIAVPAVMAPGLEWYIPGLEIELYSRDWLFRMMPRFKPEYLFGTEGFVLELRTMSFLIGFGTAPLYAQIPHDRDEEKCRVKVTLNSNREDIPSVMFEAGGGNCIHACQEVARITIGELRERYNDQLADTEYRYHPRQPQGSGRGSYLELAGIENDATTRHLVEMLWAMDETRAEIVLAAQDREDRNRGKICKLEDKVDRLEKELAALKGEAPPQKARVRLTARKRALFVPRYQLASKVRVVEEEEAAPAPVNLPVINVSDDEGEESKRTHSKVEWGATQDDEIEPSINSDARKT

SEQ ID NO: 158794 - protein, 125 aa, Oryza sativa
  unsure (1)..(125): unsure at all Xaa locations
  Clone ID: PAT_MRT4530_58234C.1.pep
TKQDRLLTVKFACYLTANKGFIGVSADEVSGHSIGLQGLHPNGFYWIILLFSCXYHQPIAFILLFTPSVRIYVRIRADSSKPYRYRLGQIDXHTRISLTFGPSLELSRSLRSVCVFFINTYVAEK

SEQ ID NO: 158795 - protein, 109 aa, Oryza sativa
  unsure (1)..(109): unsure at all Xaa locations
  Clone ID: PAT_MRT4530_58235C.1.pep
MPRFKPEYLFGTEGFVQELRTMSFAIGFGTAPLXAQIPHDRDEEKCRVMVTLNSNREDIPSVMFEAGEGNYPHACQEMAXDRYSDQLADTEYRYHPRQPQGSDRGSYLE

SEQ ID NO: 158796 - protein, 340 aa, Oryza sativa
  Clone ID: PAT_MRT4530_58236C.1.pep
MVLFMAWFMWLFWGILALFWLRIPDVPGGGPILQGEDFGRSYKRLARSSWFGMVYSWFGDRTLQPRLVVQNGWAYATRMPRFKPEYLFGTEGFVLELRTMSFLIGFGTAPLYAQIPHDRDEEKCRVKVTLNSNREDIPSVMFEAGGGNCIHACQEVARITIGELRERYNDQLADTEYRYHPRQPQGSGRGSYLELAGIENDATTRHLVEMLWAMDETRAEIVLAAQDREDRNRGKICKLEDKVDRLEKELAALKGEAPPQKARVRLTARKRALFVPRYQLASKVRVVEEEEAAPAPVNLPVINVSDDEGEESKRTHSKVEWGATQDDEIEPSINSDARKT

SEQ ID NO: 158797 - protein, 579 aa, Oryza sativa
  unsure (1)..(579): unsure at all Xaa locations
  Clone ID: PAT_MRT4530_58237C.1.pep
MAFNKYHCIGPTILNNQSRLHSSISKLGIYHSKPGAAPSLPPSAPATSVQVPNTVDMAKAAAAARALQTRAEILPTSQLLVPQAAPSQLAAAPTALAAVQAQVNSDPQTQTKADMEAMRHNMTRLQDMLRQMQEQQQAYKAARRSKXAQAPMYFAGQPSTAAVHPAPHVQLQAQPVATQVHPQPPGQVPQTMAEGASALQAQLQAFLQQPSQPHSISGTAPSAHPEGNTSQGAPSWLPSNQPGLGASPWSQGPQFDFINAAQAPAVRPQAPTPGFGLNQAPNXVAMTWSQPTFDPAMAAQLASPIGAGQPNAMAQPHAQAVISPFATPYPQQGAVNRAGGEKGLPLSVGIKTHPIPPQFKFPPIPCYSSETNPKEFLSIYESAIEAAHGDENTKTKIIHLALDGIARSWYFNLPANCIYSWEQLRDVFVLNFRGTYEEPKTQQYLLGIHQRPGESIREYMLRFSQARCQVQDITEASVINVASAGLLKGELTRKIANKETQTLEHLLRIIDGFARGEDDSKRRQAIQAEYDKASVAAAQAQAQSQVAEPPSLAVRQGADMFRPNEKHTNRFPLTNKKKS

SEQ ID NO: 158798 - protein, 178 aa, Oryza sativa
  Clone ID: PAT_MRT4530_58238C.1.pep
RGGGPPTVAKKNPRFFGICQKLYFKSVAQSSHYSPLVVGPLGTIDPECCFRGSLTLSSDVFSFGEVLLKIVTGEPPFIPPNGHIVQGIKKKVNMGNIGAIFDPRLHGEFEISPIWKVVDKALLGPKKAFSERPPMSMVVAQLKDALALEKARLRYSTSAVSQGGANAELSINSMPTGR

SEQ ID NO: 158799 - protein, 851 aa, Oryza sativa
  Clone ID: PAT_MRT4530_58239C.1.pep
MREQFGLKPKDTGNLYRHPYPEWFKRVQLPNRYKVPDFSKFSGQDNVSTYEHVSQFLVQCGEASAVDALRDFESLSHLVQKVTLHEQRFAEAKKNFKNINHVYPYMYGSDDEDDDSEVTAVEWVRSKKVIPCQWVRSSGKEERFDFDITKADKIFDLLLREKQIQLPAGHVAIEGAKIKFDDSKKPMKVDDNPFPVNMEKYHEENDGGFDPHWDREFFRFCWNEGMRLPSIEDCPGCSEDKDCPSQRADVASEDGYITTSDVEEEEEEEEVEDEDGEVFGRDDTTNYRTIIVQRVLSICNNLILLIAMWFLCKLVHFCWGVLGNMTMMLHTMEHHCQTVLLIEPTQMRPRKFNGKFKTFWTAASLWMNTWIIYVLFLMFYAMHGIEVDESKIEAIRSWPVPQTITQVRSFLGLAGFYHRFVKDFSTFVAPLNELTKKGVVFHWGKTQEKSFDTSKDKLTHAPLLQLPNFGKTFELECDASGVGIGGVLMQDGKPVAYFSEKLHGPVLNYSTYDKELYALPCAADAPVVVTARGGHRRGRQAAAVLVRPFVIAVDRRNTVAVVDPIVSAALTSSPASSVASPPLLWSPMPRYKPEYLFGTEGFVQEFRTMSFLIGFGIAPLYAQIPHDRDEEKCRVKVTLNSNREDIPSVMFEAGGGSYIHACQEVARIAIGELRENYNDRLADTEYRYHPRQPQGSDRGSYLEPAGIENDATTRHLVEMLWAMDETRAETVIAAHDSEDRNRGKICQLEDKVDCLEKELAALKGEAPPQKARVHLTARKRALFVPRYQLAPKVRVVENEATPAPAVPPVVNISDDDEEESKRTHSKIEWGPTQDDGDMPNEPSINSDARKT

SEQ ID NO: 158800 - protein, 400 aa, Oryza sativa
  unsure (1)..(400): unsure at all Xaa locations
  Clone ID: PAT_MRT4530_5823C.1.pep
WAAKTTFSSSLHCTVSSFFPTACNQSKASTGLLELEKTGNHPTGVPDVRALFLTEPQTKPYPLDMWKYGSALQQRPEDRSLYGRDGPRSTVAHSARPSAAKPARXGGRRRPRAPLVAAGDHQRGGAAAERGEGXGERRRRSTAHPGATAAMREAAGAEGGGGAARVDGVGGAPAVGDRNGEVDEVGEDAAKPKEAAPRWEAVRGDDGGVQELGGDGGERKRRRELESGEEEGRREVXTDEEGAGRVXIGLQGEESGRGGRKPAREVRPPSMAPARFAXGQIRPFETEREREKWGERKRESRGVFPPTLLHAGTAGCGGXRGGGGARARAKRRKRRERREVRDDGWAPPVSEGGGQARPSAARAWGEAEWAAGREERERGKERWAGPAQGREGGLLGFFFL

SEQ ID NO: 158801 - protein, 627 aa, Oryza sativa
  Clone ID: PAT_MRT4530_58240C.1.pep
MATSIANRCGSDTHVVKDCRILKHLVLLYQKSLKDKKSSENPKFEAHFNLTHEERLRLQFCMLLTLSNYDQLHIMKLPQCSDLFTAWFADSIFDEEHFPALGGDFKYQKECQKIDWDAQDRDSLQPSSVVHNAETRNSEDHRHIVSGDHDESIRVDEIVINYFETSESFDRRASIVDINFSEQIADYLQVDPEPRDVFSAVMPTPRGIFPVGYKWVFVRKRNENNEVLMDVVTAYLYGSLDSDIYMKVPDGIDIPTQKIKNFSEDKTSDIEILDLLGMIAASERTRAPPSPPLVQPCAAVAPVVAVAREGRCWDRQVIAVLVPPSVSAEDHRSTAVVVDPIVAAASSSSPSPSGCRPPSFGSPMPRYKPEYLFGTEGFVQELRTMSFAIGFGTAPLYAQIPHDRDEEKCCIKVTLNSNREDIPSVMFEAGGGSYIHACQEVARITIGELRESYNDQLADTEYRYHPRQPQGNDRGSYLEPAGIENDATTRHLVEMLWAMDETRVEIVLAAQDREDRNRGKICKLEDKVDRLEKELAALKGEAPPQKARVRLTARKGALFVPRYQLAPKVRVVEKEAAPAPADPPVVNVSDDDGEESKRTHSKVEWGATKDDGDEPNEPSINSDARKT

SEQ ID NO: 158802 - protein, 186 aa, Oryza sativa
  Clone ID: PAT_MRT4530_58241C.1.pep
MPPKKTIKERVVPKRKEGEGEADMAGEEPARAEAGAELHEGTGGREQAAASTIQVRTTQASTQATASIVPSIAQATTSIVPGTAQAIAEAEATATQGAEMEAMHQNMIRLQDTLSQMQEQHQVYEAALQAKTTLSTSASPNPSSTPATAAQAIQASTAIAQANQASTPLLLLFCKFYFFVNKPILL

SEQ ID NO: 158803 - protein, 572 aa, Oryza sativa
  Clone ID: PAT_MRT4530_58242C.1.pep
MSFVISLTLLTLLNDDVNNLFSSWFGDRTVQPGLVVQNGWAHATGVYTHMLCYKLEYLFGTEGFVQELRTMSFLIGFGIAPLYAQIPHDRDEEKCWVKVTLNSNREDIPSVMFEAGGGSYIHACQEVARIAIGELRESYNDRLADTEYRYHPRQPQGSDRGSYLEPAGIENDATTRHLVEMLWAMDETRIEIVIAAQDREDRNRGKICKLDDKVDHLEKELAALKGEAPPQKAKVRLTARKRALFVPRYQLAPKVRVVEKEATPAPADPPVVNMVLTRSNGNGPNPNNNNNNNAENPTLAQVLAQQAQLMNMMMQQLQNQQNQGNNHAPPQNKLVDFLRVRPPTFSSTTNPVEADDWLHTIEKKLDLLQCTDQEKVSFASHQLHGPASEWWDHFRLNRTTAEPISWLEFTAAFWKTHIPSGVVSLKKKEFRSLTQGSRTVTEYLHEFNRLAHYAPEDVRTDEERQEKFLEGLNDELSYPLMTGDYHDFQKLVDKAIRQEDKYNRMEQKKRRIAHFKAQQGNSQRPRLALGPQSMPQGGSSFVVHPQRQFFNNSAGNNIRNQAPRSIAAPSQQ

SEQ ID NO: 158804 - protein, 390 aa, Oryza sativa
  unsure (1)..(390): unsure at all Xaa locations
  Clone ID: PAT_MRT4530_58243C.1.pep
MICVKFNHYIREQLKAQLLKRRGGKISEKLLYHINKKSWKSKXAQDGDIYDCVDVNLQTTFKHPVFKDHKIQMEPSSFPVGLDIKSPLEGAVLQAHLSTFDCPIGTIPILHNNNMDNTILQRIGELASNESRMLVSFFSXMLELYGAGIEYWDEVYGIRGSIYVYDPKVKKDSQDLTASWIQISNLPKAAVGVGIGVGSCVSPSLSGDNFARFHIFWDNEELKKGCVDHNCPGFVXVSRNVGLGGRIHPISIYNGPQYVINVLIFKDPKTENWWLAYGSNNTPIGYWPSSQFSYLKAKGDYAFWGGYVQGPIAASDPPQMGSGHFASEGFGKTTFIRNIQVIEDKNNKLVTPNIRDSDPFSSDPKLYSYDGYGLNDNGMHVYYGGPGKYS

SEQ ID NO: 158805 - protein, 172 aa, Oryza sativa
  Clone ID: PAT_MRT4530_58244C.1.pep
MAPNAAVLVRPHIAGVHHLPTGRRLPRLAPPQAVSPPFSRQKGSVVAASGRVWASASGSFEKDRIGDDDVLASPQIVEESKVDLLKILKSANTIIPHVVLGSTILALVYPPSFTWFTTRYYAPALGFLMFAVGVNSSVKDFIEAIQRPDAIAAGYVGQFIIKPFLGFLFGTL

SEQ ID NO: 158806 - protein, 58 aa, Oryza sativa
  Clone ID: PAT_MRT4530_58245C.1.pep
MGRGRARNRGGRWSIGAVVQAAGLQRSSSTPRARAAVRARRRYVRVRWLMQARRRHVT

SEQ ID NO: 158807 - protein, 330 aa, Oryza sativa
  Clone ID: PAT_MRT4530_58246C.1.pep
MATARGTAGGSGAARGARRGLAARGDETARGAAAAMGRARRRDVDGDGDSAVLARLSLVPHQFPPHDENVPREPSSRRLRVRLAGDAPFRTTMVPRVERGGGGFHLPNSEREDSLFIRALISVVSGDTTVPTLLPEPTMATVVAGAATDEEDEGECTTGAVASGGVTGGVGKRRPRRRSGGEGSRYRGVRRRPWGKWAAEIRDPRRAVCKWLGTFDTAEDAARAYDVAALEFRGQRAKLNFPASTAAQQPRPLLHHNLRENCGSNASSPVHAPEHARTAAAAKDQEIWDGLREIMMLDDGSFCVQRDGMAASLYATASSIPCGHVAVAAV

SEQ ID NO: 158808 - protein, 109 aa, Oryza sativa
  Clone ID: PAT_MRT4530_58247C.1.pep
AQLLLLASTPPARFGAAAPHLPSSDTTARRPSAVDASVLHPPSPPSSRHPQLQDDTAVAIASIPLPHHDPAGATERRRRQRRRRPDHGTRKGGVGGGSAPATEVEAALF

SEQ ID NO: 158809 - protein, 274 aa, Oryza sativa
  Clone ID: PAT_MRT4530_58248C.1.pep
MVPRVERGGGGFHLPNSEREDSLFMRALISVVSGDTTVPTLLPEPTMATVVAGAATCARCGVDGCIGVDCEVVVLAAAAGSSCSDEEDEGECTTGAVAIGGVTGGVGKMMPRRRSGGEGSRYRGVRRLPWGKWAAEILDPRRAVCKWLGTFDTAEDAARAYDVAALEFRGQRAKLNFPASTAAQQPRPLFHHNFCENCGSNASSPVHAPEHARTAAAAKDQEIWDGSTGDHDARRRQLLVHAMIDDLSPISLLDRCFISCSILNRILKPLLLFS

SEQ ID NO: 158810 - protein, 281 aa, Oryza sativa
  Clone ID: PAT_MRT4530_58249C.1.pep
MQQQHKGKRSYRAGAGVRVEDKGHQLQADESCGWESGPMKQSWGLLGEGWENPYNSCRFRAGRRGPTKLCERPIDIESAGEKLRTTSHSVRSPIDPPQTGSALPVASLSAARRASQPMCRPTIDVLASSLPRANCMRDPYMHMRAWAWAWAWAWQIGRAPGAGAKVAAGRAAGRELEQRQSGGWELELRWRSTSKSLQTPHTRFVVKAKLSHTVFAMILVAVVAELLEEYTVLVARVLEQLFNDAPFPRRMRFLMLRSLPFVPPPLPPPPPSHALRVTTRG

SEQ ID NO: 158811 - protein, 859 aa, Oryza sativa
  Clone ID: PAT_MRT4530_5824C.1.pep
MEMDEVGGRWTSVPEVPAVGGVGSVLLSMARMGWKLCHVFRPYAVVNKPNIHHNSKRLRSVKVLSLVSNLSLPFVFPLSLSKPLQQMADNEKGNKVRSQDIGTSSSRVNEAPDTSCVTLVQHLINQNRLLIEILQQHQTPILNLSQIQPQVQLEAVQALTPQVSMPPASRRTHGDVPHVDSKEASIICFMCDEQGHYARECPQQKRKTPMRTEDEVRKMIITSIEWPPPGMTKRQRRNTFRGAPQLTEHLLANGGRVSDSEDSDQVSSDDEDEKSPQGFNQNKMERKACSRCGEIGHVASSCATTCVHCEEDHPPDRCPTSRITCFFCEGTDHVPKDCQFSFLLTKKMANQPASSNGEKHQGNTNPRQDYSFSLTPVPGQRNQNEKRKCRVRKDICCFNCQGMGHFADKCPKPRNIAASTSVHATPCNQKLAPQRIVIHASRSSPIAPVATAPTPASALPQGVNAQLQPQPPVDNTEASIGIVPLDVPAQQPRNQNWNNPAGATNVQVPTVQQQCKLSEFLKTETPTFAIAVDPMEASDWLRTVEKKLGLVQCTDQERVVFATHQLISHVPAGMITLRKREFRYLNQEDLTVTEYLHEFHRLAHYAPEDVENDEDKQEKFLQALKDEIAVQLLLEEYEDFEKLVDKAIQLESEHNRMKNCKRRIVSIPVSSCGNQRQRTEPLQIIGSSVAHQEFPPQEDGHNADNNISNTNDDDTTNNHAPCPISDHSNQACNVNIIHQGVDDSIDDGTQNDNPSNCDSEKDSNGDSNYGTTDANVSKDFQPPIPTPSQNDRPQTDSSAKKTLICYNCKEPRHYSRDCLQPRQSRPPHYRQVTQSRHPNRIVVTGANTVPVRPRVNQNP

SEQ ID NO: 158812 - protein, 34 aa, Oryza sativa
  Clone ID: PAT_MRT4530_58250C.1.pep
HRLRSLGVSFAADGPHQQPYSVHDSRLEPKTTGP

SEQ ID NO: 158813 - protein, 1013 aa, Oryza sativa
  unsure (1)..(1013): unsure at all Xaa locations
  Clone ID: PAT_MRT4530_58251C.1.pep
KLLKAPSVGELLLVFIACSCCAHVVCSSLPGNETDRLSLLEFKKAISGDPQQSLXSWNESTHFCSXEDVLCRAKAPLRVTSLNLTDCGLAGNISPSIANLTFLKSLSLGKNSFFGEIPASLGHLHRLQILSISNNNIQGRVPKEIFNLPTITEIDLSFNKLFGQLPTEIGNAKQLASLELSSNKNAFTGIIPTSLGNIRSLKVLNLSHNKLTGSIPVSLGNLQLLEQLDLSFNHLKGKVPKAILNMSVLVALSLSTNSFSGELPSGIGSLLPNLRQIAIGINFFHGDIPSSLANASNLVKIDISENNFTGVVPASIGKLANLTRLNLEMNQLHARSKQDWEFMDSVANCTQLQGISIARNQMEGEVPGSLGNFSVQLQYLFLGQNQLSGSFPSGIANLPNLIILGLDYNRFSGSVPQWLGGLKTLQKLSLSTNSFTGYLPSSLSNLSHLTEILLDTNQFIGNIPXSFGNLQFLTTITITDNNLHGGVPKEIFRIPTIAEVGFALNNLSGELPTEIGNAKQLIYLQLSSNNLSGDIPNTLSNCENLQHVELDQNNFSGGIPTSFGKLISLKFLNLSHNKLSGSIPVSLGDLQLLEQIDLSFNHLTGQVPTKGIFKNSTSMQIDGNLALCGGALELHLPECPITPSNTTKGKLPVLLKVVIPLASMVTLAVVILVLYLIWKGKQRTNSISLPSFGREFPKVSYKDLARATNGFSTSNLIGEGRYGSVYQGQLFQDINVVAIKVFSLETKGAQKSFIAECNALRNVRHRNLVPVLTACSSIDSSGNDFKALVYEFMPRGDLHKLLYSTPHDETSSDLCYISLAQRLSIVVNVSDALAYLHHXHQGTIIHCDIKPTNILLDDNMTAHVGDFGLARFKNDSRQSFGNSHLTSSFAINGTVGYVAPECAGGGQISTAADVYSFGVVLLEIFIRRRPTDDMFKDGLSIAKFTEMNIPDKMLQIVDPQLVQVINDENGAQCVLSVLNIGLCCTDSAPSKRISMQEAADKLHTIRDSYLRGY

SEQ ID NO: 158814 - protein, 50 aa, Oryza sativa
  Clone ID: PAT_MRT4530_58252C.1.pep
RYAYGASFSSKKNNQFTSCRFSRNCSIRPVTMGVSLVCHAHLIGVRLNKK

SEQ ID NO: 158815 - protein, 233 aa, Oryza sativa
  Clone ID: PAT_MRT4530_58253C.1.pep
MRPFSRHAGFFASLKQVEDRLAAEQQPPPPPPPPPRQPETLPFSDTMTASPLFLGPATDTAAADRPGGESSGPAVDFLTLSKDEERLQEEPRGAAGEDDDEDNDEIGEDIARLMALLGLSPPRRGLEGGGGDDDSGGCDCSGGEGFLAKVVGVVGPKCDKEKRRVDGWVEHYFSGGECREPARLAHLLLAKAAASSSSSSWEGEGHRGASPFAFPATVKEFLDRDAPPRCTEE

SEQ ID NO: 158816 - protein, 62 aa, Oryza sativa
  Clone ID: PAT_MRT4530_58254C.1.pep
NKLCLNSILGEALKPPYKISLIEISPIFFPMNEGLACCNPFSSKVGITAMHFISAAFAALVP

SEQ ID NO: 158817 - protein, 69 aa, Oryza sativa
  Clone ID: PAT_MRT4530_58255C.1.pep
NWNFWSSALRIATQSAFFSHPKFLTYCFWISTKIPHHNLTVNFIYQLFPKKKKEQLLKTTPKKKNLLFV

SEQ ID NO: 158818 - protein, 99 aa, Oryza sativa
  Clone ID: PAT_MRT4530_58256C.1.pep
PRVRRELPGSFQSATSSFPSGKALMYFGLFLATGIFFVFIAFALFLPVMVIMPQKFAICFTLGCGLIIASIFALKGPASQFAHMTSMEVQLLLLLFFSL

SEQ ID NO: 158819 - protein, 807 aa, Oryza sativa
  Clone ID: PAT_MRT4530_58257C.1.pep
MLPSGLAVAPPPISLHAAASRTGRQRCLIVLDNVWTVSTWNVVRHALQEDCCSRIVVTTEINDVAQAWSFYKSQHNASHVIKKHILKMEPLNDDFSRDLLVSRVFGDKDKCPEELNEVSYEIARKCGGLPLATIAAASLLLSRPDKPDEWIYVQKSLIPDLRIQPTSEGMAQLLNNSFNNLPHHLKACMLYLSIYKEDHIINPDDLVKQWVAEDFIEGNVCIDLPSELQGLKYLRTLHIGAMVTFLRSEVVHLPPLLHFRLPPNLGYFVDAGSVQSIEELTNLQDLQLACPQIATSDHIKHNMKLLGSIIGILKSLKSLTVVPVCFSEDSNDNENSSIAIFLDFLDKVPPPCSLLQRLELFPRVCVFHRLPSWIITIEKLCILKVAVMELLRKDIETLSMLNALTVFSLYVRTTPAEPIIFDKSGFHVLKYFKFKCSTVSSLRFDEGAMPNLQRLKMEFNGSTVEQYNLENVGFKHLSGVKVSAKICIAGTSEANRMAIASVLNNAIRQNTRISSVIIRFINRVIKDLPIVPTPHTDHMHENLRLDKSVRSWPTQCDGCKELGAGHRFKCEQCNSKVYYDMCCATAPHTLKHPLFPGSVFRFLRKPLASECGRACDACGDLMHGFVYHCFERGLDLHPRCARLPVRTANVKGYVMELRRVSACSRCCICMCGKEGYRNKFWSYRSSQEGQDINVHMACLKDLASKSHETLTKLYEILMGESQWTPTEVLGEDTSDQLVVSSAEDGDRTPLRQDEITEEFQHKDEVCNVLEHGREELRKKETDTRVKIAKTNSMWFSYHTVDNLTCAF

SEQ ID NO: 158820 - protein, 956 aa, Oryza sativa
  Clone ID: PAT_MRT4530_58258C.1.pep
MLPSGLAVAPPPISLHAAASRTGRQRCLIVLDNVWTVSTWNVVRHALQEDCCSRIVVTTEINDVAQAWSFYKSQHNASHVIKKHILKMEPLNDDFSRDLLVSRVFGDKDKCPEELNEVSYEIARKCGGLPLATIAAASLLLSRPDKPDEWIYVQKSLIPDLRIQPTSEGMAQLLNNSFNNLPHHLKACMLYLSIYKEDHIINPDDLVKQWVAEDFVSATEGKSLDEAARNHFYELVHRGILETEHISCSDEVVSCTVHDMVLNFIKRKAMEENFVTAIDHSQSGIRLADKVRRLSLHFGYSKDAKAPACIRLSQLRSLVFSGFWKCGPSISEFHLLRVLFLHGKHGEFLDLTRIRELFLLTYLQIEGNVCIDLPSELQGLKYLRTLHIGAMVTFLRSEVVHLPPLLHFRLPPNLGYFVDAGSVQSIEELTNLQDLQLACPQIATSDHIKHNMKLLGSIIGILKSLKSLTVVPVCFSEDSNDNENSSIAIFLDFLDKVPPPCSLLQRLELFPRVCVFHRLPSWIITIEKLCILKVAVMELLRKDIETLSMLNALTVFSLYVRTTPAEPIIFDKSGFHVLKYFKFKCSTVSSLRFDEGAMPNLQRLKMEFNGSTVEQYNLENVGFKHLSGVKVSAKICIAGTSEANRMAIASVLNNAIRQNTRISSVIIRFINRVIKDLPIVPTPHTDHMHENLRLDKSVRSWPTQCDGCKELGAGHRFKCEQCNSKVYYDMCCATAPHTLKHPLFPGSVFRFLRKPLASECGRACDACGDLMHGFVYHCFERGLDLHPRCARLPVRTANVKGYVMELRRVSACSRCCICMCGKEGYRNKFWSYRSSQEGQDINVHMACLKDLASKSHETLTKLYEILMGESQWTPTEVLGEDTSDQLVVSSAEDGDRTPLRQDEITEEFQHKDEVCNVLEHGREELRKKETDTRVKIAKTNSMWFSYHTVDNLTCAF

SEQ ID NO: 158821 - protein, 57 aa, Oryza sativa
  unsure (1)..(57): unsure at all Xaa locations
  Clone ID: PAT_MRT4530_58259C.1.pep
SVGSVQVVPWTYATNNXAEYDAVLKGLQLLKEVEADAIEIMGDSLLVISQLVDWPKH

SEQ ID NO: 158822 - protein, 181 aa, Oryza sativa
  Clone ID: PAT_MRT4530_5825C.1.pep
MAGKGRKGTAALLRLKVVEAAAGMEGSWRCRLGAEGVLSPFPAYLEAGAVNGDMTMGGRCGERVVAREVGAGNGKEAGPADMYELTRGRVASVSHRAALLLLLVLLLCLTSSSLAESEGRRWQPRRLLVSPAATSSQHRAGQQQQQMRVDGANKPFKQPATAASFGRRRVPRSGWNPIQNR

SEQ ID NO: 158823 - protein, 140 aa, Oryza sativa
  unsure (1)..(140): unsure at all Xaa locations
  Clone ID: PAT_MRT4530_58260C.1.pep
ISSLLHHRGSGRGYYHYSAGNSRRRSRTRRSRRRTRXSRPPHRRRRRPAASEQAPPSLRRRVRALRRLLPFRRRRRRLRGEDGGGVGDLXRRRSRRRGRTGRTSCSCRRRWWCTWRRSRSRKGPRPRRRRRRRRRRRRPR

SEQ ID NO: 158824 - protein, 480 aa, Oryza sativa
  Clone ID: PAT_MRT4530_58261C.1.pep
MGTDLANGSIVSPRAGGNYMPRRANVTFTEAQVKLNGPDHTCFSVNKCGDTMASKGWIADRVVDWLKEKPTLGPKELQEKVNKKYKMDVPNFRVFRAKEKAMDMIYGKWDESYDLLPTYKEALLKAIPGSVVELDTEEHNGDVCFKRFFVALKPCIDGFLQGCRPYIAMDSTHLTGRSRGQLAAAVAVDGHDWLFLVAYGVIEIEYKESWTWFIQNLKQAIGTPTGLVINTDAGKGIEGAVDDVYPGVEHRECMRHLWKNMKKNWVSKTKDLHIVDMHEKIRHMIVAKFDLRANIARNMEGKIIPAITKDLNAQSKAIKDHEVLRCGDGTAEVTVSTITHAVNLNERTCSCRAWQISGKPCSHALAFIAKLSRQVHMGDFVDECFSVERFRKAYAGLFNPMTSKHLWPLVDVGYKIKKPKLRRKPGRPRVSKMKASDELSIAKEALQLVKRGKKALKRVAVMHMHLMQAQVDVKGKGMGK

SEQ ID NO: 158825 - protein, 143 aa, Oryza sativa
  Clone ID: PAT_MRT4530_58262C.1.pep
RSCCRCAPSSAARSRRRSPAGAPAAPACPAARPPPPSPRSSATATWTARRRLRRPAPASRRRTRPGSSPSAAAATVAPRAPPPGRSRTTGARAGRGRPSCSARRQRRRRGAPRGGAATAASRGACSSSAPSTSGCCAAAATRG

SEQ ID NO: 158826 - protein, 73 aa, Oryza sativa
  unsure (1)..(73): unsure at all Xaa locations
  Clone ID: PAT_MRT4530_58263C.1.pep
WWLVRYRXFVVXSLXEEARVXGRXSXVGKYPSVPVSSVVVWLEWNCVSGVTRAVCVSXCRGTHRTPFYSVVSS

SEQ ID NO: 158827 - protein, 63 aa, Oryza sativa
  Clone ID: PAT_MRT4530_58264C.1.pep
PAGHINQIKLPLASANSYGSYHFVSILYILARYAIMRGSYGPTIESIANRMPYSLATEDSGIV

SEQ ID NO: 158828 - protein, 135 aa, Oryza sativa
  unsure (1)..(135): unsure at all Xaa locations
  Clone ID: PAT_MRT4530_58265C.1.pep
IICNKNMASNKVVFSVLLLAVVSVLAATATMAEYHHQDQVVYTPGPLCQPENGLPDVPAPAXSRGVGRNSQIASGQWAPARQPARRKVPGRRPASPASSPAVRRQARCKSXDGDSSHNARRRQSYKRTQQSSPPD

SEQ ID NO: 158829 - protein, 50 aa, Oryza sativa
  Clone ID: PAT_MRT4530_58266C.1.pep
RQVPDRNGKTPYPYKMRIPRKCTAKCYENRVLPALLKKHVVQLTKFDYRV

SEQ ID NO: 158830 - protein, 68 aa, Oryza sativa
  Clone ID: PAT_MRT4530_58267C.1.pep
PQNSSGGPLAKRFPVHLNPPNKNPPKRLLGKGKNLPQPGPLPCKFKGPTGKPPFPEEFFQHKTLFWFF

SEQ ID NO: 158831 - protein, 132 aa, Oryza sativa
  Clone ID: PAT_MRT4530_58268C.1.pep
VAASSVIKLVGVVREANRRMAGECFNWAEGRTGGADPFQIRFHFESVDVSPWSQVGFIFVDFGCGAPLSRGPLVSSDLILSVFVMRAPAPLAGSRFLASCVTKVRAHVFSARFREALVLFPCPPQNKYGHKN

SEQ ID NO: 158832 - protein, 162 aa, Oryza sativa
  unsure (1)..(162): unsure at all Xaa locations
  Clone ID: PAT_MRT4530_58269C.1.pep
VLQNFFFXXXXPXCXXXLXNWFKXWFCSXWLXLXWXXGLMKXGXAXXGAXXLPLGGTAXVVTGGRMEXPRAKFFNXLGKLRXESPPLAPEGNQGTGGXPRPRFGKRGGVENFLVKGPRDFSGPPKWEKPGPPVFFXWEAPNXFXFPPLXGWPPGKIFPGAQT

SEQ ID NO: 158833 - protein, 526 aa, Oryza sativa
  Clone ID: PAT_MRT4530_5826C.1.pep
MADNEKGNKVRSQDIGTSSSRMNEAPDTSCVTLVQHLINQNRLLIEILEQHQTPILNLSQIQPQVQLEAVQALTPQVSMPPASRRTHGDVPHVGSKEASIICFMCDEQGHYARECPQQKRKTPMRTEDEVRKMIITSTEWPPPGMTKRQRRNTFRGVSQLTEHLLANGGRVSDSEDSDQVSSDDEDEMERKACSRCGEIGHVASSCATTCVHCEEDHPPDRCPTSRITCFFCEGTDHIPKDCQFNFLLTKKMANQPASSNGEKHQGNTNPRQDYSFSLTPVPGQRNQNEKRKCRVREDICCFNCQGMGHFADKCPKPRNIAAGTSVHATPCNQKLASQRIVIHASRSSPISRVATAPTPASALPQGVNAQFQPQPSVDKTEASIGIVPLDVPAQQPRNQVQDEEPEPIIPLAPTILCTDSLSKELSSMEEVVSLPDLLQAEPRAINLWRAIPSRRPSSASNSTQKEASPVNDGNMQSYHIITEPIKDDAVTRTTPAISLQNQNEQPRLWFSVRYLSLCNRKFAAIM

SEQ ID NO: 158834 - protein, 43 aa, Oryza sativa
  Clone ID: PAT_MRT4530_58270C.1.pep
FPVLRRLLLEGYSRELSALDQLASFLIVGPTTNDARACHPDPV

SEQ ID NO: 158835 - protein, 750 aa, Oryza sativa
  Clone ID: PAT_MRT4530_58271C.1.pep
MSYTNCLRRYPVRAIFPYTNAILRASLEKGSPEKSLTDYNSMLRFTAFCPDYRTYVLLLKACAKCSNIYAIMEIHSHLVKLGLLSNQRIVTHLFKLYIDHGRVMEACKLFWLMLEWSAEPFYGNLMLMGFLKCGQIDKAYQIFKRMPVKDLVSWNSMIAGTARNSCLKDAMNIFSKLVNSGLVPDGFSFSSVLSACAQAGARCYGMWVHQLMAELGLEMNHILSSSLVDMYAKCGRIDVAIGIFMTIKRNHVSVWNTMIGGLAAHGLGSDAVMFFREMESEGLVPDGVTFVALLTACSHSGMVEEARQYFEAMTTKYSITPRIEHYGAMVDTLSRAGLLDEAYDLVKTMNVKPDAVIWRALLSACCRYRQTKLGEITVKEIAFQGSGDYTLLSNIYSSANRWEDSEEVWKERKKKGIRKSKGLSWVELGRSTHEFKAGDRSHPDTDGIYKVLHRLSNKAKSEGYIPLTELVSKDVSEEEREENLTVHSEKLAVAYSILKTMPRTEIMVSKNLQTCSDCHEWMKIVSKTDAAPVKTVGQYCLENYRIDLFSIISTVLTGGFSRRYERIIEFAVRDLMGGKNSTIQTLINPEREIKNAYVHGISSSMVCKPDIPRFREFIPLLLQYVLSRQMADKPVLWVAHNGRSFDVPFLMYEFQRSKIEMPGDWLFVDTLPIARQLIGSDGEKLKSVSLDNLREHYKIPLAGSAHRAMQDVITLCYVLQKLTFELKLTVPQLLERSFRVSDLSIPRPGK

SEQ ID NO: 158836 - protein, 688 aa, Oryza sativa
  unsure (1)..(688): unsure at all Xaa locations
  Clone ID: PAT_MRT4530_58272C.1.pep
MEAGASLPLPDXRFLSPSPLPTPAAAAAAACCSRRNISCARADPRXLEAPQASRPPPRPSPRGSAVAEXFEDVLQTQDCNILLRHXSETRRWDELSKVFGWMQKHDMLNIASYSSYFKYIGLSGYPARALRVYGDILENPIEIHVSVYNPVLGCLVKNGRFDSSFKLYDEMIREGLSPDLFTYSTLLSGCMKLKQGYTKAMELVNELNSRGFQMDSVIYGTLLAICASHNCCEKAEEYFQKMKDEGHKPNLFHYSSLLNAYSENANYEKADLLMKDLRSSGLTPNKVILTTLLKVYSKGGLFEKARELLTELEASGFAQDEMPYCILIDGLVKERKIWEAMILFNDMKEKGVKSGKKCVLSMENHGIGFLLMAYNDVQYLVPNNTLSVYYGYAFSIMISALHRGGYREESKQLAKEFEAKNATYDLVMLNTSLRAYCSTNDMESVMIMLRKMDESNISPDAITFNTLIRYFCMAKVYHLAYKTIQDMHTKGHQLNEELCSEIMMQLGEAGFPSEAFSVYNMLRYGKRTVCKSLHEKVLCILVPAGLLKDAYVVVKDNSEFISRRSLGNFARSFMASGNINLINDVMKAVHRSGWRISQFGVEVETPDFWMFKLDIFGKAIQRYIQKPDKKQLLLCLLDWMTGQGYSVDSSSRNLLLRNAQLFGQKQLIAEILSKQQGASRITSQRHQK

SEQ ID NO: 158837 - protein, 168 aa, Oryza sativa
  Clone ID: PAT_MRT4530_58273C.1.pep
RAAPRALEAPQASRPPPRPSPRRSAVAEVKAVPDPVAALTRFEDVLQTQDCNIILRHYGETRRWDELSKVFGWMQEHDMLNIASYSSYFKYLGLSRNPARALQVYGAIRENPTRIHVSVCNSVLGCLVKNGRFDSSFKLYDEMIREGLSPDLFTYSTLLVGCMKLKQG

SEQ ID NO: 158838 - protein, 810 aa, Oryza sativa
  Clone ID: PAT_MRT4530_58274C.1.pep
MYVVKRDGRQETVHFDKITARLKKLSYGLSQEHCDPVLVAQKVCAGVYKGVTTSQLDELAAETAAAMTASHPDYASLAARIAVSNLHKNTKKSFSETIKDMYGHFNERSGLNAPLVAHDVYEVIMKNASRLDSEIIYDRDFDYDYFGFKTLERSYLLKLVGKVVERPQHMLMRVSIGIHKDDIESAIKTYHMMSQRWFTHASPTLFNAGTPRPQLSSCFLICMNDDSIEGIYDTLSECATISKCAGGIGLSIHNIRATGSYIRGTNGTSNGIVPMLRVFNDTARYVDQGGGKRKGAFAIYLEPWHADIFEFLDLRKNHGKEENRARDLFYALWIPDLFMERVQNNENWSLFCPNEAPGLADCWGDEFQNLYKKYEREGKAKKVVSAQALWFDILKAQIETGTPYMLYKDSCNRKSNQQNLGTIKSSNLCTEIIEFTSPTETAVCNLASIGLPRFVREKGVPMESHPAKLVGSNGSKNRYFDFDKLAEITSIVTRNLNKIIDTNYYPVETAKRSNMRHRPIGIGVQGLADTFILLGMPFDSTEAQQLNKDIFETIYYHALKASAEIAAKEGPYETYSGSPVSKGILQPDMWNVVPSDRWNWSDLREMISKVGVRNSLLIAPMPTASTSQILGNNECFEPYTSNIYSRRVLSGEFVVVNKHLLHDLTEMGIWSPVLKNKIVYEDGSVQKISEIPDDLKAIYRTVWEIKQKTIVDMAIDRGCYIDQSQSLNIHMDQPNFGKLTSLHFHAWSKGLKTGMYYLRTRAAADAIKFTVDTTLLKDKQHNAEEEDVQSKMAEVVCSLNNRDECLACGS

SEQ ID NO: 158839 - protein, 79 aa, Oryza sativa
  Clone ID: PAT_MRT4530_58275C.1.pep
MCPAVTGATLFAVGVMLCPFPALVPSCRNLTAVLPELWDLLAAVYFHIRDELHQLLARRPPPRHGGAAWIRTPVAAAAA

SEQ ID NO: 158840 - protein, 202 aa, Oryza sativa
  Clone ID: PAT_MRT4530_58276C.1.pep
MENPNGYAQQLKYLLQQVGYFQEPVYCFERITQGSLEIWKVKIFLRYQGDGEEVLTFQIRHPRITLAAAIRDVFREALLRLCGISIPLDVANSFGMHPYHEEDDSRCRLRLTGEPEGSRCTLLSELAHTTENAYEQALEELDELRDRYANLESRYRRLAQEHTTLLLCQVFTIARYIESGRMGRIRRKRPLEVDPLSPPPSP

SEQ ID NO: 158841 - protein, 72 aa, Oryza sativa
  Clone ID: PAT_MRT4530_58277C.1.pep
MAFYKCEVYLGTEIDSRLIQVGVPTDKLVNKSQALSWLKQNNPVKVQFDIYTAGYQFCPVHHDKSENITPSI

SEQ ID NO: 158842 - protein, 73 aa, Oryza sativa
  unsure (1)..(73): unsure at all Xaa locations
  Clone ID: PAT_MRT4530_58278C.1.pep
FLSGLPQGCCIGVKGLYNAGCTTGDRQAXCRCLKSLGGSIKWLKLGTVGGVPGKCSIIVGFLIRLSTDCNKVR

SEQ ID NO: 158843 - protein, 71 aa, Oryza sativa
  unsure (1)..(71): unsure at all Xaa locations
  Clone ID: PAT_MRT4530_58279C.1.pep
MERIQKGEDFHGLDSDRWTAPTSNGRHNFMRTPIXACKTSALVAGLTRTTSSRXPLETVYRLLRRGVFGRL

SEQ ID NO: 158844 - protein, 109 aa, Oryza sativa
  Clone ID: PAT_MRT4530_5827C.1.pep
GTDRARAPLCPRPRHRRCGPRAHAPQGHRHRHPLTGHRRCYHQQEEEPRGSIIVVSSWAGDLAVDLLLVALSDGNPDGPQWRQPQCIAQPLPLLPCTTPSLLLSSSSTH

SEQ ID NO: 158845 - protein, 452 aa, Oryza sativa
  Clone ID: PAT_MRT4530_58280C.1.pep
MAPPLLDLPSHCLLPRLRRPTSGRLLLHLRLKPLSSSSYTTTTTTTTSSSTSSSRAPQVPPSLHGPSLRRGRRLPGETDGLLSFARIFDLAALRVPAAACAPLERRLRGHLLNWPRVRNVVRQPGDDGGLLFPVPHPSLATPSSLPTAVARREKLAREFNARGFVQFPNLAKMSRPPARKRKGKKDEGGGEAAATARDTKDKVYVVEVIGERKEEHGDEWMGLVGEEGFGRITWRGGPTRLLLLDENYANKRVDDLPEAVKIFSFSGICLLVLVKPTFQVVLDHETNKDGSSSYELVQCQLTLFYNYWPMNEYLMLLYCPGNTAFANTGYRPKVQSVQILEEILPEGIIVPTGFETVGHIAHLNLRDDHLPYKKLIAQVVLDKNKPKIQTVVNKIDAIQNDYRTMQLEVLAGIDSLVTTVIESGLRFQVDLSTVIISSPTYLYLSHNISDLL

SEQ ID NO: 158846 - protein, 439 aa, Oryza sativa
  Clone ID: PAT_MRT4530_58281C.1.pep
MGFAVVRTNREFVRPSAATPPSSGELLELSIIDRVVGLRHLVRSLHIFSAAAPSGGDAKPSPARVIKEALGKALVDYYPFAGRFVDGGGGPGSARVECTGEGAWFVEAAAGCSLDDVNGLDHPLMIPEDDLLPDAAPGVHPLDLPLMMQVTEFSCGGFVVGLISVHTMADGLGAGQFINAVGDYARGLDRPRVSPVWAREAIPSPPKLPPGPPPELKMFQLRHVTADLSLDSINKAKSAYFAATGHRCSTFDVAIAKTWQARTRALRLPEPTSRVNLCFFANTRHLMAGAAAWPAPAAGGNGGNGFYGNCFYPVSVVAESGAVEAADVAGVVGMIREAKARLPADFARWAVADFREDPYELSFTYDSLFVSDWTRLGFLEADYGWGPPSHVIPFAYYPFMAVAIIGAPPVPKTGARIMTQCVEDDHLPAFKEEIKAFDK

SEQ ID NO: 158847 - protein, 173 aa, Oryza sativa
  unsure (1)..(173): unsure at all Xaa locations
  Clone ID: PAT_MRT4530_58282C.1.pep
FTKLYILVNHKISKKYKERENKLPDAATSATTQEINPTTTQEINPTTSRNQSHNRYYCYFSRNQSQNINPNYCWLLLPLLLRACASLATIPQPLLLLLLKKSITKYQSHYCRLPLPLLLRACASPAXXTSAPHTARPYYRVRAARPSPSPGEGRGRGGEGRRNGRICVRSISR

SEQ ID NO: 158848 - protein, 110 aa, Oryza sativa
  Clone ID: PAT_MRT4530_58283C.1.pep
MGDVCVRAGASPLSPLSSLSPSARRQWDLRRRRRTWLRAPVVPPVAWAPAPHRPLPHVAWRRRQQCGFGAMELMALNGDGHAAGFASAGSSKRRRLVSFLHRGQIGGLGP

SEQ ID NO: 158849 - protein, 199 aa, Oryza sativa
  Clone ID: PAT_MRT4530_58284C.1.pep
MSFCNDHKTHHQRNWMYRNSAYNLEKPKPKPKAKKKKRNVEKTVEEEEQLNHRLRLAAIENTKRKRNEERELRKMAREFAEKNERAKERAGKVDRAQHAKEADVVTAYLYGNLDMNICMKRSHDGFYIIYVYVDDLNIIGTVKDIEEANSYLQSEFEMKVLGYSTEPTKRHCKGIKDILRYLKGSKDMGLFYRKNQDLT

SEQ ID NO: 158850 - protein, 135 aa, Oryza sativa
  unsure (1)..(135): unsure at all Xaa locations
  Clone ID: PAT_MRT4530_58285C.1.pep
GGPGXTGEFHXPVSRGXCPTXGXPXEXGXMGXXTSPQCXXXWGXEDGEWXKXKPGXGRXXGTRMXHXWLIXGRTXNQXGPDNVRXTHFLCXGPXFXXHPMXNXXNMXSKDHXQXTEIRXXXXLKEXQXXXXIXVT

SEQ ID NO: 158851 - protein, 498 aa, Oryza sativa
  unsure (1)..(498): unsure at all Xaa locations
  Clone ID: PAT_MRT4530_58286C.1.pep
MLSSQKPSSEMWSETKDVTLTRKTNCSCKYSKCLKLYCECFEKGRYCIGCNCTNCCNNVNHENARQDAINVALERNPAAFMPKVSNSTAHNCEVGHDVSEGDIVGKHTKGCKCKRTECLKKYCECFKASVFCSENCRCTGCKNYKSNADRISQKNTVHAHHVQNPASSGMVGQSVIIFHAAENDSSLSLAASVSDHSINNNTSHALSCSLTSSVTREDAKSLVKYVPHKVTYRPSLADIIQIEDVNELCNLLILVSRQAGATLLESGMKENTKRKKLNRVDSCLSSTNHDREAIQKEPAKQMCSLEKSSNEVLIAEGRLEWPRADPFDIQKGNKRPLSPGTXALMCDEQDAVFQDSKAPDATPSTTEENLVDIFKEQEKRVLTNFRDYLCKGATCGKLQELKLSLASTNCSEQAFADHGNNSSITRVAKVTRIRQTIPQFSSKAASTPVLAIGSLEAGRAAMLAFGNLWGRRALCTMASTSAECMGKPDDTSSGAITT

SEQ ID NO: 158852 - protein, 141 aa, Oryza sativa
  Clone ID: PAT_MRT4530_58287C.1.pep
MAGAAARRRLLRRQLTEAPGFDGIVAVFLGGPNDRESVAFACCLAKNDDAIRLTVTHDGIANAACPGPKVVTPIGPVVEQAQCDLGGPRLIGRAAHSNKWYQSPSGSSEAPDRLLAVGEPPPPAGAAGGRLAISISGYGDS

SEQ ID NO: 158853 - protein, 58 aa, Oryza sativa
  unsure (1)..(58): unsure at all Xaa locations
  Clone ID: PAT_MRT4530_58288C.1.pep
DDPRYKTDPXEGFETSNSIANTPTKIYEARVRGVNSPGDLVESLDYDLVGTICFDYSL

SEQ ID NO: 158854 - protein, 269 aa, Oryza sativa
  Clone ID: PAT_MRT4530_58289C.1.pep
MAGGDNNSQTTNGGSGHEQRAMEEGRKQEEFAADGQGCGLAFSVPFIQKIIAEIFGTYFLIFAGCGAVTINQSKNGQITFPGVAIVWGLAVMVMVYAVGHISGAHFNPAVPAYAAAQMLGATLAAGTLRLMFGGRHEHFPGTLPAGSDVQSLVLEFIITFYLMFVISGVATDNRAIGELAGLAVGATILLNVLIAGPISGASMNPARSLGPAMIGGEYRSIWVYIVGPVAGAVAGAWAYNIIRFTNKPLREITKSGSFLKSMNRMNSST

SEQ ID NO: 158855 - protein, 39 aa, Oryza sativa
  Clone ID: PAT_MRT4530_5828C.1.pep
FTCDYMEHLILLNKLMCYRIINSVTGTVASPFEDQCCNT

SEQ ID NO: 158856 - protein, 284 aa, Oryza sativa
  Clone ID: PAT_MRT4530_58290C.1.pep
MAGGDNNSQTTNGGSGHEQRAMEEGRKQEEFAADGQGCGLAFSVPFIQKIIAEIFGTYFLIFAGCGAVTINQSKNGQITFPGVAIVWGLAVMVMVYAVGHISGAHFNPAVTLAFATCRRFPWRQVPAYAAAQMLGATLAAGTLRLMFGGRHEHFPGTLPAGSDVQSLVLEFIITFYLMFVISGVATDNRAIGELAGLAVGATILLNVLIAGPISGASMNPARSLGPAMIGGEYRSIWVYIVGPVAGAVAGAWAYNIIRFTNKPLREITKSGSFLKSMNRMNSST

SEQ ID NO: 158857 - protein, 846 aa, Oryza sativa
  Clone ID: PAT_MRT4530_58291C.1.pep
MERWPLPVAASAAAVARLSLLVVLCGAISRAAAAAPVRVGVVLDLASGGEGRRSLACISMALDDYYGANDYSTAAAARARVELRVRDSRGDVLAAAHAGVSMMDPKFRGKDEPVRMPVYLEELMNKNAQVEAIIGPQTSAEVELFAGIAIRNHIPILSFSPTTSPALSSPPTRFFVRTAASIASQAAPIAAILDVFSWRAAVLLHEDSLYGIGILPALVHAFQVQGQLLAGSYGARGVVDSVSVPADATDGRLDAALRAVKIMPWRVYVVHMLPALVARLFRRASVAGMMSEGYAWIATAGVGAAADGLSPDDIEHMQGVVSLRPYVQPTGQVRSFTRRLKARFRRDNPGIDDEDDDDDVAHTSASLLWLYDTAWAAAAAADRCLHQSSNAREEHNTTTFLDALLATTFQGLAGRFRLVDGERQVSAYEVVNIIGSGARTVGFWTPELGVSQDMARRRPKSGSNEELKQILWPGETAAVPIGWSESANGRPLRVAVPVKVGFNQFVAIRRQQNQTSAGGAMITGFCIDVFQAVMAKLAYPVAYQYVPVTDNMLSYDKMVNLVHEKEKLESNLSKLVVIVWVFTVLIITTSYTANLTSMLTVGQLQPTINELKKGDYVGYQQGSFVQNILKDMGFNEDRLRAYATIDQYAEALNMGSDNGGVSAIIDEVPYLKLFVSQYCQGYAIVGPTITEEYCCAFFNVFPVGSPLVPDVSRAIVQLAEENRLARIENKWFGEPGSCARKSNSTGDDKLRLKPRSFGGLFLINAAVSSAALLAHLVAVSSLPTELRRRFAVVVAFGVSGRRGGGAPVAMAGGGAEERISEPHQLVGEPPNQNHSAAGTSSTVVVQ

SEQ ID NO: 158858 - protein, 55 aa, Oryza sativa
  Clone ID: PAT_MRT4530_58292C.1.pep
VRVKYIVMVNLCVARSAGFREVPCEPIGLFLPIAFCLEEEEEKVADPDAVVGEDV

SEQ ID NO: 158859 - protein, 114 aa, Oryza sativa
  Clone ID: PAT_MRT4530_58293C.1.pep
MANTTNMKLQYLDDLIMELDGDIESLNISKKSQHLGEDCTAENLRMILHRDMQNNHPDANSMWDFGWNRISDLPIERNEVVRDLEKNILGGMITDVARELIELSVRHGCCACEA

SEQ ID NO: 158860 - protein, 96 aa, Oryza sativa
  unsure (1)..(96): unsure at all Xaa locations
  Clone ID: PAT_MRT4530_58294C.1.pep
HASAHASAYGESLXSKIINDRETGRSRGFGFVTFSSEQSMRDAIEGMNGKELDGRNTTAVATGGGPPKPTGGAPESGGGRIRALPFLPGSQGPTAV

SEQ ID NO: 158861 - protein, 106 aa, Oryza sativa
  Clone ID: PAT_MRT4530_58295C.1.pep
LERVGRATRPRGAEQGRQRQRRERLRASAAAGGGERLAPLTAPPAGFAASDLVAASVISSHLSVVGDGADLSKVGIFLNSTARHRSVNGIWALVRALVYKYTRRRH

SEQ ID NO: 158862 - protein, 220 aa, Oryza sativa
  Clone ID: PAT_MRT4530_58296C.1.pep
MAPVKVFGPAMSTNVARVLVCLEEVGVEYELVNIDFKAMEHKSPEHLKRNPFGQMPAFQDGDLLLFESRAVGRYILRKYKTSEANLLREGNLTEAAMVDIGIEVEIHQYYPVISSIVYECLFNPAMYGVPTNQKVVDNSLEKLKKVLEVYEARLSQNTYLAGNFLSFVDLSHFPFTFYFMATPYASLLDKYPHVKAWWDGLAARPSIKKVTAAMVLPLKA

SEQ ID NO: 158863 - protein, 126 aa, Oryza sativa
  Clone ID: PAT_MRT4530_58297C.1.pep
MAPSVQLGGETKRTNAGVRRDLGALPRGYGKELKIAVPWKPGFKAFLNVTDRSVGGYCIDVFEAAVKKLPHHLSYKFVVFNGSYDELVQRVSSGNYDAAVGDVTITAERTIHADFTMPYTESGVSM

SEQ ID NO: 158864 - protein, 99 aa, Oryza sativa
  Clone ID: PAT_MRT4530_58298C.1.pep
KFCCGHFLFVPPPFVVVKRAQKKGCVFFAFKTTPSFLVSPLAGKGSFFGAFPIVVLAKAFRFSKKGAQGLRHTKGDGLGAFPPPQTKGSQGVFNGGEPF

SEQ ID NO: 158865 - protein, 86 aa, Oryza sativa
  Clone ID: PAT_MRT4530_58299C.1.pep
FVFTTIYGEPRLFRPTGANRYYYLCLNDALAFGEGGSFALCLDKDLLHGTSGSCQTFGNSCLAHSPDFELKNVELWGFTHSWGRST

SEQ ID NO: 158866 - protein, 2016 aa, Oryza sativa
  unsure (1)..(2016): unsure at all Xaa locations
  Clone ID: PAT_MRT4530_5829C.1.pep
MPHGGVDRSLSPLFLGFVPCREQSSSRRRPLSPLSPTTSGRPSPLAGTVSRLGVAFSGFVASPLTPSTTSPSSPTAGAPSSQSTRAAPPPSSAPAASFVVAVDPGGAGAASRRLHRRGRLRAHCVAAAWGLAVSRPRPRVRLTRGAHGAGWCEPGCARSTVDHEAAAWAPLPWTRTNEGYTSCGPVVEMSWHRAGVLLLGXSVLPTCPGGSGRRXVGSVLLSMARMGWKLCHVFRSYAVVMADTLNRRGLDLTGFVLELRGLCVVLGYPHGVDYQCKKLPEQDGDDAEPRAAWEVTAVILTGSPERTSLAITTDGDSFPAACQNAALLAIGTLHQRYPDELXHSPYRYHPRRGGARDYATFRDASSEDDATIMYLARMVEEYDAARIDFHHMVRRGLVENNMKILELRQENLQLKKDLDAVEAQLCQLKIAQGEVCRPKRRRVCRSLKITAHKSTSRPELVRQSLAWTCFVETPRAEPAPLVPQEEEASGVGSTEDLSLFASSVWDFQMVTTRRSAATGDWXGSHPEGSNHNNHGSPPPPPPQPPPPPQDTNPILTQILAQQANMMVAFLHHIQNPPQHNAPPPPPPPQHSKLAEFLRIRPPTFSSSHNPVDALDWLHAVGKNLDTVQCNDEEKVIFAAHQLQGPASLWWDHFQATQPEGQPIIWARFAAAFRRTHVPAGVMALKKREFRELKQGNCSVMEYLHEFNNLARYAPEDVREDEEKQEKSLAGMDPELSMRLVSGDYPDFQRLVDKSIRLEAKHKELESHKRRLANFRNQQGANQRIRYTNPYPGGSSSQQQXQQPRSAPRPQFVVRVLQPQQQQNQQGTRAPHPPAPAVQPGQGRRDAQGQQRLCFNCFEHGHFADKCPKPRRQQGQAPPRPNNGGKDVTRGRVNHVTAEDMLTTPDVIVGTFLIHSIPATILFDSGASHSFISVPFVGRNQLGVERLRNPLLITTPGGVMTAKYYSPAVPIEIQGIPFPSDLILLDTKNLDVILGMNWLAQFQGVVDCARRTVTLYRGPDQPVVFFAPPTSAGSSVLHQLGLPEIPIVSEFGDVFPEELPGMPPKREIEFRIDLAPGTTPLYKRPYHMAANELAEVKRQLEELKEKGYIRPSTSPWGAPVIFVEKKDKTKRMCVDYRALNEVTIKNKYPLPRIDDLFDQLKGATVFSKIDLRSGYHQLRIREEDIPKTAFTTRYGLYEFMVMSFGLTNAPAFFMNLMNKVFMEYLDKFVVVFIDDILVYSQSEADHQQHLRLVLGKLREHQLYAKLSKCEFXLSEVKFLGHVISAKGVAVDPETVTAVTDWKQPKTVTQVRSFLGLAGYYQRFIENFSKIARPMTQLLKKEEKFVWSPQCEKAFQTLKEKLVSSPVLILPDTRKEFLVYCDASRQGLGCVLMQEGHVVAYASRQLRPHEGNYPTHDLELAAVVHALKIWRHYLIGNRCEIYTDHKSLKYIFTQSDLNLRQRRWLELIKDYDVGIHYHPCKANVVADALSRKSRCNTLGVRGIPPELNQXLEALNLSIVSHGFLATLEAKPTLLDQIREAQKNDPDMHGILKNMKQGKAVGFIEDEHGTLWNGNRVCVPNDKELKQLILQEAHESPYSIHPGSTKMYLDLKEKYWWVSMKREIAEFVALCDVCQRVKAKHQRPAGLLQPLQVPEWKWDEIGMDFITGVPKSQDGYDSIWVVVDRLTKVARFIPVKTTYGGNKLTEVYFARIVSLHGVPKKIVSDRGSQFTSHFWKKLQEELGTRLNFSTAYHPQTDGQTERLNQILEDMLRACVLDFGKTWDKSLPYAEFSYNNSYQSSIQMAPYEALYGRKCRTPLLWDQVGESQVFGTDILREVEAKVRTIRDNLKVAQSRQKSYADNRRRNLEFAVDDFVYLRVTPLRGVHRFQTKGNLAPRFVGPFRIIARRGEVAYQLELPASLGNVHDVFHVSQLKKCLRVPSEQADSEQIEVREDLTYVEKPVKVLDTMERRTRNRVIRFCKVQWSNHAEEEATWEREDKLKAAYPDLFASSSESQGRDSV

SEQ ID NO: 158867 - protein, 80 aa, Oryza sativa
  unsure (1)..(80): unsure at all Xaa locations
  Clone ID: PAT_MRT4530_582C.1.pep
LAAGFLAAEFTTSLQSPTXSDKCGXCDRXDXXQCVKKGTNYGVVXVEXKNHXXXVAAXXXNXGCKCGXTXCSCTDCXCGK

SEQ ID NO: 158868 - protein, 256 aa, Oryza sativa
  Clone ID: PAT_MRT4530_58300C.1.pep
MLAWKEKVADRLARLLADSPASPSSAAAAAAAVEPQLRVDALARRDYSSVFRIKRLCFGNKPECRTWKHGTSLRTLFRRSENLQGPCLLIVGDMRGAVFGGLLNGPLRPTEKRKYQGTNQTFVFTTIYGEPRLFRPTGANRYYYLCLNDALAFGGGGSFALCLDEDLLHGTSGSCQTFGNSCLAHSPDFELKNVEFRSLKSVPRVSKIQSNFCWRKEQGQVVGGSVGFYSFMGSFNIVGLGYIINEAIPNPNCPLV

SEQ ID NO: 158869 - protein, 245 aa, Oryza sativa
  unsure (1)..(245): unsure at all Xaa locations
  Clone ID: PAT_MRT4530_58301C.1.pep
VGHVAGLLKRKYLYNRSLSHVEKKQGDFHFWSGLMKVKSKFLNMGSXIVNNGVKVRFWEDKWVVNYSFKDRYPSLYAIVRRRNASIANVMSSVPLNVSFRRTLVGPNLNNWHNLXCASIVHIHFSEENYIFRWNFHQNGVFSVRSMYLALINNGNIERNKIIWRLKMPLKIKIFMWYLLERVALTKDNLVRRNWHGSLKCCFCMRNKTIQHLFVECHYLHISLANSFFLISLLLFAILTRSGVRL

SEQ ID NO: 158870 - protein, 79 aa, Oryza sativa
  Clone ID: PAT_MRT4530_58302C.1.pep
IRLKTAPRMGTSTEVRHEEIFCRFWGQMAAFVFIEESAVDLRGLSSWGKLETRRGNRLDAWTRIPYVDASPSAWGLWLV

SEQ ID NO: 158871 - protein, 44 aa, Oryza sativa
  Clone ID: PAT_MRT4530_58303C.1.pep
MVTAWVILSKRRKLEHRLFIKLHNLYIYQKLLLPAQHTLTYRHS

SEQ ID NO: 158872 - protein, 163 aa, Oryza sativa
  Clone ID: PAT_MRT4530_58304C.1.pep
DSPDSVVWPHEKNKTFSAKSMYRLMKFGGVVDRDMKEIWGCKVPLKVKHFLFLAGRDRIPCADLLVKRNWKGAMFRIISLMQRWMLLLKEKDRKALSSLLDKMKRKLEDLRPKDVLPQIINFLLLIGLISNYKLINAFLAILLACIHVLRIKQGPSWAACSTS

SEQ ID NO: 158873 - protein, 99 aa, Oryza sativa
  unsure (1)..(99): unsure at all Xaa locations
  Clone ID: PAT_MRT4530_58305C.1.pep
CFIGVLADKLSGRCIGLXGLHPIGFYWIILLYXYYHQPIAFIXIIYIGHIADSSKPYHYLQDQTDWHARISITFGPALELSRSPRPVCVLCINTSPCGL

SEQ ID NO: 158874 - protein, 338 aa, Oryza sativa
  unsure (1)..(338): unsure at all Xaa locations
  Clone ID: PAT_MRT4530_58306C.1.pep
ARGYNFPCSLLSDGVRDSLRCGVNFDXCALHPTPELGPLRSLTSLSLWLVSITWAELECLLSNSLALGHLELAQCTKITCLKIPFALQQLSRLSVGECSGLKVIESKAPNLSSLFDRGSRVNFSVVETLQMKKLDMGHAICDARAKLPSIMPNLETLVIESGHEVTQVRMVHESIFTDSQLRHIPGHRHGHLKSVKITGFSSAKSLVELTCYILNNAVSLECLTLDTIYGPSFLVVTLRAAELRAVLAVVGSIIATELRVVLAAVRSIVEAELGDEDHHGVEVGDLVANSLDIRDKLVPIARTIDHVVDVVAEEIACRDRDRVERPLRPIDMASDVGE

SEQ ID NO: 158875 - protein, 133 aa, Oryza sativa
  unsure (1)..(133): unsure at all Xaa locations
  Clone ID: PAT_MRT4530_58307C.1.pep
RELKRLNRHSVTAHGTENNDLMEAGDDTTSTINWGEFIDGTQSFNKIEREKHFMVAFTYFNKEGSGFITVDRQNKACMELNMEDTHLDXMSLDDNQKTDGESDYDQFVTLIEKSNSPLGGQIIESSVNVTLRE

SEQ ID NO: 158876 - protein, 503 aa, Oryza sativa
  Clone ID: PAT_MRT4530_58308C.1.pep
MSKEAFTLWLFFLLLVHGAFADQAARVLEFSRSRMEMRDDQYTTEHTSQRANHQLYMSSQDGLKEADKVSELPGQPGRAGFDQYAGYVTVNATSGKALFYYFAEATDDPSTKPLVLWLNGGLTCEFYRMTKLYLEISGPGCSSLGDGAMLEIGPFLVNGDNRTLSINRYAWNNVANMLFLESPAGVGFSYSNTTSDYDNTGDTSTAADAYTFLTNWLERFPEYKGRDFFITGESYGGHYIPQLANAILSNNNITNVTIINLKGVAIGNAYLDDSTNTRATIDYYWTHALISKETHLAVQRNCSFNGTYMAQCRNALAEADTEKGVIDPYNIYAPLCWNASNPRQLHGSAINVDPCSRYYVESYLNRPEVQRTLHANTTGLKQPWSGCSNIITPENWKDAPVSMLPSIQGLISSGVSTWLYSGDIDAVCPVTSTLYSLDILELPINSSWRPWYSDDNEVAGYVVGYKGLVFATVRESGHMVPTYQPQRALTLFSSFLQGILPPE

SEQ ID NO: 158877 - protein, 56 aa, Oryza sativa
  Clone ID: PAT_MRT4530_58309C.1.pep
IGMFPFPGLTRDQVAFLRQESPLYMPFYGRSSMAGLNGRPIPLLADAIHAAVPKLK

SEQ ID NO: 158878 - protein, 286 aa, Oryza sativa
  unsure (1)..(286): unsure at all Xaa locations
  Clone ID: PAT_MRT4530_5830C.1.pep
MTSAMTSPPAAAARRLGRLGRRTLASERRHFGKNGGHQRVADGTANSPATQATAEDQRTATATRKKRRRRSGRQRRRCSGGLRRWRRGGRGRRRLGDPDGGLPERXTMXERRRRRAGATAAMAARGLTTLGRYRXREAKARVAAGREELGGPFKGARRQRRRPTTAGDEKESSGKSNPKQTRIHEFPNDFSRCFQRRKGRGNPEDHFPSFDSAGEGKDRPIWKXGGGGAALRFRPEEDDDSDRRAPPVSERGRARGRLRLRTGPTWAEEREKGFGPTFGPKPKEDF

SEQ ID NO: 158879 - protein, 59 aa, Oryza sativa
  Clone ID: PAT_MRT4530_58310C.1.pep
MTRSASESDLCTLSSLLYASHVRMRTWCVYGLVDEHKWMPNTSTCTRAAARKTHARAAC

SEQ ID NO: 158880 - protein, 761 aa, Oryza sativa
  Clone ID: PAT_MRT4530_58311C.1.pep
MENNNDGVIGISWRNSNPKVHSSMCSELTMMLDKVSSILPSIETAQPGCKAGIEELCNLYNIVDKGKLIIQNCIECSSLYLAITGEATAMRCERIRDALRRSLFLVQNMVPSSLANQVADVHDDLGDVKFIVDPEEDEAGKAILEMLRQSDATQEHELQTFLFAASKLNLTSPKAILIERRAIKKLLDKINGNDPKKEGILKFFQYLVRKYGKTMKPEGSAKNEGVDVANVTSSTNLIASGTDAPQKCFSPTNSWTGRCEEQNNLSRFSTPPEFCCPLSMKLMYDPVIIASGQTYERENIEKWFSEGYDICPRTQLKLENFTITPNTCMKAVICNWCKDNELEFTSLPEQFHSYSVSSLHNISAPLVAGTKRDYMSDHSSSSVALSGSSYVSSPMRETEESRTNSTQFFSNAYYQLYLSFSSFNKEMFLNFFYELSELPMELQVKAVRDFKSVLNREYQIWRSMISNGFLEAFLEFLKNDNGKCTMEAQRTGIQFFLAFLRNSRTRIPSISEDAVRLVASFLDSELKTEALEILHELLQQPSCRKSRLMASVVAPSVFLAWDSADSLCLELVLKIICELSFKNDVQSFLISSGIISKLSPILSQGKSPECCLKILLNLSEGKQAADLIIRTDQCLSSISDYLDTGSSVEREHASGILLALCSRSIDDCVLVMKEGVIPALVDLSVNGTEVAKASSIKLLQLLRDSRQSDQFGNSCSSEVAVNGAAENSPIGTICKQPISKSARYISRKLSIFSKPRSLTLV

SEQ ID NO: 158881 - protein, 36 aa, Oryza sativa
  Clone ID: PAT_MRT4530_58312C.1.pep
NRRRDLEFAVDDFVYLRVTPQLELPASLGNVHDVFH

SEQ ID NO: 158882 - protein, 56 aa, Oryza sativa
  Clone ID: PAT_MRT4530_58313C.1.pep
MSDGTANCIDILIAIILPPLGVFLKFGCKVEFWLCLLLTFFGYLPGIIYAVYAITK

SEQ ID NO: 158883 - protein, 119 aa, Oryza sativa
  Clone ID: PAT_MRT4530_58314C.1.pep
RRRAGEGRSGGGGGGDRDRRGRLAVGRKKTSHENGRVLAILGPATALSIAALHALSAGHDAPASAVLPPRPRTRKGRLRLATATRVGIPSKMAASGGGFFCTCGGNHYYKNRFSVRGGR

SEQ ID NO: 158884 - protein, 367 aa, Oryza sativa
  Clone ID: PAT_MRT4530_58315C.1.pep
MENNRSCRKTQKKDRANFFMKTTVINDAATRRRSIKKNKFFVGTKILTFCRRDEYGITDMTRQVMIKQTYLFRELKLRFAGRRIDNEMKILHEQGMYDWEEYNEHKTNIEVSIAAIRNALKKYRERRIKARVFYLVPHLTEISYFVRSHLKTMPREEALKKIMLDRHRSEACERAKMESISSSKKKKDEENNAESFRLEEGRVMHTLCVPHVDLVEVEAEAFAGSRSRKGNKQRMSTALDCDRTDARRSKTRGRNDRWMTIRGPPRRATRRQKNQLLNSPRVPLMGRHTAMAATAKINAMKKGISNRFEDLRLTPRNCKVQQYHRVEFDRLPICSQALLKVVIVGALLELIKGTGLDQIPVLQAGLK

SEQ ID NO: 158885 - protein, 471 aa, Oryza sativa
  Clone ID: PAT_MRT4530_58316C.1.pep
MRFLVLWCSRLCSWLVGLVLFVANFSVLLPVSVEFCFLSSEDLSVLQAEETIAEFMFALSYNVHRISSLATVETIESSSFPEQPGVPHLFCFLFSTRIVETRSKKHPDMAPRGKPWKHCCNKCDKSFRSGNALGGHMSCHRSVGNQPKSTSSPPTVVDLHMPLLSSCDDNLLLLPPETQCQMCSKVFSTSGSLREHMMMHGGEKVVVKAEEEAAGLIEALGIADSMQDVMVFSSVKRKRSFRSKRQTPALSLEEIEAADALLLLSGCFDKTSAYEDCYLGDIEDSSLRSIVLTEVNMNAVDRCSVRSVGSKEPINDNNSGYKDCYGQSDKENCLIVPKEEMDPNDFDHELVRDAALRKPRTDNSDEEMKFGDLPAAAMKDNSHRCNTCGKSFGSGQALGGHMRRHYVRKCNRQRGVADHAGSVLMKVQKLKLRLDPILFDVTLPALTDGDCCISVGVKPEPQLWCVTSNLQ

SEQ ID NO: 158886 - protein, 107 aa, Oryza sativa
  Clone ID: PAT_MRT4530_58317C.1.pep
LSLLVPAKMIGQRSIWPCLGCVVDRFGTLAYLRKLPSELAVEVQPAGSGCRSPKAHLPPRWLVLNRSEGEIQLAICSTHGERRRLERDHWTLVDELQFGLVPNSCSP

SEQ ID NO: 158887 - protein, 49 aa, Oryza sativa
  unsure (1)..(49): unsure at all Xaa locations
  Clone ID: PAT_MRT4530_58318C.1.pep
FVNWNHCFLFKGPPFLFFPQKKKKKKKKTKKKKKKPPKKKKKKKKKKXK

SEQ ID NO: 158888 - protein, 869 aa, Oryza sativa
  Clone ID: PAT_MRT4530_58319C.1.pep
MASGEPRPPSPAAVAVAVRPGGSASRRAARWAAANLVPAGDGDGRASAAAISVVHVIPPLRFVPSPCGEQVPAARVAREAAEAYARDRHARAQEALRPFRRIFAAAANATVETVVLEGDGVAEALVRYAADSGVRSLVIGSASLGWFRRAMSVPDVATAVLKTTEISCNVFVVSKRRLTLKVTRHPQMSRSGTGLRIQSVSQKAFAQSYRSLLFDNFPENGIHPDSCCQSRVSHCGPTNARQSSESHGQILFNSLGAKTTGIEGYKNHGLRSPFKEAHYADSNSSEECQSIDEVAKLRKELQDTLVMYDKACEDLVHAKKKVMNHVSHVAKEEEDAIGSFVSAGVNQTGLENPRKIAVAVSDKMHCFDLPPVMAAVVGGACDVSPVAKPSWGPGRAWHLPCRHATTPPSPPKIQVLSSECSEEARKVEHALQEEEALKQVVADEKAKHLEAIEEVEQAKKSFTREAYSRNKAEMVASMISLDKAKVVDAILSTSKNCRRYKKHEIELATDNFSEARKIGEGGYGNVYRCTLDHTEVAVKVIQQDSIDKTDEFLREVDILSQLQHPNLVLLLGFCPEIGCLVYEYLQNGSLEDQLLNNKGRQPLHWFLRFQIIFDVSCGLAFLHGRKPEPIVHRDLKPANILLNKNYVGKIGDAGFAKLISDLVPDWQTEYKETIIAGTLYYMDPEYQQTGTVRPKSDLFGLGVIILQMLTGKRPNGLIVSVENAIRNGMLADILDKSQTDWPLVEAEMLAKLGLRCTALKCRERPGLESEVLPKLQEILHRITSTVNLRSPKLNVPSHFICPIMQEVMNDPYVAADGHTYEQQAIKAWLKKHKVSPVTRRILPNLSVIPNHSLRAAIQQWKSQSAHAKS

SEQ ID NO: 158889 - protein, 219 aa, Oryza sativa
  Clone ID: PAT_MRT4530_5831C.1.pep
MGLYDTLKRRWERDDGGGGGPLPLHRKVAAGLFSGGVGAAVGNPADVAMVRMQADGRLPAAQRRNYRSVADAIVRMARDEGVCSLWRGSPLTVKRAMIVAASQLATYDQAKEAILARRGQGADGLATHVAAGLAAGLVAASASTPVDVVKTRVMNMKVVAGAPPPYSGALDCLIKTVRSEGAMALYKGFVPTVTRQGPFTIVLFVTLEQVRKLLKGVDF

SEQ ID NO: 158890 - protein, 121 aa, Oryza sativa
  Clone ID: PAT_MRT4530_58320C.1.pep
LRVEDDEANPTVLTKTTNDARRRPATKRTAAAARLDGDGGAPVAGGEGEGAAEVLLTTAHGPVNEKWAVDGARLAQEPKWRGGMRCGLAEVAGGLGHQLGGRSSASTSSDLTAQQDSTISR

SEQ ID NO: 158891 - protein, 149 aa, Oryza sativa
  Clone ID: PAT_MRT4530_58321C.1.pep
MPANLTATRKRRLQCLCAQKLKEKKAEELRDRRFNELRPPPRQEWRPKPIEVEKPVITQDEDEDNLDTSDSPVITTSGSPLAALLLRRSLWNSHELGNGIVAAAAAVRQCGRGLWGESMDINIVFALPIEFRAMDEVGIAQLSIGPKDA

SEQ ID NO: 158892 - protein, 190 aa, Oryza sativa
  Clone ID: PAT_MRT4530_58322C.1.pep
MKRVREKNGYPIPHTSPPQQGHLVPSPQEDCQLDRSSSGACNAHLKAPLSSLPRLTAYITATLVGLPVSPLPQTASPHRRHLAPLSPVAFGLAIAPSSLAPVSWQLCLPSAPCSSPVVPPVTRTTALVPVGGRAWLAPAATSMLHRPLAFADCALHHVGLPPPPAMSPFHPTAPLAQIHPKVSGSRHGEV

SEQ ID NO: 158893 - protein, 874 aa, Oryza sativa
  unsure (1)..(874): unsure at all Xaa locations
  Clone ID: PAT_MRT4530_58323C.1.pep
MGLSDYDLMGVAVPGTGVGGPHPEALKERMLCNLWEVYTLAQRNRKFNELLNDEAIMMKPSKESKKRGAGKKQEEEENNTISIEDEMCDANNKKGKKMLTGENALMCHQCQRNDKGRVIWCKSCNNKRFCEPCMKRWYPGLSEVDFAAKCPYCRKNCNCKACLRMIGVEKPPEKKISEENQRRYAFRIVDLLLPWLKELQQEQMKEKELEGRLQGIGGFSNCLFTFLFAGVSMDEVKLEQADCDMDERVYCDRCKTSIVDFHRSCKACSYDLCLACCWELRKGEIPGGEEAKSVQWEERGQKYDTLQSSEKCFSPNSXPDFLLTPSTETCNDMAVAGDPNNPLLLWKGNSDGTSWMSTPSEKFKVLHQGCSXTLFPLKMLVSVLXDRRVVIKREAFDKAINETSDQCPCFYHTSKIRTNATREAANRKGSSDNYLYCPDANNIQEDDLSPEEWGRXPIDESIXKGSLNSEGDLNGDLXLKRALREKKTNGDVEDEHFAVKAVDCLDWNEVEIISLWDRIKVSTVQESPQTSSWXDFVHMWGDCPSLKXCDCLLLIVAIXLGLPFPEYTDPRYGPLNLAVRLPAGVLKPDLGPKTYIAYGCYEELGRGDSVTKLHCDMSDAVNILMHTAEVSYDTEQLDKIAKIKMKMREQDLHELFGVSESGAKGKADDEASKISCNMENKHTSNQSTKGLDINALPPDDSGSDIGDKPSFCQSEVSHPIHDQTFYLTVEHKRKLKEEHGVEPWTFEQKLGDAVFIPAGCPHQSCIKVALDFVSPENVGECVKLTGEFRRLPSDHRAKEDKLEIKKIALNALKEVVNFLDPLPKGSKNRDEVVEVTKPKRKYGNRRGDLKSGEDQPIDESIEERKPKKRGRSKR

SEQ ID NO: 158894 - protein, 179 aa, Oryza sativa
  Clone ID: PAT_MRT4530_58324C.1.pep
MVPLIATSMTEEQETEEEEEGQGACGICISLCHTMQTVLYSEKGSSGDCGDHQMAHLPVPKQSPLGDAGDGHRVTRQQLDLNLVKLTTILFFQADCKLLIFQVRACLHAMKHSFFPELIHGCWDESEMIGCGSPNWGSSRPCSLGLLRPTRCLLATLPDLAKESLELGDIVLVARAFRY

SEQ ID NO: 158895 - protein, 90 aa, Oryza sativa
  Clone ID: PAT_MRT4530_58325C.1.pep
MRIVDLGKRWWKGKMDAQDSGVGEKEEEDSDALLRQFRAKLDTIGVPYQWPVARTGGVGGDGPIIALREDMDALLVQSSSTSHVVPTTEE

SEQ ID NO: 158896 - protein, 168 aa, Oryza sativa
  Clone ID: PAT_MRT4530_58326C.1.pep
GEAEGVGGVDAAHTECVESRLQEVEGRNARFCAGCSGVGEADVDIGTGRRQWRRGGVNAAHAGGMDSRQLGSSARRRYNGRGAAALKTASTWGRVSTSSATVEGLLGQGRELIQASLRRGAAQHDAALCGMTQAVHGPVRRVRGGSTRRSSGPAFRRARGVCVRMAAG

SEQ ID NO: 158897 - protein, 98 aa, Oryza sativa
  Clone ID: PAT_MRT4530_58327C.1.pep
MPIDARPGARLAIDVWPGVGLPIDAGGRGRRRMKMMGGGGAPPPLTTAASSSSSCYFCFAAAAGGGGGGGRGAAVCCVDDHGIELWIDLGFGGSARRR

SEQ ID NO: 158898 - protein, 216 aa, Oryza sativa
  Clone ID: PAT_MRT4530_58328C.1.pep
MEDTEILSINFTSSSIHDKSVRRVRIRGAGRGGGVVCVRWCLVAAFLPMCHAKHVPHTATTPRSPAVRAASSGSPAREPPTHVQRRCCLRTQPIEALPCPTAAAAAAPARLASPLSLCVAAVRPMHVRSGSGDARTYGATRRLDPVYLARAAGGWLPWPGLHCRWSEQMVGGSRRHETISALPAGICRRSEQRWATEAATTRGRFGTNKGTHNGYS

SEQ ID NO: 158899 - protein, 54 aa, Oryza sativa
  Clone ID: PAT_MRT4530_58329C.1.pep
RLHRCVGAPGEVLRHHRSPGPADIGLHPLHSTTAGVITERKSSGLVRRANSMFG

SEQ ID NO: 158900 - protein, 272 aa, Oryza sativa
  unsure (1)..(272): unsure at all Xaa locations
  Clone ID: PAT_MRT4530_5832C.1.pep
FLSLSPGTPGPISLTVAINKFTKWIEAQPTQEIKSDNTIKFIKGIFYRYGLPHRIPTHNGSQFTSDDFQDYCIELGVKIYFTSVSHPQSNGQVEXLMVIVLQGIKTHIYDRLMAYDMRWVEELPYVLWVVRTTTTSSNKETQFFLVYGFEAMLPSELRHQSTRVKKYSDEKQEERQSDDVNLLLEHRERVAVRATAYQXSLCQYHEKCIQAHTLAIGDYVLRRVQNQARRNKLSPKXEGPNTVVQVTRLGSFKIADCEGCALSNSWNIDQLR

SEQ ID NO: 158901 - protein, 53 aa, Oryza sativa
  Clone ID: PAT_MRT4530_58330C.1.pep
YEIIVSNKQDIKGSNKQGHKENYLAPNLNTRLISPTDVSFFCKREGSQYSNLT

SEQ ID NO: 158902 - protein, 137 aa, Oryza sativa
  Clone ID: PAT_MRT4530_58331C.1.pep
MVDLSGLEIFLAVVALIAAICAISWTVRCLIGRRFEVATGDPNGERQGLLNKEEVVIIDVAAATEARGDDVALCAICKGRLAVAVADGGGQPCRRLRPCGHVYHAECIGLWLQRGTTCPVCRADVVASRNEIVGAMA

SEQ ID NO: 158903 - protein, 103 aa, Oryza sativa
  Clone ID: PAT_MRT4530_58332C.1.pep
APAGSIAGGILAKVHTVSPAVERHKPHRGGEEVEAGDQRTARDAPAVRCRCPRRRRLLPELPPSRCKSIWMKTSTSLWLSRKIRIWESRQNVLTAKRSYRRNG

SEQ ID NO: 158904 - protein, 24 aa, Oryza sativa
  Clone ID: PAT_MRT4530_58333C.1.pep
STDRPTESLLSVILVVVNITLRRY

SEQ ID NO: 158905 - protein, 354 aa, Oryza sativa
  Clone ID: PAT_MRT4530_58334C.1.pep
MPLAAAVAASAVVPPRPPPPPPRRARPLRSFTGLILTRDLAALTVARCAPSPPAPAAEAEAEAVAVDEAPPAKPRPRRYPRQYPGEAVGVAEEMRFVAMRLRNPKRTTLKMDDTGAEEEVGDGVSEDASASEEEEEEEDDDDVVEEEEEGAGLEGEWMPSMEGFVKYLVDSKLVFDTVERIVAESTDVAYVYFRKSGLERSARITKDLEWFGGQGIAVPEPSTAGSTYATYLTELAESNAPAFLSHYYNIYFAHTTGGVAIGNKISKKILEGRELEFYKWDSDVELLLKDTREKLNELSKLVSPELQLSICRRRLPHKRGDEMVSRLMIGPRHVGLALLPIAMAMAAEAWGLGP

SEQ ID NO: 158906 - protein, 55 aa, Oryza sativa
  Clone ID: PAT_MRT4530_58335C.1.pep
GPLKTRFFPKKMGHTRLNLGGGTTGLEFIISGGRGKNKTYVYGGEPFISPAWGFF

SEQ ID NO: 158907 - protein, 371 aa, Oryza sativa
  Clone ID: PAT_MRT4530_58336C.1.pep
MATASVSFKSREDHRKQLELEEARKAGLAPAEVDEDGKEINPHIPQYMSSAPWYLNADKPSLKHQRNWKSDPNYTKSWYDRGAKLFQANKYRKGACENCGAMTHDKKSCMERPRSVGAKWTNINIAPDEKVESFELDYDGKRDRWNGYDPSTYTRVIADYEAREEARKKYLKEQQLKKLEEKDGEEGDENVASEEEDEEDGLKIDEAKVDESAQMDFAKVPKREYEEDVGINGHATVWGSWWKDHQWVYKCCKQTIRNSYCTGLAGIEAAEASADLMKANMARKEAAEDEPVRHEEKRLATWGTDVPNDIVLDKKLLDEALKKEGARRKEEMDERKRKYNVKWNDEVTAEDMEAYRMKRIHHDDPMRDFLH

SEQ ID NO: 158908 - protein, 87 aa, Oryza sativa
  Clone ID: PAT_MRT4530_58337C.1.pep
RVCVLVNSGKGRRPPDASDPQGVIIVNLIAKGALALVPKIKHEGFSCFPYRWPNESLDTAWPSPTKAWFEISQSGRARLPGCPYDPI

SEQ ID NO: 158909 - protein, 194 aa, Oryza sativa
  unsure (1)..(194): unsure at all Xaa locations
  Clone ID: PAT_MRT4530_58338C.1.pep
RWDRTRGENSTEFFRIPVMFSETESAGRNFFGISRNRNRKRKYFLGNGIEYDKSSFRRNPETTGPRSPRPHHLAPPLLFVVSPPATATISHLRRPARSPPSQXPSHRVSPFHRRHHRRRRRNNHHTDEATTTPPLQSLPHCHQRRRLLAXAAASSPAAASEKFSSSKSIRTMSLFTLIPKHLVRSILTQNQMYP

SEQ ID NO: 158910 - protein, 45 aa, Oryza sativa
  Clone ID: PAT_MRT4530_58339C.1.pep
PLASTWLTKIDHPPSWDYSLAMLLLARRYSHVDGGGVPFGGQEVA

SEQ ID NO: 158911 - protein, 63 aa, Oryza sativa
  Clone ID: PAT_MRT4530_5833C.1.pep
NNYLIECCVTVLDFCSTRSVLHWTRVIFMEGIKNLIQRNFCRHLVCNRHFLSFFYLCQNMTAS

SEQ ID NO: 158912 - protein, 54 aa, Oryza sativa
  Clone ID: PAT_MRT4530_58340C.1.pep
IIRLQYVAVKSTPSVLKPSPAYALPPNDCREPSRAAGATRTPLLGEFAGDQSYR

SEQ ID NO: 158913 - protein, 101 aa, Oryza sativa
  unsure (1)..(101): unsure at all Xaa locations
  Clone ID: PAT_MRT4530_58341C.1.pep
QRASCSARGFFCQWRVSWLMCGDVRIWSWWDDGLCWCDAGMGLDVRDGDFFIVGRVFSLLSVSPPXFGRTLFLSWGTLRGGRRFWLAVGVIGGLMAFQVQR

SEQ ID NO: 158914 - protein, 215 aa, Oryza sativa
  unsure (1)..(215): unsure at all Xaa locations
  Clone ID: PAT_MRT4530_58342C.1.pep
DDRKYFTWEPHSFPDPIDMGEHLDAHGRQLVVLLDPHIKNTDNYVASEXMLAQDLAVHNKEEKPYEGWCWPGASNWIDXAFNPKAIEWWKTMLKFDKFKGTMSNTCMWNDMSEPSLXNRPDVTMLXDNIHHGGWEHRDVHNLKRLTFQNGTFQAALHREKGELPRTFILARAFYAGSQKLGAIWTGDHHADWGHLAVSIPMTLNQGILWFPFAGA

SEQ ID NO: 158915 - protein, 83 aa, Oryza sativa
  Clone ID: PAT_MRT4530_58343C.1.pep
HEVLALCSLAIVGIAAASSAENYWLSVWPNTPLPKAFSDLLLPYGRTNNLPIRADELNQYSTLFFEHDLYPGKKTTLGHPLRM

SEQ ID NO: 158916 - protein, 275 aa, Oryza sativa
  Clone ID: PAT_MRT4530_58344C.1.pep
MPRWKPWLSTPLSLSLRNCAYLLPEEKKLDLLKTVAASSPYATAQDARQLLPPVVQLLKKYMPGKKVEDINHNYVECLMYIFHHLAHKTPNTTNSLCGYKIVTGQPSDRLGEDFSEHYKDFTERLTGTEETVRAVSKRLTQGMADFNKAISSAKTEEEKTKIKSDQQKSTMTMRAYNNILAMAQPLRAKSPLFIGDKKITLSWMEQPKKPAPTTTGGKRSQPATNGNTPASKKGRGEGAARNQLVNRAFEGLSRGGRGSGRGRGRGGRGRGWGYR

SEQ ID NO: 158917 - protein, 97 aa, Oryza sativa
  unsure (1)..(97): unsure at all Xaa locations
  Clone ID: PAT_MRT4530_58345C.1.pep
TFAENNHKVEENRHQIKRXINRTMSRIRLMHEWAKNSEMTRRMGPKFTSLRRRAREDATSRNLGWLGRPQVQPNPPQHRLIQVFSRWCRSAPNGGWR

SEQ ID NO: 158918 - protein, 474 aa, Oryza sativa
  unsure (1)..(474): unsure at all Xaa locations
  Clone ID: PAT_MRT4530_58346C.1.pep
ATCRKGVASLHEQYGSLVTLRRNYLVWGPYHPHGISSVRIXIGNKRRFSPCWFDKYANWLQYSEKDDKAYCLCCYLFRDIKGNHHGHDVFVIXDFNSWNKTEILVTHFGDCNSFHIKALKNCEHLLKQDQSIPVAFHRQTQTEKNEHLIRLNASIDICRYLLHQRQPFRGHNESKQSKNKGNYLXLLEYTIKQNDVVAKALKNASLNNHMLSPTIHKEITKCFAKELLGSIMEEFGNDVFSLLVDEXLDVSNKEQMVVVLRYVNKCEVLKEXFVGIVHVEDMTASYLLLADLGLSLKEIRGXGYDGASNMLGEFNGWQAKIXENNSAYYIHCFGHKLNLVVVRYPMLVXFFYMISVLLNVXGSSYKRKEKLREHHXKEVRKTIGREEVVTGXGDYQEISLQRLGDTCWSSRYETLMGLSKMFPSVVRVLEYVEKDGSNAYKRRQDNDLLKYFQSFDFVSFLRMMTLVLALTNDP

SEQ ID NO: 158919 - protein, 55 aa, Oryza sativa
  Clone ID: PAT_MRT4530_58347C.1.pep
MARRGRASGRGDIDEEREGGCGRSYGRGGCGRSYGRGSGGSSRSWERERRRQSEP

SEQ ID NO: 158920 - protein, 96 aa, Oryza sativa
  Clone ID: PAT_MRT4530_58348C.1.pep
TVLATSASISIPKALHLLLCNRLQRRLSKHIMLGVSSRTTYRDHGHSGCTRAINHAPSLVINLCGLELAEDFIHCESLLLGLLLYRRDLHLPNYPI

SEQ ID NO: 158921 - protein, 962 aa, Oryza sativa
  unsure (1)..(962): unsure at all Xaa locations
  Clone ID: PAT_MRT4530_58349C.1.pep
WVQKGNRNTSFFQKATQKRRRENRISSVIHNNSIINDPEEIATVFTSYFENLFQSSNTDDATPSMLGLITGGAVAECPDTKCGSVDIPYPFSIGPGRCAMPGFELACKNSRPFLGDFEVVNISLQLSQLRVLNKISSFCYNPASKLMEPNTFQSDLDTPFMLSDTGNKFTVIGCRTLAYIADKDNVGKLMSGCVSACRRGDVTSATNGTCSGVGCCQTTSTTPPYAVTLXLMDSSDFKFSTSYLTSPEFNTSYGGRAPMLLDWAIRTVNNCDEAQKNLTLYACKSDKSECFNSSNGPGYICNCTNGYQGNPYRQDGCQGKIPSNLIIARILKLRLPXVFLEIHKNSFICCAGFPFLFPXHVDRRRHNIFSTHHLTLMMIPAYCSAASAATCVRSCGGVEIPYPFGLDPACALPGFNLTCNIKGDGKPYYKDVELLNISLTEGQVRMSYAALMEASSFNFSKNYPTSSSFNDHYRGRAPLLVDWAIGNETCDVAXYYTCISKNSGCVDSLNGPGYRCNCSQGFHGNPYLKPEDPDSCQDIDECKEPYKYPCHGKCRNKVGGYDCTCPFGTRGNAYNGPCDKGRLKHFYLLLARNLCLSCGCSXTLLGIEWIKYKQRIKRQDIMRKRGEYFHLHGGQLLTDMMNIENNISFKLYDRDDIELATKGFDKTSIIGEGGQGTVFKGYNLDQVNNPVAIKKCKGFDENSRTEFTQELLILSRVNHENIVKLLGCCLQFEVPVLVYEFVPNKTLHYLIHSQNDPSIRTLEIRLKVAAESAEAFSYLHSLDHPILHGDVKSMNILLSNNFIAKISDFGCSKIRAADGHDDVVKGTIGYLDPEYLLKFELTDKSDVYSFGVVLLELLTRRTPLSKQKVSLASVFQEAMKEGLFLELIDTEILHEDNMGLIGDLARLACQCLAMTSESRPTMCRIAEELRRIEKRVRQHRGVLTTISSMSLLASSSADTSLQ

SEQ ID NO: 158922 - protein, 155 aa, Oryza sativa
  Clone ID: PAT_MRT4530_5834C.1.pep
MQTSPKLPDPIFRIDQQRAYKPAAGSPPPVSPPYRAGFQLPPQARPRAILAPPGPGRRRACHARRGRALPAGLVAASASTPVDVVKTRVMNMKVVAGAPPPYSGALDCLIKTVRSEGAMALYKGFVPTVTRQGPFTIVLFVTLEQVRKLLKGVDF

SEQ ID NO: 158923 - protein, 152 aa, Oryza sativa
  Clone ID: PAT_MRT4530_58350C.1.pep
MEVIREKVSCVLPLCHAILPRDPSSFVLTVKHGSDAWFMPGFMDSSLKNTNNMQGIFLYFRLFHMNSVVKKFHVNYWFYCSTKKVDKVMEEMKPIIILSLLGGVSDDSAASYSTNWTLKQVTGETHTRVIPPQLLPKDQKIIFQKPSQHCYS

SEQ ID NO: 158924 - protein, 96 aa, Oryza sativa
  Clone ID: PAT_MRT4530_58351C.1.pep
YHLSYCQKIRKSSFRSRANIATLEKHIYFYFFFVIFVSQNLYLDYIMVCILCRFGDLRHFFFSIGHDLCYIEETVHARPLYIRYYLSYFVIKKKKK

SEQ ID NO: 158925 - protein, 185 aa, Oryza sativa
  unsure (1)..(185): unsure at all Xaa locations
  Clone ID: PAT_MRT4530_58352C.1.pep
MEHIRSFLLAALAVVVAAATAAAAGLPPLPSTMPADVPQPEIPPCLNDLMPCASVYDDSSMLGPCCDALGKVFKSDRACLCQIWEMARNDTRQVGSNALDGDQQMFARCKIPGASSTICDNGQAGHGTSAGYSSXRLPSKKCLTSLEVDRGIPDLSSPSNTVHFGSVKHTLEDIIFHIHLPVQCM

SEQ ID NO: 158926 - protein, 711 aa, Oryza sativa
  Clone ID: PAT_MRT4530_58353C.1.pep
MGFERLTSILQNKMSNYDTDVFMPIFDAIHQLAGNGIQSYSGKVGPEDVDKVDMAYRVVADHIRTLSFAIADGSQPGNEGREYVLRRILRRAVHFGHQKLKAKQGFFSSLVHVFVQLMGDVFPELKDNEKKIKDIIKDEEESFENTLAKGFEKFKKAADAVKESGGTVLSGQDAFVLWDTYGYPVDLTEVMGVDYGLSVDREGFDAAMEEARQKARNARFKAGENSIVLDANATAQLRNQGLASTDDSPKYGYKDNDSVVKAIYTGSEYVSAASGDEDFGLVLESTSFYAEQGGQIYDTGKIEGSFGSFNVTNVQVFAGYVLHMGSFTKGSKALSVGDKVACKVDYARRALIAPNHTCTHMLNFALREILGDHVDQKGSIVLPEKLRFDFSHGKPVQPEDLRKIESIVNQQIKDKLEVFAREIKLADAKRINGLRAVFGEIYPDPVRVVSVGRKVEDLLANPESKEWLSISTELCGGTHIKNTSEAEAFALLSEEGIAKGVRRITAVTAKHASDAIKDASSIDSEINEASKLEGAILEKTIASIKSKLDTALIPAARKADLKGRVSKLEDELRKAKKKMGEENIQKAVKFAIDAAQTALSEGKRFCVAHVDVGLDTSAIREAVIKVKDQKDLPIMLFSTDEATNKAVIYAGVPPSAANSLKVLDWLTPSIAPLKGKGGGGKNGIAQGQGTEASQLKEAMEVATQIASMKLV

SEQ ID NO: 158927 - protein, 137 aa, Oryza sativa
  unsure (1)..(137): unsure at all Xaa locations
  Clone ID: PAT_MRT4530_58354C.1.pep
LRSLVPSQRXMRCSMXEXKGCTRKIYXDXKVXCNGELVLVTGGKQTRSTPWTLWSGEXPYYVXDXSXIVXXDSXIXXFXKKLGXHSRNXWPQEPLEGXIXPHXNRNFHPEXRKESPATTPVPLSAAGAVSWILGNFL

SEQ ID NO: 158928 - protein, 73 aa, Oryza sativa
  Clone ID: PAT_MRT4530_58355C.1.pep
YTQMGTLLKKIKKKQAHGERPTRSVQLIQKENGPLDGGRRGYNNYVDKKCWKKYVLKYKLNNSGRTTVKSPID

SEQ ID NO: 158929 - protein, 53 aa, Oryza sativa
  Clone ID: PAT_MRT4530_58356C.1.pep
PLLFNFAGRPKPWRISGLPLFGHGFFLSSGNCSSFKKLFGIMVFQKKKKKKFN

SEQ ID NO: 158930 - protein, 103 aa, Oryza sativa
  Clone ID: PAT_MRT4530_58357C.1.pep
HKSATEDLVFTIWLDPCTETSHILDVNSLRNLTGYMHDCQKVGLEPSPWQLLLFFEDASSVTIPPALSWMPNWLLTWVHHGLAWYAESVLGYKRSYSEYAKES

SEQ ID NO: 158931 - protein, 480 aa, Oryza sativa
  Clone ID: PAT_MRT4530_58358C.1.pep
MEQAAAEAEAERMRREKKDGVVKEVIRLERESVIPILKPKLIMKLAYLVEQDKDRGEFLKLCRRVEYTIRAWYLLQFEDLMQLYALFDPVNGVKSLEQQSLTPDEIETLELNFLTYMFQIMEKSNFKLLSDEEYDVAQSGQYLLNLPIKVDESKVDKKLLTRYFKAHPHDNLPASVDKYIIFRRGIGIDRTTDYFFMEKVDVIISRVWRSLLRVTKIDRLFSKKKQLRAKKDPKKTDEVNEEVEEQEFSVERIRLEKMELRKSSTEAKPDRGIFVKHFKNIPMADMELVLPEKKNPSLTPMDWVKFLISAVLGLVTLIGSLEMPKADIWVVIAILSGLIGYCAKIYFTFQANMVSYQNLITKSMYDKQLDSGKGTLLHLCDDVIQQEVKEVIVSYYILMEQGKATVQDLDLRCEQLIKEEFGVECNFDVVDAVKKLEKLGIVSRDSIGRIVCVPLKRANDIIGQTTEEMVMRAQQASTGS

SEQ ID NO: 158932 - protein, 163 aa, Oryza sativa
  unsure (1)..(163): unsure at all Xaa locations
  Clone ID: PAT_MRT4530_58359C.1.pep
MASASDKLVLSAIVLAVLAAVVAAASGYGDVGEYCRVGKAVSRNPVPSCRNYIARWCAAAGGRMDSRKQPPREFLEPCCRELAAVPMQCRCDALSVLVRGVVTEEGDRVSXMISQHAAPGCDAATIAGMASALTDYGRCNLQHTGFLWLPMGWEVACINFLSN

SEQ ID NO: 158933 - protein, 188 aa, Oryza sativa
  Clone ID: PAT_MRT4530_5835C.1.pep
MWPGGWRLYYHRKALGAAIVLVNLSQKVANTIFGGGPLGKSVQRHLNFDATMSKQRKQEVDPSNIVPISLDDLEEEARKIVEERLKEITQEVLMKSCTKTCQGVVLQPGPSPKVIFGECLPARLIHRLCTWEWWIRYREGQGRLDRSDRNSGLRLGGSATCTHESSGSIAEEVGGSVSAMDLPCRYER

SEQ ID NO: 158934 - protein, 112 aa, Oryza sativa
  unsure (1)..(112): unsure at all Xaa locations
  Clone ID: PAT_MRT4530_58360C.1.pep
MQTTCVPAPPCVLAVLTVAAAAAGYGGYGDVGEYCRVGKAVSRNPVPSCRNYIARWCAVAGGRLDSGKQPPRQRLXPCCRELAAVPMQCXCDALSVLVRGVVTEEGDPRPPG

SEQ ID NO: 158935 - protein, 65 aa, Oryza sativa
  Clone ID: PAT_MRT4530_58361C.1.pep
MAQPPEPAGVRSVALATSGGGLATGEGHAPTCDGGGGVEVDWQLARAVRPCAMVAVGRLQLGLLV

SEQ ID NO: 158936 - protein, 157 aa, Oryza sativa
  Clone ID: PAT_MRT4530_58362C.1.pep
LIKLLRKLIQCHPQTWGSQRKPVCWQGWHRAGSPVRRARHPGRSSRLSAPWAAACWRDHPGRRGRPSSVTTPRTSTLNASHRHCIGTAASSRAARLQELPRRLLAGVQAAPGDGGTTARCSSGTMGPGSGDTGLPPRGVLAEVWRRPRNPAAVAETG

SEQ ID NO: 158937 - protein, 131 aa, Oryza sativa
  Clone ID: PAT_MRT4530_58363C.1.pep
MASGLWFLGISLAVLLLCYVGTNRRGDGQRPPGPRTLPIVGNLLDLRGGNLHHKLASLAHAHGPVMTLKLGLVTTVFISSRDAAWEAFAKHDRRLAARTVPDTRRALAHAERSMVWLPSYDPLWKTLRRIS

SEQ ID NO: 158938 - protein, 159 aa, Oryza sativa
  Clone ID: PAT_MRT4530_58364C.1.pep
MALASDKFVLSAIVLAVLTVAAAAAGYGGYGDVGEYCRVGKAVSRNPVPSCRNYIARWCAVAGGRLDSGKQPPRQLLEPCCRELAAVPMQCRCDALSVLVRGVVTEEGDRVAGMISQHAAPGCDAATIAGMASALTDYGRCNLQHTGFFGCPMFGGGMD

SEQ ID NO: 158939 - protein, 213 aa, Oryza sativa
  Clone ID: PAT_MRT4530_58365C.1.pep
SGGAAAAASSGEGKFPAPTFDPASADQRTTKLSSPFTEIRSHLKPTSSATPSPHPAGPPPPPPRTPALPSSTSSTPGRTCSTEYAGFDGLWLIGSQATMAYLLGKPQHELVERQQIGWLAGPFAVIVDLLAPLFADLLRRRPADAVVFDGVLPWAATAAARLRIPRYAFTGTGCFALPVQRALLLHAPQDRVASDDEPFLVPGRPDAVRLFRP

SEQ ID NO: 158940 - protein, 732 aa, Oryza sativa
  Clone ID: PAT_MRT4530_58366C.1.pep
MENGDKDEKNVAVTEGSTNSEEKDQDEDLLRRTEMLNAKEAINSSNENSGNDSEAQIHVRDDSQKEFNEKMNKEGSSDPMEPTDSSQTEEDILAEDKSEEPVFDGTEVAEMEDLRRSSNQSVELDSDAHGSVLNERATAIKNFVKEKGAIAVSTFIRRLSGKKDENEFSVEDEKNEGSESISSGNIGSDAEPKSKEVQPKSEERTTWNPLNLIKIGRDFDTFMTGEAGHENVPDLIEQPTGKGRIIIYTKLGCEDCKMVRSFMRQKMLKYVEINIDIFPSRKMELENNTGSSTVPKVYFNDLLIGGLTELKKMEESGILDDRTDALFKDEPSSAAPLPPLPGEDDESGSGKIDELATIVRKMRESITLKDRFYKMRRFSSCFLGSEAVDFLSEDQYLERDEAVEFGRKLASKYFYRHVLDEDVFEDGNHLYRFLDNDPIIMSQCYNIPKGIIDVEPKPIVEVASRLRKLSETMFEAYVSEDGKHVDYRSIQGCEEFKSCCGYPIVMVDGYAVLTYFLHRYVRTTEELQRVETHELSREEKLAFFINLYNMMAIHALVTCGHPAGPLDRRKFFGDFKYVIGGCAYSMSAIQNGILRGNQRPPYNLAKPFGQKDQRSKVALPYAEPLVHFALVCGTKSGPALRCYSPGNIDKELVEAARDFLRNVGIVVDPEAKVASVSKILRWYSTDFGKNETEVLKHAANYLEPAESEQFLELLANTQLKVLYQPYDWSLNI

SEQ ID NO: 158941 - protein, 167 aa, Oryza sativa
  Clone ID: PAT_MRT4530_58367C.1.pep
KPTSSATPSPHPAGPPPPPPRTPALPSSTSSTPGRTTEYAGFDGLWLIGSQATMAYLLGKPQHELVERQIGWLAGPFAVIVDLLAPLFADLLQRRPADAVVFDGVLPWAATAAARLRIPRYAFTGTGCFALPVQRALLLHAPQDGVASDDEPFLVPGRPDAVRLFCP

SEQ ID NO: 158942 - protein, 81 aa, Oryza sativa
  unsure (1)..(81): unsure at all Xaa locations
  Clone ID: PAT_MRT4530_58368C.1.pep
NSSMGAVLFKSWVLFCLSTNRVPLYGSLHKIFSACCLFILNEQDGMLHRLLQGMGDRXVLYFPDNXGETSKRYAPLXSLYS

SEQ ID NO: 158943 - protein, 695 aa, Oryza sativa
  Clone ID: PAT_MRT4530_58369C.1.pep
MGQALGGALRRLGRRRGGDPAAALLRCGVVPSSSSYSAPGTLLPLKQPVGDCGGCRRSFSSSAWVGSRLWRSLHRRQSAGAAATATAWEAHHSTRKSSMATVSSEPDTSASQSEILHFIKSTFGTLEGQNHCWLNCMNDTWKTLNQGVYLILLYESCGTSDSHGKLSSAFQRLKYLQQRYLCSKDHALFSNLDEELEVLIKACKSLLKAGMDNAVLKAEPSDTALESRVSWQKEEVPKEPYVGSIGCSPGFEDGEFESAKFLRPAASFYNTAEDCLYIVDSENHAVRKADLGRRMLETVYPVSSKSSSGIWSWIVDKLGLRREDAPSENFIADSIAFPWHLLNITEDDFLVADRNFEASWILSVSTGQKQEIGRGIAEEMESYQQIIHERCALLKDMNMNWSSSAKEHSDLLGKIPFKELVSSVARFQKYIIFCDADGQRVLKHDLDTNGTSNIQFSNFGVLGLPYWFVCHLERVSTRGHSIGKFQEHTRKVNVLPGRCNIKVSVDIPADTQLAAPLVESCIWRQVRGSGAEVSGFDEPSTSTEKVGIAQQWYDEIDNLAFSEVPEEPTVHEGDENLSDGSYQEQRRAHFNCVVNVSPGTCELVASAALYLKIDSAKDDHGEQKSLVKRIIQCQRREDHAGVELLMESCKDSRDLTIMKPVHLRLMLECADHPAGTTNKETISSESSFEINISLD

SEQ ID NO: 158944 - protein, 86 aa, Oryza sativa
  Clone ID: PAT_MRT4530_5836C.1.pep
MANPNWSSMAAACKLTSGRPRLGDGEASKTQRKGNQVAQGNEQKEAWASKRWHGRLGEAGRCSINVLFHKESRLRLASIFSIFFSR

SEQ ID NO: 158945 - protein, 74 aa, Oryza sativa
  Clone ID: PAT_MRT4530_58370C.1.pep
SFSNPPPPPTSWASLHHLWGFQNIPSPSIPFAQKLLYPILLHHPILTPTSYLYLQYIQITIPQNYDKIPPYYLH

SEQ ID NO: 158946 - protein, 103 aa, Oryza sativa
  Clone ID: PAT_MRT4530_58371C.1.pep
MGHGTPSALPAAMLVRSPAGRARLPLLGCRTDLSSPLRPPIAAPPVAHQPHLLKKKKKKKKKKKKKKKKKKKKRKRREKREEEEKKRKEKKICVTDMWAHILF

SEQ ID NO: 158947 - protein, 115 aa, Oryza sativa
  unsure (1)..(115): unsure at all Xaa locations
  Clone ID: PAT_MRT4530_58372C.1.pep
MEQPSTSSSLAVAEMVADVLLLLGATGTSTQAGRLLDEELPTDVIPGIPGVPGVPVVGPGIPVIPDVPGVQVHGPGIPFVPVIPSVHAXEPIIPGVPMIAGVTTLTVPTIEPSID

SEQ ID NO: 158948 - protein, 138 aa, Oryza sativa
  unsure (1)..(138): unsure at all Xaa locations
  Clone ID: PAT_MRT4530_58373C.1.pep
TPPDINIRDXPRQTQSGAYGSRXEGSSAISDLDGFIFKEENYPVIDYELINKEKHRFRPTRCRVIICQIRGPNLHKNPCLHLFYLNLAYTLVPMIPIPSKYRSRDLKRRQQLHKVDGSVAARAEGVGRRPRRRRLPQD

SEQ ID NO: 158949 - protein, 91 aa, Oryza sativa
  unsure (1)..(91): unsure at all Xaa locations
  Clone ID: PAT_MRT4530_58374C.1.pep
TALMYVHIAEXRIIKTGIAIRQYGGCATGPVARRYTTFTXYTLIGISSKCXPDHXQLYFXECLHYHYVWAASHLSPPLDICWSFILSTLLV

SEQ ID NO: 158950 - protein, 97 aa, Oryza sativa
  unsure (1)..(97): unsure at all Xaa locations
  Clone ID: PAT_MRT4530_58375C.1.pep
PIPNQSFTACNAAQGSLLPPFRXKLPPNQGCXPPVXPGXRVSPVLXHPXXNSRPPARPPTPVAXAHDXRPRPQESXARGKFVTTTKARRPARPXEAP

SEQ ID NO: 158951 - protein, 344 aa, Oryza sativa
  Clone ID: PAT_MRT4530_58376C.1.pep
MDVKLLLLLLLSVLLLSAASMAKDDDEQQQKVQCHEDDEAALLAIDDALGNPYNLASWTRNTSCCDWYDVDCDQDSGRVVSLSVFQDTNLTGAIPDAIANLTHLRTLLLHHLPSLSGPIPDSLAALTDLTHLTISWTAVSGPVPSFLANLTSLTMLDLSFNSLTGLIPPSLAALTNLSAINLSRNRLSGPIPPGLFSNLQLQDDDDEVYLRLSHNNLSGSVPADLLAAANLALVDLSRNALTGDASAVFRRARAFEVMDLSRNALSFDMTGLRLQEGVSSLDLSHNMLYGGVPAQVAGLSSLQDFNVSYNRLCGELPAGAARFDQYSFFHNKCLCGPPLPTPCN

SEQ ID NO: 158952 - protein, 108 aa, Oryza sativa
  Clone ID: PAT_MRT4530_58377C.1.pep
MGPFYLDQTVVYAFARKLRRDWPFNGTQRRTSSDTGDNYATWGRDRASTGHDRRQAGHTRFDTGQWRAGEGLGSWQLEGPRGLTWHPEGHDVAPRGPLAVAATHEVRG

SEQ ID NO: 158953 - protein, 143 aa, Oryza sativa
  Clone ID: PAT_MRT4530_58378C.1.pep
MSGPSGPRVATTQGPPQLPRGGQSVREGGNPRLSSHQCAVPQPSLTAFNAVRADVRYRATGPCQIGCDRPVVGHVRLTRGHAPTSPVSGGVKGVMLATGKNLYNPGARECFSRIQGGYTISPSEPLPPAELTKRGSHDLPLKR

SEQ ID NO: 158954 - protein, 161 aa, Oryza sativa
  unsure (1)..(161): unsure at all Xaa locations
  Clone ID: PAT_MRT4530_58379C.1.pep
MASNKVMFSELLLVCLSGLGAAMATMADHHQVYNPCEQCPPGISYTTYSLPQCITLVRRQCVCRGADSAVDKQVWQDCXRQLDAVDDGWSTCGALDHMLLSIYRELGATEAGHPMAEVFPGCLRGGLXERAEASLPVFLNVDIRNGPGGDCYWLGYARSPR

SEQ ID NO: 158955 - protein, 52 aa, Oryza sativa
  Clone ID: PAT_MRT4530_5837C.1.pep
MAGKKFERTYGSDVEAHVSHNRRAGGLLVAPDTDRQALASGGREAGGREQNG

SEQ ID NO: 158956 - protein, 274 aa, Oryza sativa
  Clone ID: PAT_MRT4530_58380C.1.pep
MTEKVIPAMAAARQDSCKTKLDERGGSHQAPSSARWISSEQEHSIIVAALRYVVSGCTTPPPEIVTVACGEACALCGIDGCLGCDFFGAEAAGNEEAVMATDYAAAAAAAAVAGGSGGKRVRRRRKKNVYRGVRHRPWGKWAAEIRDPRRAVRKWLGTFDTAEEAARAYDRAALEFRGARAKLNFPCSEPLPMPSQRNGNGGDAVTAATTTAEQMTPTLSPCSADAEETTTPVDWQMGADEAGSNQLWDGLQDLMKLDEADTWFPPFSGAASSF

SEQ ID NO: 158957 - protein, 39 aa, Oryza sativa
  Clone ID: PAT_MRT4530_58381C.1.pep
MDDGNATDVQIGAATAVRPDASVRSDQRLNSGKINLVAF

SEQ ID NO: 158958 - protein, 134 aa, Oryza sativa
  Clone ID: PAT_MRT4530_58382C.1.pep
MDPGGLRPAPQSAAAAAAAAAAGAGAGASAADEPRDARVVRELLRSMGLSEGEYEPWLVHQFLDLAYRYVGDVLGDAQVYADHAGKPQLDADDVRLAIQSKVNFSFSQPPPREVLLEVARDRDKMPLPKAVAAP

SEQ ID NO: 158959 - protein, 122 aa, Oryza sativa
  unsure (1)..(122): unsure at all Xaa locations
  Clone ID: PAT_MRT4530_58383C.1.pep
MKKFADVRRCNSVEPKVEHTFPPPGCNLGLGQKSGLTLDPSWADFGSDDTGCPISRVLIGRPSVDSGETKPPPSQPPIPSPFPSLPSHFTAXPPPPPTAAAAAPPPPTAASAASSPTTGGGS

SEQ ID NO: 158960 - protein, 73 aa, Oryza sativa
  unsure (1)..(73): unsure at all Xaa locations
  Clone ID: PAT_MRT4530_58384C.1.pep
WXKRIQGHXLXIYIXFPKXPIKALIXXEKXXFXGHIVQEPNGCSNPXIRGSSIRIXTXNFLXXXXISXXNXXK

SEQ ID NO: 158961 - protein, 148 aa, Oryza sativa
  Clone ID: PAT_MRT4530_58385C.1.pep
KRYVNFPDSRSIFKNGIVFTPTPRSATSPAFAPTSVSPTPSSIQASEALTASARSPPRPPRPPPWAASPRCICHGHRHRPCSPRLALLPSFASLHSPSPRPVWQPLLPVAGSRKVAPSPPPSAAAAALALALFPCGHCSCPSPVAARL

SEQ ID NO: 158962 - protein, 332 aa, Oryza sativa
  unsure (1)..(332): unsure at all Xaa locations
  Clone ID: PAT_MRT4530_58386C.1.pep
MVLEREAIFPDEVLAVMMEGIDQPVMGGCRGAFEVLWSHCGEAVEGPKTMHDRRTPSIRPSLPLATITRRKREREAGSCGGHHLVKLKLKPSINEGEPRSTLPAGIAHSRLPSRNLGLGRKRGLTLDPSWADFGPDDTGRPISRVLIGRPSVDSGETKPTPSQPRNPSPFPSLPSHFAALSSAPPSGGGDDAAPPPPPMAAAAAPAPPTAASAASSPTTGGGSSGRGGTPRAAAAAPSPTTGGGSSGWGGAPRAAATAPLXPRAAAAVESSPTTDGGGGTLPHHRRVPSAAAAGGSIGRGGGGGGALPSTGSTATATAAVRQRRRRRRRRRR

SEQ ID NO: 158963 - protein, 66 aa, Oryza sativa
  Clone ID: PAT_MRT4530_58387C.1.pep
GKKRPAYKGETRHIKHTGKPAYVSKGTKQNPILNKNNRLFLKQGNIKGQQKTISTQKSGNPFLKKA

SEQ ID NO: 158964 - protein, 790 aa, Oryza sativa
  Clone ID: PAT_MRT4530_58388C.1.pep
MSGRTFPPPGRNLGLGRKRGLTLDPSWADFGPDDTGRPISRVLIGRPSVNSGETKPTPSQPRNPSPFPSLPSHFAALSSAPPSGGGDDGAPPPPPMAAAAAPPPPTAASAASSPTTGGGSSGRGGAPRAAATATAPLLPRAAAAAPSPTTGGGSSGWGGAPRAAATAPLLPRAAAAVESSPTTDGGGGALPHHRRVPSAAAAGGSSGRGGGGGGRNLGLGRKRGLTLDPSWADFGPDDTGRPISRVLIGRPSVNSGETKPTPSQPRNPSPFPSLPSHFAALSSAPPSGVGDDGAPPPPPMAAAAAPPPPTAASAASSPTTGGGSSGRGGAPRAAATATAPLLPRAAAAAPSPTTGGGSSGWGGAPRAAATAPLLPRAAAAVESSPTTDGGGGALPHHRRVPSAAAAGGSSGRGGGGGGALPSTGSTATATAAMVEEMEWRMAPAMKPVPFLADPPQVSSLQMLLPPEYSHLAGIGEISSIHNGIVVIYAHRYYLLYDASNNHLTAIPPLPDSLCSPTFLPLGRTAVVVTAGDDDDDYILADIVTSSTTGLPDAKLFVCSSSSEWAETPPVRLPLPPHLCGPTYFFHVDTAFSFQGSIFWVDLLKGILICDHVSSPEGPELVFVPLPHCRDVHGKPRHCFSPNEHRSIGCVSGAIKFVALIGYCEEASCPANEVKLKTWSLSPDFKHWKEETTLTVGDSWASESFNEIGLPHVMPIPILSVNEDGIMYAVLNDIFQEPIPDHNKVLSFTKISQHGELRWLTPYLIATDFSSYLQDHTRGEASAKDEQQLED

SEQ ID NO: 158965 - protein, 502 aa, Oryza sativa
  Clone ID: PAT_MRT4530_58389C.1.pep
MVHLPHQGKLRRDVKEEALDDGDAAAQAEASPFHKRSRLALQHWSTDGGSVSNQQSSQHGFLDEPSPLGLRLKKSPSLVDLIQMKLVQAGKAKDVQHSGTASASEKLKASNFPGSVLRIGSWEWVSRYEGDLVAKCYFAKHKLVWEVLDGGLKSKIEIQWSDICAMKVVSPENEPGILEIALSRQPLFFRETNPQPRKHTLWQATSDFTGGQASIHRRHFLQCPPGMMNKHVEKLVHCDPRLYSLSQQNDINLDNPYFESKSSIFEDAEGIKGQDFEHKDDGDQLAPQRFTELLPPHSASVSGTQVIKQDAASGDCERQESIYNWNGIKVPGIRRSMSKSEIANHIGNHIYRQMYSGNLPAVHRGDSTSSKVTLDGITRFLLGSTQIIGDGDGDGSMGKLTFDELTRQLLNDSQITNAADERMLMSRVNSLCSLIQRDSGSGQTNPSSSIHGDNEMQERKPQPYALPVSADSGSNTSLPPRQESFGDLLTHLPRISSFPHFL

SEQ ID NO: 158966 - protein, 217 aa, Oryza sativa
  unsure (1)..(217): unsure at all Xaa locations
  Clone ID: PAT_MRT4530_5838C.1.pep
WSGGGGRSQGREGQGXRRWLEPGEIGGGAGRRGVVVGGHVLPRPRSTPNPILVAGSRILPRPRSTSELVAGDRILRWEHVTGGRVRRPRLNPRPRSPRRXLPPSPRRILCRPCPTLVLGAGAVSITXRILCRPCDHAPRWSSPVAVSSMPELVAGGRILHAEACRRRRWSSLSVPPASARLRSLLPQWPVLPCLREVKRERSRWDSIPTGYRWDTGI

SEQ ID NO: 158967 - protein, 90 aa, Oryza sativa
  Clone ID: PAT_MRT4530_58390C.1.pep
TVQVGSQILSSVQASEQVCGESSYAETLDMFLVYAALGRCYDGLDKPLVNDAVIMEPPFDTGDAYEVSFIEGRGFTGLSCSDCPCVLALS

SEQ ID NO: 158968 - protein, 67 aa, Oryza sativa
  unsure (1)..(67): unsure at all Xaa locations
  Clone ID: PAT_MRT4530_58391C.1.pep
PLXXPRKVGSTPSSPRRDGPTXATARVPGXXXXXGGAXGAPAXXXXCFXAPXXNPPPPPPPPQRVVF

SEQ ID NO: 158969 - protein, 67 aa, Oryza sativa
  Clone ID: PAT_MRT4530_58392C.1.pep
MAVADVAFKALTAGLGVATLYLAGTFSVNVYRGLSWHSEQSKWFIKLFIGFNVADEVLRAKMMITRS

SEQ ID NO: 158970 - protein, 105 aa, Oryza sativa
  unsure (1)..(105): unsure at all Xaa locations
  Clone ID: PAT_MRT4530_58393C.1.pep
VDVTMATMNIIVVHIMDQXNDIMIKSSKCWNPIRPPSPFLVHVYLMKSSHSPFSNESSLIAKFYLSHPQSQKQCVAKPMMGLFACNFIWNPDPSXPMWGALQPGG

SEQ ID NO: 158971 - protein, 175 aa, Oryza sativa
  Clone ID: PAT_MRT4530_58394C.1.pep
MAAAARAIICEMAPQRGAVVAPAAPAQQKATTRRDAAVVARRRVVEEEESGGGGAGSSPFFASLADYIESTRKSQDFETISGRLAMVAFATAVAVELTTGNSLFKKLDMQEIEEAAGVCLAVVAGAAAFAWVSSARTRIGQMFTLGCSAFVDSLIDNIVEALFSEGELQDWSDDV

SEQ ID NO: 158972 - protein, 98 aa, Oryza sativa
  unsure (1)..(98): unsure at all Xaa locations
  Clone ID: PAT_MRT4530_58395C.1.pep
PPQGVFMSRPITTVPGKEGVLPQGGTPVCALPGPVNLLSPRGRGKTRNVTPPPQGRASVGGKCGSSPFLRECPVAEDSAVARKNKKKIQPPEPPSLXX

SEQ ID NO: 158973 - protein, 194 aa, Oryza sativa
  Clone ID: PAT_MRT4530_58396C.1.pep
MAAAARAIICEMAPQRGAAAAPAAPAQQKATTRRDGGKIMLQPRLCTLRSYGAGSGVVARRRVVEEEESGGGGAGSSPFFASLADYIESTRKSQDFETISGRLAMVAFATAVAVELTTGNSLFKKLDMQEIEEAAGVCLAVVAGAAAFAWVSSARTRIGQMFTLGCSAFVDSLIDNIVEALFSEGELQDWSDDV

SEQ ID NO: 158974 - protein, 66 aa, Oryza sativa
  Clone ID: PAT_MRT4530_58397C.1.pep
KKRKFKGCHHVQLHFMFFSKTGILEQLFFKFQLALRLEQSLFSSILEQSLFKNQLLTDNLVIWIDF

SEQ ID NO: 158975 - protein, 601 aa, Oryza sativa
  Clone ID: PAT_MRT4530_58398C.1.pep
MAAVAVKRKLIVDKSPTHRLLHSPLSPITLVRRRRVPSDLESSEGSSTSLRSDAAYTATLEEDVQAVARAVIRIALKYPEAICQLMVAGHTTWNEAEMKAFPEACMEEIEARTITSTCPNRQGYINLEVKMFQKVQKVVNRHQLNNLWDTCRRQFQTWCWLESMATGLGCCPFTGNILASPEWWTRMDHMRRGARAFRNGPLLYIPEHHAVFRGRVCTLNRSGVPVRTPINAVPQQAEILDIEDLTEHTLQEPSEQTPRHGKRSLTRGTTSGGSSKRSRGSSASDALNRLADLGVQSNDSRTRMEEIKQAKSAKACMELLKADGYTSRDPIYHMALRVFRDGFLREFFLDDCHTPEGSPFPPGFGGYIQSAPAVSPFFVHITAFCVDGFFGATGDAVLGAVAINAVGDDAATGDGEGDGVGDDDDDAGDGEAYGDGDDEGGDGAGDGHDDYGDDGDGGAAGYGGTGYVGALYWGWDLEVMIYLVMQCFDLMPIGPTARSFRTMSVSELELFERVVCPNNFARLRLEQRCINYRMAWSGSTMCKYFHRVLNAVYAMAADINKPANPNFRRVHNCVMQDANFLPFAGAAGVVDGTHIPIRVAV

SEQ ID NO: 158976 - protein, 101 aa, Oryza sativa
  Clone ID: PAT_MRT4530_58399C.1.pep
SRSSNPSENGQPPAATPTQRNAQPNRASDLDSSRARREADRSGGEQPHANESKPLGKGAVDSGRIGIAREVFFFVCVCVGRCGKREERRRCCQLRKGGRFF

SEQ ID NO: 158977 - protein, 146 aa, Oryza sativa
  unsure (1)..(146): unsure at all Xaa locations
  Clone ID: PAT_MRT4530_5839C.1.pep
MGGIDYRREHILRHAAAADLSGNSWRNATGLPTSTSPTIASILLNLSTDIQRTLKESASQENRVIDKWKMPFLTDDMNLXKLWSPALLGRCPTKVEAYVPDLIYICLNSDTPHRPTLRAMVHHLALIHDIDGTSLYTHIEPSAAPR

SEQ ID NO: 158978 - protein, 453 aa, Oryza sativa
  Clone ID: PAT_MRT4530_583C.1.pep
MAAAAVLRSHGARRILSYPTLRAAVISGPTALPDASAAAAAAPQQPPPLAGTLWARSMATFTRTKPHVNVGTIGHVDHGKTTLTAAITKVLAEAGKAKAVAFDEIDKAPEEKARGITIATAHVEYETAKRHYAHVDCPGHADYVKNMITGAAQMDGGILVVSAPDGPMPQTKEHILLARQVGVPSLVCFLNKVDAVDDPELLELVEMELRELLSFYKFPGDEIPIIRGSALSALQGTNDEIGKNAILKLMDAVDEYIPDPVRQLDKSFLMPIEDVFSIQGRGTVVTGRVEQGTIKTGEDVEILGLTPSGPLKTTVTGVEMFKKILDHGEAGDNVGLLLRGLKRGDVQRGQVVCKPGTVKTYQKFEAEIYVLTKDEGGRHTAFLSNYSPQFYFRTADVTGKVVLPDGVEMVMPGDNVTAGFELISPVPLEPGQRFALREGGRTVGAGVVSKVYS

SEQ ID NO: 158979 - protein, 444 aa, Oryza sativa
  Clone ID: PAT_MRT4530_58400C.1.pep
MADDGGDGPPCDSDYISNLPENVLVTILSLLRLDEAARSTVLSTRWRHLFPYTLLDFRAYALGRDVVAAVNTILAAHPAARVRSFRTGLLYFPPEDDPSVEAWLRDLAGRGVKELSLSFRERWQKIPASLFACTSLKRLHASSCTFPDATQAPVPLAALAEIDLFGVNISEESLGALLSRCTALEHLRMRSMGWCHRIHVRSESLKTLCGCGDFDELLIEHAPNLEQVYGNYMYMRSTHLKVAHAPKLEFLGYLGMSFDTIEIGQSVFTEDDFDIKTLMPSLKTLAIELSYTSEGYINWFMQLLKLFPCLETLYIRSDTWSKVRAAAPGSWDVLRSVPCIDNHLERVVFEVYRGHEWQREMAKFLHGRARFLKAMEFHCQGDKGCSELLGEEWVREQQELLCLDSRASLDARFLFFKGALVNNHHDVSHHEWYKRKYYHYLYNV

SEQ ID NO: 158980 - protein, 140 aa, Oryza sativa
  Clone ID: PAT_MRT4530_58401C.1.pep
VYENKLRRAKADENIGIKLVHCNSAATGSPASSSPSPAAVVAAPMLPPDHDAATSAMASSEAPAPQEQRRRPAIVVSSSSSSAAAAGGGIELPSMCGCDLATTGLLASSSLLPPAQPAAVMSSSSSVAAAEASSAVTTTG

SEQ ID NO: 158981 - protein, 289 aa, Oryza sativa
  Clone ID: PAT_MRT4530_58402C.1.pep
MTAAAMAPSPPKPVSPRQISLGDLRAVSMLGRSVKGVVFHVVPTMAGEVEGVVSSSMALKAISRETEQHKKMGSGGEDRHRRIWFEWDVLMSLSHPLLPSLRGVLATDVVVGPRRWLQAKLVAAKNRHATTVAEIPPLKSTVELTNDAIVARMEAGKKRAVVEVLHRRIDRERDDPRRLRSEVALEQMVLVRHQAARALVSDVDVDVDAAHHNVVAVPTRRPEELRGGVEGEERTAEFHVEEIVAAIRLAEAHARKQEAAEQWHGRDLEVVMFCNKICILIFVAKSCSI

SEQ ID NO: 158982 - protein, 122 aa, Oryza sativa
  Clone ID: PAT_MRT4530_58403C.1.pep
APILRAAGASAGQGNHAEPAMSSSSSSPLASPSAVAPSPPPGWFRQIAERPPPLSRPADRGAGEDQPPPDPLRPSDPPRRRPLRLPLHPAVVRSGRRPCRSASLESERRGRERIERDREMGG

SEQ ID NO: 158983 - protein, 101 aa, Oryza sativa
  unsure (1)..(101): unsure at all Xaa locations
  Clone ID: PAT_MRT4530_58404C.1.pep
VPTMAGEVEGVVSSSMALKAISRETEQHKKMGSXGEDRHRRIWFEWDVLMSLSHPLLPSLRGVLATDVVVGLVIDRYGGRDLNSLXRRQTKKMASGQAGGG

SEQ ID NO: 158984 - protein, 47 aa, Oryza sativa
  unsure (1)..(47): unsure at all Xaa locations
  Clone ID: PAT_MRT4530_58405C.1.pep
PPLFLSLFACVCKRALEGNVFMMRFGVIVYYKPQIMKVVGFFFXXXV

SEQ ID NO: 158985 - protein, 55 aa, Oryza sativa
  unsure (1)..(55): unsure at all Xaa locations
  Clone ID: PAT_MRT4530_58406C.1.pep
GAAAASRRVVEAITAGCCAVDIAVSFLXRHHRAPCRATGLASISSCXRRRSSRQP

SEQ ID NO: 158986 - protein, 48 aa, Oryza sativa
  Clone ID: PAT_MRT4530_58407C.1.pep
LVVINRKQYKVTVHVFVEPHKVPNPTLGKPFSPEEEDARSASSSGQAG

SEQ ID NO: 158987 - protein, 131 aa, Oryza sativa
  unsure (1)..(131): unsure at all Xaa locations
  Clone ID: PAT_MRT4530_58408C.1.pep
SQNIQTHVLFPSLAETLKLIEADMLXEELLISGIHFIFFSNGGGGGFIYIEQGLITSTEGVHFTHTTLLTRITQPVQNGHVWRPXGFHDKAFRKPTQVHHMPTRGVPDQHQVRSQTILCHETRGFSSTPPY

SEQ ID NO: 158988 - protein, 120 aa, Oryza sativa
  unsure (1)..(120): unsure at all Xaa locations
  Clone ID: PAT_MRT4530_58409C.1.pep
VDTHEXNXXPRXXXXHXWEXXXXKAPDXFDNXHARGILXPREXGXDPSSXPRXGREEXLDFXAFPEIGXXVLXGYXRXXXXYXXXXGXLNGQXXINXXVXXHXXQTAVFSVXIFXXNPCY

SEQ ID NO: 158989 - protein, 187 aa, Oryza sativa
  Clone ID: PAT_MRT4530_5840C.1.pep
HSLLGEYVSKLEKEGNDLCYQLCHLRDIPRLAENNSRYLETLAEENNSRGLLSTSLQYQPPSTCKCTGEEDISTLRDIKLGESESMQENLFPGLEDQQNIQKESEGREIVSQDGLLEEHQDVPSNRLLEKHWDEEMQESYPMENGGREYQIIDALSFDQSLSEEKQHQQVMCGMAIQISSLKRWCAV

SEQ ID NO: 158990 - protein, 58 aa, Oryza sativa
  Clone ID: PAT_MRT4530_58410C.1.pep
AGSGSANPTTPSPSRPPLFPPLPSRRPSSTSRAPSPPRRPPPASPTAQPGPGPRRPAR

SEQ ID NO: 158991 - protein, 109 aa, Oryza sativa
  unsure (1)..(109): unsure at all Xaa locations
  Clone ID: PAT_MRT4530_58411C.1.pep
QVLVAAPLGLLPARLHGPVFLHMPQPRPEHLMHLLPGQGGVEHSHRHMRSGEGHRRCKKRCLAPPSWRPRPLARLLARRRPLXPPGRPVLRFSRWPLRGXLXXAXXXXX

SEQ ID NO: 158992 - protein, 119 aa, Oryza sativa
  unsure (1)..(119): unsure at all Xaa locations
  Clone ID: PAT_MRT4530_58412C.1.pep
XSSFIYGVWKRGRSRIDCYLKKWNGSDYPLASALTLLTTPTLCLLRFLIHVLMSISICMILILQSIYPLVLPIELLSMFFPFREMVAVPNAELAAVPNDQCLWGFPSLQLSXFHRCVGH

SEQ ID NO: 158993 - protein, 72 aa, Oryza sativa
  Clone ID: PAT_MRT4530_58413C.1.pep
TLPPLSKWKFHRNNVTSCARSLVEHSLHSFSNQPCRMTSCSCSGNGTVLSGITVLSPCPSRPAVEKRCSPIL

SEQ ID NO: 158994 - protein, 486 aa, Oryza sativa
  Clone ID: PAT_MRT4530_58414C.1.pep
MGLCSSSSARRDAGTPGGGNGAGNKDNAGRKGIVACGKRTDFGYDKDFEARYALGKLLGHGQFGYTFAAVDRRSSERVAVKRIDKNKMVLPVAVEDMIIMCILLWSKSWKNSQMFMKSVEVYLSITIKCLSELFMALAKLKEGTVQANEDLTLLHVFDRLCEGGELLDRILAKKDSRYSEKDAAVVVRQMLKVAAECHLHGLVHRDMKPENFLFKSTKEDSSLKATDFGLSDFIRPGLCVLKNKPDFRRKPWPNITPCAKDFVQKLLVKDPRARLTAAQALSHEWVREGGQASDIPLDISVLHNMRQFVKYSRFKQFALRALASTLNAEELSDLRDQFNAIDVDKNGTISLEELKQALAKDVPWRLKGPRVLEIVEAIDSNTDGLVDFEEFVAATLHVHQLVEHDTEKWKSLSQAAFDKFDVDGDGYITSDELRMQTGLKGSIDPLLEEADIDRDGKISLDEFRRLLKTASMSSRNVQTPRSVHRS

SEQ ID NO: 158995 - protein, 145 aa, Oryza sativa
  Clone ID: PAT_MRT4530_58415C.1.pep
HHIYIYIYICIYIYICIYIYICIYICIYIYICIYIYICIYIYIYMYICMYVCILYICICIYIYICIYIYICICIYIYIYIYIYIYIYTYTYIYIYICMYMHSCVFPTTQSNGHSYIFPVFYNPLFYTCILVRILCFSYSSVFLFL

SEQ ID NO: 158996 - protein, 512 aa, Oryza sativa
  Clone ID: PAT_MRT4530_58416C.1.pep
MGLCSSSSARRDAGTPGGGNGAGNKDNAGRKGIVACGKRTDFGYDKDFEARYALGKLLGHGQFGYTFAAVDRRSSERVAVKRIDKNKMVLPVAVEDVKREVKILKALQGHENVVHFYNAFEDDNYVYIVMELCEGGELLDRILAKKDSRYSEKDAAVVVRQMLKVAAECHLHGLVHRDMKPENFLFKSTKEDSSLKATDFGLSDFIRPGKHFRDIVGSAYYVAPEVLKRKSGPESDVWSIGVITYILLCGRRPFWDKTEDGIFKEVLKNKPDFRRKPWPNITPCAKDFVQKLLVKDPRARLTAAQALSHEWVREGGQASDIPLDISVLHNMRQFVKYSRFKQFALRALASTLNAEELSDLRDQFNAIDVDKNGTISLEELKQALAKDVPWRLKGPRVLEIVEAIDSNTDGLVDFEEFVAATLHVHQLVEHDTEKWKSLSQAAFDKFDVDGDGYITSDELRMQTGLKGSIDPLLEEADIDRDGKISLDEFRRLLKTASMSSRNVQTPRSVHRS

SEQ ID NO: 158997 - protein, 96 aa, Oryza sativa
  Clone ID: PAT_MRT4530_58417C.1.pep
LEQRSHNWKKDHEAAIYSSTHLLSVLAVQFKRCLHGYSLFLSSNWKYWLVGVADTTFRVAVQNQYGFGCSLTSLKPGLSLTHHDIIFLMFKQLPPK

SEQ ID NO: 158998 - protein, 96 aa, Oryza sativa
  Clone ID: PAT_MRT4530_58418C.1.pep
MTPEEIAEYKKGLHTIKLLTMKQPKGSTLYGYYTCKFLSVNVRYRTNAEDLPRIKHRTSFDDKGIKNMQQDLCHFIHCECCHKDVRMDGSSTQKTA

SEQ ID NO: 158999 - protein, 531 aa, Oryza sativa
  Clone ID: PAT_MRT4530_58419C.1.pep
MADTGGRPEVSLATVRSPGHPAASTTAAAAADLGHADTGQEKPTVESAQPANGAAPMGECGTEYRGLPDGDAGGPMPSSARTVSMIPLIFLIFYEVSGGPFGIEDSVGAAGPLLAIIGFLVLPVIWSIPEALITAELGAMFPENGGYVVWVASALGPYWGFQQGWMKWLSGVIDNALYPVLFLDYLKSGVPALGGGAPRAFAVVGLTAVLTLLSYRGLTVVGWVAICLGVFSLLPFFVMGLIALPRLRPARWLVIDLHNVDWNLYLNTLFWNLNYWDSISTLAGEVKNPGKTLPKALFYAVIFVVVAYLYPLLAGTGAVPLDRGQWTDGYFADIAKLLGGAWLMWWVQSAAALSNMGMFVAEMSSDSYQLLGMAERGMLPSFFAARSRYGTPLAGILFSASGVLLLSMMSFQEIVAAENFLYCFGMLLEFVAFILHRVRRPDAARPYRVPLGTAGCVAMLVPPTALIAVVLALSTLKVAVVSLGAVAMGLVLQPALRFVEKKRWLRFSVNPDLPEIGVIRPPAAPDEPLVP

SEQ ID NO: 159000 - protein, 198 aa, Oryza sativa
  unsure (1)..(198): unsure at all Xaa locations
  Clone ID: PAT_MRT4530_5841C.1.pep
MESVEGAGGGGGDVGGGEGVGCEVRMAMRHGGLGQXPRAWETAASGRRGIVWWRVRRTAWRRVAQPMATEAGSAREARATEKEAGLAREAQPMEGGWIGARGAVGGGGGDLGGAAGGCGAVFGAQRLVDGGRRCRGPTCRQSLCGGGXICASAVDSQVWRSVMLSGDRSGVSLLLGLCVGDVAADEAEVTPDEDGSSI

SEQ ID NO: 159001 - protein, 266 aa, Oryza sativa
  unsure (1)..(266): unsure at all Xaa locations
  Clone ID: PAT_MRT4530_58420C.1.pep
YGITLLSGPNLYTVYRWEKMDINFVGAWCLMQYMDAXKTMVPIGYLDPTRICQSQHTVTLSENTEQLKNMTPEEIAEYKKGLHTIKLLTMVQYIRRAFLKFQRKRVLMAVYNFNNHEICFLIYPKYRTVTVLDPLDYNHMTYTQFLIILQYAYNYYKIKSGEQLXIRKKLLVHKQPKGSTLYGYYTCKFLSVNVRYRTNAEDLPRIKHRTSFDDKGIKNMQQDLCHFIHCECCHKDVRMDXFFNTEDSLATSDKYKSLLEWNNAMP

SEQ ID NO: 159002 - protein, 168 aa, Oryza sativa
  unsure (1)..(168): unsure at all Xaa locations
  Clone ID: PAT_MRT4530_58421C.1.pep
ETKGVSDLIWECRAPLKVKLFAWLLVRNRLSTKQNLLKKKIVQSAACIICNHGAETANHLCFTCPFAISFWRAIAIHPPIQQVQMLHQLKPAXLPVKHFQVFXLLCFWALXNHRHDVVFRGCSPSIVSCLQRCVSEVALRAENLKIEDRHVISVWKQIYSSHLQTLNL

SEQ ID NO: 159003 - protein, 58 aa, Oryza sativa
  Clone ID: PAT_MRT4530_58422C.1.pep
PMRKSSFCLGGLHAFGRKPEPVPYYMEYAQFMGANKLMTVRCAFITSVEIKYKSSLSR

SEQ ID NO: 159004 - protein, 202 aa, Oryza sativa
  Clone ID: PAT_MRT4530_58423C.1.pep
MCIIWNNMQKEKKSNLADDGARSTVADLASPRHGGGGSGLPAAQRQRIWPPCEPPPAPERRRARARLPPPLPTRLPSPPHAHLASSSSRLNRRRRLWGGRSWLVRMDGAGGGGEEREERREGEKGGRGAGERGRVGGQFLRGWAGNRPDQDASTTATDTNEPSRPPPLPHVVRAVSRHVALPRCLSLCSRRGGGGGGGLIVP

SEQ ID NO: 159005 - protein, 368 aa, Oryza sativa
  Clone ID: PAT_MRT4530_58424C.1.pep
MPTATGSRTPVRSASAVIAGTESGQHHLKIDGYSRIKDELPTGSDIKSRSFRAGGHSWHLRYYPNGFNSDCAECISIFLQLDYNVMKGVKAQYKFSLLDRARKPSYSRSSGKADVFLNTGWGYRTYIERGLLESSEYLRDDCLTIVCDFTVFKDLRTEDIDVDDAMPPPQSPPTVVVPPSDLHRHLGGLLATGEGADVTFEVEGKTFAAHRWVLAARSPVFRVALFGATTGGADDVVRVNIDAMKVQDFEALLHYMYTDSLPEMKGGEAAAMLPDLVAAANRYKMERLRLVCEHKLCEYVNGRTVVAMLAFAGEHQCNGLKEKCLRFLDDPVKLRLIVQAEGVENLSKSYPSILKDVIAKFVATPVDS

SEQ ID NO: 159006 - protein, 188 aa, Oryza sativa
  unsure (1)..(188): unsure at all Xaa locations
  Clone ID: PAT_MRT4530_58425C.1.pep
MATFRDHLAVIAEALCAIAADMNAAARALDPSTVISLACAAFTVAIVLVCYADICGRLATLHSQTQTPAGEDEDNNATPPEAPAASXSLKDRKRSSNGTDTSFFSESSSSSSFSSTEXSRSSSSSSSSESSXSSSSDDDLARRQMQIVGWFCSEGSTGEGSVDDDDYDAGDGDGAADAEAGMKEAVVA

SEQ ID NO: 159007 - protein, 61 aa, Oryza sativa
  unsure (1)..(61): unsure at all Xaa locations
  Clone ID: PAT_MRT4530_58426C.1.pep
MADIALLVVEEFEKMXXKXRQQXXQQGRISEEVPAGDAAAASRAGEWGSWAPAAVRTRVAX

SEQ ID NO: 159008 - protein, 156 aa, Oryza sativa
  unsure (1)..(156): unsure at all Xaa locations
  Clone ID: PAT_MRT4530_58427C.1.pep
MEDITRQEKPTGSGIHDSLSLXPVFDHSLRLKAKAAPIRSAPNCTVVAAQSVDLSSASSEKADPSPASSGELDPSPVGSVEGQGGGAAEREWRRRWVVEEGEQQMRGEXNQEERAEKGRRRIHREQLSRRRNGKESTTTRRRRRTAARPGCCGRDL

SEQ ID NO: 159009 - protein, 85 aa, Oryza sativa
  Clone ID: PAT_MRT4530_58428C.1.pep
SVSFSVAENLFSGLVPSCFENFTASIFAGNRRLCGAPLGNCRLRRVNDETSIGAAVGFVVGFVLAFYFPHWFVFSTSLHSYIFRI

SEQ ID NO: 159010 - protein, 560 aa, Oryza sativa
  Clone ID: PAT_MRT4530_58429C.1.pep
MGDEAAQAVELMEHMLKLKEQGLQGEQITRHFIKSRLAPIKERSRTAFEFDGKHDPNHEDSDSLDFKIMKERMYKIFSNAIVVSYTHLLPVVPYNAFNPPPPSCLPVESTDSGGYPVQEFALVKSDPPIAQRRSPRHQTVQGSGGPKIRSEPQPKTSNPAGQSDSRKRKLVLSDDEGDNGKKSGDEESPRKPPKHAAPKKKTSSRPMPKIRKSSRKPSDIDPSRKDSNPANTETSSSKETGPTVEGHPRPGQEIPEVEAQADSSQGPDAGSDPRPGSPAKAQESTRPRSGIITGPLVGDEEEIPRIRAAEDSRPPILVKWWNDDLRPEGIIINRQKEDEEVCQLKKALGEATRIVNIIDKVIMQRIHLRNEAKTITLKKLVPHLGTLEAVRDQLSEVKELARKTEHDLWDRIAQLQESNFELSGSSKVQAAKISRLEKQIQALENEKAELAKQRDSPLKDVEVFDKLRVAPDTYFKNIKEAGSMGASLALAMTKSLYPKIDIDAVDGFADGTSEEAALDLINDAQKAADKIAVDVVERFQDTDLRQIGPGSSDDEKTDTD

SEQ ID NO: 159011 - protein, 147 aa, Oryza sativa
  unsure (1)..(147): unsure at all Xaa locations
  Clone ID: PAT_MRT4530_5842C.1.pep
RSFGRARASPRASFAGATSATSSSHFRSLSWNVFPXXSASXXCXAIGARLAXPRAHXAGLAAPVYXMGCXLHLXPLGALPAVPCPERSTALQAHISXXGRPXPVPLRRSSPAKNPSPKEGKPQGPTPCRLNFSPKIPPQNSPPNPGP

SEQ ID NO: 159012 - protein, 125 aa, Oryza sativa
  Clone ID: PAT_MRT4530_58430C.1.pep
MENSSSKAHGFRIHLIFSIYWIYKNPEAYGLHVLQGHMFRSIPVVPGFCYVIELPNEILPPATIGFCCTTELAVNVPPPATTSFCSATELVTVVRPPATGHRWLLLCDRTRRLVFAFCHHRILLH

SEQ ID NO: 159013 - protein, 286 aa, Oryza sativa
  Clone ID: PAT_MRT4530_58431C.1.pep
MTSRTHWFSWPRCPSSPARTTPSSGGDDAKGKGKMPEFAEEDVLTGDEEDVLTGEDVFLGKAKKVEFAGGEDDGDNDINWQDVLLLWPSSSSSPWELTKTANLPNQWLDDESSFVADLTFSFEGHGFWADLLCGVLFCSCDDLLSDKVDRVDFSFINLPMGYQADVRYTGQVAAPEVYRTMGYAGGSIRFISIDGFLEYINPGDRYVTLWRLLLKSNTWVKEYEISLKELWNQQEFCNANLPMSMTPMYPILSSLEEHIIYFMLGEFNQDRDGIAFPVGAYYLLQV

SEQ ID NO: 159014 - protein, 383 aa, Oryza sativa
  Clone ID: PAT_MRT4530_58432C.1.pep
MGKKGDRQRELKIWFLAAAGSSCFSITSLMLQFNLIREIISADLQEGAQGFFFDMSWAAIENDPGIFTELLQQMQLKGLQVDELYSLDLDALNDLQPVYGLIVLYKWQPPEKDERPIKDPIPNLFFAKQIINNACATQAIVSVLLNSPGITLSEELKKLKEFAKDLPPDLKGLAIVNSESIRLASNSFARPEVPEEQKSSVKDDDVYHFISYVPVDGVLYELDGLKEGPISLGKCPGGVGDIGWLRMVQPVIQERIDRFSQNEIRFSVMAILKNRREKFTLELKELQRKRENLLAQMGDPSANRHAPSVEHSLAEVAAHIEAVTEKIIMEEEKWKKWKTENIRRKHNYVPFLFNFLKILEERQQLKPLIEKAKQKSHSSANPR

SEQ ID NO: 159015 - protein, 132 aa, Oryza sativa
  Clone ID: PAT_MRT4530_58433C.1.pep
MVIVTVSVVLAATAVGGDDVVWMLKLSRTLELLGPEETSETILAFSNFSKDGCHNKDIFCVKAVSLPQFHFPFIVVHIAKGPTLISSYHFIGLIIKYVEIILGDPGDGSNRDVSADKTKTNLHDLVSTNLKL

SEQ ID NO: 159016 - protein, 192 aa, Oryza sativa
  Clone ID: PAT_MRT4530_58434C.1.pep
MASPASDPAIAAPHLEAEEPAVVTVAAAAAEEAVVVAADVEKEGEGEDEEEEEEEGECGFCLFMKGGGCKEAFVAWEECVEAAGKEEGSDMVERCFEVTANLKRCMDAHADYYAPVLRAEQAVNDHADAAIAADKAKEGGEKKLDAVAQEAASAADEKKQQVEEKSSSSSSSPTTTIDERKEKEVVTEKADS

SEQ ID NO: 159017 - protein, 154 aa, Oryza sativa
  Clone ID: PAT_MRT4530_58435C.1.pep
MVKDKFAHGPTCQSHIWLSTFLFLLLGRLAAWTEDKERRAHEEGEGIVSRGGVGQPTASTGLEGEGPPWADSGTDRDDREARLAEDGSSGMRRVPRGPTVGRIEMIGRLDWRKMAAERHAGGSTGERWQQRHASMAGIDGVRVSVETTLGREGR

SEQ ID NO: 159018 - protein, 171 aa, Oryza sativa
  unsure (1)..(171): unsure at all Xaa locations
  Clone ID: PAT_MRT4530_58436C.1.pep
TXGDTFLGGEDFDGALLDYLVSEFKKSDNIDLSKDKLALQRLREAAEKAKVELFSTMQTEINLPFITADATGAKHFNITLTRSKFESLVESLIERTRIPCVNCLKDAGVSAKDIDEXVLLVGGXTRVPKVQDIVSQIFNKTPSKGVNPCEAVCHGELPFKGGNLXRGXCKG

SEQ ID NO: 159019 - protein, 472 aa, Oryza sativa
  Clone ID: PAT_MRT4530_58437C.1.pep
MSTSASPSVAPSAEYAEHLSNLVAVPSLSNEHQYFLGPIGNPDPHEFISAETNRIPFRLANPNIGHWKNTFKSWPSIEKSAPEKSWPVWYKRVSASKQAHWDEIGIGQALALTIANSAKDKPLMAAAAYFWSNTLNALLFNQGPMTPTLLDITMITGLDVTSLANPMSLNTKNTFEFKTKSIGGWSGYIAAYKGKGPVTPREHVVFLLIWLEKFLFCGSSCGPTTNWQFPAEALETKRQFPLGKILLGYLYQMLNNASAKIAVGSVVGVGGPWWLLQTWLNLVAMKVVNRPTAPAILVLADLFSFDIKDYLDEETEEDTTSKALAPLSDDIPDDLANIITPAVYLEQHQFKLERAKQRLADRREHKDIEATIQANRQLVHEEKSKLDQLSKVPIRSNIDRLEAQKIDLLAQLQECNAELDLEHKKLADLPKAVEEQKAKLRSAIRNVADMTKSLTVIPGTDAQDAQAIEEVE

SEQ ID NO: 159020 - protein, 162 aa, Oryza sativa
  unsure (1)..(162): unsure at all Xaa locations
  Clone ID: PAT_MRT4530_58438C.1.pep
GGKKTPPPKKTKGANRGKPPPQKFTGGPRGQPTKNKTQGHLGGGPXKAQHGNPGYHKKRGPRKKGETPTGPVFKKKKKGGGPGPTPQPHKTGGGKNPKGWQGGYGAQNAPLKKLAKGGGGGGFTGGQGPKGGRGGVSKPGEFTLEKKKGPPKGRLGTKMAGE

SEQ ID NO: 159021 - protein, 86 aa, Oryza sativa
  Clone ID: PAT_MRT4530_58439C.1.pep
LTAHNTASDDGVANALKLNRCITPDLSQMHPLKCQISAENLMRGRLRRLGRHNVALDGIWHNIGSIPVIIPLWAKLLLMCSIDTPH

SEQ ID NO: 159022 - protein, 92 aa, Oryza sativa
  unsure (1)..(92): unsure at all Xaa locations
  Clone ID: PAT_MRT4530_5843C.1.pep
FFGRRGRGGGLFWRPESVFKKVFGDLTVRDAAKPLLVPCCDXATAAPFLFFFSSLAFLWWWVPFLPFLLLPPFSLFPPLFVPSRFPPFGILR

SEQ ID NO: 159023 - protein, 453 aa, Oryza sativa
  Clone ID: PAT_MRT4530_58440C.1.pep
MDILRLLAPAPALPLMLHGGAATGKTRALLLALRYLRPSQRLVYAALRSLPSPRALFASLLSQLSATPFSTSSRHRVPDKPSDFVAALRDALNGIVSQGEVVYLVFDNLEVVRSWDKGGQLLPLLLRLHDLLQLPQVVLVYVSSATPDAYYSMTGSVEPNYVYFPDYTVDEVRDILMHDHPNPKLYSSFLSVALKPLFRVTRRVDELSAVLEPLFRRYCEPLGDLKAVPDEGMKRRLFEHVQSHLAVALNETFNVPMRASMDEIKDGGSAGKGSAKRQFAGKDGLSSELEFHMSVSAKYLLLSAFLASRNPATLDAALFDSTGGLDNRKRKRKSSQASMHMKDTIVEEMLMKGPGTFPLERLLAIFQCITSVSEDILDEIDCPGNMASESGTTGLMSDVLLQLSTLCNSNFLSKSRSCPLEGSARYRSNIDEDLALKVARSVNFPLSKYMYRR

SEQ ID NO: 159024 - protein, 694 aa, Oryza sativa
  unsure (1)..(694): unsure at all Xaa locations
  Clone ID: PAT_MRT4530_58441C.1.pep
MAAAALYKDAAAPVEARVRDLLGRMTLREKAAQMAQIERTVASPRAIAELGAGSVLNGGGSAPLPRASAADWARMVDGMQRHALSSRLAVPILYGTDAVHGHNNVYGATVFPHNVGLGATRDAEFARKIGEATALEVRATGIHWTFAPCVAVCRDPRWGRCYECYSEDTEVVRSLTXIVSAINARDASDDPXFPFGYGLKMFRGDSCAKHFVGDGGTDKGINEGNTICSLEDLEGIHIRPYPDCISQGVATVMASYTQWNGEPLHASRYLLTDVLKGKLGFKGFVVSDWEGIDRLCEPRGSDYRYCIAQSVNAGMDMIMIPFRFEKFLEDLVFLVEAGEIPMSRIDDAVERILRVKFISGVFEHPFSDPSLADIIGCKEHRLLAREAVRKSLVLLKNGKNQKEPFLPLAKNVKRILVAGTHSDNIGYQCGGWTIAWNGDSGRITIGTTILEAIKESVGAETEVVYEECPTEATVETGEFSYAVVVVGEVPYAEWLGDRTDLSIPFNGSDLISRIASKVPTLVVVISGRPLVVEPQVLDKVDALVAAWLPGSEGMGVTDCLFGDHDFLGTLPVTWFRSTDQLPINARDASDDPLFPFGYGLKMFRGRSTINNRIGQAMIGPFVVSLKSVYQKLKLQVKSWPLLAYHYCCFMENVISNSAPWNDTIAGDRRHRSYLVNILKFDSGSCCDIDGLYLE

SEQ ID NO: 159025 - protein, 42 aa, Oryza sativa
  Clone ID: PAT_MRT4530_58442C.1.pep
DPKERAPLRSGLGAPDQASLNLNWGSVSCHEGVTADKLMRIR

SEQ ID NO: 159026 - protein, 71 aa, Oryza sativa
  unsure (1)..(71): unsure at all Xaa locations
  Clone ID: PAT_MRT4530_58443C.1.pep
GYYDGRFCTMWKLPMFGGTEATSFLNDLQXAKNAYPDTFLRIIGFDNVRQMQLIXSFIVYKPPGCEELCGN

SEQ ID NO: 159027 - protein, 112 aa, Oryza sativa
  Clone ID: PAT_MRT4530_58444C.1.pep
MRVPGARAHEGKSTYESQKEWRDLTRVHVVSRDVLSFLGIPTGASCARQLGNRETGLGGGEWATLLVVYALGGSSIRSSRAGEKAVETTGGDMSRLTVWTPNDDICQRKAVR

SEQ ID NO: 159028 - protein, 758 aa, Oryza sativa
  Clone ID: PAT_MRT4530_58445C.1.pep
MEQISLEHRYKECRPRRNNSCPTKTLVGKDQLKELEHRRPSPSVIAKLMGLDVLPPAYVAHNQHQEFKDVFEVSEEPQEAVTKERSHNFPKGLPSLKRSALKLRKLMPSKSPYGDETFDNNVVNQDGFDRLNSLEINNPLFEKHPYDVNCSPNYRYEKDSTSSTFRKYPVGLGNSSLKEIVVLELGLGEVQHSGNAFSTPEPSDVNKNFRRKMKQAEFSTTNRGSQNLLGTKDINVPRIKGERHLTSNAVDSLLKRQDSSLDQYNTVDTDNTGSSQKCVSSEVNSRKSNRSSSNSSPWKIRRKYEEGAIGSKTLAEMFALSDSERLKRDSDSHVQIQDNKLNRGNNNDKEGCFIVLPKHAPRLPPHSLLDKNSSCERSPHDIFFSNTSISHNSGQFHFDSFWDKPTRQQISSPTQDDLRNASCARYHTLEQHRSSFPSYDNTRNNSWHLTDDFSTFACINEKVLFTTDEDLLRKPTETVHSSFGSRLSGEQKVSASPFHCGVYEAITISDHTCAAKSRRSLKEVDRPSPVSILEPPTDEDSCCSGYLKNDSQVMPSIDKQIYGCELRYEQEVSLSSDNDNDSSDQSLEAFEVEEEKEFSYLLDILISSGVIVADSQLLFKSWQSSGYLVGPHVFDKLEGKYSKVATWPRPQRRLLFDLANSVLSEILAPCIDTHPWAKLSRNCCPVWGPEGPVEVVWQTMVRQQEELAVAHPDDKILDPEWLEFGEGINMVGWHIARMLHGDLLDDVILEFLSGFVAS

SEQ ID NO: 159029 - protein, 64 aa, Oryza sativa
  Clone ID: PAT_MRT4530_58446C.1.pep
SDGLPRQRLHEDLHPGHSSSAAAAAAAAPPICCRNPPLGFYGCEVFRSPREAAAAGAGCFASSC

SEQ ID NO: 159030 - protein, 64 aa, Oryza sativa
  Clone ID: PAT_MRT4530_58447C.1.pep
LACFLKEGVVHGTLCALLDLWKISVLVIMGMLPFPFLIANCMYQQDIWSFVNYSLLTLKSFALP

SEQ ID NO: 159031 - protein, 377 aa, Oryza sativa
  unsure (1)..(377): unsure at all Xaa locations
  Clone ID: PAT_MRT4530_58448C.1.pep
MATAAATQSQPVRVVLRVRPHLPSEANSAEAPCVGLLGSHPGGEVTVQLKDQYTSRNECYKLDAFFGQESRVCEIFDQEVSAVIPGIFEGTNATVFAYGATGSGKTYTMQGTEDLPGLMXSTVLALCTGTWCSVEISYYEVYMERCYDLLEPKAREIMVLDDKDGNLQLKGLAWVPVRSLEEFHEIYSIGVQRRKVAHTGLNDVSSRSHAVLSIRITTDVVKGKLNLITSXDLAGNEDNRRTCNEGIRLQESAKINQSLFALSNVISALNKKEPRIPYRESKLTRILQDSLGGNSHAVMIACLNPVEYQEAVHTVSLAARSRHVTNHMSSASKXKDKVDMEAKLRAWLESKGKTKSIQRMDGLLSPNAIKTPLSMSQ

SEQ ID NO: 159032 - protein, 48 aa, Oryza sativa
  Clone ID: PAT_MRT4530_58449C.1.pep
LNNSLVRVQIKTLEHSPSVRRRTHHAHFFLLATYIAQHVRLIVRLIRD

SEQ ID NO: 159033 - protein, 271 aa, Oryza sativa
  Clone ID: PAT_MRT4530_5844C.1.pep
MQRLASSRRLLQAALAPVRAQSSLSAAAAAAAPAPENAFAAAPKMPPFDYTPPPYDGPRAEEISRKRAEFLSPSLFHFYDRPYLFDEDGRRYLDAFGGIATVCCGHCHPDVVEAMVNQAKRIQHSTVLYLNHAIADFAEALAAKMPGDLKVVFFTNSGTEANELALMIARLYTGCHDIISLRNGYHGNAAGTMGATAQCNWKFNVVQTGVHHALNPDPYRGAFGSDGEKYARDVQEIIDFGTTGRVGGFISEAIQGVGGIVELAPGYLPAV

SEQ ID NO: 159034 - protein, 524 aa, Oryza sativa
  Clone ID: PAT_MRT4530_58450C.1.pep
MEVILLPLVVIITSTMLLLLIISTAKKRHHGTANLPLPPAPPSVPVVGPLLWLVRARSNLEPAIRELHRRHGPILSLTFLSPRAAIFVSSREVTHRALVQRGHTFASRPPAIAPFAVLTSGQCTVSSAPYGPLWRSLRRNLTSGVLGHGSRAPLYAPARRWALHLLTSDLAAASGNTGGGVAVAVVDCLQFAMFSLLTYMCFGKRLDRRGVREIEAVQRELFSSYISFQVFAFCPTVTKRLFFRRWQKVLSIRRRQEDIFLPLIEERRKRIKISSMDNDGSMVCCYVDTIISHKLPKEAGDRRLTDGELVSLCTEFLTASVDTIVTALQWIMARVVEQPEIQAKLLDEINRVVSSDKEHVDEEDIKSMAYLKALVLEGLRRHPPAHFLLSHAAVEETSLDGHRIPAGRSVNFSVADVAHDENVWSRPEEFLPERFLDGGEGAGTDLTGSREIKMMPFGVGRRICPGLGLALLQLEYFVANMVREFEWGMVDGDCGGGINLAERPEFTVIMEQPLRALVVPRRRE

SEQ ID NO: 159035 - protein, 1724 aa, Oryza sativa
  unsure (1)..(1724): unsure at all Xaa locations
  Clone ID: PAT_MRT4530_58451C.1.pep
MGDHSDSDSSPKSSSSSSASSSALRRSPPRVRVQSDEGGSSDGVLVELPSQEARSPGADPDGGVLVNMPADDATSGETFEDAPDDLGGSRSARSLDESIAVIDFPDESSLAAECRKYKEEREVFAREAVALRGMLRELVGEDASGSLPAEDSDERASGSLTPLHSMLDDCSRLVLELNSVVRAREQEIESLRGRSAEVEVSREGSEQAIGRIVASVDAVVGQYDVSSEGADEEGISLVERKTSLLAERHRQILLDIEQLEQVLAEVQPDFGATGQCDHATILGIVSEELVNSKRNKADFLQKVNTFGEENKNLAEELQSVKAALDVVNAEAKKAKAEFEQVEHKLSTTKEKLSMAVTKGKSLVQHRDSLKQALAEKTAQLDGCMTELQQKSDAMQAAESRVEELKILLDEKXDMTEVISKDQLEALVEKINKLNTSSAESHLQRELAMSSSPIEKLFSLIDEVYALRHEVVXLRYENEDLHLNLESHPREMEQLKEASRNSDSNRRELESKSSELLEISVSMDRIQIHWLLNSLYQAKEDAARMQDESSAMLHKLASHESKLNSMHEEVDRLTIALLEEKQEKDILANEHAELMSLYHAASDQLSVVSSRYTELVKAFAEVSDVQLEDHEILDGGKLVEQCLANIQGRAKSSPVECESFEKLQTQVYTLDQELTLCKIILEEDKADRSEMMRLSGELQRMVQETDALKNEKDSLQKELERVEEKSSLLREKLSMAVKKGKGLVQEREGLKQVLDEKKSDIEKLKHALDEKNAELENLKQTLDGNNSVLEKLKQAWDELNSESENIKQALDVKNSEVDKLKHALDENNSEIENLKHTLNEKNSETDKLKQDIDATYMEMENLKYEIASRESAITDLREQVEHLSSQVTHSQKLQLDIISLIDEKGKVESMLAEAKVSSGALVELISSISLPFDSPCEDPIDKIGQIAQYIKESQVTKSSVENELHKVNEQVTSQASQLADALSSLKVLEDELSNSKEYISSISEEKRQMQLHTAAVEEELEKTNEELAIYASKFEDANVTINSLQDALSQARVNISVLDAEKKEADAKHETETSALNAKLAKCLEELDRSHGNLQSHSTEHDVYLEKLSTLVMDNSLLSLMTEEFGKKVSTLREMALIVRSMREQLAAKGFQIDPTMEDSESGMLLSFPDYDNFVTERMASSKIRKRNVDGALSFSTVVEQLSNQAEYLSEIFKDLSGYMDENITLVHHSLQLASSKVAHTLEEHDTLRNELQNKDTHNRAQESELLSLQKELRAMSSNCIYCYQQIETISDDLLELGYAIELATGNSSIVSKVEGSSSVLKDVDASDYTKVSDALVSTVNRLKLESEKLSNMKEAVFTMLDELKMRLKQTESAAETSLQEHELYVKRVCVLEKDLETLKDERKGMEIKIQEYQERGNMLKAKEIELLSLEHAQNTTERGMTEVISKDQLEALVEKINKLTSSAESHLQRELAMSSSPIEKLFSLIDEVYALRHEVDTLRYENEDLHLNLESHTREMEQLKEASRNSDSNRRELESKSSELLEITVSMERMIQRLGYLGGKEALEDNKPTSTQALLSKLEKLIIASNVESGNAKSVIQELGAKLQVREKAIDELSTKVKMFDDLHHARLVQPEANMDRAFEASSSAVGSEISDAEDLCCICCIEGRVFKSLHTSGMIPAQGKQIADRVDGIWVSGSQILMNRPRARLGLMVYWLFLHLWLIGSIL

SEQ ID NO: 159036 - protein, 129 aa, Oryza sativa
  unsure (1)..(129): unsure at all Xaa locations
  Clone ID: PAT_MRT4530_58452C.1.pep
APRPTSSSAVGSVESDAEDLGPAGKASISSVPTAAHSRLMRXGSSDHLVLNIGRESERLVTAQDSDDKGRVFKSLHTSGMIPAQGKQIADRVDGIWVSGSQILMNRPRARLGLMVYWLFLHLWLIGSIL

SEQ ID NO: 159037 - protein, 94 aa, Oryza sativa
  unsure (1)..(94): unsure at all Xaa locations
  Clone ID: PAT_MRT4530_58453C.1.pep
SAPVHLALRSXPSHPKGLLGWATAETAKSNLIARWAGADFPTVCALMDGAEAPSRKPSRRLETVWALRAGTKGSLPRPKKMELGSYFRTITNLV

SEQ ID NO: 159038 - protein, 61 aa, Oryza sativa
  Clone ID: PAT_MRT4530_58454C.1.pep
KGRAISLQKAQLYKTICGGKEKRERTKWTKNRCASGENGRQIKRTKTLHLFVTNPIASPLI

SEQ ID NO: 159039 - protein, 99 aa, Oryza sativa
  Clone ID: PAT_MRT4530_58455C.1.pep
SPSPAPRRRRRRTSSPTPSRRRRRGRSRSCTSWRRRSSRRTRGTSATSSSGSPGSRPPTGPPRRRRSRTRATPLATRVALSPTAPVRRRRRRRRRSRRK

SEQ ID NO: 159040 - protein, 58 aa, Oryza sativa
  Clone ID: PAT_MRT4530_58456C.1.pep
ERLASSSSSSSSSSCTGKPNPSQIPEEIVTTYRSLATGWKGSQSSQLLGFMDGLTRET

SEQ ID NO: 159041 - protein, 115 aa, Oryza sativa
  unsure (1)..(115): unsure at all Xaa locations
  Clone ID: PAT_MRT4530_58457C.1.pep
SIPAAIFIPVADGPSPTPSSPPPPSPSPPPAASPPDPAGAAWIWRAPPPPPSVAREPPVPQRAPXREEKEAPPPPSLPPRGFAGGCSGGGEAGGRPSKLSKATWCRRPCRLGRTT

SEQ ID NO: 159042 - protein, 115 aa, Oryza sativa
  Clone ID: PAT_MRT4530_58458C.1.pep
MAARRGGGGGGRGAPREERVAELDLCMRATEDWASDGPVWLERQSESPFAFRANPGGVQHGGQTADSAAWRWTSHGQRRATACERRQQATAAIDYTRGSKLLQPATLAGCNSHRL

SEQ ID NO: 159043 - protein, 91 aa, Oryza sativa
  Clone ID: PAT_MRT4530_58459C.1.pep
MAWTCGGGHIKLPPPPLLLFALAADPVLAPGTGGDGDQVMDGGTGGKPQGGCKSGGVDGKSRGTGALRPAGLRRRVLVHGASEESRLREIR

SEQ ID NO: 159044 - protein, 506 aa, Oryza sativa
  unsure (1)..(506): unsure at all Xaa locations
  Clone ID: PAT_MRT4530_5845C.1.pep
MQRLASSRRLLQAALAPVRAQSSLSAAAAAAAPAPENAFAAAPKMPPFDYTPPPYDGPRAEEIFRKRAEVLIPSLFHFYDRPLNIIDGKMQYLFDEDGRRSLDACGGIATVCVGAILYGFYRVEEYTGHYLNHSSGILTESCGYRIPGGLEAVIIQATGMQHSTLLLLNDGLADFGDALASKMPGYQKVASXTNSGTEACDLALMIAQPYADYHVIIALWKGYYGNAAGTMGATAQCNWKFNTGVHHALNPDPYRGAFGSDGEKYARDVQEIIDFGTTGRVGGFISEAIQGVGGIVELAPGYLPAVYNMVRKAGGLCIADEVQAGVARTGSHFWGFESHGVIPDIVTMAKGIGNGIPIGAVVTTPEIAQVLTRRSYFNTFGGNPVSTAGGHAVLKVLEKEKLQENAFVVGSYLKERLNKLKEKHDIIGDVRGKGFLLGVELVTDRQKKTPAKVEIGHVMNHMKDMGVLVGKGGFYGNVFRVTPPLCFTKEDSDFFIEAMDISLSKL

SEQ ID NO: 159045 - protein, 450 aa, Oryza sativa
  unsure (1)..(450): unsure at all Xaa locations
  Clone ID: PAT_MRT4530_58460C.1.pep
MALQNIGASNRDDAFYRYKMPRMITKIEGRGNGIKTNIVNMVDIAKALARPASYTTKYFGCELGAQSKFDEKTGISLVNGAHDTAKLAGLLENFIKKYVQCYGCGNPETEVLISKTQMITLKCAACGFVSDVDMRDKLTTFILKNPPEQKKGAGKDKKAMRRAEKERLKEGEAADEEMKKLKKEAKKKGASKESTSSKSGAGKKKAAAGSDEDHSNSPTRSHDGDNVAADEDDDDDVQWQTDTSLEAAKQRMQEQLSAATAEMVMLSTEEPEKKKKHEASHKEGASNGSAKHVVEEAKSSPYDDLVKEMKDNLSKGANAVQLKGLMTSSALPPQDAMNALFDALFGGLGKGFAKEVVKKKKFLAAAVPDEASQMVLLQALXAFGAKSSPEAVKEVPIVLKALYDGDVLDEEVITQWYNESVAGGKESQVVKNAKPFVEWLQSADSESEEE

SEQ ID NO: 159046 - protein, 124 aa, Oryza sativa
  Clone ID: PAT_MRT4530_58461C.1.pep
TSSALPPQDAMNALFDALFGGLGKGFAKEVVKKKKFLAAAVPDEASQMVLLQALVAFGAKSSPEAVKEVPIVLKALYDGDILDEEVITQWYNESVAAGKESQVVKNAKPFVEWLQSADSESEEE

SEQ ID NO: 159047 - protein, 140 aa, Oryza sativa
  Clone ID: PAT_MRT4530_58462C.1.pep
PRVRIQPPQANFPTLREPSSGRSRRRRRRPQIQSAHRKEAASVLLQSDKVEGLKVEASFMSEQDLLYLGSVGLLGEYSRTRKRHKLPLGRPCCMHPKPCQFMQTSGCSWSALVSADPLQGSRLLSLLALGASDIISVKEN

SEQ ID NO: 159048 - protein, 69 aa, Oryza sativa
  Clone ID: PAT_MRT4530_58463C.1.pep
MERMGNINHLCPTEHYFNLTSWIIMHRIFEDRCSNEDQVGVCQSVIDHLTHKTYVGLKDLANLYAQQAD

SEQ ID NO: 159049 - protein, 152 aa, Oryza sativa; identical to SEQ ID NO: 157643
  Clone ID: PAT_MRT4530_58464C.1.pep

SEQ ID NO: 159050 - protein, 214 aa, Oryza sativa
  Clone ID: PAT_MRT4530_58465C.1.pep
MRFLLKFLLLVHPFLLLHVYVHAEPDNLGFVSIDCGLSGPSYVDDRTNISYISDDAYIATGEKHEISSEYKSRALYTSGLSLRSFPSGGRNCYAVAAAAKGRKYLVRAWFMHGDYDGGGKSLAVRPVRFNLNIGLDFWYEVTVSDAASTYALEAIAVAVASSLSVCLLDTGHGTPFISSLELRPIGIDMYPGAVANRSLGLFGRWNMGANNFLR

SEQ ID NO: 159051 - protein, 140 aa, Oryza sativa
  Clone ID: PAT_MRT4530_58466C.1.pep
MMLMTSLTSAANAWPGQVEGISAPMAVGAVLYVTGMYLEVVSEIQRRAFKENPKTKGKVCRTGLWRVARHINYGGYALWRSGYSLAAGGWIWGAMSAVFNLSAFIGSSIPELGSYMDKRYGREWQEYCGETRWVILPGFY

SEQ ID NO: 159052 - protein, 47 aa, Oryza sativa
  Clone ID: PAT_MRT4530_58467C.1.pep
MVGCAVWLVVCEETDAMTEHRTTKTDGKTIDRNNRHFGAVRFGVRFS

SEQ ID NO: 159053 - protein, 92 aa, Oryza sativa
  Clone ID: PAT_MRT4530_58468C.1.pep
AEHALPVIDRISPTRTPESWPGKVDAPCPRAAFADASASEPSEADPPAAAAAAAAASASSAGRFGAMRSRFWLGWVGKSGFRLPLRLRCALC

SEQ ID NO: 159054 - protein, 227 aa, Oryza sativa
  Clone ID: PAT_MRT4530_58469C.1.pep
MGSSLERLDPSTNEVSSDFIPRQTSYSEIVDNIDEGLKGRGQGLTEPSCRLFNSYFSATFPPILGVSSTIIAAAAAAAGGSPHPFSGQPVDLSVSFSAPCPTRWGPSKLQDDNMQIHHFLRTGKAQHRNAASHGCATKPFHPRVEHEFDAPGDACILDSAETAGLELPYSCRAGDCSTCAGRIEDGVVDQPNGSYLDDAQRADGYVLTCVSYPRSNCVIHTHKGREV

SEQ ID NO: 159055 - protein, 157 aa, Oryza sativa
  Clone ID: PAT_MRT4530_5846C.1.pep
AAPAPEGAFDAARKMPPFDYTPPPYDGPRAEEISRKRAEFLSPSLFHFYDRPLNIVDGKMQYLFDEDGRRYLDAFGGIATVCCGHCHPDVVEAMVNQAKRIQHSTVLYLNHAIADFAEALAAKMPGDLKVVFFTNSGTEANELALMIARFYTGCMTL

SEQ ID NO: 159056 - protein, 124 aa, Oryza sativa
  unsure (1)..(124): unsure at all Xaa locations
  Clone ID: PAT_MRT4530_58470C.1.pep
YMCIFTYLQTHILLIYICIWPLITXCTHICIYIYIYIYIYIYIYIYIYIYIYIYVYVYVCICICICICICICIYVYVCIYIYIYIYIYIYIYIYIYIYICICMYIYIYIYIYIYIYIYIYIYIP

SEQ ID NO: 159057 - protein, 186 aa, Oryza sativa
  Clone ID: PAT_MRT4530_58471C.1.pep
TRDFVSDAGLTLLNNWVKTRSYIVGYSPSQADVKVFQQIKEIPAPEKFPYAWRWYNHLLTFEGEFETLPGDPTKEFTAYGPESSDLTVNPAKAPEKEAEEDDDVDLFGSSDEEEDAEAEKIKAERLAEYNKKKAGKVKPAAKSIVTMDVKPWDDETNMEELKANVLSIEKDGLVWGASKLVAVGFG

SEQ ID NO: 159058 - protein, 78 aa, Oryza sativa
  Clone ID: PAT_MRT4530_58472C.1.pep
MAGGQQPAGRRLIGGGEELGGGSDDDVTPRKARPLLRSSTGVIIATSGGPVPLDAIFLPRCVLEADTSPMCGGMVKEV

SEQ ID NO: 159059 - protein, 85 aa, Oryza sativa
  Clone ID: PAT_MRT4530_58473C.1.pep
LQISNPFITAPIFISHMHPASACNVLHQLCHIHILSVHHRSHRRRTLQVVYVHRIPYSAKTFCLDRSTTYTYVYYTEVGQACIRI

SEQ ID NO: 159060 - protein, 121 aa, Oryza sativa
  Clone ID: PAT_MRT4530_58474C.1.pep
PVTKAGILFRRPPLVLSGAGLSFFAHLSPTFFKRNRRKGLTTCFMGITHSLSLNGHPTQTRGGKMPNQCLKKPRLIKDFTRRGANLSPGRGTLAGARLRGTHEGIEPRTNIRKRQNLYSPH

SEQ ID NO: 159061 - protein, 72 aa, Oryza sativa
  Clone ID: PAT_MRT4530_58475C.1.pep
TNPKGLMPPPPLPPCLFPNLYQMKPQVGFKRLFFLTPIFLTGLEKGALNGPICGPPQFGGYILGGLNRVFLS

SEQ ID NO: 159062 - protein, 931 aa, Oryza sativa
  Clone ID: PAT_MRT4530_58476C.1.pep
MALQLRRLIPHRYAGHAASLALPPPPGAPTAMTFPTFNAATKSRKIGVNQEESKSDISKSKKAADSSKEKKTSSRSKKSSKAKESAASNATAKAEICTMTSVSEQKPLVPLYPPTAKSVLVVESVTKAKVIQKYLGDMAENLILASDPDREGEAIAWHIKEMLEQQDALGSKVTVARVVFHEITEDAVKKALISPRYIDMDLVNAYLARRSLDYLIGFGISPLLWRKLPGCQSAGRVQSAALALVCDREAEIEQFDPQEYWTVDTDFKTQHSGPSNGLNLQSRIKHLNSKKLDQLSIRSQEEAHNIEKRIYSSQFEVTGIKRSKINKNPPMPYITSSLQQDAANKLHFSAGYGEEYASEGIRKYFKKIQVDIGNSEGDMIFHSSASRLDFKGYQAVYDDTEASPSSYNSEVDAVHQDNFEALSKLEVKDLVSPVNVHLSQHFTKPPSRYSESALVSAFLMHHFSEVADLSFTANMETEVFLKQGPYGHYVQVGEDRKGVSPKRAPLSEVKDIDSITLKDAIELLQYPKILGKHPDDDLPVLITHSKAGFSIRHRRTLASLPKSADPKKITLERALKLLTGKNDLNPLGFFGTVAERRVRQGGDFSPLTAYALVPLGCLRHVHGDGFLGFRALGNAGQGHLQLYHHFFSYIKSMALKCAAELGIPAAIHRRGGAATLRDIVADVALRQAKVPHLRRLMRVLTVSGIFAMKQQQPASSGEAVYTLTPASRLLVAGAGGGHDMSPMLRFLVHPTALTPFFSLHAWFRVDDEEEEEEPVAAGGGAAMSLFEMAHGFPRWEMTGRDAAYGAVLNDAMAADSRFVMEVVFREGGGDVFRGIGSLVDVGGGHGAAAAAVAAAFPHVKCSVLDLPQVVRKAPPDAGDVRFVAGDMFEYVPPADAVLLKYVLHCFGDDDCVKILRRCKEAIPARDAGGKA

SEQ ID NO: 159063 - protein, 988 aa, Oryza sativa
  Clone ID: PAT_MRT4530_58477C.1.pep
STLPSCSIITDEASTSTSNHSKSAIGTENSSTSRIKDVSEDKKVSIKKQSKSAKTIAAAKIGTTDVSEEENKREISKSEKNANISRDKKTSNRLKKFSKAKKSAAAKAEICTKSSVDSSDSEQKPLVPLYPPTAKSVIVVESVTKAKVIQKYLGDMYEVLPSYGHVRDLAGRSKSVRPDDDFSMVWEVPAAAWTHLKRIRTALRGAENLILASDPDREGETIAWHIKEMLERQDALGCNVTVARVVFHEITEDAVKNALMSPRYIDMNLINAYLARRSLDYLIGFGISPLLWRKLPGCQSAGRDQFAALALLCDREAEIEQFNPEEYWTIDTDFKTQHSGPSNGLNLQAQIKHLNSKKLDQLSIWSQEEAQDIEKRIYSSQFEVIGIKRSKIHKNPPMPYITSSLQQDAANKLHFSAGYTMKIAQKLYEGITLSSEDATGLITYIRTDGFHCLKGSYLMHRSFWYAMSKNTFVMITVMPYGKSPNNMTMNGRIKISDVAAEDILSLVKQRYGEEYASEGIRKYFKKVKNAQEAHEAIRPTSIRRSPVIYLAASLVSTLDDDSLKLYALIWKRTMACQMEASRAEMPLMTPQQQEHTEVNWMIQVDIGNSKGDMIFHSSASNLDFKGYQAVYDDTEASPSSNNSEDDAVHQDNFEALSKLKVKDLMSPVNVHLAQNFTKPPSRYSESALIKRLEELGIGGPSTYSSIMKVLQDRNHVTVKGQVVHPEFRGRMVSAFLTHHFSEVADLSFTANLETELDNVSAGSTEWKGLLKDFWERFNKYCGNASRLQVRKVERMLEEKFGSILFPDLDNDSRICPSCSEGTLRLKVSKHGEGYFIGCDRHPKCKYIARTLSVEVDETEASDEIQSTFTPRLLGVLPDSDEKNVYDILLLVLQVKDIDSITLEDAIELLQYPKILGKHPDDDLPVLVTHSKSGFRIRHRRTLAPLPKSADPKEITLERALKLLTGVYGEFDNVERSSLTPSHGILIGE

SEQ ID NO: 159064 - protein, 709 aa, Oryza sativa
  Clone ID: PAT_MRT4530_58478C.1.pep
MALQLRRLIPHRYAGHAASLALPPPPGAPTAMLQFGVSQRCSYNFMPYSLSNNSSRQLSSIGSRLPLQLKSGAFFTTGLMGNPNFVSLRAAYRHGISLRANNIRNSRSFLTLRNTKVTFPIRNKCLFGNPNMRKEDGSVAHSMFHRSEKRKSTLAACGTITDEASTSTSKRSKSGTGTKKTTTRRKSPTSRKKEASEDMKEEKASTKKQRKSVKTSTAATKSRKIGVNQEESKSDISKSKKAADSSKEKKTSSRSKKSSKAKESAASNATAKAEICTMTSVSEQKPLVPLYPPTAKSVLVVESVTKAKVIQKYLGDMYEVLPSYGHVRDLAGRSKSVRPDDDFSMVWEVPAAAWTHLKSIRTALKGYDNAVWAENLILASDPDREGEAIAWHIKEMLEQQDALGSKVTVARVVFHEITEDAVKKALISPRYIDMDLVNAYLARRSLDYLIGFGISPLLWRKLPGCQSAGRVQSAALALVCDREAEIEQFDPQEYWTVDTDFKTQHSGPSNGLNLQSRIKHLNSKKLDQLSIRSQEEAHNIEKRIYSSQFEVTGIKRSKINKNPPMPYITSSLQQDAANKLHFSAGYTMKVAQKLYEGINLSSEEATGLITYIRTDGFHWYQSARGQCVFLCSRVRGGIEEALACLACEQLSAAQATIIAAHDNRIVANSIFISDGAAEDILSLVKQRCANIYSSTSNILVVVVLNNLNS

SEQ ID NO: 159065 - protein, 547 aa, Oryza sativa
  Clone ID: PAT_MRT4530_58479C.1.pep
TLRFKVSRGGVGYFIGCDRHPKCKYIARTLSDDDNETEASDETQRTFTPRLLGALPDSDEKVFLKQGPYGHYVQVGEDRKGVSPKRAPLSEVKDIDSITLKDAIELLQYPKILGKHPDDDLPVLITHSKAGFSIRHRRTLASLPKSADPKKITLERALKLLTGKNDLNPLGFFGTVAERRVRQGGDFSPLTAYALVPLGCLRHVHGDGFLGFRALGNAGQGHLQLYHHFFSYIKSMALKCAAELGIPAAIHRRGGAATLRDIVADVALRQAKVPHLRRLMRVLTVSGIFAMKQQQPASSGEAVYTLTPASRLLVAGAGGGHDMSPMLRFLVHPTALTPFFSLHAWFRVDDEEEEEEPVAAGGGAAMSLFEMAHGFPRWEMTGRDAAYGAVLNDAMAADSRFVMEVVFREGGGDVFRGIGSLVDVGGGHGAAAAAVAAAFPHVKCSVLDLPQVVRKAPPDAGDVRFVAGDMFEYVPPARPGLLPVAVVASVMAGGGCAGRSSGAGSGDDGGASKMDGSASSLVVRHRTGHFQRHSPDVTTNRLHPVAA

SEQ ID NO: 159066 - protein, 95 aa, Oryza sativa
  unsure (1)..(95): unsure at all Xaa locations
  Clone ID: PAT_MRT4530_5847C.1.pep
MGGAAGEKGAARGCRPAGGEERRAYTGGGWRGEERHDARARVAAGVERNGARAGEASPTTLGSXLPTVATRAXGGVGHRARELGGGDEVVADHTW

SEQ ID NO: 159067 - protein, 124 aa, Oryza sativa
  Clone ID: PAT_MRT4530_58480C.1.pep
KGGPGTKKQWGKPANGARKEGKERKRTGPRALGNVTDPKGVGPSALGSLRAAIGGAPTAIEVKEPLESASRSGLSVSTPAEERGMRAKSIKLGKAKGFTSRKDVNPPPRQFNFSDAKEKPRPSM

SEQ ID NO: 159068 - protein, 44 aa, Oryza sativa
  Clone ID: PAT_MRT4530_58481C.1.pep
MQKAKQERTMDKVGGIGCICLERMEMLRQDREKQEFAMLDSIDW

SEQ ID NO: 159069 - protein, 285 aa, Oryza sativa
  Clone ID: PAT_MRT4530_58482C.1.pep
MARCLNTGCGGPAARLFPKAAAGWVVSEFGRHGSKRKEAPSPGKDQSAGGGDDEDDGKGGGGRGGGRMLAQPIRAARTPPARYEAQFPYAARYTPNQYGTVTFLPERVGDCAVQMNRPIHLVRCRLNKGEVADYCVYVLPFAPSLVRGRWVPLVGEMARTGPLCLLLENPRPRLPLAGAPPTIRRRRLEFRRCFNCYRPPDHRRCLTWYQVCEAEFPKKECEVNQFAEESSDWEEIIASIAVQFWFVCWSVAFSVSDSVNCQDHMPQMSGAVDNLQNRSPLFRKA

SEQ ID NO: 159070 - protein, 76 aa, Oryza sativa
  Clone ID: PAT_MRT4530_58483C.1.pep
DFQLHLDLLLQAWRWIDGSWGSLDVAVTLLDAPSSSTADHIKRRWGGRRPPPVASFALLACLPSVVGLCCAREKLE

SEQ ID NO: 159071 - protein, 179 aa, Oryza sativa
  Clone ID: PAT_MRT4530_58484C.1.pep
MSFAGKAWCGCGASIGMWLMEGFGGMAAYLARTSSSEFGTMILVATTCCLNELDTDQLLTNLQAHKRGDGTAGLLFFSCIVMGVHRYMPHRDPKCGVQSRRATGAKHQRKPLSLLTYASLAVSSRPGDLQIKIYPLSLAHHDATNGIKPYIRLDERTNRYAHIAAPDANKISRSENLGK

SEQ ID NO: 159072 - protein, 132 aa, Oryza sativa
  unsure (1)..(132): unsure at all Xaa locations
  Clone ID: PAT_MRT4530_58485C.1.pep
PPHPQRESASSAVASTTRPPPAPPPADGEGKSWRVMTGEEHPSSSGLPPSRSNRKYPPPPPSGDGGGVXEXEVAADPPGDSTLRSSTILTTRSPPRAPPPAAGRQSEMGRPYRSPVALPYRPQPAAATTRER

SEQ ID NO: 159073 - protein, 319 aa, Oryza sativa
  Clone ID: PAT_MRT4530_58486C.1.pep
MATERFRINSIPQVINDEGTSISAHEEKADLFYQNFMQRMGITTSPSMAFDLPSLFAPQNLDSLIDPFYTQEIDSLISLLPVHKAPGPDGFNASSSVLLNGVPGAYFKCKRGVRQGDPLSPLLFVLGADLLHAVVNRAFSLGLLSKPINEQDNKGFPIVQYADDTLILLKSDQRELFCFKAILNTFAQSTGLKVNYHKSQLYPLNVPPEKVHLLAGLLGCSVGQMPFTYLGLPMGTTRPRLIDFAPLVDRIERRLTSSSMFLPYGGRLTLVNSVLSAIPTYYMCSLQLPVTVIEAIDKARKNCLWRGNDTSSKRKSLAA

SEQ ID NO: 159074 - protein, 182 aa, Oryza sativa
  Clone ID: PAT_MRT4530_58487C.1.pep
MASLRALPLLVLGMALCALALFPFVASASRDLRHHPAGFVIGGRGAANEFYLETEVLETQPKLLDSNFTTNMSSSPTWEEMAKEGWPVDFAATNWQEGGGEEEGREEGARVGGRENSIWCWNIEDCGAVTKKPWEWELSENGGDEAMLQGYDNGVGHRCGSRRHYKKIASSTPAHQHDNLEY

SEQ ID NO: 159075 - protein, 404 aa, Oryza sativa
  Clone ID: PAT_MRT4530_58488C.1.pep
MVHLLLQWKPELAVQVDCNGSTPLHFTVSDGNRKIVRAILATAPPGTAYMKDSDGLSALHVAARLGHGGIVEELTGFYPDTAELRDGRCETFLHAAARERRSSVVSLDIKNPIMMGGLVNAQDAGGNTPLHLAVVAGAPDIVEALLREGNVQTDVLNDDGHTPLDLASESNSLFNMAQPQRNDHLKPSSGHDMASGIEKTSDSLALVAVLIAAAVFAVGFNMPGGYGDDGTANLRDNISFKYFMVLDTFAITTSVVAVILLVYGKTAAAAHLAVSWKSFVVTLQCIWVSLVSLILAFFSAIHAVVIATSSSRTVLITMFLVIYVCFNALILWIEKWIDPAATTYRAVWRFVWRGRHAHAIKRRYPFLGDSLYSLLIFSVIIINITAFVVLVVVYYFDVRRLSNN

SEQ ID NO: 159076 - protein, 211 aa, Oryza sativa
  unsure (1)..(211): unsure at all Xaa locations
  Clone ID: PAT_MRT4530_58489C.1.pep
MAASSSLRLILGSSSASRRQILAEMGYSFTLLSADIDEKEIRKEKPEELVVALAHAKADAIMEKLRDNGMMKEILDSQETTLLITADQVVVHDGVIREKPSTPEEARKFIKGYSESHAATIGSVLVTNVKSGARKEGWDKAEVYFHKIPXMKFVESLIEXRAMSSMXAGGLLVEHPLTSPLVEAIVGTIDSVMGLPKSLTEKLIKESLEEP

SEQ ID NO: 159077 - protein, 118 aa, Oryza sativa
  unsure (1)..(118): unsure at all Xaa locations
  Clone ID: PAT_MRT4530_5848C.1.pep
SSLYPLSLRPVTQDGRPATEAATGGAVGEKGAVRRHRPAGGEERCACTGAGRREERSGARTRAAAGEERSVTSRAGEASPTTLGSRGXPTVATRAXGGVGHRARELGGGDEVVADHTW

SEQ ID NO: 159078 - protein, 367 aa, Oryza sativa
  Clone ID: PAT_MRT4530_58490C.1.pep
MGYSFTLLMAGKWRKVVGGGTNGGGRHAMGRRRGTWRPVEVGHGDPEVVRRLGKQTWRGGDGGNSGGVEEAHRPPLSPGGHGRRGGARRSMALPSPSLVGLLFLPAAMDDEEENGACAALPSPSMSSPLLADPLSLPVAMNSKEEHNAAWRYRLPQCYPPCSQAWDIVNATRDRDGARGGEGQQKGHEGESADIDEKEIRKEKPEELVVALAHAKADAIMEKLRDNGMMKEILDSQETTLLITADQVVVHDGVIREKPSTPEEARKFIKGYSESHAATIGSVLVTNVKSGARKEGWDKAEVYFHKIPDEVVESLIEEGDVFYVAGGLLVEHPLTSPLVEAIVGTIDSVMGLPKSLTEKLIKESLEEP

SEQ ID NO: 159079 - protein, 115 aa, Oryza sativa
  Clone ID: PAT_MRT4530_58491C.1.pep
MSLESRSAAGLPPLHTPQECYHHSCLRFRHGLRRVGARRMQTEEAAGEVVGGVVSGGGAWRVRLVRALGASVLTAKRGGLRARHAAQVLDEMPHEGKALFQLRPSGMSARQGQPP

SEQ ID NO: 159080 - protein, 261 aa, Oryza sativa
  Clone ID: PAT_MRT4530_58492C.1.pep
MVVAPEPEAIAVRIDMAMLHCPICFLPLKPPIFQCDAGHMACSNCRGKVAGGRCHSCEGVGVGVVYARSRAMEAFVSSTKIQCPYQAHGCRSYVTYYAVDDHQRAPAAASPALLEHLAAAHSCHVDKVEYGKALCLRVPASERRRRLLVGEEDKRVFLLAMAAVGAASAVTLVRVAASAETAARYRCKMWANAPAAAAAAVAGAASGKADMVMVDMEVASSGVAPGGVAVEEATFLAVPPKMLHGEHKEIILGICIDKKTS

SEQ ID NO: 159081 - protein, 71 aa, Oryza sativa
  unsure (1)..(71): unsure at all Xaa locations
  Clone ID: PAT_MRT4530_58493C.1.pep
MLRQDEGTSTASSGYEHXAIGXPSGNLSVPHSAXXAASGSWVTMEQGGSGAAGCXXGVGXVGXARXQVAEF

SEQ ID NO: 159082 - protein, 56 aa, Oryza sativa
  unsure (1)..(56): unsure at all Xaa locations
  Clone ID: PAT_MRT4530_58494C.1.pep
ASQRPEPVYIAXVHALLRGRDLSHIHGSLRSHPXAPGRTGKGGPVRSPGEEHRAPS

SEQ ID NO: 159083 - protein, 163 aa, Oryza sativa
  unsure (1)..(163): unsure at all Xaa locations
  Clone ID: PAT_MRT4530_58495C.1.pep
GDALNLESCFQILVGNHYPACSRPDEQAMGLSAHSDHGLLTLLFQNGVDGXQVKHDGEGLLAKPLPGSFFVIAGDQLEIVTNGRYKGVLHRAVVGGEQSRMSFVSLIGPCMDTVVEPLPEMAADGRGLEFRGIRYRDYMEMQQSNSINEKTALDIVRVMHQAG

SEQ ID NO: 159084 - protein, 79 aa, Oryza sativa
  unsure (1)..(79): unsure at all Xaa locations
  Clone ID: PAT_MRT4530_58496C.1.pep
IGCVARLCRPRWHARVPEWPTRGATVSSTFHFHLFTYVVIIPHKGXYSTVLFPLYVVFTYHSTYPHVTNSXVTNHCHRV

SEQ ID NO: 159085 - protein, 104 aa, Oryza sativa
  Clone ID: PAT_MRT4530_58497C.1.pep
MTFDILKAFHFRIEWMLLRGLRELEDNATVCRNCVVAGVDCGLPPWTLVVRVDDALAAEIGAGAIPSIRRWRRERLPVPPWMFVAQVDDALAAEIGAACKREGD

SEQ ID NO: 159086 - protein, 831 aa, Oryza sativa
  Clone ID: PAT_MRT4530_58498C.1.pep
MAVASWSIPAIPRAGPTARGVLLGGAFVTAARPPVAWRCRATLPRRVRLGGVVARAGAAETPVAGSGEAGLLFSEKFPLRRSRTVEGKAWVRVDAEPDGEGKCKVVIGCDVEGKWVLHWGVSYDGEQGREWDQPPSDMRPPGSVPIKDYAIETSLDTPHNSEGKTIHEVQIKIDKGTSIAAINFVLKHKGQDFRIPLSGSFGGDLLGTEQDIDVRPGALGHLSNVLQKPEGPIAEPHKTVPDDKGSRTKHISGFYEEYPILKTVYVQNFITVNVRENNGTTKHAVEFDTDIPGEVIIHWGVCKDNTMTWEIPPEPHPPATKIFRQKALQTMLQQKADGTGNSLSFLLDGEYSGLIFVVKLDEYTWLRNVENGFDFYIPLTRADAEADKQKADDKSSQDDGLISDIRNLVVGLSSRRGQRAKNKVLQEDILQEIERLAAEAYSIFRSPTIDTVEESVYIDDSSIVKPACSGTGSGFEILCQGFNWESHKSGKWYVELGSKAKELSSMGFTIVWSPPPTDSVSPEGYMPRDLYNLNSRYGTMEELKEAVKRFHEAGMKVLGDAVLNHRCAQFQNQNGVWNIFGGRLNWDDRAVVADDPHFQGRGNKSSGDNFHAAPNIDHSQEFVRSDLKEWLCWMRKEVGYDGWRLDFVRGFWGGYVHDYLEASEPYFAVGEYWDSLSYTYGEMDYNQDAHRQRIVDWINATNGTAGAFDVTTKGILHSALERSEYWRLSDEKGKPPGVLGWWPSRAVTFIENHDTGSTQPEIAKLISIRNRQKIHCRSKIKILKAEGNLYAAEIDERVTMKIGAGHFEPSGPTNWVVAAEGQDYKVWEVSS

SEQ ID NO: 159087 - protein, 170 aa, Oryza sativa
  unsure (1)..(170): unsure at all Xaa locations
  Clone ID: PAT_MRT4530_58499C.1.pep
GGGGMFQXGXKGXVXGXRIXFGXQXIXKQGLGRGEXWGXEIXNPFXVXGIVRXXXGXGXXDVLXNLXXGQKVXIPTGRSSXFQYGXWXILSFXDNVXWDGIVLGSXXXQXXIWXQQMEPMLDXNNFSSXVHXKMGVPWPIGXLXPXPWLSSSXLKPLNMLCDXSFNLTPV

SEQ ID NO: 159088 - protein, 97 aa, Oryza sativa
  Clone ID: PAT_MRT4530_5849C.1.pep
KRTMAAPMQSANTDTVTQNVNLAWIHVGSDYRRDTRHLTERDTETMPPRRMLLCTTRDSAFLCGISGEKNRVVVARNRGGMFRRGGMCSGVHVADTR

SEQ ID NO: 159089 - protein, 94 aa, Oryza sativa
  unsure (1)..(94): unsure at all Xaa locations
  Clone ID: PAT_MRT4530_584C.1.pep
LPPIHHGKEKTHINIEDIRHVDSGKSTTTGHLIYKLAGRGGRAIEWFLGGKPAETNKKDYTHARAXHKLKAERSRGATIDIGLWKNETTPYVLA

SEQ ID NO: 159090 - protein, 172 aa, Oryza sativa
  Clone ID: PAT_MRT4530_58500C.1.pep
MESSVRRVQQRVRKAREEMDRWDDLNSRLLSQFANAAAIVARLPVLEEVKNYGVLRCVPNIRENLLGKQMESLEIIFVSMRETVEEFNSIARSLHKALRDTNQMVCTKIISHLFADMDEQCKLFLTLYSQMKSVDVLARLLLEALCPGVLDMLTSLCFDVLACPDGQMNQRC

SEQ ID NO: 159091 - protein, 81 aa, Oryza sativa
  Clone ID: PAT_MRT4530_58501C.1.pep
GRRGRRWIGGTTSTPASSLSSQTLPPSLLVSRYALKSSVISSLTWTSSDIAAMRQLLVDQPNIPKDEVQAIFDIIFADEIC

SEQ ID NO: 159092 - protein, 323 aa, Oryza sativa
  Clone ID: PAT_MRT4530_58502C.1.pep
MPIWLILLASLGAVHVAADVLRLVATLTFGLRARPRGDLRRRYGSWAVVTGPTSGIGRAMALELAGRGLNVVLVGRDPAKLRDVAGAIARSHSHHGVRTKTVVFDFSLVSTVQGEKAMAALRETVEGLDVGVVVNNAGVAKPGAMFLHEVEVEPLMRMIRVNMLALTKVTAAVLPGMVMRGRGAVVNIGSASAEALPSFPLYSVYAGTKAYVGEFSRGLSVEYKRKGIDVQCQVPCLVETNMISRAMKDIFLSQFVVTPEEYARAAVRSIGHGRMCVPNMAHRVQLLGMRSTPDFVLNWYRLRLHLQQRAIFRSRRCHRIALL

SEQ ID NO: 159093 - protein, 81 aa, Oryza sativa
  Clone ID: PAT_MRT4530_58503C.1.pep
MEAMQALMKRMQLSEAEKKGIRICEAESGSMGSGDPKAIGKVLAEKVVNAEGLAQALGKIWCLSSASGKRHALEDGPWMFG

SEQ ID NO: 159094 - protein, 112 aa, Oryza sativa
  Clone ID: PAT_MRT4530_58504C.1.pep
RWRSDERVSDFGRTTGGRWPAVPATGGRWRATARREGGGWRRATAQREGGGRRRPTARQEDGGQRRARREGGGRRGPAERPPSHRTWEGRNRRRPTARREDGGAPPHDGRVA

SEQ ID NO: 159095 - protein, 49 aa, Oryza sativa
  Clone ID: PAT_MRT4530_58505C.1.pep
VDCCWTRVLQRLDPSAGVVQCWVRGSAPWRDSRNRSHTVGGLSLALLET

SEQ ID NO: 159096 - protein, 145 aa, Oryza sativa
  unsure (1)..(145): unsure at all Xaa locations
  Clone ID: PAT_MRT4530_58506C.1.pep
VFPDIQLDVFREMVTSFDCESRLAVVADALVKNRVSWVKGRWRXPDETNNTSALPAAAAATPQTNAKPLQAQGAXRRRQGGPVPIKEQFRSAEYREAVRSLALYEFKGLSRXAVTAVLAEXPHSYLEARKTLIEVSSXSKKKKKK

SEQ ID NO: 159097 - protein, 267 aa, Oryza sativa
  Clone ID: PAT_MRT4530_58507C.1.pep
MHVVICPLLAFGHLLPCLDLAQRLACGHRVSFVSTPRNISRLPPVRPSLAPLVSFVALPLPRVEGLPNGAESTHNVPHDRPDMVELHLRAFDGLAAPFSEFLGTACADWVMPTSSAPRQTLRMDQSGNLTREEFLHDTERIEFYKNYLTELKKAIDDGANVVAYFAWSLLDNFEWLSGYTSKFGIVYVDFTTLKRYPKDSANWFKNMLQASGPGSKSGSGTSDSQVGSATSASHPVGSAISSSHRLLLPLLVSLHFLFPSFFMFLSL

SEQ ID NO: 159098 - protein, 31 aa, Oryza sativa
  Clone ID: PAT_MRT4530_58508C.1.pep
SNERRRATLVKLDRCFCNEEWDLAFPHHVLH

SEQ ID NO: 159099 - protein, 89 aa, Oryza sativa
  Clone ID: PAT_MRT4530_58509C.1.pep
SRSPPSSSSRTTSPPPPPPPPRPPPSPSPSSPTAPPSRSRLSPSGTTSPPPRAPPPSAEPSGTRVALRSGWPPPSPSPTSPEHTRRKQR

SEQ ID NO: 159100 - protein, 571 aa, Oryza sativa
  Clone ID: PAT_MRT4530_5850C.1.pep
MGLGIKGLTFLLLLVLLVLCSNVSLSDARSGKHWRQNRASSSTLLRRKGKGKTNNSHKQYGKGNQDPYQPSPSTSPNVPVNPSERPVQGKGHPAPTMPPPSSGSGHTLPSPPPPLPPLLPPPQPPAAQSQNTVFNVVDFGARGDGVTDDTQAFEEAWAAACKVEASTVLVPSELEFVVGPISFSGPYCKPNILFQLDGTILAQTSTRVWGSGLLQWLEFTKLSGISIQGSGVINGRGQEWWTYSDPNDDDNDDVDAYNVELEKMPQIKPTALRFYGSSNVTVTGITIVNSSQCHLKFDSCQGVMVHDLTISSPENSPNTDGIHLQNSKQVSIHHSNLACGNALINSIKAKPTGFRTKGKLKTLVQVSEVIFALCDAGDDCVSIQTGCSDINIHNVNCGPGHGISIGGLGRYNTKACVSNVTVRDVNMFKTMTGVRIKTWQGGSGLVQGIRFSNIQVSEVQTPIIIDQFYCDRTTCRNQTSAVAVLGVQYENIRGTFTIKPAHFACSDSSPCSEITLTGIQLKPLIVPQYHLYNPFCWQAFGELSTPTIPPISCLQIGKPSGNNVMSDYDLC

SEQ ID NO: 159101 - protein, 229 aa, Oryza sativa
  Clone ID: PAT_MRT4530_58510C.1.pep
MAVSFTNVSSEAGLKKLDEYLLTRSYISGYQASNDDLAVYSAFSTAPSSSYTNVARWFTHIDALLRLSGVTADGQGVKVESTAVPSASTPDVADAKAPAADDDDDDDVDLFGEETEEEKKAAEERAAAVKASGKKKESGKSSVLLDVKPWDDETDMTKLEEAVRNVKMEGLLWGASKLVPVGYGIKKLQIMMTIVDDLVSVDSLIEDYFYTEPANEYIQSCDIVAFNKI

SEQ ID NO: 159102 - protein, 86 aa, Oryza sativa
  Clone ID: PAT_MRT4530_58511C.1.pep
MVNRVHHASLGMGPADHCLARGSQRPDMGEVMSNGYNNRCPVFHALTSVERPRVAPELIIGMSDEPDERIHGNFMVHVVCFGGPGS

SEQ ID NO: 159103 - protein, 216 aa, Oryza sativa
  Clone ID: PAT_MRT4530_58512C.1.pep
MPGDGAGDVPATHLMRKERGKGVISMENPFVPSISEDLQLEERRSYGSEKLEVSSGHSFVVRPRVRACGRVACAGWHELGASAHERSAGLARGNTGRHRRWLGLADVSKGAGPPWTGTTRVVHRRSTGPTVQIGPEADRTARAVATGLGSASSRPFGYGGVTAARGHGRRQPAAREAAADGAKGGSVSRRRRRSRERGKEGGEGILTGEYGGRSGG

SEQ ID NO: 159104 - protein, 122 aa, Oryza sativa
  Clone ID: PAT_MRT4530_58513C.1.pep
LVHTNTDLAPSAEHRFFVNTFIETYLSPFITLKTTSFHIWSIVDVGFAITDNDLMDVDHCNLQLNAQDMNVLINTLSQEEFDRVSNHRTAYEIWNKLSKIHEGTSEYKDTKLQFLKIQYETF

SEQ ID NO: 159105 - protein, 78 aa, Oryza sativa
  unsure (1)..(78): unsure at all Xaa locations
  Clone ID: PAT_MRT4530_58514C.1.pep
VFXLDLFLLAPVFLFSRAPQKAFQCLIPPPGPFPGRGLVGSPPPPLRGXFFXTKISIAQSPFLAFISGFKPFPFWRIL

SEQ ID NO: 159106 - protein, 75 aa, Oryza sativa
  Clone ID: PAT_MRT4530_58515C.1.pep
MALSEGTIGDRVISFGNSEWQGKLWALGLALARISDYDKFTRKTYLLVPEVLGGTIFYTRKYDNSWYLSKTIKSL

SEQ ID NO: 159107 - protein, 180 aa, Oryza sativa
  Clone ID: PAT_MRT4530_58516C.1.pep
MDGMRLGSIDPMTMEVAIGVEEATQKLPPIPLSAPTAHPLLEAQSGFEAQEELAAQEEMAAQASKEVVPDVVGYLDEGDGLAHIAPPGAPAPPRLFEPLPEPLLPQPPPPAPARRGRSKVKMVPSRHSARQAARPFSVPVSKHTEGRLLKEMGFIDKEEDLNDEAIAAFVKAFDKPLPPH

SEQ ID NO: 159108 - protein, 67 aa, Oryza sativa
  Clone ID: PAT_MRT4530_58517C.1.pep
VTANSSYKNDIIPFMLCIINFMKQSLTSQPNYSNLMEPGEPLMPNLWRYYQGGNTKKKNPPNKAILT

SEQ ID NO: 159109 - protein, 50 aa, Oryza sativa
  Clone ID: PAT_MRT4530_58518C.1.pep
MADKLSMAILYIREEGIRARLVNKDMAPWYKQQQQLFKQQKYDHPHLSSL

SEQ ID NO: 159110 - protein, 64 aa, Oryza sativa
  Clone ID: PAT_MRT4530_58519C.1.pep
GHWPPPPVKGGPSSPGPGGPWHNPTCSSPRASPMGPNLRVQVIVFQIRRGVLGCVQAFFSKVLF

SEQ ID NO: 159111 - protein, 486 aa, Oryza sativa
  Clone ID: PAT_MRT4530_5851C.1.pep
MVTPWQGYILLAVQAYTTSLHPPPCSPAATAASATTTCEPVRGANLSLLLLGLYLIPIGDGAARACLPALGGDQFDLGDPDEQRQETSFYNWYTFAVSTGGFVGLVFIVWVQNSKGWGVGFAVSAAFVALGLLVWAAAFPLYRNQLPMGSPITRVLQVFVAAFKKRNVRLPENPSELKQINQDDDANAHEVLPKTDGFRCLEKAAVETGNDAGPWSLCSVTQVEETKIVLRMAPIFVAAVLSYIPVPLLLSLTVQQGNTMDTRLGAVHISPATLFLIPTVFQMVILIIYDRAIVPPLRRLTGYVGGVTHLQRIGIGFVATIVATAIAAVVETRRKMTAEESGLEDATTGIPLSVFWLTPQFFLIGIVDVTSFVGLLEFFCSEASMGMKSIGSSIFYCILGVSAWLGSLLIQVTNRVTQRTNGGGWLDGANLNKGKLDRFYVVLCIIEVVALVIYVFFARRYVYRNDQRVVAQEQRKGDTGNGMAVI

SEQ ID NO: 159112 - protein, 475 aa, Oryza sativa
  Clone ID: PAT_MRT4530_58520C.1.pep
MSMGIHPSLLSLSLLCWAFLFMSLEYEGYGPTWDSDDEYDNFIRKMNPPRIEIDNDSCNDATIVRVDSANEYGILLEVIQVLIDLNLVISKAYITSDGGWVMDVFNITDKEGQKLKDKATIARIEDYICKSLGADSRYIPSRRRSVDVAASSDHNVIELTGTDRPGLLSEVSAVLASLKCNVVSAEIWTHNTRAAAVMRVTDEGTGSAVTDADRLERIRDRLSYLLRGGNLSRGAAMAVSTGTCSTHTERRLHQMMLDDGDHEQLHRHPPNQSQRPNVTVSNWNDKDYSVVTIRCKDRPKLLFDTVCTLTDLHYVVFHANIDAKDNQAYQEFYVRHVNGSPMHTEADRLRVIQCLEAAIERRVSEGVKLELCTNDKVGLLSEVTRIFRENSLTVTRAEVSTRGRMAVNTFYVRDSTGGTVDQKTIDSIRQAIGQNIQVKGQPEPSEPQKKESPTWFLFANLFRPRSLYSFGMFMR

SEQ ID NO: 159113 - protein, 122 aa, Oryza sativa
  Clone ID: PAT_MRT4530_58521C.1.pep
MSMDEGYGPTWDSDDEYDNFIRKMNPPRIEIDNDSCNDATIVRVDSANEYGILLEVIQVLIDLNLVISKAYITSDGGWVMDVFNITDKEGQKLKDKATIARIEDYIFFGCRFKIHTFSPEIS

SEQ ID NO: 159114 - protein, 143 aa, Oryza sativa
  unsure (1)..(143): unsure at all Xaa locations
  Clone ID: PAT_MRT4530_58522C.1.pep
MEYSKGIKSKGTCVALATRCSQMSLYYVPGQGGLNYDGCEKGKCPNCSATVIGRTSRASTPNPRINRDQGGSAEPRLGPPGLAFVSFLATDLRVVGQEKFVKAGSRLRKERDTLSGRRSAFVQPHEDRVEXRPGSLRAPQRRL

SEQ ID NO: 159115 - protein, 150 aa, Oryza sativa
  Clone ID: PAT_MRT4530_58523C.1.pep
MDGRCTVARRSHPFIWASCRHPLKPDTRVAADGRGRKRKTRRWRSELGSEWPATSYGERDGEGEPVGSLTAANTAPYTSAFSTSASAVTVPPRVAVRVDYRRHTTSNRQMERMPATGACCRRAAQWTERLKMAEAMSTKRQGTVVVAENW

SEQ ID NO: 159116 - protein, 102 aa, Oryza sativa
  Clone ID: PAT_MRT4530_58524C.1.pep
MAGAGSIYSWGLRLRVRDHSTRRAAGTAGSFDVSGWRFLALGNAAVFVGFDWHRVGIRLKCRSSVASPASTCSTQWACPERRRFFCARDHYTFSANVDAARP

SEQ ID NO: 159117 - protein, 66 aa, Oryza sativa
  Clone ID: PAT_MRT4530_58525C.1.pep
MGVPRHPSKRKVLAIITPSPPYMHPPHPNNVYPQANHQAEQSTVNYFTVKQNALGGQPQPINRSRC

SEQ ID NO: 159118 - protein, 128 aa, Oryza sativa
  Clone ID: PAT_MRT4530_58526C.1.pep
MKTGVDGAWLVEDTPEHGSDPGADWATWQNLNASLRMVKSRHVSSIPFQCTANLVRCSSVARAHGRCLPSAYCHRPPLHPSPNLVVMVDSSSNHADRCTRLLEHLCSKPGRKAFLASDFLLKNLIKPG

SEQ ID NO: 159119 - protein, 52 aa, Oryza sativa
  Clone ID: PAT_MRT4530_58527C.1.pep
IKIYSRGSQIFNSHMPNPTTYSLSRSHSYIKSEGDQVKQKQKQSTAGKIKRR

SEQ ID NO: 159120 - protein, 112 aa, Oryza sativa
  unsure (1)..(112): unsure at all Xaa locations
  Clone ID: PAT_MRT4530_58528C.1.pep
LGFSNAKIYKCEGGEMXRPMCYKAYGSGKEDSPLCDAPGSENTRTKLPRHASFDDCPGHHILMATTLNGAANMGGALHLSAANESCPQTQTSEHLAADEMMRQQHIINLQNK

SEQ ID NO: 159121 - protein, 145 aa, Oryza sativa
  Clone ID: PAT_MRT4530_58529C.1.pep
MAPRGHDMNLGTALQLLQESTASARQLKLSFALLAHGFQLSLRDIRGNMFTQVYLVKSALSADAAETAASYRMAMRGRRGEKEAQVQLQQLAASGAMNDEIVAECGSACRQAVGGAGESPGPRLGRVHVCLINHPGRPSTPDKPR

SEQ ID NO: 159122 - protein, 2013 aa, Oryza sativa
  unsure (1)..(2013): unsure at all Xaa locations
  Clone ID: PAT_MRT4530_5852C.1.pep
SNLFDYDLVDPRTSVPQYPLYPVYGYPPSTVARQVGGLGAQGSTTMTSSFTDNSVNTNLNQGVPTSTTLVWTQVGEIVFPVYTTVPISAGPPMAGNENAVATTRGDSMSKNPPAEAEIGTSTTSEPEKDPSAAKPCLSNMNHKPTRITSEVTRSWCPIHKTRKHTLQACWVFLNVHAEIRACKERGIQRTSPTRDVHCPIHKTKNHGLSSCKVFLSAMKMPPPKVQQSRIPIRDKDKEQVATPISDRFVGVIDIDPHEPLVLHLLKDYGSSTTSTPREVLAIDDVGTSARTNAEAENQVTTPAQLIRAVNAILRETPYDPVLNDDLARWTERLXESVTNLSNAFEEATAAAXQNSXPIGNANGENPERRESPHRVTPPPRGTGDLRDHLNGHRDTRRTRDNENHSRRHVSSRRHDRRPRPXNRHDHDDRERRVQGDTGRGRRHNDDDDGDRRRDNNGRRRQDSREPGRRPRNRLPEPSDPSSSSSSSSSPSSDRHPRRTYDCRQPTAPSAGCRAFGRSLRDVRWPERFRPGAIEKYDGSTDPEEFLQVYSTVLYAAGADDNALVNYLPTALKGSARSWLMHLPPYSISSWADLWQQFVANFQGTYKRHAIEDDLHALTQNPGESLRDYVRRFNEXRNIIPEITDASVICAFKSGVRDRYTTQELATRRITTTRRLFEIVDRCAHADDALRRKNDKPKTEGEKKPAKDAPESSKKKNRKSGKRKAQSEVLATEYADPPKRPDPQGSDTKKAWYPIHKSDIHSLEDCLIFKKSLAKHMASKEGKRVRMVEKDAKAPTRESDSAYPDSDLHVSHIFXVPRRRYSIVVEPTIRNIKVARVLIDGGSSINLLFASALDAMGIPRSELTPTDQSFHGITLQSSSKPLGKITLPVTFGQANNFRTEQITFDVAKFYTAYNAIIGRTALAKFMAASHYAYQVLKMPGPKGTITIQGNAKLAVQCDKRSLDMVEHMPSPPATAEPPKKVSKTNKTSKPDDAIKIVPLSSANPDKTELALITFLRDNADVFAWQPSDMPRVPREVIEHKLMVRPDAKPVKQKLWRFAPDRKQAIREELDKLLKACFIREVRHPEWLANPVMVRKANRKWRMCVDFTDLNKACPKDHFPLPRIDQLVDSTAGCELSFLNAYSGYHQISMAKEDEEKTAFNTPFGVFCYIKMPFGLITAGNTFQRTVQGALSDHLGNNVEAYIDDIVVKTKTSDSLIDDLRETFDNLRRYRLMLNPEKCTFGVPSGKLLGFLVSGRGIEANPEKIKAIENMKSPTRLKEVQKLTGCMAALSRFVARMGERGQPFFALLKKQDKFVWTQEAEEAFIALKRYLSNPPLLVAPQPNEELFLYIAATPYSVSTVIVVEREKVQXPIYYVSEALHDAKTRYPQIQKLLYMVIMTSRNLRHYFQAYRVTVVSSFPLGEVVRNKDVVGRIAKWVVELSQFDIHFVPRTAIKSQVLADFVADRTMPDNRSDNXFDGALNSQGAGAGFILTSPSGDQFKHAIHLNFRATNNITEYEGLLAGIRAAAALGVRRLIVKGDSELVANQVHKDYKSSSPELSKYLAEVKKLEKRFDGIEVRHVYRKDNIESDDLARHASRREPLEPGTFLDVLTRPSVKEATGEDSPVAPNIGSGATEAERAVADIETTNDWRTPLIKFIGSEELPEDDAEADLYKKAPNGVLLKCVSSDDGRHLLLDIHEGIYGSHAASRTLVGKVFRQGFFWPTALKDACDMXTHKAASASTLDYPSHLAVLVLGARYTRAIPTRTGRLQVPIXVAIDKFTKWIEATPTGESKADNAIKFIKGIFCRFELPHRIITDNGSQFISADFXDYCIRLGVKICFASVSHPQSNGQVERANGIVLQGIKTLLWAVRXTPTTSNKETPFFLVYGSEAMLPTELXHKSTRVQKYSDEDQEEQRYNDVNLLEKHRERVAVRAASYQQALLRYHEKRIRARTLSIGDYVLRRVQSQAGRNKLSPKXEGPYMITQVLRPGAFKIADGDGRELANSWNIDQLRKFYV

SEQ ID NO: 159123 - protein, 104 aa, Oryza sativa
  Clone ID: PAT_MRT4530_58530C.1.pep
GSPQGPTQRSDSQGGWNPSDAQEAVRPHPESAPFKVARTRRRHDGDGQNCTEPGPHHGTGPAKNLARMCSRGPRASPAAPRRTRTANENRAPTLPTDVTLSVLP

SEQ ID NO: 159124 - protein, 1166 aa, Oryza sativa
  unsure (1)..(1166): unsure at all Xaa locations
  Clone ID: PAT_MRT4530_58531C.1.pep
MAARARETLRKSASSSSSSPYARSTDDGPVASASCDARLERCCREVGAAVAVVEEPERVVSGGGALPEFVGEGGGEGIYRVPLRTTLHPWLPPPLDERPQPRRETQVESFLRTLACEPRQGLLXSSLGVRIPRAGARRRVRRRRWRGAPRRLVERAPQGVYARSARALRLGGRXIAVVWTCYKDWRIMTCRNDLAAGSEDNVAMVIREALTWQAHSRTPVLSMVITSYGEIWSGSEGGVIKAWPWDVIAKSLSLMPEEKHVAALRIERSYIDLRNNAAAGNISSFPAADVKHMLADHSRAKVWCLTSMAFAVWDARTRELLKVFGMDGQIESARLEAPVMPEQFIEEEIKAKPVKKDKPQSSFNFFQKSRNALMGAAGAVRRVATKGTFVEDNRRTEAVVQAMNGTVWSGCTDGLIIMWDGNGNRLQEFQHHCSSVQCMKALGERVWVGYASGIIQVMDVEGNLLAEWTGHSCPVIQMAIGGSYVFTLAHHGGIRGWPLASPGPLDDILRTELSNRELSYRRLVNIKMLVGTWNVGQEKASYESLMSWLGRAFFDVDLVVVGLQEVEMGAGVLAMAAAKESVGLEGSANGQWWIDNIGRTLDEGISFHRVGSRQLAGLLIAAWARKDLKPHVGDVDAAAVPCGFGRAIGNKGGVGLRIRVYDRRICFVNNHFAAHLENVSRRNADFDHIYRTMTFNKPHGSAASATSVQLHKTVNANGNQVDEDIPEMAEADMVVFLGDFNYRLYGITYDEARDMVSQRSFDWLKERDQLQAEMRAGKVFQGMREGLIRFPPTYKFQRHLPGLAGYDSGEKKRIPAWCDRILYRDSRDVLTAECSLECPVVAKITSYEACMGVTDSDHKPVRCAFSVDIARVDEFTRRQEYGKILQSDKRLHSLLRESHFVPDTIISTNNIILENQEHVVLRITNDCQRNKAAFEILCESQSISKQDGTKSEFPPRASFGLPLWLEVEPSVGLIEPGQTMEVTVHHEDYYTQEVFVNGVLQNCWCEVTRDKEAVLLVNVTGSTSTETITHRINVRHCCSTISASPPINPPSITTPSVDVLSGEASTRSSKKNPLNYLQRSDFKPFGSSERTHGDTKYSLQVEYKESYFESFPFRSCCLIQLNSPSDLQLVPEMDAVLPTQLKETTQKVLVELRWKFEPSSSKTDFA

SEQ ID NO: 159125 - protein, 285 aa, Oryza sativa
  unsure (1)..(285): unsure at all Xaa locations
  Clone ID: PAT_MRT4530_58532C.1.pep
MGEGQLGELPLLELNILTLDVSCMLNSLTERSILKLKLFGYTSGTFGQVLECWDRERKEMVAIKIIRGIKKYRDAAMIEIGMLEQLGKYEKSRSRFXSRSPKEGSYFKQLPKSSAIKVIDFGSTTYDQQDQTYVVSTRHYRAPEVILGLGWSYPCDIWSVGCILVELCTGEALFQTHENLEHLAMMERVFGPLPCHMLKRADRHSEKYVRKGRLNWPEGCASRDSMKAVMKLPRLQNLVMQNVDHSGGEFIDLLQGLLRYDPASRLTAQEALRHPFLREQSERRR

SEQ ID NO: 159126 - protein, 360 aa, Oryza sativa
  unsure (1)..(360): unsure at all Xaa locations
  Clone ID: PAT_MRT4530_58533C.1.pep
IRNGCTPWTDGRRNLLIACIIFXSVANAHKPKGFICYPCKKCKNQKEYSTSRTLHIHLLKLGFMPSYNCWTSHRELGVVMEEVDEEDDNIPDCAQYDGFVGKVDRVVEENVVADDLGQMLCDVKMDCENEKEIQKLEWMLADHKASLYSGCEQGHKKLSTTLEFLHWKAKNEVQEIHACLNDCILYRGEEYENLEACPVCNALRYKIIGDDPGDVDGQPLKKKISAKFVTVNDCSGLSNLSEQSNKRYKACTHFLDDTYSKYLKHCRKVVYMSHRRFPVASHPVRKKDKHFEEKVDHRTKPKYRNGKTVFVMVKDLKVVFGKGPGNHLIASVYGKLKDTFKGRNDLKYMKQHDGLHPEPK

SEQ ID NO: 159127 - protein, 89 aa, Oryza sativa
  Clone ID: PAT_MRT4530_58534C.1.pep
VQSSPDRFVGVEFLPSSCFVLGAPLIFPHVGLQSFYMSRGSSYSIGYSPMPLTQCSGVDGWMNVVRKQPFVSSATLLGRSVAGWMNEWV

SEQ ID NO: 159128 - protein, 95 aa, Oryza sativa
  Clone ID: PAT_MRT4530_58535C.1.pep
LPLPTPSPVLAHPHLHPLTPAAPLVSAAAGGGGRCWWSGGEGHERQRWRETARGRWSVVGGGRARCESSVGCGSRQGHARAVAEAVGRHQPGVQL

SEQ ID NO: 159129 - protein, 137 aa, Oryza sativa
  unsure (1)..(137): unsure at all Xaa locations
  Clone ID: PAT_MRT4530_58536C.1.pep
MIIKFQSAHDTYSTNGLRGRGSDTMFKRDAPSTDMISGLPEGVLHRIMSFLTLREAVQTCVLSRRWRNLWLSMPLINADYKQFFEMTDTKAGYDEALAVAVPMFKRFVNRLLELRDPVASIDKXWLWASIXDDNEDD

SEQ ID NO: 159130 - protein, 113 aa, Oryza sativa
  Clone ID: PAT_MRT4530_58537C.1.pep
MAPSEAAAAHDAEIDPDFSGGGGGGPTFEFAFNSVNFSHRVLPIEVYPGDDHDNDDHAPGFTLDSGAHSLYDWARHRKRRREEVLKEKESEAVMPDHINCKVEPQECDAYEEN

SEQ ID NO: 159131 - protein, 639 aa, Oryza sativa
  Clone ID: PAT_MRT4530_58538C.1.pep
MAFGVSGPGSGDGVAAAARFGAHVVRGRWFMFFASILIMAAAGGTYIFGIYSKAIKTSLGYDQQTLNTLSFFKDVGANVGVLPGLINEVTPPSVVLAAGAAMNLAGYLMIYLAVSGRTPRPPVWLMCLYIAVGANSQSFANTGALVTAVKNFPEDRGVVLGLLKGFVGLSGAIFTQLYRAIYGADDDGASLVLLMAWLPAAISLLFIPTIRIMPRDAAAAGADARRRRERKAFFYFLYASIVLAVYLLVMNVVELEVVGFPKPAYYVTATVLLLLIFFPLVIVVKQELNTYLQPPPPPTTTSSTVDEKKEHDGGGGEDDKPVACMQDVFRPPARGEDYTILQALFSVDMAVLFVATICGIGGTLTAIDNMGQIGQSLGYPQRSISTFVSLVSIWNYAGRVAAGFGSEYVLAAYKLPRPLALTAVLLLATAGHLLIALGVGNGLYAASVILGFCFGAQWPLLFAIISEVFGLKYYSTLYNFGAVASPVGSYILNVRVTGHLYDREAERQLAAAGGGAAARRGSRDLTCAGVRCFRVSFLIIAAVTLLGAAVSLLLAWRTRKFYRGDLYGKFREVAMAGGEEGGARQVKVDDEASGSSGGGGNGTTKANSRRYKFTLWINMVNPTYDSGRVAEAETQIEYM

SEQ ID NO: 159132 - protein, 68 aa, Oryza sativa
  unsure (1)..(68): unsure at all Xaa locations
  Clone ID: PAT_MRT4530_58539C.1.pep
FPTLYPLEQCAFDFSVEAYRXCLXGIVHRWSYTFPANVARARITGRRSLLRWQVYPFCAGAPMVVLRQ

SEQ ID NO: 159133 - protein, 356 aa, Oryza sativa
  unsure (1)..(356): unsure at all Xaa locations
  Clone ID: PAT_MRT4530_5853C.1.pep
MGRDKARRLSGSRHFRQRVVLATLTSTAITIDDIRSGGAAPGLRPHEGXKLRYKPGVIVGGRDLEHDCGVHRGIGYFLEPLILLGLFARAPISIRLKGITNDTKDPSVDTFRMVTLHMLKQFGVPLEGLELKIESRGAPPLGGGEVFLRVPNIKSTLKAANWADEGMVKRIRGVSFSTRVSPQIENRIIYAARGIFNRFIPDVHIFTDHRSGSAGGRSAGYGVSVVAETTTGCLLSADATVSYPNVDEMNEESENLELTSPEDLGVQVASMLLEEVAQGGVVDSAHQGLLFILCALSPPDVSKVRVGQLTPYAIETLRNIRDFLDVKFIIKPDPNSNTVTLKCVGAGVKNLARKTS

SEQ ID NO: 159134 - protein, 229 aa, Oryza sativa
  unsure (1)..(229): unsure at all Xaa locations
  Clone ID: PAT_MRT4530_58540C.1.pep
PRVGLGRRGLVFWPRRWNGHTTVVGEYIFTDQLHLVPPNGVSAYTVGWSHHRCWASTSSPTGCLRRRRPVFPPKQLDGHTTVDGHLHHHRRLASVAADWCFRLYGWMVTPPLLGIYIFTDRLPSPPPTGVSAYTVGCHXHRCWASTSSPIGCLRRRRRVFLPIWLVGHTTVDGHLHHHCRLASVAADWCFHLYGWFVTPPLMGIFNITIGLPPSLQTGVFAYMVGWSYH

SEQ ID NO: 159135 - protein, 450 aa, Oryza sativa
  Clone ID: PAT_MRT4530_58541C.1.pep
MANYFPMALKGQARGWLMTQPPDSIHSWEDLCQQFITNFQGTYPRPGEEADLHAVQRKDDESLRSYIQCFCQVRNTILCISAHEVVYAFWNGVRHNRMLEKIASKKLKTTAELFELADKVAWKEEAWAWNSPGTGAVATAAPESIPRSKRRERRGERKPARSDDVGHIRAAEGPSWATRKEKAADNKPCSTTPSGEGRSADKWCSVHNTYRHSLADCRSVKNLAERFRKADEKKRQSRWEGKAPATPANDWRELLATVPTHEPARKAHWSEVKLTFDQSDHPTVLARGGKLALVVSPTIHNVKMKRVLVDGGASLSIISPAAFDALKAPGMKLQPSLPIISVTPGHTWPLGHVELSVTFGDSTNFRTERIDFDVVDLNLPYNAVLGRPALVKFMAATHYAYLQMKMSGPSVPITVFGDVKVVLACAEQRVDNLAAATEPQAPEASASRAS

SEQ ID NO: 159136 - protein, 177 aa, Oryza sativa
  unsure (1)..(177): unsure at all Xaa locations
  Clone ID: PAT_MRT4530_58542C.1.pep
MTYSTLPAASSSVDKPLRLHGWHIAPLLMDIIVFTDRPPRPLSTSVLAYTVGXHTTVVGHLHLHRWPPSSXADRFLRLHGWCNPLPLLMATXVFTSGXLPSPPTGVFIGIDGRLSPHIGYICYYRGNTKKLSHHLFXSLFDIXFPLPHYTNWIXIYICIIGIHGFKLIPYALGMDQS

SEQ ID NO: 159137 - protein, 248 aa, Oryza sativa
  Clone ID: PAT_MRT4530_58543C.1.pep
MEASAAEGGAAAAARTLRWAGRAGHLGGFPRAAVIAAVGAVAKAYASLLNTTTVHNADALLRLVSSRPPGTPLLTVSNHMSTMDDPLMWGFKGFPTTDAKLQRWVLTAEDICFRNVFMSYIFRLGKCVPITRGAGIYQDHMTEALEVLSTGDWVMPEKSFFGRRPPVPLWNKEIHIIVGEPVEFDLPSLKQAARTVPQDSSFERKGWPSIMPDGLDEAAQRWLYQKISDKIQSVMETLRKRLLDLKQH

SEQ ID NO: 159138 - protein, 508 aa, Oryza sativa
  unsure (1)..(508): unsure at all Xaa locations
  Clone ID: PAT_MRT4530_58544C.1.pep
MMAEALREVLPLPYFPGQPCWYLQERRGAEAWSAEENKVFERALAQVDLDSPNRWEMVAAMLPRKTVIDVMNHYRDLENDVGSIEAGLVPFPHYSSSLSPASSGFTLQDWDGSDGGFRRGCYLKRGRAPDQERKKGVPWTEEEHKSFLMGLKKYGRGDWRNISRYFVTSRTPTQVASHAQKYFIRLNSGGKDKRRSSIHDITTVNLPEEDTSNPSPSPPSVLTTASDPLACLVDRRPVAPRRALVGSXMGLKTYGRGDWRNISRYFVTSPDADATVSAGAEAMLTLVTAGGNGGGPSSDDDIATAQLIETATTRPRPSRPPVSASDWHASWLXSCFIRLRIAKYWTEGPLTGYCFDQEHQGIPRDRNPXSVLDTAYCIXSMIYLLTCLWVPKRPHRRATRVYVYMNRARVVEPASEPASGLIXDPKREMNXSGTPGPFIFRSGFLCSDDVERNSCSSSGPVFYSSDPILFNGCERKSAIAAIALLGRHVRPRLRANIQILQMDDIIEE

SEQ ID NO: 159139 - protein, 294 aa, Oryza sativa
  Clone ID: PAT_MRT4530_58545C.1.pep
MEASAAEGGAAAAARTLRWAGRAGHLGGFPRVAVIAAVGAVAKAYASLLNTTTVHNADALLRLVSSRPPGTPLLTVSNHMSTMDDPLMWGFKGFPTTDAKLQRWVLTAEDICFRNVFMSYIFRLGKCVPITRGAGIYQDHMTEALEVLSTGDWLHSFPEGKIAQDDQPIRRLKWGTASLIVRAPVTPIVLPIVHSGFEKVMPEKSFFGRRPPVPLWNKEIHIIVGEPVEFDLPSLKQAARTVPQDSSFERKGWPSIMPDGLDEAAQRWLYQKISDKIQSVMETLRKRLLDLKQH

SEQ ID NO: 159140 - protein, 65 aa, Oryza sativa
  Clone ID: PAT_MRT4530_58546C.1.pep
GLPWWAKKQTLELVSKFRLRNSQANWEVEKKGRTLSKPFTGSGDEEFKGEPFRTGSYPGGRAPIG

SEQ ID NO: 159141 - protein, 339 aa, Oryza sativa
  unsure (1)..(339): unsure at all Xaa locations
  Clone ID: PAT_MRT4530_58547C.1.pep
MARPLGQQQVGAAAALVIVVACCVVAGCSGARGRGFREEFDVIWGEDHVRVTDEDDAATRQVVALTLDQASGSGFQSKDQFLFGEFSMEMKLVPGESPGTVATFYLTSEGDAHDEIDFEFLGNVSGEPYVMHTNVFAQGRGNREQQFYLWFDPTADFHNYTILWNPLNIIFSVDGKAVRVFKNHEAAGVPYPSGQAMRVHASLWNGDFWATRGGQVKINWTAAPFVASYRTYAYSACAVPAAGGGGGGPCTSGQLPNSTSSPSTCDCGGAWMDRQLASADGERDVAWARANYMIYNYCGDXKRFPQGLPAECSLHEIVRISHRRRRRRRRSPAEQNGRK

SEQ ID NO: 159142 - protein, 101 aa, Oryza sativa
  Clone ID: PAT_MRT4530_58548C.1.pep
MVYHSFRAEESGEIYLRSSELDTGKIPASKPVPFRHNTNSNSVPNPGSKTGKSDDYRCEMGTLLSLYLQQECDKHRKEQEEGDSPILLQMTVFIISLIDRP

SEQ ID NO: 159143 - protein, 495 aa, Oryza sativa
  Clone ID: PAT_MRT4530_58549C.1.pep
MKETNLTTVVLGSSKRKVATTVPRANEGSYVEEADPRRLTTTTTTKTDTVRVNIEKMLEQLSRPARLDGYSIYRVPASVRDSVDNKHYEPRLVSIGPYHRSKHHLRAMEDRKRLYLLRFLHDQHDDDDGSGRRDGLLQDCVGRVRKLEARARACYFESPATGDGEDDDDMFVEMLLLDGCFVVQLFIQWFCGATDPVFDVGWNLPLLHTDLLMLENQIPYFVLLALYDAYSHDPNRPPSARPKPSLTTIITSYFSEKEGRQPATTTATEDAIDHLLHLYHSTFVMPPPDHLPAPVQADCGGKLPRTIRCAKELTMHGVKFVRKPETTNVLDVTFCRDTGVFQIPRVAIEDSTCIRYMNLVAFEQCRGEAAVAEKHLTSYVVLMDYLINTAEDVVILDRADVMENKLANEEEAAKFFNQLRLSSYINYDDHYLAPVYRDVDAFCRRKWPKYKAKFRRDYLNSPWAIFGFCLATTFAVITLFNTIVTILQTFFHLFK

SEQ ID NO: 159144 - protein, 136 aa, Oryza sativa
  unsure (1)..(136): unsure at all Xaa locations
  Clone ID: PAT_MRT4530_5854C.1.pep
EWLSIMIEEAVLVECXSRGPEMDEXPLVEHVRRPPCSRVWPDVHEDEPYLKPVLSDXKMPHVVPHITSACNWTREXMAPLAALNVLGKINGYPIWGNPNLVEPFLKEDASTFSCIAPAFVNAITDSVLAHRYKTST

SEQ ID NO: 159145 - protein, 118 aa, Oryza sativa
  Clone ID: PAT_MRT4530_58550C.1.pep
MVLGLEKAALMPSSMYPRSLAVVEEEGQHRAPAIRKKGRRRQHQGGREAPPADASRGGSSGGWGERRQHSLQEEVAAFASYRGDGGVWDSFYEVGSWMNFLRIWGYSARKLTFPDLAK

SEQ ID NO: 159146 - protein, 83 aa, Oryza sativa
  Clone ID: PAT_MRT4530_58551C.1.pep
MESLRIAVGAVKHGGGPVAAAALGAVVAQRLPSALATLGAAAVPIGAGGTRRCGGGRRLPSAPVALGAAAVQEDDGSYRCRQP

SEQ ID NO: 159147 - protein, 87 aa, Oryza sativa
  unsure (1)..(87): unsure at all Xaa locations
  Clone ID: PAT_MRT4530_58552C.1.pep
GXVVVACARPNPHMPCVPSACTICACAXICPCVPVLIATMSAKNPELVHSEGFSHIXXVQAEIFLFCNCSGNXMLDHXSCFPGKPXX

SEQ ID NO: 159148 - protein, 55 aa, Oryza sativa
  Clone ID: PAT_MRT4530_58553C.1.pep
MSHDDGAKPLVLAQRWPYLEAAEVGAKPPTVLALRSHDVPKVATSDTISASRKLK

SEQ ID NO: 159149 - protein, 756 aa, Oryza sativa
  Clone ID: PAT_MRT4530_58554C.1.pep
SGSAGEPLLRKRTMNTTSQIAIVGANVCPIESLDYEVVENDLFKQDWRSRKKKQIFQYIVLKWTLVLLIGLLTGLVGFFNNLAVENIAGFKLLLTGNLMLKGKCRYLTAFFAYGGCNLVLAAAAAAICAYIAPAAAGSGIPEVKAYLNGVDAYSILAPSTLFVKIFGSILGVSAGFVLGKEGPMVHTGACIANLLGQGGSRKYRLTCNWLRYFKNDRDRRDLITCGSAAGVAAAFRAPVGGVLFALEEAASWWRSALLWRAFFTTAVVAVVLRSLIEFCRSGKCGLFGQGGLIMFDLSSTVATYSTPDLIAIIILGIIGGIFGGLFNFLLDKVLRVYSIINERGAPFKILLTITISIITSMCSYGLPWLAACTPCPVDAVEQCPTIGRSGNFKNFQCPPGHYNDLASLFFNTNDDAIRNLFSNGTESEFHMSTLFIFFTAVYCLGILTYGVAVPSGLFIPVILAGATYGRIVGTLLGSISDLDPGLFALLGAASFLGGTMRMTVSVCVILLELTNDLAMLPLVMLVLLISKTIADNFNKGVYDQIVVMKGLPYMEAHAEPYMRHLVAGDVVSGPLITFSGVEKVGNIVHALRFTGHNGFPVVDEPPLTEAPELVGLVTRSHLLVLLNGKMFMKDQLKTSGSFVLQRFGAFDFAKPGSGKGLKIQDLDFTDEEMEMYVDLHPVTNTSPYTVVETMSLAKAAILFRALGLRHLLVVPKTPDRPPIVGILTRHDFVEEHIHGLFPNLNPHKFHSTSMGG

SEQ ID NO: 159150 - protein, 119 aa, Oryza sativa
  Clone ID: PAT_MRT4530_58555C.1.pep
MKGEDEAHCLGQLFVIFIILVPKLTRDCGNNSHGQVNNRVLSEWIGIVLYRAGFGISEFYLEIKGLTEAYISRPLIMGASVRSNIITAYQSHNNPLVNTAYSRFLSPMAKPHDKPKQGS

SEQ ID NO: 159151 - protein, 809 aa, Oryza sativa
  Clone ID: PAT_MRT4530_58556C.1.pep
MEGQSQHRAPEREGSHNYDIESTDGSGGLWRRNGSSSGALLRYNDSGGGRSGSAGEPLLRKRTMNTTSQIAIVGANVCPIESLDYEVVENDLFKQDWRSRKKKQIFQYIVLKWTLVLLIGLLTGLVGFFNNLAVENIAGFKLLLTGNLMLKERYLTAFFAYGGCNLVLAAAAAAICAYIAPAAAGSGIPEVKAYLNGVDAYSILAPSTLFVKLIKFENLTVDMTVFIIDCWKYYEPVCSWYIFGSILGVSAGFVLGKEGPMVHTGACIANLLGQGGSRKYRLTCNWLRYFKNDRDRRDLITCGSAAGVAAAFRAPVGGVLFALEEAASWWRSALLWRAFFTTAVVAVVLRSLIEFCRSGKCGLFGQGGLIMFDLSSTVATYSTPDLIAIIILGIIGGIFGGLFNFLLDKVLRVYSIINERGAPFKILLTITISIITSMCSYGLPWLAACTPCPVDAVEQCPTIGRSGNFKNFQCPPGHYNDLASLFFNTNDDAIRNLFSNGTESEFHMSTLFIFFTAVYCLGILTYGVAVPSGLFIPVILAGATYGRIVGTLLGSISDLDPGLFALLGAASFLGGTMRMTVSVCVILLELTNDLAMLPLVMLVLLISKTIADNFNKGVYDQIVVMKGLPYMEAHAEPYMRHLVAGDVVSGPLITFSGVEKVGNIVHALRFTGHNGFPVVDEPPLTEAPELVGLVTRSHLLVLLNGKMFMKDQLKTSGSFVLQRFGAFDFAKPGSGKGLKIQDLDFTDEEMEMYVDLHPVTNTSPYTVVETMSLAKAAILFRALGLRHLLVVPKTPDAKFENYTPFIHFY

SEQ ID NO: 159152 - protein, 108 aa, Oryza sativa
  unsure (1)..(108): unsure at all Xaa locations
  Clone ID: PAT_MRT4530_58557C.1.pep
EIGGSGVDARSKARTLXGIVTDPSKLPKWDYDGYSTVHAIIEDREGILLPEAVFRDTFMKGNNIIGMGERYKXSNIPILTNKRLIAGKIFRFDAAVYWEPWAGIDQED

SEQ ID NO: 159153 - protein, 181 aa, Oryza sativa
  Clone ID: PAT_MRT4530_58558C.1.pep
MALAAAARGESTALALALAPPPPELHFRCSLCGKAFASYQALGGHKASHRKPSAAAAAPPAHRDVVVAAAPASSGRVAADADAASEADGRRRRHVCSLCRRGFATGQALGGHKRFHYLHGPSVSATVSSAATAASVGAAFDLNVAPIKEIAGEQRRCGEEADDDDEAESPSPAKKPRRRPG

SEQ ID NO: 159154 - protein, 102 aa, Oryza sativa
  Clone ID: PAT_MRT4530_58559C.1.pep
NICSPFCFSDSHNSERDAARVEGAFAFSPFPTPRSLTRCSRAFCYLSQAQLQRSPQYRDIPRETICQQSARKATATEKTPTLSRFYICSPPVRSVTNISSID

SEQ ID NO: 159155 - protein, 233 aa, Oryza sativa
  unsure (1)..(233): unsure at all Xaa locations
  Clone ID: PAT_MRT4530_5855C.1.pep
MTSAMTSPPAAAARRLGLAXLAGERRHGGANRRHQRVADGTANSPATKEEAAALFGXRRRRCSGGLQRQRRGGRGRRRLGDHDGGLPERRRRLERRRRTAGATATTAALGHTALRRFRRREAKAKVAAGARRRRRRPTAAGDEKESSGKTNPKQTRIHEFPNDFSRCFQRRKGRGDREDHFPSIDSAGNGKXGGPHLSAGGRARAAADWAGWAEEREKRGFGPTFGPKPKEDF

SEQ ID NO: 159156 - protein, 95 aa, Oryza sativa
  unsure (1)..(95): unsure at all Xaa locations
  Clone ID: PAT_MRT4530_58560C.1.pep
TRSLALQAKRPNSPARVWLGTFATAEAAXRAYDRAARRIRGAKAKVNFPNEDPPLDDPAADGTATAAPPSRAGSSWTTTSWRATSPRVVRAEEWT

SEQ ID NO: 159157 - protein, 70 aa, Oryza sativa
  Clone ID: PAT_MRT4530_58561C.1.pep
RSFPSSLLVSKNIRFSFPSGGFTFFFVPKRKAPSFGAPGGGWGATKFLFSPPMIPLGLNYSFPCLRLTLC

SEQ ID NO: 159158 - protein, 85 aa, Oryza sativa
  Clone ID: PAT_MRT4530_58562C.1.pep
MAQGGAHRGGCCLLLFLVLLALSLRTSCVVGQQSQFKKIYIIYLGERRHDDPDIVTGSHHDMLASVLGRQRRENSIALMETWTLK

SEQ ID NO: 159159 - protein, 104 aa, Oryza sativa
  unsure (1)..(104): unsure at all Xaa locations
  Clone ID: PAT_MRT4530_58563C.1.pep
NTVYIQSTIYWHPVLKQKINNGGLHKRCKLPFTLMPQHSYYLAQTSVNAMAHDLQXQHCEDRYFAQTNAHAQDSLFFSWPYICEVYTNCYIDQRSILTGEGDSH

SEQ ID NO: 159160 - protein, 99 aa, Oryza sativa
  unsure (1)..(99): unsure at all Xaa locations
  Clone ID: PAT_MRT4530_58564C.1.pep
CSRVCFPQLYAVLKKAECEGCQXIAIKTNVNAFVSLFAGKNSVFRAXPDDVVANANRFSREXSLSYXNYRGEEHGAFTSRFQQQYYLGFLNEFESETLE

SEQ ID NO: 159161 - protein, 88 aa, Oryza sativa
  unsure (1)..(88): unsure at all Xaa locations
  Clone ID: PAT_MRT4530_58565C.1.pep
KKESKPPMCVSSNATSIGLLMVLIFSFCSSLCSSXLMIISPDDVICISTTGEDIVRYIYVPIFTNICLPIVTSPLLSIHVISCTFFLP

SEQ ID NO: 159162 - protein, 39 aa, Oryza sativa
  Clone ID: PAT_MRT4530_58566C.1.pep
LSAAVSYSAMIAATATIPFLPLFHRPVLRSVCLLRRVVV

SEQ ID NO: 159163 - protein, 33 aa, Oryza sativa
  Clone ID: PAT_MRT4530_58567C.1.pep
PLKAGLTGDRLNPYHSDCACPSGDLSCNLIVNT

SEQ ID NO: 159164 - protein, 48 aa, Oryza sativa
  Clone ID: PAT_MRT4530_58568C.1.pep
QYLEGGLTHRDYILTKVLEVARRLVTARGGSRSTLGPISPQGRATMVT

SEQ ID NO: 159165 - protein, 50 aa, Oryza sativa
  Clone ID: PAT_MRT4530_58569C.1.pep
PMIMSCCKAPVWHERQSPLCANQLRFKLRNKRKSGTQLRLVAQQSHYAGY

SEQ ID NO: 159166 - protein, 159 aa, Oryza sativa
  Clone ID: PAT_MRT4530_5856C.1.pep
MGRDKARRLSGSRHFRQRVVLATLTSTAITIDDIRSGGAAPGLRPHEVSLLHLLHKISDHHSLDLNETGTKLRYKPGVIVGGRDLEHDCGVHRGIGYFLEPLILLGLFARAPISIRLKGITNDTKDPSVDTFRMVTLHMLKQFGVPSGGLELKIESRGA

SEQ ID NO: 159167 - protein, 708 aa, Oryza sativa
  Clone ID: PAT_MRT4530_58570C.1.pep
MADPAGAGGEQEAPSVEAAFAGQPPPPWWQQVTVRAVAVSVVLGTLFSFMAMRTGLTAGFVPSFNMSASLLSFFIIKSWTRLMARCGVASQPFTRQENVVVQTCVISCATLSIYGGFTSYLLAMNETVAKAAGGGTDGRNVYTLHTGKIVAFLFLVTFSSLFCTLPLRNTMIVDYKLIYPSGSAVAGIVNSFHTPKGATKAKLQVNAMFKSVAGSFAWAFFQWFYTGGDGCGFHAFPLFGLEAYKEKFYFDFSASLVGVGMICPHLINFSMLLGSISSSGFIWPALQAKQGEWYTDPSPTSFKGINGYKVPMGVSMVLGDCLFQLGAITVKAVQHYRKGRQEQKLAVDGAADDGGGGCVPDDDDENKWHATYDERRRNQVFLSDGIPDQFAVAGYVALAALSTALVPRIFPQIRYHHVAVCYAVAPLLAFCNSYTSGLMDWSLATVYGKLAIFVVGASVGAASGGVIAGLAACGVMMVVIGDAAELMHDFKTAYLTLTSPVSMFASQAIGTALGCVVNPAVFLAFRWLAGAEHPPGDPRSAYAAPMAVAYRGIAVLGVEGVGTLPRHAIALCAACFAAAVFLDTAGAAARAARWRVGGWVPNPMAMAIPFFVGPTFAIDMCVGSLLLMAWRRADRQGAATLAVVVASGLICGEGLWTLPSAVLAMLKVQPPICMKFLSRSQIQEVRQHFVLGAADIQPAVTLTHHHHQ

SEQ ID NO: 159168 - protein, 118 aa, Oryza sativa
  Clone ID: PAT_MRT4530_58571C.1.pep
TSSGMDPDTIFLHPFFLETLSDGQDVSRRPLVDVAATIGAVCSCSYINGGRVVWLVGVGLCDTYRRAALGFDILGVYCHHLPLGPSSSTVLEICLHFFLLGSKFCLACSKICFGCGCC

SEQ ID NO: 159169 - protein, 760 aa, Oryza sativa
  Clone ID: PAT_MRT4530_58572C.1.pep
MGDLWCCEKQQQQSGISGRSCDVGEEGLRGDAVALEGSLVHVLEHDLELVGLFIHAVAPHDGRVWRTRSISDNEDGAGATEPTEFGGVRTPLSEKGLNEDVDYGRSGSSTARDVRSCCGSRSSSDSDEGGRAAADRFLAVVEEAKRRKRRAVMEEAKRRQRRPSSVGGASRGSGDGDRRAPRDAGGGGAAAVTEKEGDIGGDRATVKEAQQRWRGSSWWWRRRSSERTSGRSKHIERKQLHLRIPRYGSQLRRFGQLHAERHSSTNRLIKQQNALVLCSSASSSMSTLCCNREIGRYVSPSVEILRSSFSTVAADSIKDVARGGPMVEYERRIASGELVDGDNFQIDTIQHLQRLYEELVENEEACQLDRYQSSEKSGRRRWLWSRLITQPSTYSPVQGLYMYGGVGTGKTMLMDLFYEQLCCLEISRKHQESTWKKPSCVFLSSFYEISVFASKQFHCVMHKGVSDPLEVVAAEISDEAIILCLDEFMVTDVADAMILNRLFRHLFSKGVILVSTSNRAPDQLYEGGLQRDLFLPFIDTLKERCIAHPIGSAVDYRQLGSAEQGFYFIGKQYSLLKQKLQTLIGDEEPRPQTVEVVMGRQLQVPLGANGIAYFPFEDLCDRPLGAADYFGLFKKFHTLALDGIPKFGSQNRTAAYRFVTLVDVMYENKARLLCTADAAPIELFENIVTVAEARKISPRSSRSQKTDDPDLCVDNELGFAKDRTISRLTEINSREYLEDFEAKLRQPLQGVDNDIDVVLV

SEQ ID NO: 159170 - protein, 142 aa, Oryza sativa
  unsure (1)..(142): unsure at all Xaa locations
  Clone ID: PAT_MRT4530_58573C.1.pep
MICLHAQLHSQFSTKQPCCFCTSSVWLCIIKYRYTLLKQAEIALSELIQSSPEEALHXLHPWSKSLVKITLLDHKXKNVKLFVPACFIEVMQVLAPDPPFSDEIFKEXMFRLFISTFADLAETNSPYLPRRXLLLENVLHSE

SEQ ID NO: 159171 - protein, 46 aa, Oryza sativa
  Clone ID: PAT_MRT4530_58574C.1.pep
MEVAMVCTRVNLLILILSLCSPYKFIQSPMDFGPLNLLPTSTTASS

SEQ ID NO: 159172 - protein, 403 aa, Oryza sativa
  unsure (1)..(403): unsure at all Xaa locations
  Clone ID: PAT_MRT4530_58575C.1.pep
MAAHHHHHEHHHLLDMSSPPNASGAIISSFDHAAGLLSLHDVAAAADHHHHHLRGGGGGLQLPSPWSQQQVSLSLYNNAAGAAGSPPSSLVAHQQLAAAQPLMFXLRGSKYLGPVKALLAEFCSLDVEAMDGAKQQRPPNPNPKIGKWDDVEGSGSWGNLSLSSMDLLDLERRKARILSMVEEVACLARDLELDPRNPRIAGLRAPKLRAKRDNSTNVLAELAPTWRLRGSHAGRREVEEDAGRNGRRTAVASGGAKHGDLGESEHTGKLRGTRGVEPTARICRGMLDGGGLRRRQPAAEEGGNGDKRRIRRKRIEGGRRREALPSSGGDGGEHMASGGNERGQWGQAARTAQARHGRRPRGRVHANNGTRGPSRRARLGASHARAAPRRNGRYTGFRKHFVS

SEQ ID NO: 159173 - protein, 262 aa, Oryza sativa
  unsure (1)..(262): unsure at all Xaa locations
  Clone ID: PAT_MRT4530_58576C.1.pep
MSSPTIYIDTLFKTDEARRRRVGEADAKATLPTPAHGPTRPWIAAGAHVYTSTSSSQPCMENAKRRRRDDHKQLNWRFSCMPKLAEVPPPPPASAGLPRVNALSGAGTYRPAGTPSSSSSVDVESDEIFSVASIPVGQLTPAFAELLCMYPLHYDVFAPFADMRITAHYATAFMFPAASEPSRVTWDAMREYLPNIHFSLNPAGRGAMFLRFSTLEDRDAAVDFPGAXRQKTIESGGHILVLEKPEDNETCFRQPLDKLTEL

SEQ ID NO: 159174 - protein, 105 aa, Oryza sativa
  Clone ID: PAT_MRT4530_58577C.1.pep
MGILPFCKAPILYTVEFQKRGLPHIHCLVWLAVPTADISASVIDSFICAEIPDFDTDRLGYELVSEFMMHGSCGEANKACPCMKNDRCSKHYPKDFQRATAPDPS

SEQ ID NO: 159175 - protein, 83 aa, Oryza sativa
  Clone ID: PAT_MRT4530_58578C.1.pep
MAGAAAAAAKGSRTAAIPAKRSLAGSRLKNLMQTLQNVILVVVWKGQYLTISIFLNVEGFDIAFDEAIPTSIWFLSSFPGVSL

SEQ ID NO: 159176 - protein, 116 aa, Oryza sativa
  Clone ID: PAT_MRT4530_58579C.1.pep
MALFETLTIIPSRYGDPWYAIDDENARGHGVATAIYHPPRYRHRSQGHIPLLLHLDVARPPLHHSHSSIMQSPVIHAAIDQLSGTALHLDIATTCPADIREELVRMYPDSEAIMVD

SEQ ID NO: 159177 - protein, 93 aa, Oryza sativa
  unsure (1)..(93): unsure at all Xaa locations
  Clone ID: PAT_MRT4530_5857C.1.pep
FTNSKGQLVTTGINPPGVPFVRVLFLVPGGKAQHTQRQTRNSGRLGRRQQALDGRHELDTKAFIIQGLLFWXWEKLSKTEYNHRTQQDTPTSA

SEQ ID NO: 159178 - protein, 64 aa, Oryza sativa
  Clone ID: PAT_MRT4530_58580C.1.pep
GCFFFFTLTPIWLRVANYPPSIWSLNSYLVESRLTLFVKLLIDFLSYCMDLAIICGQILLIFLV

SEQ ID NO: 159179 - protein, 83 aa, Oryza sativa
  Clone ID: PAT_MRT4530_58581C.1.pep
AAPLASVCAPNGAASRWSRSPYPAASSHAPVAASDPCVAAVSVARLHWEQGAAVIAEGAGRSEPRDAPPPPLWVAAFSAARRV

SEQ ID NO: 159180 - protein, 70 aa, Oryza sativa
  Clone ID: PAT_MRT4530_58582C.1.pep
QQKEEEQNSRTQKQIMMNFARKKKKRRKRSQERKKEMHLLVLSENYLPSDKEKILTEVPKQSRCEQHRIY

SEQ ID NO: 159181 - protein, 314 aa, Oryza sativa
  Clone ID: PAT_MRT4530_58583C.1.pep
MAAAEAAAPIHDEAEDDLPYETIVTRKIKANHRKSVVKLLIPVMNKLGKPGTVGGTGYIVYNAGRKFLILTCSHGLDTWICPEPIRVLFDNLVVAQALVKVCERKKEVAILSVDVSLKHRELTDAGEYPPVAFDHQPVRKGDPLVLLGYPWPSSKTGSTNLGSFFGSVTNEAALVGKLKDTPPEEHMMTVNADYSGAGGSSGAPVFRGENGKVVGTNVHGGKEVLCFVTVSWIQDTLRNLQEVKKSGLGPNATIEEILESCFALLKSDEAGPSSRITRRFYLECIRDSEYVVPEHIYEGAQLISAAQACLYLFN

SEQ ID NO: 159182 - protein, 588 aa, Oryza sativa
  Clone ID: PAT_MRT4530_58584C.1.pep
MASPRPHLTAPGTVATLPTPPRAALPSSYLRFVSSTTTALRHDATNTTVGGTPFLRDNHLADAMEEDQSATYSVDDALLSSGFGRYQILILSYAGVGLIAEAMEMMLLSFVGPSVQLEWKLTSHQESMITSIVFVGMLIGAYTWGVVSDNYGRRQLSNGSQKMVCELVSMHSLFQLIVLAIVIKTGPDRRRGFLFTAIVTSGAGFLSAFAPNYVSLISLRFLVGIGLGGGPVLASWFLEFVPAPTRGTWMVVFSAFWTVGTIFEASLAWTVMPKFGWRWLLALSAVPSFVLLLFYVITPESPRFLCMKGRVTEAMDVLEKMARLNNVQLPSGRLVSDKNIELDELSTSESTTLLADAEEDDTIIEDKVSSFGGLSVAKLLSPKLIRATLLLWMTFFGNAFSYYGIVLLTSELSNGNRICAKEEVESIHSNDASLYKNVFISSFAEIPGSFLSAMIVDRIGRKLSMASMLFTSCVFLFPLIFSRTDILTRVSLFGARLCISASFTIVYIYAPEIYPTSVRTTGIGVASSVGRIGGILCPLVAVALVHSCQQTTAILLFELVIFLSGLAVSFFPFETKGCRLNDTEVVMN

SEQ ID NO: 159183 - protein, 59 aa, Oryza sativa
  Clone ID: PAT_MRT4530_58585C.1.pep
MGSRSFDLTAHAVESLAYGSHFAMAHMVIKRRYHASAGGTPKDVAILQLIAGNPYRSSR

SEQ ID NO: 159184 - protein, 195 aa, Oryza sativa
  unsure (1)..(195): unsure at all Xaa locations
  Clone ID: PAT_MRT4530_58586C.1.pep
STATPPARAAYTAASVSAQPRNHCDLRHPHRLDPGRRRSGWNAARARPDRPAQAPPPALLRGRVPAPGRAPPAAASSRPSASPSHRPPSPPVSXPSPPAPDHLLPGAAPSSPSSANATSLHRLPAAHPPGRRAAPSPQLRAWMRWPGRGAASCRAARPKPPAPRSPPRRAPCGSPPSPAPFVSGACVREQREEPR

SEQ ID NO: 159185 - protein, 100 aa, Oryza sativa
  Clone ID: PAT_MRT4530_58587C.1.pep
LFFFFFFFFFFFFFFFFFFFFFFFLERNRGDKLLLRPPKFDIPKGPGKKLPVNKTGWISSPSFQNNQLEKGGGTKSGKSQPGRNPGEEKKKPLFWKMPPG

SEQ ID NO: 159186 - protein, 81 aa, Oryza sativa
  Clone ID: PAT_MRT4530_58588C.1.pep
FVLCLYEIMHLVLGMFSNFLFICSAGKARNKSRCFRLVLWFQHGSRRQVTTSFFFKYVTHNLHNIIFIPLRHMNIFSSIQK

SEQ ID NO: 159187 - protein, 99 aa, Oryza sativa
  Clone ID: PAT_MRT4530_58589C.1.pep
MHLRALLAWLLVAALLMAGSLTCSSSSSSRLLGGADGGDSKAWAGAGDVVREYHGGGEKAAATARRSLGLRATKPMPPAPIPNRMKANAMPVSPPARIG

SEQ ID NO: 159188 - protein, 92 aa, Oryza sativa
  unsure (1)..(92): unsure at all Xaa locations
  Clone ID: PAT_MRT4530_5858C.1.pep
FFFFXFFXFFFFFFFFFFFLXKIXDXXXXPXQKXXQAHXXXXPKHXFXXXQXKXXDRXKQXXXYXRXXSHTRXNLXKXICXVXSXMXVQIAL

SEQ ID NO: 159189 - protein, 41 aa, Oryza sativa
  Clone ID: PAT_MRT4530_58590C.1.pep
MTPLSRVCQQSLQYLTIYGNEDAQAHINDLAKVYNLLPQKR

SEQ ID NO: 159190 - protein, 245 aa, Oryza sativa
  Clone ID: PAT_MRT4530_58591C.1.pep
MASVQLSAGPRVSVSPAAALVAMPSVAAAASRGRRGYRGLVVRAATVVSPKYTSIKPLGDRVLVKIKTSDDKTVGGILLPTSVQSKPQGGQVVAVGEGRSMGSDSIEISVPVGAQVVYSKYAGTELEFDGSDHLILKEDDIIGILDTDDVKDLKPLNDRVLIKVAEAEEKTAGGLLLTQATKEKPSIGTVTAVGPGPLVEDGSRKPLSITPGNTVMYSKYAGSEFKGEDGEYIVLRVSDVMAVLS

SEQ ID NO: 159191 - protein, 109 aa, Oryza sativa
  unsure (1)..(109): unsure at all Xaa locations
  Clone ID: PAT_MRT4530_58592C.1.pep
RRRGKENDGVGSVLRLDVDGGAHTRRXARELGGWEGRTRHGVGATWRRRKGSSDGFLEKEKTAEEEGKARQRRRRTNTARCQRRRKLAARLGVGPAWAEGEKEFRPNLS

SEQ ID NO: 159192 - protein, 550 aa, Oryza sativa
  Clone ID: PAT_MRT4530_58593C.1.pep
MLSLAASSLPSTRTHRPDAASHSSSSSVRLLRSLARSRRADLAHRALLLFRSLQSTPSPPPPHVSLPAVLSAAAFLSALPEGRQLHALAAKLGLAPSHTVVANSLLHLYSSCGLPGAALDLFRRIPDRSLVSWNTAVDALVGNGDHLAALDLFREMQRDTELAPDAYTVQSVLGACAGAGALSLGVYAHALLLRELGGDGDGEAVSRDMLINNSLVDLYGKCGALELAQQVFDRMPARDLASWNVMILTLANHGRVCESVELFDRMTQVEKMAPNAITFVAVLSACNHGGLVEEGRRYFAMMVDQYRIKPRIEHYGCMVDLLARAGFIEEALDIVAGMNCRPDAIIWRSLLDACCKKNAGLELTEAMAKLALEVPDDAVSGVYVLLSRVYASAQRWNDVGMVRRLMVEEGVKKEPGFSSIEMDGLVHQFVAGDTSHPQSEAIYEKLDEIQLKLTSAGYKPDLSEAPLVASIDNAKGAALRLHSERLAISFGLLNATPGAPIRILKNLRVCKDCHTISKLISKLYGVEIIVRDRIRFHHFKDGSCSCKDYW

SEQ ID NO: 159193 - protein, 83 aa, Oryza sativa
  Clone ID: PAT_MRT4530_58594C.1.pep
MSPLLLVGELAELIALALHLFRSRELVPFGESMIAGTEARSGASSRERRGERGDRMHHTASQLSHLWTQKLQMRWGVMASDRI

SEQ ID NO: 159194 - protein, 81 aa, Oryza sativa
  Clone ID: PAT_MRT4530_58595C.1.pep
RFVFAIFQMATEESKNFQERNIYLVLVPNKIAIQKEQDELNKKDTAIEDSDQSDDQPEESEPVPAQPEESKETETEVSANV

SEQ ID NO: 159195 - protein, 58 aa, Oryza sativa
  Clone ID: PAT_MRT4530_58596C.1.pep
FFFFLIINFNNVLGFILTEALCLNLHDIFYSDCITPSVATCHTRMMHELYFSPVTTIL

SEQ ID NO: 159196 - protein, 52 aa, Oryza sativa
  unsure (1)..(52): unsure at all Xaa locations
  Clone ID: PAT_MRT4530_58597C.1.pep
ANASALKVTCXLLRIFVTKAVQRSAFIAKAEGTSTIEPTHLERVLPQLLLDF

SEQ ID NO: 159197 - protein, 147 aa, Oryza sativa
  Clone ID: PAT_MRT4530_58598C.1.pep
HEGLHLSSSCTRYPFLLQHVRINFVFSRGSQTFNASIALVTSRRVHFDPTTPHALVRGCQNPTRFRPFPSISPLFVSWPWSASPCSLRSAGQNLVLSGTAGSPWPGTRAGIRRGSWLEALGWVSGRRPPGMAEEHDHHGSSRHMSAS

SEQ ID NO: 159198 - protein, 102 aa, Oryza sativa
  Clone ID: PAT_MRT4530_58599C.1.pep
DYKTEFWSLKHRIELPVPDIKGKLDDGDDWSAMVLSEDGDVLVLVYYRQWLLYIGTDGKLLASFQHDVGCHYNTPLKLKQSLVPHAFFPLLKGYVVNARPFI

SEQ ID NO: 159199 - protein, 199 aa, Oryza sativa
  unsure (1)..(199): unsure at all Xaa locations
  Clone ID: PAT_MRT4530_5859C.1.pep
SRVSTSWGFVXSRVDQAEGRGARTGSMGVGPTRQPHGLRWTGCTRLTPAGAVGPTRQPHPRARAADGRAPHGSRGARPKAATPARPTGGGAPAPRWSRPATNSAAERRPIQNREGASERSGPRLTXGRRAKRRGGRGRRGRGEAEGGDAESGGGPERLRRRTGARRRRRRERKTARARIRRGGEAASGGNGGGEHGGGL

SEQ ID NO: 159200 - protein, 157 aa, Oryza sativa
  Clone ID: PAT_MRT4530_585C.1.pep
MDSPAIPTDFSPLLRLAPRNEQCYTKENLEKGIYDVIADVIIAGHGTVDTTTGKRGLGWAIRGHLRVEDDDANSPVQRTTTDNDERRPATRFNGGTVRLDGGDGAPVVFGGCEGADGVPLLRAHPTAATDGSGDDASGGGSTGDERAREMGQTKEDD

SEQ ID NO: 159201 - protein, 58 aa, Oryza sativa
  Clone ID: PAT_MRT4530_58600C.1.pep
AILYCTVSFQSYVFVQSYLDFPGNRQSSPMSFQNSRTSESPEVTPYDICPSVISMYGT

SEQ ID NO: 159202 - protein, 234 aa, Oryza sativa
  unsure (1)..(234): unsure at all Xaa locations
  Clone ID: PAT_MRT4530_58601C.1.pep
TPTVNPLFFFLLLSSSFFFSIKVEGIVKLRPLRRRQXGAAALRWLEGGDVGVHACSRARRTRGGRCLVEREREMAGTATTRAQLWRVKEVVMVAYRMAKGEGKLEKWVRRREASMVARGFGXCCSGKGDWAWQDGGRHGRERRRAGXFIGXEAVVRGGXGGGGRGRHGNGXREEKNDGGRLRFLSGDGRGVGGGVSRARHAHGRRRRLRWGCYSRGRESSERHPRLQPEERRRL

SEQ ID NO: 159203 - protein, 55 aa, Oryza sativa
  Clone ID: PAT_MRT4530_58602C.1.pep
RSICPSLEPQEESPFIPVGNPKPPASSSGTTLTKNTRLEVIPRPPQNLKIYMPIF

SEQ ID NO: 159204 - protein, 83 aa, Oryza sativa
  unsure (1)..(83): unsure at all Xaa locations
  Clone ID: PAT_MRT4530_58603C.1.pep
APAGDPRVADGGRSQKXXXXGFXCXQXGGXGXLXXXRXWXXRXXEFGPGXXXGRPLXTAXFPXXHGAVRCVNVELLDXTLIXX

SEQ ID NO: 159205 - protein, 179 aa, Oryza sativa
  unsure (1)..(179): unsure at all Xaa locations
  Clone ID: PAT_MRT4530_58604C.1.pep
AAKSIFYQSIXKTWAPLKCKFFSXLVTXNRVWTADRLEKRGWQNQKICLLCYNVDESALYLLAKCXLTERIWAEMQRWTGTDLQMNNWHSYHSVEXWWTLVTKSPNTPRKPLRTLVILISWEIWCERNARIFRNNAYSLSSILAKIKEEERAWVKAGASIHRRSMLPWCAKKTGSRAAE

SEQ ID NO: 159206 - protein, 162 aa, Oryza sativa
  Clone ID: PAT_MRT4530_58605C.1.pep
MKKTYSFPTFSQMYANEARIVKKVKEYIRYQFRTILCNKERQQFVHYLQHNTQWQPLFNHEPYRVNTLLEKYCNRSFNKSERLEAILTNFMLMEKLLPLALCRALSEGKSIEIAKLTDNLKICLMANQLDPLEGFWAITLRDHQDMMIYHASFSFIKPNGLL

SEQ ID NO: 159207 - protein, 74 aa, Oryza sativa
  Clone ID: PAT_MRT4530_58606C.1.pep
MPHKETPKDAGRITACACPADRDLAWHLHQNHHGPAVALAACFALGPCGSGSRGASSCMRGTTAALVPMPMQPL

SEQ ID NO: 159208 - protein, 112 aa, Oryza sativa
  Clone ID: PAT_MRT4530_58607C.1.pep
MNQQLGDLLETGKGADVVFEVAGQTFAARSPVFSVELYGPMKESEPTGVVCVQDMEAQVFKALLRFMYTDSLPKMEEEEGVMCQHLLVAADRYNLERLKLICEEKLCKGKLF

SEQ ID NO: 159209 - protein, 105 aa, Oryza sativa
  Clone ID: PAT_MRT4530_58608C.1.pep
AIIDTISTGFFNIAPHINMSKHNKVPHSQQQHITCPSKARAITVPRRISQPETEGHLSLLTEYKFGIYNQPARKRSANHTNTKIYTMTRCNKLKYKCHHLLHIEK

SEQ ID NO: 159210 - protein, 141 aa, Oryza sativa
  unsure (1)..(141): unsure at all Xaa locations
  Clone ID: PAT_MRT4530_58609C.1.pep
MEPLLQLGRAAAASIEINLDVEDGKARGAVKVVDLCGDNVEELETGDGDVVGERARRKKLPTPSRWRQHRDSRHQPSCLPPSPAPDPPCHRWIRVRGAERRPDVLRRKAVEEEVEPPRLPPARSRXASLSAAAPPEVVEPA

SEQ ID NO: 159211 - protein, 378 aa, Oryza sativa
  unsure (1)..(378): unsure at all Xaa locations
  Clone ID: PAT_MRT4530_5860C.1.pep
MSRVSTSWGFVYSRVNKAEGRGARTGSTGVGPTRQPHGPRWTGCTRLTPAGAVGPTRQPHPRARAADGRAPHGSRGARPKAATPAQPTGVGVPAPRWSPPATTGAAERRPREGREGGNEXAVHGSPRVDGDDGNGDRSGGRRRRGTGRRGRRRSGGRRAKRRGGRGRRGRGEPEEGDAEAGEGPGRRRRRTEARRRRRRERATARARFRRREXAGGGNGGGRDGECLYRVGRGRERPEEGETGAEGPAAIDXADEVXGSGFQPNPRERGRENWGERERVSRGIFPPTLLRAGTAGGVGILGGGGARARAGRRERREDRDDRWAPPVSEGGGRARPSAARARGEAEWSAGRRREREGDGPSRPKRGRGGEKDFLGFFFL

SEQ ID NO: 159212 - protein, 296 aa, Oryza sativa
  Clone ID: PAT_MRT4530_58610C.1.pep
MLEVEEEDPERLTMTSVDDEETERGEGERQAVGVEASERMGGGGGDELSAQPRRRPRGGSRRWSSRGRQPGRQQKAAPRRPGRRLKAEGVRCRPMVACSKRQSARSARSPGGDGDDSEAGTRLDGIDRNDDDLDRNDDDLQMTTARWRRRRPPRRNRQGRVPRTLCRANDATTTMATPAPGEADDQRAARPTGDVGVLVEIGSAMPSRSAMTMWMWKGGEEGEERGEEEMGRGGRLGVRQPTTEQERRQGERWRETAGTTASSAAERNGARRGGGERSGAQSRGGASGRGGERRPT

SEQ ID NO: 159213 - protein, 105 aa, Oryza sativa
  Clone ID: PAT_MRT4530_58611C.1.pep
HTEVYRQQTFPIRRVLVTRTLPYRTVVRAHQPATHPIPPTSPLGHVTRTTRRPLPFHFSSSSPGPYGHATLRSHAARRARSGAPPPLAGDARGAWPPLLRRGRRR

SEQ ID NO: 159214 - protein, 148 aa, Oryza sativa
  unsure (1)..(148): unsure at all Xaa locations
  Clone ID: PAT_MRT4530_58612C.1.pep
GPVGGRLLYDSDNDRKSFLEVVKQTVLDHLTKKCHPHVQVGGLLCQTEKKDSRPELLRRVAAGGGVFKNDKRLKCQIPGANLNDIGNQADDLLESMESRPTIPDLKLLAXLFIVREEALNIMGGGLFDEKKDRWFTTLPDAAGKLLEP

SEQ ID NO: 159215 - protein, 222 aa, Oryza sativa
  Clone ID: PAT_MRT4530_58613C.1.pep
MRQEATCSLVLTQDAQHRKNQPPLAEEDDDRDHTDDAMPPPCSILLRQEEGEATAAAAGEGLLVPPLNFAMVDHGVYRSGFPDISNLPFVESLRLRSVLCLCPEPYPEANQEFLRAHGIRLFQFGIDGSKEPFVNIPEDRIREALKVVLDVANHPVLIHCKRGKHRTGCVVGCLRKLQRWCLTSIFDEYQRFAAAKARVSDLRFMELFDISSLKHLPASFSC

SEQ ID NO: 159216 - protein, 529 aa, Oryza sativa
  Clone ID: PAT_MRT4530_58614C.1.pep
MDMNSGWLGFSLSSSSARGYGDGCGEGNGGGDGDGSCSSPVAASPLVAMPLHSDGSVHYDAPDWRHAEAKDPKLEDFMSVSYSNKSSSNLYGSSSSSSCGHADQIKYHHVHDVQAFSTPYFYGHGGSGVGIDINMNAPPAGCTGVLPDHRPPPPQQDHIFLPPHGQYFLGPPNPMAPAPMYNAGGGGGGVVDGSMSISGIKSWLRQAMYVPERSAAALSLSVPAAPPSEAPLPPAAMPVVRKPAQTFGQRTSQFRGVTRHRWTGRYEAHLWDNTCRKEGQTRKGRQGGYDKEEKAARAYDLAALKYWGPTTHINFPLSTYEKELEEMKHMTRQEFIAHLRRHHQHGRWQARIGRVAGNKDLYLGTFSTQEEAAEAYDIAAIKFRGLNAVTNFDISKYDVKRICSSTHLIGGDLACRRSPTRMLPPDAPAGAAGVDVVVAPGDHQQISAGGGGASDNSDTASDGHRGAHLLHGLQYAHAMKFEAGESSGGGGGDGATTNWMAAAAAAARPVAGIPTTVHHQLPVFALWND

SEQ ID NO: 159217 - protein, 84 aa, Oryza sativa
  Clone ID: PAT_MRT4530_58615C.1.pep
IMVLLSRTQSLAQGQFKPSGCIRGKNVSKCFLVSAPQLVEEGTTCKDCMGLLEQTAQNHLPKDLIFWGLGNNTVGVVVHALAVV

SEQ ID NO: 159218 - protein, 31 aa, Oryza sativa
  unsure (1)..(31): unsure at all Xaa locations
  Clone ID: PAT_MRT4530_58616C.1.pep
LPFNLATISTRCPPLLSGIYPXFYPKKKKKK

SEQ ID NO: 159219 - protein, 388 aa, Oryza sativa
  Clone ID: PAT_MRT4530_58617C.1.pep
MPETGPYGHKKTDGICDGVCGEPASKAVLTMSRLRCALRGFDFRALLALLIGVPILILMIYAHGQKVTYFLRPIWESPPKPFKTIPHYYHENVTMAKLCKLHGWKVRETPRRVFDAVLFSNELDILEIRWNELSPYVSEFVLLESNSTFTGLKKPLHFKENRHRFGFAESRLTYGMIGGRFVKGENPFVEESYQRVALDQLIKIAKIEDDDLLIMSDVDEIPSGHTIDLLRWCDDIPEILHLQLRNYLYSFEFFLDDKSWRASIHRYRSGKTRYAHFRQTDELLADSGWHCSFCFRYISDFAFKMQAYSHVDRIRFKYFLNPERIQDVICRGADLFDMLPEEYTFQEIIAKLGPIPSTFSAVHLPSYLLQNVDRYRYLLPGYCRRESG

SEQ ID NO: 159220 - protein, 114 aa, Oryza sativa
  unsure (1)..(114): unsure at all Xaa locations
  Clone ID: PAT_MRT4530_58618C.1.pep
KTPPFSALGKRDPGGGNPPGVLFGPWGPQKPRRAPPPGKGTPLEKKGQGAFKXELGGGPGNWENPRGEKPAFNRENGPLPLKRENPAKPGPKPLKKGAPKGFPPPEGSKTSPPL

SEQ ID NO: 159221 - protein, 131 aa, Oryza sativa
  unsure (1)..(131): unsure at all Xaa locations
  Clone ID: PAT_MRT4530_58619C.1.pep
YRRNAVTPVPTVLETLEHDGRSETAASSTTCRTGRIRRGMAMTTAGDDDLGWRRIWRQHRQRLAMTSMTRRLATTTSETTVDDGADDSWRRRNDDLADLATTRXRRRPATTDLATATAAFGNDDLDSTSDV

SEQ ID NO: 159222 - protein, 290 aa, Oryza sativa
  unsure (1)..(290): unsure at all Xaa locations
  Clone ID: PAT_MRT4530_5861C.1.pep
RRRSGGRQHARAPMVAGGGHRHGGAAAERGEGKGEKKRRSTAHPGSTATTETATGAEEGGGAARVDGVDGAPAVGERNGRVDKVAGDSAKRKEAAPRGKVVRGDNGGGPELGGDDGERGRRRELDSGGERERRVAKTVEGGTGRVYIGSGGGQSGRTRGKXARKIRPPLMAPARLGXGFQTNPRERGREKWGERERESRGIIPPYXLHAGTTGCGGFGDGGGARARARRRERREDRDDRWAPPVSEGGGRARPSAARARREGRMGRGEEEREGEGWAEPVQEGEEGEKGL

SEQ ID NO: 159223 - protein, 543 aa, Oryza sativa
  unsure (1)..(543): unsure at all Xaa locations
  Clone ID: PAT_MRT4530_58620C.1.pep
MAEERESFESQWAPSDITRHFIKSRLAPIKERSRTAFEFDGKYDPNREDPEFLDFKVMKERMYKIFSNAIVVSYSHLLPVVPYNAFNPPPPEFALMRSDPPIAQHRSPRGKTSQVSRGPKIRSADQSDTSRPIGQSDFRKRKLALSDDEGDDADKTGGDRTTGKQSRQATPKKKTSSRPMPKIRKSSRKPSDIDPSGKDPEPTDMEANPSKETGPTAEDHPSDEQPATDNVEPSNEPPTGNQSAEAEVSASQEPPTGNQSGTEPNKDIPEVEAQADSPPKKDASVDPGFNSPAKVQGPIRPRPEIITGPMIGDEEEVLRIQPAEDSRLPILVKWWDDDMQPQGIVINKQKEDEEVCLLKKALSQATGIVNRIHLRNEAKTVTLENITVQATKIFNLEKQVEALEKDKAELVKQRDLALKDVEDRKIKSQAQFDVLVNKINRLERARDKVGNAATPLIQAMFFNNAGPSTLDASEIFDKLRVAPDTYFNNIREAGSMGASMALAMTKSLYPKIDIDAVDGFADGXSEETALDLINNAQKATDKI

SEQ ID NO: 159224 - protein, 202 aa, Oryza sativa
  unsure (1)..(202): unsure at all Xaa locations
  Clone ID: PAT_MRT4530_58621C.1.pep
MPMIVIWRRPFRLRTRRRRRRRRRRRRRRRPRSSHRRRWATSQRRRRRSGQARVDAGRPIGVGSEHDGRSETAASSTTCRTGRIRRGMAMTTAGDDDLGWRRIWRQHRQRLAMTSMTRRLATTTSETTVDDGADDSWRRRNDDLADLATTRXRRRPATTDLATATAAFGNDDLDSTSDVISMTTIGGERGXRGMLSAWGPRL

SEQ ID NO: 159225 - protein, 84 aa, Oryza sativa
  unsure (1)..(84): unsure at all Xaa locations
  Clone ID: PAT_MRT4530_58622C.1.pep
YIVQAITQQHQLQQFGDLSFDRNLAHAQALLAFNVPXRYGXYPRYYGAPSPYHPGGSCNRFNSIVVRKLKISSYIIICTCETWV

SEQ ID NO: 159226 - protein, 87 aa, Oryza sativa
  Clone ID: PAT_MRT4530_58623C.1.pep
GKIAKGQGVAHQNSYKTRRVRTTARAQKGRRSATDKGARKKSTKGEPPRTRERKEDKKAPHTQEGVLFIKLCGSKNKTTVLKNPPLY

SEQ ID NO: 159227 - protein, 213 aa, Oryza sativa
  Clone ID: PAT_MRT4530_58624C.1.pep
MVLAYEVGGEGGTPLLSSGSAFSRRGHCGPAHGSNTRGYYQRLAATPVSRSDPLKREVARPFVVCKRMRDKGLYMFEPLGSVSPYSWDTTCTVLHSPSLDGAHMSWVKPSSLPSTESKAVVRPQVGPNAVLRLTRETSLSFPLNSMETFLDSCTRDTLGYVPMGQAYLPPLCLTGGRTWVRCHPSAYDRSQTNQARLTHRLSLRPLSHHVEAE

SEQ ID NO: 159228 - protein, 60 aa, Oryza sativa
  Clone ID: PAT_MRT4530_58625C.1.pep
PNPNFHLHPPRPFTTPPWTRRNGEGSFLNYAGVRELDFHSPLHTHCPIARPPGREPERLE

SEQ ID NO: 159229 - protein, 44 aa, Oryza sativa
  Clone ID: PAT_MRT4530_58626C.1.pep
MERPTRSMNLNERVCDQSERCLHKHAMLYVTVLERSEAHMDMHN

SEQ ID NO: 159230 - protein, 334 aa, Oryza sativa
  unsure (1)..(334): unsure at all Xaa locations
  Clone ID: PAT_MRT4530_58627C.1.pep
VPIAGQIGMFLEHQSHGSITDVTMATTDITIAHIMDEQHDIVLQVXNPIRPPATLLISNDRRICIRPSFLAREYLMESSRSPLSNGSSLITRFYVIWPQSHKQARVSARPSVCLFFGTLTYHLYXISICNSDCFYLVLACFFDLLVGIRLICTGKINNPRRSVSIAKAQHNVSYGCSRIVNVSSKSXVITIHRKIGPNNSLECQXNSGFINYYVSLYGQREVLLALVXLVTLCTFLALVFCIILRFKKFSYAQWYCSSTVTTIYSLFWESLLLIMRSRVLVLNLSIYFXFSKKEKMIGGKKIKEGREKRWREGKAKKKKRSREGKKGEEIGGGG

SEQ ID NO: 159231 - protein, 36 aa, Oryza sativa
  Clone ID: PAT_MRT4530_58628C.1.pep
MEEKGSVICGGSNMVHSHLGRIWPATQRPDLDEYEF

SEQ ID NO: 159232 - protein, 86 aa, Oryza sativa
  Clone ID: PAT_MRT4530_58629C.1.pep
GGEPAPAPEKKDLRHNLIVDDQVSAQPTSEGASDEAAVACYTSWRPLTRIGLAVLSMSQRFLKDHEKEDTWRLVGNYAFQRMKKAD

SEQ ID NO: 159233 - protein, 36 aa, Oryza sativa
  Clone ID: PAT_MRT4530_5862C.1.pep
IIWKITLTYVQFIPTNYFNSPLISLGSNIISYSTRE

SEQ ID NO: 159234 - protein, 50 aa, Oryza sativa
  unsure (1)..(50): unsure at all Xaa locations
  Clone ID: PAT_MRT4530_58630C.1.pep
CAGAALLASGSSHPEEGRVTKXSSHRCPHLHSNLENNNAIHVHTLSCVSK

SEQ ID NO: 159235 - protein, 880 aa, Oryza sativa
  Clone ID: PAT_MRT4530_58631C.1.pep
MGGGRKRGRTQRRHFKQGRENVWKHNPQRPPAAGGEGAEGGAAEGREGNPSWQPFATENPAFEDYYKAQQIIPEGEWDDFMNMLRKPLPATFRINASCQFYQDICSQLENDFRKSLETEVSDEHEEDAIRPLPWYPGNLAWHLNFSRMQLRRNQALEGFHEFLKRENEVGNITRQEAVSMVPPLFLNVQPDHHILDMCAAPGSKTFQLLEMIHQSTKPGMLPNALVVANDVDVQRCNLLIHQTKRMCTANLIVTNHEAQNFPGCNLAKFSSETCTDESKLQRLEFDRVLCDVPCSGDGTVRKAPDMWRKWNAGMGNGLHRLQVEIAMRGIGLLKVGGRIVYSTCSMNPVENEAVVAEILRRCGDSVELLDVSNELPELVRRPGLSTWKVRDRGSWFGTHEDVPRYRKNVISPSMFPSGKGTMDSHVAIGSVEINTDVIDADMKDSTNMVEGEQETKTASDDVNNGGDPNTEETSKLESNEVPNDSDKKSNSTSIRTEHSNFPLHRCMRIVPHDQNSGAFFIAVLQKISPINGNQEAELIKGEHNISKDRAEKLEKGLGSDKVPHKENTVQQQGVDDGNVMDEQQNGDVDNETSNGKSSEEAKVIVNEAENDQAGPRDRRRKPQNQGRWRGVDPVIFFKDEATIRSIVSFYGIKDTFPLEGHLVTRNPDAGHVKRIYYVSKSVQEVLELNVKVGERLKITSLGLKIFERQSSKDGSPCTFRLSSEGLPLLLPYITKQILYASAIDFQHLLQYRTIKFPDFVDAKFGEEASALLPGCCVVVLWEGHQNIDSIAMDPSAIAIVCWKGKTNLCVMVSPLDGKELLERICLRYGLKIPKADDVKPSMKIDGSDEQPDLSTEAVDPEAVPESKASDMEIADAKEVE

SEQ ID NO: 159236 - protein, 62 aa, Oryza sativa
  Clone ID: PAT_MRT4530_58632C.1.pep
ARLSFLLCSHSASPPPPPCTASAAEEEVLTRPTRHWPFGLSTWTITTRRRRSYCRCFFIMDF

SEQ ID NO: 159237 - protein, 417 aa, Oryza sativa
  unsure (1)..(417): unsure at all Xaa locations
  Clone ID: PAT_MRT4530_58633C.1.pep
MHLMVLETCKVGFQKSVEERRVNCTHGTTWQASKVIQDILARLPPRTIVRCLAVCKAWRSAVSAPTFHRALAAHRPAAVVKVTSELAYFGKPWRYCKALLLDTFRGRWFGPDLDNTQPERREREFVLWNPLTRACATVPPPAPGGDRGVIIGAYAHPATMRFHLLHAAGEAERGLFAATAIRVRRVGDGGAWREDAGXQSVSLHGNLHWMVQRGSGSTARLNVLVFDTARERFRLMEAPPWDDSRXRGGGGGGEEKKGLAMSRVVVLSGVGKLCAVAVSPATNTMEMWVLDDDDSSGGARAWRLAERVGLVMMWDKRDLSRAFSSATQVSAVQGDAEGEEVILHNDGXIDAYAGAGRGRRCPSPASPRCCRSVVRHDVSFGEASRLLAQNRKTLAQPGESLATPQKLVQVVRGSPTF

SEQ ID NO: 159238 - protein, 258 aa, Oryza sativa
  Clone ID: PAT_MRT4530_58634C.1.pep
MESRPGGTNLVEPRGQGALPSGIPIQQPWWTTSAGVGAVSPAVVAPGSGAGISLSGRDGGGDDAAEESSDDSRRSGETKDGSTDQEKHHATSQMTALASDYLTPFSQLELNQPIASAAYQYPDSYYMGMVGPYGPQAMSAQTHFQLPGLTHSRMPLPLEISEEPVYVNAKQYHGILRRRQSRAKAELEKKVVKSRKPYLHESRHQHAMRRARGTGGRFLNTKKNEDGAPSEKAEPNKGEQNSGYRRIPPDLQLLQKET

SEQ ID NO: 159239 - protein, 97 aa, Oryza sativa
  unsure (1)..(97): unsure at all Xaa locations
  Clone ID: PAT_MRT4530_58635C.1.pep
RLITSTGRAYGIPPIKLRFVIVVFKIICSPKVELCFTKTRSXYTTITSACGGNLVKRVTFASSVPSHVSRPSSNMDFXVVAFASSVPSNGVSGSCLF

SEQ ID NO: 159240 - protein, 373 aa, Oryza sativa
  unsure (1)..(373): unsure at all Xaa locations
  Clone ID: PAT_MRT4530_58636C.1.pep
MPLAGIALAPLFVSHLAPPHHRRSSVASAAAAAARRRPRAVQCSATATAASGEGAGDDVELSRGTLLWRAAKLPIYSVALVPLTVGSACAYHHVGSFFGKRYFVLLVASVLVITWLNLSNDVYDSDTGADKNKKESVVNIVGSRTMTQYAANISLLFGFMGLFWAFAQAGDARFILSVTCAIICGYVYQCPPFRLSYRGLGEPLCFAAFGPLAPTAFYLSNMSSFNYSGTALLPLSKTVIASSILVGLTTTLILFCSHFHQIDGDRAVGKMSPLVRIGTKTGSRLVTLGVVTLYVLLAAFGMSKSLPSACTVLCALTLPVGKWVVDYVLKNHEVTTDLTQDLDGKPXYCVRLHALFGMALASGLDLARNGTLV

SEQ ID NO: 159241 - protein, 131 aa, Oryza sativa
  Clone ID: PAT_MRT4530_58637C.1.pep
MASGGMKDFYRQKKKGGPTKASSSSKKKTQHYTGGASVGASDTAQTSALISHGNLDLKDDFSEQEEQLRLFDMDMKFGPCIGVTRLQRWERASAMGLHPPPHLRDLLLNNTHAGNHNNNGPSLECLWEGKV

SEQ ID NO: 159242 - protein, 209 aa, Oryza sativa
  Clone ID: PAT_MRT4530_58638C.1.pep
PVRPSVSFREGGSRGGGVFAALPSPRAVARPGTCSPPSRRRARLLATHIPYSLLPERITSAAANDGGGGCRIVYVCRDPKDAFVSMWLFTMSNMVKGVTTTTDEHHPAAAAAAPSIEQVFDLCCDGRSIAVPQWHHVREYWEESRRRPEKVLFLRSEEMLREPARNVERLAGFLRCPFTAGEVAAGVGDALVGLCSIDPLRNVRANKDR

SEQ ID NO: 159243 - protein, 69 aa, Oryza sativa
  unsure (1)..(69): unsure at all Xaa locations
  Clone ID: PAT_MRT4530_58639C.1.pep
EYYAAKGSSSEQXGYYGKGSSEEGFYGEQQQQPGMTRVRLTRARQYAAQLPSMCGVELHQSSIFSAAQY

SEQ ID NO: 159244 - protein, 1194 aa, Oryza sativa
  Clone ID: PAT_MRT4530_5863C.1.pep
MLVWTQVGEIVFPVYTTTPISTSPPMTVDENAVATNQGDSMSKNPPVETENRISTTSKLKKDSDTAKPCPSDMNHEPTKMTSEATRSWCPIHKTKKHTLQDCWVFLNVRAEIRACKERGIQRTSPTRDVYCPIHKTKNHDLSSCKVFLGAMKAQSPKSYIPIRDNGKEQGATPTSDRFVGVIDIDPHEPSVLHLLEDYGSSTTSAPREVLAIDDVGTSAHANTVAGNQSTTPAQHIRAVQAILRETPYDPVLNVDLERWTERLRESVTNLSNAFEEAATAAHQEQPPTSEANGEDPEWRESPQQATPPPRGTGDLRDQINGRWEARRTRDNVNRSRRHVSSRRHDNRNRGNRSNEDRDHGNHHDHNDRERRGPDNTGHGRRRIDDDDGDRHRDNSARRRQDSRDPGRHPRNHRHPRRTHDRRQPTAPNAGCRAFGRSLRDVRWPERFRPGAIEKYDGSTDPKEFLQVYSTVLYAAGADDNALANYLPTALKGSARSWLMHLPPYSISSWADLRQQFIANFQGTYKRHAIEDDLHALTQNSGESLREYVRRLNECRNTIPEITDASVIRAFKSGVRDRYTTQELATRRITTTRRLFEIVEQCAYADDALRRKNDRPKTGGEKKPATDTSESSKKKNRKNGKRKAQAEVLAAEYANPPKRLDPQSSDTKKSWCLIHKTDRHSLEDCLVFKKSLEKHMAFEKGKRVRVVEMNEETAPHEPDSAYPDSDLHVSHIFGGSTTYSSKREYKKVEREVCSTWQGAAPKMKWSEQKIEFSEEDHPKTAVIPGQYPIVVEPTIRNFKVARVLIDGGSSINLLFASTLDTMGIPQSELTPTDQPFHGITPQSSSRPLGKIMLPMTFGQANNFRTEQITFDVAEFDTAYNAIIGRTALAKFMAASHYAYQVLKMPGPKGTITIQGNTKLAVQCDKRSLDMVEQTPSPPATTEPPKKVTKTNKTPKPDGAIKIVPLSSANPDKTVKIGPSDMPGVPREVIEHKLMVRPDAKPVKQRLRRFAPDRKQAKREELDKLLKAGFIREVFHPEWLANPVMVRKSNGKWRMCVDFTDLNKACPKDHFPLPRIDQLVDSTAGCELLSFLDAYSGYHQISMAKEDKEKTAFITPFEVFCYVKMPFGLITAGNTFQRTVQGALSNQLGNNVEAYVDDIVVKTKTGDSLIDDLRETFDNLRRYRLMLNLEKCTFTF

SEQ ID NO: 159245 - protein, 244 aa, Oryza sativa
  Clone ID: PAT_MRT4530_58640C.1.pep
MAASARPVGVGGERATSFAMACSLLSRYVRQNGAAAAELGLGIRGEGEAPRAAPATMSLLPGEAERKKETMELFPQSAGFGQQDAITADSAADAREQEPEKRQLTIFYGGKVLVFNDFPADKAKGLMQLASKGSPVAPQNAAAPAPAAVTDNTKAPMAVPAPVSSLPTAQADAQKPARANASDMPIARKASLHRFLEKRKDRLNAKTPYQASPSDATPVKKEPESQPWLGLGPNAVVKPIERGQ

SEQ ID NO: 159246 - protein, 96 aa, Oryza sativa
  Clone ID: PAT_MRT4530_58641C.1.pep
GARDRGAPAHTHLFPPPARPAKAGQRRQQSPLFQRCARGPPRRKELLDGPLANGHLQILLVESLSSSVHLQLRVWMIIAISSPRPPLYFRLKKKEL

SEQ ID NO: 159247 - protein, 200 aa, Oryza sativa
  unsure (1)..(200): unsure at all Xaa locations
  Clone ID: PAT_MRT4530_58642C.1.pep
MAAVENHRERNLLLLPYDLGQGKEQYLLLLGPCLALEEGLHRWRASPALLDRRWITNDNMNSFELKSGATVRVTDKAYLLSCDLXNIPIRYTFMYTDCSHECCVXPIQVMENISTSQVISKVLLGRVLGDQDDPRYKRDPXEGFKASNSIASTPTKVYKARVRGVNSLGDLVEFLDYDLTLVPTYPNTLLIRSASITRRQ

SEQ ID NO: 159248 - protein, 155 aa, Oryza sativa
  unsure (1)..(155): unsure at all Xaa locations
  Clone ID: PAT_MRT4530_58643C.1.pep
QLQPRKELRAPMSPXARAEMSPAGXGTAQTPSGPGXPGGGPSSAPLVPAXSPGHPPPLHLLLQHRPPPPPPPPPPPKLPAAAPPPGAPPAGSPTSAPLPLLVDPRSPRRGGRRGLVAPPPPPQRHPISPRRGANRRRFRGGGRTAGVSLSLRTRG

SEQ ID NO: 159249 - protein, 377 aa, Oryza sativa
  Clone ID: PAT_MRT4530_58644C.1.pep
MVLDVFGKVRKSLSDKSENTQKRFLPLLKFFGNSENQFRKSLIDTFTALQVAEAYLTHVAALYGMPKSIVSDRDKIFTSKFWQTLFKRFEIPLNLTTAYHPQSDGQTERVNQCLEMYLRCAVAAVPTKWCAWLSLAQYWYNTSYHSSLQCSPHRTLYGSEPTYGILPAVPVTESEDDVSDSSEADAVLKERDMFSALLKHHLARAQNRMKQMADVKCSDRAFQVGKSVLLKLQPYAYKSVVSRPFPKLAFKYFGPFEIEASVGSMTYRLKLPAGSLIHPVFHVSQLKKYVPKYSPVFSQLSSAAQLDIAELVPTAILDRHMVKKGNAAVFQVLVQWGTLPAALATWEDFDVVHTRFPSAVAWGQAPTQGGANVTTDV

SEQ ID NO: 159250 - protein, 80 aa, Oryza sativa
  Clone ID: PAT_MRT4530_58645C.1.pep
MASWGLRYLMDHMVLPSYEANGQMGLVTIISAYHDICQMLDGIGLPEKDLALIKHTGLVNGMKRSVELNQDKNSEDPGIG

SEQ ID NO: 159251 - protein, 675 aa, Oryza sativa
  unsure (1)..(675): unsure at all Xaa locations
  Clone ID: PAT_MRT4530_58646C.1.pep
SKKKLSLDKSLRLHGFTGRFYKTCXEIFKEDVVLALSAIQXDHVFKFKLLNMTFLRLLIWPISLIHSFVKLIRKLMANRLAPLLPRMISVNHSAFVKKNILYTHSQMVKCLHRKKEPXLLKLDISKAFDLVSWAFLLXGFGRRLCNLLCQMLSTSSIRVLVDGETGHTIFHQRGLXQGDLLSLMLLILVMVMLNSLVVHATLENLLQPLVVQTATHQIYICVDDIVMFLKPTREDLSLGKQTLEFFCHVSGLKTNIXKSSVTPIQGIIVEELSCGIKDFPCSYLGLPPLVYKLTKVDLLPLVDNVADGLPGXKASLMNRAGHLIMVRVVLTTISIYSMMAMDLPKWVIKTLEKKRSGFLWKGHENANGGNCLISWERVCHPTSIXGLGIHNLKXLGWVLCIRWLXLKNDTSXPWAALPIQVPHNVHSLFSVAVESVIGNGESTKFWIDXWVQGRTNVELAPTLFNLIPPRIRRQRTVTQAVVDRRWVSYIHGGLTKTGPFVNTCIFWIRLMIXLFXPSVPDQXWKFTSSASYASKSAYEAYFVGSSSFXPWRHIWKNCAPLCSKFFTWLAINNRYSFYHSETIQHXLVPCVFSRXISTWIFFKLGIFSVTPQSSATRLANWWHKVLXRAPRVWRNGMDSLIILEAWDIWKHHNDCVFNGGILRSCSIANESSYGV

SEQ ID NO: 159252 - protein, 96 aa, Oryza sativa
  Clone ID: PAT_MRT4530_58647C.1.pep
NLKTNITPPYLTCKNDRDFSFPLLSCSQIHNEKSTQRKKYTMINCFCRWADWAGGRLIPGLPAHPNEPFICFPRYLPQLHLSTSSRHRRRRRGSPP

SEQ ID NO: 159253 - protein, 161 aa, Oryza sativa
  Clone ID: PAT_MRT4530_58648C.1.pep
MPCNYAAAAAAAIRVLRFGGETHAALSESPTRGQCCGDGVRQLLPPFHRPLARCNLSTDERANWAWAAATSSTRREEGQRDGQRPVKRSWAVAASPTAAGRRASEEFVRTVVAYQEKLQATTADVSQCALASPKLNQEMEKQRKVLIRSFSLAKNLWMRCV

SEQ ID NO: 159254 - protein, 625 aa, Oryza sativa
  Clone ID: PAT_MRT4530_58649C.1.pep
MQRSRRALLKRKAAAAAKEEEEEAGVGVATAAAAGRRRRRRLYGFSVSLVVACWVVLLLLNPLVGHGNGQRDEGIFADEGSSDPSFDSVEPTLSEGSVDSVVQQENGENHALPGDSCAKPDENHVLSEETLLEKDQLCSNDEAQGDSMDALPKDNVDQGENLPRTDDDSVVHPEGEVESEGVPRPARLSRVVPPGLDEFKTRAIAERGKGVPSGQPGNVIHRREPSGKLYNYASAAKGAKVLEFNKEAKGASNILDKDKDKYLRNPCSAEGKFVIIELSEETLVDTIAIANFEHYSSNLKEFEMLSSLNYPTDSWETLGRFTVANAKIAQNFTFPEPKWARYLKLNLLSHYGSEFYCTLSMLEVYGMDAVEKMLENLIPVENKRLEPDDKMKEPVDQQTQLKEPTEGKESSHEPLDEDEFELEDDKLNGDSSKNGAHDQVTETRPIQAGRIPGDTVLKVLMQKVQSLDVSFSVLERYLEELNSRYGQIFKDFDADIDTKDALLEKIKLELKHLERSKDDFAKEIEGILSWKLVASSQLNQLLLDNVIIRSELERFREKQADLENRSFAVIFLSFVFGCLAIAKLSIGMIFNTCRLYNFEKFDRVKSGWLVLLFSSCIIASILIIQ

SEQ ID NO: 159255 - protein, 306 aa, Oryza sativa
  unsure (1)..(306): unsure at all Xaa locations
  Clone ID: PAT_MRT4530_5864C.1.pep
MAEPGPMRHHSACLRAAMPARPAGGGAPAARWSPPGHQRGGRRPREGREGGKEATVHGSPRGDGGDGGGGRSGGRRWRGSGRRGRRRFGGRRPKGRGGRGRRGCGEAEGGGAEVGGGPRRRWRRTGARRRQRRESDIASSNPARRKGGERRKRTEEVRGGFKXGWKGERAAGGEGNRRGXSGSINGTGGIRGGXSKRIQGREGGKXWGKRERESRGIILPYXFHAGTTGCDGFGGGGGAXARAERREVRDDRWAPPINEGGGRAHPSAACARGGAEWATGKRREGERNGLSRPKRGRGETLRFFFL

SEQ ID NO: 159256 - protein, 146 aa, Oryza sativa
  unsure (1)..(146): unsure at all Xaa locations
  Clone ID: PAT_MRT4530_58650C.1.pep
MSSXVTXVPPTPXPPPVSTPPXXIXSPAAPANNRASPLRGMGTXNIAXPLRKXVXXXNGYLGXVAKXTARRPRDXWLXFTXSRSGNXYYXXFXSLSSXIRFQALVLPVPSPFSDGXGDICLTVXFAXHSTVAAPQLNSLVPHPLSS

SEQ ID NO: 159257 - protein, 67 aa, Oryza sativa
  Clone ID: PAT_MRT4530_58651C.1.pep
MIVGARGKLGANGNDFPSKRTKSPYLERQLSRSDPLYQEIVGSPFREFGQGKRPASRNRVSAPKAAS

SEQ ID NO: 159258 - protein, 186 aa, Oryza sativa
  Clone ID: PAT_MRT4530_58652C.1.pep
MKFLNPAHLEVISCKCNIDEGLIVKEVSEGSIAEKLGVRVGDVIKFFNGKHISSTVELELLLLQISEDHFYNGNGLDSKIDIVAHAREATRAVALAHTSAKPGERVGGGDNARKTQNPLPGGRARRGPRRPRPAPRRRHAVPHPSPSSDTHTSLARAAFVDYARTAVSSLPPYIPADLPLMVLVNV

SEQ ID NO: 159259 - protein, 108 aa, Oryza sativa
  unsure (1)..(108): unsure at all Xaa locations
  Clone ID: PAT_MRT4530_58653C.1.pep
VRKHSPAQGQPLLQSPGFQLRNCQVMQQQCCQQFRMIAQQSHCQXYSVQAIVTVQYNSCWRYFDQTQVKAQAMLXLNSVNIGITQVQAAPLYIPTVGVSGTECTSIVV

SEQ ID NO: 159260 - protein, 577 aa, Oryza sativa
  Clone ID: PAT_MRT4530_58654C.1.pep
LTTSKPTSLIRVLLPPPLLHPTTTHTAPPMATAAGASSPARRRPRRGSKGPNSDLSRTLTDCTRRGDAAAAMAAFDSALSGPDAPRLLAHQYNQLFHLLATADADSLPNAAAAARRVFSHMLGSGASPSEATITSLARVTASDASNPAAADEAFDLVATMRDKYGVAPRLRSYSPVLAAFRRAGEAGKAYAVDAHMEASAVAPEEPEIAALLDVSAKAGDADKVYEYMHKLSRTVDCVGEETAEVLEGWFRSGKAAMAGKAEWDACKVKDAIVANGGGCHRLGWLGTGPWTVQRVRVGGDGQCEGCGCRLACVDIDVEETQRFADSVASLALQRETKINFSQFQEWLEEHGAYEAIVDGANIALYQQNFAEGGFSLTQLDAVVTELRDRYNGKWPLVVLHNKRIAKLMENASNRHLIETWRANGALYTSPIGSNDDWYWLYAAIRLNCLLVTNDEMRDHIFELLGSSFFPKWKQRHQVKYTFSKGKAVLMMPPPYSSEIQESEMGSWHVPMEEKSGDDRARIWLCIDRTGHCKHPHEAPAANGVVQDVSPTEASHGCEQRRAEHNGGSLTGKRKDRN

SEQ ID NO: 159261 - protein, 606 aa, Oryza sativa
  Clone ID: PAT_MRT4530_58655C.1.pep
RSSLPSMTRDFFPPVAAIAAPPAPPPARSRRTPPRTRFSTGSTPDTKQVTSPSPRPVQPSNAPPPPPPPPPPPPPPPPPKLNTAPKPPPPPPPPPSVPSNNNLPKPAEPPAVPTSRRRLLKPLPPEGPRIAMPMPITAATTVDNNGSTSMREGDNAAADDGGSGEPRPKLKPLHWDKVRATSDRAMVWDQLKSSSFQLDEDMIEALFMNNSTPAAPPREVGRKAAGVPSFRQEERVLDPKKAQNIAILLRALNVTREEVSDALLDGDAECLGSELLETLVKMAPTKEEELKLRDYSGDLSKLGSAERFLKAVLDIPFAFKRVDAMLYRANFETEINYLRNSFETLEAACEDLRGSRLFLKLLEAVLRTGNRMNVGTNRGEAKAFKLDTLLKLADVKGTDGKTTLLHFVVQEIIRSEDAKSEKESAMISSSKDDRKHGLKVVSGLSSELGNVKKAATMDFDVLHGYVNKLETGLEKIKSVLQLEKKCTQGQRFFMSMQDFLKEAEREIERVRGEERRALGRVKDITEYFHGDTAKEEAHPLRIFMVVRDFLSTLDQVCREVGRMQQDRTVIGGSARSFRISATSSLPVLSLYGQRRENNSDDDSSSS

SEQ ID NO: 159262 - protein, 181 aa, Oryza sativa
  Clone ID: PAT_MRT4530_58656C.1.pep
MEFGGAAGGVDGGRPLMVQREVGIDSQLWRCGGDSSCVDSTDGSGRLAPLACRGGFGGADWRPWWWREYAWSAAGGRCGVRTRVGSRRGSRDEGGRVTARGGWTGWGTGAAVSMRQQRFRLWWSNGVLVVDRQAAGGRFLVWFPMANIFLVNERKHLALAMSTSGAPPYGISGFKQRVNGF

SEQ ID NO: 159263 - protein, 236 aa, Oryza sativa
  Clone ID: PAT_MRT4530_58657C.1.pep
MRLHHLHVAYLDHKASSSSSSPAPPSISPSSIPGSAAFPAFSFKCLRPLAPKISLPEPRKMIAPPDFVVPRARNASKLLNYTVQVPAAGTTRWNPSAEQIKVLEMLYRGGMRTPNSVQIERITEELGKYGRIEGKNVFYWFQNHKARERQKQKRAALLTLSTLDPSLLPATANETKEAPEKKEKDVEDGLASCKRRCKAWGDGAGDGDAVVATEAAGGCTDEVTLELFPLHPQGKA

SEQ ID NO: 159264 - protein, 443 aa, Oryza sativa
  Clone ID: PAT_MRT4530_58658C.1.pep
MAADKSPIDEALLHGKHEEALLHGKHEHVEQQLLPTSGGSFCITGASFGRSCLNLSNVISGIGMLSVPYALSQGGWLSLALFAMVGAICFYTGKLIYRCMRADRCVRSYPDIGYLAFGRYGRTAIGLIMYVELYLVAISFLILEGDNLDKLLPGTVVKILGYQVHGKQLFMLVAAAVILPTTWLKNLSMLAYVSAVGLVSSVALTVSLVWAGVADKGFHMAGSSILNLSGLPTALSLYFVCFAGHGVFPTVYSSMRARKDFPKVLLISSVLCSLNYAVTAVLGYKIYGEDVQAQVTLNLPTGKLYTRIAILTTLITPLAKYALVIQPVTTAIEEKLSTAAAAVAADAENNRLTRVLTSTTVVFSTVVLACTVPFFGYLMPFNGSSLNVTVAVLFPCLSYLKIYMPRGGVGRFEVAAIVGILVIGVCVAVVGTYTSLHQIIGTV

SEQ ID NO: 159265 - protein, 262 aa, Oryza sativa
  Clone ID: PAT_MRT4530_58659C.1.pep
MRLHHLHVAYLDHKASSSSSSPAPPSISPSSIPGSAAFPAFSFKCLRPLAPKISLPEPRKMIAPPDFVVPRARNASKLLNYTVRHIKPYLFLIDRSIRFMIVYIFGLQVQVPAAGTTRWNPSAEQIKVLEMLYRGGMRTPNSVQIERITEELGKYGRIEGKNVFYWFQNHKARERQKQKRAALLTLSTLDPSLLPATANETKEAPEKKEKDVEDGLASCKRRCKAWGDGAGDGDAVVATEAAGGCTDEVTLELFPLHPQGKA

SEQ ID NO: 159266 - protein, 38 aa, Oryza sativa
  Clone ID: PAT_MRT4530_5865C.1.pep
KLPPMLLGKKLLCHLVQTSRYHYNSIPQSRLVEDSPGT

SEQ ID NO: 159267 - protein, 79 aa, Oryza sativa
  Clone ID: PAT_MRT4530_58660C.1.pep
MNFTRKLAHTCRNIHYSGVEDYTTFNNNFDNMKSSKVKPLEAFMKSSIGKGLTIVKSFTVILHRMFSRRRAITRLPLSL

SEQ ID NO: 159268 - protein, 35 aa, Oryza sativa
  Clone ID: PAT_MRT4530_58661C.1.pep
MLRKIFRFPRADVSAPNRHHKLDILTYKSFFTSDF

SEQ ID NO: 159269 - protein, 89 aa, Oryza sativa
  unsure (1)..(89): unsure at all Xaa locations
  Clone ID: PAT_MRT4530_58662C.1.pep
ETQLQGEGEGRLQPWLSQLSAATSVPEFHGPSRTYFLLLRSMGDACIRLRMKQEKGPKGHSXWXTYIRASSPPNGYSLGGXTXERLDWL

SEQ ID NO: 159270 - protein, 314 aa, Oryza sativa
  unsure (1)..(314): unsure at all Xaa locations
  Clone ID: PAT_MRT4530_58663C.1.pep
SAXCLVSIRSCSYSDACKIARLMHANLAADNLTVEAMEALVDQEKGKADGLKDPNVKLIVMPTSLSASEWNNNSSATNPQTLKKQHFASEHAAPDLILLEPEVVATSPRNLLLSSGIRAVDHCIETMLNEHCTGEIFFHMENALQTLLRGLKAYKIGEAHNKYSELLEGIANCQLGARDAMMGLIMWDIPMGLSHAIGHQLGSICGVMHGVTSCVMLAPVLRYTADRSDRQREVQKRVLEVWNRALSADEDDLADAVGNFVRYLELPSTLKEVGVEKQEDIDRVAESTLTDVFGAMEGMGGKEDVLAILDSARG

SEQ ID NO: 159271 - protein, 813 aa, Oryza sativa
  Clone ID: PAT_MRT4530_58664C.1.pep
MPRLPLSPSIADSVESKRGRSLSSPHTTEEKNPQSLTLACGGGGGGGGEGGGGGFGDGGDEDGGNDSGDSSGDGGRWRSDIGREDGDAEEEVSSEKGINAVDELMDASSACRVAIRVCPYVEFHDNGRPEFHVSRDINWVLDKDTICWINLINDLVGEMRRLPLIVNVSDDPRNRTEPCTDQGNSQGPASNETGDGHVACTDHVLATQESQVVGHKTIKPTKASSKKKADDWGESDEVEYVGVDDEKEKYNDLVSDDEAVDPDYEPDSDEDRDDLAVDDEEGCESVAHIKKLPYPHNCASIAGVENNCMATNSWVLEEMYKIKISYYVVWDDRQMALDEILGKWEDSFDAAYSFKAELERISPRSIVEVDHVSVNGKNHFSRMFVALKPCVDGFLNGCRPYLGIDSTVLTGKWRGQLASAIGVDGHNWMFPVAYGVFESESTENWAWFMDKLHMAIGSPVGLVLSTDAGKGIDTTVTRVFNNGVEHRECMRHLVKNFQKRFSGEVFERNLWSASRAYRQDIYEGHYNEMKEACPRATEWIDDFHKHIWTRSKFSPVSKCDYVTNNIAETFNSWIRHEKSLPVVDLMDKIRHMIMERISIRKRLAEKLTGQILPSVMKTLYARSRDLGYKLYSAHKHLGEIGGTGRDLKTWRHTVDLNTRECSCRQWQITGIPCTHVIFLIISRRGLELEQFVDEYYYVAAFKRAYAGHVVPMTDKAQWAKGNIGLKLHPPLLKRSAGRPRSRRIKGVEEGGVGKRKYRCKRSTPTRSRPSVVTTTSPITRSRARALNLDVAAPPTNQEKNTRKSPSKKAGGGK

SEQ ID NO: 159272 - protein, 206 aa, Oryza sativa
  Clone ID: PAT_MRT4530_58665C.1.pep
MGRVAGMVMVLAPAGQARGGGAPTAAERALAAVARERLLEAAELLARPRDLFPRKPVRALVKDLGLARGRDPSAMGYRPRRASIAERILLTKRKMEEIKEAPVYPTTNVSQTTATRATTVFQHGASKPTTGLPMNISAVASFPVTTPPTIPSPNILKQTQLNESPSGVKAAGTSSIVSVPSVGPTNIKVEKGVNSPTCTQNGAVLY

SEQ ID NO: 159273 - protein, 191 aa, Oryza sativa
  unsure (1)..(191): unsure at all Xaa locations
  Clone ID: PAT_MRT4530_58666C.1.pep
RPGIASSPKRHEQINAKKKRKEILPLRYKNRPLPPSSASIYAGIISLRGIGVHYICCCWSSSLSSSRRRSRYPLLLHRSRLAGDGRGGAAATRREGGRHPRXPAGRENDLTTVELARFAVAEHNSKANAMLELERVVKVRQQVVGGFMHYLTVEVKEPGGANKLYEAKVWERAWENFKQLQDFKPLDDATA

SEQ ID NO: 159274 - protein, 83 aa, Oryza sativa
  Clone ID: PAT_MRT4530_58667C.1.pep
MADHYVYLIDKLVDIALCRGVEDLDLTTKLDQIYQRSDIAWYKFPLSLFTNGKGLSLLKLKLGQCTLSIPTGFDGFKCTFLMT

SEQ ID NO: 159275 - protein, 978 aa, Oryza sativa
  unsure (1)..(978): unsure at all Xaa locations
  Clone ID: PAT_MRT4530_58668C.1.pep
MAAAIAGAAASTAVSITCSSYSYEDDGAATSWSLSSGTSSSSSSSQRQRPYRRLLHDEAQRLRRERRGQGSGAHTPRWVRRTPDQMARYVEDDRAGHVYGRQVVAAVPTSLAAASSASPSSADICCTRASIVAKFPFREVCIVLHDLRDCLKIRDFFTCMKHQQCYEPGDIAXKSRLRLYGQVGNVKLAELTFLEIHQAWYEPDSAACGTLLSAYDIWGLLSDMLTFYAAMRRRDIVPSISVFNFMVSSLQKQKLHGKVIHLWEQMLEANVAPNQFTYTVVIGSYAKEGMLEEAMDAFGEMKRRRFVPEEATYSLLISLCAKHGKGEEALGLYDEMKVKSIVPSNYTCASVLTLYYKNEDYSKALSLFSEMEQNKIVPDEVIYGILVRIYGKLGLYEDAQRMFEEIDKAGLLSDEQTYVAMAQVHMNVQNYDRALQVLDAMRARNVKPSQFSYSALLRCHVAKEDVDAAEDTFRALSNYGPPDVFCCNDLLRLYMRLGHLDKARALILKMRKEALQFDEDLCVTVLEVCCKTSINKDTDNLTEVIQNEGSSSKVLNPTDSSTLSMMLKSLLDKPGGLSSVSQLIMKFAREGSTDEAKFLYEHLTELGAKPDDTAIATLIVQYGQAQQLEQAQKLFETASTSFPVGGSVYNAMVDALCRCGKTEEAYRLFMELIDQGHNGDAVTISILVTHLTKQGKLYSAVSIYDRMISSGIPRSMQTFNIMISVYGQGGKLEKAVEMFSAAQELGLPIDEKTYTNMLSFYGKAGKHHEASLLFSRMKEDGIRPGKISFNTMINAYATSGLHNEAEIIFQEMQKNNHVPDSHTYLALIRAYTEGKCYSKAEEAIQMMLRSNMTPSCTHFNHLISAFLKEGQIDEAQRMYNQMEEAGIPADLACCRTMMRMHLDHGYVDDGILFFETACRLLKPDSFILSAAFHLYEHSGRESEAGDVLDAINMSGASFLRNLKVGSKLEQVRNDTHAS

SEQ ID NO: 159276 - protein, 58 aa, Oryza sativa
  unsure (1)..(58): unsure at all Xaa locations
  Clone ID: PAT_MRT4530_58669C.1.pep
HLTDFMEYSTQARTPSISETSTKRNKIQVNLTIKXFALTSKCTISLHIRTPSLPIELS

SEQ ID NO: 159277 - protein, 374 aa, Oryza sativa
  unsure (1)..(374): unsure at all Xaa locations
  Clone ID: PAT_MRT4530_5866C.1.pep
TVAAQRDAEPARTNDDDDDEHRWSSVEGEASPRATLPLRCRRWWWCTRRRTGGGRADRGNSGEVDGEAXSTAVFRRNXGDAVAWPGKRTAFRCRERWWRRRPTRRRLGKGGRRRNSGDNTTVASGGAPPGVSTXNGGQAGGEEAXCDAGEGDGTASRRADATAGAAGGRPAPEREKEKAGRGGAGTGRRGRRLKWENRGWGFHFIGEEREPATGEAGNGGGICAGSHGRWPGLARPFPAVXIAWILRRIGARVXARERKRKKAGREEDDDPGVGPTRGAVSARDGRVRMREEGGSGRGRGLGRAAXAQEERRERRPGREREEEGAGPRGEGKGGPRERGGRKKRGRRWRLWPQAXREREDFGPDLAQRRKEDLF

SEQ ID NO: 159278 - protein, 72 aa, Oryza sativa
  Clone ID: PAT_MRT4530_58670C.1.pep
MGSRKRGGGAVAMAVAMLLAAAAAAASASQPSSLEGFQPLSKIAVHKATVDLHGSAFVSATPALLGDQVDDE

SEQ ID NO: 159279 - protein, 518 aa, Oryza sativa
  Clone ID: PAT_MRT4530_58671C.1.pep
MATLLLLAVAAAAAAWVWWGRYAWRARAVARRLAAQGVRGPRRGGLLRGCNDEVRRRKAEAEADGVPMDVGDHDYLRRVVPHFVAWKELYGTPFLYWFGPQPRICVSDYNLVKQILSKKYGHFVKNDAHPAILSMIGKGLVLVEGADWVRHRRVLTPAFTMDKLKVMTKTMASCAECLIQGWLDHASNSKSIEIEVEFSKQFQDLTADVICRTAFGSNSEKGKEVFHAQKQLQAIAIATILNLQLPGFKYLPTKRNRCKWKLENKLRNTLMQIIQSRITSEGNGYGDDLLGVMLNACFSTEQGEKRDELILCVDEIIDECKTFFFAGHETTSHLLTWTMFLLSVYPEWQDRLREEVLRECRKENPNADMLSKLKEMTMVLLETLRLYPPVIFMFRKPITDMQLGRLHLPRGTAIVIPIPILHRDKEVWGDDADEFNPLRFANGVTRAAKIPHAHLGFSIGPRSCIGQNFAMLEAKLVMAMILQKFSFALSPKYVHAPADLITLQPKFGLPILLKALDA

SEQ ID NO: 159280 - protein, 238 aa, Oryza sativa
  Clone ID: PAT_MRT4530_58672C.1.pep
MDHSNSPPVPDIGSFSYSWPTNKPLARADDDTHARGCSFDFSPPSFECSKQAAAMAHADQMFRDGLLLPLRAVRRQGGGGGGDDDGGGGDVSGAPKRDAIPVLLRPRYVDSAQRITTTIPASKRHLLPRLASPSSPRSSLRVAAAPGWSPSSVLGLGASNKLRLPSLGRRCGRVLPRRLSCKCLTFLEPLYQKMASCCVGRRITTRHAYGRAAADESRNIKVCEDAIRDAILHCKTSL

SEQ ID NO: 159281 - protein, 259 aa, Oryza sativa
  Clone ID: PAT_MRT4530_58673C.1.pep
MQSCTSPRPRLRPWRPPSSPPPPCSATPTTTRVDADEQVQSVQYEERAHKFPGMELKIREFSSHQLNANMLWPGTFLFADWLVKNKSILHGRRILELGSGTGALAIFLRKAFQVDITTTDYDDGEIQENIAYNCKANDLGVLPHIRHTWGDQFPVLIPDWDIVIASDILLYVKQYPNLTRTLSFLLKEYKGCSQNAGSSASTAITNKSGTQVPVKFPIFLMSCRRRIGKDQSLFFEECEKAGLEVQHLGALVYLIYTKQ

SEQ ID NO: 159282 - protein, 665 aa, Oryza sativa
  Clone ID: PAT_MRT4530_58674C.1.pep
CCREDIVVVPQAEVKRAHGQRGAAKKIEGRHIITEVDEDGRPSAPAEAAKNFVRHSGWVVRDNVPVSTVYWRRTRAYGDNDSFVPDSEKEMLWTTMLETFTLPAGQQGQAMMARNKDNAAKKKYHHHLGSGGYSVAMPKWEEMEASLIERGIEPATTKWPDRSKFWYYAHGETLNLVDGSLVFSDQIREAASRLTYAVVASSQGTFRPDREKDELSLALQTPEHPGQTRGKGVIPWKIGFKEDIHTYRSRMRSKRDTEAKIADLEYRVSSYELNMQEEVARKVDERMAAHRSQDPQPYIHPAMVSPSGNCSSCASTGQVGSQSMDAMQTHDETTCPVDEITQRTPCELHIPFKNLSIKVASGMAIPTDPSGTYHCRPIPAGYSRVEVELVEAAYEDLELDYPGGDGETHLRDTSHTIILWRKRQEELDANVAGEVKRQLKPRSPKKKIPIDPSVKNFFKGMSTTNKEALQISDYDRTLQRAYHKKSKPVPQFGEQPNQEVEPLVTGEDFGIMEFISDTGLTVDQLVGGAPIPKAEVAYKMEIQRARRRRFYDTGFIDPRKINTEMIDKYKKDTEDNLMSEDAIRNVLHMSEDVVGDEATTLVDDVIDALVGDAVVAIVEDAVDVIDEASCRLICQSTRGVHLCVRVSSGKLMKTTGDVESAKTIT

SEQ ID NO: 159283 - protein, 51 aa, Oryza sativa
  Clone ID: PAT_MRT4530_58675C.1.pep
PNQPSFSADPNSLKNFKLWVFPTRWGFVQGSGLKKDIVCRCPMDAMTPLSS

SEQ ID NO: 159284 - protein, 216 aa, Oryza sativa
  Clone ID: PAT_MRT4530_58676C.1.pep
MDLLEVPYMCGGGGPTEHAQTPVTLYKNEWTNRVSTQLGDLVETDEEQTKLGEGNEGNATDGTVPGIGDELWMAATIGRLLQSPCAVTAVAAATRKGDAKDAQSCCFKTPGGAAAATAADAVSGATSCKACHVTEASVPLLPCLCDACEAAAAACPVCTATKNASVHVLLSIASNIWQPRSARMPPRLPAGRCSSVVLPIGCRPSRHPFSPPVPTC

SEQ ID NO: 159285 - protein, 62 aa, Oryza sativa
  Clone ID: PAT_MRT4530_58677C.1.pep
AGNIRDKITFSQHRPLCLCNRGTTKGKKSLFLQLFTKNLIKKYLHFIQNLLKVRPIKQSANT

SEQ ID NO: 159286 - protein, 80 aa, Oryza sativa
  Clone ID: PAT_MRT4530_58678C.1.pep
STCHVRVVGAQRMQLFWRQIRVAMVRMVNVPVIWWSLERFSYGCADLCGSVYFRPVNGRLVSDVRSRVNWLASCIGPTIM

SEQ ID NO: 159287 - protein, 89 aa, Oryza sativa
  Clone ID: PAT_MRT4530_58679C.1.pep
LRNTQIGTNNSVTSLGWHTKMEQIRLQGRGAKENLPTNKGEELTDILQILFKNFFCQTNADWVAIRVLNFKNSRNICYSIHIINLLNLC

SEQ ID NO: 159288 - protein, 236 aa, Oryza sativa
  Clone ID: PAT_MRT4530_5867C.1.pep
MPNGAFLTTDINSEYVICLFRFAIDCSTGFSERQASGGGPDDFSGSHPFGDIFTHLRSCWHKKLMFDDQEQDEFHWNLTPNGVFSVKSHYLALTHTGVPNIIRRIWKVITLVTRWLRTWAILHQPGLRDTIMVVSRRLEQVAQEFFTQEHGGGLVYGLIVTKIYGGISTVGPGGTGVFLPRSMGDGLAYGLIATKIYVSVKLLCLGDVLVVSFFFFGYVHFMQRPGVTQFDSIILM

SEQ ID NO: 159289 - protein, 69 aa, Oryza sativa
  Clone ID: PAT_MRT4530_58680C.1.pep
ERSTYLASMLFCMCFATRPYWITEFSMKGKTGVILDQWEQQRHGARPRARPLVRAAMASRQIDRLLRGR

SEQ ID NO: 159290 - protein, 91 aa, Oryza sativa
  Clone ID: PAT_MRT4530_58681C.1.pep
DFHSNCFYSIKNYLFQRRSKNRRYELYQLKICGGRKMDFALGRSYGLRVTRARAREFQDLVGFPQPCSYTVALPIVPPMHETTKVQHKEIY

SEQ ID NO: 159291 - protein, 90 aa, Oryza sativa
  Clone ID: PAT_MRT4530_58682C.1.pep
MADFERRRFWHGAQCHSLRVGALEAWSPRVPSASGGAAKRNGADRRGDGPEEVDRSAAEESAATARGSDRGGGAATTTAASGRAPRWGGG

SEQ ID NO: 159292 - protein, 106 aa, Oryza sativa
  Clone ID: PAT_MRT4530_58683C.1.pep
MAWCNCSTQLDIYVLLLQLKSSSEYLLFLNPECCHVQFLQCHQQQYMLYDNNAVKQQCNFRSVIRRSKKSRIMEMIGMCTEANASWILSYTLCMKEMRSLLELRVG

SEQ ID NO: 159293 - protein, 178 aa, Oryza sativa
  Clone ID: PAT_MRT4530_58684C.1.pep
MMFEADVPHRNATNPLSLRRGSVMLHDDCIGEGLSSPIAAQILDFCDDGLGDDLFAAVATTSEQFAASSEDGSSSSTATPPLCSNSNDITAVADTAFSPLLSFDSTLSAFLEQEQNPDQDTKLLPSIDETFTAPAYYPAATEANIEQFSQIMVPEHTDAPMPPMQTNRTANALLPLAS

SEQ ID NO: 159294 - protein, 478 aa, Oryza sativa
  Clone ID: PAT_MRT4530_58685C.1.pep
MVDLETINKALPGDNPDYHGIHRLFKLSMMLRFLIIQAVKDRGFTRIDVDESDQAIWSSHLAIIHTYVSRLISVVVHQTAGGADLRSGNLQEDLAAIHFHRKIRKRSDLFGNFPGAKEGRAHACARRRWRHFCVFGGKPWPFALLPEKREREKDGNENTEDHILAAKKANCDRDRQQLEPAAGGARRRQGSPAQSRMWLPLGTPAQQLAARSNQAQHPSGAQVYVDVDSEHGTAERQEIGTTKRARWSHQMKMFLIELLTDHDVPGFRTQNAWSKEAWTNIVCRLNTKFGTSFTTNQVKQKEQDLKKDYRSVKDLLDQSGFGWDSDRMMASYADREENIIVQVVMLKGELAMHSPTPVHLTKVPPSSAQTPSEVPESRPGKKQKIKSVSPDDGFHERYLKLKKEEIDRFAAIEEKKLEDPYSINKCITVLEGLHGLQIGDILVAADIFKGKDNREVFLSFSSDALRLAWIRKEIAALE

SEQ ID NO: 159295 - protein, 50 aa, Oryza sativa
  Clone ID: PAT_MRT4530_58686C.1.pep
RIRLANLERAIPFIGNAYMLITSCITRPQQAHSALCPLPKPKSGAMPDIT

SEQ ID NO: 159296 - protein, 65 aa, Oryza sativa
  Clone ID: PAT_MRT4530_58687C.1.pep
GRSGSREKIVLDRGAGGNQPRVCGPEGGHGEPGRGRPGGHLFGPRAPEPPPRGGAGPLGGVPGGK

SEQ ID NO: 159297 - protein, 292 aa, Oryza sativa
  Clone ID: PAT_MRT4530_58688C.1.pep
MSSGAPPNIGGGGPPPPAVLALPHGMVVVGDEAVQRAVVLRLGVNFRATVCSDINAAVEMLLQRMKELDFVVISEELIIGSSRPEIMKLLREETGLRLLVLRNEGGNEYSFVPIVRRSDTQRLDGGGDSLVGKKDDQREETSTARREVGMRSLAVEVGALHQSPAPLTVADPASALLHMGALLGGDLRPEPLTCCRRRRRRRTRRSSPSPVLLPPRSTSPVAAPDAALHAPSGPERRRRQRIHRSRAWQRWRRMPARQAAKGEEAGAVSGARRRRRRRPAPSSGGDRGRRSA

SEQ ID NO: 159298 - protein, 83 aa, Oryza sativa
  unsure (1)..(83): unsure at all Xaa locations
  Clone ID: PAT_MRT4530_58689C.1.pep
XTTLAYGPHREWPPPATXXGSIPKGSKFHRRGSPVSRXFQPXSGLSANFNKWRKXNQIXLXGXWTKLKGLQXIPKTXSLTXHH

SEQ ID NO: 159299 - protein, 311 aa, Oryza sativa
  unsure (1)..(311): unsure at all Xaa locations
  Clone ID: PAT_MRT4530_5868C.1.pep
KRKRGDDVTCLARFPKHRLQLPRRADLPKLQRPRARAADGRAHLAAARARPKAASPARPTGGGTTAPRWSPPATTGAAERRPRERRGEGSERAVFGSPRVDGDDGNGGRSGGRRRRGSGRRGRRCSGGRRAKRRGGRGRRGRGEADGGDAEWGGGPERRRRRTGARRRRRREGATVRARFRRGGEAASGGNGRAKHEEXLYSVGRGRARPEREETGAEISAAIDGAGEVCWSXFRTNPREREREKRGERERESRGMIPPSLWRAGTAGCGGIRGGGGARARAXRRERREEGDDRWAPPVSEGGGRARPPCH

SEQ ID NO: 159300 - protein, 84 aa, Oryza sativa
  Clone ID: PAT_MRT4530_58690C.1.pep
MVLRHEPTTPGVNPFFTRPICPQAREPTGHRPPGAQRTTRTTASSRCSSRHRRNSRRANGELLLLHAHLASPSSGDLETPIVWL

SEQ ID NO: 159301 - protein, 145 aa, Oryza sativa
  unsure (1)..(145): unsure at all Xaa locations
  Clone ID: PAT_MRT4530_58691C.1.pep
MACNKVVISALLGGVVSVLGATTTMADHHQEQVVYTTGQLCQPGIGYPTYPLPRCRAFVKRQCFTPXTVDEHVRXRGCCWQIAAIDSSWSMFDALNHMLRIIYRESXPATAEHSMFDVFFGCLRGDIERAAASLPTFCNVDILNG

SEQ ID NO: 159302 - protein, 60 aa, Oryza sativa
  Clone ID: PAT_MRT4530_58692C.1.pep
AAVFRPMLLMYRYMICYMYSCNSLDVFHLKARCSHLICKGLYPPSPAGLSVRLLQITMGS

SEQ ID NO: 159303 - protein, 84 aa, Oryza sativa
  Clone ID: PAT_MRT4530_58693C.1.pep
ACFVVHHWPSLTLSPPSVKSSGQGCVVFWLKAPKLCLSFFPPWAILFPWARGPIDDFFFLKKKKKKKKKKKKKKKKTKKKKKPK

SEQ ID NO: 159304 - protein, 48 aa, Oryza sativa
  Clone ID: PAT_MRT4530_58694C.1.pep
AIIREPDLAGDSKHQPGAVSPSVQVLTHKVRRHVTNSVYPRFTQSNTC

SEQ ID NO: 159305 - protein, 105 aa, Oryza sativa
  Clone ID: PAT_MRT4530_58695C.1.pep
SFFYGTIFTPLNLGGPTHTCQHCGARFWYEERVRGCGRTALQIYNKCCRGGSIYLPPYRPPPEPLLSRLTGRDRVLSNHFFENIRRYNSMFAMTSMGVNIINSIN

SEQ ID NO: 159306 - protein, 96 aa, Oryza sativa
  Clone ID: PAT_MRT4530_58696C.1.pep
KHLSSGGVGEHRGEAMWHRRSRSFFFLFLFPPSQTLLVSPLLYYFCLMDIFFISLFFLLLNCLISSLCGSIMWRFEINLSLIEIWNIKIRSSKKSG

SEQ ID NO: 159307 - protein, 1502 aa, Oryza sativa
  Clone ID: PAT_MRT4530_58697C.1.pep
MKKYTCWTKHGEQEAPDVAAEEVLDQGVENTAAAREGMFVPSPLGGETIDLDTQCLSTMLHDIEDAEDNDRDYEKFSKLVEDCQMPLYDGCKSKHSKLSCVLELMKLKAINGWSDKSFTELLELLKDMLPEGNNLPQTTYEAKQVLCPLGLEVRRIHACPNDCILYYKEYADLDVYPICGGSRYKRAKSEGEGSTTKDGLNARRDLEDMGVRSELHPITTESGRRLCSFFHAIGQKIIDPEGLDKLQAELVRTLCHLEMYFPPTFFDIMEHLPVHLVRQTKCCGPAFMTQMYPCERYLGILKGYVRNRSHPEGSIIESYTTEEAIEFCVDYMSETSSIGLPRSHHEGGLTHMTEVVPYVDEHLAVIRQENPGRSESWVRNKHMSSFNEWLKNRIARLQNLPSETLQWLSQGPEWSATTWQGYDINGYTFHTVKQDSKCTVQNSGLRIEAASDGGRRDQYYGRVEQILELDYLKFKVPLFRCRWVDLRNIKVDNEGFTTVNLANNAYKDEPFVLAKQVVQVFYIVDPCNKKVHVVREGKRRIVGLDNIADEDDYNQHVHGIGQEIPLEEEEEEDEVQYARPSQVTSPVTASVGPVTGGLTCDGSTVGARHRSIQIRRPLSLTHSLDRRLASLDLSAALYALLSTAASTSPPPSSPPPNPPPSPPPSTPSSPLPRPRPLRHHLCRRPLRRPPHRRLDLSAALSTAAASRPPPSISIDLSAAISAALSTAISALYAALPTAASTSPPLPPHSLSRRPPGPPLSRHARTVVTATGISSPPPPPLDRDSSSPCAASSARRLLSRPTAPRTVIGRWSNCCGIAARENFGILHKDIGKITEAEKERAWTAMEKWFTFPAEAKDRLKRKAFQKMGKAWKNWKSKLFTEFVNPPGNHTPFDEYPQITEAVWEEFCSLKTTQEFRESSEAHRLLQQRNEHPHRLGTAGYIGKEAIWAQEDAAAAAANVPTPFSDIPEQRARNWARARGKVNPDGSVTFENKSDAVVYQELLGLVTEQASQSEVESAPKRRKDDILTKALGTKEHPGRTWGIGSDVPWKHGLPQYRSQYRKRKVSKEERDARLKDELKVEVIQELEASMNARVEERVNKVLADMNIPRVTTPAVQPTPRVQHDASPSQHRSSCASTEVPAPGLPIAPLAAVDHIEGAAQCVLLARVHPTFAPEVAEGMAFKPSVTDKVHGVDLLAGYAKVSIDTVKDTWSGYPLPVPPNDEIMTLGDARKTFIQWPKEDIVVKMTPRPSRPTELTPPKSKLSIEAPRGPALSVPHSPGGADMDLADIAQSLAPIKTTRKADSSPPLVKGQKRERGKGKVGELAPEPKRGKAATSMPVSKSGKVVRAPAQFELGMPLVEDNVLAVMGIACRELHKQYMELSNAKRKMRESSIVGHHDHQPFLSSPAYITIGFDDLFDLFRIRKLDTGLLKCYSFEITKALNMAWGPYVEKGGRHKEGKNELYHDTKFACAQQIGDQCGFHVCHNMSTLLREVKDFDPEVVANGE

SEQ ID NO: 159308 - protein, 382 aa, Oryza sativa
  Clone ID: PAT_MRT4530_58698C.1.pep
MVNTRASRSENNNNEENPTLAQVLAQQTQLINMLVQQVQNQQGNNNVNPPPPQNKLANFLRVRPPTFSSTTNPVEAGDWLHIIEKKLVLLQCTNQEKVVFTSHQLQGPASEWWDHFRMNRAKGQPITWEEFIEGFRKTHIPAGVVTLKKREFRTLKQKDHTVTEYLHEFNRLARYALEDVRTDKERQEKFLEGLKDELSVKLISHDYSDFQQLVDKAIRLEDKKNRMDNRQGQSQQLNISCEINSETNASNEVNIEQATQSVPVQQNQPQEDNSSGREQQPLTPYLTGTVAKGLGMAEPIRPQPLTPYLIGIAAKGLGVAKPVRPQPLTSYLIGNMAKGVGVAKGSHFSLLVWVPHGRRQLLSNGQLRHVEGRGCSTVLEKQ

SEQ ID NO: 159309 - protein, 466 aa, Oryza sativa
  Clone ID: PAT_MRT4530_58699C.1.pep
MEMDEVGGRWTSLGQMKATRAAARKHGLSQYSSQYRKRKVSKKERDARLKAELKVEVIQELEASMNARVEERVNKVLADMNIPRDTTPAVHPTPCAQHDASPSQHRSSCASTEVPAPGLPVAPLAAVDHIEGVAQCVLLARVHPTFAPEVAEGMAFKPSVTDKVHGADLLAGYAKTFIQWPKEDIVVKMTPRPSRPTELTPPKSKLSIEAPRGPALSVPHSLGGADMDLADIAQSLAPIKTTRKADSSPPLVKGQKRERGKGKLVPEPKRGKATMSMPVSKAGKVGRAPAQFELGMPLVEDNVLAVMGIACRELHKQFMELSNAKRKMRESSIVGHHDHQPFLSSPAYITIGFDDLFDLFRIRKLDTGLLKCYSLLYWIESRRLSNQVGFLDPSMVNEVNLRQSFTEVVDYVNRCLWAHQDKEYIMCAHNQEKVVEVEDIMALIHLRAWLANPEASQYLAFIFFWN

SEQ ID NO: 159310 - protein, 724 aa, Oryza sativa
  Clone ID: PAT_MRT4530_5869C.1.pep
MLTYRRTGVIRVKEDHENSSKDGSHDQAHKRAKNSASPTISKEQKSDVTAMQLVLTPFGNCRPPPPPRLVIANGIAYTIVHTKSGATVVGEVITAAEKVDEIYLSQPVDSPTPDQPCLLPPELERWSLLSSQPAAAAKITGEASLAATTAALSLAVPQMATPTSTDVNRSKDQLSKTSSTPRCRSVRSNVENMDGIAAGDDDSLLKAMKRKALRNLDDSFVGREKNPNLLQKEKSERLVPKIQKPLNLFPHERGVSDHTPLLLDTGEAAFTGNIKQFKLELGWFLRDDFYDRVLEIWNKLVKGRNAVQRWNNKMSALRRHLRGWAAHTSGVFKQKKANLQNTIDSLDIAVEVRLLSDQERILLDQSRDSLASLLREEEIKWKKRIFFLDQDEGKIEGVEALKTYITSFYRKLFGPPEENSFSLDESIIGDMAQVSQAENDFLTAPFSEEEVKEAIFAMEHNKAPGLDGFPAEFYQKFWDVIKHDLMNLFNEFHTGSLPIFGLNFGVLTLVPKVKEANQIQQYRPICLLNVSYKIFTKVATNRISSVANHLVNPTQTVFMRGRNILDGVVIIHETVHELHRKKLSGVIFKIDFEKTYDKVKWPFLLQTLRMKDKKGLRQGDPLSPILFNFIADMLATLINRAKTQGQIDGVIPHLIDGGLSILQYADDTVLFVNHDLEKAQNMKSVLLAFEQLSGLKINFYKSELNCFGTVRAPLFNLVGYSVVY

SEQ ID NO: 159311 - protein, 97 aa, Oryza sativa
  Clone ID: PAT_MRT4530_586C.1.pep
TKLRLIRQEATGRDLGEARWWSSGNTRAGPTWPTAPLLRGRSGAAAAGGRGQPPWLLQLSSIKPLPNPHFKPCSARRRLPAPGPWSRVSVPARRRHP

SEQ ID NO: 159312 - protein, 122 aa, Oryza sativa
  unsure (1)..(122): unsure at all Xaa locations
  Clone ID: PAT_MRT4530_58700C.1.pep
MRRSALTLLDFTATPCRYWCPMALAYKKLHYHYSXQELLGTKSNLLLCSNRIHAKVXVLLHGYGDSRAPCDVLVIXEYLDDSLPDATPSLLPSASDDPYARASARFWADYFDKTVYPVATRL

SEQ ID NO: 159313 - protein, 1732 aa, Oryza sativa
  unsure (1)..(1732): unsure at all Xaa locations
  Clone ID: PAT_MRT4530_58701C.1.pep
MASNQALSKPFFFLSTDVLLQVTEFVRFLLLLTVVPHIFLKLKVGWVKVRAEGIGGTGVQARAEIKLQVGWVEVRAEGIGGAGVRCWAEMDRRWMYYTHRSSTEYREGVTEFVTFADNDRKSRMSMHMLCPCMDCKNEQMIEDKDEVHAHLIMNRFMKKYTCWTKHGEQEVPDVAAEEVLDQDVENTAAAREGMFVPSPLGGETIDLDTQCLSIMLHDIEDAEDNDRDFEKFSKLVEDCQMPLYDGCKSKHSKLLCVLELMKLKASNGWSDKSFTELLELLKDLLPEGNNLPQTTYEAKQVLCPLGLEVKRIHACPNDCILYYKEYADLDVCPICGASRYKRVKSEGEGSKLKRGGPAKVVWYLPIAERMKRMFANKEQAKLMRWHAEERKVDSMLRHPADSVQWRTIDRIYQEFSNDPRNMRFAMCMDGINPFGDLSSRHSTWPVLLVNYNLPPWLCFKRKYIMLAMLIQGPRQPGNDIDVFLEPIIDDFERLWNEGTRTWDAYAQEYFNLHAMLFCTINDYPALGNLSGQTVKGKWACSECMEETRSKWLKHSHKTVYMGHRRFLPRYHPYRNMRKNFNGHRDIAGPPAELTGTEVHNLVMGITNEFGKKRKVGKRKEKSTSKEKTEEHVEKQKTKERSMWKKKSIFWRLPYWKDLEVRHCIDLMHVEKNICESXLMGLLLNPGTTKDGLNARRDLEDMGVRSELHPITTESGRVYLPPACYTLSKEEKIDLLTCLSGIKVPSGYSSRISRLVSLQDLKLVGMKSHDCHVLITQLLPVAIRNILPPKVRHTIQRLCSFFHAIGQKIIDPEGLDELQAELVRTLCHLEMYFPPTFFDIMEHLPVHLVRQTKCCGPAFMTQMYPCERYLGILKGYVRNRSHPEGSIIESYTTEEAIEFCVDYMSETSSIGLPRSHHEGRLDGVGTVGRKTIRLDRKVYDKAHFTVLQHMTEVVPYVDEHLAVIRQENPGRSESWVRNKHMSSFNEWLKNRIARLQNLSSETLQCLSQGPEWSATTWQGYDINGYTFHTVKQDSKCTVQNSGLRIEATSDGGRRDQYYGEVEQILELDYLKFKIPLFRCRWVDLRNVKVDNEGFTTVNLANNAYKDEQFVLAKQVVQVFYIVDPCNKKLHVVREGKRRIVGLDNIADEDDYNQHVHGIGQEIPLEEEEEEDEVQYARPSQVTSPVTAQSFGPVTGGITCDGSTVGARHRQCWPEESHQGIQAGGVEESLFQAERVRGEISVRGADLESGEDSSDSVTSDAGSAKAAPDDVLHIAHALCKVCAKSPRAVIDFVRRVSPATVGRSIDWDVVREEESSKMGDGRSRWTDMEVRVFLESCLEEMAAFTITSNSPKPQAWQNLIHKMYTKCKKKVNKAQLEYIWGQCKKRNDPLKHIDLHHAVFSGHTVVGNHSAVAGAAPQAPQGAVQWQTIDMAQLAAAYRPPPPTPPPTAADRGKGKRPAANTTASGSSSKKSRSDSAGLALERIADIREQSYQSRVAQMEAEKSMGLDACMELVENDGHEIGGSVWYAACALFRDPFTCKCFVRLKGAARRLEFIRTGGTGQSSGGTCEEEDAIIEYMAATLDFNERAPRRIPVQTGPSQVTSRLAPVTDPAPTLTPLSSLDRRLAPIDLSATLYALLSTAASTSPPPPSPPPNPPTSLPLTLSVDLPDAGLHHHRRSPSPPPSPPSPRPLRRPPLHRRLDLSAAISAALSTLYTALCTAAASLTLSTAAGTSS

SEQ ID NO: 159314 - protein, 619 aa, Oryza sativa
  Clone ID: PAT_MRT4530_58702C.1.pep
MTPDVGWDPQRQDDQRPAPSSPLGPLLLVLFSRTRIALGITYVDVGRDKCKPTAPRTVIGKWSNCCGLAARENFRILHKDIGKVTEAEKELAWTAMEKWFTFPAKAKDRLKRKAFHKMGKAWKNWTSKLFTEFVNPPSNHTPFDEYPQITEALWEEFCSLKNTQEFRESSEAHRLLQQRNEHPHRLGTTGYIGKEPIWAQEDAAAAAANVPAPFSDIAEQRARNWVRARGKLGLVAQQASQSEVESTLKRREDDILTKALGTKEHPGRTRGIGSDLPWKHGLPQHSSQYRKRKVSKEERDARLKAERKVEAIQELEASMDARVEERVNKVLADMNIPRGTTHAVHPTSRAQHDASDARKTFIQWSKEDIIVKMTPRPSRPTELTPPKSKLSIEAPCGPALSVPHSPRGADMDLADIAQSLAPIKTTRKADSSPPLVKGQKRERDKEKVGELAPVPKRDKAATSEAVSKAGKVVRAPAQFELGMPLVEDNVLAVMGIACRELHRQYMQLSNVKRKMRESSIIGHHDHQSFLSSPAYITIGFDGLFNLFRIRKLDTGLLKCYSLLCWIKSHCLGNQVGFLDPSMVNEVNLRQTVTDVVDYVNRCLWAHQDKEYIMCAHNQE

SEQ ID NO: 159315 - protein, 358 aa, Oryza sativa
  Clone ID: PAT_MRT4530_58703C.1.pep
MAGGRGARASLHLHLAWLCAFATTAWAHGGGGGGGDSDADADGGGEGKPDLRARGLVAAKLWCLAVVFAGTLAGGVSPYFMRWNDAFLALGTQFAGGVFLGTAMMHFLADANETFADLLPGTAYPFAFMLACAGYVLTMLADCAISFVVARGGGRTEPAAAAGAGLEEGKLSSTNGNASDPPAADAAAQDHSVASMLRNASTLGDSVLLIAALCFHSVFEGIAIGVAETKADAWKALWTISLHKIFAAIAMGIALLRMLPDRPFLSCFGYAFAFAVSSPVGVGIGIVIDATTQGRVADWIFAVSMGLATGIFIYVSINHLLSKGYTPLRPVAADTPAGRLLAVVLGVAVIAVVMIWDT

SEQ ID NO: 159316 - protein, 200 aa, Oryza sativa
  unsure (1)..(200): unsure at all Xaa locations
  Clone ID: PAT_MRT4530_58704C.1.pep
MVGCEHMVLRVVLMTIKDRLRSGEKSTGVAGESMPLVFEGVIMIQERALKHKDRTVAEYLHEFNRLARYAPEDQLVDKAIRLEDKKNRMDNRKRKMTVSQEAQGSSQRQRIKPLQISESSSAGQGQSQQLNIGGEIKSETNESNEVNIEQANQPVLVQQDQSNNSSGREQXGANAVPVASSRVASSSVTTQPPVSKRHAP

SEQ ID NO: 159317 - protein, 70 aa, Oryza sativa
  Clone ID: PAT_MRT4530_58705C.1.pep
TTIPGKNIAQPAHDRGHGYSNSFTLARDVPLYPQDTIPHMLPCPEVPPQHCKGGNRDNTLCTIQLTTVHH

SEQ ID NO: 159318 - protein, 728 aa, Oryza sativa
  Clone ID: PAT_MRT4530_58706C.1.pep
MSTPGANPSSPTPARIQEEANPATEAVAEGHPATTAVQQPEIHELPQEQHTSMSGETSASRSSRNPRSQNIWPTTVQVIREVDASGRPTAPRTVIGRWSNCCGIAARENFGILHKDIGKVTEAEKERAWTAMEKWFTFPAEAKDRLKRKAFQKMGKAWKNWKSKLFTEYVNPPGNHTPFDEYPQITEAVWEEFCSLKTTQEFRESSEAHRVLQQRNEHPHRLGTAGYIGKEAIWAQEDAAAAAANVPAPFSDIPEQRARNWARARGKVNPDGSVTFENKSDAVVYQELLGLVAEQASQSEVESAPKRREDDILTKALGTKEHPGRTRGIGSDVPWKHGLPQYSSQYRKRKVSKEERDARLKAELKVEVIQELEASMNARVEERVNKVLADMNIPRVTTPAVQPTPRVQHDASPSQHRSSCASTEVPAPGLPIAPLAAVDHIEGAAQCVLLARVHPTFAPEVAEGMAFKPSVTDKVHGADLLAGYAKVSIDTVKDTWSGYPLPVPPNDEIMTLGDARKTFIQWPKEDIVVKMTPRPSRPTELTPPKSKLSIEAPRGPALIRKLDTGLLKCYSLLCWIESRRHGNQVGFLDPSMVNEVNLRQSFTEVVDYVNRCLWAHQDKEYIMCAHNQERHWILLVIVPKWSRVTYLNSNKSKDYDFSEITKALNMAWGPYVEKGGRHKEGKNELYHDTKFACAQQIGDQCGFHVCHNMSTLLREVKDFDPEVVANGE

SEQ ID NO: 159319 - protein, 82 aa, Oryza sativa
  Clone ID: PAT_MRT4530_58707C.1.pep
YDLEGDPNTFKKEKMFLDFDFHQDPYFEYKYWVGEIGVEGLFIDFTGTLQRFQEWKTRYPKNEKNAEGFLQKINYMLKERGY

SEQ ID NO: 159320 - protein, 731 aa, Oryza sativa
  Clone ID: PAT_MRT4530_58708C.1.pep
MAIPEVDIRRLVLEYVGLYVLASVVPYIVVGVLIEVVVCVVRVDRVERRLRRAAVLPGHRLARSLAAAPASSPHGMGGSGRRARQGQPPGGGPPPRPACRLACLPPCPAVAEPGSPPRPLVASPSFRLASSPPRPAAASLGRNLACSPPRPAAASPGRRRAEEVLDQDVENTAAAREGMFVPSPLGGETIDLDTQCLSTMLHDIEDAEDNDRDYEKFSKLVEDCQMPLYDGCKSKHSKLSCVLELMKLKASNGWSDKSFTELLELLKDLLPEGNNLPQTTYEAKQEYADLDVCPICGGSRYKRAKSEGEGSTTKDGLNARRDLEDMGVRSELHPITTESGRVYLPPACYTLSKEEKIDLLTCLSGIKVPSGYSSRISRFVSLQDLKLVGMKSHDCHVLITQLLPVAIRNILPPKVRHTIQRLCSFFHAIGQKIIDPEGLDELQAELVRTLCHLEMYFPPTFFDIMEHLPVHLVRQTKCCGPAFMTQMYPCERYLGILKGYVRNRSHPEGSIIESYTTEEAIEFCVDYMSETSSIGLPRSHHEGRLDGVGTVGRKTIRLDRKNSGLRIEAASDGGRRDQYYGRVEQILELDYLKFKVPLFRCRWVDLRNVKVDNEGFTTVNLANNAYKDEPFVLAKQVVQVFYIVDPCNKKLHVVREGKRRIVGLDNIADEDDYNQHVHGIGQEIPLEEEEEEDEVQYARPSQVTSPVTAQSVGPVTGGLTCDGSTVGARHR

SEQ ID NO: 159321 - protein, 1026 aa, Oryza sativa
  Clone ID: PAT_MRT4530_58709C.1.pep
MAEVRKYGLPNQPPDIPQILLEAQNRWLRPTEICHILSNYKKFSIAPEPPNRPASGSLFLFDRKILRYFRKDGHNWRKKKDGKTVKEAHEKLKVGSVDVLHCYYAHGEENENFQRRTYWLLEEGFMNIVLVHYLEVKGKNNFSRVASKVSAVLKKLKRVQDYLMLIVLHAQTLSLVRASVSKEKFGATDNCRASSRYHPFVEMQQPVDGVMMNNMLGVSAPSAGYHGEMQTTTANSDNHFATHYDIAGVFNEAGAGLRGVSKTLHDSVRFAEPYPECSAEFMEPALYSSNATMESNNLDDNSRLETFMSEALYTNNLTQKEADALSAAGIMSSQAENNSYTDGIRYPLLKQSSLDLFKIEPDGLKKFDSFSRWMSSELPEVADLDIKSSSDAFWSSTETVNVADGTSIPINEQLDAFAVSPSLSQDQLFSIIDVSPSYACTGSRNKVLITGTFLANKEHVENCKWSCMFGDVEVPAEVLAHGSLRCYTPVHLSGRVPFYVTCSNRVACSEVREFEFRDSDARQMDTSDPQTTGINEMHLHIRLEKLLSLGPDDYEKYVMSDGKEKSEIINTISSLMLDDKCLNQAVPLDEKEVSTARDQNIEKLVKEKLYCWLVHKVHDEDKGPNVLGKEGQGVIHLVAALGYDWAVRPIITAGVKVNFRDARGWTALHWAASCGRERTVGALIANGAESGLLTDPTPQFPAGRTAADLASENGHKGIAGFLAESALTSHLSALTLKESKDGNVKEICGLGGAEDFAESSSAQLAYRDSQAESLKDSLSAVRKSTQAAARIFQAFRVESFHRKKVVEYGDDDCGLSDERTLSLVSIKNAKPGQNDGSHSAAVRIQNKFRGWKGRKEFMIIRQKIVKIQAHVRGHQVRKSYRRIVWSVGIVEKIILRWRRKRRGLRGFQPVKQLEGPSPIQQLEGPSQIQPAKEEEEDEYDYLKDGRKQAEGRLQRALARVKSMTQYPEAREQYSRIANRVTELQEPQAMMIQDDMQSDGAIADGGDFMAELEELCGDGDAPMPTIL

SEQ ID NO: 159322 - protein, 75 aa, Oryza sativa
  Clone ID: PAT_MRT4530_5870C.1.pep
MRRYSPPYRSPPRRGYGGRGRTPPMRGYGGRKEQGSGSLLVRNIPLSCRYWNCITLTPFSNDYILNEINKYSLCF

SEQ ID NO: 159323 - protein, 798 aa, Oryza sativa
  Clone ID: PAT_MRT4530_58710C.1.pep
MTPLLLLLLLPLLLLAPASASTVAIAAGPTACAVAEGNSTVYCASATNSSSSAAVAPFVSFSQVSGGGGAFVCGLQVGGRALFCWPAAAPGQLRRVYNGPGQLSQLAVGGGHVAAYDAAARVIRWWRGGDRFPLWFGGGFASLVSGDDFTCAVETSTSAVRCWGPRGGAVEAGFLNASVSALAAGGSRACGVRRNDGGVLCSGGGVLAPREDLYVDGLAVGDSHACGLLRPNHTAACWSLGGATTTLYYPAVGTAFELLVAGGNLTCGLVSANFSLLCWSRDGLVAAEVNLPPILPGVCVSDNSSCKCGPLPDSGRFCKVSGDVICRRFCDTSPPPPPPSPRTPSPPATPSSRRGVSKGWIAFAVVGAVGCFAGLCSIVYCLLFGFCSHKKVHNSVQPNIASNNNGGGGGGAAAAVGSGAPSPYGSPNGSLGRLRRQLSRVMTRQRSGPSSFKDPAEEFTFAQLAAATKDFAAEAKIGEGSFGTVYRGKLPDGREVAIKRGESGPRARKFQEKETAFRSELAFLSRLHHKHLVGFVGYCEESDERLLVYEYMKNGALYDHLHPKPNGSSSPSPSPVATSWKLRIKILLDASRGIDYLHSYAVPPIIHRDIKSSNILLDGSWVARVSDFGLSLMGPETEEVKHLSMKAAGTVGYMDPEYYGLHHLTVKSDVYGFGVVMLEALTGKRAIFKEAEGGSPVSVVDYAVPSIVAGELSKVLDARAPEPSAHEAEAVELVAYTAVHCVRLEGKDRPAMADIVANLETAVALCEDSATGGGAAGHGNSSSSASLSITSMELSRMD

SEQ ID NO: 159324 - protein, 77 aa, Oryza sativa
  unsure (1)..(77): unsure at all Xaa locations
  Clone ID: PAT_MRT4530_58711C.1.pep
LIEQKPRRRLRRGGCRGSGLGRGECGVACGTEAEAAELDAESRLRLPGXGPRWVRLRPQRGGQCGGADGACGVLTDT

SEQ ID NO: 159325 - protein, 89 aa, Oryza sativa
  Clone ID: PAT_MRT4530_58712C.1.pep
STLRFKKKKKKKKKKKKKKQKKKKGNNSKRRKKKKKKKKKKKGGLFKRIKLYYVVLHRQKLLKWATKKKKKRADFNHFKKGKNNSFPNK

SEQ ID NO: 159326 - protein, 58 aa, Oryza sativa
  Clone ID: PAT_MRT4530_58713C.1.pep
PRAPSVQCIIHMPRPSRDHSTPHAGECTTVNRLSRSSFQPDLSGSLPSLIYSYTRHSP

SEQ ID NO: 159327 - protein, 48 aa, Oryza sativa
  Clone ID: PAT_MRT4530_58714C.1.pep
ASCTNYTSSATARNVNVKLPVTINANFYNIFSNDTGTIGFLQEELRFF

SEQ ID NO: 159328 - protein, 57 aa, Oryza sativa
  Clone ID: PAT_MRT4530_58715C.1.pep
VGTGGDRGMRWWTVQMESVVWNRVKLVGKWRHDGAGWLADDLTREMGGSMAQRWRWP

SEQ ID NO: 159329 - protein, 63 aa, Oryza sativa
  Clone ID: PAT_MRT4530_58716C.1.pep
LLKRQSQMILKIKSMKSPRLIPSAGLNPRRKEHPQIRRCRRLVPSHSSTGNSTHLYLGGYDTL

SEQ ID NO: 159330 - protein, 58 aa, Oryza sativa
  Clone ID: PAT_MRT4530_58717C.1.pep
TTYQSTQWRTLKLKPARRCQPAPDEVTGEKVSKSELKKRQKQRERDAKKAEKAAAAPP

SEQ ID NO: 159331 - protein, 117 aa, Oryza sativa
  unsure (1)..(117): unsure at all Xaa locations
  Clone ID: PAT_MRT4530_58718C.1.pep
IIQNFRLQERNVKQNTPSKIEGVFVSEENVNRNTPCKVGGVFVSAERREHMPLISSTRRAAAAADSIASSRRGGGRWRGRGRSRRRRRRRGRRTPGARSCRRRTAPXSSPARTRSPP

SEQ ID NO: 159332 - protein, 380 aa, Oryza sativa
  Clone ID: PAT_MRT4530_58719C.1.pep
MKVEQDLHMSRGDGETSYAANSRLQEKAILKTRPLLHKAVEEAHASLSGLSRAPAGGKMVVADLGCSSGPNTLLVVSEVLSAVANRSSCDHKSSLVADVQFFLNDLPGNDFNLVFQSLELFKKLAEMEFGKALPPYYIAGLPGSFYTRLFPDRSVHLFHSSYCLMWRSKVPDKLASGEVLNAGNMYIWETTPPSVVKLYQRQFQEDFSQFLALRHDELVSGGQMVLTFLGRKNRDVLRGEVSYMYGLLAQALQSLVQEGRVEEEKLDSFNLPFYSPSVDEVKAVIRQSGLFDISHIQLFESNWDPQDDSDDDDVATLDSVRSGVNVARCIRAVLEPLIARHFGRCIVDDLFDMYARNVAQHLEQVKTKYPVIVLSLKARR

SEQ ID NO: 159333 - protein, 436 aa, Oryza sativa
  Clone ID: PAT_MRT4530_5871C.1.pep
MGFLFARSSGYSFVALALLACVLLAPCQAAKAGLSIKFYAKTCPGVDTIVRSVVAQAVAKEPRMGASIIRLFFHDCFVNGCDASILLDDTLTFTGEKNAGANINSVRGYEVIDAIKSQVEAACKGVVSCADIVALASRDAVNLLGGPTWNVQLGRKDSRTASGTAANANLPGPASSGASLVAAFAGKGLSAREMTALSGAHTVGRARCLMFRGRIYGEANINATFAAALRQTCPQSGGGDGNLAPFDDQTPDAFDNAYFKNLVAQRGLLHSDQELFNGGSQDALVRKYAGNAGMFAGDFAKAMVKMGGLMPAAGTPTEVRLNCRKDMTNFIILICGAHFPLNLQVFGGLLFILPQKMEKTDDVVFTGHIKDDDDIPPPSRATMEAEAASLLVALVSRAITACRVAKRRPPPTRFNAATAASASGPRLDYCVVIRRP

SEQ ID NO: 159334 - protein, 100 aa, Oryza sativa
  Clone ID: PAT_MRT4530_58720C.1.pep
MAKPEQQQVEEEGFDLPFFMEEEEAEVEAAKQKRREESLKPQRERQMTSTEAKERWARRKELSSKLFEYDPKTGTSFYTRAWFLDLTTFDLDKESGIAVS

SEQ ID NO: 159335 - protein, 805 aa, Oryza sativa
  unsure (1)..(805): unsure at all Xaa locations
  Clone ID: PAT_MRT4530_58721C.1.pep
MNLKQVHPKGTKGVANGSDDKGEGPQDGTVEEPLRCNNFQDQVDYAVQHALINXSGVIINTLSNMIKSVVDSTIAEHQNTGPVFLPGGVFPQYRNLVTGNQQHTTNAPPVQPTAMVSVPAPAAPSSAQRQVINPHVLTREQPQHVGQNINRLTQEQVATMFAPTQPTVELVQSTPIRQQVIQPXLGSRRYNRYQQDRERLLLSKIHLLEPSLYLPHQKPXADMIADVMREXFGLKPKDSGNLYRHPYPEWFERVPLPNRYKVPDFSNYFYSGTHEMKLSDLIGVRQRHDETVQDYIXRFRDMRNKCYSFALTDSQLADLAFQGLIAQIKEKFSSQEFESLSHLAQKVTLHEQRFVEAKKNFKKINHVYPYMYDSEVAAAEWVRSKKVVPCQWVKSFGKEERYDFDITKAXRFLICYFGRNRYNFMLIQAAIEGGKIKFNDSKKPMKVDGHPFPERYHEEDDGGMRLPSIEDCPGCSDNAGSSSRSCTKGNRLSQKRLSVHQRLGSLNQDRHQDENEDRKTQWCPSCIFXKNQKRRVQKTKQEWRVKSKVTTTDEVEADKAKKLAKGKSVASTSVNMVFILPTEFEARQADVDDVEEASARLILSPEQAFFEKPEGTENRHLKPLFXVNGKPMSKMMVDGGAAVNLMPYATXFRKLGRNADDLIKTNMVLKNFGGNPSDTKGVLNVELTVGSKTVPTTFFIIDGKGSYSLLLGRDWIHAXIEPTMHQCLVQWQGDKIEIVPANSQWKTETPNYYFEGVVKGSNFYTKGTVDDLDGKLGHGFMSADDLEEVDIDLGDRPRPTFISKK

SEQ ID NO: 159336 - protein, 187 aa, Oryza sativa
  Clone ID: PAT_MRT4530_58722C.1.pep
MGLASSRPPLVSAPATATARLPPHRHRRRRLYLSATSCASTNSYSSSVLSHGGTCAPRSLVAAELQSQSRPPPLAAGVSVRGDAATGLAFLLFVLAVVMSSFLSLAIFSFPTWRALKRLEIAVHKLSKVVAEEVPGTLSSLKLSCLEINDLTSQLKNFRQRLMINIFGNNSSVDARSQTGWPKRGKI

SEQ ID NO: 159337 - protein, 807 aa, Oryza sativa
  Clone ID: PAT_MRT4530_58723C.1.pep
MGSDLKEMKYRRRIGLDERAQCSEQRALDWHALKQDPVELLRKLDELREQITRTCQIVEPPREHRRAGRRALSLLPENPEPPPMPGYHRSRYGGGRYGHGLPPSPYEPLRPEIGERYSRQSSGRYRQYQGRQWDGCGVGHGNYNPSYTCSCPHCLHGQRTAPQEEHIPMARYFAGQHECYRFERSPSVSSDYDRRSVASSLYSHRSVSKKRAEYFRKKAEHLCRPVYGAAPFVVCSSCYQLLQVPMEKCMGRNRLQCGSCSQIVSLKREEKVIPFSPSASFCVPKIEQGSNDQTRRDFEHQLNEFANSAFYNLNEHSSMQINIDFGDDHSVSSSISHDRTEKGCGSSRSIQLKTDGLLLSPSRSGDIESPKDILCERDAECQVEPSDARVSPCSPVLEDKLVDPLCSQEKDNNSEDLGMANISDVNCKGEHKVNDDDDGSLSMGSEQKRKECDEDSLVDESMCKTHEQKSKDDHSSPEDVSKTHEFDSTKDNISSAVDGNEKHEFESKKDDTNSLEGESLNKEHEQKSKEDENSGLEGENVKKGFDKNNKESENSALEDANAPLEDTRNASDAASLSEISEEKKTEEENGSLDQPFVEDGNAFAESGGSSFNERTNSGFSRGSSETALEEDQPSTGKSGDSSFFAGFLKKGFKDLSLFNQSMDSVKVSINGHPISERALKKAEKKAGPVEPGSYWYDYRAGFWGVMGRECIGIIPPFIREFNYPMASNCASGDSGVFVNGRELHQRDLDLLVGRGLPRISGKSYSVEISGNITDEETGKKLRSLGKLAPTIEKLKRGFGMHVPEEFR

SEQ ID NO: 159338 - protein, 118 aa, Oryza sativa
  unsure (1)..(118): unsure at all Xaa locations
  Clone ID: PAT_MRT4530_58724C.1.pep
QGHMFTARLHNGCRSAICSFGNLRNVGNIRCMHVXQLTSSRSSDTLLYLPPLTCVDLLKQIYYLLLSKWVPCLEFXMVGFLYRENHRSHTYYDGMYCTMWKLPMCQCTDTTYLLMELE

SEQ ID NO: 159339 - protein, 89 aa, Oryza sativa
  unsure (1)..(89): unsure at all Xaa locations
  Clone ID: PAT_MRT4530_58725C.1.pep
PKGESPQGVAFVGNFFRGVVGFAPFXRGVPGVFKGGKAKGGPKGGKKKIWPPPKGQKKKKGNGWCPQKNKVWGGSPSPPEKKKGFFPVF

SEQ ID NO: 159340 - protein, 99 aa, Oryza sativa
  unsure (1)..(99): unsure at all Xaa locations
  Clone ID: PAT_MRT4530_58726C.1.pep
FSFDIFFTFCFTILLFVHYYFHFNFYFIFLLLFFILFFFFYLIFFLLYXLFFMFFFFFFIFYLFFFFFSFLFLYYFLFLFFLFXFYFYSYLFFNFLIIF

SEQ ID NO: 159341 - protein, 67 aa, Oryza sativa
  Clone ID: PAT_MRT4530_58727C.1.pep
AAPFLVLRNRGGCHFYNDNIYTHIGTINHLHLPYNDEWETTTRAQGFRTHAPKARKPLRRAMQNYWE

SEQ ID NO: 159342 - protein, 424 aa, Oryza sativa
  Clone ID: PAT_MRT4530_58728C.1.pep
MNSKKPTNENKKKTKKAAERRRKKIEKNKRTAQTKRMYPPVPTTHPQPSQGSLRARWLVDAVDLATGRAERLKTTADWVEGGNSSGLHNWEELAYQYAAQGACLALVARRKKALEGVAAAALERGSPDVLVLPADVSDADQSRRAVEETVAHFGKLNHLVANAGIWSSCSFDEVTNITAFTKMMDVNFWGSVYPTYYALPHLKASKGKLVVSCSAAGTVGTSRMSFYNATKAAQLRFYETLRAELGSEVGITVLTPGYVESEITKGKGIQSGGDVAVNEEARDEQIGVFPVGRVAELGEVAMDGIRAGDWYVTWPSLFRPLQLVACLAPGVLDWACRALYGTRKGARPPLGKRIMEATGMKRLFPEALRRNPAIKTEDEEYCDGEEGYGAADDAAAAYLLQCRKGLRAAHTYIRCIFSLSDSIL

SEQ ID NO: 159343 - protein, 62 aa, Oryza sativa
  unsure (1)..(62): unsure at all Xaa locations
  Clone ID: PAT_MRT4530_58729C.1.pep
LCGGSAAVAAAGGVVGASGGRIXPPPPAPAPATATATATAQSWLAGGVVLKPGRCSLRKEFR

SEQ ID NO: 159344 - protein, 1135 aa, Oryza sativa
  unsure (1)..(1135): unsure at all Xaa locations
  Clone ID: PAT_MRT4530_5872C.1.pep
RVSADLVEGPHAIRQHLTTREKSTGILMAVYGPAQDDFKSSFLAEFVRTCQQNHLPTLIGGDFNILRSSVEKNNARYNSLWPFLFNAVIDSFDLREIALSGRQFTWANSLPIPTYEKLDRVLTSTEWESKYPLVLVHALDRGVSDHTPLLLDTGEAAFTRNIKQFKLELGWFLRDDFYGRVLKIWNKPVKGHNAVQRWNNKMSALRRHLRGWAAHTSGVFKQKKANLQNTIDSLDIAAEVRLLSDQERILLDQSRDSLASLLREEEIKWYQRSKVSDVLLRDNNTKYLNLIANGKHRKKRIFFLDQDEGKIEGVEALKTYITSFYRKLFGPPEENSFSLDESIIGDMAQVSQAENDFLTAPFSEEEVKEAIFAMEHNKAPGPDGFPAEFYQNFWDVIKHDLMNLFNEFHTGSLPIFGLNFGVLTLVPKVKEANQIQQYRPICLLNVSYKIFTKVATNRISSVADHLVNPTQTAFMRGRNILDGVVIIHETVHELHRKKLSGVIFKIDFEKAYDKVKWPFLLQTLRMKGFSPKXKSWIEPFISGGSVAVKVNDDVGPFFQTKKGLRQGDPLSPILFNFIADMLATLINRAKTQGQIDGVTPHLIDGGLSILQYADDTVLFMNHDLEKAQNMKSVLLAFEQLSGLKINFHKSELYCFGEALDYSDQYNQLFGCQVGNFPFRYLGIPIHYRKLRNAEWKEVVERFEKKLSSWKGKLLSLGGRLTLINSVLSSLPMYMMSFLAIPSGVLKKLDHLRSRFYWQGDGHKKKYRLAKLDIICRPKEQGGLGIHDLEIKNKALISKWLYKLLTTNGIWQXLLRNKYLRSQPLSQAYWKAGDSHFWANLMKVKQDFFRFGSFKIRDGSQVRFWEDKWLGNASLREQYSCLYNIVRHKLSTIVQIFQTNPPCFSWRRDLIGAKLAAWHNLLPRIADLVLDKEQDEFHWNLTPNGDFSVKSHYLALTHTGVLNINRRIWKVKVPLKVKIFLWYLRRGVILTKDNLAKRNWKGSKTCCFCHKDETIQHLFFQCRLSRLVWSVIHLASNLKPPCTVGHMFGSWLSCVLKEMRNLLLMGATALCWSIWLSRNRVIFDNKMVSSPLHVITLVTRWLRTWAILHQPGLRDTIMVVSRRLDQVAQEFFTQEH

SEQ ID NO: 159345 - protein, 124 aa, Oryza sativa
  Clone ID: PAT_MRT4530_58730C.1.pep
MTKPRNRHHPYPKALLRKKKAGNKEGEMEWNCKNCGRIKIKSVREGDVQSPSPGSQGAPAQRLDQGQVGEGGRHAQCRLHRQEEESRGGSSMKGGGRQGGSSRTRGGGFEEREAQGSQVRWSSR

SEQ ID NO: 159346 - protein, 173 aa, Oryza sativa
  Clone ID: PAT_MRT4530_58731C.1.pep
MGPLCCVGVEKRLGRACRIGVVEDERTSCCVTIVESKERRASAAAAPPPAYCCPRFCSSVPHLPPPSQSACSIAAAPAAPREASLAEGTLCMYIIPDETRDGAGHAGIVAGGLASGQSEEGKAVNLDAAAAVTVRCTLISATTVTAALPWATTPSIRIRLAVVQMGEGMRWRK

SEQ ID NO: 159347 - protein, 199 aa, Oryza sativa
  unsure (1)..(199): unsure at all Xaa locations
  Clone ID: PAT_MRT4530_58732C.1.pep
FFFFFFFFFFFFFFFFFFFFFFFFFFFFXIYXXXXHXXXXXXPPPTXXIXXKSXXYFXSKKNRXKQKQXQXXXGKXKKXXTXXEXPXXXGKXPXXKNKXLXXAFFKKXGFXCHXXPPTPGXFWQXNLXNXPXXTFXKPKXTGKNAXGSLLXPXQPLNPXXGXXXXKIGXXXIVXXRPPFSXGFXVPRXKXQLXXXRGAL

SEQ ID NO: 159348 - protein, 387 aa, Oryza sativa
  Clone ID: PAT_MRT4530_58733C.1.pep
MMASFRPFSLSSPMTTTMLLLFLLLCTNSATADVAGSNGGCGGFKRMFSFGDSITDAGNLATISPPDASFNRLPYGETFFGHPTGRFCDGRLIVDFLADDLGLPFLTPFLRAKSPEDFRQGANFAVAGATALSQDFFKQMGLNLTIIPPFSLDVQLEWFKSVLNSLGSTDQERKEIMSKSLFLMGEVGGNDYNHPFSQNRSFTNEIYPLVPKVIAKIENAIKVLIDLGAKTIVVPGNFPIGCVPSYLTMFQSKSSPQDYDAFGCIKWLNDFSGYHNRALKRMLHQIRRDPTVTVLYGDYYNTALEITHHPAVHGFKKETVLVACCGDGGPYNSNSLFSCGGPSTNLCTNPSTYISWDGVHLTEAAYKFVAHHMLHGLYAHQPSLSPK

SEQ ID NO: 159349 - protein, 87 aa, Oryza sativa
  Clone ID: PAT_MRT4530_58734C.1.pep
SPCTRATTASRRLQPRATAAPAAAVLCRLHCRLRRLAGKLVLHSVSPFHRWNSTSTANPSRNHLYRLWPSLAAALSDLRPRVLLRWH

SEQ ID NO: 159350 - protein, 294 aa, Oryza sativa
  Clone ID: PAT_MRT4530_58735C.1.pep
MERGGPCDGLCRFRIHLGTRGDCPLPAGDGGRREGGGVWRAGRRGGGAECGEAAGAMASEDMIEDPGDTCIRVLKRMQADLVILVASRKAEKAPNGKEESHTEQKVCRCQPAHTLGPPLKRHIRSKSGRRVSSQLQPKEKEAVRSPCDVILQCTTVGYSAADKAAPRRPTTSLLALATAASSPSSAEVTTSTVPATSGGSGVVRKRDSTVGTTQGGEAARFSGEAVFRSLTATQFQKAEHCAEAWGRHGSCAGHVHSRQKRGSNSWQRRVQWIRIHVPGWMRRWVKPNWWLLGL

SEQ ID NO: 159351 - protein, 421 aa, Oryza sativa
  Clone ID: PAT_MRT4530_58736C.1.pep
MAPLYTAAALGYGSVRWLKAFSNEQCAGINHFVALYAVPVLIFDMVSTNNVYKMNGRLIAADTLQKAVLLLGLMAWALWERSRARGAGAKAKAAVSSPLQWVITCFSVASLPNTIIMGVPLLNGMYGPVSKDLMKQIVVMQFCIWYNVIIFLYEYMAARRSASAPPPASSEGSAKISPSSPVKAAAAAADTNGNAVAADRPQEVAVNIEITEMAASTARDGVSGETTAAAKEVSSGEVAPVEEEEASAPAPSMKHVIWMAVKKLLQIPNTYASFLGLIWSLIAFKCGFSMPKIVEDSLFTIRTTAVGLSMFSSGTFIARQSRFVPCGYKIASFSMVIKFLIGPVVMLFASLVIGMHGTLLHIAVVQAALPLAVTSFVYAEEYKGYSWDIYITSCDNCLLYSVGAEDRIQTVKILKDDNKVN

SEQ ID NO: 159352 - protein, 221 aa, Oryza sativa
  Clone ID: PAT_MRT4530_58737C.1.pep
MPLPPLPALSTGWKTSPAPAPALTLAPVGDPTGKRGPVPPTWVATLGHLLRRLEAVHHNKVMIEGSDKVSTTEDDGDVVAPARSCDEEVVSTMGSVLRGGNTSRGWSSSYGSWCHLNSSDGLRNVGFKTEDFLLGLFTQYSPQMHRNVKTLLKAFRKTAPPKDLTFTLEKLFYKSIYIFKNSGYGCGMRVYWDSRRHGCKPTCTLGLFRTPDKLYSVTSNV

SEQ ID NO: 159353 - protein, 71 aa, Oryza sativa
  Clone ID: PAT_MRT4530_58738C.1.pep
MQSPQPPHGNRTEPVQLAKVARRRLSDRAATRPRCPAEPVNPYENITAASYLRTVAARKRAYGQALDVTDT

SEQ ID NO: 159354 - protein, 1432 aa, Oryza sativa
  unsure (1)..(1432): unsure at all Xaa locations
  Clone ID: PAT_MRT4530_58739C.1.pep
MAFSPSPDTHPRRRPAPRSSHPVDPPLHISSPVLECFPTSHSSPGLFPTIQSSSCPLEEGELIEESCLDPIPSEDREEILHGSDIQPPALSLGTARVARRLPIASRLNPSILGRPPPTSRVLSSSKVVDLTRRNNHAFHSQSSVPSQAQQEHSWQEVKQKFWWRKKSPFNSSNNQEIMAARKLRFLKHTEDEGQKVEIGTFADDIRSAFYIHRSDIQITKFHPEDFFLTFVNHSDREEVLQEPRLVTRSGRVYHFNPWNERRNAEVVDIRYHARVCIEGIPMHARSEDMAAKLIGCKSSVHYIEEYSRRRNFNRTFDLWIWSLDLSTIPKATQFTITRPDREARATEIPFPDLEPSQPAPTDTKKGLTYPLLLLLSNLSHLTYCLCHRSKGRCSCLKGTXILCCMRLWWENLVDEAQHDVETFLAEVTTPIQQPLLSAPGTKLRRPCRNKVTTPIQRHSARLALKVRRSTKLELIAQEILAKQFGVLDDNKLLSDQIKKLYLQHYKKPLSPADMKTITTLVENGGCKGVRLRAKKAASMLDCFILNWNVRGLNNQARKGSVKLLVEQMNATIVCLQETKMNEITDVDVLHILGNRFRNDFAYLPADGTRGGILLACNDNFFSLSNVVQKQFSLTATVTMKNDNARWSLTVVYGPQQDAQKIEFLAELQEVEQMVSLPWLLIGDFNLIYKTSDKNNSRLNRGMMQRFKGTLDRLGIKELHLSGRKFTWTQECANPTQTKIDRAFCCPDWDVLFDSAHMSALSSSCSNHAPLFITGCMEREQNNSFRFESYWLKLPDFRQVTAESWNRPLQTTNPFVRLHLKLKRLARDLRRWKSTRIGDIRLQLAIANEVVFQLDVAQEDRVLSEEEQCLRKLLKSRISMITSLKKNSKIQSLTCLWKNLLDQMXFIGAFFKQAWDIIKTDLIQAISFFGDMGCARLQELNSAHICLIPKKADATKAEDFRPISLMHSFAKIVAKLLANRLTPKLDELVSQSQSAFIRKRAMHDNVLFVQNMIKSFHRKKKPTLFLKVDISKAFDTVNWAYLLEVLQIFGFGHKWCNWISNLLGTFSSAVLLNGIPDASGLHTNMEKTEIFPISCNGVNLDDCLSIFPAVCKPKPLGGLGILNLEKFARALRLRWLWYEWKEENKPWINMEIPCDEMDRNLFRASTQISLGNGKKCKFWSDNWLQGYAPKDIAPTLFKLAKRKTNCVAFELHNNHWITSLRTITSINEINELVHLGSKLHEIRLHPNSLDSITWKWTNHGEYSAKSAYEMQFVGSVANTNFMPLWRAEAEPKHRFFGWLILHQRTLTAENLLLRHWPCDWICSLCTDAFEDANHLAKECSFTNTVWSQVCSWLDIMQTPNQLQDANILEWWTSIIHSTYGRRRRKLIGALFITWWQVWLERNRRIFHQKQLSATQVAFLVKENIDAIQILRHT

SEQ ID NO: 159355 - protein, 53 aa, Oryza sativa
  Clone ID: PAT_MRT4530_5873C.1.pep
RKYVLAERFLCSNLTYTCHLKNLVAFHTDKTRWIKRLLYKIRAGTIMNGISFT

SEQ ID NO: 159356 - protein, 86 aa, Oryza sativa
  Clone ID: PAT_MRT4530_58740C.1.pep
HLNRHSLCQENRNSVIINPCFQSLVSSLPSSSCFSCVDLSNFGIEQAPTPWLLPVDPSIFSGTNGLHCFKNDNILVFRTIIIINGY

SEQ ID NO: 159357 - protein, 135 aa, Oryza sativa
  Clone ID: PAT_MRT4530_58741C.1.pep
GGGGINNSHGSVTYDSSLQFTKAHASVQATVQVTLAFIYTLSKIITEGNPWEYGTARHKLFTHVQLVTRRAPQLAIFRSLLDHGPGLPQHNNLDISSSYEKKIQQFEFSLNFYLQQILFLLKDSIVRLAGKAGIK

SEQ ID NO: 159358 - protein, 60 aa, Oryza sativa
  Clone ID: PAT_MRT4530_58742C.1.pep
LESIIPPLICLSIEQSSSSLTLWCQSVPVNVLIELWVDLKILRLRSHRSSVVCIILCDCT

SEQ ID NO: 159359 - protein, 341 aa, Oryza sativa
  unsure (1)..(341): unsure at all Xaa locations
  Clone ID: PAT_MRT4530_58743C.1.pep
MAELFDGGNYEAVVSELKVHNELQKDKAAAMDTYLGRHDKKKDDEMARTREVTERIMALSRECWVTEETPKLWVGMLKMLKDRDAVNVFELSNPEGRKSLLEHLAREDVRPEPADTGDEDFEKELDRVMMEYFMDDFADTVFLYEKKLADRKRCYNMFRMTPDMFYSLHDLLVDKYELKSSNKSKSIEALGLFLWMAGAPQSVRQAEDRFERSLGTVHNMFHKVLASLLKLVADIIKPRDPQFTTLHSRLRNPRFYPYFNDCIGAIDGTHIPVQVFAAAWKYYLVDSGYPNRIGYLAPYKGTKYHLQEFQNAAEPECKXRGKQIGGDTLARFGGHTSRGAV

SEQ ID NO: 159360 - protein, 110 aa, Oryza sativa
  Clone ID: PAT_MRT4530_58744C.1.pep
KAALGGALQTCISRTPPIHNAVDPATSVDRKHTLYLCQLLSSNVLCPAYACIHPSDRHHRQLIDRLDARTHMLVNLGPRSTLTPLLRDPAAVRPASAQTKPSARPPAPSR

SEQ ID NO: 159361 - protein, 377 aa, Oryza sativa
  Clone ID: PAT_MRT4530_58745C.1.pep
MEATATAAQGLRDWSSLPLDMLVLVLDRLGWSTHPSFALTCRHWRSAVSPFYPAWITPLLLSAADIGVTNVRYYSPYYHRCFEIADTLLKVPKIAARICCSSGQHLTLCLPRLILQADLVAGTMYELPEMPFYSFEFIVYDEHARRMYCVNTTYALQLARATQQDDGEWGPWELTDFDVEGPQLLAAPISNPVLHGGLLYVLGEDGKMAVYDPCNHDNNFTVPDKPKGFGIKHQVDSHLFESDQGALMAVLVGYSGAPIHVVKLNEETMEWEKMRSLEGHALFTGTYTTMLRKTKLRLMQNKVFLPRLYDWPETIHVDIVTRDGETAFVPKSSSSSNTKEITSDINIWFYEFGQQDAREFWGSERVDYSIWVDFSTN

SEQ ID NO: 159362 - protein, 854 aa, Oryza sativa
  Clone ID: PAT_MRT4530_58746C.1.pep
MAEVHLSSFAISVLGKAAFCAASEIKSAWNFKKEVRKLERSLKSICGVLKDAERKQSTSCALKVWLEDLKDVVYDIDDVLDDVATKDLEQKVHNGFYAGVSRQLVYPFELSHKITVVRQKLDEIAANRREFALTEEIIDTQFFSSNTRETHSFINELDIVGRDEAKNKIVEIILSAADAYAFSVLPIVGLGGIGKTALAKLVYNDMRIKKMFEKNLWACVSNVFDLKKILDDIIQSDTGESNKQLSLQTLQNKLRGFLQENKYLLVLDDIWSDNVNDWEQLKNLLSSGGRGSVVVVTTRNMNVASVVKTLEPYYVPELSFDECMQVFIRYAFRDEEKKDTLLLEIGKCIVEKCHGVPLAAKTLGSVLFGKQDVKEWLRIKDANLWNIEQNKCDILPALKLSYDALPPHLKACFSCLSVFPKDYVILRELLIMFWMALGLLHKTREGDEIETIGGQYFNELDQRSLFQDHYVIYNGSIQSCKMHDLVHNLAMFVCHKEHAIVNCESKDLSEKVRHLVWDRKDFSTEIEFPKHLRKANKARTFASIDNNGTMTKAFLDNFLSTFTLLRVLIFSDVDFDELPSSIGNLKHLRYLDLQWNGKIKFLPNSLCKLVNLQTLQLSRCDQLEKMPKDVHRLISLRFLCLTLKNKYLSEHDGFCSLTSLTFLFLNSCAELSSLTNGFGSLTSLRKLYIFNCPKLATLPSTMNQLSTLQTLSINNCHELDLLEPSEAMGGLACLDVLQLVGLPKLVCFPGSFISAATSLQYFGIGNCNGLMKLPDFIQSFTSLKKIVINGCPELSRRCAVKSGEDFHLISHVPQITIDKKTYRKITPSHPECSSKCVISHRRKSLSVTVKLYSC

SEQ ID NO: 159363 - protein, 55 aa, Oryza sativa
  Clone ID: PAT_MRT4530_58747C.1.pep
TVNIPFSSQHLWGPLSAKPLRLFTSLLTGARGLRGPLRGSHRGGSLPVDTGTPWL

SEQ ID NO: 159364 - protein, 432 aa, Oryza sativa
  Clone ID: PAT_MRT4530_58748C.1.pep
MVSRLLGIIIWGYMLWKRGGPLMVTAQYGGDFSKYQEGIGKRAKHDNEVETSKGKEKRREGVGHGAAARRLPVSATPLGTAHARKRKKEGAPRHNRSTAAHSPSSGYSLMGYIKDIPTLKGDNYEEWKRELDLAFILGEVDWVLTTPCPIEPAEIFRGEKESDAEWQKRERDNASLIMSYDIEHTKWSLANKNCLAAVKNTIEPTILGSIPEYDTVSKYLESIKSQFSGSSKFYATQLIKQLVTERYHGGGVKDHILRMSNMASKLKQKDLGISDDFLVHLVLSSLPKNFDNLVVNYKISTENWNIEELISNCVQEEERHKETNGDSINLVKDNKEKSHSTVAVTTAIAAAAHVKQSDDNDDGWDFLFIQRVNRSNLQGTSWHGGAECPPDRSQRPIQSAVAPGKEADGGGPTEGSAKRDLKATEEIYEAAA

SEQ ID NO: 159365 - protein, 80 aa, Oryza sativa
  Clone ID: PAT_MRT4530_58749C.1.pep
NGRLLESELSSLNPRRRRLHPISPISISIYISSQKNTQDEKRRKIATLPFGPNWRHPFLPPLCSIKLVQRLAFWGFLSFD

SEQ ID NO: 159366 - protein, 47 aa, Oryza sativa
  Clone ID: PAT_MRT4530_5874C.1.pep
MSLSSTRRYKNESPVEGISCMLASAASDERLPRRSTSRGTVAVSAPS

SEQ ID NO: 159367 - protein, 273 aa, Oryza sativa
  Clone ID: PAT_MRT4530_58750C.1.pep
MAPFKTILLVVFFALFAVSSLQPSAAVRDAQVFKPTVANADVTQPSASLVGLPGLPPLQPLPTIQIPGLPPLPQLPTIQIPSLPQLPPLPTIQIPGLPTLPQLPTIPGLPQLPTLPTIQIPELPPLPPLPSVSITPGSPGAPARIPISSQSALAAAPIAPQQPTECLSSLMALMPCMEYVTKADVPAPPSVCCDGFKSLVEKAPICLCHGINGNISKLMPAPIDLTRIMSLPATCGVAPPVEALTKCFTGPVPPLMPASTPAAAPSPSPEPST

SEQ ID NO: 159368 - protein, 117 aa, Oryza sativa
  Clone ID: PAT_MRT4530_58751C.1.pep
MVADVLSPPGGPLQRPREKGEVRDAGVGACASLLGGGRGRDDSAVGEGAGVSGLRGGRREVVGEAGAEQGGAVVGRQRRSTREAAAPCQRWRRPRQGLGTGAVEEHVPEPTDGLLDH

SEQ ID NO: 159369 - protein, 74 aa, Oryza sativa
  Clone ID: PAT_MRT4530_58752C.1.pep
RQMHVIEVNLIDLNEVMHCSMYRNLCVCISDAMSIMISHKLRGSKLQNLSGFVVMHQQASLYQYLSLLVVIVDL

SEQ ID NO: 159370 - protein, 67 aa, Oryza sativa
  Clone ID: PAT_MRT4530_58753C.1.pep
MWVEAVATLAGRRKSSHESRGGSLWWLGWRLAHAHCVRASCSIMRVLVAPTRKLLLPPPPPRLDQRL

SEQ ID NO: 159371 - protein, 53 aa, Oryza sativa
  unsure (1)..(53): unsure at all Xaa locations
  Clone ID: PAT_MRT4530_58754C.1.pep
LLTWGHTQRHFCWGGKPFEGVTPPXNLRIXCAQFTIFIYTTRNSIELKKKKKK

SEQ ID NO: 159372 - protein, 123 aa, Oryza sativa
  unsure (1)..(123): unsure at all Xaa locations
  Clone ID: PAT_MRT4530_58755C.1.pep
SPIWKSLAPPRCRYFLWLVVLRXCYRLINRGLPHPGHCVLCDQHEETVDHILVDCLESRQLWXDNLDALGHTSYLPLNVVSFHAWLCDSRKMVPKGQQQGFDTIITLXAWLIXKERNNLVYGQ

SEQ ID NO: 159373 - protein, 124 aa, Oryza sativa
  Clone ID: PAT_MRT4530_58756C.1.pep
GTKILNFQKGASHPLQKDKDSFPILNQFPGKKGIPFFLGPTPPKGGGGALCPNWGVSRVPTRREKKIIGPLFFPLFPNFYPFFFQKKNFFSFFPPPHQNYFTRLKSPLSHKNFTPVRSSRQKTK

SEQ ID NO: 159374 - protein, 343 aa, Oryza sativa
  Clone ID: PAT_MRT4530_58757C.1.pep
MAAAATGPVPFKDADDDGTLAAAEARSPLPKEEFGDLVAALPRKEQYLDGRLYEGFWLPEHYAPGIIAFRRRFTPRADDVVLASYPKCGTTWLKALAFAAMTRAAYPADEHPLLRLNPHDVIPFVEDVFTDGHEAKLDMLPSPRLINTHTPYQLLPESVVAGDGGGGCKVVYICRDPKDMVVSLYHFMRRLQPDLSLAGVVESVADGTVPFGPMWDHILGYWRASVSRPDRVLLLRYEDLLRDGAAGEHVRAMARFMGRPFSAAEEAAGAVASVVELCSFERMKALEVNRRGTAGSYKSMPRDAFFRKGVAGDWANHMSPETAARLDGIFREKFRGTGLTIVP

SEQ ID NO: 159375 - protein, 400 aa, Oryza sativa
  Clone ID: PAT_MRT4530_58758C.1.pep
MTFEALRRRHLQLDEIQETSKRADLKAGAIMMASNIRANVGKRVGLVPGVEIGDIFYFRMELCIIGLHAPSMGGIDYMSAKFGSDEDSVAICIVAAGGYENVDDDTDTLVYSGSGGNSRNSEERHDQKLERGNLALERSLHRKNEIRVVRGFRDPFCLTGKIYIYDGLYKIQESWKERTKSGINCFKYKLLREPGQPDGAALWKMTQGWIDNPASRGRVILPDLSSAAEALPVCLVNEVDHEKGPGHFTYASQVKYLRPLSSMKPLQGCGCQSVCLPGDPNCACGQHNGGDLPYSSSGLLACRKPIIYECGDACHCTTNCRNRVTQKGVRFHFEVFRTANRGWGLRCWDPIRAGAFICEYTGEVIDELKVNLDDSEDDYIFQTVCPGEKTLKFNFGPELI

SEQ ID NO: 159376 - protein, 673 aa, Oryza sativa
  Clone ID: PAT_MRT4530_58759C.1.pep
MDRASNFIPGPYQELVDAKPIRSLAPMFPAPLGINVNQSSTPPLVCVTPVGQFPVGFGSGILPTFGSTTAFTTTANGVSYTSYTNNGAIDATPISAYKTRPGIVSLDGDEPYSGSASGRKSKRSSGSAADGSNGVKFKRPKPVYKNFVAGKELAFLPPSSSDPREVVEAVHMTFEALRRRHLQLDEIQETSKRADLKAGAIMMASNIRANVGKRVGLVPGVEIGDIFYFRMELCIIGLHAPSMGGIDYMSAKFGSDEDSVAICIVAAGGYENVDDDTDTLVYSGSGGNSRNSEERHDQKLERGNLALERSLHRKNEIRVVRGFRDPFCLTGKIYIYDGLYKIQESWKERTKSGINCFKYKLLREPGQPDGAALWKMTQGWIDNPASRGRVILPDLSSAAEALPVCLVNEVDHEKGPGHFTYASQVKYLRPLSSMKPLQGCGCQSSVCLPGDPNCACGQHNGGDLPYSSSGLLACRKPIIYECGDACHCTTNCRNRVTQKGVRFHFEVFRTANRGWGLRCWDPIRAGAFICEYTGEVIDELKVNLDDSEDDYIFQTVCPGEKTLKFNFGPELIGEESTYVSADEFEPLPIKISAKKMGNVSRFMNHSCSPNVFWQPVQHDHGDDSHPHIMFFALKHIPPMTELTFDYGVAGSESSGSRRTKNCFCGSSNCRGVF

SEQ ID NO: 159377 - protein, 74 aa, Oryza sativa
  Clone ID: PAT_MRT4530_5875C.1.pep
MAECETYSETVHDKFGTLPNIPDLGGMIKSTGTLIHPKASFGPELGAPRRWRDAEPGGAAGDVSTRTRSQVGVV

SEQ ID NO: 159378 - protein, 185 aa, Oryza sativa
  Clone ID: PAT_MRT4530_58760C.1.pep
MATLLSEQGVESVTKLVNLKWVSKGRLDLPGQRQLSRLVWLRTLSEIWAEVCDRPVAGHVRLDGRPCPHVASVFGGVEASAVELSWTSALLPSQDMMVIAEIYMRCAVRFLVSIRAAASTRVLANRLGQSRNLSTTSDMLGKGGEVDRRGGTAGKATQVESTSGATEVLAKQAGSGGGENMSVQW

SEQ ID NO: 159379 - protein, 506 aa, Oryza sativa
  Clone ID: PAT_MRT4530_58761C.1.pep
MPIEGGASAAPSGGEDEDEGVPIPSRRLGVEVESRVASSAAAALRRSPSPSVVLLLPPHPGAAAMSDMESMTALMESTGSKLQLLQRAFAELESQSAVSLNLKWKQLEDHFHGLEQSLKKKFDELKEQEKEFKETVTKSEQMLEQQEAAVVAKELTSLERLQQKRDAALAMIFGKSKLNLSMPVINPISKSVSNNAVLNGNIASLWPKPATAHGAYLQDGNTAVKPRSQLVILCEEMNVNGLHKFISDNRKDLTSIREEIPVALRGATDPYGLVLASLEDFYFGDNLILDGKKDGNLLGVRRTCLMLMESLAQLQTDATTGFISKGQMLTASIKERAKKIALEWKSKLDSLDFDASNGNCLEAHAFLQLLATFAIFSEFAEDELCKLLPSVSRRRQTPELCRILGLSQNMPGVIGVLIENGRTIDANEINERELSALKAVIKCIEEHKLDEKYPIDPLQRRVIQLEKAKADKRRAVEAGKPQSKRPRANGSMVSPLGNRSSCASTG

SEQ ID NO: 159380 - protein, 157 aa, Oryza sativa
  unsure (1)..(157): unsure at all Xaa locations
  Clone ID: PAT_MRT4530_58762C.1.pep
FELVIYLFTSGKQLTLNISELFCLGGAQEKEVVNCQILTCKNDQGGLGXLDSGCMNVALLGKWLWRLKNEKGIWQDLILAKYLGQKTLSQKKLRPGDSQFWRGLMKVKERFLMLCEKNVGNGKRTLFWEDSWLGGRPLAKQFPNLYNVSLTSPLIVW

SEQ ID NO: 159381 - protein, 475 aa, Oryza sativa
  Clone ID: PAT_MRT4530_58763C.1.pep
MSDMESMTALMESTGSKLQLLQRAFAELESQSAVSLNLKWKQLEDHFHGLEQSLKKKFDELKEQEKEFKETVTKSEQMLEQQEAAVVAKELTSLERLQQKRDAALAMIFGKSKLNLSMPVINPISKSVSNNAVLNGNIASLWPKPATAHGAYLQDGNTAVKPRSQLVILCEEMNVNGLHKFISDNRKDLTSIREEIPVALRGATDPYGLVLASLEDFYFGDNLILDGKKDGNLLGVRRTCLMLMESLAQLQTDATTGFISKGQMLTASIKERAKKIALEWKSKLDSLDFDASNGNCLEAHAFLQLLATFAIFSEFAEDELCKLLPSVSRRRQTPELCRILGLSQNMPGVIGVLIENGRTIDAINLAYAFELTDQFEPVELLKAYLKEVKSMSHVKTGKMSPGVQNEINERELSALKAVIKCIEEHKLDEKYPIPPDLLQKRVIQLEKAKADKRRAVEAAKATVSCQRISICATYY

SEQ ID NO: 159382 - protein, 545 aa, Oryza sativa
  Clone ID: PAT_MRT4530_58764C.1.pep
MSDMESMATLMESTGSKLQQLQRAFAELESQSAVSLNLKWKQLEDHFHGLEQSLKKKFDDLKRQEEEFEETVAKSEQMLEQQEAVVVAKELTSLEKLQQKRDAALAVIFGKSKLNLSTPLINPISKSVNNNAVFNGNIGGSLSVKWPKPATAHGAYLQDENTAVKPRSQLVVLCEEMNVNGLHKFISDNRKDLTSIREEIPVALRGATDPYGLVLASLEDFYFGDNLILDGKKDGNLLGVRRTCLMLMESLAQLQTDATTGFISEGQVLTASIKERAKKIALEWKSKLDSLDFDASNGNCLEAHAFLQLLATFGIFAEFAQDELCKLLPSVSRRRQTPELCRILGLSQNMPGVIGVLVENGRTIDAINLAYAFELTNQFEPVELLKAYLQEVKSVPHFKTGKISLQVQNEMNERELSALKAAIKCIEEHKLDEKYPIDLLQKRVIQLEKAKADKRRAVEAAKPQSKRPRANGSVYAPHTSFPDKSFYQAAPPQRHSYPYERQYVYGAEAHHHPTMISSAPYGISPAHTTYYGNGYQVQYQVPYIH

SEQ ID NO: 159383 - protein, 583 aa, Oryza sativa
  unsure (1)..(583): unsure at all Xaa locations
  Clone ID: PAT_MRT4530_58765C.1.pep
MAAAAAAVLHALVALSLAGAVAAAGRGGEQPLSRIGIHRTTFAIQPGASVDASPLLLGLEGQDREWVTLTYNNPKPSKDDWIGVFSPANFSDSTCPSESQWVEPPLLCTAPIKFIFANYKNLDYEKTGKGSMKLQLINQREDFSFALFSGGLSNPKLIAHSKRVTFTNPKAPVYPRLAQGKSWNEMTVTWTSGYGTNEATPFVKWGLQGQIQSLSPAGTLTFSRSTMCGPPARTVGWRDPGFIHTSFLKDLWPNFKYTYRIGHRLSDGSIIWGHEYSFQAPPYPGEDSLQRVVIFGDMGKAEADGSNEFNDFEPGSLNTTYQLIKDLKNIDMVIHIGDICYANGYLSQWDQFTAQVEPIASSVPYMVGSGNHERDWPGSGSFYGNLDSGGECGVPAQNMFYVASIDRXQFWRSTDXGNIPWLNIPSAHRFIGYSSASFQRRGGHXEEPMGRESLQPLWQKYKVDIAMYGHVHGYERTCPVYENVCVAKAASHYSGAFTATTHVVVGGGGASLADYAGVRARWSHVQDRDYGFAKLTAFNHTALLFEYVRSRDGSVHDSFTVSRDYRDILACGVDNCPTTTLAS

SEQ ID NO: 159384 - protein, 117 aa, Oryza sativa
  Clone ID: PAT_MRT4530_58766C.1.pep
MTWAKANQHRGLEAKRWLDLLTRGIAPALIGVAVAGPRGGTAMGRLGDEAVARCAQTPYRQVRLDPLGPRLTQEQPRRAASLRHECYLLPAITDELRCVKVHGYAVPCGALGILHQR

SEQ ID NO: 159385 - protein, 48 aa, Oryza sativa
  Clone ID: PAT_MRT4530_58767C.1.pep
QCHLPQLKGVSIKRKGYGRMSRSQAYQTRHAWGYITSTPTVLSALVVT

SEQ ID NO: 159386 - protein, 1276 aa, Oryza sativa
  Clone ID: PAT_MRT4530_58768C.1.pep
MATQTQVLQAIANNQGDRGGSSFGEFMRTKPPTFATAEEPMDAEDWLRIIEKKLTLVRVREADKVIFAANQLEGPAGDWWDTYKEAREEDAGEPNWEEFTTAFRDNFVPAAVMRMKKNEFRRLQQGNTTVQEYLNRFTQLARYATRDLADEEEKIDKFIEGLNDKLRGPMIGQDHDSFQSLINKVVRLENDRKVVEHNRKRRLAMNRSPQTAPQRPKGTTSSAWRPTVVTTSRPAASSNFHRPVTIQNRAPAPNQAATGSVRPGSYFNCGEYGHFANKCPHPNKTPIRTGANATAIHGTATPAAGRAKHRGIIDCRHREVTLTTPWGSDMRATMDQDPRLTERAGGIFTMLPLKGMPVVQRFPDVFPEDLPGMPPDRDIEFIIDLIPGTAPISKRPYRMPVNELEELKKQIRELQEKGFVRPSSSPWGAPVLFVKKKDGSMRMCVDYRSLNKVTIKNKYPLPWIDDLFDQLKGAKVFSKIDLRSGYHQLKIRTGDIPKTAFSTRYGLYEFTVMSFGLTNAPAYFMNLMNKVFMDYLDKFVVVFIDDILIYSKDEEEHAEHLRLVLEKLRKHKLYAKFSKCEFWLKEVAFLGHVISAGGVAVDSAKVEAVTEWKAPKYVTEIQSFLGLAGYYRRFIEGFSKIARPMTQLLKKEKKFVWSEQCQESFEQLKEKLTSAPILVLPDIKKDFVIYCDASRQGLGGVLMQDGKVVAYASRQLRPHEENYPTHDLELAAVVHALKIWRHYLIGNHCDIYTDHKSLKYIFTQSDLNLRQRRWLELIKDYDLEVHYHPGKANVVADALSRKSHCNHVRMEGMVPELREEIAQLNLHIVRRGRINTLDIQPLLRTQIEEAQKDNEEVREVSPMRGTKRFKVKGKLAPRYVGPFQIIAKRGEVAYQLQLPENIADVHPVFHVSQLKKCLRVPEEQAPLEEIHISNDLTYPEHPIRILDEAEKRTRSKPLLCRVALAPRAPRAVRRSASPLPSPSPSPRVPPSPRRPPVAIAACRRADVTEPPRARADIATPVPRVLPSRCRVASSPAPPSLRHVAARRRQARAAPRRAVLSLLSRRAVVSPPIASRPEPRATAVAVAIDVPSPRASHRRCRAARRLVASRREPAASRPAPPSFHPSSSFPSLYSPLPYKDPGPIPPFSTPLHSHLFSLFPFSTRRRRRAAAPPLSCRRAATFEAAAPSPRSRRAVRRRLAPPSPSSPPPPPPSPRELRIQAKAKTRKTLSKVRYDGTAVEVGPRSVPYIGVAIEAGDEASEDPYAYYQEGDEDDGAQ

SEQ ID NO: 159387 - protein, 1454 aa, Oryza sativa
  Clone ID: PAT_MRT4530_58769C.1.pep
MASRRRATTSNDETQTPDLATLAGVMATQTQLLQAIANNQGNRGGPSFGEFMRTKPPTFATAEEPMDAEDWLRIIEKKLTLIRVREADKVIFAANQLEGPAGDWWDTYKESREEDAGEPNWEEFTTAFRDNFVPAAVMRMKKNEFRRLRQGNTTVQEYLNHFTQLARYATRDLANEEEKIDKFIEGLNDELRGPMIGQDHDSFQSLINKVVRLENDRKVVEHNRKRRLAMNRPPQTAPQRPKGTTSSAWRPTVVTTSRPAASSNFHRPVTIQNRAPAPNQAATGSVRPGSCFNCGEYGHFANKCPHPNKTPIRTGANATAIHGTATPAAGRGLFRTPQTNRTATEFGRGQVNHVRAEEAQEDQGVLMGASHSFISLKASQQHNLIRVKLRQPMLVHSPGGEIAVDTACIDVPIRLRDVVFPSNLMVLIPQTLDVILGMDWLAKHRGIIDCRRREVTLTTPWGSDMRATMDQDPRLTERAGGIFTMLPLKGMPVVQRFPDVFPEDLPGMPPDRDTEFIIDLIPGTAPISKRPYRMPVNELDELKKQIRELQEKGFVRPSSSPWGAPVLFVKKKDGSMRMCVDYRSLNEVTIKNKYPLPRIDDLFDQLKGAKVFSKIDHRSGYHQLKIRTGDIPKTAFSTRYGLYEFTVMSFGLTNAPAYFMNLMNKVFMDYLDKFVVVFIDDILIYSKDEEEHAEHLRLVLEKLRKHKLYAKFSKCEFWLKEVAFLGHVISAGGVAVDPAKVEAVTEWKAPKSVTEIRSFLGLAGYYRRFIEGFSKIARPMTQLLKKEKKFVWSEQCQESFEQLKEKLTSAPILVLPDIRKDFVIYCDASRQGLGGVLMQDGKVVAYASRQLQPHEENYPTRDLELAAVVHALKIWRHYLIGNHCDIYTDHKSLKYIFTQSDLNLRQRRWLELIKDYDLEVHYHPGKANVVADALSRKSHCNHLRMEGMIPELREEIAQLNLHIVPRGQINTLDIQPLLRTQIEEAQKDNEEVREVKERLATGRAKEFSTDEKDVLWYKKRIYVPEQGGLRGLILKEAHESAYSLHPGSTKMYQDLKEGYWWPNMKRDVAEYIALCDVCQKVKAEHQRPVGLLQPLRIPEWKWDEIGMDFIVGLPKTATGYDSIWVIVDRLTKTARFIPVKTNYSSAKLAELYMTRIVCLHGVPKKITSDRGTQFTSHFWEKVHEALGSYLAFSTAYHPQTDGQTERTNQVLEEMLRACALDFSKDWERCLPYAEFSYNNSFQASLKMSPNEALFGRRCRTPLMWSETGERAVFEPDIIKEAEEKVRLIRDRLKVAQSRQKSYADTRRRNLEFKEGDYVYLKVSLMRGTKRFKVKGKLAPRYVGPFQITARRGEVAYQLQLPENIADVHPVFHVSQLKKCLRVPEEQAPLEEIHISNDLTYPEHLVRILDEAEKRTRNKVWRMYKVQWSNHTEDEATWESKEFLRTEYPHLFENW

SEQ ID NO: 159388 - protein, 63 aa, Oryza sativa
  unsure (1)..(63): unsure at all Xaa locations
  Clone ID: PAT_MRT4530_5876C.1.pep
QKYICPLILHSSKLQRLYPDNSKLCILKSPLLPXLRRGARNNFCFLPRLIDRQKYFCKNYLIN

SEQ ID NO: 159389 - protein, 1417 aa, Oryza sativa
  unsure (1)..(1417): unsure at all Xaa locations
  Clone ID: PAT_MRT4530_58770C.1.pep
MQDAAREAFLRLSSIHLAELASTEFAHHPFREESNSFCTVQDTPCCYNPIVTRLSRWAEAVDDFYEEALLEIDDQQRRVGELETEVTDLTAQQLQLEEEHQAWGSEIDSLKAQLQDETPVPCITFLRGPRTLSTACKSTRPSGKKPKPDPEATISEPWGLRWFLDSMRDTHTPFFLPRLTSSLMMASRRRASTINEETQTPDLTTLAGVMATQTQLLQAIANNQSNRGGSSFGEFMRTKPPTFAMADEPMEAEDWLRIIEKKLTLVRVREADKVIFVVNQLEGPAGDWWDTYKEAREEDAGEPTWEEFTAAFHENFVPAAVMRMKKNEFRRLRQGNTTVQEYLNRFTQVARYAIGDLADEEEKIDKFIEGLNDELRGPMIGQDHESFQSLINKVVRLENDQRTVEHNRKRRLAMNRPPQGLLQRLKGATSSGWKPPIVATNRPAAPSNFNRLYGHYTNNCPHPRKTPVRTGANAMTVRGTTTPAAGRGLFKTPQTNRTTIGFGRGQVNHVRAEEAQEDQGVLMGMFSINSVPVKVLFDSGASHSFISLKASQKHNLTLVGLRKPMIVHSPGGEIIVSHACIDVPIHLRDVVFPSNLMVLIPQTLDVILIMDWLTKNRGVIDCRRREVTLTTPWGSDMRATMDQDPRLTERAGGIFTMLPLKGMPVVQRFPDVFPEDLPRMPPDRDIEFIIDLIPSTAPISKRPYRMPVNELEELKKQIRELQEKGFVRPGSSPWGAPVLFVKKKDGSMKMCVDYRSLNEVTIKNKYPLPRIDDLFDQLKGPKVFSKIDLRSGYHQLKIRTRDIPKTAFSTRYGLYVFTVMSFGLTNAPAYFMNLMNKVFMDYLDKFVVVFIDDILIYSKDEEEHAEHLRLVLEELRKHKLYAKFSKCEFWIKEVAFLGHVISAGGVAVDPAKVEAVTEWKAPKSVTEIRSFLGLAGYYRRFIQGFSKIARPMTQLLKKEKKFVWSEQCQESFEQLKEKLTSAPILVLADIRKDFVIYCDASRQGLGGVLTQDGKVVAYASRQLRPHEKNYPTHDLELAAVVHALKIWRHYLIGNHCDIYTDHKSLKYIFTQSDLNLRQRRWLELIKDYDLEINTLDIQPLLRTQIEEVQKDNEEIREVKERLAAGFAKEFSTDEKDVLWYKKRIYVPEQGGLRGLILKEAHELAYSLHPGSNKMYQDLKEGYWWPYMKRDVAEYVALCDVCQKVKAEHQRPAGLLQSLRIPEWKWDEIGMDFIVGLPKTATGERAVFGPDIIKEAEEKVHLIRDRLKVAQSRQKSYADTRRKNLEFKEGDYVYLKVSPMRGTKRFKIKGKLAPRYVGPFQITARRGEVAYQLQLPENIADVHPVFYVSQLKKCLRVPEEQAPLEEIHISNDLTYPEHPVRILDEAXKRARSKVWHMYKVQWSNHTEDEATLESEEFL

SEQ ID NO: 159390 - protein, 316 aa, Oryza sativa
  Clone ID: PAT_MRT4530_58771C.1.pep
MGQVKGTLRRIQQLPFDKDKATGRITSFFEPGTAISTKGCPKLLYCKSTLPEPKTTTAVPGKGKQIVESASPDSRAQKKDMTCPNTWQRYRWPKGPRPDGPAHGTAAVAAEMTAAMSRSAIDGTKLVGLPGAAAQGPFGPPLTSIPKIGPHRFARVSTQVDPNKTATSGEGSGASAQMTSEATVGATAAAIDQLGEGGDAADGAPGSSSLDAGAKSSSSLGAATDQSGEDGDTTDAALGSSSPGTGAKSSAMGRAKRLRIRTTSLRRLLKSEKRQTVKAKSQALKLIFHNVEGVESIRRAVQRAEDQRQREAKDTH

SEQ ID NO: 159391 - protein, 67 aa, Oryza sativa
  Clone ID: PAT_MRT4530_58772C.1.pep
PFCSAPNRMALNLDTSAPNSTALNARWHADSASHPRWHGIQRQLTWRSTSARSRRDVGTWLSADDMT

SEQ ID NO: 159392 - protein, 132 aa, Oryza sativa
  unsure (1)..(132): unsure at all Xaa locations
  Clone ID: PAT_MRT4530_58773C.1.pep
SSLVQLASSTSIYRSIVRPMAAAAACTKLPLLLLLVAVAASSASSLTPLHAAVPAKGPRPGGSVTLHLDHRQVMVDNGIVQVTLSNPGGHITGVRYNGERNLLHYDGEANSAGSXMWYGNFLGSIVQEHDRY

SEQ ID NO: 159393 - protein, 1542 aa, Oryza sativa
  Clone ID: PAT_MRT4530_58774C.1.pep
MVTRLSRWAEAVDDFYEEALLEIDDQQRRMGELETKVTDLTAQQLQLEEEHQAWGSEIDSLKAQLQPGSSLETPIQVDSETEGTDTEPEIEPDITDPSEDATPVPRITFIGGPRTLSNARKSTRPPGKKPKPDLEATTSEPWGLRIIEKKLTLVRVREADKVIFAVNQLEGPAGDWWDTYKEAREDGAGEPTWEEFTAAFRENFVPTAVMRMKKNEFRRLRQGNTTVQEYLNKFTQLARYAIGDLADEEEKIDKFIEGLNDELRGPMIGQDHESFQSLINKVVRLENDQRTVEHNRKRRLAMSRPPQTMPQRLKGATPSGWKPPVMVTNRPAALSNFNRPVALQNRTPTPTLAAPGAKKNVDCFNCGKYGHYANNCPHPRKTPVRTGANAMTVRGTTTPAVGRGLFKTPQPNRTTTGFGRGQVNHVRAEEAQEDQGVLMGMFSLNSTPIKVLFDSGALHSFISLKASQQHNLTRVKLRQPMLVHSPGGEIAVDTACIDVPIRLRDVVFPSNLMVLIPQTLDVILGMDWLAKHRGVIDCRRREVTLTTPWGSDMRATMDQDPRLTERAGGIFTMLPLKGMPVVQRFPDVFPEDLPGMPPDRDIEFIIDLIPGTAPISKRPYRMPVNELEELKKQIRELQEKGFVRPSSSPWGAPVLFVKKKDGSMRMCVDYRSLNEVTIKNKYPLPRIDDLFDQLKGAKVFSKIDLRSGYHQLKIRTEDIPKTAFSTRYGLYEFTVMSFGLTNAPAYFMNLMNKVFMDYLDKFVVVFIDDILIYSKDEEEHAEHLRLVLQKLRKHKLYAKFSKCEFWLKEVAFLGHVISAGGVAVDPAKVEAVTEWKAPKSVTEIRSFLGLAGYYRRFIEGFSKIARPMTQLLKKEKKFAWSEQCQGSFEQLKEKLTSAPILVLPDIRKDFVVYCDASRQGLGGVLMQEGKVVAYASRQLRPHEENYPTHDLELAAVVHALKIWRHYLIGNHCDIYTDHKSLKYIFTQSDLNLRQRRWLELIKDYDLEVHYHPGKANVVADALSRKSHCNHLRTEGMVPELREEMAQLNLHIVPHGQINTLDIQPLLRTQIEEAQKDNEEVREVKERLAAGRAKEFSTDEKDVLWYKKRIYVPEQGGLRGLILKEAHESAYSLHPGSTKMYQDLKEGYWWPNMKRDVAEYVALCDVCQKVKAEHQRPAGLLQPLRIPEWKWDEIGMDFIVGLPKTATGYDSIWVIVDRLTKTARFIPVKTNYSSAKLAELYMTRIVCLHGIPKKIISDRGTQFTSHFWEKVHEALGSYLAFSTAYHPQTDGQTERTNQVLEDMLRACALDFSKDWERCLPYAEFSYNNSFQASLKMSPNEALFGRRCRTPLMWSETGERAVFGPDIIQEAEEKVRLIRDRLKVAQSRQKSYADTRRRNLEFKEGDYVYLKVSPMRGTKRFKVKGKLAPRYVGPFQIIARRGEVAYQLQLPEYIADVHPVFHVSQLKKCLRVPEEQAPLEEIHISNDLTYPEHPIRILDEAEKRTRSKVWRMYKVQWSNHTEDEATWEGEEFLRTEYPHLFGNW

SEQ ID NO: 159394 - protein, 1817 aa, Oryza sativa
  Clone ID: PAT_MRT4530_58775C.1.pep
MTSAMTSAPAAARERKLAGERRLDDANGGHQRVEGDAANSPMADSDSPATWELSLPQSEGYVIELHRMLRRLRYPGFPSYRVRQCGSVWEARVEIHPRVPSELDYSFQTRHHRDLPETAMQDAAREAFLRLSSIHRAELASTEFAHHPFREEGNSVCTVQDTPCCYNPMVTRLSRWAEAVDDYYEEALLEIDDHQRRVGELETEVTDLTAQQLQLEEEHQAWGSEIDSLKAQLQVHGDQFQQLSDQYNDRRGMMDTLEEQLRESQEHVSQLEEQLRAAKISTTGASTSTAVGRDRYFFLTPPYPPAFHALLGEASMLATESAPYLVDPTATQPPVPELVHTPLIPTPSPQLGSNLETPIQVDSETEGTDTEPEIEPDITDPSEDEAPVPCITFLGGPRTLSTARKSTRPPGKRPKPDPEATTSEPWGLRLFMMASRRRATTSNDETQTPDLNALAGIMATQTQLLQAIASNQGNRGGSSFGEFMRTKPPTFATADEPMEAEDWLRIIEKKLTLVRVREADKVIFAVNQLEGPAGDWWDTYKGAREDGAGEPTWEEFTAAFRENFVPAAVMRMKKNEFRRLRQGNTTVQEYLNKFTQLARYAIGDLADEEEKIDKFIEGLNDELRGPMIGQDHESFQSLINKVVRLENDQRTVEHNRKRRLAMSRPPQTVPQRLKEATPSGWKPPVMVTNRPAALSNFNRPVALQNRTPTPTLAAPGAKKNVDCFNCGEYGHYANNCPHPRKTPVRTGANAMTVRSTTTPAVGRGLFKTPQSNRTTTGFGRGQVNHVRAEEAQEDQGVLMGMFSINSTPVKVLFDSGASHSFISLKASQKHNLTLVGLRKPMIVHSPGGEITVSHACIDVPIRLRDVVFPSNLMVLIPQTLDVILGMDWLAKHRGVIDCRRREVTLTTPWGSDMRATMDQDPRLTERAGGIFTMLPLKGMPVVQRFPDVFPEDLPGMPPDRDIEFIIDLIPGTAPISKRPYRMPVNELEELKKQIKELQEKGFVRPSSSPWGAPVLFVKKKDGSMRMCVDYRSLNEVTIKNKYPLPRIDDLFDQLKGAKVFSKIDLRSGYHQLKIRTEDIPKTAFSTRYGLYEFTVMSFGLTNAPAYFMNLMNKVFMDYLDKFVVVFIDDILIYSKDEEEHAEHLRLVFQKLRKHKLYAKFSKCEFWLKEVAFLGHVISAGGVAVDPAKVEAVTEWKAPKSVTEIRSFLGLAGYYRRFIEGFSKIARPMTQLLKKEKKFVWSEQCQESFEQLKEKLTSAPILVLPDIRKDFVIYCDASRQGLGGVLMQDGKVVAYASRQLRPHEENYPTHDLELAAVVHALKIWRHYLIGNHCDIYTDHKSLKYIFTQSDLNLRQRRWLELIKDYDLEVHYHPGKANVVADALSRKSHCNHLRMEGMVPKLREEIAQLNLHIVPRGQINTLDIQPLLRTQIEEVQKDNKEVREKVKAEHQRPAGLLQPLRIPEWKWDEIGMDFIVGLPKTATGYDSIWVIVDRLTKTARFIPVKTNYSSAKLAELYMTRIVCLHGIPKRIISDRGTQFTSHFWEKVHEALGSYLAFSTAYHPQTDGQTERTNQILEDMLRACALDFSKDWERCLPYAEFSYNNSFQASLKMSPNEALFGRRCRTPLMWSETGERAVFGPDIIQEAEEKVRLIRDRLKVAQSRQKNYADTRRRDLEFKEGDYVYLKVSPMRGTKRFKVKGKLAPRYVGPFQIIARRGEVAYQLQLPENIADVHPVFHVSQLKKCLRVPEEQAPLEEIHISNDLTYPEHPIRILDEAEKRTRSKVWRMYKVQWSNHTEDEATWESEEFLRTEYPHLFENR

SEQ ID NO: 159395 - protein, 79 aa, Oryza sativa
  Clone ID: PAT_MRT4530_58776C.1.pep
PYYSKQGDSEPQIRGQHRMSTGAGLLSRYQGHKLIWTSTQKCGLRPWPGAHAPKIVSEARPNHSLIAGWHLPRRPRLIG

SEQ ID NO: 159396 - protein, 454 aa, Oryza sativa
  Clone ID: PAT_MRT4530_58777C.1.pep
MGSMSTPAASATTSNIEDNNNGGQVLLLPFPAAQGHTNPMLQFGRRLAYHGLRPTLVTTQYVLSTTPPPGDPFRVAAISDGFDDASGMAALPDPGEYLRTLEAHGSPTLAELLLSEARAGRPARVLVYDPHLPWARRVARAAGVATVAFLSQPCAVDLIYGEVCARRLALPVTPTDASGLYARGVLGVELGPDDVPPFVAAPELTPAFCEQSVEQFAGLEDDDDILVNSFTDLEPKEAAYMESTWRGKTVGPLLPSFYLDDGRLRSNTAYGFNLFRSTVPCMEWLDKQPPRSVVLVSYGTISTFDVAKLEELGNGLCNSGKPFLWVVRSNEEHKLSVQLRKKCEKRGLIVPFCPQLEAIVNGIPLVAMPHWADQPTISKYVESLWGTGVRVQLDKSGSLQREEVERCIREVMDGDRKEDYRRNAARLMKKAKESMQEGGSSDKNIAEFAAKYSN

SEQ ID NO: 159397 - protein, 1373 aa, Oryza sativa
  Clone ID: PAT_MRT4530_58778C.1.pep
MWGPHVGLQSGGAAGGLAGPAWPRGVTDTEPEIEPDVTDPSEDETPVPRITFLGGPRTLSTARKSTRPPGKKPKPDPEATISEPWGLSNDETQTPDLTTLAGIMATQTQLLQAIANNQGNRGGSSFGEFMRTKPPTFATADEPMEAEDWLRIIEKKLTLVRVREADKVIFAVNQLEGPARDWWDTYKEAREEDAGEPTWEEFTVAFRENFVPAAEYLNKFTQLARYAIGDLADEEEKIDKFIEGLNDGLRGPMIGQDHESFQSLINKVVRLENDQRTVEHNRKRRLAMSRPPQAVPQRLKGATPSGWKPPIVVTNHPAAPSNFNRPVAIQNRTPTPTMAAPEAKKNVDYFNCGEYRHYANNCPHPRKTPVRTGANAMTVRGTATPAAGDVVFPSNLMVLIPQTLDVILGMDWLTKNRGVIDCRRREVTLTTPWGSDMRTTMDQDPRLAERAEGIFTMLPMKGMPVVQRFPDVFPEDLPGMPPDRDIEFIIDLIPGTAPISKKPYRVPVNELEELKKQIRELQEKGFVRPSSSPWGAPVLFVKKKDGSMRMCVDYRSLNEVTIKNKYPLPRINDLFDQLKGAKVFSKIDLQSGYHQLKIRTGDIPKTAFSTCYGLYEFTVMSFGLTNAPVYFMNLMNKVFMDYLDKFVVVFIDDILIYSKDEEEHAEHLRLVLQKLRKHKLYAKFNKCEFWLKEVAFLGHVISAGGVAVDPAKVEAVTEWKAPKSLLKKEKKFVWSEQCQESFEQLKEKLTSAPILVLPDNRKDFVIYCDASRQGLGGVLMQDGKVVAYALRQLRPHEENYPTHDLELAAMVHALKIWRHYLIGNHCDIYTDHKSLKYIFTQSDLNLRQRRWLELIKDHDLEVHYHPGKANVVADALSRKSHCNHLRMEGMAPELKEEYAQLNLHIVPRGRINTLDIQPLLRTQIEEAQKDIEEIREVKARLAAGRAQEFSTDEKGVLWYKKRIYVPEQGGLRGLILKEAHESAYSLHPGSTKMYQDLKEGYWWPNMKRDVAEYVALCDVCQKVKAEHQRPAGLLQPLRIPEWKWDEIGMDFIVGLPRTATGYDSIWVIVDRLTKTARFIPIKTNYNSAKLAEVYMTRIEKVHEALGSYLAFSTAYHPQTDGQTERTNQVLEDMLRACALDFSKDWERCLPYTEFSYNNSFQASLKMSPNEALFGRRCRTPLMWSETGERAVFGPDIINEAEEKVRLIRDHLKVAQSRQKSYADTQRRNLEFKEGDYVYLKVSPMRGTKRFKVKGKLAPRYVGPFQITARRGEVAYQLQLPEHIADVHPVFHVSQLKKCLRVPEEQAPLEEIHLSNDLTYPEHPVRILDEAEKRTRSKVWRMYKVQWSNHTKDEATWESEEFLRMEYPHLFENR

SEQ ID NO: 159398 - protein, 174 aa, Oryza sativa
  Clone ID: PAT_MRT4530_58779C.1.pep
MSEFLDLEAQDGIRMPWNVIPGTREDALSCVVPISAIYTPLKQVPDIPVLPYSPLRCRMCRSILNPFSIVDYVAKIWVCPFCFQRNHFPQLYSSISESNLPAELFPQYTTVEYISTAETGPVVPPVFMFVVDTCMIEEEIGYLKSALTQVVELLPDNSLVGFITFGTYVQVHEL

SEQ ID NO: 159399 - protein, 54 aa, Oryza sativa
  Clone ID: PAT_MRT4530_5877C.1.pep
GGCKECLSFCRKLAVFRIRKFLCYVRSSDPFNRRAGVLHMGLRAYDDRFRSVPL

SEQ ID NO: 159400 - protein, 466 aa, Oryza sativa
  Clone ID: PAT_MRT4530_58780C.1.pep
MGSMSTPAASANGGQVLLLPFPAAQGHTNPMLQFGRRLAYHGLRPTLVTTRYVLSTTPPPGDPFRVAAISDGFDDASGMAALPDPGEYLRTLEAHGARTLAELLLSEARAGRPARVLVYDPHLPWARRVARAAGVATAAFLSQPCAVDLIYGEVCARRLALPVTPTDARGLYARGVLGVELGPDDVPPFVAAPELTPAFCEQSIEQFAGLEDDDDVLVNSFSDLEPKEAAYMESTWRAKTIGPSLPSFYLDDGRLRSNTAYGFNLFRSTVPCMEWLDKQPPRSVVLVSYGTVSTFDVAKLEELGNGLCNSGKPFLWVVRSNEEHKLSVQLRKKCEKRGLIVPFCPQLEVLAHKATGCFLSHCGWNSTLEAIVNGVPLVAMPHWADQPTISKYVESLWGMGVRVQLDKSGILQREEVERCIREVMDGDRKEDYRRNATRLMKKAKESMQEGGSSDKNIAEFAAKYSN

SEQ ID NO: 159401 - protein, 1710 aa, Oryza sativa
  Clone ID: PAT_MRT4530_58781C.1.pep
MADSDSPATWELSLPQSEGYVIELHRMLRRLRYPGFPSYRVRQCGSVWEARVEIHPRVPSELDYSFQTRHHRDLPETAMQDAAREAFLRLSSIHRAELVSTEFAHHLFREEGNSVCTVQDTPCCYNPMVTRLSRWAEAVDDYYEEALLEIDDHQRRVGELETEVTDLTAQQLQLEEEHQAWGSEIDSLKAQLQVHGDQFQQLSDQYNDHRGMMDTLEEQLRESQEHVSQLEEQLRAAKISTTGASTSTAVGRDRYFFLTPPYPPAFHALLGEASMLATESAPYLVDPTATQPPVPELVHTPLIPTPSPQLGSSLETPIQVDSETEGTDTEPEIEPDITDPSEDEAPVPRITFLGGPRTLSTARKSTRPPGKRPKPDPEATTSGPWGLSNDETQTPDLNTLAGVMATQTQLLQAIANNQGNRGGSSFGEFMRTKPPTFATADEPMEAKDWLRIIEKKLTLVRVREADKVIFAVNQLERPAGDWWDTYKEAREDGAGEPTWEEFTAAFRENFVPAAVMRMKKNEFRRLRQGNTTVQEYLNKFTQLARYAIGDLADEEEKIDKFIEGLNDELRGPMIGQDHESFQSLINKVVRLENDQRTVEHNRKRRLAMSHPPQTVPQRLKGAPPSGWKPPVMVTNRPAALSNFNRPVALQNRTPTPTLAAPGAKKNVDCFNCGEYGHYANNCPHPRKTPVRTGANAMTVRGTTTPAIGRGLFKTPQSNRTATGFGRGQVNHVRAEEAQEDQGVLMGMFSINSTPVKVLFDSGASHSFISLKASQKHNLTLVGLRKPMIVHSPGGEITMSHACIDVPIRLRDVVFPSNLMVLIPQTLDVILGMDWLAKHRGVIDCRRREVTLTTPWGSDMRATMDQEPRLTERAGGIFTMLPLKGMPVVQRFPDVFPEDLPGMPPDRDVEFIIDLIPGTAPISKRPYRMPVNELEELKRQIRELQEKGFVRPSSSPWGAPVLFVKKKDGSMRMCVDYRSLNEVTIKNKYPLPRIDDLFDQLKGAKIRTEDIPKTAFSTRYGLYEFTVMSFGLTNAPAYFMNLMNKVFMDYLDKFVVVFIDDILIYSKDEEEHAEHLRLVLQKLRKHKLYAKFSKCEFWLKEVAFLGHVISAGGVAVDPAKVEAVTEWKAPKSVTEIRSFLGLAGYYRRFIEGFSKIARPMTQLLKKKKKFVWSEQCQESFEQLKEKLTSAPILVLPDIRKDFVIYCDASRQGLGGVLMQDRKVVAYASRQLRPHEENYPTHDLELAAVVHALKIWRHYLIGNHCDIYTDHKSLKYIFTQSDLNLRQRRWLELIKDYDLEVHYHPGKANVVADALSRKSHCNHLRMEGMVPELREEIAQLNLHIVPRGQINTLDIQPLLRTQIEEAQKDNEEVRELKERLAAGRAKEFSTDEKDVLWYKKRIYVPEQGGLRGLILKEAHESAYSLHPGSTKMYQDLKEGYWWPNMKRDVAEYVALCDVCQKVKAEHQRPAGLLQPLRIPEWKWDEIGMDFIVGLPKTATGYDSIWVIVDRLTKTARFIPVKTNYSSAKLAELYMTRIVCLHGVPKKIISDRGTQFTSHFWEKVHEALGSYLAFSTAYHPQTDGQTERTNQVLEDMLRACALDFSKDWERCLPYAEFSYNNSFQASLKMSPNEALFGRRCRTPLMWSETGERAVFGPDIIQEAEEKVRLIRDRLKVAQSRQKSYADTRRRNLEFKEGDYVYLKVSPMRGNKKV

SEQ ID NO: 159402 - protein, 76 aa, Oryza sativa
  Clone ID: PAT_MRT4530_58782C.1.pep
PRKELKVPSYLSYADELSSTANRCFLQSVVSKLSVHVPCALPFVSPDCPEAICTVHGNWPPSSSFIFFLFRLFFHI

SEQ ID NO: 159403 - protein, 863 aa, Oryza sativa
  unsure (1)..(863): unsure at all Xaa locations
  Clone ID: PAT_MRT4530_58783C.1.pep
KKYPLPRIDDLFDQLKGAKVFSKIYLRSGYHQLKIRTGDIPKTAFSTRYGLYEFTVMSFGLTNAPAYFMNLMNKVFMDYLDKFVVVFIDDILIYSKDEEEHAEHLQLVLEKLRKHKLYAKFSKCEFWLKEVTFLGHVISAGGVAVDPAKVEAVTEWKAPKSVTEIRSFLGLAGYYRRFIEGFSKIARPMTQLLKKEKKFVWSEQCQESFEQLKEKLTSAPILVLPDNRKDFVIYCDASRQGLGGVLMQDGKVVAYASRQLRPHEENYPTHDLELAAVVHALKIWRHYLIGNHCDIYTDHKSLKYIFTQSDLNMRQRRWLELFKDYDLEVHYHPGKANVVADALSRKSHCNHLRMEGMAPELKEEIAHLNLHIVPRGQINTLDIQPLLRTQIEEAQKDNEEIQEVKERLAAGFAKEFSTDEKDVLWYKKRIYVPEKGGLRGLILKEAHESAYSLHPGSMKMYQDLKEGYWWPNMKRDVAEYVALCDICQKVKAEHQRPAGLLQPLRIPEWKWDEIGMDFIVGLPKTATGYNSIWVIVDRLTKTARFIPVKTNYCGAKLAELYMTRIVCLHGVPKRIISDXGTQFTSHFWEKVHEALGSYLAFSTAYHPQTDGQTERTNQVLEDMLRACALHFSKDWEKCLPYAEFSYNNSFQASLKMSPNEALFGRRCRTPLMWSETGERAVFGPDIIKEAEDKVRLIRDRLKVAQSRXKSYADTQRRNLEFKEGDYVYLKVSPMRGTKRFKVKGKLAPRYVGPFQIMARRGEVAYQLQLPENIADVHPVFHVSQLKKCLRVPEEQAPLEEIHISNDLTYPEHPVRILDEAEKRTRTKVWRMYKVQWSNHTEDEATWXSEEFLKTEYPHLFENR

SEQ ID NO: 159404 - protein, 101 aa, Oryza sativa
  Clone ID: PAT_MRT4530_58784C.1.pep
STTSHCQAITCSALCQLRLNSLLASTSIRATQAQLVGPKHAALRFSQLNTAPCCFPPSGFWFELCVSVREKFSLLLGVTVEHWVITLLFCMLFSVCLCWFL

SEQ ID NO: 159405 - protein, 1304 aa, Oryza sativa
  unsure (1)..(1304): unsure at all Xaa locations
  Clone ID: PAT_MRT4530_58785C.1.pep
MEAEDWLCIIEKKLTLVRMREADKVIFTVNQLEGPAGDWWDTYKEAREEDAGEPTWDEFTAAFHENFVPAAVMRMKKNEFRRPRQGNTTVQEYLNRFTQLTRYAIGDLADEEEKIDKFIEGLNDELRGPMIGQDHESFQSLINKVVRLENDRKVVEHNRKRRLAMNRPPQVATQHPKGAASSGWKPTVVTTNRPTAHSNFHRPVTTQNRAPAPNQAATGVMRPGSCFNCGEYGHFANKCPHLNKTPIRTGANAMAIHGAATPAGGRGVRKPMIVHSPGGETLDVILGMDWLAKHRGVIDCRRREVTLTTPWGSDMRATMDQDPRLTERAGGIFTMLPLKGMPVVQLFPDVFPEDLPGMPPDRDIEFIIDLIPGTAPISKRPYRMLVNELEEHKKQIRELQEKGFVRPSSSPWGAPVLFVKKKDGSMRMCVDYRSLNEVTIKNKYPLPRIDDLFDQLKGAKVFSKIDLRLGYHQLKIRTGDIPKTAFSTRYGLYEFTVMSFGLTNAPAYFMNLMNKVFMDYLEKFVVVFIDDILIYSKDEEEHAEHLRLVLQKLRKHKLYKKFSKCEFWLKEVAFLGHVISAGGVAVDPAKVEAVTEWKAPKSVTEIRSFLGLAGYYRRFIEGFSKIARPMTQLLKKEKKFVWSEQCQESFEQLKEKLTSAPILVLPDIRKDFVIYCDASRQGLGGVLMQDGKVVAYASRQLRPHEENYPTHDLELAAVVHALKIWRHYLIGNHCDIYTDHKSLKYIFTQSDLNLRQRRWLELIKDYDLEVHYHPGKANVVADALSRKSHYNHLRMEGMVPELREEIAQLNLHIVPHGRINTLDIQPLLRTQIEEAQKXNEEVREVKERLAAGRAKEFSTDGKDVLWYKKRIYVPEQGGLRGLILKEAHESAYSLHPGSTKMYQDLKEGYWWPNMKRDVAEYVALCDVCQKVKAEHQRPAGLLQPLRIPEWKWDEIGMDFIVGLPKTATGYDSIWVIVDRLNKTARFIPVKTNYSSAKLAELYMTRIVCLHGIPKKIISDRGTQFTSHFWEKVHEALGSYLAFSTAYHPQTDGQTERTNQVLEDMLRACALDFSKDWERCLPYAEFSYNNSFQASLKISPNEALFGRXCRTPLMWSETGERAVFGPDIIQEAEEKVRLIRDRLKVAQSRQKSYADTRRRNLEFKEGDYVYLKVSPMRGTKRFKVKGKLAPRYVGPFQIIARRGEVAYQLQLPEYIADVHPVFHVSQLKKCLRVPEEQAPLEEIHISNDLTYPEHPIRILDEADXRTRSKVWRMYKVQWSNHTEDEATWEGEEFLRTEYPHLFGNW

SEQ ID NO: 159406 - protein, 1421 aa, Oryza sativa
  Clone ID: PAT_MRT4530_58786C.1.pep
MASRRRATTSNDETQTPDLNTLAGIMATQTQLLQAIANNQGNRGGSSFGEFMRTKPPTFATAEEPMDAEDWLRIIEKKLTLVRVREADKVIFAANQLEGPAGDWWDTYKEAREEDAGEPNWEEFTTAFRDNFVPAAVMRMKKNEFRRLRQGNTTVQEYLNRFTQLARYATRDLADEEEKIDKFIEGLNDELRGPMIGQDHDSFQSLINKVVRLENDRKVVEHNRKRRLAMNRTPQTAPQRPKGTTSSAWRPTVVTTSRPAASSNFHRPVTIQNRAPAPNQAATGSVRPGSCFNCGEYGHFANKCPHPNKTPIRTGTNATAIHGTATPAAGRGLFRTPQTNRTATGFGRGQVNHVRAEEAQEDQGVLMGMFSLNSTPVKVLFDSGASHSFISLKASQQHNLTRVKLRQPMLVHSPGGEIAVDTACINVPIRLRDVVFPSNLMVLIPQTLDVILGMDWLAKHRGVIDCRRREVTLTTPWGSDMRATMDQDPRLTERAGGIFTMLPLKGMPVVQRFPDVFPEDLPGMPPDRDIEFIIDLIPGTAPISKRPYRMPVNELEELKKQIRELQEKGFVRPSSSPWGAPVLFVKKKDGSMRMCVDYRSLNEVTIKNKYPLPRIDDLFDQLEGAKVFSKIDLRSGYHQLKIRTEDIPKTAFSTRYGLYEFTVMSFGLTNAPAYFMNLMNKVFMDYLDKFVVVFIDDILIYSKDEEEHAEHLRLVLQKLRKHKLYAKFSKCEFWLKEVAFLGHVISAGGVAVDPAKVEAVTEWKAPKSVTEIWSFLGLAGYYRRFIEGFSKIARPMTQLLKKEKKFVWSEQCQESFEQLKEKLTSAPILVLPDIRKDFVIYCDASRQGLGGVLMQDGKVVAYASRQLRPHEENYPTHDLELAAVVHALKIWRHYLIGNHCDIYTDHKSLKYIFTQSDLNLRQRRWLELIKDYDLEINTLDIQPLLRTQIEEAQKDNEEVREVKERLAAGRAKEFSTNEKDVLWYKKRIYVPEQGGLRGLILKEAHESAYSLHPGSTKMYQDLKEGYWWPNMKRDVAEYVALCDVCQKVKAEHQRPAGLLQPLRIPEWKWDEIGMDFIVGLPKTATGHDSIWVIVDRLTKTARFIPVKTNYSSAKLAELYMTRIVCLHCVPKKIISDRGTQFTYHFWEKVHEALGSYLAFSTAYHPQTDGQTERTNQVLEDMLRACALDFNKDWERCLPYAEFSYNNSFQASLKMSPNEALFGRRCRTPLMWSETGERAVFGPDIIQEAEEKVRLIRDRLKIAQSRQKSYADTRRRNLEFKEGDYVYLKVSPMRGTKRFKVKGKLAPRYVGPFQIIARRGEVAYQIQLPENIADVHPVFHVSQLKKCLRVPEEQAPLEEIHISNDLTYPEHPIRILDEAEKRTRSKVWHMYKVQWSNHTEDEATWESEEFLRTEYPHLFEDW

SEQ ID NO: 159407 - protein, 43 aa, Oryza sativa
  unsure (1)..(43): unsure at all Xaa locations
  Clone ID: PAT_MRT4530_58787C.1.pep
ALATRCSQISLYYAPGQGGLKCSXGLSPPLHLPQTYCGIHSNH

SEQ ID NO: 159408 - protein, 59 aa, Oryza sativa
  Clone ID: PAT_MRT4530_58788C.1.pep
IYQYGLGWTYIFKTNKLQALKPFMIHFIAICVSGAFFFFSATLCLSGILLKVFSLGLAL

SEQ ID NO: 159409 - protein, 260 aa, Oryza sativa
  unsure (1)..(260): unsure at all Xaa locations
  Clone ID: PAT_MRT4530_58789C.1.pep
RSKRIGDALNFFNFIRDKKTPGTKLYNVFISGLCEAQKPEQAMVFWREAREKGLVPSISCYEQLVLLLCSVKDYDNVVKVIDDFKETGRPVSAFLCNVLLLHTLRGSDQAKAWKRSEQATVKPEEIQXKGVGRFLIGELIMMFAGGIRNMNDLEDLEEDLEKHFPVDVYTYNMLLRGLSMVGRMDSACNLFERLCRKGYEPNRWTFDIMVHGFCKNSDRDEAERWMEAMHRNGFYPTWYTMRIYNNLALRSTDHKVISFV

SEQ ID NO: 159410 - protein, 102 aa, Oryza sativa
  Clone ID: PAT_MRT4530_5878C.1.pep
GACEFPQVPHPAGGQGAGRVPAQGAHAAVGEGALGVGGQPQRSGKARGQTGRKQGMGGQLTSSAGGGAHHQRGVHPAPGGREGHARGEGDAAHHRAEAAGRA

SEQ ID NO: 159411 - protein, 65 aa, Oryza sativa
  unsure (1)..(65): unsure at all Xaa locations
  Clone ID: PAT_MRT4530_58790C.1.pep
KNHGTCPCGQAQSCIKTCXQXNPDSNLNPSFVVLTRIPSPALLARWRSAPPPLFGREMAQGAEET

SEQ ID NO: 159412 - protein, 102 aa, Oryza sativa
  Clone ID: PAT_MRT4530_58791C.1.pep
VMVGIPGCLVVESDDDVMRMRTMLRKDFMGEVPIYCGSRRVEAQEMAKDKNGDAVTGYVRISHQVYNVTEDYEKLRDAVNKLVADGFTSSKLRPSQKQETMA

SEQ ID NO: 159413 - protein, 72 aa, Oryza sativa
  Clone ID: PAT_MRT4530_58792C.1.pep
IVCLSHADFSKCEYICIPDNPRGLAGKCFGCPCQCSRRYGSMSLSVPDASHVFESYRALFALEVRWIPFLMQ

SEQ ID NO: 159414 - protein, 540 aa, Oryza sativa
  Clone ID: PAT_MRT4530_58793C.1.pep
MASIPPDDDAAAAAAAGAAENGYGNGKGNGNGPAPRPPPAKRPRSVISAAQIRAEFEHHEAGVARVNNGSFGCCPSSLLDAQARWQRLFIAQPDDFYFHALQPGLRRSRAAVAGLVNAGDVAEVSLVDNATTAAAIVLQHAAWSFAEGRFSRGDAVLMLHYAYGAVKKSIHAYVARAGATVVEVPLPFPVASADAIIAEFRAALDVAKAGGRKVRLAVIDHITSMPSVVIPVKELVAICREEGVDKVFIDAAHSIGQVPVDVRDIGADFYTSNLHKWFFCPPAVAFLHTRKDDPIASQLHHPVVSHEYGNGLPMESGWIGTRDYSAQLVVPESIDFVNRFEGGIEGIRSRNHEKVIEMGKMLAEAWGTFLGTPPELCGSMVMVGLPGCLGVESDDDVMRMRTMLRKDFMVEVPIYYNSRRVEAQEMAKDKNGDAVTGYVRISHQVYNVTEDYEKLRDAVNKLVADGFTSSKLRPSQKTFVRPCVLLKLGQLFICYTGNFASTSGNDGLMNIAANQHSVGSYVVADYLDVDRRDSQRCGVI

SEQ ID NO: 159415 - protein, 139 aa, Oryza sativa
  unsure (1)..(139): unsure at all Xaa locations
  Clone ID: PAT_MRT4530_58794C.1.pep
TNPFDTAAARRARRQPHRHXMDGWINSRADHHHTPFTSPCTPPHHHHTTMDGRAAEKKKIKEVEQEEEKREREKRIRPSDPLFRDFPPYAIATEWMDGWMEKKTTCHHPSIDRSIHRSEVWMKVARRNCKRPDDESDCY

SEQ ID NO: 159416 - protein, 156 aa, Oryza sativa
  Clone ID: PAT_MRT4530_58795C.1.pep
MLWCATDIASHSRAVGTTSFSRHPSLPRLLLGGADGRSAVRPRDHMGMEGTRNKHPSFSDMVPENPDAINAITFTPNRRSRLTSSREIAAAGTNAVATPQPSRPRPPSAGRFHALPLPPRPRDAHARPRCRGAAAEPRRFLAVAVAHCFVLLLMPD

SEQ ID NO: 159417 - protein, 67 aa, Oryza sativa
  Clone ID: PAT_MRT4530_58796C.1.pep
MLLTGQQKPLIEHNNLKMMEPALIPHESINSRKGKFCRGRKTITPELGNACGQETECWMRGQSPGQA

SEQ ID NO: 159418 - protein, 74 aa, Oryza sativa
  unsure (1)..(74): unsure at all Xaa locations
  Clone ID: PAT_MRT4530_58797C.1.pep
AAFFVVNKGARPVIPQDCLPALSPIMTLCWDANPXVRPAFTEIVCMLESAKMEIFTNVRKARFPCCIPRPMPPA

SEQ ID NO: 159419 - protein, 82 aa, Oryza sativa
  Clone ID: PAT_MRT4530_58798C.1.pep
SLFACNLPRGITQQSHCGTGQPPKIGKHPSVEGLSLAIPATCIFISNTFHQYISSTPQIWRFAHNFHFISISHYTRFISLSS

SEQ ID NO: 159420 - protein, 329 aa, Oryza sativa
  Clone ID: PAT_MRT4530_58799C.1.pep
MAAVEVTARSAPRNGGEVTGGGVYCWRSTAVPGGTAAGEVKLDILIKQSKMEYIWSSTMVLPRRGRQLAGRPAATPPSTIRRYGADDEAAPASAWVRLRTDMRRCSLRSSLNCRMNRSALAFTSAFPSTSANARLPFAASLLFLGLSSAVAAAATSPAVAAAAAAACGGGGRTAATAGCACASSNPMGFSSAASAFPDAAGDVGGPTVMSSSCTPEIAWTKEKAEKDRSRSMTMDDALRVSLRLVDDGGGGGACSCARDDTATAPTTTVNRTNHAAPGLSHGGSGHHHNDGDDDDSTAAIDLVTHTLTTPRSLLSCSCSDLLVLETSVY

SEQ ID NO: 159421 - protein, 71 aa, Oryza sativa
  Clone ID: PAT_MRT4530_5879C.1.pep
KVWSSVCVFCPLTVRTHGSCAQSCQRYSLAVNLFIFMVQLNLYPLSRPFLSCWKPLYLKQMHCCHFNLKIE

SEQ ID NO: 159422 - protein, 63 aa, Oryza sativa
  Clone ID: PAT_MRT4530_587C.1.pep
MKVKAKAQLKVQRLGRDGNRVQGSSSCLSSSKHDTGTRLFDLESSTQATAADKYPKLEQENQV

SEQ ID NO: 159423 - protein, 186 aa, Oryza sativa
  unsure (1)..(186): unsure at all Xaa locations
  Clone ID: PAT_MRT4530_58800C.1.pep
YLIHNRVGAHGNETLGLLNQQQNPSSQQVQYQQGGSAQPQFAPQYNQFEPIPQQAQGVPHQRPWADMFADVMREQFGLKPKDTRNLYRHPYPEWFETVQLPNRYKVPDFSKFSRQDSVSTYERVSRFLAQCGEASTVDALRVRLFSLSLSGMAFTRFSSLPYNSINSWADLEXQFHSHLCSGVHEM

SEQ ID NO: 159424 - protein, 1010 aa, Oryza sativa
  Clone ID: PAT_MRT4530_58801C.1.pep
MVALLLFPMLLQLLSPTCAQTQKNITLGSTLAPQSPASSWLSPSGDFAFGFRPVEGNTSFYLIAVWFNKISDKTVVWYAKNTDQDPSIVEVPSDSFLQLTNDGALSLKDRSGQEGWNPQVTSVAYASMRDTGNFVLLGADGTTKWQTFDMPSDTILPTQVIPCNKTRNKSLRARLDINDYSSGRFLLDVQTDGNLALYLVAVPSGSKYQQYWSTDTTGNGSELVFSETGKVYFALTDGTQINISSGAGIGSMADYFHRATLDPDGVFRQYVYPKKANAGILGGETWTAVSMQPQNICHAIVSDVGSGVCGFNSYCTFDGTRNQIASCQCPPWYKFFDEQKKYKGCKQDFQPHSCDLDEATALAQFELRPIYGVDWPLSDYEKYEPIGQDDCGRLCVIDCFCAMAVYNQSTSTCWKKKLPLSNGNMADYVQRTVLLKVPSSNSSQSMISTSSNKWKRNRKHWVLGSSLILGTSILVNFALISIFLFGTYCRIATKKNIPLSQASSKSQLPLKTFTYKELEKATAGFHEILGAGASGVVYKGQLEDELKTNIAVKKIDKLQPETEKEFMVEVETIGQTFHKNLVRLLGFCNEGAERLLVYEFMTNGPLNRLLFDNSRPHWNTRVHIALGVARGLLYLHDECSKQIIHCDIKPQNILLDDNLVAKISDFGLAKLLLTNQTRTNTGIRGTRGYVAPEWFKNIGISTKVDVYSFGVILLELVCCRRNVELEVVDEEQTIVTYWANDCYRSGRIDLLVEGDDEAIYNIKKVERFVTVALWCLQEDPSMRPNMLKVTQMLDGAVAIPSPPDPCSFISSLPYASKCGYDFLKNYEDCTLMTRQQPDDVKGKGPMFVETYIQQQLNEKQVANSTKGEAGAGIIIRDCRGLVLLASCKKLPRCSSAMQAEALVCLEGIRLATEWVNMPLILESDNTSVVAELNATNVSRADWSGIISDVKAAMLCLAQVQVHRIKRDSNKIAYALAQLVMGSGTNTVWRLCSPAEILDLLNQECNPLFSH

SEQ ID NO: 159425 - protein, 933 aa, Oryza sativa
  Clone ID: PAT_MRT4530_58802C.1.pep
MDETESTYLKHCRKVVYMGHRRFLIANHPIRKKGNHFERKADHRTKPKHHNGKSVFTMVNDLKVVFGKGPESQPIESENAACLLAIIIRGIFPNNIRATITKLCAFKNAISQKIIDPDSLAALQEDVVQCLVSFELIFPPSFFNIMTHLLCHLVKVIGILGPVYLHNMFPFERHMGVLKKYVHNRSHPEASIVKGYGTEEIIEFCVHFLEDLHPIGDMDSKPKKGKWPDEPRRYVFLPRKRKIVGVDDKTDENYNQFEEQPPFAVTVDSSTLLSKEDTPYSLHLGVVPSKYGFQEDIHTYRSRMRSKRDTEAKIVDLEYRVSNYEARMQEEVSRQVGQRLAEQRGQDTQPSILPIMVVSGMAIPMDPSGTYHCRSIPPGYTGTYHCNSIPPGHTRLKIELVERTIEDFELDIPGGDGETKLGDTAHAIILWRKRSRQTHPALSSSNKKAKLDEPRLPALKKRAYDCTPEEIDESVAAEVKVHFKPRSPEKKIPIDPTTKQFFLKISAPVKEIVLLDYDRTMKKAIIMKSRGRESKALPQLGHQPQQDVEPLLPPGEQEIRQWTKQTGPKRERLLQDTPIEKAELKYKFTLDELLVKPDQVNTLPTQMYWYHQWYMEKSSRGREMFGARVIYMRENLTHADFIRVIQEQLMGFINEQIIDPAGEFYYDGKPLLQAEKIVIITRDDEKQVETGRQPRRRRARPSSGGSIHEEADSQLHEKIVIHVDADNEMVGDEAPPYKESTEFGCRAQARETNNCSRSRARCPLPAHSMFDKMSMRARRSEALVLLRWVSPVDDINPAWAGSCVHHDESASYKNWINNDGNSSARPSAGGLIFLWMSNLFPEKKKSKSNLFTQGRWMMKRHKFLYFELSIRYDSRLYTYANNAATSLLWGGEGHDRPRSAGSNNGLQARRPVTGAGRASQVAVDGDGGLRQSC

SEQ ID NO: 159426 - protein, 1802 aa, Oryza sativa
  Clone ID: PAT_MRT4530_58803C.1.pep
MADSDSPATWELSLPQLEGYVIELHRMLRRLRYPGFPSYRVRQCGPVWEARVEIHPRVPSELDYSFQTRHHRDLPETAMQDAAREAFLRLSSIHRAELVSTEFAHHPFREEGNSVCTVHDMPCCYNPIVTRLSRWAEAVDDYYEEALLEIDDHQRRVGELETEVTDLTAQQLQLEEEHQAWGSEIDSLKAQLQVHGDQFQQLSDQYNDRRGMMDTLEEQLRESQEHVSQLEEQLRAAKISTTGASTSTAVGRDRYFFLTPPYPPAFHALLGEASMLATESAPYLVDPTAAQPPVPELVHTPLIPTPSPQLGSSLETPIQVDSETEGTDTEPEIEPDITDPSEDEAPVPRITFLGGPRTLSTARKSTRPPGKRPKPDPEATTSEPWGLRNDETQTPDLNTLAGIMATQTQLLQAIASNQGNRGGSSFGEFMRTKPPTFATAEEPMDAEDWLRIIEKKLILVRVREADKVIFAANQLEGPAGDWWDTYKEAREEDAGEPNWEEFTTAFRDNFVPAAVMRMKKNEFRRLRQGNTTVQEYLNRFTQLARYATGDLADEEEKIDKFIEGLNDELRGPMIGQDHDSFQSLINKVVRLENDRKVVEHNRKRRLAMNRPPQTAPQRPKGTTSSAWRPTVVTTSRPATSSNFHRPVTIQNRAPAPNQAATGSTNRTATGFGRGQVNHVRAEEAQEDQGVLMGMFSLNSTPVKVLFDSGASHSFISLKASQQHNLTRVKLRQPMLVHSPGGEIAVDTACIDVPICLRDVVFPSSLMVLIPQTLDVILGMDWLAKHRGVIDCRRREVTLTTPWGSDMRATMDQDPRLTEHAGGIFTMLPLKGMPVVQRFPDVFPEDLPGMPPDRDIEFIIDLIPGTAPISKRPYRMPVNELEELKKQIRELQEKGFVRPSSSPWGAPVLFVKKKDGSMRMCVDYRSLNEVTIKNKYPLPRIDDLFDQLKGAKVFSKIDLRSGYHQLKIRTEDIPKTAFSTRYGLYEFTVMSFGLTNAPAYFMNLMNKVFMEYLDKFVVVFIDDILIYSKDEEEHAEHLRLVLQKLRKHKLYAKFSKCEFWLKEVAFLGHVISAGGVAVDPAKVEAVTEWKAPKSVTEIRSFLGLAGYYRRFIEGFSKIARPMTQLLKKEKKFVWSEQCQESFEQLKEKLTSAPIFVLPDIRKDFVIYCDASRQGLGGVLMQDGKVVAYASRQLRPHEENYPTHDLELAAVVHALKIWRHYLIGNHCDIYTDHKSLKYIFTQSDLNLRQRRWLELIKDYDLEVHYHPGKANVVADALSRKSHCNHLRTEGMVPELREEMAQLNLHIVPHGQINTLDIQPLLRTQIEEAQKDNEEVREVKERLAAGRAKEFSTDEKDVLWYKKRIYVPEQGGLRGLILKESHESAYSLHPESTKMYQDLKEGYWWPNMKRDVAEYVALCDVCQKVKAEHQRPAGLLQPLRIPEWKWDEIGMDFIVGLPKTATGYDSIWVIVDRLTKTARFIPVKTNYSSAKLAELYMTRIVCLHGIPKRIISDRGTQFTSHFWEKVHEALGSYLAFSTAYHPQTDGQTERTNQVLEDMLRACALDFSKDWERCLPYAEFSYNNSFQASLKMSPNEALFGRRCRTPLIWSETGERAVFGPDIIQEAEEKVRLIRDRLKVAQSRQKSYADTRRRDLEFKEGDYVYLKVSPMRGTKRFKVKGKLAPRYVGPFQIIARRGEVAYQLQLPENIADVHPVFHVSQLKKCLRVPEEQAPLEEIHISNDLTYPEHPIRILDEAEKRTRSKVWRMYKVQWSNHTEDEATWESEEFLRTEYPHLFYNWLGGIGNK

SEQ ID NO: 159427 - protein, 78 aa, Oryza sativa
  unsure (1)..(78): unsure at all Xaa locations
  Clone ID: PAT_MRT4530_58804C.1.pep
VVREACVWTLKALKAIFVVYLNRYSVILEDVDVSTSAVDFLWNRIKSTVLYFFVRAHHRNXSLSVSGTGKLLQCGIAN

SEQ ID NO: 159428 - protein, 986 aa, Oryza sativa
  Clone ID: PAT_MRT4530_58805C.1.pep
MDQDPRLTERAGGIFTMLPLKGMPVVQRFPDVFPEDLPRMPLDRDIEFIVDLIPGTAPISKRPYRMPVNELEELKKQIRELQEKGFVRPSSSPWGAPVLFVKKKDGSMRMSVDYCSLNEVTIKNKYPLPRIDDLFDLLKGAKVFSKIDLRSGYHQLKIRTGDILKTAFSTHYGLYEFTVMSFGLTNAPAYFMNLMNKVFMDYLDKFVVVFIDDILIYSKDEEEHAKHLRLVLEKLRKHKLYAKFSKCEFWLKEVAFLGHIISAGGVVVDPAKVEAITEWKAPKSVTEIRSFLGLAGYYRRFIEGFSKIARPMTQLLKKEKKFVWSEQCQESFEQLKEKLTSAPILVLPDIRKDFVIYCDASRQGLGGVLMQDGKVVAYASRQLRPHEENYPTHDLELAAVVHALKIWRHYLIGNHCDIYTDDKSLKYIFTQSDLNLRQRRWLELIKDYDLEVHYHPGKANVVADALSRKGHCNHLRTEGMASELKEEIAQLNLHIVPHGQINTLDIQPLLRTQIEEAQKDNEEIREVKERLAAGFAKEFSTDEKDVLWYKKRMYVPEQSGLRGLILKEAHESAYSLHPGSTKMYQDLKEGYWWPNMKRDVAEYVALCGVCQKVKAEHQRPAGLLQPLRIPEWKWDEIGMDFIVGLPKTATGYDSIWVIMDRLTKTARFIPVKTNYSSAKLAELYMTRIVCLHGVPKRIISDRGTQFTSHFWEKVHEALGSYLAFSTAYHPQTDGQNKRTNQVLEDMLRACALDFSKDWERCLPYAEFSYKNSFQASLKMSPNEALFGRRCRTPLMWSETGERVVFGPDIVKEAKEKVHLIRDRLKMVQSRQKSYADTRRRNLEFKEGDYVYLKVSSMRITKRFKVKGKLAPRYVGPFQIMARRGEVIYQLQLPKNIADVHPVFHVSQLKKCLRVPEEQAPLEEIHISNDLTYPEQPIRILDEAKKRTRSKVWRMYKVQWSNHTEDEATWESEEFLRTEYPHLFENW

SEQ ID NO: 159429 - protein, 1470 aa, Oryza sativa
  unsure (1)..(1470): unsure at all Xaa locations
  Clone ID: PAT_MRT4530_58806C.1.pep
MASRRRATTSNDETQTPDLTTLAGVMATQTQLLQAIANNQGNRGGSSFGEFMRTKPPTFATAEEPMDAEDWLRVIEKKLTLVRVREADKVIFAANQLEGPAGDWWDTYKEAREEDAGEPNWEEFTTAFRDNFVPAAVMRMKKNEFKRLRQGNTTVQEYLNRFTQLARYATGDLADEEEKIDKFIEGLNDELRGPMIGQDHDSFQSLINKVVRLENDRKVMEHNRKRRLAMNRPPQTAPQRPKGTTSLAWRPTVVTTSRPAASSNFHRPVTIQNRAPAPNQAATGSVRPGSCFNCGEYGHFANKCPHPNKTPIRTGANATAIHGTATPATGRGLFRTPQTNRTATGFGRGQVNHVRAEEAQEDQGVLMGMFSLNSTPVKVLFDSGASHSFISLKASQQHNLTRVKLRQPMLVHSPGGEIAVDTACIDVPIRLXDVVFPSNLMVLIPQTLDVILGMDWLAKHRGVIDCGRREVTLTTPWGSDMRATMDQDPRLTERAGGIFTMLPLKGMPVVQRFPDVFPEDLPGMPPDRDIEFIIDLIPGTAPISKRPYRMPVNELEELKKQIRELQEKGFVRPXSSPWGAPVLFVKKKDGSMRMCVDYRSLNEVTIKNKYPLPRIDDLFDQLKGAKVFSKIDLRSGYHQLKIRTEDIPKTAFSTRYGLYEFTVMSFGLTNAPAYFMNLMNKVFMDYLDKFVVVFIDDILVYSKDEEEHAEHLRLVLQKLRKHKLYAKFSKCEFWLKEVAFLGHVISAGGVAVDPAKVEAVTEWKAPKSVTEIRSFLGLAGYYRRFIEGFSKIARPMTQLLKKEKKFVWSEQCQESFEQLKEKLTSAPILVLPDIRKDFVIYCDASRQGLGGVLMQEGKVVAYASRQLRPYEENYPTHDLELATVVHTLKIWRHYLIGNHCDIYTDHKSLKYIFTQSDLNLRQRRWLELIKDYDLEVHYHPGKANVVADALSRKSHCNHLRMEGMVPELRKEIAQLNLHIVPHGQINTLDIQPLLRAQIEEAQKDNEEVREVKERLAAGRAKEFSTDGKDVLWYKKRIYIPEQGGLRGLILKEAHESAYSLHPGSTKMYQDLKVGYWWPNMKRDVAEYVALCDVCQKVKAEHQRPAGLLQPLRIPEWKWDEIGMDFIVGLPKTATGYDSIWVIVDRLTKTARFIPVKTNYSSAKLAELYMTRIVCLHGIPKKIISDRGTQFTSHFWEKVHEALGSYLAFSTAYHPQTDGQTERTNQVLEDMLRACALDFSKDWERCLPYAEFSYNNSFQASLKMSPNEALFGRRCRTPLMWSETGERAVFGPDIIQEAEEKIRLVRDRLKVAQSRQKSYADTRRRNLEFKEGDYIYLKVSPMRGTKRFKVKGKLAPRYVGPFQIIARRGEVAYQLQLPEYIADVHPVFHVSQLKKCLRVSEEQAPLEEIHISNDLTYPEHPIRILDEAERRTRSKVWRMYKVQWSNHTEDEATWEGEEFLRTEYPHLFGNW

SEQ ID NO: 159430 - protein, 1569 aa, Oryza sativa
  unsure (1)..(1569): unsure at all Xaa locations
  Clone ID: PAT_MRT4530_58807C.1.pep
MQDAAREAFLRLSSIHRAELASTEFAHHPFREESNSVCTVQDTPCCYNPIVTRLSRWAEAVDDFYEEALLEINDQQRRVGELETEVTDLTVQQLQLEEEHQAWGTGLQYGDSDPGRLRDRGDQHRAXEIEPDITDPSEDETPVPRITFIGGPCTLSTAHKNTRPPGKKPKPDPEATTSEPWGLSSHQNNSLNGIKPXELVRKLXYLLNRPTQMASRRRASTSNEETXTPDLTTLAGVMATQTQLLQAIANNQGNRGGSSFGEFVRTKPPTFATADEPMEAEDWLRIIEKKLTLVRVREADKVIFAVNQLEGPAGDXWDTYKEAREEDAGEPTWEEFTAAFCENFVPAAVMRMKNEFRRLRQGNTTVQEYLNRFTQLARYAIGDLADEEEKIDKFIEGLNDELHGPMIGQDHESFQSLINKVVRLENDQRTVEHNRKRRLAMNRPPQGVPQRLKGAPSSGWKPPIVATNRPAAPSNFNRPIAIQNHTPTPTLAALGAKKNVDCFNCGEYGHYANNCPHPRKTPVRTGANAMTVRGTTTPAARRGLFKTPQTNRTATGFGRGQASQKHNLTLVGLRKPMIVHSPGGEITGCGVSLQPYGFDTPDPGCHIGYGLVNKEQREDLPGMPPDRDIEFIIDLIPGTAPISKRPYRMPVNELEELKKQIRELQEKGFVRPSSSPWGAPVLFVKKKDGSMRMCVDYRSLNEVTIKNKYPLPWIDDLFYQLKGAKVFSKFDLRSGYHQLKIKTGDISKTAFSTCYRLYEFTVMSFGLTNAPACFMNLMNKVFMDYLDKFVVVFIDDILIYSKDEEEHAEHLRLVLEKLRKHKLYAKFSKCEFWLKEVAFLGHVISAGGVAVDPAKVEAVTEXKAPKSVTEIRTFLGLAGYYRRFIEGFSKIARPMTQLLKKEKKFVWSGQCQESFEQLKEKLTLAPILVLPDIRKNFVIYYDASRQGLGGVLMQDGKVVAYASRQLRPHEENYPTHDLELAVVVHALKIWRHYLIGNHCDIYTDHKSLKYIFTQSDLNLRQRRWLELIKDYDLEVHYHPGKANVVADALSRKSHCNHLRTEGMAPELKEEMAQLNLHIVPHGQINTLDVQPLLRTQIEEAQKDNEEIREVKERLAAGRAKEFSTDEKGVLWYKKRIYVPEQGGLRGLILKEAHESAYSLHPGSTKMYQDLKEGYWWPNMKXDVAEYVALCDVCQKVKAEHQRPAGLLQPLRIPEWKWDEIGMDFIVGLPKTATGYDSIWVIVDRLTKTARFIPVKTNYSSAKLAELYMTRIVCLHGVPKRIISDRGTQFTSHFWEKVHEALGSYLAFSTAYHPQIDGQTERTNQLLEDMLRACALDFSKDWEICLPYAEFSYNNSFQASLKMPPNEALFGRRCRTPLMWSETGERAVFGPDIINEAEEKVRLIRDRLKVAQSRQKSYADTRRRNLEFKEGDYVXLKVSPMRGTKRFKVKGKLAPRYVGPFQITARRGEVAYQLQLPENIADVHPVFHVSQLKKCLLVPEEQAPLEEIHISNDLTYPEHPIRILDEAEKRTRSKVWRVYKVQWSNHTEDEATWESEEFLRTEYPHLFENW

SEQ ID NO: 159431 - protein, 117 aa, Oryza sativa
  unsure (1)..(117): unsure at all Xaa locations
  Clone ID: PAT_MRT4530_58808C.1.pep
AICITAQDIMKPRXAFNTAKAVTDPDEYESLTLGSLPPTFQGMKVYVTEEQELIMEPSFKWAANPNITVAVKAYGLKATIHIVDLQVFASPRITLKPLVPTFPCFAKILVSLMEKPH

SEQ ID NO: 159432 - protein, 907 aa, Oryza sativa
  Clone ID: PAT_MRT4530_58809C.1.pep
MPLDRDIEFTIDLIPGTTPISKRPYRMPVNEFEELKKQIRELQEKGFVRPSSSPWGAPVLFVKKKDGSMRMCVDYRSLNEVTIKNKYPLPRIDDLFDQLKGAKVFSKIDLRSGYHQLKIRIGDIPKTAFSTRYGLYEFTVMSFGLTNAPAYFMNLMNKVFMDYLGKFVVVFIDDILIYSKDEEEHAEHLRLVLEKLRKHKIYAKFSKCEFWLKEVAFLGHVISAGGVALDPAKVEAVTEWKAPKSVTEIRSFLGLAGYYRRFIEGFSKIARPMTQLLQKEKKFVWSEQCQESFEQLKEKLTSAPILVLPNNRKDFVIYCDASRQGLGGVLMQDGKVVAYASRQLRPHEENYPTHDLELAAVVHALKIWRHYLIGNHCDIYTDHKSLKYIFSQSDLNLRQRRWLELIKDYDLEVHYHPGKANVVADALSHKSHCNHLRMEGMAPELKEEIAQLNLHIVPRGQINTLDIQPLLRTQIEEAQKDNEEIQEVKERLAAGFAKEFLTDEKDVLWYKKRIYVPEQGGLRGLILKEAHESAYSLHPGSTKMYQDLKEGYWWPNMKRDVAEYVALCDVCQKAKAEHQRPAGLLQPLRIPEWKWDEIGMDFIVGLPKTATGYDSIWVIVDRLTKTARFIPVKTNYSGAKLAELYMTRIVCLHDGQTERTNQVLEDMLRACALDFSKDWEKCLPYVEFSYNNSFQASLKMSPNEALFGRRCRTPLMWSETGERTVFGPDIIKEAEEKVRLIRDRLKVTQSQQKSYTNTRRRNLEFKEGDYAYLKVSPMRGTKRFKVKGKLAPRYVGPFQITARRGEVAYQLQLPENIADVHPVFHVSQLKKCLRVPEEQAPLEEIHIGNDLTYPEHLVRILDEVEKRTRTKVWHMYKVQWSNHTEDEATWESEEFLKTEYPHLFEDR

SEQ ID NO: 159433 - protein, 123 aa, Oryza sativa
  Clone ID: PAT_MRT4530_5880C.1.pep
WYCILLIVCGGAVILIKALEDGTDMDEEDAEGRRALHFACGYGELKCAEILLEAGAAVNALDKNKNTPLHYAAGYGRKECVDLLLKHGAAVTPQNLDGKTPIEVAKLNNQDEVLKVLEMDAFL

SEQ ID NO: 159434 - protein, 66 aa, Oryza sativa
  unsure (1)..(66): unsure at all Xaa locations
  Clone ID: PAT_MRT4530_58810C.1.pep
SDLDAARWPNSHWRXAGERQPRVSLWEIEPLTTFPMYPSPFPLRLKRPWPTGLPVGGKDDDLTSSL

SEQ ID NO: 159435 - protein, 1430 aa, Oryza sativa
  unsure (1)..(1430): unsure at all Xaa locations
  Clone ID: PAT_MRT4530_58811C.1.pep
MASRRRATTSNDETQTPDLTTLAGVMTTQTQLLQAIANNQGNRGGSSFGEFMRTKPPTFATAEEPMDAEDWLRIIEKKLTLVQVREADKVIFAANQLEGPTGDWWDTYKEAREEDAGEPNWEEFTTAFRDNFVPAAVMRMKKNEFRRLRQGNTTVQEYLNRFTQLARYATRDLADEEEKIDKFIEGLNDELRGPMIGQDHDSFQSLINKVVRLENDRKVVEHNRKRRLAMNRSPQTAPQRPKGTTPSAWRPTVVTTSRPAASSNFHKPVTIQNRAPAPNQAATGSVRPGSCFNCGEYGHFANKCPHPNKTPIRTGANATANHGTATPAAGRGLFRTPQTNRTATGFGRGQVKHVRAEEAQEDQGVLMGMFSLNSTPVKVLFDSGASHSFISLKASQQHNLIRVKLRQPMLVHSPGGEIAVDTACIDVPIRLRDVVFPSNLMVLIPQTLDVILGMDWLAKHRGVIDCRRREVTLTTPWGSDMRATMDQDPRLTEHAGGIFTMLPLKGMPVVQRFPDVFPEDLPGMPPDRDIEFIIDLIPGTAPISKRPYRMPVNELEEIKKQIRELQEKGFVRPSSSPWGAPVLFVKKKDGSMRMCVDYRSLNEVTIKNKYPLPRIDDLFDQLKGAKVFSKIDLRSGYHQLKIRTEDIPKTAFSTRYGLYEFTVMSFGLTNAPAYFMNLMNKVFMDYLDKFVVVFIDDILIYSKDEEEHTEHLRLVLQRLRKHKLYAKFSKCEFWLKEVAFLGHVISAGGVAVDPAKVEAVTEWKAPKSVTEIRSFLGLAGYYRRFIEGFSKIARPMTQLLKKEKKFVWSEQCQESFEQLKEKLTSAPILVLPDIRKDFVIYCDASRQGLGGIWRHYLIGNHCDIYTDHKSLKYIFTQSDLNLRQRRWLELIKDYDLEVHYHPGKANVVADALSRKSHCNHLRMEGMVPELREEIAQLNLHIVPHGQINTLDIQPLLRTQIEEAQKDNEEIREVKERLAAGRAKEFSTDEKDVLWYKKRIYVPEQGGLRGLILKEAHESAYSLHPGSTKMYQDLKEGYWWPNMKRDVAEYVALCDVCQKVKAEHQRPAGLLQPLRIPEWKWDEIGMDFIVGLPKIATGYDSIWVIVDRLTKTARFIPVKTNYSSAKLAELYMTRIVCLHGVPMKIISDRGTQFTSHFWEKVHEALGSYLAFSTAYHPQTDGQTERTNQVLEDMLRACALDFSKDWERCLPYAEFSYNNSFQASLKMSLNESLFGRRCRTPLMWSETGERAVLGPDIIQEAEEKVRLIRDRLKVAQSRQKSYADTRRRDLEFKEGDYVYLKVSPMRGTKMFKVKXLAPRYVGPFPIIARQGEVAYHVQLQKNIADVHPVFLCXLKKVLQVPEDQAPLEKIHIPXDLTFPNHPVRIWDEPKKRTRTKVWRMSKVHWSILPEDEPTWESKKFLETDYPHLSEIQ

SEQ ID NO: 159436 - protein, 78 aa, Oryza sativa
  Clone ID: PAT_MRT4530_58812C.1.pep
LFVLFFSQIKKGWLVKGGFYYGALPLGFFFSLGWDPGGVVFPVFLARVCPPFFFKNIKFPKPSWDKWGVRGLGNLLLF

SEQ ID NO: 159437 - protein, 75 aa, Oryza sativa
  Clone ID: PAT_MRT4530_58813C.1.pep
MSYQGPPPGTAAYPPPGTGYPPPAYGAPPPVAADYGGYQQQQPPPPPQDSQSRGDGFLKGCCAALCCCCLLDMCF

SEQ ID NO: 159438 - protein, 1430 aa, Oryza sativa
  Clone ID: PAT_MRT4530_58814C.1.pep
MASRRRATTSNDETQTPDLTTLAGVMATQTQLLQAIANNQGNRGGSSFGEFMRTKPPTFATAEEPMDAEDWLRIIEKKLTLVRVREANKVIFAANQLEGPAGDWWDTYKEAREEDAGEPNWEEFTTAFRDNFVPAAVMRMKKNEFRRLRKGNTTVQEYLNRFTQLARYATRDLADEEEKIDKFIEGLNDELRGPMIGQDHDSFQSLINKVVRLENDRKVVEHNRKRRLAMNRSPQTAPQRPKGTTSSAWRPTVVTTSRPAASSNFHRSVTIQNRAPAPNQAATGSVRTGSCFNCGEYEHFANKCPHPNKTPIRTGANATAIHGTATPAAGRGLFRTPQTNRTATGFGRGQVNHVRAEEAQEDQGVLMGMFSLNSTPVKVLFDSGASHSFISLKASQQHNLTRVKLRQPMLVHSPGVEIAVDTACIDVPIRLRDVVFLYNLMVLIPQTLDVILGMDWLAKHRGIIDCRHREVTLTTPWGSDMRATMDQDPRLTERAGGIFTMLPLKGMPVVQRFPDVFPEDLPGMPPDRDIEFIIDLIPGTASISKRPYQMPVNELEELKKQIRELQEKGFVRPSSSPWGAPVLFVKKKDGSMRMCVDYRSLNEVTIKNKYPLPRIDDLFDQLNGAKVFSKIDLRSGYHQLKIRTGDIPKTAFSTCYGLYEFTVMSFGLTNAPAYFMNLMNKVFMDYLDKFVVVFIDDILIYSKDEEEHAEHLRLVLEKLRKHKLYAKFSKCEFWLKEVAFLGHVISAGGVAVDPAKVEAVTEWKAPKSVTEIRSFLGLAGYYRRFIEGFSKIARPMTQLLKKEKKFVWSEQCQESFEQLKEKLTSAPILVLPDIRKDFVIYCDASRQGLGGRHYLIGNHCDIYTDHKSLKYIFTQSDLNLRQRRWLELIKDYDLEVHYHPGKANVVAEALSRKSHCNHLRMEGMVPELREEIAQLNLHIVPRGRINTLDIQPLLRTQIEEAQKDNEEVREVKERLAAGRAKEFSTDEKDVLWYKKRIYVPEQGGLRGLILKEAHESAYSLHPGSTKMYQDLKEGYWWPNMKRDVVEYVALCDVCQKVKAEHQRPAGLLQPLRIPEWKWDEIGMDFIVGLPKTATGYDSIWVIVDRLTKTARFIPVKTNYSSAKLAELYMTRIVCLHGVPKKIISDRGTQFTSHFWEKVHEALGSYLAVSTAYHPQTDGQTERTNQVLEDMLRACALDFSKDWERCLPYAEFSYNNSFQASLKMSTNEALFGRQCRTPLMWSETGERAVFGPDIIQEAEEKVRLIRDRLKVAQSRQKSYADTRRRNLEFKEGDYVYLKVSPMRETKRFKVKGKLAPRYVGPFQIIAKRGEVAYQLQLPENIADVHPVFHVSQLKKCLRVPEEQAPLEEIHISNDLTYPEHPIRILDEAEKRTRSKVWRMYKVQWSNHTEDEATWESEEFLRTEYPHIFENW

SEQ ID NO: 159439 - protein, 64 aa, Oryza sativa
  Clone ID: PAT_MRT4530_58815C.1.pep
LRKKPHTKREDQNIDPFFIRIIVSVLASKASVSVDVIFFAVVLLSAAAACSTCASDEKMASRMM

SEQ ID NO: 159440 - protein, 1643 aa, Oryza sativa
  Clone ID: PAT_MRT4530_58816C.1.pep
MASRRRASISNEETQTPDLTTLAGVMATQTQLLQAIANNQGNRGRSSFGEFMRTKPPTFTTADEPMEAEDWLRIIEKKLTLVRVREADKVIFAVNQLEGPAGDRWDTYKEAREEDAGEPTWEEFTAAFQENFVPAAVMRMKKNEFRRMRQGNTTVQEYLNRFTQLARYAIGDLADEEEKIDKFIEGLNDELRGPMIGQDHESFQSLINKVVRLENDQRTVEHNHKRRLAMNRPPQGVPQRLKGATSSGWKPPIVAPNRPAAPSNFNRPVVIQNRTPTPTLAAPGAKKNVDCFNCGEYGHYANNCPHPRKTPVRTGANAMTVRGTTTPAAGRGLFKTPQTNRTATGFGRGQVNHVRAEEAQEDQGVLMGMFSINSTPVKVLFDSGASHSFISRKASQKHNLTLVGLRKPMIVHSPGGEITVSHACIDVPIRLRDVVFPSNLLVLIPQTLDVILGMDWLTKNRGVIDCRRRKVTLTTPWRSDMRATMDQDPRLIERAGGIFTMLPLKGMPIVQRFPDVFPEDLPGMPPDRDIEFIIDLIPGTAPISKRPYRMPVNELEELKKQIRELQEKGFNKYPLPRIDDLFDQLKGAKVFSKIDLRSGYHQLKIRTGDVPKTAFSTRYGLYEFTVMSFGLTNTPAYFMNLMNKVFMDYLDKFVVVFIDDILIYSKDEEEHVEHLRLVLEKLRKHKLYAKFSKCEFWLKEVAFLGHVISAGGVVVDPAKVEAVTEWKAPKSVTEIRSFLGLAGYYRRFIEGFSKITRPMTQLLKKEKKFVWSEQCQESFEQLKEKLTSAPILDWGGVLMQEGKDVAYASRQLRPHEENYPTHDLELAVVVHELKIWRHYLIGNHCDIYTDYKSLKYIFTQSDLNLRQRRWLELIKDYDLEVHYHPGKANIVADALSRKSHCNHLRMEGITPELKEEIAQLNLHLVPYGQINTLDIQPLLRTQIEEAQKDNGEIQEVKERIAAGCAKEFSIDEKETLWYKKRIYVPEQGGLRGLILREAHESAYSLHPGSTKMYQDLKEGYWWPNMKRDVAEYVALCDVCQRVKAEHQRPAGLLQPLRIPECKWDEIGMDFIVGLHKTATGYDSIWVIVDRLTKTARFIPVKTNYSGAKLAELYMTRIVCLHGVPKRIISDRGTQFTSHFWEKVHEALGSYLAFSTAYHPQTDGQTERTNQVLEDMLRACALDFSKDWEKCLPYAEFSYNNSFQASLKMSPNEALFGRRCRTPLMWSETGERTVFGPDIIQEAEEKVRLIRDRLKVAQSRQKSYADTRRRDLEFKEGDYVYLKVSPMRGTKMFKVKGKLAPRYVGPFQIIARRGEVAYQLQLPENIADVHPVFHVSQLKKCLRVPEEQAPLEEIHISNDLTYPEHPVRILDEVEKRTRAKVWHMYKVQLSNHTEDKATWESEEFLKTEYPHLFEDRPNPPPTLPRAWPPRAPRCRSIASSPAPPSRRRPSPRVIAVAVAVALSRAPCRRCRAVAVGRPIAARPSRRRLAPRAPRAARPSRRRLAPRTLPRRSPVIVASPSPSRRAPRRAARPSPSPPATPRTACRVAMRPSAPPPRPYKTRPLPFSTPHPSFPFSPFSSFSMGRRRCAPRRRLHAPRRRLEATAPRQVWYRALPPWAAAAEAGDEASEDPYAYYQEGDADDGAQ

SEQ ID NO: 159441 - protein, 396 aa, Oryza sativa
  Clone ID: PAT_MRT4530_58817C.1.pep
RRRRCARPSTSSPPARPSRSPSPGATSTPTSPRSSRVQQVADGETMEAKSEEQNEAKVTSMEHDIEEGDEKASREQETWAADRSKLLLGPKIASGSNSRIHRGMYGEQPVAVKIMHAPVGDDDDDVQVRREMEAQFDAEVSLLSRLRHPNVVRLVGVCREPEVYWIITELMRRGTLSAYLHGREPYSLPPETIVRLALDVARGMEYLHARGVVHRDLKPENLMLDGGGRVKVADLGTSCLEATCRGDKCSSKAGTFRWMAPEMIHDKRCNRKVDVYSFGLVLWELTTCLVPFQNLSPVQVAYSVCDRDARPPLSPSCPPAINSLIKRCWSTEPARRPEFKQIVSVLESYDRCLRQGLPMTAGLQLTPKKEAVSPPQGRMPSLPPAHVELIHKPDDC

SEQ ID NO: 159442 - protein, 1470 aa, Oryza sativa
  unsure (1)..(1470): unsure at all Xaa locations
  Clone ID: PAT_MRT4530_58818C.1.pep
MASQRRATTSNDETQTPDLTTLAGVMATQTQLLQAIANNQGNRGGSSFGEFMRTKPPTFAIAEEPMDAEDWLRIIEKKLTLVRVREADKVIFAANQLEGPAGDWWDTYKEAREEDAGEPNWEEFTTAFRDNFMPAAVMRMKKNEFRRLRQGNTTVQEYLNRFTQLARYATRDLANEEEKIDKFIEGLNDELRGPMIGQDHDSFQSLINKVVRLENDRKVVEHNRKRRLAMNRPPQTAPQRPKGATSSAWRPTVVTTSRPATSSNFHRPVTIQNRAPAPNQAATGSVRPGSCFNCGEYGHFANKCPHPNKTPIRTGANATAIHGTATPAAGRGLFRTPQTNRTATGFGRGQVNHVRAEEAQEDQGVLMGMFSLNFTPVKVLFDSGASHSFISLKASQQHNLTRVKLRQPMLVHSPGGEIAVDTACIDVPIRLRDVVFPSNLMVLIPQTLDVILGMDWLAKHRGVIDCRRREVTLITPWGSDMRATMDQNPRLTERAGGIFTMLPLKGMPVVQRFPDVFPEDLPGMPPDRDIEFIIDLIPATAPISKRPYRMPVNELKELKKQIRELQEKGFVRPSSSPWGAPVLFVKKKDGSMRMCVDYRSLKEVTIKNKYPLPRIDDLFDQLKGAKVFSKINLRSGYHQLKIRTEDIPKTAFSTRYGLYEFTVMSFGLTNAPAYFMNLMNKVFMDYLDKFVVVFIDDILIYSKDEEEHAEHLRLVLQKLRKHKLYAKFSKCEFRLKEVAFLGHVISASGVAVDPAKVEAVTEWKAPKSVTEIRSFLGLAGYYRTFIEGFSKIARPMTQLLKKEKKFVWSEQCQESFEQLKEKLTSAPILVLPDIRKDFVIYCDASRQGLGGVLMQDGKVVAYASRQLRPHEENYPTHDLELAAVVHALKIXRHYLIGNHCDIYTDHKSLKYIFTQSDLNLRQRRWLELIKDYDLEVHYHPGKANVVADALSRKSHCNHLRMEGMVPEHREEIAQLNLHIVPRGQINTLDIQPLLRTQIEEAQKDNEEIREVKERLAAGRAKEFSTDEKDVLWYKKRIYVPEQGGLRGLILKEAHESAYSLHPGSTKMYQDLKEGYWWPNMKRDVAEYVALCDVCQKVKAEHQRPAGLLQPLRIPEWKWDEIGMDFIVGLPKTATGYDSIWVIVDRLTKTARFIPVKTNYSSAKLAELYMTRIVCLHGISKRIISDRDTQFTSHFWEKVHEALGSYLAFSTAYHPXTDGQTERTNQVLEDMLRACALDFSKDWERCLPYDEFSYNNSFQASLKMSPNEALFGRXCCTPLMWSETGERAVFGLDIIQEAEEKVRLIRDRLKVAQSRQKSYADTRRRNLEFKEGDYVYLKVSPMRGTKRFKVKGKLAPRYVGPFQIIARRGEVAYQLQLPENIADVHPVFHVSQLKKCLRVPEEQAPLEEIHISNDLTYPEHPIRILDEAEKRTRSKVWRMYKVQWSNHTEDEATWESEEFLRTEYPHLFEDW

SEQ ID NO: 159443 - protein, 111 aa, Oryza sativa
  Clone ID: PAT_MRT4530_58819C.1.pep
HASAHACRRIVEKYFKMERVPAVHLAVVLLAFCCLIHASSSAETPLPPALKVMQRFEATPVSSRGDDQAAAVIAGEPEAGEVNGRMELELTDYPGSGANDRHSPWGQERRN

SEQ ID NO: 159444 - protein, 180 aa, Oryza sativa
  Clone ID: PAT_MRT4530_5881C.1.pep
MDTKEKRVNIETDESYTVTFHCAICMEYKPMNSRFHCEGCPHYFCFKCVLDHISYRVLGGDAHVCCPEPGCTIGELTYEKWYKHVRGDVRKAWESANLRDSAMLKRCGSCGKFLEGVTLDGMEGGRDDCLDPLHTLAIAKGLLYANIGWFPLASILLSCIFSPRASARPEPSARLPSQGW

SEQ ID NO: 159445 - protein, 168 aa, Oryza sativa
  Clone ID: PAT_MRT4530_58820C.1.pep
MAPELKEEIAQLNLHIVPRGQINTLDIHPLLRTQIEEAQKDNEVIQEVKERMAAGRAKEFSIDEKETLWYKKRIYVPKQGGLRGLILKEAQESAYSLHPGSTKMYQDLKEGYWWPNMKRDIAEYVALCDVCQKVKAEHQRPAEQRGGGDARLDAARAAEAERGRARSI

SEQ ID NO: 159446 - protein, 146 aa, Oryza sativa
  unsure (1)..(146): unsure at all Xaa locations
  Clone ID: PAT_MRT4530_58821C.1.pep
MVCLRVYERSQHKLRKSIMESTDGKSPTRIELGRHCIVPSLMSPSPTWRLADLRYKRDPPGGPKAENLTANTSTTAYEAGAYRSQVAGXSSRINSTTISSILVPAYPNTLYIRSTGIPHLCYRSLCVSQHSLRILMYDAVDFLTNV

SEQ ID NO: 159447 - protein, 104 aa, Oryza sativa
  unsure (1)..(104): unsure at all Xaa locations
  Clone ID: PAT_MRT4530_58822C.1.pep
MAVLPSSIAADCTMARSLSKRWRQAGSKQDGRTPAARRASDCFLLGWEPPFGCLGVVAGIGAAGTNVYGAXSAQVRRKKKDETRVQRVTAVLNQPVKNWKNGWR

SEQ ID NO: 159448 - protein, 226 aa, Oryza sativa
  Clone ID: PAT_MRT4530_58823C.1.pep
MAAAAAAATAARILELDPAHPRAGRVIDDIVRTEKRIFPKHESLARTFHDELKRRNTTLIYSAAAATIPTTGDAAAASDEEEEVVGYAMYTCATSLCASITKLAVKESRRRQGHGEALLMAAVEGCRRRRVQRVSLHVDPARAAAVALYRKAGFQVDATVVGYYAPRRDAYRMKCKWSNMFFANCDREMLRDGILFERDAISKDRLIPVSAIVADCEYCLKVSQFS

SEQ ID NO: 159449 - protein, 400 aa, Oryza sativa
  Clone ID: PAT_MRT4530_58824C.1.pep
MGCNCLVGKGGNTRPAATTSARPSSSRCAHCGAGLAVPRPGPGGAAAVTTVRCALCHRMTCVDRRGGRDLGGGGGGGALEASSSSWAPAEASFLRRDAPSGYPFVPGRKRALLVGVSYKGSSYELEGTVNDVDCMRRLLGESFGFPADSILVLTEELGEGDPSRSPTRANLLAAMRWLVEGCDAGDSLVFHFSGHGVQKLDVNGDEVDGYNEALCPVDFERSGKILDDEINETIVRPLVAGAKLHAIVDTCHSGTILDLPFLCRLSRTGYWQWENHCRRPELAKGTSGGLAISISGCSDDQKSADSSGFSSEQAAAAAAIGAMTYSFIRAVESEPGTTYGRLLAAMRATIREGQQGSSVRRLLPGRLGSFVRKMIPSGGVQEPQLCASEVFDIYRKPFLL

SEQ ID NO: 159450 - protein, 155 aa, Oryza sativa
  Clone ID: PAT_MRT4530_58825C.1.pep
MAGSSATLSPSVKFISGDTELLVMVVQALRKEPLTVYGDGKQTRSFQYVSDLVEGLMKLMEGEHVGPFNLGNPGEFTMLELAKVVQDTIDPNARIEFRPNTADDPHKRKPDISRAKELLGWEPKIPLHKGLPLMVQDFRDRIFGDHKPHSVAGDN

SEQ ID NO: 159451 - protein, 65 aa, Oryza sativa
  unsure (1)..(65): unsure at all Xaa locations
  Clone ID: PAT_MRT4530_58826C.1.pep
FTIALSNSVRSLRPSPRPRLVGVFEGXVGLAPPPPHRARRAGPAAGVPSPSPRPXXLSTSPAAWV

SEQ ID NO: 159452 - protein, 68 aa, Oryza sativa
  Clone ID: PAT_MRT4530_58827C.1.pep
LTRGLQPPPPPPPSAAELLPRAPSPSWRTSKTRRRSPPEHSQRRGRAGSTDTGATISKLMAKHSAKSC

SEQ ID NO: 159453 - protein, 59 aa, Oryza sativa
  unsure (1)..(59): unsure at all Xaa locations
  Clone ID: PAT_MRT4530_58828C.1.pep
DWIXAASCREPDSXCXXRXPCRLHVTGLNRATATVFNFHRXRNEKREKPDLTRLARLLY

SEQ ID NO: 159454 - protein, 61 aa, Oryza sativa
  unsure (1)..(61): unsure at all Xaa locations
  Clone ID: PAT_MRT4530_58829C.1.pep
GISIIQRFAPRIDMRTTXCTLPKLMLSFYLSHTDRHTTKSENNLCISVICLQFAKDHQEGA

SEQ ID NO: 159455 - protein, 297 aa, Oryza sativa
  Clone ID: PAT_MRT4530_5882C.1.pep
MGAPKQRWTAEEEAALKAGVAKHGTGKWRTILRDPEFTALLRLRSNVDLKDKWRNLSVTAGGYGSRERARVALKGGKRGPKALAEPMDADEKNPDIDDNAIIDAQPLAVVVEPMQLESTPEKEKSVARLDDLILEAIKKLKEPSGSNRTTISSYIEEQYWPPEDFQRLLSTKLKALVATGKLIKVNQKYRIAPSSNSSGGKSIKVYSTGEMNIENNNVRQLSKPQVDAELDKMKSMSKEEAASFAARAVAEAEAAIAEAEEAARAAEAAEAEADAAKAFLDAVVTTMQNRNHASAVY

SEQ ID NO: 159456 - protein, 91 aa, Oryza sativa
  Clone ID: PAT_MRT4530_58830C.1.pep
ATMWSMLRIVFSVTMCYSFGSGSADGSESARELDIESYIGSDCRVRYGCSGAKTILDLAVGQVEGKTVEREVSLMWSGDGSVIGGVHGSAR

SEQ ID NO: 159457 - protein, 761 aa, Oryza sativa
  unsure (1)..(761): unsure at all Xaa locations
  Clone ID: PAT_MRT4530_58831C.1.pep
MPRNRLQQAILDVHVVGGEKMIIVLVYVDGKIQHGAKGAEYNIPPKITFPAVEVKTFEEVKKEIFQALGSSQDNVDCETQPTIDDDNAAEDTYAGEETDLGEDKFGLDDDNEHDFDAALDNSSDDESPRTTSCSFCQCISFYACIWTKSYKAFSDISVLWKTTADESFFGRKNQFSNPLAQGKTFDSKERLQIAIGEFHICKNSEIKYSTSSQSKLVAECTDNSYMWRLYAIPTKIGSGWMIRKCPYAHTCRAPADRFDHAQLSSSMIANVICDALKDDLELSRKNARSLVQQRYRNAKPSYSKLWRGREKAIAQLFGSWEGSYGLLIPFLQAIKAKNPGTKYVLLSKPTTQEGRRAFKSVAWAFGPCIDAIPYLRPVISVDACFLLGRYKGRLLIACGYDANNQLLPLAFAIVEKEDSANWGWFMRWLRTIKWLFKQPHIGWNESAGECVHRLCSQHVAENLWKFCRNEIVLKTFKWTVKKKKPRKFDEGMSSIANICPEAITYVKKVGKHLQEDKDEQEKPEKVFQCKDGGYCWGMMTSNGSESLNNVFKFSRRLPVAAIVEETFSKCLEWFVERRRNVVNLLNNGKQWSQRVDKLLVKRGNKAGHMNVISYGDEVGIYEVKVDXELVPMQQGNHEVYTLRDFNCDCQKPNLTGVPCAHVLAVCKHRNLNENQLINPFYSSQALAITWAGQFLPYGNQIEWPPFTGPIIVPDPRQINLGRRQHNRIPMYMDEIEAGSFFLEVVKPVLDSSSPVITIHKL

SEQ ID NO: 159458 - protein, 80 aa, Oryza sativa
  Clone ID: PAT_MRT4530_58832C.1.pep
MDISRANEGYTGCGSVVEMSWHRAGLKRLCNNENANFLGRDSRKGMCGAMVPGHTTMEPPTREERVISHRPECLPGLVSG

SEQ ID NO: 159459 - protein, 473 aa, Oryza sativa
  Clone ID: PAT_MRT4530_58833C.1.pep
MIIVLVYVDGRIQYGAKGAEYNIPPKITFPAVEATTFEEVKKEIFQALGYTEDHCAMNIQARFDIGNPGPQYFQLIPIYEDRGWRMIFEKTCGHSERDGSGVLLEPEDTYVGEDRFGLDDDNEQDCDGALDNSLDDEPPEPRVVHSVNAFPFMRASGQNPIKAFSDISILRETTADESFFGRKNQFSNPLAEGKSFDSKKHLQIAIDKDEQEKLEKVFQCKDGGYRWGIMTSNGSESLNNVFKFSRRLPVAAIVEETFSKCLEWFVERRRNAVNLLNNGKQWSQRVDKLLVKRGNKAGHMNVISYGDEVGIYEVKVDNELVPMQQGNHEVYTWRDFKYKVVLQPNNTPSCDCQKPNLTGVPCAHVLAVCKHRNLNENQLINPFYSSQALASTWAIQFLPYGNQIEWPPFTGPIIVPDPRQINLGRRQHNRIPMYMDEMQGRRLGHQAHRSTRDSDNLGATSSRTHVDGPSGTI

SEQ ID NO: 159460 - protein, 500 aa, Oryza sativa
  unsure (1)..(500): unsure at all Xaa locations
  Clone ID: PAT_MRT4530_58834C.1.pep
VRSLVQQRYRNVKPSYSKLWRGREKAIAQLFGSWEGSYGLLIPFLQAIKAKNLGTKYVLLSKPMTQEGRRAFKSVAWAFGPCIDVIPXLRPVISVDACFLSGRYKDRLLIACGYDANNQLLSLAFAIVEKEDSANXGWFMRWLRSEVIGYGKFMCVISDRHKAMKWLFKQPHIGWNESAGECVHRLCSQHVAENLWKFCRNEIMLKTFKWTVKKKKPRKFDEGMXSIANICPEAITYIKNVGKYLHEDKDEQEKLEKVFQCKDGGYRWGIMTSNGSESLNNVFKFSRRLPVAAIVEETFSKCLEWFVERRRNAVNLLNNGKQWSQRVDKLLVKRGNKAGHMNVISYGDEVGIYEVKVDNELVPMQQGNHEVYTWRDFKYKVVLQPNNTPSCDCQKPNLTGVPCAHVLAVCKHRNLNENQLINPFYSSQALASTWAIQFLPYGNQIEWPPFTGPIIVPDPRQINLGRRQHNRIPMYMDEMQGRRLGHQAQKPVLDSPSPVI

SEQ ID NO: 159461 - protein, 49 aa, Oryza sativa
  Clone ID: PAT_MRT4530_58835C.1.pep
DPHVIHICDGYFPIVTYLPWVLGLILCFVKCRGVGVAEDMGICATSSVW

SEQ ID NO: 159462 - protein, 332 aa, Oryza sativa
  unsure (1)..(332): unsure at all Xaa locations
  Clone ID: PAT_MRT4530_58836C.1.pep
MDGSGVSLEPEDTYVGEDRFGLDDDNEQDCDGRYKGRLLIACGYDANNQLLPLAFAIVEKEDSANWGPTLDGMRASVNEDKDEQEKPEKVFQCKDGGYRWGIMTSNGSESLNNVFKFSRRLPVAAIVEETFSKCLEWFVERRRNAVNLLNNGKQWSQRVDKLLVKQGNKAGHMNVISYGDEVGIYEVKVDNELVLSQXANHEVYTRRDFKYKMTALGRSRGRQQLQPPGKTASYGWKRPMAATSQNFKSRFRRWRGLPVVVDGDGGLPASRWTTAAAAAAPCLSGAAPFASWVVPTLSRKEEQTPEVEADGGGGRLPVSIWMAAKAPCPSIG

SEQ ID NO: 159463 - protein, 136 aa, Oryza sativa
  unsure (1)..(136): unsure at all Xaa locations
  Clone ID: PAT_MRT4530_58837C.1.pep
EKPVMFPVSLGNVVPPKVRRPLMLXSQPKGATQKEVLVVEHIQXDGVCKFNVFVNAREPKKIEPCGREMVGSFVCLRHHNTQNNVTRRGVQTTMRVALNDILKDLGAEQDESVTVTLVPRHGKVRIGGVRIEYNGM

SEQ ID NO: 159464 - protein, 122 aa, Oryza sativa
  Clone ID: PAT_MRT4530_58838C.1.pep
VSGAPHHPTMRTVEGREWRGRVDFGGTLSVGHRPLAVASQLGVTTRARDGELRQSSMLRARRPPAWAATRQGRSTTWDSEEGRQHGGWGWQRTGAVENGGDGVPRCTKCLTRLLHGAAWADG

SEQ ID NO: 159465 - protein, 112 aa, Oryza sativa
  Clone ID: PAT_MRT4530_58839C.1.pep
LLPLRAAGHRRGGRHRQAPRCIKASAGNKMRYVQIHGPPDEQVVTIWTPNDPDVIYFFQGQLMLGGAEGGSGVRALRDDPLTKTPSVGTLPFFVRVWEVPPSLPRTVPPVQH

SEQ ID NO: 159466 - protein, 65 aa, Oryza sativa
  unsure (1)..(65): unsure at all Xaa locations
  Clone ID: PAT_MRT4530_5883C.1.pep
HGGQPSTPPGTEAXVGAQPPVQSDVTGDRPVTDRSFSLGPLPLAPPATWQLGRGVGAKRREGPRG

SEQ ID NO: 159467 - protein, 87 aa, Oryza sativa
  Clone ID: PAT_MRT4530_58840C.1.pep
KELQQLNSADGKELTSEEEQHAHFLQNHFPFLKHCSYLHKLKLISFSSHNKQTKRNSTIPTRICWAMQHDNVPDFADGSEKPAHDPQ

SEQ ID NO: 159468 - protein, 159 aa, Oryza sativa
  Clone ID: PAT_MRT4530_58841C.1.pep
MSCRAGTPGSAPPPVQPWPLLPLRAAGHRRGGRHRQAPRCIKASAGNKMRYVQIHGPPDEQVVTIWTLHDRVHARWRREYEVPFVETWDGKRYKRSEMERKGQLMLGGAEGGSGVRALRDDPLTKTPSVGTLPFFVRVWEVPPSLPRTVPPVQHGAFLL

SEQ ID NO: 159469 - protein, 125 aa, Oryza sativa
  unsure (1)..(125): unsure at all Xaa locations
  Clone ID: PAT_MRT4530_58842C.1.pep
MAESFLMVPKTTTAILSANGAMNKEDPVNWNAAFSDMRYKEVDQEXSMAMQLREPNDKIXCNRFRVLHLVHRYYEEVADGVNTELLKADCPKVYSSLEGIHMHLGHGGDIYGVTTGCCGTYHRRT

SEQ ID NO: 159470 - protein, 127 aa, Oryza sativa
  Clone ID: PAT_MRT4530_58843C.1.pep
MPGCLAAPSWGLLPVPTWVLAISVAVGWLPMPPGLANCARLGLAGRASLELATRAGRVLASCDGLASRAAGPCPPAGLRAGHLGAPASATPFRGAPGAAVPPGGMASVPPEDSSSSPPGGHHPRCRP

SEQ ID NO: 159471 - protein, 1691 aa, Oryza sativa
  Clone ID: PAT_MRT4530_58844C.1.pep
MERTTEDDERPTVPLLEPKPASNEEEEEVGSVRRRVVEENKKLWVVAGPSICARFSSFGVTVISQAFIGHIGGTELAAYALVSTVLMRFSNGILLGMASALETLCGQSYGAKQYHMLGVYLQRSWLVLFCCAVILLPVYIFTTPLLIALGQDPEISAVAGTISLWYIPVMFSYIWAFMLQMYLQAQSKNMIVTYLAFLNLGIHLFLSWLLTVKFQLGLAGVMGSMVISFWIPVFGQLAFVFFGGCPLTWTGFSSSAFTDLGAIMKLSLSSGVMLCLELWYNTILVLLTGYMKNAEVALDALSICLAYIFTESKAVADEVADLAPLLAFSILLNSVQPVLSGVAIGSGWQSVVAYVNVTSYYLIGIPLGAILGYVLGFQAKGIWIGMLLGTLVQTLVLLFITLRTNWKKQLGSSLETPIQVDSETEGTDTEPEIEPDITDPSEDETPVPRITFLGGPRTLSTARKSTRPPGKRPKLDPEMASRRWASTSNEETETPDLTTLAGVMATQTQLLQAIANNQGNRCGSSFGEFMRTKPPTFATAEEPMDAEDWLRIIEKKLTLVRVREADKVIFAANQLEGPAGDSWDTYKGAREEDAGEPNWEEFTTAFRDNFVPAAVMLMKKNEFRRLRQGNTTVQEYLNRFTQLARYATRDLADEEETIDKFIEGLNDELRGPMIGQDHDSFQSLINKAATGPVRPGSCFNCGEYGHFANKCPHPNKTPIRTGANATAIHGTTTPAVRRGLFRTPQTNRTATGFGRGQVNHVRAEEAQEDQGVLMGMFSLNSTPVKVLFDSGASYLFISLKASQQHNLTRVKLRQPMLVHSPGGEIAVDTACIDVPIRLRDVVFPSNLMVLIPQTLDVILAMDWLAKHRGVIDCRRREVTLTTPWGSDMRATMDQDPRLTERVGGIFTMLPLKGMPVVQRFPDVFPEDLPGMPPNRDIEFIIDLIPGTAPISKRPYRMPVNELEELKKQIRELQEKGFVRPSSSPWGAPVLFVKKKDGSMRMCVDYRSLNEVTIKNKYPLPRIDDLFDQLKGAKMFSKIDLRSGYHQLKIRTEDIPKTALSTRYGLYEFTVMSFGLTNAPAYFMNLMNKVFMDYLDKFVVVFIDDILIYSKDEEEHAEHLRLVLQKLRKHKLYAKFSKCEFWLKEVAFLGHVISAGGVAVDPAKVEAVMEWKAPKSVTEIRSFLGLVGYYRRFIEGFSKIARPMTQLLKKEKKFVWSEQCQESFEQLKEKLTSAPILVLPDIRKDFVIYCDASRQGLGGVLMQDGKVVAYASRQLRPHEENYPTHDLELAAVVHALNIWRHYLIGNHCDIYTDHKNLKYIFTQSDLNLRQRRWLELIKDYDLEIWRHYLIGNHCDIYTDHKSLKYIFIQSDLNLRQRRWLELIKDYDLEVHYHPGKANVVADALSRKSHCNHLEMEGMAPELKEELAQLNLHIVPRGQVNTLDIQPLLRTQIEEAQKDNEEIREVKERLAAGFAKEFSTDEKDVLWYKKRIYVPKQGGLRGLILKEAHESAYSLHPGSTKMYQDLKEVYWWPNMKRDVAEYVALCDVCQKTATGYDSIWVIVDRLTKTARFIPVKTNYSSAKLAELYMTRIVCLHGVPKRIISDRGTQFTSHFWEKVHEALGSYLAFSTAYHPQTDGQTERTNQVLEDMLRACALDFSKDWERCLPYAEFSYNNSFQASLKMSPNEALFGRR

SEQ ID NO: 159472 - protein, 71 aa, Oryza sativa
  Clone ID: PAT_MRT4530_58845C.1.pep
MDAAADRTWAARCRVRELHRLQLVTRGHCPRVQTAETIFRHTRIGKRQAKLWIRVSDTMEIIYGGDGGPTS

SEQ ID NO: 159473 - protein, 112 aa, Oryza sativa
  Clone ID: PAT_MRT4530_58846C.1.pep
MEWSRSAESRGVQGKPHRKIIRDDKKKRIQAGIASDDEGDDEVVVFSEKEEAAMAKIFDKEDEIIVQMYHNSLRIKGSNTFIIYEMDQLEAGQPASILIEHIGDDLVSPDYG

SEQ ID NO: 159474 - protein, 207 aa, Oryza sativa
  Clone ID: PAT_MRT4530_58847C.1.pep
MAGVSAASAAGKIGSFLSKRPYAPPSWASHLSPAPSQTFSLGHFPTPIHKWNLPNLPNGTEVWIKRDDISGMQLSGNKVRKLEFLMADAVAQGADCVITVGGIQSNHCRATAVAAKYINLDCYLILRTSKLLVDKDPGLVGNLLVERLVGAHIDLVSKEEYGKIGSVALADLLKKKLLEEGRKPYVIPVGGSNSLGTWYCFLFNPNY

SEQ ID NO: 159475 - protein, 1621 aa, Oryza sativa
  Clone ID: PAT_MRT4530_58848C.1.pep
MMRCLRYSRFPTYRVRQCGFGWEAQADMRPRVPSEADYSFSTRHHHDSPETAMQDAAREAFLRLSSIHRAELASTEFAHHPFREESNSVCTAQDTPCCYNPIVTRLSRWAEAVDDFYEEALLEINDQQRRVGELETEVTDLTVQQLQLEEEHQAWGTRFEFGDSDPGRLRDRGDRHRAEIEPDITDPSEDETPVPRITFLGRPHTLSTARKSTRPPGKKPKPDPEATTSEPWGLSSHQNNSLNGIKPQELVRKLGYLLNRPTQMASRRRASTNNEETQTPDLTTLAGVMATQTQLLQAIANDQGNRGGSSFGEFMRTKPPTFAMADKPMEAEDWLRIIEKKLTLVRVREADKVIFVVNQLEGPAGDWWDTYKEAREEDAGEPTWEEFTAAFHENFVPAAVMRMKKNEFRRLQQGNTTVQEYLNRFTQLARYAIGDLANEEEKIDKFIEGLNDELRGPMIGQDHESFRSLINKVVRLENDQRTVGHNRKRRLAMNCPPQGVPQRHKGATSSGWKPPIVATNRPAAPRNFNRPVAIQNRTPTPTLAAPGAKKNVDCFNCGEYGHYANNCPHPRKTPVHTGANAMTVSGTTAPAAGRGLFKTPQTNRTATRFGRGQASQKHNLTLVGLRKPMIVHSPGGEITGCGVSLQPYGFDTPDRGCHIGYGLVNKEQREDLPGMPPDRDIEFIIDLIPGTAPISKRPYRMPVNELEELKKQIRELQEKGFVRPSSSPWGAPVLFVKKKDGSMRMCVDYRSLNEVTIKNKYPLPWIDDLFDQLKGAKVFSKIDLRSGYHQLKIRTGDIPKTAFSTRYGLYEFTVMSFGLTNAPAYFMNLMNKVFMDYLDKFVVVFIDDILIYSKDEDEHAEHLRLVLEKLRKHKLYAKFSKCEFWLKEVAFLGHVISAGGVAMDPAKVEAVTEWKAPKFVTEIRSFIGLAGYYRRFIEGFSKIARPMTQLLKKEKKFVWLEQCQESFEQLKEKLTSSPILVLPDIWKDFVIYCDASRQGLGGVLMQDGKVVAYASRQLRPHEENYPTHDLELAAVVHALNIWRHYLIGNHCDIYTDHKSLKYIFTQSDLNLRQRRWLELIKDYDLEVHYHPGKANVVADALSRKSHCNHLRTEGMAPELKEEIAQLNLHMVPHGQINNLDIQPLLRTQIEEAQKDNEEIREVKERLVAGFAKEFSTDEKDVLWYKKRIYVPEQGGLRGLILKEAHKSAYSLHPGSTKMYQDLKEGYWWPNMKRDVAEYVALCDVCQKVKAEHQRPAGLLQPLRIPEWKWDEIGMDFIVGLPKTATGYDSIWVIVDRLTKTARFIPVKTNYNSAKLTELYMTRIVCLHGVPKRIISDRGTQFTSYFWEKVHEALGSYLAFSTAYHPQTDGQTERTNQVLEDMLRVCAMDFSKDWERCLPYAEFSYNNSFQASLKMSPNEALFGRRCRTPLMWTETGERAIFGLDIIKEAEEKVRLIRDHLKVAQSRQKSYADTRRRNLELKEGDYVYLKVSPMRGTKRFKVKGKLAPRYVRPFQITARRGEVAYQLQLPENIADVHPVFHVSQLKKCLRVPEEQATLEEIHISNDLTYPEHLVRILDEAKKKTRTKVWRMYKVQWSNHTEDEATWESEEFLKTEYPHLFENL

SEQ ID NO: 159476 - protein, 144 aa, Oryza sativa
  unsure (1)..(144): unsure at all Xaa locations
  Clone ID: PAT_MRT4530_58849C.1.pep
MDVAHAATAWSNGVVARPQQPHMGKAIALSRLREPIASTRATVLGCTCARRVXHAWRPGRAHPPAACSVGHSRRRPPTMAIYPLHHSXAWASIAPTVPPHPCCPKRTNSSSPTCTSSTSTWHEREKGVLLLVCGSVASILGMSD

SEQ ID NO: 159477 - protein, 116 aa, Oryza sativa
  unsure (1)..(116): unsure at all Xaa locations
  Clone ID: PAT_MRT4530_5884C.1.pep
GNGGPGTIHILKLNPDSDAWSVCNTKIVVCDSATQVLKAEVLEANSRVGRXLSRYSTDTKLXATCDATCVGNLTVEYQLEDCASLLTEQEKMIVHGYLSMLQMIXVYLVTDPAEIC

SEQ ID NO: 159478 - protein, 153 aa, Oryza sativa
  Clone ID: PAT_MRT4530_58850C.1.pep
HGFRWSSRAVRSFAMAELEARKMRYPTTGTEGLLMGILVEGTSDAAKLLRANGITLLKVREEAANVLGKSEMFYFSPMHPPLTEAAQRALDWAINEKLKSGEDGEVTANHLLLGIWSDKESAGHKVLASLGFDDERANSLAKTAGEEAAMSPR

SEQ ID NO: 159479 - protein, 1590 aa, Oryza sativa
  Clone ID: PAT_MRT4530_58851C.1.pep
MERWQIRIHHHWEMGVPRSEGYVIELHRLMRRLRYPRFPIYRVRWCGPVWEARVEVHTRVPLESDYSFPTRHRHDLPETAMQDAAREAFLRLSSIQRAELASTEFAHHPFQEESNSVCTVQDTPCCYNPIVTRLSRWAEAVDDFYEEALLEIDDQQRRVGELETEVTNLTVQQLQLEEEHQAWGSEIDSLKAQLQTEGTDTEPEIEPDITDPSEDETPVHRITFVGGPHTLSTARKSTRPPGKKPKPDPEMASRHRASTSNEETQVPDLTTLAGVMATQTQLLQAIANNQGNRGGSSFGEFMRTKPPTFATADEPMGAEDWLRNIKKKLTLVRMREADKVIFAVNQLEGPAGDWWDTYKEAREEDAGEPTWEEFTAAFRENFVPAAVMRMKKNEFRRLRQGNTTVQEYLNRFTQLARYAIGDLADEEEKIDKLENDQRTVEHNRKRRLAMNRPPQGVPQRLKGATSSGRKPTIVATNRPAAPSNFNRPVAVQNRTPTPTLAAPGVKKNVDCFNCGEYGHYANTCPHPRKTPVRTGANAMTVRGTATPAVGRGLFKTPQTNRTATGFGRGQVNHVRAEEAQEDKGVLMGMFSINSSPVKVLFDSGASHSFISLEASQKHNLTLVGLRKPMIVHSPGGEITVSHACINIPIRLRDVVFPSNLIVVIPQTLDVILGMDWLTKNRGVIDCRRREVTLTTPWGSDIRATMDQDPRLAERAGGIFTMLPMKGMPIVQRLPDVFPEDLPGMPPDRDIEFIIDLIPGTAPISKRPYRMPVNELEELKKQIRELQEKGFVCPSSSPWGAPVLFVKKKDGSMRMCVNYRSLNEVTIKNKYPLPRIDDLFDQLKGAKVFSKIDLRSGYHQLKIRTGDIPKTAFSTRYGLYEFTEEHAEHLRLVLEKLRKHKLYAKFSKCEFWLKEVAFLGHVISAGGVAVDPAKVEAVTEWKAPKSVTEIRSFLGLAGYYRRFIEGFSKIARPMTQLLKKEKEFVWSEQCKESFEQLKEKLTSAPILVLPDNRKDFVIYCDASRQGLGGVLMQDGKVVAYASRQLRPHEENYPTHDLELAAVVHALKIWRHYLIGNHCDIYTDHKSLKYIFTQSDLNLRQRRWLELIKDYDLEVHYHPGKANVVADALSRKSHCNHLRMEEMAPELKEEIAQLNLHIVLRGRINTLDIRPLLRTQIEEAQRENREIQEVKERLAAGFAKEFSTDEKDVLWYKKRIFVLEQGGLRGLILKEAHESAYSLHPGSTEMYQDLKEGYWWPNMKRDVAEYVALYDVCQKVKAEHQRPAGLLQPLRIPEWKWDEIGMDFIVGLPKTATGYDSIWVIVDRLTKTARFIPVKTNYSGAKLAELYMTRIVCLHGVPKRIISDRGTQFTSHFWEKVHEALRSYLAFSTAYHPQTDGQTKRTNQTVERAVFGPDIIKEAEEKVSLIRDHLKVAQSRQKSHADTRRRNLEFKEGDYVCLKVSPMRGTKRFKVKEKLAPRYVGPFQVMARRGEVAYQLQLPENIADVHPVFRVSQLKKCLRVPEEQAPLEEIHISNDLTYPEHPVRILDEAEKRTRSKVWRMYKVQWSNHTEDEATWESEEFLRTEYLHLFENW

SEQ ID NO: 159480 - protein, 1400 aa, Oryza sativa
  Clone ID: PAT_MRT4530_58852C.1.pep
MASRRRATTSNDETQTPDLNTLAGIMATQTQLLQAIASNQGNRGGSSFGEFMRTKPPTFATAEEPMDAEDWLRIIEKKLTLVRVREADKVIFAANQLEGPAGDWWDTYKEAREEDAGEPNWEEFTTAFRDNFVPAAVMRMKKNEFRRLRQGNTTVQEYLNRFTQLARYATRDLADEEEKIDKFIEGLNDELRGPMIGQDHDSFQSLINKVVRLENDRKVVEHNRKRRLAMNRPPQTAPQRPKGTTPSAWRPTVVTTSRPAASSNFHRPVTIQNRAPTPNQAATGSVRPGSCFNCGEYGHFANKCPHPNKTPIRTGANATAIHGTATPAAGRGLFRTPQTNRTATGFGRGVKLRQPMLIHSPGGEIAVDTACIDVPIRLRDVVFPSNLMVLIPQTLDVILGMDWLAKHRGVIDCRRREVTLTTPWGSDMRATMDQDPRLTERAGGIFTMLPLKGMPVVQRFPDVFPEDLPGMPPDRDIEFIIDLIPGTAPISKRPYRMPVNELEELKKQIRELQEKGFVRPSSSPWGAPVLFVKKKDGSMRMCVDYRSLNEVTIKNKYPLPRIDDLFDQLKGAKVFSKIDLRSGYHQLKIRTEDIPKTAFSTRYGLYEFTVMSFGLTNAPAYFMNLMSKVFMDYLDKFVVVFIDDILIYSKDEEEHAEHLRLVLQKLRKHKLYAKFSKCEFWLKEVAFLGHVISAGGVAVDPAKVEAVTEWKASKSVTEIQSFLGLAGYYRRFIEGFSKIARPMTQLFKKEKKFVWSEQCQESFEQLKEKLTSAPILVLPDIRKDFVIYCDASRQGLGGVLMQDGKVVAYASRQLRPHEENYPTHDLELAAVVHALKIWRHYLIGNHCDIYTDHKSLKYIFTQSDLNLRQRRWLELIKDYDLEVHYHPGKANVVADALSRKSHCNHLRMEGMVPELREEIAQLNLYIVPHGQINTLDIQPLLRTQIEEAQKDNEEVREVKERLAAGRAKEFSTDEKDVLWYKKRIYVPKQGGLRGLILKEAHESAYSLHPGSTKMYQDLKEGYWWPNMKRDVAEYVALCDVCQKVKAEHQRPAGLLQPLRIPEWKWDEIGMDFIVGLPKTATGYDSIWVIVDRLTKTARFIPVKTNYSSAKLAELYMTRIVCLHGIPKRIISDRGTQFTSHFWEKVHEALGSYLAFSTAYHPQTDGQTERTNQVLEDMLRACALDFSKDWERCLPYAEFSYNNSFQASLKMSPTEALFGRRCRTPLMWSETGERAVFGPDIIQEAEEKVRLIRDRLKVAQSRQKSYADTRRRNLEFKEGDYVYLKVSPMRGTKRFKVKGKLAPRYVGPFQITARRGEVAYQLQLPENIADVHPIFHVSQLKKCLRVPEEQAPLEEIHISNDLTYPEHPIRILDEAEKRTRSKVWRMYKVQWSNHTEVFISL

SEQ ID NO: 159481 - protein, 258 aa, Oryza sativa
  unsure (1)..(258): unsure at all Xaa locations
  Clone ID: PAT_MRT4530_58853C.1.pep
YGLPPAPPPYPDPXPEPLPEPPPWPPPPPPPPPXPYPDPXPDPFPPPCPPPPPPPPPCPXPPPEAPPPXPYPEPYPDPXPDPFPPPCPPPPPPPPPXPDPAPPPCPPPPPPPPPFPXPPPDAPPPWPXRSXPDPLPPPCPPPPPPPPPCPXPPPEAPPPCPXPSPYPDPPPPPSPPPPPPPSPPPPPPPSPAPAAPPPRRPGGAPPSTAPPPPPRARPVLPPPPLAALAPERADDERRRRHGRQKPAHARTPPAIDRS

SEQ ID NO: 159482 - protein, 1470 aa, Oryza sativa
  Clone ID: PAT_MRT4530_58854C.1.pep
MASRRRATTGNDETQTPDLNTLAGIMATQTQLLQAIASNQGNRRGSSFGEFMRTKPPTFATAEEPMDAEDWLRIIEKKLTLVRVREADKVIFAANQLEGPAGDWWDTYKEAREEDAGEPNWEEFTTAFCDNFVPAAVMRMKKNEFRRLRQGNTTVQEYLNRFTQLARYATGDLADEEEKIDKFIEGLNDELRGPMIGQDHDSFQSLINKVVRLENDRKVVEHNRKRRLAMSRPPQTAPQRPKGTTPSAWRPTVVTTSRPAASSNFHRPVTIQNRAPTPNQAATGSVRPGSCFNCGEYGHFANKCPHPNKTPIRTGANATAIHGTATPAAGRGLFRTPQTNRTATGFGRGQVNHVRAEEAQEDQGVLMGMFSLNSTPVKVLFDSGASHSFISLKASQQHNLTRVKLRQPMLVHSPGGEIAVDTACIDVPIRLRDVVFPSNLMVLIPQTLDVILGMDWLAKHRGVIDCRRREVTLTTPWGSDMRATMDQDPRLTERAGGIFTMLPLKGMPVVQRFPDVFPEDLPGMPPDRDIEFIIDLIPGTAPISKRPYRMPVNELEELKKQIRELQEKGFVRPSSSPWGAPVLFVKKKDGSMRMCVDYRSLNEVTIKNKYPLPRIDDLFDQLKGAKVFSKIDLRSGYHQLKIRTEDIPKTAFSTRYGLYEFTVMSFGLTNAPAYFMNLMNKVFMEYLDKFVVVFIDDILIYSKDEEEHAEHLRLVLQKLRKHKLYAKFSKCEFWLKEVAFLGHVISAGGVAVDPAKVEAVTEWKAPKSVTEIRSFLGLAGYYRRFIEGFSKIARPITQLLKKEKKFAWSEQCQESFEQLKEKLTSAPILVLPDIRKDFVIYCDASRQGLGGVLMQEGKVVAYASRQLRPHEENYPTHDLELAAVVHALKIWRHYLIGNHCDIYTDHKSLKYIFTQSDLNLRQRRWLELIKDYDLEVHYHPGKANVVADALSRKSHCNHLRTEGMVPELREEMAQLNLHIVPRGQINTLDIQPLLRTQIEEAQKDNEEVREVKERLAVGRAKEFSTDEKDVLWYKKRIYVPEQGGLRGLILKEAHESAYSLHPGSTKMYQDLKEGYWWPNMKRDVAEYVALCDVCQKVKAEHQRPAGLLQPLRIPEWKWDEIGMDFIVGLPKTATGYDSIWVIVDRLTKTARFIPVKTNYSSAKLAELYMTRIVCLHGIPKRIISDRGTQFTSHFWEKVHEALGSYLAFSTAYHPQTDGQTERTNQVLEDMLRACALDFSKDWERCLPYAEFSYNNSFQASLKMSPNEALFGRRCRTPLIWSETGERAVFGPDIIQEAEEKVRLIRDRLKVAQSRQKSYADTRRRDLEFKEGDYVYLKVSPMRGTKRFKVKGKLAPRYVGPFQIIARRGEVAYQLQLPENIADVHLVFHVSQLKKCLRVSEEQAPLEEIHISNDLTYPEHPIRILDEAEKRTRSKVWRMYKVQWSNHTEDEATWESEEFLRTEYPHLFYNW

SEQ ID NO: 159483 - protein, 164 aa, Oryza sativa
  unsure (1)..(164): unsure at all Xaa locations
  Clone ID: PAT_MRT4530_58855C.1.pep
MSFSSSRFLQLSSPLLPPLFPLLSPRRHAAPGRGGVAHGGRARREAARDSWARRKAXARRLGKEGGGARRPGEEGGLRPGCDHQGRQRXQPDEEGGGVRWPGKEGGGAXGRARRGSVVLLGIAGIAADGVELLRSSAISSSASSSSGHLRASAACHRSVSNLLL

SEQ ID NO: 159484 - protein, 119 aa, Oryza sativa
  unsure (1)..(119): unsure at all Xaa locations
  Clone ID: PAT_MRT4530_58856C.1.pep
KLSDPPLPSLPLPPPSXSPSPHPPPSKSEPXPCRPPSDRPPPNPTLSSPSMDPHPSPSPPPASSTLPPXMPQSSSLLPLPSPKPPDLPLLSSLSPDPHLPAFPPLASPTLPPTALPTTA

SEQ ID NO: 159485 - protein, 782 aa, Oryza sativa
  Clone ID: PAT_MRT4530_58857C.1.pep
KNPKDSRVIIFAHYRECVKEILCSLRNIDGELVRPAAFIGQSSTGDQLKGQTQKMQQAILHKFRSGEYNILVATSIGEEGLDIMEVDLVVCFDANISALRMIQRMGRTGRKNEGRVDILFLEMKGYLSKQGNTKTMKKLLRDRRRFEYHDSPRMVPHVYNPEVKFVELSIEKYIPCSKKSKVDVNVASPIFNKMSEDDGRLIARYFGACKEDFWKPSLVTFPSFQVSPCDIYRVPHSFRTTNMLIDAMQQLQDLSFSRTKCASPLEGPADVPVVMDEAPEGLFGADGSKEWRLVAMDVSGYVSITFVPALPRTSEFHKDARNVNWHQKVQNKTTSVKLAADISRPTIEFHCLAGFAYSSKPILTDEFGLVPHSPEYTERYGRTDDRHVHGTPPPKTLQKVDFSKSHSEGAKANELKSRNGPLNFEGKGQFFSEISKLAVSPGENALDQTQANKEERMHPSNVKIHSPAAHTPMANLLCDSFSDDWQLRSGGDTPGSVREAPKYKRLCKYADKIKRVSSMSLDDRYDIAAGGNHNFATKRNKRRAKMCLDTFIDDEAEVSEDADVSADEGNDHSEDNYEDSFINDQATPTGQFTQSVHHGENSGDMMAFYRRSLLTQTPIVLPSRYQDVPDNSASRSGSASASCSSENLHNSMETPQGIHQPHHTIGPSPLGDQQSFVARASSIKEQGETSLAHCESSTTLDCRKRKLSFQQAASIPVINLEPELAPAPAPQPSSHITTGVNNNFVWDDDDFFESLDLDAIEAQATELWRLKKEQSTQRSFGN

SEQ ID NO: 159486 - protein, 1583 aa, Oryza sativa
  Clone ID: PAT_MRT4530_58858C.1.pep
MVIVKLYTIAKVKGRSIYFGAVICCSVDPVQSEFATAGEDADPSSGAAAAAASAAGRRVYVRRSVTGGARQECRTAATGQSNRFVTMVNTQKRVYMGFTVTRTSRSLVAPSSPTPAETLPLSVLDRVAGRHLVQSLHVFEAGGGNGGGGGEPAREALGKALVEYHPFAGRFVEVVGADGGGEVAVVGVGRWLAGCNDVDFDWEAAVQEIDRRCALASSSAASESAPPPEPSAAAGTRQLTLDRFVDSFTRRRQMAAMERGPPVPASPPAAAPILPSGARGPPVPGSPPAAAPVPPSGGWGRPSDRAGEGCSRRADEDVVPKPCGVALDHEAARTWIYPTNVQVREYQKKFVEKALFTNTLVALPTGLGKTFIAAVVMYNYFRWFPEGKIVFTAPTRPLVTQQIEACHNTVGIPQEWTIDLKGNLSPSKRSCFWKSKRVFFVTPQVLQNDIQSGICMVNQLVCLVIDEAHRASRNYAYCVVVRELEAARVPLRILALTATPGSKQPAIQNVINNLRISELVHCDESDPEVSRYIQRRTVEPLEVCMDSDKFIPVGDEAEQVNDKLLDVIRPHLVKLRSARVIDHRDASNWSPHQLRMLKDKFDQAPPPNIPLADKKEIGISFQALTLLYGIMKMLLSYGIKAAHQSIEAKYKEGSWKVLTRNNTFLEVKKTMENFLSQGILSPKVRTLVEVLLDHFRKNPKDSRVIIFAHYRECVKEILCSLRNIDGELVRPAAFIGQSSTGDQLKGQTQKMQQAILHKFRSGEYNILVATSIGEEGLDIMEVDLVVCFDANISALRMIQRMGRTGRKNEGRVDILFLEMKGYLSKQGNTKTMKKLLRDRRRFEYHDSPRMVPHVYNPEVKFVELSIEKYIPCSKKSKVDVNVASPIFNKMSEDDGRLIARYFGACKEDFWKPSLVTFPSFQVSPCDIYRVPHSFRTTNMLIDAMQQLQDLSFSRTKCASPLEGPADVPVVMDEAPEGLFGADGSKEVIPQEYCGLEVLSGEAAWSKNVLVPSLPIKKYPVHSFFSGDYVAMDVSGYVSITFVPALPRTSEFHKDARNVNWHQKVQNKTTSVKLAADISRPTIEFDCLAGFAYSSKPILTDEFGLVPHSPEYTERYGRTDDRHVHGTPPPKTLVSPKEICHKPCNSKPVSPGLSGQEDMELSPRLTYYIEEGIVPESPMLEVGHKHLETDSAANADFVQQKVDFSKSHSEGAKANELKSRNGPLNFEGKGQFFSEISKLAVSPGENALDQTQANKEERMHPSNVKIHSPAAHTPMANLLCDSFSDDWQLRSGGDTPGSVREAPKYKRLCKYADKIKRVSSMSLDDRYDIAAGGNHNFATKRNKRRAKMCLDTFIDDEAEVSEDADVSADEGNDHSEDNYEDSFINDQATPTGQFTQSVHHGENSGDMMAFYRRSLLTQTPIVLPSRYQDVPDNSASRSGSASASCSSENLHNSMETPQGIHQPHHTIGPSPLGDQQSFVARASSIKEQGETSLAHCESSTTLDCRKRKLSFQQAASIPVINLEPELAPAPAPQPSSHITTGVNNNFVWDDDDFFESLDLDAIEAQATELWRLKKEQSTQRSFGN

SEQ ID NO: 159487 - protein, 212 aa, Oryza sativa
  unsure (1)..(212): unsure at all Xaa locations
  Clone ID: PAT_MRT4530_58859C.1.pep
AAAARARPRAASPARPTGAARPRPDGHRRRPPARRSGARERGGKGEGEXAVLGSPRDNDGDGNGGRAEEDGGAARDDDDGGAPAVGGRNGDADKVDGDAAEPREVAPSREEDRSDGGGEPKRRKAAARFGMPRATVLRRSADDAERRTGSAATRRSGRRGRRVGRRSEAATAAERSSAATAEREEHGASTIPTTRASGERRKRKSGARGTIL

SEQ ID NO: 159488 - protein, 58 aa, Oryza sativa
  Clone ID: PAT_MRT4530_5885C.1.pep
TIIVITFYCALLPFHHSIVMLLQVYHNNYILCSNIACRYYCNNMWVTTEHMSKNYHPP

SEQ ID NO: 159489 - protein, 96 aa, Oryza sativa
  unsure (1)..(96): unsure at all Xaa locations
  Clone ID: PAT_MRT4530_58860C.1.pep
QLLLHHYTSGGSLDISSEDXGITGPTFPGCPETYQQQFQQSGQAQLTESQSQSHKFKDEHQKIHRFRQGDVIALPAGVAHWCYNDGEVPXGAIYVT

SEQ ID NO: 159490 - protein, 119 aa, Oryza sativa
  unsure (1)..(119): unsure at all Xaa locations
  Clone ID: PAT_MRT4530_58861C.1.pep
CPPKKESLFLLDKGGGTIXLELRLSHTSXVKPTLLRVAVERTMTQRAAASNALRHKRFVGEVTIQYNLCNEPWLKYSISIVADKGLKKSLYPSARLKKGEVIYLETHYNRYELVFAGMS

SEQ ID NO: 159491 - protein, 128 aa, Oryza sativa
  Clone ID: PAT_MRT4530_58862C.1.pep
MAKDPHVSISLTGLAMVVLLIFSSSFLQAAQGSDKKMAMKYDVPVKRLVYRPSAMQAAVIGTEAAAYEPFELCMGCRCCASSNASSCVDTRCCYAIDCNIPGKPFGVCAFSPHTCDCGATNCTSQQQP

SEQ ID NO: 159492 - protein, 131 aa, Oryza sativa
  unsure (1)..(131): unsure at all Xaa locations
  Clone ID: PAT_MRT4530_58863C.1.pep
AVAAELGTTRGAAAGGGRLAWCVEAWPAAGGRPGARRRGRRWTRLAWRGEARPAVTGAGTVQGGGAASECGAVYDARRLAGGGXRCSGPICRXRMDGGGALGRXRGLTGGERRVKTQPSLXRASNNDARSV

SEQ ID NO: 159493 - protein, 92 aa, Oryza sativa
  Clone ID: PAT_MRT4530_58864C.1.pep
YNEHVFKFTLNSTIVYAPFNTFFQPQKTTPSSPRKRKNKPAARQGRRKQEEYRLARPLGGAGDDREQKDAAEGPEALGEGPYGARTDDECIG

SEQ ID NO: 159494 - protein, 288 aa, Oryza sativa
  Clone ID: PAT_MRT4530_58865C.1.pep
MTNGYLFREYIGAQFTGVRFSDVPINPNLSFNFILSFAIDYTSPAGGATPAPTNGVFSPYWDTANLSPADVAAVKAAHPNVSVMVGLGGDSVQDTAKVFFSPTSVDSWVANAVASVSGIIDAYGLDGVDVDYEHFNDDGGAGVDTFVECIGRLLTELKARHPNITTSIAPFEDAVVQRYYQPLWRRYAGVIDLVNFQFYGYGDNTDVPTYVMFYDEQAANYPGGKVLASFKTGDVAGLLWPEQGIAGAKELQRQGKLPGLFIWSADSSKVSSYGFEYEIKAQEIIANH

SEQ ID NO: 159495 - protein, 286 aa, Oryza sativa
  Clone ID: PAT_MRT4530_58866C.1.pep
MVNGYLFREYIGAQFTGVRFSDVPVNPGLSFHFILAFAIDYFMATQSSKPAPANGVFAPYWDTANLSPAAVAAAKAAHPNLSVILALGGDTVQNTGVNATFAPTSSVDAWVRNAADSVSGLIDAYGLDGVDVDYEHFAAGVDTFVECIGRLLTELKARHPNIATSIAPFEHPVVQRYYQPLWRRYAGVIDYVNFQFYGYGANTDVATYVMFYDEQAANYPGSKLLASFKTGNVTGLLSPEQGIAGAKELQRQGKLPGLFIWSADSSMVSSYKFEYETKAQEIVANH

SEQ ID NO: 159496 - protein, 113 aa, Oryza sativa
  unsure (1)..(113): unsure at all Xaa locations
  Clone ID: PAT_MRT4530_58867C.1.pep
FGLWAXPDVEXRCXVGGLAXATDNRSLEAAFSTFGEILESKIINDRETGXSRGFGFVXFXXXXAMRDAXXGMNXNXLDXPQHRRLPSSSXXSPXXXXXSRFCGRKPPAAVVGV

SEQ ID NO: 159497 - protein, 299 aa, Oryza sativa
  Clone ID: PAT_MRT4530_58868C.1.pep
MEKKKSNTDNNLEVFLQAATPCLRWRSASMECFQDPSKVWQLDKKKDEVDYFALEDLWEHYAESSAYGLAVPVRLESGNTITQHFVPYLSAIQIYTSTKSLLAFSRGSAGSESDSWSDDSTGDKLSRSWDAAMSDDDDSSHDSSESVSAKQGAGCLNFQYNEWSSPYERVPLADKVAELAQHYPCLTSLSSAQLSPSSWMSVAWYPIYHIPARGNLKGLSTCFLTYHSLSSVFQDNVEEGRSVVGVSPFGLATYRAEGKLWTSSRSSDLFWAASSWLKQLRAYHPDFIFFTSHCRQSAF

SEQ ID NO: 159498 - protein, 134 aa, Oryza sativa
  Clone ID: PAT_MRT4530_58869C.1.pep
MTYLFSFLFTLSLSLRSPLLLCERQGIDVDEGACGGDRWWMAVTAVGRSTGTQSDKNMECSNVQTFNESKPLLHNNQIYNYLPQDYDMTDDDICAQITIETSSSTDVLVKINDIAPKQDQLLPILDENEYLDDN

SEQ ID NO: 159499 - protein, 64 aa, Oryza sativa
  unsure (1)..(64): unsure at all Xaa locations
  Clone ID: PAT_MRT4530_5886C.1.pep
IHKNTGVGYYASQRPEPVYIARVLCASILANLPHTDXELRISPRAPGRTGKGGPAWSPGEEPHA

SEQ ID NO: 159500 - protein, 265 aa, Oryza sativa
  Clone ID: PAT_MRT4530_58870C.1.pep
YAVPEQWKQLFKRRQDVLQEHHVDNDAKDAHEKDLERKRNLLFILAILTATVTYQAGLNPPVLVLSSTNDALEPPARSRRWLQKFFGLADSQKSLASPGQSKNESDKSDPLINEKKEKRHKYLMLLAILAASIAYQAGLNPPGGFWSEDSRDGYKAGNPLLKDIHSRRYMVFYVSNSISFMASIAVIMLLLSKSVRKNKVPLQALFLIMILDLLALMTAYAAGSCRKVRTSIFVFLVVCGVVLYLMIVIILLSGIAKWLKERKGC

SEQ ID NO: 159501 - protein, 1145 aa, Oryza sativa
  Clone ID: PAT_MRT4530_58871C.1.pep
MTEGVSDMQPHRGSESIAEADGGHPQSEIVESNSLPTPESRDDGQMADEAADIESQQDSKMVEIKDQDSGNSSSRSASLNSHEVRIKTDFVFLWRLRKYLLLLAVLAVSVTYNAGLSPPGGFWTDDSPVHHAGDPLLPSKFFQRYEAFFYCNATAFAASLVLIILLLSRGVANQHLWLRAMQVTMILDLFSLMGAYAAGSCRALKSSVYILVLVLSVFFYVGIHILVFIRVVPKWLKEGVQTFMHQTVQKLQRMLKQVLTICHLPKKQRSNQNDKEEIEEARKFILMLSTFAATITYQAGMSPPGGFWAENSHGYRPATFVLRRHNLRRFNIFTCSNATSFVASLVTIILLLSTELSRHGIRTQALFVCVIAELFGLIFAYAAGSCRDVATSLSVIFIIVVVLICALILVMFFQSRTVTIWIDNALRPRFDHFLEMLSWPRENRLSDGNREGPLSSSRQDTDHGNLGDQSTEDVKSAPTNDLESIKDSIPNMANQLHDQKDNLAIATVHSSSADVPSRKGPLPEQVLSEPISALGDRTVSADVPDTEHNIAKCQRDREEQTQELSGHHDSSEADGEVRKSEDGIVSNNDGTKDKGRISGDSEKNPDDVRLKKSRTYLLLLAILAVSLTYQAGINPPGGFWTSNTPSHSAGDPILEDNYHKRYLAFFYFNAIAFLASLVMLIMLLNRKMSNKVIKRRALQTAMITDLLALLGAFVVGSCREKTKSIYISVVIFFVVVAYTFLHVLASKYAVPEQWKQLFKRRQDVLQEHHVDNDAKDAHEKDLERRRNLLFILAILTATVTYQAGLNPPGGIWPDGSGKPGNPVLQDSHPKRYDVFYYSNALSFVSSVAVIILLVNRESCEHGIKSYALRVCLIAGLLGLLIAYSAGSFRKVKSIGYLIIITAAVLICLLIQVLVLSSTNDALEPPARSGRWLQKFFGLADSQKSLASPGQSKNESDKSDPLINEKKEKRHKYLMLLAILAASIAYQAGLNPPGGFWSEDSRDGYKAGNPLLKDIHSRRYMVFYVSNSISFMASIAVIMLLLSKSVRKNKVPLQALFLIMILDLLALMTAYAAGSCRKIRKVKENDCSCVDFLHFSRTLSSSAIPNARGSLRVAKRKGTWDGIDAHNSHQDIAKYCKWSCSQRMLP

SEQ ID NO: 159502 - protein, 144 aa, Oryza sativa
  Clone ID: PAT_MRT4530_58872C.1.pep
RPGFRGFSEGSTPHLQLFLFPSSGVVLPNGSSSSPVRPGGDSGCGAGPSFSGTPPAPRWMRNRRGWGWHFCPAAAPAVIRSTAPPALLLLLLLSSLSCSGFSPLMAVALSRDYSSFEILFSFGWINWSSLSARLQLFLIDLFGS

SEQ ID NO: 159503 - protein, 157 aa, Oryza sativa
  Clone ID: PAT_MRT4530_58873C.1.pep
MAEPKTAIDKELVVLADASSFQAKPFELASEFESPAYVHDCTVYVHLGKRMPGCRPIARLFLWEKLAVAYAYARLVWIGPHVTHMHDLRSRNAQGDRSIELASAPTHRNMNEQYTHDLKIEILCSKMHDVFVRVHMSVTKSRVFDRKRDVSGVFVIL

SEQ ID NO: 159504 - protein, 99 aa, Oryza sativa
  unsure (1)..(99): unsure at all Xaa locations
  Clone ID: PAT_MRT4530_58874C.1.pep
XXLFXGVXXSSPPGQDXGEANSXHDLXDXPDXDXXKXXXFXKXXXNVPRGIRWAXXIRXPWXAXXLXXGXXRVAXDEXXXXPLYQXKXXTRPDPRXGFP

SEQ ID NO: 159505 - protein, 92 aa, Oryza sativa
  Clone ID: PAT_MRT4530_58875C.1.pep
LPVFWRTKLTRKRNMDGGHKLQIVGWWQSVRILYSPHFLDKRGTNFARQMRNKLKGTKLEETWKIQYLHVLLVVSLVNPYRSLYQSVHTHNV

SEQ ID NO: 159506 - protein, 185 aa, Oryza sativa
  unsure (1)..(185): unsure at all Xaa locations
  Clone ID: PAT_MRT4530_58876C.1.pep
WETTTFGRRGIIWWRGRRPAWCREAQPLAAEAGSAREAXRGRRWRRRPRCEEELLVGVARSSAREGWPAGDAGAGVPHGTREDLPSSDSRRPGGVAGAWPVEAWLPACCCCAAALPAPGWRVRGGPDRGPGDGGLRQRHDARPRRRDGETGGGAGRPATAPARRSHVPVPSRRLLPRLLLLGQWA

SEQ ID NO: 159507 - protein, 63 aa, Oryza sativa
  unsure (1)..(63): unsure at all Xaa locations
  Clone ID: PAT_MRT4530_58877C.1.pep
MRDLQLSLNQTQRXRLEAALHELQTXAPTXXVTXADTIPVNDEDNILKGHGTSDQDGEVVATL

SEQ ID NO: 159508 - protein, 64 aa, Oryza sativa
  Clone ID: PAT_MRT4530_58878C.1.pep
NSPLAQAPRSRRDPPAPPMGYPPRCPPVIFRRRAYPYIPPPPPIYIYLPIPPYTWLVWTRSFRF

SEQ ID NO: 159509 - protein, 150 aa, Oryza sativa
  Clone ID: PAT_MRT4530_58879C.1.pep
KWQGVDIAFRVDAGSNQYYLAVLVEDEDGDGDLSASWGAVWKYNSGPAPLQAPMSIRLTSGSGRTLVASNVIPAGWQPGGTYRSILGTWALAPVHVPISQRGPGLRAVAGDNATCAGFREKFKMIYEGNHDRHGGSATAIELEIGEMMPR

SEQ ID NO: 159510 - protein, 32 aa, Oryza sativa
  Clone ID: PAT_MRT4530_5887C.1.pep
LVFKFICGIWSCEGKTDQHLSFPLATFFSFSV

SEQ ID NO: 159511 - protein, 273 aa, Oryza sativa
  Clone ID: PAT_MRT4530_58880C.1.pep
MALAAKLLPSIVAFVALACCVLRSSVASVDHHRKLSGWSIGGATWYGPANGSGTDGGACGYQGDVGQPPFNSMIAAGSPSIYESGKGCGSCYQVKCSGNPSCSGKPVTVVLTDLCPGGACLEEPVHFDLSGTAFGAMAKPGQDDQLRNAGKLPVQYARVPCKWQGVDIAFRVDAGSNQYYLAVLVEDEDGDGDLSAVDLMQSGGSGGGGSWAAMQQSWGAVWKYNSGPAPLQAPMSIRLTSGSGRTLVASNVIPAGWQPGGTYRSIVNFRRED

SEQ ID NO: 159512 - protein, 81 aa, Oryza sativa
  Clone ID: PAT_MRT4530_58881C.1.pep
FFHSMCLVNLALYIFLQYPVLPRNKMGNGEKISAYAYVWYMYKLLLAAQTMKFSIGCQAKCVTFDVMLHLVPSRPSDLGPS

SEQ ID NO: 159513 - protein, 253 aa, Oryza sativa
  Clone ID: PAT_MRT4530_58882C.1.pep
MKDHLMVNVDDLMAPECFETTGAAKNSSGEAAAQAPTTVHTFLAVGESMAPEEEPLLQLVECRICQEEDSIKNLESPCACTGSLKPYEHGYTAPTRPHPDETTIDISGGWTITGTAFDLRDPRILAVAQNHIMEAEYDDYSATNASTAAFCRSAALVLMALLLLRHALTLTDEDDDDTSAMFSLFLLRAAGFLLPFYIMAWAVSILQRRRQRQEAAALAATEVAFILQSGQGTGVHFTIAPDSPTTPQHEPQP

SEQ ID NO: 159514 - protein, 67 aa, Oryza sativa
  Clone ID: PAT_MRT4530_58883C.1.pep
IRGAGIRLKLTLGPRSKLTLVHAEAYTWSTLTLIFTLTLTLTFTLPLLLLLLFCSLCSLYLSLRLST

SEQ ID NO: 159515 - protein, 59 aa, Oryza sativa
  Clone ID: PAT_MRT4530_58884C.1.pep
TQKEALPAIDVLRELSLSNLPCFRLSWNVMGTYLSGSEKKRIRIWRCLSRGVWNEIKEI

SEQ ID NO: 159516 - protein, 463 aa, Oryza sativa
  Clone ID: PAT_MRT4530_58885C.1.pep
MSNHVSTSAITVSHVAMHAQVTGIEERESKHTLLGRVIFASGSWRGRARRRLAGQRVAAPAGPQASNTAAVPSFARTIATAGAASARSAAADHPGAGGLVADRWTLPTAPSAGGSSGAAAVGVVLFWAMPGKGKDVVVVEHHGGRRTASEAAGGGALFQATAVNGVPFRGKVGVLGEPIPVQVKIKSSLFTATTDHPGAGGLVADRWTLPSALSAGGSRGAAAVWVVPFRAMPGSLGGRSRWTASEVPGGLLQAATFVVYRAKSTSAVAGVKDAAKTRFLDRAGAALAGERLVRLLLGPTTSPERMAVVAALKRVHKLLFGDGSVRLMPPQRPLPSSATNRFAEELRAAGVMDVNGKVNQGEALGAAVGKIVEALEQHSAYMMKYHQRAGAKDMVLHTLFFVAQILLMTYSSLSELLEDVTGHKTWESLSIQVQQKLHWAGRPSACEDNFRRRTLASLIRLRK

SEQ ID NO: 159517 - protein, 250 aa, Oryza sativa
  unsure (1)..(250): unsure at all Xaa locations
  Clone ID: PAT_MRT4530_58886C.1.pep
MAPPXMASVPAALRRAATLARWYPAAMFSSGIVPENKPILVRDFVRSALYDPNHGYFSKRSGPVGVLDSSIRFNQLDGRSAYMQYLDKLYKKHDIAWFTPVELFKPWYAYAIAASILRTANLSVPLKIYEIGGGSGTCAKCILDYMMLNAPPKVYNTMKYISVEISSSLAEKQLETVGEVRSHLSKFMXXECRDATDRAGWGRKDPQPCWXVXWLEVLDNLPHDLVYSPDQVSPWMGVWIXKVNGSSQGF

SEQ ID NO: 159518 - protein, 74 aa, Oryza sativa
  unsure (1)..(74): unsure at all Xaa locations
  Clone ID: PAT_MRT4530_58887C.1.pep
YCXWRIXPVLXHIRTYGSXSPLRCXFIRLTIGCEFVIGSIHASKEFQEQVMYLWEDRYMYMSSEFLIDWISLAG

SEQ ID NO: 159519 - protein, 469 aa, Oryza sativa
  Clone ID: PAT_MRT4530_58888C.1.pep
MAPPHMASVPAALRRAATLARWYPAAMFSSGIVPENKPILVRDFVRSALYDPNHGYFSKRSGPVGVLDSSIRFNQLDGNPPFYLLLGSFYCLDRIWMWEFGRSAYMQYLDKLYKKHDIAWFTPVELFKPWYAYAIAASILRTANLSVPLKIYEIGGGSGTCAKCILDYMMLNAPPKVYNTMKYISVEISSSLAEKQLETVGEVRSHLSKFMVECRDATDRAGWGRKDPQPCWVLMLEVLDNLPHDLVYSPDQVSPWMEVWIEKVNGSSQGSEVYKPLQDPLVSRCVEITGINEEKVSVRDKLSLAAKGVVSKVFPKPRRAWLPTGCLKILDTLHQALPSMSLIASDFSYLPDVSIPGDRAPLVSSKKDGRTLDHRNYLEAQGDADIFFPTDFWLLEKIDHDCSGFSKQQKNPGAFKPVKTRRTIILDSAAFMEEFGLPLKTRTKDGYNPLLDDFRNTKFYLSVPTHNKK

SEQ ID NO: 159520 - protein, 68 aa, Oryza sativa
  unsure (1)..(68): unsure at all Xaa locations
  Clone ID: PAT_MRT4530_58889C.1.pep
MEKAAPSATWPSPEGGSGPRCPPTRIYDDPSGRATPHAAXQCTQPVCDRSNDRWDWLPESVLPLWSKL

SEQ ID NO: 159521 - protein, 152 aa, Oryza sativa
  unsure (1)..(152): unsure at all Xaa locations
  Clone ID: PAT_MRT4530_5888C.1.pep
VVVIPNINDTAIALHLWVPTKGWVFWGKITRTGFWDIITCRLPLTNPWDTQKTKRSFSETGVECTDSSGTPQEFLLEIYTRRGRSRXSAKLPGTPPEIPXTLYLFXMYKRYNRISYNSAQSCVYWNESLSSXYRLQMTVMTMGNDQNTLQPS

SEQ ID NO: 159522 - protein, 217 aa, Oryza sativa
  Clone ID: PAT_MRT4530_58890C.1.pep
DAWGVNWQVSRSSSIPPNTRDALYQSLPPTVKSSLRSKVNSFVVNEEVTAAQIKAEMEKTLRWLVPIANNTTKAHHGFGWVGEWANTGSEVNCKPTGQMDLTRIETLYHADKEKTETHILELVAWLHHLISRSKSANGERSPIKSPVRSPTQRGHTITLSPNKASSNSSPLLTQEDQDMLRDVKYRKFIPGISKSQEFETKSRHSKQSRLSKSNSHS

SEQ ID NO: 159523 - protein, 102 aa, Oryza sativa
  unsure (1)..(102): unsure at all Xaa locations
  Clone ID: PAT_MRT4530_58891C.1.pep
SAXTGRGGEGPTTNPARTHRRPPPSAAAAAATATTLRWWATCLELFSRLCTGYLSKGGDRXRXRRARPRHQGRRQGQARVSERACFTVVASSPTLSRTAYFS

SEQ ID NO: 159524 - protein, 164 aa, Oryza sativa
  Clone ID: PAT_MRT4530_58892C.1.pep
MAAAAAAAVEQHGQQEACPNSDGPPPGDLLRRRAGGAAGARQRHPQGHLGKSWAKFRVEYGSNGFVEVEYDVDEFEETQRLQEERRLWRAHVWEKIFADDPPEEGEFAEYVSVYNQETRAFEVRPKELEEGTRTIAVFDKVKMKLACLQVDSRGSPGTELEFAL

SEQ ID NO: 159525 - protein, 96 aa, Oryza sativa
  unsure (1)..(96): unsure at all Xaa locations
  Clone ID: PAT_MRT4530_58893C.1.pep
GKXTXIXDXHRVXHSSRLPTPQPTTGSPQSRWYLARVVGSGRPRGQPQFMQGHTAXXCLVSWSPMGWHSQLFRPGTHTAGHTHIFGLGHCGRRAVS

SEQ ID NO: 159526 - protein, 40 aa, Oryza sativa
  Clone ID: PAT_MRT4530_58894C.1.pep
MKKEKLSSCLLSIEVFNVVSKCNTMKKEKLVAGGAYSLGR

SEQ ID NO: 159527 - protein, 482 aa, Oryza sativa
  Clone ID: PAT_MRT4530_58895C.1.pep
MLQQQYYLLNFLWDMIMIILKHPMHIQTKEQNCIYAGNIVVQPSDMRQQVSLKDVAMTIDYFQYDEDNVLKALFWVDGRTRKLYQSYKDCVFFDTTFMTNRYNMPFAPIVGINNHLQTILLGCALICDETTETFIWVFETWMQAMNGQKVGSVMTVRDKAMRAAIKKVFPGTIHRCCLWHVTTKADQQLLPVYTSKKGFREALYRCIYDSETIDQFLSDWQKMVDEYDLHGNQTLNNLWETKEMWAPVYFNTSFFPFTGTTGRSEGLNGLFKLFVHPQDSVWIFVKQYEHIIETRLDREDREGYRVETTEPRMYSRSLIEKQASQFYTTRLDAEKTQEVPDIIYNVMPSDIERTGKKYRVTVDAAHSTYSCSCHKFERDGLLCSHILRVMAVLNIHEIPSKYLLKWWSEQATLQIRDEYNGPAPSIGVPATSKLRFNALCRAMTSLASDACVNEEKYLIVSAGIQNLHAMVATPHTVETQHQ

SEQ ID NO: 159528 - protein, 411 aa, Oryza sativa
  Clone ID: PAT_MRT4530_58896C.1.pep
MAAATPANSGEGGGLMRFTEARGVPGWRRPKLGRPGAAARHAAGGGRTEQRRREAVPATFQRWIGWVKRGEWEYSAWRIRFYLRFQRIDDLFKLFVHPQDSVWIFVKKYEHIIETRLDREDREGYRAETTEPRMYSRSLIEKQASQFYTTSMFADKFQYEIYEATGLDAEKTQEVPNIMYNVMPSDRERTGKKYMVTFDATHSTYSCSCHKFERDGLLCSHILRVMAVLNIHEIPSKYLLKRWSEQATLQKCDEYNGPAPSIGVLATSKLRFNALCRATTSLASDACINEEKYLIVSAGIQNLQTMVATPHTVETQHQQGILPSQQAPSSSAKNPPTKKRTGRPAEKTHRMKPIGEQITESSKKRRTKKKSSCSYCFDETHNVSICQYLKIANMRDALLNQKMVQETELTI

SEQ ID NO: 159529 - protein, 226 aa, Oryza sativa
  Clone ID: PAT_MRT4530_58897C.1.pep
MKTMNFLKTLHDRNIATSQILALLGDLHGGVRNLTFTAKDVSNLRTKLRQQVSLKDVAMTIDYFQKKKTQADNPSFFYAARYDEDNVLKALFWVDGRTRKLYQSYKDCVFFDTTLMTNRYNMPFAPIVGTNNHLQTILLGCALICDETTETFIWVYKTWMRAMNGQKPGSVMTDRDKAMRAAIKKVFPGTIHRCCLWHVTTEADQQLLPVYTSKKGFHEIYSKVKQ

SEQ ID NO: 159530 - protein, 100 aa, Oryza sativa
  Clone ID: PAT_MRT4530_58898C.1.pep
VRVPLPFWCPRQFFPPFGFLYVLVPLWGRFPFFSTFSAPPTPQLPPAFNPWQGLRMVWVTPLTVFKFFFNFGVKFKFFLKKKKKKKKKKKKKKKKKKKKK

SEQ ID NO: 159531 - protein, 61 aa, Oryza sativa
  Clone ID: PAT_MRT4530_58899C.1.pep
SQDSRCISSNRHDGGNVAAGGGVEGGELVEADEAIAIAHEKPHPDLNGVGAWHCRAPRLPH

SEQ ID NO: 159532 - protein, 1286 aa, Oryza sativa
  unsure (1)..(1286): unsure at all Xaa locations
  Clone ID: PAT_MRT4530_5889C.1.pep
MRVYTHMPRYKPEYLFGVEGFVQELRTMSFVIGFGTAPFYAQIPHDRHEEKCRVKVTLNSNSEDIPSVMFEAGGRNYIHACQEVARIAIGELRDRYSDQLADTEYRYHPRQPQGSDRGSYLETEGIENDATTKHLVEMLWAMDESRAETVLAAQDREDRNRGKICKLEDKVDRLEKELAALKGEAPPQKARIRLTARKRALFVPRYQLAPKNKLAEFLRVRPPVFSSTTNPVEASDWLHAIEKKLDLLQCTDQEKVSFASHQLHGPASEWWDHFRLNRTTAEPITWLEFTAAFRKTHIPSGVVSLKKKEFRSLTQGSRSVTEYLHEFNRLARYAPEDVRNDEERQEKFLGGLNDELSYPLMVGDYPDFQKLVDKAIRQEDKYNRMEQKKRRIAQFKTQQGNNQKSLLTLGPQPMPQGGSSSVVRPQRQFFNNNAGNNISNQALSLQRSPSVRIEIQGVPFLANLILLESKDLDVILGMDWLARHKGVIDCANKKVTLTSYDGRVVTVHALSSESLRSRLNQITLEEIPIVREYPDVFPDDLPGMPPKRDIEFRIDLVPGTTPIHKRPYRMAANELAEVKRQVDDLLQKGYIRPSSSPWGAPVIFVEKKDHTQRMCVDYRALNDVTIKNKYPLPRIDDLFDQLKGATVFSKIDLRSGYHQVRIKEEDIPKTAFTTRYGLFECTVMSFGLTNAPAFFMNLMNKVFMEYLDKFVVVFIDDILIYSRTKEEHQEHLRLALEKLREHQLYAKFSKCEFWLSEVKFLGHVISAGGVAVDPSNVESVTNWKQPKTVSEIRSFLGLAGYYRRFIENFSKIAKPMTRLLQKDVKYKWSEECERSFQELKSHLLSAPILILPDPKKGFQVYCDASKLGLGCVLMQDGKVVAYASRQLRPHEKNYPTHDIELAAVVHALKIWRHYLFGTRTEVYTDHNSSKGFVAALEAKLTLIDQVREAQINDPDIQEIKKNMRRGKAIGFLEDEQGTRVKAEHQKPAGLLQPLKIPEWKWEEIGMDFMTGLPRTSSGHDSIWVIVDRLTKVAHFIPVKTTYSGSRLAELYMARIVCLHGVPKKIVSDRGSKFTSNFWKKLQEEMGSKLNFSTAYHPQTDGQTERVNQILEDMLRACALDFGGSWDKNLPYAEFSYNNSYQASLQMAPYEALYGRKCRTPLLWDQTGERQVFGTDILREAEEKVKVIQERLRVAQSRHKSYADNRRRDLSFEEGDYVYLRVTPLRGVHRFHTKGKLAPCFVGPYKIVSRRGEVAYQLELPQSLAGVHNVFHVSQLKKXFKGTYRRS

SEQ ID NO: 159533 - protein, 116 aa, Oryza sativa
  Clone ID: PAT_MRT4530_588C.1.pep
RRALTFVLRSASRLRAASPSPCPRRAPFHPHRRPFPVGFLLNRAAAVYASSAAAQAVPAPPPASGKATGGGKITDEFTGAGAVGHVCQVIGAVLDVRFDEGLPPILTALEVLDHNI

SEQ ID NO: 159534 - protein, 54 aa, Oryza sativa
  Clone ID: PAT_MRT4530_58900C.1.pep
STACIWAPLSADSSHCTLYETVHSCLSLCTYPDPKHPCTFTVPDTVLAGCVGII

SEQ ID NO: 159535 - protein, 401 aa, Oryza sativa
  Clone ID: PAT_MRT4530_58901C.1.pep
MDVSPAPPWAELPDAVLLGIVRRIPCAFDRAHVGEICRSWRRTLLQIPPPRPLPGILLLTPHGPTLSFVVAGDAWCTHPAFVPEAFRRARYFGSYDDSWLFLAVGQDNGHALFNLTDSQEEELPNWGTFQLHDRELGAEILLVAATLSSSPNVHGSVAGGILTADLPPANSMEHIAFWRTGSDVMSKAIRASGVGPLEDVTYHDEAFHFLTLDDIIVVCRASMAEPGSPGKIVVVDEVHVSIELGNIAPRDELGYRDLRIVASYLVESRNDLLMVEKLAPNLLSPASAFRVFQMIKERLHDGQVRYSWEELTTKLDGRMLFVGQGCSRSYEAANYPGLDAGVYFLDDRSTRHDPKIPFQEARARRYLCSDNGKWSGTPPQIKLCVPDPGPSNHSPPVWFFP

SEQ ID NO: 159536 - protein, 73 aa, Oryza sativa
  Clone ID: PAT_MRT4530_58902C.1.pep
KLLMEAQYKIHMRLHLMHHTQNAVSGQSGSEHLDTSSSACTALMKLASTSNTKTQYISASLTINPCSFHDITG

SEQ ID NO: 159537 - protein, 191 aa, Oryza sativa
  Clone ID: PAT_MRT4530_58903C.1.pep
MSKRQGPPKHQNRYAWKPNLGQKINETEPGGRFRPLSEITGVCQRCKDQIDWKRRYGKYKPIVEPAKCQKCGKRNVRQAYHNVCTACSKDLGICAKCCTCVKALVGRDLSEQESERKELEEAIRGARERERRTLLRLMNKGGGESGPSVPKIADRSREGDIFPAASLDEYAEQARQQDDSDEEEARDFVED

SEQ ID NO: 159538 - protein, 139 aa, Oryza sativa
  Clone ID: PAT_MRT4530_58904C.1.pep
VDPPGCRLRQLNYLKLVQDDIRGFIIKKGHFPELIDLCLVVGNPNLPTIEEGASPKLVSLQLLCQALDGLSGINIGWLKRLEEVALDCKVNPDTIETWENEAKKHPKRPKVLFLERIDPNDEDSMVKYVASERPAARTG

SEQ ID NO: 159539 - protein, 92 aa, Oryza sativa
  Clone ID: PAT_MRT4530_58905C.1.pep
MRVIQQEAFVVAGLRGSNGEAEVVPHEAKAAGEEAVAKCMVEASSEEATSPEMEGPLGDVIVRLCEVEATEIEGAGVLPCVIGGRASLHVWA

SEQ ID NO: 159540 - protein, 129 aa, Oryza sativa
  Clone ID: PAT_MRT4530_58906C.1.pep
MPRLAHNNIKSTNILLGKAGKAWLADYGLARVVSSLAAAAASSAWYRAPEAPPVPRPWASQKGDVYAFGVVLSCPGSELPNGDAAVPTSCGHGCVIPLGETSGHSNSSEEKMSRAAVVAIVAGDFAGTG

SEQ ID NO: 159541 - protein, 404 aa, Oryza sativa
  Clone ID: PAT_MRT4530_58907C.1.pep
MVSSTSGGLSPPAVVLAVAVVLSAAASRALAAPCYPRVFCFGDSLTDTGNIAFLYGNDSRRPSLWPPYGETFFHRATGRSSNGRLIIDFIAEAMGLPFVRPYWGGQTAGNFASGANFAVGGATALSPDFFRERGVPMDDDTVHLDMEMEWFRDLLGMLCTGGDMDGCKGMMNQSLFLVGEIGGNDYNLPLMSGMSIEKIRNFTPSVIAKISSIITLSSQELIGLGAKTLVVPGNIPIGCIPMYLMQFESDKKEDYEPKIGCLRWMNEFSQYHNKLLVDELENLRKLHLDVTIIYADYYGAAMEVFLSPERFGIEDPLVACCGGRGPYGVSASVRCGYGEYKVCDDPAKYASWDGFHPSEAAYKGIAIGLLQGSYTQPPIVSITNSCPQIIGLGSSVEHKAMYDL

SEQ ID NO: 159542 - protein, 404 aa, Oryza sativa
  unsure (1)..(404): unsure at all Xaa locations
  Clone ID: PAT_MRT4530_58908C.1.pep
MTGADEPSITRWTFEDFEVYYEVRLGIRREPGGDEDGDGDGGGGRGYAPLGSGSAGSTRPSAAHANGGADLAVFEQFERLERKVELRNGAIEAGPPQKSLLPSFESAEMRNLAETLLRDIIRGSPDVKWESIKGLENAKRLLKEAVVMPIKYPKXLQRSAITLERYIAFWSTRNRKXTMLAKAVATECKTTFFNISASSIVSKWRGDSEKLVKVLFELARHHAPSTIFLDEIDAIISQRGEARSEHEASRRLKTELLIQMDGLTKTDDLVFVLAATNLPWELDAAMLRRLEKQQEARHAMFEELLPSVPGTMNIPYDVLVEKTEGYSGSDIRLVCKEAAMQPLRRLMSVLEGRQEEVPEDELPEVGPVTTEDIELALRNTRPSAHLHVHRYEKFNQDYGSHVLS

SEQ ID NO: 159543 - protein, 196 aa, Oryza sativa
  Clone ID: PAT_MRT4530_58909C.1.pep
MGAGIGINPRVIRRGPRCERTGVDRVHKKWAPRISSSNGVDPPCTETTRWSMGLPCGPATSMVRATTGMRRHNRLAASASLMVTTGDHSTRRRHKRRRKGRGKGKGPHRAPKQGRLRCAGLGDGEMAATPLVVAVRTKIRGSRRRQRGSRGASVPGEQWRMGWADLVRRDGERPGRMGELIRRGVKGIPVTRSFEE

SEQ ID NO: 159544 - protein, 114 aa, Oryza sativa
  unsure (1)..(114): unsure at all Xaa locations
  Clone ID: PAT_MRT4530_5890C.1.pep
IPFTFGYTSCIDMVYLRVYGRSLYTLRKFIMESTYGKIPTRIELGRYCIVQGPMSPSPTWRPTDLWYKKDPQEDLRHRILPPTHLPXPTKPKPIGAKSPGDLVEPTRLRSRRYH

SEQ ID NO: 159545 - protein, 175 aa, Oryza sativa
  unsure (1)..(175): unsure at all Xaa locations
  Clone ID: PAT_MRT4530_58910C.1.pep
VXKXPTXFFNSKKXPKQTXGXXXXXXFFNTXXQKNXNAIKKLEXRXTNXFXAXSTXXXLGPTPSAACRGKHLPRPCRRXFXXQXPXXSWXXXGLQKPXTPXXCXSNXXPXXXXVXXPXXDXXSXAXSNXLXFXXXXSKAXFPPLXXFXXFLXXSPTXXXEPPXLXFPPPNFFPXP

SEQ ID NO: 159546 - protein, 195 aa, Oryza sativa
  Clone ID: PAT_MRT4530_58911C.1.pep
MAIARARYVNRRAVEFTHFPRLRTSYLNQEHGNVAVVIGGAEKSKCSRGGGGSTTERSGEGGRGSSTASREPHGKRGTCRCRQWRTAARPEALNRAENDALRLSESLPCEKPLPHGARGDAAMQDERGARGSAGRSPQSAGQAVIIGRSQKRKEGLSWLICHLGVGRLGLLCDWASAIRSLAEKVHQRSLSLSSG

SEQ ID NO: 159547 - protein, 384 aa, Oryza sativa
  Clone ID: PAT_MRT4530_58912C.1.pep
MQIMTSSSTSPTSPTSPLAAAADNGVAAAYFNFRGAERVPESHVWKGMHEKDTAPVAAADADGGDAVPVVDMSGGDDAAVAAVARAAEEWGGFLLVGHGVTAEALARVEAQAARLFALPADDKARGARRPGGGNTGYGVPPYLLRYPKQMWAEGYTFPPPAIRDEFRRVWPDAGDDYHRFCSAMEEYDSSMRALGERLLAMFFKALGLAGNDAPGGETERKIRETLTSTIHLNMFPRCPDPDRVVGLAAHTDSGFFTFILQSPVPGLQLLRHRPDRWVTVPGTPGALIVVVGDLFHVLTNGRFHSVFHRAVVNRERDRISMPYFLGPPADMKVTPLVAAGSPESKAVYQAVTWPEYMAVRDKLFGTNISALSMIRVAKEEDKES

SEQ ID NO: 159548 - protein, 118 aa, Oryza sativa
  Clone ID: PAT_MRT4530_58913C.1.pep
MEKRCSILALLGLVLLFSNVIAEGAGLNKAIFSRKGLKEERKLAVTGTASSLGGLQGQSSSTGVGGVSSNNAESTNSETGDSSSAYTPMSTATTTDSHHDMSMDQYRKIIHNSQMNKP

SEQ ID NO: 159549 - protein, 128 aa, Oryza sativa
  Clone ID: PAT_MRT4530_58914C.1.pep
GQLFHLGFFFKTPTPLPRGLASFFFVNPFYPWLWGPSSPFWPPFFCKPFTASTFWPVCFFFLFFTVPFFSKPLYPIPWCPPRFFVVFFAVPPPSLSTLPALHFFCRACKAKDQNYISSSSLAFRSAYA

SEQ ID NO: 159550 - protein, 354 aa, Oryza sativa
  Clone ID: PAT_MRT4530_58915C.1.pep
MASAKVSHPVKSASEESKVLVVENGKMVDVQDKEITMEGLCSISSYDQWARIPVSGPLPKPRYKHAAAVVQEKMYVFGGNHNGRYLGDMQVLDFKCLSWSKLEAKIQSEEPSDLTGTASLPPCAGHALVPWGNKILCLAGHTREPTESLSVKEFDPQTCTWSTLRTYGRSPSSCGGQSVTLVGGTLVVFGGEGDGRSLLNDLHVLDLETMTWDEFETTGTPPSPRSEHAAACYADRYLLIFGGGSHSTCFSDLHLLDMQTMEWSRPEHQGITPEPRAGHAGVTVGENWFITGGGNNKKGVPETLVLNMSTFVWSVVTGLEGRAPPTSEIYALKSSRKCGVPSGQQNDRDTNVFA

SEQ ID NO: 159551 - protein, 72 aa, Oryza sativa
  Clone ID: PAT_MRT4530_58917C.1.pep
MVARNLAVKSALDTIKFSKTMQRCRLRIGEFERNVQYQVRVSSEMRKFLPIDKYIMQFQRGSSRVDLQACKL

SEQ ID NO: 159552 - protein, 111 aa, Oryza sativa
  unsure (1)..(111): unsure at all Xaa locations
  Clone ID: PAT_MRT4530_58918C.1.pep
FLVNMYGKLGAFGSGRRLLIRKPERNMAHFRHCSIQAARFRXGDFDGTAGLFRRLWWLGHQENQTTVTTMLKLAIDMVAGRLGEGGHSCASKQRHDHHVFVGLGVVDAYSL

SEQ ID NO: 159553 - protein, 83 aa, Oryza sativa
  Clone ID: PAT_MRT4530_58919C.1.pep
FLQTHRIGDRPLLFILGENVFTDFLFFCWATLAIYSGINLSLFRYFLIWSAIPCGICLYEFTIYLFIYFRLSRSMPVIYFITI

SEQ ID NO: 159554 - protein, 132 aa, Oryza sativa
  Clone ID: PAT_MRT4530_5891C.1.pep
PPGRGTPARALPEARVRAAPLGPAWLLVSGPCAAAACRPRAPAPFWGWPRCSGPPPAGPSGWGCAWSAAPVGSGARRAWPRPAPATAPPPPPSSPSPTAAPPSRGARPGRRSATWPSPSHSAAGGISVLAAG

SEQ ID NO: 159555 - protein, 486 aa, Oryza sativa
  Clone ID: PAT_MRT4530_58920C.1.pep
MELIISSITGDLTSRFISFLINKFLYNLFSGEKVKRLEQLLRRVHMVVEEADGRYITNRCMLAQLKTIVAAMYSGYHVLDTIKYMKNNEGANDLKKFSMELQGALQNIETVIGDINEFVILLARCERMSHRPYDAYLYIDNFMFGRHVEKHHLINFLLENNILGPPAVIPVIGGHKVGKRTLVTHVCNDERIRSHFPLIFHISGANLSRITENGNLSARTLIIVEFISDVDDNDWITFYSSMANLNRGNKVIILTKIQKLERFGTVKPITVDRLVYEEYRYLFKTLAFGSANPMDHPQLVPIVEEFAMLLRGRLIQANILADVLRKNLNVHFWLFALKGVQITVKKYLSMYGTHPHELFDQGHPVHLTDYVLYPADTTENAPNNDLPKLTFGDLITGRIFPPKGNFNLVSWESRIPPYTSFVHMARFSPSLAEDKPESHLSGRKRPRSWEALASAGIIVIIPELATTRRIKPPLLALVLASWAASS

SEQ ID NO: 159556 - protein, 130 aa, Oryza sativa
  unsure (1)..(130): unsure at all Xaa locations
  Clone ID: PAT_MRT4530_58921C.1.pep
CFLLSPVCSVGCQRVPRLVXGYWFXWLAFTGAVPHIPLFNPXCVLFPPLLCCYSCVCLSHVFVLYMFVFSKCCVXSRPVLTRVGXYDLCATQAVCVVWVMSXLXPVFMCFSLAVSLWWXLXLVLCLAAHW

SEQ ID NO: 159557 - protein, 136 aa, Oryza sativa
  Clone ID: PAT_MRT4530_58922C.1.pep
MVAAPVMSSGVEDAATGDELPMEDAVAGNELRRGLGTGEDAAVGDEVRVRCGAWTGEDAATAAPPLFVDVSPAIGSAVMRRCLDATQTRSSSSLRRARRRRPRPPLVKWVLFPGPRQRSSLAATSSSQLRRELSFG

SEQ ID NO: 159558 - protein, 85 aa, Oryza sativa
  Clone ID: PAT_MRT4530_58923C.1.pep
IDLPSFFFFGAQGRPHQDSSFHFLGAKQKQKPKKKEGKPPPKAESVLAGEWIPPTPSTLALPPSLGPFLPPPSPIFCPERPLTIS

SEQ ID NO: 159559 - protein, 103 aa, Oryza sativa
  unsure (1)..(103): unsure at all Xaa locations
  Clone ID: PAT_MRT4530_58924C.1.pep
AFLFSHLKSNSLGGLFGGPXLTKTXPFPNLIPFXHIPFSSPFHNTLKNPPPFPLPNNYPNSIPKSPSPYXSPFSPPFLPPFLXLTIPLPITLTPLPFPFFPSF

SEQ ID NO: 159560 - protein, 221 aa, Oryza sativa
  Clone ID: PAT_MRT4530_58925C.1.pep
MKGYTARLVDEEVELEAHTEVDEQQQQEEARSVRCECCGMAEDCTPGYVRRVRARFEGRLVCGLCAEAVSERRRREPALTVGEAVESHASLCDRFNRTVRLNPTLSLVRSMRDIARTNCLSRHRSARADACAAGGASKQIGRVKEISLIILVIVMVIILALYIVLVTICFKGMTVWPGSYWNNHLNHALVLTDPLRAMPVLRDIYIEKFAMNPATYRLEIC

SEQ ID NO: 159561 - protein, 54 aa, Oryza sativa
  Clone ID: PAT_MRT4530_58926C.1.pep
HHLQNFINPSSDVKIIIEYRTRVARTRIDSCSVCTPIARRCRESLASFIFCHPF

SEQ ID NO: 159562 - protein, 277 aa, Oryza sativa
  Clone ID: PAT_MRT4530_58927C.1.pep
NDPVQPHFSNGFSLPGCARTPLTARNCVRLEYMRMKSSWSGYCQCEVIEKLCRDASHVLRQGSCVGQSRGVGKVYIHCSPLPKKREGGRPQKTITIQWREAILGITMDGGQNRRCLNTNTGQARLTLEFFGNRLPEKKLQLVDMSILLILLSPRLGCYTGAELGQNSAKYHGAEPCQCGGPAFPPRLRGMDLSATYIGAKMANLSAISFCAELRPLAARARLAQAIALCGQVGDFSAKYTGAEIAACAGLAQASPLCGRVGDLNASYNSAETFNFSA

SEQ ID NO: 159563 - protein, 978 aa, Oryza sativa
  Clone ID: PAT_MRT4530_58928C.1.pep
MAGSFEGRSPAARGVEQDIALVALKKGAHLLKCGKRGKPKLCPFRLSSDEKMLMWYSKDREKRLNLSSVSSVVLGHKTVHSIYGSPRLMQKNVLQSNLDFSEPFFSPRQRTWSDLDYYMEKVTPDVVNRVKHSCRDIKVADKLNEQIITQLPKQKSSEGLHVAYGATSLKDIFVWGEVPGNVLDHGDVSKANVSLPRLLNTTHIIDVQSVACGEKHAAIVTKQGEVFSWGVDNGGRLGHKVSVSVSDPKIIESLASTRVKAIAFGAKHTCAVSISGELYEWGEGTHCLGLWGDQYQRSQWFPHKLFGPLDGISILKIACGHWHTAIISSAGQLFAYGDGTFGVLGHGDTLTVARPKQVESLKGVRAKAIACGPWHTAAIVERMGTVKSNAPSGKLFTWGDADRGKLGHADKKMKLVPTCVEPLNDFDFAQVSCAKAQTIVLTITGVVFTIGSKEHGRLGNPLSEDTSICLIEGPLKTEFVREISSGSSHIAVLTMNGKVFTWGKGTEGQLGLGDYVDRSYPTLVEALEDKQVHSIACGFNFTMAICLHRPLSSKDQSVCSNCQLTFGFTRKKHNCYNCGSMFCNSCSNNKVSRAALAPDRSKRYRVCDACFSQMQKVEEHRKLDPQQKIQKDEVCPIEIRSYTPKLARIFKEANAIMEKMASAQSPHQRSQNLAVPDHVRTLRWGLVECPSQFRCVRESIPYCSTLNKQTVSGSIVRVMNETMAPKPASSLLKSANDSKAELDLMENILLEEVKQLQEQVTTLAKQCRQRSLKVQLYKRKVEETWLIAKDEAAKCKAAKDIIKVLIDQHDFLSKNLLAGEKLDNSRIMPSHIASAKSLKAELPDPPDKNVFTSEFQQSKSNRDHHNSRQVDRECTQPSIASMANYSVTHQNCRRTSNGSTRCTEGTDATTAPTDSNGVIEQIERGVYATVVTSPGGKKCIKRIRFSRKHFGEDQAQKWWEANESMIFGKYSSMEQTVG

SEQ ID NO: 159564 - protein, 124 aa, Oryza sativa
  Clone ID: PAT_MRT4530_58929C.1.pep
MAGVATGGWSSGDDAAARSIDRWIDRSHTCTLGATPAAPVRDPATLAAAPIPAPTPAPAAPAALAPTPRAASAPAPAPTPTPTWALAPAPPATTTATRNSAATAILFIFMAAIVRIDRLICWLL

SEQ ID NO: 159565 - protein, 102 aa, Oryza sativa
  Clone ID: PAT_MRT4530_5892C.1.pep
MSSRSFILSCCTAGCFLHAMSGQAPRTVFSRQDAIVSKAISLVMPDTCHAICTWNLKQCASLPGTRKKPPGKARARPLLPLMRRASWMSLGRRGWLVSSKRP

SEQ ID NO: 159566 - protein, 113 aa, Oryza sativa
  Clone ID: PAT_MRT4530_58930C.1.pep
MASRMCECGGAPNPSQIRAEFAIPSGGDERSSPAEVVKRRRPRRPTSSSPAAELPRRRFLRRPLPRADLAVVSWEVGGGRGGWCAGERQAPPPLPSVAEELGPAWGYGVGKKE

SEQ ID NO: 159567 - protein, 131 aa, Oryza sativa
  unsure (1)..(131): unsure at all Xaa locations
  Clone ID: PAT_MRT4530_58931C.1.pep
MDRRSRCGRMESWRWKPRRARSIDRSHTCTLGATPAAPSAAPVRDPATLAAAPIPAPTPAPAAPAAPAPTPRAASAPAPTAAPTPASAPAPAPTPTWALAPAPXPPPRRRGTAPPRPSCSSSGPPLYGSID

SEQ ID NO: 159568 - protein, 124 aa, Oryza sativa
  Clone ID: PAT_MRT4530_58932C.1.pep
MAGAATGGWSRGDVRRAADRSIDRSHTCTLGATPAAPSAAPVRDPATLAAAPIPAPTPAPAAPAALAPTPRAGSAPAPTAAPTPASAPAPAPTPTWALAPGPPATTTATRNSAATAILFTFMAA

SEQ ID NO: 159569 - protein, 104 aa, Oryza sativa
  Clone ID: PAT_MRT4530_58933C.1.pep
MPPPSITTTTTKLFLLLLLLHGGHCLKSLDMAMEMEMDSEAHSRMLWESSSSNGRRYISYDALRSDVVPCSRQGVPYYNCRIMTTANPYTRGCETITRCRDVDP

SEQ ID NO: 159570 - protein, 55 aa, Oryza sativa
  Clone ID: PAT_MRT4530_58934C.1.pep
NIKRNKENQKRLIINNIIQPTTKGRTRRYRNAIAAIAALLPNDRHRFGSRRRSKA

SEQ ID NO: 159571 - protein, 47 aa, Oryza sativa
  Clone ID: PAT_MRT4530_58935C.1.pep
MATMRRLGGVRQQYRPRFAPARVACATSSPVATNAKRPSSSPTALAR

SEQ ID NO: 159572 - protein, 154 aa, Oryza sativa
  unsure (1)..(154): unsure at all Xaa locations
  Clone ID: PAT_MRT4530_58936C.1.pep
IEMTKTTWIVSILISLVLLGQGDTYGYKYKAPXEEERGHETIDQDIRSTYKPTCAKTRHXISTSEINMASALRCLRILSGETXALSLISPDADSRRKAILLSTTSQHFRPXSRQQLDRLPQILYCLAYILVPTIPILCKYRNRDIKRRHYTPLP

SEQ ID NO: 159573 - protein, 45 aa, Oryza sativa
  Clone ID: PAT_MRT4530_58937C.1.pep
VFYYELTDRWGLSFLRVLALGDAEWCYLRDGEGYGIRSDAHGTGG

SEQ ID NO: 159574 - protein, 44 aa, Oryza sativa
  Clone ID: PAT_MRT4530_58938C.1.pep
RSHLLTKPHPESGPYSKYKTRDLSCIYAISDSKLAYILLLSIFT

SEQ ID NO: 159575 - protein, 400 aa, Oryza sativa
  unsure (1)..(400): unsure at all Xaa locations
  Clone ID: PAT_MRT4530_58939C.1.pep
MLASKLWSRLASPSSPASPRALSSSSSAAAAARYLLPSSGMPAQERSPGHPSGGDARPGAGLGLAETGCGAAGAPRPLPLPCSSSSDNPXIIHDLPRSVKIVEVGPRDGLQNEKNIVPTHVKIELIQRLATSGLSVVEATSFVSPKWVPQLADAKDVMDVVRNIEGVSLPVLTPNLKGFEAAVAAGAKEVAVFASASEAFSKSNINCTIKESLARYKDVALAAKELKIPMRGYVSCVVGCPVEGYVPPSNVAHVAKELYDMGCYEVSLGDTIGVGTPGTVVPMLEAVMFFVPKEKLAVHFHDTYGQSLSNILISLQMGVSVVDSSVAGLGGCPYAKGASGNVATEDVVYMLNGLGISTNVDLGKVMAAGEFICNHLGRQSGSKAAIALGSKVATANASKL

SEQ ID NO: 159576 - protein, 278 aa, Oryza sativa
  Clone ID: PAT_MRT4530_5893C.1.pep
MVGWRAAGGARAVLRRLSAAAEAAAKQDGRVFAASYSGSSGGVNAPFGLGQYANLLRAQAFASRGVALNFHQLIRNAGISTTRNLLAADDAMVPVSSPLTPPLGDGEQTDKKGAIVKRLKVQAIKKDIKQSPKKVNLVAKLVRGMRVEDALLQLQVTVKRAAKTVYQVIHSARANAAHNHGLDPDKLIVEEAFVGKGLYLKRLSYHAKGRCGVMVRPRCRLTVVVREATAEEEAKIAKLRVSNYKKLTRKEKQLMPHRLIEVSPRWARKRKEEAGAAA

SEQ ID NO: 159577 - protein, 232 aa, Oryza sativa
  Clone ID: PAT_MRT4530_58940C.1.pep
ANASHRLLVDGKKKRYVGIRLASGQDILCQQLILDPSYEIPSLDMPSDAPVSNLPRKVARGICIISSSVRQDTSNVLVVFPPKSLEEEQITAVRVLQLSSNLAVCPPGMFMAYLSTPCTDAFTGKKCISKAIDALFSTKVSNDLEDHLEKNSEENKESVKPTLLWSCVYVQEIIQGTSGTALSCPIPDENMDYRSILESTKMLFTDICPNEEFLPRNSAPKYASDNDSDSAE

SEQ ID NO: 159578 - protein, 172 aa, Oryza sativa
  unsure (1)..(172): unsure at all Xaa locations
  Clone ID: PAT_MRT4530_58941C.1.pep
MLASKLWSRLASPSSPASPRALSSSSSAAAAARYLLPSSGMPAQERSPGHPSGGDARPGAGLGLAETGCGAAGAPRPLPLPCSSSSDNPAEENPCTRQIYQRQLMPHRFKLFLGEKRHFTYANGASLNPQNYRYFSSSSGQQSIGIGNKIIHDLPXSVKIVEVGPRDGLQNE

SEQ ID NO: 159579 - protein, 155 aa, Oryza sativa
  unsure (1)..(155): unsure at all Xaa locations
  Clone ID: PAT_MRT4530_58942C.1.pep
MGRGRAASLSATGRRVKGKMPLGMEDSHIAEFHRLEDGNEVGLFVVFNGLSDADVATYLGEHLSTLLREQGFGTDTMDAIRRAYHRTDWKVLRTTTEEGDSXSGAGATADRQLLVDQEPLQEXRRERRCGFVTEMHGDMPRVDAQLAMSRAFGDR

SEQ ID NO: 159580 - protein, 409 aa, Oryza sativa
  Clone ID: PAT_MRT4530_58943C.1.pep
MDKLDGSARLMIVSDLDQTMIDHNDPKNLSLLRFQALWESEFSQDSLLVFSTGRSPISYRGLRTQKPLITPDITIMSVGTVIAYGEEMIHDVGWAEFLSNKWDRDIPERSQGPHKVSFFVDKEGAREVMDSLPETLNRRGLDVKIIFSSGEALDVLPQGAGKGQALLYLLKKFNSDGKPPNSTLVCGDSGNDAELFSVPSVHGVMVSNAQEELLQWYEENARGNPMMIHATERCAAGIMQAIGHFNLGPNVSPRDLEFPYPKLDAIKPADVVVKFYVLYEKWRQGEVQKAPFIIQYLKRITHPNGTTIHPSGRECSLHASIDALSSCYADKQGKKFRVWVDRIVASSIGTINWLVRFDKWEMEGNVRYCCLTTLLLTMKPETEDGFEITHIHKTWLEGYSAGNEHACIL

SEQ ID NO: 159581 - protein, 138 aa, Oryza sativa
  Clone ID: PAT_MRT4530_58944C.1.pep
MVRCGGLCYARGIVTAPFREEEFYNDADASVWRGGGASRRWRVPAVAWRGGVPRRGRRRGSGVGIVDSAGATSSAVAAASRSGSASAGGGVGVGRVNVGGGVGNEAAAVAAKEKPRSGKNLLSVDGEDGGAHREYIYP

SEQ ID NO: 159582 - protein, 122 aa, Oryza sativa
  unsure (1)..(122): unsure at all Xaa locations
  Clone ID: PAT_MRT4530_58945C.1.pep
TNALYHEVRTKGKKAAQSSTPFFPSPRFHLTICQVMQHTVSACSSLMIAHQSHXHNISNDQANVQQLLIQQLADVYCDQVPAQFPAMXNPVQLRRAICEYLHQLNNAPCRMPTVPVIRYRIR

SEQ ID NO: 159583 - protein, 48 aa, Oryza sativa
  Clone ID: PAT_MRT4530_58946C.1.pep
MHQANSKQQYLNQFEVELSEVAEYYKLLEGSIEGDKKSVVAGRKKEKF

SEQ ID NO: 159584 - protein, 46 aa, Oryza sativa
  Clone ID: PAT_MRT4530_58947C.1.pep
MAARRQASSGTHTSNRGGQMFLGANRRRQRTQVFDALSPTSSGSRR

SEQ ID NO: 159585 - protein, 116 aa, Oryza sativa
  Clone ID: PAT_MRT4530_58948C.1.pep
LRYTWPARHHGPLVPARWPATARSRRVYTARGAYTMPKSAANPKPCRILGARGTAPTAWLYLSAALQRAAELPDRRVPHATTLCYTCTALRHLITIHENLELVSHPRQADYASRQP

SEQ ID NO: 159586 - protein, 83 aa, Oryza sativa
  Clone ID: PAT_MRT4530_58949C.1.pep
MRAEYYPISSLVLSASTAEAAAMGVDDGGGDLSDERARAGGEGTGMKVTNPADIPGGGLDATAAARQPRCATAARRRWPAQTT

SEQ ID NO: 159587 - protein, 188 aa, Oryza sativa
  Clone ID: PAT_MRT4530_5894C.1.pep
KVARIAIEELRDRSSDQLADTEYRYHPRQPQGSDRASYLETEGIENDATTKHLVEMLWAMDESRAETVLAAQDREDWNRGKICKLEDKVDRLEKELAALKGEAPPQKARIRLTARKRALFVPRYQLAPKVRVVKKEVTLALADPPVIIISDDEEEESKRTHSKVEWGATQDDEDEPNEPSINSDARKN

SEQ ID NO: 159588 - protein, 138 aa, Oryza sativa
  Clone ID: PAT_MRT4530_58950C.1.pep
MGMRAEYYPISSLVLSASTAEAAAMGVDDGGGDLSDGGRCSSLFFNKDEHLGRFAQVKFIGEVIVETEHHGAAKKELQAPASSSAPTDRERARAGGEGTGMKVTNPADIPGGGLDATAAARQPRCATAARRRWPAQTT

SEQ ID NO: 159589 - protein, 384 aa, Oryza sativa
  Clone ID: PAT_MRT4530_58951C.1.pep
MAVAPVRLVACIVALAAVAPGGVAGHTRGVRPGRAAGKQQPSFPENATRVEAIERQFMEWVRYMGGLEHSTVHHALARAFPSYSLVVDKNPAFGDFTTIQAAVDSLPIINLVRVVIKVNAGTYTEKVNISPMRAFITLEGAGADKTIVQWGDTADSPSGRAGRPLGTYSSASFAVNAQYFLARNITFKNTSPVPKPGASGKQAVALRVSADNAAFVGCRFLGAQDTLYDHSGRHYYKECYIEGSVDFIFGNALSLFEDCHVHAIARDYGALTAQNRQSMLEDTGFSFVNCRVTGSGALYLGRAWGTFSRVVFAYTYMDDIIIPRGWYNWGDPNRELTVFYGQYKCTGPGASFSGRVSWSRELTDEEAKPFISLTFIDGTEWVRL

SEQ ID NO: 159590 - protein, 75 aa, Oryza sativa
  Clone ID: PAT_MRT4530_58952C.1.pep
AYRGAKWWRLMRHLKTINKTPNRILMTIKRKDDGHVVKQSVRISMIIKKDGNGRVVEEYSNKVADVLAELQESKK

SEQ ID NO: 159591 - protein, 79 aa, Oryza sativa
  Clone ID: PAT_MRT4530_58953C.1.pep
SKIILQEHKHHLPSTGTSTIRHFSRSEKQLKIIPAAVAISDFRMPRSSRASFQKSEKMQQAELFRIQKRRSMRRRMMMS

SEQ ID NO: 159592 - protein, 203 aa, Oryza sativa
  unsure (1)..(203): unsure at all Xaa locations
  Clone ID: PAT_MRT4530_58954C.1.pep
SPWRAQRSAQAATPSPRPRHRTAAARTARGARHPRPRRTRSRPCRPPPAAPPGHRTPRAASSAVAPSRRRRRPPPPPGRRRSRTSPTRRTPGAPCRTPTSPSRRPRQGARTPSPRPPSSTRSPAPPSSGAGTRTRSPAVXLRRRHGSSCRCRCRRRRRRMDVHGESPRMVSTAAAALVAPRQRGDGGEEXRRRGRPRRSPRRR

SEQ ID NO: 159593 - protein, 1150 aa, Oryza sativa
  Clone ID: PAT_MRT4530_58955C.1.pep
MDFMSRPAITGFMGGMAVVIMLQQLKGIVGMTHFTTKKVSAFVVGAVALIATPFAVPSASFTRDVGRAVAERAERDGGHGRGEAKAAREAGDRRGRSGTRGGREDAKVEEEEREHRGGRRSAARRGERRKRCALMPAITPYRERCSFMFDSAALTEDLTDHSLPHCVWFSFFMYLDPSAMGCGKNVPSVDYYYYELANFFSDLLCTVPIYLSYGMPRYPGPYPMMRPGFPPRPMPPVGVMPLQRPPIIPGIRGAPPVVPPTARPPTPAVTPPDKPPTAVYVGKIAPTVDNEFLLSLLRLCGPVKSWKRTQNPSSGKPVSFGFCEFESAEGILRATRLLNKLSIDGQELVVNINDATKEYLKKHVEEKKKAQEKTKEMEDGGGSGTTAVTGNELSKPVSDETETGTGDAGDKGNEENPKKFGIVTEEDSKADKDVAEKISSMIEEWLKTRPPPPPPPVEQSADISSKHKNGEYSVDVTKNDSEDKSGTGSDKRAVNETERIETGSPDKRKERERDKEKRDKDKELERHERERERERVRRDREKDIKYKEVERLYKERLKEWEFREREKEYQRQHEKEREKDRERERKREIMKQEDDSDEEDNRKRRRRSSGTLEERKRRRLREKEEDLADKLREEEEIAEARRRAVELQQQADEAAAAAAAAAVVAESATVMEVDGDDGKERDAQDKPAVVDVGNNDAFANGVDSGVNNGKDNIGDDKNMTPGEISDTKHNTSAPAKKLGFGLIGSGKRTSVPSVFAEEDDEDNDDKRARPLVPIDYSTEELQAVQANSSTGQPNIVAAAEFAKRILVTKDDKSDVEKDRSWRSSDRTNQRDRDRNDQDVGRTSDERREKTHDREKDKQDKPKSENKNILDAKQLIDMIPRTKEELFAYDINWAIYDKHELHERMRPWIAKKIIEFLGEEESTLVDYIVSCTKDHVQASKMLELLQSILDVEAEMFVLKMWRMLIFEIKKWLNGRTTFSAMPSSALASWRLCSRNDRNAPSSPSSSCSYDIVIVITVFLLRGEVVGVLVGDRFLEEVEGEGRRRKGVKAGATGDLVLGAVLVDGGEVNAARWSAAALVLAERVSWLTAEAAVAASTEEGFLPPPLPHRHRPVCLFPTTPCPPQHHRTQTIAVAGEEVLTAFGLSSGHVKKD

SEQ ID NO: 159594 - protein, 1746 aa, Oryza sativa
  Clone ID: PAT_MRT4530_58956C.1.pep
MRAPPSVTAKDVERVLADEFGLRSGEIAMSLHFREAFLLKFKHHRHCEEAVKKGFAKGQGIEVHFIQWRSLKNAAGSALMYRVKLCLDGVPMHLWAPDIAERIISRTCTLESVETDLVHPVDAGDTRVISLWAWMPNPSRIDKRVWVTITRQTRDPLLESVTISETPPEHWQQGVKHPVLFHIEEIHDYTAAAVDLRNPKSCRLATRTLPPWHLGVLDGQRAPPCLFENFPHHPPTPTTYAFRQGRAEGVEDNAGLAREPHDQGSRTAREAAARDGGWRQHDGDRDRRREDHDGRRDDRDVRRNADRRRERRGRYNNDHPGAGHGPGWRRDDDDDEERGHGRDVAQGRGGLREPDVHFRRERTRSPRARDRGGNDRRDGRRRQDDICEEPGDLGGGDRDNDISPGLAMAGEFQPPRSLSPLPLLRGFGNEARGHLSGLCGRGPMPARPGGWVAIAIDKLSAPATIVAPGGVVTPFAAASPVAPTDTLALDDPANAEQAEPARQAAANDPVDDLQATLGPTVQPEAAIHTPMLSTSAVDFPQCADVNLQTPPPPMPRQDRHRSSRLAQQPTVGLPSGLKAQLNLCRRMGLTPEEGTLTDKVVADFKAMFNAPLPQDTIDALEQLFGLNREDAKAADAWRDEWTRVNVLSDGTSIRGNIPIPQQFRGSTPTSDSSVPHFRTFFVPSSHSCDKADSLMCCRRTVACGADAAPAPATLRRRSPLVRRGRTGSTWPNRPNWSASPSQAGQALPASPCTLHQPRPGRRATVRETLQTAKPHIAYLQETKMSNIDVAIVGSLGGSYLRSYNYKPATRPFGTRGGILVLWNEDTVDLSNFVLGTFSLTATVLLKECQTTFLLTVVYGPTRDRAKQAFLQELRDTKPRNDSKWLLVGDFNIIYKASDKNNANLNLRQLRIFKETLNACELKEITLQNRRYTWSNEQDNPTLDTAFEKHLLHVLSTSLSDHCPLLLSGQGDAPRARTFRFQNYWIHLPGFQEIVAQAWAVSPPYHEVHHRLYHKLGATAGRLKAWSRNLISQGKMHLHMALEVILQLDIAQESRQLSQAELNLRRGLKDRVMGLSIIERARKRQASRITNLKEGDANTKYFHLKMNARRRKKFIQRLRVGNIWKFKHEEKAAIIKDHFEAFLARPPPCLVDFDWDALQLPPVDLAMINGPITEEEEGAEGIGDFRPISLIHGIGKLISKVLALRLQPHMGSLISQAQSAFIKKRSIHDNFMYVRNLARKFHQTRTPALLLKLDISKAFDSVRWDYLIDLLQRRGFTTRWTNWITNLLISSTSRALLNGCPGIPIKHGRGLRQGDPLSPLLFILAIDPFHHLLEKATNLGLLSTLRGRAPRFRTSLYADDAAIFVNPSVQDMTNLTEILRAFGGVSGLRTNMSKSQIAPIRCGNIDLTDVTSIFPAALTSFPMKYLGLPLVVGRLKKVHIQPLIDKCQSRLAPWQGRLMSSAARICLTKSVLTAQPIYHLTSLKLPDDTLKDIDKIRRKFLWAGGESISDGKCKVNWKRKNAPLNEEQDSIRWNLTANGKYSTRSAYRLQFMGAARSAFYQSIWKAWAPPKCKFFSWLATQNRLWTADRLGKRGWQNQKICPLCCVTDESALHLLAKCRVTKRIWAEIQQWTQTDLQLSKWNDCPSVELWWNLVAESPNTPRAPLRTLLMLVSWEIWGERNARIFRSTASTPASVIAKIKEEGRAWVKAGATKLQEFGILGDITFFRLRVGFWLTLYIFSLVFLLLY

SEQ ID NO: 159595 - protein, 259 aa, Oryza sativa
  Clone ID: PAT_MRT4530_58957C.1.pep
DCGTVQLLLAKGACVDTVANRGTPLHVAASKGKDGAMKILLDHNADSGVQIPEVLIFVSSFNKMVDGHLTPLATAITAGELKCVNLLIEAGAVVSGDCISTAAKGGSNECNYSMEETGANRNISDNGEPVSKRKATELKSLGNKAVEKKDYLSATGFYSKALDLYPDDATLFSNRSLCWHHMGNGGKALLDAYECRKLRPDWPKAYYRQGAALMLLKDYESACETLYDGLKLDPGNSEMEDALREALASLKASASTEAR

SEQ ID NO: 159596 - protein, 294 aa, Oryza sativa
  Clone ID: PAT_MRT4530_58958C.1.pep
MATSLDMSLDDMIKNNRNSRGRGRGRSQGGGRGRGDGQRFSYGSGRGRGAGTFRGRGVGVPSRRPLGVSTRSSSYAIAKSFNKTKDIVWRQDLFEDSMVAAGLSVTESSTKLYISNLHYGVTKEDIQELFSEMGHLKHCAVHYDNNRRPTGSAEVIFTRRSEAVAALKRYNNVRLDGKPMKIEVIGADLGMAAPSAPRVSVVPGARGRGQREVVMMPGGSGFGRGAAGSSNFIPGWKRNNFAQRGGQGRGRGRGRNNFGRGRGRGYVRKGPVEKSAEQLDKELDSYHSGAMNVD

SEQ ID NO: 159597 - protein, 139 aa, Oryza sativa
  unsure (1)..(139): unsure at all Xaa locations
  Clone ID: PAT_MRT4530_58959C.1.pep
SCCXXAXVXXXXXXKPSASXXXXRXNXRXKRTXAXPXXIXLAXXAXKKXTSXPXRXXXGVVFXERXXPXGXVXXGKGXXQXAXXXXXNVXXYXXIXXPXEWXSXXXVXLXRQAXLXXWXDXXXRXXXCGAXXVXXTAAL

SEQ ID NO: 159598 - protein, 162 aa, Oryza sativa
  unsure (1)..(162): unsure at all Xaa locations
  Clone ID: PAT_MRT4530_5895C.1.pep
FWAVKAPSLGVFVPGAGWVPVVCTLGKPGFQGVFRPGPFLVLPPPSVVFKKPGPEGCPSLFFQAHANPRGGPPAGGDPIFRAPPGGGVAKASPQSGGPAPTLXNNRGGGAGAFPPWDPPPAPPGFFNRGGDGAFGGGSNEIGWGGPNKKSPPGWGTLGGVCF

SEQ ID NO: 159599 - protein, 123 aa, Oryza sativa
  Clone ID: PAT_MRT4530_58960C.1.pep
MVMAYDPNNPCMAVGTIYPGMPEFRIAMRQFAINKEFELDLVKIDPVSIQEDPASLLLGFVLFYPFPTTRATNESAEIAAQSYQQQGIAGTVKVAGSYLQWNLYCFDFSVFVVVLVMEGFYAS

SEQ ID NO: 159600 - protein, 127 aa, Oryza sativa
  unsure (1)..(127): unsure at all Xaa locations
  Clone ID: PAT_MRT4530_58961C.1.pep
STSWYLISFAGGWCXWQSKLQICVALSTIEAEFIVAKKANQELLCLKKLVSELGFDQEKYLLFCDNXKCYHHLSKNTSFYSRXKYIDVRYHWICYVFXQMRLEEVYTDDNEADMMTKVMTKEKLKAH

SEQ ID NO: 159601 - protein, 44 aa, Oryza sativa
  unsure (1)..(44): unsure at all Xaa locations
  Clone ID: PAT_MRT4530_58962C.1.pep
CYSIMDSATRISSSCSVXKRIPDDHSALIRDKQNSYNQVDSKAV

SEQ ID NO: 159602 - protein, 44 aa, Oryza sativa
  Clone ID: PAT_MRT4530_58963C.1.pep
MRQLELRMDDPTAQEVTWLNMGDDGTVIFPDASSLVWVVKDRTC

SEQ ID NO: 159603 - protein, 121 aa, Oryza sativa
  Clone ID: PAT_MRT4530_58964C.1.pep
QQVFSPSRGFLRPPFSIVATPFWQPVSFPFFNPPFFPPQCFPPLRVVAPQFPFPALCFFPPILHQLQLHQFRGVSFGQTQAQAPTFFPFPLPPLCGFSPNYYSAPRSLPPVGGVWALIVPI

SEQ ID NO: 159604 - protein, 136 aa, Oryza sativa
  Clone ID: PAT_MRT4530_58965C.1.pep
LTCRGPRVVLSLSSHLCPSLPLEPLFCAPPCGGNNPRCFFVEPMVSTAPKHLVHGPFLASCDCCLWAPPPLSHCGGFTTQVTFALLSKKELRFFPKGVNSPKFSQFFFLKKKTPFSPGAPFVILGPNFFPIFLAIV

SEQ ID NO: 159605 - protein, 345 aa, Oryza sativa
  Clone ID: PAT_MRT4530_58966C.1.pep
MGAVVSHASAAAPPPPPTGYAPFVDPAAAAAPPPAEKDAAADEEKVDYMNLPCPVPYEEIQREAFMSLKPDVFEGLRFDFTKMLNPFFGLSHSGFGCIVTILVRLSVSMGSMELPSQGADVIKVPTSNYEFGANFMDPKMMLIGRVSHDGRVTARVKCDLLENLCLKINAQLTNEPHYSQGMFSFDYKGKDFRSQFQLGNNAFYGGNYIQSVTKNLSLGTEAFWLGQQRKSGVGFVARYDTKKMVATGQIATTGLVSLSYVQKVSEKVSLASDFMYNHMAKDVTASFGYDYMLRQCRLRGKIDTNGVVSALLEERLTPGVNFVLSAELDHWKKDYKFGFGMVLGE

SEQ ID NO: 159606 - protein, 115 aa, Oryza sativa
  unsure (1)..(115): unsure at all Xaa locations
  Clone ID: PAT_MRT4530_58967C.1.pep
MRSEVLSVNQSDRLSRTTRRRACHVAYDGEPPSPVKESHSGERHVRERXEVDLRGGAAAKTGWAEPARAAAXPHDGSICRASCNARDYFHNYIKNIVSICRYSDVSSVQLHAFYS

SEQ ID NO: 159607 - protein, 88 aa, Oryza sativa
  Clone ID: PAT_MRT4530_58968C.1.pep
HPISPNPIPSRSLLSQSSVTVMRVTLPFLSRFLVTSGFLAATRAPVVKPVNKADRRPRVAPARPETVQAAMAAKLADGLSLSLVGELR

SEQ ID NO: 159608 - protein, 206 aa, Oryza sativa
  unsure (1)..(206): unsure at all Xaa locations
  Clone ID: PAT_MRT4530_58969C.1.pep
VRARPKPPPSPILILPGVNRANSCRTVGLKLDGGFPSHNSNQPPPCXRFNSXPPPCVAPGLALTRRQPILSTVKPILHRILDPNRSPTSSFTSSHRAEHRRPCSALFFAAAKFFQPQSVVSIDLAASPPTYQINPSAAARRHRRTLATSPPWLQPLSSSIARNGERLEVEEEXERERLTGLEDSSDTLDNINQSQDIEQGKLLSTF

SEQ ID NO: 159609 - protein, 274 aa, Oryza sativa
  unsure (1)..(274): unsure at all Xaa locations
  Clone ID: PAT_MRT4530_5896C.1.pep
TCGTTVVLCNRGPKTGPLWPSRAPRGSRSVRPKAATAARPAGGGAPAPLWSPAAAIGTAERRPREGREXGGNEAAVHGSPXVDGDDXKGGRSGGRRRRGSGRRGRRRSDGRRAKRRGGRGRRGCGEAEGGGAEVGGGPGRRWRRTGARRRRRRERATARARFRRGGRAARGGNERRRCGEGLYWVGRGRGRPEGKKTGAALSGSINGAGXLGEGFQTNPRERGRENWGXERGRESRGIIPPXLIARGEDGGGGIRGGGGARARARRRERREEGG

SEQ ID NO: 159610 - protein, 284 aa, Oryza sativa
  unsure (1)..(284): unsure at all Xaa locations
  Clone ID: PAT_MRT4530_58970C.1.pep
SCWLQDQTNWHAPNRLALERLSXTNKGWFPSRNRVNEGRGEEKRVKVEARTLEVITIKVGSHDMPIPSKDGAKAIPSDEPKPGPSXRSNHRPHASLTGPTGQSDRWFTTGXLTGLQRRFDSRFARGGSGASSSSSKINRGHNIPHGTXPKSRRMPRNLTATQKRRLQHLRTQELKEREAEEWRDRRFNELXLPPRKDDQLVVKDELPPKEDMDINMVCMFPMEFCAMDEVEVFQLSLGPRDAVFGKPDESNRHMKHLNLKGHIDGXSRMLVDGGAAMNLIPYSF

SEQ ID NO: 159611 - protein, 324 aa, Oryza sativa
  Clone ID: PAT_MRT4530_58971C.1.pep
MAAAVPTGCYKCGRPGHWSRDCPSEPAGAGAASTDNPNPNPNPKPSASRFAPYPRPRFGKSAAAAAAAEGEDGSGGQAQGKKKKKERATRPKLTPDLLLSDDGLGFVLRYFPKAFKPRARPGHEVEDLGNLIKLYTDWHSRLIPYYSFDQFVRKVEKVGASNRVRRCVSELRDRVARGGDPTLLHEPPVEVIPEGEPDGATAEDPIFGTEVPATENHGVDQVQEDIDIPVESNDVDPMQEDLLNEIYNKEADEPQIPAVGGTAEETTPAMAPKEAKPQDDPPREAQNQPGKIQLTEEQRARMEANRLRALERAAAARARASQPA

SEQ ID NO: 159612 - protein, 577 aa, Oryza sativa
  Clone ID: PAT_MRT4530_58972C.1.pep
MAASKAAAANQPLEMDAVVNGGAGFDLSSDSYKLNLLINGCEERMRARAERLAGEVRRRMFAAGGGNGDGEGGVTMSVAEAATLVDTLERLGLDGHFRHEIGVLLGRLRREEADFAGSDDDLYTVALRFRLLRQHGVWVSAGTCVRDKFRDGTCSFSSSLRDDPRGLLSLYNAAHMAAPVEIALDDIIAFARCHLEALSMEGELKSPLAEQVSRAPDIPLPRFPRRLETMSYLVEYEQEDEHDDMLLELARLEFELTRCLHLEELKALSLWWRELYESVKLSYARDRLVESYFWTCGVFHEEEYSRARIMFAKVFGLLSLMDDTYDVHATLEECYKLNEAIQRWDEGAISILPEYLRMFYIKLLSNFDELEASLEPHEKFRVSYAKNAFKLSSEYYLREAKWSNTKYTPSFAEHLEVSVMSSGFPMLAPVVLMGVHDDAAVATAAAFEWATAAGVPDVVIAASGEVARFLNDIASHRVGKNEKDVPSSVESYMAEHGVGEEAALAAVAAMAEHGWRTINRALMEMDPGLLPAARLIVNLTRTLEVIYLGGRDGYTFGGDIKGLVVSLFLDPVAVIRI

SEQ ID NO: 159613 - protein, 257 aa, Oryza sativa
  unsure (1)..(257): unsure at all Xaa locations
  Clone ID: PAT_MRT4530_58973C.1.pep
STLEDPHEERRAAGAVDDDEDLVDVLLRVQKDGSLQMPLTMGNIKXVVLELFGAGSETSANTLQWALAELIMNPRVMLNAQAELSNVIKGKQTISEDDLVELKYLKLIIKETLRLHPVVPLLLPRECRETCEVMGYDIPIGTTVLVNVWAIGRDPKYWEDAETFIPERFEDGHIDFKGTNFEFIPFGAGRRMCPGMAFAEVIMELALASLLYHFDWELPDGISPTKVDMMEELGATIRRKNDLYLIPTVRVPLSTVL

SEQ ID NO: 159614 - protein, 345 aa, Oryza sativa
  Clone ID: PAT_MRT4530_58974C.1.pep
MALIREKRFSQMNLSLHVPSRVPFQDAAAAARRQCPPPVAAASTSSTPASRASQFRLADFERVAVLGRGNGGTVYKVRHRETCALYALKVQHSAGGGELAGVEADILSRTASPFVVRCHAVLPASASASGDVALLLELVDGGSLASVAARAGAFPEAAVAEVAAQALSGLACLHARRVVHRDIKPGNLLVSVDGEVKIADFGIAKVVPPRRGGEHRAAYEYEGTAAYMSPERFDSELHGDGADPFAADVWGLGVTVLELLMARYPLLPAGQKPSWAALMCAICFGELPPLPDGAASPELRAFLAACLHKDHTKRPSAAHLLTHQFVAGRNVAASKLALRRLVAGA

SEQ ID NO: 159615 - protein, 533 aa, Oryza sativa
  unsure (1)..(533): unsure at all Xaa locations
  Clone ID: PAT_MRT4530_58975C.1.pep
TAVGHSPPPSSPPLLSPVFPPRPPSRSPSPSSLRACAPRPRFLELHVHSALPPRPPPVLAPARPCSSLARVSFPRVSPPLPAPPLPFLRPSPAPPFRPAALPRHPSRPRPAFSPFYPSPCPRPSSSPPPPPHAAVPPPPSVSAXPXXXXXXXXXXXXXXXXXKPPPPSHHPSPPRPPPPKPQASNPHPPTPHPTPTTPQPPPNPPHTXPPPPTKPPPKPTKKPPKTPKHKQNHPTHPRHPTAENTNPTPPTPNHHTPQQTLPNPKPPTHTPSHPRQPTQTNPPPPKNPTTPPHPAPPPPPLHQRHNHPSAPPTPPAXPXXXPPPPHPXSLLPRFPPLRVPLARVRASPPPCLPRCLLNSSPPPVPYSVXQPPPSEPPPPPPIIFLRPPSPFLWSSSPSKPPILSSPPPPSPSPASSPPXPPPPPPLPPAPARPPAXPTPLGPLPRGSPLLFPPPPPPPXPPPLPSPPDPPPPPLSLWSPLSLSSPSPGQATPXPDPPPPXPPPPDPPPPRMGRAVPLQVASSSSSSATVVARI

SEQ ID NO: 159616 - protein, 422 aa, Oryza sativa
  Clone ID: PAT_MRT4530_58976C.1.pep
YASTPSSFGLPLRRPLGPQCRCPWSTPPLVIAVLRDALLSMATSSVDFSSLHRHGAATVLSSRDRSFAAFVVFIVIRALTTSSSVLVIVSRSGSSSSTLSIAAASPSCHCRHSRPMVQLPLHGYRRRHPGRWSHYFAFVFVQHDSSPASSYLPRLHFAFLRQPRAAPAILPLRHSRAATVLEVFSASLLRHWRMIHGGPLSRPRAEIAGLVGDDTFQETVTSELFRTTLGMIYNAIETVAGSSSPTSNLSLIELVKLKIKKCTNASRRKDDNDDEDTDEEEIDDSDDEDRISEVQAAVVQLFQDYSNQGNAREHTNHNNENVMDIDPFHQIHNSTFQTVGQPSMEHDHRSSQESITELDAYLREKTIPIKQENFDIVKWWKENCHRYPIVARMVRDFLAIPTSTRPTPQMMTKIRNHLRRYA

SEQ ID NO: 159617 - protein, 72 aa, Oryza sativa
  unsure (1)..(72): unsure at all Xaa locations
  Clone ID: PAT_MRT4530_58977C.1.pep
FSPXPPXRRRHKPRRPPWPPPXXPPXNPAPSPPQTPPPLHXHXXKXSPPXAPXSXAYXMASPPXSWQLAAVY

SEQ ID NO: 159618 - protein, 107 aa, Oryza sativa
  Clone ID: PAT_MRT4530_58978C.1.pep
SSSKFTRRRWRQLWWAAAPSAAASSAVAMAGATAAGRGKHAGGRWAARGRRRVARAATTRNRRGTARAATGMCTTEATKLGGRRAARGRRRAGGGRRPAECGGRSGA

SEQ ID NO: 159619 - protein, 191 aa, Oryza sativa
  Clone ID: PAT_MRT4530_58979C.1.pep
MSTVSGTRRAPRRQSQDGPGDKVVVNLDAISSPVVGSRRAVPTSTGARASPIDVEALDDEVQTLSASQVPPPRRNRRTRRQPVAVVDLEVDASREGNKRQRVAPVIHCLSPERGEGSSLKTSNEPPKAKEPVFNCPVCWNKLEEPSTTICGHIFCTTCIKQAIQIQKKCPTCRKSLRANNFHRIYLPNSDS

SEQ ID NO: 159620 - protein, 107 aa, Oryza sativa
  Clone ID: PAT_MRT4530_5897C.1.pep
GGRVSDSEGSDQVSSDDEDESPRHLGEEEMESKACPRCGEIGHVASMCLTLCPHCEEDHPPGECPTRKVTCFLCEGRAKGNQPQEGDTKQKTVIRFNQQSEGSFSCE

SEQ ID NO: 159621 - protein, 140 aa, Oryza sativa
  Clone ID: PAT_MRT4530_58980C.1.pep
IKGSTKPSSKVEANSAAATAASCEPGVGAGGTLAHPVNESFCSRSFFATAADGTNDGGADMGASEATTTGGDRAQREPALNVARPCNSSPPAPPWSVPWLRLRRRRRAIRVVERVAVPIAKRNRGTRPLFLLLLLLLLLL

SEQ ID NO: 159622 - protein, 56 aa, Oryza sativa
  Clone ID: PAT_MRT4530_58981C.1.pep
EKMTHKDGQKGKHKAAHLGKPISYCLHQHAHALEKVKSFCIRTELWYGISHHISAS

SEQ ID NO: 159623 - protein, 55 aa, Oryza sativa
  Clone ID: PAT_MRT4530_58982C.1.pep
QSFNHLLQFSYTKITVTTQTCKKIFWSYPKACKPGEHILHMKSITKWHHCNISAR

SEQ ID NO: 159624 - protein, 82 aa, Oryza sativa
  Clone ID: PAT_MRT4530_58983C.1.pep
LGSLMLYESFYFSSRVGPLPHSFRPFCTLLRLLVLYTNEIFTHARFLSFCFVNFPILYYLNFSYVFPCSVSSLSLSYNNFAL

SEQ ID NO: 159625 - protein, 78 aa, Oryza sativa
  Clone ID: PAT_MRT4530_58984C.1.pep
NKRNPCPKRRELPPFFIKPNIGGGIPYGKKKKGKGLEGGQKNGKKGGGFPSAKGETPGPFEYARPGRLLGGSKGKGRG

SEQ ID NO: 159626 - protein, 472 aa, Oryza sativa
  Clone ID: PAT_MRT4530_58985C.1.pep
MAPPLLPRGAALLLLLRSAARRPAAASSRGFLSSAAAGGREGALAAAAVAVVGSGLGLWLVPPSLADSGEAVADAPAVQISVGSGSGAVGAVEERGRKRRFLLGDSFRRRVFFNYEKRIRLLSPPEKIFEYFASVRNPEGEVFMLPADLMRAVVPVFPPSESNIVREGRLRGERNPGELHCAPSEFFMLFDTNGDRLISFAEYIFFVTLLSIPESSFSAAFKMFDVDHSGEIDKEEFKKVMALMRSYNRQGANHRDGLRTGLKVGQPVENGGVVEYFFGNDGNEPLHYDKFTNFLKGLHDEIIRLEFSHYDVKSSNTIPAKDFALSMVASADMNHINKLLDRVDNLGNDPDLKGVRITFEEFKSFADLRRRLEPLAMAIFTYGKVNGLLTKQDLKRAAHHVCGVDLTDRVVDIIFHVFDTNHDGNLSSEEFVRALQRRETDVRQPATPGSMGLLSYWLNFNKCSSLTQMLLK

SEQ ID NO: 159627 - protein, 91 aa, Oryza sativa
  unsure (1)..(91): unsure at all Xaa locations
  Clone ID: PAT_MRT4530_58986C.1.pep
AKQVAAQEAERTNFIVKKAGHGMMSVMIRAHDEANNTQLIIKIIVNNPAILAFKQIXAFTEIYHTNXCSDNNGLLDFINLLLNLHSLNVSN

SEQ ID NO: 159628 - protein, 276 aa, Oryza sativa
  Clone ID: PAT_MRT4530_58987C.1.pep
MKMEQQNTNSKEGVEVLQQVPFEDEKLGKGQYTSKNYHLQSKIPSWMKGFAPASALTVHEESWCAYPNSRTGFLIICYQCPLFSKCSLTIDTVIRPDNGCSENTKRQILREHNVHNQAHNLTSEQLAAREVEVVDIALQSRDYWSKVISAPNVDLTAFRSQRTSRGPLLKGWMDSCRPVMTTYKLVIMDAPIWGLGERLEDCIIAGERALFLACHRLCFAWIDEWYGMTLDQIREMERQTDLLLKKTLKKPAKAGSKHDGKRKTLKEEIVAVGSCT

SEQ ID NO: 159629 - protein, 140 aa, Oryza sativa
  Clone ID: PAT_MRT4530_58988C.1.pep
SRGPPFFFFCPYLLLVIFREIDKEEFKKVMALMRSYNRQGANHRDGLRTGLKVGQPVENGGVVEYFFGNDGNEPLHYDKFTNFLKGLHDEIIRLEFSHYDVKSSNTIPAKDFALSMVASADMNHINKLLDRVDNLGNDPD

SEQ ID NO: 159630 - protein, 67 aa, Oryza sativa
  Clone ID: PAT_MRT4530_58989C.1.pep
EPLAMAIFTYGKVNGLLTKQDLKRAAHHVCGVDLTDRVVDIIFHVFDTNNDGKLSLEEFVRALQRRE

SEQ ID NO: 159631 - protein, 124 aa, Oryza sativa
  Clone ID: PAT_MRT4530_5898C.1.pep
MPTLAWMRLLEESYTTSPAVAHAGLWADVSTGGRRGADRRAPLGSDSRGGGSPWTGTTRVVHRRSTGPTAQIGPEPIGGGDRGGRRARLGIKAGWPARASGDGTRPTAAAAEGVSARLKAVARH

SEQ ID NO: 159632 - protein, 78 aa, Oryza sativa
  Clone ID: PAT_MRT4530_58990C.1.pep
MPGSTAVERGVGLVVEVTLAVAGLVVVVAGGRVKSGKPSANEIKIRIFTLFVMMFVMKAPVGEKARARMDEERSIIVL

SEQ ID NO: 159633 - protein, 73 aa, Oryza sativa
  Clone ID: PAT_MRT4530_58991C.1.pep
TFRNHPAETCGRSPPQKDVSGLVPAPSRHIKFPRALLGLFDIAVLGAQRSVLIPRPIQTAKGGRRLGVVFSYH

SEQ ID NO: 159634 - protein, 34 aa, Oryza sativa
  Clone ID: PAT_MRT4530_58992C.1.pep
ETKALSLISLGTYSRRKTTLLSTTSQTFRPPCRQ

SEQ ID NO: 159635 - protein, 73 aa, Oryza sativa
  Clone ID: PAT_MRT4530_58993C.1.pep
PQTSLEVHCSLSFRQSRSQYQGFGRCSSARIIVVTLSTADRERVIPDSRALAREASEAPGPQQNPRRRRRQGV

SEQ ID NO: 159636 - protein, 57 aa, Oryza sativa
  Clone ID: PAT_MRT4530_58994C.1.pep
PLDPASGPFLRAQMGGREQDIKTLSGGHTLGRCHKERSGFEGPSTRNPLPFYFSHFT

SEQ ID NO: 159637 - protein, 121 aa, Oryza sativa
  unsure (1)..(121): unsure at all Xaa locations
  Clone ID: PAT_MRT4530_58995C.1.pep
MKITALLVLKSPGDGDSSSGGGGGEQEQEQQAAVVVANATDVSHFGYFQRNPAREFILFVARTVAARTPAGRRQXVQHEEYKVHCYNQNGLCAIXFTDDQYPGRSAFYXXNTGLEEDPQTF

SEQ ID NO: 159638 - protein, 618 aa, Oryza sativa
  Clone ID: PAT_MRT4530_58996C.1.pep
GISTLENEEMSKVTQANGIDSREHKGQSIAVEANSKGETREVVEGKVDWRGRPAIRGSHGGVANSFFILVNFGLENLASLSLAVNLIIYFMTVMHIGLTDGSNLLTNYMGTSYMVAVLISVFADTFIGRYKTVIISSVIELVGLLILTLQAHSNKLKPPYCVFPFDPKCETVSGDGRTHLYVGLYLVAIGSAGIKAALPAHCADQFDEKHPTEKLQMSSFFNWLLLSLCTGGAISVTVFVWIQSYKGWDKGFGAATGVMGLALLVFIAGLPGYRISVVQGSTALLEILQVYVAAIRNRNMKLPENPDELYEISKSKAPPDTDFMAHRDKPFRFLDKAAIVQAPTDEAPSPWRQCRVTQVEHAKTVLAMVPIFCSAIIMSTCLAQLQTFSIQQGVTMDRTIGTFKMPPASLPIIPLIVLVFAVPIYERGFVPFARRITGHPNGIPHLQRVGVGLVLSIVSMAIAAVVEVRRKRVAARHGMLDANPILGKQLPISCFWLAPQFTVFGVADMFTFIGLLEFFYSQAPPALKSMSSSFLWCPMSLGYFLSTIIVKAVNAATRGATASGGWLAGNNINRNHLDLFFWLLAVLSFLNFLNYLFWASWYKYKPQQSAHVPAEHKV

SEQ ID NO: 159639 - protein, 474 aa, Oryza sativa
  Clone ID: PAT_MRT4530_58997C.1.pep
MAEAAVLLAAILLSLHPLPMSLSAAAGSDGGGGDSGTAEAAADRITALPGQPRVNFSMYSGYVTVDAAAGRALFYWLIEAADPASAPLVLWLNGGPGCSSVGYGASEELGAFRINPDGRSLYLNPYPWNRVANMLFLDSPAGVGYSYSNTTSDLFTAGDNKTAHDSYAFLVNWLERFPQYKYRDFYIAGESYGGHYVPQLSQLVYRNNKDVEKPILNFKGFMVGNAVIDDYHDYVGTFEYWWTHGLISDDTYQKLQVACDFESSAHASEACNKIYEVAEAEQGNIDAYSIYTPTCKKTSFLKRRLIRGNSPWLPRGYDPCTEKYSTKYYNLPEVQKAFHANVTGIPYAWTTCSDDLFYYWKDSPRSMLPIYRELIAAGLRIWVFSGDADSVVPLTATRYSIDALYLPTVTNWYPWYDDEEVAGWCQVYQGLTLVTIRGAGHEVPLHRPRQALKLFEHFLQDKPMPQPVHSIQSF

SEQ ID NO: 159640 - protein, 653 aa, Oryza sativa
  Clone ID: PAT_MRT4530_58998C.1.pep
MDTPAAADWSELPADVLGLVLLELEFPDLFRSAAVCKLWRATARDIRRLGLYSRAQTPCLLYTTAAAGPRAAVLYSLADKTTSYTVPLPDPPIAERHIVGSSHGWLVTADHRSELHLLNPATGEQLDLPPVATIEHVRPLYDDAGNLNNYKLVYYDGGGNSHRSNDDDMHTVTHPPETFREFLYLKAVISSDPSRGDDYTVMLIHHPYLQLSFARSGDKKWTWIKMGNNECEWFEDCIYHDGVFYAQTVHGAIHAIDVVSASSSFTHRLILKPTMGELGTLYIVRTTEGDILQVLRVTEEDEGSEHKDVRTTEIGVYKVDYKKQDLDDVDDIGNNALFIGTSYSMCLPVKDYPHLMPNHIYFDDDYGRRRLRQRQRGWVAAVTGLGGGQSRRRRHVGDGSGGGLSLSSSLLHRCQLPSPPPLRAAIASTASPPRAQGRPDPAAATSGVAGSAAASTGEAGATTTTTGEVGSAAGSTGEAGAAATTTGEECEMDYMNGNDAGGTSSKLNDRAEVSRKDKASVSELEDGNVCSHHGIEEPNEESMQGIVMEQEELSDSEEDSQHVEFEREEMDDSDEDQVQGVDPLLAQNKEVSTSVGCGEYEGSNNQSQNQQRLVQVGGKQGAATQKPQRLSNARPAREKLKGDNAKRPGSRTT

SEQ ID NO: 159641 - protein, 280 aa, Oryza sativa
  Clone ID: PAT_MRT4530_58999C.1.pep
MDKDPDRPRNDKATILSDAIQMLKDLTSQVNKLKAEYTSLSEEARELTQEKNELRDEKVSLKFEVDNLNTQYQQRMRVLYPWTGMEPSVVIGPPLPYPFSVPVPVPVPIPSGAVPMHPQLQAYPYFRNQTSGTVSNPCTPYMAYTQPIHPPTDQLSNQFSAPVQHSSSNRSHSMAQDSRSKSSALQQVSCRGKHDDFDDVATDLELKTPGSSAPLQSEIANKDSSSDLKKKQQFIQETKGSSLTEGSSSSSRCSSSGPPDVSNSIEGGSVADDQRSTVQT

SEQ ID NO: 159642 - protein, 91 aa, Oryza sativa
  Clone ID: PAT_MRT4530_5899C.1.pep
RHWVAEITIFVPCRASYIEWHSPTAPPPPLSRRPLQPAILQLHRWPFQAATFQLLRSSILLLQSLQQPLQIRRWIRVTRVVTSLHTGFLSI

SEQ ID NO: 159643 - protein, 52 aa, Oryza sativa
  Clone ID: PAT_MRT4530_589C.1.pep
CEASHHFQDLNNSEPRMESDLHQRESCLPYVPTHQPLINPIAYTLIYRCIVK

SEQ ID NO: 159644 - protein, 137 aa, Oryza sativa
  unsure (1)..(137): unsure at all Xaa locations
  Clone ID: PAT_MRT4530_58C.1.pep
RRSRASCYITQSPVPRVSSWSTTRGKSQVFTGELPRGQLGLLYPNHLXPVVKKPQREGCATMPFKPILTPRVTHMAGKSSIXRALPMMVLPKAYRFSREEAQRLKHNGGDDSAIHPIQYKSXQDVYNPPRIFLVRSG

SEQ ID NO: 159645 - protein, 66 aa, Oryza sativa
  unsure (1)..(66): unsure at all Xaa locations
  Clone ID: PAT_MRT4530_59000C.1.pep
FFFFCLSKLAAFFCEISINDMKYFIWIISFPXNFTNAKSSPWNIGSGMVSFPVPAIIQAVINPQTL

SEQ ID NO: 159646 - protein, 200 aa, Oryza sativa
  unsure (1)..(200): unsure at all Xaa locations
  Clone ID: PAT_MRT4530_59001C.1.pep
KKKAFCSYSEDKLCLLKKKKLGRRNVAGXSLLLLNLLMYVFLLGFAGWALNSYIKNAGADVGVGWGEQPWSPYYRQSAWFASRFHLATFAALAGALGVTAKASAAYHGGRSGASWRPQGLAAAASLGTAAWAATALAFGVACREIHDAAAAGPAGAARGWRMRALEGLTVTLAFTQLLYVLLLHAAVAGERCGLACAADA

SEQ ID NO: 159647 - protein, 59 aa, Oryza sativa
  Clone ID: PAT_MRT4530_59002C.1.pep
EVLGLLLTQAWSNLKHLERAAKVAGGTSSRGTTRQLRRPLCLAQAKALRLNQVQMDHES

SEQ ID NO: 159648 - protein, 62 aa, Oryza sativa
  Clone ID: PAT_MRT4530_59003C.1.pep
GRRCRLRARARQSRSRVHRQKITHAICHPAAVACHPSHVVAPPSPSTADFTPRRGRYKSLQP

SEQ ID NO: 159649 - protein, 125 aa, Oryza sativa
  Clone ID: PAT_MRT4530_59004C.1.pep
NTHLAAQHTRSSPSSQQQNHPAPARHHQPPKCQSQWASNSIRTRHPPLSQHTPSSTGGRTGWAQAQQTTILSQHTRQPQQSHPHPWVHQARPMQANLKHPIGSPQITTMRAAPSASHRIFPPILS

SEQ ID NO: 159650 - protein, 37 aa, Oryza sativa
  Clone ID: PAT_MRT4530_59005C.1.pep
LREPNARLPWQMVVHSLLGASPELVHRLIPDHIRRQH

SEQ ID NO: 159651 - protein, 73 aa, Oryza sativa
  Clone ID: PAT_MRT4530_59006C.1.pep
ARPPATAAGSGPSAPVPQSPLAPPPAPLVLPLPGRARRTPPRVPPAAAALVSSVFVTMELSPVAATARRSPRH

SEQ ID NO: 159652 - protein, 42 aa, Oryza sativa
  Clone ID: PAT_MRT4530_59007C.1.pep
SYIKYVITFYTYMYRIDDYYTVISTNVEFECQGDPEEAMRSG

SEQ ID NO: 159653 - protein, 108 aa, Oryza sativa
  Clone ID: PAT_MRT4530_59008C.1.pep
MRRLAQRGLTDIVDIFLPTSKIRRLRIGTMAAGDRIEEESIKQKEEWQPGGTEEEEFGISVLNVVGTFSCENLGILGPPPRISEWSSCRPRRRHRHKKGAKTGGECAY

SEQ ID NO: 159654 - protein, 70 aa, Oryza sativa
  unsure (1)..(70): unsure at all Xaa locations
  Clone ID: PAT_MRT4530_59009C.1.pep
PSGAGGGGETTAAAAAAVQDDDDEEVDQEGVEPNDIHLVMTQARVSIPRAXNALGAGNVXIXSAIMELTT

SEQ ID NO: 159655 - protein, 1799 aa, Oryza sativa
  unsure (1)..(1799): unsure at all Xaa locations
  Clone ID: PAT_MRT4530_5900C.1.pep
SDQLDYDLVDPRTSVPQYPLYPVYGYPPSTVARQVGGLGAQGSTTMTSSFVDNSVNTNLNQGVPTSTMLVWTQVGEIVFPVYTTVPISAGPSTTGSENAVATTQDDSMSKDPLAEAENGTSTTSEPEKDPSAAKPCLSDKNHEPTRMTFEVTRSWCPIHKTKKHTLQACWVFLNVHAEIHACKERGIQRTSPTRDVYCPIHKTKNHDLSSCKVFLSAMKTSPPKVQQSHIPLRDEDKEQGTTLISDRFVGVIDIDPHEPSVLHLLEDYGSSSTNTPREVLAIDETGTSARANAEAENQVTTPAQHIRAVNAILRETPYDPVLNDDLARWTERLRESVTNLSNAFEETAAATHPEQPPTGGANGENPEQRESPHRATPPPRGTSNLRDHLNGRREARRTRDNENRSRHRVSSRRHDNEERGGRSSEDRDRDNRHNRHDHDDREWRVLGDTDRQPTAPSAGCRVFGRSLRVVRWPERFRSGAIEKYDGSTDPEEFLQVYSTVLYAAGADDNALANYLPTALKGSFVAKFQGTYKRHAIEDDLHALTQNPGESLRDYVQRFNECKNTIPEITDASVVRAFKSGVRDRYTTQELATRRVTTTRRLFEIVDRCAHADDALRRKNDKLKTGGEKKPAKDAPESSKKKNRKSGKRKAQAEVLATEYADPPKRLDPQGSETKKTRCPYTSKRVRVFEKDAEAATQESDSAYPDSNLHVSHIFGGSMAYSLKREYKKVEREVCSTWQGAAPKMKWSEQKIEFSEEDHPKTAVIPGRYPIVVDPTIRNIKVARVLIDGAYNAIIGRTALAKFMAASHYAYQVLKMPGPKGTITIQGNAKLAVQCDKRSLDMVEHTPSLPATAEPPKEVIEHKLMVRPDAKPVKQKLRRFAPDQKQAIREELDKLLKAGFIREVLHPEWLANPFMVRKANGKWRMCIDFTDLNKACPKDHFPLPRIDQLVDSTAGCELLSFLDAYSGYHQISMVKEDEKKTAFITPFSVFCYVKMLFGLITAGNTFQCTVQGTLSDQLGNNVEAYVDDIVVKTKISDSLIDDMQETFDNLRRYHLMLNXPEKCTFGVPSGKLLGFLVSGRGIEANPEKIKAIENMKLPTRLKEVQKLTGCMAALSRKXEEAFIALKRYLSNPLVLVAPQPNEELFLYIAATPYSVSTVIVVEREKVQRPVYYVSEALHDAKTKYPQIQKLLYAVIMTSRKLRHSFQAHRVTVVSSFPLGEVVRNKDVVGRIAKWVVELSQFDVRFVPRTAIKSQVLADFVADWTMPDNRSDNQIDNETWTMALDSALNSQGAGEGFILTSPSGDQFKHAIYLNFRATNNTAEYEGLLTGIRAAAALGVRRLIVKGDSELVANQVHKDYKCSSPELSKYLAEVRKLEKRFDGIEVQHVYRKDNIKPDDLARRASRREPLEPGTFLDVLTRPSVKDASGEDSPVSLNKSSGATEAERAVADIETTDDWRTPLIKFIGSEELPEDDAEAEKISRKAKFYCMIGNDLYKKAPNGVLLKCVSSDDGRHLLLDIHEGICGSHVAGRTLVGKAFRQGFFWPTALKDACDMVQRCEACQFHSXTHKATSASTPDYPSHLAVLVLGARYTRAIPTRTGRLQVPIXVAIDKFTKWIEATPTGEIKADNAIKFIKGIFCRFGLPHRIITDKGSQFISADFQDYCIRLGVKICFASVSHPQSNGQVERANDIVLQGIKTRVYDRLMSHDKKWVEELPSVLWAVRTTPTTSNKETPFFLVYGSEAMLPTELRYQSTRAQKYSDENQEEQRNDDVNLLEEHRERVAVRAASYQQALRRYHEKRI

SEQ ID NO: 159656 - protein, 99 aa, Oryza sativa
  Clone ID: PAT_MRT4530_59010C.1.pep
MARGAAAATRRAGGAAWGAGAGRRGSGGARREAVTSTAARGRDGDGDVGAVAGDRERGKEEGLVEISTAKPRRLPDKPGSWLRCYFMAIFLTFSCIQEL

SEQ ID NO: 159657 - protein, 102 aa, Oryza sativa
  Clone ID: PAT_MRT4530_59011C.1.pep
MLDLRAISERKERKETSSASPHSTPLSSLLRSGEAARRRTGLPHSTLQQLPEEEGESAAEEMRRGQGGVREVEALKVEADVDSESAPSPLGLASTCVACRHR

SEQ ID NO: 159658 - protein, 65 aa, Oryza sativa
  Clone ID: PAT_MRT4530_59012C.1.pep
ACSEQSRAVLTHRWRLVTCAVLPCLFVALAGGNDDISLSAIRWRHRKIKILTFSCPLQKLTVKIQ

SEQ ID NO: 159659 - protein, 421 aa, Oryza sativa
  unsure (1)..(421): unsure at all Xaa locations
  Clone ID: PAT_MRT4530_59013C.1.pep
MRGGGPRRIERSEDKRRXTSPPLRLADPPLYYPPFSAPRHLLLCSPLLLLVQSKLRNSSSKQPNAAHTKLCSSCSSYTRAAAHSVELRAQRGAMGRHKFRLSDMIPNAWFFKLRDMRAARGGAGAGGGGASHGGVVTQSSVAVSRAGRACRPLPNTPRHGALSLPHRASYYYTPRAGDLLVGSPLHPKCSDTQFPPLQLSPPRKSRRRHRRRSVKLAPSVSGSSVLSSPVSTGCRCGRKPELVVVEAPDTPPCRRDKFVGYNDDDDDEEGPHRHATSPSTPASTMTLIVGGVTTSSGPVTRHLRCWQSSDEKTPRVHRSPTPPCSLISAXNKPASKSLVLSPAPKTKPPLAESFAVVKSSRDPRRDFRESMEEMIAENGIRTAADLEDLLACYLSLNAAEYHDLIVDVFEHIWANLADIKM

SEQ ID NO: 159660 - protein, 91 aa, Oryza sativa
  Clone ID: PAT_MRT4530_59014C.1.pep
MPVLGPNPPSTSPEPCREHASRRRTTHVDGFWCRAGWPPLAVADGTPPTLASAPLRETAYDEADQHPMSPPPQDLMPRTGSRRRQPLADAP

SEQ ID NO: 159661 - protein, 156 aa, Oryza sativa
  unsure (1)..(156): unsure at all Xaa locations
  Clone ID: PAT_MRT4530_59015C.1.pep
NVELALVYGLTESSGAVAATVGPEESKAYGSVGKLGSHLQAKIADPCTGEALGPGQRGELWVRGPIVMKGYVGDDEATAATVDSEGWLKTGDLCYFNEDGLLYIDERLKELSWYTSYEVPAGELEHFLXFQCEFADAGVFPYPDEEAGELPMAFIA

SEQ ID NO: 159662 - protein, 62 aa, Oryza sativa
  unsure (1)..(62): unsure at all Xaa locations
  Clone ID: PAT_MRT4530_59016C.1.pep
YNCGVCMGEYFCSACKFFDDDVDREHFHCQDCGICRYVFXHHSVSLRDKHCCIENSMKNNCP

SEQ ID NO: 159663 - protein, 242 aa, Oryza sativa
  Clone ID: PAT_MRT4530_59017C.1.pep
LPPTQEFYVWIIDKKLKGTLISVAGAMVLTFYKGVAVTHTTKIHHATAAAAVAAEAAMSSRNWTLGTVAILGNCVCLSCWFLLHSRLAKKYPHVYSCNAFMCMFSFLQVAVVGLSTQRNVSVWIVRTKFHILTILYAGVVGCGLSFVLLTWCIEKRGPVFVAAFIPVVQIIVSVIDFTVLHEQLFLGSVLGSVLVIGGLYLLLWGKRQEALHLPPKVAEHDKEQQQQQQQQQQQQQQQQVQL

SEQ ID NO: 159664 - protein, 183 aa, Oryza sativa
  Clone ID: PAT_MRT4530_59018C.1.pep
MGREGEGEAGGLRRRQCRFGEPTCAVKSASWRSASGQIGDREDDAGGEACAEADGGGDRAVGHARAARNGKARWMSVFVRNIPMAYKMKGIFKGLKVISQIFVVKEHEMQIGSPTDVKHVAHIGWDGLTGNASPSWGPLGLLKVWQELLVLQSGRFSVLVRLLHMIVASLGKALVCLMSGMYG

SEQ ID NO: 159665 - protein, 254 aa, Oryza sativa
  Clone ID: PAT_MRT4530_59019C.1.pep
MATKEFDELALDGTNYPIWASDIKINFASREILNTIEEPNDGDPAIEPRKLNTALFLLRLYIHKDLKHEYMLETSPLNLWKALKERYDQQKELIWPKANYEWNNAENKKGFKGNSSNNPKNLTGKRKRTNNRRKFKGRKKGKGKGKAPQPRSNTNKHCNRCGSDTHVAKDCRIPKHLVLLYQKSLKDKKSSENPRFEAHFNLTHEEHPEVASSHQAPAEPESNLNVLPEDVAPLSTMDDMFIEYCSTDPLGDLQ

SEQ ID NO: 159666 - protein, 1448 aa, Oryza sativa
  Clone ID: PAT_MRT4530_5901C.1.pep
MDCVVQGVLSQLLSEMPRYKPEYLFGVEGFVQELRTMSFVIGFGTAPFYAQIPHDRHEEKCRVKVTLNSNSEDIPSVMFEAGGRNYIHSCQEVARIAIGELRDRYSDQLADTEYRYHPRQPQGSDRGSYLETEGVENDVTTRHLVEMLWAMDETRAETVLAAQDREDRNRGKICKLEDKVDRLEKELAALKGEAPPQKARIRLTARKRALFVPRYQLAPKVRVVEKEVTPALADPPVIIISDDEEEESKRNHSKIEWVATQDDEDEPNEPSIDLRCSEELECHFPPVSLLVPCPCQMVNTRSNGNGPNNNNNNNNNNNEGNPTLAQVLAQQTQLMNMMMQQLQNQQNQGNNHAPPQNKLAEFLHVRPPIFSSTTNPVEAGDWLHAIEKKLDLLQCTDQEKTHIPSGVVSLKKKEFRSLTQGSHSVTEYLYEFNRLARYAPEDVRNDEERQEKFLEGLNDELSCPLMTGDYPDFQKLVDKAIRQEDKYNRMEQKKRRIAQFKTQQGNNQKPRLTLGPQSMPQGGSSSVVRPQRQFFNNNAGNNIRNQAPCPVAASTQQQPAKREQGSKPVVCFSCGDPGHYADKCSKPRRVKVVPAQSNTTAPAPKARVNHVAAAEAQDAPDVILSTFLVNSVPATVLFDSGATHSFLSMSFAGNHGMEVEDLRRPLMVSTPSNQALSLQRSPSVRIEIQGVPFLANLILLESKDLNVILGMDWLARHKGVIDCANRKVTLTSNDGRVVTVHALSSEFLRSRLNQITLEEIPIVREYPDVFPDDLPGMPPKRDIEFRIDLVPGTTPIHKRPYRMAANELAEVKRQVDDLLQKGYIRPSSSPWGAPLKGATVFSKIDLRSGYHQLRIKEEDILKTAFTTRYGLFECTVMSFGLTNAPAFFMNLMNKVFMEYLDKFVVVFIDDILIYSRTKEEHVEHLRLALEKLREHQLYAKFSKCEFWLSEVKFLGHVISAGGVAIDPSNVESVTNWKQPKTVSEIRSFLGLAGYYRRFIENFSKIAKPMTRLLQKDVKYKWSEECEQSFQELKNRLISAPILILPDPKKGFQVYCDASKLGLGCVLMQDGKVVAYASRQLRPHEKNYPTHDLELAAVVHALKIWRHYLFGTRTEVYTDHKSLKYIFTQPDLNMRQRRWLELIKDYDMGIHYHPGKANVVADALSRKGYCNATEGRPLPFELCKEFERLNLGIVRRGFLAALEAKPTLIDQVREAQINDPDIQEIKKNMRRGKAIGFLEDEQGTVWLGERIFVPDNKDLKDAILKEAHDTLYSIHPGSTKMYQYLKERFWWASMKREIAEYVAVCDVCQRVKAEHRKPAGLLQPLKIPEWKWEEIGMDFITGLPRTSSGHDSIWVIVDRLTKVAHFIPVKTTYSGSRLAELYMARIVCLHGVRKKIVSDRGSQFTSNFWKKLQEEMGSKLNFSTAYHPQTDGQTERVNQILEDMLRVCV

SEQ ID NO: 159667 - protein, 111 aa, Oryza sativa
  Clone ID: PAT_MRT4530_59020C.1.pep
MAPSCGTEAAAAASSRLAVAESDEAPSHGHGVNSSGFLRPTPAGACCRSLAWAWEQQRRPWTGPPNLTGDNKIGGGNWSGNLPVWKGVDFHKHGFWLPTKMGSGCLRKSIF

SEQ ID NO: 159668 - protein, 345 aa, Oryza sativa
  Clone ID: PAT_MRT4530_59021C.1.pep
MATKEFDELALDGTNYPIWASDIKINFASRGILNTIEEPNDGDPAIEPRKLNTALFLLRLYIHKDLKHEYMLETSPLNLWKALKERYDQQKELIWPEANYEWVHLRLQDFKTMAEYNHAVHNICSRLKFCEQEPTENNAENKKGFKGNSSNNPKNLTGKHKRNNNRRKFKGRKKGKGKGKAPQPRSNGNKHCNRTKKSSENPRFEAHFNLTHEECPEVASSHQAPADPESNLNVLPEDVAPLSAMDDMFIEYCSTDPLVDAFHTWHDRLGHPGIEMMRKIIGNSIGHHLITDKFSKPSDFVCTACATWKLDLRPSLSQIRAEPLKLDAFQEISVALLCKLTRQVL

SEQ ID NO: 159669 - protein, 210 aa, Oryza sativa
  Clone ID: PAT_MRT4530_59022C.1.pep
MATKEFDELTLDGTNYPIWASDIKINFASRGILNTIEEPNDGDPEIEPRKLNTALFLLRLYIHKDLKHEYMLETSPLNLWKALKERYDQQKELIWPEANYEWVHLCLQDFKTMAEYNHAVHNIVPDCRIPKHLVLLYQKSLKDKKSSENPRFEAHFNLTHEERPEVASSHQAPVEPESNLNVLPEDVAPLSVIDDMFIKYCSTDPLGDLQ

SEQ ID NO: 159670 - protein, 59 aa, Oryza sativa
  Clone ID: PAT_MRT4530_59023C.1.pep
SPCTPHQHKKGEGDAREDQQQDNRLFPSALTLFPSVYACKAEVAYGGRMPCPSGNVTML

SEQ ID NO: 159671 - protein, 545 aa, Oryza sativa
  Clone ID: PAT_MRT4530_59024C.1.pep
MAVRTWEPPLFTPSPTHRHAGAAAARRPGLRHTFIAVPHGSRSRTIPNGVGGNGIRIRPVSDSDKESGSSACRRPMRGTRRWRMVDGSGGGGGGWEMAVEASGSGGEGGGGGCIGGAPTAAPPWRRRRLRHGGVRGGELAAVGGEPAANWRRTTAADEVEEAAPTRRHHGGGGGTNCRGGSGVLNIGYGIFTIIYLPGDRILGSKDMETKEFDELALDGTNYPIWVSDIKINFASRGILKTIEEPNDGDPAIEPRKLNTALFLLRLYIHKDLKHEYMLETSPLNIWKALKERYDKQKELIWPEANYEWVHLRLHDFKTVAEYNHAVHNICSRLKFCEQEPTEAEKIEKTLSNYASGGQDTDSTAERHHELSLKNAQQRPPGSAPLPEVHFNVQNNAENKKGFKGNSSNNHKNLTGKRKRNNNRRKFKGRKKGKGKGKAPQPRSNGNKHCNRCGSDTHVAKDCRIPKHLILLYQKSLKDKKSSENPRFEAHFNITHEEHPEVASSHQAPAEPESNLNVLPEDVAPLSTMDDMFIEYCSTDPLGDLQ

SEQ ID NO: 159672 - protein, 202 aa, Oryza sativa
  unsure (1)..(202): unsure at all Xaa locations
  Clone ID: PAT_MRT4530_59025C.1.pep
ISSQIHCQELLPLYPITSSVDLSSTCILTSVSFYKDEDSQNSGSSYSLTDYICFKIPDGSXEGKNCIGVIKDFSNSSASGPSSSGFLLHIPDEYECVDVSLYKDSQIVVLLSERSYSDGPGSSYIVMLQMENFSFVPLSRMFPSXIYSVQELXGQELQLDTDYGKKVRSIPHAXSTPLAVRASRGVAWVFSSXRXAXGSFPC

SEQ ID NO: 159673 - protein, 628 aa, Oryza sativa
  unsure (1)..(628): unsure at all Xaa locations
  Clone ID: PAT_MRT4530_59026C.1.pep
NFASRGILNTIEEPNDGDPQIEPRKLNTTLFLLRLYIHKDLKHEYMLETSPLNPWKALKERYDQQKELIWPEANYERVHLRLQDFKTVAEYNHAVHNICSRLKFCEQEPTEAEKIEKTLSTMXSGGQDTAQQYRAKNFQKHSLLIHTLTQAERHYELSLKNAQQRPSGSAPLPKVHFNVQNNAENKKAFKGNSSNNPKNLTGKRKRNNNRHKFKGQKKGKGKGKAPQPRSNGNKHCNRCGSDTHVAKDCRIPKHLVLLYQKSLKDKKSSENPRFGAQFNLTDEERPEVAIKKREGKVLTIAGRDTVIVGSGQAIITLPMGTQITIEGALLYPDSTRTLLSYRYIRQNGFHIETHMDNREEFLLLTKQNGYGKHICEKIPSLTSXLYYTYIKPIAHIAYKVIFQNVDAFHTWHDRLGHPSIGMMRKIIGNSIGHHLITDKFLKSSDFVCTACATGKLILRPSYLKIRAEPLKFLEHIQGDICGPIVPRSGPFRYPEHRVQSIHMDNAAKFTSHAFDDYCMALGIQVQHSVPYVHTQNGLAESLIKRIKLIARPLLMNCKLPSSFWGHAVLHAANLVQLXPTAYHETSPMQLVRGNPPSISHLRKFGCAVYSPLPPPPRGSPRPRHLPGC

SEQ ID NO: 159674 - protein, 135 aa, Oryza sativa
  Clone ID: PAT_MRT4530_59027C.1.pep
MTPAGGKREKGGEKLGLPPCHFGEKEEGEGAMQQRGAGLSLRPLEASARRWRGRVDDDGDDGGPVWSGAATRATDAGQARQALTAAATGRSATTARAHARAARRFGRHRREWQREREGGLCAAHGKAGRERDSAH

SEQ ID NO: 159675 - protein, 355 aa, Oryza sativa
  Clone ID: PAT_MRT4530_59028C.1.pep
MSRAPPDAAGDLFAANLKGSLLAVASSAFIGVSFIVKKKGLRRAGAAGPRAGVGGYGYLLEPLWWVGMITMLIGEIANFVAYMFAPAVLVTPLGALSIIVSAVLAHFILNEKLQRMGVLGCVLCIVGSTVIILHAPEEETPSSVEQIWHLATQPAFLCYVAFALVVSLILMAHCAPRYGQTNIAVYIGICSVIGSLTVMSIKAVGIAIKLTIEGINQAGYFQTWLFATVSAICIIIQLIYLNKALDTFNTAVVSPIYYAMFTSLTILASAIMFKDWSGQSISSIASEICGFLTVLSGTVVLHSTREYDQTISPDLYTPLPPIYWHIQGNGETVKQKEDDSLSADFITVVRQDYFV

SEQ ID NO: 159676 - protein, 579 aa, Oryza sativa
  Clone ID: PAT_MRT4530_59029C.1.pep
MARSWSLLLLPFALALVASVAQAAVVEYTFNVGNLSISQLCQQEMIITAVNGQLPGPTIVATEGDTVVVHMVNESPYNMTIHWHGIFQRGTPWADGPAMVTQCPVRPGGNYTYRFNVTGQEGTLWWHSHFSFLRATVYGALIIKPRGGAKAYPFPVPDEEVVVILGEWWKTNVYDLQQRSLVTGNPAPHADAYTINGKPGDFYNCSAPNQTHKFELKQNKTYMLRIINAALNTPLFFKVANHSFNVVAADACYTKPYKTDVVVISPGQTVDALLVPDAGVAAAVGGRYYMAVIPYNSAVNAADPSFLYSLTNSTAIVEYGGGPATSPPMVPDMPEYNDTATAHRFLSNMTALVPNRVPLAVDTHMFVTVSMGDTFCGPEQTMCMPDDKGTIFASSMNNASFILPNTTSMLEAMYKGSIDGVYTRDFPDTPPIVFDYTADASDDNATLKHTFKSTKVKTLKYNSTVQMVLQNTRLVSKESHPMHLHGFNFFVLAQGFGNYNETTDPAKFNLVDPQERNTVAVPTGGWAVIRFVADNPGVWFMHCHFDAHLEFGLGMVFEVQNGPTQETSLPPPPSDLPQC

SEQ ID NO: 159677 - protein, 146 aa, Oryza sativa
  unsure (1)..(146): unsure at all Xaa locations
  Clone ID: PAT_MRT4530_5902C.1.pep
GRREAKAKVAAGRGDTGGPFKGARRRRRRPTATGDEKESLGKTNPKQTRIHEFPNDFSRCFQRRKGRGDREDHFPSIDSAGNGKERLDLEGNGGGGARXTMGPTGGTHLSATARARARRLRTGPXWAEERGRSFGPTFGPKPKEDF

SEQ ID NO: 159678 - protein, 916 aa, Oryza sativa
  Clone ID: PAT_MRT4530_59030C.1.pep
MALPSRRWAGAVESGVDPVAEAWAKLLRSLSQAMARLRVQMESFDDAQMRWALAAGVRAKAQLLASRLAQILALFWDEGQRAALPACVRDALYGMEDMVDDLEYHMLKFQPHQQEVRCNLLISLVNLRYRLIISHASRSRFLKDLDFVASEAGSLLSAMHKLEPTAPSLPALLLADDDHQVVFGRHKEVTDIVRILIDPPASHHHHPTYDILPIVGMGGVGKTTLAKLVYDDAKVKQHFELRLWASVSTSGGFHKIDITEQILRSANPTYPASIHSEPTLDMLQFHLSQLVASKRFLLVLDDIREESFTSMACQEILSPLSSAEKGSRILVTTTTASVPAMLGASCTYHLNVLDIEDLWSLLKKYAFHGGPTHDSTQELEEIGRNIASKLKGLPLAAKMLGGLLGATKSTKTWMNVLDKELYGDSILPVLELSYSYLPRRLKQCFSFCSLFPRNYKFNKRVLIQLWMAQGFVQSQNSADKNMEDLAEDYFEELLSRSFFDVRREACETHYVMHDLVHDLAQSVSADQCLRVEHGMISEKPSTARYVSVTQDGLQGLGSFCKPENLRTLIVLRSFIFSSSCFQDEFFRKIRNLRVLDLSCSNFVQLPNSIGELVHLRYLSLPRTLNMLPESVSKLLHLESLCFHKCSLEKLPAGITMLVNLRHLNIATRFIAQVSGIGRLVNLQGSVEFHVKKGVGCTLEELKGLKDLRGKLKIKGLDNVLSKEAASKAELYKKRHLRELSLEWNSASRNLVLDADAIILENLQPPSSLEVLNINRYQGAICPSWLQLSSLKQLQSLDLINCRNLEILPPLGLLPSLKYLCMKELCTVNQIGHEFYGDDDVPFPSLIMLVFDDFPSLFDWSGEVKGNPFPHLQKLTLIDCPNLVQVPPLPPSVSDVTMERTALISYLRLARLSSPRT

SEQ ID NO: 159679 - protein, 122 aa, Oryza sativa
  Clone ID: PAT_MRT4530_59031C.1.pep
KAPRNQLATKGGGKLAPAPGGVKKPPRFRAGPVALRGIPKSQKSPELFIRKLPFQGLVRGIAQGFKTALRFQSSPVPALQGAPEGSLVGLFGAPPLCAIPAKGVPFMPKDIQLGGRIPGGGV

SEQ ID NO: 159680 - protein, 616 aa, Oryza sativa
  Clone ID: PAT_MRT4530_59032C.1.pep
MSRRRPPHALATLLSRLRACSSASHALQCHALLLTSGHLAASPARLSNLLLLALASASASPSAADHADSVFAHLAEEASRHAFPWNTLVRLHAAASPRRSLLYFSRMRRAAVAPDAYTFPAVLKACGCAPGCRVGLVVHGEAVRTGLDADLFTRNALISFYCRIGDCRSGRKVFDHGVRDLVSWNSMVAGYVGCGEVDLAQDLFDEMRQRDAFSWATMIDGYGEMAGGVDRARELFDQMPDRDLVCWNSMIDGYARHGRMDEARVLFEEMPERNVISWSIVIDGYVRFGEPNEALEFFQRMLRCGIKPDRVAAVGAVAACAQLGALEQGRWLHSYLEKKKVLFDVVVQTALIDMYVKCGRLDLAKLIFESMPKKSVVTWNVMIVGLGTHGYGLDAIKLFNQMETERAPMDDLSILAVLTSCTHAGLVSEGLGIFYRMEKDLGLEPKVEHYGALIDLLGRAGRVDQARNTIETMPMEPTPELWGSLLASCRSHRCVELAELSVERLASLGADDSGVYVLLSNIYADEGMWDDVFRIRKLMSAEGMKKNIGRSVIEVDGQIHEFVNGVSSPDYYPASLVQEHEVLFWRFGTLAFFAKELGDCDKVENRTRLNHNFNPD

SEQ ID NO: 159681 - protein, 66 aa, Oryza sativa
  unsure (1)..(66): unsure at all Xaa locations
  Clone ID: PAT_MRT4530_59033C.1.pep
KVFTSSSGSPKTSDICGKTSVHCLIKTYAFLTPIFWTNTKFVXFPFQKYAALLAKPTKALMIHSPV

SEQ ID NO: 159682 - protein, 142 aa, Oryza sativa
  Clone ID: PAT_MRT4530_59034C.1.pep
MAVDGQDDPHRRLGAPSVTLGSGKEATPSKADKWARGFSSRGCSISSSSSAVMDKVLAFSILSASPADIAAGGYWARLSWRRKADDQAVDGRRQPSEQQQRGEGSSPSQREERRRPREAPPLPPRFAPEFDGIDCFETIVMH

SEQ ID NO: 159683 - protein, 86 aa, Oryza sativa
  Clone ID: PAT_MRT4530_59035C.1.pep
MASCGRRRWRWATWAWRVRAEWGRGVERRKRRQQLELGLHWLEIEEGADKWAPPVGDLEREGGGRRLGHGLGLGQLGGRALVGEAD

SEQ ID NO: 159684 - protein, 171 aa, Oryza sativa
  Clone ID: PAT_MRT4530_59036C.1.pep
MAVDGQDDPHRRLGAPSVTLGSGKEATPSKADNNLSASNLAPVELEAGFELPPVTVWLPGLPWGYGFSSRGCSISSSSSAVMDKVLAFSILSASPADIAAGGYWARLSWRRKADDQAVDGRRQPSEQQQRGEGSSPSQREERRRPREAPPLPPRFAPEFDGIDCFETIVMH

SEQ ID NO: 159685 - protein, 177 aa, Oryza sativa
  Clone ID: PAT_MRT4530_59037C.1.pep
PPPPRRCRWWGRRGSGQPACAQDQWRRSRPPPPHPPHQRGSADLAGVRVHCSWPPPSHRQRRWGRRGSSCHGAKDAAPSHFLLVVVGGGHRAARRWIHTGEDGREPRRPPPSIPCRPRRPSRCRRRRIHPPPSRWLPPCWSSRIVSRNRSSASHRPQQLRATASDAGTAYCCCGVSW

SEQ ID NO: 159686 - protein, 97 aa, Oryza sativa
  Clone ID: PAT_MRT4530_59038C.1.pep
ASPSEARLTEGLAFPCHGLPRRLLVSNPFHGDRASEKPWLTEGPQPEGTLHLKSLRRRGQPSIFGSLLCLLESIIGSTASPEFIYSSEVLCCRVVIS

SEQ ID NO: 159687 - protein, 71 aa, Oryza sativa
  Clone ID: PAT_MRT4530_59039C.1.pep
GGDLLREGRQILFPLGCLDRGRGCAAALAREEARLECSLRRRVKHAVHVTDRGNIRMWRSLKRRVLPAVSL

SEQ ID NO: 159688 - protein, 106 aa, Oryza sativa
  Clone ID: PAT_MRT4530_5903C.1.pep
GKICKLEDKVDHLEKELAALKGEAPPQKARVRLTARKRALFVPRYQLAPKVRVVEKEATPADPPVVNVSDDEEESKRTHSKIEWGPTQDDGDVPNEPSINSDAQKT

SEQ ID NO: 159689 - protein, 138 aa, Oryza sativa
  Clone ID: PAT_MRT4530_59040C.1.pep
MVAVLPCPDPAVMMGGGGGGGQWRLREDSCSGCEDEDDSGGDWRMTTGGGQHQWWWLEDEDNDDDGGDMRRTMLTAAAGERRRQRQEDKDGGGGNDDREQSQRTDGVDKDKRKLILVGQHISFGCGLNYKSVRKIEFS

SEQ ID NO: 159690 - protein, 93 aa, Oryza sativa
  Clone ID: PAT_MRT4530_59041C.1.pep
RPPSQAERLILRIGLAFAFRVCLTAFAASFVGALLVMCDDVQFEDDIPEEEEEGTGTVANNSAKDGDDILRRSDSYDVMDLEELLKQRTFTRQ

SEQ ID NO: 159691 - protein, 369 aa, Oryza sativa
  Clone ID: PAT_MRT4530_59042C.1.pep
MGLRFDKSIEQEIEDFFASKNLDTVAQSPYIGLIRAVELLEKEGDGPAPANGNDAGSPGPAGSERLSSSGSSVNQPEPLTQDLLADAVTYESPNYLSDAESTNSLGPVTDLASPLDPFSIHPIMDLLMGNYYLAFTNESLSMATKSYAQILIGSRLFLTAMAIHLSLQVAPPDLQQGGNSRISYVHVPAARMSIVIYIATAINSSLFPLTKHPLFLRSSGTGTEIGAFSTLFTLVTGGFRGRPMWGTFRVWDARLTSVFILFLIYLGALRFQKLPVEPAPISIRAGPIDIPIIKSPVNWWNTSHQPGSISRSGTSIHVPMPIPILSNFANFPFSTRILFVLETRLPIPSFPESPLTEEIEAREGIPLKT

SEQ ID NO: 159692 - protein, 88 aa, Oryza sativa
  unsure (1)..(88): unsure at all Xaa locations
  Clone ID: PAT_MRT4530_59043C.1.pep
XKKKKKKKKKKKKKVVKKLGKXEVEKLLSYTVVVPTRXXXXXXXXXXXXXXXXXVSPSGPTPPEGVRPRGSPRRYARAIALLEGSGRV

SEQ ID NO: 159693 - protein, 415 aa, Oryza sativa
  Clone ID: PAT_MRT4530_59044C.1.pep
MASAFSPATAAPAASPALFSASTSRPLSLTAAAAAVSARIPSRRGFRRGRFTVCNVAAPSATQQEAKAAGAKESQRPVYPFAAIVGQDEMKLCLLLNVIDPKIGGVMIMGDRGTGKSTTVRSLVDLLPDIRVVVGDPFNSDPDDPEVMGPEVRERVLEGEKLPVVTAKITMVDLPLGATEDRVCGTIDIEKALTDGVKAFEPGLLAKANRGILYVDEVNLLDDHLVDVLLDSAASGWNTVEREGISISHPARFILIGSGNPEEGELRPQLLDRFGMHAQVGTVRDAELRVKIVEERARFDRDPKAFRESYLEEQDKLQQQISSARSNLGAVQIDHDLRVKISKVCAELNVDGLRGDIVTNRAAKALAALKGRDTVTVEDIATVIPNCLRHRLRKDPLESIDSGLLVVEKFYEVFT

SEQ ID NO: 159694 - protein, 62 aa, Oryza sativa
  Clone ID: PAT_MRT4530_59045C.1.pep
MEVRAVMVEEDTRSVFVTNALKMQEIVADRELHERYIDGFIQQLIFHVADGNSDTAAPDPSS

SEQ ID NO: 159695 - protein, 118 aa, Oryza sativa
  unsure (1)..(118): unsure at all Xaa locations
  Clone ID: PAT_MRT4530_59046C.1.pep
MATRRRCTGRDDGDARAATRWRRGARSGNATGGAGLDAATRRASAGREAAMATGRWRGDGTGARRQAGARRGDSVAAAARGARRRHGARGGGTGREAAARGSRRRXRGARPTATRRRR

SEQ ID NO: 159696 - protein, 73 aa, Oryza sativa
  Clone ID: PAT_MRT4530_59047C.1.pep
MASDNTSISLYHREAASEGESRMATGKARRMAEWAASADVRLLHGRLVSLLLSSSSSPLRPAAPKVVYNGVHV

SEQ ID NO: 159697 - protein, 46 aa, Oryza sativa
  unsure (1)..(46): unsure at all Xaa locations
  Clone ID: PAT_MRT4530_59048C.1.pep
GKGSGHREGGPVXGGGYGAARTDAVVGHGGSRGDEYGGHSGGNWRT

SEQ ID NO: 159698 - protein, 108 aa, Oryza sativa
  Clone ID: PAT_MRT4530_59049C.1.pep
MVSAKKKDGRTTESAGGKRVASFKWKANGVVWESGRRHGHLGPKIFRKYTEGGGTLYPHEATNLGHPAREEQPRLVTFRLSLQGISKGDNLFYAIDKAWILQYTIDKA

SEQ ID NO: 159699 - protein, 90 aa, Oryza sativa
  Clone ID: PAT_MRT4530_5904C.1.pep
ALAKTLSPSEKGQTPPQTPKDRPMTAIPGDQALCSAPFRHLAHFFPKRRNERVPTMDRFWKKIISQLLASFFSLLIPGGFSDGPPLGRGS

SEQ ID NO: 159700 - protein, 375 aa, Oryza sativa
  Clone ID: PAT_MRT4530_59050C.1.pep
MSEHGPREVSLLIRLLDDSCSITEIVYDLDHSEDYARFSTGTIYSSKYSNDYTLLREVFLGARHVTTSSKLQQNSIAVVMLLDTLIDALDNAMTLMLIKERELEALSDQANRQRSLLPTHPRLHRATDQANGHLFTFQGTAGIATFTRDLRRVDWPADFNPAGIEKYGGKTDPESWLTIYTLAIRAAGGDSKAMANYLPVALTDSTRSWPLGLRDRFVANFQGTYERPGIQFDVYHVIQLKNKLLKDFIRRFFETCNKIPEDTNNVIIVNFQKGIRDENLIGKFTRKPPLTVMKLFKTANSAEAINIVREDKQSSAPHLVKDNNEYHKKDRNRRPGNLVATTSYCQSHCPSARNYNRILNGPSPNHPNSKHPAKD

SEQ ID NO: 159701 - protein, 147 aa, Oryza sativa
  Clone ID: PAT_MRT4530_59051C.1.pep
MGDAVIEGSNWRLVEVGRVVVINGDHPFAGHLATIVEIIDHKRILVDGPSANASLATPRQAVPLNKVLLSSLVVEGLNRGSRTGVVRKLWEKSEIDSKWEQTNWAKKRDQMERRKALTDFERFQVLRLKKQRRFEERKALAKVKASA

SEQ ID NO: 159702 - protein, 485 aa, Oryza sativa
  Clone ID: PAT_MRT4530_59052C.1.pep
MFGGGGGGGRKPLDYEELNENVKKVQYAVRGELYLRASELQKEGKKIIFTNVGNPHALGQKPLTFPRQVVALCQAPFLLDDPNVGLIFPADAIARAKHYLAMAPGGLGAYSDSRGIPGIRKEVAEFIERRDGYPSDPELIYLTDGASKGVMQMLNTIIRNERDGILVPVPQYPLYSAAISLFGGSLVPYYLEEEANWGLDFVNLRQTVASARSKGITVRAMVIINPGNPTGQCLSEGNIKELLKFCFHENLVLLADEVYQQNIYQDERPFISARKVLFDMGPPMSREVQLVSFHTVSKGYWGECGQRGGYFEMTNLPPKTVDEIYKVASIALSPNVPGQIFMGLMVNPPKPGDISYLKFSAESKSILESLRRRARLMTDGFNSCRNVVCNFTEGAMYSFPQIRLPPKAIDAAKRAGKAADVFYCLKLLEATGISTVPGSGFGQKEGVFHLRTTILPAEEDMPAIMTSFKKFNDTFMDQYDGYSRM

SEQ ID NO: 159703 - protein, 1137 aa, Oryza sativa
  Clone ID: PAT_MRT4530_59053C.1.pep
MESIIARALEYTLKYWLKSFSRDQFKLQGRTAQLSNLGWDPLLRLRMPIWSPPGANFFFGRDLGDADINGDALHASLVLPPSLAVETARVGKLQITLPSVSNVQVEPIVVNIDKLDLVLVEKDNSEDLSSTSRQIHSSGSVLYRHHQLKTADMDMLIRSPPLAAITFRDLVLYTTNEKWQKLEWQSLSVDLLPHPDMFTDARFNSSSSEDGKRDDDGAKRMFFGGERFLEGISGEANITVKRTEQNNPVGLEVQLHITEALCPALSEPGLRAFLRFMTGVSVCLNRGDVDPKAQQLAEAAGSSLVSIIVDHIFLCIKDAEFQLEFLMQSLFFSRASVPDGGISRNLSCIKIAGLFLRDTFSRPPCTLIQPSMQSVPQEPPPVPDFGQNFCPQIHPFENQQLEFTSGIPLFSLYCLQLTPSPLPPKFASKTVITCEPLMVTLQEQSCLRIASFLADGVVANRSAILPDSSINSMSFYIKEFDLSIPLDAEEITRYSGTKNVCPQSSFMGARLHVENLYFCESPSEKCLLLNLDKDPACFLLWGYQPVDASQRKWATRASHLSLSLETSSTSNEQRTVRGSSPSLWKCVELDDIRFEAAMVTADGSPLLIVPPPEGVVGERISKVSKGNCSATKTSADKRERKLPSDTAFGGEDLYLKVSHRTLGGAFAVTTNLTWKTVSVNCLEGESAIFGENGTAVTGEPNILLHENGHPNMRAVFWVDHRNKNQSKEARFIDIDITHVMPYDMRDMECHSLSVSAKVSGVRLGGGMSYTESLLHRFGILGPDGGPGEGLLRTLKDLSSGPLAKLFSPSHLTDKEDGMPNSKDNDYNSKFDLEVPDDLDVSIELRNWLFALEGTEEVGDWLSPHGSDHISREEKCWHTTFTNLHVSGRSSDRPGSAEKVIHKRALPIERFTAGIEGLQAIKPCLRDQLIGNATSNNLQTGSVFDNTSSIGDQGVDVEATMVICEDEIEGPKWTMDNVKFSVKEPIEAVATKEELEHLTMLCRSEADAMGRITAGILRLLKLDKSLGQGTIEQLRNLGSGGIDNTFSPRKLSRQNSFGSIGTPRTPNLHSTTDAGTKELLESTVASLQIEILESKAKCTALVSQASGVEDQKCAEDIRQLNDKLESMQSLVTKLRTLI

SEQ ID NO: 159704 - protein, 60 aa, Oryza sativa
  Clone ID: PAT_MRT4530_59054C.1.pep
CLAGLKVNFRIQGNYGSGPTQKFSRRPHRQNYPARLVVPSCPCGARWPIFHYVYPGFLFA

SEQ ID NO: 159705 - protein, 74 aa, Oryza sativa
  Clone ID: PAT_MRT4530_59055C.1.pep
MVYWFGDGATATVVIDGVLPGFYMVHLASISFRIFDLQRLMKLVAKWLSLSRTVEAGRRAKAKQRRPERNGVLS

SEQ ID NO: 159706 - protein, 1193 aa, Oryza sativa
  Clone ID: PAT_MRT4530_59056C.1.pep
MESIIARALEYTLKYWLKSFSRDQFKLQGRTAQLSNLGWDPLLRLRMPIWSPPGANFFFGRDLGDADINGDALHASLVLPPSLAVETARVGKLQITRNKAALGIPCASGYCKFWLGGDLSALSPSPAKNSGYGYADKVYFFDLDVQRTFIPSFLFRSPPLAAITFRDLVLYTTNEKWQKLEWQSLSVDLLPHPDMFTDARFNSSSSEDGKRDDDGAKRMFFGGERFLEGISGEANITVKRTEQNNPVGLEVQLHITEALCPALSEPGLRAFLRFMTGVSVCLNRGDVDPKAQQLAEAAGSSLVSIIVDHIFLCIKDAEFQLEFLMQSLFFSRASVPDGGISRNLSCIKIAGLFLRDTFSRPPCTLIQPSMQSVPQEPPPVPDFGQNFCPQIHPFENQQLEFTSGIPLFSLYCLQLTPSPLPPKFASKTVITCEPLMVTLQEQSCLRIASFLADGVVANRSAILPDSSINSMSFYIKEFDLSIPLDAEEITRYSGTKNVCPQSSFMGARLHVENLYFCESPSEKCLLLNLDKDPACFLLWGYQPVDASQRKWATRASHLSLSLETSSTSNEQRTVRGSSPSLWKCVELDDIRFEAAMVTADGSPLLIVPPPEGVVRIGVAFQQFTTNTSVEQLFFVLGLYTYFGQVGERISKVSKGNCSATKTSADKRERKLPSDTAVSLTMNSLQLNFLESLSSNDLQLPLVQFGGEDLYLKVSHRTLGGAFAVTTNLTWKTVSVNCLEGESAIFGENGTAVTGEPNILLHENGHPNMRAVFWVDHRNKNQSKEARFIDIDITHVMPYDMRDMECHSLSVSAKVSGVRLGGGMSYTESLLHRFGILGPDGGPGEGLLRTLKDLSSGPLAKLFSPSHLTDKEDGMPNSKDNDYNSKFDLEVPDDLDVSIELRNWLFALEGTEEVGDWLSPHGSDHISREEKCWHTTFTNLHVSGRSSDRPGSAEKVIHKRALPIERFTAGIEGLQAIKPCLRDQLIGNATSNNLQTGSVFDNTSSIGDQGVDVEATMVICEDEIEGPKWTMDNVKFSVKEPIEAVATKEELEHLTMLCRSEADAMGRITAGILRLLKLDKSLGQGTIEQLRNLGSGGIDNTFSPRKLSRQNSFGSIGTPRTPNLHSTTDAGTKELLESTVASLQIEILESKAKCTALVSQASGVEDQKCAEDIRQLNDKLESMQSLVTKLRTLI

SEQ ID NO: 159707 - protein, 355 aa, Oryza sativa
  Clone ID: PAT_MRT4530_59057C.1.pep
MNDVQDKKDSVNTVLLPVGLSSLASPLTTARLTEENPSYICRCRVLGPITGHRLCWRKGNDGASVEGAPGGREGARWGCRERIWEMERGWRRAGEGLCWVLAAERIVGGEGCATAILRREARDGGATCEGEAVRAAAGDLAEGEGRFALAFYGNPTRPQLVALIAQEEVTSAGGQIEPPGIHMIYLPYSDDVRYPEEVHLTSDDAPRATDEQIKKASNLLRRIDLKNFSVCQFSNPGEDEMPDVKDETLPDEEGLARPVVVKAVEEFKASVYGENYDQEEAEAAAAKAGASKKRKALTDAAAEKSAAHNWAELADTGKLKDMTVVDLKSYLSAHGLPVSGKKEALVSRILTHLGK

SEQ ID NO: 159708 - protein, 92 aa, Oryza sativa
  unsure (1)..(92): unsure at all Xaa locations
  Clone ID: PAT_MRT4530_59058C.1.pep
HLIQKLNYLLYFFVGSXPELDSVEGALQWRETSWSRRVIQQKLGDVSAVLKAFADYVDSICGTPYPMDYEIWLRRLRRTINEDHGKEIDTSS

SEQ ID NO: 159709 - protein, 72 aa, Oryza sativa
  Clone ID: PAT_MRT4530_59059C.1.pep
MSSRRWIGRRRLAGRGLFSATSLTSARPHQSCYPHLAGVAVDTAEPPKSIDGEALPANASPHHHPLPAGEGH

SEQ ID NO: 159710 - protein, 82 aa, Oryza sativa
  Clone ID: PAT_MRT4530_5905C.1.pep
SPKKAVSTLNHQSRNPPSGFPQVWENSWPFSLIEKVILINSCLASFLRRAGICSNPDFPGCFFQIISNLSHSLVSNFFAGKQ

SEQ ID NO: 159711 - protein, 807 aa, Oryza sativa
  unsure (1)..(807): unsure at all Xaa locations
  Clone ID: PAT_MRT4530_59060C.1.pep
MSQQGEPMSTTTIGTTSSRNPRTQNKIPKEVYTITEVDDVGYPTAPTKVVKKFPTICGVLGRRNFTILKDHIDLVPQEEKEEAWRQFKESFRYPTEAEAGLKRQAIRNMGNCWKNFKTTLVTEYVLNLAQPEPFGKYAFITQPVWDEFHAAKSTKESREKNQTYHDLQARNLHPHRLGTGGYTGKQAEWDKEDEAAAESNTPQVLADIPVQRARNWARTRVKKNSDGTLSFPNPEDQAVYQKIVELNAERQASQEYKKHKLSKAQKAARIKAQLREELKEELREELTAELLGIEAQIEARIRDRSTDATPGPIVQVSPTQRHSSCASTEAPAEQPEGPATVDHITEPTSCTLVVRVTPGFAIPAAEGQAFKPTQETRVHGAQLQAGNAKVQVDLVKPDWVGYTIPHPPNDEILTLGAARGTFIQWPKHSIEINITPRLAPSSRPPPTRPHQTVVSLPSAVEQRDEDLQLQYDTDFGDDGMEVDSRPHLPPPAKRSKRAKSSPPKLDTRRKAAGTGRGKIKVPLAPKKLDLGKAPVAPPKPLAKFILGMPLVGDDALFKMGPACKELHRYMEKSNARRKNRETSMLGQHDGQPFLGPTAFIAVDFKDLWDLYRVRAIDTNLLKCYSLLTWKHVHRKAPHVALLDPAVVNETTLKNDRANIVAYIKDCLFARQDKDFIMCAYNHQRHWILLVITPKWSLVHYLNSNINPKIYDWSAIESALNEAWDQYVARGGRHKDGHPKLGHKKDFLIRXQVGNQCRFHVCHNMRSFADKEKISTIPEINFDIIREEITQFILDDLLSPKGMFKVKS

SEQ ID NO: 159712 - protein, 212 aa, Oryza sativa
  unsure (1)..(212): unsure at all Xaa locations
  Clone ID: PAT_MRT4530_59061C.1.pep
RGQASVSWQRLAVYGFGRLSGVHGNSSEMVRDAARADDALRAPSSGAPAGVLFKQQDNVXEDSSFDEGERKSTMLRRRGRDRQGDDVRSSISTTSHRQXRRRGIEVAAGEARTSRQQVDVSPATGVSDERERRDLRLAVPPTSGEDAISSGPGSTGNSPYAEALRPTSPAAERTSSRRTPRYGSRCRRPQSTHVPAGRRDTPAKTTIHISLI

SEQ ID NO: 159713 - protein, 752 aa, Oryza sativa
  Clone ID: PAT_MRT4530_59062C.1.pep
MSQQGEPMSTTTNRTTSSRNPRTQNKIPKEVYTITEVDDVGYPMAPTKAVKKFPTICGVLGRRNFTILKDHVDLVPQEEKEEAWKQFKESFRYPTEAEAGLKRQAIRKMGNCWKNFKTTLVTEYVLNPAQPEPFGKYPFITQPVWDEFHAAKSTKEPRAKSQAYRDLQARNLHPHRLGTGGYAGKQAEWDKEDEAVAESNTQQVLADIPVQWARNWARARVKKNSDETLSFPNPADQVVYQKIDDILMKALGNEEHHGRTRGIGSNVPWKFGFPQYAWQYKKHKLSKAQKAACIKAQLREELKEELREELTAELLGMEAWMEARIRDRSTDATPGPIVQEPTSCTLVVRVTPGFAIPAAEGQAFKPTPETRVHGAQLQAGNAKVQVDLVKPDWVGYTIPHPPNDEIPTLGAAHGTFIQWPKHSIEINITPRPAPSSRPLPTCPHQTVISLPPAVEQRDEDIQLQYDTDFGDDGMEVDSRPHLPPLAKRSKREKSSPPKIDTRRKAAGTGRGKIKVPLAPKKLDLGKAPVAPPKPPTEFTLGMPLVRDDALFKMGPACKELHGYYMEKSNARRKNRETSMLGQHDGQPFLGPTAFIAVDFKDLWDLYRVRAIDTNLLKCYSLRHWILLVITLKWSRVHYLNSNIKPEIYDWSAIESALNEAWDQYVARGGRHKDGHPKLGHKKDFPIRQQVGDQCGFHVCHNMMSFVEKVTLLDPEEFISSIPEINFEIIREEIAQFILDDILSPKGMFRVKS

SEQ ID NO: 159714 - protein, 115 aa, Oryza sativa
  unsure (1)..(115): unsure at all Xaa locations
  Clone ID: PAT_MRT4530_59063C.1.pep
MAAARSVGMEAEVAALRGRFAAGGTRGAEWRAAQLRGILRMAAEAEAEVCRALHADLAKPYTESYVHEIALVKSSCKFALKNLKKWMKPQKVTDXLMTLPSTVRVAAEPHRRPAR

SEQ ID NO: 159715 - protein, 857 aa, Oryza sativa
  Clone ID: PAT_MRT4530_59064C.1.pep
MAQDAGDTVLPASRITADRHLILPRKIMPEGAVVRAGEWRPRPRYLERSVHLLSFSMAGLIPPFSGFFHEVLDFYEIHALHLAPNAVMTLAIFAHLCDMFIGVRPTMRLFQSFFIPQLLQGAVEYDAMWDHLRGLRSLGLTGAMVFGDYFRRRIAPLQDRSRGVWEYTGPNNPMRTHVGARWDWGEEDAKMVIQRVLGLDSAEQMLIPDEILPLRCDRDRESILAVMSVVGVGRGWSSRGGTGGSAAGMGGGGATAGGSRTCGPGGGGSSRSPGTNRGPGDDSASDPKEKRKISESRPPSPPRGGGAERVADRPPAGHKRPAGAEAGRKKKRLRKIGQTEPCRGSFIEPPKWTFNRPPCSDIDSKFEWDTDVDVEFPAALALLSMDAMVPSTRRTQVDDVGYPMAPTKAVKKFPTICGILGRRNFTILKDHIDLVPQEEKEEAWRQFKESFRYPTEPEAGLKRQAIRKIGNCWKNFKTTLVTEYVLNPAQPEPFEKYPFITRPARNLHPHRLGTGGYAGKQAERDKEDEAAAESNTPQVLADIPFQRARNWARARVKKNSDRTLSFPNPEDQAVYQKIVELNAERQASQEVCSQKREDDILTKALGNGEHRGRTRGIGSNVPWKFGFPQYAWHYKKHKLSKAQKAARIKAQIREELKEELREEFTAELLGMEARMEARIRDRSIDATPGPIVQVRPTQRRSSCASTEAPAEQPKGPAAVDHIPEPTSCTLVDWVTPGFAIPAIEGQAFKPTPETRVYGAQLQAGNAKVQVDLVKPDWVGYTIPHSPNDEILILGAARGTFIQWPKHSIEINITPRLAPSSRPPPTHPHQTVVSLPPAVEQRDEDLQCHAQKFKNQNF

SEQ ID NO: 159716 - protein, 861 aa, Oryza sativa
  Clone ID: PAT_MRT4530_59065C.1.pep
MGAVANDGEYEVSRLPNLVWSGYSLHSTSQEKLVNRTFRSNTTFLEICYRYQYPRLLSSDIDSKFEWDTDVEVEFPAASALLSMDAMVPSTRRTQVDDVGYPTAPTKAVKKFPTICGVLGRWNFTILKDHIDLVQEKEEAWRQFKESFQYPTEVEAGLKQQAIRKMENCWKNFKTTLVTEYVLNPAQPEPFGKYPFITQPVWDEFHAAKSTKESQEKSQTYRDLQARNLHPHRLGTGGYAGKQVEWDKEDEAAVESNTPQVLADIPVQRARNWARARVKKNSDGTLSFPNPEDQAMYQKIYKKHKLSKAQKATCIKTQLREELKEELREELTAELLGMEARMEARIRDRSTDATPGPVVQVSPTQRRRNSCASTEAPAEQPEGPAAVNHITEPTSCTLVVRVTPGFAIPAAEGQAFKPTQETRVHGAQLQAGNAKVQVDLVKPDWVGYTIPHPPNDEILTLGAARGTFIQWPKHSIEINITPRPAPSSRPPLTRPHQTVVSLPPAVEQRDEDLQLQYDTDFGDDGMEVDSRPHLPPPAKRSKRAKSSPPKLDTRRKAAGTGRGKIKVPLAPKKLDLGKAPVAPPKPPAKFTLGMPLVGDDALFKMGPACKELHGYYMEKSNARRKNRETSMLGQHEGQLFLGPTAFIAVDFKDLWDLYRVRAIDTNLLKCYFLLTWKHVHCKAPHVALLDPAVVNETTLKNDRANMVAYIKDCLFARQDKDFIMCAYNQQRHWILLVITPKWSLVHYLNSNIKPEIYDWSAIESALNEAWDQYVARDGKHKDRHPKLGHKKDFPIRQQVGDQCGFHVYHNMRSFAEKVTLLDPEEFISRIPEINFEIIREEIAQFILDDILSPKGMFRVKS

SEQ ID NO: 159717 - protein, 74 aa, Oryza sativa
  Clone ID: PAT_MRT4530_59066C.1.pep
MQPWLQHLHYCLNVELRVIVPSKQHMRTVIQCAILGVSWVAPVRRLRRQAARRSSSNSVRRPGDLSGDGVGQPE

SEQ ID NO: 159718 - protein, 309 aa, Oryza sativa
  Clone ID: PAT_MRT4530_59067C.1.pep
MERYTCWVMHGEQDLGTDGAAADGSGTDIHEEGDEEEHDMFVPSPLGGEMVDVDPDMLQDMLRDVDDPAMNERDSMKFSSWVNIRRGVKVDKEGFTLVDLAKQGEPMSTATTGTTSSRNPRTQNKIPKEVYTITEMDDVGYPTAPTKAVKKFPTICGVLGRRNFTILKDHIDLVPQEEKEEAWRKFKESFRYPTEAKVGLKRQAIRKMGNCWKNFKTTLVTEYVLNPAQPEPFVKYPFITKPVWDEFHAAKSTKESQEKSQTYRDLQARNLHLHRLGTGGYAGKQAEWDKEDEATAESNTQPVLADIPV

SEQ ID NO: 159719 - protein, 51 aa, Oryza sativa
  unsure (1)..(51): unsure at all Xaa locations
  Clone ID: PAT_MRT4530_59068C.1.pep
TQSPGKRLQAPASLKNKAKDFNTIKKRHISSHENCKLNSNMLXRFLPALFK

SEQ ID NO: 159720 - protein, 376 aa, Oryza sativa
  Clone ID: PAT_MRT4530_59069C.1.pep
MGEEAAMATMESAYHDELAPAAAPAPAKGGGSKKKRKQQKREEKRKECRLVSYHELPDYMKENEFILDYYRSEWPILNALLSLFSWHNETINIWTHLLGFVLFFGLTVLHLGQYFPQVADLIGHLSWPISKVAENVSSNIGDVLSGAASFMQASPASSAGAMAAAWPVTAAAAATTRWPFFVFLAGAMFCLLSSAACHLLSCHSHRLNLFLIRLDYTGIAVMIVVSFFPPIYYIFQCEPRWQVVYLSAITAAGVATVYALMSPRLSAARYRAHRALLFVAMGLSGVVPAAHAVAVNWHEPRRNVTLAYEGAMAASYLAGTAFYLTRVPERWRPGMFDLCGHSHQIFHALVIAGALAHYAAAIVFIQARDEMGCPAP

SEQ ID NO: 159721 - protein, 145 aa, Oryza sativa
  Clone ID: PAT_MRT4530_5906C.1.pep
LKLSKDGNLVISSNASIIWSSTVNRTSATTMNSSTSVVLSNDGNLVIGSSPNVLWQSFDYPSDVLLPGAKFGWNKVTGFTRRFTSKKNLIDPGLGLYYVELDKTGIDLSRSNPPNMYWSWSSEKSSSALISPRAEFGTRPRAEFL

SEQ ID NO: 159722 - protein, 81 aa, Oryza sativa
  Clone ID: PAT_MRT4530_59070C.1.pep
MAREELAGADDGASAQRRPPSARTATRQVAMRDTAAKDGATEVREARGPGVTEVTLGEEVARLGLGIEQIGNKAREQIEHM

SEQ ID NO: 159723 - protein, 57 aa, Oryza sativa
  Clone ID: PAT_MRT4530_59071C.1.pep
MVGRPSNKSSGSHAKPGTIFMGHMVGKPSNKSSGSHAKPGTIFMGHMVGKPSNKSSG

SEQ ID NO: 159724 - protein, 48 aa, Oryza sativa
  Clone ID: PAT_MRT4530_59072C.1.pep
MDGSLHDREEGSKRRKSREGWASLPRRVPASERSIDRSSSPEAETPTK

SEQ ID NO: 159725 - protein, 58 aa, Oryza sativa
  Clone ID: PAT_MRT4530_59073C.1.pep
GEWLGSPAGECDKKFLGGSQGRLTDPMLGCLKQWNGPPRSLGKKKKTIAPGGAIRPPG

SEQ ID NO: 159726 - protein, 270 aa, Oryza sativa
  Clone ID: PAT_MRT4530_59074C.1.pep
MRNAAAARPKPEQGFHLEIYGGKWESAMTTHSRRETARRRRHRTGQRHGKAFASVYTLPTQAPPHRRPHNSPRRLTSSQPSMQSTITHTPLLHRPEPAKAAKGPVVETRLATVATSARSPAAPPPRPVGAAGGCHRSAPWIIWDFHIERNIIFPPDFVVYKYMKTSPICNFGFPDIPINTLAFKTDSLNYSDFHASMCFAIAKVTIRAGVTGWCIQRSDIGGGDAASPAKEVYCSGYAGGLQQEILCWESRRTETARQDQRQVEDAAASD

SEQ ID NO: 159727 - protein, 94 aa, Oryza sativa
  unsure (1)..(94): unsure at all Xaa locations
  Clone ID: PAT_MRT4530_59075C.1.pep
PPAHRQSVAGRSPGATATGTARRRLGGKTAKPPPSDRAGRNXARSRSRSPPPRPSRQSPGAPPRPTRTRRRRRRRRRRASPAARAPRASPSPSC

SEQ ID NO: 159728 - protein, 241 aa, Oryza sativa
  unsure (1)..(241): unsure at all Xaa locations
  Clone ID: PAT_MRT4530_59076C.1.pep
MASSARDLSGDPPESTRLRIGDDIAWSDVGGVYDRDDSLKENTNPKCILKNHLPGAHNGGSQRFSGNLKPTAAPIIGISGKLGQGGKXRHHPPAMFPKKVAVTGGGGRNPKAAVPEHEPTSPKVSCIGKVLSDRERARRGRRPAGRMVPAGGCCPGLGGLFRRSHSRKKNAVECVDQSPPPLPPWASRRGEPKEVKEATPAAAAAMAPGLGGMMRFASGRRAADWATEMEPDGRVARSGPL

SEQ ID NO: 159729 - protein, 220 aa, Oryza sativa
  Clone ID: PAT_MRT4530_59077C.1.pep
MSKVLERRNSFGGSTPTSSASGSRKDEKTTPHYLRASTGSCHNLCKYGHKNPFEEEKKLSTSGGRRKKLPSHLNNLTLHRSAILDRSKDVRQRNLSLAKSSISLGESDRIAPKKTQANLKGSSDHLITRTSSSADHKNVNLDGRKKHLTVAQKTSADSGSSNGVPKFDKKSAMPVKGTIVPAKLKLAEMPQLEESRTMEKVTTVKHHQLRDRLHCLLSLT

SEQ ID NO: 159730 - protein, 78 aa, Oryza sativa
  Clone ID: PAT_MRT4530_59078C.1.pep
MVFYGLPIVHPNSILVVTINGIGLVIEAVYLTIFFLFSDKKNKKKMGVVLATEALFMAAVALGVLLDAHTHQRRSSAP

SEQ ID NO: 159731 - protein, 127 aa, Oryza sativa
  Clone ID: PAT_MRT4530_59079C.1.pep
STLVYPDQGETGAAVCSYVSASCFFPPLFLLIQGPPPTEKGGIPNYTPTEEDPPMHLSTSLFGVAPKTYTPRPGQAPTPSNFLAGWAPWPNPRTQKNNPAWWGCQPLQLLFLTTPPPTIKSTTPPPV

SEQ ID NO: 159732 - protein, 57 aa, Oryza sativa
  Clone ID: PAT_MRT4530_5907C.1.pep
RLLSNMTHGIAGGHGYPAHQGYHPQGYPTATRAYPTPSVAYPTTTEAYPSPPEAYPP

SEQ ID NO: 159733 - protein, 135 aa, Oryza sativa
  Clone ID: PAT_MRT4530_59080C.1.pep
MRPSDWPRTCKWHCAVHRLRPSVQLKDNDDAEALTITPRRNQSPVRRDHNAPLVGRSGARLISILALPSATGTLLISILASSATARRGGPDAAKVSLVIPADRGGHHRHLPAHDHLIVVGQAALAPFLPPACSTD

SEQ ID NO: 159734 - protein, 102 aa, Oryza sativa
  Clone ID: PAT_MRT4530_59081C.1.pep
MAAGVGKVGEWIRRRMMPRRSKSKAAGSRSRSEGDGGEALPAPPQRKLRARALPAALRWRPRGRLLAVLYEKVVYHLLWLVESIVVVARLCFFVMRFGLKQL

SEQ ID NO: 159735 - protein, 424 aa, Oryza sativa
  Clone ID: PAT_MRT4530_59082C.1.pep
MGVRYSALGVTLNDAAMVKKLFDTVLEKYVSLVAGIEQFYDVDTMPFEEAVGRLKAYEERMRKKNRVTGCQCHFVDAVLVPRRSWMLISSLGKKLASEEEWMEYEYHYSRGIRVSPDIRKVLFDCIWEYMKLAYPVVQPKMETDEKRKKPCSAHVESVRELDEALAFLPEFQESVLILHIATNVFYGLCIEPDQNAASFKQLEAIKTLSDYMVFLVAVRPGMLPGLKLRSLYEATQKALEKLWSEQRRSCNCKRTKERCLAEILRCLEKKPGERVLKNHLYCNWRPGYRTRNREPGFISKLYDSSIILSDGVKLAEVILRWLSSGYRDNILYIKSEDKFQPIFPELMKIMKCKMYDDPTYDKRLSKLLEHIFKEWVRLLINSSVKCMRDSHAKQLSRGGELTTVVWILVEHAAVFHVDRARFPA

SEQ ID NO: 159736 - protein, 381 aa, Oryza sativa
  Clone ID: PAT_MRT4530_59083C.1.pep
MVGMKKKSVGLGRLSLMISMVQVLGAVGGGGVHPSKMRLVPAVYVLGDSTLDVGNNNHLPGKDVPRANKPYYGIDFPGSKPTGRFSNGFNAADYVAKNLGFDKSPPAYLVLKARNYLVPAALVMGVNYASAGAGILDSTNTGRSIPLSKQVVYLNSTRAEMVAKAGSGAVSDLLAKSFFLFGVGSNDMFAFAAAQQKLNRSATPSEVEAFYTSLISNYSAAITELYGMGARKFGIINVGPVGCVPSVRVANATGGCNDGMNQLAAGFDAALRGHMSGLAARLPGLAYSIADSYALTQLTFADPGAAGYANADSACCGGGRLGAEGPCQRGAALCGDRDRFVFWDSVHPSQQANKLGAKAYFHGPPQFTSPINFNQLANYNS

SEQ ID NO: 159737 - protein, 376 aa, Oryza sativa
  Clone ID: PAT_MRT4530_59084C.1.pep
MARWCVGWPAAARGGRDELTWQAELTAHAAGEFSMAAAQANAVMEDQAQVMASPGATLVGVYDGHGGPDASRFLRSRLFPLIHEFAAERGGAVDADVIRKAFLAADEEYLQLLRWSLPNMSRAAASGSCCLLGAISGDTLYVANAGDSRAVLGRRAAAGQTVAERLSTEHNVASEEVRRELAALHPDDGEVVVHARGAWRVKGIIQVARAIGDVYLKTPEFKRDPAVQRLCSAAAAVELARPVVTAEPSIHARKLKAGVDLFVVFASDGLWEHLSDEAAVQLVSKSSTRRGVAARLVQAALGEAARKREVRRGDLRRIERGVRRHFHDDITAVVVFLDLDDDGGRRARRRGRVVDSSSSSCSNTPLDVYSLYNSTA

SEQ ID NO: 159738 - protein, 97 aa, Oryza sativa
  Clone ID: PAT_MRT4530_59085C.1.pep
MGRTCHIPPILYCPLLPSSTGKGGSGDEAAAVGKKTREIGERSWPWLSSSMVVGLDGGDDDDEWQAKEKPCSRGEGVPSEAEEKPRGRGEGTPVEAE

SEQ ID NO: 159739 - protein, 228 aa, Oryza sativa
  Clone ID: PAT_MRT4530_59086C.1.pep
METARRRRHDVAARQGDGGDKTARGGAGCKAAAQHTQGRRRPPGGARQRRGGGHPAGGEEAGGGGGSPAAGDGRRGGGGNYRLLVDAKSVAMDRRSPVLHGLLRPPSHAATAKGGAGHRRAAVGSGAERCAAGGARRQGRAGGRPCGPPTAESVLHTASRDASAAAPLLPALPLEGLDDVLSLLSPTSPPNHLVLGPPHSGSRPLSLPHYRDLRSPPRSTASSPSSLY

SEQ ID NO: 159740 - protein, 65 aa, Oryza sativa
  unsure (1)..(65): unsure at all Xaa locations
  Clone ID: PAT_MRT4530_59087C.1.pep
MAEPNPQVEREVEVEEXVKKPQLMYLLLVPGAQALAKICLGGLSPLAKDHAGPIRPGGLHPWVRR

SEQ ID NO: 159741 - protein, 170 aa, Oryza sativa
  unsure (1)..(170): unsure at all Xaa locations
  Clone ID: PAT_MRT4530_59088C.1.pep
MLSGCWGVRLSSSLSWRPAATACCAGLPGADGVALLAWEERRRRQQLATGXSSLRFSIESPFFAAARGFSSSETLVPRNQDTGLAELPATVAALKNPNPKVVYDEYNHERHAPGDPSKRAFAYFVLSGGRFIYASLLRLLVLKFVLSMSASKDVLALASLEVDLSSIEPG

SEQ ID NO: 159742 - protein, 48 aa, Oryza sativa
  unsure (1)..(48): unsure at all Xaa locations
  Clone ID: PAT_MRT4530_59089C.1.pep
SEIVFQQSCLRXAXRIEYYISNIGVXEIIFVITITNAXLLXYHLTELL

SEQ ID NO: 159743 - protein, 83 aa, Oryza sativa
  Clone ID: PAT_MRT4530_5908C.1.pep
RAILCSYPFIVCCLGPLVFIFSEPGMVASISKTYCCHGNRGSGELVRPLEQQFGRGRWQLLVLGTVTWLERWQWHDGGKHCCL

SEQ ID NO: 159744 - protein, 144 aa, Oryza sativa
  unsure (1)..(144): unsure at all Xaa locations
  Clone ID: PAT_MRT4530_59090C.1.pep
ADGDEVQGHPTEKMKWNASPNCKLCEVEDVDHLMFNCAISKIMWCCVRDAFGWSGIPRSRGELMDKLKMQSCDSNITSLSLFAAGSWAXWLLQNDWVFNNKMIDDASHLPXRLFLYIYSGENXRQRRRVLWTLQGTYCLPVSER

SEQ ID NO: 159745 - protein, 103 aa, Oryza sativa
  Clone ID: PAT_MRT4530_59091C.1.pep
MVRELNRQYADLRAMAEAHKACWERTEKKIEKERESKYFVWRWTRPKPEPAPTTTKKTTASTYFRRGEGGGLASHAAAIGDPDLSRLVQRVDTKTKLKKKLEY

SEQ ID NO: 159746 - protein, 31 aa, Oryza sativa
  Clone ID: PAT_MRT4530_59092C.1.pep
FACICNQVTFQSGCPCVPQEGFILDPFRLFP

SEQ ID NO: 159747 - protein, 237 aa, Oryza sativa
  Clone ID: PAT_MRT4530_59093C.1.pep
MLRDTSRSPAGGCFAFGSCLAISTVFLAAQRAAEANCFTPPCITNWINQRGTSDDDGRHGDGRLLKDTSRSSCSRIIIAHFNTLRQKHEQLFKDFTYCRRMYRTRNRMIRISLVCWAWANNILRPWFPTFDLDLAQQTRPGTGMAKQRRGGKLKGDGDGNRQIDATTSIRARLAINPGQPARARISWCDIAIRPLGFLPHHVVAAIYHINGRSVDTEARSTRISMIYVLSSRCLRRQ

SEQ ID NO: 159748 - protein, 552 aa, Oryza sativa
  Clone ID: PAT_MRT4530_59094C.1.pep
MSWKAFTKSLLFHSNKIVRRLKSFVLHAHPPPPPPHVVRRPPSSDELPAAADVTVCKVEGGLLMSPSTFPYFMLVALEAGGLFRGLLLLLLYPVLLLLGHDRATKLMVMVSFAGVRKEKDGSPSFRVGRAVMPKLFLEDVSAEVFDAAARRRRLVCVSSMPREMVEPFLKEYLAVDAVVAPELRAFRGYYLGLAESDGEVMQRLDMEEVIGMKERGGAGDGDGDGQVTVVGIAGLGNSFHQLFQNYCKVGVVASEWARRRWRPLHPRRYAKPLIFHDGRVAFRPTTSATLAMFVWLPLAVPLALLRVALIVVVLPFSLAAPIAAALGIHCRCIAASTLRAAAVLDLFVCNHRSLLDPLYVSAVAGRADLAAATYSISRLSEILAPIRTFRLTRDRAADRAAMQAHLSRSRRGGGGGGLVVCPEGTTCREPFLLRFSPLFTELGADVQPVALHSEVAMFHGTTAGGWKMLDPFFLLMNPSPAYVVHFLDPVAGGGGGPEVANEVQRRIAETLGYTCTALTRRDKYLVLAGNDGGVANSGLAADFHHAQDLLHY

SEQ ID NO: 159749 - protein, 72 aa, Oryza sativa
  Clone ID: PAT_MRT4530_59095C.1.pep
RTHEMNLANPHNSKWLATELKHSTQQSPQWSSDVHFPRAERSNHLSTIQSTKYAMGYFTFLPPNLLSVCMER

SEQ ID NO: 159750 - protein, 128 aa, Oryza sativa
  unsure (1)..(128): unsure at all Xaa locations
  Clone ID: PAT_MRT4530_59096C.1.pep
RSRRRRAAAGTPAPPAPAAAPPPRAARPPRPPPAPARTATPRSRAPPPRRRRRPASCSCPCVRSAAAAAACRRRRXPSSTWXRSPPRCRTALHRRRRPRRRQRPPARRRCGTATPRRRATPCGSGASA

SEQ ID NO: 159751 - protein, 41 aa, Oryza sativa
  Clone ID: PAT_MRT4530_59097C.1.pep
RERERERERERERERERERERERERERERERFISPTTTWHP

SEQ ID NO: 159752 - protein, 183 aa, Oryza sativa
  Clone ID: PAT_MRT4530_59098C.1.pep
MPPSPPLQLVALLLLSLLLRSATAAEYTVGDGPWDTGTNYATWSDKHAFLAGDILVFQYVRSQHNVLQVTEATYRSCDTGGGGVAGVIKSYDTGYDRVQLTEPNATYWFICDFPGHCLGGMRLAVKVAAAAAGGGGGGGGSPPPSGVPLHPPAAGGAGRSQWPAWGLTLAVLLVVFHYCIIIF

SEQ ID NO: 159753 - protein, 100 aa, Oryza sativa
  Clone ID: PAT_MRT4530_59099C.1.pep
MAPEFPSAIDERSISPELRRSRINCSLPQSPLNCHRFHRTKARHPVANPGWIRGGAGAPTSPNSGSATAVTSGSAAPLLQPHFIVAARFEVRCRERVVAR

SEQ ID NO: 159754 - protein, 916 aa, Oryza sativa
  Clone ID: PAT_MRT4530_5909C.1.pep
MEEDEVEDDNIPDFAQYVGFEGNQTGEEEIAADGNDVADDLGQMLQDAREDCESEKEAHKLDKMLEDHRTSLYPGCEQGHKKLDTTLELLQWKAKNGGKSPRRRRRISPSSRARRPRRRLRLLRCRRISGMADRDEEQILYDTIAEGSSQYWNEEEGNEDPNQYLNEEGNVERDAEGNQQGHVERDVEGNQEDGWVVRDNVPVSTVYWRRTRARGDHESFVPDSEKEMLWTTMLETFILPAGTEDKVKRWTLKKMAEQFQSFKGDLYQKYILKGQTPNFDTFPKLRDHWDEFVAYKTGEQGQAMMERNKENAAKKKYHHHLGSGGYSVAMPKWEQMEASLIEKGIEPATANWPERSKFWYYAHGGTLNPADGSLVFGDQIREAARRLTDAVEASSQGTFRPDRDRDELTLALQTPEHPGRTRGKGVIPWKIGFKEDIHTYRSRMRSKRDTEAKIADLEFRVSSYELNMQEEVARKVDERMAAHRSHDPQLTIPPAMVSPSGNRSSCASTGQVASGMAIPTDPSGTYHCRPIPAGYSKVKVELVEGAYEDLELDYPGGDGSCTVSSSCSASTVSTSGSSIDSSSGSCTDSSSAPPAPPPAHTRATKKAKVDAAKNKDPGYDCTQEELDAYVASEVKRQFKPRSPEKKIPIDPTVRNFFRGMSASVKEAIKLSDYERTLKKASSGKSKPVPQLGEQPNQEIEPLVTGKEMTIEQFITDTGLTTDQLLGVAPIEKAEVKYMYELGKPLVKPELLQSLPTQMYKFHQLYMEMSATGREMIGARIRDTDFLQGDDILWINFRGIYELYQLDTLDVSIMSCWILMEIQRARRRRVFDTGFIDPRKVNVAMLDQYPQETEDNLVHLLKAQHYKTFILLPYNTEFHWVLLLIDLEACTVNGPARLQPVAGKIAIFACGRADRTG

SEQ ID NO: 159755 - protein, 487 aa, Oryza sativa
  Clone ID: PAT_MRT4530_590C.1.pep
MGGGGGGGRGGGDHHSPTSGKTPRGDYSALATSTPTKQSPRWPSPSAAASSVLPSGAAALLESRWALPAAFGVFLFLAVTLAVATSSLSVAASLPAFFPAAKQPLPLPPPSPPPGAGVARLAYLVSGSKGDLDRLWRTLHALYHPRNLYVVHLDREAAVSERLELAARVANSSMFRRVGNVEVIRRSNMVTYRGPTMVANTLHACAVLLRRSRDWDWFINLSASDYPLMTQDDILHVLSSIPRNTNFIEHTGYLGWKDFVLTNEAGWQCRGQRARPVIVDPGLYMARKQDIFYVEQRRELPTAFKLFTGSAWVALSRDFAEYVVWGWDNLPRTLLMYYANFVSSPEGYFQTVLCNAPRFVPTAANHDLHHIQWDTPPRQHPHPLALADRPAMERSGAPFARKFPRDDPVLDAIDADLLGGRGRANGNGTAGAEGDMFVRGGWCVGAGGGCDEVGDDWVLRPGPGAARLDKLMDRIVRSEAFVNSQCK

SEQ ID NO: 159756 - protein, 212 aa, Oryza sativa
  unsure (1)..(212): unsure at all Xaa locations
  Clone ID: PAT_MRT4530_59100C.1.pep
LLDXTMRPXXYXLXHXVVLAXXTYXRDTXSWRAXXKVLEXGESIGLKXFXPXKXXGSXDXGXVXXVXLLNTGEYFXXKTMDKSIXLXXXKXPXXXAXXPILDLLXXXFLPXLYXXFXTKXXILXTDYCXGGELXVPLXNXXLXVLHXNALXFYXXEXVVXLXEYLHYXXIIXRHLXXQNILLXXDGHISXTDXHLSCLNILPPGLSSPKNAE

SEQ ID NO: 159757 - protein, 227 aa, Oryza sativa
  Clone ID: PAT_MRT4530_59101C.1.pep
MGERVKLIGAFASAYGHRAEVALRLKGVRYELILEDLRNKSDLLLNHNPVHKLVPVLLHGDRSLSESLVILEYIDESFHGPPILPTDPYDRAVARFWAQFIDQKFGRFNFWIPFVQMEGNMQDCFVREAKENLALLEGQLKGRRFFGGDAIGFLDIAACLIAHWLGAFEEVCGVTLATDEEFPALCEWRRRYVNDEAVKPCLPNRDELVAYYRERKEMIKAAGRQHK

SEQ ID NO: 159758 - protein, 363 aa, Oryza sativa
  Clone ID: PAT_MRT4530_59102C.1.pep
MWQPRRQGKARWRRHGGATGSHGERHVDGPDHPKGDLAATRGEAGSPAGPSERRHGGGGARAPATDGEWRRNKRWKGAGRRGGMLTKQSTAGRGGRRREARRRRCPSGEDNDDDLAACGTGGGEAEGRRDLRKRLDGLGRKTGDRSGGKTMPAMELGAEAELTRMRGGWDSGGSSAKRSGRRGAVERGGAEGGGSTTGRGLSRRRGVAGGGGKGNGSACMWRGLAATGAAARGGKSGGGCGLRVDTASRWWFGEIKWMPGCYVVRRTNGGGGLARWRLAAVATGWSSMASGGARLDREGATGRPGSGEFGAAAAGDVELNVAKGRHGGGFGSGSQRSMMQFMSSARTLPRCVAARVVHIVVRR

SEQ ID NO: 159759 - protein, 526 aa, Oryza sativa
  Clone ID: PAT_MRT4530_59103C.1.pep
MAAAAAVASLLGFVLALPFCLAAPSITTHGSDGGGGSYVSAVGDPGMRRDGLHVAWEAWNFCNEVGQEAPGMGSPRGADCFDLVRAGKFAENGVDENGQPTYKVVHRVTDADNNLRAGDPLPGSPANITDVDLYAAAKELYLGDRCQVPDSPSPWQFWMVMLKNGNLDTTAAICPENGRPARPFSQTSRFPCPGGAGCMNQPLVFHNRTALDATARRLRGGLFGTYDLDAADLGSREVSYYSVTWEKDIGSGGDGGWVFHHKLRTAPKYPWLMLYLRSDATKGFSGGYHYDTRGMTKMVPESPNFKVRVTLEVKQGGGPNSQFYLMDMGSCWKNDGRPCDGDTATDVTRYSEMIINPETPSWCTRRRIEECPPWHTFRNGTRVHRTDAARFPYAAYHVYCSPGNARAAEEPTTYCDAYSNPQPQEILQLVPHPVWGEFGYPTAKGQGWIGDPRTWELDVGALSQALYFYQDPGTPPAKRRWSSLDVGTEIYVSKYAEAEWTLSGFDIVVPEECIGSSQGGPVSRCL

SEQ ID NO: 159760 - protein, 93 aa, Oryza sativa
  Clone ID: PAT_MRT4530_59104C.1.pep
MAVIKILQTPVTPTARDVHRCTWSAVVALDPLGNFAGDTPEWGQFRKGLHPLEAAKIIEQTNKSIFSLSPDLLLPHGLDLPHLEQEIKKRLLL

SEQ ID NO: 159761 - protein, 192 aa, Oryza sativa
  Clone ID: PAT_MRT4530_59105C.1.pep
MAARKLLEQPGTAAPPVLGGSIADDRDIVIILASLLCALICVLGIGLVARCACSRRGGGGPDAAAANKGVKKSVLRAIPTVEYVSPGGGGKGKEEEEAAAEEGEQSECAICLSDFEHGDAMRVLPQCGHAFHAACIDKWLRGHSSCPSCRRILVLQLPQGERCQRCGARPEPAAASAVWKPTHYSEVPPFLP

SEQ ID NO: 159762 - protein, 576 aa, Oryza sativa
  Clone ID: PAT_MRT4530_59106C.1.pep
MKKGKWSKEEDDLIKNHMEKYGIGRSWQALSDALGLQRCGRSCRSRWLNYLRPGLKHGDFSPAEERIICKMYSKKGSSWSAIAAQLPGRTDLAVKNYWNSTLKKRFPAAAAARSTAAARRRHRPAASATTSSDDDDDVDVDDATPPGLALVVYSEGSTAAAAAAGELAPYSISSPAATADAAEEEEPIAAVPISTCILALPPPPPPPPPPPSDATGGEVSIPCFPFSPLPFIEPDLPELTWTTDLDDITATFDAAACRYPKRPHPITPDSPRLPKLPAIAGFDDVQSFLSCICLRYNTSPFLLARATAAPPAAAADRCLAGRRCLYSTPPPPPLSPLHWRCSRRDPELGADVSALLLRGRLGARQLFDELPHRVRWRRGYLRAAFAASVSNLNARDGHRGASSIISHDHVEQLKSFLASVLITQPPEKNIVGEDIEALEKRINGDGFHSKSLLDDIAQGRETEVQAARTAAAADEDAIGVHGGRSYLAGAGSGHAVEAGHSGRGDVARDVGESERRSSCTSRRRCLAGAIRRTRGVRPRRHRHRLHPPSEGSRPRSEGRRRSALGSSGYAACHGAA

SEQ ID NO: 159763 - protein, 188 aa, Oryza sativa
  Clone ID: PAT_MRT4530_59107C.1.pep
MEASEVGAHDQSQGGDGYDGGGLELACPRRALAIGGKARVPSADLARRGDRDDPGGGLDLTPENEVSCHRFRPPCYRRLGLCVEKPGRATTATPVEPKGRMQMDLAPLCQIRPKSGHAGRWGSAKMVWWLGGARLSSPTMTTRCPTTSKMSVANDIDDKEGHPHTGCLVASCLATRLLMAWIIGGGVV

SEQ ID NO: 159764 - protein, 101 aa, Oryza sativa
  Clone ID: PAT_MRT4530_59108C.1.pep
LMCTRVPDLPKGSDKQRFGRSRDTNRSDFLNAYALEPCNRSTTSPLVITRAETGQRPKYSDAALKKMCDLNVLRVWPVLDSDHGALFSPQLKLKLLFLPVN

SEQ ID NO: 159765 - protein, 155 aa, Oryza sativa
  unsure (1)..(155): unsure at all Xaa locations
  Clone ID: PAT_MRT4530_59109C.1.pep
PRQKDRQTNQPRAAGRPGRRPTARRPDRRTKERRTPEPRAGRQDRRHGRPPPRPRRAPARTARRTGTAKARRRAPDXRRQEPPRRQQAGDQAAPPPPAPARDVVAGKKGPGHGTPPSPRGSTRRRRRSPTPLPPRRPGRRARWPRAPAVLKPDAG

SEQ ID NO: 159766 - protein, 1170 aa, Oryza sativa
  unsure (1)..(1170): unsure at all Xaa locations
  Clone ID: PAT_MRT4530_5910C.1.pep
EPPPPDLPSSRSLFVAPPATRRRATTTTRHADAAPSRRRHAPPPSSPPRALCRRRHATPPPSPARAQCRRRHATPPPSPPRNAAAACQRHAAAAVATPPPPSPPRAQCRRRHATPPPPRPRNATPPLXCRHAAAAAATPPRQPPPRCRHTAVNERERERSNEREREXTRQRTLPRERERERERSNERERERTRQRTLPRERERARERERARERERARXMADRNEEQILYDTIAEGSSQYWNEEEGNEDSNQYLNEEGNVERDAEGNQQGHVERDVEGNQEEEASGSQPSVGQKRARGQRGAAKKLEGRHIITEVEEDGRPSSPAEAAKNYVRHSGWVVRDNVPVSTVYWRRTRARGDHESFVPDSEKEMLWTTMLETFTLPAGEQGQAMMERNKENAAKKKYHHHLGSGGYSVAMPKWEQMEASLIERGIEPATANWPERSKFWYYAHGGTLNPADGSLVFGDQIREAARRLKDAVEASSQGTFRPDRDRDELTLALQTPEHPGRTRGKGVIPWKIGFKEDIHTYRSRMRSKRDTEAKIADLEFRVSRYELNMQEEVARKVDERMAAHRSHDPQPTIPPAMVSPSGNRSSCASTGQVASGMAIPTDPSGTYHCRPIPAGYSKVEVELVEGAYEDLELDYPRGDGXYIILPGRQAASRAPSPPAPPSPPQDPAPSPPHAPPAPSPPQAPASTPPQDPAPTPPRAPTPTPPQAPLPAPSKATKKAKVDAAKNKDPGYDCTQEELDAYVASEVKRQFKPRSPEKKIPIDPSVRNFFRGMSASVKEAIKLSDYERTLKKASSRKSKPVPQLGEQPNQEIEPLVTGKEMTIEQFITDTGLTTDQLLGVAPIEKAEVKYMYELGKPLVKPELLQSLPTQMYKFHQLYMEMSATGREMIGARIRDTDFLQGDDILWINFRGIYELYQLDALDVSIMSCWILMEIQRARRRRVFDTGFIDPQKVNVAMLDQYPQETEDNLVHLLKAQHYKTFILLPYNTEFHWVLLLFDLDACTVNVYNLLKVGFMESGDGLPPLFRPPPLRSDGFHGPLCLSSPHLHVKAWGGLRLAVAYLLLPAVVRPFWIAPRWKTEMAVNKTATGDGLRQAWRGEGRQGRRGAIGNCLVALVLLAVATDGDKEGEMRGGREDAGAKRPSALDLAALVLLAVATDGDKEGEMREG

SEQ ID NO: 159767 - protein, 425 aa, Oryza sativa
  unsure (1)..(425): unsure at all Xaa locations
  Clone ID: PAT_MRT4530_59110C.1.pep
MQACTYIRSAVTASRAPAEQKQSPATDRSIAAQCQYQYASRTCTARAIRLILEIYLNTNSNKVLRAFHLFTRIYGGLQLQIKPATTLTADGELXVVSINSRLAGASLRRQAGSNPNHISSSRDETRRVRLLYIAPCPTNPRSSRLVSSRPCAARLRLQESSSSPMAAAMGAEAEIAAAVAPAATDECGGKAAAMGGVKQRRGGGGGGGWVKRMMTTTTAVPRRRGHYTPVGVEVELHGSAAAGADEEKPPRRRGGWLRRMMVPRECVHGRQQRWWKLQAGGGGGGSSSRLAAGLTRSLSRWKTAGSGGWATAVADAVAFRVIFKPILLAAAGRVRNHHASEIIGLVFVDRAYIHTCSRWTRLLNRLMPLDCSRPCRLWRAPWSLDGSGLAHRAIGSASTSKQQKRMTFLNDDIFDLLGSTYRNST

SEQ ID NO: 159768 - protein, 134 aa, Oryza sativa
  Clone ID: PAT_MRT4530_59111C.1.pep
SAPPSTSPTRSPCSWTPDRPISPPPRHGAWGAIRSTHRRLVRSPAVVLVRLPAVVLIRSTRCCPRPPPAHRRFARQPRLPAAARRCSAAALTSRRAPLLARRRARPLARRPRSPADARRHSAAALARRPPIVLT

SEQ ID NO: 159769 - protein, 437 aa, Oryza sativa
  Clone ID: PAT_MRT4530_59112C.1.pep
MAAPNNNDAAAGASASATTSEPAPEDTSIEALARRVQEHMTLASNPTARRHKFWETQPVGQFRDAADSSLPDGAIEPPTPLSEVRADPYPLPAAFEWYTCDLDDDALLTDLYALLAHNYVEDDENMFRFNYSPAFLRWALRPPSFFRAWHIGVRARESKKLVAFISGVPARIRARDDVVRMAEINFLCVHKKLRSKRLAPVLIREVTRRVHQENIWQAAYTAGVVLPTPITTCRYWHRSLNPKKLIDVGFSRLGPRMTMSRTVRLYKLPEAPLTPGFRQMELRDVAAVTRLLRAYLAKFVVAPDFDEMDVEHWLLPREDVVDSYLVESPETHEVTDFCSFYTLPSSVLNNANYATLKAAYSYYNVSTKTPLQQLMNDALIVAKQKNYDVFNALDVMENESFLKELKFGPGDGQLHYYLYNYRIRNGIKPSELGLVLL

SEQ ID NO: 159770 - protein, 874 aa, Oryza sativa
  Clone ID: PAT_MRT4530_59113C.1.pep
MAPIMSGAAAAAGGTGGAVPLIKNATSASQMSRGKAGTGAGAVVCYSPMMVTAYGIWQGASPLDFSLPLFLLQVAIIVATTRLLVILLKPFRQPRVIAEILAGVILGPSVMGQVSTWAVKVFPERSLLTLETVAHLGLLYFLFLVGLEMDVNTIRRSGKKALIIAVAGMALPFCIGTATSFIFRHQVSKNVHQASFLLFLGVALSVTAFPVLARILAEVKLLNSDLGRIAMSAAIVNDMCAWILLALAIAISEVNSSAFSSLWVLIAGVAFVLACFYVVRPLMWWIVRRVPEGEAIGDVHITLILTGVMVAGVCTDAIGIHSVFGAFVYGLVMPSGPLGVVLIEKLEDFVTGLLLPLFFAISGLRTNVTKVRDPITVGLLVLVFVMASFAKIMGTILIAVSYTMTFRDGVALGFLMNTRGLVEMIVLNIGRDKEVLDDESFAVMVLVSVAMTALVTPVVTTVYRPARRLVGYKRRNLQRSKHDAELRMLACVHTTRNVPSIISLLELSNPTKRSPIFIYALHLVELTGRASNMLAAHHSASNPGGASDHIFNAFESYEEMVGGVSVQALTAVSPYQTMHEDVCVLAEDKHVSLIVLPFHKQQTVDGGMEPINASLRGFNESILASAPCSVGILVDRGLSAAAARMAAVHHVALLFFGGPDDREGLAYAWRMVENPGVCLTIVRLIPPGYTAPAISPPQPPMPAAHSRAINVVPEVAKSERQMDEEYLNEFRSRNLGNDAILYVEQVVANSEETVAAIRSQLDNAHELYIVGRHPGEASSPLTSALAEWMESPELGPIGDLLVSSEFSKMASVLVMQQYVITAPLPPPVALAGPPTDDPVRQYLTNANQRPSVAIGGNQMGAAGRGGWSGGAGGY

SEQ ID NO: 159771 - protein, 530 aa, Oryza sativa
  Clone ID: PAT_MRT4530_59114C.1.pep
MPRDKNWFSSLEQASKTSAVLATGLVKVNDKFELKNVALVEVLNYNLLSVSQIVDENFEVHFKKTRSKVFDSCGDSVLNISRYGRVFKADFENSVSPMITCLVAKFDKDVMFWHRRPGHVGFDHLMRADFEVMKSVVHKVKNFIIYLDQGDTIADDSDSDGSLEDDPDFMDSDYDISDANDDLYVDNVDVGVEDLSDCKAKFWKKAKGSQLKGKEIVVRNSDGEEVSTDDEDLQLPDSDDDGEVRLKFKAFMAEDVKNPVFKVGMVFPSVEVLRKAITEYSLKARVDIKMPRNEQKRLRAHCVEGCPWNLYASFDSRSKSMMVKTYLGEHKCQKEWVLKRCTAKWLSEKYIETFRANDKMTLGGFAKLVQLANDIESTEKCRYGKHMLCIASRERDFSEVKPPIYEKKVGRPPKSRRKAPHEVQGKNGSKMSKHGVEMHCSYCKEPGHNKKGCPLRKAGLRPKVKTSRIPGASSTEEWHESEQEPAEVLTQSQSAYDQLLSQVPNPMVAQMFEESSQKFGIVMNMGNYCL

SEQ ID NO: 159772 - protein, 543 aa, Oryza sativa
  Clone ID: PAT_MRT4530_59115C.1.pep
MSTADWKVPNKQDDSDSDGSLEDDPDFMDSDYDISDADDDLYVDNVDVGVEDLSDCKAKFWKKAKGSQLKGKEIIIRNSDGEEVSTDDEDLQLPDSDDDGEVRLKFKAFMAEDVKNPVFKVGMVFPSVEVLKKAITEYSLKARVDIKMPRNEQKRLRAHCVEGCPWNLYASFDSRSKSMMVKTYLREHKSVVETESLRSWRWFLQTLKEDLGIDNTYPWTIMTDKQKGLIPAVQQIFPNSEHRFCVRHLYSNFQDAYEWLQKMPPKTWVRAYFSEFPKCDILLNNNCEVFNKYILEARELPILSMFEKIKSQLMCRHYRVRELVLSQFFHPAYAFNIWPCNDMTKWAQVNGPEVKPPIYEKKVGRPPKSRRKAPHEVQGKNGPKMSKHGVEMHCSYCKEPGHNKKGCPLRKAGLRPKLKTSRIAAASSTEEWHESEQEPAEVLTQSQSAYDQLLSQVPNPMVAQMFEESSQVSQMETTHGPLPDNQYILSNQPAVVSTPMTTATKEGKSRANKRKCTTEGVSGVAATTSKNRAPRKKATATNK

SEQ ID NO: 159773 - protein, 83 aa, Oryza sativa
  Clone ID: PAT_MRT4530_59116C.1.pep
MPANGDLPAHCLPCLRLLELVPAMLKSKAQDLKLWLRLGLWWSRPNVDLGGPQLVGRAAHSNKWYQSPRFETRNNFHGSHGLM

SEQ ID NO: 159774 - protein, 841 aa, Oryza sativa
  unsure (1)..(841): unsure at all Xaa locations
  Clone ID: PAT_MRT4530_59117C.1.pep
MIFRLEGEGPPLYSPDDGKFTAEVHHGGFFVGQGSNRAYVDQTINWIDHCEARTWDIVCLDEFLAMLGYDMTPDFKAYWLLPGKTLEDGLRVISTRADFEVMKSVVHKGDTIAGVDWDDVVANPISELPKVLSPRKMSTADWKEVSTDDEDLQLPDSDDDGEVRLKFKAFMAEDVKNPVFKVGMVFPSVEVLKKAITEYSLKARVDIKMPRNEQKRLRAHCVEGCPWNLYASFDSRSKSMMVKTYLREHKCKKXWVLKRCTAKWLSEKYIETFRANDKMTLGGFAKSKLARARRLAFKDIYGDEIQQYNQLWNYGAELRRSNPGSCFFLNLVDSCFSTCYMSFDACKRGSLSGCRPLICLDGCHIKTKFGGQILTAVGIDPNDCIYPIAIVVVETESLRSWRWFLQTLKEDLGIDNTYPWTIMTDKQKVHFKGENLKNQLWACARSSSEVEWNANMEEMKSLNQDAYEWLQKMPPKTWVKAYFSEFPKCDILLNNNCEVFNKYILEARELPILSMFEKIKSQLISRHYSKQKEVAEQWHGPICPKIRKKVLKNADMANTCYVLPAGKGIFQVEDRNFKYIVDLSAKHCDCRRWDLTGIPCNHAISCLRSERISAESILPPCYSLEAFSRAYAFNIWPYNDMTKWVQVNGPEVKPPIYEKKVGRPPKSRRKAPHEVQGKNGPKMSKHGVEMHCSFCKEPRHNKKGCPLRKARLRPKLKTSRIPAASSTKEWHESKQEPAEVLTQSQSAYDQLLSQVPNPVVTQMFEESSQVSQMETTHGPLPDNQYILSNQPAVVSTPMTTATKEGKSRANKRKCTTEGVSGVAATTSKNRAPRKKATATNK

SEQ ID NO: 159775 - protein, 191 aa, Oryza sativa
  Clone ID: PAT_MRT4530_59118C.1.pep
MAAQQLLLLLPLPLPSRTFSKPLPSLPIPLPALRLSSSAYAARRRDLLRSLRCGMRRSDLVADLELAKDKQWQGRRPNGIFWILLLNVGIYVADHLFQIEHIKAMYLYHAFPSWFQFVTSTFCHANWNHLSSNLFFVYIFGKLVEEEEGSFALWMSYILTGAGSNLISWLVLPTSSVSLGASGAGFGLFTI

SEQ ID NO: 159776 - protein, 381 aa, Oryza sativa
  Clone ID: PAT_MRT4530_59119C.1.pep
MQVVGTVRVSGCGAVVAPSRRQCRVSAAVLTAAETATATRRRVTHSMPPEKAEVFRSLEGWARSSLLPLLKPVEECWQPTDFLPDSSSEMFEHQVHELRARAAGLPDEYFVVLVGDMITEEALPTYQTMINTLDGVRDETGASACPWAVWTRTWTAEENRHGDILGKYMYLSGRVDMRMVEKTVQYLIGSGMDPGTENNPYLGFVYTSFQERATAVSHGNTARLARAHGDDVLARTCGTIAADEKRHETAYGRIVEQLLRLDPDGAMLAIADMMHKRITMPAHLMHDGRDMNLFDHFAAVAQRLNVYTARDYADIVEFLVKRWKLETLETGLSGEGRRARDFVCGLAKRMRRAAERAEDRAKKDEQRKVKFSWIYDREVIV

SEQ ID NO: 159777 - protein, 1242 aa, Oryza sativa
  unsure (1)..(1242): unsure at all Xaa locations
  Clone ID: PAT_MRT4530_5911C.1.pep
MDRQWMYADRRSKEFIDGVHYFLRVAEANKQRGFICCPCNKCKNQKEYSASRTIHFHLFESGFMPSYNCWTSHGEQGVEMEEDEVEDDNIPDFAQYVGFEGNQTGEEEIAADGNDVADDLGQMLQDAREDCESEKEAHKLDKMLEDHRTSLYPGCEQGHKKLDTTLKLLQWKAKNGVSDKAFGDLLKLVKNILPGGNKLPETTYEAKKIVCPLGLEVHKIHACPNDCILYRGEEYENLEACPVCKALRYKIRRDDPGEVDGQLTKKRIPAKMADRDEEQILYDTIAEGSSQYWNEEEGNEDPNQYLNEEGNVERDAEGNQQGHVERDVEGNQEEEASGSQPSVGQKRARGQRGAAKKLEGRHIITEVEEDGRPSAPAEAAKNYVRHSGWVVRDNVPVSTVYWRRTRARGDHESFVPDSEKEMLWTTMLETFTLPAGTEDKVKRWTLKKMAEQFQSFKGDLYQKYILKGQTPNFDTFPKLRDHWDEFVAYKTGEQGQAMMERNKENAAKKKYHHHLGSGGYSVAMPKWEQMEASLIERGIEPATANWPERSKFWYYAHGGTLNPADGSLVFCDQIREAARRLTDAVEASSQGTFQPDRDWDELTLALQTPEHPGRTRGKGVIPWKIGFKEDIHTYRSQMRSKRDTEAKIADLEFRVSSYELNMQEEVARKVDERMAAHRSHDPQPTIPPAMVSPSGNRSSCTSTGQVGSQSMDAMQTQDESTCPIDDITQRTPCELHIPFKNLSIKVSSGMAIPTDPSGTYHCRPIPAGYSKVEVELVEGTYEDLELDYPGGDGETHLRDTCHAIILWRRRYIILPGRQVASRAPSPPAPPSPPQDPAPSPPHAPPAPSPPQAPASTPPQDPAPTPPRAPTPTPPQAPLPAPSKSRAPPAPPPAHTRATKKAKVDAAKNKDPGYDCTQEELDAYVATEVKRQFKPRSPEKKIPIDPSVRNFFRGMSASIKEAIKLSDYERTLKKASSGKSKPVPQLGEQPNQEIEPLVTGKEMTIEQFITDTGLTTDQLLGVAPIEKAEVKYMYELGKPLVKPELLQSLPTQMYKFHQLYMEMSATXMEIQRARRRRVFDTGFIDPRXFHWVLLLFDLEACTVNVYDSMDKKESTFDKVFELIDRAWYRFRHLVRGKWRERLRRKFKFSCAKQKQGTNLCGYYVCEYCHCLADQIITTRELDFIRMRDNLTTHKEFIVAVQEQLMGFINEEILDPKGEFYYDGNTIHRSLASELAASTTTSKS

SEQ ID NO: 159778 - protein, 69 aa, Oryza sativa
  unsure (1)..(69): unsure at all Xaa locations
  Clone ID: PAT_MRT4530_59120C.1.pep
DRTDHYELGRALAPVRNNGVLFLSSCSATXHNLRRMGPEXGTPVPQXAAEFDRWLLDALLRREAPLHKK

SEQ ID NO: 159779 - protein, 40 aa, Oryza sativa
  Clone ID: PAT_MRT4530_59121C.1.pep
MSKVVSLLEGHTPLQPFLSDLSLGKTQIGASEEISSVSPC

SEQ ID NO: 159780 - protein, 74 aa, Oryza sativa
  Clone ID: PAT_MRT4530_59122C.1.pep
MQISRFQDSLKQWWLAVDSKHTVTGGRLISPASSEQALQGTQNQPTVAGNRRRRLRSDKNRKDMEDGESIRLTG

SEQ ID NO: 159781 - protein, 203 aa, Oryza sativa
  Clone ID: PAT_MRT4530_59123C.1.pep
SDIPRRHTGAHEQRLQWWHGAAGDREEHHLHRVDGRGEEAVEIAVHAVAEADGRGAHERPEAVAAGGRRRRHGGVRQVVRARHHGHQRRHALLWLRLRRRARLRERERQRERETRPGRRRSASGRRAMRRERERGRHWERETRRPRRRRSASGRRARRRERERERQREREAAGPSRRRSAAGAGRRARDREHQEREQRERQAG

SEQ ID NO: 159782 - protein, 55 aa, Oryza sativa
  Clone ID: PAT_MRT4530_59124C.1.pep
YHHSEALISPHSLETAGVGLGVDHLRQLKCAPELFSPIYSIKAFGLCVPRYAGKH

SEQ ID NO: 159783 - protein, 423 aa, Oryza sativa
  Clone ID: PAT_MRT4530_59125C.1.pep
MSGRPEDHKGVTRTIKQLTRGGNMMLCTELKSNLVFEHIISHSRNVSAALVVRTPSRRTDGSDQGHSLTVGIVQPRKLIVDTGSDLIWTQCKLSSSTAAAARHGSPPVYDPGESSTFAFLPCSDRLCQEGQFSFKNCTSKNRCVYEDVYGSAAAVGVLASETFTFGARRAVSLRLGFGCGALSAGSLIGATGILGLSPESLSLITQLKIQRFSYCLTPFADKKTSPLLFGAMADLSRHKTTRPIQTTAIVSNPVETVYYYVPLVGISLGHKRLAVPAASLAMRPDGGGGTIVDSGSTVAYLVEAAFEAVKEAVMDVVRLPVANRTVEDYELCFVLPRRTAAAAMEAVQVPPLVLHFDGGAAMVLPRDNYFQEPRAGLMCLAVGKTTDGSGVSIIGNVQQQNMHVLFDVQHHKFSFAPTQCDQI

SEQ ID NO: 159784 - protein, 229 aa, Oryza sativa
  unsure (1)..(229): unsure at all Xaa locations
  Clone ID: PAT_MRT4530_59126C.1.pep
RAYHQTPAAGSSNWGLIKLRCGTHVSASTTLLFLPHTSPFSLHFPHDPLYPLWWTTRGDGDDGSSPASSSSTVAGGGDGELPVVGVAGSGGGAQRQRAAVATXRRGTAPFAPLAALTSRGGRCRSPLCSPREQPRRKGGRGRNALTAVLDNDANISAGKADGDGELRQKMQDSDGAPPSPWWRHAQAEGGRAAAASAICKGREGRQGRDGAASGERGXKSWWGPRMASG

SEQ ID NO: 159785 - protein, 74 aa, Oryza sativa
  Clone ID: PAT_MRT4530_59127C.1.pep
MAPTHHDASLAPPPSTLLSPHRSPCHRRHRFASRRSCSRICGLFGGVMEDGYTGVDVHNPKGGEPSIGSSGGSA

SEQ ID NO: 159786 - protein, 69 aa, Oryza sativa
  Clone ID: PAT_MRT4530_59128C.1.pep
MRFRIYKRKVVILTVVVLICGLAFWSSGRQKKHDGALFKEVETVRRSSSSIVSSSSNINSNHNQAAATL

SEQ ID NO: 159787 - protein, 67 aa, Oryza sativa
  Clone ID: PAT_MRT4530_59129C.1.pep
MERFEIWALTKEDDEDFNIVAHFLTFIGKEAYSLIKILALPDKPISLPYATFKQLLLDHVKYTNSEC

SEQ ID NO: 159788 - protein, 78 aa, Oryza sativa
  Clone ID: PAT_MRT4530_5912C.1.pep
MLGRGRDVVAFFTVAPLGDQDDPRYKRDPGEGCKASNLITNTPTIVCEAEVRGAKSPGDLVEYIDYDLVGIIELVYFH

SEQ ID NO: 159789 - protein, 458 aa, Oryza sativa
  Clone ID: PAT_MRT4530_59130C.1.pep
MGLLPSLALVALPAYPPTRLALCTRSPVWGEERAPVERTQRLGLGRIRKFNFAIPQNSIPTLGLASALDTLCGQAFGARQYHLLGVYKQRAMLLLTAVSVPLAVAWYYTGDILLLFGQDADIAAEAGAYARWMIPALFAYGPLQCHVRFLQTQNMVVPVMAAAGAAALCHLGVCWALVHAAGMGSRGAALGNAVSYWINVGVLAVYVRVSRSCKKTWTGFSMEAFRDPLSFFRLAIPSALMVCLEWWSFELLVLLSGLLPNPKLETSVLSITLNTANCLFMIPFGLGAAISTRVSNELGAGRPRAARLAVRVVTLLATLEGLGMALVLACVRYVWGHAYSNEEEVVAYVAKMMLVLAVSNFLDGIQCVLSGVARGCGWQKIGACINLGAFYVVGVPAAYLAAFVLRAGGLGLWMGIICGVAVQTLLFLAITSRTDWQKEAKMAKDRVFSSSLPTDLAT

SEQ ID NO: 159790 - protein, 223 aa, Oryza sativa
  unsure (1)..(223): unsure at all Xaa locations
  Clone ID: PAT_MRT4530_59131C.1.pep
LKLLLSTFEKLSGLKINFHKSELFCFAQAKECQELYSTIFGYKLGNFPMRYLGIPIHFRKFSNKDWKTGEERIEKKLSSWKGKHMSVGGRLVLINSVLSSLAMFMISFFEISKGVLXKIDYYRSRFFWQGDKHKKKYRLTRWDIICQPKDQGGLGVHNLEIQNQCLLGKWLFRLINEQGVXHDLLKMKYLYSQTLSWVEKKXGDSHFXSGLMKVKSKFLYMDS

SEQ ID NO: 159791 - protein, 76 aa, Oryza sativa
  Clone ID: PAT_MRT4530_59132C.1.pep
DGRASLKQQGCIGSRFNAHHKKMLVCFQLWPSYVKVIFKKILAKWGDLKGNPLLGSTLSNLGKGAFPSKFKFSCGF

SEQ ID NO: 159792 - protein, 493 aa, Oryza sativa
  Clone ID: PAT_MRT4530_59133C.1.pep
MAAIKEESDYDSSRSSLTAPDSRRSWISDIGSSSSVSARSFGGDTPASSCRYKPHKANQAEWEAIRRLRAGAGRVGLEHFRLVRRLGSGDLGNVYLCRLREPWSSSSMTTTAGGCLYAMKVVDKDALAFRKKLRRAEVERDILRTLDHPFLPTLYADFEASHYACLVMEFCPGGDLHVARQRQPGRRFTVSSTRFYVAETVLALEYLHMMGVVYRDLKPENVLVRGDGHIMLSDFDLSLKCDVVPKLLRPARSAAAGGKPPLPPPSSCVPPTIQPVLSCIFRGVHKCHHAKECAGGGAAAGNNGDGDGNDEEAETETAEPEVVVVEPVAARSKSFVGTHEYLAPEVISGQGHGSAVDWWTLGVFMYEMLYGRTPFKGESNEKTLINIIKQPVTFPRLAGAAAAGEWEEMKTAQDLMLQLLAKNPKKRLGSTMGSAEVKRHPFFKGVNWALVRSVRPPEVPAPPAPAPKKVMTMSKKERQEPYNYRPENHFDYF

SEQ ID NO: 159793 - protein, 76 aa, Oryza sativa
  Clone ID: PAT_MRT4530_59134C.1.pep
VSSRRSCTRRSGGGYDPSHPSVTRGRVVSGGGRRRFPLENRLLLSFREKARFEAQKKWSGIPLLWRISDDWNHVRR

SEQ ID NO: 159794 - protein, 181 aa, Oryza sativa
  Clone ID: PAT_MRT4530_59135C.1.pep
MKCLPVAFNLALVFVLAIPLLLEARPLASGDQDYENLPVLTTVTVEETTQVMVDYLDLNGSSSDGEDDEAAQGSPPDAALRRPARTPPSPQGRYPPQHQQKPAPCSGGPAGVVGGRRPSAPPAPRGRSPPHWVRSSDQQGPWLLDVFHRLLCALTGLTGQTGSMGYVEVWKTFRHVHLNEE

SEQ ID NO: 159795 - protein, 348 aa, Oryza sativa
  unsure (1)..(348): unsure at all Xaa locations
  Clone ID: PAT_MRT4530_59136C.1.pep
MVGPTWPHMSSSLPLYPLSPLSSAPTLPIHALLNTVAADADPPRVVLVFGGGPIRVGAELLDAVPSLRCIITISAGINHIDLRECVCRGVQVVNAGGVYSTAVGXFDVLVVACVLTAETRHIWTGGVLDALGEHRVVARLCISFGCDSFSLLIMDWGVLDTLXGVVVNVVRGANIDEAELVRALAEGRVAGAGLEVFEDEPNVPPEIFLFFSFLLLSLFSLLFLFFFRVSEAGGAAMRGWQVRVAAERWQASTEEGSGGVGGGMARGGGMGGGRARRRVRAAAERGLWAERRQVAQRQAEWRCTGGGSVWRWEAAGERGRRVSTKEGSGGGMGGGQARWRVRAAAERG

SEQ ID NO: 159796 - protein, 64 aa, Oryza sativa
  unsure (1)..(64): unsure at all Xaa locations
  Clone ID: PAT_MRT4530_59137C.1.pep
ARPPRRDSGGRITMRRTVKSAPXSIWYGPDRPSPGPFSRSASYXTGEFPELVTAGYRPSVGGQE

SEQ ID NO: 159797 - protein, 376 aa, Oryza sativa
  unsure (1)..(376): unsure at all Xaa locations
  Clone ID: PAT_MRT4530_59138C.1.pep
SPAPASLHQPAPLRLKAVAVDVDPPRVVLVFGGGPIRVGAELLDAVPSLRCIITISAGINHIDLRECACRGVQVVNAGGVYSTDVADYAVGPVRRARRGMRADSRDTAHLDWGRAXALGEHRVVARFCYREQLDLHRVAAANAKEKSVHQMMMPFLFWGCLSFVDFFXTTTDLAASSNVLVVACALTAETHHIMDWGVLDTLXGVVVNVVRGANIDEAELVRALAEGRVAGAGLEVFEDEPNVPPELRAMDNVVLRRLAAPPRPSPALPAATRPAPSAGERKGIERRGKREDRQREGGVRMTGPAQDRYNPSSTVVDRRRRLRTCEGDGTLTNHADWWHSSRRWRLDPLWGASYATRAGGGRACGIAAVDAMAGLQ

SEQ ID NO: 159798 - protein, 291 aa, Oryza sativa
  Clone ID: PAT_MRT4530_59139C.1.pep
MLEERKLFVAGLPQQTREGDLRGHFARYGEVVHTRVVLDMASGNSRGFGFVEFADEAATLRALADDEMPNHVFRGRKVDVKRAERRHDHKQTSPSIKNQNDSVQKNQFIFQKKVFVGGLHETVTVKDLISYFEKFGTITDAVVMRNRTTNRARGFGFISFDSHEAVCKILLNRFHNLNGRDVEVKIAVPKSPTYSEAKYYHMRMDMSLSPITYYDGMVHVHPYTPYTFGCVTPLAHLTHSGYGYGGPIDYSCYAYGGPIGHQHDLVGSYYYAKDYSKTTPIDLDTTDTTKK

SEQ ID NO: 159799 - protein, 859 aa, Oryza sativa
  Clone ID: PAT_MRT4530_5913C.1.pep
MADWNLIRDQKRCLHPFKVFFVRTTSRASFCSRWLAGSLLVANTKGRQKGGGAGAAPRLGDELPQEMDRQWMYANRRSQEFIDSVHYFLRVAEANRQRGFICCPCNKCKNQKEYSTTRTIHFHLFESGFMPSYNCWTSHGEQGVEMEEDEVEDDNISDFAQYVGFKGNQTGEEEMDADGNDVTDDLGQMLQDAKENCESEKGAYKLDKMLEDHRTSLYPSCEQGHKKLDTTLEFLQWKAKNGVSDKAFGDLLKLVKNILPEGNKLPETMYEAKKIVCPLGLEVQKIHACPNDCILYRGEEYENLEACPVCKVASGMAIPTDPSGTYHCRPIPAGYSKVEVELVEGAYEDLELDYPGGEGETHLRDTSHAIILWRRYIILPGRQAASRAPSPPALPSPPQDPAPSPPHAPAPSPPQAPAPTPSHAPAPSPPQALAPTPPQAPASTPPWSPTPTPPQAPLLAPSKSRTPQAPLPAHTRATKKAKVDTAKNKDPGYDCTQEELDAYVASEVKRQFKPRSPEKKIHIDPSVMNFFRGMSAPAKEAIKLSDYERTLKKASSGKSKSVPQLGEQPNQEIEPLVTGKEMTIEEFITDPGLTTDQLLGVAPIEKAEVKYMYELGKPLVKPELLQSLPTQMYKFHQLYMEMSATGREMIGARIRDTDFLQGDDILWINFKGIYELYQLDALDVSIMSCWILMEIQRARWRGVFDIGFIDPHKVNVTMLDQYPQATEDNLVHLLKAQHYKTFILLPYNTEFHWVLLLFDLSAWTVNCAKQKKGTNLCGYYVCEYCHCLADQIITIRELNFIRMRDNLTTHKEFIAAVQEQLMGFINEQILDPKGEFYYDGNTIHRSLASELATTTTSKS

SEQ ID NO: 159800 - protein, 573 aa, Oryza sativa
  Clone ID: PAT_MRT4530_59140C.1.pep
MATAVAAAGGGGGGEQPRRRKPAPGRGGVVLPAGLSEEEARVRAIAEIVSAMGELSRRGEDVDLNALKSAACRRYGLARAPKLVEMIAAVPEADRAALLPRLRAKPVRTASGIAVVAVMSKPHRCPHIATTGNICVYCPGGPDSDFEYSTQSYTGYEPTSMRAIRARYNPYVQARSRIDQLKRLGHSVDKVEFILMGGTFMSLPADYRDYFIRNLHDALSGHTSANVEEAVCYSEHGAVKCIGMTIETRPDYCLGPHLRQMLSYGCTRLEIGVQSTYEDVARDTNRGHTVAAVADCFCLAKDAGFKVVAHMMPDLPNVGVERDLESFREFFENPAFRADGLKIYPTLVIRGTGLYELWKTGRYRNYPPELLVDIVARILSMVPPWTRVYRVQRDIPMPLVTSGVEKGNLRELALARMEDLGLKCRDVRTREAGIQDIHHKIRPDEVELVRRDYAANEGWETFLSYEDTQQDILIGLLRLRKCGRNVTCPELVGRCSIVRELHVYGTAVPVHGRDADKLQHQGYGTLLMEEAERIARKEHRSKKIAVISGVGTRHYYRKLGYELEGPYMVKCLV

SEQ ID NO: 159801 - protein, 71 aa, Oryza sativa
  Clone ID: PAT_MRT4530_59141C.1.pep
MDKVWKSKEKAQMTNLQEGQLHAAQLEDGPLFGPMFVGGPDVDVDELPDASLGALVLEGVHVRGVDVHEVD

SEQ ID NO: 159802 - protein, 73 aa, Oryza sativa
  Clone ID: PAT_MRT4530_59142C.1.pep
VLIWVIRHLSLSFVSRHLYICFMLQADLNFAAHTKRYGLNPILEITCKCSKIMEEKLVTTNLAKALVYIFTMG

SEQ ID NO: 159803 - protein, 110 aa, Oryza sativa
  Clone ID: PAT_MRT4530_59143C.1.pep
MAGEPRCTKEAETPAAQIQALLGRIRRGAGMQIGLQLKEGVSRPDLTPLRTDPQPPRFSRQFADDYMTPRVTVLRVSSMGRWRVVAVEEGEAAVEGETESTMDDGAFVAL

SEQ ID NO: 159804 - protein, 233 aa, Oryza sativa
  unsure (1)..(233): unsure at all Xaa locations
  Clone ID: PAT_MRT4530_59144C.1.pep
FPSSVGKKKKRENRKQSEKNCKKTKKKSDSREKYIRLPLSSRKKKRKRSXAINIRREKTREKTNPIPCKKRPKKTTLSDKKKNRVKNKESDSVTAVKEDEKNRGKKRIRSNVKKGEKNKKNRLSDKKKESGEKTRRKKIREKKPGKNKSNPMAKKPGEKKSGEKKPGKKGIRSRVKKGEKKGLSDKKKRXRVKRPGEKKSGEKKAKKRIDSLDVVKKSGQKRIRYNSKKKELY

SEQ ID NO: 159805 - protein, 50 aa, Oryza sativa
  Clone ID: PAT_MRT4530_59145C.1.pep
LCFPELSKCMSCPRKNISGQQVCVNVEACMCDQFLAHGMAKAVAFSAISL

SEQ ID NO: 159806 - protein, 105 aa, Oryza sativa
  Clone ID: PAT_MRT4530_59146C.1.pep
SLKSPMSHHHQHAQQPPRQCDSPSSSYEPRVHGRRGDWWRQVRATPLAEVHHQQHPYYLHRQGKPGKRKGAPSPLSRCTAGSGRRRLIGVSLPRRGGAPDARCGC

SEQ ID NO: 159807 - protein, 64 aa, Oryza sativa
  Clone ID: PAT_MRT4530_59147C.1.pep
VYQFVDMYGSNVYCYIPIYSPEEWSPICDTYVGGTTGLLICVVTLYGLLGGGSLLFYNTFSFFF

SEQ ID NO: 159808 - protein, 189 aa, Oryza sativa
  unsure (1)..(189): unsure at all Xaa locations
  Clone ID: PAT_MRT4530_59148C.1.pep
MSPARRLAVLRSHLQPAAPAGEGDRDVVVCAEQAAGVSTSPCSAAAAGGGREAEGKSCVFCRIIRGEAPAFKVYEDDVCLCILDSHPLAPGHSLIIPKCHFPSLEATPPHIXFNMVVNNGAAAGQVIFHTHFHIIPRRSGDKLWPTESLRRRSIEPNETPGLVSCIKEQLYSSPEGCKAEPPSSLPKER

SEQ ID NO: 159809 - protein, 907 aa, Oryza sativa
  Clone ID: PAT_MRT4530_59149C.1.pep
MDLMAVLRSSASFMYYFEIAPIPLSPNCNPMNVLPRFANPIKKWDICHDGDEGGEDVDEGGRLWSPPASSAPTAAVLKAGGATRVGEATALSLDAVLHDTCIISSNHAFLLSTSPDAALPSSSSMTVTTDAGCGAASEEGDVRVGSLSPALDQATMICIDNSEWMRNGDYSPSRFQAQADAVNLICGAKTQSNPENTVGVMTMAGKGVRVLVTPTSDLGKILACMHGLEVGAEANLAAAIQVAQLALKHRQNKRQQQRIIAFIGSPVKYDKKVLETIGKKLKKNNVALDIVDFGETDDDKPEKLEALISAVNSSDSSHIVHVPPGENALSDVLISTPIFTGEEGGSGFAASAAAAAATGAAGFEFDVDPNVDPELALALRLSMEEERARQEAIAKKAAEESSGAENKDHASSSNADSVMAEAEPASNAADDKKDQPKEDDDAQLLQQALAMSMEEGSSGAAAADAAMAEAAVDDQDLALALQMSVQDAGGSSQSDMSKLPGVDPNDPSVKDLLASLHGQGEAPEALEISGLALFGHGFYLSSFGIFCQPDISFLNFSPFLPTGGIAPDANAHVTSQTCLDTGVDGGYYTPASHLLEVEGLRILLDCPIDLSALTAFSAVPLGASSSSGDAEDLIRGVPYYRSPTAVAAAKAGHIDAVLVSSATGLLGLPFLTRFPGFANTKQGVDAELTLKPFMPLAIQVLGCSFLSGIKVGKIDPLLGLLKPKLILFPEGQKSLCPATDKQPWSFLYYSKGKTIEVPNMREEFEVRMTTEVAFGLQPRQLDKTTAVARLKAKLLLSNGQYVLAAAKNADYSAPSDRERVISITSPGEALVKNPLLVHTSPLPTRPARVRKRNDAHAINHRPVHPHPNAIIQHGTRLSDAANHTELGASQRMLQLQITIDPTRGLDR

SEQ ID NO: 159810 - protein, 198 aa, Oryza sativa
  Clone ID: PAT_MRT4530_5914C.1.pep
MLVAVVTVLHARLLILIIMLGRGRDVVAFFTVAPPAGLIILSPSSAMKSHKYIIYYWYYKFKQVYAIGVMVMDKTYLLSYDLWNIRVWYTLTYTGYFRMRSRNPLQIIKNISTGQVISKVLLSFLLGDQDDPRYKRDPGEGCKASNLITNTPTIVCEAEVRGAKSPGDLVEYIDYDLILVPTYPNTLIIRFTSITRRQ

SEQ ID NO: 159811 - protein, 575 aa, Oryza sativa
  Clone ID: PAT_MRT4530_59150C.1.pep
MASTASFMLAVLLAVAVAAAPARAVRCPPSDKQALMRVKQSLGNPATLSTWSLASADCCEWDHVRCDEAGRVNNVFIDGANDVRGQIPSAVAGLTALMSLSLFRLPGLSGPIPACLTALSNLQFLTISHTNVSGVIPDSLARIRSLESVDLSHNSLTGPIPNSFSDLPNLRSLKNKLTTMICIDNSEWMRNGDYSPSRFQAQADAVNLICGAKTQSNPENTVGVMTMAGKGVRVLVTPTSDLGKILACMHGLEVGAEANLAAAIQVAQLALKHRQNKRQQQRIIAFIGSPVKYDKKVLETIGKKLKKNNVALDIVDFGETDDDKPEKLEALISAVNSSDSSHIVHVPPGENALSDVLISTPIFTGEEGGSGFAASAAAAAATGAAGFEFDVDPNVDPELALALRLSMEEERARQEAIAKKAAEESSGAENKDHASSSNADSVMAEAEPASNAADDKKDQPKEDDDAQLLQQALAMSMEEGSSGAAAADAAMAEAAVDDQDLALALQMSVQDAGGSSQSDMSKVFEDRSFVTSILNSLPGVDPNDPSVKDLLASLHGQGEQEKKEDKSDKPEDEKK

SEQ ID NO: 159812 - protein, 128 aa, Oryza sativa
  Clone ID: PAT_MRT4530_59151C.1.pep
TRSWRVGCINLNFGAASYVLKILACKTGLCVQRFCRSALFRTVVSLFTIMISILLFLCKTNVLTCAICIKVYHLPHATYQNVARPRRQPPLDQSRRRPKHWRYLVSLYLVMDSTYPRVTVLQLKNLKG

SEQ ID NO: 159813 - protein, 120 aa, Oryza sativa
  Clone ID: PAT_MRT4530_59152C.1.pep
SCHWHSRRYPTGCSMRLLLLVRAGVSVGLSVRLFVRVLVSEPDMEGELGLCLGEGSGNGSGSDSEKHSDNAGDEEGEEEEEKKEEKMWKGHNMTHNYTVVYAAVGATGEVKRDMKRGIHT

SEQ ID NO: 159814 - protein, 439 aa, Oryza sativa
  Clone ID: PAT_MRT4530_59153C.1.pep
MVAWPDNRNQRQGIQVSVVDVAEGQWLTCVHLFMPEMPLMILVDDAGAFLPAINHSPWDGVTLADFVMPFFLFIVGVALALAYKRVPNKLEATRKAILRALKLFCVGLVLQGGFFHGVRSLTFGIDMEKIRLMGILQRIAIAYIVTALCEIWLKGDDDVDSGFDLLKRNRYQLFIGLIVMITYMGFLYGTYVPDWEYRISVPGSTEKSFFVKCSVRGDTGPGCNAVGMIDRKILGIQHLYCRPVYARSKQCSINSPQNGPLRPDAPSWCQAPFDPEGLLRLQQYNISFANFAKFSLFFLDSRISSVMAIVTCLIGLQYGHVIVHFQKHKERIMKWLIPSFSMLILAFSLDFFGMHMNKPLYTVSYALATAGAAGLLFAGIYALVDMYGHRRPTAVMEWMGTHALMIYVLIACNILPIFIHGFYWREPKNNLLRLIGVGA

SEQ ID NO: 159815 - protein, 109 aa, Oryza sativa
  Clone ID: PAT_MRT4530_59154C.1.pep
QGLYPLKSFPNKQVFSAIKLFPSQWHCCLGHPSSVIVQQVLSHNNLPCVSESNKHSVGDACQKGKSHQLPYFKSLSRSSAPLKLIHSDVWGPAPTSVGKNNYYVSFVDN

SEQ ID NO: 159816 - protein, 374 aa, Oryza sativa
  Clone ID: PAT_MRT4530_59155C.1.pep
MSKRHRSDDDGGELESRRPHSRHRRRRRRRHLYVVLDDWSKGYSVYKVDVDGFDGDPDADLDDEAVRLPEPPVFRLETADYGRFGIFVAVGSRIFATHYSEDTNARAPVLMFDTVTGGLAVCPGVPAELCNQPMIFPAGDKVYAMGRSKIKMDARGESRKYLEELAADGEGSWAWSSSVDDRAPPPPFDVERARCHAAHPDGRTVFFSAHGDGTYSFDAGTRGWTRHGEWMLPFDGQAYYDGELDAWVGLWSGHSGRRGRVCSCDVVDPRGGGGGEQPPPAWKLAVRSHPAWRARSRFLSVALARMGGGEFCVVEWRSRRGVSEEELHERCLLYATTFRLRYDRDGSLEATDRRARAFTARKKSDEFEWCAFGI

SEQ ID NO: 159817 - protein, 179 aa, Oryza sativa
  Clone ID: PAT_MRT4530_59156C.1.pep
SRRSPLPLPSPPGDDLDIVLVVREINLFGQGRSSLSSSSSTALQQPPVLGRGQHLVLRAPPRRAAGVADGSPHAWLASPSLDAAGYGGTRPAVPIVSSSAWTAACAHQAGTTAATAWVGALDLRFRRRPTSSRTPAAGRLPPRCQHRSHPLVYVKSISCYLAYCSFDCLLCCDLAVVSK

SEQ ID NO: 159818 - protein, 138 aa, Oryza sativa
  unsure (1)..(138): unsure at all Xaa locations
  Clone ID: PAT_MRT4530_59157C.1.pep
MAASPTRLLSSSHQPCKESLHCTATGRTWAGEKRTPPDVLKLRGLPYFTTAEDIIKFFVEYELTEENVHTAYRLDGKAXMEFSTTGVAKTAICKDKMTIGTRYMELFPSTPEEASRTKSRFTSQAMNYLIQASTLPWP

SEQ ID NO: 159819 - protein, 151 aa, Oryza sativa
  Clone ID: PAT_MRT4530_59158C.1.pep
MALTDVVLSCVKAAAARRPDLRVFVCLDHYSTLCKGVKCDFLLQLLHARSMAGPDATLLADLDARAAWRLDQASLGAVMIPAFRYSCDPPDARLDVPFMLRLVRGFLREGGKASVGGTTATCRVARLVDAYPPSSFATARPELENGMELGN

SEQ ID NO: 159820 - protein, 141 aa, Oryza sativa
  Clone ID: PAT_MRT4530_59159C.1.pep
MAQVDRAAPAALVDPVGNDDNNDVDGDGLGGLSSNYGSCGTSRQRHDDLSDDNPGGDDDNLDGNGPSGSSGLGFWVMTPDEPQQGQPEHSNYIEHLLREQLRRGRAEIMVSSDLRDSVCFVKINGDHQRMMSVYYYVPMSF

SEQ ID NO: 159821 - protein, 50 aa, Oryza sativa
  Clone ID: PAT_MRT4530_5915C.1.pep
GWCRKNRRPLLYLAFLLVGFVFIILALSASVLFFLPIFVCFNNNSRLNHT

SEQ ID NO: 159822 - protein, 241 aa, Oryza sativa
  unsure (1)..(241): unsure at all Xaa locations
  Clone ID: PAT_MRT4530_59160C.1.pep
MVMWAMHLWERDXRLAHHVLHQAHPAAIVVEIACTRTAEELLGARKAYQALFHHSLEEDVAYRARDKPYCGLLVGLVSAYRYEGPRVSEETARAEAKALVAAVKSAGHAAAKLVENDDVVRILTTRSKPHLVETFKHYKEIHGRHIEEDLGHEETLREAALCLATPARYFSEVVAAAVSDGADHHAKEALTRVAVTRADVDMDAIRAAYHEQFGGRLEDAVAGKAHGYYRDALLSLVAGGK

SEQ ID NO: 159823 - protein, 70 aa, Oryza sativa
  Clone ID: PAT_MRT4530_59161C.1.pep
MEMDRSWMYDIRRSSLEYREGVTAFISFVDNDMKNNCNNEKMFENSLWVQSHMIRIRFMDDYRCWSKHDV

SEQ ID NO: 159824 - protein, 304 aa, Oryza sativa
  unsure (1)..(304): unsure at all Xaa locations
  Clone ID: PAT_MRT4530_59162C.1.pep
LIGIVCFIDFEKAYDRVQWDFLYEVLQKKNFDQRVISWIKKISEGGDALSAILEEAARNGVLXEGLVPGLVEGGLTHLQYADDTILFTKATRENXLALKFLLFCFEISGMKINYQKSGVYVLGVTKEVEEEIANMLNCKVGRMRGGYELYSQGTVNELWDGGDWDLHFRRNLNSQDRLELDKLQRELEGVTLNGERDMVIWPHDKKKIFSTRSMYRVLKFGGVVDQEIQGVWRCKIPLKIMHFLYMTGRNRIPCTEQALSRGRKHYTCVLLKEKECTSLDVFQAKIMLTLEVLKPTDNLPDDIG

SEQ ID NO: 159825 - protein, 106 aa, Oryza sativa
  Clone ID: PAT_MRT4530_59163C.1.pep
MTTVPDNDGGGGSRVLQCQISNIGLGAPHPPAGSHKDDDVTRTGGACGDREGINLDLARTIMSGVGQWVNGNQRFIIALVVAFPFASLVDLCFWLNEVERDKEKEE

SEQ ID NO: 159826 - protein, 80 aa, Oryza sativa
  Clone ID: PAT_MRT4530_59164C.1.pep
MEEGAGFAPRDPPPRCATRRIKKKAAETSSFDDDGQQHPRPQGEVGAADPGDSVKEESSERSGPSGCGGATERGGCGGVD

SEQ ID NO: 159827 - protein, 72 aa, Oryza sativa
  Clone ID: PAT_MRT4530_59165C.1.pep
KPFQSIKFNLIPGLFSLLVKASQCFFFQGEENPPDTPLRLSWPNFNYWGLCTLKFPLGLTRVPPPWECPFFV

SEQ ID NO: 159828 - protein, 81 aa, Oryza sativa
  Clone ID: PAT_MRT4530_59166C.1.pep
FFFFFFKIGDFISDILICTIQDYPTWSTPVQCSAVHYIYLQHWQPIITHSPHFQVTQTHTPPKRVGQVLLGQQVVSSVQAS

SEQ ID NO: 159829 - protein, 68 aa, Oryza sativa
  Clone ID: PAT_MRT4530_59167C.1.pep
CDAESNIGKSSPLFFNCPICKDYDLSICHQLFMTPMHSLGVCTKAICTRNYLYFLYNESIVFMFELKV

SEQ ID NO: 159830 - protein, 312 aa, Oryza sativa
  Clone ID: PAT_MRT4530_59168C.1.pep
MGEEKVAPKSDAAPAVELLGFVMSAEEAERAAAAAGVETVEDLLPLLVPSAMRRARAPISRFPVGAVGLGASGRVYAGVNLEFRGLPLSHSVHAEQFLVVNAAAAGESELRAVAVSHMPCGHCRQFLQEIRGAGGIRIIVTSDAEDGCAPEWRTVASLLPRPFGPHDLLPKHVPLVLEPHDNPLGEPAAVANGFAHGDLEARLREAAEAAARAAHAPYSECPSGFAVADGEGKVYAGGCLESAAYNPTLGPVQAAIIGMVAAGGGAAGDVVAAALVEKEAGLVSQEATARIFLAAVAPQATFHVYNYTPSDA

SEQ ID NO: 159831 - protein, 363 aa, Oryza sativa
  Clone ID: PAT_MRT4530_59169C.1.pep
MAAALSKLLRRRLRGGGHRLLPSRPSTSAASQPPPPPPSAATPPPPGAGKEAGAWSKLFLFAPGAITFGLGSWQLFRRQEKIEMLDYRTRRLEMEPIAWNQMAPSDLSAGVDPATPEFRRIVCEGDFDEERSVFVGPRSRSISGVTENGYYVVTPLIPRPSEHGSSWPPILVNRGWVPRDWRDKNVQDHQGVREVPEYKEADKKTDGKGSWWKFWSNSKEPEQSCEIEKPVKPPVRVLGVIRGSEKPSIFVPANEPSVGQWFYVDVPMIARACGLPENTIYIEDINEDVSPTNPYPVPKDVSTLIHHSVMPHDHLKYTVTWYTLSAAVTFMAAKRIKAKKLKFPLLQKEMFDNLSTASSSLRQ

SEQ ID NO: 159832 - protein, 440 aa, Oryza sativa
  Clone ID: PAT_MRT4530_5916C.1.pep
MPRALPCRRHAAAAPPRRCSATATPPLRCRHVIERINVNVNVNVNERTNVNENVNERTNVNERERTNMADRDEEQILYDTIAEGSSQYWNEEEGNEDPNQIRARGDHESFVPNSVKEMLWTTMLETFTLPAGTEDKVKRWTLKKMAEQFQSFKGDLYQKYIRKGQTPNFDTFPKLRDHWDEFVAYKTGEQGQAMMERNKENAAKKKYHHHLGSDGYSVAMPKWEEMEASLVETGIEPATTNWPERSKFWYYAHGGTLNPADGSLVFGDQIHEAARRLTDAVEASSQGTFRLDRERDELSLALQTPEHPGRTRGKWVIPWKIGFKEDIHTYRSRMRSKRDTEVKIADLEFRVSSYELSMQEEVARKVDERMAAHRSHDPQPTIPPAMLSPSGNRRSCASTGQVGSQSMDTMQTLDETTCPVDDITQRTPCELHILPSRTYQ

SEQ ID NO: 159833 - protein, 76 aa, Oryza sativa
  Clone ID: PAT_MRT4530_59170C.1.pep
MGCCCRCLEILCAILLPPLGVCLRHGCCTMEFWISVLLTILGYLPGVLYAVYVIVSVDPDRERRRRVDPDEYIYVA

SEQ ID NO: 159834 - protein, 169 aa, Oryza sativa
  Clone ID: PAT_MRT4530_59171C.1.pep
GAAAAAAAAGRTPTWKERENNKRRERRRRAIAAKIFTGLRALGNYNLPKHCDNNEVLKALCREAGWVVEDDGTTYRKGCKPPPSSAGGASVGMSPCSSTQLLSAPSSSFPSPVPSYHASPASSSFPSPSRIDNPSASCLLPFLRGLPNLPPLRVSSSAPVTPPLSSPTA

SEQ ID NO: 159835 - protein, 82 aa, Oryza sativa
  unsure (1)..(82): unsure at all Xaa locations
  Clone ID: PAT_MRT4530_59172C.1.pep
SRAHVTNLAWLSQWVQXFLVAHRSACTIGTLSSTHHWIILSGVYCCVQWSDGVMLKWFGPKSPARWITIYQIAMGYSHTVKC

SEQ ID NO: 159836 - protein, 157 aa, Oryza sativa
  Clone ID: PAT_MRT4530_59173C.1.pep
MAAAARLLDAASGDELSGEGSAPSRRGCAPARRHSAETTLGGICEWQHWHEETEADSWRGTELRNAKDTWMRTTKEVKHIRVDNPVTALISNCYLHLIKVATKKGTKKKDQEGIARHQWYANILVNYYAKLLKNHMVIMAKNRMHARHKKRIKKSSS

SEQ ID NO: 159837 - protein, 58 aa, Oryza sativa
  Clone ID: PAT_MRT4530_59174C.1.pep
ASLSLILDPKLMLKKIYQACSLELHACRNTRRFIKKENKSINKHNQFLHEEMGKLAVN

SEQ ID NO: 159838 - protein, 156 aa, Oryza sativa
  unsure (1)..(156): unsure at all Xaa locations
  Clone ID: PAT_MRT4530_59175C.1.pep
TASNILEWMAAFSPKDYFEAFRFDSLIELAKSYPDDFTSLQLKDSXHIYIDNMRADERFGNVNTISELAKLMVETXKHLAFPLVYHLLKLVLVXPASVERCFPAMKTVKTTPRNRIGDQFMNDYIVCFVEKDFLATILVDEVIAPFQKMEDRKGKV

SEQ ID NO: 159839 - protein, 100 aa, Oryza sativa
  Clone ID: PAT_MRT4530_59176C.1.pep
QGQRPPLYRIQREGRKRQPDVPATMAPSPSGVGVFVLVIAWLDVYLTMLHELFGDALFSRHILAQPDPAHGYDAGILAITSSSYVTPSHNFLGSMTSASG

SEQ ID NO: 159840 - protein, 77 aa, Oryza sativa
  unsure (1)..(77): unsure at all Xaa locations
  Clone ID: PAT_MRT4530_59177C.1.pep
ARAQITASEEGDIILEGGTHPCLEAQDGVNFIPNDCTLVKXKSWFQIITGPNMGGKSTFIRPVGVNVLMAQVGSFVP

SEQ ID NO: 159841 - protein, 129 aa, Oryza sativa
  Clone ID: PAT_MRT4530_59178C.1.pep
RRQRCLSPSAMAAAPFPLPFPHRHDAAPLPLPRWRAGAAPSPLSDPAGGEEAAARCPCDDGTLPFRRRAWLDVYLTMLHELFGDALFSRHILAQPDPAHGYDAGILAITSSSYVTPSHNFLGSMTSASG

SEQ ID NO: 159842 - protein, 136 aa, Oryza sativa
  Clone ID: PAT_MRT4530_59179C.1.pep
MAMLSANGGMYGGWDRSPSKSHATPAKNGWTQTLSVPPAKPSHFVGSLSRNLVVRLVSFGQRYCESAENSSPGAAHCGTSPSGSVPGVFPHGSSSPTEAMRIGKRALRLDVVTNSRRQQRLSIWQHAATALYRPLA

SEQ ID NO: 159843 - protein, 874 aa, Oryza sativa
  unsure (1)..(874): unsure at all Xaa locations
  Clone ID: PAT_MRT4530_5917C.1.pep
MADRNEEQILYDTIAEGSSQYWNEEEGNEDPNQYLNEEGNVERDAEGNQQGHVERDVEGNQEEEASGSQPSVGQKRARGQRGAAKKLEGRHIITEVEEDGRPSAPAEAAKNYVRHNGWVVRDNVPVSTVYWRRTRAREDHESFVPDSEKEMLWTTMLETFTIPVGTEDKVKRWTLKKMAEQFQSFKGDLYQKYILKGQTPNFDTFPKLRDHWDEFVAYKTGEQGQAMMERNKENAAKKKYHHHLGSGGYSVAMPKWEEMEASLLERGIEPATANWPERSKFWYYAHGGTLNPADGSLVFGDQIREAARRLIDVVEASSQGTFRPDRNRDKLTLALQNPEHPGRTRGKGVIPWKIGFKEDIHTYRSRMRSKRDTEAKIVDLEFRVSSYELSMQEEVARKVDERMAAHRSHDPQPTIPPAMVSPSGNHSSCASTGQVGSQSMDAMQTQDESTCPVDDITQRTPCELHIPFKNLSIKVASGMAIPTDPSGTYHCRPIPAGYSKVEVELVEGAYEDLELDYPGGDGETHIRDTSHAIILWRKXYIILPGXQAASRAPSPPAPPSPSPDPAPSPHAPPAPSPPQAPAPTPPQDPATTPPRAPTPTPPQAPLPTPSKSRAPPAPPPAHTREAIKLXQGDDILWINFKGIYELYQLDALDVSIMSCWILMEIQRARRQRVFDTGFIDPRRVNVAMLDQYPQETEDNLVHLLKAQHYKTFILLPYNTEFHWVLLLFDLSACTVNVYDSMDKKESTFDKVFELIDRAWYRFRHLVRGNWRERLRRRFKFPCAKQKQGTNLCGYYMCKYCHCLADQIITTRKLDFIRMRNNLTTHKEFIAAVQEQLMGFINEEILDPKGEFYYDGNTIHRSLASELATTTTSKS

SEQ ID NO: 159844 - protein, 65 aa, Oryza sativa
  Clone ID: PAT_MRT4530_59180C.1.pep
MRGPCGCEEKLKTTVVVVLSDDDDDDDYEEEFRRFSEVVNCLGQLLAEAVFEKSCSWDKLPQTGP

SEQ ID NO: 159845 - protein, 121 aa, Oryza sativa
  Clone ID: PAT_MRT4530_59181C.1.pep
KTTFFLLYHPKFHMLHKRGVCLFLNSEPLFSGTQYETPAWLLKVRPLHYTQGRPHTPKGGKTPPNLGLVPNSPQSGGHQTGQKKLAGQWPEQKKDPPPRMEGQLGQNVPKLNNCPVKKMLF

SEQ ID NO: 159846 - protein, 39 aa, Oryza sativa
  Clone ID: PAT_MRT4530_59182C.1.pep
RTKIITGFCSFDWRCLKQYPIYECHLNTFIHGRPGDKWC

SEQ ID NO: 159847 - protein, 66 aa, Oryza sativa
  Clone ID: PAT_MRT4530_59183C.1.pep
SYVADCVRTKTFREAQHLLIEVRFWTCDASGEVFGLDQPIAFRLLGSVRSLQALEGNSVLHLAFRI

SEQ ID NO: 159848 - protein, 138 aa, Oryza sativa
  Clone ID: PAT_MRT4530_59184C.1.pep
MQIFVKTLTGKSITLEVESSDTIDNVKAKIQDKEGIPPDQQRLIFAGKQLEDGRTLADYNIQKESTLHLVLRLRGGSRGGYTIQEPSLLLLALKYNEKKMVCRKYARLPARSTNCRKKKCGHTNQIRPKKRFISKTAN

SEQ ID NO: 159849 - protein, 213 aa, Oryza sativa
  Clone ID: PAT_MRT4530_59185C.1.pep
MALCTTGLHLMLPSRIADLLARPLPPPHSTNNRLALLSSRPWPHVSWVCVLPASSSRVAGHLLTLCQPPRCVLAALATCRRYHLGLALVSRASTLAQSSFSSPPCWFVVHPPHHRLLGRQIRRGLEPRPNDAGLAADTATDSLPFDLGSASDYRNREKNKRACCRCPCAPSPGFAHDSSGGGGEAEGTTARDGDSAGCRLCYPSWGRAITYEL

SEQ ID NO: 159850 - protein, 171 aa, Oryza sativa
  Clone ID: PAT_MRT4530_59186C.1.pep
PTTPPIGDHSTTTTTTPPIGESAGRSFDGGKMQIFVKTLTGKTITLEVESSDTIDNVKAKIQDKEGIPPDQQRLIFAGKQLDDGRTLADYNIQKESTLHLVLRLRGGSRGGYTIQEPTLRALALKYREKKKVCRKCYARLPIRSHHCRKKKCGHSKELRLKKKFINSLSIA

SEQ ID NO: 159851 - protein, 160 aa, Oryza sativa
  unsure (1)..(160): unsure at all Xaa locations
  Clone ID: PAT_MRT4530_59187C.1.pep
ASPLQQHHSGAGRGARVGNGXAASTTAAXAXLWDFVGXDLVKXDMGRWLDXWXKHKSLAIYXPHXGGYQGRXLXRLXYQGYYFLXLSRPAGSGEPQNHLTKIXHPLCXPXPPGSNPVAXXFFPXRKXTKRLXLLAPRNPGPSSWVKPKVLSQGKPFPPFP

SEQ ID NO: 159852 - protein, 58 aa, Oryza sativa
  Clone ID: PAT_MRT4530_59188C.1.pep
FMTNGSINSIAWEAESLRKDRGRKNHFSDCSAPIYHLFKILMNFQKMHGHTTVSSPVS

SEQ ID NO: 159853 - protein, 598 aa, Oryza sativa
  Clone ID: PAT_MRT4530_59189C.1.pep
MAFPPAVVAAGGGASCKPGAEPRSIVIKIRRRLPDFARSVNLKYVKLGLLSAGFPMPPSPSWVVMLALAAAAAYGLFDVAALYAVDLVGCAAWLCAAALLVAVWYARRPRPVYLVEFACYKPDGDEHEISKDGFLEMTESTGFFNGEAVAFQTKITRRSGLGDRTYLPPGIQARPPRLSMAEARAEAEAVMFGCLDKLFAATGVDPSRDVGILIVNCSLFNPTPSLASMVVNRYRMREDVKSFNLGGMGCSAGLIAVDLARDLLQANAGALAVVVSTENITLNWYFGNDRSMLLSNCIFRMGGAAALLSSRGGDARRAKYRLLHTVRTHKGAADGCFGSVYQREDERGRVGVSLARELMAVAGDALKTNITTLGPLVLPLAEQLKFLRSLVLRRVLRRGARRPYIPDFRRAFEHFCVHAGGRAVLEEVQRSLGLGDGDMEASKCALHRFGNTSSSSLWYELAYAEAKGRVRRGHRVWQIGFGSGFKCNSAVWRALRDVPPVSSGAGDGEEERRRVIVIVAIIRLFEKDQLTLRNQFGFHQNHVYTVSENLQTGEKAQFESCRGHFFDGIVVNLFGKKTITIGTSKRLAVIVESLTTSI

SEQ ID NO: 159854 - protein, 93 aa, Oryza sativa
  Clone ID: PAT_MRT4530_5918C.1.pep
MADGASSSGAASASGPGGGGGGESVVIDYGRRRTACGYCRSTGQTSISHDMALERFRCLRFALHLVYINGHPILSLKWDENHAADVLIVYSQS

SEQ ID NO: 159855 - protein, 85 aa, Oryza sativa
  Clone ID: PAT_MRT4530_59190C.1.pep
MVAQSRALPADPDVHVSSDAKRTASAARVAAVEAADDEHEVDSERREGCEGNEEDHRHCPPRRRLGLAAPRSGRTPRKPSRSRWS

SEQ ID NO: 159856 - protein, 341 aa, Oryza sativa
  Clone ID: PAT_MRT4530_59191C.1.pep
MRRAPRLHALPSRALAFGGLPPPPLPRAQLQGITEPGAASRLGAAFLARALATTGLPAPRRPRALQVQRITEPGAASRFGAAFLARGGFSTDASAAAQDSAKPAAATGGEGGDGKSGKSEQGDAGKSVRGGPVSWLSFLLLLVTGGGIIVYYDKEKKRHIEELKNRTSAVKQEPSVGTAAIGGPFNLLNHDGKPVTQKDFFGKWTLLYFGFTHCPDICPDELQKMALAIDKIKEKAKMEVVPVFITVDPERDTVEQVRDYVNEFHPNLIGLTGTTDEIRKVARAYRVYYMKTEEEGSDYLVDHSIVMYLMNPKMEFVKFYGKNYDADSLADGIIKELKGHQ

SEQ ID NO: 159857 - protein, 88 aa, Oryza sativa
  unsure (1)..(88): unsure at all Xaa locations
  Clone ID: PAT_MRT4530_59192C.1.pep
FQKXQLLEIRXQRRQKTPAWGHAGWRNPNPGRPASQGGGSSSRFHSTHPHPSSHRARHNIPVNHQGPSLVPAGTAQHAQHCTVRCPHD

SEQ ID NO: 159858 - protein, 153 aa, Oryza sativa
  Clone ID: PAT_MRT4530_59193C.1.pep
MVAAAAAVLPWGGGGSPAWIEVPEKSKSAFWELKRRKVHRYVIFKIDDRREEIVVEKTGAPGESYDDFTASLPADDCRYAVYDLDFVSDDNCRKSKIFFISWSPSVSRIRAKTIYAVSRNQFRHELDGVHFEIQATDPDDMDLEVLRGRANRT

SEQ ID NO: 159859 - protein, 182 aa, Oryza sativa
  Clone ID: PAT_MRT4530_59194C.1.pep
RVCGRGRRRCGLCGARGRSGRGGEEAAGTREGERGGRREARAEVEGMGAPALPARHRLRVEGNRPTSSSSIPLDPSLPILLLAVEPSPGAPIGARVHPGRSPPHPPPVSRRGGARRRGGGVAGDSEVAARPLTRRGSGWGEAGAGHCSRRRGRSRRPPPLPISRFFPAALPSAAICPHAREN

SEQ ID NO: 159860 - protein, 70 aa, Oryza sativa
  Clone ID: PAT_MRT4530_59195C.1.pep
RGEWWKRRKSPLVISFFTHHLFFFLHFTFIPYLAWLFPPRQTRRRLCKKKKKSYKNFMCERVVSNSENLC

SEQ ID NO: 159861 - protein, 458 aa, Oryza sativa
  Clone ID: PAT_MRT4530_59196C.1.pep
MVALAGVSVEKWVSSSVFMPCGLILRRGRQRGVSRAPSAFLSVMDCQSKRTLMGLAEYVAGELGLGLVRAHDTSPRQCRSSRVKPKRYPWVASPPPPPPELKPARRKRSGRDPAEAAERQVGGASGSTADLATGKPNLAAGLGEYKTILFSQINILFRRCGSGATRSWRRCGKDKRSIWFNAPVEVDRLGLHDYHTVIKWEITLEEKNLLRVGLESLPEKKMHNVLQIVRKRNGNPELVGGEIELDIDEMDVETQWELDRFVNNFKKALNKSRRAAIVNGENADVIDASVANDSYVLVNGSTATMVDNGDVAMAIESKDPDKITTQAEQLDEYVDIGDEMPTATLSLNIHRPKGKKGPAEAPSHTPYLEVLQTETFTSQIWRFSLLTSSSNYPCSNPTYATIKTTGSDGRKELLPRPLRLSAPLPPLARPTITAPHPPGPAVAVPLPPDPPLATAPSM

SEQ ID NO: 159862 - protein, 56 aa, Oryza sativa
  unsure (1)..(56): unsure at all Xaa locations
  Clone ID: PAT_MRT4530_59197C.1.pep
MLSFSSLPSTGAGXTXSAAFLPPSASAHPASAFAPPNAAVCLRHSPRGGLFGSPWY

SEQ ID NO: 159863 - protein, 341 aa, Oryza sativa
  Clone ID: PAT_MRT4530_59198C.1.pep
MRKRCDQILAKLRKDKRSIWFNAPVEVDRLGLQDYHAVIKCPMDLGTVRANLAAGRYPSHDDFAADIRLTFSNALRYNPAGHEVHTFAGDLLASFEKMYKASVSCAAPELPPAKAPAQVKPRAGNVKMRKTKAREPNKREMTLEEKNLLRVGLESLPEEKMHNVLQIVRKRNGNPELVGGEIELDIDEMDVETQWELDRFVNKFKKALNKSRRAAIVNGENADVIDASVANDSDMLVNGSTATMVDNGDVTMAIESKDPDKITTQAEQLDEYVDAVADPEFLSWPWVRPCVDVGDEMPTATYQSVEIEKDTEAASSGSSSSSDSGSSKDSVSESGNAHSLV

SEQ ID NO: 159864 - protein, 456 aa, Oryza sativa
  Clone ID: PAT_MRT4530_59199C.1.pep
MASALLAGRGGVNHHHHHHQWGETRAPLAPVAPNSDPNHPLQQRANGSATRPPPSSYVALRPGAMAHREARALRDRLAGELGQVRALIARIDTWQQGQVKRHGSPRRDLPTPPAKLRAAMRKRCEQILAKLRKDKRSIWFNAPVEVDRLGLHDYHAVIKCPMDLGTVRANLAAGRYPSHDDFAADVRLTFSNALRYNPAGHEVHTFAGDLLASFEKMYKASMSWFEQELKLLEPPMPVPPPELPPATAPVQVKPRAANVKMRKPKAREPNKRDMTLEEKNLLRVGLESLPEEKMHNVLQIVRKRNGNPELVGGEIELDIDEMDVETQWELDRFVNNFKKALNKSRRAAIVNGENADVIDASVANDSDMLVNGSTATMVDNGDVTMAIESKDPDKITTQAEQLDEYVDIGDEMPTATYQSVEIEKDTEAASSGSSSSSDSGSSKDSVSESGNAHSLV

SEQ ID NO: 159865 - protein, 1017 aa, Oryza sativa
  Clone ID: PAT_MRT4530_5919C.1.pep
MPPPPRHAAATTPRHATVRHATPPPPRPHNARPPPPSPRRRANRRPDAATPPLTNENENDRTNESENEHVNVRCRDNVNENENDRTNESENENDRTKTSENEGTNVNENERTNVNELGNVNERTNEDERTEDKVKRWTLKKMAEQFQSFKGDLYQKYILKGQTPNFDTFPKLRDHWDEFVAYKTGEQGQAMMERNKENAAKKKYHHHLGSGGYSVAMPKWEQMEASLIERGIEPATANWPERSKFWYYAHGGTLNPADGSLVFGYQIQEAARRLTDAVEASSQGTFRPDRDRDELTLALQTPEHPGRTRGKGVIPWKIGFKEDIHTYRSRMRSKRDTEAKIADLEFRVSSYELNMQEEVARKVDERMAAHRSHDPQPTIPPAMVSPSGNRSSCASTGQVGSQSMDAMQTQDESTCPVDDITQRTPCELHIPFKNLSIKVASGMAIPTDPSGTYHCRPIPAGYSKVKVELVEGAYEDLELDYPGGDGETHLRDTCHAIILWRRRYIILPGRQAASRAPSPPAPPSPPQDPAPSPPHAPPAPSPPQAPASTPQDPAPTPPRAPTPTPPQAPLPAPSKSRAPPAPPLAHTRATKKAKVDAAKNKDPGYDCTQEELDAYVASEVKRQFKPRSPEKKIPIDPSVRNFFRGMSASVKEAIKLSDYERTQKKASSGKSKPVPQLGEQPNQEIEPLVTGKEMTIEQFITDTGLTTDQLLGVAPIEKAEVKYMYELGKPLVKPELLQSLPTQMYKFHQLYMEMSATGREMIGARIRDTDFLQGDDILWINFRGIYELYQLDALDVSIMSCWILMEIQRARRRRVFDTGFIDPRKVNVAMLDQYPQETEDNLVHLLKAQHYKTFILLPYNTEFHWVLLLIDLEACTVNVYDSMDKKESTFDKVFELIDRAWYRFRHLVRGKWRERLRRKFKFPCAKQKQGTNLCGYYVCEYCHCLADQIITTRELDFIRMRDNLTTHKEFIAAVQEQLMGFINEEILDPKGEFYYDGNTIHRSLASELAASTTTSKS

SEQ ID NO: 159866 - protein, 291 aa, Oryza sativa
  Clone ID: PAT_MRT4530_591C.1.pep
MESPKQLGFEIRGSKPTCLLPVCVISLCHTADKLADRTGDQYGSLSLTMPPLFIQELGPGSYKSRVYGRALSGGDVDFRTRVLLAFINCARGRTAGAAHHEKFSNPRCRAPMGLQAGVPPCSDCQSSAAVACYSATARRRSTPTYAAAEEKKRVVNCVSIQRPPIEDIIHASAYIGPVQLCFHVHGTPAGIAEISLRDTTLAPIDDQDVKGHFGSGEEEIFRRQVVNSNVVYMEQKYGRGPLGVYTIKAQIKKVRFTTARNHVSQIALIFVHMPMSEAKHNVMASWNLGDA

SEQ ID NO: 159867 - protein, 69 aa, Oryza sativa
  Clone ID: PAT_MRT4530_59200C.1.pep
GIGTRPSSTPLSPPPPPHPHQPPTALPPSSPKVKKKLSRISHLETCSSLSIFWGFLHLILIHGVGQSLL

SEQ ID NO: 159868 - protein, 58 aa, Oryza sativa
  Clone ID: PAT_MRT4530_59201C.1.pep
EMVQSMNETATGERSSGRIAMKRFEEMDWDKNGMVTFKEFLFAFTRWVGIDENEDDNE

SEQ ID NO: 159869 - protein, 62 aa, Oryza sativa
  Clone ID: PAT_MRT4530_59202C.1.pep
TSGGTNQPRGATPDASSTSTIRELYGKPQRDSEHHIQKSLLSTTKQGTQETQRSVMDSVKLN

SEQ ID NO: 159870 - protein, 282 aa, Oryza sativa
  unsure (1)..(282): unsure at all Xaa locations
  Clone ID: PAT_MRT4530_59203C.1.pep
MAKSSADDAELRRACAQAVAASGARGEEVSFSIRVAKGRGIFEKLGRLAKPRVLALTVKQSTKGEAAKAFLRVLKYSSGAVLEPAKLYKLKHLTKVEVISNDPSGCTFVLGFDNLRSQSVAPPQWTMRNIDDRNRLLFSILTMCKEILSYLPKVVGIDFVELALWAKENTVTLDNQSSTQDGQEKSVTTQTERKVTVTVENXXVSQAKDEEEDMEALLDTYVMGIGEADAFSERLKQELVALEAANVYQLLQSEPLIDXVXQGLDAASATVDDXDEWLRIXI

SEQ ID NO: 159871 - protein, 313 aa, Oryza sativa
  unsure (1)..(313): unsure at all Xaa locations
  Clone ID: PAT_MRT4530_59204C.1.pep
TEFYQLQTKPVRENLPSQSSSFASSNGSSVTFSEGFESLLSPAGVLPDVSLNDFVVQNQQALQFRRGFQEASKFLPDESKLVIDVDKLYSGDEGSRFLGEVRQEKKLVKVKTETSDVESAGHRGKKHFYGDDLDAEEGRCSKHSAQGIDTDHLVRDLMDKVLLCNGETCSKGVKELREALQHDVAKHSGGGHGKGSSHGKGRGKKQPKKEVVDLETLLIHCAQSVATDDRRSATELLKQIRQHAHANGDGDQRLAHCFANGLEARLAGTGSQIYXKNYTITRLPCTDVLXAYQLYLAACPFKKISPLLLIKQF

SEQ ID NO: 159872 - protein, 75 aa, Oryza sativa
  Clone ID: PAT_MRT4530_59205C.1.pep
RSYIECPFAEPRLILRRNGILLVCQWRRGRLYSLPSAGCKGKEPGSGSVARCHACSESWTYVSKPCGAILIALFH

SEQ ID NO: 159873 - protein, 50 aa, Oryza sativa
  Clone ID: PAT_MRT4530_59206C.1.pep
FYNVLTLGGTYEIFSFCCNCIIHFGIPRLERLFIFSLINDLKMKNKRNFN

SEQ ID NO: 159874 - protein, 172 aa, Oryza sativa
  Clone ID: PAT_MRT4530_59207C.1.pep
MATWLRLMYRKVGRKVNRQRQETRVQPLSAMPGQRPDPTASARENTHGMHGSKNSKLGAYFTASLLTDRFLVKLLNSWRASVTSAVEVCRLSSYKNKNMDLSKVKTGQIRCNFTDGVHFAYMATQAGVASYRNATPPLTLQLCIQALKGGTTFAVGLEIPILIGEKEKGEFK

SEQ ID NO: 159875 - protein, 35 aa, Oryza sativa
  unsure (1)..(35): unsure at all Xaa locations
  Clone ID: PAT_MRT4530_59208C.1.pep
CNTVFDITQVIFLLVSTKSSVIQSXVFELNVLHCT

SEQ ID NO: 159876 - protein, 712 aa, Oryza sativa
  Clone ID: PAT_MRT4530_59209C.1.pep
MAPSLMSPLSSAFPSTASSPSAAASPSSTASSKLSSSSPSSTASQSATSYLGSGGDGRGPCHPKREVRGDAMARIAKEVDRSPPLLWHTPVCQDEHGRWAMARRRGGVVQLEAHEARVGDHGAPRLAHGPEPQDGLDREAEEDFLHNVFRDASRGGAGGFDAPPPLGNGHITTMSRLIHHITFRKGNYQKHFGFRGIRLLSMACASAGKRDMMNQPGHGGDLPVAKRRRCVEPTGAAAAGIPEDVIEQILLRLPVKSILRFRSVCKSWRSMVAEPHFVRLQLHHSTTAARHHPPSMLVLADWCVPEQWRGTIDFFSYPGHGVAADFAHRITWSSNSKSTVAAAADGYAAADWDAVDDGADAADDGAAADNLDDAVDDGDAAADWDDDDDWDDDVGAIGWGMHLHCNGLVLLRSTMKYSTQMLVCNPATKELAELPDCALDYFGVQAVSFYADQSTGKTKVVHCFIRHCDKTYTDYSVGCEVLSLGSPAWRPVADPPYLIKTKTSPCILGGIYWIAALPSPSTGSCTTPGIVRFDVCSEEFASFPCPPFMERQKMSDVACGDLTELGGKLCYVHAPADDRVELWTASAADGGGSRPRWSLQCTVVLPHSFDTFFQFTYDYQGGIFFYVDYAMIYRYDVERRVVERVVDMLEEMTYFDRSRRKLDRCDGDWMHYAIQYSESLAQARPDCYWAVPCRADTKARSAHWAWASPGTA

SEQ ID NO: 159877 - protein, 220 aa, Oryza sativa
  Clone ID: PAT_MRT4530_5920C.1.pep
MADKEPVVDRPEDEEEASAAAAAAGGEEEDTGAQVAPIVRLEEVAVTTGEEDEDVLLDMKAKLYRFDKEGNQWKERGTGTVKLLKHKENGKVRLVMRQAKTLKICANHLVASTTKMQEHAGSDKSCVWHAADFADGELKEEMFAIRFGSVENCKKFKDLVEEISESLAKTEGKETEEDSSAAGLLEKLSVTEKKSEEVATKEESTEAVKETDTKSAATSE

SEQ ID NO: 159878 - protein, 57 aa, Oryza sativa
  Clone ID: PAT_MRT4530_59210C.1.pep
PTRPPTRPPTRPPTRPPTRPPTRPGGTLNSSQKEERKQTRIAPGKQERDAGSALSCK

SEQ ID NO: 159879 - protein, 68 aa, Oryza sativa
  Clone ID: PAT_MRT4530_59211C.1.pep
MRWDRGCCGWRGRHTPHVDGTASMVEVATFDMVDGLVKEDLTVNTTVVAVGVLLPVRMSQRLDRRRLR

SEQ ID NO: 159880 - protein, 44 aa, Oryza sativa
  Clone ID: PAT_MRT4530_59212C.1.pep
MAGRQHIEEVSRSSARVVQMMAPRGVQNPSPVKGFIKDAFAGQK

SEQ ID NO: 159881 - protein, 130 aa, Oryza sativa
  Clone ID: PAT_MRT4530_59213C.1.pep
MPSPEKAAIVVALGGETTKLSSGGTYIARRFSHHRLGPRARRKQRHGREEVARRTEFETPSPERALSSLAKVKRARCRRDQSVRSAHESGSGCRDTDGTEMIDKRQRRDASWRSLELLEDSAEEGARRRL

SEQ ID NO: 159882 - protein, 277 aa, Oryza sativa
  unsure (1)..(277): unsure at all Xaa locations
  Clone ID: PAT_MRT4530_59214C.1.pep
MAASCARVTVSAPSNCRARACSRGAPARGPRTPTAPRTSIALAGDRSSRPEGRRSGGERTSSRPSTLPGGRGAAVDLSHFFGKSDNEEGGDVGLARRRRRLAPAAAMWQARGXRQARRRWGAAAAALAWPGGGDVARDGARRRWGAAEPALVAPTAAMWRLGEEAIGPDGGGGLAPQRGGDDGLAPRRRRQGTPAAAPADEEVRSAPVGLCLGMALALGLVELQLAVPLALLDPLRVRACPLHEPVVIRRGDQDAXGRSRPSLPALANSHVPWNEPR

SEQ ID NO: 159883 - protein, 125 aa, Oryza sativa
  Clone ID: PAT_MRT4530_59215C.1.pep
AAATGPRETAWVAVAGPRALASLLRETSALAFLSCEIAHRSSSGTHRLALALLGVRHRALSLISKAILYDRLGHRVRSVLADRTSDTALVLAPRSCETVVSLNETATAQAWAVRPLDRFSRPIYT

SEQ ID NO: 159884 - protein, 37 aa, Oryza sativa
  Clone ID: PAT_MRT4530_59216C.1.pep
MGWNEFLNEVTAVGLSLPNDEQPDERINGMSRAEATE

SEQ ID NO: 159885 - protein, 506 aa, Oryza sativa
  Clone ID: PAT_MRT4530_59217C.1.pep
MERRCGTSAPAIEDMSPHSRSTAGKYIAGYIVKKKMHPNGAPLAVPPGFRFHPTDEELLYYYLRKKVAYEAIDLDVIREIDLNKLEPWDLKDRCRIGTGAQEEWYFFSHKDKKYPTGTRTNRATVAGFWKATGRDKAIFLGSGGGTRIGLRKTLVFYTGRAPHGKKTDWIMHEYRLDDDNVDVPEEGWVVCRVFKKKSIHQRGFDQPDMAAAADEDELRYQLLHGAGMSSSPVDQKHVLLQEQLVAHGAHGGGFVVPAFEASMHLPQLASADAAPCGGGGGGHVAFASMNPLDAAGCGSQNMMTMKMAATSGGEMLLMSGGGVDGGRFGAAADWSILDKLLASHQNLDQLFHGKVAGAHQQQQQMAMDAASSLQRLPFHHYLGLEAADLLKSSPLPVSHRPVPDRVPQAHDSSPPHRPAPPWGQAVVASSLRGQAAAAAGTNRLLAQSPHRRHRSNPRRLCRAPLPPRAVTRHIAAAGPSQPTPPPRRPIASSPAAPSSPKIWYDL

SEQ ID NO: 159886 - protein, 95 aa, Oryza sativa
  Clone ID: PAT_MRT4530_59218C.1.pep
MASESEMKAFHAALLLLLAMVLVASSSSGVMAAKIAGPKYFQDTCSAVLNPGAPSCDSGECATNCPRQYKGGVGQCIGTQCKCVYTCASPAPASN

SEQ ID NO: 159887 - protein, 368 aa, Oryza sativa
  unsure (1)..(368): unsure at all Xaa locations
  Clone ID: PAT_MRT4530_59219C.1.pep
MATPAPELSRWLLRVALLAAPLAALLLQLPIPISLKPRSTDTAAAAAMDAAASEIEFDMPGVLRMYKDGRVERFDGTQTVPPSPSGDPANGVVSKDVVLDPAAGISARLYLPPGVEPGKKLPVVLFFHGGAFLVHTAASPLYHRYAASLAAAVPAVVVSADYRLAPEQPVPAAYDDAFAALRAVVAACRPDGAEPWLAAHGDASRVVLAGDSAGANMAHNAAIRLRKEGIEGYGDKVSGVVLLHPYFWGKDPVGGESTDAGYRGSFHGTWEFASAGKLGLDRPCVNSLACRRSGGSSGXSRVLVTTADHYWFVERARSYAEGIKKCEWDGELEFHETEGEGHVFFLPKPDCDNAVKELAVVTDFVRRC

SEQ ID NO: 159888 - protein, 988 aa, Oryza sativa
  Clone ID: PAT_MRT4530_5921C.1.pep
MGSSPTNTGRTPHGLGLRGRLAGLFSSPSPCHHQHSDEVVAKLKEEVEKQRDLKETYMARLESTQAYLRFCLEVAQVHDFLHLVSNSNGGDDEPHRDAGDQEPATAAAADDDDEDAAEAPPCDPYFAATRDLAVQHGWATWRGLDVAVKWMRAEFFAAADQRSRGEAFFAQELDALSRQRHPHVLRLMAACLRPPASCFLVTELLTGATLAQWLHGGDGGGRSRERRRQPSSPPPPPPLVDRVSRALEIALAMRYLHEQTPAVVHRDLKPSNVLLDGDSRVRVADFGHARFLPDGTAALTGETGTYVYMAPEIIRCEPYTEKCDVYSFGIILNELVTGEHPYIDTGYGPSKRPYKSLYYGSSPQRPPSPTPTPPPPSPRRLAAMPAVKWLMHWHPNQGATLNSQILAEACACAESLGGSKDGRWKTSIIFYRAMARDGASAAAAGGGGPPQQHPDVPRELLGVALHERPGLYFSILRAHRLVLQADSAFPQVMEKLQSYKARVTLNFEGFQYQLGDFCLRIGKCVPNNSETLRGIMMEVEYYPLSSIEKSRAVMEDFFDIWQETVAKKSLPDLVCLYTLPKEEGPCPPQSILVRASSCGSGRFKVLKIGGKWKSSTPVELSASSSRGVKAGRRARCEAASIGAHQAAHLWQSGCLCARPVGLSGEISVRGADLESGEDSSDSVTSDAGSAKAAPDDVLHIAHALCKVCAKSPRAVIDFVRRVSPATVGRSIDWDVVREEESSKMGDGRSRWTDMEVRVFLESCLEEMAAFTITSNSPKPQAWQNLIHKMYTKCKKKVNKAQLEYIWGQCKKRNDPLKHIDLHHAVFSGRTVVGNHSAVAGAAPQAPQGAVQWQTIDMAQLAAAYRPPPPTPPPTAADRGKGKRLAANTTASGSSSKKSRSDSAGLALERIADIRQQSYQSRVAQMEAEKSMGLDACMELVENDGHEIGGSVCHAGRCKEEDDPAVDPTAGGGDVHRSGARRYEGSAPE

SEQ ID NO: 159889 - protein, 264 aa, Oryza sativa
  Clone ID: PAT_MRT4530_59220C.1.pep
MIPSRKASNVTDQHNNHAMAAYQISQSKKSISAYEQLHLAKPRLMRNPRRVTDFSSKSQSNPAEAAPPPPGGGRRQVPPPRVGGEAEAARGVGARGRVGGVGVAVRVVAERAAAEGGLHLGLGGVLPQPQRLVVVAAHRHRRRRPRQLGEDLAGRWITKFLGEGEGEGGGDGARRRLRGELAPNCCHYPRPPIATVVVVEKGTRRGEEDKGEKIKGGGGRKERERMTCGPHNDDLAVGLGQWAILAKTTLKTIEGVICYTSFNS

SEQ ID NO: 159890 - protein, 109 aa, Oryza sativa
  Clone ID: PAT_MRT4530_59221C.1.pep
SCCCYLHERNSSQICHITHIHKSWGLTVRQARRRWGAAAAALAWPGGGDVARDGARRRWGAAEPAWVAPTAAMWRLGEEAIGPGGGGGLAPQRGGDDGLAPRRRRPMRR

SEQ ID NO: 159891 - protein, 138 aa, Oryza sativa
  Clone ID: PAT_MRT4530_59222C.1.pep
MPRMTNAAAGSGAPGGEEAARGGRPGGVFPHYRRAEGADASGPLDSTLGPSMLGRNEDTGAAARRAGGGGGRISAGKPRGRSTPPGIWSRSAQVSFVTSSPPPLPRRWPPLADAALRRHHGITPDSGLSCRKRLRQSD

SEQ ID NO: 159892 - protein, 714 aa, Oryza sativa
  Clone ID: PAT_MRT4530_59223C.1.pep
MSLGLNLCVYVPRTLDDGDSPSTGSSTAALVSPVASSSSAATSANTTPTAEQRVKGAGALMPTTPTPTSAGLRLSKSGSKSFKKTCAICLTTMKPGQGHALFTAECSHTFHFHCIAANVKHGSNNCPVCRTKWKELPFRGPLPGEFPQGSARINPVNGHQNGGQMTILRPLPRARSSGRLHHMTSLLPDTDRSIFNDDEPLDSLSEANEGSQQGCLRTVEIKTYPEFTEVPESTSERNFTVLVHLKAPLAQTLQTSSKLEDGNSLGTTRAPVDLITVLDVSGSMAGTKLALLKRAMGFVIQNLGSSDRLSVIAFSSSARRLFPLRRMTETGRQQSLQAVYSLTSNGGTNIAEGLRKGSKVIEDRQAKNPVCSIILLSDGQDTYTVSPTAGVHKAAPEYCSLLPYTSNGCQQVPVHVFGFGADHDSVSLHSISQTSGGTFSFIETEAAIQDAFAQCIGGLLSVVAQDLHVKVESLHPDVHFGSIRSGSYSSRLADDKRNGSIDVGDMYAEEERDFLMSVNVPPGYGETALLKVGCVYKDPLMKETINMADVQVKISRPAFVSVQSVSIEVDRQKNRLHAAEVMAEARLSAERGDLTHAVSLLEDCRRMIMGSTSGQSGDRLCQALDAELKEMQERMANRQRYEASGRAYVLSGLSSHSWQRATARGDSTDSESLIQAYQTSSMVDMLLRSQTMSRSSTPPQMRHVKSFPARPQPR

SEQ ID NO: 159893 - protein, 88 aa, Oryza sativa
  Clone ID: PAT_MRT4530_59224C.1.pep
LPSSMSFFPQAVRALLNSSTTARCSSSTRPTEPSPSRSSNPRPNGLWPVYTYYMDCIGGLRPFHLCKDSVLLNISCFWRKKMHVLRFT

SEQ ID NO: 159894 - protein, 211 aa, Oryza sativa
  Clone ID: PAT_MRT4530_59225C.1.pep
MGGDHYQTLGLRQDATKAEVKAAFRRRALRDHPDRHAHSPDAAARADAARRFRLASDAYRVLSDDRLRAEYDLRIRSSSFYSRASSSASASASASASSSSASYDYGYGYGHRRGGGTWRRPPPGGGGAASAGFDWDLLLKSVTRRGFLINLGFASVLLTGAAFLDGSILEIWKMNNSGLIQLTLYTFELSDVLIKHPLAIELSGYFAHCCP

SEQ ID NO: 159895 - protein, 75 aa, Oryza sativa
  unsure (1)..(75): unsure at all Xaa locations
  Clone ID: PAT_MRT4530_59226C.1.pep
PQQPPPLPHPQRTLIHTSSQPWQERGGERGRRAQAGSAAASGAGGRXDRGGRRGGRXGPSQEEEKRMPXXKLGRT

SEQ ID NO: 159896 - protein, 417 aa, Oryza sativa
  Clone ID: PAT_MRT4530_59227C.1.pep
MENPQIEMGAFKANGPQLQNGGLRSSMVQSWNLQRFVESALRSIRIVIFTSKLNLLLPFGPASIILHYTTSRHGLVFLFSMLGITPLAERLGYATEQLAIYTGPTVGGLLNATFGNATEMIIAIYALKNGMIRVVQQSLLGSILSNMLLVMGCAFFAGGIVHRNKDQVFSKATAVVNSGLLLMAVMGLMFPAVLHFTHSEVRQGASEVSLSRFSSCIMLVAYASYLYFQLSGRNNAYSPIGSEEMPNEDAAEEDEESEIGMWESIAWLAMLTLWVSILSEYLVNAIEGASDSLNLPVAFISVILLPIVGNAAEHASAIMFAMKDKLDITLGVAIGSSTQISMFVIPFCVVIGWMMGQKMDLNFQLFETATLFITVLVVAFMLQDGVANYLKGLMLILCYLIVAASFFVHVDPQSSDD

SEQ ID NO: 159897 - protein, 144 aa, Oryza sativa
  unsure (1)..(144): unsure at all Xaa locations
  Clone ID: PAT_MRT4530_59228C.1.pep
VSATWAASAPXTNXAXNVITXXXGFXGXLPFHLETGXXEVDNTDTVXLFYYFIQSXRXPXXXPLXLWXTGXPGCSALSGLLFXIGPLFDTWFEFLFYFSTVSNVIFLDPPLGPGSPPLKNKGSTSPSPRCGVLWLGDYPFRLPS

SEQ ID NO: 159898 - protein, 144 aa, Oryza sativa
  Clone ID: PAT_MRT4530_59229C.1.pep
GASEVSLSRFSSCIMLVAYASYLYFQLSGRNNAYSPIGSEEMPNEDAAEEDEESEIGMWESIAWLAMLTLWVSILSEYLVNAIEGASDSLNLPVAFISVILLPIVGNAAEHASAIMFAMKDKLDITLGVAIGSSTQISMFVIPF

SEQ ID NO: 159899 - protein, 712 aa, Oryza sativa
  Clone ID: PAT_MRT4530_5922C.1.pep
MEEDEVEDDNIPDFAQYAGFEGNQTGEDERDADGNDVVDDLGQMLQDAKEDCESEKGAHKLDKMLEDHRTSLYPGCEQGHKKLDATLEFLQWKAKNGVSDKAFGDLLRLVKNILPKRNKLPETTYEAEKIVCPLGLNKGNARMMRWHAEEHQQDGMLRHPADGSQWRNIDRKFKDFGKDARNIWFGLSTDGMNPFGEMSSGHSTWPVTMCIYNLPPWLCMKRKYIMMPIIIQGPKQPGNDIDVYLRPLAPAPTPPQAPTPTPPQAPRPAPSKSRAPQAPPPAPTRATKKAKVDAAKNKDPGYDCTQEELDAYVASEVRRQLKPRSPEKNIPIDPSVRNFFRGMSAPAKEAIKLSDYERTLKKASSGKSKPVPQLGEQPNQEIEPLVTGEDFGIQEFINDTGLTTNQLLRGAPIEKAEVKYMYELGKPLVKPEQLQSLPTQMYKFHQLYMEMSATGREMIGARIRDTDFLQGDDILWINFKGIYELYQLDALDVSIMSCWILMDIQRARRRGVFDTGFIDPRKVNVAMLNQYPQATEDNLIHLLKAHHYKTFVLLPYNTEFHWVLLLFDLEACTVNVYDSMDKKESTFDNIFELIDRAWYRFRHLVRGKWRERLRWKFNFPCAKQKQGTNLCGYYVCEYCHCLADQIITTRELDFIRMRDNLTHKEFIAAVQEQLMGFINEQILDPKGEFYYDGNTIHRSLASEITTTTTSKS

SEQ ID NO: 159900 - protein, 68 aa, Oryza sativa
  Clone ID: PAT_MRT4530_59230C.1.pep
RQYFKKTPLFSPLGGKLNQTTYPKKTGSLLNQPGPNKKNQGVFFFKNTQTGWFFFILKPPSPPKRGVW

SEQ ID NO: 159901 - protein, 83 aa, Oryza sativa
  unsure (1)..(83): unsure at all Xaa locations
  Clone ID: PAT_MRT4530_59231C.1.pep
ERERKKEGRDGGRRDLCGPHISVGPQFLFXMTNGPRIYIFNSNATXAPCQRHIGRRASQYCHVDAMSAKPSSKTAEGVKLYRF

SEQ ID NO: 159902 - protein, 48 aa, Oryza sativa
  Clone ID: PAT_MRT4530_59232C.1.pep
RAKYITAEQTRGGVEDRKRQRPGLQTSNTGYLLNVIIVKLLLRQTIRW

SEQ ID NO: 159903 - protein, 116 aa, Oryza sativa
  Clone ID: PAT_MRT4530_59233C.1.pep
MGTVGVGWIGVARGRGGGRVVIRHGCRGIVELTAIKGAVVGVCCRVPGRPRDTLVSRHLCGHVSLHPTLYSLRGAFDAVGGVVATDGTIGRMVEAATRYCPFSDVCLQHGLAERSA

SEQ ID NO: 159904 - protein, 181 aa, Oryza sativa
  Clone ID: PAT_MRT4530_59234C.1.pep
MAAAAADSADPVITTATCAHCHREIPSPNIALHSAHCARNLQKCEHCGYMVPKKLMDEHYDENHAPMICSLCQKTVQRELWDLHKGLQCPQRMLACQYCDFELPAADIYEHQNIVSLAGSMSDCGNRLDTTSSSIPNPLLLQNLQVTEARWKKKRVIQQKNNQYDPSTLMAYNASNFLSQL

SEQ ID NO: 159905 - protein, 450 aa, Oryza sativa
  Clone ID: PAT_MRT4530_59235C.1.pep
MDELGIIEQGVDWRTRLGQDIRDCMINDILFSLQTKLQSTTTALIDLQKVAVRIEERIHTIASDYGDYLRRICLTRGDLDSYDVFLNDCQRQQASIRSSILLHQENKQGVLSNQVALNDHKEHSHPYEKDMISKLPNDLVQHIMSFLSMREAVRTSVLSHWWVNQWTFLKSIQLNIYWFHMDREKFSSFLDKLLLSRVQADAPMDTFELKSFAIDRANYWINHAIKHNAKVLKFAEYGKWEPFYLDPNLVELSSRYLETLELTNVALDATIFNQLANACPALQNMLLTDCLLEVEEISSSSLKNLDIIDCYILKDLSICTPSLVSLCIKNERTDNSSFRNSYLIFATAIIIDASNVSSMELLAMDRQFTFVEKDGGEPMFKNLRNLSLGLWCINNMFSPLRRFVRHSPMLRMVTLRISPLDWKSHLTKEHQEMLISIRDRRGLILYIDWY

SEQ ID NO: 159906 - protein, 154 aa, Oryza sativa
  unsure (1)..(154): unsure at all Xaa locations
  Clone ID: PAT_MRT4530_59236C.1.pep
VAQELRIDSALVQAIRMAKGVNSASSAGEKSVYRYKQNKDKSDKTFSTEWDKRAGXGNASSGQIFVTIAPDHFGPILEDHDPKRNLCVXVGNHWKNIIQCRKWGAHFPHVARTVDRSTHDSQSVSLSRGYLDDXYHVEWFLYTGSGGRLEASLD

SEQ ID NO: 159907 - protein, 136 aa, Oryza sativa
  Clone ID: PAT_MRT4530_59237C.1.pep
GDDEVPSVLVLLLALGTLSAGVSASSPSFLQISARLRLTSRSKQFINAYPNPEADLTAYGSFAKECLGTKTETYSVQSSQILGEQPFPHHRSSGLGSPSSLPAHCLKKPGTQTSPSQSQPQNSSPPPTQQGSLFRM

SEQ ID NO: 159908 - protein, 174 aa, Oryza sativa
  Clone ID: PAT_MRT4530_59238C.1.pep
IIDDLRKRGLSVYEVAADFVDRRIQPLQARAHPAFDYSRPEDTTRVSPRGLDSDTVERRVGQVMMSAPSAADDIPVSLCEKNPAERIAAINALPLTDVIGPLVDHQAAASLKESVAKEASDIVVAATTSGSNVPKRGRKFSFVLRTHRKATNSADSDASPLPQRRQRFVTIGEK

SEQ ID NO: 159909 - protein, 178 aa, Oryza sativa
  Clone ID: PAT_MRT4530_59239C.1.pep
ISIRKKEKELGSKNRFGLKTSLPRSCLCEELEPSVHTHTPSEDWKESISEKIKSYSIEYGSGNYITALRRKREIVNNCLQDPRILKEYINKYVQTHYEIRYRYYSPNWNNMCLFHNNIEFNQPIVRFHYNYIRDMLSLRSLSPMKFGELSMRSRLWTSLQRLTESSNYTLTAKYTHNV

SEQ ID NO: 159910 - protein, 483 aa, Oryza sativa
  unsure (1)..(483): unsure at all Xaa locations
  Clone ID: PAT_MRT4530_5923C.1.pep
GARRGAEKAGRQRRLPAWAHGWRLGTTRQKRARGXRGAAKKLEGQHIITEVEEDGRPSAPAEAAKNYVRHSGWVVRNNVPVSTVYWRRTRARGDHESFVTDSEKEMLWTTMLETFTLPAGTEDKSFKGDLYQKYILKGQTPNFDTFRKLRDHWDEFVAYKTGEQGQAMMERNKENAAKKKYHHHLGSGGYSVAMPKWEEMEASLLERGIEPATANWLERSKFWYYAHGGTLNPADGSLVFGDQIREVACRLTDAVEASSQGTFRPDRERDELSLALQTPEHPGRTRGKWVIPWKIGFKEDIHTYRSRMRRKRDTEAKIADLEFRVSSYERSMQEEVARKVDERMAAHRSHDPQPTIPPAMVSPSGNCSSCASTGQVGSQSMDAMQTQDESXHCRPIPAGYSKVEVELVEGAYEDLELDYPGGDGETHXSPPAPPSPPQDPAPSPPHAPAPSPPQAPAPTPPQAPLPAPSKSRAPQAPPHVRTR

SEQ ID NO: 159911 - protein, 656 aa, Oryza sativa
  unsure (1)..(656): unsure at all Xaa locations
  Clone ID: PAT_MRT4530_59240C.1.pep
SDIWEQRVTNAVEPFLDLFCFYYELRWMEPNRVSRCVGFRLRDCLKSRYIPFQCPSSRSKWRARWFYLXIENSDPVLVVPKEQPNKIPEWTTKPALTPSLXSFIDIIDDLRKRGLSVYEVAADFVDRRIQPLQARAHPAFDYSRPEDTTRVSPRGIFFSYFXFVPSASVSPDLSSSRSRFTGLDSDTVERRVGQVMMSAPSAADDIPVSLCEKNPAERIAAINVSVLDDSFTSFFSRSRCDFKLCRLSLXTDVIGPLVDHQAAASLKESVAKEASDIVVAATTSGSNVPKRGRKFSFVLRTHRKATNSAPHEEKANIRRMARAKVAQGRTDAASSASPTATSTGFVVTAKDQEVTPSSPVVSLVPTRSLSTDALTWGELQAEMERLLQAGACGVGCEIEEARAAALSANQRADQLARDLAEAHEDLQKMRELVAGNEMQWRGLEHRMSELEGHMIDIRGSLRTDVDIEDIQQHGQPDMPVIVPALTLEPFVPREEISQSPSAEANMAMMSQAVFSEEKSSLTQSFPWRADFENMLADRDRRIQYWKTKLEVAELEKTMVEVKKDQAVEALRGRELEGIGKRIDEALKQKCRQASRYAGGHVLACIRDHRPQLYLEFLREGFLRSRRTPAEIDGLAQSMAPLAEKVFRSMDWRWPSW

SEQ ID NO: 159912 - protein, 115 aa, Oryza sativa
  Clone ID: PAT_MRT4530_59241C.1.pep
MAAFHPLAIIVFVSLLAAGATANYGYTTPSPSPPPPPPQQQYTPPAHSDKLLVRVEGMVYCQSCAYRNTHSLDGAVPLPKAEGNVIERKGGRGCIGLGLLASRSGNLTVTNWQWR

SEQ ID NO: 159913 - protein, 49 aa, Oryza sativa
  Clone ID: PAT_MRT4530_59242C.1.pep
MATTASSIHWPGVVATGSNQNDGDVVVGWIDGGMWLNHEGVLEYGMVWG

SEQ ID NO: 159914 - protein, 78 aa, Oryza sativa
  Clone ID: PAT_MRT4530_59243C.1.pep
PRLLQSACGVASVAAGSGRGRATVPLTSFNAWRRVGHYRSPQTAPEGVEGGRERREVRIRRGEGESESDSKADTRGTV

SEQ ID NO: 159915 - protein, 38 aa, Oryza sativa
  Clone ID: PAT_MRT4530_59244C.1.pep
WLKEELLMHAALLCCTGHSGLMGSPLNYSLKIHRTMAN

SEQ ID NO: 159916 - protein, 112 aa, Oryza sativa
  Clone ID: PAT_MRT4530_59245C.1.pep
MPYPITVNVLPLPRATLGARACGKVAAAYQAQGPTYSRRNDAELKIPGHMDDPEFTGPLLGRGHMILFCFSSVPGLDPGHRHGANGTKVKILLVDMLITSLLTGSFPRSLAT

SEQ ID NO: 159917 - protein, 471 aa, Oryza sativa
  Clone ID: PAT_MRT4530_59246C.1.pep
MAAADEASKPPPLPPYPEMILAAIEGLNEKSGSNKSAISKFIEGKYGDLPPAHASLLTAHLARMKESGELIFLKNNYFRADAPDAPPKRGRGRPPKPRDPNAPPPPPKPSSPRPRGRPPKSKDPISDAIPKSRGRPPKKAKTAPAPPPAAGDGSAPVKRGRGRPPKLVWPLMVATGVLVSGGGGSWYLCASWTANRRHGGQIIPEQEPQSKIEFPDLDGLGGGGGGASGSGCRHPARVRVCVGGGDGVCVAPGTSVVVVEVATVSALSSALRRLSSPFAVPELAVALFPSVAPMLAVAPAGVGMCAMIGASSSVGGSGWLVVIYILLQADAFRILVIGCLFCPKSCGSMLQVALSLAIPALKARQKSIGSLSKASLLMVGWSTFWPSLLFPRSRSRAWFVIRVELGPPAQFRLSGLLEFLRFNDESRGDVSLSAVMLTPKIYGSATNLDLVPFPWRQPKGINGLSSGVHFN

SEQ ID NO: 159918 - protein, 75 aa, Oryza sativa
  Clone ID: PAT_MRT4530_59247C.1.pep
MAGSVSDLPDSVASPPSLPLLLRCRWPEVVGQQIRQPSADPLVAGDGDDGSSCANENGAMRMEKGLESRANKDEA

SEQ ID NO: 159919 - protein, 1441 aa, Oryza sativa
  Clone ID: PAT_MRT4530_59248C.1.pep
MTMMTPPPLEPEEDEMLVPHQELVAADAAQPMEVVAQTEAASTAESQPAEDPQTSRFTWTIENFTRINAKKHYSDAFVVGGYKWRVLIFPKGNNVDHFSMYLDVADSANLPYGWSRYAQFSLAVVNQIQQKYTIRKDTQHQFNARESDWGFTSFMPLSELYDPSRGYLVDDTVVVEAEVAVRKMVDYWTYDSKKETGYVGLKNQGATCYMNSLLQTLYHIPYFRKAVYHMPTTENDMPSGSIPLALQSLFYKLQYSDNSVATKELTKSFGWDTYDSFMQHDVQELNRVLCEKLEDKMKVTNLRTVVEGTIEKLFEGHHINYIECINVDYKSNRKESFYDLQLDVKGCRDVYASFDKYVEVERLEGDNKYHAENHGLQDAKKGVLFLDFPPVLQLQLKRFEYDYMRDTMVKINDRYEFPLQLDLDRDDGKYLAPDADRSIRNLYALHRYKFDDERVTKEDTKKALEEQYGGEEELPQINPGFNNAPFKFTKYSNAYMLVYIRESDKDKIMCNVDEKDIAEHLRVRLKKEQEEKEHKKKEKAEAHLYTIIKVARDENLKEQIGKDIYFDLVDHEKVRSFRIQKQLLFTTFKEEVAKEYGIPVQFQRFWLWAKRQNHTYRPNRPLSPHEETQSVGQLREVSNKAHNAELKLFLEVELGPDLRPLPPPEKSKEDILLFFKLYNPEKEELCFVGRLFVKALGKPSEILTKLNEMAGFVPNEEIELYEARAKFMMLYLWDNLEEIKFEPNVMCEHIDKKATFRASQLEDGDIICFQKSPIPDSDTQMRYPDVPSYLEYVHNRQVVHFRLLEKPKDDDFSLELSKLHTYDDVVERVARQLGVDDPAKIRLTSHNCYSQQPKPQPIRYRGVEHLLDMLIHYNQTSDILYYEVLDIPLPELQGLKTLKVAFHHATKDEVVIHSIRLPKNSTIADVINDLKTKVELSSPSAELRLLEVFYHKIYKIFPLHEKIENINDQYWTLRAEEIPEEEKNLGPNDRLIHVYHFMKDPLQNQQIQNFGDPFYLAIREGETLAEVKERIQKKLQVPDEEFCKWKFAFISMNRPDYLQDSDVVSARFQRRDVYGAWEQYLGLEHADTAPKRAYTANQKKLTRITAAVSAALGSVIVIADEIFASTYILTILSKKLYLMSRIKFGVTRSIFFSRHYDLNKAPVHLTLQLPTSPMDNPTPSSSSGGGGAAAAANASSDEHRKTSPATAADFFDEEHTFDDILLPVDLFDFTHGLDAGDGCYVDDQAAIGQKPLSPAPEPAAEQQPSPAPEHGDDERLVMYYQGQEYIFDPVQPQKIENIFHHLNGQEMIPQSIRPQPTNLVRPITVPEDFDRFAALTRYREKKRNIKFIKKADYSARKEVALRMKRSKGKFAPRVQTSENSLAHRKGITFCTNCGESSDATPMMRHAPNGTKSFCNACGLMWANSRKIRKIRNPTSGEQEDQ

SEQ ID NO: 159920 - protein, 106 aa, Oryza sativa
  Clone ID: PAT_MRT4530_59249C.1.pep
TKTKPNGTYHHAFTHTVASQQPHQHSFTITAAVIMQPAVFGPMPIAILAAKCHAAGTHHHKVHSKFTSKHPKAPHPPPAASSSGQLGGCHCIVHSAHRNLQYCAQR

SEQ ID NO: 159921 - protein, 76 aa, Oryza sativa
  Clone ID: PAT_MRT4530_5924C.1.pep
TGRRRRRSSTATCGSLSEHGVLRPGVVEEGLIRRAAAAHGSCTASGWSGRVSTRCSYRKCSWLSPSSSASSPAPMS

SEQ ID NO: 159922 - protein, 86 aa, Oryza sativa
  Clone ID: PAT_MRT4530_59250C.1.pep
YEILIYICLFSCFRNFNLFWAEQLPQINPGFNNAPFKFTKYSNAYMLVYIRESDKDTIMCNVHEKVIAEHLRVRLKKEHPEKEHTK

SEQ ID NO: 159923 - protein, 511 aa, Oryza sativa
  Clone ID: PAT_MRT4530_59251C.1.pep
MTGEASKGRSGGGREGRASSSRQRTDVASELELQEASSSAVSPPHPNPGDAEAAPAAVAIPPAPAPLHDLAQGAEAASAAGRSNEKEEQVELRKVQKDIELGALVAGFSFSVAMTGFFLSPQATGRQAIYIDISMFLAFSSFVCGCTFMLLRMQRLSAREEHISGFHHAISKCLFYLCCVLPVLTILCLLLVMPRKPYIYVGLGVLAAAVVPVALMHWYVSRKTQLETNDTAPEDVEQNAMSRKTQETNGTAPEDDDEQKAMESSYKITSAIVPMSLAGLVGVLFGVYKGGSSSGGAGGDISGSVHVVIMCMFITSMLSMLLMMLWMKVLESKKPKLREFFVRATIPRANAALLALLAIAAFAASFGILRWYMVAAFLTLALAATVQFVIQHCTREQNAVRASHNETQLKWMADMASKTTPWSLGIVMAIFGGFLGDDDKSKDKMVALKVCMFLSTSAFTSGLGLMYLTMRPGESARGGTSKAAMTILAWSVMVLLSAAALAIYGVEVMKS

SEQ ID NO: 159924 - protein, 98 aa, Oryza sativa
  Clone ID: PAT_MRT4530_59252C.1.pep
TVDFQVRLKKEQEEKEHKKKEKAEAHLYTIIKVARDENLKEQIGKDIYFDLVDHEKVRSFRIQKQLLFTTFKEEVAKEYGIPVQFQRFWLWAKRQNHT

SEQ ID NO: 159925 - protein, 203 aa, Oryza sativa
  Clone ID: PAT_MRT4530_59253C.1.pep
RPGIHSIRLPKNSTIADVINDLKTKVELSSPSAELRLLEVFYHKIYKIFPLHEKIENINDQYWTLRAEEIPEEEKNLGPNDRLIHVYHFMKDPLQNQQIQNFGDPFYLAIREGETLAEVKERIQKKLQVPDEEFCKWKFAFISMNRPDYLQDSDVVSARFQRRDVYGAWEQYLGLEHADTAPKRAYTANQNRHTYEKPVRIYN

SEQ ID NO: 159926 - protein, 90 aa, Oryza sativa
  unsure (1)..(90): unsure at all Xaa locations
  Clone ID: PAT_MRT4530_59254C.1.pep
MTAFYHMKPELFXPVKVGQAPKYMXVSCADFRVWPLVTMGLEPGEAFTVRNIVNMVPAYCMIKHAGVGSAIEYAVCALKVELIVVIGHNR

SEQ ID NO: 159927 - protein, 78 aa, Oryza sativa
  unsure (1)..(78): unsure at all Xaa locations
  Clone ID: PAT_MRT4530_59255C.1.pep
VKAKLFQIEDLVWKTILPLGSRSKEFDRXSPSWEGPYRVCRIVRGNAYFFGDTXGKRFQITINRKYLKKYFPCVWQDA

SEQ ID NO: 159928 - protein, 293 aa, Oryza sativa
  unsure (1)..(293): unsure at all Xaa locations
  Clone ID: PAT_MRT4530_59256C.1.pep
MAKEPMRVLVTGAAGQIGYALVPMIARGVMLGADQPVILHMLDIPPATESLNGLKMELVDAAFPLLKGIVATTDVVEACTGCECCAVXAVVGSPGNTNALILKEFAPSIPEKNITCLTRLDHNRALGQISEKLNVQVTDVKNAIIWGNHSSTQYPDVNHATVKTPSGEKPVRELVADDEWLNTEFISTVQQRGAAIIKARKQSSALSAASSACDHIRDWVLGTPEGTFVSMGVYSDGSYGVPAGLIYSFPVTCSGGEWTIVQGLPIDEFSRKKMDATAQELSEEKTLAYSCLN

SEQ ID NO: 159929 - protein, 117 aa, Oryza sativa
  Clone ID: PAT_MRT4530_59257C.1.pep
SAGDHEHATVRRRQEQRRVRSPPRHHRDHAGNRARPAKRLQRQVSPSAPTSAAPAGDGPDTEQPGASPPPGRRPPAVRIPHGSGGRSAPLLEPRLRASTSPRRRQLSCPPPPPPPPP

SEQ ID NO: 159930 - protein, 179 aa, Oryza sativa
  Clone ID: PAT_MRT4530_59258C.1.pep
LLVNTEGVAQIINHCYKNLPSDLKTCLLYLSTFPKGRNISRKHLIRRWIAEGFITEEHGKTADEVAEDSLNELIGRNLVKPINNNSNGKVKSCQIHDMVLQYIVSKSSDENFITVIGGHWQTAFPSYKVRRLSVHKNGQQETEMIEKMKLSHVRSLTVLESFGALHSSMLKFQILQVLE

SEQ ID NO: 159931 - protein, 46 aa, Oryza sativa
  Clone ID: PAT_MRT4530_59259C.1.pep
MKELKWNGQREVPGKNARNFQAALRKFFAMKRRPEVPARTSGDFRT

SEQ ID NO: 159932 - protein, 84 aa, Oryza sativa
  unsure (1)..(84): unsure at all Xaa locations
  Clone ID: PAT_MRT4530_5925C.1.pep
MLPSNGRQNCIRAPFWVREYLMESSRSPLSNRSSTISEFHLVWPQSQKKSNASPILGLWACNFVXDPDPSGAHVGCAPTKWRTT

SEQ ID NO: 159933 - protein, 59 aa, Oryza sativa
  Clone ID: PAT_MRT4530_59260C.1.pep
QALEQQLPLQQFGDLYFDRNLAQAQALLAFNVPSRYGIYPRYYGAPSTIPNMPVSCNKF

SEQ ID NO: 159934 - protein, 169 aa, Oryza sativa
  Clone ID: PAT_MRT4530_59261C.1.pep
MAPAGAAAAALALAAAVCFLLVAPAPARRPADLPPQAAVLLPEPVDYREAAADAEPLLPPKPVADADAAALAVPEEEEERGPARPRASLLCLVFRCDDGDEANAVAVRRSGGGAQDGGWWPRAAWKGEGDESNSDSDSDSDCDSDSDDDDDEGGEGGIVGWFWSLAHRF

SEQ ID NO: 159935 - protein, 89 aa, Oryza sativa
  Clone ID: PAT_MRT4530_59262C.1.pep
KIVPFLVCPFLLSKFIKAFSFKSGKNTQAKSFVAPFGFFFLLNMNPEPPCTPFLRFCPPKKTLYGVLTPFLVWPLSNPPSASFFFCCFS

SEQ ID NO: 159936 - protein, 91 aa, Oryza sativa
  Clone ID: PAT_MRT4530_59263C.1.pep
ATPTKRFQVRRSNCVVDPISIAKRLLSSMDHARLSTYGPNVAAAGDLQAGALAFSARNSSHSAPLTVKFITSAYNNVFSGLLNRHKHVLSP

SEQ ID NO: 159937 - protein, 71 aa, Oryza sativa
  Clone ID: PAT_MRT4530_59264C.1.pep
AELPCIKGTDFLISFLLSIHHHFVVAYLGPETRVDPRVRLIGDTFQIIWLLLSLPKGTAVAFYLVLNMHIY

SEQ ID NO: 159938 - protein, 79 aa, Oryza sativa
  Clone ID: PAT_MRT4530_59265C.1.pep
MAQRRRGHGRSCFVEAVQRRRGYSGNGLEDDNGGSRRMMAVVVSVAGINTDKLVPDFHPTIQIGTYGIFYSRVRMLGDF

SEQ ID NO: 159939 - protein, 164 aa, Oryza sativa
  Clone ID: PAT_MRT4530_59266C.1.pep
HEGLTKPSPDLSTTQAVAMDMDSVVVHQRGGAGAGDEEEEIGVFTAERYFSGADEVDALWCGGSSSSLSSAFKTGGGQQEYWSAAPTTLTAATTSSEASWNSRSALSEGRRRRRRRRDGGAFPAQAVTSARPELRRPRRRIIFFYGGCSAWLRAPAPAAARRRL

SEQ ID NO: 159940 - protein, 62 aa, Oryza sativa
  Clone ID: PAT_MRT4530_59267C.1.pep
MRPALRHGGEVQPEVRWHGAVAPSITPNGGGVGGKPLALIPQKLRLAPMILEVETVTVKVGA

SEQ ID NO: 159941 - protein, 149 aa, Oryza sativa
  Clone ID: PAT_MRT4530_59268C.1.pep
NLGVAASFYLPDQIRSPWRRRRRRRRRTSSSCAPASAPASSASSPSPSPPRPPSLPPSAARALHPPHLPPPTPSARAAPPARRNRIPPFSPSALTPPTPIPTPRPGGSLAPCSSTPPPPFSTTTPSFSFNPAASPGHSCRLGLATPPPL

SEQ ID NO: 159942 - protein, 352 aa, Oryza sativa
  Clone ID: PAT_MRT4530_59269C.1.pep
MSNADVEAGGPAGREATTGIKPPPGRYNPSGNGPNAVAPAPPPFYYYDQAAAQERHHRTWVVPLVVIANVAMFVVVMYYNNCPANGGRRDCVGRSFLRRLSFQPLRENPVLGPSAATLRKYGALDWYGVVHGNQAWRLETSTWLHAGLIHLAANMISLLIIGIRLEQQFGFCKPESVKSRKGKVGLVYLVSGFGGSVLSVLFISRNGITVGASGALFGLLGAMLSELITNWTIYSNRCAAMVNLIIIAAINLALGILPRVDNFAHIGGFATGFLLGFVLLIQPQFGWSEQVSSAKSKYNAFQIILLTLSVALLIAGFAAGLVSVFKGVDGNAHCSWCHYLTCVPTSSWKCDK

SEQ ID NO: 159943 - protein, 81 aa, Oryza sativa
  Clone ID: PAT_MRT4530_5926C.1.pep
IKEPNGFGMGEFRLHQQKRSSCDQDKPFLFPEFTVSIQSNGSSSNTSCNLVNSQASVTFRKSRTTQEWNEKKKTLQILLEQ

SEQ ID NO: 159944 - protein, 206 aa, Oryza sativa
  Clone ID: PAT_MRT4530_59270C.1.pep
MASRPATKPWQKHAPPRRPSYVPLWQRRVEEEEEKKKQRHAAAPPRAAAPEEQQQAEKTPRRTSTKRGDSARRAISANLTVLAAISNPNTKIGIVLRYVRFDLYFEDSVVAAQAVWPAPVQVAPGGSVPRRVHLVVSSVSVTRQDAALWRNATAKGGRPVALRLAGRFRTQLNFDRWFFRYRYWVKPQCTLWLDPPPSGALRRSRC

SEQ ID NO: 159945 - protein, 78 aa, Oryza sativa
  Clone ID: PAT_MRT4530_59271C.1.pep
MMVIVAEQQERLEVISFPVDRDEASAMPTTVAAMVADRSMRGPQYKHGEEGKKKEMASPALEESGGARIRRPVACGDR

SEQ ID NO: 159946 - protein, 466 aa, Oryza sativa
  Clone ID: PAT_MRT4530_59272C.1.pep
METSSFLRTTLPTAKPLPAFQTLAPRPRPRPLRRSTISAAITRGRKEDTVAAVREQLEGCYLLAGIRYEGLTVKQLQGIRDTLPETCRLLVAKNTLVGKAIEGTPWEALKPCMKGMNAWLFVHTEEVPAALKPYRAFQKEERLEETNDFVGAVFEGKFYAPGDFKALETMPSRAEVYAKLLGSLQGPATSVVTTLQAPARDVVSVLSAYVRKLEQERLQRSKFSRLRGNGNAQLEWSITTSACVVVPSISVSRSDYQACQYANIIRPMDKDRVYMSVSQKQRKRSPSRRNEETTASGWPRGHVKRRAGANQLGLQLIISPKRSTKLLRAIGDVVQPGAGAADHLIDAFHAELFASAVAIKTAKEKGMARVELETDSLMLCNALQSNSFNLSVMGGVILEIKHVIASCFHSFSVSYCPRNCNKVAHELAALGCNLSGRFLLDRLPAWDGTTGDQRFSWISYIKFRFP

SEQ ID NO: 159947 - protein, 99 aa, Oryza sativa
  unsure (1)..(99): unsure at all Xaa locations
  Clone ID: PAT_MRT4530_59273C.1.pep
XXXXXXXXXXXXXXXXXXXXXXXXXXXXXXXXXXXXXFFFFFFVYVFNSILFKFSELLEKLRNLSTQIYRHLQKMKKCVNHFVVLCIREYLFKADCLIV

SEQ ID NO: 159948 - protein, 39 aa, Oryza sativa
  Clone ID: PAT_MRT4530_59274C.1.pep
MMPRDMWIQRGGIGENPRASWHTSRSPYVAVLNGLGDPG

SEQ ID NO: 159949 - protein, 208 aa, Oryza sativa
  unsure (1)..(208): unsure at all Xaa locations
  Clone ID: PAT_MRT4530_59275C.1.pep
FVRRCCTSAPRRRPPPPHSXRPTVVRAAAARPWPTVVNADLGGRGGREPPPPXAARPRPAVVRAGAARARPAVINADLGRRGAREPSPPQQHGRGPPSFAPPPHGHGPPWSLQIWERWAAGSRRRRLNHPRRCGHATASTLLAATARRRAPPAPLRPDPPATALPLLPPARSGRRGRERAAAALRRCRPPPPPPVASRRRREGRGEER

SEQ ID NO: 159950 - protein, 384 aa, Oryza sativa
  Clone ID: PAT_MRT4530_59276C.1.pep
MPELLHEPPEQLIPSLPVRIRRGHPAGALSPAQALASGAPPLDPSSSSGTVFGCRPHAIGVRQHPSRQHCSIVLVVLPTSANILLASYVPSCLSSSHRRHLHVLLVPPAPTCYPRVTNVRTPSLHRYCLVILLMLCPLLVLFEERASNEGAPDGRDPLLASYDDDDDDDEDEDEDDSSSGDLPPRKKQKKCKYIADKPSACTSMPAKIVDFRSLRPPLLHVRAAPSSATAAQPRPTVVRAAAARPWPTVVNADLGGRGGREPSPPQQHGRGPPSSAPPPHGHGPPWSLQIWERWAAGSRRRRLNHPRRCGHATASTLLAATARRRAPPAPLRPDPPATALPLLPPARSGRRGRERAAAALRRCRPPPPPPVASRRRREGRGEER

SEQ ID NO: 159951 - protein, 97 aa, Oryza sativa
  unsure (1)..(97): unsure at all Xaa locations
  Clone ID: PAT_MRT4530_59277C.1.pep
AASTSSPAGRECLVQSTACTHSSITPQALSSSWSPFVLWSAGRGLCTSCQRTPVSAGSVCNSALXPPSTNDAIAAQEKHTPKTAIWFQTELQCHLSS

SEQ ID NO: 159952 - protein, 94 aa, Oryza sativa
  Clone ID: PAT_MRT4530_59278C.1.pep
MESTWPWSLDLELVTNVPSPLITDVCPPFRQPGRGDSEANKDVILGFVRAELTAMHAALRDLTDLTPAQLDEQAKAGASHATSRTPSTLSWFGA

SEQ ID NO: 159953 - protein, 136 aa, Oryza sativa
  Clone ID: PAT_MRT4530_59279C.1.pep
MVRTGTMFKEEQRSTAIGIPCEKVTRVRIFGSHLWSTVGIGARLREELMSRRSRIPGDEVGYEMAYGGWTACGRDLCNGLHEVCVQGSVFAKDIGRNWIGVDSVTVRCRRAASCLGCRLRLGGKPSRGPGSRERGP

SEQ ID NO: 159954 - protein, 93 aa, Oryza sativa
  Clone ID: PAT_MRT4530_5927C.1.pep
MWEEGNADGREEEATTTTTGRALQRCPCVCSQLASDAAYGRSPPPAPPTRADRSRLALIGDENGRCRLQRSPVHPQDDMVVPPRMLIWELLPK

SEQ ID NO: 159955 - protein, 149 aa, Oryza sativa
  Clone ID: PAT_MRT4530_59280C.1.pep
MSAAAAADVVHSGGCHCGRVRWRAEAPASVVVWICNCSDCAMRGNAHFVVPASKFTLAAGAGESLTTYTFGTHTAKHTFCRVCGITSFYTPRSNPDGVAVTAACVDPGTLAHVEYRHADGRNWEKWFSRSDISDFSKPKAPPPPPPSKT

SEQ ID NO: 159956 - protein, 104 aa, Oryza sativa
  Clone ID: PAT_MRT4530_59281C.1.pep
MARETTWAHQDQLVMEARSPLALKMEGFARGRERVPPGSNPSTGRPLAVGSKKRSGKKERKTTMTAEAATTTDARARVRDEGITPQEGGSGGDGRASLRKIWGF

SEQ ID NO: 159957 - protein, 76 aa, Oryza sativa
  Clone ID: PAT_MRT4530_59282C.1.pep
GLLLPNSTSVGEICVCAYFNEKTHPSCEETHLRPIRREHTDWRAHKSGETARERVITAITAIRAHQSVSWPKGRPG

SEQ ID NO: 159958 - protein, 127 aa, Oryza sativa
  Clone ID: PAT_MRT4530_59283C.1.pep
GDGSRLPLSAARRLFPIPPRRFSSPHTSVLRPIPLSSPLNLSSLPCRTASASAPPSPLRGGAAFPSLADRHHQRMSRLSSSLARSSPIYIASYDDSWLDLSRTTSLLRVHSSPLDMHVSIYARTPRD

SEQ ID NO: 159959 - protein, 1121 aa, Oryza sativa
  Clone ID: PAT_MRT4530_59284C.1.pep
MEYMRWLEEHNKQINELRSAVHTHAGDDDLQNIVSSVMAHHEEIFRIKGLAAKADALHVLSATWRTPLERCFLWLGGFRPSDLLKLLADQLEPLTEQQLASIYNQQQSSQQAEETLSQGMEIIQDSLAKTVASQLGRAGSSSPSNAADHTAAALGKIGDMESLLQQADDLRMQSLQKMQRVLTTRQSARALLLVSDYFSRLRALNSLWIARNNDFEVNAGDSTKYPQSPKPPHLPFQLAYPTEEHGELKFPQDIAEELQKLSSSLSTIQAHVEDAEARQLKDRAARSWLAKLKDVAYEMDDLLDEYAAETLQSELEGSSRSRHLSKVRSSFCCLWLNNCFSNHKIVQQIRKIEEKIDRLVKERQLIGPDMSSTMDREEIKERPKTSSLIDGSSVFGREEDKENIVKMLLTPNNSNHANVSVLPIVGMGGLGKTTLTQLVYNDPRVKEYFQLRVWLCVSENFDEMKLTKETIESVASGFSSVTTNMNLLQEDLSKKLEGKRFLLVLDDVWNEDPEKWDRYRCALVSGSNGSRIVVTTRNKNVGKLMGGMTPYFLKQLSENDCWNLFRSYAFADGDSSLHPHLEIIGKEIVKKLKGLPLAAKAIGSLLCTKDTEDDWKNVLRSEIWELPSDKNNILPALRLSYNHLPAILKRCFAFCSVFHKDYVFEKETLVQIWMALGFIQSPGRRTIEELGSSYFDELLSRSFFQHHKGGYVMHDAMHDLAQSVSMDECLRLDDPPNSSSTSRSSRHLSFSCHNRSRTSFEDFLGFKRARTLLLLNGYKSRTSPIPSDLFLMLRYLHVLELNRRDITELPDSIGNLKMLRYLNLSGTGITVLPSSIGRLFNLQTLKLKNCHVLECIPESITNLVNLRWLEARIDLITGIARIGNLTCLQQLEEFVVHNDKGYKISELKTMMSIGGRICIKNLEAVDSAEEAGCKPAVERSEAAAATRDVCAAGQRAPRVPPSVAVASAMATFLVRDSRAAGLGLFGRRLVQLGRCNKGQGPSRMREESMRSEAVLLHPANVVACTALGVVAALLGVLLPCPRLATRDATDKRLAYLEVAAERVMLLAHAFQLHFSSGDAGDDERASYCRCSRRRRQCVAACIMSQADRAATAGRRRLSSAA

SEQ ID NO: 159960 - protein, 378 aa, Oryza sativa
  Clone ID: PAT_MRT4530_59285C.1.pep
MVIGEAVLSAFMQALFDKVIAAAIGELKFPQDIAEELQKLSSSLSTIQAHVEDAEARQLKDRAARSWLAKLKDVAYEMDDLLDEYAAETLQSELEGSSRSRHLSKVRSSFCCLWLNNCFSNHKIVQQIRKIEEKIDRLVKERQLIGPDMSSTMDREEIKERPKTSSLIDGSSVFGREEDKENIVKMLLTPNNSNHANVSVLPIVGMGGLGKTTLTQLVYNDPRVKEYFQLRVWLCVSENFDEMKLTKETIESVASGFSSVTTNMNLLQEDLSKKLEGKRFLLVLDDVWNEDPEKWDRYRCALVSGSNGSRIVVTTRNKNVGKLMGGMTPYFLKQLSENDCWNLFRSYAFADGDSSLHPHLEIIGKEIVKKLKGLPLAL

SEQ ID NO: 159961 - protein, 322 aa, Oryza sativa
  Clone ID: PAT_MRT4530_59286C.1.pep
MAAQALAAVVAIAVLAQSAAAAAAPPPAKGPVTYVFGDSMSDVGNNNYFPLSLAKSNYPWYGIDYPNGVATGRFTNGRTIGDYMADKFGVPSPPPFLSLSMVYDDVLGGVNFASGGAGILNETGVYFVQYFSFDQQISCFEMVKKAMIAKIGKEAAERLYGLGARKVVFNSLPPLGCIPSQRVHSGNGKCLDHVNGYAVEFNAAAKKLLDGMNAKLPGARMALADCYSVVMELIVHPEKHGFTTAHTSCCNVDTTVGGLCLPNSRPCSDRKAFVFWDAYHTSDAANRVIADLLWDAMPSAGSGGAATTPLAASPAPSPSRAP

SEQ ID NO: 159962 - protein, 136 aa, Oryza sativa
  Clone ID: PAT_MRT4530_59287C.1.pep
GLQESARGHNAVTKSVEIKTYSEFPAIQKSERRKVFAILIHLKAPKSLDSVSSRAPLDLVTVLDVSGSMSGIKLSLLKRAMSFVIQTLGPNDRLSVVAFSSTAQRLFPLRRMTLTGRQQALQAISSLVASGGTNIC

SEQ ID NO: 159963 - protein, 168 aa, Oryza sativa
  unsure (1)..(168): unsure at all Xaa locations
  Clone ID: PAT_MRT4530_59288C.1.pep
MAMVAGTEPAAGAKVVVVVPCGLVVTTAVTVSPRSAPLGRIWRVAGGSWWXCATMTAAVRRRRRRCGDGSGGGGRRQRRQXGDGSGGRGSWRLRCWLVMAAVAHMASGGGQPHAGEGRWHSGXVADTRAGVDGSGDGGXCAGGGDVGGGEGVGCEARMATGDGEVAGR

SEQ ID NO: 159964 - protein, 50 aa, Oryza sativa
  Clone ID: PAT_MRT4530_59289C.1.pep
MARGAGEAWDQWSGVHREMIKASMLDEIIDRLRQVLARGGNFPVGVGDPP

SEQ ID NO: 159965 - protein, 234 aa, Oryza sativa
  unsure (1)..(234): unsure at all Xaa locations
  Clone ID: PAT_MRT4530_5928C.1.pep
FKKKLYCVSRGEGARGLGPREWGPRDSLTVHGGPGAPGLAPAGVVGPTRQPHPRTWAADGRAPRGGHSARPAGDGARAPMVAGGGHRHGGAAAERGEGKGEKRRRSSAHPRSTATTKKAAGAEEGGGAARVNGVDGIPAVRGLGEGVDGVDGGAAKPEEATPGQETVPASGEGQPEVVDDGGERGRRHELDSGGEXGAARAETGEGGAGRVYIGLEGGEGGRRGRKPARRSRAP

SEQ ID NO: 159966 - protein, 90 aa, Oryza sativa
  Clone ID: PAT_MRT4530_59290C.1.pep
MEGPSSSPPTAEAAPLARFVPPSSSSPMTVYDTMIHDSLVFDDGHRVVGGKVRSWSTIHHPRQACGGDGTRGSRSHAVEAQQASPLSMPV

SEQ ID NO: 159967 - protein, 26 aa, Oryza sativa
  unsure (1)..(26): unsure at all Xaa locations
  Clone ID: PAT_MRT4530_59291C.1.pep
RPGRGQQRLVAEEECRQQQQAAKLRX

SEQ ID NO: 159968 - protein, 131 aa, Oryza sativa
  unsure (1)..(131): unsure at all Xaa locations
  Clone ID: PAT_MRT4530_59292C.1.pep
ERILFRETSLSGNQISSSPSFAPVSDHXTPTSASFXSDQAPQXRSSXRRCGLRLRAAGXPIGGRXRXRGATAPPWAAAAAEEASVDEAAAREPWCXRGRWPWLRXLPXNWKFCYCREWVRHNAIPLNGIXK

SEQ ID NO: 159969 - protein, 266 aa, Oryza sativa
  Clone ID: PAT_MRT4530_59293C.1.pep
MEATYRLQRTVSGGRGRPRQRDKRCGGKTQAARPPQRHAAVPGRSTSRHHVDRSTAAAVGAKVEAGATAVVGAEARLLLWTAASIGLLFGELVLDKEGGDKIGKRGGTATSPVAFVSTSAGGGGRIRALRAPIPSTAAAPEGMGTMVTTVLAWRRLHSQPSSGHGGRRYAPTTRSISQLIQVEADHVDVAVVTACAHRGDLFADTSRRSAAALARRVPRIPSPSIPPEPGAATRLPPLLPATADAPQPLPLPLSAKKKAIEEKIAD

SEQ ID NO: 159970 - protein, 167 aa, Oryza sativa
  Clone ID: PAT_MRT4530_59294C.1.pep
MEATYRLQRTVSGGRGLPRQRDKRCGGESRWQLHAVLAAPQRTLIFCVFNSSSPQDFSDEKTHDAPPPTASPMSLVTAQAARPPRRHAAVPGRSTLRHHVDRSTSAAVGAKVEAGATAVVGAEARLLLWTAAGIEHQLLGLPLAHATGLRPSRSLGAGAVDGLSAPT

SEQ ID NO: 159971 - protein, 147 aa, Oryza sativa
  Clone ID: PAT_MRT4530_59295C.1.pep
MGGGNSADFFSATASLVFSRGFFSRAATPLRTPLTRQGIPAMKQSSGDGRLLLRLWLQLLKIRQCDVYGPDVFLANFSNYKCFLVLVSKPQALVLVSKPQADCPTQEVGESEAHTAHAPHGRLVGDTRLGKEIATCVSIHGQKFECI

SEQ ID NO: 159972 - protein, 408 aa, Oryza sativa
  Clone ID: PAT_MRT4530_59296C.1.pep
RRRSACLRPRAATAPPGSAGAADGWCVKTGRRQRGRSWAAPAIGDAGTREKGRHGGAATREKGPRGGDGLGGCPDRGAVRRMRRRTAEQASEAGCDLAFVRSRPRVRRAASSSAKEADEGLRAGLLRVVRGRGRRHVGGVGRRARGVWGSAACGRRCHRGLDASQRRVAAAAAAGGISSLIGSRPRPPCPYTLCRPSCHAVPPTPHARTTCPPSKERDAFGGWKRTATATMTTRVRRAELEKRRDGEGSHAAAVHLDPDGMERLPIGYSARSAAAEAGRGSVTSVVGAKVGGSCTPSLLPHSARLSSVNVPRRLPLPSIDSSPDLRLVAYGRRWWQPRPLDRHRRHAAVPGRSTSHHHVDRSTATAVGAKVEAGATAVVGAEARLLLWTAAGIGPLFGEGMRCIRFCD

SEQ ID NO: 159973 - protein, 35 aa, Oryza sativa
  Clone ID: PAT_MRT4530_59297C.1.pep
SSPGAYTLRHTALLNIVHAVLRVVTPVVVFIVHTT

SEQ ID NO: 159974 - protein, 219 aa, Oryza sativa
  unsure (1)..(219): unsure at all Xaa locations
  Clone ID: PAT_MRT4530_59298C.1.pep
ESKPSKHKSKNSEPSDRSPSFPKRSQQSKAQASKNPLPIRETTLVVSAKSNRPCPLIRRSNVFDPFSLDLWDPFDGFPFGSGGSSSGSMXPSFPRGASSETAAFAGARTRWKEEGGQTQRSSATGAGRASENVRKSKVEVDRRRNPDRSSGDRXKEQEEKTDQWHRVERSSGKFLRRFRLPDNAKPEQIKASMENGVLTVTVPKEEAKKPDVKSIQISG

SEQ ID NO: 159975 - protein, 54 aa, Oryza sativa
  Clone ID: PAT_MRT4530_59299C.1.pep
IVLNMLPVTAFYKVIFLNGVFPRIQNLKICATGRVIISVCLIKINFTAPHRHML

SEQ ID NO: 159976 - protein, 110 aa, Oryza sativa
  Clone ID: PAT_MRT4530_5929C.1.pep
MGEGGHGDSGFPGAAAPDAPTSMLPALLLTPPRSQMLPLLPTPCLIILHASFRVWPASDPKPGRADAVESNKRPLSRASSAELGHERRQREEQLHKPNDDDGEVAAGAAA

SEQ ID NO: 159977 - protein, 438 aa, Oryza sativa
  Clone ID: PAT_MRT4530_592C.1.pep
MATASSHHRARLRSRAAPLLAVVVLAVLALTAILRASRHDFVPGAARAAAGVGGGGNNHTIAQRKILLDPDFTPRLPRQSALSLSLSQRNALPPRNADRFPRLPDGHLNIVLYVHNRPRYLRLVVDSLSRAHGIGEALLIVSHDGYFPEMDKIVQTITFCQVKQIFAPYSPHLFPEAFPGVSSGDCQGKDKAAEKHCQGDPDQYGNHRSPRIVSLKHHWWWMMNTVWDGLDETRDFDGHILFIEEDHYIFPNAYRNAQLLVDLKPSKCPQCYAINLAPSDVKAKGEGWESLVAEKMGNIGYAFNRTVWRKIHAKAKQFCTFDEYNWDITMWATVYPSFGSPVYSLRGPRRSAAHFGKCGLHQGQGLSNVCVDNGDATVQLDAIDKVPNIKANWPVHIIKRQEGYQAGFKGWGGWGDKRDQELCLSFAYMHHFKDPSSP

SEQ ID NO: 159978 - protein, 159 aa, Oryza sativa
  Clone ID: PAT_MRT4530_59300C.1.pep
MSLIRRGNAFDPFSLDLWDPVDGFPFGSGGSSSSSGSLFPRANSDAAAFAGARIDWKETPEVHVFKADVPGLKKEEVKVEVDDGNILQISGERSREQEEKSDKWHRVERSSGKFLRRFRLPENTKPEQIKASMENGVLTVTVPKEEPKKPDVKSIQISG

SEQ ID NO: 159979 - protein, 161 aa, Oryza sativa
  Clone ID: PAT_MRT4530_59301C.1.pep
MSLIRRSNVFDPFSLDLWDPFDGFPFGSGSRSSGSIFPSFPRGTSSETAAFAGARIDWKETPEAHVFKADVPGLKKEEVKVEVEDGNVLQISGERSKEQEEKTDKWHRVERSSGKFLRRFRLPENTKPEQIKASMENGVLTVTVPKEEPKKPDVKSIQVTG

SEQ ID NO: 159980 - protein, 107 aa, Oryza sativa
  Clone ID: PAT_MRT4530_59302C.1.pep
MENGGNDGDGSAVLVVSWKHELVSRLQLSPSFHFVPTDKELVDFHLRGKIKRRKPPLYLINEKYKGYGEGMWYFFMVRGPSKTKKKDLPQLHMKLDYLCCPKHSPAF

SEQ ID NO: 159981 - protein, 181 aa, Oryza sativa
  unsure (1)..(181): unsure at all Xaa locations
  Clone ID: PAT_MRT4530_59303C.1.pep
QSKPSKHQSPNSEKSDRSTSKFAAIPTMSMIRRSNVFDPFSLDLWDPFDGFPFGSGSGSLFPRANSDAAAFAGARIDWKETPEAHVFKADVPGLKKEEVKVEVEDXTLLQISGERIKEQEEKTDKWHRVERSSGKFLRRFRLPENTKPEQIKASMENGVLTVTVPKEEPKKPDVKSIQITG

SEQ ID NO: 159982 - protein, 67 aa, Oryza sativa
  Clone ID: PAT_MRT4530_59304C.1.pep
PTRLANAPPLCPRQVSPPPPSKWSPPSPHVSPCSSPPPPLQFQFHQSLFVCPLIVCLCVLDLSNFLP

SEQ ID NO: 159983 - protein, 66 aa, Oryza sativa
  unsure (1)..(66): unsure at all Xaa locations
  Clone ID: PAT_MRT4530_59305C.1.pep
RPSSVPSPXRSHRRREAVXRTRPRRXGGRARASAARRRASSTAAAAAAXXEPXRLAYLSSFLDAPP

SEQ ID NO: 159984 - protein, 160 aa, Oryza sativa
  unsure (1)..(160): unsure at all Xaa locations
  Clone ID: PAT_MRT4530_59306C.1.pep
MSLIRRSNVFDPFSLDLWDPFDGFPFGSGGSSSGSIFPSFPRGASSETAAFAGARIDWKETPEAHVFKADVPGLKKEEVKVEVDDGNILQISGERNKEQEEKTDQWHRVERSSGKFLRRFRLPDNAKPEQIKASMENGVLTVTVPXEEAKKPDVKVIQNS

SEQ ID NO: 159985 - protein, 127 aa, Oryza sativa
  Clone ID: PAT_MRT4530_59307C.1.pep
MAARSSLHPSSMASIPRLIGTRKAALRFRAPAHGGTSSSQLSIAAATANKKVFEDQLRGIVCYRDDKGEMVCEGYDEGPRLGMRLPEKACFPWPMEVQITDFIELATFRVFEDADVLQIKNDQKRQI

SEQ ID NO: 159986 - protein, 170 aa, Oryza sativa
  Clone ID: PAT_MRT4530_59308C.1.pep
MATFEMLQRRQRTAGRRRRLLLAFGLSKGGGKRFKDHLRMLHVRGIVPKLTRERGIEGMSRRPDLRKKDQVEEVVHVPMDKMRRSSPEVSKIGSNTFGQRNEEGVLGDKAQGYLRPTVSKNSLSSATSARQVERRRRGVHQQISTFMGCLPPKVHFRGVPELNTHNCDVL

SEQ ID NO: 159987 - protein, 289 aa, Oryza sativa
  Clone ID: PAT_MRT4530_59309C.1.pep
PRLKLHGLEVALKMLGEALNIDYSSTFTQIADEFLEVLSMYEEKFGSTLRPPPSPPSSLVFRLFAARLKELELKELELQKDSSPSSSVHQRKAKNEFNKKYIETPCSLRLNSRGPDPNIIMWWKDNKLFHVVLAQLARDVLASPVSTVSSADAFNINGRVVEDQRSCLAPDILEAIMCLKDFGNAATREQDRMVNAEFASVLNEDIVMGFSYLRTAWGSPSIIEVNLVPTKSEQFITLKAIDFHGNPSGSITGASLQHVDHGFRDQIRRQESHNQELGIILQRNQQLTQ

SEQ ID NO: 159988 - protein, 47 aa, Oryza sativa
  Clone ID: PAT_MRT4530_5930C.1.pep
LCRFSQFNSSVSQQHRFHQRSRFLLDSLKTKEITSMEYIIGTNSMSK

SEQ ID NO: 159989 - protein, 138 aa, Oryza sativa
  Clone ID: PAT_MRT4530_59310C.1.pep
PVPRGPKSGSRTLFGLRHSGWWGLFSGGPLVVEPYIGAMDAFVPAWLPGPEGPGVPHVLFGDPGFPGQLPRTWFQSVGPLPMNFGGQPFNPLFPFGFGLTPQPSHSPSLRSKPFFSMCSPNRSLGFNLAFDGLFYCSV

SEQ ID NO: 159990 - protein, 1671 aa, Oryza sativa
  Clone ID: PAT_MRT4530_59311C.1.pep
MLASRIPLKRCTAAAVVPLPGELEMEEGPTPPAGGGEGSGAAVVPAKRRRERVVPSRFRDSVVSLPLPPAKKGRPAKKAAAREGGDGEVYDVEVRAVEQQGATAAAFGAVETAVWPGDERPAQTEEELYRACRNIRRSSSSSGFSGSVVTSLSNAGGSVAPEGKPVVVVECKPKREGGDKKEDFYWPEDFVLGDVVWARSGKKCPAWPAVVIDPLLHAPAVVLNSCIPGALCVMFFGFSSGGHGRDYGWVKQGLIFPFVDYLDRFKGQALYKLKANRFRQAIEEAFLAERGFCELETDEGCSLEKSVNDQSIPDGLLEGSGSNNEQECQSEAQVVGKSTGCCDSCGNRVPPKIAKKKKQAGEQLLCRHCDKLLQSKQYCGICKKIWHHTDGGNWVCCDECQIWVHVECDLTCINMEDLENADYFCPDCKSKRKTVPPVEQMNTPNSSECASTSKEKLPEMIPVFCFGMDGMYLPKKHMILCQCNSCKERLMSLSEWERHTGSRKKNWKMSVKLKSNGDPLVTLLDDIPCANVKSSTPSINKEELLKLLGTLALEFMLVYAVANSFRPVNARWTTERCAVCRWVEDWDYNKIIICNRCQIAVHQECYGARDVQDFTNWVCRACELPKQKRECCLCPVKGGALKPTDIDQLWVHVTCAWFQPKVSFPVDETMEPAMGILSIPSEYFKKACVICKQMHGACTQCYKCSTYYHAMCASRAGYRMELQYSEKNGRNITRMVSYCAFHSTPDPDNVLIVKTPEGVFSTKFLPQNNEKQSGTRLVRKENLQEKVLPAKISDCPAARCLPYEMLKNKKEPGEAIAHRIMGPRHHSQESIEGLNACMKIENKRVSCGRSGIHGWGLFAAKKIQEGQMVIEYRGDQVRRSVADLREARYHREKKDCYLFKISEDVVVDATEKGNIARLINHSCMPNCYARIMSVGDEKSQIILIAKRDVSAGEELTYDYLFDPDESEDCRFFSAVQFQFQIGREWRCCSHPRVETDLKTLARRFWKVAAPYWWSEDKVQARLRLAAVFALTLATTGISVGFNFLGRDFYNALADKDQEQFTKQLLYYLGGFAVGIPIVYTRIISHITRFSFFVLRDYARETLSLRWRSWMTSYYMKRYFKNRTFYKIQSQSLIDNPDQRINDDLSAFTGTALAFSLTFLNAAVDLISFSNILYGIYPPLFIVLIVYSLGGTGISIFLGKNLVNLNFMQEKKEADFRYGLVRVRENAESIAFYGGEENELQLLLDRFRRAFENLSELLIASRNLEFFTNGYRYLIQILPAAVVAPMYFSGKIEFGVINQSVSAFNHILSDFSLIVFQFQSISAFSAVIDRLGEFDDLLDGNGSSLSKPDNIDGINIIFKSTGPTVLSSNGSPTQSNPSMVLEICNLTLLTPRSGNILITDLTMELKEKDHLLVMGPSGSGKTSLLRALAGLWTSGTGDIIYHVRGSMELQTSNSGPDEPSNIQSNGEELLQSSKQRRDNGIFFVPQRPYMVLGTLRQQLLYPTWTEDVCHSSNNDPQSTDPLTFEVSTSDGVGSKSEMPTTDELIRVLEAVKLGYILPRFNGLDSMHDWASVLSLGEQQRLAFARLLLAKPTLVLLDESTSALDDMNERHLYSQIEAAGITYISIGHRKTLHKFHNKVLYISNSDSTDSNPRNWYLKPTEQMSIEESSSFAS

SEQ ID NO: 159991 - protein, 55 aa, Oryza sativa
  Clone ID: PAT_MRT4530_59312C.1.pep
MMAYEMTCKVGPPKKWSKFTVTSQLTFDWHRSNFQTPGMEVSSFDEKFVAFVKFD

SEQ ID NO: 159992 - protein, 1348 aa, Oryza sativa
  Clone ID: PAT_MRT4530_59313C.1.pep
MTKRGNGGERKGRNAGRAGQRAGQEKQATHGRTLARHHTASSTSRDVFTRSSPFRRAVHFLQIAIPQSIFPSLPFLLLHLHPPAAAAAAVAAAHSPGPAEAAANAAGAATDDSAASTAGMRDEDRSLSGESLSEWRSCEQVESESPSTSPPFWDTDGDDDDPGPKPSDLFGRYTWRIENFSKEKKREMKSEPFEAGGYKWYILVYPQGCDVSNHLSLFLCVANHDKLLPGWSHFAQFTIAVGNIDPKKVKYSDTLHKFWKKEHDWGWKKFMELSKIQDGFLVDDVLEIIAQVQVIREKVDKPFRCLDRPYRRELLRVYTTNIESIYRRFVEERRNKLSKLIEDKMRWSSFCAFWSAIDPSTRHRMSREKTDVILKVLVKHFFVEKEVTSTLVMDSLYTGLKVLEYQSKGKKGRTIADLDELPAPMIHVDMDMFVLASDVIDLLERAALEPLPCQPVSPKDDKCSQSRMKDGASGEVNKISMEREERRLTELGRKILETFVLSHIFSGIEVAYQEAVALKRQEELIREEEEEAWLLGNEMKGKRGGGANEKDKRAKKKQAKQKKNNRKIKDKERDEKFEAKILERLHDETAIDDSDGLSSKQAEEVTTKVENLEEGASDRQGDLDSSEIAHRPDSGDKYPRQMNGLSDVTGNAQKVKKASSMEANSPVFLADSVAASGTHSRGNNLSDSKNRMTPNRGKNQRNKGISIISFSEEGEGIPSSSTGGSARCSSSCGTSAKLDQDTVLLTLKDKLRKLGQRLHEKNMEGRKLLQAHFEAMEAKTSGSSPSSSPLDETPDVVKSPEQSAEGTTDAKANGTPNKDEPVTNCVAEESVSVMPGTKSTEALSGMALAKTKVEPVSNKDHVPKPTLQANRASANCSKSTPVDMEKDVPLPSRSPQINKPAPVPPKSPQVGNATPVPPKSPPIEKACPVPPKSPPSAKDTSLPSVRSLQIDKPVPVPPRLPQVDKAASLSSELPQTSTTSNSEAQEETAAIRVASPSVSEVTVTASRPSSAPVFPAPRSTVPATQVQVSTLLSRSMSEATRRSGNDPSPSAPAYIPQTYRNAIIGKHGRGTTSGTTAYQSTSLGQGTALSQPLSTYAPTMSVTMPPAGRNDQFSGRHGLESGLGKPEARDSWQPWNANRHVDKHLWRDDSTYQQTTNGHAYPQPWKDVNFLQARGTETEIPSRFGGPQLPRQFQAETHADYLLQQPQGPVAEEFPHLDIINDLLEEEQSNGSMPESIGHDYHTFGLPLPFLLRGNLADQEMASASSPGRFNLTEPYYDEGYSRAYDMSAFQGTRERQFPSLDAYSNGLSDMSPSKPWLNGSPNPSMNHAVGTNGYPQQIPDYTNLGSE

SEQ ID NO: 159993 - protein, 132 aa, Oryza sativa
  unsure (1)..(132): unsure at all Xaa locations
  Clone ID: PAT_MRT4530_59314C.1.pep
MNTNFIIYPSHICYDASLSRRCNGVRIIIVYMMTLCHDDDIRVVFGNLSVVFILLDIIIWGYMLWKRGGPLMVTAQYRFSSARVYSPKLISWGGYSSVFSPGXMVIMDCRKKLCNQGWLLETPRGHRKEGIS

SEQ ID NO: 159994 - protein, 82 aa, Oryza sativa
  Clone ID: PAT_MRT4530_59315C.1.pep
MACAAATDDSAASTAGMRDEDRSLSGESLSEWRSCEQVESESPSTSPPFWDTDGDDDDPGPKPSDIFGRYTWRIENSSKEKK

SEQ ID NO: 159995 - protein, 534 aa, Oryza sativa
  unsure (1)..(534): unsure at all Xaa locations
  Clone ID: PAT_MRT4530_59316C.1.pep
LLVHVAVHCCRCRGVCLRLWPAVEVDAEQPEPPPPAPWSGTPPPTRPRTPPPCPQPRPXPPPTASSSTPARRPTPSSPPPPARPPPLGRPRGAPRLVPPRQRQAQPXPSSSPPSSTSSSASPPPQQPPAPLQRRRRRPAAAAAPPARAPPATSPPPPPSPPPPPPPPXPPPPSSSSSCSATSPPPCPWAAQGTAALPPVSSSXAPPPPPPPPPXSPAPPPQPPPPACTRTTSTXPDERREAEQPRPPRPASAPGVNHRDVPPPPPHRELMPPXPPPPPPPPYPPPPETEQPPPSAYLSPSHSFHGYSSAPPLPQATAAAVRAPFRPAPALPHCGCARQHERLRPPRXPPPPSPSPAAVPAASSPSVLPPPASPPPXPPPVLPPPPCPSPLPAPLRRSPSPPPTXPAALHTLPPPTPPCAGPKPPPPXPPPPPPPXPPRPADSLPPSPPPSAPPPPPPPPPPPPPPLPPPRAPTPTPLPPPGISISXRRPPPPHPQPRPPAPPSPFATTGPPSRHRFLAGDGDGDADSTTAATAA

SEQ ID NO: 159996 - protein, 182 aa, Oryza sativa
  Clone ID: PAT_MRT4530_59317C.1.pep
WRGEAAAAAVGEGGISSRWGGGGGTSRWLTPGADAGRGGRGCSASRRSSGRRRCRPRASRRRRLRWRCRRELAAGGRNRNRRRTTSGRRPPPRRSPPPRPPPPTAPPATTPPPAAAAAAPRRRNRRKSRRTLRRPRARRRRSRRAGGRRRRRRRTTAAAAAGTCPAARSCAWGVLLAQLHQD

SEQ ID NO: 159997 - protein, 241 aa, Oryza sativa
  unsure (1)..(241): unsure at all Xaa locations
  Clone ID: PAT_MRT4530_59318C.1.pep
MEKATATTKVAGRRRRGMDSSPAREGDGVPVGFRRREAVAEMAHAAAMLMAAAAWRGGGSSGCGARPEVAACGGASGERRVTGRRHGRARRKGEKGEGDAGKLYRGSRGADMAGKPPDLAGDVGXGERERVGGIQIESRPFAGARAGGNGGEGGDVGTRSGGAAWSXRRRRRGLFRRRLPSWGRRLEEGDDLTGGPHLSASRREXKGNGPAQRKEAERGREWADGPIEKKEGKEKEKEERI

SEQ ID NO: 159998 - protein, 71 aa, Oryza sativa
  unsure (1)..(71): unsure at all Xaa locations
  Clone ID: PAT_MRT4530_59319C.1.pep
HQTTSFLGTASYXTXEFPGDYGWDTAGLSADPEXFARNRELEXIHSRXAXLGALGXVXPEILSKNXVKFGE

SEQ ID NO: 159999 - protein, 218 aa, Oryza sativa
  unsure (1)..(218): unsure at all Xaa locations
  Clone ID: PAT_MRT4530_5931C.1.pep
KDDVTCLARFPKRRLQPPRRADLPKLQRPRARAADSRAPHGSRGARPKAASPAQPTGGGAPAPRWSPPATTGAAERRPREGREGGSETAVHGSPRVDGDDGNGYRSGGRRRRGSGRRGRRRSGGRRAKRRGGRGRRGRGEAEGGDAEARGGPGXRRRRTGARRRRRRERATSRAQIRRGGRAARGGTGRRRCGEGLNRAGAREAGRGREETSAGGRPP

SEQ ID NO: 160000 - protein, 69 aa, Oryza sativa
  Clone ID: PAT_MRT4530_59320C.1.pep
RCFNSYFYCRIYNNYTGNKVMIKEKKCCALVKSIIMFSIVFIHYSLSYIVHHAKCHNKIQNILILLTKK

SEQ ID NO: 160001 - protein, 84 aa, Oryza sativa
  unsure (1)..(84): unsure at all Xaa locations
  Clone ID: PAT_MRT4530_59321C.1.pep
SVKKREATKRAQLLPLAYLVIRRRRRRRXPTWPEPRRTPWRSSAPPARPFPPLHAPPRFCRAAEACYNRCASTTPPRLSLLPVR

SEQ ID NO: 160002 - protein, 97 aa, Oryza sativa
  Clone ID: PAT_MRT4530_59322C.1.pep
YDCLAQEDAEAVNTEEAPATAEDEKKPEDVPQSEVHKDKESPHLAIDQIVPEDKEMTLEEYDKVLEDTSLASLALKAEERKVHCYSDTAGHATDALS

SEQ ID NO: 160003 - protein, 109 aa, Oryza sativa
  unsure (1)..(109): unsure at all Xaa locations
  Clone ID: PAT_MRT4530_59323C.1.pep
LRRVLRRRRRRPVAGTRSRRSSRCPGRCGVWEGGVGLFMVTGAALLALAVAWIRGFQLRSRFGKYQXPVFEFTQACGICVGTPVWIRGVAVGSIVRIDSSLHSIDAYAE

SEQ ID NO: 160004 - protein, 68 aa, Oryza sativa
  Clone ID: PAT_MRT4530_59324C.1.pep
MDDYLLVNPLCKNSKGQRDKLRKIYVLDGNGLPPAAITSELQKNRRNEPALSVMSDDSRQPWLQPSEP

SEQ ID NO: 160005 - protein, 68 aa, Oryza sativa
  Clone ID: PAT_MRT4530_59325C.1.pep
SRGLEILFSFARWTGNSINDTLVEKFVKIFPGVEHGWTVRYKDDDAAAVKSAEEALADMIDWFNKNLK

SEQ ID NO: 160006 - protein, 457 aa, Oryza sativa
  unsure (1)..(457): unsure at all Xaa locations
  Clone ID: PAT_MRT4530_59326C.1.pep
MPTITHYVLDPLLETGSATQSQKAASKPPPAPPLPQEKAAEKPIPVPVAPVRRAQTASATLYATPESTSLPDSPSSFPGTWSPYLINHKRRGPCLVKTLSQGDVGSDGSQQPTLSVTLPPLPKRSQSFEAQEPEFEFQQASNGVLEGDSGVVETLDWQNGMLQKGKGTVSGEYGHDQAEFEFQHGNPDATVRPVNVGRPANGGTPRKINNDAFFELQDSLSMASNSEAEDAGGHERWWKPSSPLGTSVGTPGAEFYDAFEEISSDGATRSSQCMDDDLREMRLSLLMEIERRKQAEEALENWQKEWKKLSDHLSLIALTLPPPSLAEDTDDSSMDXELSCANKLIVSLLVAAAIARGFARAEVXETDMETKIAAKNFEIARLSDRVQYYEAANREMSQRNQEAIEMSRQQRNIRKKRQKWFWGSVGLAVTLGTAAIAWSYLPAAQPQASQDSNTNSD

SEQ ID NO: 160007 - protein, 666 aa, Oryza sativa
  Clone ID: PAT_MRT4530_59327C.1.pep
MDCFAETEGKRAHDPLYQRRAAAAATPATGVPVDDVDKVVDVPGAVIVGAGPAGVAVGALLGLRGVAYVVLERCGCIASLWRHRTYDRLCLHLPKRFCELPLRPFPASFPEYPTRDQFLGYLDAYAREFGVEPVFRRAVISAEYDGESWWVYTREVVAAAAGGEQAVLGCTMTVYRSRWLVVATGENAEPVVPEMDGAGRFKGQMMHSSEYRNGDGYAGKKVLVVGCGNSGMEVSLDLCNHNARASMVVRDTVHVLPREILGFSTFGLSMWLLRWLSVQTVDWLVLLLSFLVFGDTARLGIPRPSLGPFELKSVSGKTPVLDVGTLAKIKSGDIKVTPAIQCFQEHGVEFVDGSTEEFDVVILATGYKSNVPYWLKEKEFFSEKDGFPRKGNAWKGQNGLYAVGFSRRGLSGVSMDANNIVQDIVQRLHDMGYERTWKPLLLSFSEATIPSHLHHFPLSNKQDAREILSVDGNKVADHLSGACENHFRRRRLSDPHAKIDFNINRFAGPNFFLSPHTSESLHTSPPFLTGLSPPLPSPPLTSTLPGGGFRRRRRAVTAEGSSGKEIWPEEGGGRPAGATARGILVVLAILVGIIALIVYLVLCPTHPRFYLQDATLRQLDLSNSSSTAGAGRPAASPLPPSLVDLAGGGRGEAGGSGGGDESAGRR

SEQ ID NO: 160008 - protein, 250 aa, Oryza sativa
  Clone ID: PAT_MRT4530_59328C.1.pep
SAWEYGEENARGAEGRADAIDYFLYIDARYFARVPSTSQRLLPLRSASSGRREIRLHHNDCDNRNGPPAKMQKNEQKKSPHAAHRRRPPPAGSERGGELPPSSSSPPPCSMPSSPRASSSPPPRAFVAAAAPAGLPPPSSGQIYEGGREGRRRRPPRAGGGGGVGEVKLAEGGVLEVEARVGGAEDEVDDERDDADEDGEDDEDAPRHLGGRGEGNRCRRPDFGRTSLPLLPSAVTARRRRRKPPPGRVE

SEQ ID NO: 160009 - protein, 99 aa, Oryza sativa
  Clone ID: PAT_MRT4530_59329C.1.pep
MARLVWRCLEQQFLGNCEYHVVNLQVEFHSFHQGELSVTDYCHKLKIMAENLAMWVNLSLISNLSSPPSQQELRVGSKVVKFAKGHSKCVVFASESART

SEQ ID NO: 160010 - protein, 86 aa, Oryza sativa
  unsure (1)..(86): unsure at all Xaa locations
  Clone ID: PAT_MRT4530_5932C.1.pep
YSPSLPMPSSVPPAKSSPPSSPGKGAPAAPWPPPGRTTSMTPAAPPPVAAHRPVPAPPHTARPHRPXPASPTAMRRSPLPPPSPSP

SEQ ID NO: 160011 - protein, 32 aa, Oryza sativa
  Clone ID: PAT_MRT4530_59330C.1.pep
LCITIIRHTCNVDPLGDHHILAFDSSLGAKFP

SEQ ID NO: 160012 - protein, 460 aa, Oryza sativa
  Clone ID: PAT_MRT4530_59331C.1.pep
MAAAAPPPPTPPPASSPAPPQDPATGGDALASYLGLSFAFFLASLPGGTPAARHLASLQSRGRVLATRLLAAEDQLRQLRARRRDDARANARAAEIFAGHRASWMDNERRLLARATAATDEAASLRARLAEAEADAAALRARVDRLEREAAERDDLINALLAATRAADADLRSTDDDPEPRDAEQHHHHQPAAAALDLDPAEPRGADADAEALAAAAALYAQQRQQQEGFGSDDFYTAAAAAAASGMQQPWMERSKGWQDLKYETAEPMYNTKHAVPRRESPWKVDVESSGVPAKLQLLEQELINLEKIGNGDLSKIPLVMRKQVKRYQTLAGKIDDLCKRMQTSDPCDSTLSSEFRTQRQTEYLLEAFHLQHRATETRQKLSALQAETAKGSFGDELTAEAKMSTRRALSSIRNNFKEIQRSLEIWLARILGDLEGMLARDGASRIREYFLSPYASAVR

SEQ ID NO: 160013 - protein, 115 aa, Oryza sativa
  Clone ID: PAT_MRT4530_59332C.1.pep
RAKGKKKNHPGPQFHNHPPPGGGAFIKAPGAAGFPFQKGARQARLFELDGAVDSPPRCFSQCLRLGSCGEIGTQPDFARDAAMNPIPPSSEPAQNRGRREARRGQDRIDRPPPAN

SEQ ID NO: 160014 - protein, 213 aa, Oryza sativa
  Clone ID: PAT_MRT4530_59333C.1.pep
MSPPSHRPQVLRGIPFLSGCLPHYLFSSFGCRLLSSHVFLSLWPPAPERWRAKRRGDGAEPSGGGEATVPSGPSGGGAAGRSSGEPSGDGAGRRAALQRGGGRAERWRDGQIWPDLALGSDGDGRREDDKLDGTRTTSSMVAGTTAPSLLQPAGDGTAGDSRRAKGGGCGRRRAQDPLLAIGLKLWINLRNVNLRGLQPPLLQGCSVNLQTRT

SEQ ID NO: 160015 - protein, 54 aa, Oryza sativa
  Clone ID: PAT_MRT4530_59334C.1.pep
MEECWSVSILGTEFRRKPGFLVRPSYSSTIGYIIKLKAKLILADQGRDGARSIQ

SEQ ID NO: 160016 - protein, 470 aa, Oryza sativa
  Clone ID: PAT_MRT4530_59335C.1.pep
MASTAVSRHVVAVPYPGRGHINPMLAACRLLAAADGELTVTVVVTEEWHGLLASAGVPATLPPAGRVRLATIPNVIPSEHGRGADPAGFFEAVDAKMGVAVEQLLDRLERRPDAIVADTYLAWGVPAGAARGIPVCSLWTMAATFFWALYNIHLWPPVDDREGEQDLSRKSLEQYVPGCSSVRLSDVKIFRSWERSMKLTTEAFVNVRKAQCVLFTSFYELEPCAMDRITQAVPFPVYPVGPSISDMPLDGGAGKIDDEEHRAWLDAQPERSVLYVSFGSVVSMWPSQLEEVAVALRDSAVRFFWVARDSASAGDLRRIAGGNGLVVPWCDQLGVLCHRSVGGFLSHCGWNSLLEAVFAGVPLLALPVVWDQVVDARVVADEWRIGVNLSEQRREEDDGGGVVVGRDAIRAAAARLMDPDDGESREMRRRAALLREACRGAVQDGPDGGSSRRSLNGFVKDLADGRLNFQ

SEQ ID NO: 160017 - protein, 446 aa, Oryza sativa
  Clone ID: PAT_MRT4530_59336C.1.pep
MAPLKTLLLFLVVLLPVANACQPPRTLHVPVFHRDALFPPPPGAKRGSLLRQRLAADAARYASLVDATGRLHSPVFSGIPFESGEYFALVGVGTPSTKAMLVIDTGSDLVWLQCSPCRRCYAQRGQVFDPRRSSTYRRVPCSSPQCRALRFPGCDSGGAAGGGCRYMVAYGDGSSSTGDLATDKLAFANDTYVNNVTLGCGRDNEGLFDSAAGLLGVGRGKISISTQVAPAYGSVFEYCLGDRTSRSTRSSYLVFGRTPEPPSTAFTALLSNPRRPSLYYVDMAGFSVGGERVTGFSNASLALDTATGRGGVVVDSGTAISRFARDAYAALRDAFDARARAAGMRRLAGEHSVFDACYDLRGRPAASAPLIVLHFAGGADMALPPENYFLPVDGGRRRAASYRRCLGFEAADDGLSVIGNVQQQGFRVVFDVEKERIGFAPKGCTS

SEQ ID NO: 160018 - protein, 79 aa, Oryza sativa
  Clone ID: PAT_MRT4530_59337C.1.pep
MAKFHLQTLIRKRGHRPGTCVQVSVIQSDRDVNNKVGTDQITAAHRCATLLAKDAVAVLLRIRGDVLKLLAVQAQRRPY

SEQ ID NO: 160019 - protein, 83 aa, Oryza sativa
  unsure (1)..(83): unsure at all Xaa locations
  Clone ID: PAT_MRT4530_59338C.1.pep
FFFFFKKNMXSSIYLQELNIIISESNLNXYXDPCNKNHGIIPSQQNMDDXRRYLNYPKCAFKASSXPPNXASGXGMIRDGGFV

SEQ ID NO: 160020 - protein, 369 aa, Oryza sativa
  unsure (1)..(369): unsure at all Xaa locations
  Clone ID: PAT_MRT4530_59339C.1.pep
MEADAGKLFIGGISWDTNEDRLREYFDKYGEVVEAVIMRDRATGRARGFGFIVFADPAVAERVIMEKHMIDGRMVEAKKAVPRDDQHALSKSGGSAHGSPGPSRTKKIFVGGLASTVTEADFRKYFEQFGTITDVVVMYDHNTQRPRXGGGYGVGMNFDPGMNPAIGGSSSFNNSLQYGRQLNPYYSGNSGRYNSNVSYGGVNDSTGSVFNSLARNLWGNSGLSYSSNSASSNSFMSSANGGLGGIGNNNVNWGNPPVPAQGANAGPGYGSGNFGYGSSETNFGLGTNAYGRNAGSGVVNTFNQSTNGYGRNFGDSSGGGGGGGGGSIYGDTTWRSGSSELDGTSPFGYGLGNAASDVTAKNSAGYMGH

SEQ ID NO: 160021 - protein, 105 aa, Oryza sativa
  unsure (1)..(105): unsure at all Xaa locations
  Clone ID: PAT_MRT4530_5933C.1.pep
HSRSTATTKKVAGAEEGGGAARVDGVDGVPAVGGLGEGVDGVDGGAAKPVEATPGRETVPASGEGQPEVVGDGGXARGRRHELDSGGEWVXKGRKRAREARGGFK

SEQ ID NO: 160022 - protein, 390 aa, Oryza sativa
  Clone ID: PAT_MRT4530_59340C.1.pep
MEVEAATTQRQPCKNAITTKQQQQQQQQLSTGRLFRSPLLVVNFVLMVVGSACGPLLLRAYFLRGGNRKWLSSLLQTAGWPLLLAPLCFSYSSRRRRREVEDDGAGAGAAATPLFLMTPRLLVASAVVGLMTGVDDLLYAYGLAYLPVSTSSILISTQLAFTAAFALLLVRQRFTAFSVNAVVLLSVGAAMLGMNAGGDRPAGVSRAQYCAGFAMTLAAAALYGLVLPVMELSQAHHAAARGAVTYTLVMEMQLVIGFVATAFSAVGMLVNNDFHAIPGEAHEFGLGQAGYYLLLAGSAAMYQCFFLGTIGAIFYGSALLAGVIMTVLIPVTEVLAVMFFHEPFNGTKGVALALSLWGFVSYFYGEVRAAKAAHRRRHSDEPPKPDHLDP

SEQ ID NO: 160023 - protein, 336 aa, Oryza sativa
  Clone ID: PAT_MRT4530_59341C.1.pep
MEFAVPVPQQVSSLALPVVVAEAEAAAAAAAAPGRRGAAGGVSSIPKGAGAAARRKTLCDITNLRPRPAAAVEQDGATKIIELSGTELQKLRLANWQLAQANSQMLAELNLGRDRLKKLQHQLACSRAVIATKTSELEEAKKAMKRNRNLPLPEKAPPASETAQQQQGSDRAAQIKDGDVVNPEPAAASDASHAASTKKLSNASRKRMQRSRSLGPPATTKLAATPKEKENVQRRWTKISGVPNDSAKKSMRTPVPQPSEHREDLFEIEDLQLAIGGGGGGGDSKAGTSDPPEQAAVAVAAAQFPRRSSLGRPIRRATERVASYKEMPVNIKLRRS

SEQ ID NO: 160024 - protein, 48 aa, Oryza sativa
  Clone ID: PAT_MRT4530_59342C.1.pep
SLNLFICRPSTCLVRSSFACLSVVDLLILHGKLHHSLLFFLVLHPALR

SEQ ID NO: 160025 - protein, 101 aa, Oryza sativa
  Clone ID: PAT_MRT4530_59343C.1.pep
MGSSNPDFKRKGVILRKGDEAQARTKKGECGTVGRLKLTELVKTLTGQPFEGHSKIVGFATRHSKIVLLADGLCEHHYIISTQVKKDKDKCPVSNYYEIQT

SEQ ID NO: 160026 - protein, 146 aa, Oryza sativa
  Clone ID: PAT_MRT4530_59344C.1.pep
MTKVRWRSTNGIMYLSTGQPSPPSRHYPICSTRNRRRRLDCSSVAPLSDPFSSTPVNSDGCPQRPIQSQPSSHPSLHEDGGDGDKPFKAEDWHQGGSNAAWRGGKGGTGRRGGVSRMSRGRAETHNLGDCALEEEGQHGDDAMLPN

SEQ ID NO: 160027 - protein, 103 aa, Oryza sativa
  Clone ID: PAT_MRT4530_59345C.1.pep
LFTGCWPWPSRRRRRRRWAIRRRGGRSVGGDPWRRGLPAAEITELLQPSHHLQETMNECHCSPASGLQSCLLLHRQNSARHPTFDLRAQLPLQGNICTHCPDI

SEQ ID NO: 160028 - protein, 146 aa, Oryza sativa
  Clone ID: PAT_MRT4530_59346C.1.pep
IKPTGTPLNPKARFRSCTRVKQISQASSMHKKPSMAATSTMAVVSPVRTDLHNQDQGVKSIEELRVVLKELATLIQEKLVKKEEWHSKQEAIEQDMAVGMVMPSPISTPPTQPAGLEACRQRCLSSPLQPHPQVLKWCKRIKVTHG

SEQ ID NO: 160029 - protein, 65 aa, Oryza sativa
  Clone ID: PAT_MRT4530_59347C.1.pep
QTIRSMRIVVAHVHIDRYYKHVPPPPLSVCLFYSYSGLDSKGFVLTVPVKYPCASVLTAVEELPV

SEQ ID NO: 160030 - protein, 1749 aa, Oryza sativa
  unsure (1)..(1749): unsure at all Xaa locations
  Clone ID: PAT_MRT4530_59348C.1.pep
MAMASTYQYQQYQQLQQAQQLFQRDAQTITPEALESVKAALATSDVLDPANARATATSSSDPAAKKKAIPRRAAGQSWEDPTLTDWPDNDYRLFCGDLGNEVNDDVLSKAFSRFPSFNMARVVRDKRTGKTKGYGFVSFSNPTDLAGAIKEMNGKYKRTGKTKGYGFVRKERTDVDALERQKWNAPFVGNRPIKHLSFRITSRRNLKCPRKVSFTSKAILALLSAIHVNRLERDYELRSRGPPSLGVKALDNLVSVSRRSTSSSTAAPPASTTAAAGPSSPTTSPCTSPPPSPVSSSVASTAGDMSEHGDLKAAIDALTKNVALMQSSIQANAKAIADITSSSSGAGPRSHSGEHPQDRPPKHWRPEFPRYDGKTDPLIFINKCESFFLQQRIMPEERVWMASYNLNDVAQLWYMQVQEDEGTPNWPRFKDLLNLRFGPPLRSAPLFELSSCRRTGTVTEYQDQWQALLPRAGKLDEAQRIQLFTGGLQPPLSLQVQMQNPQSLASAMSLARQFELLAEYTGPPAPAAPARAPARGLLGASLPLLALPAPPPPAARAPAAANPAANAGAANPGDGRQAKRLSREEQAERRRLGLCYNCNEPYSRGHNRVCRRIFHIAGVELDDDDNAGHEEPATESPVFSLHAVAGVAALIALLDVSLGRAALIALLDSGSTHNFISAGAAERTGLVVEPRPRLTAVVANGERVSCPGVIRAAPVSIDGTIFHIDLFVMPLAXWGRSFHWTGVLADHAPRLHSTAASTSLLDELLATFDDVFAEPTGXPPPRARDHHIILQPDAAPVAVRPYRYPAAHKDELERQCAAMIQQGIVRRSDSAFSSPVLLVKKADGSWRFCVDYRALNALTVKDAFPIPVVDELLDELNGAHFFTKLDLRSGYHQVRMRAEDVHKTAFRTHDGLYEFLVMPFGLCNAPATFQALMNEVLRPYLRRFVLVFFDDILIYSSSWADHLRHLRAVLASLRQHRLFVKRSKCAFGVPSVGYLGHIISADGVAMDPAKVQAIHDWPQPRSPRAVRGFLGLAGYYRKFVHNYGAIAAPLTALLKKEGFTWNDDAAAAFTALKAAVTSAPVLALPDFTKPFVVECDASTYGFGAVLLQEAHPLAFFSRPVAPRHRSLAAYERELIGLVLAVRHWRPYLWGRRFTVRTNHYSLKYLLDQRLATIPQHHWVGKLLGFDFVVEYKSGATNTVADALSRRDTEEEPVVALLAVSGNRFDFIGRLRQAQATDPALVAVHEELRAGTRAAPWSVVDGMILYDSRLYIPPSSPLLPEIVAAIHDDGHEGVQRTLHRLRRDFHFPNMRRCVQDFVRECSTCQRYKSEHLHPAGLLLPLPIPTAVWADIGLDFVEALPKVNGKSVILSVVDRFSKYCHFIPLAHPYTAESVAQAFFTDIVRLHGMPQSIVSDRDPVFTSLFWRELMRLMGTKLHMTSAFHPQSDGQTEAANRVIVMYLRCFTGDRPQQWLRWLPWAEFVYNTAYQSSLKETPFRVVYGRDPPTIRSYEPGETRVAAVARDMEERETFLAEVRHRLEQAQALQKLYYDRQHRPVSYQVGDWALLRLRQRTMASLPQAQPGKLKPRFVGPYRVIELINDVAVRLELPPQARIHDVFHVGVLKKFVGAPPAAPPPLPPIQHGTVTPEPLRVQRARLARGVRQLLVHWRGEPPESATWEDAEAFHEQFPTFQLEDELGLEGGRDVMWGQTYTRRRRARDIRRAAERAAAREGNARDAAAPAPAITAAVDGSG

SEQ ID NO: 160031 - protein, 88 aa, Oryza sativa
  Clone ID: PAT_MRT4530_59349C.1.pep
MSGCRHRSHYRAAVAIHTTRRQIEGPKTRHAPTVVEPCQPDPTVGPCLGLFLGTACQPSMAQPNDQHNCDPTSPTPSGSSPSTASPKS

SEQ ID NO: 160032 - protein, 343 aa, Oryza sativa
  unsure (1)..(343): unsure at all Xaa locations
  Clone ID: PAT_MRT4530_5934C.1.pep
DLAPLSSPPLQPCAAVAPVVAVARGGRHRGRRRVAVLVRPSAVAVDRRNTAVVVKPIVAAAXFSTPSPFLDLPPLFWSPMPRYKPEYLFGVEGFVQELRTMSFAIGFGTAPLYAXISHDRHEEKCRVKVTLNSNSEDIPSVMFEAGGGNYIHACQEVARIAIGELRDRYSDQLADTEYRYHPRQPQGSDRGSYLETERIENDATTRHLVEMLWAMDETRAETVLAAQDREDRNRGKICKLEDKVDRLEKELAALKGEAPPQKARIRLTARKRALFVPRYQMAPKVRVAEKEVTLALADPPVVNVSDDEGEESKRTHSKVEWGATQDDGDEPNEPSINSDARKT

SEQ ID NO: 160033 - protein, 388 aa, Oryza sativa
  unsure (1)..(388): unsure at all Xaa locations
  Clone ID: PAT_MRT4530_59350C.1.pep
IPPTPQPNTPKSGFVPSHPISSQQPDATATHPLPPPPXTTPSASTPPPXPPLMPVPTSPAPPRAPXPPSRSSPPGRLPTPPRCAAPRPPPRAPPXSXRPSPPGXLPPPXXCAALPPPPSRAVAXPPRAXXPPSXRCAAPPPPSCAPSPLQVPSKESSAAREPPPAAGASGTPSPNPEARSTSPPSRPRAPXPRRTPRTLPPPPPPPPXPHPPRRRPRPPRPPAPSPRPRSPRXAAPSPPMPSPPFSSPLSPPPRASPSHRRAALSPSLRRPSRLPLAARPLSLPLAAAPRVSLLPRCSLSPSRRRLSYSPSTPAAGGGRSGAVVGGSGTPAARSARRPWRGLLADRCADCIDEFDKMNDQDRVAIHAVLEHKTVTIAGIHASLNARFF

SEQ ID NO: 160034 - protein, 153 aa, Oryza sativa
  unsure (1)..(153): unsure at all Xaa locations
  Clone ID: PAT_MRT4530_59351C.1.pep
ATGLATLYNAAKQRPNETGPVGKFVNRVKVKTALGARGNMEWKECSDAVGAAMHGDVMKSVKPXDGVVSTEAWXRELKWDGLAVFLDADCAVWRIGEELAGYVQRSGPLSHVVVYGAGHLLPADNGHAAQEMVKDWVLQAGLFGRHGGMKRAG

SEQ ID NO: 160035 - protein, 90 aa, Oryza sativa
  Clone ID: PAT_MRT4530_59352C.1.pep
PLERPPIRAPGPPPCEILSPSFFGVFWRAHHRCALPAGYFRLLYAALYVWGFFNRASKLLDGSVTNLTKGIWSALAPFPFRVLAQLSFPP

SEQ ID NO: 160036 - protein, 251 aa, Oryza sativa
  Clone ID: PAT_MRT4530_59353C.1.pep
MGPTCQRDHFNLLSLSFPSSLLSSYFSPFSDSAGGRRRASAAGDGRRGGWPTRGSSCCRCWRTRRADTRELVLSLLENATGLATLFDAAKQRPYETGPVGKFVNRVEVKAALGARGDMEWEECSDAVGAAMHGDVMKSVKPKVEALLRGTRVLLYQGIRDLRDGVVSTEAWMRELKWDGLAVFLDADCAVWRIGEELAGYVQRSGPLSHVVVYGAGHLLPADNGHAAQEMVKDWVLQAGLFGRHGGMKRAG

SEQ ID NO: 160037 - protein, 258 aa, Oryza sativa
  unsure (1)..(258): unsure at all Xaa locations
  Clone ID: PAT_MRT4530_59354C.1.pep
MGGKAALLMALVAISVVLEARADAGGYGGGYTPTPTPVKPAPKPEKPPKEHKPPHHHEPKPEKPPKEHKPPAYTPPKPTPTPPTYTPTPKPTPPPYTPKPTPPAHTPTPPTYTPTPTPPKPTPPTYKPQPKPTPAPYTPTPXTPPTYKPQPKPNPPPTYKPQPKPTPTPYTPPTYKPQPKPTPTPTPYTPTPKPNPPPTYKPQPKPTPTPTPYKPQPKPTPSPYTPKPTPTPPTYTPTPTPPYHKPPPSYTPGPPPPY

SEQ ID NO: 160038 - protein, 46 aa, Oryza sativa
  Clone ID: PAT_MRT4530_59355C.1.pep
CFFFFFFFFFFFFFFFFFFFFFFLKGMETSAQRNKFQRPGKGEIRF

SEQ ID NO: 160039 - protein, 424 aa, Oryza sativa
  Clone ID: PAT_MRT4530_59356C.1.pep
MAPPLLLVSLLLIGFEALPTNSGYLPITTTNASLFFAYYEATHPLTPPASTPLLLWLQGGPGCSGLAGNFFELGPYFVNRDALSLSPNPFSWNRRFGLLFIDNPLGTGFSAAPSPAAIPTNQSVVAAHLFAALQSFFALQPGSRSRPFFLTGESYAGKYIPAAGSYILAVNPTLPTRLRVNLHGVAIGNGLTHPVAQVATHADTAYFMGLINAKQKRELEALQARAVELTNAARWSEAADARGLVLSWLENATGLATLFDAAKKRPYETGPVGKFVNRAEVKAALGARGDVEWEECSDAVGAAMHGDVMKSVKPEVEALLRGTRVLLYQGIRDLRDGVVSTEAWMRELEWDGLPAFLDADRAVWRIGEELAGYVQRSGPLSHVVVYGAGHLMPADNGRAAQEMIEDWVLQAGLFGRHGGMKRAA

SEQ ID NO: 160040 - protein, 79 aa, Oryza sativa
  Clone ID: PAT_MRT4530_59357C.1.pep
MAWTPRLSFPSAFELASCSDLPANLQLGELLINEKQHTVLMVMDRTSWLWRRKPSDKSPGGAENTVSVSSHSEHYSDDQ

SEQ ID NO: 160041 - protein, 175 aa, Oryza sativa
  Clone ID: PAT_MRT4530_59358C.1.pep
MGSEAPDPAVAASVPLVRLNHVSFQCTSVEKSVDFYRRVLGFELIKRPESLNFNGAWLYKYGMGIHLLQRGDDADGCSIPTRPLPAINPMGNHVSFQCSDMAVMKARLRAMDREFVVRKVWDGETVVDQLFFHDPDGNMIEVCNCENLPVIPLIVASTPGLPELLPPAMQTNVHG

SEQ ID NO: 160042 - protein, 66 aa, Oryza sativa
  Clone ID: PAT_MRT4530_59359C.1.pep
LGEWEIPCWHTVIATRRGETKLWGTRLDMVLPQGHTHQHGVTSLPSASDLRATTSTHISIIVELFL

SEQ ID NO: 160043 - protein, 93 aa, Oryza sativa
  Clone ID: PAT_MRT4530_5935C.1.pep
LSMTELGAPHRETAQAPLCQFGRGLRCKPHRGSGHLGPRGRGRSNPTPPRGNQEEGGHLTLGPDVPEGARPRGRLCLPQASSHDIPGPISPTV

SEQ ID NO: 160044 - protein, 125 aa, Oryza sativa
  Clone ID: PAT_MRT4530_59360C.1.pep
MAGSTAAAAALSLRGGAADDEAINHAFNRLESSPLHAQSAKCFSSAPPLPPAQAPRLSRCSASRSGDGVGVRRSGRRASAAPRGDGWERPDSVHAGVVRGSGRRSGKPGGDTAQLSLIRIDDTEE

SEQ ID NO: 160045 - protein, 659 aa, Oryza sativa
  Clone ID: PAT_MRT4530_59361C.1.pep
MLLLINKYLSRSKNPAAGDDKEMPPPPPPPPANGAEREFMCIPGCVPVRVKRGTTTTTTTTTTARTSRHNFVKSAASGLFPGAQFTNHESLPAMEEAYAEFVAAFPQYAGLAQADAIRDGEYQHLDRHVCLDYTGINLFSHAQMNSSVPSTSATPPASSSGAAWQPPFFDIAYKSTSLRSQVQCGDDVAAASAAGGIGGAVTRRVMASLNIPDDEYAMVCTANRTTAFRLLAESYSFQQHGKRLLTVYDYESEAAGAMAESARRRGAEVMSATFAWPGMRVHAADLRKKLLRGRRRGGGGGHRRGLFVFPLVSRMTGARYPYLWMSAAHEQGWHVALDACALGTKDLDTLGLSLLRPDFIVCNFFKVFGENPSGFAGLFVKKSSLAALERSVIARSIGIVSIVPARRWSLHDGYSTELDPVAAAADDLDTTSSFSGPLSGTLIALTLKNVPEMDAAGEENGHSPEIREADPPPPPPPIMEVECRGLDHADALGLIAIGNRLRCISNWLVVAMQKLRHPQSEQGKALVRVYGPRVKFERGPSLAFNVFDWKGEKVAPPLVQKLADRHNISLTCGFLRHICFSDKYDADRAAVLEHIDGGGKRKDAAGEMGIYVVNASLGFLTNFDDAYRLWAFVAKFLDADFVEKERWRYTALNQKTVEV

SEQ ID NO: 160046 - protein, 608 aa, Oryza sativa
  Clone ID: PAT_MRT4530_59362C.1.pep
MYWYRINRRKRKRAITYAPMLDRDVERLRRLDRLYHGTEAHCISELRMRKVVFHKLCAELRSRALLEETFHVTIEEQVAMFIHVVGHNWSNRPIAFEFMRSDALCILARDLVCIKSIDTHQKITSSHGRFHPYFQGCIGALDGTHIPACVPMHMQDRFRGRKKFQSQNVLAAVDFDLRFLYVLAGWEGSAHDSYVLQDALSRTNGLKIPEGKYFLADAGYAARPGVLPPYRGTRYHLKEYKGAREPENPKELFNLRHSSLRTTIERAFGALKNRFRIFKCQPFFPLKTQVKIVMACCALHNWIIEDGPDVYVYDDAAWYAALPRSLSLVNENRMAKGKAKADAFPTSHERSLTWHEDQTKFMLEWYMEYLKKQHAGFKVKKSHHMLCADALNKKFGMGVTADQVDRHYRYHKENWKYIAAALSKSGNAFDHTRFLVTISESEKATLCDRARRLLSKPIRFFNEMQELFTGSSADGSLAMDQNTCMNDSDGSNSDDSRDMLDLNCYTQPEEPTGEDSDTLPSPTTNATVDNSSSGSQAPPPMPQLTDPHAILWQKLEAIPMTPDQRVLVGEYLSDKENKGKRGWLCNASDATLNAWVFKFLCEKDGLNL

SEQ ID NO: 160047 - protein, 103 aa, Oryza sativa
  Clone ID: PAT_MRT4530_59363C.1.pep
MILEPLVIKRIGDVTWKGKGSMARYPDLAVIELETAPSRHPNTRTSGNIRFPFPIPFPFSTSSLPLTASGEHRATVPVACTEGKCAELYMVGKSLVTEAEKSS

SEQ ID NO: 160048 - protein, 72 aa, Oryza sativa
  Clone ID: PAT_MRT4530_59364C.1.pep
VDSSMAWAHIALAMMWSRCGRGPWLDRGWRARSVALIPPAATSVGIAGRWRRLSSGRPVHEEERGRETRSLV

SEQ ID NO: 160049 - protein, 53 aa, Oryza sativa
  unsure (1)..(53): unsure at all Xaa locations
  Clone ID: PAT_MRT4530_59365C.1.pep
VSFLTIWSPHHHCHSRMVSWCHHAYSPGCXAIPPIMPCLFQPSCCSHHTSHVX

SEQ ID NO: 160050 - protein, 922 aa, Oryza sativa
  Clone ID: PAT_MRT4530_59366C.1.pep
MLTATQTLAPAVLSRSHGAPSSFSSQPRRTAAAASRVSCTRVGALSEVVNGELVVGDQEQTTDDLLTRHKNVVADYTLSATVTVSLKQDDSTPQKVADMVNRDWLFLDFFSSHIEGMHTEPQLARYSHMDGKGSFIYEASFSIPSSLDAVGAVQVVNRYSSEVYISDIDVHLCGGRHQWTDITFHCNSWIDYNPNDQRFFFPLKSYLPSQTPRGVKNLRKEELRAIRGDGRGERKEWERIYDYDVYNDLGDPDNDPATRRPVLGGRGRPYPRRCRTGRRRCRTDPSSESPPAKDGAGIYVPRDEAFTERKAGAFATKKALSALSAFTTAQRVSGDRRRGFPSLAAIDALYEDGYKNRPSSSQQEADNLEGYFREVLQKQVKLLLKGEKEEFKEELRKVFKFQTPEIHDKDKLAWFRDEEFARQTLAGMNPLSIQLVRDTDFPIFSKLDEETYGPGDSLITKELIEEQINGVMTAEEAVEKKKLFMLDYHDVLLPFVHAVRELDDTTLYASRTLFFLTEDGTLRPIAIELTRPKSPNTPQWRQVFTPGSSVAASWLWQLAKTHVLAHDTGYHQLVSHWLRTHCCVEPYVIAANRRLSQMHPIYRLLHPHFRFTMEINAQARGMLINANGIIESAFAPGKLCMELSSAVYDKFWRFDMEALPADLIRRGMAIECEDGKLELTIEDYPYANDGLLIWDSIKEWVSDYVNHYYQLASDIHMDKELQGWWNEVRTKGHPDKEEGWPELNCHGSLVEVLTTIIWVASGHHAAVNFGQYPYAGYFPNRPTIARRNMPTEGQACSHDGMQPTFVEDPVRVLLDTFPSQYQTTLVLPVLNLLSSHSPGEEYMGTHAESAWMADREVRAAFGRFNERMMSIAEMIDCRNKDPERKNRQGPGVVPYVLLKPSYGDPKDMTSVMEMGIPNSISI

SEQ ID NO: 160051 - protein, 36 aa, Oryza sativa
  Clone ID: PAT_MRT4530_59367C.1.pep
VVYRYIVYYKPVMCNHKTGLMVSTTFCCGRTAWKQL

SEQ ID NO: 160052 - protein, 658 aa, Oryza sativa
  Clone ID: PAT_MRT4530_59368C.1.pep
MGRRRRFAQLATTSDDDDDDAPAADAPPKAKPPPPPSSSSGPKKPKQRRLSSAAADDDDDVEEDDLELEEEEEDEKDLEEMRRNEEEERREETQTRRRRRRRGRKPKRPAEESEEDEEEEEEEAKAEEAREEENTEAVPIGEPVKITGRGKKQRKHYTSFEYEGNTFELEDPVLLTPEDSKEKPYVAILKDITETEGSLSVTGQWFYRPEEADKKGGGSWKASDTRELFYSFHIDDVPAESVMHKCVVHFIPQHKKIPSRKEHPGFIVQKVYDTVAKKLWNLTDKDYEDNKQHEIDLLVKKTIDRIGQLSDIEPADAPGDNNDQLSNKRGLRKRPVLPIDVSRDDALAGKSEQFGKAETPGSDKLKNYATLVKYKAVTGDQYRDRWLDKLVDTIPLTSKESAGASHADPGGATKSSTNGSSAKEDNEKSYSPDVIVSIMASLERSTYEALGSDFQKYNQKLRQLLFNIKNSPVLRNRLMNKELDPPVLLTMSPDELKVGLTAAERTSEPEESRKLQMTDARCVRCAEKEVGVSDIIHAGHGDRYQKVVASRRENEVVNVGGDRTLRLARLVASGGSVGTAPWATAKFDVMEKQLTSPRDHQPDKPLADALHKSAAPVHAHAGEAEIVRQAQARRALVGASSWPRVDQTVHTHYTSRQN

SEQ ID NO: 160053 - protein, 532 aa, Oryza sativa
  Clone ID: PAT_MRT4530_59369C.1.pep
MTPREGGGGGGGGVVGLVAYAALAVVALRVVLSYKSVAHAVRRMWRWADEWAQAYQYYEVPRFGGGGGEGVENPLFRKAAAYVAALPSLEDADAACVLSSACKTNDFSLQLGPGHTAHDAFLGARLAWTNAGPAGDGGGGRERLVLRVRRHDRTRVLRPYLQHVESVADEMELRRRELRLYANTGGDGAPSPKWTSAPFTHPATLETVAMDPELKARVRADLESFLKGRAYYHRLGRAWRRSYLLYGPSGTGKSTFAAAMARFLVYDVYDIDMSRGGCDDLRALLLETTPRSLILVEDLDRYLRGGGDGETSAARTSRMLSFMDGLSSCCGEERVMVFTMSGDKDGVDPAILRPGRLDVHIHFTMCDFEGFKTLASNYLGLKDHKLYPQVEEGFHAAGARLSPAELGEIMLANRGSPSRALRTVINALQHVAPAPAPPQQQPRASSASRPPPRLTARWSGHLDEASAADASAANQSPGGGGGGFGKDAPMREFKKLYGLIKIRSRKDGGVVPVDDTASANGRGSDVSADKDR

SEQ ID NO: 160054 - protein, 1638 aa, Oryza sativa
  Clone ID: PAT_MRT4530_5936C.1.pep
MSSSFIDNNVNTSFSQALPASTMLVWTQVGEIIFPVYTTMPISTGPPMTGNENAVATNQGDSMSKNPPVETENGLPTTSKLGKDSDTAKPCPSDINHGPTKMTSEATRSWCPIHKTKKHTLQDCWVFLNVHVEIRACKERGIQRTSLTRDVYCPIHKTKNHDLLSCKVLLGAMKTSSPKSYVLVRDNGKEQGAAPASDRFVGVIDIDPHEPSVLHLLEDYGSSTTNRHPRRSHDRRQPTVPNAGCRAFGRSLRDVRWPERFRPRAIEKYDGSTDPEEFLQVYSTVLYAAGADDNALANYLPTALKGSARSWLMHLPPYSISSGADLWQQFVTNFQGTYKRHAIEDDLHALTQNSGESLREYVRRFNECRNTIPEITDASVIHAFKSGVRDRYTTQELATRRITTTWRLFEIVERCAHVDDALRRKNDKPKTGGEKKPAADASESSKKKNRKNGKRKAQAEVLAVEYANPPKRPDPQGSDTKKLWCPIHKMDIHSLEDCLVFKKSLEKHMAFEKGKRVRVVEKNEETPPHESDSAYPDSDLHVSHIFGGSTTYSSKREYKKVEREVCSTWQGAAPKMKWSEQKIEFSEEDHPKTSVIPRRYPIVVEPTIRNIKVARVLIDGGSSINLLFASTLDAMGIPQSELTPTDQPVHGITPQSLSRPLGKITLPMTFGQANNFRTEQITFDVAEFDTAYNAIIGRTALAKFMAASHYAYQVLKMPGPKGTITIQGNTKLAVQCDKRSLDMVEQMPSPPAMTEPPKKPSDMPGVPREVIEHKLMVRPDAKPVKQRPRRFAPDRKQAIREELDKLLKAGFIREVLHPEWLANPVMVRKANGKWRMCVDFTDLNNVEGTLSNQLGNNVEAYVDDIVVKTKTNDSLIDDLRETFDNLRRYRLMLNPEKCTFGVPSGKLLGFLVSGRGIEANPEKIKAIENMKSPTRLKEVQKLTGCMAALSRFVTRMGERGQPFFALLKKQDKFVWTQEAEEAFIALKRYLSNPPVLVAPQPNEELFLYIAATPYSVSTVIVVEREIIMTSRKLRHYFQAHRVTVVSSFPLGEVVRNKDVVGRIAKWVVELSQFDVHFVPRTAIKSQVLADFVADWTMPDNKSDNQGDNETWTMAFDGALNSQGAGAGFILTSPFGDQFKHAIHLNFRATNNTAEYEGLLAGIRATAALGAKRLIVKGDSELVANQVHKDYKCSNPELSKYLAEVRKLEKRFDGIEVRHVYRKDNVEPDDLARRASRREPLEPGTFLDILTKPSVKEVSGEVGPNTPDISSEVTEAERAIADIETTNDWRIPFIKFISSEELPEDDTEAEKITCKAKIYCMVGNDLYKKAPNGVLLKCVSTDDGRQLLLDIHEGICGSHAADILGPFPRGQGGYRFLLVAIDKFTKWIEAVPTGEIKANNAIKFIRGIFCRYGLPHRIITDNGSQFISADFQDYCIGLGVKICFASVSHPQSNGQVERANGIVLQGMKTRVYDRLMSHDKKWVEELPSVLWAVRTTPTTSNKETPFFLLYGSKAMLPGELRHQSTRVQKYSDENQEEQRDIDVNLLEEHRERVAVQAASYQQALRCYHETRIQARILSIGDYVLRRVQTQAGRNKLSPKWEGPYTITQVLRPSAFKIADGDGRELANSWNIDQLRKFYV

SEQ ID NO: 160055 - protein, 107 aa, Oryza sativa
  Clone ID: PAT_MRT4530_59370C.1.pep
ALGPYPRKEIRGEGGNISWRTHNTRGICTTGQAPRWALKHLGKKPLGRSSGTPRWTPPTGGGPPFGTGPEQKQKKRGPGSQGKTGPGHQGLRPGRAPEQRAGADPGA

SEQ ID NO: 160056 - protein, 100 aa, Oryza sativa
  Clone ID: PAT_MRT4530_59371C.1.pep
YYIQTRTLNDYPCRQDTIWLEKTHPNTQKYVTPTPWTYTEPLFWMQPWRRKQQQTALNLEGRTPEPLLMVDNKTDPGDRLFMELQCSMRIERKPPLRQRR

SEQ ID NO: 160057 - protein, 120 aa, Oryza sativa
  Clone ID: PAT_MRT4530_59372C.1.pep
TSRTESRCWRCLVTATGEPLLVAIEVDLGDGALAHCHWRERVVLLQVGARLTVAVLEKPSMVAALVVSRRRSPGGGASRRRRRRGGAQHWSRAREETPREREAAADRARKNSRSPEVRVH

SEQ ID NO: 160058 - protein, 83 aa, Oryza sativa
  Clone ID: PAT_MRT4530_59373C.1.pep
MISFRGALPMVVRRDTMHWDGWFVMGDDDTVFFPDNMVAVLNKFDHAKTYYIGAPSESVEQDVMHSYSMAFGGGGFAISYPAA

SEQ ID NO: 160059 - protein, 325 aa, Oryza sativa
  unsure (1)..(325): unsure at all Xaa locations
  Clone ID: PAT_MRT4530_59374C.1.pep
MECLAEMPRAPLADRRPRKRQRLGWDVGPEIHQVQIGLCGQEVANVISAVTLGLSSQEIPRFASPPLREDDKDGHFVFAVGDNLTPRYRINAKMGEGTFGQVLECWDRERKEMVAIKIIRGIKKYRDAAMIEIGMLEQLGKYEKSRSSCVQIRNWFDYRNHICIVCEKLGPSLYDFLRKNSYRSFPIALVREVAKQLLECIAFMHELRLIHTDLKPENILLVSPEYIKVPDYKVSSRSPKEGSYFKQLPKSSAIKVIDFGSTTYDQQDQTYVVSTRHYRAPEVILGLGWSYPCDIWSVGCILVELCTGEALXXDHXNLEHPAMME

SEQ ID NO: 160060 - protein, 67 aa, Oryza sativa
  Clone ID: PAT_MRT4530_59375C.1.pep
MARWHFLLAFAIRLCVPAPSELVVSLLGSTAVGRALAGHPDPFRVVHRSELAERRSSGSALTRSSPS

SEQ ID NO: 160061 - protein, 82 aa, Oryza sativa
  Clone ID: PAT_MRT4530_59376C.1.pep
MADGIPAHAVTYAPVKARKLASGLAPGPRKMTYYTRWPRHTLVLARTRDTRTPTPPRVYSYPHGIATRSLQKSGCAHVPHLQ

SEQ ID NO: 160062 - protein, 100 aa, Oryza sativa
  unsure (1)..(100): unsure at all Xaa locations
  Clone ID: PAT_MRT4530_59377C.1.pep
FLRDSRVPPERGAFYTPRGALQGXTWPSTSSTSPTWPATHPIPKQPTRPTPKTPTHRLPLDQERLPGLCYTEGDSDGSPMHRKALPPGEPRQPEPLQPWP

SEQ ID NO: 160063 - protein, 64 aa, Oryza sativa
  unsure (1)..(64): unsure at all Xaa locations
  Clone ID: PAT_MRT4530_59378C.1.pep
WRAKNTQQNQGXRADVLADDRAGLCRRKVTQTTRTGFLYAPDSVXNTGEESDPAVHHLCPRAAA

SEQ ID NO: 160064 - protein, 66 aa, Oryza sativa
  unsure (1)..(66): unsure at all Xaa locations
  Clone ID: PAT_MRT4530_59379C.1.pep
XPRQAHXLRHSSLEXLPLFLLILAASTNTTSDHCTHYANNISETAQVHNTHDLAKLATIQQYDLAS

SEQ ID NO: 160065 - protein, 291 aa, Oryza sativa
  Clone ID: PAT_MRT4530_5937C.1.pep
MLSGFFYTTFNKECWPSLVYRFTNVSGKGSGPCDSDGNAPFHYAVCNPVTKKWVMLPKANWASDSSYLEDHPIACLGFDPAISSHFHVLEYLEGPDGCITAVGIYSSKTGLWNLHESGWNHGVGVSYGGPRGVFLNGFMHFVAVRNEIVAVDMEGKRWKIIPMPDSGGHGAPMIDRTQGHLCALNVDPLDIFNLSLWVLEDYNTDNWILKRTVSTLELFGGKKYEFDRGYQVIAVHPECNLIFFHYGLDNTLLAYEMDPKELRVVRNLGHHTCQPVLPYVPLFSVPLAHGH

SEQ ID NO: 160066 - protein, 224 aa, Oryza sativa
  Clone ID: PAT_MRT4530_59380C.1.pep
YSGTLIPLIFPRAAATLATRRFPLPKILRRLLMVSWSLWSAAAFPSSLRSRSRCLPLKLAEPAVADVVWSQWLPSLSSQRASGSCRHLLASSMSTVAVISSPSPSHASLVLQDLCRIERLQARGNQQACLEAQTKGSHMYGASDKQKVYEYPIKTLTMLDRTFSGCCMQLLLSKLSKMLCDINCDPLSLYSSFHFLYNLTSKMFDLDHGLEIGRLFEIQDILIT

SEQ ID NO: 160067 - protein, 166 aa, Oryza sativa
  Clone ID: PAT_MRT4530_59381C.1.pep
MWARAAWWDLIVSLTTFSTRAHGQNTHATRVSMDAGNPISGNATASTWDAAALWTPPHHHCSLPGLPRFLLAEFRAATKQRPVKIKIFAGGYRPEPPSPASSSLKSHPPSPSPLPSPVGLNRLRLDDAAAVLPSPGDLYRLDDPAAEPRRPPPSPPRHRRCKATQR

SEQ ID NO: 160068 - protein, 355 aa, Oryza sativa
  Clone ID: PAT_MRT4530_59382C.1.pep
MTQWADLDALRPAVAADVQVVTSDGKSIAAHSFVLGTASPVLERMIERARRGWNAECTIRVLGVSSDAVFAFLQLLYASRVTPEDEEVVTAHGPQLLALSHAYRIGWLKRAAEASVTARLTPEHAVDMLKLARLCDAPRLYLRCARLAAKDFAAVERSEGWRFARRHDAALELEILQLLEDADQRRERWARERASREAYRQLGEAMDSLEHIFSDDGCSCADADADADTDAPPCRGLRLLMRHYATCGARKAAPGGGCTRCKRMVQLFRLHASVCDRAAPHDDGDRPCRVPLCSHFKGKMRAEKADKTWRLLVKKVTRARAMSRLAAGREREVVPEVVAASWARYSSSGGAARLR

SEQ ID NO: 160069 - protein, 620 aa, Oryza sativa
  Clone ID: PAT_MRT4530_59383C.1.pep
LGRRRRGCRGRLRVDMASSHLLQGPDWAINLEICDTLNADRWQTKDVVKAVKKRLQHKDPRVQFFTLTLLETMMKNCGEYVHFEVVEQHILQEMVRIVQKKHDTQVRDKVLILLDSWQEAFGGPGGKYPQYYWSYIELKRSGIMFPRRPVDAPPIFTPPATHHTQSYGSPTYPAGSLNERMTSDVETLSLGDLNNIRDTTELLCDMVNALNPSDRMAVKDEIISELVTQCRSNQQKLMRFVSSTGNEELLKQGLEINDHLQSVLAKHDAIASGAPLPVETPRKDEIPREDPKIKPSAPPIAPPSAPPVEEDEDDEFAQIARRKNKSVISSDEASSSAGDQALVPVDPVTSEASSSVASNAVVPVDSSPASGTRTREQDMIDLLSLTLYSPPEASTDSSSQTQNGTQQSVTSNGPELPPNYQPAASNGSHYSSNQQAYPTNQAYTPYNNYVVPWAQAGQGTQAGGAYQTQPMQQYGSSYPAPPWAMPASVNSTNPFQPATYQMQNPPVASVAPTNTYPAPSSPYAAPPRQQVPSPATKPMQQYNSFVSQTRSGPAMAQDVRMNGNPRPSETTAAAAKPYYMPDNLFGDLIDVKSYGGGKMSRTASMPSPNGSGQPLLGGKK

SEQ ID NO: 160070 - protein, 94 aa, Oryza sativa
  Clone ID: PAT_MRT4530_59384C.1.pep
MTRWADLDALRPAVAADVQVVTSDGKSIAAHSFVLGTASPVLERMIERARRGWNTECTIRVLGVFSDAVFAFLQLLYASRVTPEDEEVVTAHGP

SEQ ID NO: 160071 - protein, 69 aa, Oryza sativa
  Clone ID: PAT_MRT4530_59385C.1.pep
VHSSYNMLETPTLHCLIESRPTFNSPPDITGLCYTPTRAHQPHPWQQHGHMGRHFPRGSLPRRKIAREE

SEQ ID NO: 160072 - protein, 103 aa, Oryza sativa
  unsure (1)..(103): unsure at all Xaa locations
  Clone ID: PAT_MRT4530_59386C.1.pep
FRAAHWDSIHITPGIDDIRNLQLFQRPTNIPAAHHRSFILLCLLGIWNHRHDVIFRNQEPSFXRLLRRCIDDATLWVERLKIQDRQVASAWKHVLSSPLLVSS

SEQ ID NO: 160073 - protein, 175 aa, Oryza sativa
  Clone ID: PAT_MRT4530_59387C.1.pep
MEGSGAQPVGGAAAAAAAPKRNNMDYTLAALKLFGCQLAGATEAPPSESDGTSQAQMLYGIRFQRVWLQGVVVLADYRDGAGHILVDDGSCVAEITLTPKEAEGQPWREGMYVMVLGSYSGKESLPRANRPVIKVHKLVDLSAQPDRESMWYMEVVEAFNFFYLQFSAASPLMKR

SEQ ID NO: 160074 - protein, 75 aa, Oryza sativa
  unsure (1)..(75): unsure at all Xaa locations
  Clone ID: PAT_MRT4530_59388C.1.pep
MTRWADLDVLRPAVAADVQVVTSDGKSIATHSFVLGTASPVLERMIERARRGWNTECXFRVLGVSSDAVFATSPS

SEQ ID NO: 160075 - protein, 428 aa, Oryza sativa
  Clone ID: PAT_MRT4530_59389C.1.pep
MASLSDPNSPPPHVVEDCRGALQLLSDGTVVRAAAPPPPFYVRLDIDDGRVEWKDVVYDAAHGLGVRMYRPAATGGAEEKLPVVVYFHGGGFCIGSCTWPNFHAGCLRLAAELPAVVLSFDYRLAPEHRLPAAHEDAAAALIWLRDQLLSDPWLADAADARKVFVSGESAGGNFAHHLAVRFGAAGLDPVRVAGYVLLMPAFISERPTPSELAAPATGFLTRDMCDRYCRLALPAGADKDHPLVNPFGPASRSLEAVDVSRVLVVAADGDLLRDKNVEYAERMKAMGKDVELVVFAGEEHAFFGVKPMSAATGELVEVIRRFIAGAAAKAAAQGITSARSSSTKSSKAITRSNSTWSLKTTTQSSNTWAAKVVARSNIARNFKTVATTQSTGTQRSRAATAAVRSSAIQRSKATAVCTRRRPMSSAPA

SEQ ID NO: 160076 - protein, 366 aa, Oryza sativa
  unsure (1)..(366): unsure at all Xaa locations
  Clone ID: PAT_MRT4530_5938C.1.pep
MNRVPTSWGFVYPRVNKPRGGARGPGPRGWGPRGSPTAHGGPGAPGLTPAGTVGPTRQPHLRARAADSRAPRGSRSVRPKATTPAQXAGGGAPTPLWHGGAAAERGGGKGEKKRRSTAHPRSTATTEXAAGAEEGGGAARVDGDGGVPAVGEXNGGVDEVTEDAAKPKEAAPRGKVVRGDDGGGPELGGDGGERERRRELDSGGERERREAETNGGGAGRVYIGLEGGESGRTRRKRARKIRPPLMAPARLGERFPNESEGEREGKMGGKREGITGNISPHFIARXTAGGGGIRGGGGVRARARRRERREDRDDRWAPPVSEGGGWARPSAARARGXGRVGRGERXGEGREMGRAGPRERGKEKER

SEQ ID NO: 160077 - protein, 124 aa, Oryza sativa
  unsure (1)..(124): unsure at all Xaa locations
  Clone ID: PAT_MRT4530_59390C.1.pep
MEGSGAQPVGGAAAAAAAPKRNNMDYTLAALKLFGCQLAGATEAPPSESDGTSQAQMLYGIRFQRVWLQVASPPFPIPPISXLHLSLTTCGGRQGVVVLADYRDGAGHILVDDGSCVAEITLTP

SEQ ID NO: 160078 - protein, 49 aa, Oryza sativa
  Clone ID: PAT_MRT4530_59391C.1.pep
MAGVINVMEEPETGGNWQVEGKNPKRQVGNRNQPTTGVRTGDMLPKRQR

SEQ ID NO: 160079 - protein, 113 aa, Oryza sativa
  Clone ID: PAT_MRT4530_59392C.1.pep
PPKKKQARHIPKKTAQTPHTKKPHGGGDPAPVGGEEKNKKKGGAHIKRKKAAKAIREKKQDPTLQFINRPGPPPPKKNPTGAVAKFLKKSGEKKKNHSKRTPKTLGHNQGAAF

SEQ ID NO: 160080 - protein, 287 aa, Oryza sativa
  unsure (1)..(287): unsure at all Xaa locations
  Clone ID: PAT_MRT4530_59393C.1.pep
TPSWAPPNRTPSPXXASPEHNHQCSSPXAPSPDTSTHQTNRLHTPSPHARGLTRVCKGTPPVHHPTKTNCXTFRPPRPXPPKTYXSRAQQGGPXPRPLTPHGGRTTWAPRPPPPXLDNNLXLEXTPPTARETRHPTRKNCRFHASPPREGPPPPPQDPVLRPPXXXEHNXPKSCTVWPHPEKPHPPQXHNPGXGPXLSPTSSGRXKKTPPFLSSXRAHKPQHTTYPSNGPKNPLGYRFGRFPLLPPSRRKPGGSSPRTPKTKKGFLPLPRRPGGCKNRRVSHKAIEK

SEQ ID NO: 160081 - protein, 108 aa, Oryza sativa
  Clone ID: PAT_MRT4530_59394C.1.pep
MSPPPPSHSPTLRHQPSRSVTYAVTAAHCYLTASRRSRLASTVTSPRDDVILAPPPSHYRPHAKSIRCGLLECLAVVDLLDLVEHGLHIAALAQVLPPHRAGFVHDLS

SEQ ID NO: 160082 - protein, 72 aa, Oryza sativa
  Clone ID: PAT_MRT4530_59395C.1.pep
QYYQLAKILTMLKFDKVYFDYKIKSNSHGPAAFPVAGVHRCPSLYLSTAGDLGPPDAPAVAGKAREVASMGA

SEQ ID NO: 160083 - protein, 61 aa, Oryza sativa
  Clone ID: PAT_MRT4530_59396C.1.pep
NQLLFFPRKPIFVLLSPFQNLSHFSIFYIYIYIYIYMSRFINTNINMKNARMTYIVKRSES

SEQ ID NO: 160084 - protein, 102 aa, Oryza sativa
  Clone ID: PAT_MRT4530_59397C.1.pep
ARREDGLKASLIPASAPSSFFPETSCPSARPPSLPSAGSPTAHTITPRQHNRARPYTIIGSPRHGTDIANSHGRRTPSAEPYGTREVAVPDDGMARRTSRVA

SEQ ID NO: 160085 - protein, 135 aa, Oryza sativa
  unsure (1)..(135): unsure at all Xaa locations
  Clone ID: PAT_MRT4530_59398C.1.pep
STGIGTRSRPGTAQPNKALLGGLGIRRPSLSVQDGFAQCIGGLLSVPVQELHFDAETWRGPDGXHERGWQRGGGVRRRRALRGGGPGXVRVEAIDDIALEQGLVIVFSVSVVEEIEQGSDRGMAWLVLDLARSRM

SEQ ID NO: 160086 - protein, 199 aa, Oryza sativa
  Clone ID: PAT_MRT4530_59399C.1.pep
MGALHRGGGKKPNWVIVDFARDWLPPIANEHQVPCAFFSVFSTKMLVFVGPKAARTEKEKGGGCRPARKRAGSGSHWTGRSASPVDPHVPLASTPRVFVRHTVSSPHPDNSDVVDVCPAGQLPVAARIDSSGCTYHGVAAMPRYVAVESTREKVMDASLGKHARVGKVGTEVPRPPQWSSSVTSPPLPSSRRTPAATQL

SEQ ID NO: 160087 - protein, 306 aa, Oryza sativa
  unsure (1)..(306): unsure at all Xaa locations
  Clone ID: PAT_MRT4530_5939C.1.pep
PPPAPSPWLHHLSPPPPSLSSVPATLQPPLPPCPSAGRPCRRLLQRRSRLLCAGLPSVARGDLRKCIPAGNSGVTATVPSSASCCSSLVRRPTSPSPPSTSQPPPLPRSALRFAGKPPETCPRRQXVALPPLYRLQPPVPPCRCSDCRHRHLPSTSPRRPPPRPALGFAGTPSPASVLPSASPEFLRQPLPPCLCAGRRRHLLPRRHRSGVFHAVLVSVQLLPAASSPPXPVLVVVLSSFPVVVAFVPLSSRSRPSSASVKCAAAAPSSSSSSPPLLQALRRLRLAFVQGSPPKSSPRLSSPSFPA

SEQ ID NO: 160088 - protein, 383 aa, Oryza sativa
  unsure (1)..(383): unsure at all Xaa locations
  Clone ID: PAT_MRT4530_593C.1.pep
MSLTGHGGGGGEGTAPALELLDEYWFFSNTLGKNGRHGGGGGGGGRPPMLPRSPSTVSGGGGRPGKGVEAVGTSRLFASAGRRLLRTPSLPSPRVGMEIAKEDEEVVEEAPAAAGGGGDQEADAEDDDLNWSSIYEGVLRTRIAEEGVRSALRRAPSMPVTSSATXRDDDARREDTAAAATGSTTPGMSRLRHAHSTLERHCRSHAPTPKADRTPRTSGGGDGGHRRQPPRRELRSFSANQQPLVRHQSLFHDKKWKSSSDLESIEVQGFRDLGFVFDQEELRESLADVLPGLRGKPTPTGSGSASDNDDANTATTATGSDAVAAVRRPYLSEAWYHVRRPAPRSPAAAAMRLQQADARSAAEMKDQLRMWAQAVACNVRQEC

SEQ ID NO: 160089 - protein, 88 aa, Oryza sativa
  Clone ID: PAT_MRT4530_59400C.1.pep
FRSVLTSSCTRAPFPRLSATRLCPPSATNCPVGDRSTAAGDLTAPHHHREAAGGTPSPRPPARRDPSGTKSLFAVVSYPRFQIQNEYH

SEQ ID NO: 160090 - protein, 42 aa, Oryza sativa
  Clone ID: PAT_MRT4530_59401C.1.pep
MMSTDAAVCRHLKENQDKGFHPTAHPRERARLDNAPKRKNDS

SEQ ID NO: 160091 - protein, 61 aa, Oryza sativa
  Clone ID: PAT_MRT4530_59402C.1.pep
LLNVSFLAHVAIQIMEDAGHFEGVFFFISFCCGARRLDRSHKDKEKEIWGYMTIMILQGIQ

SEQ ID NO: 160092 - protein, 112 aa, Oryza sativa
  Clone ID: PAT_MRT4530_59403C.1.pep
GAKANPGPRAPSSKPPPTAASRANCLVFSGSGNGKVCIKAGNYCNVEVGGIKQNLAWVNQRNILCLSVVNPSKPRLIVYKRILYLWFKKKKKKKKKKKKKKKKKKKKKKRAA

SEQ ID NO: 160093 - protein, 114 aa, Oryza sativa
  Clone ID: PAT_MRT4530_59404C.1.pep
KKKPPGGQKTKPLSPGGGGFFKTGGPTGFPLCKGAVGGPPIKGGRPPLRAPRAFPFFFPVLFFVEIWRGNNFSQGNTMSLFSPKFYRPPLKEKGGPPRAPGPKFRGDPPVPRKG

SEQ ID NO: 160094 - protein, 59 aa, Oryza sativa
  Clone ID: PAT_MRT4530_59405C.1.pep
MIFPRDKINTIPLEYSQVKCYNDISVRLRMNSVTIIFQTYFCAIAENYISSNVVKKYQH

SEQ ID NO: 160095 - protein, 297 aa, Oryza sativa
  unsure (1)..(297): unsure at all Xaa locations
  Clone ID: PAT_MRT4530_59406C.1.pep
YRRIRPWEKQPPPDPPTGAAAPPPPPPAALPSPLPALPPPRRXPTPSARTSSTSRRSTASSAPPPPPPPPTPSAAPXSSTTPRRSATCRRSPPPSATSPPPPPATTTTSPTPASTTSTPSTTAPAAPRTAASAAAPAAEATCPPPRXNTSLFYCPPWPWPPIPFCTPRPWFPPIPFLTPPPPPFLPFPLPPIPFLTPPSPPPPAFPFPLPPWPWAPPPAFPFPHLPPIFSPPSPPPPPPPAFPFPFPQLPPLPHFPPLPSFYPSPPPPPPPPPPPPPSFPWPFPPLAPLFPPYPSPP

SEQ ID NO: 160096 - protein, 134 aa, Oryza sativa
  Clone ID: PAT_MRT4530_59407C.1.pep
MGYIGAAADMDESNCTSTVDHCASCILQRQRCCCFRLLRLLELLRLLICSPDGANDAISFSYNNEILLYQIPVCIPTVQADVISLVYRLFKMSTNLWWCDLYAWMQFELQNLQDLVFQEKLNYRLLPEGISDFE

SEQ ID NO: 160097 - protein, 523 aa, Oryza sativa
  Clone ID: PAT_MRT4530_59408C.1.pep
MDRELVRTVKLATKNHAGVLFRRAVRHLPHIVAVTALVAAAPRLSTLLAAAAAGGSTMRWARALWSDLAGELGPSAPALAVACWAAALAAYTYAASRPRPVYLIDLAGYKAPREHEASRAKTIAHFGRCGRFSGESMAFQKRMLERSGLGEATHFPTSLISLPVDMCLRTAREESHAVIFGVVDEVLRKSGVAAADVGVLIFNSSLLSPTPSFTSLIVNRYGMRPGVVSHNLSGMGCSAGIIAIDLAKRLLQVHENTYALVVSTENITLNAYMGNNRPMLVTNTLFRVGGAAILLSNRAADRRGRAKYQLIHTVRTHRGAHDQSFGCVTQEEDDAGEVGVSLSKELMVVAGEALKTNITTLGPLVLPISEQLRFLATVVLKRVFRADVKAYLPDFKLALDHFCIHAGGRGVLDELEKSLKLSPWDMEPSRMTLYRFGNTSSSSLWYELAYCEAKGRIKRGDRVWQIAFGSGFKCNSAVWRALRTVDAAGLDAGDNPWMKEVDMLPVDVPKVAPIDETSYQIPN

SEQ ID NO: 160098 - protein, 51 aa, Oryza sativa
  Clone ID: PAT_MRT4530_59409C.1.pep
WFSQYAAGLGLAPVLSMMSRPSATARRGSESLLLLSAIVTVRCDLDTHCGR

SEQ ID NO: 160099 - protein, 107 aa, Oryza sativa
  Clone ID: PAT_MRT4530_5940C.1.pep
NRSDGSGRKCAPLPSPGCAVGPGYLGSGIRTIPKTASMFISQPLTTYAKQDFQPCWGKTSGDPLACKPSSSRARPVERAKFQLVCPFFTLGGKEKPNPLAAPNNRQS

SEQ ID NO: 160100 - protein, 62 aa, Oryza sativa
  Clone ID: PAT_MRT4530_59410C.1.pep
PLPGGWFFGRVCFPSGLRWDVLPCCCALVFCGAWVWPFPFFGRGYFCPGPSTYMIARARVIV

SEQ ID NO: 160101 - protein, 173 aa, Oryza sativa
  Clone ID: PAT_MRT4530_59411C.1.pep
MSIYNLLLDIPQKSCKNGSKRGLRMINATHPPGGARRMLWRRGGGAYWRRPPIVSAQAGHTVPQWHGDGTRRDGTALLDDNAIDVAATGAVPAAAWMEDDTVGIDLQLQAAPLAMVLAAAAGGGVDDDHELHRRVLQARGGYVDPSLVADRQRPVSGWGGVSPGLCGRRDPAA

SEQ ID NO: 160102 - protein, 92 aa, Oryza sativa
  unsure (1)..(92): unsure at all Xaa locations
  Clone ID: PAT_MRT4530_59412C.1.pep
KSIIGFRLGLISIPPRIADPTIWLQEEENDSDVKHTSIKTIIIQQCLVSVFRLGTSCSKQQPXERIVLSEAVXRDEYLRSWMLGHEEHSTVS

SEQ ID NO: 160103 - protein, 52 aa, Oryza sativa
  unsure (1)..(52): unsure at all Xaa locations
  Clone ID: PAT_MRT4530_59413C.1.pep
LPIFNTYPTSKLNGSTPGGLSPNQVMILIGTIFPWRSPRSFCXGPPFLQEKA

SEQ ID NO: 160104 - protein, 92 aa, Oryza sativa
  Clone ID: PAT_MRT4530_59414C.1.pep
MRENASAKASGEAREEHEHGDRRPLFAAAPSQSPAAGLRAARYSPPARHRLACPPSAVAALEEIVWGGCSSPVGGREEEVVVENGLEEEEEE

SEQ ID NO: 160105 - protein, 126 aa, Oryza sativa
  Clone ID: PAT_MRT4530_59415C.1.pep
MASAAARSGLRSLAARAKATAAPAARRRMSSSAHDDAHETAKWEKITYAGIVTCTLLAAYNLSKGHPHFDEPPAYPYLHIRNKEFPWENAVIITTSFVIIIFLRHFCALALYGMKPVPKIDAYLCL

SEQ ID NO: 160106 - protein, 656 aa, Oryza sativa
  Clone ID: PAT_MRT4530_59416C.1.pep
MGDLSSSDSLLGWANDELDLFASYGASLFPNTRKPLICSEHQPIQSVPPSCRVPNVAIVYVLADVPGGVELAARAAAPAPAAAIGEAVRVMERVRRRIRVRIGVGEAGGAGAAGGEELGGARHGGVAAVRKEQRKKGKWGSSKHKPFGTDSIHKPPYELPLCGVQPPRGSNGNRGSIRRVPHLRHSLHPILSQELPSDITIKVDDAAFNLHKLPLASRCGYIKKQVSGVGGNKATHLEIAGMPGGSKSFELVVKFCYGVNFEITVDNVAMLRCAGEHLEMTEECRPGNLVGRTEAYLEEVALASLEGAVAVLRKAEELLPASEEKARLVARCIDAVASIVCGGDGQFSMSLGTPGGGGGGGYNGVGAAASREVDDWCADELTALRIDTFQRVMIAMKARGFKGIAMGTLIMLYAQKSLRRLDMHGRDRKKMGARQEHEKRVVLETIVSLLPRERNTLSVSFLSMLLRAAIHLDTTLACRLDLEKRMAAQLGQAVLDDLLIPSSSPDAAAATTAYDIDAVQRILAGYLDLDYTGRHLISISPPVSPKTSGATTHLPPWHRRRRDPASARWRRAPRRPPPPRRGAACPPPPTTTPMRRPSGRRSPTPGSSPAPCWRRTTSPRATPTSTSRRRTPICTSVTRSSHGDPMAYLRTSTIKY

SEQ ID NO: 160107 - protein, 79 aa, Oryza sativa
  Clone ID: PAT_MRT4530_59417C.1.pep
MEKDGRGVARGSPGGRGTTPDFNPERQRPPTPLKNQTQITKSNGPNKYQQPKAKSRLAIHELKLPVGYTIELALREPNN

SEQ ID NO: 160108 - protein, 272 aa, Oryza sativa
  Clone ID: PAT_MRT4530_59418C.1.pep
MTSASELFTARRARAARLSDPDPDPDPPADALHDPHGLADRRGRRRGCRPRRQLDAAGDVRQHLHTGAPPSRRRASYTDRVLSYIDNSNIGDSATRRNRLDRLMFRTNERLPGAVLQAQARVLERLRGISIGSSVSRPSITLDEFSATDVFRIIDFGNRDAPYEANRSSSSLAHPSSESDEERSPIDTSSLKRSRGLSKAAFLRLQIEIFEASKDDNREASPECSICLDGFYDGDELIKLRCGHRFHSNCLEPWVRKCADCPYCRTNIQSRS

SEQ ID NO: 160109 - protein, 120 aa, Oryza sativa
  unsure (1)..(120): unsure at all Xaa locations
  Clone ID: PAT_MRT4530_59419C.1.pep
RPCLWRGRTRWKDPTLSRNQSEVLAIVPDLAGDYNRPGDLLPRMYVDSSXLQQALPPQLACKGDSQSKIRQWAEACPSGGQDNPIVFIIETNGFRGSGGLGCEMGLLKVQEILNYCHEPC

SEQ ID NO: 160110 - protein, 1014 aa, Oryza sativa
  Clone ID: PAT_MRT4530_5941C.1.pep
MARGSALLDGSVLPPSRIVSERQAGLSRRFMPESATGREIVTLGEGRPAPDYPGRSVFFLPFAMAGLVPPFSSFFMDVLEFYDLQMAHLTPNAVMTLAIFAHLCEMFIGVRPSLRLFRWFFTVQSVSPPSVVGGCYFQPRGPVLNRYIPCALRKNAPPTSEQPPAQASSWRAPVDLGDGYDAVLDRLAGLRSQGLTGAMVYGDYLRRRIAPLQRRARGAWEYTGSEDFTRTHQGVRWDWAPEDFKILVQRVLNLNSVEAALIPQGILPLCSDPDRASILTIMMAVGASEERAPKGHDGAGGSRRGEQSTPRGGRASGSRDRGPGSSRPADARVKRKQGGTPPPSPPRGGGAARASNRRPEGAAPTSQPEGERKKKRPRKMGETEPSRGNLISPPKWSFNRPPHSEIPSRPSRHSKSGQSEAEDPAAAEALRRESDRREAADRLREAEEAAQEAARARQAEETAREEAGFRQDEAMATSEAARDEAAGASLGPTPSGDTQATTSGAAGDEAAGASLGPTPSGDAQDQPGPGDIPESGTSIGGPSRVASSPRRLFPTPSIALLNAEPLLQALAAANTTVLDGLSAQVEVLQAERAELDAAWARVEEGRRSVEAMVEVGRKAHRRHVSELETRKKVLAEIAKEVEEERGAALIATTVMNEAQDTLRLQYGSWEAELGKKLDAAQGVLDAAAAREQRAAETEAASRRREEALEARAMALEERACVVERDLADREAAVTIREATLVAHEAACAEEEFTLRLREDALTERERALEGAEAAAQQLAVNLSLREAAQEEQARRNLEGARAERAVLNQRAAELEARAKELDARARSGGAATGESDLAARLTATERTIADLQGALDSSAGEVEALRLAGEVGPGMLWDAISRLDCAGRQVGLWRGRTVKYAANQGGLAQRLSKMAGALQRLPEELEKTIKSSSRDLAQGAVELVLASYQARDPNFSPWMALDEFPPGTEDRARALNKGLCPGSGPQKARVGASAWGDPHVETGQAGNVVTEGYG

SEQ ID NO: 160111 - protein, 177 aa, Oryza sativa
  unsure (1)..(177): unsure at all Xaa locations
  Clone ID: PAT_MRT4530_59420C.1.pep
RAREGAVERGKGGGEWRDGLYGLGRGGRGREAAGFLADVGNGEXRERERDSNSNPSVAGCTREWEEWGWWAATWARGAEWGAEGGGGGRRGRLGGCRLGERRREVEEGADRWAPPVDDPEGLGRREEPAWAGPAEGRSAREANGLGRRPKKRGKRRKKKKKKKKGFFQGFNIALCSF

SEQ ID NO: 160112 - protein, 244 aa, Oryza sativa
  Clone ID: PAT_MRT4530_59421C.1.pep
MEAKLDRIAEQLKALPLLSQVVEGHQHRLEELSKQIAVAAALVEDVKKEQAAAAASRAARIDGYSGGFFRLAKLKFPTFSGTFPRLWITKCTRYFEFYGMPMKMWVSWASMHMEGMAELWMMTYEKRHERDWGRFCEAVEERFGPYDHKQKLTALLDLRQEGIMTVSEYRDQFEERLYHAKLFDPVSSNCFDVALFIRGLREEIRDRMWQQTPATVDAAAQSALVQEALYNLEMQRAQRDPYKE

SEQ ID NO: 160113 - protein, 125 aa, Oryza sativa
  unsure (1)..(125): unsure at all Xaa locations
  Clone ID: PAT_MRT4530_59422C.1.pep
HRSDGRQTWRAATLGLGRGGRIRGEAASPGCGRPDPRGGVTAGPREAISAGRRRRRATTTTTTMATTTTGXAAGGGCTAAGGXGGPPPPPLPHGPTSLPSSFPRRQMCGGGRDGDHHDDDDHGNW

SEQ ID NO: 160114 - protein, 57 aa, Oryza sativa
  Clone ID: PAT_MRT4530_59423C.1.pep
MAGLIAISSVRTPFRTSKDHLYSGGQPCERAQHAEDPIWVMYITRFYIVWVSFDQQT

SEQ ID NO: 160115 - protein, 292 aa, Oryza sativa
  Clone ID: PAT_MRT4530_59424C.1.pep
MAGSSSSSKQDRALQAKNLAERCFLAGDVAGAKRWCQNALKLDPDLPGVAQAAAAYNVHSAAALKAIGVAGCGPDWYAMLGLPQPRSDLVTHHDAVKKQYRKLCLLVHPDKNTSAAADGAFKLVQTAWDVLSTRHPPPGATAAAASVCTLPMRAEDLFRTKPTAAAPATPPAAKRPPEPPPKTTQRQQPPGPPPKPQPSAPKRPQVVQMRRPAPAKQQRPTILPPPPVVKRPSPTRGKCQYCGAAISKSFRCMSCHRSPMDNKPGYSDNDEYDDYYAKKNMEYDDYYYHDDR

SEQ ID NO: 160116 - protein, 93 aa, Oryza sativa
  Clone ID: PAT_MRT4530_59425C.1.pep
HEGESDGRINKAVKDFLLVPPSCSPRGENRFELSRSFPSNQPSIPVGTARGFFPISSSRRFPESAPFPNLIFMKRGSNLFLPNLIRAQVHNLI

SEQ ID NO: 160117 - protein, 235 aa, Oryza sativa
  unsure (1)..(235): unsure at all Xaa locations
  Clone ID: PAT_MRT4530_59426C.1.pep
ISPCTASTHRPPSNTAAPLPLRASAAAGKLSTHAKSLSAPFCTVATSTLMTYHPAALSRASAAATARARRPGGTRCVPAHAAARASPAPAPRAVIPXAPRRRRAAARRTTAPPGAPCTATCRARPGCRTGASPRGCTPRRAPRRRRRGGGARRRRRRGRRGAAGGAAAAAATARGRVPPGARPAARGTPRWRPRPPPRTAVAVRSPAARVADRWTWRTPKGSGLQICNLQFAKLL

SEQ ID NO: 160118 - protein, 33 aa, Oryza sativa
  Clone ID: PAT_MRT4530_59427C.1.pep
TLESYSLQGNGSKIKEYNAGQLHVRNLAYSKST

SEQ ID NO: 160119 - protein, 134 aa, Oryza sativa
  Clone ID: PAT_MRT4530_59428C.1.pep
MAATGWFLAAAVAAMAVVACFAATSSSSSSQLHCGTVTSLLSGCAAFVRGHGGGAQLPSPGTPCCDGVAGLYAVAADSADNWRAVCRCMARLVRRHSSNASAIALLPGVCGVVSPWTFAAGNTNSNRPYCRSLP

SEQ ID NO: 160120 - protein, 2235 aa, Oryza sativa
  Clone ID: PAT_MRT4530_59429C.1.pep
MSAAQGLALKLRAAPAAGGVRGEKRRRAASATAAAAARPRHGAMSLEGGFLGGALPAEDRVAPRASASRQAEAGAGAGAARPPPRSMSKIPESSIGLYDPSMERDSCGVGFIAELSGEYSRKTVDDAIEMLDRMAHRGACGCEKNTGDGAGILVALPHNFFREANLLEVTKDAGFELPPPGEYAVGMFFMPTDDKRREKSKLLFREKAELLGHTVLGWRRVPTDNSGLGQSAVDTEPVIEQVFVTKSASSKADFERQMYVLRRFSVMSIREVLGVKNGGTKDFYMCSLSSRTIVYKGQLKPSQLKGYFFADLGDESFTSYMALIHSRFSTNTFPSWDRAQPMRVLGHNGEINTLRGNKNWMKAREGLLKCEGLGLTRDEMLKLLPIVDATSSDSGAIDNVLELLIQSGRSAPEAVMMMIPEAWQNDVNMDPERKALYEFFSALMEPWDGPALISFTDGRYLGATLDRNGLRPGRFYVTYSGRVIMASEVGVVDVPPQDVSRKGRLNPGMMLLVDFENHCVVNDDELKKEYSKVRPYGEWLKRQRIQLTDIIESVNEAERIAPSISGALPITKENKADMGICGILTPLKAFGYTREALEMLMLPMAKDGQEALGSMGNDTPLAVMSNREKLTFEYFKQMFAQVTNPPIDPIREKIVTSMECMIGPEGDLSETTERQCHRLTLKSPLLNTNEMEAIKKMNYRGWRSKVLDITYPKKNGRMGLKQTLDKICAQAREAIHEGYTILVLSDRERVAVSSLLAVGAVHQHLVSHLERTRIGLLVESAEPREVHHFSTLIGFGADAICPYLAIEAIWRLQIDGRIPPNDGKPYTQEQLIEKYFYASNYGMMKVLAKMGISTLASYKGAQIFEALGLASEVVSKCFEGTPSRVEGATFEMLAQDALRLHEIAFPSRTLPPGSADANALPNPGDYHWRKNGEVHLNDPFSIAKLQEAARINSREAYKEYSRRIYELNKACTLRGMLKFREIPNQISLDEVEPAKEIVKRFCTGAMSYGSISLEAHTSLAEAMNTLGGKSNTGYITIKNGSKGQLTTQTLTFFRGTVEPFALGRWCCENFVPFNLNTNDAQSLCAFPKKNNPRISAIKQVASGRFGVSIYYLTNAVEVQIKMAQGAKPGEGGELPGHKVIGDIAVTRNSTAGVGLISPPPHHDIYSIEDLAQLIHDLKNANPGARISVKLVSEAGVGIVASGVVKGHADHVLISGHDGGTGASRWTGIKNAGLPWELGLAETHQTLVANGLRGRAVLQTDGQMKTGRDVAVACLLGAEEFGFSTAPLITLGCIMMRKCHTNTCPAGIATQDPVLRAKFAGKPEHVINYFFMLAEEVREIMAQLGFRTVNEMVGRSDMLEIDPKVLEGNEKLENIDLSRLLKPAAEISPGAVQYCVEKQDHGLDMALDNKLIASSTAALRKGVRVFIETPVRNINRAVGTMLSHEVTKRYHIHGLPSDTIHIKLNGSAGQSFGAFLCPGITLELEGDSNDYVGKGLSGGKIVVYPPRNSRFNPQDNIVIGNVALYGATKGEAYFNGMAAERFCVRNSGAQAVVEGIGDHGCEYMTGGTAVILGKTGRNFAAGMSGGIAYVYDVDGKFSSRCNYELVDLYAVVEEDDITTLRMMIQQHRLHTQSDLARDVLLNFDTLLPKFIKVYPRDYKRVLDKLKEEKAAKEAEQKAREVVDKKPVEVIQAPNGISVKTEKVMNEEPSSRPSRVSNAVKYRGFIKYEREGTSYRDPNERVKDWNEVAIELVPGPLLKTQSARCMDCGTPFCHQEGSGAGCPLGNKIPEFNELVHQNRWHEALDRLLETNNFPEFTGRVCPAPCEGSCVLGIIDNPVSIKSIECAIIDKGFEEGWMVPRPPLRRTGKRVAIVGSGPAGLAAADQLNKMGHFVTVFERADRIGGLMMYGVPNMKADKEGIVQRRVELMAKEGVQFIVNAHVGSDPLYSVEKLRSENDAIILACGATKPKALSLSRDLPIPGRELAGIHFAMEFLHANTKSLLDSNLEDGNYISAQGRKVVVIGGGDTGTDCIGTSIRHGCTNLVNLELLPEPPRKRAPDNPWPQWPRIFRVDYGHQEATSKFGKDPRSYKVLTKRFIGDENGNVKALEVIRVEWGKVNGRFQFKEVEGSEEIIEADLVLLAMGFLGPEATVANKLGLEQDMRSNFKAQFGNFATNVEGVFAAGDCRRGQSLVVWAITEGRQAAAAVDNYLSKDDEGETNGTEDIAVSSEGLVQPVVA

SEQ ID NO: 160121 - protein, 223 aa, Oryza sativa
  Clone ID: PAT_MRT4530_5942C.1.pep
MTSHARYVSLDPLERRRPSSSSSFSRQSDAPLRAATVSFPYSPRPAALAAGARASRVSPVVVAAGGGHQRLMGSLTNTQGLRFGVVVARFNEIVTNLLLQGALETFERYSVKKENITVVSVPGSFEIPVAAQKLGKSGKFDAILCIGAVIRGDTTHYDAVANSAASGVLSAGLSAEIPCIFGVLTCDDMDQALNRAGGKAGNKGAEAALTAIEMASLFQHHLA

SEQ ID NO: 160122 - protein, 425 aa, Oryza sativa
  Clone ID: PAT_MRT4530_59430C.1.pep
MDTGADQAPPPPPPPPVAAASAAADEPRDLRVVREILHSLGLREGDYEEAAVHKLLLFAHRYAGDVLGEAKAYAGPARRESLQADDVRLAIQARGMSSAAPPSREETPVVAHKCNEIPIPKPCVPSGSISLPHYEDMLLNKKHIFVPRVEPTPHQIEETEDDYNDDGSNANVASPNSNYDQDLFGSISLPHYQDMLLNQNHLSVHRVEPAHDQLEKIKDDGSNDNADSSHSNYVQDSSGSVSLQHHQDMSLNQNHLFVHQVELTLDQIEEIKDDGSNDNVDSPNFNCVQDPSRSVSFPHYQVMPLNQNHLSFHQVEPMLDQVEEIKDDSSNDNVASLDSNCIQDPHYQDMLLNQDHLSVRGVEPTLDQVEEIEDDCSSDNVASPDSNYDKEKNDSNKQKPSKKVSQLNTLVAAGKDKVDCSTELS

SEQ ID NO: 160123 - protein, 93 aa, Oryza sativa
  Clone ID: PAT_MRT4530_59431C.1.pep
MNFLSHYGWYTRVAKGAREEELWQLFNRPSGNQESHSAGRGIGSAAEERRRRRRRGEKRSRRGDARGFTQTRRRRRVPPSDDWMTGHGPRPKS

SEQ ID NO: 160124 - protein, 94 aa, Oryza sativa
  unsure (1)..(94): unsure at all Xaa locations
  Clone ID: PAT_MRT4530_59432C.1.pep
GLQACTVLYAARKYVPPTASSQQECSDPATVSAKRGGAASDKNSTSQHDGGGGGGLKDSXGDQLEAQRAAWDAEREQRVALLAAVDKLAGAVCR

SEQ ID NO: 160125 - protein, 707 aa, Oryza sativa
  Clone ID: PAT_MRT4530_59433C.1.pep
MELNTRSLQQSGSSKSKGKIMAKIVEEDEEGEEEEEEEEDSLSSGCHCFLCAIKEPDARLRRASLAAFFRELPYCEDDDAGAGAGAGVDGGRSCGEVVGAVWRAAMAAPDDPELPSLGAIRCMSLLLARALADVEWRRRGRNVYVPYYAAHVIGSYTIRSSAHAELAVAAGAVRPLLAFLGGAMTWVEQRAAARALGHLASYDATFPAVARHAAEAVPLAVRAASTCVGNVYASFVALAPSKRPKYQRDLLTRGLDGGGGGVVADGEERKAEEWASQLQCWSLYFLSCLASRDVSSHATICHDPVFLRELCQMWGGLANGDSPAGVGLLRLLCRSTAGRAAIAACRDALSGLCDLARSSDDWQYMAIDCLLLLLDDRETWHAVADATAARLVDLAELRHLGPRRRLGNAITAALLLDDGDDDGDIVHGRELGMEAKEAIARLREVQVERKGREDAMSRDELLKRRIMAKEKKRQGNDMFWHGEVEKAIELYTEALELCPLSRRRERLVLHSNRAQCRLARRDADAAVGDATRALSLARPAANAHARSLWRRAQAYDMKGMARESLLDCLAFAGAWLNRKDGTAAAAAAASRGGNPKLPYCVARMISKQMGLTGLFSAVATNSSTTKVDRDDRMPHYSDGDGDGGDSDDEEDDDDDDRDESEEEEFAEKGMKLCRPGKGLPIITDEAWRRLARRKKATSRVLSHDHRF

SEQ ID NO: 160126 - protein, 45 aa, Oryza sativa
  Clone ID: PAT_MRT4530_59434C.1.pep
LKNFLNRPKTHTHLRAKNTSTFKTKTEGSVRVYKKLTNGTLFDTI

SEQ ID NO: 160127 - protein, 85 aa, Oryza sativa
  Clone ID: PAT_MRT4530_59435C.1.pep
GAHGWCGPGVVTQHGTCAGTGRTDVARRGRSWNKLQLLFRKPISKELQGTTSNFGIHCSCHAWCFGSGSRPGPLPLHQTTAPKDV

SEQ ID NO: 160128 - protein, 90 aa, Oryza sativa
  Clone ID: PAT_MRT4530_59436C.1.pep
RFKFGLLCPPGILFSQETGLPEETVLRGQKLTLFLGFSNGGLGKPERDQHPCKSLNNSQRRIGGHPFPCFKPGWAGTPPHGPFFGGRRAL

SEQ ID NO: 160129 - protein, 60 aa, Oryza sativa
  Clone ID: PAT_MRT4530_59437C.1.pep
VAVVEENPPSSFLTTNSPPNKAITFQNSPIQWRYPFPFLLERPGFFAGHFTCRPAAAALP

SEQ ID NO: 160130 - protein, 91 aa, Oryza sativa
  unsure (1)..(91): unsure at all Xaa locations
  Clone ID: PAT_MRT4530_59438C.1.pep
MQPPPAPPPRPPEDPPPRPPPRPAGLPPRTPPMPPMTPPRGPPIPAKPPTPPPPMPGTGGRKVLWSLRPPPPPXPPWPSPWLWRPAARACL

SEQ ID NO: 160131 - protein, 85 aa, Oryza sativa
  Clone ID: PAT_MRT4530_59439C.1.pep
MKDLSHNRSIHQLPKMVTNYLSREEIYKKEEENQTRIRTYRVLDPKTQLNTFKWDKHPYQYNEGPEMSVQAKTGAKEAGQSSAEP

SEQ ID NO: 160132 - protein, 482 aa, Oryza sativa
  Clone ID: PAT_MRT4530_5943C.1.pep
MVTAGDHRCGGAAPERAERRGKANGGLRLTPGQRRRRERRPERKKAAARFGMTMTAALRRSASETEARTRSTAMRRCRGRWRRVGRRSGAAAAAERSSAATAEREEHGASTNPTARASGVSAGVLVVLVALLLAYVGMEKRRMLRAKQRFFEQNGGLLLQQQLGSLAASGVAFKIFSEEEVSKATDGFAEARVLGRGGHGVVYRGSLADGSTVAVKRSRVVEEKQLREFSREMLILSQINHRNVVKLLGCCLEVQVPMLVYEYVPNGSLHRYIHGGGAGAGEGLSPADRLRVAAESADALAYMHSSASPPILHGDVKSANILLDAGLTAKVSDFGASRLAPAADEAEVATLVQGTCGYLDPEYLLTCQLTSKSDVYSFAVVLLELLTGRKAFCPPPDSAAGSQDDDDDDDDRSLAFFFLTAAHKGRHREIMDGWVREEVGGEVLDNAAELVMQCLSMAGEERPTMKEVADRLAGMRSRASDS

SEQ ID NO: 160133 - protein, 98 aa, Oryza sativa
  Clone ID: PAT_MRT4530_59440C.1.pep
MTRERPRCRMPVLRHRQAVAGMHPSSGRCGGRCGAAPPRRGTAPVTHVGWRRRCRITSLRETDNRARWNASGGGISISVLQSRNKLGGWDGPDWILWA

SEQ ID NO: 160134 - protein, 80 aa, Oryza sativa
  Clone ID: PAT_MRT4530_59441C.1.pep
FCFLLFPGFAFFFFFFFFFFFFFFFFQTRGRTNRVTFGLREKTTRLGEKKTHGKGARGKKTKRTFPKFLDKNRLGRKKHF

SEQ ID NO: 160135 - protein, 40 aa, Oryza sativa
  Clone ID: PAT_MRT4530_59442C.1.pep
YVQNRSVVGLVLICVKKLRPKIISLFILKNRPKTVPFSFS

SEQ ID NO: 160136 - protein, 101 aa, Oryza sativa
  Clone ID: PAT_MRT4530_59443C.1.pep
QVPTGLSWVPHDALKPPTTPTVGNDAIDATSQPPHTHLPWQRRTHVTTHVWAWTTTDTRHNTLHIHKRRDDTPQGRLSPFSLTRDYRFKGLLATSGSGEPP

SEQ ID NO: 160137 - protein, 71 aa, Oryza sativa
  Clone ID: PAT_MRT4530_59444C.1.pep
CVKFFPDPKHMYNNNNNNNNNNNNNNNNNNNNNNNNNNNNNNNNNNNNNNNTKIAFTRCNARAFFLVIIIY

SEQ ID NO: 160138 - protein, 59 aa, Oryza sativa
  Clone ID: PAT_MRT4530_59445C.1.pep
ELVLQCPMLLLIGYPTRLGDLDLRVLGPISQALLNSASPSGRPSFVPDPLHSPRFARER

SEQ ID NO: 160139 - protein, 122 aa, Oryza sativa
  unsure (1)..(122): unsure at all Xaa locations
  Clone ID: PAT_MRT4530_59446C.1.pep
AIGGLSLNMDVSTTMIVTPGPVFDFLLTNRNVRDIRDIDWPRAKKMLKNLRVKAIHNNMEFKIIGLSDEPCSRQTFPMKVRNGSSEGETVEITVQEYLSPSRXLTMPYLPCLDXGKPKRPNY

SEQ ID NO: 160140 - protein, 275 aa, Oryza sativa
  unsure (1)..(275): unsure at all Xaa locations
  Clone ID: PAT_MRT4530_59447C.1.pep
LILYGKINFAAMNLEKVNRKASKNLLDEGKSTLDRVTFIDHTALHASLYWISFQNRXARQDFDSFYENALLYLXAYTTVESLSESFKLDLAFDLSLAALLGDNIYNFGELLAHPIINSLIGTKVEWVYHMLQAFNTGNLALYQELCRVHNAALSAQPALVQNERKLLEKINILCLMEIIFSRASEDRTIPLSVIAERTKLSISDVEYLLMKSLSVHLIEGIIDEVDSTVHVSWVQPRVLGIPQVKALRERLDAWVGKVHTTLLSVEAETPDLVAA

SEQ ID NO: 160141 - protein, 391 aa, Oryza sativa
  Clone ID: PAT_MRT4530_59448C.1.pep
MALQFVESQREARPELADPYADLADLYQRKLWHQLTLKLDHFLQLPAAQTGDTLIQLYNNFITDFETKINLLKLAHFAVIASRQYPDKDAAISFLEGVITKLRETKDLRINEPILYVKMQIAAINLEKGNQKECKKLLDEGKSTLDSMTDVDPTVHASLYWISSQYHKARQEFAEFYKNALLYLAYTTVESLSESFKLDLAFDLSLAALLGDNIYNFGELLAHPINCKASKINSLIGTKVEWVYHMLQAFNTGNLALYQELCRVHNAALSAQPALVQNERKLLEKINILCLMEIIFSRASEDRTIPLSVIAERTKLSISDVEYLLMKSLSVHLIEGIIDEVDSTVHVSWVQPRVLGIPQVKALRERLDAWVGKVHTTLLSVEAETPDLVAA

SEQ ID NO: 160142 - protein, 106 aa, Oryza sativa
  Clone ID: PAT_MRT4530_59449C.1.pep
MVGLRAYGAETAATAVLLSFSSVSEQEESAGGWGPGVEGGGASAIGDVVNVAVPGWPGYDRSAVDGNGDELGTTGSDGKLAHFGLGGEISGRRQRSAAGLAVVQCG

SEQ ID NO: 160143 - protein, 268 aa, Oryza sativa
  Clone ID: PAT_MRT4530_5944C.1.pep
MAAAAPATTSSAAARPSSSSSSSRQSDAPLRAATVSFPYSPRPAALAAGARASRVSPVVVAAGGGHQRLMGSLTNTQGLRFGVVVARFNEIVTNLLLQGALETFERYSVKKENITIMTTIVTVMHAYKIVLLPLFPMLRVNICFMPIHLFLSYFIVQKYCSEVVSVPGSFEIPVAAQKLGKSGKFDAILCIGAVIRGDTTHYDAVANSAASGVLSAGLSAEIPCIFGVLTCDDMDQALNRAGGKAGNKGAEAALTAIEMASLFQHHLA

SEQ ID NO: 160144 - protein, 403 aa, Oryza sativa
  Clone ID: PAT_MRT4530_59450C.1.pep
RGPWVRVLSLSACPPQEPGQKLYRWLALRPHPDKPASVGAERALKRVPVAWAVPAPKSRKMQYDQKRKDHPVTNGGNGLYTYDKKAHKRARKNAAASAAAAAAAAAAAAEATTRPVGLDTFWTSCNRCRMQYEYLRIYLNHNLLCPNCHHAFMAVETGYPCNGTSSSFSWSTKQQQQNHKHSYSSASRTSGVPGTGHGVYQQENTYETYNNQSFQWNQYSKTNNSAGTNAYSSTASEKPKRKHEESYIYNYSSSGNEFGQERPTSGRGRFSKRRQNINNGYASVDCNGDNKETVAATAGTTVLADVGRVNGTSVEKFRSAVSGRRANVMREIFQLDTRGLLIEKAKAAIREKLQDLNISATRHIAAKGKAERKNHVDHDVKGNGILPHNPSHKFKICNSKGAD

SEQ ID NO: 160145 - protein, 567 aa, Oryza sativa
  Clone ID: PAT_MRT4530_59451C.1.pep
MASKAVPDVVTDKKCDKTMAASSEMSQSQEVISRGGKLGTASSRETLLGDVATSSGVKEQDKDSCSVDESVKLDGNEDAEKSSLRGSVKDSSASAKGSDRASSLTKVSGSTKVSDHAADIVGSSKSSVYRASAGSDVSDESTCSSICSSASKPHKSNDSRWEAIQMVRTKEGSLGLGHFRLLKRLGCGDIGSVYLSELSGTKCYFAMKIMDKASLASRKKLLRAQTEREILQCLDHPFLPTLYTHFETDKFSCLVMEFCPGGDLHTLRQKQPGKFFPEQAAKFYVAEVLLALEYLHMLGIIYRDLKPENVLVREDGHIMLSDFDLSLRCAVSPTLLKSSNPGVDPNQKGNPSYCVQPVCIEPACIQPSCVTTTTCFAPRFFSSKSKKEKKAKTDIASQVRPLPELVAEPTDARSMSFVGTHEYLAPEIIKGEGHGSAVDWWTFGIFLYELLFGKTPFKGSGNRATLFNVVGQSLRFPESPVVSFAAKDLIRGLLIKEPQHRLAYKRGATEIKQHPFFEGVNWALIRCATPPDIPKPVEIPRSVASTSQKATTTAEKGSDNYLEFDFF

SEQ ID NO: 160146 - protein, 97 aa, Oryza sativa
  Clone ID: PAT_MRT4530_59452C.1.pep
MSTCHSSPPSLVDLVSLPPSSPAGGGGGGAGAGVVQVVPLDVSEELLGKFQDTSEFGFEYEKSGLWSPLVVRPEALVLAGGGKRRRRSWRRKVFCCW

SEQ ID NO: 160147 - protein, 68 aa, Oryza sativa
  Clone ID: PAT_MRT4530_59453C.1.pep
LLTHSTSLHLSPLVFCGIVTDNNSHRNSYDHDYPSLIDHIGKLYACSTFRNPGRPTLPTRGAKTWSPI

SEQ ID NO: 160148 - protein, 125 aa, Oryza sativa
  unsure (1)..(125): unsure at all Xaa locations
  Clone ID: PAT_MRT4530_59454C.1.pep
MQIFVTTLTCKTITLEGECCYTIDYVKVIIHDKEGYSLDQERLIFAGTHFEDGRTLSEYNIQKESTLHLVLRLRGGMQIFLXTLTGKTITLEVESSDTIDNVEAKIHDKEGIPPDQEGLIFAGKQ

SEQ ID NO: 160149 - protein, 103 aa, Oryza sativa
  unsure (1)..(103): unsure at all Xaa locations
  Clone ID: PAT_MRT4530_59455C.1.pep
FFFFFSGRTNHYFYYFRRKFQSEFLISHHRHSYQPNYTPRPRPRRAWLATYMVGRAARRGRWRRSWXRSRRCPWGSGPRRRRSRTRHAASALLTRPCVWSTTV

SEQ ID NO: 160150 - protein, 241 aa, Oryza sativa
  Clone ID: PAT_MRT4530_59456C.1.pep
MPADPFTTDLVFSFGESCLCWADLFMGILFCDLATLRAPRFRFIPLPKACSFDPVGKYGRPHMPEFRSMGRVNGVIRLIDMEGFTNEYLAVDEVKLTIWTLSADLSEWEKGPVCTVGDIWASEEFVAMGLPQLRPMCPVLSMVDEDVVCVVMTEVEIEESDVTDFDDEGNKLKFKAQYVLDIDVRRKRVLSITQHHIESMGDLIPDLIACEFTAYSELSKGMQAMVEGNEGEESTKRMKVK

SEQ ID NO: 160151 - protein, 86 aa, Oryza sativa
  Clone ID: PAT_MRT4530_59457C.1.pep
VWGGFLGLKLSVSKNFVGAFSLFSSLLVGWKRVPGLNPLFLQVNSLVGWFPSGPPPLAVKVFLGSSIKVPPLSPVFPIFLNIFFSP

SEQ ID NO: 160152 - protein, 102 aa, Oryza sativa
  unsure (1)..(102): unsure at all Xaa locations
  Clone ID: PAT_MRT4530_59458C.1.pep
LFRPGSITRKIYFPSPNRDSPFFFFKFPSKKMTFWGGFFFKKIPXKINGVSGTELKAVFPKIXFFLFFKKGGLFPQRPFXMPVAKVFKKTPEKNLSLRKLWK

SEQ ID NO: 160153 - protein, 158 aa, Oryza sativa
  unsure (1)..(158): unsure at all Xaa locations
  Clone ID: PAT_MRT4530_59459C.1.pep
WREATSDFPRAPAVKETSSLGVFNRGMEEVGLRXGRGRPAMVEVIAPVGQLDNWSIGSNFGAQAGPSTGHQMNFDDRAIWTKVQRRVGLKAERDTDDSATVLKVMVKRVATPVWLGGRFQPMPMLIHPFTNGLTIHSFVSDTLISMLLGTWQACWSPS

SEQ ID NO: 160154 - protein, 115 aa, Oryza sativa
  unsure (1)..(115): unsure at all Xaa locations
  Clone ID: PAT_MRT4530_5945C.1.pep
RLKGPPPPVPISFFQMAXMEDSEPLLFYADGAVDKSSPCNKVKGWQSFQXVPRPGKSGFTRPRAGHPVVAARAGVPDRTGGSAFSASNSTTMISAERTFNIGFLPPPSARDFILS

SEQ ID NO: 160155 - protein, 426 aa, Oryza sativa
  Clone ID: PAT_MRT4530_59460C.1.pep
MAAAEEGQWVLMATGRSPTNIAVIKYWGKRDEALILPVNDSISVTLDPDHLSATTTVAVSPSFPSDRMWLNGKEISLSGGRFQSCLREIRKRAQDVEDEKKGIRIKKEDWGKLHVHIASFNNFPTAAVFTLGKLMNVKEDHGELSSIARQGSGSACRSIYGGFVKWCMGKNNDGSDSIAVQLADEAHWNDLVIIIAVTVVPERVLKMEEAIKSRNFESFARIISLVEKWNQSEGTPQVAYTFDAGPNAVLIAPNRKNATILLQKLLYYFPPQDNDLSSDDAALLAVLSNAAELGCYAPALRLDSAARRPLSSSLSKDDGAARWTCRAAVDLARVVESAAPEEMPPPLTVDEEVRLECFAKSSGAVLFRLYHGCLFELSLATMEVRMTVKMKPVVALFLVTVLIASHGAMMQWAAEAETCNYPIYKC

SEQ ID NO: 160156 - protein, 153 aa, Oryza sativa
  Clone ID: PAT_MRT4530_59461C.1.pep
MADAHNNGGTELLHDTEVRGELLLPPLSSKRQPWYSRKSTAPLLLAKHSSRTSSSTVNGGGISSGAADSTTLARSTAARHVHLAAPSSFDNDDDSGRLAALSSFDDNDRYLVAPRHGQAERPVRLRHEEHLHARLGDAFEVRGMREFDLRRRR

SEQ ID NO: 160157 - protein, 199 aa, Oryza sativa
  Clone ID: PAT_MRT4530_59462C.1.pep
MAAAEEGQWVLMATGRSPTNIAVIKYWGKRDEALILPVNDSISVTLDPDHLSATTTVAVSPSFPSDRMWLNGKEISLSGGRFQSCLREIRKRAQDVEDEKKGIRIKKEDWGKLHVHIASYNNFPTAAGLASSAAGLVCFVFTLGKLMNVKEDHGELSSIARQGSGSACRSIYGGFGKWCMGKNNDGSDSIAVHLPDELL

SEQ ID NO: 160158 - protein, 481 aa, Oryza sativa
  Clone ID: PAT_MRT4530_59463C.1.pep
MAGTGGSPLLRSPSPVMNTMPTPPSAAVFDVEAASGARRLGIKPAADAGAAFVLESKGKWWHAGFHLTTAIVGPTVLTLPYALRGMGWALGLVALTAVAAVTFYAYYLMSRVLDHCEAHGRRHIRFRELAADVLGSGWVFYLVVTVQTAINAGITIGSILLAADCLQIMYSDLAPNGPLKLYHFIIVVAVVLSLLSQLPSFHSLRYINLGSLLLSFGYTILVSAACIRAGALSDVPEKDYSLSSSNSEKTFNAFLSISILASVFGNGILPEIQATLAPPAAGKMMKALVLCYTVVLFTFYLPAITGYWAFGSQVQSNVLQSLMPDKGPSLAPTWLLGLAVVLVLLQLLAIALVYSQVAYEIMEKSSADAARGRFSRRNVAPRVALRTAYVAACAFVAAMLPFFGDIVGVVGAVGFIPLDFVLPVVMYNMALAPPRRSPVYLANVAIMVVFTGVGLIGAVASVRKLVLDAGQFKLFSGNVVD

SEQ ID NO: 160159 - protein, 87 aa, Oryza sativa
  unsure (1)..(87): unsure at all Xaa locations
  Clone ID: PAT_MRT4530_59464C.1.pep
RVGESEVWSISRLAGHEQRKRGQQPSSINGHMARGPTAXPRPGXFGPSQAQHGSTREXVVPMLARPDSCAVPEVAAATATKEESHGQ

SEQ ID NO: 160160 - protein, 70 aa, Oryza sativa
  unsure (1)..(70): unsure at all Xaa locations
  Clone ID: PAT_MRT4530_59465C.1.pep
RARHSATTQYLVDXAHNIAQHPKICAMVSTPENWQXHSGIQXMGNGPKTSREKRISILQNGNNSCTINNP

SEQ ID NO: 160161 - protein, 70 aa, Oryza sativa
  Clone ID: PAT_MRT4530_59466C.1.pep
CCSLRSQGEEAAAAAAAAARDEIVESGTPPPSFASHEKEGRKMSSVSEAGHQTGMLVCFTCALQYIAFPN

SEQ ID NO: 160162 - protein, 177 aa, Oryza sativa
  Clone ID: PAT_MRT4530_59467C.1.pep
KPSRHRHTRAHPPLDLRSRRGRRLLRAHATTTPPLRAPHRRPPSATSPAAAPPTGALRLFGEMPVADRNAVSWTAAIGVLMRAGRVCRMLQCHDFCVLQQRSCPRCFYALFEGMPRKNVISWIAMISGGQMWATGRMKPTPSTLACANVPDILLGLQMAKLPSLVIGSCLFGRSSCE

SEQ ID NO: 160163 - protein, 331 aa, Oryza sativa
  Clone ID: PAT_MRT4530_59468C.1.pep
MERRGSLYGVAAAAAVVVVVAMAAAAGGEAARLSPEHYRSTCPGVESVVRSVVARKVKETFVTVPATLRLFFHDCFVEGCDASVMIASRGNDAEKDSPDNLSLAGDGFDTVVRAKAAVEKKCPGVVSCADILAIAARDVVAMSSGPRWTVELGRLDGLVSKSGGVAGKLPGPDMRVKDLAAIFAKNNLTVLDMVALSGAHTVGFAHCTRFAGRLYGRVGGGVDPSYDPAYARQLMAACPRDVAPTIAVNMDPITPAAFDNAYYANLAGGLGLFTSDQELYTDAASRPAVTGFAKNQTLFFEAFKEAMVKLGRVGVKSGKHGEIRRDCTAFN

SEQ ID NO: 160164 - protein, 87 aa, Oryza sativa
  unsure (1)..(87): unsure at all Xaa locations
  Clone ID: PAT_MRT4530_59469C.1.pep
SAAWHQTTGGGGDHXSTLAATPGSKAITDAAADTDTTEDVPGDDPPATRRRTPCTAPRSTRKEGHRSYHVHTYERRRLVTTDTKLNQ

SEQ ID NO: 160165 - protein, 105 aa, Oryza sativa
  Clone ID: PAT_MRT4530_5946C.1.pep
HVNAIPYRSHLICNQCRPQLSCSIRMQTTIFPVVSYTGRLITPRYRVVFGTPYAVVGKAIRCARSLSIRYYDRNVRCARARQHARSHRSVRRNLLNLLVLFEYSS

SEQ ID NO: 160166 - protein, 63 aa, Oryza sativa
  unsure (1)..(63): unsure at all Xaa locations
  Clone ID: PAT_MRT4530_59470C.1.pep
MDSEPSSQNPADMTAFVQNLLTQXDEMGTKIDELEQSVNDLKAEMGTDVPTKKADEAKPADST

SEQ ID NO: 160167 - protein, 112 aa, Oryza sativa
  Clone ID: PAT_MRT4530_59471C.1.pep
MAAPLIAGLAVAAAALASRYSIQAWHAYKARPIVPRMRKFYEGGFQPEMARREAGLILGVRENVHPEKVKEAHKKVMVANHPDAGGSHYLASKINEAKDVLLGKTKGGGSVF

SEQ ID NO: 160168 - protein, 802 aa, Oryza sativa
  Clone ID: PAT_MRT4530_59472C.1.pep
MSASENQAAEASKGDDEKMDPPKMKIRIRLPPRKRLSNGLLKADMDGPDDRNNAQSSGVPVQTKSTIPSKQLTIPAAQCYASSISTSILWNEGNNNASSQTLPNEPNCDTSSDKLPEEASDSIPSKKLIIKAAQHYTSSISTGGLCNEANNNTSSKTLTNESNCDTSSDKLPEETIDNISSKVLTITAAQHQIDSISTGELCNEANNNTSRKILTITAAQHQIDSISTGELCNEANNNTSSKILPNEPNCDISSDKQPEEANDTIPSKNLMITAGVCMDDVSNYSAKEGLCEDANDTIPSTNLMITAGVWGHDVSNYSAKEGLCEEANDIIPRKNLTIVDGVWEDDVSNYSTKEGLCEEANDTIPSKNLIITAGVWGDNVSNYSAKEGLCEETNDIIPRKNLTITAGVWGNDVSNYSAKEGLCEEANGNIPSNAHPATIKELPAKPLESTPSKNLTTIAMLGEEENNNPLRLFHETDINIPSKVVLPKKSKNNQRRNLVTTAVKCEEANNDPLSRRFSEDANRNIPTRNLSDKTKNNAQSNRPTNPDRKNNPQKKLSTTAVHAAPARKNTSEIKMANSEMKPSTSFGQAAEQGINLANLKAIKQYQEFEEKVKRTVYLDYFSHQATESVIRTALNQFGTVREINFVVNYTIPFSIPQSALVIMETEKDAVAVVNMLNEFPFMMSGMPRPVRATRATAEMFNDRPRRPGNKLEFRWVGPSDADYHIVKKLKLMSRRHELDNLALVKHELEEEHFLAKHQEEILNCNQRKLEVMDSIMLTGKFTHLQHIYSVKVDEVFCNKWLV

SEQ ID NO: 160169 - protein, 544 aa, Oryza sativa
  Clone ID: PAT_MRT4530_59473C.1.pep
MRSAARPLAALRRAPPRPILLLLGRLFCASPQTGFGGGDPGPADADTDAGVDVDARLVGSLCRVLSDFRGPRHDLPAALRGFAPRLTPRDAAAGLRRCRHLPLPSLRFFLFAGELPGFSHHPDSLLVLANSLAGARLFPLLRSLLSDLPPSALSRGLFPLLFRAYSRARLPEDAIRAFSSMAGFGFPPTIADFHSLLFALSRNGLVEYGERFFRESTAQFDVSAKAYTILISGWAVVKKPENARSLFDEMVKRGVELDVHVYNALIDALCRGGDITSAQEQLSNMQKSHGLVPNAATYGPFLHAACASKDVRAALRVLDRMHTHALTPNVFTYNAVIRLLCDLGEINEAYNILDEITTQGEKPDVWSYNTLLNAHCKLKEVNKALRLISRMDKELCPPDRHSYNMLLKMLISVGRFDTAIEVWDGMEKRGFHPGAATYAVMIHGLASKKGRAEDACSYFVRMVDEGIPPYQATCEVLRDRLLMLGLRDQLGVLTDRMRRSTSYTIQEMSTIMCRNQYGLRALIAEPGRYDSICTKPPNPDAIKV

SEQ ID NO: 160170 - protein, 527 aa, Oryza sativa
  unsure (1)..(527): unsure at all Xaa locations
  Clone ID: PAT_MRT4530_59474C.1.pep
MDHNTDPPPTTMVDAAAALLLEPKLEGYDDDGGGEPLQPAPFVSPLDQLMQPPRPLEALLQGPHLPPFLSKTYDLVCEPELDXVISWGPRRLQRRRPGHLRLRAEPHVSPDLVLQRLHQRNNVYRLVCPLSTYXKKKIGHDEIPGHSKHWLMKIVRRRYSPTQQSGLQHGSSVESGLDPELNTLRREKSALLQEVTRLKQEHLQTIEQMSTLNQRLESAEDRQKQMVSFLAKLLQNPTFLRQLKMHRQQKEIDSTRVKRKFLKHVPHGNIDSGESSSQHTGESNLDFSPTSLDLPATHSDILDLQNFLLEDGDLNLAMLPENIGLDGIEAPDDIGALVQGFDTQEELELGSGVELLEIPPASGPRGQDPTIGRSKGKNVLSPGLDATSSEADCLGSFSDNMGMLSDSMLQTAGKLMDADDDERIWGVDASSALQSSCSGTSQQAYGSLVSDPYLMEMANKPEKFWELDFQALDDGDLQLDNPEKVLDTGVVAQAQALELGGLTQATELKKACFFLRLITQGTNQTGP

SEQ ID NO: 160171 - protein, 65 aa, Oryza sativa
  Clone ID: PAT_MRT4530_59475C.1.pep
SQSDVFSSPHPTYLLSTSQADKGGGGSIGRSRADPPMAAIGGWKDREGIGNDDGHRIWSDDGSGR

SEQ ID NO: 160172 - protein, 66 aa, Oryza sativa
  unsure (1)..(66): unsure at all Xaa locations
  Clone ID: PAT_MRT4530_59476C.1.pep
TLDGPTMTMQITSVINPGXKKIVLGEGIPIPKDPSNKGNLRVKLYIKFPARITPDQKSGVNRLLGQ

SEQ ID NO: 160173 - protein, 125 aa, Oryza sativa
  Clone ID: PAT_MRT4530_59477C.1.pep
MASKFGLAGGIPERRVRPIWDAVDSRQYKAALKLCTALLAKHPTSPYVLALKGLIWERMGKPDEALSVCLNAKEQLYSDNIFHFDDLTLSTLQIVFQRLERLDLATSCYEYACTKYPNNLELMMG

SEQ ID NO: 160174 - protein, 56 aa, Oryza sativa
  Clone ID: PAT_MRT4530_59478C.1.pep
GSLFPKGVLKGVFFFSPPKERGPLGWEKKKKKKKKKKKKKKKKKKKKKKQKKKKNQ

SEQ ID NO: 160175 - protein, 99 aa, Oryza sativa
  Clone ID: PAT_MRT4530_59479C.1.pep
HASVHASGRLLRSSIACANKPTRDLDRPGRAKQIRGGEPAHLEEALDTTALTFVNTTSNSRCAVSSHDHIKAMRTRHPWPASNCNAGPRIGMCLTETLD

SEQ ID NO: 160176 - protein, 64 aa, Oryza sativa
  Clone ID: PAT_MRT4530_5947C.1.pep
TAGSASFYPPSLPSTPLPSPRPASGEESRRRIRRPRRRGGGSRRRRRSSEPPPLKEGRLSIEDR

SEQ ID NO: 160177 - protein, 75 aa, Oryza sativa
  Clone ID: PAT_MRT4530_59480C.1.pep
PRVFPLFRPRVRKKKKKKKKKKKKKKKKKKKKKKKKKKKKKKKKKKKKKRGGRLKEPNLTNPGMEIKNFFMGQPK

SEQ ID NO: 160178 - protein, 34 aa, Oryza sativa
  Clone ID: PAT_MRT4530_59481C.1.pep
LCIQKKKKKKKEKIKKKKKKKKKKKKTKKKKNNN

SEQ ID NO: 160179 - protein, 129 aa, Oryza sativa
  Clone ID: PAT_MRT4530_59482C.1.pep
MTSSMRVSLGAEDDDDDMTAASETCNVRLTVGDPKTSDGEDNKGGEVGGSNGGNQTESAGGVAWCGQGGGGELVAGVRVSAFERKRPRSGGRAPFGGATVTTTVTAKVEEVGLVVREGRAVDAAGSDRG

SEQ ID NO: 160180 - protein, 329 aa, Oryza sativa
  unsure (1)..(329): unsure at all Xaa locations
  Clone ID: PAT_MRT4530_59483C.1.pep
PSLNSIVLASPIPPQDPXTLPPPPPSSPLLSLHPQPPPHTXAAGPVPPPQPLPPSMSGRAGSSPPVSPSSPPRSTPPPPSXRSPSPPPPPXPPPHAAPPPPPPPASSPSTAPRCRPRRARASPARRAAAPRTPPPRASRTPPAPASRRTPPPPAPRGARAARSPPAAMVSPPPPPPLSPPPXPARRGRPRTPRAPAPAPRAGRRCPERPTRRPPWRSGPRRSPCCAPPVRLPTPSPPPPLIGKHLRGPPAAPSLIPNPRQIRRHLIVFFSSSQIPPTDLSSLISHDNPPNANPPPPTLPTTLLHTRSSGASSPSHLRRPPPPTIGNKPP

SEQ ID NO: 160181 - protein, 177 aa, Oryza sativa
  unsure (1)..(177): unsure at all Xaa locations
  Clone ID: PAT_MRT4530_59484C.1.pep
YISSDMNNSFDIWRLSSKWFCERSDRPXPQSDRPTLCRLRFRVVSLDIRDCFMVMASRWILYVTRCLGRVFTVMDRKSAWREVIKSSSTLRVLRXCFTGFRRSNRLHTGGXTGGIAAVKPAGIRRSDRRRQESAAGDLGGSTGVRSXVRPTFIKRSDRRIHFGHTAIXEFEGNFYFR

SEQ ID NO: 160182 - protein, 480 aa, Oryza sativa
  unsure (1)..(480): unsure at all Xaa locations
  Clone ID: PAT_MRT4530_59485C.1.pep
MDDATTTKRTRPVIRFNDLPTDILIGIISRLPIKEAARTSILSSHWKKIWCSHVNLEFSFYSMSPRLASTSHDARLRMKMFIERVSQVFAQHSGLSVQKIAIQGKLDNEHADHINRWLSFVSATKTKDLTFDFKSRYPREGPYDFPFKFFGAMDSSYLLSMRLSAVSLNPPVDFKAFLNLKRLKLEHTNITDENMQILISNCNALEFLGIVDCGKLTRLSTSHLWNQLKHLHVESCHLLKEIELNLGLTKLGYKGTLIPLSPPGPLLLTNVCMKLQHARSSLGYIFTNLPSTLLHLETLSLQXFRTREGYFARKSYQIYVSKAFEVAIETPSAPLLQKFELHMWMPLHHQRYREEAHGELRSLPPQPHAHLRLVHISGFIGMKDQLELSLHILRNSAMIRAMKVDPKPLFALPCISMLSPLEGFQYLDGYEVAIEYLCREDHNNVVDVSEIRREEVETLSVCELVYPDCVRLTRKANSSS

SEQ ID NO: 160183 - protein, 337 aa, Oryza sativa
  unsure (1)..(337): unsure at all Xaa locations
  Clone ID: PAT_MRT4530_59486C.1.pep
MDDATTTKRKRPVIRFNDLPTDILIGIISRLPIKEAARTSILSSHWKKIWCSHVNLEFSFYSMSPRLASTSHDARLRMKMFIERVSQVFAQHSGLSVPRVDPRVXVIRFNDLPTDILIGIISRLPIKEAARTSILSSHWKKIWCSHVNLEFSFYSMSPRLASTSHDARLRMKMFIERVSQVFAQHSGLSVQKIAIQXLISNCNALEFLGIVDCGKLTRLSTSHLWNQLKHLHVESCHLLKEIELNLGLTKLGYKGTLIPLSPPGPLLLTNVCMKLQHARSSLGYIFTNLPSTLLHLETLSLQXFRTREGYFARKSYQIYVSKAFEVAIETPCDGKED

SEQ ID NO: 160184 - protein, 120 aa, Oryza sativa
  Clone ID: PAT_MRT4530_59487C.1.pep
MEVILVISLVLLLVLGAIFVIPKSNNNGKGKEIQSPNGGMVYDVTSYVEEHPGGDEILNNAGATSKGNYALILPVNEFPFFLVYSNGIVQWFPVFEYWSCIFVIIETIYAQRHTPINPYP

SEQ ID NO: 160185 - protein, 185 aa, Oryza sativa
  Clone ID: PAT_MRT4530_59488C.1.pep
IRRTVKYSLRIYIYIYIYIYIYIYIYIYIYIYIYIYIYIYIYIYIYIYIYIYIYIYIYIYIYIYIYIYIYIYIYIYIYIYIYIYIYIYIYIYIYIYIYIYIYRKMLLYSREYVNQIIYIYIYIYIYIYIYIYIYIYIYVQTNSTVNFILTRHIYNNNKIKIYFTRYNARAFFRRRPEGGAGRGGR

SEQ ID NO: 160186 - protein, 596 aa, Oryza sativa
  unsure (1)..(596): unsure at all Xaa locations
  Clone ID: PAT_MRT4530_59489C.1.pep
DDWSFLLEVLCHLGFGRRWCNLLCLLLSTSSTRVLVNGEPGQDIAHCRGLRQGDPLSPILFIXVMDALNLVVACADRGNLLEPLTXPATAHQVSLYADDVVMFLCPTSGDLSLIKQILEFFGXISGLRTNMIKSSCTPIHCLEDDLEVISNELSCEVASFPCSYLGLPLTIRKSTKTDLLPLVDKVADNLPSWKASLMNRVGQLITVRXVLLAIPIYAMMALDLPKWVVKAIDKRCRGFLWKGRENTNGGNCLISWDRVCRPLSYGGPGIPNLENMGWALRLRWLLFQKTDFARPWGGLSIHVXNVRSLFNVAVKTIVGNGENTXIWSDRWLQGKTVAELAPNLFALISKSTSKQRTVAQALENRRWAADINGGYLSGHMAIYKYLTIWVLVEEVVLLQDVQDQHVWKLTADGXYTCKSIYEAYFLGSIKFAPWKNIWKSWAPLRCKFFIWLAVNKRCWTADRLAKRGLQHPTACPFCDQSEESVQHILIXVFSRQVWMALFLKLGFSDAVPQPSADHFFRWXSQATKDRPKDVRKWLNSLVILVAWEIWKHRNDCVFNGXNPSIATVLQVVENEGNLWCLAGAPALQKFLNRSAN

SEQ ID NO: 160187 - protein, 90 aa, Oryza sativa
  Clone ID: PAT_MRT4530_5948C.1.pep
AWEASRSGVLSRSRTSASLNVAFKGEGWILGGACRCYRLHHGCSWQWDFDVDRESSAPAMVFGELGCTRFISICSNLFQICSSSIGLISS

SEQ ID NO: 160188 - protein, 99 aa, Oryza sativa
  Clone ID: PAT_MRT4530_59490C.1.pep
FFSHQRRKWSMGAMMVAAPAAADDPRKASPSSSSPSQPPTSSSPLLARPLPSFHYSRASKRRDSGQRAERRLKQRWRGLEDDNGQQQGRHESEDDDGQQ

SEQ ID NO: 160189 - protein, 357 aa, Oryza sativa
  unsure (1)..(357): unsure at all Xaa locations
  Clone ID: PAT_MRT4530_59491C.1.pep
MEARARGREAGEGGWGGGGGGLPLAVRELVAGGVAGGVAKTAVAPLERVKILFQARSPLTFECFFWNFQTRRAEFHGSGLIGSFRTISRTEGLLGFYRGNGASVARIVPYAALHYMAYEEYRRWIILGFPNVEQGPILDLVAGSIAGGTAVICTYPLDLVRTKLAYQVKGAVKLSLREYKPSEXVYKGILDCVKTIYRQNGLRGLYRGMAPSLYGIFPYSGLKFYFYETMKTYVPEEHRKDIIAKLACGSVAGLLGQTITYPLDVVRRQMQVQAFSSSNLEKGKGTFGSIAMIAKHQGWRQLFSGLSINYLKVVPSVAIGFTVYDSMKVWLKVPSREDTAIAALTEERSNAAPAHSS

SEQ ID NO: 160190 - protein, 120 aa, Oryza sativa
  Clone ID: PAT_MRT4530_59492C.1.pep
MENDCRVGLRERRRQEWCGSKAARWILWSPDNPGRRYFKCADARSGGCDFFAWVDGRSVESELDLARKELATSRNAVGEKEAIVGMMKDRNNRLELEIFVMLLVVLGLVVVVFTMLMGRK

SEQ ID NO: 160191 - protein, 459 aa, Oryza sativa
  Clone ID: PAT_MRT4530_59493C.1.pep
MSMALKMNREETFSAAVESLIMSRGCIVLDLLDLSSLVGLKIRQFDIVGMMAKRCTDILLAPRPRKTKRIDINSCRSRFLLPYIPDEVMFDVLLRLPSKSLMRFKSVCKAWHAMISSPIFINAHLEWSKLKPSSLLMAPGFYQKQKNGQNIAFLMGLYKYQGGNNNVVHLHDFPRDFPQVLDTWTRPVHCDGLLLVSNMSKKMIIYNPSTREIVSLPKGSRNLHKGTGIGFGFDPRSSKYKVARVFYQRDDKTSMLVCKFEVLTLGTINVWRQTEDPPYPIGKSTPVHVKGAIYWMVSRTSLCPDPPNTLVRFCLTDEKFSLFPCPCNVKPSCLTGLGDELYCGYFFSQPLQLEIWGCSVVGQKPEWTRRCALQIPPDVIKRPVASPLVVFHGKMLLLALKKVYKYDIQACKLEKIPLVVEDFMCYDRENNMYQTYSKKEVMDFHLFNYVESLVSIREF

SEQ ID NO: 160192 - protein, 796 aa, Oryza sativa
  Clone ID: PAT_MRT4530_59494C.1.pep
MACTAPREEDLLMEEDEHRPPLNRALLHRSATNNTSQVAMVGSNPCPIESLDYEIIENDLFDQNWRSRGKADQVRYVVLKWTFCFAIGIITGIAGFVINLAVENVAGLKHTAVSALMESSSYWTAFWLFAGTNLALLLFASSITAFVSPAAGGSGIPEVKAYLNGVDAPNIFSLRTLAVKIIGNIAAVSSSLHVGKAGPMVHTGACIAAIFGQGGSRKYGLTCRWLRYFKNDRDRRDLVTIGAGAGVTAAFRAPVGGVLFALESLSSWWRSALIWRSFFTTAVVAVVLRMFIELCASGKCGLFGKGGLIMYDVSTKFDDLMTYHLKDIPIVVLIGVIGAILGALYNFLMMKVLRVYSVINERGNAHKLLLAAVVSILTSCCVFGLPWLAPCRPCPTAGAPSPPNGTCHSLNRFRRFHCPAGHYNDLASLFLNINDDAIRNLYSTGTNDVYHPGSMLAFFVASYALGVLSYGVVAPSGLFVPIILTGATYGRLVAMLLGGRSGLDHGLVAILGSASFLGGTLRMTVSVCVIILELTNNLLLLPLVMLVLLISKTVADSFNSSIYDLILNLKGLPHLDGHAEPYMRQLTVGDVVAGPLRSFNGVEKVGHIVHTLRTTGHHAFPVVDEPPFSPAPVLYGLVLRAHLLVLLKKREFLTAPVRCPKDYMAGRFEAQDFDKRGSGKQDTIADVELSPEEMEMYVDLHPFTNTSPYTVVETMSLAKALVLFREVGLRHLLVVPKSCDRSPVVGILTRHDFMPEHILGLHPVLVGSRWKRLRWQKGAVAKKFRSLLDWLANDSG

SEQ ID NO: 160193 - protein, 34 aa, Oryza sativa
  Clone ID: PAT_MRT4530_59495C.1.pep
ITTGSIIAIQERDTHMNHANLALIHNRICHVANP

SEQ ID NO: 160194 - protein, 153 aa, Oryza sativa
  Clone ID: PAT_MRT4530_59496C.1.pep
ALRSGTRVRPRVRPRVRPRLRIHSRSQLFHSHFCLISLASNELTARESDAVADDGEVAVAEEEEGDGDDGEEEEDADVAPGAVAPDSAQDVDDDGAARAHEEARAAVARVTGALLRRREEVARRTAVVIMISSSPAPARLTAPLVACDTTWST

SEQ ID NO: 160195 - protein, 44 aa, Oryza sativa
  unsure (1)..(44): unsure at all Xaa locations
  Clone ID: PAT_MRT4530_59497C.1.pep
XXLTDESAYXTLVXLTPWEEAXMKXQKIXKGFILYXGSIKPIYL

SEQ ID NO: 160196 - protein, 70 aa, Oryza sativa
  unsure (1)..(70): unsure at all Xaa locations
  Clone ID: PAT_MRT4530_59498C.1.pep
NFLNERTLKGTFFGTYEPRTDTXNVVELYMKKELDVEKFITHRVPFWEINTAFYLMHTGEGIRCIIRMEN

SEQ ID NO: 160197 - protein, 410 aa, Oryza sativa
  Clone ID: PAT_MRT4530_59499C.1.pep
MSRAMAASRRVSVFVAALVCCSLVRLSRCGGGGGGQRAQNYTSMFSFGDSLTDTGNLVVSSPLSFSIVGKYPYGMTYFHRPTGRCSDGRLVVDFLAQAFGLPLLQPYLSRGEDVTRGVNFAVGGATAMDPPFFEEIGASDKLWTNLSLSVQLGWFEQLKPSLCSSPKDCKEFFSKSLFLVGEIGGNDYNYAFFKGKSLDDAKSYVPTVAGAVADATERLIKARPNTETIITECTSILSSCNGGFFFNFQRLIKAGAVHLVVPGNLPIGCSSAYLTLHPSSNRSDYDSTGCLKTYNDFAQHHNAVLQDKLRLLRRSYPEARIMYADYYGAAMSFAQNPKQFGFRHGALRTCCGGGGPYNFNPKASCGVRGSSVCTDPSAYANWDGVHLTEAGYHAIANSILNGPYTSPRLL

SEQ ID NO: 160198 - protein, 95 aa, Oryza sativa
  Clone ID: PAT_MRT4530_5949C.1.pep
MAEKTLREFAAPSAENVPVGPQINLGDTDFDLKSSLITMAQASLFCGKPNKDASAHLQQFQEIRSTYTVKGVSPDAVRIRLFPFSLLGKVNAGIS

SEQ ID NO: 160199 - protein, 107 aa, Oryza sativa
  Clone ID: PAT_MRT4530_594C.1.pep
RVLEGEQCGGAGGIYGRSEGVIAEGSGEQKRKVVKKSKVEKDRELFELAQAYHKVVAERDAAIAVKEKLESLCREFQRQNKMLKEECPRVSTEGQDMRMELSDQFNM

SEQ ID NO: 160200 - protein, 112 aa, Oryza sativa
  unsure (1)..(112): unsure at all Xaa locations
  Clone ID: PAT_MRT4530_59500C.1.pep
KSNMIIVXIHFLLSRSPTKPSLALPLYFSTVRPLPALFIVLEILKSIMIIIGVYFLFFFMTXLLNSLSIVLAFNRHWIIFGVLLIVFRCLINRYNCFYSFSLEHLKIGPYSF

SEQ ID NO: 160201 - protein, 950 aa, Oryza sativa
  Clone ID: PAT_MRT4530_59501C.1.pep
MEAGARLAFVMPLVVVLLLMIFSLGVRGVDVVVDGGGGGAAAARRRRVEVGVILDRRTWLGNISWACMELAVEDFYADEERASYTTALRLHLRDTRLDAVDAASAGVDLLKNVHVQAIVGPQTSAQAKFLAELGEKSSVPVVSFSANSPCRTASQTPYFIRTAWNDSSQAEAIASLVQRFNWRDVIPVIEDDDSNTRFIPDLVDALRNAEIRVTHRCKIHPSAGADDIKKVVLSLKEKWTSVFVVRMSYQLALSFFKHAKDEGMMGQGFVWIAAYGLTDIFDVVGSPAFDVMQGVIGMKPYVNDTKQLQNFRQRWRKMYKSENPGTTLSEPTLSGLYAYDTVWALALAAEKAGYVNSDFLLSEKNNGSTDFDRINTSNAAKKLQSTLLNIDFQGMSGKFQFQDMHLLSMTYEIINIVGEEQRVVGFWTPEFNISRGLNTKADVNEIIWPGGETTVPRGWLFPMNKTLKIGVPAKPGFSGFIKKEKYNFTGLCIEVFEEVLNGLPYKIPHDYVEFGNGKGESNGTYDELIYKVYQNDFDAAVGDITILANRSLYVDFTLPYTESGVRMLVPVQDQRQKTAWTFLQPLTADLWLGTAAFFVLTGFVVWFIEHRTNEDFRGPPVNQIGSVFYFAFSTLVFAHRQKIVNNLSRVLLVIWLFVVLILQRSYTASLSSILTVEQLQPTVTNLDEVIRKGANVGYLNDSFMPELLKRLKIDESKLIALDSPDEYNEALSTGRVAVVVDEIPYLKVFLSKYCHNYTMVGPTYKFDGFGFAFPLGSPLTAEISRGILNFTSSNRMAQLERELYNNRTCPDKDDSQTSSSLTLRSFLGLFIITGASSLLALFLHVVITLYNHRHDLSSASSSQSSWCGWFAILLKIFHEGDRPNAPQLDEPAVSNANTTADTPWSTPDHHIIENVDSGSDVESVREEDREDFVQGPDPPSFAYMHSERGQ

SEQ ID NO: 160202 - protein, 95 aa, Oryza sativa
  unsure (1)..(95): unsure at all Xaa locations
  Clone ID: PAT_MRT4530_59502C.1.pep
RDPPRPPSRGPPLLPRQPWRPTWRRRSPARSAARTRCGSASPSPLFSVNLEGGPVPNSPYSESYYNSLAVVLQRRDWENPXVXXLNRLAXHPPXA

SEQ ID NO: 160203 - protein, 77 aa, Oryza sativa
  Clone ID: PAT_MRT4530_59503C.1.pep
NRLFCNAALYVYFGVLSLISFDQMWQWAGAERLSPFTLMILLFYASPQDSLRISNDVNIYRWIALNPFLLVLYSIKL

SEQ ID NO: 160204 - protein, 36 aa, Oryza sativa
  Clone ID: PAT_MRT4530_59504C.1.pep
MGVPGKIAQEQSDRDHHKNTLEKWEKNSQNHNSVER

SEQ ID NO: 160205 - protein, 229 aa, Oryza sativa
  Clone ID: PAT_MRT4530_59505C.1.pep
MAEAGNGVFMQSLHETWNLETIEADIGRNDRKVNGLTGKNRYHDVHGRACVSGAQGFATSYQAVEVAETMAAVPRANSRGAPSPTSPVLALSPSTATISSSPLCRETGGARWRGESEKTTAAAATATTPRLRRRRCSSSRWCTSSCGGGTWTGRPVGVQRRAQPPEHAAVTVTTTYGRAGRHPATVAEAARLMMMGGGGGVVVVVNLLFGAVSPSATISSSSGCRYSSA

SEQ ID NO: 160206 - protein, 62 aa, Oryza sativa
  Clone ID: PAT_MRT4530_59506C.1.pep
PYNYSSCFPYRTPSTFFFCTIQNSFSDCKLRLKNHNTTLRCFDMQFGELMSLKKKKKKPPPS

SEQ ID NO: 160207 - protein, 54 aa, Oryza sativa
  Clone ID: PAT_MRT4530_59507C.1.pep
MDGRRWRLRHHDLLILASCNNYCPLDHGSCLAGRPPAAAATTGRRNICNGDHRV

SEQ ID NO: 160208 - protein, 104 aa, Oryza sativa
  Clone ID: PAT_MRT4530_59508C.1.pep
MDWILSPFPLATARRQAVASTPPVETCGGARGGGGTNNLAGERGGVGEVYSGGGTAEVGVEIKKERQEQDCLSASAFEVQCFREMLPSTATLSAYRIVHLSMHS

SEQ ID NO: 160209 - protein, 373 aa, Oryza sativa
  Clone ID: PAT_MRT4530_59509C.1.pep
MQPSQRSRRPPRLSRRNAIRQSAYVARPASQLSPPSESDQPAFWYSTEESVLEERVVEDEVGDHAEAGGAEAAALVVEEASTSSSSAVSVHAAMVIRRSILNWSKLDLIGAGSSGRVYKAVAEDGFVFAVKEASLIGPESYTKQTACQLKQEILLLSRLEHKNIVQYFGAKMGETVLCIFLEFVSEDKSLEAEKILYRKCILDGSRGVSREAVASCFVLRSGGGWICIVRFIGCFDELNHYLFFVNVQMANTLPYHLLITAIRVVRGNPYGYSADIWSLGCTVLEMLTQRIPYPDDNWFYQVSVFYQIGRGQLPPVPGSISPVSRDFIHKCLQVNPDDRPSADELLNHPFVANPPIFSRSARSAAAPRERGGG

SEQ ID NO: 160210 - protein, 84 aa, Oryza sativa
  unsure (1)..(84): unsure at all Xaa locations
  Clone ID: PAT_MRT4530_5950C.1.pep
KKGGKSPLSFLXFFFFFFFFFFFFFFFFFFFQVWGFFVGLCKTHLFFQVGRCLRNAVIIDGRQTLSEADGSYHHFDGPFGGQXR

SEQ ID NO: 160211 - protein, 484 aa, Oryza sativa
  Clone ID: PAT_MRT4530_59510C.1.pep
MPSTCIVGYHEGFGCDSAHTDTGIMAADKSPIDEALLHRQEDLRDEVDYDMEHLLLPTGSNMEQHLLLPTGSNMEQHLLLPTGGGSFCMTGASFGRSCLNLSNIISGIGMLSVPYALSQGGWLSLTLFTMVGAICFYTGNLIDRCMRVDRCVRSYPDIGYLAFGSYGRMAIGLVIYVELYLVAISFLILEGDNLDKLLPGIVVEILGYQVHGKQLFVLAAAAVILPTTWLKNLSMLAYVSAVGLVSSVALTASLVWAGVAGKGLHMEGSSLLNLSELPTALSLYFVCFAGHGVFPTVYSSMNSKKDFPKVLLISLVLCSLNYAVTAVLGYLIYGEDVQAQVTLSLPTGKLYTRIAILTTLITPLAKYALVIQPVTIAIEEKLSATTDAEINRLTRVLTSTAVVISTVVLACTVPFFGYLISFIGSSLNVTVAVLFPCLSYLKIYMSRGGVGCFEMAAIIGILVIGVCVAIVGTYTSLQQIIGTF

SEQ ID NO: 160212 - protein, 989 aa, Oryza sativa
  Clone ID: PAT_MRT4530_59511C.1.pep
MTDTTDDIAEGISFQAFEDDCRLLGSLLHDVLLRELGPRFIHLLERITILAQSAVNMRSAGVEDTAVVVEKQLGAELAAMSLEDSLCLARAFSHHLNLMTIADTYHRVRKARNFADLSKSCDDTFAKLIQSGVSPEELYDTVCKQHLLEFNERADLSLEDKEILIEDLVREITAIWQTDELRRHKPTPVDEARAGLHIVEQSLWKAIPHYLRRVSNALKKNTGKPLPLTCTPIKFGSWMGGDRDGNPNVTAKVTRDVSILSQWMAIDLYIRELDTLSFELSINRCSEKLANLANDILLKESASEDQKTNTWNQTGPQNNLKLQHSLALPAQLPSGADLPSCTECNDGESQIRMSKLPGNPKHKRSLEAQTVHKNALAQLFQYALHFFSTNIEMTWSEKCYGEAMASPLALNITEKREDSPLPSPSHRPMGRTPSGGQLRKMFTESQIGRSSFRKLLEPSISERPGSTPYRVVLGDVKEKQSCGSSVLADGRLADLIRRVATFGMVLMKLDVRQESGRHTETLDAITSYLDLGVYSEWDEQKKLDFLTRELKGKRPLVPPYIQVTADVQEVLDTFRVAAELGSDALGAYVISMASNASDVLAVELLQKDARLTVSGDLGRPCPGGTLRVVPLFETVNDLREAGPAIRKLLSIDWYRDHIIKNHNGHQEVMVGYSDSGKDAGRFTAAWELYKAQEDVVAACNAFGIKVTLFHGRGGSIGRGGGPTYLAIQSQPPGSVMGTLRSTEQGEMVQAKFGLPQTSVRQLEIYTTAEISRVSCAQYRSTVYENPEFIKYFQEATPQAELGYLNIGSRPAKRRTTPGISNLRAIPWVFAWTQTRLVLPAWLGVGRGLQDACDKGHTHELRAMYEEWPFFQSTVDLIEMVVAKADAPMAKHYDDVLVHDAGRRTLGAELRQELARTENCVLAVSGHKKLSANNRSLRKLIDSRLTYLNPMNMLQVEVLRRLRQDDDNRKLRDALLITINGIAAGMRNTG

SEQ ID NO: 160213 - protein, 63 aa, Oryza sativa
  Clone ID: PAT_MRT4530_59512C.1.pep
SWSRQILYVGSLIKSELSAPHQEQGRQCSGSHLSLCQCTRELPCLSHSLWGAQIQGMEVDIHV

SEQ ID NO: 160214 - protein, 591 aa, Oryza sativa
  Clone ID: PAT_MRT4530_59513C.1.pep
MAMGAVLSSRTFASPLSSSGKQHPPQNNKCTCSSPPTRDKFSRLTTRTTIFQVSNYSRSTSMERFQLSARFHQPVVDSSTNYLTRWFYNANLKRRRIECFLTSDPINTGWLKPRRWDNFTSLDTACVQPDYKIPVRTRADCKAEQYEITGSPLSPSDVPAEAVLIGDTNEISPWWQQFPKRWTVVLLCFFSFLLCNMDRVNMSIAILPMSSEFGWSPATVGLIQSSFFWGYLLTQILGGIWADRFGGKVVLGFGVVWWSIATVLTPLAAKIGLPFLLVMRAFMGIGEGVAMPAMNNILSKWVPVSERSRSLALVYSGMYLGSVTGLAFSPLLISRFGWPSVFYAFGSLGSVWFALWQRKAHSSPSEDPELSKAEKRYILGGSTLKEPVTSIPWKLILSKPPVWALRLSHFCHNWGTFILLTWMPTYYNQVLKFNLTESGLLCVLPRLTMAIFANIGGWIADTLVGRGVSITNVRKIMQSIGFLGPALFLTLLSKVRTPAMAVLCMACSQGSDAFSQSGLYSNHQDIGPRYAGVLLGLSNTAGVLAGVFGTAATGYILQKGSWDSVFQVAVVLYIVGTVVWNVFSTGEKVLE

SEQ ID NO: 160215 - protein, 713 aa, Oryza sativa
  Clone ID: PAT_MRT4530_59514C.1.pep
MHMVSFRAGQDLHDVVERNGVEKSMLTEYFEANKVNEDARGILYKDFPEAFTWQAGPKVWQRRKRRITQIGRIVTAHPAEGERYYLRVLLTHVTGATSFEHLRTVDGEVCSSFREAAEKRGLIEADNTLDECLTEAEVFQMPSSLRRLFATILVFCEPSDVLGLWNKHLEGMLDDYRRSHTCPRTIEQMVLLDIRNMLQSMGKEITSFPLPEIDESYDTSGSEPREIFEESTIEVDHGHMDLSSSLNPEQRCAYDEILSAIEGGQGGLFFVDGPGGTGKTFLYKALLATIRGQGKIAVATATSGVAACIMPGGRTAHSRFKIPLNIDDGGVCSFTKQSGTAKLLQRASLIIWVQASMTKRQAVEALDRSMRDIMDRPDVPFGGKTVVFGGDFRQVLPVVRKGTRPQITDATLRKSYLWDCMRQLRLVTNMRAQNDRWFAEFLLRVGNGIEEACDDGYIRLPDEICVPCTGNDDDLNNLIDNVFPMLDANLADPNYITSRAILSTRNEYVDQINMKMIDRFRGEEMLYHSFDRAEDDPHNYYPPEFLNSLTPNGLPPHILKLKINCPVILLRNIDPANGLCNGTRLVVRGFQRNTIDAEIVLGQHAGKRVFLPRIPLCPSDDEMFPFRFKRKQFPVRLSFAMTINKAQGQTIPNVGVYLPDPVFSHGQLYVALSRATARMNIKILAVQSKDKSHRSMSRGTYTRNIVYREVLTS

SEQ ID NO: 160216 - protein, 219 aa, Oryza sativa
  Clone ID: PAT_MRT4530_59515C.1.pep
PQPPRHRFCRRCPLPEEIRPTSLSLSISFDFSTSLSLPFSLCAAAAWQGQRGACGGPAAAAPSPPPDLTGAGGEARSWRTVWRCNAGDHKPARAPSLDNPSSGGCGSSCPEFGYSRSSGLRRQQRQIQAHGEWMASPLSSNRLCALPSAVKAYRLYGEHVLLLILCSHHLPATLARHLWSCFSSCCSSLRFRDSRSSPMRWLQELQKINFAARSSSPIR

SEQ ID NO: 160217 - protein, 104 aa, Oryza sativa
  unsure (1)..(104): unsure at all Xaa locations
  Clone ID: PAT_MRT4530_59516C.1.pep
DSSVLIYVVSFYFQDWLLYSFNFFLIDSLLLLFRLTYSFXFFLVLFFLFNILFLHLFFILYLFTFLIFYSFFYLYIFSSFYIIFTFTFNFIFLFFLTLYLLFPF

SEQ ID NO: 160218 - protein, 121 aa, Oryza sativa
  Clone ID: PAT_MRT4530_59517C.1.pep
ARGSGLAVAAGRRLTAGRSVNVMLMSDGQQNRADATRLDPGGVPVHTFGLGADHDPAVLQAIAGKSREGMFHYVADGVNLTAPFSQLLGGLLTIIAQDLELTVTRVDGEAAIKKVDAGTYP

SEQ ID NO: 160219 - protein, 1241 aa, Oryza sativa
  Clone ID: PAT_MRT4530_59518C.1.pep
MGPIGLKYTRLHSTGVPRKIIFREAGSASSSSIGEKRDLLHPTEPPVRIDTFDGFESRERKGDEGVDAQLAEQANQIRVSDMNSSQHKPINTDKGLSRDLIMAERGGELLPIPSNEMIPAVRDLSAYQDSLDEGSMDETSSPSKRKTGSLSDTKKTGIVQQALLEYKQLEESTAQSKKDIESIGRSLKRLRKDGGATGEVTGLEATSAGAAVKDTSSQLVFLCETRQRVEKVSRLSKRLGLRGFTGVSSEGMSGGLALFWHESVIVDIKDVNARYIDAYVRLSPIDPVWHVTFVYGEPRVENRHHMWSSLNALRQSSNFPWMVIGDFNEALWQFEHFSKTPRNENQMKAFRDVLQICGLSDLGFKGLPHTYDNRREGWNNVKVRLDRVIVDDSWRDIFSEAHVVHLVSPCSDHSPLLLNCKMKDTSTVRNKCLHYEILWEREADFPEVVADAWSDAGDKGDLGKVNKALDRVMASLRSWSNRKVKNIGRESEKARKRLAALLENGADSSVVRQASDHMNELLYKEEMLWLQRSRISWLKEERVAQGSISPIQICRRAPGISHLLFADDTLLFFKAEQQQAIAVSEVLSAYAAGTGQLINPAKCSIMFSEASPPGIQEAIKSILHIEKDEFEERYLGFPTPEGRMKRGKFQSLQEKIWKRIIQWGETFLSSGGKEIMIKAVLQVIPVYVMGIFKLPESVCEDLNKLTRQFWWGSQDGRRKTHWKAWDVLMKSKQSGGMGFRDIRWFNQALLARQAWRLIESPDSLCARVLKAKYYPNGSLIDTVFGGNASPGWKGVEYGLVLLKQGLIWRIGNGKSMKIWRDPWLPREFTRRPITVKRHCRLKWVSELIDENVAWDVDKVSQYFWNVDAEEILKIRLPYRETEDFISWNPDKNGRFSVRSAYHLAVRLASKDESSSSSSICAKNSWDLIWKCEVPHKVKIFSWRVATDSLATMENKKKRKLEMSDSYTICDREREDTGHALCRCSHARNLWMEMAKAGNLVSDINSIRGGSYWFLDWLGRVPAEEHPMILMILWRNWQVRNDITHGKPAAPVWASRRFLESYMSTIVQIKQNPGANLKKGKLAVGIAKRAPAPCCSVKDVPVSWEKPPAGWMKLNIDGSFHPQEETGGVGMVLRNSSGEGTRWRIPPPAGTPRGKLHEMVLKEQEESSTAFVESPLYPADKAGSKPRHVLVASSGFSVNASGADSDNGEDRSSDSSQQVLHCHERPSPPRLLALFLALSGRR

SEQ ID NO: 160220 - protein, 314 aa, Oryza sativa
  Clone ID: PAT_MRT4530_59519C.1.pep
MIAVGSAKGLAYLHEDCRPKIIHRDIKAANILLDYKFEPKVADFGLAKIQPGDDTHVSTRVMGTFGYLAPEYAATGKVNDRSDVFSFGVVLLELITGKRPVISTEPFNDETLVSWARPQLTKALEQHVYDDLIDPKLDALYDAHDMHRLISCAAAAVRHTARSRPRMTQIVRYLEGELSIDDLNAGVAPGQSSLRSQEHSGDMTELVRRRLRRVAFPPGSGVTVTGTGAVTDSGYLSEATSEYGVNPSISSSSGGDDDDTAGEVVGGVTATSRPHAAAAASSPDTSEVASPHAGELAADAAKPMSRRTRLGRFP

SEQ ID NO: 160221 - protein, 121 aa, Oryza sativa
  Clone ID: PAT_MRT4530_5951C.1.pep
MGFLHRKTSKQTSKLKTLLGLAVLRIATARRPHLARKSIATDDVRQLLTLDHLDRAIHRAEQVIAEDNMLEAFEMIEMYCKRLIEHAAKLDKPGECTDLIRGPAAGVSFAAGCGNELTEFL

SEQ ID NO: 160222 - protein, 499 aa, Oryza sativa
  Clone ID: PAT_MRT4530_59520C.1.pep
MAAAAAAGQISLDDLRNGGGVAANAGGGGGVHDDFLDQMLSSLPPSAWPDLAAGKAAEDDAEGMHHHHHQQQQQFGGPYDESAMLASRLRQHQISGGGGGGGGGAAAVKQMVLQQLADLRQGHHMMLQGLGGRSPAGGGGGGGDGGLLLPLTLGSGGSGGDVQALLKAAAANSAGGGDAGGVYGGGFAGSLHQQQQHFQPHPQTAPTIPTQSFGGGGGGGGGGTASGGGAAQPQAGAAGGGAPAPPRQRVRARRGQATDPHSIAERLRRERIAERMKALQELVPNANKLMQTDKASMLDEIIDYVKFLQLQVKASTYTKLLIHVLSMSRLGGAAAVAPLVADMSSEGRGGGAANGGAPAAAGSDSLTVTEQQVAKLMEEDMGTAMQYLQGKGLCLMPISLASAISSATCHLRPPVVAAAQQFPAGLGAAAAAAHHHQLSAAAAAAAMRGHLPGLNADGSVPASPSMSVLTAQSAMANGGGGAADGEGSQLKDAASVSKP

SEQ ID NO: 160223 - protein, 70 aa, Oryza sativa
  Clone ID: PAT_MRT4530_59521C.1.pep
ILHGDVKTSNVLLDENYAAILVPTDEAQFVTLVQGTCGYLDLEYMQTCQLTDKSDAYSFGVASLEYHPQP

SEQ ID NO: 160224 - protein, 60 aa, Oryza sativa
  Clone ID: PAT_MRT4530_59522C.1.pep
LFLQEHHIFEVQHLFQRFYALGLTFRFQWGPRTASLGAFLNTKTRVAITRYRKKNLTNLK

SEQ ID NO: 160225 - protein, 269 aa, Oryza sativa
  Clone ID: PAT_MRT4530_59523C.1.pep
MRKAGRRAFTCSAAAAAAAASALVKLLVLVAAVAATTSAGGGDEPTYETKSIDPSLAVMTLPAPVTGPESLAFDGRGDGPYTGGSDGRILRWRGGRLGWTEFAYNSRHKSISVCSPEKKLVVPESVCGRPLGLQFHHASGDLYVADAYLGLLRAPAHGGLAEVVATEAAGVPFNFLNGLDVDQRTGDVYFTDSSTTYRRRGLHLLVAATGDETGRLLRYDARRRRVTVLHSGLPYPNGVAVSDDGTHVVVAHTGLCELRRYWIRLSLYI

SEQ ID NO: 160226 - protein, 349 aa, Oryza sativa
  unsure (1)..(349): unsure at all Xaa locations
  Clone ID: PAT_MRT4530_59524C.1.pep
TCSAAAAASALVKLLVLVAAVAATTSAGGGDEPTYETKSIDPSLAVMTLPAPVTGPESLAFDGRGDGPYTGGSDGRILRWRGGRLGWTEFAYNSRHKXASYIYPEIESVCGRPLGLQFHHASGDLYVADAYLGLLRVPARGGLAEVVATEAAGVPFNFLNGLDVDQRTGDVYFTDSSTTYRRSQYLLVVAMGDETGRLLRYDARRRRVTVLHSGLPYPNGVAVSDDGTHVVVAHTGLCELRRYWLRGPRAGKSETFAEVPGYPDNVRRDGDGGYWVALSRGADNDDVAPTVAVRVTAAGKKKGGGAAVVAEALAGFSFVTVSEVAEQNGTLWIGSVDTPYAGAAVRGRR

SEQ ID NO: 160227 - protein, 742 aa, Oryza sativa
  unsure (1)..(742): unsure at all Xaa locations
  Clone ID: PAT_MRT4530_59525C.1.pep
METRKGTVVQKYKVKVIADVPGTGSSKDAEVQQVPDGTTQSSDKGVADGFQGIQGDGSQGVQGDESGVLVNTLSNMVKSMVDGLIAEYQATGPVYLPGGVFPNYRPLITNNQPVVXPIPPNAPSAQPTAPVSAPAPVAPSSALGQLINPRLLPTVDTIQQQPIQQTPPRQQVVQPIQQQGLMNASAVFGTPDDQLRXHAANQVVLEHLVHNVQPDQTVVPQVIPEHLVRNIQPNFQNYHWGNLNYQYXPPSPXVQYQQGGPAQPQFVPQYNQFETVPQQAQGVPQQRPWXPEWFERVPLPNQFKVPDFSKFLGQDSVSTYEHVSRFLAQCGEASAVNALRGMITPIREKFSSQDFDSLSHLAQKVTLHEQRFAEARKNFKRVNHVCPYIYGSDDDDDDDDSEIAAAEWVRNKKVIPCQWVKSSGKEERYDFDIXRLIRFLICYFGRNRFNFLLIQAAIEGGKIEFDDSKRPMKKKYDRQQERHYEEDDGGFDSHWGCEFFRFCWNKGMRLPSIEDCPGCGNVAESSSRSYNGSNRLRQARVPVHQRLGPVNRDCNQEDDEDRKTQWCPSGSRVRRKCSRRLIEDRLLQGTEVEQEINHQLKKTKPKQEWRVKIQVPAADEATADEAKRLAKGKSVVTASVNMVFTLPAEFGVKQADVDKVEEKSAKLILLPEQAVFEKPEGIENRHLKGLYVNGYVNGKPISKMMVDGGAALNLMPYATFRKLGRNAEDFIKTNMVLVGSMA

SEQ ID NO: 160228 - protein, 404 aa, Oryza sativa
  Clone ID: PAT_MRT4530_59526C.1.pep
MARPRRRGGAGAWVAAVLAAALQVLAVSAAGKYRAVFNFGDSLVDAGNLVTDGIPDYLATARPPYGQTYFGYPTGRCSDGRLVVDFIAQEFGLPLLPPSKAKNASFARGANFAITGATALDTDFFERRGLGKTVWNSGSLFTQIQWLRDIKPSFCSSTQDCKDFFAKSLFVVGEFGGNDYNAPLFAGKDLREAYNLMPHVVQGISDGVEQLIAEGARDLIVPGVMPSGCFPVYLTMYKEPKEGYGSRSSCLKRFNTFSWVHNSMLKRALAKLRAKHPGVRIIYGDYFTPVVQFLLQPEKFGFYKQLPRACCGAPGTGPYNFNLTAKCGEPGATACADPKTHWSWDGIHLTEAAYGHIARGEVLCRSQISGKTRSFSLQTSVDPTISMLLRFSIDMVELKSYKKV

SEQ ID NO: 160229 - protein, 88 aa, Oryza sativa
  Clone ID: PAT_MRT4530_59527C.1.pep
SATRPGTLFYPWEGALVPGSKGTTASTCEPFVKKLVDGSLGRCLGGGYLMGGIKFGYIGLKIKPGLPKNKLEPWALGGGGHLKNQFVK

SEQ ID NO: 160230 - protein, 218 aa, Oryza sativa
  Clone ID: PAT_MRT4530_59528C.1.pep
MGNGLSPCMHLPATAAAGVKLVYWGGQTRMLDDDGGVCAVAGDVTAELPGDHVVCAADSFYVGLPIPVVSAGEELMAGRTYFVLPAERFSCFKVLTAAALASLSPAPSKKVSVAGPGQCPFEYVKGEGGATLIRVLPEFIEKVISCDENGGGARRRKPSTTATATATELCSTPELKRHYALLMGRRNQPWSPRLETISECNKTRKLLLRTLARLLSSR

SEQ ID NO: 160231 - protein, 1920 aa, Oryza sativa
  Clone ID: PAT_MRT4530_59529C.1.pep
MARISSGKKIKGLMKTESVMHVLQIQKTDQTSDVVIPDSIKHVLDRFQEVFQEPTEMPPVRNCDHKIPLMEGASPVNLRPYRHTPALKDEIERQVTEMLQSGVIQNSNSAFSSPALLVKKKDGTWRLCIDYKHLNAITIKGKYPLPVIDELLDELSGAKYFSKLDLRAGYHQIRLQPGEEHKTAFQTHSGHYEYRVMSFGLTGAPATFQKAMNDTLATVLRKFTLVFFDDILIYSPDLPSHIQHLEQVLQLLQAQQWKVKLSKCSFAQQQLAYLGHIIGKDGVTTDPSKIADVLHWKIPQSVKQLRGFLGLAGYYRKFVRNFGTINKPLTQLLKKGVPFKWTAQMDEAFNALKQALVSAPVLALPDFSKTFTVETDACDMGIGAVLSQDRHPIAFVSKALGPKTRGLSTYEKEYLAILLAVDQWRSYLQHDEFVILTDHHNLMHITDQRLHTPLQHKAFTKLMGLQYKVCYRRGTSNAAADALSRRDEETNDQLWAVSECQPLWLTAVVKGYETDEQAQQLLTELALHPTAREHFHLVQGVLRYKGKIWIGHNLSLQQQLVTALHASPIGGHSGFPVTYQRVKALFAWPQMKKMIQQWVKNCTICQQAKPDLAKYPGLLQPLPIPEGAWQVVSLDFIEGLPKSERYNCILVVVDKFSRYAHFVPLSHPFSALDVAVSYMKNIYKLHGMPKVLISDRDKIFTSKLWEFLFLKSGIALHLSSAYHPQSDGQTKRVNQCLEMFLRCFTNAAPFKWVTWLHLAGYWYNTCFHSALNKTPFEVLYGHNPLQLGVTMETCAIPDLAVWLHERKLMAELLQQHLHRVQQKMKFHADKNRSFREFAVGDWVFLKLQPYVQKSVASRACHKLAFKFYGPFQILARVGTVAYKLQLPDDSTIHPVFHVSQLKVAHGFKHQVQSRLPKFLKSTVYPLQILDQRLIRKGNRTVSQVLVYWSDSVAEDATWEDREDLQQRFPMALAWGQATFQGEGVVKIFPDGEQENNTAELEIAAEQEIEETSIATAKKPIRARVPNPRYSGPMWAKWKNLPRRSMTCYDLTVDDFLPPRYHRVKRMWKEAKATFAAEKDALKLASKGPMDQRLADIYTTEDHNDRRIRIISVLEAILERYKRQAMRSYVKRVNAFLLPPDGVHRTIQKLRLHTFGRGWSVFIQRWIIATIGRWGVKDFELDVEEPGVSLNFRKILDGSQNVQLERLVLSNWYIYFLGVSEAHQTLLGLKNLLVDNCKFGKIYLDVLPCLETFVCRGQQPTKLYYGEVPQLRHVWIEPMALPSPLSHLRKLFIANVPMIWDIFWIVALLDAAPVLESCHVHIDNTSEKMASWVDVQAQERQYHCLNELVGWQIGFVKHVVKASPWLRRVHLLDGHVVEDDEQVQTLRSAAAARSLGQPLTIRSDGFRGDKCTMLPPSQEAYDVCTVTGASSSKRGSAAYEAEKAAYLAARRSATEETKERMQQWTRRTRPLLESIMRRYERCAKRCAMRRYVKRVDAFLLPPPDDGVRRTIRKLRLQTRSGSGRWSECIQRWVTAAIGRWGAEDLELDVEEHRVDYDFRVLDECQSMRLKRLVLINCKPIGIFDCLMLRWLTKLELCKASYYGGASRILSNCVSLVDFSIRHCRSSQPILQFSVPDSGFKKLLVDNCEFVEIYLDSLPWLETFACRGVQPTEVYYGEVPRLRHVSLDYLKTKVEPSAVSNTTYRLSKFVMSMPSIESLVLQFKGPEVWIEPIALPSPLLHLKKLFIANVPMNWDIFWIVLLLDAAPALEPCHVHIDNGSVKMASWLEVQAQQHLYHRLKDLTIVGFSAVGWQIGFVKHVMKASPRLRRVHLIDGHVVEDDDEQVIGGLEVVPHQREWHEFERSEVLDDLRDGIYSPQLEIILIDNVTYHRTTDLNKLVSVQLHNTMICHISNQTYILEQRD

SEQ ID NO: 160232 - protein, 115 aa, Oryza sativa
  Clone ID: PAT_MRT4530_5952C.1.pep
MTSLPTAARHHVLAGERRRSGANGQHLRVEGDAANSPRALTTTDGNRRRRRRGRGGEDVRVDGDCDAPAIFGGNGGQDEDRDDLANPTATSPSDDDNQSGEGTRLDLLRRRRRTG

SEQ ID NO: 160233 - protein, 95 aa, Oryza sativa
  Clone ID: PAT_MRT4530_59530C.1.pep
LRSTRRFSPAMRRCPSIQPASLRIGSSRALMSSERDMGWQFLLQGTCLRPYSTGRKLLLWRRNKNRPLHWSNRRSRQNWTRSSERLHCERSNRRT

SEQ ID NO: 160234 - protein, 66 aa, Oryza sativa
  Clone ID: PAT_MRT4530_59531C.1.pep
PKKKGSDFVVDACLHPCVRKHINSNIVSAICNSLSSVLQRVYWQIHCVTHVIPLVMHLALDCCFAS

SEQ ID NO: 160235 - protein, 90 aa, Oryza sativa
  Clone ID: PAT_MRT4530_59532C.1.pep
KGPNKDPLQRFKRLFNSRGLKPPKSPTWAPRKLPKRAPKKSFPLRKIPGLQKTQKGKKPPKIMAKFCNKTRFPWKSSPTLPPKIRGHPKP

SEQ ID NO: 160236 - protein, 70 aa, Oryza sativa
  Clone ID: PAT_MRT4530_59533C.1.pep
MVAAAGLRKGHNHRHRPPSRRTAHPPVDIKKRGGEELLKRSRLRKSIFACGPLNEPYAKMEVDFCRRGQL

SEQ ID NO: 160237 - protein, 92 aa, Oryza sativa
  unsure (1)..(92): unsure at all Xaa locations
  Clone ID: PAT_MRT4530_59534C.1.pep
VEVECLSVLSFHDFFTGFLADAYLLPAILRSSLILIHKVLICRLGSDIMLSLIYSEILKMLRXYGLLEFSLDIFYLRDLNSLLRGNTRARWA

SEQ ID NO: 160238 - protein, 46 aa, Oryza sativa
  Clone ID: PAT_MRT4530_59535C.1.pep
PSMYQVRALINGTCLILQVRKDRDLIGCKHIETIPTAKTQAGTTED

SEQ ID NO: 160239 - protein, 152 aa, Oryza sativa
  Clone ID: PAT_MRT4530_59536C.1.pep
MVRVIRSLGDVKALLRTHGDRIGLTVSIRCLWRIRHARRMRALLRQQMKIDGMHWEVEGIEHLNAMRRHRGDRASAWGVAGGCRHGDHHGAAPAPYDDRLSSPSQVAGRPGVGSEDSGQGILTALSKPVYSYPSHRLVLLLLLNLGLSGATA

SEQ ID NO: 160240 - protein, 516 aa, Oryza sativa
  unsure (1)..(516): unsure at all Xaa locations
  Clone ID: PAT_MRT4530_59537C.1.pep
MKGFSSPPFATLLLPLSCAPTQLASCSSFATLSLPVPPLDDVMTRSSAPLDGSILPPSRITNERFAGLPRKFVPMPSGRATVIYGEARPAPQYPERSVFFLSYAMVGLIPPFSSFYDMLDFYGIQMAHLTPNAVLTLAIFVHLCEMFIGVRPCLQLFRWFFTMQLXPPTEAGGCYFQPRPNTQQRYIGQTLCKKWNDXVLHRPPRPPSSVHTANWQEAPVLGDAFDTALDYLVGLRSLGLNDTMVFGDYTRRRLAPLQEQARGEWTEVSSRGTPWVTPLPPRRPKVPGRDEARPGARETEAERSGAEAEPRVQRRQTASDTAPEDEPEARATGGDPGAGDDASRSADGEDSSAVPRAEAARGASAADAARSASGVGGGGAQDNGGNAFLPVLRMLRPHARSAGTGSPSTPWTGAPTTGGSSRGRGLLFPHRLQRARSLFCRTLVGDFGRPERQAPRRSDRARPSAGGGGRRVGAYPQGGGRHGEVVVGSAGTGGGRAGASEPLGLRPRLLALPHAG

SEQ ID NO: 160241 - protein, 222 aa, Oryza sativa
  unsure (1)..(222): unsure at all Xaa locations
  Clone ID: PAT_MRT4530_59538C.1.pep
AAKISPLAASPPPSPPRHRRLLPKTSPSLPSPLPAPPRSRPPXPSPPPPPGPLXAPSPSLPPSPLPAPPRSRPPHRRRRQDLSPAPSPSLPPRPPXPPPAPPRSRPPXPSPLPPPGPLPGPLAVAAVMSSPPPLAPPXSPPGPSTPPXSSPPPPAPSXNHPGPSPPRPXPGPPRSPXPSLSPPSPPAIPXPPPPXPAPPVPSPPADWNTFVKDHTTVEALAL

SEQ ID NO: 160242 - protein, 120 aa, Oryza sativa
  Clone ID: PAT_MRT4530_59539C.1.pep
MVTSSRRKRTCVARPPPATTRARRIQLISVGCRPSSPAARSGAVAGTARRPARRWFADPAVQSGAVADDDDDGDEFEEEQDARSSSPAAARRSCAAPPPARAWPKAGLESEMWARRGEER

SEQ ID NO: 160243 - protein, 54 aa, Oryza sativa
  Clone ID: PAT_MRT4530_5953C.1.pep
ALMIIKSWRHFLPIFRVNALTQQPNAQIKTNGMRSITHTVCSCRSMARYKCHAS

SEQ ID NO: 160244 - protein, 51 aa, Oryza sativa
  unsure (1)..(51): unsure at all Xaa locations
  Clone ID: PAT_MRT4530_59540C.1.pep
XYXXFFYISTKQVHXHXLPKXQRXXSXHKPXXDXHXIGMXXXXKQXXXRGF

SEQ ID NO: 160245 - protein, 50 aa, Oryza sativa
  Clone ID: PAT_MRT4530_59541C.1.pep
KGPRFKLNPKKRGAKANTKCGKNFFPGQTIFWCLEENFVLPPVGCHVFAE

SEQ ID NO: 160246 - protein, 90 aa, Oryza sativa
  Clone ID: PAT_MRT4530_59542C.1.pep
MSYAGKLLDDEEMMSYILAGLDDDYEPVVSNLVGKAEAVSVAEIYSQHLSFEGRAKLRQQASGSSVNSAKRGGKSGDGFNSNFVETRFRQ

SEQ ID NO: 160247 - protein, 992 aa, Oryza sativa
  Clone ID: PAT_MRT4530_59543C.1.pep
MTARGVGGGSPPSLPPKSGAASPAPARPQPPPCRRIWPRRGSACRPSHPRWAGAASTPPHLPTMHRERQRERDDAVASPAPAGPQPPPSRRIWRRRGPACRPCLATAASTPLDLAEARLGQPPPRRPTCHLHDVHRHRCHTSPPPDLAEGRASPPLPAPPSSSCAAVLLLLTPPPPEPDLDEPDPDASPPPTSPTPMPTLLRRARPRCLLQIRADSTRRRPPLLLHRLLLRPAGFRCRLLPLPQCLPIAAVESTLFPTSSAASSTSRFSLVVHYRFCCNQPTLLSIYPAGHLKKNFVPRCESFSKLRFLVELLHIKLLGGWSDKSFDMLLDLLREAFPKGSTVPKSFYEARKIVKCLSLGYDTIHACENDCVLFRKQYANADVCPKCNTSHRKTSKKSLDGKRVHKVPRKVLRYFPIEERLQKMFMSPKLANDVRWHDEGRTKDGLLRHPADSPDWKHFDNTYPEFAADSRNLRLTLATDGFNPFRLMNCSYSIWPVVIIPMNLPPWQCMKQPNFILSLLIPGPNSPGKNMDVYFEPLVDDMHDMFEEGVRTYDSSKDEYFQLHAALQKTITDFPGLGYVSACVTSGKVACPHCHSYTCSIHLKNGGKCCYMGHRRFLDANHKFRFDAASFDGNVELGTAPKPLTREEIFKQTEDLPADFGKDPKKKKTKPNSKGKETEEKIIWNRRSIWFRLRYWKDVMLPHNFDVMHIEKNVCDNIINTLSSIDGKSKDNLNARLDLKLLDIRKYLHPVEVGDSYYLPPAPFSMSSEEKKLFCEVLKRIKFPDGYASDIRRHVHVKEKRIIGLKSHDNHILLQHLLPLAVRKTLPEYVSAVLVRVSNFFKKIYSPVISISDMEKLDAEIAETLSLLETIFLPAFFDIMVHLMAHLPTQVRISGPVQYSNMYPIERFLMRLKGYVRTKSHPEGSIAEGYLFDESLTFCSRYLEGCETRFSRKSRTSIDKPSSITMPFFYNNIGRDLSGKCMVTLDYMAPST

SEQ ID NO: 160248 - protein, 164 aa, Oryza sativa
  Clone ID: PAT_MRT4530_59544C.1.pep
GLAKYVEWSANMMDVDAKIKLKNAELQAKKDQLRIWTGFKPPVTNSKPIHDQKFTGKVVEVVSGDCIIVADDAAPYGSPSAERRRSVQMLYSRRISTVDGQPTTNTAEDRVLDYGSVFLGSPSQADGDDVSSIPSSGNQPGINIAETLLSRGFARTSKHRDYEE

SEQ ID NO: 160249 - protein, 986 aa, Oryza sativa
  Clone ID: PAT_MRT4530_59545C.1.pep
MASATGASGWLRGKVKGVTSGDCLLIMGSTKADVPPPEKSITLSYLMAPRLARRGGVDEPFAWESREFLRKLCIGKEVTFRVDYTAPNVGREFGTVYLGDKNVAYSIIAAGWARVKEQGPKGGEPSPYLTELLRLEEVAKQQGLGRWSKEPGAAEESIRDLPPSAIGEASGFDAKGFAVANKGKSLEAIVEQVRDGSTVRVYLLPSFQFVQIYVAGVQSPSMGRRPPNPTVVAAAESTADGATNGGDSEEAPAPLTTAQRLAAAAVSTEIPPDRFGIEAKHFTETRVLNRDVRIVVEGTDSFSNIIGSVYYSDGDTLKDLALELVENGLAKYVEWSANMMDVDAKIKLKNAELQAKKDQLRIWTGFKPPVTNSKPIHDQKFTGKVVEVVSGDCIIVADDAAPYGSPSAERRVNLSSIRAPKMGNPRRDEKPDNFAREAKEFLRTRLIGKQVTVEMEYSRRISTVDGQPTTNTADARVLDYGSVFLGSPSQADGDDVSSIPSSGNQPGINIAETLLSRGFARTSKHRDYEERSHYFDLLLAAESRAEKAKKGVHSAKESPVMHITDLTTVSAKKARDFLPFLQRNRRHSAIVEYVFSGHRFKLTIPKETCSIAFSFSGVRCPGKDEPYSNEAIALMRRRILQRDVEIEVEAVDRTGTFLGSLWESKTNMASVLLEAGLAKLSSFGLDRIPDANVLMRAEQSAKQQKLKIWENYVEGEEVSNGSASESKQKEILKVVVTEVLGGGKFYVQTVGDHRVASIQQQLASLKLKDAPVIGAFNPVKGEIVLAQFSADNSWNRAMIVNGPRGAVSSQDDKFEVFYIDYGNQEVVPYSRIRPADPSISSSPALAQLCSLAFIKVPNLEDDFGHEAAVYLNDCLLNSQKQYRAMIEERDTSGGKSKGQGTGTILIVTLVDAETETSINATMLEEGLARLERSKRWDTRERKAALQNLEQFQEKAKKERLQIWQYGDVESDEEEQAPAARRTGGRR

SEQ ID NO: 160250 - protein, 67 aa, Oryza sativa
  Clone ID: PAT_MRT4530_59546C.1.pep
TCRHSGCARCYLNSKDMIVLNVRWSNYEKCFGLRSSALSMGGRESLWLFVNMCFCILFLDACTKFSL

SEQ ID NO: 160251 - protein, 265 aa, Oryza sativa
  Clone ID: PAT_MRT4530_59547C.1.pep
MSDDVIWHCIRHNHCSFMAKITTGIFCRNPYNATGICNRSSCPLANSRYATIRDHDGIFYLYMKTAERAHHPNKLWERVKLPRNYEKAIEVINRHLEFWPKLLVHKIKQRLTKMTQYRIRMRKLRLKVSYPFKVLDMEKGDVDPEEDEEEEVEEYVEGDYMDDMEDMEDFEGLPGGDYGEMNEDDLSDERIAKKPKVLGSDLRSNIGKKSKKPTEVELDEDIIYGYQAKDVNMKGVDQVVVNRFLVWMAYLPTDVAVFVLGQLAL

SEQ ID NO: 160252 - protein, 674 aa, Oryza sativa
  unsure (1)..(674): unsure at all Xaa locations
  Clone ID: PAT_MRT4530_59548C.1.pep
MDLDKSTSTTASLKKLQDNGALPGRGTMEREAGVALDGIQQGIWMRWILTSGWPEVVIEDSDPVLVVPEEQPDKISEWTTKPTLTPSLQSFIDIVDDLQVQGLSGYEVDGDFIGRRIQLLQARAHPTFDYSGLEDVTRVSPRGLNSDTVTRRVGQIMISGPTTTSNIPLPLCEKGPAEREVAINALPLTDVIGPLADHQAAASLKEGVAKEASNVAAVAATTSGSNVPKRGKKFSSVLENRQKAPTQSASDASPPPQRRQRLVTLSEKXARAKAAQDGSGGNSSASPAAASTDVVVVPRSREATPSGPVDGLVPARGPPTDVLTWXELQIEMESTLQAGARGIGREIKEAKAAAASSVNERADKLARDLAELIGECGVKTTIPANPDEFSLTSSLTELATAMEEIPSKHAARIGEETSNGIYIGACHVLACVRLAHPELDLQRILDQGAADDAHKGMMEEVGDFGESVLPLFEEDVDVEDVQQRGQPESPVVVPALGLEPYVPRDDVDQNLSMEAGMATTSLDLESALADRDSRIQYWRTKFEVAELERTMVEVKKDRAMEALRGREVWFNSYLRSCCTTMARVCRELRVPRRDPEESAAEYISWLNGACAKLEGISKRIDEALKQECHRSSRYAGGHVHVHXIACIRDHRPQLHLEFLHEGFSRYRRTPAEID

SEQ ID NO: 160253 - protein, 75 aa, Oryza sativa
  Clone ID: PAT_MRT4530_59549C.1.pep
AFPLGSSDLYSPPCVPKYHCCIPLFFLFFFCQKPILGFYLFYLWRDIFLFFWLALLLKKKKKKKKKKQKKKKKQK

SEQ ID NO: 160254 - protein, 59 aa, Oryza sativa
  Clone ID: PAT_MRT4530_5954C.1.pep
ATLPFTRPGAPAKRRLDLHNHVDIGPPPAIRTNDDLGQAVLAQAAASSIFNPKNASTRA

SEQ ID NO: 160255 - protein, 572 aa, Oryza sativa
  Clone ID: PAT_MRT4530_59550C.1.pep
MSAWAAALARMWRQSTWRRGGLRHRRRRAGAGPGGGRLRLRFIRVRGVGGLGKFFFFPPRWCSAAASRQGGLPWPQPYVAAESPFVGVAELYAAIYSPSSRSVRRRIIPNDNAVHQCNNVIHNYHNRICHRLLTKVTMILGNHFPVDTTLPDPSVDHIGYEAVSKFMIHGPCGSSNKSSTCMNDGKCSKFYPKEFTEKNYGVVGRVIYARPKNNITTEKGGVDVDNRYVVAHNVDLLVKYQAHINVEIVNRDGMEKYLFKYTTKGPDCAKVGIRDGGNEIQQYLDCRCVTPCEAAWRLLQFDIHHTDPSMERLPVHLPLENSVVFSEDDHLDQVIENPRSTITKLTAWFDANRIYPQARQHMYVEFPEFWTWHGDGKYWKQRSQSHKGKVGRIANVGPNQGEQFYLRILLHVVKGAQSFSDVRTVSGIQYPTFQSACEEMGLLGDDREWSHAITDAAQWALPYQLRQLFVMMLLFYQVSDPAKLFDNNVQLMGEDFAYRVCQQTPRIHQNILQEHIRLSTLAELDRLLRDVGYSLDHFQLPRLSHLAFPPLESRLIMDELAYGTTEVNEQLN

SEQ ID NO: 160256 - protein, 65 aa, Oryza sativa
  unsure (1)..(65): unsure at all Xaa locations
  Clone ID: PAT_MRT4530_59551C.1.pep
WLSAGDMTSVRPVTNRSFLSTTXIYLTGSNVPPPGANTPAPDRDECLEALILTGWGEACVRPPTG

SEQ ID NO: 160257 - protein, 61 aa, Oryza sativa
  unsure (1)..(61): unsure at all Xaa locations
  Clone ID: PAT_MRT4530_59552C.1.pep
SDSDEPCSSCGGXMNTSLPGVEDYEAHLSKVYVEDIMERIGLGVGGHGEGLNARMGLDLVV

SEQ ID NO: 160258 - protein, 91 aa, Oryza sativa
  Clone ID: PAT_MRT4530_59553C.1.pep
SLMLAASPCRFRTYLLDPRTRSVSPDLEDGRGRVGVSRRARNLPRKNDLYGRLRRREHMNHKMCKNDVTKNRGQHHLPIVGINNQFNCSHE

SEQ ID NO: 160259 - protein, 186 aa, Oryza sativa
  Clone ID: PAT_MRT4530_59554C.1.pep
STLEDPPRVMASQVLSSLPYSLAVTRFGTAPPPRRAAARVSLRRQQTSRDGALLLRSLTTTRSRCAPAAKGGDGAKEAPEAAGDPDDKLWPWDEFPENSVFVSKGMLIACIGCYNLFKMNPTTFIDAALGYTFYRLCIVSSQLRRRGFSNDLIIRVKFVVMLVMAINDINNCIYWLDAIRAPVYFL

SEQ ID NO: 160260 - protein, 186 aa, Oryza sativa
  Clone ID: PAT_MRT4530_59555C.1.pep
MGPTCPFSLPSLSSFSLIAAPSISLSPAVGGDGGEQRKRGGGARAELHRGEDGGDDSGGGGTHMRRGMVSLAAIDQVFDAITGGWEPAAAAGGWAEQALKIMANEEKLDLFLKKMVEEAAQRVEAEQRSISDLLSFKATVEAWIPEVEWKVDSLNSSVVYLQNKLTLMEKKGAAAVDVAAVTRRHV

SEQ ID NO: 160261 - protein, 106 aa, Oryza sativa
  Clone ID: PAT_MRT4530_59556C.1.pep
TKQKQSYMHEQKKYSTSKKGAAARKGSSIRACVTSRDQTIRRLLNHAAKPLNYSLHLPHIFSPLPTSAIFPTSAICLDGVVSTEFYDRIYVIFKNIILVDHIISRS

SEQ ID NO: 160262 - protein, 108 aa, Oryza sativa
  Clone ID: PAT_MRT4530_59557C.1.pep
MATKVQRIFRNAVLSGITDEDTREATGSSVGRITYRYTNQPECPRRIPRGNRPEKNQKAAASGDRRRAAEVKGRKETGGGERVYGSGFPNSCRLWAFSNEDMGLNSGP

SEQ ID NO: 160263 - protein, 733 aa, Oryza sativa
  Clone ID: PAT_MRT4530_59558C.1.pep
MDIYNVEAAEILANEAQLLPIGEAAPIYEKLLSTFPTAAKYWKQYVEAYMSAKDDEATKQIFSRCLLSCLQINLWRCYINFIRRVNDKRGSDGLEETKKAFDFMLNYVGNDVASGPVWMDYIAFLKSMPVVTPQEESHRMTTVRKVYQKAILVPTNHVEQLWKDYENFENSVSRTLAKGLLSEYQPKFNSAKAVYRERKKYIDDIDWNMLAVPPTGSYKVIRTWGKANAQYLTGRGNPQRIDATTANRRVTFTFEQCLMYLYHHPDIWYDYAMWHAKNGSVDSAIKIFQRAVKALPDSGVLKYAFAELEESRGAIQPAKAIYESLIAENAGMTSLAHIQFIRFLRRTEGIEAARKYFLDARKLPGCTYHVYVAYATMAFCLDKDAKVAQSVFEAGLKRFMHEPGYILEYADFLCRLNDDRNVRALFERALSLLPPEESIEVWKRFAQFEQTYGDLSSMLKVEQRRKEALSRTSEDALSALENTLYDVVSRYSYMDLWPCSTKELDYLSRHEWLAKNIANRGDKSVVLTGGATLDKGDIRVGSNKKSFPQSSKVVRPEISRMVIYDPRQMKGPDFSTTASGYTKEIDEILKRLSPQMMSFITNLPAIEGPSPDMDIVLSVLMQSTLPVGDKPGSQVPGPATSDLSGPGKSGLNQNGSIHRPPRDGQPTKRKNSERGRAQEEDDTSTTVQSRAMPRDIFRLRQIQRNRGLGPSQSGSAALSSGSVFSGDQSASSG

SEQ ID NO: 160264 - protein, 114 aa, Oryza sativa
  Clone ID: PAT_MRT4530_59559C.1.pep
TTTYIVKCSPEKSNGLWQMSPPSATVKHPVRGQIAQHAPLHGFISSESLDQQNEVNCNEHLHETLNNVTGTRRKGAGYEPLYFHKKNNGRGYQTQINYAKAKESSQGPNAYRRV

SEQ ID NO: 160265 - protein, 339 aa, Oryza sativa
  Clone ID: PAT_MRT4530_5955C.1.pep
MTEAAANARPKLDWVFTRSGESPQGNTSNEETTPIGIDVTDPRRPGRAVAQDSLKKYRTSKKLEQECLHSHRAREASARPKRPYYQQTRPPTRTKKTQPPKDSTAGLGAGDQEKGGASRRGGGLAGLKVKLRTGSKGNKDIGVIHVSSEDLRASWDNPKQLWQPPPTSPPAQREEHRGEQHSNCMSGAQNQRYQQDLVEKLELLTQPHPHPYYIKWFNSCGKFKASENNKGNEEEKKDEEEKNLYIAPRMLEECLIDQVPTISEDEKKGKDNGATSAQEVLAWAKKKRPSVTNSLMIKEVDWGPYQGLLQVHFHLIMSLLVHRRQEIKFYTFWIRIRAS

SEQ ID NO: 160266 - protein, 125 aa, Oryza sativa
  Clone ID: PAT_MRT4530_59560C.1.pep
MASPCTCRAKLNMVSVDSVTTLPKRRAPTYCPERSSISITDLPVAYHLNLKQKVITIAALAPKRPPSLRKPAVIVPVFDNRTIRWKLTSCWDLWNEKALLPPRSLQPHSLLQWWRSRERTGRKRW

SEQ ID NO: 160267 - protein, 78 aa, Oryza sativa
  Clone ID: PAT_MRT4530_59561C.1.pep
LLRRPVYICPYTMINNRRANAYRSILCILVYVGRSKINFMPAGVVISYHFHCVIDKGNFLDSANNVYLYSHCVPTIME

SEQ ID NO: 160268 - protein, 96 aa, Oryza sativa
  Clone ID: PAT_MRT4530_59562C.1.pep
GPEILTRSTVTRSLSPSLPATPRHELSGRVAPALTPARGYASRPAAARRFLGEECRGTKNVSTLDHCLEASPPPPPSPPPSPTPPPPPTTPPPSRS

SEQ ID NO: 160269 - protein, 41 aa, Oryza sativa
  Clone ID: PAT_MRT4530_59563C.1.pep
IRGAAGRWSHSTGITAGQQGSTGAGSQAAGRRHGGLWQHWQ

SEQ ID NO: 160270 - protein, 267 aa, Oryza sativa
  unsure (1)..(267): unsure at all Xaa locations
  Clone ID: PAT_MRT4530_59564C.1.pep
MAPYDGRRPEAGASRDGGRWQGLRATAAGDRGFPRRRPTAGASRDCGRQRQELLATAADGGGFARRWPGEGLPTTAADGNDTDGGGFGLWLRAALAEHGTSQEIRLTIDSISLLVLPCRTPVRPKLLATAGESRAASVGESGGGAAAATSERGCGWGEAAPTTPXPVLSSFAAPGAREEGAGLVVGVGGGGGXRGRLLRLRRRGRGRRRGRMRGKAPSAVCCCFPFAVLAAVCVPAALCVPDNGVRQDRWRGEEHVRRGREWCGVCG

SEQ ID NO: 160271 - protein, 337 aa, Oryza sativa
  Clone ID: PAT_MRT4530_59565C.1.pep
MEGRLRGIEGGLQGLRSLVSLTIIDCPDFFSSYSSSSSSFPFPSSLKYLSIDRVSGMETLSLLSNLSSLTNLGIECGDLRGEDLCSLLAQGQLTRLRVNKNPKFFVGINPSSLQHLVTDDIAGVLVVPICRLLSPSLTKLTIFCNNEVKRFTKEQNMALEHLSSLQELSFSFCRLQFLPSVLHRLVSLKRLEISCMRELWDLIPCTQKELHLVAASTVCQLGNEQTILFREDNWLQGGTIRAIAPSIYDHVSTRIRKRRMVAEALSNRRWIKDISGALGTQAILEYLKLWSLIQSVDCSSAEPDSLSWKWESSSKYTSKSTYRALFLGRIAFESTPI

SEQ ID NO: 160272 - protein, 87 aa, Oryza sativa
  unsure (1)..(87): unsure at all Xaa locations
  Clone ID: PAT_MRT4530_59566C.1.pep
RPFRPKPPTPRRRNLSPAXGRPLRPAPPPMPPPTRSRRRQSPRSRRRPCSPPPRATDPSMGRLXPCMPAPDLDNAGGFSTVSVGALP

SEQ ID NO: 160273 - protein, 1026 aa, Oryza sativa
  Clone ID: PAT_MRT4530_59567C.1.pep
MESAAVNAARWVVGKALSPLSGGFVEAWAASTELGPNVGAIKMELLYAQGMLHNTRGRETSNPALQQLLLELRGLAYDADDVLDELDYFRIQDELDGTYEAADEHASGCLLGLVLNAHHTARNIKRRYLSASCSCGGDEEASRHANEEEAVAGSGCMRILACSAQSTIHLVGKHLPCFPFAPGLDNCDDSGALHISTMKTPKLKFDRVDLSTRMKHIVEQLKPVCAKVSTILNLELLESCIAISINGEFSRKPGQTLVHPSNVAMNRPVTTSGIIDPEFYGRKGDRSRIIEDITRGDYCDKDLTVIPIVGPGGIGKTTLTQHIYKEVHNHFDVKVWVCVSLNFNLYRLKEEISKWIPKLKDDEKYVDMDDSIEQRLKSKKLLLVLDDMWKCDNEDEWKKFLAPLRKAMTKGNIILVTTRFPVVAEMVKTFDRPIQLEGLEPEEFWELFQACVFGDDKSIDDHANLLETGEKIVKKLKGSPLAAKTVGRLLRNHLDLDDWMRVLESKEWESQTSENDIMPALKLSYDYLSFHLQQCFTYCALFPEDYKFDSEEMIHLWIGQGILHSQDENKTTEDIGLSYLNDLVDYGFFKKNVNEDGSPYYSMHDLLHELALKVSSCECLAVSSSNVRFVQIPPSIRHLSIVIDDMDVNDRVTFESIKTDFSTLSKRLDVEKLHSFMLFGRFHGSFISPLGDLLSNAKSLRVILLSTPSYAVENMLHNFSNLVHLRYLRIIRGYFPEIRLPNTISRFYHLRILDVRKCNGHFGLPRDIDNLVRLRHFLVPDDNLHSDVANVGKLKCLQELRRFKVKRQSEPFALRQLGQLELNGTLGIYNLENAQAADEAKLLNKSHLHKLILHWSTKDCSQDEHILESLKPHNNLQELQIEGHGGATCPSWLGFNLSIKGLQSLSLHGLDWNKFPPIGELWLVNQHSEKSLSCIEGQSFWNLKRLELVGIPRLEKWTGNDASRVFSQLEVFIVRDCPELIELPYSKMDSTQFPTLKELEIVKCPTLSSLPPVPWTNSPCRALIEE

SEQ ID NO: 160274 - protein, 262 aa, Oryza sativa
  Clone ID: PAT_MRT4530_59568C.1.pep
MAPLRRVGRWPRHPNLRRKRCAGGQIRIQCPCSRIPRPSPVDGSDISTSDLARVVARWGVGRGRPTWALMGSPSQLAAVDAMAASGKKVDASNNSGKPRWLAATKGLDHNGGVGVFSLGAWRYKGVARQSASMCCGQLDHSSGMHDDGEVWLRAGPCSDIAGIVRWSSRRIWGPELKLGRIAPSSWAATTADRPLCPIPSHLLGAPTLLGWFISHKELHGETVKTAAGEEGRGCRHVVVGGGIVTSPPFLGEEMEVMACEEG

SEQ ID NO: 160275 - protein, 1612 aa, Oryza sativa
  Clone ID: PAT_MRT4530_59569C.1.pep
MESVAVEAARWMVGKALSPLSGGLVEAWLACSELGTNVGAVKLELLYAQVMLDNARGRETRSPALKQLLLQLRGLAYDAEDVLDELDYFRIQDELDGTDEAADEHTRGCLHGLLLNTRHTARNIKKRYLSACCSGGGDEKAVAGSDLSLAGEHDADDDCTDEDDNDTGSTDIDHSSTATHMPRKEKQWGSQREDTMKTPKLKFDRVDLSTRTKHIAEQLKPVCAKVSTILNLELPESNRTIRSSIAMLRPVTTSATIEPEFYGRKGEKDRIIKDITHGDCCVKDLTVIPITGPGGIGKTALTQQIYKAVKNLFDVNVWVCISLNFNAYRLKQEIADSIPKVENEQLGDLDENEQLGDLDDLIERRLKSKKILLVLDDMWNCSNEDDWKRLLAPLRNAQTKGNVILVTTRFPAVAEIVQKTYRPIQLEGLEFEELWELFQAYVFGDEKLINHHAILQQTGEMIAKKLKGSPLAAKTVGRLLRNHLDFNHWTSVLESKEWELQTGDNDIMPALKLSYDYLPFHLQQCFIYCALFPEDYKFDSDELIHLWIGLDILQSHQDQNKRTEDIALSCLNHLVDFGFFKKNVNEDGSPYYSMHDLLHELALKVSSCECLAVSSSNVRFVQIPPSIRHLSIVIDDMDVNDRVTFESIKTDFSTLSKRLDVEKLHSFMLFGRFHGSFISPLGDLLSNAKSLRVILLSTPSYAVENMLHNFSNLVHLRYLRIIRGYFPEIRLPNTISRFYHLRILDVRKCNGHFGLPRDIDNLVRLRHFLVPDDNLHSDVANVGKLKCLQELRRFKVKRQSEPFALRQLGQLELNGTLGIYNLENAQAADEAKLLNKSHLHKLILHWSTKDCSQDEHILESLKPHNNLQELQIEGHGGATCPSWLGFNLSIKGLQSLSLHGLDWNKFPPIGELWLVNQHSEKSLSCIEGQSFWNLKRLELVGIPRLEKWTGNDASRVFSQLEVFIVRDCPELIELPYSKMDSTQFPTLKELEIVKCPTLSSLPPVPWTNSPCRALIEEVRSDFQHLKYSNLYQSKSHLWVAGKKGHLNCAFSKVLASSNLTEMKYLILTKCPFLPLEHLQMLSCLKKLEINGSSSSLLMVEGGSAVRYQFPVKKLVIRKCGASGKELTLLLSHFPKLSDLTMYRLEKIAMLGVAEQQITATSASSPSLSGNKLENARFGQEQQQPRGEDEKAAASSGLLLLPTQLQELFISCCSKLILHHDSLGENMEGRLRGIEGGLQGLRSLVSLTIIDCPDFFSSYSSSSSSFPFPSSLKYLSIDRVSGMETLSLLSNLSSLTNLGIECGDLRGEDLCSLLAQGQLTRLRVNKNPKFFVGINPSSLQHLVTDDIAGVLVVPICRLLSPSLTKLTIFCNNEVKRFTKEQNMALEHLSSLQELSFSFCRLQFLPSVLHRLVSLKRLEISCSEFISSLPKSGLPSSLEILDVSGGSEELKRQCRKLRGTIPIIKDSDWDLIVRELWDLIPCTQKELHLVAASTVCQLGNEQTILFREDNWLQGGTIRAIAPSIYDHVSTRIRKRRMVAEALSNRRWIKDISGALGTQAILEYLKLWSLIQSVDCSSAEPDSLSWKWESSSKYTSKSTYRALFLGRIAFESTPI

SEQ ID NO: 160276 - protein, 121 aa, Oryza sativa
  unsure (1)..(121): unsure at all Xaa locations
  Clone ID: PAT_MRT4530_5956C.1.pep
XLXRVRWGLKGFGGAAQEXPLFXDXWHKGTGQGFWRGEPVLVPXAGXXIPRILVFFFSGXXXEIXGXXKFXKXXLLXFGXXXFXXFVFXSXXXFFXXXGXXXKXXGXYPSHXKXXXXXXWX

SEQ ID NO: 160277 - protein, 70 aa, Oryza sativa
  unsure (1)..(70): unsure at all Xaa locations
  Clone ID: PAT_MRT4530_59570C.1.pep
CRYAPLLVSRHSALARRLRLRRRRSPSIPRASTPPSFVLPHPGERILRHRRSPSIARAXRRRRSSCCFRR

SEQ ID NO: 160278 - protein, 1285 aa, Oryza sativa
  Clone ID: PAT_MRT4530_59571C.1.pep
MADLVTSMVIGPLVSMVKEKASSYLLEQYKVMEGMEEQHEILKRKLPAILDVISDAEEQASHRQGVKAWLEALKKVAYEANDIFDEFKYEALRREAKKNGHYRGLGMDAVKLFPTHNRIMFRYTMGKKLRRIVQIIEVLVAEMNAFGFKYQRQSLASKQWRQTDSIIDYSEKDIVERSRETEKQKIVRSLLENNDIMVLPIVGMGGLGKTTFAKLIYNEPQIKEHFQLNRWVCVSDEFDLSKIASKISMTTNEKDCDNVLQKLQQEVSGKRFLLVLDDVWNRDVDKWSKLKTCLQQGAAGSVILTTTRLAEVAQIMGTVQAHNLTTLDNRFLWEIIERRAFYLKKEKPSELVDMVDKFVDRCVGSPLAARAVGSVLSNKTTPKEWNTLLSKSVIFDDDSGILPILKLSYDDLPSQMKLCFAFCAIFPKDYEIDVEMLVKLWMANDFIPSENGVGLEKVGNRIFNELARRSFFQDVDETSLFKMYRRDKLCQFRKTCKIHDLMHDIALYVMREECVTVMGRPNSIQLLKDSSRHLFSSYHRMNTLLDAFIEKRILPLRTVMFFGHLDGFPQHLLKYNSLRALCIPNFRGRPCLIQAKHLHHLRYLNLSHSWNMERLPEEISILYNLQTLDLSDCCSLRCLPKNMKYMTSLRHLYTQGCTDLECMPPELRKVTALQTLTYFVVGNSSDCSNVGEIHDLNLGGELELGKLENANEEQAIAANIKEKVDLTHLCFKWSNDIEKDPEHYQNVLGALRPHAKLQLLKVQSFKGTNFPTWMTDVCTFMNLTEIHLVDCPLCKEIPKFWKLPALEVLHLTGLNKLQSLCSGASDVIMCSAFQKLKKLKLQHLKSLKRWGTMEGKLGDEAIFPVLEDIHIKNCPELTVIPEAPKIGTLKLEENKPHLSLLVVGSRYMSLLSKMELSIDDIEAALIPDQSSVETLDDKDIWNSEASVTEMKLDGCNMFFPTTPSKPTVGLWKWCKYLQKLEIKSCDVLIHWPQREFQSLESLNELTVESCKNLKGIMPVDGEPIQGIGQLLPRLKFLGIRNCQELTEIFNLPWSLKTIDIYRCPRLKSIYGKQEDSESGSAHAEQLTTLLSKRMPDPSSSAAAAATEHLLPCLEHLNIGHCDSFTKVPDLPPSLQILHMYNCPNVRFLSGKLDALDSLYISDCKNLRSLGPCLGNLPSLTSLSIYRCKSLVSLPDGPGAYSSLETLEIKYCPAMKSLPGRLQQRLDSLEEKDLSNMRSSDPWEGIHSAFHFSFLRAVDPLCPGGMYRKSGILLNKLFFACCVLLN

SEQ ID NO: 160279 - protein, 32 aa, Oryza sativa
  Clone ID: PAT_MRT4530_59572C.1.pep
KRVIGLISPASFKISYTERKNRPHNPKMDAGA

SEQ ID NO: 160280 - protein, 64 aa, Oryza sativa
  Clone ID: PAT_MRT4530_59573C.1.pep
MVSPPRARQPDPATAAEDDSEPLPVGALPKDVGGIWNQIVLAVSNEYELGSQANRATNGEGTGG

SEQ ID NO: 160281 - protein, 641 aa, Oryza sativa
  unsure (1)..(641): unsure at all Xaa locations
  Clone ID: PAT_MRT4530_59574C.1.pep
MQLNPKARTRRNKTKHLSNLVAIPSLSHENYKFLSPVGNPDPTEFIIGETNRVPFRLANPNLGHWKNTFISWLSLEKTPPEKSWTTWFKRMSASKRVHWDEIRIGQALDLTIANSAKDEPLMAAASYFWSNTINAFLFNQGPMTPTLVDITMITGLDVTSLANPMSLNTKNQYDFMTKSIGGWSGYVATYMGQGSITPRERVAFLLMWLEKSLLWIKLWPYNQLAVYSRSLGNKEAISFRKNPSRLLISNAKQCISQNSRPLSSRSSFYDGFLKEARIWFLYEDSSLLENLSDFRFEDINHERYQKSREVLLAAISPCILPVGIHQGRNIKTTEFSPPHQSNSNRNIKYAPGLIPNGGGPSPPIIGFHAPRTSTLLQGLIREPADASKKKRTRSSAVDASAPAPKKKAKLKKPMPTDDLPALDPSIEQALDEEEIGEDVDQAADKPPPPPSSPVQQSLSDQTPSAVERHHIEEEEQPAIPTIPALADLFSFEIKDYLDEETEEDTTSKSLAPLSDDVKKTLEDISHRLEASSLDNLVVNCGPIRTRLHEIHALIPDELADVLTLAIYLEQHQFKLEKSQTKISRMSGAQTYIEATIQANRQLVHEEKAKLDQLSEGPIKSIIDRXQLEECNAELDMEHKML

SEQ ID NO: 160282 - protein, 76 aa, Oryza sativa
  Clone ID: PAT_MRT4530_59575C.1.pep
EIRWLFSCFPLGAGITLWVQPSAGLLACPLLLGFIFPLLMVGCFCDSWVWYSGSPKNFPVMYVLFLGQFQPLPFSV

SEQ ID NO: 160283 - protein, 133 aa, Oryza sativa
  Clone ID: PAT_MRT4530_59576C.1.pep
IFFFFYLHHRFFLNILGAFSFLHTYLSISYFFSNYKNTGEHKTHYFLQAYKKKTPTHFTNFTPSPKREKKNLQPNPKGLPPPQGGSTKYPNPFKKQRGFEKTGPLSKNVTHRTNGFGNRAQKTTPGPPEPQKP

SEQ ID NO: 160284 - protein, 268 aa, Oryza sativa
  Clone ID: PAT_MRT4530_59577C.1.pep
MDSSLCTAQGSGWVKQRTLAAAAMDRASRSGVLSETASFADTPRSIYSSCNLQHLQSQSIRKIHEGALDISPRFSYCKPNASQDKILHRRFSLNLPEHMPGHYSRTVTERNQKAASKSITDLVVEIAALEQEVVRKELHLLSLYRKAFDQYLSESGSVTSEVDQELLKNIDEGALRLKDIKQSAAFNLPIVSDTKSEVSRSPSRHSSLVNFLSASISEYVPKISCKLSEDILSCIAAVYCKLGSVPLQDSEYITSPSPSVSSSSTFSP

SEQ ID NO: 160285 - protein, 83 aa, Oryza sativa
  Clone ID: PAT_MRT4530_59578C.1.pep
GNFSPNDQRITGLPGARALSCAEGSFMQDGYPRSNIDRSSMNPMTHQRPVLNRMPSGAPVPGHVPQMLPARPDIHTFNCWRPS

SEQ ID NO: 160286 - protein, 77 aa, Oryza sativa
  Clone ID: PAT_MRT4530_59579C.1.pep
RSCHAVPVFVAKLCFPHGIPEALVGNLGRVLNMRHTLPTSRVEHSLLFYRILIIHSIQNVFLLVSIDSCFNVRSGIG

SEQ ID NO: 160287 - protein, 511 aa, Oryza sativa
  Clone ID: PAT_MRT4530_5957C.1.pep
MARPLPVSPSTPSERRLATSEGFSLPGEVNRVSIWLRNLSCLHNRILIDITSNGSTIVVSSRYNGRKMKLEPMSFSEIFEDNLERMKNGIEEIFKDSIERTKNRIDEIFRDNRNKNNIVMPSTKSELLQNERNVVAIILDTNILYASKNNQGNEEEKKDGQEKDLSIVPCMLEEYSIDQAPIISEEEKKCSIDQAPIISGEEKKGNDNGATTTQGMHIYDVPTMSTIYATLEQPIVKTIAEIPLSQNNLFDVSCDKEELCDASLISVPQLMNEHVNSIVEPPCVEFKHVIHIGSENEELKLLSSLNTWGYIQFDDLCPVNYLEKKLFARFELPCPSDVIFHVIGNYDSKGEYNVGLQEGECCGFSTTKILGSNHMAIKKCSSPDVVIDKDKFNTLHDKALAISARSTGFRHAFGQIRLIEPFDGSNYAKWKADVLLNLGILDYDYAIREDRPEEPFSVEHDCEEKLKLYREKTNEWEKSNKISLMYIKSAISNVIIGRIEDYNYVRTYSDF

SEQ ID NO: 160288 - protein, 1410 aa, Oryza sativa
  unsure (1)..(1410): unsure at all Xaa locations
  Clone ID: PAT_MRT4530_59580C.1.pep
MAPAGRRGAKAHKWTTQPQLGDLVLAKVKGYPPWPAKVSKPEDWDQMPVPRKVFVVFFGTREIFHCIACVFQFYLFSLWGFSAHIALPDLQPFTENAKSEVMDRSRNKQCPKKYIDSFAEAVVEICKAYDDLPKSSETTTCMLPDDQSEQPTEHLVKSPNNDEAPRSGQMEGDSPSDNLNTSGLGSGTEVDIKDGSXPKAEKEINPSEFLTLDPTVQIVCALEVPKKSKAAKQSKNAERKDNKRVNVADISGRTTPGAVLDTELKRSAEKDSKGFKKSKLMMKQSVSNESEKIDHKRIMVDKSDKLLARKSSSVFSSNKKPLPGSEQRKLDNSTDMRPAKRPKLMDRANETVKTEAKSETSLHADNEKDSALKIEKSIPAEAVSNSVPKIGVGDDWTRRSGSLLSPLARLHSQGSEPASGSTQLSAVDTAKKVSSLKENFSRVGKPLAKPRRRACRFGDDDEEEQRTPPHKSSVKSIPMRGVPTEKFQSQTGVRGISSSQIGNASAMKFGVAREEKPKSIGRSPVEHEPDYTSPNQDKMHGRLQIMGKRSTTSSVDTSASLGNKTNLADRRSSGQLRMAASSEVKKTQGSSSKLLHQTPGNLHSQNPDDSEKNALLSKSENSKAKTKSGTQITATVEGRISTAMQAERIGKMDHSKEQRSDFVDKAAFAEPNSDPVKSMKHLIAAAQARRNLIAAAQGKSDGLSADNTVLSSTPYGLPGLSPGPVFHIPSASRIIPESDGMQFPDSFCAITEPGQQVAMKNLLEIEHEHGKSPKTRQSSDSLSGGTDAAIARDALEGMIETLSRTKDSIGRATRHAIECSKYGIAAEIVELLVLKLENEPNLHRRVDLLFLIDSITQCSHSQKGVAGVSYVPTVQAALPRLLGAAAPPGPGARENRRQCLKVLRLWLERKIMPEGILRRYMDDIEVPNDDANTGFLLRRPSRAERSVDDPIREMEGMLVDEYGSNANFELSGILSSNVFENDDDFPGLSPAISLPVQSGRMQENEQAIAPNFVEENIRLPKDVTSDVPMEDASLLPRDKQQTDGAIPVVHDLQHEIDREQALADQNELPPLPDGPPPLPLDAPPPPPLPEGPPPLPSDSPPCQPPLPPSPPPATPPPPPPLSPSLPPPPPPPPLPSGPPPQPAPPPLPIQPPPIPPPPVPSSPSSLGYQPPAPEYFRASNIQKYSWLNNKLILMQSNQLNQMAGNASIQGIGNMTNFIPGGSVNTQAAVNFTPSVPPDYGNNNLYIKPQGSNGNFQFRPTGVPFQQGTFSAFPSAQTPPVRPHTHLTQMNPVGQQAVPPCNPYAVQSFPNNQSQYTSDEQWRMTSGNFSPDDQRNTWLPGARALSCAEGSFMQDGYPRSNIDRSSMNPMTHQRPVLNRMPSGAPVPGHGHVPQMLPARPDIHTFNCWRPS

SEQ ID NO: 160289 - protein, 70 aa, Oryza sativa
  Clone ID: PAT_MRT4530_59581C.1.pep
KKERTKKYIYSANNTLQPSPPHISHISNTCCGDHMVGSLGAVVGATSKSYTYVYITMPRFSISARLVSRP

SEQ ID NO: 160290 - protein, 524 aa, Oryza sativa
  Clone ID: PAT_MRT4530_59582C.1.pep
MATRVKDVARRSSKKYVDEALYRRLFRRGSTPQAVREEVDGFLDSRKRAFKWEVGVCVRRLRKQALYRPALKLSEVMARRGMNPTVSDQAIRLDLVAKSRGIAAAEKYFLDLPETSKTHLTYGALLNCYCKDLMTEKAEALMGKMKELNFAFTAMCYNSLMTLYTKVNQHEKVPSVIQDMKADDVLPDIYTYNVWMRALAARVDIKGVERVIEEMKRDGRVTPDWTTYSNLASIYVDAGLFEKAEAALKELEKWNTSNDLEAYQFLITLYARTQNLVEVHRVWRSLKRNQPRRANMSYLNMIQALANLKDLPGAEACFKEWEAQYINPPKTNTKAPGTAETSSNESDVKATKDKGTDGELKHPKYDIRVANAMIKAYITEGMFDKAVAVKKRAKMRGGRLNAKTWEIFMEHYLKEGDLKMVHWCADRAIKKGHSAGRIWVPPHEVTETLMDYFEKNKDVDGAEKFVEVLKKVQKDLGTVVFEPLVRTYAAAGKKLPGMRHRLKIENVEVSEETAKLLDSVCIDQ

SEQ ID NO: 160291 - protein, 139 aa, Oryza sativa
  Clone ID: PAT_MRT4530_59583C.1.pep
PTRPPTRPPTRPPTRPIPIAVGLVDSTGKDMPLTSIYSDGMLQSLTSDGQPVFTTVLQFNKKEEEFIFNNIPEKPVPSLLRGYSAPVRLDSDLTESDLFFLLANDSDEFNRWEAGQVLSRKLMLSLVADFQQQKTLALN

SEQ ID NO: 160292 - protein, 81 aa, Oryza sativa
  Clone ID: PAT_MRT4530_59584C.1.pep
MLKNTMKLEEKTKQLDTENTQLFTINMHLDRHKAHFKHIEKMKTKRMIYSNPSFQLDYKMSLQGEMMSLSSSIASGPIGES

SEQ ID NO: 160293 - protein, 332 aa, Oryza sativa
  Clone ID: PAT_MRT4530_59585C.1.pep
MQSEEVKMRFGRCPYCRAMIYQNPKAVIFYCSRCRTPIRGKNPEPTDEAEYALSRLEILSADTASVFSDEPEDAGSDRRADEVRPLSRRTKRPSSSSDWTTTTDSERSEEAFYTPRNAQEGRPWQSPSPVSSQELGASGGGGGLPRPPDEPGAVAAARLMDPAFHKELLHALDNLRSLIVTIEQPRPASGGGGRALTRRDSRLFRRLESQLERALPPQDTASTSASSSSCRGDRGGGRPSAPARREGTDPCRPVLGGAPFVICGKCSELLRTPPPPRPRRRRWTTRIRCGECNEVLELSLPAGGVPAQHRPIRTCSAPLVSDHHRPLPRRLE

SEQ ID NO: 160294 - protein, 148 aa, Oryza sativa
  Clone ID: PAT_MRT4530_59586C.1.pep
MRELSDANMDEDVQHHDQRVVCSSVLMASPLAVGDYEDVMSSGSTQDIPEVCDETSQPGQEHDQSDGFEAKVISGDKDLYTEEHVRQQLETLRTITGYRSPFSSTLEGELAALYLFIGVEPPVSSRNASDLMEINAKLRLLKSIVGVD

SEQ ID NO: 160295 - protein, 51 aa, Oryza sativa
  Clone ID: PAT_MRT4530_59587C.1.pep
AFLYKKDIGLLTCDVIRLSLSIIGRSHTSSHSPGAVYRASSPKHAPDRRRR

SEQ ID NO: 160296 - protein, 66 aa, Oryza sativa
  Clone ID: PAT_MRT4530_59588C.1.pep
QYHFPHFLPSPTLPWTSPAAAAAAASRRGGCKRSGGSRSPTSSLRRRTTEDTGADPRAAGQEPGCH

SEQ ID NO: 160297 - protein, 86 aa, Oryza sativa
  Clone ID: PAT_MRT4530_59589C.1.pep
KNWTHISNIIAPKCEMLSLNSLYFSVTKNTNYDRFYQKRQKLFYQKNVRFFFFFLLSLKLINWKMRLLRIGVLLLGVNILVFYRFF

SEQ ID NO: 160298 - protein, 73 aa, Oryza sativa
  Clone ID: PAT_MRT4530_5958C.1.pep
KLYHRMYEYYGLLDLTLIILEKCNVLHVFVLDDKSNNPLNRIAHLWLTPFPSVNAEYYLVEHNMHSPQHAPIY

SEQ ID NO: 160299 - protein, 374 aa, Oryza sativa
  Clone ID: PAT_MRT4530_59590C.1.pep
MAAAVVVAGEAAAAAAAAGAGGKKRGASRSWILFDAAGEERVLDADKYAIMHRVDINARDLRILDPLLSYPSTILGRERAIVLNLEVLLRDPLDDNVIPVVEELRRRLAPSSATQHDVEGAEEDESPFEFRALEVTLEAICSFLGARTTELESAAYPALDELTSKISSRNLDRVRKLKSGMTRLNARVQKVRDELEQLLDDDDDMADLYLSRKLAGAASPVSGSGGPNWFPASPTIGSKISRASRASAPTIHGNENDVEELEMLLEAYFMQIDGTLNKLTTLREYIDDTEDYINIQLDNHRNQLIQLELFLSSGTVCLSLYSLVAGIFGMNIPYTWNDNHGYVFKWVVLVSGLFCAFMFVSIVAYARHKGLVGS

SEQ ID NO: 160300 - protein, 165 aa, Oryza sativa
  Clone ID: PAT_MRT4530_59591C.1.pep
HERKLAGAASPVSGSGGPNWFPASPTIGSKISRASRASAPTIHGNENDVEELEMLLEAYFMQIDGTLNKLTTLREYIDDTEDYINIQLDNHRNQLIQLELFLSSGTVCLSLYSLVAGIFGMNIPYTWNDNHGYVFKWVVLVSGLFCAFMFVSIVAYARHKGLVGS

SEQ ID NO: 160301 - protein, 184 aa, Oryza sativa
  Clone ID: PAT_MRT4530_59592C.1.pep
AAAAAAAGAGGKKRGASRSWILFDAVGEERVLDADKYAIMHRVDINARDLRILDPLLSYPSTILGRERAIVLNLEHIKAIITAEEVLLRDPLDDNVIPVVEELRRRLAPSSATQHDVEGAEEDESPFEFRALEVTLEAICSFLGARTTELESAAYPALDELTSKISSRNLDRVRKLKSGMTRLN

SEQ ID NO: 160302 - protein, 94 aa, Oryza sativa
  Clone ID: PAT_MRT4530_59593C.1.pep
MHFCLLTNKPNPDPRLRPPARSSPAPKLSFMAAEAAYGGGGGYRMLPQAEMPIGFRFRPTDEELLLYYLRHMAMLGALAAVVRLVVQLFHQHSW

SEQ ID NO: 160303 - protein, 77 aa, Oryza sativa
  unsure (1)..(77): unsure at all Xaa locations
  Clone ID: PAT_MRT4530_59594C.1.pep
LWFILYYFSLAVXTKTFKGVAXPGXADTFNLHFSCWNILTLQHPSLTWSRVRHSVVHLLVALAYDGTGTGDLFLDDC

SEQ ID NO: 160304 - protein, 98 aa, Oryza sativa
  unsure (1)..(98): unsure at all Xaa locations
  Clone ID: PAT_MRT4530_59595C.1.pep
MGXKGRXGXEKXGXQXGARFAXGKAXGXXVRKPTGAAWALAMAAKLRERPLSHGWMTAAVSHGGRCLLSTDADDVVLRDVIRTLETQEEGDTAMGRSS

SEQ ID NO: 160305 - protein, 275 aa, Oryza sativa
  Clone ID: PAT_MRT4530_59596C.1.pep
MGQQSRRFLRIRHLLLPSRPSSSTSSSRGAPPGKRSHEEASGGRAGQSPSPSRTLAIAAIARAQQESSFTAKGHAKGIQGEGATAARRRRAKEKASPDLVSEAQQQEKAGGGIRALWSKADELRILEAMANHVNTHRSTLWDTCRLFPALASSLDKRDADLPDLADKVHKRKRCHWKGVFTVPPTASSSGSCCASDGTSVPLSSAARRAERERRRRASVGLREGVLKVKGRANLTVDAKDKLLLQLERRDAERAKTSSAAPPTRHVIAAPAVRPR

SEQ ID NO: 160306 - protein, 445 aa, Oryza sativa
  Clone ID: PAT_MRT4530_59597C.1.pep
MSFRSIVRDVRDGFGSLSRRGFEVRLVGHRRGRSHSAVHELRDGHAAAAAADVVQSSCWANLPPELLRDVIERLEASEAAWPSRKNVVACAAVCRTWRDMCREIVKNPEFCGKITFPVSLKQPGPRNGAIQCFIKRDKSTQTYNLYLCLSSAVLVESGKFLLSAKRYSRATCTEYTIFMSADNTSRSSNMYIGKLRSNLLGTKFVIYDTQPPCNTANVSQSGKTSRRFYSRKVSPKNPSSTYSIAQVSYELNVLGTRGPRRMNCVMHSIPASSLEAGGTVPCQPDSVLARSLDESFGSISFSKSSIMDRSIRFSSSRYSDISVGGPMVGGQALGDSDESKERPLILRNKAPRWHEQLQCWCLNFKGRVTVASVKNFQLVAATQPAAGAPTPSQPAPPPPPDHDKVILQFGKVAKDMFTMDYRYPLSAFQAFAICLSSFDTKLACE

SEQ ID NO: 160307 - protein, 50 aa, Oryza sativa
  Clone ID: PAT_MRT4530_59598C.1.pep
NCLLCILSSTCIRTIRHVMLPSYSPFVCFCNTICFNCSLLYMSWLIVSYG

SEQ ID NO: 160308 - protein, 57 aa, Oryza sativa
  Clone ID: PAT_MRT4530_59599C.1.pep
NSRHKPSMNITIQSANYYSYRQSKYASTEQPVKKNKRKGECRDTDTTQQHLQIREHV

SEQ ID NO: 160309 - protein, 388 aa, Oryza sativa
  Clone ID: PAT_MRT4530_5959C.1.pep
HPRRAHDHRQPTAPSGGCRAFTRFLREVRWPEKFRLGTIEKYDRSTDPEEFLQVYSTVLYAAGVDDNALANYLPAALKGSTRSWLVHLPPYLISSWTDLWQQFVANFQGTYKRHAIEDDLHALKQNPGESLRDYIRRFNECRNTIPEITDASVIRAFKSDVRDRYTTQELATRWITTARKLFEIVDQCTHADDALRRKNDKPKTGGEKKPAKDAPEASKRKSRRSRKRKAQTEVLTAEYADPPKHLDPQDLVEKLELPTQPHPHPYYIKWFNSCGKFKASENKQGNGKEKKDEEEKDLSLAPCMLEECLINQAPIISEDEKKEDRMHISNSLSSSSSCLNELQVGLQEGECCGFSTTKILGSNHMAIKKCSAQDVVIDKDKCNTLHDK

SEQ ID NO: 160310 - protein, 128 aa, Oryza sativa
  unsure (1)..(128): unsure at all Xaa locations
  Clone ID: PAT_MRT4530_595C.1.pep
FIFENRIYNKTIINNCLTKKKKETAKKADDDLEHIPTELQEYSMTSVTEGIDAIATTRVVVTGDVSDSKHALTGHSFNRAFSGSGGALDIVVSSVRAYLSAXNKMSSFVGAIKASSEVSESQRVQTTE

SEQ ID NO: 160311 - protein, 85 aa, Oryza sativa
  Clone ID: PAT_MRT4530_59600C.1.pep
WYNLIYLLCWTFRSNLLGTKFVIYDTQPPCNTANVSQSGKTSRRFYSRKVSPKNPSSTYSIAQVSYELNVLGTRGPRRMNCVMHS

SEQ ID NO: 160312 - protein, 121 aa, Oryza sativa
  unsure (1)..(121): unsure at all Xaa locations
  Clone ID: PAT_MRT4530_59601C.1.pep
KKTPNKGSPGCASQVSHVNQGACXNRFGTTPFQLISMAPRVLPRAVCHKSQHMKAFNPYHRFNQHGLQHVECIIADSARALVLQATNNANHLVPFHQMWAPWPVVHKDSANGHPKSPLPVA

SEQ ID NO: 160313 - protein, 64 aa, Oryza sativa
  Clone ID: PAT_MRT4530_59602C.1.pep
STSYLALLCLSLAFARSITTMARNAALALSGCLLGAAETSASTYCPASSTPKPKHQTRSIASPN

SEQ ID NO: 160314 - protein, 35 aa, Oryza sativa
  Clone ID: PAT_MRT4530_59603C.1.pep
QAQCTGHELRPIQHLIHILEPILSNNILLPSTDVC

SEQ ID NO: 160315 - protein, 129 aa, Oryza sativa
  Clone ID: PAT_MRT4530_59604C.1.pep
MTSIADGSLGHRVATADSLLAEKEEDAGGCGREMRSGGGSAVCGRPGAQAATLPLGEQSQSEAATAAARFSLHSLDAGGRKQEAADDARRRAVMPPHRPPLLSTARVVLVWERDKPLRHGAYQWQGRLG

SEQ ID NO: 160316 - protein, 219 aa, Oryza sativa
  Clone ID: PAT_MRT4530_59605C.1.pep
KALQPFSQGVADAVVFSAAAPRGAPHSCDPVLPRRPGSKGLRFISVPGDLGGCASAGTSLGVLLGVGPLWAGSPAVAPRRPGAAGTDPKALVSKNYQATCFAGPRLEDGKMCSWWMVDIGPDHQLMCNYYTVRQDGSATFMRSWVLQGSMDGRSWTSLHVHEDDQTICQPGQFASWPITGQTALLPFRFFRVMLTAPATGVSNTWNLCICFLELYGYFR

SEQ ID NO: 160317 - protein, 116 aa, Oryza sativa
  unsure (1)..(116): unsure at all Xaa locations
  Clone ID: PAT_MRT4530_59606C.1.pep
MIGQIHLLNGQIWLSQSALPLVGPMPERLISXPTLVLPVQLTAVEDDAAAXRHDDEHHPRPPACRRRCFGLRLLPQRKRRRLRSRPXHIRHCRLRSASXRPHPPASSSFSARSESA

SEQ ID NO: 160318 - protein, 198 aa, Oryza sativa
  Clone ID: PAT_MRT4530_59608C.1.pep
MDLVLEDARNMLKDQHLNMLSSVHPQRQESTDGSGNGLGARTPAGRWADGVAAGDGEDERCRWRLQLAKGNAATTTRTAAAARKEPTQPGPGILDFRRRRLERRESDPRFGGGAAVTRVKAPSPSANACLPGQRAKQRLATTPSCVVLGVAAENEGTDDDGPWQQGGQKGGQGGVANLGYDWSSLMDISADFIWVDRV

SEQ ID NO: 160319 - protein, 131 aa, Oryza sativa
  Clone ID: PAT_MRT4530_59609C.1.pep
MGPTGDATPAWARGTASVPLASQAHRADPLAGHARPACLRRYNCWSVARGWLTPPLGRFAMLRVWGVGPTWCRVSQLRDKRGAAFPSCGTVSVSRVLVGHCIDMLSRRGTVVVLHFRPMGTWRFRSPVLQE

SEQ ID NO: 160320 - protein, 184 aa, Oryza sativa
  unsure (1)..(184): unsure at all Xaa locations
  Clone ID: PAT_MRT4530_5960C.1.pep
MVGYISYGHEIKLDGRQTVAATSPSTDARDDSTLVQQVLSSQMEKAEQWQYHELFETKFVVKDRACRTIIDSESCNNLMSSDLVEKLELPTQPHPHPYYIKWFNSCDNLERMKIGIEEIFKDSIERKKNRINEIFRDTRKDTIVMPSTKSELLQNERNVVPIALDTNILXGSKNNEGWFARRGV

SEQ ID NO: 160321 - protein, 83 aa, Oryza sativa
  Clone ID: PAT_MRT4530_59610C.1.pep
INACVRSCVCQSCVMLQTPRTPEPGGRSAFVAGQAKLVGSELLPVTSFSFRGSCTISSVLVYPTQLMLSNGWVRKKKKKKDGP

SEQ ID NO: 160322 - protein, 74 aa, Oryza sativa
  unsure (1)..(74): unsure at all Xaa locations
  Clone ID: PAT_MRT4530_59611C.1.pep
MADTLRHAFRSSTSTPSXISNDHDLKFGHIQIKKGLFSLFSSIWMIEGRDRHFLFSLFSSAPSSSTAVASLPAP

SEQ ID NO: 160323 - protein, 87 aa, Oryza sativa
  Clone ID: PAT_MRT4530_59612C.1.pep
MPRPFILFATVFYQSFRCGTRITHFTSGLSYRLAIGSAWYAYVSLVRIYRVAPCVFVRYTTCASSSFMLVSYAAWRNLDTSYFSVPT

SEQ ID NO: 160324 - protein, 161 aa, Oryza sativa
  Clone ID: PAT_MRT4530_59613C.1.pep
MAPGTKAVAAAAGRRGCIRSTRGPWTVRRRGRGGGVTTSLRHPTARERENNRQRERRRRQVATRIYAGLRAGAGYALPKHADQNDVLRALCAEAGYLVDDDGNVSRRHDERLAGAGAGGGGSSDQLQVSSYSGATEAAVAIQHQEQEQEISLELTLSFTYM

SEQ ID NO: 160325 - protein, 123 aa, Oryza sativa
  unsure (1)..(123): unsure at all Xaa locations
  Clone ID: PAT_MRT4530_59614C.1.pep
MERTGRQLERDLEAWRISKGVQVKMEAQTMSTSRTFQSSGPVCTKTEAHVAYMHGLGHSLYGWKGISLLGEVXPCFDTVDNQRRRGAAIAGLKSVFVQXAKSICIATPPNCLSIRTFQKIRNP

SEQ ID NO: 160326 - protein, 619 aa, Oryza sativa
  Clone ID: PAT_MRT4530_59615C.1.pep
MARSTSLTEAEAGITCFASSLPGFRGVLKHRYSDFIVHEVARDGSVARLTSFDLPDECVDVSEEDKAAPSADADHSQALESFRALCGDADCDALKGLLEKASAGAEADVSPVILSPDADKAHRSEVHNFFKRSFKFLVTDTVEHNDGVQRCIRVRLGSGARGGRGAGGRSGGGRGRKRKNMGGSDWRDDRPFDSRGSTSWPNHVGKFLRFHLCKENKDTQEALGVIGKMLGLQSRSFGFAGTKDKRAVTTQQVTVFKISANRLAALNNRLFGIKVGNFSYVKEGLVLGQLMGNRFTITLRGVVAESEDIIKASVEGLGKNGFINYYGLQRDDIREMREHYKEHGDIDMALRNFPRHLVAEKAILQCLKKCPGNYLQALKSIPRTLRMMYVHSYQSYLWNHAASARVEKYGISQAVEGDLVYSKEPPPGEATSVDTSEPCDDQINSSDIDLCSETLPEETIQSVKIVDSEDLLKGVYTFEDVVLPLPGSQALFPGNGIADIYHELAKKDGISLTENAHGVKELMTYTDDTASLAETDLDVLSRNKPTKAKEVNETISSAISNAQSHDSKVAGPLDSSMPGHVSENTRLLILLLTSILYGESSKPHLRGVDIVKQHELYCI

SEQ ID NO: 160327 - protein, 128 aa, Oryza sativa
  unsure (1)..(128): unsure at all Xaa locations
  Clone ID: PAT_MRT4530_59616C.1.pep
PRHTPSSVYGDRQERSSTISDLDRSIFEEEDXPVVDYELMNKEQHXLRPTGCRAITCQIRGPNLYKNPCLHLFYLNLTYTLVPAIPIPSKXRSRDLKLRQINKWSTTNGREIGHRDCSGQRGVLSKMS

SEQ ID NO: 160328 - protein, 137 aa, Oryza sativa
  unsure (1)..(137): unsure at all Xaa locations
  Clone ID: PAT_MRT4530_59617C.1.pep
ETEAHEGDESKLPLQLAIVGRPNVGKSTLLNTLLQEQRVLVGPEAGLTRDSIRTQFQFDNRTVYLVDTAGWMERSGKEKGPASLSVVQSRKNLMRAHIVALVLDGEKIAKSKSSMNHPEVLIARQAIEEGXGLVVIV

SEQ ID NO: 160329 - protein, 82 aa, Oryza sativa
  unsure (1)..(82): unsure at all Xaa locations
  Clone ID: PAT_MRT4530_59618C.1.pep
MVLIRLTMLIFIAILLAGRTCVLLVAGRGMPATFVFGDSLVDAGNNNYLVSLSKANYPPNGIDFDGXSPPGRYTNGRTIVDI

SEQ ID NO: 160330 - protein, 110 aa, Oryza sativa
  Clone ID: PAT_MRT4530_59619C.1.pep
MAGMGTSGRSGWWAVGSAGAVLEGAVAREQGRYFMSRIWAGLLAGVAQKQHPRTRASRAQRFSEGRLRIIPPRGVVRERGRGEATNMSGMSWVEVKKGSRIPGYVCNTKV

SEQ ID NO: 160331 - protein, 49 aa, Oryza sativa
  Clone ID: PAT_MRT4530_5961C.1.pep
MAGPPCPSPAVARLPPPLLAGETAAFPRVTTLLPRRHHKGSDNATIHPL

SEQ ID NO: 160332 - protein, 248 aa, Oryza sativa
  Clone ID: PAT_MRT4530_59620C.1.pep
MWSPWVRRGRATGRLTQSPSFSPSCVASPPSSGGGGGGGGGKADHQGIGSVLDDDDAAPAPPGPGSRNVLHRVRSSTKLRACKSFAVAAEAAAAAVAGERRVVLYFTSLRAVRGTFEDCRDVRAILRGLRVAVDERDVSMDAAYLAELRALMRRDRPALPQLFVGGRLVGDADEVRLLHESGELHRVVAGAARAAATPCASCGGTRFVPCGTCDGSHRRYSEKTGGFRVCTACNENGLVRCAACCSGG

SEQ ID NO: 160333 - protein, 537 aa, Oryza sativa
  unsure (1)..(537): unsure at all Xaa locations
  Clone ID: PAT_MRT4530_59621C.1.pep
MAELPPEGRGGGGNNNGKWKGKEKVVPEHGKNRHGMPVGCYFVPKDXLELFAILRCKLVRGQLPGALNNVFEHIRILEFHPALLHETYIENEEDGYIYFFSRRQFATKAGNKRRPTRVAKGGTWKASGGSKTVRSKKVGGIDVGQKLTMVFYERRFEGDRNPIKTNWGMHEFTKIIDGSKNQLPGSPXDLAVYRLYKIKRKEDEEPSNTAAAASSTDEPSTSSALPPPTPPRPLPDMAGPSSATPLLPLQLPGLAGSSSAMSLPALQLPGMAGSSSAMPLPPLSLPGLAGGMMSMADQANMASTSQASTPSSELLQDWYDEFEITYGAVAPPSPSTISWVAPQSSPTGWWPSPNGGPVQHDGYLGMAADPTSYMLENLLPTAAIPPEPMMPPTSSPAPPPAVDHHHRLSPPHDAAGSNYNHPELADYNGGVQAQHEHQYHPQEPQASLVDAEDGYSAMAGGDDAQLGGAELDTERIAEMVNHIMDGEFEFKFEDNTVLKYNEVFPDNDEVVAAPMMIDGGRDGDGADGGDGDDPFDN

SEQ ID NO: 160334 - protein, 145 aa, Oryza sativa
  Clone ID: PAT_MRT4530_59622C.1.pep
GTFGSGRRISVKRLVQMWHARSVTYSAAPGRCPVKMQGARKASRSVRLAGAPNGSRGPDGDLKAPGWVPCGALNYLSFDIRASIENYKKKIGRGRLCTDRNPLGPVRDIHGSRKVPCRRPTGILKAPGQVPRGSLNYVSSGIRTS

SEQ ID NO: 160335 - protein, 161 aa, Oryza sativa
  Clone ID: PAT_MRT4530_59623C.1.pep
PTADLGIDIGTMHDAMLYDIMLISDDDNDDTNILNNIRKTKCEPKNEKEKAKEAAAAAGDGLSEVQNKIYDIMYKLADIPFLEPYLTQIIAVIDKGEKQANITIGIMICIVVSIVTVLLTILFRSLKPAATAKPAAKVKKPESTAYYTACNTGGNEDDKED

SEQ ID NO: 160336 - protein, 369 aa, Oryza sativa
  Clone ID: PAT_MRT4530_59624C.1.pep
MLDCIIVNSVCVLCVCAVRSFPPLPRKAPQLPEFNEFHLKTMERATRHADTCSEASSVGTIRSQSSKPLTLTAPKPPQLETALRARPPRVKSSQELELEELEKAPKFKAKPLNKKILESKGDIGVFPHLKAQPTAPKEFHFSTDDRLGPPAVVDLFDKERGHEKERQLAAQLLQKQLQEEKARIPKANPYPYTTDYPVIPPKPEPKPCTRPEGFQLESLVRHEMEQQRIMEERERMEREEAQRRVVKAHPIMKEDPIPLPEKERKPLTEVQPLKLHVDERAVQRSEFDNMVKEKEITYKRLREENEFAQKIEEEKALKQLRRTLVPQARPLPKFDRPFRPQRSTKQVTRPKSPQLQVDQRGARRHAFIR

SEQ ID NO: 160337 - protein, 122 aa, Oryza sativa
  Clone ID: PAT_MRT4530_59625C.1.pep
FWFFFFFFFFFFFFFFFFFFFFLLCWCSRAKPREKQGKKKPPAEKTGAQHQTRGAPKKGGKKKGGRKPPREGDTDTGPRRGGNKTQRGLRAKEPGRGKQHTWLLPQEGRHNPPGEAGGAPTP

SEQ ID NO: 160338 - protein, 767 aa, Oryza sativa
  Clone ID: PAT_MRT4530_59626C.1.pep
MATDANPEAAAPPPQLLVDEGYEFCAPKFFDFVCDETEEEIRAAERWFEASASHAPSPFAPRIKESRAEVKIESLCDFTDAEPIPKEVAVEEAAGSAANPSQNSDGNVQQNKDGSIKLVHEANPSENCVTDGDHKHQESDAMLESPPAEEDEKESPKSFEFVPSNAKSADVASSTPKIQRPPPVKAVTTVPTCPKLTVKTEAFTPKVQATNSSRGLAPLTGSRAHPSALKQSMSVKRSVIKCPRELLAGKAATAANEIAQENQAVKRQKLDDGRTRQILNVKTRTLPHKGRGGGLAGSTEMSLSAMRKHRDDSHSLKEVTHYISAAEMVKKFESGTRELAIPHNRSLSHEDAATALQRRTKLMLTRPKEPEFQTSHRVRAVRVKSSAELEEEMLAKIPKFRARPFNKKIAEAPSFPPLPRKAPQLPEFNEFHLKTMERATRHADTCSEASSVGTIRSQSSKPLTLTAPKPPQLETALRARPPRVKSSQELELEELEKAPKFKAKPLNKKILESKGDIGVFPHLKAQPTAPKEFHFSTDDRLGPPAVVDLFDKLSLCSESSYHSKKDVPRLTIPNPFNLHTDERGHEKERQLAAQLLQKQLQEEKARIPKANPYPYTTDYPVIPPKPEPKPCTRPEGFQLESLVRHEMEQQRIMEERERMEREEAQRRVVKAHPIMKEDPIPLPEKERKPLTEVQPLKLHVDERAVQRSEFDNMVKEKEITYKRLREENEFAQKIEEEKALKQLRRTLVPQARPLPKFDRPFRPQRDD

SEQ ID NO: 160339 - protein, 262 aa, Oryza sativa
  unsure (1)..(262): unsure at all Xaa locations
  Clone ID: PAT_MRT4530_59627C.1.pep
MQGGDHGGMEMGVGSFTGGGGGGECSSSSATAAAAAAAAAAAAAAEAEERQLLKGEIAVHPLCEQLVAAHVGCLRVATPIDHLPLIDAQLAQSSGLLHSYAAHHRPFLSPHDKQELDSFLAQYMMLLCSFREQLQQHVRVHAVEAVMANWHNNSQTSTLKSKRKRXRAEKNVYLTYSLIKSKEDMFLRKRRAGKLPGDTTTILKQWWQQHSKWPYPTEDDKAKLVEETGLQLKQINNWFINQRKRNWHNNSQTSTLKSKRKR

SEQ ID NO: 160340 - protein, 69 aa, Oryza sativa
  unsure (1)..(69): unsure at all Xaa locations
  Clone ID: PAT_MRT4530_59628C.1.pep
AHXXGEFGISSXVIHRXXKXXXXXXIXPKLXTPTPXXXPSPXXQPXRXAXXXXXXXXXSXXSSXXXXQW

SEQ ID NO: 160341 - protein, 196 aa, Oryza sativa
  Clone ID: PAT_MRT4530_59629C.1.pep
MQAQYMMLLCSFREQLQQHVRVHAVEAVMACREIEQSLQDLTGATLEEGTGATMSEDEDETAPMLEGPMDMGSDGHDLMGFGPLMPTDSERSLMERVRQELKIELKQGFKSRIEDVREEILRKRRAGKLPGDTTTILKQWWQQHSKWPYPTEDDKAKLVEETGLQLKQINNWFINQRKRNWHNNSQTSTLKSKRKR

SEQ ID NO: 160342 - protein, 191 aa, Oryza sativa
  Clone ID: PAT_MRT4530_5962C.1.pep
MACARDESTLVQQVLSSQMEKAEQWQYHELFETKFVVKDRACHAIIDSESCNNSVSSDLVDKLELPTQPHPHPYYIEWFNSCGKFKASENNQGNEEEEKKDEEQKDLSIAPCMLEECLIDQAPTISEDEKKGKDNGATTAQEYRMHISNSLSMAIKKCSSPDVVIHKDKFNTLYDKVLAWAKEKRPSVMNS

SEQ ID NO: 160343 - protein, 38 aa, Oryza sativa
  Clone ID: PAT_MRT4530_59630C.1.pep
MTMTMRADSDDDANACPAMAMTMRCGSGWWEEASSDGR

SEQ ID NO: 160344 - protein, 455 aa, Oryza sativa
  Clone ID: PAT_MRT4530_59631C.1.pep
MGGSGKWVKSLIGLKKPDREDCKEKLQVPSVNGRGGGKGRKWKLWRSSSGDHGSLWRGSRGGGGGGGHHRSASSDASDDASSAAADPFTAAVATVARAPAKDFMAVRQEWAAIRVQTAFRGFLARRALRALKGLVRLQAIVRGRQVRKQAAVTLRCMQALVRVQARIRARRVRMSTEGQAVQKLLEARRTKLDILREAEEGWCDSQGTLEDVRVKLQKRQEGAIKRERAIAYAYSQQIEGATKCNFWTECVIFLVFAQQQPKPTSYGRLNQSGMLLKHQHFDKSNGNWSWLERWMAARPWENRLMEEHNQTNSSSPDLLSSKNCEDSFGILGDFSEPNSVKVRKNNVSKRVCAKPPVVSHHQRIKAQSISSLSTELHNDESSASSSSCFASTPISFSTFVTTEKTEDSIRARPNYMNMTESIKAKRKACNAQRTTAGKLMEDRKASGVELKVAQV

SEQ ID NO: 160345 - protein, 67 aa, Oryza sativa
  Clone ID: PAT_MRT4530_59632C.1.pep
GEKEAHQGLRPKPLTQKPVPGQCLSQGSNPDHLTGYHNLKTRWSKQPNLLDFCPRAAGDLLVQTSAP

SEQ ID NO: 160346 - protein, 125 aa, Oryza sativa
  unsure (1)..(125): unsure at all Xaa locations
  Clone ID: PAT_MRT4530_59633C.1.pep
MGRLLIGHLXPPPPPPLPPPPPPPLPPPPEPPPPLPPPPEPPPPPEPPPLPPPPPRPPPPPPPPPPPPPPPPGLGHEPHWQPHASEKVKKWRFRARSVAIHPSFRRHAHPPHCTCRISIYGLAST

SEQ ID NO: 160347 - protein, 96 aa, Oryza sativa
  unsure (1)..(96): unsure at all Xaa locations
  Clone ID: PAT_MRT4530_59634C.1.pep
KWGCCFERSDIHRGVEAAEIGTCGAAGAARPPPHAGLGLWAARLHHRSVRPGGWPPPCAPGRGGRAGQPGASPGRGGXAGRGRGEAPAYADSRARL

SEQ ID NO: 160348 - protein, 71 aa, Oryza sativa
  Clone ID: PAT_MRT4530_59635C.1.pep
MESGRGRREKKKKDSWAHYPWPVRPAIIGRSDLKGAAGQTGPKWPVRPPPSGRSDRAYSTGQTAWPPADCA

SEQ ID NO: 160349 - protein, 131 aa, Oryza sativa
  Clone ID: PAT_MRT4530_59636C.1.pep
CTLHCTTWTRTKLTAADRRAHGDGQQWLVGSRQWESVGRKVRGGGPATVDLASGGDGHPPHRSARMRRRWLEEQGGGDEGVRSTMSAGGRALPGSGGKLATTVPARIRADPSAVAGEAQWQRAASAHRRAF

SEQ ID NO: 160350 - protein, 92 aa, Oryza sativa
  Clone ID: PAT_MRT4530_59637C.1.pep
MAEAIVGPLVGRLQELALGQARALVGVNADIQKLKDKLMWLQAFLREADAKRRAVSDEVTKVWVLQTRDAVFDAEDALDHYYLQLDKSSMNM

SEQ ID NO: 160351 - protein, 45 aa, Oryza sativa
  Clone ID: PAT_MRT4530_59638C.1.pep
STIKLKKNFPPCSRKKFYSSVKFRTVFHPIINLTKTIAFPRTECQ

SEQ ID NO: 160352 - protein, 915 aa, Oryza sativa
  unsure (1)..(915): unsure at all Xaa locations
  Clone ID: PAT_MRT4530_59639C.1.pep
MNPDNFTHKTNEALVAAHEIASEAGHAQXTPLHLVAALAADKGGILRQAISQASGGDADAPDSFERVVSGAGKTLPSQSPPXCLKEAGVSAARVRAELEKLRGGEGRKVESASGDTNFQALKTYGRDLVEQAGKLDPVIGRDEEIRRVVRILSRRTKNNPVLIGEPGVGKTAVVEGLAQRIVRGDVPSNLLDVRLIALDMGALVAGAKYRGEFEERLKAVLKEVEEAEGKVILFIDEIHLVLGAGRTEGSMDAANLFKPMLARGQLRCIGATTLEEYRKYVEKDAAFERRFQQVFVAEPSVPDTISILRGLKEKYEGHHGVRIQDRALVVAAQLSARYIMGRHLPDKAIDLVDEACANVRVQLDSQPEEIDNLERKRIQLEVEHHALEKEKDKASKARLVEVKKELDDLRDKLQPLTMKYRKEKERIDEIRKLKQRREELQFTLQEAERRMDLARVADLKYGALQEIDVAIAKLESETGENLMLTETVGPEQIAEVVSRWTGIPVTRLGQNDKERLVGLADRLHQRVVGQAEAVSAVAEAVLRSRAGLGRPQQPTGSFLFLGPTGVGKTELAKALAEQLFDDENLLVRIDMSEYMEQHSVARLIGAPPGYVGHEEGGQLTEQVRRRPYSVILFDEVEKAHVAVFNTLLQVLDDGRLTDGQGRTVDFRNTVIIMTSNLGAEHLLAGMVGKNSMKVARDLVMQEVRRHFRPELLNRLDEIVIFDPLSHEQLRKVARLQMKDVAVRLAERGVALAFLDLVQAGTIYDCDIRSHVPRPIQEGRPYPDETRPPSGSPKGVSPWPFTGRRRWTSILSLSYDPVYGARPIRRWIEKRVVTQLSKMLIQEEIDENCTVYIDAAPHKDELAYRVDNRGGLVNAETGQKSDILIQVPNGAATGSDAAQAVKKMRIMEDEDGMDEE

SEQ ID NO: 160353 - protein, 116 aa, Oryza sativa
  Clone ID: PAT_MRT4530_5963C.1.pep
MVHARVASLEAWSSRPVAVDSGVYVDAAAARPSAVVVPAGAVAEGGSLGAEAVAVSGDGCVGMGPTVAAITNPGELATLESSAGRMQGLGQGMQPAVSLVTCCACLPVVAMPSRAY

SEQ ID NO: 160354 - protein, 965 aa, Oryza sativa
  Clone ID: PAT_MRT4530_59640C.1.pep
MNPDNFTHKTNEALVAAHEIASEAGHAQLTPLHLVAALAADKGGILRQAISQASGGDAGAPDSFERVVSGALKKLPSQSPPPDSVPASTALIKVIRRAQSAQKKRGDSHLAVDQLLLGLLEDSLISDCLKEAGVSAARVRAELEKLRGGEGRKVESASGDTNFQALKTYGRDLVEQAGKLDPVIGRDEEIRRVVRILSRRTKNNPVLIGEPGVGKTAVVEGLAQRIVRGDVPSNLLDVRLIALDMGALVAGAKYRGEFEERLKAVLKEVEEAEGKVILFIDEIHLVLGAGRTEGSMDAANLFKPMLARGQLRCIGATTLEEYRKYVEKDAAFERRFQQVFVAEPSVPDTISILRGLKEKYEGHHGVRIQDRALVVAAQLSARYIMGRHLPDKAIDLVDEACANVRVQLDSQPEEIDNLERKRIQLEVEHHALEKEKDKASKARLVEVKKELDDLRDKLQPLTMKYRKEKERIDEIRKLKQRREELQFTLQEAERRMDLARVADLKYGALQEIDVAIAKLESETGENLMLTETVGPEQIAEVVSRWTGIPVTRLGQNDKERLVGLADRLHQRVVGQAEAVSAVAEAVLRSRAGLGRPQQPTGSFLFLGPTGVGKTELAKALAEQLFDDENLLVRIDMSEYMEQHSVARLIGAPPGYVGHEEGGQLTEQVRRRPYSVILFDEVEKAHVAVFNTLLQVLDDGRLTDGQGRTVDFRNTVIIMTSNLGAEHLLAGMVGKNSMKVARDLVMQEVRRHFRPELLNRLDEIVIFDPLSHEQLRKVARLQMKDVAVRLAERGVALAVTDAALDVILSLSYDPVYGARPIRRWIEKRVVTQLSKMLIQEEIDENCTVYIDAAPHKDELAYRVDNRGGLVNAETGQKSDILIQVPNGAATGSDAAQAVKKMRIMEDEDGMDEEYTCRVQFLFLNWNEVTDGASTVDKLPGWKSLLSDWIAGHKSNIKRASGPWKPH

SEQ ID NO: 160355 - protein, 144 aa, Oryza sativa
  unsure (1)..(144): unsure at all Xaa locations
  Clone ID: PAT_MRT4530_59641C.1.pep
EKGWWXRKADKHSQIGTWQAAQWNMWSQLLEGRFLQKYAEVSTSETPTGEDSGGTPAERAVAESDRLLCTLPYLPAIFIRGHSWHLAATSRQGDKTILWHEYAFGTTQSVVGTYKIISGLQSLQRYIRDVFWPWYLRVILEIEH

SEQ ID NO: 160356 - protein, 71 aa, Oryza sativa
  Clone ID: PAT_MRT4530_59642C.1.pep
SVPLTQFFTLTSWNLLEQPDDVGTPASSSLEVSSAAHPPARSTSPRTAAAAGRRRAWWVAIGRRRVARTRG

SEQ ID NO: 160357 - protein, 117 aa, Oryza sativa
  Clone ID: PAT_MRT4530_59643C.1.pep
GVMDKVAKTDKKGVIKLHNYCTSVYEKGNARSALIAMLQSLNHAKHGVDVVSGTRVKTHFARPNWRNVYKRIALNHRDQRVGVFYCGAPVLTKELRELAQDFSRKTSTKFDFHKENF

SEQ ID NO: 160358 - protein, 976 aa, Oryza sativa
  unsure (1)..(976): unsure at all Xaa locations
  Clone ID: PAT_MRT4530_59644C.1.pep
MHHTRAGAADGAGGGGEDIVEAGAEAPPPQRERLVPHSGPLSKRSGMRKSARFAESVSAPLSAPSGVAAERRAAAGANDDDEEDYVEITLDVRDDSVAVHSVKPAGGGGEDSDVTLLARTLEKRSSSFGHSVIRNASSRIKQVSQELRRLASVNRRGGGGGGPRFDRSKSAAAHALKGLKFISRADGGAGWPAVEKRFDDLAKDGLLPRSKFGQCIGMKELEFAGELFDALARRRNISGDSISKAELLEFWDQISDTSFDSRLQTFFDMVDKNADGRITEEEVKEIITLSASANKLSKVQEQSEEYARLIMEELDPSNLGYIELYNLEMLLLQAPSQSVRIGTTNSRNLSQMLSQNLRPTAEPNPLRRWWRRASYFLEDNWRRVWVLLLWLAICAGLFTYKFIQYRHRAVFHVMGYCVCVAKGGAETLKFNMALILLPVCRNTVTWIRNRAAVARVVPFDDNLNFHKVIAVGITVGAGLHVISHLTCDFPRLLHATDAEYEPMKRFFGDTRPPNYWWFVKGTEGWTGLVMLVLMAVAFTLATPWFRRGRLRLPRPLNRLTGFNAFWYSHHCFVIVYALLIVHGYYLFLTKDWYKKTTWMYLAVPMFLYACERLTRALRSSVRPVKILKVAVYPGNVLSLHFSKPQGFKYKSGQYIFVNCAAVSPFQWHPFSITSAPQDDYVSVHIRTLGDWTRELKNVFSRVCRPPTEGKSGLLRAEYDRDGAMTNPSFPKVLIDGPYGAPAQDYKQYDIVLLVGLGIGATPMISIIKDIINNMRQLDGDLEDGDGNENSVSSASAAFKTRRAYFYWVTREQGSFEWFPRVMDKVAETENSKMNELHNYCTSVYLEGYARSDRILMIQXLIQAKYGVDVVSGTRVKTHFARPNWRNVYKRIALNHRDQRVVASGDLADGDKHDQSFEVECSIGSSDGLGAAVIKVEQEPAGVFYCGAPVLTKELRELAQDFSRKTSTKFDFHKENF

SEQ ID NO: 160359 - protein, 697 aa, Oryza sativa
  Clone ID: PAT_MRT4530_59645C.1.pep
MRALISLSKLTRRLLPSLAVARAPLPPLRRCLHAEPPPPPHHAPPPVASRILQSELTPGAGADADAEQEQQPAPDPLLDEFLARFVAALRPTLAAAFPTHARHVLDEMLRLVAEAVLCRLTGVEPEEGGAVELSDDLWAAVWEVSAAVRDGMQRDRVRAELRGYLHCEEVKEMTRFASDVGIRGEMLRELRFKWAREKLEEVEFYRGLDDMRAQAEAAANPVALPPPRLAALPQRKGEIKFKIHGLDLSDPTWGEVVERAAEAEAHFVPQEAKPIEGKAKKAEEKLMAVDPRKGDPAPAMEEWKEELLPKRADWMALLERLKARNVELYLKVIYPLLEGSTIVPYVAEILLADESFGATIRDYSKLIDLHSKANHVEDAERILGKMKENGIAPDVVTSITLVHMYCKVGNLEQANQAFQFLKGEGFPPDMKLFTSMIRAHLKSGEPKQAENLLREMERSIKPTKELFMDVILAFAQRGMIDGAERVKTSMLLAGFQLTPELYTSLIEAYGRGGHVGQAYTLFEQMRSSGHEPDDRCVAGMMVAYMMKNQLDHALSFLLKLEKDGLKPGVKTNLVLLDWLSRLQLVQEAEQVVQKIRKAGEEPLEMHVFLADMYAKSQQEERTRKSLKILEEKKKLLKAYHFERIIAGLLEGGFTEEANKYFKMMKSHGFVPSPTIEIGVKASFGVRGGVHPTGRHRG

SEQ ID NO: 160360 - protein, 82 aa, Oryza sativa
  Clone ID: PAT_MRT4530_59647C.1.pep
MSKLQNQPVRKIAKSTIDHTHLCSISHRHTGRHNAFSAVGKGREHAHRKGPNRTASRGATSRALGAAVARVGRRLRPAAPFL

SEQ ID NO: 160361 - protein, 94 aa, Oryza sativa
  Clone ID: PAT_MRT4530_59648C.1.pep
MGEINIPFKSGVVSAGARSNSLAHTLLPAAPERGFHEAVEAPRPGHPPERGETEAEAEAGAHLSASPSPEGSHMFLCLVPENFRRQIQSIQVTV

SEQ ID NO: 160362 - protein, 372 aa, Oryza sativa
  unsure (1)..(372): unsure at all Xaa locations
  Clone ID: PAT_MRT4530_59649C.1.pep
VGAPRAAELRREPQLRAAAVLPPPPPPPAAAAAAPRPAQLRLDPPPPPPPPPAAPSPAPASAPAAAXHHDAVSTDESRTPPPPPPPMGAPGFGPFRWSPRPLRGAPLAAWDAASPVRSGGGGGGGTGPPMLSPFFRLPAPSPSPPVTDFGEFSPTMPLFEVGSSSGSGGFPGPSSRMIPGGSSSPFAMGVAVTKASIYGRGSNFFLHSQYGSNTVCVCSIQWISINCDYEISLVIAAAYPSHAVDMVPIRTLQVSYIKLDQKEVDDDVASLHVKLKELVRDNFIGWQAMLVAIIDIHDRQQSVIPRNFAMRSPSSGSQHDGFSYWNMGRFRRNTTTSLVSPTGVTPSSFGKKRNADSSNFLPLKFRKMSGAT

SEQ ID NO: 160363 - protein, 271 aa, Oryza sativa
  Clone ID: PAT_MRT4530_5964C.1.pep
MTGMSGAQNQRYQQGARANSTWVQQVLSSQMEKAEQWQYHELFETKFVVKDRACRTIIDSESCNNLVSSYLVEKLELLTQPHPHPYYIKWFNSCGQPWVYDNNGSHNFVANTYTFRHNGRKMKLVPMSFTKILEDNLERMKNGIEEIFKDNTRKDTNIAMPSTKSELLQNERIVVPIALDTNILQASENNQGNEEEKKDEEEDEKQGNDNSATAIQGISLLGERVRSEAGSSCVATPPKSTVYQYLSEDRDLHPSPGDQVYYYRRKEEHLS

SEQ ID NO: 160364 - protein, 33 aa, Oryza sativa
  Clone ID: PAT_MRT4530_59650C.1.pep
SRSRSRSVPCSRSSVVVVSGCRRGHRKVKVRYS

SEQ ID NO: 160365 - protein, 61 aa, Oryza sativa
  Clone ID: PAT_MRT4530_59651C.1.pep
SSKSPTLVFFFSFSLLPRDKTGQGGHLFIPCCPPLLIPLPLTETSKIYKVHTRCILSLDLY

SEQ ID NO: 160366 - protein, 133 aa, Oryza sativa
  unsure (1)..(133): unsure at all Xaa locations
  Clone ID: PAT_MRT4530_59652C.1.pep
SGSPGLQARLKTAYELLRVSILIESXILPHVSLPFLILHGAADRVTDPSVSDLLYRSASTTDKTFHLYTGMWHALTSGELPHNIDAVFRDIIDWLHHRTSPTSASYVQDHDLSTSFEAERKAKHDDTIHRGKQ

SEQ ID NO: 160367 - protein, 128 aa, Oryza sativa
  Clone ID: PAT_MRT4530_59653C.1.pep
NVGLDIILGVLDISGIEGCGFLCERKKDSHGFRNQLRSLFEQMDKEASCIFYDAFLLQLSEGPHQWRSQFSSKIDIKEKTSVPCKHMSGFPRPAWLLCLLKDLFFLIDLCDSCPRLSVALVPNSCSPG

SEQ ID NO: 160368 - protein, 208 aa, Oryza sativa
  Clone ID: PAT_MRT4530_59654C.1.pep
MVKHNNVIPNGHFKKHWQNYVKTWFNQPARKQRRRIARQKKAVKIFPRPTSGPLRPIVQCQTLKYNMKSRAGRGFTLEELKAAGIPKKYAPTIGISVDHRRKNRSLEGLQANVQRLKTYKAKLVIFPRRARKVKAGDSTAEELATATQVQGDYMPIARGEKRSVEVVKVTDEMKAFKAYAKLRVERMNQRHVGARQKRAAEAEKEEKK

SEQ ID NO: 160369 - protein, 1015 aa, Oryza sativa
  unsure (1)..(1015): unsure at all Xaa locations
  Clone ID: PAT_MRT4530_59655C.1.pep
MPCHGGWETKSACQRTFSAMLFSAEVSKFSATRFGVEQKGETFLIIISLVSGCTHQLRPHSEASLSSSRTNPLLAHKLWFLADAEARRMKDSAVQKWLDQLRDVIGLSLSSCFSNIRIRHEVAVKIRSLNKKIDNISKDDVFLKLSLTQHNGSGSAWTPIESSSLVEPNLVGKEVVHACREVVDLVLAHKAKNVYKLAIVGTGGVGKTTLAQKIFNDKKLEGRFDHRAWVCVSKEYSMVSLLAQVLSNMKIHYEKNESVGNLQSKLKAGIADKSFFLVLDDVWHYKAWEDLLRTPLNAAATGIILVTTRDETIARVIGVDRTHRVDLMSADIGWELLWRSMNINQEKQVQNLRDTGIEIVRKCGGLPLAIRAIATVLASLQDQTENEWRRILGKNAWSMSKLPRELSGALYLSYEVLPHQLKQCFLYCALFPEDETILRDILTRMWVAEGFIDEEKGQLLEDTAERYYYELIHRNLLQPDGLYFDHWSCKMHDLLRQLACYLSREECFVGDVESLGTNTMCKVRRISVVTEKDMMVLPSINKDQYKVRTYRTSYQKALQVDSSLFEKLTYLRVLDLTNSHVQRIPNYIENMIHLRLLDLDGTDISHLPESIGSLQNLQILNLQRCKSLHRLPLATTQLCNLRRLGLAGTPINQVPKGIGRLKFLNDLEGFPIGGGNDNTKIQDGWNLEELAYLPQLRQLGMIKLERGTPRSSTDPFLLTEKKHLKVLNLDCTEQTDEAYSEENARNIEKIFEKLTPPHNLEDLFGGNFFGCRFPTWLGCTHLSSVKSVILVDCKSCVHLPPIGQLPNLKYLRINGASAITKIGPEFVGCWEGNLRSTEAVAFPKLEMLIFKEMPNWEEWSFVEEEEVQEEEAAAAAKEGGEDGIAASKQKGEEAPSPTPRSSWLLPCLKQLQLVECPKLRALPPQLGQQATNLKKLFIRDTRYLKTVEDLPFLSGCLLVERCEGLERISNLPQVRELRAGGCPNLRHVEELGGXLEQLWLSKNMQKISSLWVPGL

SEQ ID NO: 160370 - protein, 58 aa, Oryza sativa
  Clone ID: PAT_MRT4530_59656C.1.pep
NLSRRPRRGSWVLQHNPYRANSTTGNALMVKGRPAQRYLCLRNGWTSLWCSPPTGIPE

SEQ ID NO: 160371 - protein, 154 aa, Oryza sativa
  Clone ID: PAT_MRT4530_59657C.1.pep
TPTRGPCTAVPTPLPTPTPTPPPLPTPTPPHNTTASVAPRPPRRCVAPTPPQSRHATAAMRATPPPLPPRPLPTPTPPQPRHATTAARATPPPLPTLPWPMPSPPSFVPESEKEMLWTTSSRRSRSIPPVMVSPSGNSSSCASTGQVGSQSMDA

SEQ ID NO: 160372 - protein, 163 aa, Oryza sativa
  unsure (1)..(163): unsure at all Xaa locations
  Clone ID: PAT_MRT4530_59658C.1.pep
MFFTGIKKFKKQQNMIFXILECIGFVRVKKSLRDSRGELLSINANIGTRGCDVFDRXDKVRKSPNQDFWTYWSVLGALVAKKNFVIRVANFCQLMPKLAHVGVMFFTXNEKVKKAPKHEFWTYWSVLGACVSKNHSGTHTAIFCQLMPILSCISCNTLKIQDK

SEQ ID NO: 160373 - protein, 310 aa, Oryza sativa
  Clone ID: PAT_MRT4530_59659C.1.pep
MMAGAPPMHICMDSDWLKGIVPEEHGMGSSSPSAELIACPRAPMQAAAAAADRRLRPQHDQPLKCPRCESTHTKFCYYNNYSLSQPRYFCKTCRRYWTKGGSLRNVPVGGGCRKNKRAPPKKAAAHAQPAVAVAAALQGRHMETGLHLSFSGMQHHLAPPPPAAATAADPLCSLGLFDWKQYDPVFAGSGGGGSPVAALESAGGSEAQFMGAGMMGIGGGGVAEYHALSALRFAAGLGDHLALPFGAVRAEHDAVEVKPVAAERLLSLEWCGEASRTAAPESSISSLGGLGLWSGMIGGGHHHHGSSAAI

SEQ ID NO: 160374 - protein, 227 aa, Oryza sativa
  Clone ID: PAT_MRT4530_5965C.1.pep
MTEAAANARPKLDWVFTRSGESPQGNTSNEETTPIGIDVTDPRRPGRAVAQDSLKKAREASARPKRPYYQQTRPPTRTKKTQPPKDSTAGLGAGDQEKGGASRRGGGLAGLKVKLRTGSKGNKDIGVIHVSSEDLRASWDNPKQLWQPPPTSPPAQREEHRATGAVGVADATPRQDPIPPTDGDSRRSCRQANAPPRTPTCRERQPPPATPRAATTTLPRAATTSAA

SEQ ID NO: 160375 - protein, 342 aa, Oryza sativa
  unsure (1)..(342): unsure at all Xaa locations
  Clone ID: PAT_MRT4530_59660C.1.pep
MTVKSLSNTRWESRIKSVRAXIRYQAPQLRSALLWLSEGRDTEPKDRSDAKXKKTKKLAALKFILGMVIWHDILYSVNIVSKKLQSPSMCIDSTLQHIEGMVSYFQSYRNNGFADSLVAATEIALEMGVEPSFPVERQSQRKKQFDETEYNEAILQAEKDFEVNYFLVMVDMAISSLKSRFQELQSFNGIFGFLMNSTSLKSLDAADLKDQCTKFAQTFSLDGSSDVDINDLISELGVIQFTLPDRPMSAMEIFEFVTEADCYPNISIAYRILFTMPVTVASAEITFSKLKLLKNYLRSVMSQERLNGLATLCIEKKLLDEIDIKLSALVSFIQKIVRKSLS

SEQ ID NO: 160376 - protein, 70 aa, Oryza sativa
  Clone ID: PAT_MRT4530_59661C.1.pep
VWLGRRRRPAGRCRLAVSRLVRWRLVAELLRPIRKALMEMAAAAGRRQLVALPQLSFPFVGTLALPAAVA

SEQ ID NO: 160377 - protein, 280 aa, Oryza sativa
  Clone ID: PAT_MRT4530_59662C.1.pep
PAQSSPASTAATARPCRARTSPTSPRRSSPPTATCSAASSPSNNGPNNERSTASGQGLSPVNRATTTQSRTARGRTMASTSPATAAAAAPTRCASSPGRSATTRTTSAQRTITYRASVTVQEQEPTSSSLASTSSRERCSPGWTTTRSPADRFTWTARCTSSTPTREPSSPSTSTMRPSPPSTCPASVSSSKVVASLARTPNRISWRCPDACASRQPTAATRHATPYGCSWAIAGGSGGARSAMTTCRRRRRSPASGTVAAGCLFYCSPATKSPSLYTTM

SEQ ID NO: 160378 - protein, 152 aa, Oryza sativa
  Clone ID: PAT_MRT4530_59663C.1.pep
GGFNQGLNNFSGRDKTLKNLRKFCPPNLELPPIKSSNRGEKKKVFRGPPLAKFFHGTPRAPYGGLISSILRGGPPPNHLLGKGGQTLEKPEKPRRGGRKNLAFLRLGARGQKKNLRRGAPRTSPGGGVGKHLEKFPRGEGGRPPCPKKKRGG

SEQ ID NO: 160379 - protein, 46 aa, Oryza sativa
  Clone ID: PAT_MRT4530_59664C.1.pep
MDARPPAARKRGEVTAAGDATPANAQLLVLTVETKQGTDHMQFDII

SEQ ID NO: 160380 - protein, 130 aa, Oryza sativa
  unsure (1)..(130): unsure at all Xaa locations
  Clone ID: PAT_MRT4530_59665C.1.pep
GFLYENECYSKFLEPXHPGLDAYDVYYTTKVRDFQYLLRTXRASSDAEXRPIKNLLLTECRLAINDLINNLYEIRWDISVIDWALVCNLKSPVRIPSMFPSGVLXRTHATGGKAPNNLLEHDFHLLQQQI

SEQ ID NO: 160381 - protein, 132 aa, Oryza sativa
  unsure (1)..(132): unsure at all Xaa locations
  Clone ID: PAT_MRT4530_59666C.1.pep
MAQPQPQSQRQRVYEAWKGNNRFFFGGRLIFGPDAKSLLFSVALIFVPVAVFCAFCRRNLRHXRLSQTPNGYHTCRRKLLQCKMXSLLFITAAQDPGIVPRASHPPEEEFHYDNFSLHLLRTDQPSPGSYEV

SEQ ID NO: 160382 - protein, 65 aa, Oryza sativa
  Clone ID: PAT_MRT4530_59667C.1.pep
RSRTYAERYGFSASETLICCLKSHLYHSIIILAQSKPNQKEKKQRETVRNQDKKKGIKNTKSRAS

SEQ ID NO: 160383 - protein, 288 aa, Oryza sativa
  Clone ID: PAT_MRT4530_59668C.1.pep
MDDFTFPITAAAAAAAADTAAAAAAAAEPLRLHHHHHHHRRRGRLHFAASPLWFPSSCPVAAAPPDVPVADDADTADAAVASAVKDVDVVVFVRDAMEGKEQEQEDEEGGGGGQEEATSDAGRREEEEGKKEEEATAAAAATGELSRGDGDEDGGDHGGGGAARDKEEKMDQLWENFNEELRQALHQRVGSCPRADARAAAAAGMELSPETSDAESEPAAAAALRGHIGCAPMLRPSSRAGAGGYRRTATSWVLLMKIFRRLFVIEKTISSSSSAAASASGRHGSARR

SEQ ID NO: 160384 - protein, 193 aa, Oryza sativa
  Clone ID: PAT_MRT4530_59669C.1.pep
MSSMAGLGASQHGYPPRSHEPWTKLVHRERLPEWFAYNPKTMRPPPLSHDTKCMKILSWNINGLHDVVTTKGFSARDLAQRENFDVLCLQETHLEEKDVEKFKNLIADYDSYWSCSVSRLGYSGTAVISRVKPISVQYGIGIREHDHEGRVITLEFDGFYLVNAYVPNSGRFLRRLNYRVNNWDPCFSNYVKY

SEQ ID NO: 160385 - protein, 201 aa, Oryza sativa
  Clone ID: PAT_MRT4530_5966C.1.pep
MTSMSGAQNQRYQQGARDDRTLVQQVLSSQMEKAEQWQYHELFETKFVVKDRTCHSIIDSESCNNFVRSDLVKKLELPTQPHPHPYYIKWFNSCSKFKASENNQAPTISEDEKKGKDNGATTAQEHNMRISYSLSSSSSCLNELQVGLQEGECSGFSTTKISGSNHMTIKKCSSPDVIDKDKFNTLHDKSYLLGRKKRNRT

SEQ ID NO: 160386 - protein, 324 aa, Oryza sativa
  Clone ID: PAT_MRT4530_59670C.1.pep
MSSMAGLGASQHGYPPRSHEPWTKLVHRERLPEWFAYNPKTMRPPPLSHDTKCMKILSWNINGLHDVVTTKGFSARDLAQRENFDVLCLQETHLEASLGVSAIRLLIYTEKDVEKFKNLIADYDSYWSCSVSRLGYSGTAVISRVKPISVQYGIGIREHDHEGRVITLEFDGFYLVNAYVPNSGRFLRRLNYRVNNWDPCFSNYVKILEKSKPVIVAGDLNCARQSIDIHNPPAKTKSAGFTIEERESFETNFSSKGLVDTFRKQHPNAVGYTFWGENQRITNKGWRLDYFLASESITDKVHDSYILPDVSFSDHSPIGLVLKL

SEQ ID NO: 160387 - protein, 319 aa, Oryza sativa
  unsure (1)..(319): unsure at all Xaa locations
  Clone ID: PAT_MRT4530_59671C.1.pep
ARGEDVLYLTSDSAQSKIVTAPIMFGCGQVQTGSFLGSAAPNGLLGLGMDSKSVPSLLASKGLAANSFSAGFGDDGHGRINFGDTGSSDQKETPLNVYXPNPYYNITITGITVGSKSISTEFSAIVDSGTSFTALSDPMYTQITIRFDAQIRSSRNMLDSSMPFEFCYSVSANGIVHPNVSLTAKGGSIFPVNDPIITITDNAFNPVGYCLAIMKSEGVNLIGENFMSGLKVVFDRERMVLGWKNFNCYNFDESSRLPVNPSPSAVPSKPGLGPSSYTPEAAKGALPNGTQVNVMPSASSPLQPQSVSATIVLLFLIVL

SEQ ID NO: 160388 - protein, 52 aa, Oryza sativa
  Clone ID: PAT_MRT4530_59672C.1.pep
ILSCFQSEPFAVLHHIIIAFIFSIQGGIKWLAGKSQLQSRTCVRSAKKKKKK

SEQ ID NO: 160389 - protein, 269 aa, Oryza sativa
  unsure (1)..(269): unsure at all Xaa locations
  Clone ID: PAT_MRT4530_59673C.1.pep
MAQLGQLDAESNVVVAPTATGDEGADIVLASLPTREGWWTAFVLYHGCWMTPQAATSVSLVRAQFAPRPDDVLLATYPKCGTTWLKALSFDIANRSRHPVAGAGDHPLLTTHPQDLVPFIETPFRXPPPSLCPRRAPAFELFVDGCSLYGPIWDHCLHXVLFLKYDDMMADPAGHVKKLAEFLRVPFTDEEVGTGVVVEVVRLCSFEKLSRLPVNFSGVVDRIGGRPMENSSFFRKAKVGDWKNNLTQEMAQKLDAVIAEKLKGSGLTF

SEQ ID NO: 160390 - protein, 67 aa, Oryza sativa
  Clone ID: PAT_MRT4530_59674C.1.pep
MEKSGCRPSLSCTRSPARYRILALSNILPPSADSDVTVLPDSDRPARALLWSPNKKRGVNDGGAQRA

SEQ ID NO: 160391 - protein, 1205 aa, Oryza sativa
  Clone ID: PAT_MRT4530_59675C.1.pep
MEAVEEQVAPEQVISTRGGSVLGKKTILKSDHFPGCQNKRLSPQIDGAPNYRQAGSLRVHGVAMPTMKGIVNVLNHIGAQKKGKQTQVLWHSLREEPVIYINGRPFVLRDVERPFSNLEYTGINRERVEQMEFRLKEDILQEASRYGNKILVTDELPNGQMVDQWESVVTDTVKTPLEVYEELQHQGYLVDYERVPITDEKAPKEGDFDNLVRRISQVDIETEIIFNCQMGRGRTTTGMVIATLIYLNRIGSSGIPRTSSIGKVFHSGNDVDDYMPSSEEAILRGEYSVIRSLVRVLEGGVEGKRQVDKVIDKCDTMQCALLNNQTFQKKLVFSDWMRARPELYSILRTLLRRDPMGALGYSSSKPSLAKIVEYADGRPHEMDIVAAMRNGEVLGRQTVLKSDHCPGCHNLHLPERVEGAPNFREIPEFPVYGVANPTVDGIRAVIQRISTSKGGRPILWHNMREEPVIYINGKPFVLREVERPYKNMLEYTGIDRDRVERMEARLKEDILREAERYSGAIMVIHETDNGEIFDAWENVNNEAVLTPLEVYKLLESEGLPIKYARVPITDGKAPKSSDFDTITLNVAAAHKDTAFVFNCQATKVEFNLLIFVDGQGKNNYRPIRLPACEYNHEDPNELGYSSGEETTDHNGHLNSSSPRPHTVTEQHPRFGIDDILVLRKITRLFDNGIECRQTLDNVIDKCSALQNIRQAVLQYTKVINQQHVEQRVKRVALNRGAEYLERYLKLVAFSAYLWSEAFDGFCGQGEAKMSFKAWIHQRPEIQSMKWSIRLRPGRFFTVNDESKASFQPSQGDVMMEAIVKARNGSVLGKGSILKMYFFPGQKRSSTINFCGAPQVFKVDGYPVYSMATPTVDGAKEVLSYLGSKDTGRSIPQKVVVTDLREEVVVYIKGTPFVLRELDQPVDTLKHVGISGPMVENIEARLKEDILSEVKQQGGRLLLHQEEFNSSTGQSSVVGFWEHIGTEDVMTPAEVYSVLRNQGYCIDYKRIPLTREREALASDVDAIQSSVDENARYYLFISHTGYGGVAYAMAITCLGLGADEKFIMEQTAETHFISTSLTKSVSIKTSADIALKQGDYRDILNLTRVLVHGPKCKEEVDTVIDRCVGAGHLREDIMHYRKALQDCSLDDDETWSYLMDMGTKALRRYFFLITFRSYLYCSSLREPTFASWMEARPELGHLCDNLKLDK

SEQ ID NO: 160392 - protein, 1170 aa, Oryza sativa
  Clone ID: PAT_MRT4530_59676C.1.pep
MEAVEEQVAPEQVISTRGGSVLGKKTILKSDHFPGCQNKRLSPQIDGAPNYRQAGSLRVHGVAMPTMKGIVNVLNHIGAQKKGKQTQVLWHSLREEPVIYINGRPFVLRDVERPFSNLEYTGINRERVEQMEFRLKEDILQEASRYGNKILVTDELPNGQMVDQWESVVTDTVKTPLEVYEELQHQGYLVDYERVPITDEKAPKEGDFDNLVRRISQVDIETEIIFNCQMGRGRTTTGMVIATLIYLNRIGSSGIPRTSSIGKVFHSGNDVDDYMPSSEEAILRGEYSVIRSLVRVLEGGVEGKRQVDKVIDKCDTMQNLREAIATYRNSILRQPDEMKREASLSFFVEYLERYYFLICFAVYVHSVCSAQQSNFSEEVSFSDWMRARPELYSILRRLLRRDPMGALGYSSSKPSLAKIVEYADGRPHEMDIVAAMRNGEVLGRQTVLKSDHCPGCHNLHLPERVEGAPNFREIPEFPVYGVANPTVDGIRAVIQRISTSKGGRPILWHNMREEPVIYINGKPFVLREVERPYKNMLEYTGIDRDRVERMEARLKEDILREAERYSGAIMVIHETDNDGQGKNNYRPIRLPACEYNHEDPNELGYSSGEETTDHNGHLNSSSPRPHTVTEQHPRFGIDDILVLRKITRLFDNGIECRQTLDNVIDKCSALQNIRQAVLQYTKVINQQHVEQRVKRVALNRGAEYLERYLKLVAFSAYLWSEAFDGFCGQGEAKMSFKAWIHQRPEIQSMKWSIRLRPGRFFTVNDESKASFQPSQGDVMMEAIVKARNGSVLGKGSILKMYFFPGQKRSSTINFCGAPQVFKVDGYPVYSMATPTVDGAKEVLSYLGSKDTGRSIPQKVVVTDLREEVVVYIKGTPFVLRELDQPVDTLKHVGISGPMVENIEARLKEDILSEVKQQGGRLLLHQEEFNSSTGQSSVVGFWEHIGTEDVMTPAEVYSVLRNQGYCIDYKRIPLTREREALASDVDAIQSSVDENARYYLFISHTGYGGVAYAMAITCLGLGADEKFIMEQTAETHFISTSLTKSVSIKTSADIALKQGDYRDILNLTRVLVHGPKCKEEVDTVIDRCVGAGHLREDIMHYRKALQDCSLDDDETWSYLMDMGTKALRRYFFLITFRSYLYCSSLREPTFASWMEARPELGHLCDNLKLDK

SEQ ID NO: 160393 - protein, 63 aa, Oryza sativa
  Clone ID: PAT_MRT4530_59677C.1.pep
MGWRDRVGRFGWAGLGGFCDRRTKWRMQRLPQVVGTSSWAAHRQGLSMQLKAGELEEDDGPPT

SEQ ID NO: 160394 - protein, 1253 aa, Oryza sativa
  Clone ID: PAT_MRT4530_59678C.1.pep
MEAVEEQVAPEQVISTRGGSVLGKKTILKSDHFPGCQNKRLSPQIDGAPNYRQAGSLRVHGVAMPTMKGIVNVLNHIGAQKKGKQTQVLWHSLREEPVIYINGRPFVLRDVERPFSNLEYTGINRERVEQMEFRLKEDILQEASRYGNKILVTDELPNGQMVDQWESVVTDTVKTPLEVYEELQHQGYLVDYERVPITDEKAPKEGDFDNLVRRISQVDIETEIIFNCQMGRGRTTTGMVIATLIYLNRIGSSGIPRTSSIGKVFHSGNDVDDYMPSSEEAILRGEYSVIRSLVRVLEGGVEGKRQVDKVIDKCDTMQNLREAIATYRNSILRQPDEMKREASLSFFVEYLERYYFLICFAVYVHSVCSAQQSNFSEEVSFSDWMRARPELYSILRRLLRRDPMGALGYSSSKPSLAKIVEYADGRPHEMDIVAAMRNGEVLGRQTVLKSDHCPGCHNLHLPERVEGAPNFREIPEFPVYGVANPTVDGIRAVIQRISTSKGGRPILWHNMREEPVIYINGKPFVLREVERPYKNMLEYTGIDRDRVERMEARLKEDILREAERYSGAIMVIHETDNGEIFDAWENVNNEAVLTPLEVYKLLESEGLPIKYARVPITDGKAPKSSDFDTITLNVAAAHKDTAFVFNCQATKVEFNLLIFVDGQGKNNYRPIRLPACEYNHEDPNELGYSSGEETTDHNGHLNSSSPRPHTVTEQHPRFGIDDILVLRKITRLFDNGIECRQTLDNVIDKCSALQNIRQAVLQYTKVINQQHVEQRVKRVALNRGAEYLERYLKLVAFSAYLWSEAFDGFCGQGEAKMSFKAWIHQRPEIQSMKWSIRLRPGRFFTVNDESKASFQPSQGDVMMEAIVKARNGSVLGKGSILKMYFFPGQKRSSTINFCGAPQVFKVDGYPVYSMATPTVDGAKEVLSYLGSKDTGRSIPQKVVVTDLREEVVVYIKGTPFVLRELDQPVDTLKHVGISGPMVENIEARLKEDILSEVKQQGGRLLLHQEEFNSSTGQSSVVGFWEHIGTEDVMTPAEVYSVLRNQGYCIDYKRIPLTREREALASDVDAIQSSVDENARYYLFISHTGYGGVAYAMAITCLGLGADEKFIMEQTAETHFISTSLTKSVSIKTSADIALKQGDYRDILNLTRVLVHGPKCKEEVDTVIDRCVGAGHLREDIMHYRKALQDCSLDDDETWSYLMDMGTKALRRYFFLITFRSYLYCSSLREPTFASWMEARPELGHLCDNLKLDK

SEQ ID NO: 160395 - protein, 115 aa, Oryza sativa
  Clone ID: PAT_MRT4530_59679C.1.pep
MKGRRGKRQRGEAAAGTRGERAVPLDPSRVARPPEQRQSPGAVAAQAVGARRLRCSARLRKDDRAADLAPAIEKDAPNPWGKAERKRGERTVLAPQKPRTHCECPMKFMKAVTVG

SEQ ID NO: 160396 - protein, 74 aa, Oryza sativa
  Clone ID: PAT_MRT4530_5967C.1.pep
MACGEGGRYRIHVGNGHHASLSPDLPPSRGGRAATIGSTLSHASSTLPHCPRPPPPPLPTTATAVAGVGERRYL

SEQ ID NO: 160397 - protein, 86 aa, Oryza sativa
  Clone ID: PAT_MRT4530_59680C.1.pep
MTSMGSSNKKKKKKKKKKKKKKKKKKKKKKKKKKKKKKKKKKKKKKKKKNKGRGEKKKKKKEPKKKKRGAVVKTMGIRKKNRDSTK

SEQ ID NO: 160398 - protein, 158 aa, Oryza sativa
  Clone ID: PAT_MRT4530_59681C.1.pep
MAKKPPPSQGTGFKPPVNKTGAKNPSAEVDSTNIVPITLDRLTAKQRDELEQMMSNVKGKFMDSFQETRDKGDIPQDGTVEDLGADGNQVPLQFNNFQDRIDYAVQHALINQFGVLVNILTNMVKTVVDSSIAEHQASGPVYLPGGVFPNYRPLVIAN

SEQ ID NO: 160399 - protein, 829 aa, Oryza sativa
  unsure (1)..(829): unsure at all Xaa locations
  Clone ID: PAT_MRT4530_59682C.1.pep
LQDQINWHAHEPKXGRFWTCTGVKQISQASCFXTSTRFWHARWDXRVFDDLIPMAKKPPPSQGTGFKPPVNKTGAKIXSAEVDSTNIVPITLDRLTAKQRDELEQMMSNVKGKFMDSFQETRRGTIVQKYKLKVVAADEVGSNTATGSGDKGDIPQDGTVEDLGADGNQVPLQFNNFQDRIDYAVQHALINQFGVLVNILTNMVKTVVDSSIAEHQASGPVYLPGGVFPNYRPLVIANXQNTSNALPAWPTAPVLATAQVTSSAPRQIVNPRLLTREXPQHAGQNVNRLTQDQVAAMFLPNPTIVDPTQXCRLSKHSRGSRRFSQLSTKTWSQCSNKYKEYLSXTSWTDMIADVMREQFGLKPKDTGNLYRHPYSEWFERVPLPSXYKVPDFSKFSGQDNISTYEHVSRFLDQCGEASATEALRVRLFPLSLSGSAFTWFSSLPYNSVNSXADLEKQFHSYFYSGIHEMKLSDLITIKQRHDESVQDYIQRFREMRNRCYSLSLTDSQLADLAFQGLIAPIKEKFSAQDFESLSHLAQKVTLHEQRFAEAKKNFKKINHVYPYMYDSDDEDDDFEVAAAEWVKSEKVIPCQWVKSSGKEERFDFDITKADKIFDVLLWKKQIQLPAGHLIPSAEELGKRRYCKWHNSGSHSTNGCKVFRQQVQAAIEGGKIKFDDSKKPMKVDGNPFPVNMVHTSGRTADGGEXRKFQVNSARIISKYKRKYGRQQDKYHEEDDKGMRLPSIEDCPGCSNAGNSSRSYSGGNRLSQKRVPVHQRLGPVNQDYDHDEGEDRKTQWCPAGIFTKNQKRRVQRMRNRECHTLKIPSLFPRPP

SEQ ID NO: 160400 - protein, 113 aa, Oryza sativa
  Clone ID: PAT_MRT4530_59683C.1.pep
GKLAPGGAPPQFPGGHPRVRSLKKFQQLSPEIVQIEGKDGTALYGTLYLPDEKKYGPPPYKTLVNVYGGPSVQLVSDSWISTVDMRAQFLRSKGILVWKVTILSSIFFSLLFV

SEQ ID NO: 160401 - protein, 280 aa, Oryza sativa
  Clone ID: PAT_MRT4530_59684C.1.pep
MLESYEPDEAIKMIREALSKHEASHFIYTFTLQYNLPNIISCFRKKNDVGILQIISDGMHIPLPLDMDILRWAKETQDVLCNAKLPKSVKFYNIYGTDYDTAHTVRYGSEHHPISNLSDLLYTQGNYICVDGDGSVPVESAKADGLDAVARVGVAADHRGIVCDRHVFRIIQHWLHAGEPDPFYDPLNDYVILPTAFEIEKYHEKHGDITSVREDWEIISHRDDESKRPAELPPMFNTLSASREGEDGSLEEAQATIFVHPESKGRQHVEVRAVGVTHDG

SEQ ID NO: 160402 - protein, 219 aa, Oryza sativa
  unsure (1)..(219): unsure at all Xaa locations
  Clone ID: PAT_MRT4530_59685C.1.pep
GLDGACLPHAISKRLPARSTTWQHKCQGSRHPPHSKPPPGFPPPIKSGPTKFPYSTTTXPPRQDASGPEPQNGQPRTRPPPPPPPPSPQANSTPDPTPPASRLTPPFPANPRRVSSVPPPNPSKPXRPSSPLPCAQPHPPPPXAPHPRPPPSPRASSPPQLPPPPLPQPSCXPPSPPPLSQLAISPXAVAAPSPPDLPVRRLGPPDPVTPFSSPADPAP

SEQ ID NO: 160403 - protein, 81 aa, Oryza sativa
  Clone ID: PAT_MRT4530_59686C.1.pep
RVPYQAAYPPDAERNDPVSRDKRAQRAVWNTNLRLLEVKKSALEKKKTELERRLKAEFKKVNEQQSDLGVGYANYQSPYQA

SEQ ID NO: 160404 - protein, 134 aa, Oryza sativa
  Clone ID: PAT_MRT4530_59687C.1.pep
MRYQFSSGRPLLKGAIAIPSHEATTKQAARATHPLDRKCRRGRCTGYCRSQPLPQEHVAPAAVGTRHQRRPPRPSRPLLESSPPLQVLVAPAADSCKLFMSEDMADNFRTLEEEEEYRTITAMRFKTEDDGFKL

SEQ ID NO: 160405 - protein, 76 aa, Oryza sativa
  Clone ID: PAT_MRT4530_59688C.1.pep
FPSQKRETKRREDGCWCFGEPIIMMDIGNEENHNSKNVTDNDVVPIERETTTASSDDEHDVNTTGTSTVHVKYKCM

SEQ ID NO: 160406 - protein, 421 aa, Oryza sativa
  Clone ID: PAT_MRT4530_59689C.1.pep
MCTVVTKSPPEIVRPSEPVTTTAATSKVIFSPLDRPLAIVPIVVLQVFEHPIHEPVETIRRGLSRALVHYYPLAGRLAGDDYDDVHIDCTGEGVTFVAANADCTVKELVRDIDCRSPDAAKAVIRELIVDYPANGFGRADPLVLMQVTAFACGGFVVGVTWNHGAADGFGIAQFLQAVGELARGLPTPAVTPVRWDGWAQAVAPSTVMASKRFMFGVKAPTRLALHSITIPARTIDGVRGATACTMFEAVAAALWRCRTRVVMSDPDAPTVLAITVNSRKHVGVKDGYYGNCATVHMAVARSGAVAGGDMTEAVRAIRRAKEEIPERLKKGDVIGELSKEQLGGYESVLLVTCWRNIGFEAVDYGGGRTARVMTTYEQGRVRPMCVVCLPWQGEEEEGARVLSGCVTPHHADAFLREIATL

SEQ ID NO: 160407 - protein, 74 aa, Oryza sativa
  Clone ID: PAT_MRT4530_5968C.1.pep
AVPRLAAHAQRRVHAHRSTIPRRSIYMSVQIILQRMMIRSYLSESSADPESSASTSILAMAGAPLDRSNSRQMA

SEQ ID NO: 160408 - protein, 239 aa, Oryza sativa
  Clone ID: PAT_MRT4530_59690C.1.pep
MLPPHLTENGTVMIQFGHKMPDYESSATQSTSGSPREVSGMSEGSLNEQNDQSGNLDGYTKSDEGKMMSALSLGKSETVYAHSEPDRSQPFGISYPYADSFYGGAVATYGTHAIMHPQIVGVMSSSRVPLPIEPATEEPIYVNAKQYHAILRRRQLRAKLEAENKLVKNRKPYLHESRHQHAMKRARGTGGRFLNTKQQPEASDGGTPRLVSANGVVFSKHEHSLSSSDLHHRRAKEGA

SEQ ID NO: 160409 - protein, 681 aa, Oryza sativa
  unsure (1)..(681): unsure at all Xaa locations
  Clone ID: PAT_MRT4530_59691C.1.pep
LVTSPSMGVYVFTVGLPSPPPTGVLAYXLVGHTAVDGHLRLHHRLAFTAIDWCLCLHSWLVTLPLMGIYVFTXRPAFAAADWKGSVRTSPPACLYXSPTGAFAYTVGWSHHRCWASTSSPPACHRRCRLXCPRLHGWMVTPPLLGVYVFTTGLPSSPPTGVSAYTVVWSHHRXLDIYIFTAGLPSPTPTGVSAXRLVGYTTVVGRHRLHRRLASVDADWCPRLYGWVVTPTLLGIIVFTDRPPHPPPTSVLAYTVGCVLAYTVGWSHRRCWRLRLHHRLASAAADWCXPRLHGWLVTPPSMGVIVFTGCPCLHGWLVTPPTMGVIVITAGSSPXRPWCLRFHXWPFMPPLKDIFVFIIILLLPSPTDYAAADWGFYXTTTRLRHRFASVAADSCSRHHGYATLSPWLSDFIFIIFGTGKLYCLYFASLASSPTTTSTSASTSRHVSPXYDAVLFYYNKWCSNLQYFYSDIRRCINLSYADANIKKTTRAWISSQQFDELLSLTSSPATLLHRPXTSPLLVMGDYIFAFDFXVIADFHCRLIISPSRLAYYAXLIGDLVVIISYYSAIDWITDIVVIINILSCFFDLAYFASIDRQLRHHNRPSLLLPIVITVYCISHLSLTDYFATIAAQLCRRRWAPSSSLLADLSAADWFLRLHGYATSSPLIGVIVFTTTDIFIGSDG

SEQ ID NO: 160410 - protein, 566 aa, Oryza sativa
  Clone ID: PAT_MRT4530_59692C.1.pep
MASDEASPAAAAAAAAAAERIRVVGAWAGSLEVELGGWTVPMLRAEVARRAGGVEPDRINLIFGGRVLKDDPPASLQQAGLKGNAKVLSTLLAPDRGKAIAAQAAAAAAEEEHNNRLVRLWNAAEALCQRHTDGSFHEEDFNLDLEDQSGQKVMFGSVDDLKAVKMALMLHQKAKTFIKRDMHKEALDVLAMAEEAFSLCDPKLIERVDNVPMLQLDIVWCYFVLRDVSRLEVAGTRLERARSGFERSHGKDSARFRLLQAGRHADLAIYVRLELLEGVVAYHNGNTVKARESLTSAQAKYMQLQVPDEAISILMSMGYGAQAAKRALKMTGYDIQSSVDLLCEEREKKIRRVQEDMEMQKEIMEQKKYGKTPMNKAVNMQKLKGLVAIGFEKKLAAEALRINENDADKALDLLTDPEQNCILQHKIMSKAKRLSRGSGSGSSSSRAAAATTASGVNNSQAPVDTSANVPDGSAMESHVLPVINEEAANNVEAVNDDETVNHEEEDMSEESAEGEEEANPPPVRDVAMENELAHEMTGDALDDYDIDVSNEGQAISEYLSLLDSAA

SEQ ID NO: 160411 - protein, 428 aa, Oryza sativa
  Clone ID: PAT_MRT4530_59693C.1.pep
MALVTNVCEYEELAKHKLPKMVYDFYAVDAEDQWTLRENRELATARAAAAAETIMIYKDRNLVQQLIQRAEKAGYKAIVLTVDAPWLGRREADVKNRFTLPQNVMLKIFEGLDQGKIDETNGSGLAAYVASQIDRSFSWKDIKWLQTVTSLPVLVKGIITAQDTISCVEEHESQVVREANGRVPVFIDSGFRRGTDVFKALALGASGVFIGRPVLFSLAIDGEAGVRNALRMLRDELEITMALSGCTSVKEITRGHVVTESDRIRRCSRLWRWLCFFRNLVQSGMWRMVVLQPDPFLSELTSMYERSTEKGSVWVTMKRSSMKCQARLKKMAAKGEAVEYRCLVRATDGKKNICTAGSIVQLRAELSAKEYLKFQASYATVLKAHMHALKKRERKDKKKAAEVEKIPEKAPKKQKKAPSSKKSAGSKS

SEQ ID NO: 160412 - protein, 60 aa, Oryza sativa
  Clone ID: PAT_MRT4530_59694C.1.pep
YMCSSYISRMVLTSQKVGIESNKHNLSPDASEGPQLWESSGPDRNEANQYQLAVKDELQR

SEQ ID NO: 160413 - protein, 157 aa, Oryza sativa
  Clone ID: PAT_MRT4530_59695C.1.pep
RSPCSSPAASSSSSSSTPATACRGCRPWRRASRRAWARPCRGRAPRRWEPRRTSRGRRTSWWPPRTPRRSRTRLARRPSARCSPTRWRPTASGCRASSPTASPTSSPPSLPSTSAPRRCSRRAGTRRRCTPRPSPIGIGPCSFCASLRLVVPRQQLS

SEQ ID NO: 160414 - protein, 109 aa, Oryza sativa
  unsure (1)..(109): unsure at all Xaa locations
  Clone ID: PAT_MRT4530_59696C.1.pep
KPAPWKPSPTSLPGFLQKRWLDQAQTSIAFIFAWTRGLAHRAKLDDNXAKLLDFTEKLETACVGTVESGKMTKDLALIIHGSKLSRDTYLNTEEFIDAVAAELKERLNA

SEQ ID NO: 160415 - protein, 52 aa, Oryza sativa
  Clone ID: PAT_MRT4530_59697C.1.pep
TRANFLLQKLLNLLLLYLTVVSTFQREKAEVKWGRFFWGFQGSFFICDRRQE

SEQ ID NO: 160416 - protein, 80 aa, Oryza sativa
  Clone ID: PAT_MRT4530_59698C.1.pep
RRQMQGLAMHGCRASGGWRARQNRLGAGPYPDAHVAAVFTTPSKSPTLVYEDVTRQMDGLQSSLTESLLARADQSLTRDR

SEQ ID NO: 160417 - protein, 72 aa, Oryza sativa
  Clone ID: PAT_MRT4530_59699C.1.pep
MAVAANTDAAAAAAATGRSCIEKWHSRWPLAPRPHHHHHANIRWLPVLILRATVPEAASFAVASGLLPHRLR

SEQ ID NO: 160418 - protein, 742 aa, Oryza sativa
  Clone ID: PAT_MRT4530_5969C.1.pep
MKNGARKDAGGGGGGVFVPCVDIKSFVLSLAFLTVFVALWQLQPYGSLLTAARSTASVSASPCSLIATPAAAAASAGVIRSENSTADTAKTAPAAVASAVPARLARAARPARVEDPNKRELRPYGSAAALFVQMGAYRGGPRTFAIVGLASKPTHVFSNPYFKCEWLPNPTAGNPSPRPVRTKAYKMLPDWGYGRVYTVVVVNCTFPSNPNADNAGGKLLVHAYYSTTSRRYERFVALEEAPGSYDESRFSPPFPYDYLYCGSSLYGNLSASRMREWVAYHAHFFGPRSHFVFHDAGGISPEVKAVLDPWVRAGRLTVQDIRAQAEYDGYYYNQFLVVNDCLHRYRHAANWTFFFDVDEYIYLPNGQTLDQVLGKLSGYSQFTIEQNPMSSKLCVQDPSKDYSREWGFEKLVFRNSITKVRRDRKYAIQARNAYSAGVHMSQNVYGRTTHKTESLIRYYHYHNSINVMGEPCREFVPVPVNGSKLMFEGIPYVYDDKMKRLAGQIKREELGGLEEKEGEPVVGERVVEAALGGGAGGGRVEGGVDVGEEGVGDGDVDEEEEGEREDEGGGDAGEERAVGDDDDELRRRWLEGESGGGGGRAPLTSPASRRRRCPRPDPASPGRIWPPRRHSDDDDPAVFYLRGRSARLNFPEEISLLASPSEGGGAGEPREPDGGTLSAASIRKKAIEVGSHVDALQTGMMVAPTHHREQQKHHHHPHLQPHGEEQHHHEDWISSKYEDIHT

SEQ ID NO: 160419 - protein, 44 aa, Oryza sativa
  Clone ID: PAT_MRT4530_596C.1.pep
NHEKFLKILHNTLSPPGSFQDLITSFVSLIESLKYAENLNIILF

SEQ ID NO: 160420 - protein, 72 aa, Oryza sativa
  unsure (1)..(72): unsure at all Xaa locations
  Clone ID: PAT_MRT4530_59700C.1.pep
MEGVFYLLCMWAIWNHRHDVIFKKXTPSIGSCLQRCIREAALWAENLKIEDRHVVSVWKEIFSSPLQTLNML

SEQ ID NO: 160421 - protein, 69 aa, Oryza sativa
  unsure (1)..(69): unsure at all Xaa locations
  Clone ID: PAT_MRT4530_59701C.1.pep
GXTXTXRWRXKARXSXWRIGLXGWGGXQRGLGWQWXHCQRRRRRDGRFGWXGLGNLGGFGPPGSSPGRT

SEQ ID NO: 160422 - protein, 275 aa, Oryza sativa
  Clone ID: PAT_MRT4530_59702C.1.pep
MSAVVCGKRSSAIFADDLLPPSPPSPHSHHHPAKRSCRSPHRRREAHLHHLSSLFPGMDPQLLEGALDASGDDLDSAIKSLNNLRLESTEAILSATGCKSENGLPTAVYPSVEGIVNNGGVSTANEHPAAADSCQTGNNGSEWVELFVREMTNASDMGDARARASRALEVLEKSIVERTGADAAQNLQKENMMLKEQLTVVLRENAVLKRAVAIQHERQKEFDERSQEVQSLKQLVVQYQEQLRTLEINNYALTMHLKQAQQNNSIPGHFNPDVF

SEQ ID NO: 160423 - protein, 188 aa, Oryza sativa
  Clone ID: PAT_MRT4530_59703C.1.pep
MDKKQCGAKGGGGGNARRSATGGGAGRMHRKGKHQGDGGGGGGKRREIKVVYIANPMRVTTSEEGFRALVQELTGRHADPSKYRGGGGGAPVDETSGGGGGGGGEMMQGAAAMMQPSPGSTVDSSSTDHGGAGAGGQGAGLQAAALDDDENSFIAPELIDNRYSVCFSPPTFLYGGGSHTYDGDDYGL

SEQ ID NO: 160424 - protein, 302 aa, Oryza sativa
  Clone ID: PAT_MRT4530_59704C.1.pep
MAPRLCCSSQFLLAVSFLAAFAAVSNAGKVAVYWGQGAGNGDGTLAETCATGLYDFVNIAFLNVYGSGLTPVLNLAAHCNPDAGTCKSLSSEISSCQQSGVKVLLSLGGERGQYSLSSADDARGVADYLWNTFLGGSSDSRPLGDAVLDGIDFDIEKDGDHYDELAMALSSKCNGACVLTAAPQCPYPDAHLDAAIKTGVFSHVWVQFYNNRQCQYASGDASALQAAWAQWTSGVPAPADVFLGLPTAPAAAPSGGYIDADTLLSQVLPAVEGAAANYGGVMLWNRWRDVTAGYGAKLKGKV

SEQ ID NO: 160425 - protein, 195 aa, Oryza sativa
  unsure (1)..(195): unsure at all Xaa locations
  Clone ID: PAT_MRT4530_59705C.1.pep
MAVKDRFAGNPGRIXVLTTSQPHPGKGERDGVRMGPATAYAAFGFTXAREGTAHCLARSGGETXVWCVWLEGVMRRVLSRPLSGMSCSGGWLGLLQRGVALDSGWLILINYYKCFTAFNYCLXNAALCKXTTLAIIWLYPASYPPFRYDLLSTMGSTQFCSTFPQPQSXVCVRWWLFRGVGFVRAVEITNSGPNH

SEQ ID NO: 160426 - protein, 280 aa, Oryza sativa
  Clone ID: PAT_MRT4530_59706C.1.pep
MKFPICMNCHYNDHQLKEHTLHVNANANEKQDDDDVLQHELQALEYDIQEYGVYADAINVVFNVDELLDSDEEENDANANEPIKSRKLTNPQRQGIYELLLAKKLNTPIDEKWFNATKKDKTYYLHPLEEELYRIVQNKNAIEKVMFLSVVVRPRYNDEVALMGLDIRFVNQPPNSPDMNCLDLGFFASLQSLTSTRVSSNMEELVENVHKEYNDYNPTTLNRVFVALQSCYIVVMKASRGNKYKIPHMNKESLEALGILPKALFCDHPLYERAIQLIVY

SEQ ID NO: 160427 - protein, 541 aa, Oryza sativa
  Clone ID: PAT_MRT4530_59707C.1.pep
MAIDLNILADEEGDGGALPDLNEAQVNLEEEGEGRHAIEAEGGGVVHPFDLNLRAFDLNMEVAGEQEQVHPDNDQQGMQYDMDVNANGNEEQEIELEELPDSDEEENDANANEPINARELTNPQRRSIYELLLTKSLDGYLEKGSTRVVAEVFNVSIRTVQRIWKRAQLCIAQGVQVNVDSRKRYNCGRKKVEIDLSVVAAIPLRQRSTIRSLAEALGVSKSTLHRLFKEGHLRRHSNSLKPYLKEANKKERLRWCVGMLDHRTLPNNPKFIEMENIIHIDEKWFNATKKDKTYYLHPLEPEPYRTVQNKNAIEKVMFLSAVARPRFDDEGNCTFDGKIGIWPFVRKEPAQRSSRNRERGTLVTKTIKVDRDTMKSFMISKVLPAIRACWPQEDARRTIFIQQDNARTHVPIDDEQFGVAVGQMGLDIRLVNQPPNSPDMNCLDLGFFASLQSLTSTRVSSNMEELIENVHKEYNDYNPNTLNRVFVTLQSCYIEVMKASGGNKYKIPHMNKERLEALGILPKALCCDHQLYERAIQLLVD

SEQ ID NO: 160428 - protein, 1129 aa, Oryza sativa
  Clone ID: PAT_MRT4530_59708C.1.pep
MPRTGGIQIVITDGGILKRRELEGCSRAYKPLSIQNAGHGLVMPSVLNSQANADGQMPGNQGGRSGSPYPEESPQQPVDKHEARSHNFNDNSTPSDYMEDDLLPPSKRARSDCISNLEDHMEETIHVYPVENRQISGESVQDYELLEASLRSRLVERFGKKSYLNNSGEATEELSFGKVSEIEREKAYVGPLLQEADENVMTNIEGMVELGNDAHEKRADSSNAPSIGNYDHEENISSFGELCMPLSVTHPIIPSSAPQNAARHMKGLFPDLHKKASDYKNDCQTSNAASVATVRLPDVAKDNAKMHSTTRKDMDIVSGAVDPFWPFCMFELRGKCNDEECPWQHVEHHAWRKSKHTKHSKPSFSGWIPYGLFQHILPVPTYRVGSNLIRADLNLIQSVLASSIWQYWQRGFCASFPFPLSVQRVLPSDAPSLQAGDDSSANFDRDRQLLNLRMLDSRKNKIVQGSVDAELFLEGALILYFGKINKPDRLKALLYLARAIEADPSTVILWVFYLHIYYQKDEGLGKDDMFSHAVQHNVCSYELWLMYINSRLRFDDRLDAYNDALSMLCQMTAVTDMELKDRSSFVLDIFLQMVYFLCMSGNVDKAISRIYGILPTATPDCSGDKLLADVISCLTISDRCIFWISCIYVSIYRKLPEEIIDQLEFLKDLPNSLVWSPIELTVDNRSQILVLLNYAAGKIAVDINETVKNGDPSYLRLSQFLAVNHINCLATLEGFQSCANLLVKYMEEYPMCPHILVFSARLHRKYGSCPGLKGFDELLLGWPKEVQGIQYLWNQCAEHALADNIELAEKLLTRWFEEYGKDGDIQSGGATRPMEISNEESVRSSVSSIQEVGSGTSTSEDQIFWLLNLSLYRTIENNLQEAKVAMDKALKLAHGESYEHCIKEHAAIHTLEKTSSSTDVQTQATFSLISGYLVDQRNLPVRDLLSRRFMKNVKKHRLKRLIDETIGPTSANPALINSVLEVCYGPSLLPETIGEVKYLVDFVESVMEVLPANYRLALAVGKFMVKHCTGDDSISMGTRFWASSILINAIFRAVPVAPESVWLEGASLLEKLQAAETVKRFYQQATSVYPFSFKLWHSYLNSCKASGSSTESIAEAARQRGIELSVTPP

SEQ ID NO: 160429 - protein, 185 aa, Oryza sativa
  Clone ID: PAT_MRT4530_59709C.1.pep
MEIAEGLRRNPVPLLKNPKNGAYYLRVTGIAVNLEAVPIPPRALDLDVRRGTGGVTLSTVAPYTTLRPDVYRALLGAFDAATSGIPRAAAVRPFETCYRASALGTTRLGFAVANIDLVLGGGRNWTLPGGSSLVQVDEQTVCFAFLEMMGTSPAAADSPAIVIGGFQMENNLLLFDLEKGTLGIR

SEQ ID NO: 160430 - protein, 193 aa, Oryza sativa
  unsure (1)..(193): unsure at all Xaa locations
  Clone ID: PAT_MRT4530_5970C.1.pep
TPTMSTTYATLEQRIVETIVEIPLSXNNLLDVSCDKEXLCDVSLLSMPQLVNEHVSSIVEPPCVEFKHVIHIASENKELKLLSSLNTWGYIQFDDVCPLNCLQKKLFASCLNELQVGLQEEECCGFSTTKILGSNQMAIKKCSSPDVVIDKDKFNTLHDKAKSRTXEDDEDTTSLDITMNTLCINQPKVHMFY

SEQ ID NO: 160431 - protein, 52 aa, Oryza sativa
  Clone ID: PAT_MRT4530_59710C.1.pep
HLWVLINVYHGMRLIVQLLVHLSTCSHLCISSTCKWIDSLYTLPIFVLSSQF

SEQ ID NO: 160432 - protein, 272 aa, Oryza sativa
  unsure (1)..(272): unsure at all Xaa locations
  Clone ID: PAT_MRT4530_59711C.1.pep
MDSARERGRGERRTGVGLTRSWPSWRRRGAYVAATRAGGRLKKAPAGTDFGRRLRTAGRTTAIQAKASTPVMMADGTGRDRSGLGPGKRKERVCPESTSRVLARAGSFVTHDDERRRRTGQGAAMARPKMGKIGLGRGSGFTGAVKRRGGRAGAARLLLCPGASSERRESRGRAERGKWETEGEKEGSRYAGLGRKRDGSGRHCLAGQGAXAGGAARRGAGRRRHGQQAADDGGDRTGARARDSLRLAPFARDAPGLARHSCDSSPHAVLAP

SEQ ID NO: 160433 - protein, 131 aa, Oryza sativa
  Clone ID: PAT_MRT4530_59712C.1.pep
MADGARRDRSGLGPGKRKERVRPESTSRVLARAGSSDTRDDERRWRTGQGGNGEGENGGDWFGEGLGFIGRQCQFGNQPWTALGARELRGEGIGFTGAARRNGRYRHAMSGGDVPIFTAAGNILEEPQQGR

SEQ ID NO: 160434 - protein, 335 aa, Oryza sativa
  unsure (1)..(335): unsure at all Xaa locations
  Clone ID: PAT_MRT4530_59713C.1.pep
TPIPLPPQTGIARAFFLPLRFPLSSLGPASALPPLGASARAEEQPRRASPSSAPFDRAREAYPFPSKLPRPLVPPKARMSPASLVVSPSNPTLETDSGGRVDALVRRNRTLVASLSFPSFLAAGCRRRNLPPSNSLRQIQAIGSSPLVSCNHPVCSLSPVXAVVRPAVRAPRRRQLGQDRVKPTPVRRSPLPRSRALCHREPRVACSSLTVSRATDKRVPLGTTRDQKSNNLRNSISSQPYVRLTPFNFQNSSNLEIYLMARLDYGLGLNLMXVWDPSRWHMVNLCRLLKCLVVKAXKSPDVSDPHGLGDQVAEEDDVDPADEEFFEEQVGYDEF

SEQ ID NO: 160435 - protein, 522 aa, Oryza sativa
  Clone ID: PAT_MRT4530_59714C.1.pep
MAASEAPQGEVGHQAGTGWDTAISIGKRKRVIELPDRMAFVETGGGGRGSRRSERLEVTAKEGRPKSSLNMQPEAAQITKWANRMEMESLGRDQMAMSHAAATATTLRAAHMAPPATTLSDALDHDRRRDARRYRTFLPPSQLVLGLHRLGFACIPRSGAPLTRPRTAPSSVPHQPPPRREAPQPQVANAAVAERRPLREREEAAAAAAAAAKRIHDHHTPAESKAEAASEPQVSAGDHSTQSSDHSASAVAVGRGGSIWVRVLPKSVAMVDSPQTSEESTPTAEDKYIWADKYRPNFLNDFICNKDAALELYNQGFTPQVTAQECNHIIFEGPTSVGKRSMVSALIWDAFATDNLKIEEQTKRFELKGEIAKHIDIRVKISSHHVEAVRHLCKVVTLKPPSSDEIIKVLEYIAVQESIDLPRDIARRITMSSGNNLRQAIRSFEATWKAKLYVIRGKIRKLIEHNVSPYFIFSNLVAELKRDRDEEFQNSIDQLASELNHVSMTTASSVTVVSIHDLIAVY

SEQ ID NO: 160436 - protein, 429 aa, Oryza sativa
  unsure (1)..(429): unsure at all Xaa locations
  Clone ID: PAT_MRT4530_59715C.1.pep
MGRPAREGGPRHVREGRKEXPVGRVHLAWSRVGPACWRLDSPXRGARDAALGFGXGARCTRAACGGCGCGGPTRSLTARGGPRARAGQRGAADRGRLDPVLAELAPTWHLRGCHTGRRKVEEGAGRNGRRTAAANGGANHGDTGEIEHTGWLHEMRGDEPTARIRRREFDGGGLRRRQPAARKEGNGNDATRVQFLRTRASTRPPVSVSTVGLDGDTTREAGDXGRYEARAATAASTQRAAAAVRAAPASYGEALRTTVRGEXGAVTMADGAGRDRSGLGPGKRKERVRPESTSXASSLVPAPPTRATTNGDGEQGRARQWRGRKWGRLVWGGARASRARSNGVEDGLARRGRSSALALAPSGGRAEVGPREESGKRRGRKKARAMLVWGGRGMGAGGAASGFWTDAGGAARGRALARWARRGASGATR

SEQ ID NO: 160437 - protein, 52 aa, Oryza sativa
  Clone ID: PAT_MRT4530_59716C.1.pep
MAAVSGDDNHSEMGIWGSSDVGAVRPQVRVERCTWPMDGMDVEPEDEVLVTV

SEQ ID NO: 160438 - protein, 64 aa, Oryza sativa
  Clone ID: PAT_MRT4530_59717C.1.pep
PNPFFSPGFLFNFIPIDTTKHLKPHNQRELNSWEHHGQKTPNTGGMERGLSDSREPLDTITTPT

SEQ ID NO: 160439 - protein, 58 aa, Oryza sativa
  Clone ID: PAT_MRT4530_59718C.1.pep
DTQANQTGTMFVWAYFVEEGTHRHLSDWNIYSYQSTIVKGKILCIYLFYIVIHKIPVL

SEQ ID NO: 160440 - protein, 378 aa, Oryza sativa
  Clone ID: PAT_MRT4530_59719C.1.pep
MKSLCGIVIVNFDKIKGCQLKEIEVEVQCHELGRWVGGFGLEMLKLPLEERLKKWFTEVSQVNRFDALMHLAPLYSEDDVLKVLPVYADLVRGLWVCKSSLLFDDGYAWKRDRILLEFRKKDSIPLKDIHRIIKVKLDDNLKKKFLYPLCKIRAKLEDCKFVLPVDSSFIRRYPHIVKEQDHAWSVRETTMRESQETSSNTEARKTKNTTKSNIPSKGPDPNMNKARDGPVQGNENLVHSVLDTIFTANKVRSIQAIRRDLRQLAAKYASDRKDGPKLQALSNAATNCASFPLVDLQKSLNQVAVPVHGVYVAKPAKPNSPRNILIKLFRDKDPDSKLTKQEILDCAANHLKKGLNEKDYHQVWRESVIVFKFCPVTA

SEQ ID NO: 160441 - protein, 90 aa, Oryza sativa
  unsure (1)..(90): unsure at all Xaa locations
  Clone ID: PAT_MRT4530_5971C.1.pep
GGRTPHPRARRPRGCQATWAIVCGEETRGVGAPRPSGPGXGVTRPPSGKSVRRADTSPSGPTSPRVPGHMGDCVCLKPLVTILPVPYHRQ

SEQ ID NO: 160442 - protein, 144 aa, Oryza sativa
  unsure (1)..(144): unsure at all Xaa locations
  Clone ID: PAT_MRT4530_59720C.1.pep
YEGLSRRQIVTMILYEVLRXYPLAVTLTRRTYKQIEIGGVTYPAGVIIELPLLLIHSDPDIWGSDVHKFNPERFXGDSQASKDPGAFLPFSWGPRICIGQNFALLETKMALCMILQHLELELALSYTHAHKYNELCALLMVAPD

SEQ ID NO: 160443 - protein, 96 aa, Oryza sativa
  unsure (1)..(96): unsure at all Xaa locations
  Clone ID: PAT_MRT4530_59721C.1.pep
MAVEEVAVLAFLVAAAAAASPAPAVVATLVEGGVDVRPTVEMTPRGRTCLXTQEESMEILGVTXEGEDKLAEAATGKPXLMKGRSGHIECDALQRD

SEQ ID NO: 160444 - protein, 312 aa, Oryza sativa
  Clone ID: PAT_MRT4530_59722C.1.pep
MGLQVAAVAPSPCARSSASSSPPSTSSSRPALGGAGLARSRAPVNWGAGVMARRRGLRQPARCALSASLDGVGGGDAEFLRRIEELAAAVGVQPTGCGWPASVERSASSAGMPLSLRMLKRKKQQQQLVARQTRWDERLLGSAGDSVGRAFSSMVLIVRELQSFALQQMREAMLGDDLQSVLARVHGEMHASFVWLFQHIFAGTPALMVSLMLLLANFTVHSMGHSVAAAAAIPPAPPTSAAVAVVDTQHADPSLPRFDAASVKTFSIGRAASVGGSSGGGGEGSARRGRHWRRPVGRIPSSAERCRAAATS

SEQ ID NO: 160445 - protein, 89 aa, Oryza sativa
  Clone ID: PAT_MRT4530_59723C.1.pep
YHHATRCENDDDERARQRRTGTTETNGEGTTSAAILGRRRDAAGATLDDAELRTKTKKEATTMRTMTGTGEKATRAAGSSCTETRTAWN

SEQ ID NO: 160446 - protein, 128 aa, Oryza sativa
  Clone ID: PAT_MRT4530_59724C.1.pep
MPLSLQMLKRKKQQQLVVWQTRWDERLLDSAGDSMGRTFLSMVLIVQELQSFALQQMREAMLGDNQQGVLARVHGEMHASFVWLFQDIFASTLALMVSPMLLLANFIVHSMAITIDTNIIIDMVILEK

SEQ ID NO: 160447 - protein, 460 aa, Oryza sativa
  Clone ID: PAT_MRT4530_59725C.1.pep
MEGYACWVKRGEQEVTSADRSGAKNQEEEDEHDMFVPSPLGSEMVDVDHDLLQDMLRDVEDPAYNKRDSMKFRRLVSDSETPLYAGCRAKHTKLSATLDLMKLKASSGWTDKSFTQILGILKAMLPDDILTNRTRNWARARVKKNSDGTLTFPNAEDQAVYQKIRQFSQEVSSQRWDDDILTVALGNEEHRGWISGIGSDIPWKHGFPQYAWQYKKNKLTKAEKDARLKEQLMEDIRAELSSEFDEKLSRVEARIRGEHQQGNVDPADAPRVEVSPTERRSSCASTEAAEEQPPVPTAVDHTMGPIECTLVVRVTQAFTLPTAKDFGDEGLEVDSMAYFPPPAKKSKKAQSSPPQHETKKKAVGRGRGRGKVEASLLVPNKPNLGKAPSARPTAPTDFTLGMPLVGDDMLAKMGPACKELHGYYMEMSNTRRKHRETCMTGHHDRQPFLGPPSFIAVGIS

SEQ ID NO: 160448 - protein, 103 aa, Oryza sativa
  unsure (1)..(103): unsure at all Xaa locations
  Clone ID: PAT_MRT4530_59726C.1.pep
XSXLICXXSNXXYLKIXRXSXSNXTPAXNIDXXNRIHGXLLFEHXIXXXIXPXDDHIGHWRYXXXSXQEIIDVSVARSXXVXSIXQILSLPWXSXXVXXRSGX

SEQ ID NO: 160449 - protein, 68 aa, Oryza sativa
  Clone ID: PAT_MRT4530_59727C.1.pep
MDSNPADWSNCRTRASIKPLLSKPYMQVHDLPRQIHARSDLFAGVSDSSSKPYTADDIHALKILDYKP

SEQ ID NO: 160450 - protein, 409 aa, Oryza sativa
  Clone ID: PAT_MRT4530_59728C.1.pep
RVLPHLRRRRHRHRRHHPPPYQVWRGRNVFLCGGRLIFGPDASSIVLTVSLIMTPLALFVAFVSFHLAALIGKPLGQAVPAVAIAVGVFDVIVLVMTSGRDPGIIPRNVRPPEPEDIGVSSPAFGGGGSLPPTRDVYVNGVVVKVKYCHTCLLYRPPRCSHCSVCNNCVDRFDHHCPWVGQCIGKRNYRFFFMFISSTTFLCLYVFVFCWVNLAMTARQFGCSMGRAVVESPVSGILIVYTFVTAWFVGGLTAFHSYLVCTNQTTYENFRYRYERKANPHNRGVAKNVAEIFLSPIPPSRNDFRSRVAVEHYYAAGAGAASGQYFYSYSIGPLSSESKAASFNTRGSLGRARSLCLCSMVSVGDACRMSGGWWDGGMGMMVGGGGEEEVGEGGGEEGEGEEEVAGEEEE

SEQ ID NO: 160451 - protein, 76 aa, Oryza sativa
  Clone ID: PAT_MRT4530_59729C.1.pep
KKQLFPIKPKNPPPKIKHRVWAPLKATYCPPSFIPLRRQHLTKPVLPSFKTSCQVARRKTPCDSPFKKKNYIPLPP

SEQ ID NO: 160452 - protein, 153 aa, Oryza sativa
  Clone ID: PAT_MRT4530_5972C.1.pep
MAKQSLVLTLIMLEPQVDKETWADVIKAGRGAGKRAPPVSGSGEGGRGAGKRDPHGSDSGRAVHGGSGPRTGEERRTSRRPRDSRTDGPNLAKGRSDGGGSSWPVRAGTAQTGPAAMARDGAARMRQRRKTAAGGDRPAAESGGVSAKRQLRG

SEQ ID NO: 160453 - protein, 499 aa, Oryza sativa
  Clone ID: PAT_MRT4530_59730C.1.pep
MLKVRWLPFKKTHLARSNASDASSPTSAAAATATAVTTHRLYQVWRGRNRFLCGGRLIFGPDASSIVLTVSLIMTPLALFVAFVSFHLAALIGKPLGQAVPAVAIAVGVFVSPATTISASLEQNEAIDRSLCVHACVKDVIVLVMTSGRDPGIIPRNVRPPEPEDIGVSSPAFGGGGSLPPTRDVYVNGVVVKVKYCHTCLLYRPPRCSHCSVCNNCVDRFDHHCPWVGQCIGKRNYRFFFMFISSTTFLCLYVFVFCWVNLAMTARQFGCSMGRAVVESPVSGILIVYTFVTAWFVGGLTAFHSYLVCTNQTTYENFRYRYERKANPHNRGVAKNVAEIFLSPIPPSRNDFRSRVAVEHYYAAGAGAASGQYFYSYSIGPLSSESKAASFNTRGSLSFDMATASFDLGGVGVGGGVGGYSAKRTSVDVCSNSSDFGDIYGGEQQPPRHSIFGGDGGGGRTSVRKADDVPTEFGHYGAAAAAAAGGGGGRPRGREFEAV

SEQ ID NO: 160454 - protein, 92 aa, Oryza sativa
  Clone ID: PAT_MRT4530_59731C.1.pep
MSCRALVTSYRIPQQSTDGLRLGRDGAATRGAKLAGQHTAHGTEPYLLRPDRIGKNWNQSPYRSRTGGGARGGAHYSSTLVDTRGSRTWGGT

SEQ ID NO: 160455 - protein, 61 aa, Oryza sativa
  Clone ID: PAT_MRT4530_59732C.1.pep
PLTRSRFHPVYPFSSVSLSSHLSPHKVSSLSFRCLSGFSGSSPGSEIKNKNPKKSSKVLFT

SEQ ID NO: 160456 - protein, 55 aa, Oryza sativa
  Clone ID: PAT_MRT4530_59733C.1.pep
RAAGIRHEGEFYDGKLSNVLDSGRVAALRRDLFYKLLTMEGNSAELPSHIARYLE

SEQ ID NO: 160457 - protein, 49 aa, Oryza sativa
  unsure (1)..(49): unsure at all Xaa locations
  Clone ID: PAT_MRT4530_59734C.1.pep
MAXPDVEYRCFVRGLAWATDDQVLXACFHNYCEISNFKITNDRETCWLP

SEQ ID NO: 160458 - protein, 259 aa, Oryza sativa
  unsure (1)..(259): unsure at all Xaa locations
  Clone ID: PAT_MRT4530_59735C.1.pep
MNCKYGKLRMLEDAGAGYEVTRCRPAAAPSWAGYVAVSTDETTRRLGRCDVLVSFRGTVTPAEWMANHRSSLVLARLAPRRGDGGGGYVKVESGLLNIYTSADETCRFGCTDSCRNQLLREVSRLVASRSGGEDVSVTLANHSMGGALALLLAYDLAVASVSAATPPPXVTVFSYGGPRMGNAAFKARCNELGVKVLRMAKGKAAAVEEEVNGFFVEEEGTAVSDVSLIGVASSDSSTGELVVGEGGAFSSLQAALQRK

SEQ ID NO: 160459 - protein, 62 aa, Oryza sativa
  Clone ID: PAT_MRT4530_59736C.1.pep
WGCPGLTPTSICGRSADMTSQSYAAASWRSHPSQSKAARRRRWPGQAWSQRMRPTVSPLRRR

SEQ ID NO: 160460 - protein, 309 aa, Oryza sativa
  unsure (1)..(309): unsure at all Xaa locations
  Clone ID: PAT_MRT4530_59737C.1.pep
MTCSPLHPLLRGEVARYGELVGACYAALEDPSSPRYMNCKYGKLRMLEDAGAGYEVTRYIYSSPDAAVPGMEVSTSGRASWAGYVAVSTDETTRRLGRCDVLVSFRGTVTPAEWMANHRSSLVLARLAPRRGDGGGGYVKVESGLLNIYTSADETCRFGCTDSCRNQLLREVSRLVASRSGGEDVSVTLANHSMGGALALLLAYDLAVASVSAATPPPXVTVFSYGGPRMGNAAFKARCNELGVKVLRMAKGKAAAVEEEVNGFFVEEEGTAVSDVSLIGVASSDSSTGELVVGEGGAFSSLQAALQRK

SEQ ID NO: 160461 - protein, 181 aa, Oryza sativa
  Clone ID: PAT_MRT4530_59738C.1.pep
MARSPAAPPLLEGEDRTGSLGFCFWGYVLSLRTKRHTDCRPIKKMRGQVMPEPIVVFAPSSATSAYHIPGFVISESTAALDLRRNHINGSECYFLGTCHYAEKGFNGHCRLVGSPVFSLKGKVMGLIAGTCVKELNLYLGGYEIKVALLTSHMDGMLNAMLPKSDAAKKKIASRKKGGKFP

SEQ ID NO: 160462 - protein, 115 aa, Oryza sativa
  Clone ID: PAT_MRT4530_59739C.1.pep
MAEEEEEEDHKMKEEEKKKKLDGDRVGHPPARGIDEPPPRAHLTTSLLSSTSSSLVPRRIQPPPRRPCRTRRILPAIGRRPPTRHDRDSRAHAAPFLPFPFRLTLAVGALSSSHQ

SEQ ID NO: 160463 - protein, 203 aa, Oryza sativa
  unsure (1)..(203): unsure at all Xaa locations
  Clone ID: PAT_MRT4530_5973C.1.pep
MAARARSIIRWLGHHRSRRVSSSSFHLTTTGDDTVKDLHDPRRENAKADGWKVHEGPESDPEEYIALVSKNAGTHLPEPDFFTEYGEANRYKVSEVIGKGSYGVVAAAVDTQTGERVAIKKINDVFDHVSDATRILREIKLLRLLRHPDIVEIKHIMLPPSRREFRDIYVIFELMESDLHQXSVFHRDLKPKNILSNADCKLK

SEQ ID NO: 160464 - protein, 120 aa, Oryza sativa
  unsure (1)..(120): unsure at all Xaa locations
  Clone ID: PAT_MRT4530_59740C.1.pep
TSLXAXTRTPTPPNFPNRRKEANPLTGMTGXLXSGVPXIRKGGRLYPSTAPGFGXSRRKSXGESPKRTLXQLQESKRAXYXRSXLSKCXXHAILSSNPEQRANPRHRGVLPGAWSRFPVN

SEQ ID NO: 160465 - protein, 62 aa, Oryza sativa
  Clone ID: PAT_MRT4530_59741C.1.pep
FFFFFFLKKSPEGREYGYTLAQGHPHKGISSSEVPYLVNESDFRPSTKTRHNGSLNYQNRCK

SEQ ID NO: 160466 - protein, 885 aa, Oryza sativa
  Clone ID: PAT_MRT4530_59742C.1.pep
MVSRSYSNLLELAAGGGGGGGGEGPLPSLGRRRIPRVVTASGIVPDLDYSDDDAASAASSSDHSSAHSHAPRERAIIVANQLPIRASRRGGGGGGWEFSWDEDSLLLQLRDSLRAHADRADDMEFVYVGGLRDDVPAAEHDEVAHHLLEGFRCVPTFLPADLRSRFYHGFCKQQLWPLFHYMLPLSPELGGRFDRALWQAYVSVNKIFADKILEVISPDEDYVWVHDYHLMILPTFLRKRFNRVKLGFFLHSPFPSSEIYKTLPVREELLRSLLNADLIGFHTFDYARHFLSCCGRMLGLKYESQRGYIALEYYGRTVTIKILPVGVHLEQLRSVLNLPETGVKVAELLKQFCDQNRLMLLGVDDMDIFKGISLKLLAFEQLLMQHPEWRGRVVLVQIANPARGRGKDVKEVQDESYAMVRRINEAFGQPGYQPVILIDRPLQFYERMAYYVVAECCLVTAVRDGMNLIPYEYVIARQGNEKLDGILGLGPSARKKSMLVVSEFIGCSPSLSGAIRVNPWNIDAVADAMDSALEMPEGEKVLRHEKHHKYVSTHDVGYWANSFLQDLERTCLDHSRRRCWGIGFGLRFRVVALDPNFKKLAVEHLVSAYRRTTTRIILLDYDGTLMPQTSFGKSPSSKTIDMLNSLSRDQNNMVFLVSTKKRSTLEEWFSSCDNLGLAAEHGYFLRLKRDAEWETCVPVTDRSWKQIAEPVMKTYTETTDGSTIEDKETAIVWSYEDADPDFGSCQAKELHDHLESVLANEPVTVKAGLNHVEVKPQGVSKGLVAKRLLSIIRENSLLPDFVLCIGDDRSDEDMFEVITTAAQDNCLSPDAEVFACTVGRKPSKAKYYLDDLADIVRLIQGLANVSDEMHSTMPTPVDAADTALR

SEQ ID NO: 160467 - protein, 145 aa, Oryza sativa
  unsure (1)..(145): unsure at all Xaa locations
  Clone ID: PAT_MRT4530_59743C.1.pep
DSASPRFGDGGAAAVGVGARQPQLHAAAVEAWDPADGSRPRTDPAAVRPPPXMGSAPLPSLDPAEGRDVGGGPAGGEXSGGRQRRGWRXEAGGSEAATDDEEEEEAAPPILGLPQMRMMENCAWEGETSHPNFDPIYPHELDSQI

SEQ ID NO: 160468 - protein, 343 aa, Oryza sativa
  Clone ID: PAT_MRT4530_59744C.1.pep
MSPPVAEESEGGGGRMPESMDHPPVVEESEARRQQRRPGDGKLHQHGQIDGAVDVEWRADEKSNADFSVQAKYQISFANQVKMQPSLKYIMVRTFIRGCSWTWGYKKFIKREDFEKSDDLRDDSFTIRCDILILRKIRAEETTEILPAAESFVSVPPSDMNQQFGDLLETEKGADVVFEVGGQTFAAHRCVLAARSPVFRAELYGLMKEGDTAGVVRVEEMEAQVFKVLLRFLYTDSLPEMKEEDVMCQHLLVAADRYNLERLKLICEEKLCKYISVGTVSNILALADQHRCDGLKKACFNFLGSPANLSAVVAGDGFKHLSKICPSLMEELVVKLALPATQA

SEQ ID NO: 160469 - protein, 55 aa, Oryza sativa
  unsure (1)..(55): unsure at all Xaa locations
  Clone ID: PAT_MRT4530_59745C.1.pep
SVCWNASVMVIVMCISKPQPLGWLLVGTDLVXFPVXVGYPLLPTVVDPSYIWGRV

SEQ ID NO: 160470 - protein, 78 aa, Oryza sativa
  Clone ID: PAT_MRT4530_59746C.1.pep
KIEFVSSPLRHSSIESIRFSISPTHKTVPLLSVVKVWSFHISTNNCSQAFKIVRFNPRRCASGMVSRQISHGSSCISL

SEQ ID NO: 160471 - protein, 555 aa, Oryza sativa
  unsure (1)..(555): unsure at all Xaa locations
  Clone ID: PAT_MRT4530_59747C.1.pep
MGYHQPVHGGAAAGAGGSGGGGGGDHLHQHHHPRLHSPRISGGGSMTRRANSFKRGEIELQIGSPRSPRGDGVGSPLAESSSASEASAGGGGAVHHHHHQSQQQQLRFRLFKRPGSGAGEVVLGLGIRERRRIGNLLFLAFCGVCLLLGVAKIWAGGWFALPGDDKDADLQDLSISFSSDGGYQFDSHFGHVGGKESDRMLMTAPDVWSQPSSGKFRQCIISNSHKKEDSHTNGYILINANGGLNQMRFGICDMVAVAKILKATLVLPSLDHTSFWADDSEFKDLFNWRHFIESLKEDIDIVEMLPPAYKHIEPVAKAPISWSKVETRFEKDMLAFTGCSHSLTSEEEEELRKMRYEVSHWKEKEINGTERRTMRGRPMAPTEISSLLXALSLTRRTRIYLIAGAALRNASLQAKIFVHEDHSALANTKTMXELWPLRIHLPAAGACDLRGADHRSNFNHYTEGKYGEADYAHRRVVPIRKTIGPXRISLVHLIAEAEEGWVSSDDNSSEVQRIHRDGERIATPNLREPGEFPKLEESFFANPLPGCICEKLNDE

SEQ ID NO: 160472 - protein, 167 aa, Oryza sativa
  Clone ID: PAT_MRT4530_59748C.1.pep
SYFCSEFKDLFNWRHFIESLKEDIDIVEMLPPAYKHIEPVAKAPISWSKVNYYRDEILPLLKKHKVIYFTHTDSRLANNGLPSYIQKLRCRVNYRSLKYSQTIEDLGATLVSRMHQDGSPYLALHLRFEKDMLAFTGCSHSLTSEEEEELRKMRYEVSHWKEKEING

SEQ ID NO: 160473 - protein, 100 aa, Oryza sativa
  Clone ID: PAT_MRT4530_59749C.1.pep
MCSHQSVLRGFRGDVFAPATIHVVEATACEEWLLCRPVISCPKSQKGVGVDAFMVPHISWCVPLAGGWVYHSAQWLVATFRSDGDGKVIALAQHGVALFF

SEQ ID NO: 160474 - protein, 227 aa, Oryza sativa
  Clone ID: PAT_MRT4530_5974C.1.pep
MATDRGTPRVKRQDLTGPIIKITLSSLPDPERDSVASIRYCSPRVLLQATSSLPPPFTRSGSGMDDATSSSSRAPRPKTEELDAALHAMGFEIERVSPAEVTGRLLVTPTCCQPFKVLHGGVSALIAEGLASMGAHMASGYSRVAGVQLSINHFRSAALGDTVLVRAAPLHVGRSTQVWAVKLWKLDPSTKEKGAQISESRVTLLCNLPVPESVKNAGEALKKYSKL

SEQ ID NO: 160475 - protein, 507 aa, Oryza sativa
  unsure (1)..(507): unsure at all Xaa locations
  Clone ID: PAT_MRT4530_59750C.1.pep
MEKLDESKFEQRLQLWALRIPRELASAVAGILRSEKLDESKFEQRLQLWALRIPCELASTVTRLLRSGYLLDKPRVKPVVEDPESDKNRLVVLSEKIQNPDLSDIEEKVYDSLKQICNIDVVPYSLTLGYSYWSADHILKQILPAGVEVPSSFETIGHVAHLNIPDDLLPYKDVIAKVIYDKNYPRIQTVVNKVGTITNEFRVPQFEILAGKNDMVTEVKQYGATFKLDYGLVYWNFQXGDVICDMFAGIGPFSIPAAQKGCIVYANDLNPDSVRYLRTNAQINKVDDYIFTYNMDARVFMQNLLEVPCSENKSDSQVAANCSSEDIDPANESSILVKTLTLVMKVCHKDVIDASFISAATKMQQEHSKGGDGYCQEDASHTKKRNNKRVKGSGPPPVKPWEHFDHVVMNLPASALQFLDCFSGLVQKKYWTGPLPWIHCYCFIRSSESEELILSEAQNKLNAKIAEPIFHRVRDVAPNKAMFCLSFQLPSECLKDETEDHIQSVDC

SEQ ID NO: 160476 - protein, 79 aa, Oryza sativa
  Clone ID: PAT_MRT4530_59751C.1.pep
MRNTANPRKTMQHHAEQGQSPCHRHQSGRSQPATGQTEGKGRTEERGKRDGRTHMVNPPTSQRHAPTDMWDHKGVDAHA

SEQ ID NO: 160477 - protein, 347 aa, Oryza sativa
  Clone ID: PAT_MRT4530_59752C.1.pep
MEKYELLKDIGSGNFGVARLMRNRETKELVAMKYIPRGLKIDENVAREIINHRSLRHPNIIRFKEVVLTPTHLAIVMEYAAGGELFDRICSAGRFSEDEQICHRDLKLENTLLDGSPAPRLKICDFGYSKSSLLHSKPKSTVGTPAYIAPEVLSRREYDGKMADVWSCGVTLYVMLVGAYPFEDPDDPKNFRKTIGRIVSIQYKIPEYVHISQDCRQLLSRIFVANPAKRITIREIRNHPWFMKNLPRELTEAAQAKYYKKDNSARTFSDQTVDEIMKIVQEAKTPPPSSTPVAGFGWTEEEEQEDGKNPDDDEGDRDEEEGEEGDSEDEYTKQVKQAHASCDLQKS

SEQ ID NO: 160478 - protein, 141 aa, Oryza sativa
  unsure (1)..(141): unsure at all Xaa locations
  Clone ID: PAT_MRT4530_59753C.1.pep
EASAPLPQAAQLGSKPKVFSFWILFLQLRFDDYCKNEHMTYSTSYTANMQVHKHIKGWHNIGXSFAKAAFSKELRQRTNDPLKQQKTKPRTQNEKDGDGFPATGGGNGGVDEFLLTATNPMETTATEGDDGRRRTARPEID

SEQ ID NO: 160479 - protein, 113 aa, Oryza sativa
  Clone ID: PAT_MRT4530_59754C.1.pep
GRRSSGSPSRASPRSPRRPSHRAAPHCLALPPRPRTPTSPLQPRSTPPQPHHRLFPPWGRDSARRLEEARSGLPSIDGGLRVTAGGGEVGPALQPRSTPPQPHHRLFPPCWTR

SEQ ID NO: 160480 - protein, 71 aa, Oryza sativa
  Clone ID: PAT_MRT4530_59755C.1.pep
RKVSARGLTLYYIGCMLNRVAVNRPFKLEPVVQLPEVHVLAGSSPVLFLNPACLFINRLLFQMVRVETQHA

SEQ ID NO: 160481 - protein, 77 aa, Oryza sativa
  Clone ID: PAT_MRT4530_59756C.1.pep
VCSREGGREAAPAPFYFYRDREDAAPPTFGPGGGGAMAVYDFSYVTDSVKTYVINLYRHIRDRSVYETHHMYEGGFT

SEQ ID NO: 160482 - protein, 179 aa, Oryza sativa
  unsure (1)..(179): unsure at all Xaa locations
  Clone ID: PAT_MRT4530_59757C.1.pep
MRMPADRAAGVAAVAGRGRSNSGGGRRRKRQRKRSLAERRQAAGGGGGRRWKRQRRRSPASAVAPRRRPLRPRCPTERRXPPRPVVERRFPPRPAAAGPLPPRPTAARGFSSPGRCRRRPRWSHPGRSPPSFPGSRAPPPSLPAAARRSAHLPPLRERLGTCTSRCGRAAAVQSSRTGP

SEQ ID NO: 160483 - protein, 136 aa, Oryza sativa
  Clone ID: PAT_MRT4530_59758C.1.pep
MASRTWHCWLLLVFFLLSDDASGQLSTSYYADSCPSVEKVVHATVASAIQAERRMGASLIRLFFHDCFVQGCDASILLDDVPATGFVGEKTAAPNNNSVRGYEVIDQIKANVEDVCPGVVSCADIVALAARDSTAL

SEQ ID NO: 160484 - protein, 103 aa, Oryza sativa
  Clone ID: PAT_MRT4530_59759C.1.pep
MARDSDDGRAHAQWTGDAGRRLTTTTTTARVNGWCASRVGGAVNDVLRRELSPVDRPRATHGFRLSDSGRDVGMGASLWPCGTRSANLLADDAVQKWRLSSIR

SEQ ID NO: 160485 - protein, 1691 aa, Oryza sativa
  Clone ID: PAT_MRT4530_5975C.1.pep
AHDTTASERCEVQVVRRIRRRRSGRTSSWSPSRRRPRPPLRHRRRPPEHRRRRQAEELRRFLFVAGAVRCFSAVVLVVAPGLEWYIPGLEIELCSRDGCSEWLGLCNRIRHDRHEEKCRVKVTLNSNSEDIPSVMFEAGGRNYIHACQEVARIAIGELRDRYSDQLADTEYRYHPRQPQGSDRGSYLETEGIENDATTRHLVEMLWAMDESRAETVLAAQDREDRNRGKICELEDKVDRLEKELAALKGEAPPQKARIRLTARKRALFVPRYQLAPKVRVVEKEVAPADPPIIIISSDEEEESKRNHSKIEWVATQDDEDEPNEPSIDLRCSEEQDFPPVSLLVPYPCQMVNTRSNRNGPNLNNPNNNNNGENPTLAQVLAQQTQLMNMMMQQLQNQQNQGNNHAPPQNKLAEFLRVRPPVFSSTTNPVEAGDWLHAIEKKLDLLQCTDQEKVSFASHQLHGPASEWWDHFRLNRTTAEPITWLEFTAAFRKTHIPSGVVSLKKKEFRSLTQGSRSVTEYLHEFNRLARYAPEDVRNDEERQEKFLEGLNDELSYPLMTGDYHDFQKLVDKAIRQEDKYNRMEQKKRRIAHFKAQQGSSQKPRLTLGPQSMPQGASTQQQPAKREQGSKPMVCFNCGDPGHYADKCPKPRRVKVVPAQSNSAVPASKARVNHVAAAEAQDAPDVILGTFLVNSVPATVLFDSGATHSFLSMSFAGNHGMEVEDLRRPLMVSTPSNQALSLQRSPYVRIEIQGVPFLANLILLESKDLDVILGMDWLARHKGVIDCANRKVTLTSNDGRVVTVHALSSEFLRSRLNQITLEEIPIVREYPDVFPDDLPGMPPKRDIEFRIDLVPGTTPIHKRPYRMVANELAEVKRQVDDLLQKGYIRPSSSPWGAPVIFCGKERSYPEDLKGATVFSKIDLRSGYHQLRIKEEDIPKTAFTTRYRLFECTVMSFGLTNAPAFFMNLMNKVFMEYLDKFVVVFIDDILIYSKTKEEHEEHLRLALENKCEFWLSEVKFLGHVISAGGVAVDPSNVESVTNWKQPKTVSEIRSFLGLAGYYRRFIENFSKIAKPMTRLLQKDVKYKWSEECEQSFQELKSRLISAPILILPDPKKGFQVYCDASKLGLGCVLMQDGKVVAYASRQLRPHEKNYPTHDLELAAVVHALKIWRHYLFGTRTEVYIDHKSLKYIFTQSDLNMRQRRWLELIKDYDMGIHYHPGKANVVADALSRKGYCNATEGRQLPLELCKEFERLNLGIVSIGFVAALEAKPTLIDQVREAQTNDPDIQEIKKNMRRGKAIGFLEDEHGTRVKAEHQKPAGLLQPSKIPEWKWEEIGMDFITGLPRTSLGQDSIWVIVDRLTKVAHFIPVKTTYSGSRLAELYMARIVCLHGVPKKIVSDRGSQFTSNFWKKLQEEMGSKLNFSTAYHPQTDGQTERVNQILEDMLRACALDFGGSWDKNLPYAEFSYNNSYQASLQMAPYEALYGRKCRTPLLWDQTGERQVFGTDIVREAEEKVKIIQERLRVAQSRHKSYADNRRRDLSFEEGDYVYLRVTPLRGVHRFHTKGKLALRFVGPYKIVSRRGEVAYQLELPQSLAGVHNVFHVSQLKKCLRVPTEEANLEQIEVQEDLTYVEKPIRILETNERKTRNRVIRFCKVQWSNHSEEESTWEREDELKSAHPYLFASSSESRGRDSV

SEQ ID NO: 160486 - protein, 150 aa, Oryza sativa
  Clone ID: PAT_MRT4530_59760C.1.pep
MDPLSPLNLVLPLAILLSSLLAPPAIAMPSIEEQAGALIAWKATLQTQEPLQSWDRKAWPCHSWRGIGCGARQGKFVITKISLRGMRLRGSLEVLNFSALTMLTSVDLSHNKLTGRIPWSGASLKELRSLLLQNDQYQYVNRAQVLGSFR

SEQ ID NO: 160487 - protein, 47 aa, Oryza sativa
  unsure (1)..(47): unsure at all Xaa locations
  Clone ID: PAT_MRT4530_59761C.1.pep
LKTSKQQIVTEAIVMDSSRSSTKDARSCRISAAKEXIKHEPYGHRLH

SEQ ID NO: 160488 - protein, 51 aa, Oryza sativa
  Clone ID: PAT_MRT4530_59762C.1.pep
LRFKPSQPNSQPDLFQTPLGLASLSVAMAAAGQQILLLRKRAPRVGAASLC

SEQ ID NO: 160489 - protein, 40 aa, Oryza sativa
  Clone ID: PAT_MRT4530_59763C.1.pep
LLDDFFSYSSRAHTVVTSCDMTNYLRYWWHTNTNFIFPLE

SEQ ID NO: 160490 - protein, 84 aa, Oryza sativa
  Clone ID: PAT_MRT4530_59764C.1.pep
MARGGAFRFSSETPVGPTWGPHRRGAVAGLLPPSLLSLDAIGEWQKRNKTTPTFPAFSFLELLTDAHVHPPSSSSTAQLAAVLA

SEQ ID NO: 160491 - protein, 204 aa, Oryza sativa
  Clone ID: PAT_MRT4530_59765C.1.pep
MDFYGRREQYGGYGGYGGGGALATPGYAPAAPYGMSQVNIEGNGCGRTLPPQPTVKVYCRANPNYAMTARNGAVVLAPANPKDEYQHWIKDMRWSTSIKDEEGYPAFALVNKATGQAIKHSLGQSHPVRLVPYNPEVMDESVLWTESRDVGNGFRCIRMVNNIYLNFDAFHGDKYHGGVRDGTDIVLWKWCEGDNQRWKIQPYY

SEQ ID NO: 160492 - protein, 204 aa, Oryza sativa; identical to SEQ ID NO: 160491
  Clone ID: PAT_MRT4530_59766C.1.pep

SEQ ID NO: 160493 - protein, 53 aa, Oryza sativa
  Clone ID: PAT_MRT4530_59767C.1.pep
MVFVYDEEGASRGESWVLVHGLSRLTPRKSGCLPACLHTRCGNLCAQPVSLGL

SEQ ID NO: 160494 - protein, 157 aa, Oryza sativa
  Clone ID: PAT_MRT4530_59768C.1.pep
MNQKENVNAHQDPLPSPALLPGWRSAPLGERESESCSIGDSLAVEKENHPENQTVAAARNAQRVEARSSTGRRRAQSTTMVWDLHATPLHGHRSRLPTRTRHVTDIGNAGYTPSQVASTSPDEELNGGICGTLTLGKRAREIRAISRYGLALGHEAQ

SEQ ID NO: 160495 - protein, 137 aa, Oryza sativa
  Clone ID: PAT_MRT4530_59769C.1.pep
MHIGDLQEKKRVSCVFVKEMAGARGCNQKLRDGRFLNKNKIVVHYTAAYSATIYTTWVRGPASTYMACTHVRVRIMMRLLSSLQRLLQETVQIAQQDFGGLFNSSPNPNGATMKCNLVSFQAFGMKSSYTVIVLYDH

SEQ ID NO: 160496 - protein, 483 aa, Oryza sativa
  Clone ID: PAT_MRT4530_5976C.1.pep
MELRSLFHEIALLPEPDFFTEYGEANRYKVSEVIGKGSYGVVAAAVDTQTGERVAIKKINDVFDHVSDATRILREIKLLRLLRHPDIVEIKHIMLPPSRREFRDIYVIFELMESDLHQVIKANDDLTPEHHQFFLYQLLRGMKYIHAASVFHRDLKPKNILANADCKLKDYVATRWYRAPELCGSFFSKYTPAIDIWSVGCIFAELLTGKPLFPGKNVVHQLDLMTDLLGTPSAESLAKIRNEKARRYLSNMRKKPRVPFTKKFPGVDPMALHLLERLLAFDPKDRPSAEEALTDPYFNGLANSEREPIAQPISKLEFEFEKRKLAKDDVRELIYREILEYHPHMLQEYLRGGDQMSFMYPSGVDRFKRQFAHLEEGVSKGEKSSPQLRQNASLPRERAIGNKHGDDEYHAKLNVGEKPCHASVTDGISKPLMSARSLLKSESISASKCIGEKPKQDRDEDSLTESMDETADEVSEKVAQLKT

SEQ ID NO: 160497 - protein, 67 aa, Oryza sativa
  Clone ID: PAT_MRT4530_59770C.1.pep
RRDSGFVQVHQSLPLQPYLSQECVSGILHGNSSLSSKMRATFRQQRRSAFVDKGCEGRIQVIQIIIT

SEQ ID NO: 160498 - protein, 54 aa, Oryza sativa
  Clone ID: PAT_MRT4530_59771C.1.pep
VPQGVASHHIGSIKLRHAVKLPDISYILNYDSIATTYEGEGGARLARSLVDSSV

SEQ ID NO: 160499 - protein, 37 aa, Oryza sativa
  Clone ID: PAT_MRT4530_59772C.1.pep
VSGHRGSGLTEQMVVDWSELMEEVVSNQIGSTEGLGV

SEQ ID NO: 160500 - protein, 663 aa, Oryza sativa
  Clone ID: PAT_MRT4530_59773C.1.pep
MGAKDNGEVRDEKGVGSDYEPARVSGVSKKLMRKDTRENSPRMAKSSGSRQVQNKLQHKASNNIQSRSPKPRKVVNAAKSAEVRRSDTVRVPSRAPSELSEETDDIVSEAGTVDDSKGNEEAKEIDVLDEAPHCDQSTGTDDEIPEIEEKIVDDEKPVVYQRNEELQSKIDKLEQELGEVDAFVVPLYSVLTKHESSVHNQNTPARRLSRMYIHASKFWSSDKIASVAKSTVSGLVLVAKSCSNDASRLTFWLSNTVVLREIIAQTIGISCQSSSTITAINMNGSAKSLDGRSMPMLWTNSSSGKQTKFTGMQVPDDWHETSTLLAALEKIESWIFSRIVETVWWQVMEQCVGRLDVAMFNAILRESASEIPTDPISDPIVDPKVLPIPAGDLSFGSGAQLKNSIGNWSRWLTDNFGIDADDSEEDGTDTGSERSAAESKSFQLLNELSDLLMLPKDMLIEKSIRKEICPSIGLPLVTRILCNFTPDEFCPDPVPSIVLEELNSESLLERCTDKSATSAFPCIAAPVVYRPPSLLDVAEKVADTGGNAKLDRRASMVQRRGYTSDDDLDDLDSPLASLIDKSAPPLLSKGSAHFTAQRGVSMENARYTFLRECTTFLAHIHAFAEMDIDGKARSVNTFIPLHKKCASRVFPKWPRSYNLGQME

SEQ ID NO: 160501 - protein, 174 aa, Oryza sativa
  Clone ID: PAT_MRT4530_59774C.1.pep
MQVPDDWHETSTLLAALEKIESWIFSRIVETVWWQALTPHMQTPVEGSSTPKTGRVLGPSLGDQQQGTFSVNLWKAAFHDAFNRICPLRAGGHECGCLPVLAKLVMEQCVGRLDVAMFNVHSCESASEIPTDPISDPIVDPKVLSIPAGDLSFGSGAQFKNFIGMGQMFTDNFG

SEQ ID NO: 160502 - protein, 104 aa, Oryza sativa
  Clone ID: PAT_MRT4530_59775C.1.pep
GGMNKPASHKSAIVSSDWILLLSLSNLVSFPCNLIPVVSTFYCSPLQRSLQLYLVEADKKLSRCNLVLWSQMFACVLLGNILSEMLIFTLKKKKKRGDPPGVSW

SEQ ID NO: 160503 - protein, 144 aa, Oryza sativa
  Clone ID: PAT_MRT4530_59776C.1.pep
SLLLSPDFQTRKENKKIEAFGHAKSIPNATTSVGFPLNRSSQHPKKSIRLRNQITNECIKNTRKKESKKEQGASEIREFTLLTSKSAGVVSSSATPPKSSLSAPSSSSTHMPLPAATEPEKPTAAAAAAAAESWSEQRRRRPNR

SEQ ID NO: 160504 - protein, 45 aa, Oryza sativa
  Clone ID: PAT_MRT4530_59777C.1.pep
IMQFCRIYFQQTSIRNVRIGTLLSKAAFFSDVVPLRAAAKGGPLE

SEQ ID NO: 160505 - protein, 191 aa, Oryza sativa
  unsure (1)..(191): unsure at all Xaa locations
  Clone ID: PAT_MRT4530_59778C.1.pep
QDVSSRPSXAAXXXEXEEEEEASNLXLXPAGSKVXSKLLSXEXAAAAPXXXVYXGVASAGSVPXLXEXQXGTPXNXMXXXVXPPLXPPXXXXXAGXVSXXXRXXXRRXNYWXXXXXXLXVLPXIXLRKSGRPVSGXPXSXXAXSXXXXXSXGSXXXSXXXSXGXTWXXXCSXXRTCXGHGGXGALPTQRTT

SEQ ID NO: 160506 - protein, 56 aa, Oryza sativa
  Clone ID: PAT_MRT4530_59779C.1.pep
RTAFNMDEAKYIGMMSKEVLAGPFVISPEYAQIASANCSKPISSFQVHPNICRCMI

SEQ ID NO: 160507 - protein, 117 aa, Oryza sativa
  unsure (1)..(117): unsure at all Xaa locations
  Clone ID: PAT_MRT4530_5977C.1.pep
THKATGASAPDYPSTWAILVLGARYTRAIPTRQGGNRVPIXVAIDKFTKXDRSSTHGEIKADNAIKFIKGIFCRYGLSHRIITDNGSQFISTDFQDYCIGLGIKICFASISYYFQAC

SEQ ID NO: 160508 - protein, 718 aa, Oryza sativa
  Clone ID: PAT_MRT4530_59780C.1.pep
MAPPSVAPCPARVLLVSTPSPPSLSRRRPAGRRCGGGDGGARLRTIRCGAATEEEDGDRRGERVEAAWEEEVAAPGRDLVTLAACLVGLLSGVSVVLFNLSVHEIRDLFWDGIPLRGASWLREESIGEIWQRVILVPVSGGIIVGVFNTLRSSIATNSNDTMSKIKGAFRPFLKAMAASFTLGTGNSLGPEGPSVEIGSSIAKGFGNVFKLEGGKKLSLVAAGSAAGIASGFNAAVAGCFFAVESVLWPTSVDSSSLSNSTPMVILSAVIASVVSEIGLGSDPAFTVPEYDFRSPTELPLYLLLGIFCGLVSTTLSRCTALSMEIVQSLQTATGLPKAASPALGGLIVGLLALVYPEVLYWGFENVDILLESRPFTSGLSAAVLVQLIGVKVLATSLCRAFGLVGGYYAPSLFIGAATGMAYGKVMRFTFTGPDSLFQIPFLDVASPQAYGLVGMAATLAGVCKVPLTSVLLLFELTQDYRIVLPLLGAVGVSSWIASPQRFSRSNRSKPDSSEVKSSNFKQEKSVPSQTQGASVDTDKPITDLCKLESSLCVYDAKHENFQENLTVAEAMKTKYISVSKTTPVVEALNLMLVEKQPFVMIIESNRSLIGLVTLKDIQDFCRTAKTTRVQTEEPVQTYVCGAVKCKMWPVTPQTSLTTVEKIMDSYGVDQLPVVSEHVDRQDRGLLVGFVDKEGIAIARRAVATKDLLSFTSEIKGDR

SEQ ID NO: 160509 - protein, 88 aa, Oryza sativa
  Clone ID: PAT_MRT4530_59781C.1.pep
MASISGERWYVIIFAASGQRWRHDHIAAAVKGSWDGAHAGRKWDGHAGGASDDRGGANNARRRHGGGFVFFGWCTTTQYDDMTGDVGI

SEQ ID NO: 160510 - protein, 113 aa, Oryza sativa
  Clone ID: PAT_MRT4530_59782C.1.pep
GRRCCPGPQGGGDPPGGSPPPCFFFLGCQVLFNWVVFPSPFPLYDFLASLGPLLKRNGFVFLYFFRNFVVVAGKTPPLSLPFSPLKNTFVRSVSPSLLGWSLNLIWGGLSFFN

SEQ ID NO: 160511 - protein, 188 aa, Oryza sativa
  Clone ID: PAT_MRT4530_59783C.1.pep
MACFDLNAEKQRRVASSDWPTMAVLLVGDAWRRRIGAGEHLNNAGDEALVCRQEWYRVASKVEVTSKCVVHGSGAMAMGSACRSEVELVIDTRTVGTPGGRRSSRGGSHQARRRVPVTEPPEEGADKDDEGEAKDVRELERMHVNVERENEAERDPVFSVALRGSLWATTIRRGALLQLRQRDGEEGR

SEQ ID NO: 160512 - protein, 29 aa, Oryza sativa
  Clone ID: PAT_MRT4530_59784C.1.pep
CTLFGQIYSSYNKACYKIRDKLTKALLDT

SEQ ID NO: 160513 - protein, 123 aa, Oryza sativa
  unsure (1)..(123): unsure at all Xaa locations
  Clone ID: PAT_MRT4530_59785C.1.pep
PRLRHLCRHLPPEAQSLEPFDELDGYLLGSFSCLPVFLPXCVYDEFYXHFCKHYPWPWLHYHVQHTCXVTSTFDATLYHXLSANKSFVARVIEVLSLEDSDIMFIHDYHLWLLASFLHVAIER

SEQ ID NO: 160514 - protein, 141 aa, Oryza sativa
  Clone ID: PAT_MRT4530_59786C.1.pep
MGGSGEPRLTKGVGVGMVMASVRAAMTLTTREEAGAAGSGDPVLLAGGSGAPEKGTRTAGTGGSGVLKRNESRRCRPDGRASGGCCPLLASSMSTVAAISSLSPSHENLVLQDLFRIERLQARGNQQVKLDMGGSSQISSC

SEQ ID NO: 160515 - protein, 424 aa, Oryza sativa
  Clone ID: PAT_MRT4530_59787C.1.pep
MPAFEPSTWLRAAAENTYSKPEVAVDDRPAQADIWNAIQADVVDKSATTGAKKAAAKPYVHPLVRRSSSLMSQKSLEVCTESLGSETGSGDFTASLDDVDMASLFGAPAAPASKRADQAAEDSFWQQSAAPEEAWERKELAAVNYHCSGGTRSPPRSFPPPLPSMSSRDAPCLQMRPRRQDGRLIVDAVVVRPRGYLHARRQGGRLLLSFVDCSAREQSAASKAAVATEKAPYFPVVDAKLDQDEEVAAEVEEDDEVEEEEEEVEVVDRGTVVEVKVSTQPQTPTAAKVHRSTLVINKFVGSTPLTVADLQPRCNADAACAAAAAAEATTDAPAPALRRVPSSTSTTTLAAAVAVASTSTDGDDDDDEPHHPPGAAAPAADTKQLLLFTSRCRDKQELLQSVRQCRQLRQKPLFILEPYCIATS

SEQ ID NO: 160516 - protein, 39 aa, Oryza sativa
  Clone ID: PAT_MRT4530_59788C.1.pep
PETDISTDTNAHSHLEHQLFISHIVDQETHVYHNYVYII

SEQ ID NO: 160517 - protein, 142 aa, Oryza sativa
  Clone ID: PAT_MRT4530_59789C.1.pep
MEWVRGKCVGRGAFGAVHVAVDRATGRAFAVKSVEAKGGAPAAAMACLESEIRILRRLSSPYVVEYLGDDGDAATTRNLHMELVPGGSAAAAAAMGGLGERGARGVVRRVAAALRYLHDVAGVVHGDVKGRNVLVGCDGDGR

SEQ ID NO: 160518 - protein, 268 aa, Oryza sativa
  unsure (1)..(268): unsure at all Xaa locations
  Clone ID: PAT_MRT4530_5978C.1.pep
TRPADCKLKVCDFGLARVSFNDTPSAIFWTDYVATRWYRAPELCGSFFSKYTPAIDIWSVGCIFAELLTGKPLFPGKNVVHQLDLMTDLLGTPSAESLAKIRNEKARRYLSNMRKKPRVPFTKKFPGVDPMALHLLERLLAFDPKDRPSAEEQXSEREPIAQPISKLEFEFEKRKLAKDDVRELIYREILEYHPHMLQEYLRXGDQMSFMYPSXVDRFKRQFAHLEEGVSIREVEGEYADENQCQFLTCLFYQCRRHGAAAGFCYWPR

SEQ ID NO: 160519 - protein, 91 aa, Oryza sativa
  Clone ID: PAT_MRT4530_59790C.1.pep
MTAPALHPIGRSCRFGLAYTVADVGRREMALTSGGSGGEGMEHGDDVSARQSAAAAAARTRAPRTRPWCSVVAAPTGREEAAQLTGPAWAE

SEQ ID NO: 160520 - protein, 53 aa, Oryza sativa
  unsure (1)..(53): unsure at all Xaa locations
  Clone ID: PAT_MRT4530_59791C.1.pep
TIVGHMGRPARHGPGTTGPRPRSVGPARPDEQAVPCRAVXSPRATTTAQARPK

SEQ ID NO: 160521 - protein, 414 aa, Oryza sativa
  Clone ID: PAT_MRT4530_59792C.1.pep
MESLTLRASPSTAAPLRRVPGRRHAAVSVRASAGAGEPDLSVRVNGLKMPNPFVIGSGPPGTNYTVMKRAFDEGWGGVIAKTVSLDAEKVINVTPRYARLRADPNGSTKSPIIGWQNIELISDRPLETMLNEFKQLKKEYPDRILIGSIMEEYNKAAWHELIERVEESGVDALEINFSCPHGMPERKMGAAVGQDCDLLEEVCGWINEKATVPVWAKMTPNITDITKPARISLKSGCEGVSAINTIMSVMGINLKTLRPEPCVEGYSTPGGYSARAVHPIALAKVMQIARMMKEEFADGQSLSAIGGVETGNDAAEFILLGADTVQVCTGVMMHGYGLVKKLCAELQDFMRQHNFSSIEDFRGASLPYFTTHTDLVHRQREAINQRKAIRKGLESDKDWTGDGFVKETESMVSN

SEQ ID NO: 160522 - protein, 127 aa, Oryza sativa
  Clone ID: PAT_MRT4530_59793C.1.pep
CKVMGYDIPIGTTMLVNVWAIGRDPKYWEDAETFRPERFEDGHIDFKGTDFEFIPFGAGRRMCPGMAFAEAIMELVLASLLYHFDWELPDGISPTKVDMMEELGATIRKKNDLYLVPTVRVPMSTAL

SEQ ID NO: 160523 - protein, 62 aa, Oryza sativa
  Clone ID: PAT_MRT4530_59794C.1.pep
GFLIFGGYFFFFFFFFFFFFFFFFFFFFKQQQQTLFYIHPRVNFTGEGGPPYKIQKGLDQNF

SEQ ID NO: 160524 - protein, 253 aa, Oryza sativa
  Clone ID: PAT_MRT4530_59795C.1.pep
MASRRLFASLLRSTAAPRPTPTPGYLFNRAAAAYSSSAPYNGQGFPPPQSETASRLGLFSRPGDTRQPSYGDRLMQSQQLSQDYRARTQANNAPRFGDTMSRIAGGDNSSYFGTPSRIFDEHKQSLVKGKRDFVHVLLKRNKTFVTVTDVRGNKKTGASAGCLEDRKGRSRLSKYAAEATAEHVGRAARKMGLKSVVMKVKGTTFFNKKKKVILSFREGFRGERVREQSPVVLIHDVTQLPHNGCRLPKQRRV

SEQ ID NO: 160525 - protein, 96 aa, Oryza sativa
  Clone ID: PAT_MRT4530_59796C.1.pep
MLGVSRSKLVILTLINGAADFLSSCSTEAQPDPATAEQAQRVIFEISFGDGSFVKIVFAKGQIVKIFVGVVVVCMGGKGQIVKFFAGVVVVCMGGK

SEQ ID NO: 160526 - protein, 182 aa, Oryza sativa
  Clone ID: PAT_MRT4530_59797C.1.pep
MGEPSKELLDLPSEPKPPSLIESILVGRREQQQHKEGKRKAGPPTDPLPKSQVLGRVKDFLGEMAKANEKLHLDVKNKRPEEYDIEALTGNEKEYIEMDLLLGVADLHSEKAVEVAEATMNGFPPSGRSFACSSSDSEDDSDGSDEDSGDETNMSSKDADEPEAQASKGKKPNKRQKIVVLN

SEQ ID NO: 160527 - protein, 180 aa, Oryza sativa
  Clone ID: PAT_MRT4530_59798C.1.pep
MPTTAEDQKQWKVVEVQRINAESHPPPRRDDRCDDLRNDEEFQRVMDNVVFGRGYDPTRDDLRISTDPTAMVELIEYYHKMGLIEVPVRIGTGIIVDFGRPTKNGFSTSDPVVDCEGRDDATPDRADEQVKKQCLMSLELDINRDQGASSTLASFIASFWKLLKEDWQLAPESPDGCEIW

SEQ ID NO: 160528 - protein, 620 aa, Oryza sativa
  unsure (1)..(620): unsure at all Xaa locations
  Clone ID: PAT_MRT4530_59799C.1.pep
MLLDPNPGTRITVPGLLETPWFQKTAPVLRPIIADLVPAPVDTHGNATRARAGCGSPWRLIDVFSVAPSLLVVDVKKDGGDAMEYRSFCSEELWPALKDIVWSVSRSWAFSSPNGEGGDTAVEAAKQAIATGHVEAESVANGVGLTIGEKGGGRLDERCKREMAATTPHASRAVARRRPCAVRRRAARRCRSSPPLTMLDTAWREEGGEMGRAGERKKKRIGFGHLRMTCGAHNIPFRHHLRFTLASPSPITRPKTLAVAAAMSGAVATHAAEPPRPSAAAAEVAVAGGGGGCGAARKPAATMEHVLLALHETEAEREARIRAMFGFFDAAGRGHLDHAQIEAGLAALHLPPPXPPEEGGGGYARELLRACDRDRDGRVGYDDFRRYMDDKELELYRIFQAIDVEHNGCILPEELWHALVKAGIEIDDEELARFVEHVDKDNNGIITFEEWRDFLLLYPHEATIENIYHHWERTFACGSGKIPSLGALSRDIWMQEGPRAFYRGLVPSLLGMVPYAGIDLTVYETLKEMSKTYVLKDSAFAAHIARARRAPSRMLPPLRGVAHAARGWAPDSDGGAGAKVIGAEVVPVSANGTSANIVPAWRPSREVAGPQRLALIPFTR

SEQ ID NO: 160529 - protein, 361 aa, Oryza sativa
  Clone ID: PAT_MRT4530_5979C.1.pep
MPCHMLTQKKQGHYARNCPQQKRKAPMRTEDEVRKMIITSTEWPPPGMTKCQRRNSSRGAQQLTEHLLANGGRVSGSEDSDQVSSDDEDAKSPQGFNQNKIELKACSRCGEIGHVASSCAFTCVRCEEDHPPDRCPMSRITCFLCEGTDHVPKDCQLSFLLTKKMADQHAHSNGEKHQGNTNPRQHYSFSLTPVPGQRNQNEKRKCRVREDICCFNCQGMGHFADKCPKPRNIAAGTSVHATPCNQKLAPQRIVIHASRSSPIARVATAPIPMSALPQGVNAQFQPQPPAGKTEASICVVPLEVPIHQLRNQVQDEEPELKKGITPKTVPNQGKIGLHITANLHEADIPIVLWSLEQTPCP

SEQ ID NO: 160530 - protein, 302 aa, Oryza sativa
  Clone ID: PAT_MRT4530_597C.1.pep
MLRCVYTQRRWAHRRGGFVTGGTGWSQRRAPAAAAAVGAGAGAKKSEWWAVDGEMHEIGEGVPHRERFAIPRDNLPNRRRKQMREQFMRRTRLVLKDTFSLGSRINLLANKLAEIWNHGIGKIEKHGMKLKMLLYLNAEHEAWCKKYMELYQELRENWERLYWDEGYSKKIAEDHANYDSAEEDDLDFSPYSRRRHTNVEPNKDIGFTASKQGETWERVTQIRDKFEYDRERRMRERAFAPMNMENNFGQHDSRFRNRHDSNYAPRNMENKFGSNDSDFGTQSGRSFRHDPSFRNQHGSPFQ

SEQ ID NO: 160531 - protein, 52 aa, Oryza sativa
  unsure (1)..(52): unsure at all Xaa locations
  Clone ID: PAT_MRT4530_59800C.1.pep
TYCTCTRSKHTHFSVLKMXXKITKKNXIIKNVHTHGSICSVVSRTXYPGLLS

SEQ ID NO: 160532 - protein, 178 aa, Oryza sativa
  unsure (1)..(178): unsure at all Xaa locations
  Clone ID: PAT_MRT4530_59801C.1.pep
KKEKKEGGGDAAXAGTGSXKGTRXXEGAXKPAAATPEETXPXAXXDRXPTHRGXGEARHSXRXGADAAPGGXRDAXARARXXXXPXAGRXXEPEAGXPAXRXTADGXNPAEAAADGSPEDXRXXERPPPXPKEDXGPXPGDDRXGXEPHNTXXKRQXTKXTXGGRDGGPTTPGGRPGA

SEQ ID NO: 160533 - protein, 517 aa, Oryza sativa
  Clone ID: PAT_MRT4530_59802C.1.pep
MASPGGKGLVACNAAISRCSRAGLHRRALALFTEMRARGLRADEYTLPPILNSAALLRAPPAAALHALLLRAGLASHLHVANALVDAYAKLSRLGAARAVFDEMPRRDVVTWTSLVTGLARAGSHGLAVRAYRDMVAAGVATDEFAVAAVLSSCAGSTALELGRSVHAAAVRSGHEPFLSVGNSLVSMYAKTGSLRDARTVFDAMRSRCAITWTALIVGYAQNGRGRESLAVYADMARSGCRPDYVTFVGLLFACSHAGLLDAGRAHFQSMQSEHGISPGPDHYACMVDLLGRAGRLGEAVDLLDRSPAAELDATVWKALLAACRTHRNAALAERAAGMVWRLDPTDAMPYVMLSNLYSRARRWGDVARVRALMRSRGISKEPGCSWVVVAGVTHVFHAGDRDHQRAAEIYRKAEEMAARIRARGHVPDTEWALQDEAPEGREMGLAHHGERLAVAFGLLAVPAAAPIRVYKNLRVCGDCHAAIKMVAEVYGREIILRDSNCFHHMKDGSCSCGDYW

SEQ ID NO: 160534 - protein, 251 aa, Oryza sativa
  Clone ID: PAT_MRT4530_59803C.1.pep
MGTRLVPRETAALLGAFVALLAVSFGAVAAPAPLVVGSIKCLDCSPDDVKAEDAFRGLQVGIMCNSGAGEAYETKMLSGLDENGGFSIPLAADLLRDDGELDKDCFAQLHSAPETPCAGQTPPRIAKAGPGNDTIAAAAADAAPTYLAVSDDTLFSPVACKCGKYKKKFMFAPPPPPPPRPPAPEYKPPTPTLTPIPTPEPSYGPPAPKPPAPPVEDEPQPFFHKHPKLKFMHKKKPCPPLVDVDIPRPNN

SEQ ID NO: 160535 - protein, 351 aa, Oryza sativa
  Clone ID: PAT_MRT4530_59804C.1.pep
MTVAGASELMSGYYQAQEMSTMVSALARVVAGGGGGGGDGDGDQWAWSSPSPSSSAAAAAARGVQERRREEQAMHELAGYACGGAPSPEFAGSEQSSDTQSASAATMDEHHSPVGGGGNAEGPDTPRRRYRGVRQRPWGKWAAEIRDPHKAARVWLGTFETAEAAARAYDEAALRFRGSRAKLNFPEDARLYPTAATTTTAAPPPAPVAAASPSAAIYPGASQSAEYLRYQMLLQGRLTTATPNQGTLLPFYGGGGGGGSMTNPYGGGGGGAMSGFLGSYYSFPTPSVSVATVPSSTSSAPGNYYSSHGGSHQSMSAAEEWNWENALVYPATAASWSESSYHHHPPPPHTQ

SEQ ID NO: 160536 - protein, 94 aa, Oryza sativa
  Clone ID: PAT_MRT4530_59805C.1.pep
MVRMAGVDPEWSHSMAHALALDARTWPGWDVPDLGLTDEDVDVLRGTVGHVANSRARVLPLAGAAEPATALTSGVGGTEKERAVAGGNDGAGKE

SEQ ID NO: 160537 - protein, 363 aa, Oryza sativa [sequence omitted]

SEQ ID NO: 160538 - protein, 476 aa, Oryza sativa
  Clone ID: PAT_MRT4530_59807C.1.pep
MAELPPVQIVAAKDDVPPPYLTDNVVHNLLLCLAPEPAYLAVATAVSTKWRSVVHSEACFGRRFRLDYDGPTPLLGFFSNNAAGPFFTATGAGVVGLAPPEEAVSAGDGSVQHIYDARHGRVLMDGREDKELLVWDPLSRRKDFIPMPPGYFVGEGYGGGALICEADHGAGDDCHAAPYRVVFVYCGSDRPPTTMASVYSSRTNTWGPVATMDARVTFELKQPAVLDYTVYWLVNGRTQIIEFEFDTNSLALFRTPVDLPDIVVFPMEDGRLGYTGMMGPIVRVFAIEDIYEDGDATWTKVTTLHLDAMRPSQSYQQVLDSDTDSDSDDEEEVVLLLAHQFGPKAKKDSKIIPSHPPTIKSDNDEYNHVVIRPRVIGFIEDPNSILVRNELGVFMVDIESNEYEQLSQRIYFTTVYPYESFYTTVGKANFNDPVLIDHENNDEQGLQQLEPLNDTILPDQENIGGGISASGDGDEQ

SEQ ID NO: 160539 - protein, 43 aa, Oryza sativa
  Clone ID: PAT_MRT4530_59808C.1.pep
GPMRRSDRRLAAGQTGHGTPVRPPLCGRSDRPWSGGTQSLPLL

SEQ ID NO: 160540 - protein, 270 aa, Oryza sativa
  Clone ID: PAT_MRT4530_59809C.1.pep
MAAGKEGTVNRTNRGWLVDVAGVVDEEAKEVQAVEAAKAVEEGSVTGVVGLVKELVVSRFSAVGVRSTSAVKLSSLVSTVAGRRGAASDGVRGWSGCPLFTARKDDGPQATRLVRSRFARVLLPHVLLNVYTEVTEQNRKMKQQSTGVAFFHSLRICFVEGDATQAALRVERESLPAVGFLFLSSSSPTRAVPHGPRHANSIGGDSACLPARARAAALHLPPGSSGWHGMDALLSSPFPRNATRRPGAHGKPTLSPRGGRGKASPSALAA

SEQ ID NO: 160541 - protein, 497 aa, Oryza sativa
  Clone ID: PAT_MRT4530_5980C.1.pep
MDPSKKEPDFFTEYGEANRYKVSEVIGKGSYGVVAAAVDTQTGERVAIKKINDVFDHVSDATRILREIKLLRLLRHPDIVEIKHIMLPPSRREFRDIYVIFELMESDLHQVIKANDDLTPEHHQFFLYQLLRGMKYIHAASVFHRDLKPKNILANADCKLKVCDFGLARVSFNDTPSAIFWTDYVATRWYRAPELCGSFFSKYTPAIDIWSVGCIFAELLTGKPLFPGKNVVHQLDLMTDLLGTPSAESLAKIRNEKARRYLSNMRKKPRVPFTKKFPGVDPMALHLLERLLAFDPKDRPSAEEALTDPYFNGLANSEREPIAQPISKLEFEFEKRKLAKDDVRELIYREILEYHPHMLQEYLRGGDQMSFMYPSGVDRHKRQFAHLEEGVLKGEKSSPQLRQNAFLPRERAIGNKHGDDEYHAKLNVGEKPCHASVTDGISKPLMSARSLLKSESISASKCIGEKPKQDRDQEDSLTENMDETADEVSEKVAQLKT

SEQ ID NO: 160542 - protein, 64 aa, Oryza sativa
  Clone ID: PAT_MRT4530_59810C.1.pep
KSQRTPRTRRSGGGYDPSRPSITQGRAVTGGGRHLVPLENRLLLSFREKARFKAQEKCSGIPLR

SEQ ID NO: 160543 - protein, 49 aa, Oryza sativa
  Clone ID: PAT_MRT4530_59811C.1.pep
SVGPAAVRPPAAPLLATTRFDAPLPLARGRCRSGPPPLPGCGWLPGSPA

SEQ ID NO: 160544 - protein, 131 aa, Oryza sativa
  unsure (1)..(131): unsure at all Xaa locations
  Clone ID: PAT_MRT4530_59812C.1.pep
PGVPLPLFYFKDFSNSPPFYSPAFGYTVPPLXHSPKWAELENGXTTFAFPPLPQRETDALTGPVQLPDSAGERGPLEIFFDYPDVDAGYRRAVDNGPVPVSPPDQKNWGQKVGFVRDIDGFFVGMGSPVRG

SEQ ID NO: 160545 - protein, 66 aa, Oryza sativa
  Clone ID: PAT_MRT4530_59813C.1.pep
KVFYHLSSLVQLCRESMKSGPSVTKRVYGVYSSPPKLQSCLCVCGTVAVLFLWWVPRRRNPAGVIS

SEQ ID NO: 160546 - protein, 56 aa, Oryza sativa
  Clone ID: PAT_MRT4530_59814C.1.pep
WRLWSGHDKPGGEGARRWLTANAASSSTTAQFTCARERTRTVPDGATPTRFNCAGP

SEQ ID NO: 160547 - protein, 172 aa, Oryza sativa
  Clone ID: PAT_MRT4530_59815C.1.pep
MSNTRVFFDMTVGGAPAGRIVMELYAKDVPRTAENFRALCTGEKGVGKSGKPLHYKGSTFHRVIPEFMCQGGDFTRGNGTGGESIYGEKFADEVFKFKHDSPGILSMANAGPNTNGSQFFICTVPCSWLDGKHVVFGRVVEGMDVVKAIEKVGSRGGSTAKPVVIADCGQLS

SEQ ID NO: 160548 - protein, 284 aa, Oryza sativa
  Clone ID: PAT_MRT4530_59816C.1.pep
GAAQGTRRTSGISPSPVDLSPPLPSSPLRAPVLSPRPLLPESRARPLHLSLRRCKRRTGRRTGPDARSRGKDAAAGEVAARAQQLARLQQGRDGRRDREGRGGRRGSGKGVPAGEVAAKAWWPARVQTRRSRGDLRAVGPIDLHRSNRRHQDGQIGGSISVRPIFIEFEDEIKKEDNDPGAFYLVYKMATILSRPLSTRLVLLSFAAFGRSRTPRCDGDGNGSRAVAGILAGAPCQGGKADMMTWEKAAMFRLDYHRGLCSTQKCRTAMFQPSVPSGGFGGKKS

SEQ ID NO: 160549 - protein, 68 aa, Oryza sativa
  unsure (1)..(68): unsure at all Xaa locations
  Clone ID: PAT_MRT4530_59817C.1.pep
HLLSTYHYYLVLLLFAXPLYIVISNLGQGNVGAKFAYPPSVPYFRTRGSTREFXDRIPCQAYAGLIPY

SEQ ID NO: 160550 - protein, 87 aa, Oryza sativa
  unsure (1)..(87): unsure at all Xaa locations
  Clone ID: PAT_MRT4530_59819C.1.pep
MALTNGVEQLLSMRRSGAGKGGRDGHAAGGRMTRMQPREQVRLRGLRFLDKTSDGKEGWKFVKRCLDEMXRHPKESFGKCIATRTTV

SEQ ID NO: 160551 - protein, 88 aa, Oryza sativa
  Clone ID: PAT_MRT4530_5981C.1.pep
GGSQVRLHLKGLQVPDLMIGSQEPSPLWDIRISSPFFFLLFLFWAWKKTGRGGKPPRSCFFFRGLGGLFRGLFFFLFPLVLGGKKKKA

SEQ ID NO: 160552 - protein, 107 aa, Oryza sativa
  Clone ID: PAT_MRT4530_59820C.1.pep
CSRCKNELIGRVWYSKHEQLATAERILVLPLPLLLYSYTTPLLLLLQAAAVLGWLLQQMDVLGLISIEMCGCIWQIVVVSVGRNVGVMDRRKGEWVGWPRAEFLQPG

SEQ ID NO: 160553 - protein, 208 aa, Oryza sativa
  Clone ID: PAT_MRT4530_59821C.1.pep
MGGAGALLCLSSSLASPLLLHPCTAASTRGHRRRFACVYHDLVQRHDALALLAAVTDTEGHIHVFVLVVIKFYRPRPRQPRRGYIFSGPDPYVVNLSPRLSRPRQTTYSSVGEWAIGMENRWRRTACWRWTALAVEGVLAAEGTCDEGRWRRTTLAMTAAGSGRRNDSGRHRARVVRLGRDSARVRGGGGARAWWRWCDMELGIGEID

SEQ ID NO: 160554 - protein, 473 aa, Oryza sativa
  unsure (1)..(473): unsure at all Xaa locations
  Clone ID: PAT_MRT4530_59822C.1.pep
MPPPAGLLPWPAPSAARLAAPTRTRPPPRTRVRPPPPPAPPPPPPPRLEPVVVVAPSTTTATATLPPIITPTLSPSTSTCLECVHFNSCSGCTHEVDLDKPPVLQEVENFFKGHGVGDFTFSRGRLREWRCRAKLAIRGTPQNVAMSLHKAYTAKSTHIKVKNDKRPWNLRPSEAAAKAXIQQCKEVVXMARNSYILYLRMGQXKKEFRXVWNPKDXRFANSENLCLLSXIIYGRNCRHLIGENDLWERYGGVDISLDPYSFGQANTLSFNALLHTLHKYVPRGSTVVDLYSGAGVIGLSLAASKKCRSVKCVEINKLSKMSFEKSASRLPPNLGCTITWHNTDASVEPVHWLEGSSVVIVDPPRKGLHPSVICALQKVALSERKAYKAKSTLTKVKDEKRPWILRAREAAVQVDSTPLEGSSETWPETLIYISCGWDSFKKDCKSLMSSKAWHLQNAHAFNFFPGTDRYSGL

SEQ ID NO: 160555 - protein, 110 aa, Oryza sativa
  Clone ID: PAT_MRT4530_59823C.1.pep
STGLQASLCRVVRDRDKKLMLIGSEVHGPAIVRRYPFIARARAKFYTHPRRKLLSMQAVSSSTIDSPRLNLVSLSRRTAGAFVGMSALIMCAAMCRIILVYAMLNYLHGE

SEQ ID NO: 160556 - protein, 137 aa, Oryza sativa
  Clone ID: PAT_MRT4530_59824C.1.pep
SPVRSLAEKIAFTNAHPVEEELKEHGQSILLMSENTAGIGPADKAAIRRLNELSVNGVEKLMTDHQLDAIVTPDSAAAVVLAFHGLPGVVVPAGYDEKGVPFGVCFGGLKGYEPRLIEMAYAFEQVTKVRMPPMFKP

SEQ ID NO: 160557 - protein, 101 aa, Oryza sativa
  Clone ID: PAT_MRT4530_59825C.1.pep
PAGISSSLIFYSGPGLHCRPIDCASIPIPPWRRRRRGASPRRRGELLRPHLLPHAPATRRTSPPAASTSRVRSGRARRATACSSWSPTCRRWKQLNCMTAP

SEQ ID NO: 160558 - protein, 64 aa, Oryza sativa
  unsure (1)..(64): unsure at all Xaa locations
  Clone ID: PAT_MRT4530_59826C.1.pep
ILYIYPPFFFFFLNIYIXIFCVFHKHMPHPTTYTHIKYYSYINSHLYQFKQKQNHFTPFKIKKP

SEQ ID NO: 160559 - protein, 110 aa, Oryza sativa
  Clone ID: PAT_MRT4530_59827C.1.pep
MARARPGRVRYKICRAGTSQPICRASPRAPPLCRAGLARRYGQPICEAGEEEGIGSRRRATRRRWGMSCGVGGEGGAACGWRRSNARERGKERCAGSPIGCRPQGPRGGG

SEQ ID NO: 160560 - protein, 326 aa, Oryza sativa
  Clone ID: PAT_MRT4530_59828C.1.pep
MARPSSSWWMALLVVAAVAQLGASDLRTDYYNSTCPNVESIVLGVVKDKMQATIRTIGSTVRLFFHDCFVDGCDGSVLITSTAGNTAERDAPDNLSLAFEGFETVRSAKAAVEAACPDQVSCTDVLAIATRDAIALSGGPFFPVELGRLDGMRSSASNVAGKLPQPNNTLSELVAIFKSNGLNMSDMVALSAAHSVGLAHCSKFSDRLYRYNPPSQPTDPTLNEKYAAFLKGKCPDGGPDMMVLMDQATPALFDNQYYRNLQDGGGLLASDELLYTDNRTRPTVDSLAASTPDFYKAFADAIVKLGRVGVKSGGKGNIRKQCDVFN

SEQ ID NO: 160561 - protein, 125 aa, Oryza sativa
  unsure (1)..(125): unsure at all Xaa locations
  Clone ID: PAT_MRT4530_59829C.1.pep
RXFPASTHASGTTLQGHPKTEKPNQITSPTAHGKISPSIDRSFAIARAAGMSSTNTTSNDPKTTKDELAPPAPTAAEHGGGKDAVTKTVQTVEVKESVGQEPVLKPTKVVHQIPADQAKDAPKQD

SEQ ID NO: 160562 - protein, 582 aa, Oryza sativa
  unsure (1)..(582): unsure at all Xaa locations
  Clone ID: PAT_MRT4530_5982C.1.pep
MDNTGNKGYGNDGSDDSRTQANGNEKSINETLPXLIQIVVNQTNMLATAFQLLQNRNNPAWATNVQVPIVQQQCKLSEFLKTGPPTFAIAVDPMEANDWLRTVEKNLGLIQCTDQERVVFATHQLVGLASEWWDSYEVSRPEGHTITWDEFLAVFKRSHVPAGMITLRKXEFRYLKQEYLTVIEYLHEFHRLAHYAPEDVETDEDKQEKFLQGLKDELAVQLLLEDYEDFEKLLDKAIQLESEHNQMKNCKRRIVNIPVIPCGNQRQRTEPLQITGSSVAHQEFLPQEDGYNADNNISNTNDDDTTTNHGSCPISDHSNQACNVNNIHQDVDDSINEGTQNDNPSNCDSEKESNGDSNYGTTDANVSKDFQPPIPTPSQNDRSQTDSSVKKKLICYNCKEPGHFSRDCPQPKRNLRHHSGHYARRRQVTRLVVTGANAIPVSLKGSKPKDHIATRSIHNSQSEEYLVEKVDTQDMNYEKFXTEAPSSSAATQSKSARGATRDKSSASSSPTSPLFRGETIGDASSPVNSGVAATAPPPAAPSAVPEHRPTSLSPPSTSQRRPLLRLCHGVDNIYVITKALKA

SEQ ID NO: 160563 - protein, 44 aa, Oryza sativa
  Clone ID: PAT_MRT4530_59830C.1.pep
CAVLKWTMSPIYKDLTYYISDATCVHLITVRDLDAYEIALCCVK

SEQ ID NO: 160564 - protein, 75 aa, Oryza sativa
  Clone ID: PAT_MRT4530_59831C.1.pep
VQLRSRTHTTRRNPTYIRTYIQVEKNTKIQWRSRCQQIEAADRLVHRPIDLIERTSIIFTSIIYVCICVLLASRA

SEQ ID NO: 160565 - protein, 61 aa, Oryza sativa
  Clone ID: PAT_MRT4530_59832C.1.pep
SVTSSVRHHSCISFFLGGGGSMMVPTRYLHFFLQFNEEARSPFVNKYKTIVHPGEVMVILY

SEQ ID NO: 160566 - protein, 55 aa, Oryza sativa
  Clone ID: PAT_MRT4530_59833C.1.pep
GVVMQLITVRGDGKQHSGGKSSTSSGDSGTHRHKNRQQQQCGYQATVQTHSTRRH

SEQ ID NO: 160567 - protein, 91 aa, Oryza sativa
  unsure (1)..(91): unsure at all Xaa locations
  Clone ID: PAT_MRT4530_59834C.1.pep
FFFFFANXWGYENIQYPGSQATSFTMLHGPQYIIQSDKTGVVMAASLYQCNRVLMFSIXXXFNDHCFFRVGQGKKWLQNQDLQIVKDXRXH

SEQ ID NO: 160568 - protein, 88 aa, Oryza sativa
  Clone ID: PAT_MRT4530_59835C.1.pep
QMKALFFIFPTEKNTQVALFSPDQLSPPQKNQPIFLHHPHNYQPPLFFSIHRHLVRPRKKTTATCKTHPLPLERTPLQPAGTTPIAPP

SEQ ID NO: 160569 - protein, 171 aa, Oryza sativa
  unsure (1)..(171): unsure at all Xaa locations
  Clone ID: PAT_MRT4530_59836C.1.pep
GPSCQHHPLLFSIFLPRRGELQQSPRRQSGRSGGGGERSRRLRSRQDGAAAGERGCECRRRTSRQVERWRAEQAGGSDGXSAATSGEDGRAGTRSGGERSLRRAAAAATRRPXLDPSLPILPLAAEPSPGAPIGARDHTGTLGSLQLLMLSGLQLLMLSGVGLRGQLEKHG

SEQ ID NO: 160570 - protein, 55 aa, Oryza sativa
  Clone ID: PAT_MRT4530_59837C.1.pep
YWGLGVAFHARAQIRASLLCMNLANGIDYAEWWPVKSECVCSQKCYKEFCTPQDS

SEQ ID NO: 160571 - protein, 140 aa, Oryza sativa
  Clone ID: PAT_MRT4530_59838C.1.pep
MRSRNPGLFASTPATASARPWASSERRRERRRWGRTGQQQRATCHSGSAGELLNGTLQKINGDLNHMIYVKIRVPKFFSSSSHEAPATGDDPMNTSGVRAMRHQSHGDGGGQSAGVGGKDKVSLWLGGDGRLWTNTTVGR

SEQ ID NO: 160572 - protein, 165 aa, Oryza sativa
  unsure (1)..(165): unsure at all Xaa locations
  Clone ID: PAT_MRT4530_59839C.1.pep
HEAQTLRMVAGGXIPTLVGNDKLXQTRLRGEGGIKALLGMVKCGHPDVLAQVARGIANFAKCESRAATQGNKVGKSLLIDDGALPWIVKNANNEAAPIRRHIELALCHLAQHEVNSKDIISEGALWELVRISRDCSREDIRMLAYRTLTSSPTLQSEMRRLRIEC

SEQ ID NO: 160573 - protein, 351 aa, Oryza sativa
  unsure (1)..(351): unsure at all Xaa locations
  Clone ID: PAT_MRT4530_5983C.1.pep
TDTGTRVPGSTTAQRARATPKGRGRGSEGRKPYHHATRRGNDNDERARRRQTGXNGDERRGDGFGGDPWAKARRGRHEAXRRGAEDEHEDGAAATRLTNADDGRERLDGGTNATTIGNDERTRATTTGAGEEATRTAGSGCTGTRMTWNTPLXMTXRRRRRETTSRREGTVKTTTDTGGVRSEGRRGRGRRRGMPREGTAAPADARAWRKGQPEEMPPRRKERPARATAFRRNSGEEEVMPGKKAMPRCRRRRRRRRSAHRRXTAAGWREYSGTNATGCRRGHRSGEFPARRRXAGXRGRCCRAEGGDGTAGRCSGEERKAAGGGRREGKRRATAGTGLETTGRLGMGLKR

SEQ ID NO: 160574 - protein, 50 aa, Oryza sativa
  Clone ID: PAT_MRT4530_59840C.1.pep
MQPGHGGALYHFGTSGAAVAAATAVTHPLDVIKVRLQMQLAGQRGNLVGM

SEQ ID NO: 160575 - protein, 161 aa, Oryza sativa
  unsure (1)..(161): unsure at all Xaa locations
  Clone ID: PAT_MRT4530_59841C.1.pep
KQPARYRTRLWHVGGGFRARRSDRRRRHGGAVALPLRRCAHGRRVAPRRCLFAXPPSVADVIDGRRRVVVEEEEVWLAIVVVVARLTLTXGFMGWSGGGGKPRVLCRPXSSTPLYMAQCDRGPLAIGLGAPDQASLASTARAQAVARGGGGGRGHALRQRR

SEQ ID NO: 160576 - protein, 182 aa, Oryza sativa
  Clone ID: PAT_MRT4530_59842C.1.pep
MASSELRRRERFFSPKNKNLRPRPYHNPIKRCSYAAAAATNKPLFSAAPIGWARQLQPKTLYPVEPISPYILPDAERCGKEQCDRAAMGVVASRLVASCDAGESCIVLEKEPPRRRELLPCWRGNLVGAPACRSLRAAKLVSPICDGEGRHASTGREKGEAAAGCHTPIWHRRTTAPDRSVS

SEQ ID NO: 160577 - protein, 33 aa, Oryza sativa
  Clone ID: PAT_MRT4530_59843C.1.pep
RIQCPMVHPHEHSVDVLLENEVGANIMIFFIRP

SEQ ID NO: 160578 - protein, 284 aa, Oryza sativa
  Clone ID: PAT_MRT4530_59844C.1.pep
MATAVSRGTASSIVADAVTGYHLLKIDGYSRTKGTPNGAALTSDQFVVGGHRWRIRYYPNGDIAMFADYISFHLMLDENATSTKGVKVKAQFQICFADQKLGKLLDTEKGADVVFGVGGETFAAHRCVLAAQSPVFSAELFGPMKDSDRAGVVRIDDMEAQVFKALLRFMYTDSLPEMEEEEDTMCQHLLVAADRYNLERLKLICEDRLCKHVGVGTVVNILTLAGQHHCDGLKKACLHFLGSPANLSAVLAGDGFEQLSRSCPSLVNELVAMLAPPIPPSSHA

SEQ ID NO: 160579 - protein, 123 aa, Oryza sativa
  Clone ID: PAT_MRT4530_59845C.1.pep
WRGRWRARTVAGDGNRRRGKRRRMTAAQRRRHTAEAAARPGTALGGRGRGKEGEGRLTASGGHGGTHRRARRSKLRRRDGPGKRRTGWRTSLRTRRRRRCGAATALAVAECGRSLAASGGWRD

SEQ ID NO: 160580 - protein, 223 aa, Oryza sativa
  Clone ID: PAT_MRT4530_59846C.1.pep
MAALLARQAAQALRARQMAQLGPSATAMQGHIRTYMGAGKPTRFKEDEEKEKLAKEIAKDWNAVFERSINTLFLTEMVRGLMLTLKYFFEKNVTINYPFEKGPLSPRFRGEHALRRYPTGEERCIACKLCEAICPAQAITIEAEEREDGSRRTTRYDIDMTKCIYCGFCQEACPVDAIVEGPNFEFATETHEELLYDKEKLLENGDRWETEIAANLESESLYR

SEQ ID NO: 160581 - protein, 53 aa, Oryza sativa
  Clone ID: PAT_MRT4530_59847C.1.pep
MAAPDVEYRCFVGGLAWATDDRSLEDFLYTYGESLDFKIINDRETMRSQPLGF

SEQ ID NO: 160582 - protein, 109 aa, Oryza sativa
  unsure (1)..(109): unsure at all Xaa locations
  Clone ID: PAT_MRT4530_59848C.1.pep
RVDLASEKFKKKKKKKKKRKKKKKKKKKKKKKKKKKKKKKKKKKKKKKKKKKKKKKKKKXKNPFKNKRGGTXXTFPKKKKXXHKKKPNQSPFQTIHTKNPHIYPPIKPH

SEQ ID NO: 160583 - protein, 199 aa, Oryza sativa
  unsure (1)..(199): unsure at all Xaa locations
  Clone ID: PAT_MRT4530_59849C.1.pep
PLAAARPSPALPHSPTMPCQPPHRTEPPXPCPRRRPAATPTAGRSASLVSAPAAPPXRPPDRPLWTCRRRRLQPXGAVAVSPIPDAAAVLRPPSHPLPPRRHLXPKPGAPHVSPTATAASAIPRPPLLSRRRPPSSPPPHNAAPXTSHAPPQADADYRAAPLSPIGARHPAPPFLFHSTPSRAVFRAVWFITSTCHTSL

SEQ ID NO: 160584 - protein, 1987 aa, Oryza sativa
  unsure (1)..(1987): unsure at all Xaa locations
  Clone ID: PAT_MRT4530_5984C.1.pep
YKRDPPGGPXGIESHRQHIHLSLRNPHTSVPQYPLYPVCGYPPSTVARXVRGLGAQGSTTMPSSLINNNVNTSINQGVXPSTMLVWTQVGEIVFPVFTTVPISAGPSMTGSENVVVTTPDGSMSKDPPADVESGTSTTFEPDKDPNAAKSCPSDENHEPTRRTSEATRSWCPIYKTRKHTLQTCWVFLDVQAEIRACKERGIQRTSPTRDVYCPIHKTKNHDLSSCKVLLSAMRTSPPKVQQSQISLKDANKERGATVISDRFVGVIDIDPHELSVLHLLEDQGTSSTSTPRDVFAIDGTSTSARANTEAEDQVITPAQHIRAINAILRETSYDPVLNNDLAQWTERLREXVANLSNAFEETAAGVLLEQPPIGGANGELPEXESHRQATPPPRGTNDLRDHLNGRREARRARDNKNRSRHRVSSRHRENGDNRHNHHERDDRKQRMPGDNGRGRRHNDDDDGDRRRDNNGGRXQDSREPRRHPRNRTPEPSDSLSSSSSSSSSSSYRHPRRTYNRRQPTAPGGGCRAFSRALRDVXWPEIFRPGAIEKYDGSTDPEEFLQVYSIVLYAAEADDNALANYLPAALKGSARSWLVHLPPYLISSWVDLWQQFVANFQGTYKRHAIEDDLHALTQNPGESLRDYIRRFNECRNTIPEITNASMIRAFKTGVRDRYTTQELVTRQITTARKLFEIVDRCAHADDALRRNNDKPKTGGEKKPAKDTPESSKKKSCKSGKRKAQMEVLAAEYADPPKYPDSQGDDTKKIWCPIHKSDKHSLEACFVFKKSLAKQLALEKGKRVHVVEKAAEAATQDSDSAYPNSDLHVSHIFXVPRRRYLIVVXPTIRNIKVARVLIDGGSSINLLFASTLDVMGIPRSDLTPTDQPFHGITPQSSSKPLGKITLLVTFGQANNFRTEQITFVAEFDTAYNAIIGRTALAKFMAASHYAYQVLKMPGPKGTITIQGNAKLAVQCDMRSLDMVEHTPNPPATAEPPKKVSKTNKTPKPDSAIKIVPLSSANLDKTELALITFLRDNVDMFAWQPSDIPGVPREVIEHKLMVRPDAKPVKQKLRRFAPNRKQAIREELDKLLKASFIREVIHPEXLANPVMVHKANGKWRMCVDFTDLNKACPKDHFPLPRIDQLVDSTAGCELLSFLDVYSGYHQISMAKEDEEKTAFIMPFSVFCYVKMLFGLITAGNTFQRTVQAALNDQPGNNVEAYVDDIVVKTKTSDSLIDDLRETFDNLRRYRLMLNPEKCTFGVPSGKLLRFLVSGRGIEANPEKIKANPNWMHGGTEQEAKEAFIALKRYLSNPPVLVAPQPDKELFLYIAATPYSVSTVIVVEREVIMTSRKLHHYFQTHRVTVVSSFPLGEVVRNKDAVGLIAKWVVELSQIEKXFVPRTAIKSQLLADFVADWTMPENRSDSQTDSETWTMAFDGALNSQGAGAGDDLAGARRLGRTFGGYLRAGVPLLRAHPTAATAGNGHGYRGGATRLEAVLGVKRLIVKGDSELVANQVHKDYKCSSPELSKYLAEVRKLEKRFHGIKVRHVYRKDNIKPDDLARRASRREPLEPGTFLDVLTKPLVKVANDEDSMVVPDISSGATEAERAVANIETTDDWRIPLIKFLSSDELPEDDTEAEKLSRQVKIYCMIGNDLYKKAPNGVLLKCISSDDGKHLLLDIHEGICGSHTAGQTLVEKAFQQGFFWPTALKDSCDMXKHKAISTSAPDYPSYLAVLMLGARHTRTIPTRTGRIXFLFVAIDKFTKWIEATPTGEIKADNAIKFIKGIFCRYGLPHRIITDNISQFISADFQDYCIGLGVKICFASVSYPQSNGQVERANGIILQGIKTLLWAVCTTPTTSNKDTPFFHMYGSEAMLXDIERTLVQKYSDEDQEEQQSDNVNLLEEHRERVAVRVASYQQALRQYHEKRIRAHTLSIGDYVLRRVQSQAGRNELSPKWEGPYTITQVLRPGAFKIADGDGCELANSWNIDQLRKFYV

SEQ ID NO: 160585 - protein, 683 aa, Oryza sativa
  Clone ID: PAT_MRT4530_59850C.1.pep
MEEGGGSGVGGMQGAASNLLDAGAQAFYPAVGAPFPFQQLPHQLYCPQPPPPPYQVMPVPPPPPPVGLPVPPLPATMAPQPGYCVPAAATVVDGPASRAVVLSLVPPHAPEDEIARAMAPFGAVRAVDASAVASEGVATVYFFDLRSAEHAVTGVREQHIRQQCRLGQLYAAAAAAAASSPTWPPPAWDWPHDDNRGLVLGQAVWAHFAAASTVPDDGASRGSLVVLNSLPAMSVFELREIFQAYGDVKDVRESALRPSNKFVEFFDTRDADRALHELNGKELFGRRLVVEYTRPSLPGPRRRGHVSHQPLAPTPPRLQAAWRPAPAPSQSAQPSSSGSGKAREGVVLLRRSSGKGSSGSQSKGGGNAGHERKSKGGKSAAAACSTAASASSSTATAPSKQSQKGGGGGGGRGGSWRGQKSGWEARFLFKEPEAAAAAAGDAAASETHEPASCKDTRTTVMIRNIPNKYSQKLLLNMLDNHCILSNQQIEASCEDEAQPFSSYDFLYLPIDFNNKCNVGYGFVNLTSPEAAVRLYKAFHKQPWEVFNSRKICQVTYARVQGLDALKEHFKNSKFPCDSDEYLPVVFSPPRDGKLLTEPVPLVGRSPAPSSASGASSPPKSCAASVDPLAQELMTAPSSSGDGASSASSSNAHADEDDVHGETGGDRGDDAGLDLELQRLGYTD

SEQ ID NO: 160586 - protein, 52 aa, Oryza sativa
  Clone ID: PAT_MRT4530_59851C.1.pep
VLFLSINNPIVPSIVANKHPTVFVSRKFSPTLLFFFQVRHVSIKGFSHYRPW

SEQ ID NO: 160587 - protein, 102 aa, Oryza sativa
  Clone ID: PAT_MRT4530_59852C.1.pep
KANENSGCKSKISRNPSRMHEKSFAQHVNSLASISQKAFARMVQNIKGNPASFRWLYADMIPRERSPVAWSMLQEGIKDAACKHLLLSNGHLHPMDQDPLQF

SEQ ID NO: 160588 - protein, 97 aa, Oryza sativa
  Clone ID: PAT_MRT4530_59853C.1.pep
PPPPPPAPVRWEKHRSRACAPLQGPAAQTWCCHAKPQAAPLRAARGGRGRGRGLTQHAGDLEGLGRRSREAVRWTIGGATRAPRRRRPWAAGQSGVE

SEQ ID NO: 160589 - protein, 68 aa, Oryza sativa
  Clone ID: PAT_MRT4530_59854C.1.pep
AMTERACVGGPIVGEVASHGQLLKQEHAGAGSTTVPGLGLGLVLLLGPCPPIPITSPLMYVVSLNYRI

SEQ ID NO: 160590 - protein, 35 aa, Oryza sativa
  Clone ID: PAT_MRT4530_59855C.1.pep
YRSQCSTVASGLGSFTQQVPLLKQKIKIAKVQIMN

SEQ ID NO: 160591 - protein, 118 aa, Oryza sativa
  Clone ID: PAT_MRT4530_59857C.1.pep
MTPTPLLRRRATPLGRASLPPRNAAAALPRHRRATPLLRCRHVNETKDVVIVVPQAGVGSNIRHLNEEGNVERDAEGNQEGNVERDAEGNEEEEASESQPSAGQKRAHGQRGAAKKLE

SEQ ID NO: 160592 - protein, 97 aa, Oryza sativa
  Clone ID: PAT_MRT4530_59859C.1.pep
GRFTAGFGEEQPAAFAPPLIPPSKDLARIRPPIGASLPQRWGHYFLCPMIIRFALVPVGNRRWKPWPPKTGMGMAVRTHGRMDVHLWLWEAPLNVCG

SEQ ID NO: 160593 - protein, 644 aa, Oryza sativa
  unsure (1)..(644): unsure at all Xaa locations
  Clone ID: PAT_MRT4530_5985C.1.pep
MSWQRVGALLLGAQSRLPVPGVPAVGGIGSNWNNPAGATNVQVPTVQQQCKLSEFLKTEPPTFAIAVDPMEASDWLRTIEKKLGLIQCTDQERVGFATHQLVGPASEWWDNYEASQPEGHTITWNEFSSVFRRSYVPAGMITLRKREFRYLKQGDLTVTEYLHEFYRLAHYAPEDVETDEDKQEKFLQGLKDELAVQLLLEDYEDFEKLVDKAMQLESEHNRMTNCKRRIVNIPVFPWGNQRQRTEPLQITGSSGVHQEFLPQEDECNADNNTSNTNDDDTTNNHGSCPISDHSNKACNVSSIHQDVNDSINVGTQNDNLSNFDSEKDSNGDSNNGTTDANXHFSRDCPQPKRNLRHHSGHYARRRQPPVPPRPCAGRPRHRLLQRRRHLLHAGLPSVSRGDPRSCVSAVAHPFPPRRPPPVASISLPERRSTSPPPPSAPRRRSHPRHHLLLARTSPEHRRPRRPHLPPRRHLLRLPLSPCPRDVVLGLASPSTEPRRCSSSSSRSSSPARRLAAPPPSSSSLRRVPRRPRLRAAVAGCPRRLLAGCPRRLLAGPGRRRPRPLVVPDRRGVRPSVKPFSFVILASSKSLQPPSSSSSSPPRHQAPCRPRLAFVQGSPPKSFPRRPSPPRQFVVGVPTPRRVVV

SEQ ID NO: 160594 - protein, 52 aa, Oryza sativa
  Clone ID: PAT_MRT4530_59860C.1.pep
GKKVCLSTPHLLFLFSERISTPHSAAYKTADLYLIIHWTVSGIISLVIICTT

SEQ ID NO: 160595 - protein, 345 aa, Oryza sativa
  Clone ID: PAT_MRT4530_59861C.1.pep
MPSAGAGAAFLLRPISATTHPLISLSCTGAGDSANHKSHLLFRLHHSCRRLPVPRLSLTPAPTGSNNSPPSPPPASPEPPPPPFSRWSPPRAIWRGLSALLLAGQVFHRVLTGRVHRRNLLAQLRRVGPGSAGVSLLTAAFVGMAFTIQFVREFTRLGLHRSVGGVLALALSRELSPVVTAVVAAGRVGSAFAAELGTMQVSEQTDTLRVLGAQPVDYLVVPRVVACVLALPVLTLMSFALGLASSAFLADSIFGVSTSIILESARRALRPWDLISSLLKSQVFGAIIAVVSCAWGVTTHGGAKGVGESTTSAVVVSLVGIFVADFALSCLFFQGAGDSLKYAMG

SEQ ID NO: 160596 - protein, 94 aa, Oryza sativa
  unsure (1)..(94): unsure at all Xaa locations
  Clone ID: PAT_MRT4530_59862C.1.pep
VVRLRDLGGERREHARVVXPELDVARFARRHGVLHHDSVLVHERRLFRVDAHDLADGGLLAALGRHVRDPPALALGQRERVLVRGSVGVREPSC

SEQ ID NO: 160597 - protein, 108 aa, Oryza sativa
  Clone ID: PAT_MRT4530_59863C.1.pep
MEEARQGARGSKETIKDGDWRDAWTEERNTHRIINHPWRRYLRASAGCGTAVAGAERGEDEWAGCLPVGLVSETGQRSQSAELVRAMAAGAEHSKNAGSAAGAEMTGD

SEQ ID NO: 160598 - protein, 53 aa, Oryza sativa
  Clone ID: PAT_MRT4530_59864C.1.pep
EEVSTMLISQASVLENIRCHSERKLFETSNYKSKYGHLSLIGARTVFMSTSRS

SEQ ID NO: 160599 - protein, 88 aa, Oryza sativa
  Clone ID: PAT_MRT4530_59865C.1.pep
MAICGAKAAAPSLVVAASMGAVEALKDQAGLCRWDYALRSLYLRAAASSPRLRSPLSNSAAAAARPPAEEAADVRLRKVHHLVCWGPN

SEQ ID NO: 160600 - protein, 90 aa, Oryza sativa
  Clone ID: PAT_MRT4530_59866C.1.pep
MPTSPVTTTADGDGLAQLDIAISRRPSLLHPALLRDDRALLALASPRVPPPLARSGQYGLTNTQARLGLPMGCTPGPTRLGLCRAGPKAR

SEQ ID NO: 160601 - protein, 32 aa, Oryza sativa
  Clone ID: PAT_MRT4530_59867C.1.pep
LKQVLVAVVVVYVHDRPTTKSRHTLKTIKRGN

SEQ ID NO: 160602 - protein, 129 aa, Oryza sativa
  unsure (1)..(129): unsure at all Xaa locations
  Clone ID: PAT_MRT4530_59868C.1.pep
SRFHEKADFADVRKRGTSXREAAKETHISVSQPXGPMSDLGFDVSLSSSRARLPESERRRRSAANRLVRRARSRAGVGRDSARRGVVRHPFAWVAGETSGAIHAAMRQWGEWCGIRSPQSREKRLERSM

SEQ ID NO: 160603 - protein, 97 aa, Oryza sativa
  Clone ID: PAT_MRT4530_59869C.1.pep
MGIPNPSDEVVQVRHGDVAGEPTVVTISCPDKTGLGCDLCRLVLLFGLNIVKGDVTRVLCELELTIRRVKVSTTPDGRVLDLFFITDARELLHTKSR

SEQ ID NO: 160604 - protein, 326 aa, Oryza sativa
  unsure (1)..(326): unsure at all Xaa locations
  Clone ID: PAT_MRT4530_5986C.1.pep
MDQRWVFDATHYSMEYIRGVTSLVAEVTSTKXVNGPDYCLXCLCINCKKDXQFLAQLVHAHLLTRALMTNFRCPYNHDXEGSAGKTDVPNEDVGYEHDDQTXIDHGEADLNQILHDGERAYTDNRDYSKFNTMVNSKLXVYNGSKVEHNKLPVVLSLIQLKATNGWSDKSFSELLQLLADILSAGNVMLKTAYQAKKIICPLGFETRKIHACXNHCILYQGEYADLDDCPVCKESQYNCGDGDGGNNGTMKKKRVPXKLLWYFPIFPRLKHMCANKNHAQLMHXHHDERKRDGXHSYDGSQWRKVDDKYIKYFSYDVRFALNVDGI

SEQ ID NO: 160605 - protein, 169 aa, Oryza sativa
  Clone ID: PAT_MRT4530_59870C.1.pep
MLKPSDEVVQVRHGDVAGEPTVVTISCPDKTGLGCDLCRLVLLFGLNIVKGDMSTDGRWCYIVLWVVARPGRAMAMRWDLLKDRLIQLCPVAAPFGLDNHHLAAAGLHLHDHDAPAPSPNIFLLKFFCYDHVTRVLCELELTIRRVKVSTTPDGRVLDLFFITDARELL

SEQ ID NO: 160606 - protein, 176 aa, Oryza sativa
  Clone ID: PAT_MRT4530_59871C.1.pep
SVVSPLPESLPCAGAAPAPGKKMERVWTGEKGLPGKLRRQPTTRSATPSAAASIPTAATLIPTFSGSICRCRVDPHSRCVDPRCHCIDPPPPHRSPPPAPPSAVATSIRRRRVNPRLTAASIPSSGASIHRRRVDWGGRVELKRRERERWKKREGCGFIPLGINFFVGQYLPLAWP

SEQ ID NO: 160607 - protein, 46 aa, Oryza sativa
  Clone ID: PAT_MRT4530_59872C.1.pep
MANNQQPTTKKLGHVRSCNGLSTENLADVVRRRSIMESKQQQYNDR

SEQ ID NO: 160608 - protein, 244 aa, Oryza sativa
  Clone ID: PAT_MRT4530_59873C.1.pep
MSYWLGLNKFADMTSEEFMAKYTGAKVDDTGVSGAGAASEADRGGAAAGSCWAFSAVGAVEGINAIMTGNLLTLSEQQVLDCFGAGDCSGGWPDQAQQYIVKNGITLDRCGKEPYYPAYDATKHPCRTVAGKQPIITVDDVKWVNKSEAALLLKVYQQPISVALDASGWQFYQGGVFTGPCQTPPPLNHAVLNSWGANWAESGYIRMKRDVGTPDGLCGIATHATYPIKKCPCPPKTPTAIASY

SEQ ID NO: 160609 - protein, 51 aa, Oryza sativa
  Clone ID: PAT_MRT4530_59874C.1.pep
IVVLYSHLSQVGSARRMSSPPLIVWKCGHRCLLFHICSWVALASSDNSSQC

SEQ ID NO: 160610 - protein, 107 aa, Oryza sativa
  unsure (1)..(107): unsure at all Xaa locations
  Clone ID: PAT_MRT4530_59875C.1.pep
FKSNSSLFDCGIHLAYSGMAALPYFDEIDSSTIDVLLITHFHLDHAASLPYFLEKTTFKGRVFMTHXATKAIYRLLLSDYVKVSKVSVEDMLFDEQDILRSMDKIEV

SEQ ID NO: 160611 - protein, 52 aa, Oryza sativa
  unsure (1)..(52): unsure at all Xaa locations
  Clone ID: PAT_MRT4530_59876C.1.pep
FIKYHXTQFPNKYNISISSPLNFLAIETFYPFHLSINYYLIYSLTIYIFSLE

SEQ ID NO: 160612 - protein, 158 aa, Oryza sativa
  Clone ID: PAT_MRT4530_59877C.1.pep
MDFFTRDINEDSMLRCPFLRNINEPTNFSFFSPLALPMPVRGAKGPIFEDGPNFDLAFRLFHGSDGVVPLSDRSFRPSEKKVQAEPPKSQFNPLAAKAATISLSSFGFGGAFGFDAFSEKWNNQKRKSKSSKNEPSSQDGSKHEANNDWLQNGNWPIA

SEQ ID NO: 160613 - protein, 43 aa, Oryza sativa
  Clone ID: PAT_MRT4530_59878C.1.pep
YVFLFGIWYNRFQPRGPAGIDTRLSQADTVEPDNWRGRKETTV

SEQ ID NO: 160614 - protein, 143 aa, Oryza sativa
  unsure (1)..(143): unsure at all Xaa locations
  Clone ID: PAT_MRT4530_59879C.1.pep
AELSYPSSERTTSPPAFHPASEGGRTRTRTTRQEEGDNTDGAEHRRRTGASAGVFRPGADXASTPTAARWLMTKXSESGARNAGTAIADSILTRDXGARERTGGRGAKQEGRRDAGPAARGGIPPPRPPRQRQRPEPNARIRP

SEQ ID NO: 160615 - protein, 354 aa, Oryza sativa
  unsure (1)..(354): unsure at all Xaa locations
  Clone ID: PAT_MRT4530_5987C.1.pep
SINPRLRPSPSVYFVYNQTEPQTKPYPLDMWKYGSALQQRPEDRSLYGRAGPHTAAAGRARRRPRRHSXGRRRARAPMVAGGGHRYGGAAAEREGEKREAKRRSSAHPGSTATTGTATEAERGGGAARVDEDGDAPAVGGRNGGADEVDENAAKPKEAMPKREEVRGDDGGEPELGGDGGEGGQRRELESDGERVRRVAETEERGTGSDYIASGGGESGRRGRNRPRKSRPPLMRRRGSREQIRTNPRXREREKRGKRGRESRGVISPSLWRAGTAGCGGFGGGGGARARXGRRARREVGDDRWAPPVSEGGGRARPSAARARGXPMGRGGEEREGGSWAEPAQEGKGGKEDFF

SEQ ID NO: 160616 - protein, 97 aa, Oryza sativa
  Clone ID: PAT_MRT4530_59880C.1.pep
LLVRSRKIAVLGLINTAYMFVEFGCGFVSDSLGLISDACHMLFDCAALAIGLYASYIARLPANGMHNFGRGRFEVLSGYVNAVFLALAAVISVLSSL

SEQ ID NO: 160617 - protein, 174 aa, Oryza sativa
  Clone ID: PAT_MRT4530_59881C.1.pep
MSRDPLVVGNVVGDILDPFIKSASLRVLYSNRELTNGSELKPSQVANEPRIEIAGRDMRTLYTLVMVDPDSPSPSNPTKREYLHWLVTDIPETTNASFGNEIVSYESPKPTAGIHRFVFVLFRQSVQQTIYAPGWRQNFNTRDFSALYNLGPPVAAVFFNCQRENGCGGRRYIR

SEQ ID NO: 160618 - protein, 104 aa, Oryza sativa
  Clone ID: PAT_MRT4530_59882C.1.pep
LLLISPGPPFFRGPQIINLIPSRPCNPPVLPKKKTRGPLLKKTPGGSPPRPPLRGGLFFGQVFFVKMPPIFPLLAICPPPNKALTGGPPRLGGHPPPFFVAKFP

SEQ ID NO: 160619 - protein, 642 aa, Oryza sativa
  Clone ID: PAT_MRT4530_59883C.1.pep
MIQAASSFTHETTKQMRERVFALIGKGAIPKWIKAASLHNLVFPYDDLDKMIRKDREPPAKAVFWALFGAIYLCFGMPEVYRVLFEAFGMDPEDESCQPKLRRQLEDVDYVSVEFEKRQLTWQDVAAYRPPPDALFAHPRLFRACVPPGMHRFRGNIWDFDNRPKVMNTLGYPLPMNDRIPEITEARNIELGLGLQLCFLHPSKHKFEHPRFCLERLEYVGQKIQDLVMAERLLMKHLDAPGRWLAEKHRRLLMNKYCGRYLRDKHLHHYIIYGESVQDRFEHNRRLRNPSTTAVQQAIHGLAYCVYGKPDVRRLMFEVFDFEQIQAQTVLSLIPEVEKQEFVIDLQNIFATNDTSSFIFYISVRNSSSLVMELIGNRFGCNEASNSNMGRQAQFIRGGRRGGGLRGSGRERKMSSLRNAIQRRAHKERAQPESRKKFGLLEKHKDYIVRAKAFHQKEETIRKLKEKASFRNPDEFYFKMINSKTVDGIHRPKPEANKYTEDELMLLKTKDMGYILQGIQSEKKKIEKLSSMLHELDNKRPNKHVYFAEDREEVKEIQSRIEQKSSSLGLDNIPSRIKRKTASSYRELEERKQRVQKLEKLYADMALQKELKKPGRKRKLREDEIENQTSRPVYKWRAQRKR

SEQ ID NO: 160620 - protein, 79 aa, Oryza sativa
  Clone ID: PAT_MRT4530_59884C.1.pep
GEPQERKGVRHNAGKGRHRHHRVVQHVQHEAILRRRHAGDPHLSLSRSPPSNSTHSSRPPRISQPARSEDLSVIKRSSG

SEQ ID NO: 160621 - protein, 103 aa, Oryza sativa
  unsure (1)..(103): unsure at all Xaa locations
  Clone ID: PAT_MRT4530_59885C.1.pep
RIRVPCKNMNTGTSQADCAVLIIDSTTRXLEAGISKDGQTREHPLLAFTLGVKQMTCCCNKMDATTPKYPKAXHDETLKEXSSYLKEXATTPDKSPFKPSLGF

SEQ ID NO: 160622 - protein, 74 aa, Oryza sativa
  unsure (1)..(74): unsure at all Xaa locations
  Clone ID: PAT_MRT4530_59886C.1.pep
NLCRGGTLYPHGITNPDHPARNSKADTGLPYANERGPRPTPGXVPDHTMPGSPRVLPDTTPLNPHVSWHHGSPD

SEQ ID NO: 160623 - protein, 177 aa, Oryza sativa
  Clone ID: PAT_MRT4530_59887C.1.pep
PVPQGRLRALAVCTTWKACLDPRRGPVEGDLRLNSYDDEDQRIVCWVASTGPALRALSLSDHECRAEVPRTLLGIPSKTLKELSLHLDWQVLQNSLAAIRSFTGLEGLGLDVGDSRDSEALDLAALQPLLALKRLHCSYGTVELRGGPLLPQLTRLEFFETNSVVMEATLASLQHLL

SEQ ID NO: 160624 - protein, 156 aa, Oryza sativa
  Clone ID: PAT_MRT4530_59888C.1.pep
MAEAKGIGDSWSCFPKAKFGISPNKSDDSEAVHDCRGDDGIDCVGASGHWPTRHWRNMPAREVARRGCTERDTMSNSVDGGLDNSERGASPIRGSLLTLPSSAATLRLSPSLLDAGRCPAFDCSRYRIKASTHLQRPPGEPGIEDVVEAWGLITIS

SEQ ID NO: 160625 - protein, 125 aa, Oryza sativa
  Clone ID: PAT_MRT4530_59889C.1.pep
MAVVTVMTVSGTVTHDKKIDGQNWFIMTVNNTDLQASAAKRIPYNHLSNGYAHNGFTRGPHPAQLPRKRFMSRACYDARIYSTTLRTPPHVHEQAARQAVLMAVSSMMRWLIEPMSMVEQRMCPR

SEQ ID NO: 160626 - protein, 49 aa, Oryza sativa
  Clone ID: PAT_MRT4530_5988C.1.pep
YGFPGITYHRGYGTWTPRTAWFGYADGCKYPFPWDISPILNVVLFSWGC

SEQ ID NO: 160627 - protein, 964 aa, Oryza sativa
  Clone ID: PAT_MRT4530_59890C.1.pep
MERSLLPWLLLLLCFADGVFQSRAQPDSKGFISIDCGIQPNTSYVHNTTKISYVADDDFTDGGSNYNVSPEYIKPQLSQRYYNLRAFPDGARNCYTARSLAPGIKYLIRASFLYGNYDGLNKLPVFHLYIGVNFWTMVNITSLGLGGSRYEEAIVVVPDDFVQVCLINTGTGTPFISSLELRPLDKRLYPQVNATLGLLQLNRLNFGPTDNSLVRYPDDPHDRFWGNWDSYTSSLWKEISTASRVDNLDGDIFDAPTAVMQTAVTPRNASGNIYFFWEPWPQPNDPTPPYTVIFHFSELEILTNNASRQFYINLNGEPLIDTAYEPTYLTARYLYGLEPLERTSRYNITINATANSTLPPLINAAEIFSIISTAVIGTDSQDASSMMAIKDKYQVKKNWMGDPCMPKTFAWDKLTCSYPNSSGARIISLNLSSSGLSADISSAFGNLKALQYLDLSNNSLTGSIPDVLSQLPSLRVLDLTGNQLSGSIPSGILKRIQDGSLNVRYGNNPNLCINGNSCKAAKKKSKLAIYTVIPAVLVVLIASVTTLFCLLRRKKQGPMNNSLEQQNEMSTSTSHVLINSGYGDNVSLRLENRRFTYKELEKITNKFKRVLGRGGFGYVYHGFLEDGTEVAVKLRSESSSQGAKEFLIEAQILTRIHHKNLVSMISYCKDGIYMALVYEYMPEGTLEEHIVGENKKGKILNMEREAQYRIGICTRCIILTIPMDPYALQQTLLGLEYLHKGCNPPIIHRDVKATNILLNTRLEAKIADFGLSKASSYDNITHVSTNALVGTLGYVDPEYQMTMQATTKSDVYSFGVVLLELVTGKPAILHEPNPISVIHWTRQRLARGNIEDVVDTCMPSDYDVNGVWKAMDIAFTCTAQASTQRLTMTEVVMQLQECLELEDARCAIGDAHNEFYPDPRSDHNLSYNTYVSDRSNDVSQNSGVSMMEHNFGRVPTMASGPAAR

SEQ ID NO: 160628 - protein, 77 aa, Oryza sativa
  Clone ID: PAT_MRT4530_59891C.1.pep
RQRRVEEGWCGRRLTGKERRGEEGRWDGRRRRWLPSHGEERGGRRRGEAATPARPAAGEGGARLRGDPRANAAAAAP

SEQ ID NO: 160629 - protein, 58 aa, Oryza sativa
  Clone ID: PAT_MRT4530_59892C.1.pep
MDECGGGGAAANVVPGGCAAQQPQHALRHEDNLPRAGYKISSILIWSNTLNNVQNMAI

SEQ ID NO: 160630 - protein, 69 aa, Oryza sativa
  Clone ID: PAT_MRT4530_59893C.1.pep
RMMRRHKIVKDVVVPSEVRFSKNAAVLMTNISAGGLEQDCLNDSWTDAYGPHYGVRLTCTALMVHRQQA

SEQ ID NO: 160631 - protein, 50 aa, Oryza sativa
  Clone ID: PAT_MRT4530_59894C.1.pep
LQFSDINLIQSYCCFLWALCLINLIRLEWCKCLLLLSHIFYFGKSFYRAS

SEQ ID NO: 160632 - protein, 64 aa, Oryza sativa
  Clone ID: PAT_MRT4530_59895C.1.pep
IPLHLLHETMLLYNIYKDHLSHLFDSCLRYTHFKLHNSEEELDLQGSFYYTYIQNFNNAYISYT

SEQ ID NO: 160633 - protein, 76 aa, Oryza sativa
  Clone ID: PAT_MRT4530_59896C.1.pep
MDQHHVQQQQYVDPYRTMVLSPQPDHLNALQYNHQQQPQPPPQATPPPPQHHHASLASHFHLLHLTTIVADTSGKG

SEQ ID NO: 160634 - protein, 420 aa, Oryza sativa
  Clone ID: PAT_MRT4530_59897C.1.pep
MDSNEGSHRITRSGIVRAKPAVTADAVNIRNVMEQVNEQPFCNTILISGHVRFYIDPTNMYEFRSQKDVQRYLESGDVTNCVMIQNKRKMEDLHTARNQSHHTRRPSDHRQLDAGEGATQCDLPIARGNSARSDFLVNANSSDNSEDMSSSVPKGVSEGKLTRLKLQKARVPNQSVEHESSTGEVANMEHKPKEKKQKTKPVKQISTPLRASPRLAALKINQEGNNEPKDEALSTNTDTANQSQPKLTKSPKAKANSSVLPEKSDGAHTSNASEIPQNKYPSATEQMQGSSVHPQQAGTADAMPGSALSSLLRSICQIHASSLRSRLLQDMNKGTTPNCSSSAYDGSRNHAQVDHVGMPMPRPSDKFYGSGWFPPQNSTEFSQETVQFPHNSSVPKKAFKYSNVVPVHIFCRFFAHLWNI

SEQ ID NO: 160635 - protein, 141 aa, Oryza sativa
  Clone ID: PAT_MRT4530_59898C.1.pep
TNCVMIQNKRKMEDLHTARNQSHHTRRPSDHRQLDAGEGATQCDLPIARVPKGVSEGKLTRLKLQKARVPNQSVEHESSTGEVANMEHKPKEKKQKTKPVKQISTPLRASPRLAALKINQEGNNEPKDEALSTNTDTANQS

SEQ ID NO: 160636 - protein, 438 aa, Oryza sativa
  Clone ID: PAT_MRT4530_59899C.1.pep
MDSNEGSHRITRSGIVRAKPAVTADGKIEPAGEGLPHGWLKEYRPRKNQSGSRVKGDTFYIDPTNMYEFRSQKDVQRYLESGDVTNCVMIQNKRKMEDLHTARNQSHHTRRPSDHRQLDAGEGATQCDLPIARGNSARSDFLVNANSSDNSEDMSSSVPKGVSEGKLTRLKLQKARVPNQSVEHESSTGEVANMEHKPKEKKQKTKPVKQISTPLRASPRLAALKINQEGNNEPKDEALSTNTDTANQSQPKLTKSPKAKANSSVLPEKSDGAHTSNASEIPQNKYPSATEQMQGSSVHPQQAGTADAMPGSALSSLLRSIWSDPCLKFAIKTLAGDIPALDFIPSQDMNKGTTPNCSSSAYDGSRNHAQVDHVGMPMPRPSDKFYGSGWFPPQNSTEFSQETVQFPHNSSVPKKAFKYSNVVPVHIFCRFFAHLWNI

SEQ ID NO: 160637 - protein, 62 aa, Oryza sativa
  Clone ID: PAT_MRT4530_5989C.1.pep
SKDWTVHSRKQCGVGNLFILVILYPAKAGPKRDSGAAIIKRSVGRLCGIGLREWNGDRNSIS

SEQ ID NO: 160638 - protein, 201 aa, Oryza sativa
  Clone ID: PAT_MRT4530_598C.1.pep
MALSEPDLAAETEAIVSALTHVVAYGGGGPPPSEETAASRAARVWLGTFATAEDAARAYDAAALRFRGGRARLNFPEDAAAADERRATDAAAAAAAASSAPAALLESQPGDVADCLDYSRILAGAPERPTSSTVPDGFFGGGGNGRFLHSWSIGTSPSPSGSGSGGAGGGGGGGGGGAPVRPLFHGGNGWEQRGDSAYNGF

SEQ ID NO: 160639 - protein, 900 aa, Oryza sativa
  Clone ID: PAT_MRT4530_59900C.1.pep
MAPMLLFAALMLASLSEAAADDGIGGQSGFVSIDCGREANYSDYKDPKTGIVYVSDEPYIDAGAGENHRISATATATAADSYLLQTLRSFPSGPRNCYALPTVAGTKYLVRLGFLYGNYDGENSSSSSASSLRFDLHLGAQRWATVDDVVVQTGGISRMYEVVFMGWARWAPACLVNVGGGTPFVSSVELRPIDDELYPSVKTSESLSLFKRSDMGADTTTLTRYPADEHDRIWKGTGNPGSTDISTQEKIQSENSFEVPLPVLQTAITTPGGNDTTLTVAWQDTRSSSEYMVFLHFADFQKIQPRQFNVTLNDIPIGSNGRSLMFSPSPLDSSSVYSSDGYRADDGNYNLVLRRTAASALPPMLNAMEIYTVITHDSPRTFHKDFDAIMDIKYEYGIKKNWMGDPCFPSEFIWDGIKCSTAGDDNTSRIISLDLSQSNLQGVVSINFTFLTALNYLNLSGNQLNGPVPDSLCKNIAGLYIFSYTSDGDICNNRTSSSRSTNRSTTILAISIVTPVLAVAILLAFLLWRAKGKHNGLTSFGISLISYNWFMQKPVSTFDPPRVPDPKKAPGSTTDHWSHLPINGSRQFTYEELKNFTLNFQRFIGQGGFGHVYYGCLEDGSEVAVKMRSESSLHGLDEFLAEVQSLTKVHHRNLVSLVGYCWEEHYLALVYEYMPSGSLCDHLRGKRDVGETLNWAKRVRIMLEAAQGLEYLHKGCNLPIIHGDVKTNNVLLGENLKAKLADFGLSKMYISDSQTHISVTAAGTVGYIDPEYYQTGRLTESSDVYSFGVVLLEVVTGELPILAGHGHIVQRVERKVTSGSIGLVADARLNDSYDISSMWKVVDTAMLCTTDVAIQRPTMSTVVLQLKECLALEEAREDRNRAGPTNDAVDVVSTFGPSAR

SEQ ID NO: 160640 - protein, 119 aa, Oryza sativa
  Clone ID: PAT_MRT4530_59901C.1.pep
EKSQDIQVPIEDAAKTIQAEKTEADAVAVDIGSLTEPAGRSNRQTTAGLTDPPSRGGLTGIAQRSDRWYLRSDRLCMAGLTGQTGWSDRHCVADVIDKRLKTLKEMKMLQDELDVEKGL

SEQ ID NO: 160641 - protein, 59 aa, Oryza sativa
  Clone ID: PAT_MRT4530_59902C.1.pep
LRLVRCSINTTEPVVVYYFYRYVYVMYTLYRGQLKVERRTPTTTTSLQPMYMRSLFHNV

SEQ ID NO: 160642 - protein, 913 aa, Oryza sativa
  Clone ID: PAT_MRT4530_59903C.1.pep
MRRKRGTMEAHAMTALFRMREAIIFAPPELVWGNVRSHPWWPGQVFDAADASELALKHTRAGAPLVAYFWDKTFAWSDASALLPFCSNFTRLASVVDGAYMRGAYHGRPFLDYILALGMNPLAGADRLELTTAKAQLRAFNCSRGSRHLPEFVTFEGIEDVSVAIPHTKRKRMDKSGGDDVMDMEKKPRRGESSSRKKKVLPEAGKKEIMDGEGSVPSIGATEDTLSKTKKSKNQNCAAKKNRNTSKDADGLDMDDKGSVPSKGATVDTSRQIKKSKNQNSAVNKNKNTSKDADGLDMDGEGSVPSKGATDDASSKTKKSKNQNNSAKKNKNTSKDADGLDMDDKGSVPRKGATDDTSIKTKKSKNKNRSAKKNKNTSKDADGLETVGASKKLSKKAVDETLSDSKSARRTRSTRMKGGTPVALKGRGKDSGAESLKVEEKNTALLKENKVGRRAGSARKKYKTTGDGDGLEDGNANVSVSSGKRSTRGETSVASEARISEQGRKKKKLSELMAVTDVPNPSSGGKSKARGKRSMDASTEKLEDPDRDLEDTMKTRKRKKLDTLGDLSSQPQPVSRKSTTKVGELMHKAAGQMSQTRPVRKANGAVSQKNSRSTKERQVNAPDKSAHSLKVKKGKTDTLTENSLSCSEMLSQLSLAVFNLKKKERFSSAGMNFFTDFRKYSYASRSDVEKEIYGKATNTGSCASFSDVDEDIPEKAAGTEPTPLEQPLADHMQDDYWADILINVEEPLSSLRKKKDKGVNRTRKKEHVKKPAMKSSSLGNIEGPTVEGSENKQPNAETQLSVANGTKVSSEETESSSFAGLVLHFSRPGAVPSRSDLIKIFSQYGPVNEAKAETANNANCAQVIFKRRMDAEAAFAGAGKIGALGPALVSFRLSDFPAAASGNDPRQGASKSD

SEQ ID NO: 160643 - protein, 160 aa, Oryza sativa
  Clone ID: PAT_MRT4530_59904C.1.pep
MSSASSVASPSAAREGGSSSTRDVEQQKSVAAVGASSPKLNGAESFGGRWRTSSASSVASPSTEAEGETSSMRDVAEQKPMEINTSTEVATAKQHGFDWGYPGFLMIGKDNDQNPPGPKLLEEKQPSVDHREKYTGKRKRVKILDSLNPLMVITITRAND

SEQ ID NO: 160644 - protein, 125 aa, Oryza sativa
  unsure (1)..(125): unsure at all Xaa locations
  Clone ID: PAT_MRT4530_59905C.1.pep
WLAHAFSPRALAAARAVHXRKVRDLVAYLRGRAGREVDVKDAVYGXGVLNLVSSALFSADVVDVGGESAQGFRELVEELIESIAKPNVSDLFPFLRPFDLQGWRRWTSGHLAKIYKVLDDIIDRR

SEQ ID NO: 160645 - protein, 115 aa, Oryza sativa
  Clone ID: PAT_MRT4530_59906C.1.pep
KSFSSPKRGFTKHPLPFWSRGSNPSGCSKPPWGGLPLPWSVGFVTLPIFFRFFFPLSKKGGCFIGPGVSFFFPKKFFFLSPTIFVIFGNFPFQTPFFQGGDFQRIPDSPQGFFPL

SEQ ID NO: 160646 - protein, 174 aa, Oryza sativa
  unsure (1)..(174): unsure at all Xaa locations
  Clone ID: PAT_MRT4530_59907C.1.pep
SGARDTXXKAAVAPGSSESAKGTTHLVQEGDGPTTATGSAPGLKPGPHGSHIHAPGDTTNGRMSTGPHYNPAGKEHGAPQDETRHAGDPGKGTAGEEGVAKIHAADSQIPPTGPNSNIGRAVAVHADPEDPGKGGHQXSKTTGNAGGRAARGNIGPHGRNPEVRTHPPSPSTRS

SEQ ID NO: 160647 - protein, 317 aa, Oryza sativa
  Clone ID: PAT_MRT4530_59908C.1.pep
MGSGNLMMKKVVRPSSFDFDIQLDKSWTEDVTCPICLDYPHNAVLLRCTSYEKGCRPFVCDTDQTRSNCLERFKGAYELPANMKVSTIAVAPLDSIHIVAPNVNNRPSCPLCRGDVIGWIVIGEARLHLNQKKRCCEEDCCSFVGNFNELQKHTQQKHPDSRPSEIDPARQVDWENFQQSSDIVDVLSTIHAQVPNGIVLGDYVIEYGDDETGEEYEVFRRVRRHWWSFMFFRGFSRSSRRRRRARARERRGSGRRNSNQAHLESFNLEVPTQSVDLREIRFDEIDDEYIVTGAIPSIATPGRMASFHYRSVETVYC

SEQ ID NO: 160648 - protein, 95 aa, Oryza sativa
  Clone ID: PAT_MRT4530_59909C.1.pep
MMNKQPVVRLDQKPPNLWIRTRKQIVDFPPKNTHRLLHSPFPASNDQQQSNAFAPFCYTVTLDIIPLITTDNPAPHGWDPLDSENGWPKREYAWV

SEQ ID NO: 160649 - protein, 508 aa, Oryza sativa
  Clone ID: PAT_MRT4530_5990C.1.pep
MEHAFSARDCREAMTSPLRRKLRAPSPQTPTVPHISPLVLEKHKCRTLSASFLSLSLYSKMLCHRGLSAVASGRLRRALTTAASRPPWALIHRISTADGSTGAGVSLALAPPPRASRVTIPAKAIALNDRPISADESRVALRGRGVLAASGDGLLLVYTFKACFRGPAHPVPELPLDVIIPELARTTVETTYEHFASFVCNPLTGELFRLPDFDGTENTVDVHHTGILTQRDGGGEDGPPKRYAAAQLSNVDGDDEGRRFLLRRYSSETREWSKLVMPSPLPPGRAMGMNHEVVAFGGRLWWVDVSWGAVAVDPFSHRPEPRSIKLPAGSILSEKPCSREMERIVKHRRMGVSNGKLRYVEVSDQEPFVVMSFTLDDESGHWTLDHQVALSTLGAKGGSPKGIPYIGAIDPFNADVLYLAIERVSVSVDMRLKKVIQCSELCSDVFPTVSSSGVLLPCVLPPWLDSFPIPNAVLCLHSKINLSGKNNMKNETLADILVINIKTGILMD

SEQ ID NO: 160650 - protein, 139 aa, Oryza sativa
  Clone ID: PAT_MRT4530_59910C.1.pep
MASSSAMVRVVVVAVLLMQCCNAIMAARLLEGDLFGSSWLQGLQGGVATGELILQLNSIMASSSAAMVRVVLVAVLLMQCCNAIMAARLLEGDLGSWLQGQGGVAGELILQVLKGGSPPVGNDCHQGPGGGSGATCYPP

SEQ ID NO: 160651 - protein, 363 aa, Oryza sativa
  Clone ID: PAT_MRT4530_59911C.1.pep
MEAAAAAEEEEEEAVWAWSWGAGTDGQLGNGGFQDHHLPQPLLLPPRCRGLVSFVAGGGAHAIALTSDGEVFTWGRGTHGQLGHGDVENIPHPKLVKFFENYMITCVSAGWNHSGFATDSGQLFMCGDGSFGQLGAGDNHPRNLPFEVAYFTTKHVVRLALGMRHSLVLLKDNSVYGFGSTRRGQIGRCTRNQKFYDVPRIIDGFPDCKIGNIYANGDHSAALDESGQLYIWGRALIGEHDDDQPRPVFPSLGISQVALGWHHALVLSESSSSSTLVKVPCVDGEQVVHIAAGTEHSASVTDKGTVFTWGWGEHGQLGLGDTCDQVTPQRVNIGDKRPCSSASVNVYCGSGFTIAVNSGLESD

SEQ ID NO: 160652 - protein, 312 aa, Oryza sativa
  Clone ID: PAT_MRT4530_59912C.1.pep
TVTYMSPERIRNENYSYAADIWSLGLAILECATGKFPYNVNEGPANLMLQILDDPSPTPPKDSYSSEFCSFINDCLQKDADARPSCEQLLSHPFIKRYENTTVDLVAYVKSIVDPTERLKQIAEVQIFVQPTINVMGSRKRSNWIGMGGRRTWMLAVHYYLLFNGTDGIWHYMKTFYMEESTFSFSGNVYVGQSDIFDTLSNIRKKLKGDCPREKIVHVVEKLHCRAHGETGIAIRVSGSFIVGNQFLICGEGLQAEGMPSLEELSIDIPSKRLNPIYAVMVPRWDSDGSGLLKVADEDYTIHVSRHLTFSK

SEQ ID NO: 160653 - protein, 105 aa, Oryza sativa
  Clone ID: PAT_MRT4530_59913C.1.pep
MVGVGLGTRRWIPHRGGVWPAKLTSTFIGLLTILIDSGLVRLEAGPPPRIKERVLQIRPPPRCRRLLIASRAVGVNHRATSSVHVLVTGRCHRIAAMASDELDLV

SEQ ID NO: 160654 - protein, 57 aa, Oryza sativa
  Clone ID: PAT_MRT4530_59914C.1.pep
MNKLGFCGSGEDEERLETEKFFRNRRTSKWIPKTLLKAHYRRCDFQGKRRDARRKFL

SEQ ID NO: 160655 - protein, 124 aa, Oryza sativa
  Clone ID: PAT_MRT4530_59915C.1.pep
VPWVPFEPVDDLNANHQLNIHLPPKVLPSLLSRLKRRSWVRLGSLPGCSTPKQRQMHSCFLQVSKISRNHNGIPHIRHSKNTEEVQFQTTSKVQYCFPFPRKFWKLNGNLECLSKLGFFPREPK

SEQ ID NO: 160656 - protein, 85 aa, Oryza sativa
  unsure (1)..(85): unsure at all Xaa locations
  Clone ID: PAT_MRT4530_59916C.1.pep
MEVNATDTALYSCGGVAYWFCSAVASAAAFASRASVVGSSSWLTYVRPAPAGSPCAPPPPXPRHPYAPRSSSSRLHVHRHLRPAT

SEQ ID NO: 160657 - protein, 88 aa, Oryza sativa
  Clone ID: PAT_MRT4530_59917C.1.pep
MIHIVSDDARPAEYSYGARTLLFYYTLPMSALDCRVRMCRVLVMCSRRYRTKIGTKRGLNFGGTNSPNRYYSCHKTFTGMPNPTDDSK

SEQ ID NO: 160658 - protein, 131 aa, Oryza sativa
  Clone ID: PAT_MRT4530_59918C.1.pep
VESDSYSVKWTCVGPANFLPLSMRLSRMSDLRIPRVAWISAIIHLADNQFSGSSVWIRISSQVHIPGAVRGTAHGGSISKVVRHPHSVHHKPLAVSVVPVGISKLNGSVQHIFILKSPFRSAVPEHSQPTV

SEQ ID NO: 160659 - protein, 161 aa, Oryza sativa
  unsure (1)..(161): unsure at all Xaa locations
  Clone ID: PAT_MRT4530_59919C.1.pep
MASAASCRNNVCSRSRTRPAFLRWALXPPSFFRAWHIGVRARESKKRVAFIFGVPASIRARDDVVRMAVINFLCVHKKLRSKRARVVAIRTGDPLFSTPAFVTLSASWGRLTDVRLGEVICRSNTVTDGSYCEAVQDISSARRWNTKRSLSSNGRRRLSAF

SEQ ID NO: 160660 - protein, 112 aa, Oryza sativa
  Clone ID: PAT_MRT4530_5991C.1.pep
MASDMDTTRALAILAATSFVAMLACVQAAGDESYTFMKDAVQSPQVSYYDYIIVGGGTAGCPLAATLSQRFRVLLLERGGSPYDDERIGNMTAFADPPPDTSPSSPAQRFVS

SEQ ID NO: 160661 - protein, 77 aa, Oryza sativa
  Clone ID: PAT_MRT4530_59920C.1.pep
KGKRKTPVKIEKKKRGPPSNHRILPKRTNSRTRGGTPGRTRGRPPGFPPEPRTRPWKRPDFPIKVVSERGGNTATTA

SEQ ID NO: 160662 - protein, 98 aa, Oryza sativa
  Clone ID: PAT_MRT4530_59921C.1.pep
QFQSVRATPPFPTSPRDALASRIPAAPLLLQPPPPGASPPLPHSGASPPPPPAPLPSPGGRPSRAGAPTRPTAAPRSSHDASSLACGPPDLLAYLPLP

SEQ ID NO: 160663 - protein, 217 aa, Oryza sativa
  Clone ID: PAT_MRT4530_59922C.1.pep
MAAAASSSTTSAAAAPATATTTVAFSFQHPTPTPSHHHHHHGVLGYSPLVLDHHHPTTAAASSHAPSPPTLHHHHGGGLHAAAPPPRSSPPHPWSCEEGDHRGRPQMGNKGEAAAAMGAMGINDAGNNTAAAAAAQHHLGVGAVRMKKVGGGGGGGGKARRKVREPRFCFKTMSDVDVLDDGYKWRKYGQKVVKNTQHPRAFELPFFPCMVCDTFAR

SEQ ID NO: 160664 - protein, 163 aa, Oryza sativa
  Clone ID: PAT_MRT4530_59923C.1.pep
MGLAFSAFGLPGWSSIPTGQVYDQYFKDKKTDSFEAFHVAYVEFCKDFNTVLPGQDFDTPSLEKIQKFYDDTWKLINEDQEKKKAFMDYIRDNVKEAAVDDSLFIMAGLAAPAGAIVLKRTGQSIPQLKRLDLLPNVLFVPLFTLAAIMGATAVQMKQRSRHT

SEQ ID NO: 160665 - protein, 172 aa, Oryza sativa
  unsure (1)..(172): unsure at all Xaa locations
  Clone ID: PAT_MRT4530_59924C.1.pep
DFHLSIQVPTLIKDNIQQTLLDTFRPVGNXNPNWNDLLWAGRPGGRAIRNMSGATIAFVLDELRRRPDNEEHQLPQPERGGMLPVGPRTGLTHMECVPPMSGVPDKKPDQPPEIKDRAILWGRGISRREETGIPPGITCDQKPAKGRNRIKAHRLRFSKASPPGKHHKNPSP

SEQ ID NO: 160666 - protein, 158 aa, Oryza sativa
  unsure (1)..(158): unsure at all Xaa locations
  Clone ID: PAT_MRT4530_59925C.1.pep
PPPPPPPTASTSPHHAPPPQPPPPPLARGEEQRVHTRPALASPTGLXPKPNTFARAEXFASMLLETNPNQAQASRARQVQQQCSGKKDSSELNYDYRNPFVVCGATYVPIYRGQKDVSCPYCGSRFVPSIEGQLCTICELAVVGADASGLLCSPTQSR

SEQ ID NO: 160667 - protein, 93 aa, Oryza sativa
  Clone ID: PAT_MRT4530_59926C.1.pep
MNQKEDAPGSPPLRCSPDGDRRPALPCSSWRRRNERSGGDDENETGDFSFSFTRLKVEDECATDSPPDLARRRTMKVTSLVDGGIATWRLGVE

SEQ ID NO: 160668 - protein, 79 aa, Oryza sativa
  Clone ID: PAT_MRT4530_59927C.1.pep
MALASGGGGHLGAGSTGEETGVTGSGGPGLLTGRSGGSLGGSGGGSTDLMKNEAIQTEKGNKAWPEATKQKDGTVLRKK

SEQ ID NO: 160669 - protein, 87 aa, Oryza sativa
  Clone ID: PAT_MRT4530_59928C.1.pep
WGPDYLINFRNFTYKDNRVNLDENVSGGEHFKPAGFILKQKHNKTHPQGPGRIPATLLEKDPRKIINSTAGRKHQKKKTTGTYKPNL

SEQ ID NO: 160670 - protein, 107 aa, Oryza sativa
  Clone ID: PAT_MRT4530_59929C.1.pep
MEMAPTRWRYEVGAHGDGVPLMLWLQGGGWPGSAARASGRGQIHGRLGQIWPVTVQVCSKSFTPLLANILPSMLLLPFYGRSASILGHWELRGKGRCGAFVELTTSR

SEQ ID NO: 160671 - protein, 115 aa, Oryza sativa
  unsure (1)..(115): unsure at all Xaa locations
  Clone ID: PAT_MRT4530_5992C.1.pep
QKTRGLGDLLNSNVGPKLAFECMSVPVDLILXQQEINRSKETAVKYINDSRSARTLSMCGNHLEAPRSNPTSHIKLYCRDRLHRLTXPDSDSADLIVADLDSSRFLLCYRTRSLP

SEQ ID NO: 160672 - protein, 39 aa, Oryza sativa
  Clone ID: PAT_MRT4530_59930C.1.pep
PQANIQLVASIIVLITVVCRANAHKLTFRRAHWNNSYKT

SEQ ID NO: 160673 - protein, 72 aa, Oryza sativa
  Clone ID: PAT_MRT4530_59931C.1.pep
GGSIFPLRLANFWKGDCLGPFCFFSNLGKGDFLQSELIWLTQGFFNFPVFKKPPIKFILVALIKKLLFSIPA

SEQ ID NO: 160674 - protein, 57 aa, Oryza sativa
  unsure (1)..(57): unsure at all Xaa locations
  Clone ID: PAT_MRT4530_59932C.1.pep
ALPYPVIRAYVGPQPTAHFXADDFFRDFADSMVKMSTIDVLTGAQGEIRNKCYAINI

SEQ ID NO: 160675 - protein, 175 aa, Oryza sativa
  Clone ID: PAT_MRT4530_59933C.1.pep
MPVTEKERRVEYIMDVLPFYHAFFCSRAEDELEFDPVEDSKLIPLPPPINACCARFRGEIYLHINFVARTRARNSHWQKQRCLVFAELRFTPYVLDSFFVDTCTVLQQLPADADLTAAAANGNDCAFCPPGRVLHPAEFYCGKQQHKDELNHNFISIPNSAGTKPTFHSIHKCCK

SEQ ID NO: 160676 - protein, 50 aa, Oryza sativa
  Clone ID: PAT_MRT4530_59934C.1.pep
PSAGGARARSPMAIKRDRSRGRRATNSRPQKGRNCGQKLGEDTNCAHAPL

SEQ ID NO: 160677 - protein, 172 aa, Oryza sativa
  unsure (1)..(172): unsure at all Xaa locations
  Clone ID: PAT_MRT4530_59935C.1.pep
QSTTPLSSPLGGAXAVAARSMEAEEAAGGGERKRKRDGDAVRDDEEEEEEGVYEGIAEESVAELMRWLEMEISDAAPETETKTETESGDDPAGAAAPGFVTINGNEESCGPSFSAAASTVMASVDTRAGAPPAPPVPWPLPPAADVVPAEVVVDGVGEEWLVELLTSGPAVA

SEQ ID NO: 160678 - protein, 75 aa, Oryza sativa
  Clone ID: PAT_MRT4530_59936C.1.pep
TSFEKSFPELELLSLAHGPYHHCSVVLAHHYPSPYILFHRQATLLLLCVLAALGGGRAIDGCDTREQAEGATLDL

SEQ ID NO: 160679 - protein, 142 aa, Oryza sativa
  Clone ID: PAT_MRT4530_59937C.1.pep
TLISLDHLNTMDLLDRKHCKPPSASLLCQSCQAGQRETMEHLFSSCHFSSACWNYIGFQWDFNLNFHDMILHQWLLFGHLCFMEVFLLAAWNIWKHLNNLVFNNVLPTTSSWKRAFKADLSLHLVGLRDDKKLFVQSWIDIL

SEQ ID NO: 160680 - protein, 120 aa, Oryza sativa
  Clone ID: PAT_MRT4530_59938C.1.pep
AIVSHGATPRRRRGAGLPVPVPYRQTARRQTQAETLLCRLHHVLEGVVTLARRAAGAPVPQAPAREAHAHPARAGANLGEPVQAHAHGHGAPLAPQTMNASHACWVPLEAFNALDMKLTD

SEQ ID NO: 160681 - protein, 86 aa, Oryza sativa
  Clone ID: PAT_MRT4530_59939C.1.pep
YLSVVNLVAIKSSRSRQQSSLSPRIRVRRYQRQRYVSPDSILRHRRGLAILISDVDTRRLVLAYNSIHPFLCGTPPISEGCFRIRH

SEQ ID NO: 160682 - protein, 71 aa, Oryza sativa
  unsure (1)..(71): unsure at all Xaa locations
  Clone ID: PAT_MRT4530_5993C.1.pep
KHRHCPPTRPSRAPWLPGVLGQHTPVTLDLPPPADTQQKPVLPGPSAVVVTRPSRASXRRAASVRDDPLVK

SEQ ID NO: 160683 - protein, 1424 aa, Oryza sativa
  Clone ID: PAT_MRT4530_59940C.1.pep
MRWAAPARKSGMTVLGKIPKPINLPSQRLENHGLDPNVEIVPKGTLTWGSKPTPTTPNAWNSSSLLSPKNDGSSNSPSHFNGRPSSGGGSRPSTAGSESLDSPNAWGSSSRPSTASGTLPSNHLQTTTNRPRSAETRPGSSQLSRFADNSSENMKVSIRTIDKSGSSSHGHGFTLSTGDFPTLGSESNSQRGHSSKGRPTSSSGKETAQNEQGKSITAGPAEEILSSNSQSADNIKTDQHVYDGGAPFPGTSLPNKAQQPQPYPGNFCVAPPHFDSWHAPPGHPPDGMWHRGAAPGGPYRPLGPPGGGFPVEPFAYYGQFQPSSEAAARQGPGHGGYQPKNGDAYLSVPPSSYMMNQPVIPVRPVYQGPMSYDGYYGPPRANFNNPNHEKFHPGHPQNRPGKHETAPNEHFESDRVHVIQRGQPRILHDNLRGPREVERNAQPAPPLLPHPNGNRIDVNKRSDIRESFNEKNRILMKSAPDHRGPAGTSHLSIPENVHSHPREADDGTLRKKFKEDNSVVPDQQPVIKKNVALIEKIESLNNKARNVDARNITEPFPSKQAKEMQKSTSSKEDQKLPNEPVLEPSQSELTEIITAGKLGESTRDRTHRRGDSSRSSHHGSSKDRNSQHEQPPEDALKLAPVMVTDDTSLDFESQRAKMRELAAQRAKQLQAEEEERTKQQRAKALVKLEELNRRSSVHQKSSNDVPPDIADVQQKQKVGFEETAKPANLSAESCDVACDGHNSLQPPNDPKHTEFSVQPKPTVLTHTLGVGKDPTIHNTTTLARNSEHEAQKGVAQSHDINVPKPKQGYRRRQAVSEEKNPSEKSSGAISTESGKKIAEAFSNTSTAVVTSHDDTLAHNKKSARHSRNKKKVDEAPVTSKHPPVALNEQNAVKVPNEPKPQTAGVIISSSIVPTEGTVVTVGSIMVGGISFGSLNQECVKPQESVKPADEVHSSTSNSHPKRQQAKRSGKNQQSIQPIERPHGNEGAVWAPVKPSGHSEQSGEAMWSTGVVAPTQPAGLNTNDGENVTKTKRAEMERYVPKPLSKELQQQNLRQILPSEKSCEENKIRDKEIVERSTGAKPETAPEAKKWEGKKTSKGHGKSHPSWRRRNTDESTLVGPKATELADNYQESHELQKHTVHQPPEPDKQADAPARNSSVPAETVSSVVTVAKEHGAANKQRRQHVKAQRNEGSNYPNENKDQMAAPPAPGIDSNSYERRNMSRSDVKHSGTVPQPRSHWKPKTIPQSQGNSHGNNAKDGHVDSATPQDSSNNNLAENIGWNDENHAHSEEVKGEKRHVDDYQKSESHENAEQQQQLSHAPRRQGHHNGGRYHRGGGTNRGRGYDVGKPSHVTNAERRRGGTHLEYQPVGSYNKTADFQQNPGTDERTEGAPVHRERVHNRGPRPAGQFVKRNPASTPAANSYRDE

SEQ ID NO: 160684 - protein, 66 aa, Oryza sativa
  unsure (1)..(66): unsure at all Xaa locations
  Clone ID: PAT_MRT4530_59941C.1.pep
SHHQPPGCSHRCTRVHTHISGQHSAQXQVHMQRPIHPSHRFAATHSRSIVTPCXVVSHTPMQSRIG

SEQ ID NO: 160685 - protein, 310 aa, Oryza sativa
  unsure (1)..(310): unsure at all Xaa locations
  Clone ID: PAT_MRT4530_59942C.1.pep
MKATRAKRSTLSRSSMASSSRSRYLYMATDDVVPAVGPTTSPSSSSSMSHHXRCCIFLDYTSLLSDNTALLRQFSFYAVLVCPQVWQTRHDVSSSTVRQHRLFGVIFLNXALIASPSSSSARPXHDYSMAPHAHLVARLSRHQXPDFGYIDHGYFTHGFIDYGSLAPFASTTXTMAQRAIILIEHSCRFLLQSKCPRCSRLDVCIAHVWXCGGILEYMYSYMYRPFETQYNNPRYAVYLSSYIPTVVALPHPXNRWIRNGRCGFRWHVPNPSLCASPRSPPSVHHHALLLSSSPHMRRRPIPGSGLGKQM

SEQ ID NO: 160686 - protein, 176 aa, Oryza sativa
  Clone ID: PAT_MRT4530_59943C.1.pep
MECHAKEGVHVSAAWWHYLQGCDGQRIASTVYMLTEYGYRYYENPFLHTGEKERLPTAWARRSAKMTLFACGRRNRMRNGIFACGRLYQPHAKIKSRKKKPTNPNPSPPPERRIPAARHHRIDYPTTRRRRRPPAPLFARVRRALGAGSARDGAAARVAAHSPDLSAAPAVRPPSS

SEQ ID NO: 160687 - protein, 211 aa, Oryza sativa
  Clone ID: PAT_MRT4530_59944C.1.pep
MVTGNGEGGTAARLGTGKASAWTRTTVLQGRRLKDVAPLVHAASRKKSRSLKHAALAYQWLHDLALPTNEGWTTDLIDELITIWSAVRNVHFTEHEDQITWKLNNHGEYTATSAYKAQLLGTTTSSNFDTLIWRPWAPRKCKTFAWLILQNRVWTSDRLATRGWPNGSTCPLCRQTQETALHLLAECRYTRRIRNEIAQWTGNDHCPSKTF

SEQ ID NO: 160688 - protein, 74 aa, Oryza sativa
  Clone ID: PAT_MRT4530_59945C.1.pep
MVSTRRIEPPEMDMALVACGHGWDGASDAACSVQRRMWVGGVSSRGGGYGRRRPEPRFVEVLGRWERRIGSPFD

SEQ ID NO: 160689 - protein, 115 aa, Oryza sativa
  unsure (1)..(115): unsure at all Xaa locations
  Clone ID: PAT_MRT4530_59946C.1.pep
LQKKPGFQQVVFSXLLLIIASVLAATATMADHHKDQVVYSLGERFFSGXGXSXYSXGRCRAVVKRLCVGHGAPGGAGAXXLRXVCCRLXXAVVVRWCWCSALWLLVSGARGRRCW

SEQ ID NO: 160690 - protein, 136 aa, Oryza sativa
  Clone ID: PAT_MRT4530_59947C.1.pep
MHKELHDPPNHQIVCIAPLSAMESKWLHAVAVLSDGKRLFLSTSGGNSSVGLNTGLQRPSCLKIVATRPSPPLGVGGGLTFGAVSAAGRAQPEDLALKVESAFYSAGALIMSDSSATAMSSLLAVQKDSAAQLSLP

SEQ ID NO: 160691 - protein, 62 aa, Oryza sativa
  unsure (1)..(62): unsure at all Xaa locations
  Clone ID: PAT_MRT4530_59948C.1.pep
XIPSQVPXSPXXXPPSSRXSFGXGXGGRXRRKLXGKDAXXGHISGLGFPDXFSLAALXSFXF

SEQ ID NO: 160692 - protein, 98 aa, Oryza sativa
  Clone ID: PAT_MRT4530_59949C.1.pep
ARGPARSPHTTPLLSTPRMAAAHAASTPPPPRPLLAPPPAAPLPRLAPPPPPWTCPLRALLPIPVPVLGLAARRASPPRHSSEGLGPGRPPPASSRAA

SEQ ID NO: 160693 - protein, 70 aa, Oryza sativa
  Clone ID: PAT_MRT4530_5994C.1.pep
ETKQLRKTISALQNDVASLKQKMKSLDEDILLKEGEILLKEGEISILRDSIGRPSDIICSPRPSKLFESE

SEQ ID NO: 160694 - protein, 361 aa, Oryza sativa
  Clone ID: PAT_MRT4530_59950C.1.pep
MAADHELRAAAVVMVVVVVLGMVSTSSAHVFVGAYNTTCPNAEDIVYKEMTSILAKSPELAGPVLRLFSVDCFVGGCEGSILLDSTPGNKAEKDSPLNKGVKGYEVVDAIKAKLDAACPGIVSCADTLALAARDVVRLTKGPYIPLPTGRRDGNSSNAADVAANSPAPGATVNDLLTIFAKFNFTAKDLAVLSGAHTIGKAHCSAFSTRLYSNSSSNGGPTLDANYTTALRGQCKVGDVDTLVDLDPPTPTTFDTDYYKQVAAQRGLLATDAALLLNADTKAYVLRQANATSDDEFFADFIVSFVNMSKIGVLTHSHGEIRHKCSAVNPPSPPSSAAASMLATSLAGSLLFLLAGVLVLLF

SEQ ID NO: 160695 - protein, 79 aa, Oryza sativa
  Clone ID: PAT_MRT4530_59951C.1.pep
KEYNLPHLVRWMGMKRIQPKAKVLLGYDHLIWQDFERPTRTRPRYTKFISKNPTRKPRLWVEIYRPCGEERIDLNKPSR

SEQ ID NO: 160696 - protein, 151 aa, Oryza sativa
  Clone ID: PAT_MRT4530_59952C.1.pep
MATAAAALACRIGVAVAPLARIHPSLPERCRKRGRYADDHGEWTWCTPPVDGTRAACRWKKYRVGELDWPPPPPGTRGWDSGIVNRGKLRMNGRWSGSTYSQDSRLESEVTAKGKRVGLAVLLSLRVSGRAQGRMSIKISRQHHRPLVADN

SEQ ID NO: 160697 - protein, 1615 aa, Oryza sativa
  unsure (1)..(1615): unsure at all Xaa locations
  Clone ID: PAT_MRT4530_59953C.1.pep
RGHWSGGGTFGTHTKGRRIDHHMDRVHRVRASRQRRAVNLLSRENAMRIEHDIITPNQSRPENERKRTSSLMDFGPELSRVNRQRRSLLRSKAIPSPPLGNIANAEGRGSSSRVDKQYIQSLKASYPGRSYYGPPTYECPYCRAVFWYQERVKSSSAISKRKIVYNLCCKGGRIQLPKIRAPPEPLASLLNFNGDARAKKFLRQIRSYNSLFAFSSMGAAIDKSINTGNAPYVFKINGVVHHRIGTLVPSHGSPPKFAQLYIYDQENELQNRLNIFETDGDHADRPDPEILLSLSSMLDTENSLVQTFRYARERVLEHGDQRITLCLLGCNAKDDVQYNLPTNGEIAGIIVGDFSAKEYKFDVLVYDRNRGLHQISPLHPFYMALQYPLLFPYGERGFHLGTKYNNYDGTGKKYVTMPEYYRYEMHYRLNEPNPFTCYGRLSDQSAVDIFSTIEANRLQYFIDHQKELRTESVDGIVDAIDKGVTDGDSVGKRVILPASFTGGRRYMVMNYQDAMAICRVYGSPDLFVTYTCNSKWQEIAEAIRFEPGQQPSDRADMIVRVFNMKVNEFITDIREGRTFGKVIAVLYTVEFQKRGLPHIHCLVWLAAATADVSASIIDGFICAKIPDYDDVHSLFDKYWIYMTDDIKNRLKKALDNPRFVIPQDHLLNLLLHKLVAVFANSGGNIKDFNLPHPTSIPDVPGSNRLIDEELAIDPLMLAVHADSLVQQLNDDQSNIFNIISSRVAANRPGFFFVSGHGGTGKTFLWNAIIAKLRSQNKIVLAVASSGVASLLLPRGTMLAELLTEASLIIWDEAPMTHRRCFEALDRTLXDILLETYPANSIIPFGGKPVVLGGDFRQILPVIPKGSRXSIVNASITNSELWKHVTILTLNINMRLLNPILPESERKDIYDFSQWVLAVGNGSLPMIARENESCPTWITIPDDLLVMTNGDKISAIVNEVYPDFLHSYKDIEYLASRAIVCPNNITVDEINDYVIGLIPGDPRIYLSCDTISKCSELIPDFDLLYPPEFLNSINATNFPTHKLILKEGAVVMLLRNLNQSIGLCNGTRLLVTGLGDRILQCTILTGSNIGEIAYIPRITLSTTKMKWPFTLQRRQFPVRVCYSMTINKSQGQTLQRGKSIHAQIYHPVIGVLKPLLQEQKVYYIDSFTVRYANRSYRPVENNLIILFTKWPTLEEYIDPPADFPSVTFSLTSFGDIPPLVDKTLFYVDVMGVITEVGAPAIVRPKSRNTDSLKRTIQICDASTPMSLILTHTILVLLFVNKISNSTLPVTLWGDKAAIFDADTIYNAGQTQPQVIVFVGMLVKDYPGLGLIVTGSSPCQWYLNLDIPEVLELKERTSRPYGSTYKCSGCSNIGIPDPRIAHRLIRRPVESLIEDNPPNSEYIPSEIAALIDGKFVWNVSFTRNTVKRSQESLQVNSIVSTASSGHSLLLMPPDTSQATSAIVSAGSSSSVQIAPPVSETSTGSHQAIEPGHNASTPTKLAIGSTTHDTPTSKPCHSTPSKKNIVVSMCHVQSASPSLPTDTKVRTDAKVEEDTSQHASSTPLVAHSAEHKGKTASQTXENIPQTSPSSLASAIAKKRSKPTVVAPASKKLFKDTAE

SEQ ID NO: 160698 - protein, 114 aa, Oryza sativa
  Clone ID: PAT_MRT4530_59954C.1.pep
HEAKTFLSRVASCTDRIKGRRCGGSGTTIGGVPVHTVRVFSAAGEDYCLTVRNGTACLAPKNPRDDYQHWIKDMRHSNKIRDEEGYPAFALVNKVTGEAIKHSTGQGHPVKLVP

SEQ ID NO: 160699 - protein, 69 aa, Oryza sativa
  unsure (1)..(69): unsure at all Xaa locations
  Clone ID: PAT_MRT4530_59955C.1.pep
MASTALSFAFSLLSLPSSSSPASAIASAPRSFTVPSHALPLLAVSIVASTSXDSPXVLNLYNSISSLTL

SEQ ID NO: 160700 - protein, 171 aa, Oryza sativa
  unsure (1)..(171): unsure at all Xaa locations
  Clone ID: PAT_MRT4530_59956C.1.pep
GSRRCGFGHHHNQAPAAPSDPNQIFKIFCRAVVLAPVNPKDEHQHWFKDMRFXAKVKDGEGMPAFALVNKATGLAVKHSLGQSHPVKLVPFNPEYEDASVLWTESKDVGKGFRCIRMVNNTRLNLDAFHGDKDHGGVRDGTTVVLWEWCKGDNQSWKILPWGPEAHSSSPG

SEQ ID NO: 160701 - protein, 343 aa, Oryza sativa
  Clone ID: PAT_MRT4530_59957C.1.pep
MFGFGHHHNQAPAAPSDPNQIFKIFCRANENYCLTVRDSAVVLAPVNPKDEHQHWFKDMRFSTKVKDGEGMPAFALVNKATGLAVKHSLGQSHPVKLVPFNPEYEDASVLWTESKDVGKGFRCIRMVNNTRLNLDAFHGDKDHGGVRDGTTVVLWEWCKGDNQSWKILPWGPEAHSSSPGAATACTIGGVPVHTVRVFSAAGEDYCLTVRNGTACLAPKNPRDDYQHWIKDMRHSNKIRDEEGYPAFALVNKVTGEAIKHSTGQGHPVKLVPYNPEYQDESVLWTESKDVGKGFRCIRMVNNIYLNFDAFHGDKDHGGIHDGTEIVLWKWCEGDNQRWKILPW

SEQ ID NO: 160702 - protein, 65 aa, Oryza sativa
  unsure (1)..(65): unsure at all Xaa locations
  Clone ID: PAT_MRT4530_59958C.1.pep
FFFFFSNFGFYFIFIPNFXLISYWVLLIFYFLFSISVVSKLFSYFHSLFNLPNFXFYFIFILNFN

SEQ ID NO: 160703 - protein, 1243 aa, Oryza sativa
  Clone ID: PAT_MRT4530_59959C.1.pep
MAENSSKNPLVLDECIVSASCPSPVQSILCDPGRKRKVPMLDQQSKEPDLAILVYIKGAFCAGQFSQTTPFVPNVCRDKFVSTFNLPSRRAVRHRLMFGSDNAPNTTSDSSPGIINLISGGPTLAADETFCGLPRPQPCVAAESRRKRKAAMIHKRGEKLCPAIYSPSSRSVWRRIIPNDNVVRQQCHTQLQQQNLSSASHQDPRQPFAGRHQCFVVMIIATAQLIHANGAYVWGGSVHLAPYKPPPEPLLSLLTGQNPALSAHFFDNIRRYNSMFAMRSMGLNIIGSINDGGGPYVFKISGQLCHWIGSLIPRDGARPEYCQLYIFYTENEVQNRMEVPCISGGFKPNENVISSLMRMFDDHNPIVQVFRTARDRLSDQSEDRYYVKLFVVPNQHGGVYSAPVASEVVGLVVVNDLGTTNEGCDLIIQDKASHLQRIKESHCKFMAMQYPLLFPYGEDGFHKDLRFGCPHLFITLTCNASWSEITQALALIPRQHSSDRLDIVDRVFQMKLRIFIDDITKYQFFGPISGVVYTIEFQKRGLPHVHIIVWLEKDGPLDVDWIDAFISAQLPDPSVDRIGYEASPSLCKFYPKEFIEKTMVLPSGRVIYARPNNNITTEKAHNVDLLVKYQAHINVEIVNRDGMEKYLFKYSTKGPDYAKIGIRDNVDLLVKYQAHINVEIVNCDGMEKYLFKYSGMEKYLFKYSTKGPGYAKPSMCAPGKNFPVGHPSQNCYRPSTLNLRVLSRSASGKEVATCWIYPHAYQHTYVEFPEFWTWHADGKYWKQRSQSHKGKVGRIANVGPNQGERFYLRILLHVIKGAQFFSDVRIVGGIQYPTFQSACEAMGLLGDDHEWSHAITDAAQWALPYQLRQLFVMMLLFCQVSDPAKLFDNHVQLMGEDFAYRVSQHTPGKTFLWNTLLANIRNKGKIVLAVASSGIVALLLPGGRTPHSRFRIPLDIQEDSMCAIKKNTHLAELIQQTSLIIWDEASVNHRHFFEAFDRTLRDIMSSINHDLVNMQFGGITVVLDGDFRQTLPVIPNARKQQILNASITRSRLWKNCVVLELTENMRLNCPTFSQQDKFRLELFATWLLSLGDGVVHDSAPTDRPDATWVEIPSYLLLPAKERNLACLISFVYDSIPHLSQLPTYLCEHAILAPTNEITAAINAQIISHTATEEMSYYSFDTIDDATPNYCNVQSLYPAEFLNTVHMSGLPDHHLQLKIGVPIMLLRNLDPSKGLCNGTHLIVT

SEQ ID NO: 160704 - protein, 76 aa, Oryza sativa
  Clone ID: PAT_MRT4530_5995C.1.pep
GLFFFVFLFFTAKPVRNFSKSPAPKWPKQMVEKVFQNYEQKVPSLSAIYRGIIGNAFGSITITRSGHGRKRPRGST

SEQ ID NO: 160705 - protein, 110 aa, Oryza sativa
  unsure (1)..(110): unsure at all Xaa locations
  Clone ID: PAT_MRT4530_59960C.1.pep
MSIWGTRKPDIEGIGVRWYEDLRSTTSSKXKTMIILVIALIQLIXDYMVEVTDYKGNMELDDTDETVVELAEVDVSAVKFNALGPSGGSLLDRGLVILQAGLGSTGPLTI

SEQ ID NO: 160706 - protein, 180 aa, Oryza sativa
  unsure (1)..(180): unsure at all Xaa locations
  Clone ID: PAT_MRT4530_59961C.1.pep
GGGGSDDDGCTAATVIITGVTVARRKAARREDIGEAKDDAVGDGEADAAAVDRTARHVLGIESWTTVAEFTPSADLTTTVEPAKGTRGWRSARQWRAMAGDGEEEDATAVGEEEDNAEAVWRRQCSSGECEGGRRGGDGEEAMHGRGXGGGGAGGGRQRRGVGRRGGGGGRGARAKRPSC

SEQ ID NO: 160707 - protein, 63 aa, Oryza sativa
  Clone ID: PAT_MRT4530_59962C.1.pep
SVPACNIYLFWYGLLFSIRYRLAHVSGCSSVILSLHLFKISTQGIKSQSFELSMVPCSFPLGI

SEQ ID NO: 160708 - protein, 246 aa, Oryza sativa
  unsure (1)..(246): unsure at all Xaa locations
  Clone ID: PAT_MRT4530_59963C.1.pep
QALTAFEPGPRLSLYVVRLDFXATNNMAEYEGLLAGLRAAAGMGIHCLLVLGDSXLVVNPTPPGAFEENLTQPSAHSDPPRVPNAATPTLTPGEPQASGPEGVNPDPPCQVAWMADIRAYLDNHTLPKDRAEAEKLAHISKRYMLVEGTLYRSGANGVLLKCISREQGVELITDAREGKCGAHSASRTLVGKAFRQGFXWPATLQDAQDWVRXCKACQFYAKQTHQLAQALQVIPFSWLGTIMDLD

SEQ ID NO: 160709 - protein, 274 aa, Oryza sativa
  unsure (1)..(274): unsure at all Xaa locations
  Clone ID: PAT_MRT4530_59964C.1.pep
MYERATNNMAEYEGLLAGLRAAAGMGIHCLLVLGDSXLVVNXLSKEYQCTNQQMDAYVHEVRRMDRHFDGLELRHVPRRDNAVADELSRMASARAXTPPGAFEENLTQPSAHSDPPRVPNAATPTLTPGEPQASGPEGVNPDPPCQVAWMADIRAYLDNHTLPKDRAEAEKLAHISKRYMLVEGTLYRSGANGVLLKCISREQGVELITDAREGKCGAHSASRTLVGKAFRQGFXWPATLQDAQDWVRXCKACQFYAKQTHQLAQALQVIPFSW

SEQ ID NO: 160710 - protein, 596 aa, Oryza sativa
  unsure (1)..(596): unsure at all Xaa locations
  Clone ID: PAT_MRT4530_59965C.1.pep
MEEDGGGAGRRKERVVLMWGYLPGVSQQRSPLLGPVPVRMPDAAAAAGDAWRDVAGGGCGFAMAVSEQGKLFTWGSTDDMGQSYVTAGKHEETPEAFPLPSDIAIVRADAGWAHCVAITGKGDVYTWGWKECVPTGRVIADHSATGAMDCDKRQSGVATDQGNIGNSITVSPRSKVSRTSTKAASGPAESRSSEDSTKRRRLSSSKHGAESESSSDENLSAPPCVVTFNTGVKIVEVAAGGRHTLVLSEKNQVXGWGYGGEGQLGLGSRIRTVSSPHPIPCVQSAFYSKDRTGIVMGSRTLEGTNDRAATCVKAIACGGRHSAVVTDSGTLLTFGWGLYGQCGQGNTDDILSPTCVSAIMGVKIQRVAAGLWHTVCTSADGDVYSFGGNQFGQLGTGSDQAEIVPKLVEASKLENNHARGVSCGARHSAVITDKGDVFCWGWNKYGQSGSCICYITVSSILHPSANIQQAVSGVLLVGTNTSVPILKCHLASQMQLSSTELLKILIMEGFIPFIYKAIVQYRKEGQVSVGDLFFDEPSPSSYFRLPGDSGRYQQQQQAAMSVLFSQATTADSDAVAPRRSPLRCTVHHRRPATATP

SEQ ID NO: 160711 - protein, 71 aa, Oryza sativa
  Clone ID: PAT_MRT4530_59966C.1.pep
TGRRRAEEGGGRAAGVGDGGGRAERRRRKRTAGIGDGGGWAAGRRWPCVSAGEGGGPVAAGVGDGGRQRKH

SEQ ID NO: 160712 - protein, 42 aa, Oryza sativa
  Clone ID: PAT_MRT4530_59967C.1.pep
RANKGRKPQKQEVYKARYLDPPTTKSYSKIVLSTFVNRSRCR

SEQ ID NO: 160713 - protein, 108 aa, Oryza sativa
  Clone ID: PAT_MRT4530_59968C.1.pep
MNGSDEGSSRLRVLDGRTGFDRCPAPGLRSSRAALGSEQSRHVHGKSLRRARRAEASMETGGCSRLLLGGSAPMLDPLRFAFPVPPSEGLRVTQPLGPVGRDRIPRGP

SEQ ID NO: 160714 - protein, 58 aa, Oryza sativa
  Clone ID: PAT_MRT4530_59969C.1.pep
MARSPRSMAPRRKSQFRRPRLLVDVPDTFCDVPTSRGGGGDGGGGSGVRCVQRRDGRR

SEQ ID NO: 160715 - protein, 68 aa, Oryza sativa
  Clone ID: PAT_MRT4530_5996C.1.pep
ISSPRLSPSLCFPTPPFFLSALNCGNPTPPGNQTGTYFCLMNPFFAYQKGIKLCYKNIYNAPLCLNFD

SEQ ID NO: 160716 - protein, 38 aa, Oryza sativa
  Clone ID: PAT_MRT4530_59970C.1.pep
MVHEEIVLRHRVPVSAPIIQPPDGTLPFEIMCDARDFL

SEQ ID NO: 160717 - protein, 292 aa, Oryza sativa
  unsure (1)..(292): unsure at all Xaa locations
  Clone ID: PAT_MRT4530_59971C.1.pep
MTSLRPLETSLSIGGRPRRGLVLPPPGVGAGVLLRREAMALPGRRGFACRGRSAASAAERTKEKKRRDSSKQPLVHLQVCLEHQVKFGEHVGIIGSTKELGSWEEQVELEWTTNGWVCQLKLPGETLVEFKFVIFLVGGKDKIWEDGNNRVVELPKDGKFDIVCHWNRTEEPLELLGTPKFELVGEAEKNTGEDASASVTFAPEKVQDISVVENGDPAPEAESSKFGGQWQGSKTVFMRSNEHLNKEADRMWDTTGLDGIALKLVEGDKXSRNWWRKECTLCSDPASKALSY

SEQ ID NO: 160718 - protein, 973 aa, Oryza sativa
  Clone ID: PAT_MRT4530_59972C.1.pep
MIFKRNQRSEILSLRRCNAGGGAGVGEDDGDGGERRPKRRRGDEFFPVELLGDVPVAGIPYAAFGFRWCEEAEVASPAAASRAAAAAAAASRPPVVRTSRGRAQVLPSRFNDSVLIDPWKKDKPAKPPVPAKAVQLVPKSEVLYRKGAIADRSLTMSELDENGDDDYEEGHNFVASRKYSMSLSTVTSVHGEPYSYYHRKGLMKRQYDDDDDDDDDDDDDDDDEDEEAEEEEEEEEEEEEELSYWRNDFVYGDIVWARLGKRQPVWPGVVVDPAQPAAAQALPPQPRSGAVLCVMLFGWAAEFGDEKKFIWVRQGGIFPFVDYMDRFQGQTELSSCKPGDFQRALEEAFLADQGFFEVPMDGNTTGQPARYKRALQCESCGNCFPNKDPSMMVYVMEQLACRQCAKILRSKEYCGVCLKSWQHKCGGRWKSSKPDKVAVICFGMEGTYLRDLELISCHCGPCKGQKFLFNEWERHAGCRSKNWKSSIKIKDTLMPFGKWIEQHQSSSYSTNPAKRSSQKMKKQKLLDLLSEPYDTVNVKWTTERCAVCRWVEDWDYNKIVICNRCQIAVHQECYGVRGKQDFTSWVCRACETPDQKRECCLCPVKGGALKPTNVDNLWVHVTCAWFQPQVAFASDELMEPAIGILNITPLLFMKMCVICRQIHGSCTQCYRCSTYYHAICASRAGYRMEIRCLEKNGKQTTNKISYCAHHRAPNPDNVLIIQTPAGTISSKKLVQSNGTVAASRLIRKDLPKDSVSEVEISENLSAARCRFYVKKELKRSREGAIAHRVRGSCQHRWDEIDSLNPPREERDPESFSTFKERLHYLQKTEHTRVCFGRSGIHRWGLFARRGIQEGEMVLEYRGEQVRRSVADLREEQYRVQGKDWYLFKISEEVVVDATDKRYLALLIGQSCTPNFHARLMSVGHDLSRIVLITKKNVSAGEELTYDYLFDPDEADDRKVPCLCQTANCRKFMN

SEQ ID NO: 160719 - protein, 101 aa, Oryza sativa
  Clone ID: PAT_MRT4530_59973C.1.pep
PGRDHHSASIVLPPFVETLGPPSTDLRNLDLSPLDTSQIFCTRLSYSAPSATATHRPHYLFLILPPHVAHAHLATWSTECDANTAYDQLHVHDHGTAMPTP

SEQ ID NO: 160720 - protein, 183 aa, Oryza sativa
  Clone ID: PAT_MRT4530_59974C.1.pep
CASSLTSAPSTRLAPPRCPTGGATSTQPSPSSTSSTPRATRSQAPSSPRTRRRPSARSGSSISGRRTTRSTRRSPPPPPPASRSSTSSSGTGTAPTASSAPSAATPMPPPTSTTPCAARSPPRRHTSSGATRCAACGSPTSSSTCRRAASPCRRWRSSPSRGSWRRRTRRCSSSSPAARTSPT

SEQ ID NO: 160721 - protein, 59 aa, Oryza sativa
  Clone ID: PAT_MRT4530_59975C.1.pep
LKHFHLGICVNKKVRGENVYPVLCLTLFWSARPRFPLPLRRRLLARAFRSPYPTTTAYL

SEQ ID NO: 160722 - protein, 523 aa, Oryza sativa
  Clone ID: PAT_MRT4530_59976C.1.pep
MATNLRFASISFRTCPKMLFGNSENYSLGLQWLVFEGLGNAYSSLPLDDIKVLSIGIRARSLIPGFTVLREDVDKRAMGPNIERVVDVSISPPNDMELSFEEEEKCTHLNAQATNVLFSALSEDVFKTIMPLEDAYLIWTTLKERYDKSKCDGEDALRETSFGDCSTLSSHHDKSQVIISSDQEDHVFMGDDDDDDSVVDHLNKDTTMVIKLMRVIEKQQACLIKKNEEIKDLADEHKKLKGYNSSLIMRYEQLENEFACATNSIACVASLKKENQELKSQLEEITSKEKHMDHGLMGNAQPSQDNHESMVKKLEKGSTVACTKFYQENKSNNKRTPVAAASPPTGSGGGEDAAAAGPPGRHRLSFSPTRSGGGQESPLHATSRRRSLLMGRGSPAPPPRGRRGHEGETTGRGAGARPLDGGALTHGRRHAAVELELSLGGVISPNVTSFDLKAAVCSHGLFMIAPNHWDRTSRALVRPLRVTFDRTTFIAVCISRHPHVPLRCVPRFCRQCARCPLPARPDC

SEQ ID NO: 160723 - protein, 329 aa, Oryza sativa
  unsure (1)..(329): unsure at all Xaa locations
  Clone ID: PAT_MRT4530_59977C.1.pep
MDDSCAVCADALEWVAYGACGHREVCSTCVVRLRFVMGDKHCCICKTECSSVFVTKAMGDYTKVINDFNIFPPVATEGKVGEYWYHEDSQAFFDDAEHNXVIRAMCRLSCSVCDKAEDQAGQAAQVFICEQKLYTRTQLNQHVKTGDSEVDGSEVERSGFAGHPMCEFCRSSFYGDNELYTHMSREHYSCHICQRQHPGQYDYFRNYDDLERHNAMEHGGRMSRAQRNAALQIPTSFIYRRNEQDERRGRGRGRNSVLQDILCASSAEVHFMEITSFTHICPENTIHVTYVKGNILGSMIISGIMMTWSCISVKIISSVKMKHVWRRSL

SEQ ID NO: 160724 - protein, 264 aa, Oryza sativa
  Clone ID: PAT_MRT4530_59978C.1.pep
QKSWKFVCRKVLIDGKVGSLKKNFGTKLGQNELDQDINDLNICADFLPIKGKIESETDLITARSTVSTNTYDLKKGYPWASPANSCSPAGELLLPHTGELLHARRRAPPPPCLRAPDAHAGSGTWRTSAARPTGRSIHAANDGGPRATAALTRGGGRGAAEVALVLLALVALYGAMSLVAYRVIHMRHVPLGADAPLGDFSEGCVLHHLRRLSVDIPGRQRLSILSATAPEQPSTTELLALARNDGGRTGVSRNEENSRPNGMF

SEQ ID NO: 160725 - protein, 293 aa, Oryza sativa
  unsure (1)..(293): unsure at all Xaa locations
  Clone ID: PAT_MRT4530_59979C.1.pep
SVPLLSRHLQAWASPANSCSPAGELLLPHTGELLHARRRAPPPPCLRAPDAHAGSGTWRTSAARPTGRSIHAANDGGPRATAALTRGGGRGAAEVALVLLALVALYGAMSLVAYRVIHMRHVPLGADAPLGDFSEGCVLHHLRRLSVDIPGRQVPPLPPPPPPPAXRLSILSATAPEQPSTTELLARPWAGKVGPGPFVHHHLHHLTRRPVLLPQRRLPCPLLIDRRRKGRSKVKMIYRKWSLLSSTILIWGGAATAGLAGVFLFNAKVYPPCPPSPPHQRLRQQDRAAMGKN

SEQ ID NO: 160726 - protein, 56 aa, Oryza sativa
  Clone ID: PAT_MRT4530_5997C.1.pep
PSIYSSIFLSTTCKRELLQLTQIEQHIMEFIRMYDPSLFLHPPFQNELTYCSDLQY

SEQ ID NO: 160727 - protein, 117 aa, Oryza sativa
  unsure (1)..(117): unsure at all Xaa locations
  Clone ID: PAT_MRT4530_59980C.1.pep
NEGVKPHSLWDAEEACHAFPLQSQLSIRTFGSGPNHSGAITSSILGTIPECVTDVDQQCFTEVWEEEPSPHIPLSXPEFGEPELGAYCSRLLSGTDSLGLSGLLSNSLDAFQKFSVF

SEQ ID NO: 160728 - protein, 171 aa, Oryza sativa
  Clone ID: PAT_MRT4530_59981C.1.pep
KSCPVSCDSLFFISMHDGINQTCTLRRSQSLTRTQGREDPGGMRDHRGITDERDERDGGGDDLAPDGVAVLGEVLVHEAKALPHGHGGAPEPPCELAVLGASEALSGQIHRGETKRRIDGLLADLALHKAGWRRWWWWLTTLSSGRPESPVERRGSPDSTPLVSSLADEVA

SEQ ID NO: 160729 - protein, 445 aa, Oryza sativa
  Clone ID: PAT_MRT4530_59982C.1.pep
MKPQQHRKATETGANIKLGCSKMQSLKPGKYINKPSGNANTKCRVAVTPPQLYTENQMALKGGSTMEAQFCDSKNFSNRQPNHSGKIKLELFPIDKAIQKVLQQENHNPYLELTLAPRKKISSVVQHLNIKWGNSQCARGELMLFPYDAQLDNIAGSGKWTHSDSCTAADVHAAVGSPLRFRLRYGWFEPDFEQQSHGPNLQDVHSVDKIIDNKPLDPVLMEQKQTVHLSEFPNDFAAQSVGDNAVQTVGNQSKVTPLSWIDCISNISFEELLSEAAPSADNKQLLSQNNTSFSQIPINFDSFDAAIASVIGQQQASNQMKVSNPSLWDAEEACHAFPLQSQTSIRTFGSGPNHSGAITSSILGTIPECVTDVDQQCFTEVWEEEPSPHIPLSCKDNVAPYISLPEFGEPELGAYCSRLLSGTDSLGLSGLLSNSLDAFQKFSVF

SEQ ID NO: 160730 - protein, 96 aa, Oryza sativa
  Clone ID: PAT_MRT4530_59983C.1.pep
MVFGMQIQVEPAHLVPRRRGLTLALHKSRARRNEEVRVADVACLSLADFLNHAGPASVRPAPDIHLRLRVLLLMFTSSSRASTGVQARWEGRRTER

SEQ ID NO: 160731 - protein, 153 aa, Oryza sativa
  unsure (1)..(153): unsure at all Xaa locations
  Clone ID: PAT_MRT4530_59984C.1.pep
PPRRPATGPADQPPRRXPLAGQAQPRARQPQPXSPPATIAVPPQLPRSPTPPRLPRPPAPPPLSRLPPCLRRRSACCASTAVAVVRAFATTPRLHAASRASTPALRRGGARSSGGGAGSAATTPRRRAAFPTVRAAPSRRDSRATRDRRLAAA

SEQ ID NO: 160732 - protein, 54 aa, Oryza sativa
  Clone ID: PAT_MRT4530_59985C.1.pep
LYIYFCSIMAYRCMARFQNHLIFLIYEMEFCLFCGMNHIKAVQKIGISLVSYLT

SEQ ID NO: 160733 - protein, 58 aa, Oryza sativa
  Clone ID: PAT_MRT4530_59986C.1.pep
SLLMIWGKTGGCSCVGPQLARTGPCYWAGSYALLPYMAGTWGGHQFMNLRISNKFNLP

SEQ ID NO: 160734 - protein, 327 aa, Oryza sativa
  Clone ID: PAT_MRT4530_59987C.1.pep
MGWSSSRAMLVARAVALAVVFLAAEAQLSPGYYNATCPGVVSIVRRGMAQAVQKESRMGASILRLFFHDCFVNGCDASILLDDTANFTGEKNAGPNANSVRGYEVIDAIKAQLEASCKATVSCADIITLAARDAVNLLGGPNWTVLLGRRDARTTSQSAANTNLPPPGASLASLLSMFSAKGLDARDLTALSGAHTVGWARCSTFRTHIYNDTGVNATFASQLRTKSCPTTGGDGNLAPLELQAPNTFDNAYFTDLLSRRVLLRSDQELFGSGAGNGTTDAFVRAYAANATTFAADFAAAMVRLGNLSPLTGKNGEVRINCRRVNSS

SEQ ID NO: 160735 - protein, 75 aa, Oryza sativa
  Clone ID: PAT_MRT4530_59988C.1.pep
VGPRAALPARTTPTEYSEKIVSVRTAGRVPPAVQLGEDDGELQQTESFFLANLCKFANSQVTLWTSKHHDRFQNH

SEQ ID NO: 160736 - protein, 387 aa, Oryza sativa
  Clone ID: PAT_MRT4530_59989C.1.pep
MGWSSSRAMLVARAVALAVVFLAAEAQLSPGYYNATCPGVVSIVRRGMAQAVQKESRMGASILRLFFHDCFVNGCDASILLDDTANFTGEKNAGPNANSVRGYEVIDAIKAQLEASCKATVSCADIITLAARDAVNLVSICLVFFCTHVMLALMAGRVQLGGPNWTVPLGRRDARTTSQSAANTNLPPPGASLASLLSMFSAKGLDARDLTALSGAHTVGWARCSTFRTHIYNDTGVNATFASQLRTKSCPTTGGDGNLAPLELQAPNTFDNAYFTDLLSRRVLLRSDQELFGSGAGNGTTDAFVRAYAANATTFAADFAAAMVRLGNLSPLTGKNGEANHHLTLLTHHCRLSITGMRKKILWSSTSSRVSEPHQDSGQGEAKLEFE

SEQ ID NO: 160737 - protein, 519 aa, Oryza sativa
  Clone ID: PAT_MRT4530_5998C.1.pep
MATGAGVLERSLSFKNWEPTAAEEAAVAAPPPHDEAASRCINGARPGILLLQQSPKAKQGDAATSPAQAALIEFISPKPRSELDQAATKVQKLFKGHRTRRNLADCAIVVEELWWKAYDSACLNIKSISFFDEAKQETAASRWSRAGKRIAKVGKGLSKNEKAQKLALQHWLEAIDPRHRYGHNLHLYYDIWSASSSTEPFFYWLDVGAGRDMHHQKCPRSKLYSQLIMYLGPNEREAFEVVVEGGKLMYRKSGVLVNTTEDSKWIFVLSTTRSLYVGQKKKGKFQHSSFLAGAATTAAGRLVAKDGVLQAIWPYSGHYLPTEENFREFISFLEENSVDLADVKRCSVDDDEFPSFKKTEEKPEEAEKPTEPTHDEIMDSSQIELPEVDIVKEAVVENSEDTKVAPIMASRPSFKWATANGARIGCVRDYPADLQSMALEHVNLSPRVVPSPTTNRLPIPSPRPSPKIRLSPRLHYMGLPTPTGCKLPIPSPEIRRSPRDQFMGFQTPSVSLTLPKLGK

SEQ ID NO: 160738 - protein, 62 aa, Oryza sativa
  Clone ID: PAT_MRT4530_59990C.1.pep
VRSYLGITHGTANGTDYKTATENRYDRSYDRSSFRNPMRLISLIVERCNELPPQCKYLLKDA

SEQ ID NO: 160739 - protein, 795 aa, Oryza sativa
  Clone ID: PAT_MRT4530_59991C.1.pep
MEEPPLLASTSRATASVASSSSANCPDPMDEGPSVSVPGLPFAEQLRAAGRGASSGSPGGPEAQVQALASISRGIYPLARAEALRGLAAVLETADAPGGVVELCHGCAVGLMRDEDEGVRLASVRLIALCADKLNTREGSDGNGDNQTDIMFLQRVSEGVLLQSLSKKVIKPNTGSGSIIKGEKVPPKLIYPCAAGIFAHGIEDEFHQVRTAACKSLGALSKLSAQYAQKALDLLMGMMNDDTEAVRLQTLQALFHMATYGCLTVQEMHMHMFLGLLVDMNASIRDATRKILGLVNLPKLQMFKSAIDVLITSLEKHQEEQEIYSVLFSVGKNHGNFSANIAKHLAKEISMPSDGELILDKPRIKALLIVSISVAFSDDKHNKRDIPEVIFSHAISLLGKISCAIGEVVDQNSLLSYFCQRTGIPFWETKLPSRESEGCSVETVADIRPRIEKTVKSTKCLDEVLTMQSVKSIIETVERTWTIRKSCNIRDVRNILRTCKEELRILASNSSGSTGAFLSFLCEYLDAVQFIVEILRSFQLDNSYDLGPTSPDILLEKLDTSIRRMKCCYAGFNRGMEIQVCELALLANLFGLSKVGIQSKLVLDKLHWMINRLDCLCADGSCELSYFSREIKKAFDANFVGHDIFTLLELFHPKPTTDYGMLKTISADLQVRDNDPENSSTYVCGLPVAVSLYISLCNISSQDRLWLRMIVGESIQHTFLELSSFGGNDEVKSCSTIIPFYATPMACSFVLRTCLVMECPYGSVSIRQECNRGPSGSIIELSDELDVYFVCTKRR

SEQ ID NO: 160740 - protein, 337 aa, Oryza sativa
  unsure (1)..(337): unsure at all Xaa locations
  Clone ID: PAT_MRT4530_59992C.1.pep
DTETSAANDDKAKGDNREEELEALKLLQDQVDYTVHHALVNQSGMLVNTXLTYMIKSMVDGTIAEHQTQGPVFLPGGVFPNYRTLSTDKQQPIACAVAAVGYTIPREIEIKPFTAAQWALAVPLIERVLHKVQSVCGSRAHATTPGKRRSTPGGFGPRVTNAARLRLVHAYVLWALYTDLTTDSRISPPSTSGCSSPTRHGLGGFASLVVQALYADPPTDSGASPPLLPRRSTPTSPRTQGFCLPRCPGVLCRPATDLGASPPSLSGRSAPTPPQARELRLPRRPGALRRPRHGLGGFASLIVRVPFADLATDSGASPHSSSGWSSPTSPLARGLDC

SEQ ID NO: 160741 - protein, 124 aa, Oryza sativa
  unsure (1)..(124): unsure at all Xaa locations
  Clone ID: PAT_MRT4530_59993C.1.pep
NLTAVGAHNEQAPWDGEKGGKDGSAKAYGCGRAAHTRGGAGKQGGVGIHRKESGDQGELIQRSRXGRGGAAAAGDGSRAAAGWVARRGRGRRGGRPRRRAGEVQGVLRTAAVRVIAGFRADGGA

SEQ ID NO: 160742 - protein, 69 aa, Oryza sativa
  Clone ID: PAT_MRT4530_59994C.1.pep
EEILRTSNGNNRIWAQEVSDWRGHAWRIAAANVLKADVETFRGLGLNLKQIEHWTTLVKDPQLCMKKWT

SEQ ID NO: 160743 - protein, 329 aa, Oryza sativa
  Clone ID: PAT_MRT4530_59995C.1.pep
MRSIRAAQALASRSLLLSSRALHGDAASTAAAAAGGGRLGVQPSPPSQASSSSSSRAMPAGIAGAVSFSLTFATMAAAEAKERPPMDLLPQNVVLYQYQACPFCNKVRGKLGLELVVKRCWFPPARQTIPPEIAQAFLDYHDIPYKVVEVNPLSKKEIKWSEYKKVPILMQRVRPDDKATNEEEEKWRRWVDEHLVHVLSPNIYRTTSEALESFDYISKHGNFSFTERFAVKYAGAAAMYMVSKKLKKKYNITDARASLYDAANTWMEALDGRDFLGGSKPNLADLAVFGVLRPIRYLTAGKDMVEHTQIGDWYQRMEDAIGEPSRIQE

SEQ ID NO: 160744 - protein, 760 aa, Oryza sativa
  Clone ID: PAT_MRT4530_59996C.1.pep
MMAFDVNSEPVDMNNTSSKANLENSEPFVGMEFESEEAAKVFYMAYASRVGFSVRISKSRRSRNDESIIMRRFVCSKEGFHHKKQTDTGKRKRKRAIIREGCHAMIEVSQKYYGRWVVIKLIKEHNHAVAAPSIVRYVAPEEYAQLEPFAGMEFPSYESAQTFYYAYASRMGFDVRIRLSRRSPKDETFVMRRFVCTREGATPCEENENRRKRNRGVPREGCQAMFEIVKKDQDKWVVSKLFLAHTHELANVPNKVHYIQSNSEVVVLAKSSVLRENSIAPTLNSPLADLGRNFEKQATNDQEIREPRRNAFGLDDTQKLLGYFKRLNAENPTFSYAFQVERHDCLTHAFWADAKARTSYYYFGDAVTLETSFVENNDLLPLVMFSGVNHHLQREMFGCALLTDFTEASYIWLFQNWIAAMGSHHPTSLTTVYNEAIGSAIAKIFPQTHHLYFTADILKRSKDILADIYFRHVSFEREFYVCINEPETIEMFELSWKKVLDKYDLHDNSWLQSLYRIRQKWVPVYFKGVFTADLSASQRPESLRNIFEKYFNRRTALPVFISLFEHLMAGWSEREAVEDLATSFTRPVLRTPSNMMKQVSEIYTTTVFNILEEEFIGSLGYYISSLDNDGLIAVYSVTKEDTEATCRVRYDTSGNIAKCSCCKFESCGILCRHILRVFLALDVRTIPDVYILKRWTKEAKNGFVLDECLRYSELHRDALRYAREGSTSGEVFTFAQQTLQVAFAEVVQMKQETFSQCTIR

SEQ ID NO: 160745 - protein, 90 aa, Oryza sativa
  unsure (1)..(90): unsure at all Xaa locations
  Clone ID: PAT_MRT4530_59997C.1.pep
IPLXPAGVXNQKRPAPISLPXXCXTXKLXNGKLFNLNILFKIPPLIXXXITXFFYPIXAQIRQIPFXFXKNXTKIGLKXFFXFWEXKFPY

SEQ ID NO: 160746 - protein, 216 aa, Oryza sativa
  Clone ID: PAT_MRT4530_59998C.1.pep
MAHRVDNEYDYLFKIVLIGDSGVGKSNILSRFTRNEFFLESKSTIGVEFATRTLQIASKTIKAQIWDTAGQERYRAITSAYYRGAVGALLVFDITKRQTFDNVQRWLRELRDHADANIVVMMVGNKSDLNHLRSVPEEDGHAFSEKEGLSFLETSALEAINVEKAFHTVLSEIHQIVSKKALAAQESASTNGRSMQGTTINVAEAPAATKGSCCSS

SEQ ID NO: 160747 - protein, 61 aa, Oryza sativa
  Clone ID: PAT_MRT4530_59999C.1.pep
ENGEEKRRSKSKTEETTDRQEGAEKKAELQGLQEGYSTNLAKSFAPHPIHVLISSMIFVTK

SEQ ID NO: 160748 - protein, 56 aa, Oryza sativa
  Clone ID: PAT_MRT4530_5999C.1.pep
IGTASLAVLYLQFSSLISSLPSDQRFQRPGFRSNTVCQHWCDLSPCYLIQRWLYDC

SEQ ID NO: 160749 - protein, 244 aa, Oryza sativa
  Clone ID: PAT_MRT4530_599C.1.pep
MALSEPDLAAETEAIVSALTHVVAYGGGGPPPSEETAASAVTRTAPWRADGARQGAVPAARKYRGVRRRPWGKWAAEIRDPHRAARVWLGTFATAEDAARAYDAAALRFRGGRARLNFPEDAAAADERRATDAAAAAAAASSAPAALLESQPGDVADCLDYSRILAGAPERPTSSTVPDGFFGGGGNGRFLHSWSIGTSPSPSGSGSGGAGGGGGGGGGGAPVRPLFHGGNGWEQRGDSAYNGF

SEQ ID NO: 160750 - protein, 75 aa, Oryza sativa
  unsure (1)..(75): unsure at all Xaa locations
  Clone ID: PAT_MRT4530_59C.1.pep
AFXGVFXSFFPXXVPSAVWGPXPXCAFVVXPFXXCXXXXXLSXLLVLXFLXPLIFPSXXXXXGGARSRGPALACA

SEQ ID NO: 160751 - protein, 79 aa, Oryza sativa
  unsure (1)..(79): unsure at all Xaa locations
  Clone ID: PAT_MRT4530_5C.1.pep
FFFFFFFFFFFFFFXTIYXXSKYFXATNPNTXSXXSEDQNEQVFKFIXQLXXNLXGHLTHXXTXXKXLXSSSRVXXKLT

SEQ ID NO: 160752 - protein, 76 aa, Oryza sativa
  Clone ID: PAT_MRT4530_60000C.1.pep
AEVNHGAINPRLARQAWPSLGVAPWLESHSSGRVYLRHCFVDTGRADGMAMRALHDGMSFTSLKELSPFLVLDALK

SEQ ID NO: 160753 - protein, 685 aa, Oryza sativa
  Clone ID: PAT_MRT4530_60001C.1.pep
MANRNVPMLLPLAVLFLLGSGGVATAANVIDRCWRGQRNWAADRQRLAVCSVGFAGKMRQNRGAGVVAYTVTDPSDDPVRPRPGTLRYGATVLPAKVWITFARDMRIRLAQPLYVKNFTTIDGRGADVHVAGGAGIVLYHARDVIVHGLHVHDCRAQPPGRVVVPGGAVQPSGSGDGDAIRLVASSKVWIDHNTLSRCEDGLLDVTVGSTDVTVSNNWFHDHDKVMLLGHDDGFTTDRRMRVTVAFNRFGPNVNQRMPRIRHGYAHVVNNLYDGWRDYAIGGSMGPSVKSQGNLFAASGGAGDNKKVTRRMPAVARGGGGGGKDQWHLHSVGDAFENGAFFRQVGNRVRPNYNRHQAFSAASAGDERVSVTEFGWALRQSLWLPDSPGQKRGLLTLVLRVLPAGINMSSFLKFSLSLISIALSSCSRWQQELGPAYLSTKALRGSGRGHIWAFYRGRQRRLGPPPPLPARRRLGPPPPVLVPHTPASAAAASHPRLRCRCEPRGCSSGRIEGAGAASDRRLRCRRLGPPPPLPLRAARLLVTAGMDRSWINSRLFSKPHLDGVNEFMKFVLERFDENAEILCPCRWCLNRIHRQKGHVEDHLYIYGIASTYTRWIYHGEQSDAGINENEDHLDEHTSFSEDVGINEDEEENPPDRIPDMVDELYIAEGQDGGKSMFAAILDEMKQ

SEQ ID NO: 160754 - protein, 407 aa, Oryza sativa
  Clone ID: PAT_MRT4530_60002C.1.pep
MAVPPVESETRSEETDNFPLLADHMENTGHHAHAVDIPWDSSPSTSRRDNHNGFDQLPRILEGSPGTSTPSNSQNGPLARRDDNRGRRQPSPLNSGCWISVELVVNVSQIIAAICVLSVSRNEHPHSPLFEWVIGYTVGCTATLPHLYWRYLHRNLPTTGQEPTVQNIPPNNTPEANSYGVTGTNGVSRNNEATVNPRFQAFADHFKMALDCFFAVWFVVGNVWVFGGHSSAHDAPNLYRLCIAFLTFSCIGYAMPFILCALICCCLPCIISILGFREDLNQNRGASAETINALGTCKFKSKKTRDGDGNEVGVGVVAAGTNKERVISAEDAVCCICLARYVDNDDLRELPCAHFFHKDCVDKWLKINALCPLCKAEIDGVSTSAPAIGFGRRHSDNRVGNDIESQL

SEQ ID NO: 160755 - protein, 59 aa, Oryza sativa
  Clone ID: PAT_MRT4530_60003C.1.pep
HGATLQLRLYQHTSVRTLMVYVGASELYGSSHSNLCIAAIVLVWTEILCQTQTAFYVFS

SEQ ID NO: 160756 - protein, 84 aa, Oryza sativa
  Clone ID: PAT_MRT4530_60004C.1.pep
MARHFSPAQARNGPTTGPFLGPSTGTVVTGATTGWRRDERICRRCPCKGWICHHWHRDGGGSAAEALMARELLGLSDDNNDAHQ

SEQ ID NO: 160757 - protein, 283 aa, Oryza sativa
  Clone ID: PAT_MRT4530_60005C.1.pep
MAALAPSKMLGTRLNFAGSSRYATAAPTTGAQKIVSLFSKKPAPKPKPAAVTSSSPDIGDELAKWYGPDRRIFLPEGLLDRSEVPDYLNGEVPGDYGYDPFGLSKKPEDFSKYQAYELIHARWAMLGAAGFIIPEACNKFGANCGPEAVWFKTGALLLDGNTLNYFGNSIPINLIVAVAAEVVLVGGAEYYRIINGLDLEDKLHPGGPFDPLGLASDPDQAALLKVKEIKNGRLAMFSMLGFFIQAYVTGEGPVENLSKHLSDPFGNNLLTVISGAAERTPSL

SEQ ID NO: 160758 - protein, 363 aa, Oryza sativa
  Clone ID: PAT_MRT4530_60006C.1.pep
MSCCGGAEEDSYGPPANQAAPPPNVNAPGNRGGPRGPGAARPGGPPKPVNIDVPAIPFEELKKITSNFSDRALIGEGSYGRVYNGTLSDGRAAVIKKLDPGASQETDSEFSAQIAMVSKLKNEYFLELLGYCLEDGNRMLAYQFATMGSLHNILHGKKGVQGAEPGPVLNWAQRVKIAYGAARGLEYLHEKVQPSIVHRDVRSSNVLIFDEFSSKIADFNLTNQGTDTAARLHSTRVLGTFGYHAPEYAMTGQINQKSDVYSFGVILLELLTGRKPVDHTMPKGQQSLVTWATPRLSEDKVKQCVDPKLNNDYPPKAVAKLAAVAALCVQYEADFRPNMTIVVKAIQPLLNTKPAGPAEPPPA

SEQ ID NO: 160759 - protein, 461 aa, Oryza sativa
  Clone ID: PAT_MRT4530_60007C.1.pep
MALLRAAARARVRRLVGSGPPALATFAGADRATGGRGGAAGERALQAMRLCCATPSVASVGRDVKAPVSPPAGASVTLVVEQATRFATATTALPLPLAKIPAAGRGGGPRSAGILVATVAVGSKGAHFATASAPERALLTLERAQQATSPCPPLAAPRILCRGLSLSTVAGDKKARRFSSTSSAGDDQSKSLEKKEPLSRRARADDPAPAVEEPLEPLKEMEHSVLRALKAIQKVILRSFSEQEAFMEDLMKRASTQILRAGGFYNANTTVGFIIAVLLCFAIILGVLLFMSVLFAEWRAKQFLHSEECDRLTDGMMDKAEMKTQEFLRNNNFHQIVEGYVSEGLELATGEEVRAIRKRFLKEALQDTGEYIVHKTTFGSQRDKIASWFRRDKQQEAPSPSATALTKDSESTVGVVEKVRMRDRVAAWFRRNKETKPAEPAPSQQQKIAGTEGSGTPPPPQ

SEQ ID NO: 160760 - protein, 191 aa, Oryza sativa
  unsure (1)..(191): unsure at all Xaa locations
  Clone ID: PAT_MRT4530_60008C.1.pep
DHQLLPLPPPPPPLPAPDSGAPTPDPWAPPLPLSRPMPSPPPPPXPLPCSEAPVGPLRSLPKWHHRPSPESXPRRIWRGGSCEPRCRRPGEPPAFADTSLEQQRGKGSGRPEARRRRPRRRPHRHRPLPPPVALVPPPATPAAARHPHPRRLQIQAAPPPPDPVXPPPLPPXIQAGGGPPPPTMSPTTPAA

SEQ ID NO: 160761 - protein, 191 aa, Oryza sativa
  Clone ID: PAT_MRT4530_60009C.1.pep
AVQSAWDAFGRIDVLINNAGLRGGVHSPLDWPEDEWETLIKTNLTGSWLVAKHVCRRMRDAKLKGSVINISSVSGLNRGHLPGSTGYAASKSAMHYATKLMALELGAYGIRVNSIAPGIFKSEITAPLLQKKWLSTVVSKIVPLKTHGTTDPALTSLVRFLIHETSSYVTGNIFIVDSGATLPGVPIFSSL

SEQ ID NO: 160762 - protein, 108 aa, Oryza sativa
  unsure (1)..(108): unsure at all Xaa locations
  Clone ID: PAT_MRT4530_6000C.1.pep
PRTCAVWMRRRAAVRERRLATESAEEMPNAAMSLRRPWDGSDCRLVCSVLIHRCQRSFRVQDAQMPWRLEAPRXACRTSTAVVALLWGSITRAGRQSVMPPHRLTSRY

SEQ ID NO: 160763 - protein, 70 aa, Oryza sativa
  Clone ID: PAT_MRT4530_60010C.1.pep
MVALSSKAYSHLANQKKRSFFFQLIFPPRLLNLIQIKRFFRTNLNCSQKILFFPKKACIPQGSFLFIKNT

SEQ ID NO: 160764 - protein, 117 aa, Oryza sativa
  Clone ID: PAT_MRT4530_60011C.1.pep
SGGGGGERSRWRRGSEEVRCRSRSWSPRPTPPPPLAPPSAALSSSPRRARGTTPPPPRMPPWQRRAHPRPPPPVPRSTPTPCCSNRRHLPPLAPPSSTALLSSPRRAKGTTPPPPCP

SEQ ID NO: 160765 - protein, 76 aa, Oryza sativa
  Clone ID: PAT_MRT4530_60012C.1.pep
MVLDMKSKSLPHFMYFISHHPPALLHIRAPDSRADAVGLGNIVEGMSGHQDLVQLVYLEFEGDDAVGDEVLIEDLS

SEQ ID NO: 160766 - protein, 107 aa, Oryza sativa
  unsure (1)..(107): unsure at all Xaa locations
  Clone ID: PAT_MRT4530_60013C.1.pep
YCHVRKAVFRNPVRSCQNYMQQRCVDACGRMDYRKLTARELLQPSCRELGALPMQMQCYPLIVLVRRVCTXDGDRLFGMIYQHTVPMCDDQTISRMASALTDYGRCN

SEQ ID NO: 160767 - protein, 855 aa, Oryza sativa
  Clone ID: PAT_MRT4530_60014C.1.pep
SHIPPPPDFDHPPAISPLPPLSPHPPPYSPTDSPNPRPSCLLSPPPCLHPLSAPPPSSLPPPSAPPPPPSPSPPPALHPPSPTPSHSRYSPYPQLLPPPPHPPHAGLPALLPPRAHAGPVPPASSQSFHRPPPPAPHLRRPSSATAGAARCCLLLRSPPLPVHAAVTRSHLVAVFAPTTTGASRRGLILAGDCEEPVRRRQILKKKNLNRRLRPLPRRPLPCPHDAARPSARRPGAPPRWPSGPPHPAAASAANPGISDDSAAEPGRRMLGAAEEAVNRWVSREAAADGGYGVSDFPALAAAVKDLISLGSHGGAYSQRAKLALESAMGHLEDDFCQVLISGTYFHPPDNLQASLYDSIALPVRSSSFSSITNLEAASLSSFTTSSSDDRWTYCTGHSRDSFSLEKVHLYLIDPEASTLLKEIAELMMLAGHESNLSHAYGEIRNSTLMQCLCLFGVQIDLNSYNPRASPSESGFNMLLDLDGQKMEIWIQALRVIIGTVLPEERQACTQIFGSDSKVEEDCFARATMRFIQQLFAFGSLIANVKDEQYEKVPLLVQMLEEFLKLKPSIEALRYGDAKDAISQEADMLLEKLREEAVRLLLKFSEAQINHESYDNETIVLNGSVLSFPQYTMGVIKLLAGYSDTLNIILPVEVGGVGTVTTSPWKSYVLTLLTRLQLNIEEKSKSYKDECLRNVFLMNNAMYVLEKARSPDLKILLGDNWVTKQLVQVEQHATAYLRASWTEPLFQLKDKGINYTERSLILTKKFKNFNSIFGEISRVQTTWKVPNPQLRQHLRLVILQQVIPAYRAFVGRFVSYKYIDQRKDECPRGRVDAHHKFAVTIGEGVSVAKGSVFGRL

SEQ ID NO: 160768 - protein, 141 aa, Oryza sativa
  Clone ID: PAT_MRT4530_60015C.1.pep
GLSTTEAAEGRQGVRPRSRRGHRRRGGPPPPLRSLRSGGRSLHPEGRRRGRQPHRPPGPPLRHRQVRPPRVRRPRPQRSGAGHRRPDGSHRAAAAAEMGSPAAGGHRRAAAAATASPPGAKPDQSTGGAWCSPGTEHAQER

SEQ ID NO: 160769 - protein, 77 aa, Oryza sativa
  Clone ID: PAT_MRT4530_60016C.1.pep
IVTDRDMTKPNIMLFVNRIIMKRIHFHEAHALTYRGTDEARMGNIKNDHAKGDATASAEAITTSTQIFIATAELMDE

SEQ ID NO: 160770 - protein, 118 aa, Oryza sativa
  unsure (1)..(118): unsure at all Xaa locations
  Clone ID: PAT_MRT4530_60017C.1.pep
FPAAEAXXPEGCERVDHVPSPDMVPSFFDAAMQFGDAVAXXXXRLTGPRRLSCLIAGISHTWAHVLARXLGAPCFIFHGFCAFSLLCCXYLHAHRPHEAVSSPDELFDVPVLPXFEFR

SEQ ID NO: 160771 - protein, 254 aa, Oryza sativa
  Clone ID: PAT_MRT4530_60018C.1.pep
MAPAASASASAVVTPSSFRCVPTASCGLGARGKAPAPRRLLHDHAQGKKRAAATWSLKAGLWDSLRSGFLKSNNSTETVEPPSAPIEEEEPLPEELVLLERTLADGSTEQIIFSSAGDVNVYDLQALCDKVGWPRRPLTKIAASLRNSYLVATLHSVTMPSKAEGEERKQLIGMARATSDHAFNATIWDVLVDPSYQGQGLGKALMEKVIRTLLQRDISNITLFADNKVVDFYKNLGFEADPQGIKGMFWYPRF

SEQ ID NO: 160772 - protein, 251 aa, Oryza sativa
  Clone ID: PAT_MRT4530_60019C.1.pep
MKPLKDADAQEKAAPPPTEWYDPLSSPGRPVRVYADGIYDLFHFGHARALEQAKKSWVDEVIPDAPWVINQEFLDKHRIDYVAHDALPYADTSGAANDVYEFVRISESSHVKAVGKFKETKRTEGVSTSDIIMRILKDYNQYIMRNLTRGYSRKDLGVSYVKEKQLRVNMGISKLREKVKEHQEKFHSAAKIAGSNPVEWMENADRWIVGFLEKFEEGCHMMETAIKDRIQEGLKRQSRSDPNLSGEDSDS

SEQ ID NO: 160773 - protein, 94 aa, Oryza sativa
  Clone ID: PAT_MRT4530_6001C.1.pep
RPLYRAIRTDSAFSLGWFFLCYMLHIAFCVFAAIAPPVIFRGKSLTGILAAIDTFSDHAIVGIFYFVGFALFCLKTLVSIWVLQKVYMYFRGHK

SEQ ID NO: 160774 - protein, 193 aa, Oryza sativa
  unsure (1)..(193): unsure at all Xaa locations
  Clone ID: PAT_MRT4530_60020C.1.pep
MKPLKDADAQEKAAPPPTEWYDPLSSPGRPVRVYADGIYDLFHFGHARALEQAKKSFPNTYLLVGCCSDEITNLYKGKTVMTEDERYESLRHCKWVDEVIPDAPWVINQEFLDKHRIDYVAHDALPYADTSGAANDVYEFVKAAGKFKETKRTEGVSTSDIIMRILKDYNQYIMRNLTRGYSPQDLGVSYXKE

SEQ ID NO: 160775 - protein, 73 aa, Oryza sativa
  unsure (1)..(73): unsure at all Xaa locations
  Clone ID: PAT_MRT4530_60021C.1.pep
MQNTPRLEKLPLKLHPFXYQQQRIIGELTERSFTCGHLKIVEVICSENDPLINHLVDFFVSSGMTTAQIHIKH

SEQ ID NO: 160776 - protein, 375 aa, Oryza sativa
  Clone ID: PAT_MRT4530_60022C.1.pep
MAGLAGDDSSFFGDDGDGDEFCYGPFDVEDLCYGASDVDDDWEEFCDGPFGGGGVEEFCVSGFSVRDLSDASSSGARETGDPHDDDPLPQTLARSLDSDGDLSATLHQIVSAMRLSEDEEEEEEEELLVLGHGHGVGIGGGGDVDGFMVSAFDLDTAMAIGGILEDIHEVMGADEVREEVVVEEEEAGNGGGIMPNGFEFGPPPRAISGTAAGFRMMVDADDTDSDDFQFVEVLGGGQVREAGAGMSMRPSRASQLVVESLPEATLSEEEASRGCAVCKDSFASGQIVALLPCKHYFHGDCIWPWLTIRTTCPVCRHQVRTEDDDYEQRMARRVIVLAAVEHQGAPAQGCGDSATMGAEGASECVVENGPEKTSF

SEQ ID NO: 160777 - protein, 49 aa, Oryza sativa
  Clone ID: PAT_MRT4530_60023C.1.pep
FCWVNNGWCMGRKDILFIEIYRQCLLWVLMWWVVPPKFYKATRKKKKEG

SEQ ID NO: 160778 - protein, 71 aa, Oryza sativa
  Clone ID: PAT_MRT4530_60024C.1.pep
GYRLRSIPLSRNSNSLPNATPHHHCLDRKRLDPIPSDSGNFNSIYSPSKGIKPKPHQFKQAFPSVNLQPGD

SEQ ID NO: 160779 - protein, 137 aa, Oryza sativa
  unsure (1)..(137): unsure at all Xaa locations
  Clone ID: PAT_MRT4530_60025C.1.pep
CCQRPACHRPPLCPATVVASEVGGEGDAPPPSRGSSSVSRRGRCGPXHGNQARCCSRVXVASPGTHERQPSGWERMGRRIPXCERRRRHVAAVSLAYLDLFCFFXIANMWDTYGICIGTYPICIRIRCRIRYGYVAL

SEQ ID NO: 160780 - protein, 70 aa, Oryza sativa
  unsure (1)..(70): unsure at all Xaa locations
  Clone ID: PAT_MRT4530_60026C.1.pep
LLNXAKKTLLLAYCXXPIPXNGXFXXXCXXXVXPXXLNPXXXLIWXNXNLRSFSVXVXLRWEKGIXNFGT

SEQ ID NO: 160781 - protein, 102 aa, Oryza sativa
  unsure (1)..(102): unsure at all Xaa locations
  Clone ID: PAT_MRT4530_60027C.1.pep
VTVTMATMDTTIAHIMDEPEDIKIKSSKCXNPIRPTATLLTSNGRRICIRPPFSVREYLMEISRSPLSNGSSLITKFHVVWPQSHKQGVVSLVLGLWACNFV

SEQ ID NO: 160782 - protein, 51 aa, Oryza sativa
  Clone ID: PAT_MRT4530_60028C.1.pep
TIVASAQFNSGTCCHSSRTSKLACVNNLLLRTQDLHRQPAPPRARTPALAA

SEQ ID NO: 160783 - protein, 119 aa, Oryza sativa
  unsure (1)..(119): unsure at all Xaa locations
  Clone ID: PAT_MRT4530_60029C.1.pep
SLFVPPKKGVRGRCRCPGRTRLLLTLEDHRKKPGTRACRERRTRGGRASLFKXVPDDWSSATLSCTTLVLHVKNGQLIRFQTKTKHVSVTINFDNQSIPWSQSYQYSVASCITAKTTKS

SEQ ID NO: 160784 - protein, 232 aa, Oryza sativa
  Clone ID: PAT_MRT4530_6002C.1.pep
MLQASSELQQQPSAAAAAAGMWVPGMSPQAVDAGLSARAQEIARRPEERLGMLHDLPESEYELSLTDLVEKAGGVGVAPPSPSPSEGKAEPGPARTASGRQSEQQQQAAAAAGRPEMSVSARRWDSAGGSSFRSSSDGVLLNFYMPRSFTRSFTAPRTTGPGRPPSVSGGRTASICSYRNKRERDGETVRCWSLLWDRRWRKSSRGDHGNESAIRAAILKAAKHNASSPKKI

SEQ ID NO: 160785 - protein, 88 aa, Oryza sativa
  Clone ID: PAT_MRT4530_60030C.1.pep
MAAAAGGGTREEMVYMAKLAEQAERYEEMVEFMEKVVTAGALCGPRQLTAPDMELLSSAYGHATVTTLSSVCVLRVLARHGCRRLPVL

SEQ ID NO: 160786 - protein, 314 aa, Oryza sativa
  Clone ID: PAT_MRT4530_60031C.1.pep
MQPRAHSAATSPTHHTQGEIITICTASSRPPPPAPRRARADARVRCLDPTSADQQAEARACALEEILAALVVFFPLDEESRRCIASPPSLDALVSILSHGEQVTRVSAVVVLREIASSCDNQCLEAMSKANAMYDALVNLVAKPVSPQATKAALVTAYYLVKNDIEHAASRLVDLGTVELLVELLADADKGTTEKALAVLDTVLVAAKARDRAYAHALAVPVLAKKTMHVSDMATEFAVSALWRLCKNSPADGGCKAEALQVGAFQKLLLLLQLGCDGVTKERASELLRLLNASRDSTECIETADFKGLKRPFI

SEQ ID NO: 160787 - protein, 519 aa, Oryza sativa
  Clone ID: PAT_MRT4530_60032C.1.pep
MASSSSFLGLGAIFQSGCPLLPPRPAVRRAPTRRRAVATKISCIGWDPEGVLGPPQGGHIVRLEFRRRLERDSDAREAFERQVREEHERRRQEREARVIPDTDAGLVEFFLDTEAREIEVEIGRLRPRLNQPFFDYIQREIAQIKFSITRTAEMEDRLIELEAMQKVLLEGVEAYDKLQNDLVSAKERLTKILQSSDKKSTLLEMVERNELNMSILTLLDENIASAKTNNQEEAVAFMENVRSSILKYITNLAQRLEEPKKQQSRDHLRLRGEEAAMWRRQVGALLLRHRSTPSSTLRHHLPLPVPDQSPPLASNLLLRLFTSQSGEGGDGATKPFIAFVLGGPGSGKGTQCVRIASDFGFAHLSAGDLLRSEISTGSEKGELILNIIKEGKIVPSEITVELIRKAMESSDAKRVLIDGFPRCEENRIAFERITGTEPDLVIFFDCPEDEMVKRLLGRNQGRVDDNIETIKKRLKVFESLNIPVVDYYTSRGKVHKINATGTEEEIFGAVHKLFSSLRF

SEQ ID NO: 160788 - protein, 165 aa, Oryza sativa
  Clone ID: PAT_MRT4530_60033C.1.pep
MSSTGRPYGRRGGAAPSYVPRPRAPNPSPSAPAPARPPQQLRKPVFTTVERLRPQSHGHTLTARVLSARIILDNPPPRARLAECLVGDNTGTVLFTARNQQVDLVKPGTTVIFRNAKIDMFKGTMRLAVDKWGRIEVTDPASFQVKEDNNVSLVEYELVDVVDED

SEQ ID NO: 160789 - protein, 90 aa, Oryza sativa
  unsure (1)..(90): unsure at all Xaa locations
  Clone ID: PAT_MRT4530_60034C.1.pep
LLCSLGFPGIXALSCAFPLLGWKPTRHRSPSLFREFIYLQFLSGCVVESSSWGCELVVIPSVRETLTRRRLCVLQFLGFIFLFXKXSADS

SEQ ID NO: 160790 - protein, 107 aa, Oryza sativa
  Clone ID: PAT_MRT4530_60035C.1.pep
RTDPGNGGRDQAMAALNPLYLRHISAVVAQNHTGGEYGRLGPSRRGGRRYEEKKAWLPPSLSAAGFAAGGLQRQRGGGREGEKARAARVFSPRATRRESDAGGFFAF

SEQ ID NO: 160791 - protein, 187 aa, Oryza sativa
  Clone ID: PAT_MRT4530_60036C.1.pep
MAGLRKGIRDGHAQHRLLHHQRDIATSSRITYEGAQNIHHEEKSNMLEISSPSLTKEEEKTDAPTLSEEGIKGKLNGAGITQGIGLICTDKINNPRRALSVERNSRFIIVTLGGCHLLDGLVELPGDLSKKVVEEARSYSGDYGYHIPIELRYPTGYRGDFAGVPFAFDDSRHSDDGLRQSLKCLGG

SEQ ID NO: 160792 - protein, 146 aa, Oryza sativa
  unsure (1)..(146): unsure at all Xaa locations
  Clone ID: PAT_MRT4530_60037C.1.pep
MEKNLPRSGGPRFLAASNANEVGTLVGHENERIISVHSREKIRILFGADNSRIVCIRIXNRIFSPGYEYAHGIXFSTDTDNNTHMQKKCLSIRVRSYSILICIRYNSYLRPYMSYLYSFSYLTKNMESVSSSRTNFGETLARSSAH

SEQ ID NO: 160793 - protein, 157 aa, Oryza sativa
  Clone ID: PAT_MRT4530_60038C.1.pep
DTEHASNGTSSNDNGHAMSVENNASEVADTDNKEDCNLDGQNTSGRIEGPSEEIPPNANGMDIDSDREETYNVEGIAENSEDCRVRGGGDIDTECNLSLPEHELPLHQESKSDSELKEATKTEDEATKKGHLVRVQSRSCDLRESHRASAGSSMDFH

SEQ ID NO: 160794 - protein, 33 aa, Oryza sativa
  Clone ID: PAT_MRT4530_60039C.1.pep
MRGGLTGVVREAIRGALHAMFALWREADSRFNP

SEQ ID NO: 160795 - protein, 1466 aa, Oryza sativa
  unsure (1)..(1466): unsure at all Xaa locations
  Clone ID: PAT_MRT4530_6003C.1.pep
MSYYVDPRTSVPQYPLYPVYVYLPSIVARQVGGLGAQGSTIMTSCFVDNSINTNFNQVVPTSTTLVWTQVGEIVFPVYTTVPISAGPPMAGNENAVATTQDDSMSKDPPAEAEIGTSTISELEKEPSAAKPCPSDKNHEPTRMTSEVTRSWCPIHKTRKHALQAYWVFLNVHAEIRAGKKRGIQRTSPTRDVYCPIHKSKNHDLSSCKVFLSAMKTPPPKVQQSRVALRDEDKEQGATPISDRFVRVVDIDPHEPSVLHLLKDYGSLTTSTPREVLAIDDVGTSAHANAEAENQVTTPAQHIGAVNAILRETLYDPVLNDDLARWTERLRESVTNLSNAFEEAAAVAHPEQPPTGDANDVRWPERFRPGAIEKYDGSTDPEEFLQVYSTVLYAARADNNALANYLPTALKGSARSWLMHXPPYSISSWADLWQHFVANFQGTYKRHXIEDDLHALTXEPGKTIPEITDTSVIRAFKSGVRDRYTTQELATRHVTTTRRLFEIVDRCAHADDALRRKNDKPKTGGEKKPAKGAPESSKKKNRKSGKRKAQSEVLATEYADPPKRPDPQGSDAKKTWCPIHKSDIHSLEDCLVFKKSLAKHMALEKGKRVRVVEKDAEPATQESDSTYPDSDLHVSHIFGGSTAYSSKREYKKITFDVAEFDTSYNAIIGRTALAKFMAASHYAYQVLKMPGPKGTITIQGNAKLAVQCDKRSVDMVEHTPNPPATAEPPKKVSKTNKMPKPDGAIKIVPLSSANPNKTVKPSDMPGVPREVIEHKPMVRPDAKPVKQKLWRFAPDRKQAIREELDKLLKASFIREILHPEWLANPVMACPKDHFPLPRIDQLVDSTAGCELLSFLDAYSGYHQISMAKEDEEKTAFITPFGETFDNLRRYRLMLNPEKCTFGVPSGKLLGFLVSSRGIEANPKKIKAIENMKSPTRLKEVQKLTGCMAALSRSDNQIDNKTWTMAFNGTLNNQGVGAGFILTSPLGDQFKHTIHLNFRATNNIAEYEGLLAGIKVAAALGVRRLIVKGDSELVANQVHKDYKCSSPELSKYLAEVRKLEKRFDGIEVRHVYRKDNIEPDDLAGRASRQEPLEPGTFLDMLTRPSVKEASDEDSLVAPSISSRAIEAERAVPDIETTDDWRTPLIKFIGSEELPEDDAEAEKISRKARVYCMIGNDLHKKAPNGVLLKCVSSDDGRHLLLDIHEGICGSHAAGRTLVGKAFLQGFFWPTALIDACDMVQRFGLPHRIITDNGSQFISADFQDYCIRLGVKICFASVSHPQSNGQVERANGIVLQGIKTRVYDRLMSHDKKWVEELPSVLWAVRTTPTTSNKETPFFLVYGLEAMLPTELRHQSTRVQKYSDEDQEERRNDDVNLLEEHRERVAVRAASYQQSLRRYHEKRIRARTLSIGDYVLRRVQSQAGRNKLSPKWEGPYTITQVVRPGAFKIADGDGRELTNSLNIDQLRNFYV

SEQ ID NO: 160796 - protein, 84 aa, Oryza sativa
  Clone ID: PAT_MRT4530_60040C.1.pep
LLLRINYFSSPPEEISSGDGEPDEPLPRWRRMTPPQRDEKDGPFSCAVLLRDGLRRRTRRARHAPIHACPRHRAPHRRRRRRNR

SEQ ID NO: 160797 - protein, 111 aa, Oryza sativa
  unsure (1)..(111): unsure at all Xaa locations
  Clone ID: PAT_MRT4530_60041C.1.pep
MGSVDFGLVEIHPGEIRFEFEVKKKSSCYVCLVSKSEEYVAFKVKTTSPKRYCVRPNVGVILPRATCVXQTTVVPFGTADEDIAPAFFSKEVGRYIEENKLRVVLVRATPL

SEQ ID NO: 160798 - protein, 84 aa, Oryza sativa
  unsure (1)..(84): unsure at all Xaa locations
  Clone ID: PAT_MRT4530_60042C.1.pep
ERAXSXDARLGGSHDRLSGRPRAXGXXXHRRRRRRGGAAXAGHHASRGRRESGVLDPRSDXAILRGGAWEEEAGRXRRRDARTF

SEQ ID NO: 160799 - protein, 104 aa, Oryza sativa
  unsure (1)..(104): unsure at all Xaa locations
  Clone ID: PAT_MRT4530_60043C.1.pep
ILWIKFCIPSLEHEMKEFWGQNSPNVTIHIIQGRNLSPRAPALISKSGLTILHCQSSQHALMCCSLPMNDQRLSMCSLVPLLMALGFSWHIXTIRLAFFWARLV

SEQ ID NO: 160800 - protein, 387 aa, Oryza sativa
  Clone ID: PAT_MRT4530_60044C.1.pep
MGSVDFGLVEIHPGEIRFEFEVKKKSSCSVCLVNKSEEYVAFKVKTTSPKRYCVRPNVGVILPRATCVFTVIMQAQLIAPPDLQIRDKFLVQTTTTVVPFGTADEDIAPAFFSKEVGRYIEENKLRVVLVSATQLEEQQLIAGVPSAKTGVEVRVAKETLNIESEASNVMNEVHHSLKTNFPPLRENPATLNEMPFPVKQTTILAPSKEVPAISAEKNPAILNEIPFPVRQTTILPPLKEVPVISAESAHHWKETLNVSLESHFSSTETNVVSSECPETLENTSPSKEFAILRDTLVNAENLHYVTDDVQNLMTKLSNLEAKLEEAESVIVKLREDTRTTIRERDKLKHEMVVLTRKGASRSQAGFPLLFVVYMAILGASLGYLLHL

SEQ ID NO: 160801 - protein, 713 aa, Oryza sativa
  unsure (1)..(713): unsure at all Xaa locations
  Clone ID: PAT_MRT4530_60045C.1.pep
MDRSGEAARATAIVRASRPGAAAGREQQTVVVGGGGGGGEAVKRRRRGDTQAAQCCSTGLSQLGSVGFHGDGDISFAEVVRGDSMERRPPNPRPDQWQSNKRRAVDEEQRDWGDRAPWEREEEELRGRLLGQNQRRPEGRWRPDERREGGRNWQGEKGRVWQGEQREGLDXKIDVPAGEGSKTACRGILSVIRGKGSVPKVMAELSSLFKGLKWDWKVRQINDNDFLVDFPNPEARSKLTLVKSFDFDKFPIKASVTESKMTVDELWEVEKDSLKGTDLLPPDGNDDEEEDDRDEDKKDQEKKEEGDKGDLMDIDLQKKYAIRGYEDEEDGKCAIPTDSDIEKMREEENEGEDEEHEQGACEDVMGQIIEEEAFLKVERKNKKKGVIPAKRQGLRVRDKNVPVQLKAEIRKSKVNLNPAQAALFEAEQNLISMAAVDDSTGREEIEGAVTDETTHQEGVASDGLTVVDEEPIGEGLVKLKPGKGDAISKCVYPLLMGGDFNMYRYSSDKSNGVVDEIDEVIKGMKSNTAPGPDGFPVGFYKNMWPEFRVLVKEMLDELHQGSLDTDRLKYGVVTLLPKYLKTYVIGRVTYTMHDCYEPFVFRSLTGQQWRQRSGGVAAAWCGGCVAQRWRCVAAAWRGGVPRRGRRRGSGVGVVGSASATSLAVAAASRSGSASAGGGVGAGRVDGCGGGGGGDDDARETTARYDGGVGAGMP

SEQ ID NO: 160802 - protein, 256 aa, Oryza sativa
  Clone ID: PAT_MRT4530_60046C.1.pep
MAAAVTTTTTATTTHLCRGLSSSSAAAAKPRRATTLRCGAAARVEGLGRREALLGVLLSTATAASAPVAAVAATAELQEGFRTYEDEANKFSIAIPQDWLIGAGEVSGFKSVTAFYPDQVADSNVSVAITGIGPDFTSLKSFGDVDAFAETLVNGLDRSWKRPPGVAAKLINSRAANGFYYIEYTLQNPGEQRRHIVSAIGMAFNGWYNRLYTVTGQYIDEDGDVDKYRAQIEKFNQLNVHQLFRDFDDAALPRPT

SEQ ID NO: 160803 - protein, 217 aa, Oryza sativa
  Clone ID: PAT_MRT4530_60047C.1.pep
MDDSHDLASPTSPDTASSSSSSTSTSSSSATVAPKKRPRNDGRHPTYRGVRMRSWGKWVSEIREPRKKSRIWLGTFATAEMAARAHDVAALAIKGRTAHLNFPDLAHLLPRPATAAPKDVQAAALLAAAAADFPSVSVDANAKSPDTCSVASAASPQPPPPDAEADPDSTLFDLPDLLLDLRYETSSSLSCGASWAVDDDVAGGVVFRLEEPMLWDY

SEQ ID NO: 160804 - protein, 170 aa, Oryza sativa
  Clone ID: PAT_MRT4530_60048C.1.pep
TTAELQEGFRTYEDEANKFSIAIPQDWLIGAGEVSGFKSVTAFYPDQVADSNVSVAITGIGPDFTSLKSFGDVDAFAETLVNGLDRSWKRPPGVAAKLINSRAANGFYYIEYTLQNPGEQRRHIVSAIGMAFNGWYNRLYTVTGQYIDEDGDVDKYRAQIEKCVQSFRFT

SEQ ID NO: 160805 - protein, 90 aa, Oryza sativa
  Clone ID: PAT_MRT4530_60049C.1.pep
PPPPPPQPPISAVASPPSPPPPPSRGERRRSDAAPLLGWKGWGGGRRCSACSSPRRRRRRPSPSWPLPSRCMRCSTRSRMWPTSSASAIS

SEQ ID NO: 160806 - protein, 278 aa, Oryza sativa
  unsure (1)..(278): unsure at all Xaa locations
  Clone ID: PAT_MRT4530_6004C.1.pep
IYCVSRGEGRADRVHGSGAHAAASRSTVDRVHPAHTGRRRGSHASAXPRARAADGRAPHGSRGTRPKAATPAQPTHCGAAAERGEGRGKRNGXSTAHPGSTATTGTATGAEEGGGAARVDGDGGVPAVGDRNGEVDKVGEDAAKPKEATPKREKVRGDDGGGPELGGDGGERERRRELDSGGERERRVAKTAXGGTGSVYIGLGGGESGRMRGKRARKIRPPLMRRRGLGGNISNESEGERERGKNGGKEGGNHGEYFPPLDCTRDGRERRDSRRRRR

SEQ ID NO: 160807 - protein, 107 aa, Oryza sativa
  Clone ID: PAT_MRT4530_60050C.1.pep
MTQHGCTNGHGATPCSNERANDSTTAAAKPAGQTRSTVKPRQWRRLGKDARWRHTATQRHDGNGDSGSAKQIHQRTRRAEYQRRYGDGGDGNLQRRHKAAATARRRG

SEQ ID NO: 160808 - protein, 128 aa, Oryza sativa
  Clone ID: PAT_MRT4530_60051C.1.pep
GPQPLFLGFWESPLTKWGVFKAPLVGFRKNPTQGFFYGGVFPPKKKKGPPVKRRGGLFSPPLKKKGGFLKKKFFVKPQKVGCSPLPKKKVFFWPKKKKKKKNKKKKKKKKKKKKKKKKKKKKKKEKNN

SEQ ID NO: 160809 - protein, 326 aa, Oryza sativa
  Clone ID: PAT_MRT4530_60052C.1.pep
MLMPETLALAAASSTNLSPRKRYSRCRSAISAHQHTIGRWFHHRDGSSSSSSSRVDKARAERARVHAAVTVASVAAAVAAVASGAANDPDDLDDAKMDAALASATQLLASHCIEIAELAGADHDQVASAVEAAVDVRSPGDLMTLTASAATALRGATALRLRAQREARSKVAAVAPYEKTGSCRGDIWCKEGTLLKRSRKGALHRKRVAVYINKKSQVIVKLKSKHIGGAFSKKKKSVVYGVDDDVQAWPAPHACGGGAVPPAPETASSEKCQFGLRTAQGVVEFQCESRAQKQDWVESVKNLLRQAAGGTAQLEHSFESLRLSAS

SEQ ID NO: 160810 - protein, 1132 aa, Oryza sativa
  Clone ID: PAT_MRT4530_60053C.1.pep
MVNLPGRLDELLRRHGNILPKGADQEIPLIRQDIEEITSILHGHHSDATELEDYHDMVVRCWTKEVRELSYDIEDCIDQYEDAVEQYEHAATVGRYPSVSTIRRRKFSRRPVGSKTPLVPEKLKQRLWMANKIREFSLRVQEALQRHAILYSSDLGGIANTSAGHPTLCRKRADGVRHVGLDAAINKVQEWLADGEKKLKVVSIVGVGGVGKTTLANELYRKLGRQFECQAFVRSSQKVDMRRLLISMLSQVRLQQPPDNWKLHSLISSIRTHLQDKRYLIIIDDLWDICTWDIIKCTLPDGNSCSRILITTEIEDLALQSCGYESNYIFKMKPLSEDDSRNLFFSTVFGSHSNCPPELCEVSYDIVRKCGGLPLAVVTIASLLATQLEKHEQWDYINETLGYSLMANPNLEGMKQLLNLCYNSLPQHLKACMLYLRMYQENSIIWKDDLVNQWIAEGFICPSEGHEKEEISRAYFSELVDRKFIQPVHINDNGEVLSCVVHHMVLNLITYMSTEENFAIAIDHTQATTRLADKVRRLSIHFGNVEDATPPTNMRLSQVRTLAFCGVLNCMPSITGFQLLKVLILHFCGDEDSISFDLTEISELVRLRYLKVTSNITLKMPTHMQGLQYLEALKIDGKIDAVPSDIVHLPGLLHLSLPARTNPPNGIAHMSSLRTLGYIDLSCNTSENLWSLGELTNLQDLQLTYSAIHSDNLKNNMQYLGSILGKLPNLKSITLSPVGSSYANTLHIHSATSTSVSVYGWSSVSSPPALLQRLELLPCVCIFSSLPNWIGQLGNLCILMIGIREVTSYDVDVLGGLPALTVLSLYVHTKPAESIVFDNARFSVLKYLKFRCSLAWMKFEAGAMPNLRKLKLGFDVHRADQHDAIPVGIENLSGLEEITAKIKVDFTAGDLCRRFAESALTDAIRMHPGRPIVNIRCVDWTFDDKDNNNVRTRDEEHRTTEKQHLIVKEGLHEKSVALQKDHGAGACKSVEEERRGVLTAGSGWRRQPQFKRFDKYAESRADDGGGGGRIISGAQTVPVKNFTGGWPAPPWEEGSGTTMPPVYINEGEYINVIYYSPPRSSTTTSSQDESTEASERERSGSGTGSSEGGFYGPTFQAVGRYLDRKFGLDRED

SEQ ID NO: 160811 - protein, 112 aa, Oryza sativa
  unsure (1)..(112): unsure at all Xaa locations
  Clone ID: PAT_MRT4530_60054C.1.pep
KIKKKAVGPTAKSAEGAPPPTSQAPPEGRHPPEDRHAVSPSPPCTAPPXPPGASSAAAARPPAASTPPRRFARPPLAAPPRRPAGPPRPTPPSGPAGTPRPTVAEGGGEVGR

SEQ ID NO: 160812 - protein, 178 aa, Oryza sativa
  unsure (1)..(178): unsure at all Xaa locations
  Clone ID: PAT_MRT4530_60055C.1.pep
SVAVTFPSHESNQPLLNQPFPSSPPPCVEPGTALARRQPFSPPVKPRSHCIPKPSRSSAMTFTSSHSIELRHRRRALFLPPXKFFRPHLTVSTTLAVMPLTQXINPSAAAHRRRRTLATSPLRPQALPPPIAAAIPNPSAAKKKKKRERLTGLEDSYEILNITNQSQDIEQGKLLFTS

SEQ ID NO: 160813 - protein, 223 aa, Oryza sativa
  Clone ID: PAT_MRT4530_60056C.1.pep
LEVLEPHIMEARRERIRRAVENRSYSVCLVVEGLSDFGNVSAAFRSADALGVQSVHVISCDNNKRYRDNRHVSMGAEKWLDIELWSSTAECFDALKKRGYRIATTYLGNDSVCVYDMDWSQPTAIVVGNEGRGISDDALKLSDLHCSVPMKGMVDSFNVSVAAGILMHHAVCDRISRIGHHGDLLPEESRILLAEFYLRHRQSTAGIVHEYAKRKAGNFMAKL

SEQ ID NO: 160814 - protein, 98 aa, Oryza sativa
  Clone ID: PAT_MRT4530_60057C.1.pep
MVVNNFTGPGIGLGFGIGCGFGVGWGFGGMPLNMFGLGIGGGCGVGLGLGWGFGKAYGCQYRSSRVQFQGIEFQKKTEGDEASSLVSPERVEKSRPYG

SEQ ID NO: 160815 - protein, 194 aa, Oryza sativa
  unsure (1)..(194): unsure at all Xaa locations
  Clone ID: PAT_MRT4530_60058C.1.pep
MSDTRIHGSGDRGSADRFRACRGTARSVALGLEKGEATARGHALAEPEPRALPRPVASPPPLLLAADAREEGRGRGTAALWPSPQSGEPAPGSXSPPSMSSSASSWGEEDGGVEPASGSAANAREEGRGRGTAAVXGPRRQIQRARARIRRARRHQARHAVGELVRTVVGEEDGGVEPASGSATENLSAPLEVR

SEQ ID NO: 160816 - protein, 208 aa, Oryza sativa
  unsure (1)..(208): unsure at all Xaa locations
  Clone ID: PAT_MRT4530_60059C.1.pep
MSDTRIHGSGDRGSADRFRACRGTARSVALGLEKGEATARGHALAEPEPRALPRPVASPPPLLLAADAREEGRGRGTAALWPSPQSGEPAPGSXSPPSMSSSASSWGEEDGGVEPASGSAANAREEGRGRGTAAVXGPRRQIQRARARIRRARRHQARHAVGELVRTVVGEEDGGVEPASGSATENLAPPASLSWMTLASFGSIRRRH

SEQ ID NO: 160817 - protein, 1402 aa, Oryza sativa
  Clone ID: PAT_MRT4530_6005C.1.pep
MASKRILKELKDLQKDPPTSCSAGPAGEDMFHWQATIMGPPDSPYAGGVFLVNIHFPPDYPFKPPKVSFKTKVFHPNINSNGSICLDILKEQWSPALTISKVLLSICSLLTDPNPDDPLVPEIAHMYKTDRPKRERAAAARRRRRSKSSARRRRDPPGRLSAGCHAVVEGCLSVPPLDRPLPLRPASWPLVPPAKSPRDLPHRPGCPAGRRHCSTTPPAATAHDAEAGSERRRAGRLSAWPAVLRRQPPPLDPAIAAQRAHYRGPLPPPPSPFKRLPASPSPPSLQPCAAVAPAVAVAREDRRRGRQVAAVLVRLFAAVGDRRSFIAVDNPKVSAVSSSSPSSFVVPPPSLWSPMPRYKPEYLFGVEGFVQELRTMSFVIGFGNAPFYTQIPHYRHEEKCRVKVTLNSNSEEVPSVMFEAGGRNYIHACQEVARIAIGELRDRYSDQLADTEYRYHPRQPQGSDRGSYLETEGIENDATTRHLVEMLWAMDESRAETVLAAQDREDRNRGKICKLEDKVDRLEKELAALKGEAPPQKARVRLTARKRALFVPRYQLAPKVRVVEKEVAPTLADPPVIIISDDEEEGSKRTRSKIEWVATQDDEDEPNEPSIDLRCSEELDNGNGPNNPNNNNGENPTLAQVLAQQTQLMNMMMQQLQNQQNQGNNHVPPQNKLAEFLRVRPPVFSSTTNPVEAGDWLHAIEKKLDLLQCTDQEKVSFASHQLHGPASEWWDHFRLNRITAEPITWLEFAAAFRKTHIPSGVVSLKKKEFRSLTQGSRSVTEYLHEFNRLARYAPEDVRNDEERQEKFLEGLNDELSYPLMTGDYPDFQKLVDKAIRQEDKYNRMEQKKRRIAHFKAQQGSNQKPRLTLGPQPMPQGGSSSVVHPQRQFFNNNAGNNIRNQAPRPVAASTQQQPAKREQGSKLVVCFNCGDPGHYADKCPKPRRVKVVPAQNNSTVPASKARVNHVAAAEAQDAPDVILVREYPDVFPDDLPERIHQTKFVTMGSSSYFCGKERPYPENLKGATVFSKIDLRSGYHQLRIKEEDISKTAFTTRALAPCALASPSPPSLQPCAAVAPAVAVAREDRRRGRQVAAVLVRLFAAVGDRRSFVAVDNPKVSAVSFSSPSSFVVPPPSLWSPMPRYKPEYLFGVEGFVQELRTMSFVIGFGNAPFYTQIPHYRHEEKCRVKVTLNSNSEEVPSVMFEAGGRNYIHACQEVARIAIGELRDRYSDQLADTEYRYHPRQPQGSDRGSYLETEGIENDATTRHLVEMLWAMDESRAETVLAAQDREDRNRGKICKLEDKVDRLEKELAALKGEAPPQKARVRLTARKRALFVPRYQLAPKVRVVEKEVAPTLADPPVIIISDDEEEGSKRTRSKIEWVATQDDEDEPNEPSIDLRCSEELE

SEQ ID NO: 160818 - protein, 127 aa, Oryza sativa
  Clone ID: PAT_MRT4530_60060C.1.pep
MATLLLLAVAAAAAAWVWWGRYAWRARAVARRLAAQGVRGPRRGGLLRGCNERCGGEGGGGGGGGGMDAGTRYPRGRPAPRRQAERAGPEPPTGRQRGMARGKPAWGEARGCMATGRARRSRSGGPN

SEQ ID NO: 160819 - protein, 335 aa, Oryza sativa
  Clone ID: PAT_MRT4530_60061C.1.pep
MAMEKQQLRFSVRRREPELVGPAAPTPRETKRLSDLDDHETLRVQVKFAFFYRAGGEHDAAGVVRRALGEALVPYYPLAGRVREVEERKLVVDCTGEGVLFVEADADVRLEELEEDGDGGGELRPPFPSMDQLLLDVEGSGGGVLGSPLLLVQVTRLLCGGFVLAVRVNHTMCDAIGAAQFLLAVGELARGLPAPTVRPAWCRELLDARSPPAPSFPHREFDVVPPPPPPGDLVTRTFTFTAADVAAIREGLPPRLRGTAKTFEALTAFLWRARTAALELPDGEDARLVVIANLRGVAELNLPGGYYGNACVAPTAITTGEALLPRGSLGDAAEM

SEQ ID NO: 160820 - protein, 589 aa, Oryza sativa
  Clone ID: PAT_MRT4530_60062C.1.pep
MGNCCRSPAAAAREDVKSSHFPASAGKKKPHQARNGGVGGGGGGGGGGGGGGGAGQKRLPVLGEEGCELIGGIDDKYALDRELGRGEFGVTYLCMDRDTKELLACKSISKRKLRTAVDVEDVRREVAIMRHLPKSASIVSLREACEDEGAVHLVMELCEGGELFDRIVARGHYTERAAANVTRTIVEVVQLCHRHGVIHRDLKPENFLFANKKENSPLKAIDFGLSIFFKPGEKFSEIVGSPYYMAPEVLKRNYGPEIDIWSAGVILYILLCGVPPFWAETEQGVAQAILRGNIDFKREPWPNVSENAKDLVRRMLEPDPKLRLTAKQVLEHPWLQNAKKAPNVPLGDIVKSRLKQFSRMNRFKRRALRVIADHLSAEEVEDIKEMFKAMDTDNDGIVSYEELKSGIAKFGSHLAESEVQMLIEACCLGVGAEPALVDCRTRKLAAIGVVLLFTICVSRNLCVVDTNGKDALDYGEFLAVSLHLQRMANDEHLRRAFLFFDKDGNGYIEPEELREALVDDGAGDSMEVVNDILQEVDTDKDGKISYDEFVAMMKTGTDWRKASRHYSRGRFNSLSMKLIKDGSVKLVNE

SEQ ID NO: 160821 - protein, 48 aa, Oryza sativa
  Clone ID: PAT_MRT4530_60063C.1.pep
MTHGRKSRRIPHSGPLMPPGGNVEDMLKEHERQIQEAVRKARVSKPGR

SEQ ID NO: 160822 - protein, 193 aa, Oryza sativa
  Clone ID: PAT_MRT4530_60064C.1.pep
MFLWDWFYGVLASLGLWQKEAKILFLGLDNAGKTTLLHMLKDERLVQHQPTQHPTSEELSIGKIKFKAFDLGGHQIARRVWKDYYAKVDAVVYLVDAYDKERFAESKKELDALLSDDSLAAVPFLILGNKIDIPYAASEEELRYHLGLSNFTTGKGKVSLGESNVRPLEVFMCSVVRKMGYGDGFKWVSQYIK

SEQ ID NO: 160823 - protein, 148 aa, Oryza sativa
  Clone ID: PAT_MRT4530_60065C.1.pep
MATAGVDKPYWFEDTDDDGGVLLASSRRHLQELACHSPPLCPPPLCCARHLSAPRCRRPLPVACASLLQPPPLSSTGQPLRSDLLRPADGDAAALRAFVRVYVDRDAGAVFLRLRGATAMANVAVRRVARPNAAFLPFPRSHLLIDIA

SEQ ID NO: 160824 - protein, 933 aa, Oryza sativa
  unsure (1)..(933): unsure at all Xaa locations
  Clone ID: PAT_MRT4530_60066C.1.pep
YGAPGLGCILIQNVKSAPPREHMNPMAMVKIIYGEGLTETKLEEGFKQQFRWNWEWRAKKQTNGTFQIRFPNKLRLSELSNFDHFNVKGTKVEVNVSEWTSESAAIGKMHVVWVVIEGLPDEMKGYQALFEVGSNLGVVMEVDMPMLAAKDIVRMKVGMMDVKQFPLXILSTPEALLYEACFNLESVVEMGWLKGQQLDKQXETTLRVEEKEEQKVLTKGKQVEEMKELTQHVVGAQQKGDCSQAQMESVHRLVEEDRIKAIQILQDSQLALALQEEDIKGHLNEDKGCDENQTALLILKDDDKMVSQEVSTAKEVQRSQLVASSEDDIEGEGEEGKVXLGESEELFDSQDSENAFAKSLGVVLPEEELGSQEEERRASKRFRDREDKCSIDAVDSNIKLINDLEEARVNLFLKEQQKTGDNGSLENKKGDGSEIDDVFKILNESDSDDMWSDFDFTETFLSQSHKGKRRADRGNLAIVKHKVGFIGLQETMKQDFSVYFLKTLGQGREFIWDWIPASGRSGGILLGLDGEKFKMLAVRKGHFFLKATVENLEDKQEWDLMVVYGAAQKEHKEEFLRKLAQELNLQKKPLILGGDFNIIRRESEKNKPGGCNRWSFVFNAIIEQANLREIDMGPSTFTWAVXHENPTFEKLDRIMITSEIEQKYPLLTVQCLERVFSDHNPLLVVLKNNCSKNTPFKFEISWFMREDLDKIVSEVWSSYNDNGSSLDVXQGKLRAVRKRLKGWNINWEGKYRREKAEILTQIDLLDKKIEMNGMTCLDREERRVWELKLKYTINLMRVIEDFQRGNIDIERLNYGVITLVPKTKDAMQKQKFRPICLLNAKLFPEIWCDWIMKTVRGGKVAVKVNDQIGPYFQTHKGVRQGDPLSPLLFNLAVEALTIMIQRAEREQLIQGLGTGVDSRIAILQYADDTIFLI

SEQ ID NO: 160825 - protein, 504 aa, Oryza sativa
  unsure (1)..(504): unsure at all Xaa locations
  Clone ID: PAT_MRT4530_60067C.1.pep
MSTMEEPSSAPPVSWCRKPKNFAMIIWLVFVAAGLLLLFMLMTGMLDSTIPTTSXRKKWTEVIDQMVQNLNTLFTIMCLHQHAKIFHHLVLLRRWRPDTGDDREEIHKVYCKDGAPRPHDHAHMLVVAVLLHVXCLALYFCCALFWSYARKERPDWALNIGYGLGTGCPVIAGLYAAYGPLGRKQHEDSDEESAAAQNDREVEIKIYNRRVVVSSPEWSGGLFDCCDDGTVCALSATCTFCVFGWNMERLGFGNMYVHAFTFILLCVAPFLIFSVTALNVHDDDIRDTVVSVGVLLGLCGFLYGGFWRTQMRKRYKLPASGCGCGRAAVSDCAKWLFCWSCALAQEVRTANFYDVEDDRFVFHGARNEDGELANHRQGTAAXGARGVGVGVGAGRAGRRKGSAGGAGRLVPGAGAVRGAQLRGRAQGAGAARAGPRVVVPWAAGAPAHDALLYRRRPRRVKVLFLPLLSGHLPRDLELASSPWCQTAGGAEADGSRTGARNQRC

SEQ ID NO: 160826 - protein, 44 aa, Oryza sativa
  Clone ID: PAT_MRT4530_60068C.1.pep
LVFKFKFRLRGPGAKNAFAEILKKISKIQKPYGPNYVVLKNSQK

SEQ ID NO: 160827 - protein, 89 aa, Oryza sativa
  Clone ID: PAT_MRT4530_60069C.1.pep
MAATARGTALFAQEVPPPETLDVVRRQRQLLRRAADLCLHPIAEEEDDDTNDHVSSSSFSLLSSSSSTTTTISGCRRPKVDEMRACQSV

SEQ ID NO: 160828 - protein, 108 aa, Oryza sativa
  Clone ID: PAT_MRT4530_6006C.1.pep
RPATASLGNRRIRRRPAPSRASPLQLLSCQRCRRRRRSRSCRRWRSPESSPPSPAGMDSCLGGSLRGVSLVESLKTSAAAAAVAAPPTPRLPPILTLIPNPSSVYQKY

SEQ ID NO: 160829 - protein, 333 aa, Oryza sativa
  Clone ID: PAT_MRT4530_60070C.1.pep
MKPMVDSSGGGGPSFSGHSLSSPDAESAKPEPPHDSGARASLEQVTVDHTKPPDSGSAKPVTVDHKSATSDSSTGTESDGGGEPSSASSSLPAAAHPFARALAVVDGVASVAVSSDELATNEEGSKIDGEQKPPVPTNFAKFVGRSVTSGLDDASMVSVIDRAFSAWQDESKFGLVARQDPPPRGPMALLLRRRGAPRERQVHLFRAHRWLRRRRGNRRRARIRQRLRRRKRRVGSGRAAPKSNLCSAALVHAAKRALLCLPTAAPAGAGAGRRRGAALLLFRLAPTASSPAAGRLGQTRGEEKREREEEGREMIWQPDMWELHRSHAESTVM

SEQ ID NO: 160830 - protein, 67 aa, Oryza sativa
  Clone ID: PAT_MRT4530_60071C.1.pep
MPRPPVAPTNYTTRTPPSSDPTITVEIAIVFSATVEGANGNGAIASPSGEVEDALPLPDLAPPEEET

SEQ ID NO: 160831 - protein, 106 aa, Oryza sativa
  Clone ID: PAT_MRT4530_60072C.1.pep
SHNSSHQFHHTRLSQHANPGVTQVPFLGVVSWVVVSRQMVISWGSCPLVASLPTFASTISIIVESPGSSCDTKSHPVVHPLSVHVVTRHLKTAPFRLALCNPGLGP

SEQ ID NO: 160832 - protein, 212 aa, Oryza sativa
  Clone ID: PAT_MRT4530_60073C.1.pep
MRTGEVAEAVPRVVAILSSLLQRVAERNDAAAAAAAVGEEAAAVSAFQGLTKPAISIGGYLERIFRFANCSPSCYVVAYIYLDRFLRRRPALAVDSFNVHRLLITSVLTAVKFVDDICYNNAYFARVGGISLMEMNYLEVDFLFGIAFDLNVTPAAFASYCAVLQSEMTYLEQPPAVDLPRLHCCPSDQDDAGCHHKQQQQQQQQQQHQLAV

SEQ ID NO: 160833 - protein, 59 aa, Oryza sativa
  Clone ID: PAT_MRT4530_60074C.1.pep
TRGRCLLGKISSPLFFPNLELPLMDCDHFFLKNLCQKGAPYRYLAKKKVVQKKGGSNGL

SEQ ID NO: 160834 - protein, 57 aa, Oryza sativa
  Clone ID: PAT_MRT4530_60075C.1.pep
MGKAKRASIFIRLVSAAGTGFFYVKRKNPRRITEKLEFRKYDPRVNKHVLFTEAKMK

SEQ ID NO: 160835 - protein, 202 aa, Oryza sativa
  Clone ID: PAT_MRT4530_60076C.1.pep
MWAPLYGIDDVILALNSRQHTIQKFIRINHRFHPLDYSIINHQNNKRFQEQIVNNELPAYEFYCYRGKVGNTVKYHLLNGLRQGGTAASMERRRGNGRAGGESELSVKRRQWRRCTGRTGGVNDQEWGRLLMQSRAEVVLARETGNSADGVVDGEVAATELVESVSRALPMVKADAVVRRKWTLSHSQNVVPLECHPETTIR

SEQ ID NO: 160836 - protein, 142 aa, Oryza sativa
  unsure (1)..(142): unsure at all Xaa locations
  Clone ID: PAT_MRT4530_60077C.1.pep
FFFFFXFFFFFFFFFFFFFLNSSINPRKTATLKLLFFPPRKKKGKKNRKKTGGKKAGELGAQKGHRGGKNLVQTPQKASLLFKNRFPAPLPAPGGRPPGGGARPPPHSPGGNPRGAGLTFHTGAGGGPQRGASSMLAQKLST

SEQ ID NO: 160837 - protein, 346 aa, Oryza sativa
  Clone ID: PAT_MRT4530_60078C.1.pep
MDQKQDEILKKDRAELLQAQAELWCHTFGYLKSIALRCAVELGIPNAIHRNGGSASLPELLGTLPLAANKRSCLPRLMRFLVSFGIFKEDISREGTTTTTSVYQLTPVSRLLVDASSRGIFVLGNWLTSSDENTPFGMAHGMDFWDFTGHDAEYSMLFNKGMASDSHFVVNIVIHECAEVFVGVRSLVDVGGRNGAMAKAIADAFPHIKCYVLDLPHVIHGTPTDGIVEFVAGDMMHFVPSADVVLLKFVLHDWSDEDCVRILTRCKQAITNKEEGGKVIIIDTVIGSPSQQILEAQLSMDICMMTLTTGKEREERDWHKIFLEAGFTRYKIMPILGVRALIEVYP

SEQ ID NO: 160838 - protein, 108 aa, Oryza sativa
  Clone ID: PAT_MRT4530_60079C.1.pep
MFLKKAPIRKTTVGTLVKEKKKKVFFFFNLEFKPFFPGTQKKKKRQSNVMCKGIDQKRNLRGEAPFVGPKKKKKPNPKKKKKKKKKKKKKKKKKKKKKKKKKGRARDL

SEQ ID NO: 160839 - protein, 61 aa, Oryza sativa
  Clone ID: PAT_MRT4530_6007C.1.pep
LTAEGPLMSVERLVILLPIFFLYEIPFLPHWIQNLVTVDVLTLALLIDLYAFPCQNYILLS

SEQ ID NO: 160840 - protein, 591 aa, Oryza sativa
  Clone ID: PAT_MRT4530_60080C.1.pep
MAALRDVLLSIAQTPHRLRRRALVTWTPAQETSEVRDRSGARMKRRLEWYDLVGLGVGGMLGAGVFVTTGRVARDTAGPAVFASYVIAGVSALLSSFCYAEFSVRVPAAGGAFSYLRVTFGELVGFFGGANILMEYVLSNAAVARSFTDYLASTCGITEPDAWRIQVDGIAKGYNALDFPAVALILVLTLCLCYSTKESAMLNMVITVFHLLFFVFIILAGLWNGSARNLVSPHGLAPYGVRGVLDGAAIVYFSYIGYDSASTMAEEIRDPARALPVGIAGSVLVVSALYCLMSLALCAMLPYTEIAESAPFSAVFREKAGWEWAGSVVGAGASLGIVASLLVAMLGQARYLCVIARARLVPAWLAKVHPSTGTPMNATIFLDRANGSIKYTNNFTEVKVLTTVSDHENCNAGLCTASIALFTELQVVFEMISIGTLLVFYLVANALIYHRYAKLGANRSLHVLLFLLILTLSSLGFSLSRRIHGQCRWGMALFGATSVTITAMFHCAVRRDMPEPPSEWMVPLMPWPAAASVFLNVFLMTTLKVMSFQRFGLWSFVIIVFYVCYGVHSTYSAEENEAVNAMIHHANMDIS

SEQ ID NO: 160841 - protein, 38 aa, Oryza sativa
  Clone ID: PAT_MRT4530_60081C.1.pep
NSEAPTTVHIKAWGARSSTSTLGLVLLDFTTNGPTWGP

SEQ ID NO: 160842 - protein, 68 aa, Oryza sativa
  Clone ID: PAT_MRT4530_60082C.1.pep
MEEPKDAKTTEWTLWEDGVLLPLSRRRTSHLAVVRTSHFAVARSCTVIDPAIAIVGAFIFFFAIAQQT

SEQ ID NO: 160843 - protein, 170 aa, Oryza sativa
  unsure (1)..(170): unsure at all Xaa locations
  Clone ID: PAT_MRT4530_60083C.1.pep
STKESAMLNMVITVFHLLFFVFIILAGLWNGSARNLVSPHGLAPYGVRGVLDGAAIVYFSYIGYDSASTMAEEIRDPARALPVGIAGSVLVVSALYCLMSLALCAMLPYTEIAESAPFSAVFKEKAXWEWAXSVXGAGASLGIVASLLVAMLGQARYLCVIARAPAVPAW

SEQ ID NO: 160844 - protein, 69 aa, Oryza sativa
  Clone ID: PAT_MRT4530_60084C.1.pep
REQRNILIHVLAEKKHLHIQVVGSTGTKSEPTTIGQMHWCLNYRLTTKCIHRELVSIEGCTRYKFQAAN

SEQ ID NO: 160845 - protein, 193 aa, Oryza sativa
  Clone ID: PAT_MRT4530_60085C.1.pep
MAKKKMNAPTMAIAGSITVHDLATAKWLVLLSGSSTPSTGSVHSVVSASLYKASMSISTGANQVSFGLELMTMPFLSTPRKLKNNGPKSNLSYTFFFAKTPLYKESMSIPPYANQTFFGLEWITMSLVVPLPTKNFSNDDWESHEREMLGIHRRTGLSHLMFEIYHVMKPKRKKKLTTKKNIKNSGTMTKTET

SEQ ID NO: 160846 - protein, 114 aa, Oryza sativa
  Clone ID: PAT_MRT4530_60086C.1.pep
MGGRHGRTKMRLRQSAKRIEVDGCEARAWRAGGGRGRLRINGGPGSCLLTLSPSGRVATTPSPSSCHGRLRQPSAHINSFRRPLALCLLHLTALHRRRADRRPDPAAIAAPIAA

SEQ ID NO: 160847 - protein, 196 aa, Oryza sativa
  unsure (1)..(196): unsure at all Xaa locations
  Clone ID: PAT_MRT4530_60087C.1.pep
MEEPRCASDRARSGSRSMAARLELGGRGADAAFADQWRSIRDGGEHRSWIPKATRRRGSRSGGTAGPPVRRSALSGLRHPPPPPSLGRRPPKLSSTPTSSYSGPPPHQAERRPRGRLPPXTNRRPRKLPPHSVPVRPGRHHAVAVVVPWPPPPTVGPHQLLPAPPRSVPPPPHRPPPXAALTAALIQPPSPRPSPP

SEQ ID NO: 160848 - protein, 353 aa, Oryza sativa
  unsure (1)..(353): unsure at all Xaa locations
  Clone ID: PAT_MRT4530_60088C.1.pep
MRRLEESYTTSPAVAHAGLWADVSTGRGADMRGPPVSDSGEGGRGAGTRAHWSAARERKGGGXRLGLAHGRPTDRGDGXRRTRERVAGDGNRRRRRRRKGDAEAAALKERKGKKXGRGASPRVAGAEEDDGERRRQATGGRRRRADELRGALRKEKRGIRERMINHGDRKPWPNAAVEVMLTRARGGEGSGDEPRRRRGGEGTGRGRERRESPADVREWGRERGGIRFSNPGHLGRGREREREGSGRGRRGARAGVVDVARGRRRRGRGGGCGAXGASEIGGRWETGPTGGPHLSATRXEEGGGRPGWASACGRPSKGEXGRKEGMGRRPIRKKEEKGRXRKKKKRKKDFPWN

SEQ ID NO: 160849 - protein, 53 aa, Oryza sativa
  Clone ID: PAT_MRT4530_60089C.1.pep
ETEEQRQARETEERRRLEEEHQAQEQEWLRREQQDRERTAKEAEDLSRPEIPE

SEQ ID NO: 160850 - protein, 193 aa, Oryza sativa
  unsure (1)..(193): unsure at all Xaa locations
  Clone ID: PAT_MRT4530_6008C.1.pep
KLYCVSRGEGARGLGPREWGPRDSLTVHGGPGAPGLAPAGVVGPTRQPHPRTWAADGRAPRGGHSARPAGDGARAPMVAGGGHRHGGAAAERGEGKGEKRRRSSAHPRSTATTKKAAGAEEGGGAARVNGXDGGAAKPEEATPGQETVPASGEGQPEVVDDGGERGRRHELDSGGEXGAARAETGEGGAGRVY

SEQ ID NO: 160851 - protein, 239 aa, Oryza sativa
  Clone ID: PAT_MRT4530_60090C.1.pep
MSDAGFDPTRAQHSATGRKTDNAVGHTCASLLSVRRMPPPAACRLPPSTSIPPSPTNSSTNPTRAGGGRSRAPVELGCQVSSRVARRTGRAVRPSLDRMGVRGPREAHCCWAASSPASMRPPTVALGFGVFPRDDASSSSSYEYGVVVYRRSPTTCTGSSTVGWPMESGGVRGEGSESELKICIEVLSAVAITYFRRCSSRGHLVIPAPPITTTLVLRTVLDLPVTLLPATTGVYWSTV

SEQ ID NO: 160852 - protein, 227 aa, Oryza sativa
  unsure (1)..(227): unsure at all Xaa locations
  Clone ID: PAT_MRT4530_60091C.1.pep
FFLSFSSFLSNGPPAHXPPSFPPPYWAGRRPRPSQAAPPXSLGVADRWGPPVGPVSLLPPISRSRRXRRNHRRAHVPAFPGPRRPRXRACAASPAPTPLYLPLAPAPEMAGIRKSNPASLSSPFPHVGRRFPPLPAMCGSLFPFLSTAVAPSHFFPISPHSLEPPIAPASCNLRSRHFPLLRPPLAAVRVAARPRRHRRRIRVAEIHPVHLSSVKVRRRSPHPLAHG

SEQ ID NO: 160853 - protein, 231 aa, Oryza sativa
  Clone ID: PAT_MRT4530_60092C.1.pep
MAGLRRRHRDSMVPVEATALPGTDHHAPLPTTRHPLLVFSRAERSRMGDEGREDRGANMASGGRQKRETGRAERLAGEAGRATADGGLGQVRGTWGHRAQTAATAGVVEKGVNGIVGRREEVERPRGRPASLRQRCCRRCLQATVAMVGGTRRWRQQSRGSLAFPPLSLASFLPRPLTSSLFARLAGFGSPTEREKSNGQPFSHSASFVGRAAKAASISHIVIRIASNGGG

SEQ ID NO: 160854 - protein, 143 aa, Oryza sativa
  unsure (1)..(143): unsure at all Xaa locations
  Clone ID: PAT_MRT4530_60093C.1.pep
MAELAAREPGSPQLDSLQISMRSQHLGCADDGRTADASIACGIELHGLAWPRRTPPCAATTEARRCASHPCGAARSSAARAMAIGCRNPXRRPSVATIGARGGGPEERGAAVEGGGRRAPAAEVGPAPALGAVAAAWCGGGGG

SEQ ID NO: 160855 - protein, 197 aa, Oryza sativa
  unsure (1)..(197): unsure at all Xaa locations
  Clone ID: PAT_MRT4530_60094C.1.pep
CAINPRADVIKAGRGASKRGPPVSGLGEGGRGGSPWTGTTRVVHRRSTGPTAQIALGADRTGGGDPARLKTGQAATAMATAXRTRVAGDGNARRRRRRKRRLTGGXLKRRLGGRGRGIEGRGCLTEGGRRGGRRWRTATVSHGRTTATGGQGLNSPEREGMRISATKLNGEGAAGVELSLANPTAATARCGGDPSGG

SEQ ID NO: 160856 - protein, 157 aa, Oryza sativa
  Clone ID: PAT_MRT4530_60095C.1.pep
MPPVRSAPVAPPPPPPPPQQKKPAVPVSRPWPMSFTPHPPPPPPPPKPAVEVKNASPKKRKHCNCKNSRCLKLYCECFAARVYCDGCHCSPCGNKIENENIRKEAIETILLRNPLAFQAKIENSPNTGTGRKDNCEAIPAIPKDNKGCHCRKRQCLK

SEQ ID NO: 160857 - protein, 364 aa, Oryza sativa
  unsure (1)..(364): unsure at all Xaa locations
  Clone ID: PAT_MRT4530_60096C.1.pep
MRRLEESYTTSPAVAHAGLWAGVSTGGGGGRRLGSDMQGPPVSGSGGDGSPWTGTTRVVHRRSTGPTAQIAPGXIGRAAATRLGLAQGRPAGHGDGXARACERVAGDGNRRRRRRRKGDAKAAAXAAARKEREGNRXGEEASPRVAGAEEDHGERRRQATGGRRQPADGLRGALRKGEXREIREREMNHGDRYSWXVEVELTGARGNANSGDETRRGRGGQGAGRGRERRESPANVGXSGGGERGGIRKSNPGHLGRGRGREREGSGREGRGARAGVADVARRRRRHGRSGXGARWETGPTGGPHLSVTPGERRGRGLSWGVASGRPSKARGERRGXGRRPTKGKGKRKKRKRKKGISRDLNIA

SEQ ID NO: 160858 - protein, 370 aa, Oryza sativa
  unsure (1)..(370): unsure at all Xaa locations
  Clone ID: PAT_MRT4530_60097C.1.pep
MRRLEESYTTSPAVAHAGLWADISTEGGGCGADKRGPHVSGARVAGLPWTGTTRVIHRRSTGSTARIGPGPIGRCGGGQARLGSAQSQPTGHGDGARTRTRVADDGNRRRRRRRKAAPKGAAARREREGKRXGGSASPRVAGAEEDDDERRRQATGGRRRWADELRGALRKEKRGIREREMDHGDRKPWPKAAVEVVLTRVRGNEGSGDEPRRRRGGRGGSRPREPNGGDGXGLAATLTAASGSRKRGRRRCLNRXEREPDVAGRRGARACVVDVARRRRRRGRGGGCGRDGASEIGGRWGKDPTGGPHLSATPREEAAGRPGWASACGRPSKEEGRXKEGMGRRPIRKKKXRKKRGKRKRKRKKDFPWN

SEQ ID NO: 160859 - protein, 37 aa, Oryza sativa
  Clone ID: PAT_MRT4530_60098C.1.pep
PPLLTDEMLPLHGRVDSRASLLQEGDAHFSSALLPIS

SEQ ID NO: 160860 - protein, 150 aa, Oryza sativa
  Clone ID: PAT_MRT4530_60099C.1.pep
MAPAARRSHGGGAHAAAAQSDDRRRSSGGGERRLAALGGEEGEKEGGDASPRVAGAEEGDGGRRRQATGGRRRLADELRRALRKEKRGIREREMDHGDRDPWPKAAVEVALTRARGDEGSGDEPRRRRGGRGGPRPREANGGDGVRRRRA

SEQ ID NO: 160861 - protein, 95 aa, Oryza sativa
  Clone ID: PAT_MRT4530_6009C.1.pep
EIEENAGSTLAEGADACEDDQKEHDASAANAKSVLRLRKTAEGSDKENKQEEEEGVLASHVRAPGNKRGFPSYIIWLVLSVALVLLISLGIYGWV

SEQ ID NO: 160862 - protein, 128 aa, Oryza sativa
  unsure (1)..(128): unsure at all Xaa locations
  Clone ID: PAT_MRT4530_600C.1.pep
FILVGDMGLGVSRLEGGGRPPMPRGPPPRGVRPRVTTCGGLGGHLRALTYPHXWRPEXARHAAFNVACSARXNWSVTGRMTDGTRGVRRTTAWVRGRAPCLVPSVMMTRGLRKRSPFKSCLQVMKEGI

SEQ ID NO: 160863 - protein, 64 aa, Oryza sativa
  Clone ID: PAT_MRT4530_60100C.1.pep
MSRLVRHHLCCSDYTTSWACSGMAISHMGPGTRRGPAPTGAGAGAGVDFNPRGVRSGAPVMSGD

SEQ ID NO: 160864 - protein, 140 aa, Oryza sativa
  Clone ID: PAT_MRT4530_60101C.1.pep
MYIKIPVQDQPGYTNDNVDIQIHREHHSTGILDGTDKAYSSEKPSSDPNSKSGHRGSGADMRGPPVSGSGEGGKGTGTRAHWSAAREERGGGTRLGLAQGRPTGRGDGDGARANALPATATGGEGDGAKGDAKAAALSGG

SEQ ID NO: 160865 - protein, 91 aa, Oryza sativa
  Clone ID: PAT_MRT4530_60102C.1.pep
LRIFTFAELRAATRNFKPDSVLGEGGFGRVYKGWVDERTMSPARSGTGMVIAVKKLNPESVQGLQEWQVNSFVHSSPSAALTDRGVNVNLF

SEQ ID NO: 160866 - protein, 308 aa, Oryza sativa
  unsure (1)..(308): unsure at all Xaa locations
  Clone ID: PAT_MRT4530_60103C.1.pep
KGKDRPPIKGPAGGLGFKPARPASLWGTAPAHNGFGPAARKAAAAIRRPRHPNRSGGAALRGEEGEKXGRDASPRVAGAEEDDGERRRQATGGRRRLADELRGALRKEKRGIRGREMNHGDRKPWPKAAVEVMLTRARGDEGSGDEPRRRRGGEGTGRGRERRESPADVGSGGGERGGIRFSNPGHLGRGREREKGGSGRGTRGARAGVVDVARRRRGRGRGGGFGAAARREXGGRWGTGPTGGPHLSATPREEAAGRPGWASACGRPSKGEGRKEGNGPXRPFEKKKRKKGGKRKRKRKRKKDFPWN

SEQ ID NO: 160867 - protein, 81 aa, Oryza sativa
  Clone ID: PAT_MRT4530_60104C.1.pep
IDQVGVKRWLAHLGCLLLVVKNEKEKGIRGHILPMAPELCKICRSWAISSSLPPLPPPAPQEKKTTTDADADACGTSRRST

SEQ ID NO: 160868 - protein, 161 aa, Oryza sativa
  Clone ID: PAT_MRT4530_60105C.1.pep
MRGPPVSDSGEGGKGRRQAGPLGSNSRGNGSPWTGTTRVVHRRSTGPTAQIALGADRTGGGDPARLKTGQAATATATAHVRERVAGDGNRWRRRRRKRRREGGCAKRRLGRRGRGMDGRGNLTEGGRRGGRRRRTVTASHGRTTANGGRVSGCPKEGRERD

SEQ ID NO: 160869 - protein, 127 aa, Oryza sativa
  Clone ID: PAT_MRT4530_60106C.1.pep
RPGGHRAPPVHPNLASTDQASRHRLVPQPPLPSSLLLLPSSILSVSSPSSSTASSLVSVAASSPLVSPNAKPRVQPKLPPKTKLTTITFSPHHKRDYQVTCTNTGCRPCVVSCPSNCPNMCLVACRY

SEQ ID NO: 160870 - protein, 167 aa, Oryza sativa
  Clone ID: PAT_MRT4530_60107C.1.pep
MEREGWSGHPYPLHSPPLSLDNVGKRAAPSLTVSDGALPTPPLPSSLLLLPSSILSVSSPSSSTASSLVSVAASSPLVSPNAKPRVQPKLPPKTKLTTITFSPHHKRDYQVTCTNTGCRPCVVSCPSNCPNMCLVACAYCLTFCPPRASRPRCLLSAPMPGTPQRRR

SEQ ID NO: 160871 - protein, 43 aa, Oryza sativa
  Clone ID: PAT_MRT4530_60108C.1.pep
KLLSIEMLCIQLKHTKTIHMFGLTYVNRQSPPREKLKILVASI

SEQ ID NO: 160872 - protein, 130 aa, Oryza sativa
  Clone ID: PAT_MRT4530_60109C.1.pep
MAGPWPLLRSFLRNCVAGTLVVVTVNDRYASVITVRGTSMNPTLESQQGDRALVSRLCLDARYGLSRGDVVVFRSPTEHRSLLVKRLIALPGDWIQVPAAQEIRQIPVGHCWVEGDNPDVSWDSRSYGPE

SEQ ID NO: 160873 - protein, 115 aa, Oryza sativa
  Clone ID: PAT_MRT4530_6010C.1.pep
MPHAGACRRRRLYHHVGSSAVHVTIPHAVACRRPRPLCRSSSPASASSTPELNGGGHVCAANVNLGEGRGRAPLPLSPAATAAAAVANRRPLRLPPRTVLSLWRGGKGREGRAMQ

SEQ ID NO: 160874 - protein, 240 aa, Oryza sativa
  unsure (1)..(240): unsure at all Xaa locations
  Clone ID: PAT_MRT4530_60110C.1.pep
DVVYYIVQILIFRAEPAASPTPDATSPPLPLPTSAAFPPIPSGGAAPSPPPPSQPPPLPPASSLPPPASSXPPPTPLIPXPSSPSHYPQPPPTSPSSHPPASPAPPAAGRHLPPLHCRPPSPYPAPPATAAEGRHLPPLRRRPSPPYPAPPATAAXRPPPPSPTPPAAAXPSLRRRPPPPSLFLEATPLDALCAAGPLPPPPPPPALARAGAPTPTPPRASPHSAAGSNQASPAMQFENE

SEQ ID NO: 160875 - protein, 148 aa, Oryza sativa
  unsure (1)..(148): unsure at all Xaa locations
  Clone ID: PAT_MRT4530_60111C.1.pep
APPPFARSDRCTAAATKSEGSVGLVLRRQSAAPAERRERERQWRTCGDAXGGVGARTGVGGWSGXQGIGGAGRGGARRVRRRTGTGARVSGRMGRRGRCCEGSDGAGAARADARGGAESARLPALASDVDSSACEHAAPNRSPLANSG

SEQ ID NO: 160876 - protein, 42 aa, Oryza sativa
  Clone ID: PAT_MRT4530_60112C.1.pep
HEDETMQNSIIFGLKFHKYQFVLILIIILHLICTYSVCARPI

SEQ ID NO: 160877 - protein, 88 aa, Oryza sativa
  unsure (1)..(88): unsure at all Xaa locations
  Clone ID: PAT_MRT4530_60113C.1.pep
RYXASQVTIEISKMIKSRKKKFEKMLFERLSVSANINFTTDLTGSADVDIGVSTSDRLADWDQHLNHDIQMTAEICSEYDGYMYKPSK

SEQ ID NO: 160878 - protein, 189 aa, Oryza sativa
  Clone ID: PAT_MRT4530_60114C.1.pep
MGNCQAAEVAAVVIQHPGGKVERLYWPATAADVMRSNPGHYVALVLLRVSASSSGGGGGGKAEHSAVGAAVGDESGGAAAKITKIKLLKPKETLLLGKVYRLVTSQEVTKALQARRQEKMRRCKEVTDHHHRQPQTGDSAAAGEEQRRPSDHQERKPAEKDRHRSSGGGGGGRGRNWRPSLQSISESAS

SEQ ID NO: 160879 - protein, 1036 aa, Oryza sativa
  unsure (1)..(1036): unsure at all Xaa locations
  Clone ID: PAT_MRT4530_60115C.1.pep
EEMRMGHYQRPVDTAAFLDFIKXTSRPLSTFCLSSGENNXQRLIEQFRQILEEGSRPEIVQYYAMVKYXRISIRNAMSVFHTILGKVERAQQKEVHFKEATQCYNRASRIDETEPSTWIGRGQLCVVKHDLQMASDSFKIVLDEDGSNFPALLGQASVYFLMGDSEQQHKKALDYYRNSLDLYKRALRAYTSCPAAVRLGIAFCRYKLGQSDKARQAFQRVLQLDPENIDALVALAIMDLQTNEAGGIRRGMEKMRRAFEIXKKTNIEMNQKQKMIMQTSARXTMEQLTETALVTXSAAAGLEDSDAEEDDMGHPQCAIERKRRXYMASDNEMSVQRPVQPTAGENDLXIELDGXKSSLASFEKVLEVHPGSWDAESTIGRAHMHLWIXDVEMELTRRFEPEVXKIYLGSRAVTDIQQLISRHSRHAMGXLLSCELLTLELEMAEQSFKEALGDGFWVSIIDGSVGSSVVNWSIQYRDQSFFQQLEEEGTPLELPWDKVTTLFNYARLFEELHDTVKASLFYRLIIFKYPDYIDTYLRLAAIAKEKNNLQLSIELIGDALKIDDKYPNALSMLGSLELQGDETWLTAKEHFREAKDASEGKDTYSMLQLGNWNYFAANRPEKKAPKFEATHREKAKELYSNVLKQHHGNMFAANGIGILYAEKAQWDIAKELFTQVHEAASGSIFVQMPDVWINLAHIYFAQGFFQQAVKMYQNCLRKFFYNTDATILLYLARTHYEAEQWQDCRKTLLRAIHLAPSNYLLRFNVGVSMQKFSASTLQKTKRTVDEVRATVSELQNAIRVFSLLSVASTYHSHGFDERKIETHIEYCKHLLDAAKVHRDAAEQAEQQNKQKMEVARQIALADEARRKAEEQRKAQLERRKQEDELKQVMQQEQHFERVKEQWKTSSNTPGKRKDRSKHEDEEGGGEKRRKKGGRRRKDQKTKAHYGEEEEDEYRDEPEAEDDYANTARSNDGGDSEKAPGHLLAAAGLEDSDAEEDDMGHPQSAIERKRRAWSESEDDEPVQRPVQPSAGENDLSD

SEQ ID NO: 160880 - protein, 1020 aa, Oryza sativa
  Clone ID: PAT_MRT4530_60116C.1.pep
MASVYIPVQGTEEEVRVALDQLPADASDILDILKAEQAPLHLWLIIAREYFKQGKIEQFRQILEEGSGPEIDEYYADVKYERIAILNALGAFHTFLGKVERAQQKEVHFKEATQCYNRASRIDETEPSTWIGRGQLCVVKHDLQMASDSFKIVLDEDGSNFPALLGQASVYFLMGDSEQQHKKALDYYRNSLDLYKLDPENIDALVALAIMDLQTNEAGGIRRGMEKMRRAFEIYPYCTLALNHLANHYFFTGQHFVVEQLTETALSSSNHGLLKSHAFYNLARSYHSKGDIETAGRYYMASVNEISKPQDFVLPFFGLGQIQLKFADYKSSLASFEKVLEVHPENCESLKAIGHIYAKSGENDKAIETFKKVTRIDPKDHQAFMELGELLVQSDWATAMEYLKTVRLFTSLEVYSVSLYQILPWISSQARNLLKKAGEKIPIELLNGIGLLHFEKGELEMAEQSFKEALGDGFWVSIIDGSVGSSVVNWSIQYRDQSFFQQLEEEGTPLELPWDKVTTLFNYARLFEELHDTVKASLFYRLIIFKYPDYIDTYLRLAAIAKEKNNLQLSIELIGDALKIDDKYPNALSMLGSLELQGDETWLTAKEHFREAKDASEGKDTYSMLQLGNWNYFAANRPEKKAPKFEATHREKAKELYSNNWCSQFMMMSKDIIYNMFLGFKKMVLKQHHGNMFAANGIGILYAEKAQWDIAKELFTQYQNCLRKFFYNTDATILLYLARTHYEAEQWQDCRKTLLRAIHLAPSNYLLRFNVRATVSELQNAIRVFSLLSVASTYHSHGFDERKIETHIEYCKHLLDAAKVHRDAAEQAEQQNKQKMEVARQIALADEARRKAEEQRKAQLERRKQEDELKQVMQQEQHFERVKEQWKTSSNTPGKRKDRSKHEDEEGGGEKRRKKGGRRRKDQKTKAHYGEEEEDEYRDEPEAEDDYANTARSNDGGDSEKAPGHLLAAAGLEDSDAEEDDMGHPQSAIERKRRAWSESEDDEPVQRPVQPSAGENDLSD

SEQ ID NO: 160881 - protein, 111 aa, Oryza sativa
  unsure (1)..(111): unsure at all Xaa locations
  Clone ID: PAT_MRT4530_60117C.1.pep
NAKFSENAALILVSELASRAGCFYFGIIQAALAAVGAPPHLVHIITGSAVAGQALGSSADXSMFVGLPGVGRMIMXQALPTFIPVALGLGGADASLVCGDVDSPRGVHAAL

SEQ ID NO: 160882 - protein, 139 aa, Oryza sativa
  unsure (1)..(139): unsure at all Xaa locations
  Clone ID: PAT_MRT4530_60118C.1.pep
MNLQVTLLAKRKDRSKHEDEXGGGEKRXKKGGXRRKDQKXRAHYGEEEEAEYRDDPEAEDDYANXARSXDGGDSEKAPGHLLAAAGLEDSEKAPGHLLAAXGHPQSAIERKRRAWSESEDDEPVQRPVQPSAGENDLSD

SEQ ID NO: 160883 - protein, 81 aa, Oryza sativa
  Clone ID: PAT_MRT4530_60119C.1.pep
EDRSRRRFAQAVPPQEEEPGVRRVRAAPRQAQAQEEESARRRCRRRLLLLHPWQLQHQACVLISNIFFFFSSGSMSSSYAV

SEQ ID NO: 160884 - protein, 152 aa, Oryza sativa
  unsure (1)..(152): unsure at all Xaa locations
  Clone ID: PAT_MRT4530_6011C.1.pep
KHGYKQSHKRHRISLSTVTTGIKPTGIPFVRILFLVPGGKTEPQTKPYPLDMWKYGSSLQQRPEDRSLXGRGATIKTMHLEPSLKPXLRVLNRGGDDVTCLARFPKCRLQPPRRADLPKLQRLHDQREEKGFYSNKLHIXAGTKHKNGFLTS

SEQ ID NO: 160885 - protein, 455 aa, Oryza sativa
  Clone ID: PAT_MRT4530_60120C.1.pep
MAILREFGTIEGMENLLPEDVLSNIIHRLAPRYLAISRCVCKTWCTIIEAHNLLHVDLLPRPLCGIFINFNELSMSEFFSRPSKGPTVSGNFDYLPCSSCIIDHCNGLLLFHKYVVNPATRQSAPLPPCPYMVVEHIFHREYLVFDPTLSPHFEVFMIPEIRRSNVWYNMLNSDDKLDPAIEELEWPPSPCILHVFSSRTKVWEERSFVREGEAAGNVSDMRLDHPYVPDTSVYVPDTSVYCRGVLYVYCQNKYVMRISLSNGKYQVIKPPSDCEGMAYTNLYLGKSMKGERGFEYEDGNNEAVVEDRFEWDSDNDNVIETNSRGSGGYINFLVDTTRRGRYNSGGYIDFLGFHPYKEVIFLSDSLRRGLAYHLNSSKIQDLGSLRPTNYGTETKRVKWEPLRHAMPFATIPKRYGVKGWGRKGGLRSQPSLWTPFTIPKPFAKIPMKYGVKGWG

SEQ ID NO: 160886 - protein, 68 aa, Oryza sativa
  Clone ID: PAT_MRT4530_60121C.1.pep
KFQSDQPDPVKWCLVKMCTCKLTVEYRMNIHGFQFRYQHSYLSPFQGKFWHLTSLHLWVNFWFPEVPS

SEQ ID NO: 160887 - protein, 474 aa, Oryza sativa
  Clone ID: PAT_MRT4530_60122C.1.pep
MAILREFGTIEGMENLLPEDVLSNIIHRLAPRYLAISRCVCKTWCTIIEAHNLLHVDLLPRPLCGIFINFNELSMSEFFSRPSKGPTVSGNFDYLPCSSCIIDHCNGLLLFHKYVVNPATRQSAPLPPCPYMVVEHIFHREYLVFDPTLSPHFEVFMIPEIRRSNVWYNMLNSDDKLDPAIEELEWPPSPCILHVFSSRTKVWEERSFVREGEAAGNVSDMRLDHPYVPDTSVYVPDTSVYCRGVLYVYCQNKYVMRISLSNGKYQVIKPPSDCEGMAYTNLYLGKSMKGPCQIIDGPGPWTLQDINNQERGFEYEDGNNEAVVEDRFEWDSDNDNVIETNSRGSGGYINFLVDTTRRGRYNSGGYIDFLGFHPYKEVIFLSDSLRRGLAYHLNSSKIQDLGSLRPTNYGTETKRVKWEPLRHAMPFATIPKRYGVKGWGRKGGLRSQPSLWTPFTIPKPFAKIPMKYGVKGWG

SEQ ID NO: 160888 - protein, 140 aa, Oryza sativa
  Clone ID: PAT_MRT4530_60123C.1.pep
DARPTADHRRRPGATPDRRLPPKPPPWDAATTSAEHRPQEAAGGRVRPVGDGAGAGGRPLQPQPNAEPPRHQLPARRRRAAAQRRRGVKWAGQRQGGGEDVQPAGEKRSAGPAEPAARRAGAGERPPGERVERVVGHGRS

SEQ ID NO: 160889 - protein, 194 aa, Oryza sativa
  unsure (1)..(194): unsure at all Xaa locations
  Clone ID: PAT_MRT4530_60124C.1.pep
PLLSPRALLGRPEATPQLSPXPPPLSRGHRQVGPTCRTRLPPRAAPPRPQPPPRPCLRLLRATSATPARAPHPSRPLPSLSRPRPRPRWPGFDFRIPPLSPPPLXTLAGDSRLSRPRPAPSLPFSPISPNSPELSITPAPCIHPPPPFPSLRPPXRLAAAPRRRCRRVREAKLHPGRPFPVEFRRRNSHSLALR

SEQ ID NO: 160890 - protein, 75 aa, Oryza sativa
  Clone ID: PAT_MRT4530_60125C.1.pep
KNFPGGGPTCVFPQKPFFQRGPPKLGFSKIPPQKRGWGVFFKIFGGKNGFPRGLIFGPKGGPPLKRCPWGEPPVG

SEQ ID NO: 160891 - protein, 64 aa, Oryza sativa
  Clone ID: PAT_MRT4530_60126C.1.pep
MPPGAGQMWLDVAGRRRPIPECRTGGRCSHLVKSIGKPRPGRNVGEIGDAKSSLSNTRSGSSKG

SEQ ID NO: 160892 - protein, 204 aa, Oryza sativa
  unsure (1)..(204): unsure at all Xaa locations
  Clone ID: PAT_MRT4530_60127C.1.pep
LVREERAWGRERRPKAAAMAPLAGTRRGWVSGGEPRRGKGGRGRSRPREANGATARDGDEPXRRLAAAEAAKAAAAGGCTARRRSGAREGSAQWGKSERGCRRRLKRGWGXTGRGRDRRDLTADVGEWGGERGGIRFSNPGHLGRGREREREGNGRGDCGARAGVADVARERRRRGRGVGCGGGDASGIGGRWGKDPTGGPHLH

SEQ ID NO: 160893 - protein, 368 aa, Oryza sativa
  unsure (1)..(368): unsure at all Xaa locations
  Clone ID: PAT_MRT4530_60128C.1.pep
MRRLEESYATSPAVAHAGLWADVSTXGCGADMRASLVSDSRVAGLPWTGTTRVIHRRSTGSTARIGLGPIGRCGGGQARLGSAQSRPTGHGDGARTRTRVADDSNRRRRRRRKGXAPKGAAARREREGKRXGGGASPRVAGAEEDDGEQRRQATGGRRRRADELRGALRKEKRGIREREMDHGDRKPWPKAAVEVVLTRVRGNEGSGDEPRRRRGGEGTGRGRERRESPADVGSGGGERGGIRKSNPGHLGRGREREREGSGRGRRGARAGVVDVARGRRGRGRGGGFGAAARXEIGGRRETGPTGGPHLSATPREEAAGXPGWASACGRPSKGEGRKEGMGRRPIRKKXRKKRGKRKRKRKKDFPWN

SEQ ID NO: 160894 - protein, 367 aa, Oryza sativa
  unsure (1)..(367): unsure at all Xaa locations
  Clone ID: PAT_MRT4530_60129C.1.pep
MRRLEESYTTSPAVAHAGLWADVSEGARLGADRRGPPVSXGRERKGVAARGPTGQRHGERRGGGATAGPRGRGARARRETAATMAPAARRSHGGGAHAAAAQSNDRRRSSGGGERRLAALGGEEGEKEGGDASPRVAGAEEGDGGRRRQATGGRRRLADELRRALRKEKRGIREREMDHGDRDPWPKAAVEVTLTRARGEXGSGDEPRRRRGGRGTGRGRERRDSTADVGEWGGERGGIRFSNPGHLGRGREWEREGNGRGECGARAGVVDVARGRRRRGRGVGCGGGGTSGIGGRRETGPTGGPHLSATPRGGGRAAGXSGWASACAGPTERRGRKKXMGRRPIXTKRREKRGKRKKKKKKDFPWN

SEQ ID NO: 160895 - protein, 281 aa, Oryza sativa
  unsure (1)..(281): unsure at all Xaa locations
  Clone ID: PAT_MRT4530_6012C.1.pep
MNPRDPVEEFLNQTIADPDEHSSTTSKAQYDSDTGIIPTEFENHGVMQGEFMDDLSGLENLDFWPDDRNPQLSALYEDTPLLPYDSTDQDVLSMDSGAESLQDLFNSMTVMELKKLPLGFRFHPTDEELVRHYLKGKITGQIRSEADVIPEIDVCKCEPWDLPDKSLIRSDDPEWFFFAPKDRKYPNGSRSNRATEAGYWKATGKDRVIRSKGDKKKQQVIGMKKTLVFHRGRAPKGERTGWIMHEYRTTEPEFESGEQGGYVLXRLFRKQEEKIERPSPG

SEQ ID NO: 160896 - protein, 160 aa, Oryza sativa
  Clone ID: PAT_MRT4530_60130C.1.pep
MQKSRPTTRIYGEKRSYALNPHRSNTDKHHRPARRAETARATGSEALTPLRSDGRGGSSRLVTTWPLLMPTKSPDFGCDGAIGEPFFLHDKQREKIYVSGAEGGERLGFQIGGGGGGGGGWLTLPGRNEAAAAREETLAEECSYIGARRVAVSRVIDGLG

SEQ ID NO: 160897 - protein, 143 aa, Oryza sativa
  Clone ID: PAT_MRT4530_60131C.1.pep
MAPAARRSHGGGAHAAAAQSDDRRRRRAAARGEEGEKKGGDASPRVAGAEEGDGGRRRQATGGRRRLADELRRALRKEKIGIREREMDHGDRDPWPKAAVEVALTRARGDEGSGDEPRRRRGGRGGPRPREANGGDGVRRRRA

SEQ ID NO: 160898 - protein, 178 aa, Oryza sativa
  unsure (1)..(178): unsure at all Xaa locations
  Clone ID: PAT_MRT4530_60132C.1.pep
KEGPFEXPLSSIRAYIQDXVTPRXFVHVGSAGVTRPERPGLDLSKQPPAVRLNKELDFILTYKLKGEDLIRDSGIPFAIVRPCALTEEPAGADLIFEQGDNITGKVSRDEVARICIAALESPYALNKTFEVKSTVPFSEPFTVDPENPPPEKDYNEYFKTLKDGITGKEALEQSTVAV

SEQ ID NO: 160899 - protein, 485 aa, Oryza sativa
  Clone ID: PAT_MRT4530_60133C.1.pep
MDRPNLAVAVVGLLAVVAATLPAPSWQFFDLFLPAGPSHRSSGGGFGKWVLMNHEEYVEKKSLYAMKAAGDIGGKTIDASLSAAEEAKVTWVVDPKGTPGDTTFTTIAAALEKVPEGNTKRVILDLKPGAEFREKLLLNITKPYITFKSDPANPAVIAWNDMAATRGKDGKPVGTVGSTTVAVESDYFMAYGVVFKNDAPLAKPGAEGGQAVALRLFGTKAAIYNCTIDGGQDTLYDHKGLHYIKDSLIMGSVDFIFGFGRSLYEGCTIVSVTKEVSVLTAQQRTKTIEGAIESGFSFKNCSIKGQGQIYLGRAWGDSSRVVYSYTDMSKEVVPIGWDGWNIAKPESSGIYYGEFKCTGPGSDAKKRVGWALDLTADQAKPFIGTHYIYGDSWILPPPDGKSAASTSTASKSTASAIPRNSTAPATATESNSTAPATPSNSTAPVTASNSTAPATASSSNPPATKSYSGPPATPSASSTPAKASR

SEQ ID NO: 160900 - protein, 399 aa, Oryza sativa
  unsure (1)..(399): unsure at all Xaa locations
  Clone ID: PAT_MRT4530_60134C.1.pep
MASPSSLTVDAVLDDTIKIIADAVRSSFKAPSGXDDDTLTTAVAGTAADRAATAARAALAPVLLGLLPTTPAADDAISSTVPPPVPSMTAPSTTAIPPPPTSTPAPAAQLPPEILALLARLSITTTPAAPTQDATAQPPALDAAAPPPALDAEAVANLHSQAVAVLNVKALVPVTLDLDANNYSRWQGLFLVALGKYALTDHVFSDVPRPDHADWTQMDCVVLSWLYGSISSTLMQEVLSPTATACSVWHRPNSSFVLNNVLISPEIIKSLISARRFTCDNWCSVELDPFGLSVKDYPTKIEIVRCNSSCALYPLPADAYSSAASTRAFVASSTNTDAVAAVSFARSRSTSSTPPPSRFVAGALISTRTGERHLYRRLRPWIPIAMVHLSLSNPSLLLP

SEQ ID NO: 160901 - protein, 264 aa, Oryza sativa
  unsure (1)..(264): unsure at all Xaa locations
  Clone ID: PAT_MRT4530_60135C.1.pep
RRRHAADDGGVRRHGRRRRRPKATARNSRVAGAEEDDGEQRRQATGGRRRRADELRGALRKEKRGIREREMDHGDRKPWPKAAVEVVLTRVRGNEGSGDEPRRRRGGRGTGRGRERRESPADVGXSGGGERGGIRKSNPGHLGRGREREREGSGRGKRGARAGVVDVARRRRRRGRGGGCERGGASETGGRWGKDPTGGPHLSATPGEEXAAGRPGWASACGRPSKEEGGRKXEGMGRRPIRKKXRRKKRGKRKRKRKKDFPWN

SEQ ID NO: 160902 - protein, 61 aa, Oryza sativa
  Clone ID: PAT_MRT4530_60136C.1.pep
MGRIRSRQRHEGRLRHSALTIEDFQALVLTREQVGIAQAHLPCHTGHSNVARPVGHACAPH

SEQ ID NO: 160903 - protein, 31 aa, Oryza sativa
  Clone ID: PAT_MRT4530_60137C.1.pep
TSSGASYQQTLMRPHWMSQASFPSSFLTGYS

SEQ ID NO: 160904 - protein, 46 aa, Oryza sativa
  Clone ID: PAT_MRT4530_60138C.1.pep
TITGMLHFIIEWLHLHECLAASQHSQRKPQSHTLILFSFLLEERQF

SEQ ID NO: 160905 - protein, 710 aa, Oryza sativa
  Clone ID: PAT_MRT4530_60139C.1.pep
MNLLASVAGEISKSELISSSASPRNSPGNEEGCEGDNIGKLKVQSDMGLSRHAGPTNDAEKIISDKGEKIGAGLVAKEEQHLGDAKDNKVTSSGLPSPPGIDVKAVESPAKTENHEVRTTDKGGDGDKSVTKQPVDIKIDAKLNIYPSTTSELRGGDKQSHGLLKSTDQKNRQCLPDNSEAMTDLPSFSSSTVEVNKADGLLVGNAVLREDEKKEQPSSTSADATKLAVPAGVPFGPENGISSKELKDNSSESSSHARPGTTVSQDTERSARRSSKKSSDDASGNEDLVSSDDGSSFAAKIRPSATAKLDFDLNEGIPGDDVHQSEAETSPANLLRFQPETGWKGSAATSAFRPAEPRKIFEMTLSAPGIPVSDAADKHRPALDIDLNVADEQFLEEDVSQSSVQTTGSESGNTRRSNGPTITWSFSSSDANSSRDFDLNNGPTLDEAGTEHAPRSLSSKNTSSIPFLPQVASMRMNSAEMSNISPWFASANACAPVAIKSFLPSRGEQPHPVETAAGSGTQRIITSMADGVQHGSDPSRTPVISTSPTMMFHPPAYQYAGFPFTPSVHLQAPGFSIGSTSYANSAPGGIPYFPTIAPTLVGPAGALPAQHTRQYAINLPEGSSTVGHDNNRKWGRQGLDLNSGPGSVDVEVKDDRVTLPVRQNFIAPPHAFVDEHTRMYQMPPGVGIKRKEPEGSWDAERSSYKQLSWQ

SEQ ID NO: 160906 - protein, 125 aa, Oryza sativa
  Clone ID: PAT_MRT4530_6013C.1.pep
MAGNENAVGTTRDDSMSKDPPAEVEIETSTTSEPEKDSSAAKPCLSDRNHEPTRITSEVTRSWCPIHKTRKHTLQACWVFLNVHAEIRACKERGIQRTSPTRDVFCPIYKTKNHNLSSCKVFSAP

SEQ ID NO: 160907 - protein, 87 aa, Oryza sativa
  Clone ID: PAT_MRT4530_60140C.1.pep
VPYCVFFYAKLSHIQDIHHPQTIWFKELKTGCMLIIPCIRRKRCMRTQDVNSDGNRTLPVQYNATPDAYSPELDCNPTQHEFEHSST

SEQ ID NO: 160908 - protein, 1536 aa, Oryza sativa
  Clone ID: PAT_MRT4530_60141C.1.pep
MDGREFRVGDCALFRAVDVPPFIGLIRWIEKQEEGYPKLRVSWLYRPADIKLNKGLQLDAAPNEIFYSFHQDETSAVSLLHPCKVAFLRKGAELPAGTSSFVCWRVYDIDNKCLWWLTDRDYINERQEEVNRLLHRTRQEMHTAVQQGGRSPKRLTGPSASQQLKAGSDGAQNCGSSKGKKRERGEQGIDQIKRDRDRTLKTDDTEPGNLKGDNMKSEIAKITEKGGLPHAEAVEKLVHLMQLDRTERKLDFAGRVMLADVITATENPDCLGRFVQLRGLPVFDDWLQEAHKGKSGEGGSPKETDKPMEELLLALLRALAKLPINLNALQSCSIGKSVNHLRSHKNPEIQKKAKCLVENWKKRVDAEMKSNDAKPVVSGQAVSWPGKPGFAEISSAGNRRSGSSEPNLKSPVSQLSSSKALTVKPGASDTTVKSSPLISGSSKLQHIQPGNAVTNLKEQPCKSSGGTCSPELHTVKEEKSCSSSQSLNNSQSCSSEHAKTIGSSKEDARSSTAASGIAGRTSGSSSRVHRRTNNGILSSGGQKEATVARSTSLDRSLLPEKASQSVTACEKGTDTPSDQGNGHRLIVRFPNPVRSPARSASGGSFEDPSFTGSRASSPVLADKHEQSDRRVKMKTENSNPHLGNDTNAESWHSNDVKGASVSEEGDKSPYAMLTDDRSRTTEEAGKDACASRVVCSDANEKAACSSENGGRNSFNPMNALIEIKYSEASHSLQAGDDTAMNLLASVAGEISKSELISSSASPRNSPGNEEGCEGDNIGKLKVQSDMGLSRHAGPTNDAEKIISDKGEKIGAGLVAKEEQHLGDAKDNKVTSSGLPSPPGIDVKAVESPAKTENHEVRTTDKGGDGDKSVTKQPVDIKIDAKLNIYPSTTSELRGGDKQSHGLLKSTDQKNRQCLPDNSEAIDRSGDSAAVKLDVEPSFSSSTVEVNKADGLLVGNAVLREDEKKEQPSSTSADATKLAVPAGVPFGPENGISSKELKDNSSESSSHARPGTTVSQDTERSARRSSKKSSDDASGNEDLVSSDDGSSFAAKIRPSATAKLDFDLNEGIPGDDVHQSEAETSPAVCSSAINLPCLSPFISPMSSGLPAPIKVAATAKGPFVPPENLLRFQPETGWKGSAATSAFRPAEPRKIFEMTLSAPGIPVSDAADKHRPALDIDLNVADEQFLEEDISQSSVQTTGSESGNTRRSNGPVRSVGIELDLNRADEVAENHFVSNTPHRVEVPLLSSRPLPAIFSSADTNGSRDFDLNNGPTLDETGTEHAARSLSSKNTSSIPFIPQVAGGRMNSAEMSNISPWFASAHPYAPVAAQPFLPSRGEQPHPVETAAGSGTQRIITSLADGVQRGSDPCRAPVISTSPTMVFHPPAYQYAGFPFTPGVHLQAPGFSIGSTSYANSAPAGVPYFPSIAPTLLGPAGALPAQHTRQYAINLPEGSSTVGHDSNRKWGRQGLDLNSGPGSVDAEIKDERVSLPVRQNLITPPHAFGEEHTRMYQMPSVGIKRKEPEGSWDAERSSYKQLSWQ

SEQ ID NO: 160909 - protein, 403 aa, Oryza sativa
  Clone ID: PAT_MRT4530_60142C.1.pep
MGHGVSCARTGDEHDFFRAAQLGDLDALAALLAADPSLARRATLYDRLSVLHIAAANGRIEVLSMFLDRGAPPDAVNRHKQTPLMLAAMHGKIDCVLKLLQADANILMFDSVHARTCLHHAAYYGHVDCLQAILAAAQTTPVADSCFPGSTSLHLAARSGNLDCIRKLLAWGADRLQRDSAGRIPYSVALKRNHGACAALLNPTSAEPMVWPSPLKFISELEPEAKALLEAALMEANREREKKILNGTKYSLPSPSPGDDSADDDACSEVSDTELCCICFDQACTIEVQDCGHQMCAPCTLALCCHNKPNPTTLTPPSPACPFCRGSISRLVVAQTRSACDPDKPSSLQLTRKRSRRSHNLSEGSSSFKGLPSAMGSFSKLGRGSSRMADSDSSNLDKPEHDL

SEQ ID NO: 160910 - protein, 450 aa, Oryza sativa
  Clone ID: PAT_MRT4530_60143C.1.pep
MGHGVSCARTGDEHDFFRAAQLGDLDALAALLAADPSLARRATLYDRLSVLHIAAANGRIEVLSMFLDRGAPPDAVNRHKQTPLMLAAMHGKIDCVLKLLQADANILMFDSVHARTCLHHAAYYGHVDCLQAILAAAQTTPVADSWGFARFVNVRDDHGATPLHLAARQGRPGCVQVLLENGAIVSALTGSYGFPGSTSLHLAARSGNLDCIRKLLAWGADRLQRDSAGRIPYSVALKRNHGACAALLNPTSAEPMVWPSPLKFISELEPEAKALLEAALMEANREREKKILNGTKYSLPSPSPGDDSADDDACSEVSDTELCCICFDQACTIEVQDCGHQMCAPCTLALCCHNKPNPTTLTPPSPACPFCRGSISRLVVAQTRSACDPDKPSSLQLTRKRSRRSHNLSEGSSSFKGLPSAMGSFSKLGRGSSRMADSDSSNLDKPEHDL

SEQ ID NO: 160911 - protein, 133 aa, Oryza sativa
  unsure (1)..(133): unsure at all Xaa locations
  Clone ID: PAT_MRT4530_60144C.1.pep
MPLVYAISKKRKKTLRQGKENDAWLVALWTAVHNVQLEEEESDQIAWKFTPHGHYSASSAYKAQXWAPGKCKLHAXLIIQNRVWTSDRLATRGWQNNGRCPLCRREDEMALHLVAECRVPPAKTPTLGGGAIG

SEQ ID NO: 160912 - protein, 103 aa, Oryza sativa
  Clone ID: PAT_MRT4530_60145C.1.pep
MVCPSPLKFIGELEPEAKALLEAALMEANREREKKILNGTKYSLPSPLPGDDSADDDACSEVSDMELCCICFDQACTIEVAAVTAVASAVSAAAGAGAAATID

SEQ ID NO: 160913 - protein, 193 aa, Oryza sativa
  unsure (1)..(193): unsure at all Xaa locations
  Clone ID: PAT_MRT4530_60146C.1.pep
WRTPPLGPEERRTGAGGGRRGAGADGGSRGEPACGCLHLNGLRATPTRRREPCRXRTSCSPSAHXAVQHMDQKNRMFKGVAXGQDKGPGDGLGGKKEATCGPSVDRIGGDGIWASPSRGVVAYCVIEERSGRLGATREGSVLREAINSVAWMGLRRLGVTGDSGGWTVWRREERVRGRQFRKRLGAEAGGGVR

SEQ ID NO: 160914 - protein, 205 aa, Oryza sativa
  unsure (1)..(205): unsure at all Xaa locations
  Clone ID: PAT_MRT4530_60147C.1.pep
PPLGSPPHCAVAAVGFARTNSTPSALPPSGFVAGIRIPSRSGXVPEARPPVAVVLPWLAVAVRRRLPPRRPPSMRRPLPFTPLPLPPSAAXAATLMPSRARRPPLSPPPDRXRGRSGPSVTWTGGGSPMWSRSTVDRPPLSHCRVGPACRRPFXLSPEPLTSGTRLSAPPLDDVSRVCVGWWFLQGVGFVRAVEDACGVVFPLAE

SEQ ID NO: 160915 - protein, 98 aa, Oryza sativa
  Clone ID: PAT_MRT4530_60148C.1.pep
PPLGSPPHRAVAAVGFARTNSTPSALPPSGFIAGIRIPSRSGEFGSGPPTWSRSTVDHPPLSRCRVGPACRRTFSLSPEPLTGGPRMSAPRPPLMTSA

SEQ ID NO: 160916 - protein, 75 aa, Oryza sativa
  unsure (1)..(75): unsure at all Xaa locations
  Clone ID: PAT_MRT4530_60149C.1.pep
KNIFLTVQSLRRRWLASPATAHRSTLGADQPPHGRWWPXHGVLSAPDVDVHALAVEHQLFLAQVTGRCRRRLDWG

SEQ ID NO: 160917 - protein, 268 aa, Oryza sativa
  unsure (1)..(268): unsure at all Xaa locations
  Clone ID: PAT_MRT4530_6014C.1.pep
PPEAHSRRRPSHSSLPATSSRTSRLARAPSGRAATSPGVAAASSFPASPPFRGEITGDASSPASSGVATTSPPPAASAAXPGHGVARISPERRHLRAGLSFLLVGSVAPLHHHLHQHRSGVFHAVPSSTQPLLPAIIVSSSSPIVLVVDVPSVARLVVSRRRLRHRHRSGVFHVILVPVQPLPAVLVASSPVPVVVVVVVLSSFPVVVAPXSSSSSSAPRRQAPCRPRLAFVQGSPPKPSPRRSSPLCPSVSAAPVRRCRSYASSRGG

SEQ ID NO: 160918 - protein, 357 aa, Oryza sativa
  unsure (1)..(357): unsure at all Xaa locations
  Clone ID: PAT_MRT4530_60151C.1.pep
MRQLEESYTTSPAVAHAGLWADVIKGGRGADMRGPPVSGSREGGPPWTGTTWVVHCRSTGPTAQIAPGXIGRAAATRLGSAQGRPTGHGDGDGARARTRCRRRRKGDAKAAAXAAARKEREGNRXGEEASPRVAGAEEDDGERRRQATGGRRQPADGLRGALRKEEREIREREMNHGGRHPRPKAAVEVELTGARGDANSGDESRRRKGGRGLERGRXGEIPPANVGEWERRERGRIRKSNPGHLGRGRGREREGSGRGRCGACAGVTDVARRRRRRGRGGGCGRGGAGARXEMGPTGGAHLSASRXEEGGGRPSWALAFGRPSGGERRKENXAGGPLEKKRGKKKKKKEEKDFPWN

SEQ ID NO: 160919 - protein, 86 aa, Oryza sativa
  Clone ID: PAT_MRT4530_60152C.1.pep
MSQEGECAKTDVYSTAWASSSSSSELANLPLAIAWVVTCCSIVGGVHCQQGVNLNQREVFALAIAAKRMTDERRERLQRRTRHSRR

SEQ ID NO: 160920 - protein, 363 aa, Oryza sativa
  unsure (1)..(363): unsure at all Xaa locations
  Clone ID: PAT_MRT4530_60153C.1.pep
MRQLEESYTTSPAVAHAGLWXSAARERGKRGVGKRAPLGSGSKGGDPPWTGTTRVVHRRPRSPPGLIGRAAATRLGSAQGRPTSHGNGXARARERVAGDGNRRRRRRRKGDAKAVAXAAARKEREGNRXGEEASPRVAGAEEDDDERRRQATGGRRLPADGLRGALRKEEREIREREMNHGGRHPWPKAAVEVELTRARGDANSGDESRRRKGGEGAGRGRGRRESPANVGXSGGGERGGIQKSNPGHLGRGRGREREGSGRGRCSACAGVADVARRRWRRGRGSGCGRGGAGARXETGPTGGAHLSATRXEEAGGRPARPSWALAFGRPSGRRGERRMGRRPTRKEKXKKKKKKEEKDFPWN

SEQ ID NO: 160921 - protein, 130 aa, Oryza sativa
  unsure (1)..(130): unsure at all Xaa locations
  Clone ID: PAT_MRT4530_60154C.1.pep
PKGXLWPRCWXXRPSDXDRARRLAXRXAXRRAPLLVPLFDRCYLPCRPCXAGNPVFFITDDRVLCXGLDILHFFTRESXFQPLDVSSPSATPSSGICTPHTRRSLDAVCXGQALRWIEFWSDAASDRRRR

SEQ ID NO: 160922 - protein, 41 aa, Oryza sativa
  Clone ID: PAT_MRT4530_60155C.1.pep
QSSEHNIRQRTGQTREPHETSPRGVKERVVTRVSTKKVIAG

SEQ ID NO: 160923 - protein, 248 aa, Oryza sativa
  unsure (1)..(248): unsure at all Xaa locations
  Clone ID: PAT_MRT4530_60156C.1.pep
MDQGCGGPTRSRLAHRGPRARGWGGRRRLTGSAQSKPRWRRRGAMRRRGRRGAHWNNKEDKREXANGSDSPEGSRRRRIAAAATGGKQRGKRRRDDEGSIQRDGSISGAXRVSFLGSDGVXGAVEVWRREAASGSGRRRRQGHGERRRGLGRRLRTTGRLTELPRELKEEEGERGRGTEGYHFGTGRRDERRRRGSKLSGSGWGRGRRSARSSSSHVHARTGLLVLGDERRRCEPSRATRRGRRRREG

SEQ ID NO: 160924 - protein, 186 aa, Oryza sativa
  Clone ID: PAT_MRT4530_60157C.1.pep
PPLGSPPHRAVAAVGFARTNSTPSALPPSGFVAGIRIPSRSGEFYLRPPVAVVLPWLAVVVRRRLPPRRPPSVRRPLPSTPLPLLPSRRLAPPPLPLVAVAGNVCPRVVAIAVAGRPALSRAEPGRRRPSDQPRERSGPLVPWTGGGPPAWSRSTVDRPPLSRCRVGPACRRPFSLSPEPLTGGPR

SEQ ID NO: 160925 - protein, 363 aa, Oryza sativa
  unsure (1)..(363): unsure at all Xaa locations
  Clone ID: PAT_MRT4530_60158C.1.pep
MRQLEKSYTTSPAVAHAGLWADVIKGGGGGAAPTGGSHWSAAQRGAGAPWTGTTRVVHRRSTGPTAQIGPEPIGRWXSGGRRARLGIKAGRPVRASGDGTRLTXDGDRQHGRRRRRPKATTHDLKWRRGSRREREGSRXGEDASPRVAGAEEDDGERXRQATGGRRQPVDGLRGALRKEEREIREREMNHGSRHPWPKAAVEVELTGAXGDANSGNESRRGRGGRGPGRGRXGEIPPANVGSGRGERGGIRKSNPGHLGRGGGREKEGSGRGRCGACAGVPXVARRSRRCGPVGGCGREVEDGPDRWGPPVGXPGWKEGGGRPSWALAFGRPSGGEGRKENGXRPTRKEKGKKKKEEKDFPWN

SEQ ID NO: 160926 - protein, 54 aa, Oryza sativa
  Clone ID: PAT_MRT4530_60159C.1.pep
RAAVRASTSRVGSISSPSASLLLPRSRARLRPRKPSPRFCSAAEICSLPAPVQV

SEQ ID NO: 160927 - protein, 439 aa, Oryza sativa
  unsure (1)..(439): unsure at all Xaa locations
  Clone ID: PAT_MRT4530_6015C.1.pep
MWCSMETKVRNSPLRSSRRPPTTLQLTERSVKAASAQCTLDIFFRTGETRWPSSARTRTRRTGQQLRNSWQSCVLEQEKRQLLPPFRKMKKVEERLIVYEYTNNGSLHDHLHGTTPPPSSSSSPVRTSLNWKMRIETLLGVSRAIEYLXCYNERPVIIHRDINSSNMLFDATWAPRFGXLADFGASVRCDHSTRSVPADAFYGKFGYIDLEYATTAIAKPTIDVYSFGVVMLEVLTGMRALFYQEEDVHKVFDCSEEDRNAIPAVLAEVTPPFIEVGETVGSAAAAVVGVRLVRVVGCILGLSELQPKLRYVAFHDKGYDIWKCLQFGLVKRLQFGLWKCFGYQLAAMVLRPTYMSVSTRTTATNEVLDRSCCADNHARCYSDSTLILSERVAHSKSATATVGGGRGRRELAVIDGTLRRKGSPCACTTATTTSNSTFA

SEQ ID NO: 160928 - protein, 154 aa, Oryza sativa
  Clone ID: PAT_MRT4530_60160C.1.pep
MEDVGAWEGRGGGVLAPSAMLGREKKRWRRGRGGEDRDEVAEEGRGRGGSELPPPPRFRRPSLLPLPPPRHSVELPPPRHSADLPPPRRSHRAHAASPLRQSPAAPPSSHRPVAPAAPAELPLPRRSTTPPSTRRASSLHLACREDKEEGEIAT

SEQ ID NO: 160929 - protein, 46 aa, Oryza sativa
  Clone ID: PAT_MRT4530_60161C.1.pep
SKPHGSLARVIVQNSGIGPLILIQPVPKLNPRVIFFKQVHQPTNGG

SEQ ID NO: 160930 - protein, 99 aa, Oryza sativa
  unsure (1)..(99): unsure at all Xaa locations
  Clone ID: PAT_MRT4530_60162C.1.pep
TNPRLQRAGDRKNGSPSARREMRRIKNPTQRKHLTRNGPKKKKEKGETTGHLRKWQEGQKYPAMXASYRARSGGGSRPPWMDLAGRRRGKQPRANSCSP

SEQ ID NO: 160931 - protein, 637 aa, Oryza sativa
  unsure (1)..(637): unsure at all Xaa locations
  Clone ID: PAT_MRT4530_60163C.1.pep
MRSSWADSVANAEESAPATGAAPTPVANHQNSRPTRSAYVPPHLRGQAPTTTAAPAPAPGPAAVQPSASVQPSGYAAIVGGSRWAGPASGDGTGAVGGPRQSVGGRGGGGGGGGGWNSRPXWDRRDREPNPFANSEAEEATEVDFDTANTGINFDAYEDIPVETSGHDVPPPVNTFAEIDLGDALNENIRRCKYVKPTPVQRYAIPISIAGRDLMACAQTGSGKTAAFCFPIISGIMSSRPPQRPRGSRTAYPLALILSPTRELSVQIHEEARKFAYQTGVRVVVAYGGAPIHQQLRELERGVEILVATPGRLMDLLERARVSLQMVKYLALDEADRMLDMGFEPQIRKIVEQMDMPPRGVRQTMLFSATFPKEIQRMASDFLADYIFLAVGRVGSSTDLIAQRVEFVLEADKRSYLMDLLHAQKANGTHGKQALTLVFVETKRGADALENWLYTNGFPATSIHGDRTQQEREYALRSFKSGATPILVATDVAARGLDIPHVAHVINFDLPNDIDDYVHRIGRTGRAGKSGLATAFFNEGNLSLARPLCELMQEANQEVPQWLERYSARSSFGGGGGRNRRSGGARFGGRDFRRDNRGGGGGGYGGGGGGYGGGGYGGGGGYGGGYGGGQGSTSSWD

SEQ ID NO: 160932 - protein, 96 aa, Oryza sativa
  Clone ID: PAT_MRT4530_60164C.1.pep
MHQRPIAWNPSTQAYDWVGFTCDATNATILGLRPPSVSLIGCYASSGEESVAAGVACDRTHNRGRTREDSQKKNERREKKIRAKLSFYVVSLLSID

SEQ ID NO: 160933 - protein, 358 aa, Oryza sativa
  Clone ID: PAT_MRT4530_60165C.1.pep
MAPAAQELLLQEVPQPRRTGAALIVGATGYIGRFVAEACLDSGRDTFILVRPGNACPARAASVDALRQKGAVVIEGCVGGKEGRKSVEAALRARGVEVVISVMGGASILDQLGLIEAIRAAGTVKRFLPSEFGHDVDRARPVGAGLRFYEEKRLVRRAAEASGVPYTFICCNSIAGWPYHDSTHPSELPPPLDRFQIYGDGDVRAFFVAGSDIGKFTIRAAYDARSINKIVHFRPACNLLSTNEMASLWESKIGRTLPRVTLTEEDLIAMAADDIIPESIVASLTHDIFINGCQTHFYIDGPRDIEISSLYPDIPFRTIDECFDDYIHVLNLAEEAKEEEEKKNAPTVGRLAIPPTCA

SEQ ID NO: 160934 - protein, 33 aa, Oryza sativa
  Clone ID: PAT_MRT4530_60166C.1.pep
VLVESQRPADLLFSDSIIRPAFLFLISPMFSPL

SEQ ID NO: 160935 - protein, 124 aa, Oryza sativa
  unsure (1)..(124): unsure at all Xaa locations
  Clone ID: PAT_MRT4530_60167C.1.pep
SLAGQXDAARRACGGLCIIMHDMTWIDRSNLGPCVVGKVAMRTDAAPAPLAPAPRSTGATPASAQRRCGLGCSPLVEKQAPWRARWVGGLGSVGSLGSECPGGAATGRFEPPPRAMNPNKISYL

SEQ ID NO: 160936 - protein, 149 aa, Oryza sativa
  Clone ID: PAT_MRT4530_60168C.1.pep
SVKESSIHRRGGGSDLSVGSARSPHRTPPHPTTQRIPKPPTTELAAAAAPPPRGGSIPSRSVAARRKGVAPVDRGVPIPPPPHPSSSPPSPQTEGPRFDPSIHAMPCMMMHRPPQARRAASLSADLYTMGAVHVASGEGMWERNPRRWP

SEQ ID NO: 160937 - protein, 101 aa, Oryza sativa
  unsure (1)..(101): unsure at all Xaa locations
  Clone ID: PAT_MRT4530_60169C.1.pep
VLHTNFLGHSDFNSYIKCTFVIYDAEAEXTDQPGSILKSCITPRTKWEQVKEILGDCGRAAIQTQGSMNNPFGSTFVYGYQNIAFEVMKNGYIATVTLFQS

SEQ ID NO: 160938 - protein, 83 aa, Oryza sativa
  Clone ID: PAT_MRT4530_6016C.1.pep
QHVQRRRRWVAGVVPASSTAVAAALQEAVSSEARERECAVCFEDFEEGEMLARMPCSHCFHGSCISDWLRVSHLCPLCRFPPH

SEQ ID NO: 160939 - protein, 80 aa, Oryza sativa
  Clone ID: PAT_MRT4530_60170C.1.pep
WTNPENSAHTCINAPSNTVAYKAKEYRRQLHRRRVRSVEQTTLDSLTEECKVQLQNLVGLLDTERSDSSEEAIVVCRYKF

SEQ ID NO: 160940 - protein, 105 aa, Oryza sativa
  unsure (1)..(105): unsure at all Xaa locations
  Clone ID: PAT_MRT4530_60171C.1.pep
QVLFLPGGGVTHRFAHRLTDSQNTXAMLTTFHEVGMTHLMKLRSCYKDEFGTRHGVQLGLMSCFVRGDVTGLXNQPIGNAVIDGDDIIYRDYVDFXVAWWSXQGL

SEQ ID NO: 160941 - protein, 272 aa, Oryza sativa
  unsure (1)..(272): unsure at all Xaa locations
  Clone ID: PAT_MRT4530_60172C.1.pep
MQWKQLNCMNDCRYXCMMQREGERQSRGLNPVKYHGKWPFIRVSVFQEPLSAALSAVNLLMHFTGWLSFFLLVNYKLPVRPQTKRTYYEYTGLWHIYAILSMNAWFWSSIFHTRDIDLTEKLDYSSAVALLGYSLILSLLRTFNVKDEATRVMFAAPILAFVTTHILYLNFYELDYGWNMKVCVVMAVVQLLAWAIWAGITQHPSRFKLWVVVFGGALAMLLEVYDFPXPYKGYADAHSLWHASTIPLTYLWWSFIKDDAEFRTSTLIKKAK

SEQ ID NO: 160942 - protein, 149 aa, Oryza sativa
  unsure (1)..(149): unsure at all Xaa locations
  Clone ID: PAT_MRT4530_60173C.1.pep
FFFFFFGSSSEEEEEAGAHRRGGDGGGGGGGGASRSCSAVFFVXXRAPVLRRELFLPIIQCLVGSSSSXXSADSSSILRFSQERERAAREEXHXASQVSXSLTLRTVIGFSVCWGLGFGSNLLMRGGGFGVEFEQRWKEAEEGHPSGDA

SEQ ID NO: 160943 - protein, 159 aa, Oryza sativa
  unsure (1)..(159): unsure at all Xaa locations
  Clone ID: PAT_MRT4530_60174C.1.pep
MPPEAENKPAEEKAPAGGDECAARAAAGREPAAERGVAAGXSMVSGEEGGGGDKKGRKXAKNSVETYKICIFEVLRQVHPHIGISCKAMSIMNSFINDIFEKLAQEAARLHRYNKKPNVTPRENQTSVRLVLRGGLAKHAVSEGTKAVTKFTEQEGLSL

SEQ ID NO: 160944 - protein, 408 aa, Oryza sativa
  Clone ID: PAT_MRT4530_60175C.1.pep
MQSAAAVGLLRPCGATTAAAPLQLRNPSPRGFGVGVGQPLLPPRGLRLSAVAPRAGISARRIGLVPASPEQEDERRRGARDVAVAATAAAAGEAGAEEGGGLAKTLQLGALFGLWYLFNIYFNIYNKQVLKVFPYPINITNVQFAVGTVIALFMWITGILKRPKISGAQLAAILPLAMVHTMGNLFTNMSLGKVAVSFTHTIKAMEPFFSVLLSALFLGEMPTPFVVLSLVPIVGGVALASLTEASFNWAGFWSAMASNVTFQSRNVLSKKLMVKKEESLDNITLFSIITVMSFFLLAPVTLLTEGVKVTPTVLQSAGLNLKQIYTRSLIAAFCFHAYQQVSYMILARVSPVTHSVGNCVKRVVVIVTSVLFFRTPVSPINSLGTGVALAGVFLYSQLKRLKPKPKTA

SEQ ID NO: 160945 - protein, 125 aa, Oryza sativa
  unsure (1)..(125): unsure at all Xaa locations
  Clone ID: PAT_MRT4530_60176C.1.pep
AKGIEYLPXTWCVXNPQCKDVSKLGDNIQLACTYADCTPLGFGSSCNGMDTNGNASYAFNAYFQAQSQKEEACNFQGLAVPTETDPTTAQCNFPIQIKSSAAAAAAAPVAAGVVVAALAQLLLLW

SEQ ID NO: 160946 - protein, 88 aa, Oryza sativa
  unsure (1)..(88): unsure at all Xaa locations
  Clone ID: PAT_MRT4530_60177C.1.pep
FFFFFFFFTGAGAIDLXKICYXEKXXDKHCFXVYIFLGTSAIXAVXISXAXQMKNGXTQRKPNPFGASXDSFNIIFHXXKIFPHQASX

SEQ ID NO: 160947 - protein, 459 aa, Oryza sativa
  Clone ID: PAT_MRT4530_60178C.1.pep
MGGDPTADPSSAYFIDADHPYAAAAASALTSHRSRSKWSHLSSLAVPDPLPASAVAAVPLLLRRRPHVALSFHLFATRRLLPSGSPPPLLLSVSAAHVAAASRLRRAAISLLSSAARHYPHSQIFAALAATYRRFASAPFVFDLLLLAYLRSRRDALAAASVARRILAAGAHPLPSTSAALLRSLPSAAAALDMYREIYTRPSSRINSQLLPTVHTFNSLLLAFYREGKCDVFKVVLQEMDRYSCVHNVCTYNIRMAAYCDSKEVEKARGLWDEMVEGGIQPDVPAYNTMISGYCGVGEVGMAEEMFKDMEMGGIDPSVTTFEWLVRGHCRVGDIDAAMLVRADMSRRGFQMAAEVVEEVVNVLCQKKRVKEALGVLKEEMRKEEFVPSRECYEVLIRELCEQGEVEVAMRLQAEMAGMGFKVGSEVYCAFVCAYEKAEDYEMAEKLRKELSVISIQDG

SEQ ID NO: 160948 - protein, 93 aa, Oryza sativa
  Clone ID: PAT_MRT4530_60179C.1.pep
YRQSGAYHTEGDLITPTVRAISVSHSRRHSVAVCTSSYQIEPVWGQKYGPCQCVSTGKIGCWLLLRNTPVHVLAIPEKFMFVSSFLLETFALE

SEQ ID NO: 160949 - protein, 152 aa, Oryza sativa
  unsure (1)..(152): unsure at all Xaa locations
  Clone ID: PAT_MRT4530_6017C.1.pep
CLTLCPHCEEDHPPGECPTRKVTCFLCKGTNHVPKDCQLSVLLIKTAEIQRTTLRLSRQLVSSNSNIDDIIHSTNAPPAAPDSATNHSNNTFSTNHSLHRQPQQRIVVDGRSCVSPRPTPGRAKGNQSQEGDTKQKTVLCFKXQSEGSFSCE

SEQ ID NO: 160950 - protein, 140 aa, Oryza sativa
  Clone ID: PAT_MRT4530_60180C.1.pep
PSPPGAPPAAPWCSTGRCSWTWWRRRYRKTRCSCRCTAPRSRRRCPATARRTCRPPPRRSGRASRRRCSWWGTASTQSRTSSPPSSSAQHLPSTLSSPRRCPSKSASSTAGCTTSPCAALASSSSPSTSRRLIHRPSAPA

SEQ ID NO: 160951 - protein, 85 aa, Oryza sativa
  Clone ID: PAT_MRT4530_60181C.1.pep
RPVLLHSRRRSVGGDISDSMDSSVRWCRWSSPSGVRFCFSVTFLFSFCIFYSSKEATPIYADLATVRRWQPCGRGHPERWPRTRG

SEQ ID NO: 160952 - protein, 1345 aa, Oryza sativa
  Clone ID: PAT_MRT4530_60182C.1.pep
MASVPSDLASRPDLGSCMVAATSEMERLKQLFTARSVVAWSDEGQKVEIGTFADDIRSAFRIHRSDIQITKFYPEDFFLTFVNHSDREEVLQEPRLVTRSGRVYHFKPWNERRNAEVIDVRFHARVCIEGIPMHARSEEVATKIIGCKSSVHYIEEYSRRRNYNRTFDLWIWSSDLSSSILKASSFSITRPDSEARATDVPFPELEPPRMPGILPQLFLLFPNLSHLICCPCHRIRGLCSCLKDTWILSAADSQATPVEVTRHDVEEFLAEVTTPIQQPLLPAPGTKPRRPCCNKVITPIQRQRERLAVKARRNTKLDLIAQEILAKKFGVLDDNKRLDDQIKKLYLQHYKKLLSPADMKTITTLVENGGCKGIRLRAKKAASVLNCFILNWNVRGLNSQVRKKSVKLLVEQMNATIVCLQETKMNQISDVDVLHTLGSRFKNEFAFLPADGTRGGILLACNDNYFSLSNVLRKQYSLTATVTMKNDGIAWTITVVYGPQQDAQKIEFITELQEIKQLVMSPWLLIGDFNLIYKTSDKNNSRLNRSMMQRFKGTLDRLEVKELPLSGRKFTWTQECDNPTQSKIDRAFCCPDWDVLFDSAQMYALSSSCSDHAPLFITGCVEREQNNSFRFESFWLKFPNFLQITEESWNRPLQTTNPFARINLKLRRLARDLRRWKSTKIGDTRLQLAIANEVIFQLDVAQEDRVLSDEEQCFRKFLKISQILMSLSLKKNLNMSFLIYPRKKPLARMVSLGLFSSWDIIKIDMLQAVTFFGDLGYSRLQDLNSAHICLIPKKTDASKVEDFRPISLIHSFAKIIAKLLANRLAPKLGDLVSQSQSAFIRKRAIHDNVLFVQNMIKACHRAKKPTLFLKVDISKAFDTVNWPYLLEVLQNFGFGQKWCNWISNLLGTSSSAILLNGTPGQAEESGLLSSLQRQRRFRCSLYADDVALFIKPNRDEMLVLRGILSVFAEASGLYTNMEKTEIYPISCNEINLDDCLSIFPGRVSNFPCKYLGLPLHTRKLRKVELQPLVDKVGSRIPGWQGRFFTSAGREVLVKNTLSSTPIYHLTILQQNKWPYKRIDRFRRAFLWKGKDPENVSGGSCLLNWSSVCKPKSLGGLGTLNLEKFARALRLHWLWYEWKDEHKPWINMEIPCDEMDRILFRASTQISLGNGMKCKFWSDNWLQGRAPKDLAPNIFRLAKRKANCVALEMQNNHWITSLRMITSIEEINELVFLGTQLQEINLHCNSLDNITWKWTQHGEYTAKSAYEIQFQGSVVNKNFMPLWKAEAEPKHCFFGWLILHQRTLTAENLLLRHWPCDWICSLCTEAFEDANHLAKECSFTILVWNQ

SEQ ID NO: 160953 - protein, 1251 aa, Oryza sativa
  Clone ID: PAT_MRT4530_60183C.1.pep
MSDTDDLKTTIAQLAETVKALQATAAANTKAILALSADKSLSSGPKAGTGETNTDRPPPRFQKLDFPKYDGKSDPLVFINRCESYFHQQKIMAEEQVWMAGDEGIPPWRRFVDLLNLRYGPPLRSTPLFELADCRRTGTVTEYQDRFQALLPRTGPLEEAQRVQLFTGGLLPPLSHAVRVHNPQSLAAAMSLARQLELIKQSTPALPTARPAPRALLLAPPPRLALPAPERAAAPAAPVAGNPVKRLSQADQAERRRLGLCYNFDERYTRGHNRVCRRVFFIDGVELADADDAQAAADQDAEAPVFSLQALAGVPAADTITHNFISEAAARRSGMPLHTRPRLTAMVANGERVTCAGVLKAAPLTIDGALFPADLFVMPLVGFDVVLGTCWLGTLGPIVWDLASHRMSFQRQGRTVCWSGVPTPGAPALAATTDGEPLLDGLLATFGDLFAEPTGLPPQRAHDHCIILKPDAQPVAVRPYRYPAAHKDELERQCAAMIEQGIIRRSDSPFSSPVLLVRKPDGTWRFCVDYRALNALTVKDAFPSPCAPSVAYLGHVISAAGVAMDPSKVQAIRDWPARRSPRAVRGFLGLAGYYRKFVHNYGTVAAPLTALLKKDGFSWVEAAAVALAALKTAVTTAPVLAIPDFAKLFIVECDASSHGFGAVLTQEGHPVAFFSRPVAPHHRALAAYECELIGLRLAMIPQHHWVGKLLGFDFSVEYRSGATNTVADALSRRDIEEGELLAISAPRFDFIERLRHAQATDPSLVAIHDEVRAGTRAAPWAVVTDMVTYDGRLYIPSASPLLQEIVAAVHDDGHEGVHRTLHRLHRDFHFPHMRRLVQDFVKACVTCQRYKSEHLYPAGLLQPLPVPSIVWANIGLDFVEALPRVHAKTIILSVVDRFSKYCHFIPLAHPYTAESVAQAFFIDIVRLHGIHQSIVSDRDPVFTSGFWRELMRLMGTKLLMSSAFHPQTDGQTEAANRVIVMYLRCFTGDRPRQWLRWLPWAEYIYNTAYQSSLHETPFRVVYGRDPPSIRSYEPGETRVAAVALEIEAREAFLADVRYRLEQAQEVQKKHYDRLHRPVSYQVDDWALLRLRQRAASSLPCTTTGKLKPRYVGPYRVTEVINDVAVRLQLPPGARLHDVFHVGVLNKFVGTPPTSTPALPPTLHGAVVPEPARVTRGRLARGVRQVLVQWRDEPAESATWEDLDDFRARYPAFQLEDELDFDGGGDVMYGRTYRRRRDMRRAAERATATSSG

SEQ ID NO: 160954 - protein, 51 aa, Oryza sativa
  Clone ID: PAT_MRT4530_60184C.1.pep
PTWDFGHVTLHTKRDCLNFSFTGVKFFLLIIYMLRIKPPNFGGPFKKQLLV

SEQ ID NO: 160955 - protein, 122 aa, Oryza sativa
  Clone ID: PAT_MRT4530_60185C.1.pep
YHPHHFFFVEIHRFFHEFIINLNKNLRLSPSRARFHLIAFIGHRLPSQTNTCLFCTLCAHSCAPENNFPVGHPSQIGPGQARLTLEFFENRLPEKKLQLVDMSILVILLSPRLRCYKGSGFL

SEQ ID NO: 160956 - protein, 95 aa, Oryza sativa
  unsure (1)..(95): unsure at all Xaa locations
  Clone ID: PAT_MRT4530_60186C.1.pep
LKCSSPREYWXKLXRDGIPFLPGYFTGYRATFIVFHAFGPLKLPQMAETVIIIQSLIMNPYPLPLTLFRARFVFSPLCFTEATLANPWFIPTEKK

SEQ ID NO: 160957 - protein, 435 aa, Oryza sativa
  Clone ID: PAT_MRT4530_60187C.1.pep
MMASPDLFPNVSFSHVSVPAAAGASTEVTGGATAVFGGDASTGAPRLSLVWSGETQAKHTLEIDLSDAQIFKLGPTEWLCVSGESHSFIICCTGWLNGFMLTLNSLRQKSYSRAIKVVLRTEAESKAFYLAFQQWKHRVISGKAGEPLENGLIIGSKSKFDTKIEASSAKMYFHYYGQLLHQQNMLQDFVRTGTYYAAVMENRSDFEGRVVVDVGAGSGILSLFAAQAGARHVYAVEASEMAEHAQRLISGNPSLGQRITVIKGKVEEVELPEKADILISEPMGTLLVNERMLESYVIARDRFLVPGGKMFPTTGRIHMAPFSDEYLYVEMANKALFWQQHNFFGVDLTPLHGSAFQGYFSQPVVDAFDPRLLVSPPIKEPYYSMSQPQPYVMQQDQQQQQLPSLQPQGSEQQMQDGLSPSITIEPDQDSAAFTR

SEQ ID NO: 160958 - protein, 91 aa, Oryza sativa
  unsure (1)..(91): unsure at all Xaa locations
  Clone ID: PAT_MRT4530_60188C.1.pep
DRPSXKRLAVRRHGRQAAXXHRXXLRXXLHAGLLNXPXAXVRLXSLSXXXSXXXCSYGSMXSXFXAXPXRXXNLKXXXVRXLCVSCCFKLS

SEQ ID NO: 160959 - protein, 186 aa, Oryza sativa
  unsure (1)..(186): unsure at all Xaa locations
  Clone ID: PAT_MRT4530_60189C.1.pep
MASPDLFPNVSFSHVSVPAAAGASTEVTGGATAVFGGDASIGAPRLSLVWSGETQAKHTLEIDLSDAQIFKLGPTEWLCVSGESEAKDGVEEKSYSRAIKVVLRTEAESKAFYLAFQQWKHRVISGKAGEPLENGLIIGSKSKFDTKIEASSAKMYFHYYXQXLHQQNMLQDFVRTGTYYAAVMEN

SEQ ID NO: 160960 - protein, 118 aa, Oryza sativa
  unsure (1)..(118): unsure at all Xaa locations
  Clone ID: PAT_MRT4530_6018C.1.pep
GGGEVLQSKGETFILVPLRITHQKFLFPFLSHCFIGRAGRRSSDPQLLPPFAQKHRTHLLSSPNQKSLPFFFFFVFSFIVSPLAGGDEPQEGAGGGAAXAGVEGGGGVXRIAEAGGPG

SEQ ID NO: 160961 - protein, 248 aa, Oryza sativa
  Clone ID: PAT_MRT4530_60190C.1.pep
PTRPDRFLVPGGKMFPTTGRIHMAPFSDEYLYVEMANKALFWQQHNFFGVDLTPLHGSAFQGYFSQPVVDAFDPRLLVSPPTFHTLDFTTMKEEELYEIDIPLNFVASVGTRVHGLACWFDVLVNGSTVQRWLTTAPGSPTTHWYQLRCILSQPLYVMAGQEITGRLHLVAHSAQSYTIYLTMSAKMWGEGAEQGGILQTSTAKLELKEPYYRLSQPQPYVMQQDQQQQQLPSLQPQSPLWDYHYGQD

SEQ ID NO: 160962 - protein, 79 aa, Oryza sativa
  Clone ID: PAT_MRT4530_60191C.1.pep
PTCLCTVSKWWQTWWYSAAPVAEAFNTSCLFSRPVFCTCLCLGNERHRRRPRGCDNPWELVEPGVHAKNRPPVVSCTIG

SEQ ID NO: 160963 - protein, 49 aa, Oryza sativa
  Clone ID: PAT_MRT4530_60192C.1.pep
MGHPRLKATTLKDVVGGVTEVLPANKLATKEDADKVAATAMQKRWEACR

SEQ ID NO: 160964 - protein, 111 aa, Oryza sativa
  Clone ID: PAT_MRT4530_60193C.1.pep
MNPDSNKTIVEFGRPTKDGFSTSVFVQVPGWVRVKGELVYMGGRSEYCLVELLEPEGSRDEEKCDECVLRLTTLRVVFDDGGELVATARRPAGCYKFSRSGGLCTLQAFWM

SEQ ID NO: 160965 - protein, 64 aa, Oryza sativa
  Clone ID: PAT_MRT4530_60194C.1.pep
ANMICSYQSIEYVLHMLRITHELNLTHMSSRIRDDLTPCAAVIDILVHTYDPLSRADECLHRKL

SEQ ID NO: 160966 - protein, 207 aa, Oryza sativa
  Clone ID: PAT_MRT4530_60195C.1.pep
RPGPTRQPLSAAEGSYAGAVGGRRRARAPMVAGGAEEGGGAARVDGVGGVPAVGELDEGVDGDGNGAAKPEEVMPVRETVLASGEGRLKVVGDGGERERRRELDSGEETMRQGGGDLARLGSAQSRPAGHGKGAGARARVAGDGNRRRGQRQRTAPRRRRARVVAAHGETGKERKGEGVLTGGGGDYRRRGAMEGGRQAADRVRDDQ

SEQ ID NO: 160967 - protein, 48 aa, Oryza sativa
  Clone ID: PAT_MRT4530_60196C.1.pep
LTYSTLFLACVQCIRLSNILKLWKALYTFQIMVHQRLLSSLGSFMVSW

SEQ ID NO: 160968 - protein, 133 aa, Oryza sativa
  Clone ID: PAT_MRT4530_60197C.1.pep
MHGVPLPGCRKVCSFSSGSLSPSPPSLSNRRPPPLHPCRTPSPHCHWPPPLKPPSSSSSSQPTPNSALHVAMAPGYRHTPPCPAVRAAAPSRRRTAVPPSPAHSPTAAARDDTPTSSSQSSSPSRRRAEPHAA

SEQ ID NO: 160969 - protein, 494 aa, Oryza sativa
  unsure (1)..(494): unsure at all Xaa locations
  Clone ID: PAT_MRT4530_60198C.1.pep
MDSIWPLEVRMGLCVCGGWWRGRGPMNLTLPKMILHACSSQSMKTPNWPLSTPVKGVRASTTRTQRXSTDPACVVIPHRTFALSQEPVHEFYGHDDAILDLSWSKNRDLLSSSMDKTVRLWQVGCNSCLKVFSHTNYVTCVQFHPTSDNYFISGCIDGLVRIWDVRRCQVVDWADTKEIITAVCYRPDGKAAVVGTITGNCRHYDASENHLELESQVALNGRKKSPLKRIIGFQYCPSDPKKLMVTSGDSQVRILDGLHVISNYKGLRSSSQVAASFTPDGDHIISASDDSSIYMWNYANQIAPVTNHVKTVWSNEHFSCHDVAIAIPWNASQTRNSISLACSITSSQQEVLDEFHNEHDSSSCSHTEDSPDGDSLYQLPSGNFTLSSAFFAESAPRGSATWPEEQLPSNSTTQSTLRKSQYKFLKASCQNAATHAWGQLGPCPCSDLGLLSPACTVTSLFFQIPPQVLPIEVIFPGSLLVLFVSRTIAQQSQK

SEQ ID NO: 160970 - protein, 178 aa, Oryza sativa
  unsure (1)..(178): unsure at all Xaa locations
  Clone ID: PAT_MRT4530_60199C.1.pep
GINALLSLSSPAXATSMAPTSSSTPAGSRALAAEGVFECKTCNKSFPSLQGLGGHRTSHTRLQAKLLSDPAAAAAERDRARIHEGETGTTTVVLTAADVDDSGGATVPQPPEAMLDLNYPPPVAVPPSPAAARARRSAAPICSLPAACASAAALPACLLNRVAPPPPPGFTKPTEHTD

SEQ ID NO: 160971 - protein, 799 aa, Oryza sativa
  unsure (1)..(799): unsure at all Xaa locations
  Clone ID: PAT_MRT4530_6019C.1.pep
MYMFVAQSLDKLLISSPAYQAILQLYAFADGQKRRFSDTLSSYPSNEAYNAIIGRTALAKFMAASHYAYQVLKMPGPKGTITIQGNAKLAVQCDKRSLDMVEQTPSPPATTEPPKKPSDIPGVPREVIEHKLMVRPDAKPVKQRLRRFAPDRKQAIREELDKLLKAGFIREVLHPEWLANLVMVRKANGKWRMCVDFTDLNKACPKDHFPLPRIDNWWTQQPAKCTFGVPSGKLLGFLVSGRGIEANPEKIKAIENMKSPTRLKEVQKLTGCMAALSRFVARMGERGQPFFALLKKQDISIKSQVLADFVADWTMPDNKSDNQVDNETWTMAFDGALNSQGVGAGFILTSPSGDQFKHAIHLNFRATNNTAEYEGLLAGIRAAAALGVKRLIVKGDSELVVNQVHKDYKCSNPELSKYLAEVRKLEKRFDGIEVRHIYRQDNIEPDDLARRASRREPLEPGTFLDILTKPSVKEVSGEVSSATPDISSEATKAERAVADIETTDDWRTPLIKFINSEELPEDDTEAEKITRKEKIYCMVGNDLYKKVPNXDEGICGSHAAGRTSVGKAFXKCFFWPTALKDACHMVQRCEACQFHCKHTKLPAQALQTKPLTWPFSCWGLDILGPFPRGQGGYRFLLNAIDKFTKWIEAVPTGEIKADNAIKFIKEIFCRYGLPHPIITDNGSQFISADFQDYYIGLGVKICFASVSHPQSNGQVERANSIVLQGIKTRVYDRLMSHDKKWVEELPSVLWTVRTTLTTRKHPSSSCTTPKPCSPASYDIRVHEYRSTPTRTRRNSETSM

SEQ ID NO: 160972 - protein, 224 aa, Oryza sativa
  Clone ID: PAT_MRT4530_601C.1.pep
MKSRKNSTTSTKAAGSCHTSSSGGGGGGGNCYSSSSSKMERKDVEKNRRLHMKGLCLKLSSLIPAAAPRRHHHHYSTSSSSSPPSSTKEAVTQLDHLEQAAAYIKQLKGRIDELKKRKQQAAALTTSTSNGGGGGMPVVEVRCQDGTLDVVVVSEAIREERERAVRLHEVIGVLEEEGAEVVNASFSVVGDKIFYTLHSQALCSRIGLDASRVSHRLRNLLLQY

SEQ ID NO: 160973 - protein, 90 aa, Oryza sativa
  Clone ID: PAT_MRT4530_60200C.1.pep
MANGDGGPREATATADELRRALRKEKRGIREREIGPGDRKPWPKAAVEMELTRARGDEGSGDEPRRGRGGRGRSRPREANGGDGARRRRA

SEQ ID NO: 160974 - protein, 102 aa, Oryza sativa
  Clone ID: PAT_MRT4530_60201C.1.pep
KKRKKKRKKGKVSPPRRERRTAHRPAGGSAPATRAPAGSPLPEVDEAALRPFIRPGAPTNDPADICWSICHKVLPVDPELVETPCSLIYSPFANNDQLEESG

SEQ ID NO: 160975 - protein, 68 aa, Oryza sativa
  Clone ID: PAT_MRT4530_60202C.1.pep
MRRVMGGALTAVGDERGVRRVETQRRRAVASGEKGGGRAQLPARFKEDWAELFADFELSDCEEDSQEE

SEQ ID NO: 160976 - protein, 165 aa, Oryza sativa
  Clone ID: PAT_MRT4530_60203C.1.pep
MREVCGGYKLNGGGLWLVGRRVVVGKRGSQWPLPLAFTVANLQSRAAIQLSRSTRKSEGEKDNAMWAGRMPSPPTSRGDVPLDPWSASPPASYSSHHPPLASILFTACRSAVLLATRRRPPHYPPLVFSSPLATSAQLPARFKEDWAELFADFELSDCEEDSQEE

SEQ ID NO: 160977 - protein, 50 aa, Oryza sativa
  Clone ID: PAT_MRT4530_60204C.1.pep
DDIYKDCSIKDYLETTHTSSHIQSKSISSDRPLSPIVKLLEELIRPLSLL

SEQ ID NO: 160978 - protein, 100 aa, Oryza sativa
  unsure (1)..(100): unsure at all Xaa locations
  Clone ID: PAT_MRT4530_60205C.1.pep
FFFFFFLKREKSDQHSCNIGQPRGFAAFAPRQTHIPIQLVLDTATLTKWQCLPFTTQQLSSRFPREXXXXSDIKHHPCXYHXRVTQGVSQRXXXFPQHTK

SEQ ID NO: 160979 - protein, 88 aa, Oryza sativa
  Clone ID: PAT_MRT4530_60206C.1.pep
KTNVSMSSCHCKRAYNASSPLSGKFLHLVHRHGGHRSFKRKAHASDRSAPKTIIVYGHNQHPMPASSPTAAAGAAMRSEEGNGGDLGA

SEQ ID NO: 160980 - protein, 174 aa, Oryza sativa
  Clone ID: PAT_MRT4530_60207C.1.pep
MARFVDPLVVGRVIGEVVDLFVPSISMTAAYGDRDISNGCLVRPSAADYPPLVRISGRRNDLYTLIMTDPDAPSPSDPSMREFLHWIVVNIPGGTDASKGEEMVEYMGPRPTVGIHRYVLVLYEQKARFVDGALMPPADRPNFNTRAFAAYHQLGLPTAVVHFNSQREPANRRR

SEQ ID NO: 160981 - protein, 112 aa, Oryza sativa
  Clone ID: PAT_MRT4530_60208C.1.pep
FHWFHKTTFSPSFSLSIMFSHLDLAWVHCFAYSLVETLKLSCTIFLYIHRTKPQCWKRNKGILLSPLLHACFRDAGCCWRKIIKLYREYIYHSWFSFLSYIFHNNYFKSSQS

SEQ ID NO: 160982 - protein, 180 aa, Oryza sativa
  unsure (1)..(180): unsure at all Xaa locations
  Clone ID: PAT_MRT4530_60209C.1.pep
YSYYRFFANKKPWFPSRKCSLVVLLIIVCVLAATCTMGDHHKDQXVVYRAGERXCEPGMDYPITRCTLXRAVVKRQSVRHGAPGGAADEQLRQDCCRQLAAGDDSWCMXSALSHVVGGIYRKLDATDVGHLMGDVLPXCRRGDXERAEQSLPAICDEDMLNGTGGGCYWVRYPRTARTGH

SEQ ID NO: 160983 - protein, 430 aa, Oryza sativa
  Clone ID: PAT_MRT4530_6020C.1.pep
MMQKYLWIQIFVLLSSFSFSVETDYASIFSFGDSFSDTGNIVLIYGPARTDLVMTKPPYGMTFFDHPSGRLSDGRLIIDFIAEALGLPLLPPSFAANRSFEHGANFATAGGTALDRAFFVANNFTVMSPFNISLGDQLGWLDGMKPSLCGCKPGGCEGYFSESLFFVGELGWNDYSAVLLAGRGVDEARSLTPRVVGTIRAATQKLIDGGARTVFVSGITPMGCSSANLVLFAGSSEADYEPDTGCLRSLNLLSMEHNRQLRHALAQLGGARIIYGDFYTPLVELAATPRRFGIDGEEGALRACCGSGGGRYNFEFNMSAQCGMAGVTVCGDPSAYVNWDGVHLTEAAYHHVADGWLRGPSSISMGYKLGWAGNEAHPNEASWSSWICTRDSCGLLRPWLTEDSCAGFTGTVVPWICACVRLSGYKVYQL

SEQ ID NO: 160984 - protein, 124 aa, Oryza sativa
  Clone ID: PAT_MRT4530_60210C.1.pep
MTSPTTTTTTSSPLLLAELAVSVLLLACDLSETDQVRILTNKELSAADAPSYTSKLKWSPGDHVTADTARPPDATRRLGHGGRQVSGRLHGETGGALAVPHGHMHIAVAGAVAPPWHGGSRRRT

SEQ ID NO: 160985 - protein, 87 aa, Oryza sativa
  Clone ID: PAT_MRT4530_60211C.1.pep
MALLEEREASRMLKYGATDDIYKGSRMEVQEKPWVGVVAVTNRPLFANAGRRKRPHRDARYPYLQGTTSRLHREAQEATHGGRRRPE

SEQ ID NO: 160986 - protein, 83 aa, Oryza sativa
  Clone ID: PAT_MRT4530_60212C.1.pep
PQWFGGPFLVSGPPPSKLVPPFFLPVGRKFSSAAFSNGMPPLAPHFFVFGPFLAPNMYMFPLVKKGSSVLVPVCGQKAGLVPP

SEQ ID NO: 160987 - protein, 337 aa, Oryza sativa
  Clone ID: PAT_MRT4530_60213C.1.pep
MGAGMSSGRRPSFYGGGGGGGVGRPRGMLPLLALQVLLEYGRAGASRPPVTAALLAANALLYLRPGSLDALLPSLNRVAFNPHLIIHYCDLTRFFLSAFYHLSETHFFFNMSSLLWKGIQLETSMGSVEFASMVAALLGMSQGITLLLSKGLLLFGNDEAYYDQYAVGFSGVLFGMKVVLNAWSDDYVFLHGVVIPAKYAAWAELLLIQAFIPGTSLIGHLGGILAGLAYLWLKRSFSGPDPLSLLISGIGKAVRWPVGFVQKLFRSGRPQGYTPSRGRVGRGSARENGRGSPHNISLGCLISYAFKNRSRRVVGIMVGSRHLRASIPEVHIDRNRA

SEQ ID NO: 160988 - protein, 156 aa, Oryza sativa
  unsure (1)..(156): unsure at all Xaa locations
  Clone ID: PAT_MRT4530_60214C.1.pep
HRAQTLAVAATPTGANSSVSGGADVPATASMNADSLMHHDASPVCCYCNIIVWIFALXGCIMPQIICQQHLALSIWTPKVNTRQPAYXDACCVHCMTVKMDTYDTRMDHLLSHRSNHVLLLRLXILDLHGQQXPSLLSFIHQHKLAQIQQQQQHQM

SEQ ID NO: 160989 - protein, 360 aa, Oryza sativa
  Clone ID: PAT_MRT4530_60215C.1.pep
MARMLETVSEMENTEAADGDGATATWRRSVRSSNYSSASSTASSARPRYVPCYDDADFVTYSFQRAVGLGAPGPARDIRGQLGEWFSELDVSCVLRNDQEEEEATGSLVGRWARALTVMARALIATLQDQEDNLTGRLCQLGRLMEASFSKIQLAQFAQATFSKMLAFANALADKPWTRPTDKFSGLMQLRICINDVSDILVPLYNEDELEKKSKLFSDHSLRYLFLLNNSYVVQYQFLVPSDYSPPSEIKFHYEQYQKEYMRASWEPVLSCLHDKMPPCFPKLSSHSELSRFELEFEKTCSHQKLWKVPLPNLRQSLRETIINKIITRYKKYMEDHPEQEKCGRDPLDMEGMVNDLFEG

SEQ ID NO: 160990 - protein, 149 aa, Oryza sativa
  unsure (1)..(149): unsure at all Xaa locations
  Clone ID: PAT_MRT4530_60216C.1.pep
FQTFNRFLSLKLIFAGGREVRLHHNVRSRGNGPPAKMQKNEKKKSPHAARRRPXRASSPPPPHAVVAAVAPAGLPPPSSGQICEEGREGRCRXAPPKKGGGGGIGPTGAGGVAAPSPPPDPAGGEGRWRTAWRRRPDYGRGGCGGPMAA

SEQ ID NO: 160991 - protein, 915 aa, Oryza sativa
  Clone ID: PAT_MRT4530_60217C.1.pep
MDGRVALVPWADMLNHSPEVETFLDYDKSSGGIVFTTDRSYQPGEQVFISYGKKSSGELLLSYGFVPKEGTNPNDSVELLVSLNKSDKCYKEKLQALKRNGLSEFESFPLRVTGWPVELMAYAFLVVSPPEMSQRFEEMAVAASNKSPSKPGLNYPELEEQALQFILDCCESNIAKYTKFLEGSSGSLQLSTNSKQANRTLLLKQLARDLCISERRILYRTQYVVFVADEAQTVEEKEIDKSDYNLSRQATDARRLEVVGGSMAGSGGGVVSGGRQRGPPLFATEKPGRMAMAAYRVSAATVFAGVLLIWLYRATHLPPGGGDGVRRWAWLGMLAAELWFGFYWVLTLSVRWCPVYRRTFKDRLAQRILIANSYSEDELPSVDIFVCTADPTAEPPMLVISTVLSVMAYDYLPEKLNIYLSDDAGSVLTFYVLCEASEFAKHWIPFCKKYKVEPRSPAAYFAKVASPPDGCGPKEWFTMKELYKDMTDRVNSVVNSGRIPEVPRCHSRGFSQWNENFTSSDHPSIVQIRVSSVISNSPIIMNVDCDMYSNNSESIRDALCFFLDEEQGQDIGFVQYPQNFENVVHNDIYGHPINVVNELDHPCLDGWGGMCYYGTGCFHRREALCGRIYSQEYKEDWTRVAGRTEDANELEEMGRSLVTCTYEHNTIWGIEKGVRYGCPLEDVTTGLQIQCRGWRSVYYNPKRKGFLGMTPTSLGQILVLYKRWTEGFLQISLSRYSPFLLGHGKIKLGLQMGYSVCGFWAVNSFPTLYYVTIPSLCFLNGISLFPEKTSPWFIPFAYVMVAAYSCSLAESLQCGDSAVEWWNAQRMWLIRRITSYLLATIDTFRRILGISESGFNLTVKVTDLQALERYKKGMMEFGSFSAMFVILTTVALLNLACMVGVKCTASTSTCEMGAI

SEQ ID NO: 160992 - protein, 399 aa, Oryza sativa
  Clone ID: PAT_MRT4530_60218C.1.pep
MAAAVEAEGRGGEPVTPGTPAPDLSQATDDRRLLRSRYLAVKSRISDDKDDMARADSVKFRAVFTQVEDLHRLVQRPREQIADAEALLGIATSLVASVRTHSALGITPSDFVSGMLKKFGEKRRDDDEAASLRWLDVGLYTSRIFMAVPGCSTMVGPMNTEVLPRRVRVCRKRTAKPRGSECPEQLPDSSNAAKTDTDRNMSVIFDVLRKKKNARLENLVLNRKSFAQTVENIFALSFLVKDGRVEISVNDEDHHLVYPRNAPAASAITSGKVVYNHFVFRFDFKDWKLMKDMVVDGEELMQHRPPAPQVGTHGSSTTTTTTTTGGANEGPETETPAAPAHSTAIRKLCRNRGLVMHDMKEEAATMEEKRSAMDAQVSQLASKRRRLFQDDDDDDGDLE

SEQ ID NO: 160993 - protein, 90 aa, Oryza sativa
  Clone ID: PAT_MRT4530_60219C.1.pep
ALQFILDCCESNIAKYTKFLEGSSGSLQLSTNSKQANRTLLLKQLARDLCISERRILYRTQYILRRRLRDMRGGELKALSLFNGLRKLFK

SEQ ID NO: 160994 - protein, 1004 aa, Oryza sativa
  unsure (1)..(1004): unsure at all Xaa locations
  Clone ID: PAT_MRT4530_6021C.1.pep
SNQLDYDLADPCTNVPQYPLYPVYGYHPSTVARQVGGLGTHGSTTMSSNFVDNNVNTSLSQALPASTMLVWSQVGEIVFPVYTTTPMSTGPPMIGNENAVATNQGDSMSKNPPVETENGSSMTSKLGKDSDTAKPCPSDMNHEPAKMTSEATRSWCPIHKTKKHTLQDCWVFLNVRAEIHACKERGIQRTSPTRDVYCPIHKTKNHDLLSCKVFLGAMKTPSPKSYVPVRDNGKEQGATPASDRFVGIIDIDPHEPSVLHLLKDYGSSTTSVPREVLAIDDVGTSAQANIEAANHTTPAQHIKAVQAILRETPYDPVLNDDLERWTERLRESVTNLSNAFEEATTAAHQDQPPTSDANGEDPERRESPQRATPPPHGAGDLXDQINGRREARRTRDNVNRSRRHVSSRRHDNGNRGDRSNEDRDHDNHHDRIDRERRRPDNTGHGRRRNDDDNGDRRRDNSERQRQDSRDPGRHPRNRTPEPSDPSSSSSSASSXLSDRHPXRTHDRRQPTAPNAGCRAFGRSLRDVRWPERFRPGAIEKYDGSTDPEEFLQVYSTVLYAAGADDNALANYLPTALKGSARSWLMHLPPFSISSGTYKRHAIEDDLELXVRRPXNSGESLREYVRRFNECRNTIPDIANASVIRAFKSGVRDRYTTQELVTRPITTTRRLFEIVERCAHVDDALRRKNDKPKTGGEKKSATDAYESSKKKNHKNGKRKAQAEVLAAEYANPPKCPDPQGSDTKKSWCPIHKTDRHSLEDCLVFKKSLEKHMAFEKGKRGAAPKMKWSEEKIEFSEEDHPKTAVIPGRYPIVVEPTIRNIKVARVLIDGGSSINLLFASTLDAMGIPQNELTPTDQPFHGITPQSSSRPLGKITLPVTFGQANNFRTEQITFDIAEFDTAYNAIIGRTALAKFMAASHYAYQVLKMPGPKGTITIQGNAKLAVQCDKRSLDMVEQMTSPPATTEPPKKVSNTNKTPKPDGAIKIVPLSSANPDKTVKIGATLNEK

SEQ ID NO: 160995 - protein, 178 aa, Oryza sativa
  unsure (1)..(178): unsure at all Xaa locations
  Clone ID: PAT_MRT4530_60220C.1.pep
WFIPFAYVMVAAYXCSLAESLQCGDSAVEWWNAQRMWLIRRITSYLLXTIDTFRRILGISESGFNLTVKVTDLQALERYKKGMMEFGSFSAMFVILTTVALLNLACMVLGISRVLLQEGPGGLETLFLQAVLCVLIVAINSPVYEALFLRRDKGSLPASVARVSICFVLPLCILSICK

SEQ ID NO: 160996 - protein, 285 aa, Oryza sativa
  unsure (1)..(285): unsure at all Xaa locations
  Clone ID: PAT_MRT4530_60221C.1.pep
LAATTIILGDGKMASFWDRTXLDNKAPKEIAPAIFTAXKRKSRTVHDALAHNNWIRDIDLMHTTEADHLSQYVCLWNLIQQVGPLSDQRDSIVQKLTTNVIYSTSSAYGMQFLGVATTIYNQTIWKCWAPPKCKFYSWLIIQNRVWTVDRVQKRSSANXRVCPLCHTVPESALHLLAGCRLSKRIWAEAQRWTGIDLRLQEWGECATVEDWLXKILCTTNYPTKALKSMIILMAWELWCECNARIFRQVASMPAIIIAKIKEEERAWIAVGAAKLTEINSSGSVD

SEQ ID NO: 160997 - protein, 99 aa, Oryza sativa
  Clone ID: PAT_MRT4530_60222C.1.pep
MGNRMVKNLSPSGMTGAGTVNHSPSPAPTIHSSLQPSTRVTHAAPPPFASPPAAREPPFAAPPFAGRLKPPLPAAFVDEPPGRRGACSRLHREPPLTRR

SEQ ID NO: 160998 - protein, 160 aa, Oryza sativa
  Clone ID: PAT_MRT4530_60223C.1.pep
EVPRCHSRGFSQWNENFTSSDHPSIVQILIDSNKQKAVDIDGNALPTLVYMAREKKPQKQHHFKAGSLNALIRVSSVISNSPIIMNVDCDMYSNNSESIRDALCFFLDEEHGHDLGFVPSPQPPAPVSLSVLFGAPVPCFPPPFFLLCPRSRFSPSLFLF

SEQ ID NO: 160999 - protein, 269 aa, Oryza sativa
  unsure (1)..(269): unsure at all Xaa locations
  Clone ID: PAT_MRT4530_60224C.1.pep
MECNKDEALRAREIAERKFESKDLQGAKKFALKAQALFPGLEGIVQMITTXLDLYLASEVLISGEKDRYSILSVETSADDETLKKQYRKLVLQLHPDKNKSVGAEGAFKMVQEAWTVLSDKTKRALYDQKRKLMVLKRNTSQTNKASAAPGASNGFYNFAANAAASKVTRGNKQKAGPATSSVRQGPPPPPPPPRQAPAPPPAKPPTFWTSCNKCKMNYEYLKVYLNHNLLCPTCREPFLGTRXVQWPPTGSVHAVHDPXISGGNXNTM

SEQ ID NO: 161000 - protein, 815 aa, Oryza sativa
  unsure (1)..(815): unsure at all Xaa locations
  Clone ID: PAT_MRT4530_60225C.1.pep
MSMARLVCVTKSLLNPSGENETVDPDIDGRPRRQNISLPRRGYGFDSRRSITTAVTAVVADRAVSKILKNFNQQTATAEKLQRLEMLLIKIHSTIEVSEKRAIKSAALIQWQDKLKEAASRGEEVLHSFQQREADVDEATGQNASDHQQQQEEGSSSSSVPATALSFKRKALSGMAQRVITIAIALFSSDEEVKKLNGAVEALEKESANIGEFIALLQLEASPNPKRRRSQMSSNNMEGLSFRLQEGDANTRFLHQHSAWRRRKNFVQQIEHNSQIATAPDEKAALAHNFFSEVGSVSHREFSVDLDYFEPRGQQLSDLEEPFTVDEVWKAIADSPRDNAPGPDGFSGQFYYCCWDIIKEDIMAALNQLHRMDGSSLGKVNKAFITLLPKRSDARKLKDFRPISLVHSFVKLFTKVLSRRLAPKLDALVAKNQSAFVKKRCIQDNFMLVRQSAKRLHDRRTPSALLKLDTAQAFDSISWQFILEVLEHKGFGLRWRSWIAMLFRTTSSRVLINGEPGCPILHRRGVRQGDPISPMIFILAMNVLSSIFSKAEVEGLLQPLGIPFCVSLYADDVVAFIRPAVDEIRTAMQILAIFGEVSGLRTNFAKCSAXPIQCNETDLQTLHDELPXEDLQPLVDKIARRLPSWMSHLMTPIGRATMVNVVLSSIPVYLLMAINAPKWVIKGIDKICRGFLWAGKASANGGVCRVVWAQVCSPKEYGGLGIPDLERLEIALRLRWLWQQRTSPEKPRQGLNIPVSQKKRNLVSISTYAXVGDGNSVLFWEDCWLQGSSIRSLALAVYAAVPARLRNHRTVAEAI

SEQ ID NO: 161001 - protein, 172 aa, Oryza sativa
  unsure (1)..(172): unsure at all Xaa locations
  Clone ID: PAT_MRT4530_60226C.1.pep
SYHSFHLVALRLLLLLPSRPWAQISSPRAATPPTPPTQRPPHPPPRNSXSPRAATQTPHPNXAPPPTSKWFALPTHPHPPPLQXTPPPPPXATQLPPQHRPXRRXSSPNPLRETPLNPFKPQKTQISRQTRPPPHTLARLPVSSPRAXPPPRRAXPLTLXLPQTKPPHRGGF

SEQ ID NO: 161002 - protein, 308 aa, Oryza sativa
  unsure (1)..(308): unsure at all Xaa locations
  Clone ID: PAT_MRT4530_60227C.1.pep
CCFRVASSLLHSCCYSASSPSIHSLSRPRGKPGNATLRATPAPRLLFPAVVDGLLNIIEPFHRFVGRDMMTDLRYPLKGNTIPFWAVPLIAIVLPWVVFGGIYFKKKNVYDLHHGILGILYSVLSYIKQIVQKXMDNFNNVTGDVICHGERSVIKEGYKSFPSGHSSGAFAGLGFLAWYLAGKLKAFKREGHIAKLCLVFLPLLVASLVAVSRVDDYWHHWQDVFAGGIIGLTVASFCYLQFFPYPFDADAIWPHAHFQLLAESRSNGNENSHNMGWTETDAFHEGAGAVALRDTSLVLDSMESGRRF

SEQ ID NO: 161003 - protein, 780 aa, Oryza sativa
  Clone ID: PAT_MRT4530_60228C.1.pep
MAGIQPVLDERMDPFTGRMIIPASTCQSRCTAHNDLSLFSGPLIDRTSSSSISEFNSEAEKFNDLEVPPPWLLSYHRSCDIGSNFEAFATVMSRLRQHLLDANVEINYTEYLDLMKLEVEQHLNKLKEDIRFLKSHSLVHDGDANGSCPMVCHHGKLVEIYEGFNGFKLLLVVVFRQIKEMLSLFSASIRDLQWEHEMQLEVTSIMIGDCIKSLQDELERKLYEQSSIVNTLKKNWKETVVQCGAIHEELIDIADMLLPSEEESNILNSKHEHFGNWSSGWKHKFFGKKSGEERTPSSNEENISSATQKSVCPREVISEKSDFRHLKGMNREEMIKYFRFEISKLKRLHELSLQEKTEELFKFKREKGSLALKYDPEFEPLRKKVPEIISRVDQIILNTINAPTAFSTNQVLEERGRLTGRIDSLYYANQNLRGLLAEKMKDIKDLSRQVSDASRKMSFQLSLEEKLSRQLHKIKGDYEDLHIQSTIRDEVYQTVTKRMFDDYRNSLQDPALTYQEKVTSLEAALSEKETALRLANEENQRLKEKLSKQEKEHGIQNNQDYPELIKQDNEEMILRDIEMEPHVSPRRSYAISEQNAEYEELIKLKQTLEIASTALKEVESNELDYNGILGKNEQEKQLEFILVSIMDLSKEFVQIENKMSGDMKGSEKGPEILGYQCKHMVQQALVLTKKGLWYKQMLDTRRSQLRKAEAEESIKVSKMVDVLGNKVSTLLSLVQKIYVTLEHYSPVFQQYPGLLDAFLKTCKLVAGLRSKQKEDLQDTS

SEQ ID NO: 161004 - protein, 473 aa, Oryza sativa
  Clone ID: PAT_MRT4530_60229C.1.pep
MVSLVKGIASSQGGMEKSQRSLYAPMYADINECDPSNKDKYPCYGVCKNIVGDYECSCHTGYQPSGGGPKKQECNPKFPVAAQLALGVSLGFSFLVVVVLFTLMMLQRRKMNEYFKKNGGSILQNVDNIVIFSKDEMKKILKNNSEVIGQGGFGKVYKGRLKDNTLVAVTTSIEVTEAQKEDFTNEVIIQSRMMHNNIIKLLGCCLEMDVPMLVYEFAANGSLKDILHSDASHLVPLTLDLRLDIAIESAEGLRYMHSSISHTIRHGDVKPANILLTDKFVAKISDFGTSKLLTVDKEFTMVVAGSMGYIDPVFYMTGHLTQKSDVFSFGVVLLELISRRQTIYGKNRSLIIEFQEAYDQANSGRLLFDKDIAIEEDVLILEEIGRLAMECLNEKIDERPDMKEVVARLMMLRRSRKLKQENYNISRQQFFEENSIDELPKSFDDNSSSSSAELLSNLATKNSLTYRSTTGRD

SEQ ID NO: 161005 - protein, 135 aa, Oryza sativa
  unsure (1)..(135): unsure at all Xaa locations
  Clone ID: PAT_MRT4530_6022C.1.pep
MATAVEAAAVFGLKLTEALESVGQPWLSVAARGMARRRRSFSGERRWLDLSNNLACMGSLDGEMLRKVRSISLFGAPFFMVLEGKWRGVRGEYNGATAWPDLVQIDCDGNDATTATLGARSGALVGXRRSRRCSG

SEQ ID NO: 161006 - protein, 67 aa, Oryza sativa
  Clone ID: PAT_MRT4530_60230C.1.pep
ETGRTFYLTSYLTYLERADPTREKNESVHRATELGMQRVCTKISHAYTADMTTHSFAFVGVDFGLIL

SEQ ID NO: 161007 - protein, 52 aa, Oryza sativa
  Clone ID: PAT_MRT4530_60231C.1.pep
LQVYNSNLGNPLVDNTVRKQDFSILILVALISRIVKKEKKKEGKKSCESKNG

SEQ ID NO: 161008 - protein, 190 aa, Oryza sativa
  unsure (1)..(190): unsure at all Xaa locations
  Clone ID: PAT_MRT4530_60232C.1.pep
FFFIXTTKFIIIIIRVRLPTHQPWHGHRIQSRVHHHCSHSSSSFSSAAHGHGCGMVLGSAGNFLPRTASQCIFFAAGRLPIGGLLGTCEHCQQGPGSNPVARSSVRRCXHPPMCELAQSPTLGHVQLVKSXLPTPDATTTFAXISCTSPPVXXDPHRCREPPRQCRTWPVLLDAPCTWMRLETNNRGEAW

SEQ ID NO: 161009 - protein, 176 aa, Oryza sativa
  Clone ID: PAT_MRT4530_60233C.1.pep
MWHQREADYPAGQIGIEGAKKVTKPGHVMMRRLMESLLELDWGGAPRSIWTPRLWHERRMRHSGGRASMVTYSVIVFGPNNGDSPPPFSFSVRAAFGPTNTSIFVEKTEKKAHGTWCSFAMGGSQSRAKSTMTQLGFLLKGFGPLPPPPSQSLAVSHCLEFWLKDEYRLKDEYRIS

SEQ ID NO: 161010 - protein, 355 aa, Oryza sativa
  Clone ID: PAT_MRT4530_60234C.1.pep
MRLSVSVAAVLVVLAALRPPRVAVAQKYAAIFNFGDSLVDAGNLVVDGIPDYLATARLPYGMTYFGYPTGRCSDGRLVVDFIAQEVGLPLLPPSKAKNATFHRGANFAITGATSLDTPYFQGRGLGHTVWNSGSLHTQIKWFQDMKASICKSPQECRDLFRRSLFIVGEFGGNDYNSPLFAFRPLEEKLIEEGAVELVVPGVLPIGCFPVYLSIFRKQPEMYGRRSGCIRDLNTLSWVHNAALQRKIAELRLKHPGVRIMYADYYTPAIQFVLHAEKYGFLRQTPRACCGAPGVGEYNFNLTSKCGDPGSYACDDPSNHWSWDGIHLTEASYGHIAKGWLYGPFADPPILETRHH

SEQ ID NO: 161011 - protein, 55 aa, Oryza sativa
  Clone ID: PAT_MRT4530_60235C.1.pep
MAKKRKSYTRGKGAIPRSRKGVGFEHLNVELFLFQKVIGVMEKNQIKVVRLEFLL

SEQ ID NO: 161012 - protein, 49 aa, Oryza sativa
  Clone ID: PAT_MRT4530_60236C.1.pep
LVTVSVMIISVYGIICPAYAPSTAMAIVVSGCVAINFYYLLNWIVYPIP

SEQ ID NO: 161013 - protein, 674 aa, Oryza sativa
  Clone ID: PAT_MRT4530_60237C.1.pep
MEVRGLGQLLAALAAALFVRAVAGPGPALLPPADDEDSDADPEAGGEGGGVPPVTIRWARITCALKNKRGDVARFLLSNASGEAKSGRLLALMGPSGSGKTTLLNVLAGQLTASPSLHLSGFLYINGRPISEGGYKIAYVRQEDLFFSQLTVRETLSLAAELQLRRTLTPERKESYVNDLLFRLGLVNCADSIVGDAKVRGISGGEKKRLSLACELIASPSIIFADEPTTGLDAFQAEKVMETLRQLAEDGHTVICSIHQPRVVIFVLVSGTIQNSSVRYHCPDHVNPAEFLADLISVDYSSAESVQSSRKRIENLIEEFSNKVAITESNSSLTNPEGSEFSPKLIQKSTTKHRRGWWRQFRLLFKRAWMQAFRDGPTNKVRARMSVASAIIFGSVFWRMGKTQTSIQDRMGLLQVTAINTAMAALTKTVGVFPKERAIVDRERAKGSYALGPYLSSKLLAEIPIGAAFPLIFGSILYPMSKLHPTFSRNSRISIVRYYFVYAPSNNIPCYTFRFAKFCGIVTVESFAASAMGLTVGAMAPTTEAAMALGPSLMTVFIVFGGYYVNPDNTPVIFRWIPKVSLIRWAFQGLCINEFKGLQFEQQHSYDIQTGEQALERFSLGGIRIADTLVAQGRILMFWYWLTYLLLKKNRPKYQQLLPPSEEDQNKQQVKEVK

SEQ ID NO: 161014 - protein, 61 aa, Oryza sativa
  Clone ID: PAT_MRT4530_60238C.1.pep
PMNFSQFQVEFMCLLSNSRLVQPNFNKLMESAIPNSLCNLYGGAIYLHCSCFCNGFELHVS

SEQ ID NO: 161015 - protein, 32 aa, Oryza sativa
  unsure (1)..(32): unsure at all Xaa locations
  Clone ID: PAT_MRT4530_60239C.1.pep
XSFSYTSVLFPTLVLVFQTIETVSTFFIDIYI

SEQ ID NO: 161016 - protein, 115 aa, Oryza sativa
  Clone ID: PAT_MRT4530_6023C.1.pep
MPTSWGHISFNGEDSPALREIMIPLVKDGTCTSAMSGRKGETVRVDTTTEFCAGSENGIIRDACQGDSGGPLVVQRNEKYRQIGIVSYGIKCGVTFGVYTRVPHYVDWIEGIINE

SEQ ID NO: 161017 - protein, 107 aa, Oryza sativa
  Clone ID: PAT_MRT4530_60240C.1.pep
EGEPPGPKIGPHFLGKKFTLLGGANFWGPPIKEIFLETKRFLGKKGQKKTGYKKKYTGGEKKNPFYWALLGGFGGPIYLERGGFWSKEPPGDGWNLIGHLRAGVGGF

SEQ ID NO: 161018 - protein, 849 aa, Oryza sativa
  Clone ID: PAT_MRT4530_60241C.1.pep
METAMAATCSALSSLGDIMLVVREEEEETREGGAVELLAAELTAVHAALRDDYLADVPPARFDEQAKAWSGHARELACDAALLARRADGSPDAASAATVKALLERAADLSRRRPRPTAAVDPRRPAAAVDAGPPATEIVGLDAAKDDLIKKLCDDVDGDEQSEQRLKTVSIVGAAGLGKTTLAKMVYDTLRPRFDCGAFVSVSAINPDMAMVFMRMLRQLDDDDKHESVGGEEPSVSGEAQLVDQLSKFLRDRRYVQYLIVIDDLWDKPSWEMIKHALVENYCGSRIITTTRNFSVADQAGMPYELKPLSAENSKILFLQRIFGHDNKICLDDEFAEVADKILKKCDGVPIAILALASLLAGKIGDKKEWYKVHNSIGSTLENGADVKNMRMTISVGYYRLPANLRACLLYLSIFPEDYEVSSLSSEENFVTILNDEQQTCSSNKGCRLSIRGSKASVDTTNQATMMSMLQARSLSVFSPAIGSINLSEFKVLRVLDLEGCDISQSHHVLNDHLGSLIHLRYLGLRNTRITELTEDVGKLQFLQTLDLADTRVKELPATVFRLGKLMCLRVEFQTRIPSGIGNLVSLEELSDISTRDSPDLVNELRNLTKLRVLKITLRQPTQSTEEALVESLRNLRKLQDLHIYAASGNGHKRLLDLLQDGSWTPPPRLRSFSALATYISCSPLRLLPAWIAASVVPRLAVLLIQVRELRQVDIDALGKLPVLRTLRVEPYEMKEMIVIGRDAFPCLKECRFRNSDHGPVIQRGAMPRLRIIEFCFGVRQTKDLGNGFDFGLANLGCLEEATVYINCKEATEPEAEEAEGAVKHAADTHPNHANFDMNIWGRAHAFRR

SEQ ID NO: 161019 - protein, 82 aa, Oryza sativa
  Clone ID: PAT_MRT4530_60242C.1.pep
MREGHRTVRADAGGTGRAGLIGQAREIFGSMAAKYGMEPGVENYGSLVDVLAGMVEEAEDADEARLVRAGGAAECVNGARRH

SEQ ID NO: 161020 - protein, 71 aa, Oryza sativa
  Clone ID: PAT_MRT4530_60243C.1.pep
APPPWRVPRRRRLGCRGACPAPPRRSRSPPGRPRRPPPCTSSPRSRRRRRRRGRRRRRREGQPCKASSSSA

SEQ ID NO: 161021 - protein, 54 aa, Oryza sativa
  Clone ID: PAT_MRT4530_60244C.1.pep
LDPAGVVLCQERVAVRPDVEPGGLVGEVEIDSHGMGELPVAAGCGGSGGGGGAA

SEQ ID NO: 161022 - protein, 84 aa, Oryza sativa
  Clone ID: PAT_MRT4530_60245C.1.pep
AHACPPTLSRFCCMISLYDNSLSHLSLATVRLIGQEAEWSGRKMTTKRKREEPYLLSSLGGAVQLPLYGGPSKEGEREENDKKT

SEQ ID NO: 161023 - protein, 362 aa, Oryza sativa
  Clone ID: PAT_MRT4530_60246C.1.pep
MALRRLLQGSVLPRMAGRAAAAPFSTASGETVRATLFPGDGIGPEIAESVKQVFNVAGVPIEWEEHYVGTEVDPRTESFLTWESLESVRRNKVGLKGPMATPIGKGHRSLNLTLRKELGLYANVRPCNSLPGYKTRYDDVNLVTIRENTEGEYSGLEHQVVRGVVESLKIITRQASLRVAEYAFHYAKTNGRERVSAIHKANIMRKTDGLFLKCCREVAEKYPEIVYEEVIIDNCCMTLVKNPGLFDVLVMPNLYGDIISDLCAGLIGGLGLTPSCNIGEGGICLAEAVHGSAPDIAGKNLANPTALMLSAVMMLRHLQFNNQADRIHNAILQTISEGKFRTADLGGKASTSDFTKAVCDHI

SEQ ID NO: 161024 - protein, 49 aa, Oryza sativa
  unsure (1)..(49): unsure at all Xaa locations
  Clone ID: PAT_MRT4530_60247C.1.pep
FTMSKXGKHVSKLXVELNYQLLXRHPXCXXCHMDQPTLDSXDPNDFRSN

SEQ ID NO: 161025 - protein, 57 aa, Oryza sativa
  Clone ID: PAT_MRT4530_60248C.1.pep
MAGENGQHGEVARDETERGGRQGHDNAPVAEQARRLSPCGVEDGSSGGEAVAGGTAA

SEQ ID NO: 161026 - protein, 352 aa, Oryza sativa
  Clone ID: PAT_MRT4530_60249C.1.pep
MDAALASRRHRLLLAAAAAAAGGYGLYRLYRHHRRRVAAVLSLADAVSQVGSDLADFLRSDSDHVPRTLLQLSKLAASDPISSAASSLSHSLASGLLRALSDSTSTSTTTTPAQIGLTDRILDRLLSPAGTGFASAVVGSFARNLVLSYHAAAAPRPPSAHPLPDWLCSDRGKDAAADLVRVFVSTAVAAYLDRTASVPRTSHQLLAAFTDPKHEAKLKDLLVSVCNGAVETLVRTRRQVAVAPPPTPIVVVSEAQSPHGCVMDTVSSTLAVPSNRRFVLDITGRVTAETVRSLLDFLAQRVSDGARKSIATARNEGFLAIKHITSKSMAIFTICFALCMHISMGTRFLLPP

SEQ ID NO: 161027 - protein, 75 aa, Oryza sativa
  Clone ID: PAT_MRT4530_6024C.1.pep
LQSPKDGMLHRYMFLFNCHEEIFFFMSRLAMMMLFSYFLFECVEFFLALMFFCIGVNKLVLISRLRVKQTDSFRE

SEQ ID NO: 161028 - protein, 529 aa, Oryza sativa
  Clone ID: PAT_MRT4530_60250C.1.pep
MARPPAATAPPPPPPPPPPPPPPIDRLVWLACAAPLSRIPVVGTQVSYFPEGHAEQCPAPLPDPLPSAHRFFLCTITAVDLSADTTTGEPYATISLLPLRHDAPAPAPAPAPAAAELAEAESQEFRYYAKQLTQSDANNGGGFSVPRLCADHIFPALNLDDDPPVQSLTMGDLQGDSWEFRHIYRGTPRRHLLTTGWSKFVNAKQLVAGDTVVFMWCGAPAPERKLLVGVRRAARYSGESACNARGRVQPQEVMEAVRLAAEQAAFRVTYYPRHGAGEFVVPRVEVDKGLTTPWRCGMQVRAQVMEAEDTRRLAWLNGTLTNLRHQQIWRTLEVEWDASAASSSMKNRFVNPWQVQPVDFPPLPMGLKISNNNISAPVCNGDSLLVPPILMHPQPQPPADIQGARHNNGHAYADIPSSSTPSMVRTQQLFPRDLQILVPHTDIVTPQNGSPPDNPVNTPLSASDGMKTIQLFGVTITSPVQGDTNGAFASAQVNQVPEGVDDETATEEASDTSLPDSLTNGHNQDGARL

SEQ ID NO: 161029 - protein, 47 aa, Oryza sativa
  Clone ID: PAT_MRT4530_60251C.1.pep
QRSTSLNSPSQLTNWVAQNGDPCGQSWLGITCSGMGLKGTLGYNMNV

SEQ ID NO: 161030 - protein, 60 aa, Oryza sativa
  Clone ID: PAT_MRT4530_60252C.1.pep
GWGLILFFFFFIHFLWTLKSSRYIVTAPYWLAILPKTLGDNRWKATTTQLFPAVTFTKLK

SEQ ID NO: 161031 - protein, 745 aa, Oryza sativa
  Clone ID: PAT_MRT4530_60253C.1.pep
MAPPPNTYSESWWGGKEERGTPVVVKMDNPYSLVEIDGPGMAAPSEKARGKNAKQLTWVLLLRAHRAVGCVAWLAAGFWAVLGAVNRRVRRSRDADAEPDAEASGRGRAMLRFLRGFLLLSLAMLAFETVAHLKGWHFPRSAAGLPEKYLRRLPEHLQHLPEHLRRHLPEHLRMPEKEEIEGWLHRAYVAWLAFRIDYIAWAIQKLSGFCIALFMVQSVDRLVLCLGCFWIKLRGIKPVADTSISNDDIEATAGDGGGYFPMVLIQMPMCNEKEVYETSISHVCQIDWPRERMLVQVLDDSDDETCQMLIKAEVTKWSQRGVNIIYRHRLNRTGYKAGNLKSAMSCDYVRDYEFVAIFDADFQPNPDFLKLTVPHFKGNPELGLVQARWSFVNKDENLLTRLQNINLCFHFEVEQQVNGVYLSFFGFNGTAGVWRIKALEDSGGWMERTTVEDMDIAVRAHLNGWKFIFLNDVKVLCELPESYQAYRKQQHRWHSGPMQLFRLCLPAVFKSKISTWKKANLVMLFFLLRKLILPFYSFTLFCVILPLTMFVPEAELPIWVICYVPVIMSVLNILPAPKSFPFVIPYLLFENTMSVTKFNAMVSGLFQLGSSYEWVVTKKAGRTSSESDILALAEAADADARPPPAKLHRGVSEGGLKEWAKLHKEQEDATAAASAAAAPGTPVKKSKAAKAPNRIFKKELALAFLLLTAATRSLLSAQGLHFYFLLFQGVTFLAVGLDLIGEQVS

SEQ ID NO: 161032 - protein, 87 aa, Oryza sativa
  unsure (1)..(87): unsure at all Xaa locations
  Clone ID: PAT_MRT4530_60254C.1.pep
FHSTCSHSVPKDYNISIGWRASHVYSFWCNKXQTKTTKKSTXNNNXRXSXNSRSEXPFPXPPPPFPLTKLLPSILAVVSRVNGENRW

SEQ ID NO: 161033 - protein, 146 aa, Oryza sativa
  unsure (1)..(146): unsure at all Xaa locations
  Clone ID: PAT_MRT4530_60255C.1.pep
XXXXXXGXQASAREQLXTKXDXHXXHRIWYXWGGDLXXCXXQVVXXSDRGAXMXKPXSCXXYTIXXXXLGYVRXGNXLHXXTSXVICXIHMGXLEIKINRXVSNTHXXXXXXXXXSXNXXXYXXLCCDPPKYXVSAXGHXKXXXXA

SEQ ID NO: 161034 - protein, 107 aa, Oryza sativa
  Clone ID: PAT_MRT4530_60256C.1.pep
MSAIRGRGADGGVSPASKRKLGGRGGGVTASYWLKLGQIDLHKYTIEIVIRKRDTEVRNGKVRYRHCIALPMRESMMVSRVEWARRFELAVSLVGYAISTRYRVFIE

SEQ ID NO: 161035 - protein, 46 aa, Oryza sativa
  Clone ID: PAT_MRT4530_60257C.1.pep
MRIGRRPGRPQGVRVGRFINAAGTTGFPIKLRHHRLQNNQQRRRRR

SEQ ID NO: 161036 - protein, 109 aa, Oryza sativa
  unsure (1)..(109): unsure at all Xaa locations
  Clone ID: PAT_MRT4530_60258C.1.pep
MLVPTSTTVALAVIGPINKEDPLNWCAVVAYMVRSHLDEVNRMVVQLREPLDKIQGATLRVVHVVGVIXVKDCASVCVELNEEARSRVKVNSGWILNCIVHGGDIYGVT

SEQ ID NO: 161037 - protein, 396 aa, Oryza sativa
  Clone ID: PAT_MRT4530_60259C.1.pep
MATFSGTDRLRDLHAFDDTKAGVKGLVDAGVTTVPYFFRHHPDPLPVAAPSEAAAAIPLIDLAKADVDRGHVVSQVRSAAESAGLFQVVNHGVAGELMDAMLAAARRFNEQPAEAKAPYYTRDLGSKVRFFCNFDLFQSPAAQWRDTLYVEMVPDAPSPEEIPPPLRGVAEEFAAAVWRLGERVTELLSEALGLPPGYLAEHAGCMDGMSMVAQYYPPCPEPEKTMGTTRHSDPSFLTVLLQDESGGLQAVLPRPPEERWVDVPPVAGALVVNVGDLLQLVSNGRLRSMEHRVLPTAASAARARVAVACFFRLEYSASLTRPRSYGPIVDSGEGGARRAAAVYRSTTPRDFLAYFNGKGLDGRSALEHFRIPEAAAASSAVDVVSSSTTAAASIPR

SEQ ID NO: 161038 - protein, 132 aa, Oryza sativa
  unsure (1)..(132): unsure at all Xaa locations
  Clone ID: PAT_MRT4530_6025C.1.pep
THAALLTKKPRDRRRAAAAARXGRGKGGKGLGKGGAKRHRKXLRDNXQGXTKPAIRRLARRGGXKRXXGLXXEETRGXXKXXXENXXRDAXTXTEHARRKTXTAXDXXXAXKRQGRTXXGXGGARREATRGR

SEQ ID NO: 161039 - protein, 741 aa, Oryza sativa
  Clone ID: PAT_MRT4530_60260C.1.pep
MSISHCEDNDSDRISNLPDKLLHHVMSYLTAQEAVRTCVLSRRWQNVWSSMMFLHANAAKSSSITSFKKFLDNVLLYRNPVPLKGLWVSAACDNSDDSLDYSDIHRWVRHVLRSNAREVGIFVRCGSKLLSIDGYPFAFNSVHLSKLVLFKFTVNDCFAKKFSSGCPVLKDLVLISCGIDVTMFSSTTLKSFVIHNAEDIEHLPKQIEYLVIEMPNLVTLHIEEIPRRNIHLVDLSSVKEATIYFFEHSFRNSAVDCNILSALSNATSLKLICDSVYDEVSKLGAEEYEKFPTAAAAIDPPCKEAARTFHCEKLTEIEIVYPQGDKRVHIIVRILIANISPLPEIKIKPFPKSGLSCACLQEPIIRTASSSSSDEPIMFLVSEQPSVLKLLIPVYNPAVFLFPRQHLARKLLDSMSLIEQVLPATGMTTSINEENAPDRISRLPDGLLRFVMLYLTAQEAVQTCVLSRRWQNVWSSTKWLKADAAKFSSMKSFKKFVDNLLPYRRPVPLDALFILATCNHSDDSLDYSDIHPWIRHALRSNAWALGIMEHCGTNLLSIDDEIPNRNIQLVDVSSVKRATFYFFELSFQNSAVDCNIIPALSNVTSLELVSPTAYEDVVPNVLIRSFPRCKTFSNLKYLKLGEWFLRDGCYPLLFLLRRSPNIEKLHLQLNKYGSDDYEDYPDAAAAIDPTCREIEEMFNCVKLRKITIFYPQGDERVHIIVRILIANISPLPAIKIKPTPV

SEQ ID NO: 161040 - protein, 126 aa, Oryza sativa
  unsure (1)..(126): unsure at all Xaa locations
  Clone ID: PAT_MRT4530_60261C.1.pep
LDVYIHDYLLKRNLQSTAKAFQAEGSVSSDPVGGFLLEWWSVFWDIFIARTNEKHSDVAASYIETQSIKAREQQPSQLQQQEAHSQQSSQQIQMQQLLLQRHAQQQQQQQSQQQXQQQRRQQKQQQ

SEQ ID NO: 161041 - protein, 844 aa, Oryza sativa
  Clone ID: PAT_MRT4530_60262C.1.pep
MAQQQQQQSAWEAEKMLDVYIHDYLLKRNLQSTAKAFQAEGSVSSDPVDVSFCFAKKAIDAPGGFLLEWWSVFWDIFIARTNEKHSDVAASYIETQSIKAREQQPSQLQQQEAHSQQSSQQIQMQQLLLQRHAQQQQQQQSQQQPQQQRRQQKQQQRSESSHLPTSAHNGLVSADPPTRQSTSAASSLSAKMYEERVKNSVQRDTLDEAPAKQRFTENIGQLLESNSSSMLKSVAITAQASGQIFHGSTGGVSGTLQQVQARNQQLQASTQEIKVDTNAAVHMRAAGADGSLIGVPGANPAGNNLTLKGWPLTGLDQLRSGFLQQKSFMQSPQPLHHLQFLTPQQQQLLLQAQQNMTSSPGEMDSRRLRMLLSSRNIVPGRDGQSNAYTEVIPSVGPSLQNMCSPVQRMETDMLMKKIAAIQQHQQSSNQQQLLQHSLLSQQPPISNHLPGQQEKMGAGSVTIDGSLSNSFRGSEQVSKNQNGRKRKQPISSSGPANSSGTGNTAVPSSEPSTPSSQSPGDTISMPSLHHNASLSKALVVYGTSTAGTMGSPSNQLADMDRFVEDGCLEDHVDSFLSHDDADRRDGSRMESTKGFIFREVSSVQASTNKVVCCHFSSDGKLLATGGHDKKVVLWHAETLKQKSVLEEHSLLITDVRFSPSIPRLATSSFDKTVRVWDADNQGYSIRTFTGHSASVMSLDFHPNKDDLICSCDGDNEIRFWSINNGNIVRIFKGGSSQLRFQPRHGGYLAVASENAVSILDVETQACLRRFEGHTKHVDSVCWDPSGEYVVSVSEDTVKSLELWDMSENRTMTLAAHDSLITALASSSSGLVASTSHDKFVKLWK

SEQ ID NO: 161042 - protein, 686 aa, Oryza sativa
  Clone ID: PAT_MRT4530_60263C.1.pep
MATIQDIGVSAAINILSAITFLLAFAFLRLQPINDRVYFPKWYLKGARESPSHGGAFVRKFVNLDMRSYLKVLSWMPAALKMPEDELISHAGLDSAVYLRIYLIGLKIFAPITVLAFIILVPVNWTNITLQSSKVQHSDIDKLSISNIPVGSKRFAAHLTMAYVFTFWTCYVLLREYEIVATMRLRFLASEKRRPDQFTVLVRNIPPDPDESIGELVEHFFLVNHPDHYLTHQVVYNANKLDKMVKEKKKMQNWLDYYQLKYERNTSQRPTTKTGFLGCFGSKVDAIEYYTSEIERIEKEETDERGKIMKDPKSVVPAAFVSFRSRWGAAVCAQTQQTSNPTVWLTEWAPEPRDVYWDNLSIPFVYLTIRRLIIAVAFFFLNFFYVLPIAFVQSLANIEGIEKAAPFLKPLIEIIPRTIGEAIPMKATFFITYVMVDGWAGVAGEILRLKPLIIFHLKNFFLVKTEKDREEAMDPGSIGFDSNEPQIQLYFLLGLVYAVVTPFLLPFILIFFGLAYVVYRHQIINVYNQEYESAAAFWPSVHGRIIVALIVSQLLLLGLLSTKGAGQSTPVLLVLPVVTFYFYKYCKNRYEPAFVEYPLQDAMRKDTLERAREPGFDLKGYLMNAYIHPVFKGDEDDEKFSISDEPEAEQVLVATKRQSRRNTPVPSKYNGSESPSLAEIVNDQRL

SEQ ID NO: 161043 - protein, 253 aa, Oryza sativa
  Clone ID: PAT_MRT4530_60264C.1.pep
MADPNNNRRRPNLLTGGCSAGKQYLASKTAPSIFSVEVAVRHEKQNNLKAMRKYVALTDKATDVMDTGVPTDELTIKRRQQTGFVVHSSDTQLFILTTAHAVDCVFKKGVHQVTAEELNLVFLFGVACTHHEAQIQADYPDGNVSELLRSYCDAHVVALDIEKDLLLLAVTKDELCLQDVDVGGVFVPCSSDHPIIHLADLPPEQSDLSLLQVMVDAKCGYAICLEDVREFLTNALENLQLLEDNEDGDGGHA

SEQ ID NO: 161044 - protein, 164 aa, Oryza sativa
  unsure (1)..(164): unsure at all Xaa locations
  Clone ID: PAT_MRT4530_60265C.1.pep
PGCRNRHEEATASSRSVFHQHAERAVTSSRSSMTSCRSSTYQNGDRVATSSRSAXGPNADRVHASSKSAQQASRRSLREPHGAVSLPRAAVNKGSHVSHVALSNSTTQKFVTSHPKHSVMPNSSQSASTLHTTQVSLKRSAGVSSVNNRPQNKRKQLSTPSTWR

SEQ ID NO: 161045 - protein, 137 aa, Oryza sativa
  unsure (1)..(137): unsure at all Xaa locations
  Clone ID: PAT_MRT4530_60266C.1.pep
MPTTASLSPSGAPTVRAGLKKPLCASFQPVRGRADARRXAVRASASMKERATPGXAAPCAAMVLPDVAEPPGSLXPSLKNFLLSIVSAGRALPISAPSPLSNFDPFNDLISLPHHNTPRSFLSNHLSPFFEFLTITI

SEQ ID NO: 161046 - protein, 591 aa, Oryza sativa
  Clone ID: PAT_MRT4530_60267C.1.pep
MKVVDRLALSEAEFPRLEPITNEDGEEITKRRCMSIGEAASTNAGSKLSAELFRDWFTNFYDGFPRNTRVWFAYEESANFELPADFQFVEINSDKFDKSREVFSAAITPCILPVGIHQGRHIQISYEFYHPTSAARQLGMGQLPISLFFADKIQNMGEITSAPMMDRLLNIAGPSLGSIENIKLAIQRSAAFDRWWVEWKKHLLHQSTSMYLTDLFPEAVPQTTESSPPHHSESGLEIHFALGILPNGGGLAPSFIGYHAPKTSTLLHGQTRVPIAYEAGKKKRAKSVAAPSAAPKKSKKQKTTDDLPSIDPVVEQFLEDKEIEEAVDDAAATMSETREQTPPADIPTPQRTPPPPTHSTYKPRKKKLASKKPIAPATPPPHSPTPSVHESSEHTPSAAGSHHMEEEVAPTPGIPGTADMFSFDIRQFMDEEEETTSKALVPLADNVKTTLLDISKRLEGSLETLVVSCGSIRDRFHEIHDQIPDELADVLTPAAYLEQHRLKLEKAKQRIADRRERKDLEATIQASRVSINEEKANLDELEAGPSSTQANIDRLNARKIELLAELEQCNAQIAIEEQKLVDLPKATEDQR

SEQ ID NO: 161047 - protein, 692 aa, Oryza sativa
  Clone ID: PAT_MRT4530_60268C.1.pep
MSEADRIRVRAAALALDGGGGGAVRDKPDAKADVFADLGSPVSPLRARASVATSSSSSSGSAKSPAPSNAGALALAGGRSHSGELTAESTPPRLPGHRRCGSGPLIFSGGSSGGSGGGGGDRGSTASSPMTNALPAGNICPSGRVPVAAAAPPPPRSRPDVLGSGTGNYGHGSIMRGGGGMAPARSSIDSSSFLGHAPRSPATFPAASSASSGSLQDVTRLGNEWYKKGKHAEALRHYDRAVALCPESAACRGNRAAALAGLGRLADALRDCEEAVRLDPANGRAHSRLAGLCLRLGMISKARRHLTQAGHLHQSDPSEWEKLQEVEMHQGRSIDARKVGDWKSALREADAAIAAGADSSRLLLAIRSEALLRLHKLEEADSTLASLLKLDSVLLYRMGANPSGMLAESYVSIVRAQVDMALGRFDAAVEAADNARFIDPGNAEVGMILNNVKLVAKARAQGNELYKAAKFSDASIAYSEGLKYEPSNPVLYCNRAACWGKLERWEKAVDDCNEALRIQPNYTKALLRRASSYAKLERWADCVRDYEVLHKELPADTEVAEALFHAQVALKTTRGEDVSNMKFGGEVEMVTSVEQLRAAIGSPGVSVVYFMSIMNQQCTLITPSVNSLCSECPSLNFLKVNVEDSPMVAKAENVRIVPTFKIYKDGVKVKEMICPSLHVLRYSVRHYAVSSS

SEQ ID NO: 161048 - protein, 96 aa, Oryza sativa
  unsure (1)..(96): unsure at all Xaa locations
  Clone ID: PAT_MRT4530_60269C.1.pep
HRACRPHRIYSHRTNPGEIATDCYKRRHRARLLPMAHRSASKEDEPNSICMKMWEHQPAANAQVMRRSVRRDTSSPGRTRTWGFSXENSLPTNEGT

SEQ ID NO: 161049 - protein, 227 aa, Oryza sativa
  unsure (1)..(227): unsure at all Xaa locations
  Clone ID: PAT_MRT4530_6026C.1.pep
RKEKRNNDKQPKKKTRTKEKQNQQNQFKTKHTHTRKRKQATHKQQQRRGQQNKTKTKAQRKRERKXRQNRRKNKSKPNKKXKKKKSDTAHKEQRRRAERKTSKEKKRTNRNPNQKRKRKHRTKQREKNPCATRKQHKKKKQEKAEQLKCTTHENEQRTTEQPNKAKGKKTRREQERECKRQKRGRRETEQIKKKKTTYTHQHTGKTKKPDRKEHKKEQTATKVKRRR

SEQ ID NO: 161050 - protein, 64 aa, Oryza sativa
  Clone ID: PAT_MRT4530_60270C.1.pep
KTQVTKGTMEHDGSSKIVVELVRLDPGDLAPCGLRLRSIRMRVGIPYRYVTYIEGNQPRHTITN

SEQ ID NO: 161051 - protein, 97 aa, Oryza sativa
  unsure (1)..(97): unsure at all Xaa locations
  Clone ID: PAT_MRT4530_60271C.1.pep
PTPFFGVLXAEGEEEGECVFCLFRKGVGCREDFVGREKCVVDAYKAADHVIKRCYQVTAALDKCMEAAAEYYHPILSAERAMVGDLEAAKAHQADEV

SEQ ID NO: 161052 - protein, 59 aa, Oryza sativa
  Clone ID: PAT_MRT4530_60272C.1.pep
FFFFFFFFFFFFFFFFFFFFFFFLGTKILGTLGSKKKQRAFFFLKQNPQGQNPPLLGGK

SEQ ID NO: 161053 - protein, 105 aa, Oryza sativa
  unsure (1)..(105): unsure at all Xaa locations
  Clone ID: PAT_MRT4530_60273C.1.pep
RRRRRRRRRRRGRSWRRRRRRWRASRRRRGRRRTRRSWSASRTTITSSRRAPPRXHWICIKDKFRAAGEYVSQKSSSVFGKKKVEPVVKDAAVPGEASSVTVESQ

SEQ ID NO: 161054 - protein, 43 aa, Oryza sativa
  Clone ID: PAT_MRT4530_60274C.1.pep
MGRQEVSSAISVLAEYRFEEEDYPVIDYDTGFGQQDVGLLPIR

SEQ ID NO: 161055 - protein, 46 aa, Oryza sativa
  Clone ID: PAT_MRT4530_60275C.1.pep
MMQTFKGAAFTAGTAEQSPRNCSFRPCKRICLPRPLLLCPQPTHPI

SEQ ID NO: 161056 - protein, 511 aa, Oryza sativa
  Clone ID: PAT_MRT4530_60276C.1.pep
MEERLADVEGSFACNSRGEDDFRSCCGDEDEWEDTEESFTAGVAKGELDESSVRLFFKGVSSPEAEGKKLSGIGVVMERSPGVPMLQVQKKLDFYVDELVADHLALMDGLLVALQNGIRKIFAFTNSEKLYFQRIAEAEILEDQLLVALGHRILELVEKLEDFDIILLPSFELERPLQLAKEAIGIMYLSPYEVGTCSICCEEKRGAQMIKVGCAHTFCYSCLTSYTQEKLQTNKVPIRCPQLRCKYHISASECKSFLPVSCYDSLERAFAEAGTSDMERFYCPFPNCSVLLDLSQHFSRASTSSQSDLNCVECPECHRDICINCGVPWHVMMGCDEYQSLPVDERDAGDLSLHRLAQNNRWRRCQRCRRMIELTQGCFHMNCWCGHEFCYSCGAEYTNGIQTCQCVFWDEESIEAASAAHSTQASEIWAWDTFDCMPTAIEGYSEQERAQLALIQRFLSGGFNLGEPPSQSPPRCADSYIIDTMKDLHQLPWLERFVSVISDSYNEDYIQ

SEQ ID NO: 161057 - protein, 152 aa, Oryza sativa
  Clone ID: PAT_MRT4530_60277C.1.pep
MKPATYEVDSIALLDGKLDATPTWRANCRIDPKDIVTRLQGLDMEVSPRICFEASNEVVQHTYSPRFEPYLDPSQWPSYDRVLFPGLEEYFEERHQAPRIASGERLKTLRVRDHTAHIPFSNCGELTLTLEEVTMILALPIRGQAITSDINS

SEQ ID NO: 161058 - protein, 404 aa, Oryza sativa
  Clone ID: PAT_MRT4530_60278C.1.pep
MRWKGCKFAALVVVVVVVSSGAKRGRGGGAGLPLFSVSPLNSEAPLIETWGLASPNEFEPVPRLCRLILTVYEDDLEHPQWAPPGGYGIEPRWVVHRKTYEHTGGHAPTYLLYVDHHHSDVVLAVRGMNMAKESDYAVLLDNSLGQRRFDGGYVHNGLLKAAEWLFDAECDVLRDLLERNPGYTLTFAGHSLGSGVVAMLALVAVHNRDRLGGVERKRVRCFAMAPARCMSLNLAVRYADVINSVILQDDFLPRTDTPLEDVFKSLVWVPDAAFITLLKGNHSGGGVEAEELRRLGLDPGMPSPLMLENERTMKPPETQRMDDEIAIERDHDEEQKAALRRAVALGVADVNVPSAYGTFSENLTPEADEASPVLPDSGLRRTVWDEWIARIFEKDESGKMIPRT

SEQ ID NO: 161059 - protein, 54 aa, Oryza sativa
  unsure (1)..(54): unsure at all Xaa locations
  Clone ID: PAT_MRT4530_60279C.1.pep
RPARMWASPTSSHWLRHLSSEWLEPQDPSGHATVDNKQSCFLAMGSLRAPICXM

SEQ ID NO: 161060 - protein, 1174 aa, Oryza sativa
  unsure (1)..(1174): unsure at all Xaa locations
  Clone ID: PAT_MRT4530_6027C.1.pep
MADHGAASAAADADPSLRQGGDAADADEEEDGEXARHTSAAGIGIRGFVDDRXRARKDLVEQDAVGAKCRVPWLVEENDNKEVVACCGKGEGEVLAAVPGMGRXMYTDPXLKGLIAVEGVDQELKVRKGSKRGPVAIWLDMTHRNVWLCGAVRNLNSQVFHXCHVLKVLEVGNIKEXHQTTVLKRWRKDAQSESPRENYGVEAVDEDPRFAVPNNGQEARKMRGSKRGRTKKDVTEKDEKPVVELEAEKEDEVVAQDGDDVEEQKGEGEEEMEEEVQVEVQEKRGRGRPRKADAEGNALQARVLRELGLRASQYTNEERKKIVSKYLSKRQSRPVSARPAKIASHQALAERRKRGDGGRFLSSEGLTQPSERRSKRLETPFGQLQEPAPGPLQQTHLQQPPFHSGPQIPQAPPPDIQSLQFLSSNPQLGHQATDQSQYTXQSGISCDVRCDILACTIVXQSSCKLCNGNNVETKVMPAXSSLAMLVEQLSAAKSRIQPCAQVKRVPSRXQQLDTRMDLCSQVVVLYRICQMQEKGGSKTRLXEVYIPLKRTIYKKDMQLGDTQAIYEYLQRKKGEHPSFFYAIQVDEDDQLTNVFWADVKSILDYHYFGDVLCVDTRYSTSDHSRPLLLFIGVNHHKQPVIFGAALVYDESVESFKWLFETFKSAMSGKQPKTVMIDQSTAISEAVASVWPRTTQRFSLIHLYKNATKILRDAFQASETFADDFSMWLYGYEEEGDFLSSWEILSDKYNLKDNEWLGKLYADRERWALPYGRDSFCADIAAALRSDNNTDAILADLLKKETDFPSFFNNYDKLLENKRLAEQQADYLGVQMAQRVAPLRMLWQAANAYTPTLFEMFRLEFELTLTCMAYCCGEIGPISEYEVTVKNRPRDHFVRFDSSECMVVCSCKKFEFTGIPCCHVLKVLEVRNIKELPPHYILKRWRKDAQSESPRENYGFEAVDEDPRFLLSKRYSMLYRTFYKIAAKAAENIEAYTYMESQCDQFIEQVELLLQAKLHDKSSLSTILKVQQPNLFPNEASNSETRRQQSPLQSNKKKKGRQGLPEPEEAEVPLRVDPPTISNDIPNHLRTPTSQFLATSHIMQAPYIAQQFGLSSLQGFPGISPFGQLQEPAPAPLQQPHLQQPPFHSGPQIPQVIVITYTHVPFPRDFTFTDSISNY

SEQ ID NO: 161061 - protein, 173 aa, Oryza sativa
  Clone ID: PAT_MRT4530_60280C.1.pep
GRFMGLSEPVVPPFPISDYGTGCIGAITALLGLYHRATRGGSWHGKASLLHYDLLLFKVGQYPEEVKERLRKDIGPDFLALRHAHSVDQISGTALLRMRQVFPELFTGDKYVEKWYSNAYKAEVEAVPPVVEIEGLEVGFRRASRPNGADKPTWDFGEEADRKLSQVVYLIKF

SEQ ID NO: 161062 - protein, 74 aa, Oryza sativa
  Clone ID: PAT_MRT4530_60281C.1.pep
LPEGGLGNHIMGQNPSWSGRVAGTSVRVLPGFGPLCTGKGLPKAGVRRGFLPCEGLWSGRPAGWGFRPGPAGSR

SEQ ID NO: 161063 - protein, 567 aa, Oryza sativa
  Clone ID: PAT_MRT4530_60282C.1.pep
MESINVAPGTTATPRMAPPPPPPCITNLQSTLRYNNLLLHRKTKGWKPRNVSCRVDRRDVLLGISGAAAMVATQGGGGALAAPIQAPDLGDCHQPVDVPATAPAINCCPTYSAGTVAVDFAPPPASSPLRVRPAAHLADRAYLAKYERAVSLMKKLPADDPRSFEQQWRVHCAYCDGAYDQVGFPGLEIQIHSCWLFFPWHRMYLYFHERILGKLIGDETFALPFWNWDAPDGMSFPAMYANRWSPLYDPRRNQAHLPPFPLDLDYSGTDTNIPKDQLIDQNLNIMYRQATRKAELFMGQPYRAGDQPEPGAGTVESVPHNPVHRWTGDPRQPNGEDMGIFYSAARDPVFFAHHGNVDRMWHIRRGLLFPGDTDFTDPDWLDASFFFYDEEARLVRVRVRDTLDPSALRFTYQDVGLPWLNAKPSTGAASTPAPAAGAFPATLDKTVRVAVTRPRASRSREEKEEEEEVEIPDHSTYVKFDVFVNAPESGDGAATCAATCAGSVALAPHGIHREGQLSPRKTEARFGICDLLDDIGADGDKTIVVSIVPRCGCDSVTVAGVSIGYAK

SEQ ID NO: 161064 - protein, 128 aa, Oryza sativa
  unsure (1)..(128): unsure at all Xaa locations
  Clone ID: PAT_MRT4530_60283C.1.pep
MGTTATNIANIIWISKKTKIKSSKCXNSIRSPTKLLTSKGRQIYIRTLFSAREYLIERSRSPLSNGSSFIAKFHSNHPQLRKQCVVSPVVGLWAWNFVWDPGPCGAHVGNKVDLHRQDQQPTERCIDR

SEQ ID NO: 161065 - protein, 113 aa, Oryza sativa
  unsure (1)..(113): unsure at all Xaa locations
  Clone ID: PAT_MRT4530_60284C.1.pep
SFFFTIHVTLKEGFRYHSHEVMGWEATDLAYGDMXRGSSGAEVLHRSPMSXTIFLGREHAGTWGKALGAXCYDXNNMGXHDLAQGCPLRLQGFCHTKYGLATLPKSASHCLDR

SEQ ID NO: 161066 - protein, 145 aa, Oryza sativa
  Clone ID: PAT_MRT4530_60285C.1.pep
RLWRIPIATPPPRQPDAPPGPFGEFFAKETDNEMVFIGGGAALSDPLPEDNWDGYTGFIHNVLNENYLKNHEAPEDCEYYMCGPPVMNAAVIEQITLQGKTMGTTYTVKYIDDVNTPFEISPDFATVVAEAIRLNKITEGAFNVT

SEQ ID NO: 161067 - protein, 44 aa, Oryza sativa
  unsure (1)..(44): unsure at all Xaa locations
  Clone ID: PAT_MRT4530_60286C.1.pep
LCXKKKKKKKKKKKKKKKKKKKKKKKKKKKKKKKKKKKKRGRPF

SEQ ID NO: 161068 - protein, 55 aa, Oryza sativa
  Clone ID: PAT_MRT4530_60287C.1.pep
GICFVGQPPSLDQQGNPGANRKGKFSAHSYIMSYIYFKYILWKKNKINKYSLLFD

SEQ ID NO: 161069 - protein, 85 aa, Oryza sativa
  Clone ID: PAT_MRT4530_60288C.1.pep
MPCNAAAASCTAAAAPVAVAPGCPEATTLDCSASPCRCAPLAEPPVAGALLRLRPFPRTETSIVELGNFQRPRFWVRGKGRWRKG

SEQ ID NO: 161070 - protein, 119 aa, Oryza sativa
  unsure (1)..(119): unsure at all Xaa locations
  Clone ID: PAT_MRT4530_60289C.1.pep
PPSPPRREAPAARRDAAXXXPDGGDGDRXEAAGAGPXPAQQGRPTREGRXAQAPGERAAGEDAQEXDXTXASERDKPGEQAATGDRGGXXAXRERTEXRDNARRRERERXDAPTTRHPE

SEQ ID NO: 161071 - protein, 211 aa, Oryza sativa
  Clone ID: PAT_MRT4530_6028C.1.pep
AYTYMESQCDQFIEQVELLLQAKLHDKSSLSTILKVQQPNLFPNEASNSETRRVSSKKIKNVDTRRQQQSPLQSNKKKKGRQGLPEPEEAEVPLRVDPPTISNDIPNHLRTPTSQFLATSHIMQAPYIAQQFGLSSLQGFPGISPFGQLQEPAPAPLQQPHLQQPPFHSGPQIPQAPPPDIQSLQFLSSNPQLGHQATDQSQYTIPVWDFL

SEQ ID NO: 161072 - protein, 562 aa, Oryza sativa
  Clone ID: PAT_MRT4530_60290C.1.pep
MGHTASRICTLLSILFVSCMLASAANDGLIRIALKKRPIMESIYGELVPKSGTVDHEVALGYSGVRMNSADEGFYDPVTEAINHVRVHQQRMLRDIEAAAMEGRLKHFWSYRGFRERGSLKNGTQNHPLALKNFLNAQYFGEIGVGCPPQNFTVVFDTGSSNLWVPSAKCVFSLACYFHRKYESRSSSTYMENGTPASIHYGTGSIHGYYSQDQVTIGDLVVNNQEFIEATHEPGLTFLAAKFDGILGLGFKEISVEGADPVWYNMIQQSLVTDKVFSFWLNRNANDINGGEIVFGGADESHYKGDHTYTRVTRKAYWQFEMGDFLIGGRSTGICVDGCAVIADSGTSLIAGPIAAIAQIHAHIGATGVANEECKQVVARHGHEMLELLQDKTPPAQVCSKIGLCKSDGAHGISDGIESVLGETHKSADEVSDATCNACEMAVTWMQSEFVQNHTKEGKLEYANQLCGNMPSPVGSYVDCRHIGHLPNVAFSIGGRAFELTPEQQYILKFGEGFLAHCMSGFTALDIPPPIGPLWILGDVFMGAYHTIFDYGKMRVGFADSA

SEQ ID NO: 161073 - protein, 66 aa, Oryza sativa
  Clone ID: PAT_MRT4530_60291C.1.pep
MGINMYTQGSNLLARLHLIKIWTCTGAKQISHAGVFDFFVNTNWHARMVEYISIGLSVTWGRGYHD

SEQ ID NO: 161074 - protein, 73 aa, Oryza sativa
  unsure (1)..(73): unsure at all Xaa locations
  Clone ID: PAT_MRT4530_60292C.1.pep
RGKPCGGMPIFQCHMVAIXKCKAQRXVLVLCYELKKLNWSWSRKDMLHPVLRRGFIXLSILSTFNSLSFFLCF

SEQ ID NO: 161075 - protein, 336 aa, Oryza sativa
  Clone ID: PAT_MRT4530_60293C.1.pep
MKGLFKSKPRTPADVVRQTRELLIFLDLHSGSRGGDAKREEKMAELSKNIRELKSILYGNGESEPVTEACVQLTQEFFRENTLRLLIICLPKLNLETRKDATQVVANLQRQQVSSKIVASEYLEANKDLLDTLISGYENMDIALHYGSMLRECIRHQSIARYVLESDHMKKFFDYIQLPNFDIASDASATFKELLTRHKATVAEFLSKNYDWFFSEFNTRLLSSTNYITKRQAIKFLGDMLLDRSNSTVMMRYVSSKDNLMILMNLLRDSSKNIQIEAFHVFKLFAANKNKPTEVVNILVTNRSKLLRFFAGFKIDKEDEQFEADKEQVIKEISAL

SEQ ID NO: 161076 - protein, 62 aa, Oryza sativa
  Clone ID: PAT_MRT4530_60294C.1.pep
YMHSSSIFLTMVDRKCVNLLDSSHPSFGPSIMVQQHEVDHDAGKHNNSQSDDIPRRLPVSAA

SEQ ID NO: 161077 - protein, 125 aa, Oryza sativa
  unsure (1)..(125): unsure at all Xaa locations
  Clone ID: PAT_MRT4530_60295C.1.pep
YRTSLPESTHPSLTFLAKAIANGTDSIYIRVMYIKLIQKYVGEGAPMVQELSHIALSNKACIAFFXNVDTIGMCLTLHDQGYGXDIYVQHTMFEIVNQLHESDTTGNIKVLIATNTPDTLDPSLL

SEQ ID NO: 161078 - protein, 479 aa, Oryza sativa
  Clone ID: PAT_MRT4530_60296C.1.pep
MAGRSSSSFRLLDLVRPFMPLLPEVREPDGRRVPFRRKLACTAAALFAFLACSQLPLYGLHRAAAAGGGADPFYWVRAILASNRGTVMELGITPVVTAGTLVQLLVGSNLVRADSSNPDDRALLSAAQKLLSIVITAGEATAYVLSGAYGSVGVLGAGNAVLVVLQLVLGGMVAIFLDELLQKGYGFGSGISLFTAANTCEGVVTRALSPATMDRGRGAEFVGAVTAAAHLLATRARKLSAVREAFFRGGGGGSLPDLRGLAATCAVFLAAVYLQGVRVALPVRPRNAPRSHRGGAYSVRLLYTSGMPVVLLSSAVSSLYVVSQALYRRFGGSLLVDLLGKWTPDAAVPVGGIAYYVTAPASAASAAANPLHAAMYVAFVLAACAALSRAWVVVSGSSSRDVARRLREQQMVMPGMREASMQRELERYIPAAAALGGVCVGALTVAADLMGAVGSGAGMLLAVTTVYQCYEAFEKEKTY

SEQ ID NO: 161079 - protein, 41 aa, Oryza sativa
  Clone ID: PAT_MRT4530_60297C.1.pep
VLGTWLVEAYSMRVPICTRVSPSVCSNLSQFSLGGSRYQPM

SEQ ID NO: 161080 - protein, 43 aa, Oryza sativa
  unsure (1)..(43): unsure at all Xaa locations
  Clone ID: PAT_MRT4530_60298C.1.pep
IGPTALIPGHLYIVICRCPPMLIKPFPSQKKKKKKKKKKXXXX

SEQ ID NO: 161081 - protein, 135 aa, Oryza sativa
  unsure (1)..(135): unsure at all Xaa locations
  Clone ID: PAT_MRT4530_60299C.1.pep
ESKAEASFEEAMSEEPNVVAAFDEPCNVESTADAEPVVEXKPCDSKSEEKTLVVTRDEAXTKTVEAIEETFVPAAAAPAACSIEEDVALEXEVLSASAPEPVLICGLPFVGYVXRTDSVFLKLLLALDFKVFDAL

SEQ ID NO: 161082 - protein, 81 aa, Oryza sativa
  Clone ID: PAT_MRT4530_6029C.1.pep
RSIYWTDVYMNTQIDLGVSRSSIKYIYVASAATIGGYAESGLAQTLETADTRHGMILRQKAMIRHACTSDAMYAYIKLWEG

SEQ ID NO: 161083 - protein, 142 aa, Oryza sativa
  Clone ID: PAT_MRT4530_602C.1.pep
MEATALTLSSRPAAASRSPAKGTFASLHPRRRFSAHAVHLRAAQSASLRAPSPGARRRRRRGSGLVVRAEMFGQLTTGLESAWNKLRGVDVLTKENIVEPMRDIRRALLEADVSLPVVRRFVSSISEKALGSELIRGVRRNS

SEQ ID NO: 161084 - protein, 197 aa, Oryza sativa
  Clone ID: PAT_MRT4530_60300C.1.pep
MSACHVNFPFHLFSFSVSLLPPSLSLSALAGHGDAGARAPKAARAAGVGGGDGVSSGGERVVIVVIVVEEAEEVIGRRDEKGAGAATAVRGGGGRDGGGAASTTGDTSTAPDNPSSQIAYGLTARSIASNEPWAAQFMGAMGELACGIDTIKVESVWHRVPTNLASSQIPPSPLVLADGGALLTVCLQVKRLEARIR

SEQ ID NO: 161085 - protein, 403 aa, Oryza sativa
  Clone ID: PAT_MRT4530_60301C.1.pep
MRTARTPASAARGGRALYELYRAASRAAAPAALLWRRLRGLEHPSRWPERLGRPSVARPRPGSPLVWFHAVSLGEGMAALPVVRHCARLHPGLPILLTTTTLSSFEVMKDLLPDGVIYQFAPLDCPDAIESFIGYWKPNLILLMESELWPNLILSAAEKGIAVVLLNARMSLKSFNRWSLPLGLQLVSLMLSKLSLVIPLSTIQAVRFQLLHAPPQIIHFAGDLKYAVGDIAAGEKEVAAIEDLQQQFSNRPIWMAASIHKGKMKLMNEIPWKIGELRMLYRVTPIAVIGGSFLPGLAGHNISEAAAVGCAVMTGPSVGHFYHMLVEMWQINPLAVKQVKGEYELLEALKQLLGDSRALEACQRAAKDAFSFMSDGVVNRVWNLVHPFTIGSQPDTCDSFSSS

SEQ ID NO: 161086 - protein, 61 aa, Oryza sativa
  Clone ID: PAT_MRT4530_60302C.1.pep
RRLSLSPSIPLPLATSNKPRRSQPTNQPRTCCNAAVLGDHGRYISASTRHPTTASHRAYAS

SEQ ID NO: 161087 - protein, 436 aa, Oryza sativa
  unsure (1)..(436): unsure at all Xaa locations
  Clone ID: PAT_MRT4530_60303C.1.pep
MRTARTPASAARGGRALYELYRAASRAAAPAALLWRRLRGLEHPSRWPERLGRPSVARPRPGSPLVWFHAVSLGEGMAALPVVRHCARLHPGLPILLTTTTLSSLXASPILLPDGVIYQFAPLDCPDAIESFIGYWKPNLILLMESELWPNLILSAAEKGIAVVLLNARMSLKSFNRWSLPLGLQLVSLMLSKLSLVIPLSTIQAVRFQLLHAPPQIIHFAGDLKYAVGDIAAGEKEVAAIEDLQQQFSNRPIWMAASIHKGEDEIILRVHDELTRAYPTLLLILVPRHPEDSKNVSQLMNEIPWKIGELRMLYRVTPIAVIGGSFLPGLAGHNISEAAAVGCAVMTGPSVGHFYHMLVEMWQINPLAVKQVKGEYELLEALKQLLGDSRALEACQRAAKDAFSFMSDGVVNRVWNLVHPFTIGSQTDTCDSFSSS

SEQ ID NO: 161088 - protein, 82 aa, Oryza sativa
  Clone ID: PAT_MRT4530_60304C.1.pep
MGQLNQVFTIPMKSGRISRNFDVSTRLEQFRQNRPVFENLSANSVNLIYKICSEFTGFLPDFTKFQIPPDRNGRFYKKNQIN

SEQ ID NO: 161089 - protein, 549 aa, Oryza sativa
  Clone ID: PAT_MRT4530_60305C.1.pep
MDSSYLHLVLPAAAAAVVVAVVLLLSLWRRCQTTSNHRPQANPILGNLVAFLANGHRFLDWSTGLLAAAPASTMQVHGPLGLGYCGVATASPDAVEHMLRASFHNYVDKGDRVRDAFADLLGDGLFLANGRLWRLQRKLAASSFSPRLLRLFAGRVVLDQLRRRLLLFFDAAADARRVFDLQDVLKRFAFDNICSVAFGVDRDDSSPSSSSPSRLEAGGDGRDDAFFAAFDDAIDISFGRILHPTTLAWKAMKLLDVGSERRLRQAIGVVDEYVTAIMESKQRCSDSEEESDLLSRFTAAMMEEDGGNELGAMFDSPEAKRRFLRDTVKTFVLAGKDTTSSALTWLFWFLAANPECERRVYEEVTALRGDTAGDERDDGYEELKRMHYLHAAITETMRLYPPVPLASRVAAADDVLPDGTVVRAGWFADYSSYAMGRMPQLWERDCGEFRPERWLDGGGGGGGRFVAVDAARYPVFHAGPRSCLGKEMAYVQMKAVAAAVVRRFSVEVVPAAAANAPPSPPPHETAVTLRMKGGLRVLLTRRRGVLSHA

SEQ ID NO: 161090 - protein, 118 aa, Oryza sativa
  Clone ID: PAT_MRT4530_60306C.1.pep
MPDTLFNKGGGGVLPSGPLLLHLIVRRPPLPPSTYATGGVPLPLCPPMGGVPTGGAWRGGGSQPACGSSGWRGRGSGGRDLPSARSGCPACGSGTGGSGVRRRRRRVNVFLFVVVLMP

SEQ ID NO: 161091 - protein, 50 aa, Oryza sativa
  Clone ID: PAT_MRT4530_60307C.1.pep
KSISLTAKYCIILQLGHLVESLHINVRQNTVAQSGNEPAVYLVLFTMTPL

SEQ ID NO: 161092 - protein, 199 aa, Oryza sativa
  Clone ID: PAT_MRT4530_60308C.1.pep
MECAASLSIKLDKKHGIWFVDNFIDEHNHPLTSHDGTPFLRSHRKIKDFQKSEIHSLESIGIRKNVIMKVMKCKYGGYDKVGFVKKDLYNYSSRYKRSRILEGDASATLELMKKRRDKDPGFFYEYQVDDEGRLKNLFWCDAQSRMDYQSFGDVVVFDSTQRMNKYNMPFIPFVGLNHHRQTTIFACGVLESNVPAETK

SEQ ID NO: 161093 - protein, 637 aa, Oryza sativa
  Clone ID: PAT_MRT4530_60309C.1.pep
MKFMKLGTRPDTFFSNESVRSVCTEVATDLQILVGDCLYQLHKFPLLSKCLLLQALCAESGCGGNGGDVIELPGFPGGVEAFDACAKFCYGITVTVSARNLVPLRCAAAHLGMSEAADRGNLAAKLDAFLASCLLRRWKDALAVLNSTRHCAPLCEDIGLTSRCVDAVAALIASPAALPAHSSSASPWWAHDVAELGVDLFWRIMVAVKATGAVHEKTVGDALKAYARRWLPNVAKDGIVVGADQPFDGVGNGGDGGNASVKQIATRHRLLLGFLLKLLKAANILSASATSRAELVRRVAWQLEEATVGDLLIPSLSCVSETLYDVDAVAAILDEFALRHAAAPPPPVALAVSPDDDDDSPARSGGHRRSRSAESVGFDGAARRSSSAAPVSPDALVRVGRLVDGFLIEVARDPNMPLDKLLAMAEAVPDTARPEHDGLYKVVDTYLKVHSEMSKSARKRLCRVINCRKLSDKACAHAAQNELLPLRVVVQVLFFEHARAAAMAGGAHAAAELPGSIRALLQSKSSGSDQEDDAADRVDEQRLRALAAGASPGDDWSVEGLRRAASKIATLRMKLEEDDDHDGGGGDDEEFARRQQAGLARSASLRFRAFCAIPAARPKRMLSKLWPLARGVTTERH

SEQ ID NO: 161094 - protein, 166 aa, Oryza sativa
  Clone ID: PAT_MRT4530_6030C.1.pep
IPEHHKDPSKCWILHVLGQSYGIFYPLNSGHHSRPPTNPGRAASSCRRVLHRRRRSMRRRPSRPRRARRRDLPPRPARRRAAARRRPSRPSRGGTAPRSPPRRRRAPAPAPGPASARRPSPRTPSASASPGAPGSRRPSRRRRLASPLGSPARSRRRRRRSPRRRR

SEQ ID NO: 161095 - protein, 123 aa, Oryza sativa
  Clone ID: PAT_MRT4530_60310C.1.pep
KGGRRRGSNKRPWVAKREMRARFGTNSPPTSALATSSRRGGSRNRRSGRGFTNSAMQIKICPGKVAKKIQIPFSQSATAYQGGECLVNTFRNKLQPVTREPGTACQRRRRRRRRDAAARTRGR

SEQ ID NO: 161096 - protein, 89 aa, Oryza sativa
  unsure (1)..(89): unsure at all Xaa locations
  Clone ID: PAT_MRT4530_60311C.1.pep
YELNLDRDPNMSPTALGGPSDVSYIFVRGVTGGGIASPWEYGEENARRGEGRAGAIDYFLYIDARYFVRIHSTSXRLIPLRSASSGNDT

SEQ ID NO: 161097 - protein, 139 aa, Oryza sativa
  unsure (1)..(139): unsure at all Xaa locations
  Clone ID: PAT_MRT4530_60312C.1.pep
GGSRVPIARNFXKTFFSGFFFPKPPFFFPPNFFFLKKPPLXGCPFFAIPPNRYAFFSPPSGVNSVFPPFPVFVFPKGFCLPREKGLKPQNPRGGEFGPFPPXFPPQFSPNFLIYLKGGLPGNVTKILFLGSQIKGVLGP

SEQ ID NO: 161098 - protein, 145 aa, Oryza sativa
  unsure (1)..(145): unsure at all Xaa locations
  Clone ID: PAT_MRT4530_60313C.1.pep
MKTGAGEDLASGSVRGDGGSGGGRERPHGQRWTAAAAAHREDLVSGGGGWGRRRLRATDGDLRPAAVDGEAPAVXKTSPLVQCAPAAEGDDNARSESRVERLWQATLSYFMGLHVIYSFSSQTLPHLWPTNCWPHFVCHATPMAN

SEQ ID NO: 161099 - protein, 104 aa, Oryza sativa
  unsure (1)..(104): unsure at all Xaa locations
  Clone ID: PAT_MRT4530_60314C.1.pep
MKTGAGEDLASGSVRGDGGCGGGKERPHGQRWTAAAAAHREDLVSGGGGWGQRRLRATDGDDVVSACGRPRWMGKLQRWGXTSPLVQCAPAAEGDDDAINKNRT

SEQ ID NO: 161100 - protein, 69 aa, Oryza sativa
  Clone ID: PAT_MRT4530_60315C.1.pep
PQANQARGIYPRPGGSLRSVSMARFLSSVHRLFKVLLFGGVVICQAPWEHAVRLKKDPPGGARVLEPLI

SEQ ID NO: 161101 - protein, 104 aa, Oryza sativa
  Clone ID: PAT_MRT4530_60316C.1.pep
TRGHVSRPDRLMSGADVTGSPGGCRGQIMFRLVLCAIASLADVVSPGGLTRPSGWSPIVLLDGRACCIPWPILLHVLYSWRSQDHNVFHRYYISCSFSQTIDWF

SEQ ID NO: 161102 - protein, 99 aa, Oryza sativa
  Clone ID: PAT_MRT4530_60317C.1.pep
TPPCRGRGRRGPRAAGSDPGARRASRRARRGTPGCGARPPPTRRARTRPASSSPSPLPTPRPVRNPPGAPPPARPLLGRGARRLERMRRESQRRSGGGS

SEQ ID NO: 161103 - protein, 220 aa, Oryza sativa
  unsure (1)..(220): unsure at all Xaa locations
  Clone ID: PAT_MRT4530_60318C.1.pep
IYLHHKLIHELTNMGKRNNPEKFLKISENQVFHHSHPRTHLAYIDLGSLGRVHKLVKCLFWCMNLSNACGGRRKGHXMLFLYTTQVSETNLTSSLDVLITYVKDYLWAHQNKSFILLAHNHQYHWVLLVIVLKWSKVYYLNSRISDKYDFFMLKGSFYDAWAPNVEKGGGNREGENLYHHKDFPCHQQIGETCGFHMCHNIKTLLNKVTLLDIEVRIYLH

SEQ ID NO: 161104 - protein, 62 aa, Oryza sativa
  Clone ID: PAT_MRT4530_60319C.1.pep
TRRTRGRTRGRTRGRTRGVPPELAYGKKGVQEIPPNATIELDVELLSVKQNSYGTPVKIIEG

SEQ ID NO: 161105 - protein, 86 aa, Oryza sativa
  Clone ID: PAT_MRT4530_6031C.1.pep
SHACASRTCHSRLGLLTNLDPTPVVDVFVRVNASDVEAPSSLAPKIGPLAPSSHNIGEDIAAGTGNDCKALRVTGVFSEPKRQANV

SEQ ID NO: 161106 - protein, 169 aa, Oryza sativa
  Clone ID: PAT_MRT4530_60320C.1.pep
PAECTVLQPAQSQHGCVEEAYQRKEAMPQNATPGSKRLASVRRSVEKLPYGQAEGASSVRTNGVTYGQKGFHSEGKALTLPAEPCHTSQPGMTPRGEGLEPKGKSPVTAGATSHIEWFTGWKPPQVQHSFPPGPSYLATGLALNSYRSHRLCMQRDSDQTNPHNEMFEK

SEQ ID NO: 161107 - protein, 109 aa, Oryza sativa
  Clone ID: PAT_MRT4530_60321C.1.pep
GVTGRNREITCARHDRIAGTAAGFDDDGDDDEDTIRTELFRGVGTGIKLGDRIMTVSAWVCVDGVVKWRWGDTVGFGHLEAGRGEGRIVHVEAGRIVAGIFWFHSLGYH

SEQ ID NO: 161108 - protein, 37 aa, Oryza sativa
  Clone ID: PAT_MRT4530_60322C.1.pep
FTITYAMFQNHNNITCHSHNRQRSLYPSYMVMKITIM

SEQ ID NO: 161109 - protein, 107 aa, Oryza sativa
  Clone ID: PAT_MRT4530_60323C.1.pep
TYIHARTAEIIINDETWCGRDLTGNVRALVGGGLLVTRLGLLVLVLDPMGPMRRALRHFPQTARRRRLRIVHTLLPCSSSCGGGCLPRRRRRRGWVAAVVPLVRPRR

SEQ ID NO: 161110 - protein, 580 aa, Oryza sativa
  unsure (1)..(580): unsure at all Xaa locations
  Clone ID: PAT_MRT4530_60324C.1.pep
VRDVGASFSISGQIKGKIGCVICVNGTVYRFLRRNHKYRSKAAYFDNTEXLDDPPGPCKGDRVFXNDEKSQSFFLRRQKRRKPSGSEMRKDQAFYSIDIXIHHFIGVMHLEKNVFYRTIGTLVAIPSKTNDGLKSHNDLVNTQITEELHXADEGQDVTRVHLSLTYYTLTNYEKMALYKSLHEVRVPTVSHKVIDLEELGHLRVFAIETLCKLEMCFPLSFFNMMQPRSPHIVPQILVLGPLYLHQMWTFEQYMSNLXKGYVRNRAHPEGSMIEGYTTKKVIECCIGYLQDGKAIGLLVPRHKGRLSGRGTXKEKRILDNDYKAVKDAHFIVLXQLVIVELYIEQHLKELQARNVRRSEAWIMKWHKSDFTEWLKDLGRPYGDSTKEKTMKSLADGHSRVYTSWXSVYLNGYTFYTKARDKRSASQNNGVQVXEIDTTGQKSTYYEFIEEIWERDYEPNMQIPPFRCQXVKHPAGVFVDKFRRTIADLDNVSHKNNPLVLADRATQVFYVXTPSQLKKHIVISGKQRILGVGDVEDVEAYNQYENMTLFMDFGNYIKLVEETISESPKPYMRNKGVRKNV

SEQ ID NO: 161111 - protein, 86 aa, Oryza sativa
  Clone ID: PAT_MRT4530_60325C.1.pep
TNVIPTCLYRGWSCPLQALLHVQLGVETKGNPKHAFPSKKTSRPDETQLDSDLPVRPATHRRSDWPSTGGLTAQHTAVRPAHSKET

SEQ ID NO: 161112 - protein, 104 aa, Oryza sativa
  unsure (1)..(104): unsure at all Xaa locations
  Clone ID: PAT_MRT4530_60326C.1.pep
TPAAAAGTAAPRWTAAKSHGAAVPPSDQAGVARAPRPQAGQHPARPQHPSAAPPSXPSPHRHAPCHAAPPQPPPWPXRHLSSPSRPSPAPPPPRATPPPARCRL

SEQ ID NO: 161113 - protein, 69 aa, Oryza sativa
  Clone ID: PAT_MRT4530_60327C.1.pep
MNSEARSMSRLAYHSTATSPLSLLLCCSLFAAAASSFLTPLLLPLLLNQRFLEANTDFRAFVHIRCHCS

SEQ ID NO: 161114 - protein, 388 aa, Oryza sativa
  Clone ID: PAT_MRT4530_60328C.1.pep
MEAVLRHPSLSRLKPPNPNAQRTPALSITVPFRLRLPNRRLTAAAVFQDQTNPRNPASKGGDDDEAYGEVDRIVSSRTIKNPVFAEDGSATTVTATEYLVEWKDGHEPSWIPAEAIAADVVAEYETPWWTAAKKADAAEITALLADETLRRDPDAEDAQGRTAMHFAAGLGSEECVRALAEAGADVGRPERAGGGLTPLHIAVGYGRPAAVRALLELGAEPEAPDGQGRTPLELVQDVLAKTPKGNPATFERRLALEAAAKELEKAVYEWGEVEKVVDGRGEGKWREYLVEWRDGGDREWVRAAWVAEDLVKDFDAGLEYAVAEAVVNKREAAEGEGKWEYLVKWVDIEEATWEPAENVDAELLQEFEQRQSGVAAGGDAPPPPPVAG

SEQ ID NO: 161115 - protein, 72 aa, Oryza sativa
  unsure (1)..(72): unsure at all Xaa locations
  Clone ID: PAT_MRT4530_60329C.1.pep
GGKPGAPKEGVFLSFXTNVGVFVAPQGGMKGFPPPGPFGKGGVVFWPRVARAAKGFVFFKPPLKVPLGFFFF

SEQ ID NO: 161116 - protein, 142 aa, Oryza sativa
  Clone ID: PAT_MRT4530_6032C.1.pep
MNPPKTDDAPARRKGHDSTKSDDANGTDRAAPSPNRVAALLNSLPRSYGPCQFLESICATIAVTVPGAGGGAAAGFPSPPLSTTCRRGGRDLPIDGCSDGSYMGMVTANRRRNDGAATAGRRCADGGRSHKEDDWKRRLFAG

SEQ ID NO: 161117 - protein, 204 aa, Oryza sativa
  Clone ID: PAT_MRT4530_60330C.1.pep
MGKEMNLIREDEYGGGGVGFEPTEDELMLHFLRPQLRGFAPRVAGAVVEADPCGAAPWELLARHGRREEGFFFSARARRKPSVRRTVAGCGGGGGGGGAWMHSSTKNGQSVTDLGVVVRWCRINYCFYVRGEMGQQRSTGWMMAEYEITDPRCYRRADDGEEDDFWVLCHVRKSSRPQAAKISPAKPARRRKPAAAAAADVRAA

SEQ ID NO: 161118 - protein, 80 aa, Oryza sativa
  Clone ID: PAT_MRT4530_60331C.1.pep
PPQETRLAHSPPRRTSGAAPPLPPPLPKAAPSASAAPADDARAPVSRTPRVPSARPSSASYTRTAAKNAACDQGGGGGEK

SEQ ID NO: 161119 - protein, 38 aa, Oryza sativa
  Clone ID: PAT_MRT4530_60332C.1.pep
FKIPWDTRLRNADEQVTLVHVEQLDIWVLQACEPASYC

SEQ ID NO: 161120 - protein, 93 aa, Oryza sativa
  unsure (1)..(93): unsure at all Xaa locations
  Clone ID: PAT_MRT4530_60333C.1.pep
PDLCATAVVMEPFSSWAFKVVILRFATTSNICSDDSSVQARPRGFCFGSRAIKLMLCYCSLPHHLFFIDLFNPIHIHCYLINQVSFIIFFXXF

SEQ ID NO: 161121 - protein, 163 aa, Oryza sativa
  unsure (1)..(163): unsure at all Xaa locations
  Clone ID: PAT_MRT4530_60334C.1.pep
LTSPPQAFHTRTALAFPTPTPTRSPLELLPFIRVYVSGRVERXLLGTDTVAASLDEPTGVASKDVTVDPATNLSVRLYLPPAVAAGERLPILVYFHGGGFXVESATSPTYHRYLNALGSRARVVAVSVXYRLAPEHPLPAATGSAASGGSCAGAPTSASTTRG

SEQ ID NO: 161122 - protein, 163 aa, Oryza sativa
  Clone ID: PAT_MRT4530_60335C.1.pep
ARRENGRRIIVSEQDSKGPQHQRTWLYLLETATQEELKQIRKPAIQDDTFRKTLELIAATNDGVLVSLTYYKLPFKSDLLSLESQESESQKESDSSFYSPSFSNSTSSSDPFVFFWSLPSFRIDDQDHSVSQPRPSHTVYSSPSNDKISSSKTSSSRLSSPKT

SEQ ID NO: 161123 - protein, 206 aa, Oryza sativa
  Clone ID: PAT_MRT4530_60336C.1.pep
MDSTDGRGPEQSDGAAVPLRRFLMSTGLDADMRRGREGDAASVAVVEEGVGGGGGGRKVCNGGGDGRRDANAYYRRMIQADPANPLLLGNYARFLKEVEGDAARAQEYWERAIVANPGDGDALALYAGLVWETTRPRRRLLHLRKGPRHRSPAAAKPTARRCRIQARRRRRPRRHVCAGDRDAAGHGLLRHRVLHCRRGHGLAGMP

SEQ ID NO: 161124 - protein, 93 aa, Oryza sativa
  unsure (1)..(93): unsure at all Xaa locations
  Clone ID: PAT_MRT4530_60337C.1.pep
LHSRXVVVAPPSASCCVDAPRSXGAXXRLRDASAAXPVAGGPPPTRCCRRPYALAWCRVAGAEMRQQVSYXXALSARELXWRPCSHLLLEKRV

SEQ ID NO: 161125 - protein, 184 aa, Oryza sativa
  unsure (1)..(184): unsure at all Xaa locations
  Clone ID: PAT_MRT4530_60338C.1.pep
WPWPAEDRQWAVESSGWRXRRRHRRSCGDVGGWWAGVGGGGKASMRLGGGGRWWRIQRRGAAGDGEDGGAGESRCHLLEKKERGGGGGGLAGVVDSFRPAGEAGGGVIDILTTASPSTTVGVKDAAAGFPVVDFSRASALPAACQEPREKSERESDKRKGEKRGKKEEADMWGPCRSYADSAVT

SEQ ID NO: 161126 - protein, 40 aa, Oryza sativa
  Clone ID: PAT_MRT4530_60339C.1.pep
MSNTLVAYLNASPSFIPVLTTMAQIQRFPVDVLLDPFQKR

SEQ ID NO: 161127 - protein, 31 aa, Oryza sativa
  Clone ID: PAT_MRT4530_6033C.1.pep
VNIHRFIMHNDVVAHTVELRYRCTVSLAKLN

SEQ ID NO: 161128 - protein, 81 aa, Oryza sativa
  unsure (1)..(81): unsure at all Xaa locations
  Clone ID: PAT_MRT4530_60340C.1.pep
TPNKASATAAFLPAMELLTPTRAVSPAQEQCHPVVGTRRLLIGAGPXKLHRHLHDAYIKPCSYCPDFIAQTTTAKEYSPQS

SEQ ID NO: 161129 - protein, 91 aa, Oryza sativa
  Clone ID: PAT_MRT4530_60341C.1.pep
MASSRVVVAVALLVAAVLAAFGALAPACEGARVMREGAAVVGKMSSYQPPVRHKPPVPPSGPSHRHNKRATVPRKRKHFPPSGPSYHDPHS

SEQ ID NO: 161130 - protein, 921 aa, Oryza sativa
  Clone ID: PAT_MRT4530_60342C.1.pep
GSSERRGGSSFARASNPMAGAAPLRDSLRRLCTDVGWSYAVFWRATRAADSQRLKLVWGDGHYERAAGAPSISGFEAMDLLLKEKAAALRSGTGRGGGGGEGHAADGAAGHSHDRVDALVHKAMAQQVHVVGEGVIGQAALTGLHRWIVHDIVDECEEEDEVLLEMKGQFCAGIQTIAVIPVLPRGVIQLGSTKMVMEEAAFIDHVRSLFQQLGSSTAVVPCGSFVQDSIMRTPFHKSLGVPTSSHSEDLAGGGNTYNDDMINHQFRHQKSPASTIQSFNPVQQFYAGPTFCRPVTIASRCDLFQPDHGSTFTLNSQSEDNRSTALLKNSVSHSKTSNDAFSHAFNPLNEPNVSISGRRECVSIEQHGSCRNGEMEITIGRTASSSCTGKTNIINKVDDLLSQDCLVGCQASNATSVNRKFQTMSIVDNTKLQDGSYAIPHAALVDSTQYSDCFQSLLGTIQGSSSSNSNAIHVDTSHNAVHGKSNFCPLGDRNAANSSDLAELLASPIPLELTGGNDLFDVLQLQQKPNGSNNSEVNNRQSMPYGSEQAVKSLIGCVDDDFTGLITEADPDQLLDAIVSKIITGHKQNVDTSASCSTTVAGFDRPLHSDCHLYTTGPSSGPIFCNFASVAPVAIKTEGPAAGSRQSSSSIDKSAGCSQTQESYKSQIRLWVENNHSVGSDSLSTGQASDSLSTGQCKRSDEIGKSNRKRSRPGESARPRPKDRQMIQDRIKELREIVPNSAKCSIDTLLEKTIKHMLFLQNVAKHADKLKGSGEPKIVSHEEGLLLKDNFEGGATWAFEVGTRSMTCPIIVEDLNPPRQMLVEMLCKERGIFLEIADQIRGLGLTILKGVMEVRKDKIWARFAVEANKDVTRMEIFLSLVHLLEPSTGSSILSAGVENTSLPRDSFFPSSIPASGFSNCL

SEQ ID NO: 161131 - protein, 60 aa, Oryza sativa
  Clone ID: PAT_MRT4530_60343C.1.pep
MRAPPDSDSGGRSTADRVHGPGKTGAPRGAHVAPTCGAARMRRQRETTTGDDRPAAESSG

SEQ ID NO: 161132 - protein, 118 aa, Oryza sativa
  Clone ID: PAT_MRT4530_60344C.1.pep
MRREEDGSGSGKVLTPRFVRTRSSPEPWWSPISLALHVFAPDALSMMVKGQEGRIVDGPLMVTAQYGYSSMLVYIPKTNSWGGYSSVFSPGWTVMTGCRKELGNPGWSLETTGGHCYG

SEQ ID NO: 161133 - protein, 44 aa, Oryza sativa
  Clone ID: PAT_MRT4530_60345C.1.pep
ALAGQDPSLRYWVNAGRDGIGGGVGCRRSGPRPSPPPMIWALCL

SEQ ID NO: 161134 - protein, 66 aa, Oryza sativa
  Clone ID: PAT_MRT4530_60346C.1.pep
PCVSGSKCSLRCSSRSIFLGFSELKLTSDHVRGSQDVPPHPWRKPRIDIDPTGKSTHNMEWRNVLF

SEQ ID NO: 161135 - protein, 120 aa, Oryza sativa
  Clone ID: PAT_MRT4530_60347C.1.pep
GPSSRPSSPARRPPRRRRRRTPPRAAAETPTRPRRTATATAASPRRTSTRPPPRARTTTTPPTAPRRASSSSSSPSPPRTAASRRGPRSSASSSTSPPPPPRPRARPAAAAAAILASRLW

SEQ ID NO: 161136 - protein, 67 aa, Oryza sativa
  Clone ID: PAT_MRT4530_60348C.1.pep
NLSVSTGTAAPSPHPRAGRTEPPPSPPPSPERRRRHCRRPPPREPVAAPSRTTSAPNQARSKPPRSP

SEQ ID NO: 161137 - protein, 501 aa, Oryza sativa
  unsure (1)..(501): unsure at all Xaa locations
  Clone ID: PAT_MRT4530_60349C.1.pep
KEGLDLIAKYLSTNLKAESTAKKFDITAAAASVAVATAKKPPCPAPPAAPPFPISPFLPSPHPPLXSSSPPARSSSAVAAPPPSSPTFPQPPSAPVAPSPAPPITSSRTFPPPPSPPPPRPPPPPXPPPPSSSPPPTTXPPTSPPPPPTPPTQPSNPLPAPPSSSPPPTTPPPPSTPPPPPPTSPSTPRPXPPPSSSPPPTTPPTSNPPPPPTPPSSSSPPTMPPPSTPPPPTPPPPPPPPPXPSSPPLPRTPPAPPPXPPSSPLPPPPXPPLPPLRPPGPQSPPPGVKPSPPPPPPPPPPSPXPPPPLPPXPPPREPPPPAAPPPPPGSPPPQPPPMPPSPSPASERSPPPRSPAPCARPSASSTPTPPRSAPPPPPPTPXSRPPSRHPPPPPDLHRSTAPATPSSPGSSPPVSPPLLPXSLGESPPLPXPPPXPRAPPPPHPPPTPSSPPQPQPXPPSGARRESATRRRAPPPSPPTPPPSRGCSAAASTRHRRPRPRH

SEQ ID NO: 161138 - protein, 86 aa, Oryza sativa
  Clone ID: PAT_MRT4530_6034C.1.pep
VKKGNLSSDFLTKNRCENHHTSKNTDHKQIARGRNLKRKIKANRTRKGLEERRFQGTRKSSRVLNPNGNKSKRAKNKWGKKWGGLT

SEQ ID NO: 161139 - protein, 85 aa, Oryza sativa
  Clone ID: PAT_MRT4530_60350C.1.pep
GASVLLEGAGLSPGGLLASGGFGLVAGLGGLLLAAAQVRPPRLVLLIGLVLGGCSGFLLGPGGLGPGSPGTNPPRCAGACHPSGA

SEQ ID NO: 161140 - protein, 174 aa, Oryza sativa
  Clone ID: PAT_MRT4530_60351C.1.pep
MAKQGVKKTRDANKKRMDLILRLILAANVIYIVVRMAVMHSSFTWKHWIGLAVTSAAYFLPYKQLANMSEPEYSENGELINAGYDLNAGGMSEYLQDVIYITLFVQLMSIFSDKFWWTYLVIPAYGGYKISGLLRGAFFGGSSEGEEEDEKTRKKREKMEKKASRGKIIKTRTR

SEQ ID NO: 161141 - protein, 71 aa, Oryza sativa
  unsure (1)..(71): unsure at all Xaa locations
  Clone ID: PAT_MRT4530_60352C.1.pep
FYFLFDDKPRTHIIMGPLQKGRQTTQLNTAQATSXXRQNRKDKDHKSQGHTLMNSNAHPQHKGYGRQLNMA

SEQ ID NO: 161142 - protein, 178 aa, Oryza sativa
  Clone ID: PAT_MRT4530_60353C.1.pep
ETKEKKGGPPGDRGTGRTKDQKRSRPGGGHHGKTSSAHQTQKRRRQKQGRGRQPGPGRGKKKQEGGHPKGGAGGGPDPPPRAPGQPGGQRSQARETGAGTTAKARGARREKNTESTQSTATKANKRERKNKKNKTKPGQKEKRTQRKQPGGEKEGSTDAPAKPTGPGRGDRGRAGKRD

SEQ ID NO: 161143 - protein, 49 aa, Oryza sativa
  Clone ID: PAT_MRT4530_60354C.1.pep
IGGTKVANKAPELMRHIFRCFRLIVGFFQNEHISGDANHLGFFSMYFNL

SEQ ID NO: 161144 - protein, 65 aa, Oryza sativa
  Clone ID: PAT_MRT4530_60355C.1.pep
MPVVPVVRVELKLLPVVRGGDGARRPQWISGRQPPDAAQLSTTPAVPSTGHQLAGHMWWQMQPQC

SEQ ID NO: 161145 - protein, 53 aa, Oryza sativa
  Clone ID: PAT_MRT4530_60356C.1.pep
GNPRVGPRVLGPFRATLDKTPPSAKTGYPWGVPHGENARVFPGVGLPGQFFPE

SEQ ID NO: 161146 - protein, 201 aa, Oryza sativa
  Clone ID: PAT_MRT4530_60357C.1.pep
MEAHVERALREGLTEEERAALEPAVMAHHTFPPSTTTATTAAATCTSLVTQRVAAPVRAVWPIVRSFGNPQRYKHFVRTCALAAGDGASVGSVREVTVVSGLPASTSTERLEMLDDDRHIISFRVVGGQHRLRNYRSVTSVTEFQPPAGGPGPAPPYCVVVESYVVDVPDGNPGEDTRMSTDQGVEAHRSVMLTSVAGDSY

SEQ ID NO: 161147 - protein, 60 aa, Oryza sativa
  Clone ID: PAT_MRT4530_60358C.1.pep
MMAGPATLDPQRAEAANKHVRALNSQFASWVQSQLQNHPAELWEDGMRDYISHASEIMEK

SEQ ID NO: 161148 - protein, 373 aa, Oryza sativa
  unsure (1)..(373): unsure at all Xaa locations
  Clone ID: PAT_MRT4530_60359C.1.pep
SARGGVARVNLCHGGRGWHRAVMREVRRLNEEEGFCVSLMVDTEGSQLLVADHGGAASVKAEDGSEWLFTSXKXPMNLYPFTMHVNFDKFSEDILVGDELVIDGXNRXTFEVIEKVGNDLRCKCTDPGXWADIEFGIAEGVDCIALSFVKDANDIKYLKTYLSRKSLEHIKIGARVESLESLKNLKDIIEASDGVMVARGDLGVQIPLEQIPAIQEAIVDLCRRLNKPVIVASQLLESMVEYPTPTRAEVADVSEAVRQYADAVMLSAESAIGAYPQKALAVLRAASERMESWSREENMQKLLPQHQLAIALPDRISEQICTSAAEMANNLAVDAIFVYTKYGHMASLLSRNRPNPPIFAFTDNANSRKSMNL

SEQ ID NO: 161149 - protein, 847 aa, Oryza sativa
  Clone ID: PAT_MRT4530_6035C.1.pep
MPSLSCHNLLDLVAAADDAAPSPASLRLPRVMSAASPASPTSPSTPAPARRVVVSHRLPLRAAADAASPFGFSFTVDSDAVAYQLRSGLPPGAPVLHIGTLPPPATEAASDELCNYLLANFSCLPVYLPADLHRRFYHGFCKHYLWPLLHYLLPLTPSSLGGLPFDRALYHSFLSANRAFADRLTEVLSPDDDLVWIHDYHLLALPTFLRKRFPRAKVGFFLHSPFPSSEIFRTIPVREDLLRALLNADLVGFHTFDYARHFLSACSRLLGLDYQSKRGYIGIEYYGRTVTVKILPVGIDMGQLRSVVSAPETGDLVRRLTESYKGRRLMVGVDDVDLFKGIGLKFLAMEQLLVEHPELRGRAVLVQIANPARSEGRDIQEVQGEARAISARVNARFGTPGYTPIVLIDRGVSVHEKAAYYAAAECCVVSAVRDGLNRIPYIYTVCRQESTGLDDAAKRSVIVLSEFVGCSPSLSGAIRVNPWSVESMAEAMNAALRMPEPEQRLRHEKHYKYVSTHDVAYWAKSFDQDLQRACKDHFSRRHWGIGFGMSFKVVALGPNFRRLSVDHIVPSYRKSDNRLILLDYDGTVMPEGSIDKAPSNEVISVLNRLCEDPKNRVFIVSGRGKDELGRWFAPCEKLGIAAEHGYFTRWSRDSAWETCGLAVDFDWKKTAEPVMRLYKEATDGSTIEDKESALVWHHDEADPDFGSCQAKELLDHLENVLANEPVVVKRGQHIVEVNPQGISKGVVVDNLLSSMVSRGKAPDFVLCIGDDRSDEDMFESIVCPSNSSVKLPASSEVFACTVGKKPSMAKYYLDDTVDVIKMLQGLANAPSQRPRQVQLRVSFEGSL

SEQ ID NO: 161150 - protein, 1205 aa, Oryza sativa
  Clone ID: PAT_MRT4530_60360C.1.pep
MRPSPPPAAPAAEPVPPWLRSLPVAPEFRPTAAEFADPVSYILKIEPAAAPYGICKVVPPLPPPPKKATFSNLSRSFAALHPDDRSPSFPTRHQQVGLCPRRTRPGLKPVWRSSHRYTLPQFESKAGATRKSLLAGLNFPASRQLTPLDHEVLFWRASADRPIVVEYGSDMSGSGFSPCAAQPQPPPQQQPTARAAAHLGETAWNMRGVARSPGSLLRFMPEDVPGVTTPMLYVGMMFSWFAWHVEDHDLHSLNYMHLGAAKTWYGVPRDAALAFEDVVREHGYGGEIGAECRGICGHFSRILSLRFQSWEPSNGEMETRSSRIKEKKKCEGEQLVKKMFIQNVIEDNELLSHLLNDGSSCIILPANAHDGPGLSTLRSTDQSNMNSRISHNLCSREEAPEASGCLSPNRNGDTRNCISSDTHNMEGDKGDIMSATGLLDQGLLSCVTCGILSFSCVAVLKPRDSTARYLMSADSNSINNQLSISGGSILADAPTNERNGVISRPYSEHCCNEIMADDAEIDKNSALDLLAFAHGGQPDPEEDPLEKILKIAHGINKSQPNSSNNVGCVGTKLSSSSTERQERPSSQNAHCNGSSVISNGPKGVRTRNKYQLKMVLSEGFQAKDIYSAKEKKVQSEPSSSKGDVKETIDVSGTENDVGCKSTTISVSEHRGSTKNMYSVKEKKVQSKPSSLKGTVKETVDVSGTENDARCKSITISVSEHRGSTPMTNSLAASIVKPDKDSSRMHVFCLEHAIEVEKQLHAIGGSNIMLICRPEYPKIEAEARLLGEEMGLVYDWKGIHFKEANMEDRQKIQEVLRDEEAIPTSSDWAVKLGINLYYSANLAKSPLYNKQMPYNRVIYRAFGCDSPNDSPVMFNTCERKQSHQKKIVVAGRWCGKVWMSKQVHPYLAHRVESQEAEEADRICSYHFDEKHKAEPVGNSSRVEASKRKSSSLTDVTESSNRRGEIPGEETNTKRPKHSQENNLRALETAAEVVVPSPAGTGLRVSSRIANRANKLKSKMEKEDVPSSRPKSNIKEKSSHASGQKSNVQEANANSASHLRAMPPKQKAEAEAKKQIRTPKPPKQAVEYSCDIEGCSMSFRTKRDLSLHKSDICPVKGCGKKFFSHKYLLQHRKVHTDDRPLTCPWKGCNMAFKWPWARTEHLRVHTGDRPYVCHEPGCAQTFRFVSDFSRHKRKTGHSVKKKKKAKS

SEQ ID NO: 161151 - protein, 442 aa, Oryza sativa
  Clone ID: PAT_MRT4530_60361C.1.pep
MEQCHHHQQQSNGQQLQRLEGIEEEGGAAEKWPPPTTVRPPETPTETMEFLARSWSLSAAEISKALRVLSGKGVSDDVHDAAAAVAGDRKERRSPVTMDGRRHEQASEENEAASMRADASSMAAAAQGGAMSPPISPRANLDVKLLRATATAAAAAGGRGGGGKTTMGTWIKEQKERKRAEARSRNAQAYAATSVAGVAAAVAALVAGAVFSPPPDHPKNGGAAAPAPAPAHAAGAAGAKTAAAIASAAALVASHCVEMAQAIGASHDQILGAIQSAVNAQTSGDIMALTAGAATALRGAAMLRARLHKEIQAAALPGGGAGAGDISGREPERDTSPFAFVSRGGELLKRTRQGTITVIIKMRSAHMAGTFIKTKKFVVLDICSEIPAWAGREVEEGSHRRGYFGIKTVERMIEFECRSKYEQHKWVQGITEMLNRRHTMKN

SEQ ID NO: 161152 - protein, 42 aa, Oryza sativa
  Clone ID: PAT_MRT4530_60362C.1.pep
EHASSMIVLASVPRNALKIAQYLQMYEGLSMVDLIMKYSSVV

SEQ ID NO: 161153 - protein, 145 aa, Oryza sativa
  unsure (1)..(145): unsure at all Xaa locations
  Clone ID: PAT_MRT4530_60363C.1.pep
PSPPQGWLAAXGSPPAGSGEGESAXATGTPNRPPPPHLPLDPPPPPPAEGAGGGESAAAASPSARSAAGGGGGLRRRRSRGASPPAXPSPVMGAPPARAVACHLPSVVGEGSACLPACRSREEGRRRRLRSGALRGGRRRERWEG

SEQ ID NO: 161154 - protein, 97 aa, Oryza sativa
  Clone ID: PAT_MRT4530_60364C.1.pep
GMFFLHGKNLLIFVLLIISDRCSMLVHIDLLLCTESEMFILCGLNFSQTIAMKFTRDCPIVSFLVCTNSQEKHLRINMVPKIHRRNTRKRGSRSIFT

SEQ ID NO: 161155 - protein, 112 aa, Oryza sativa
  Clone ID: PAT_MRT4530_60365C.1.pep
MLQQEGVIIIRRGEGRNIERGQTVIKISCYKLRKNQGWKKVELEGQQYEYKDINIDKRIAQKVQLQQLGDLYFDKNVDQGEGVLGINVRCRYEIYPRYYKEPSTIKKVGGVL

SEQ ID NO: 161156 - protein, 46 aa, Oryza sativa
  unsure (1)..(46): unsure at all Xaa locations
  Clone ID: PAT_MRT4530_60366C.1.pep
KLQAYRNHPDVHKTIHHWAPTVKWCISIANGVHYANPPEEXCYPQQ

SEQ ID NO: 161157 - protein, 243 aa, Oryza sativa
  Clone ID: PAT_MRT4530_60367C.1.pep
MQQELEDIPWEELDIPCSSGGSSKLGARGEAAATPAAAAAGRGDLAPMVGMYQQQLVEDPFPLSGGYCSDQPRHAPASASTSTSTSSSAAVAASPLAQAHGAGEPRRLFEAFMGEILLPLRGEGGANGGGVGRGPGGVGDLGELLRWTREVAANPVAARPVPAEVKARKRQVLALRRARYLRMEDVANADELPSFFKAEVPDWTEPPSDELARYKNDPNISKMLGTRIWPPEDSITQMQPEIS

SEQ ID NO: 161158 - protein, 1360 aa, Oryza sativa
  Clone ID: PAT_MRT4530_60368C.1.pep
MSDDGGRYTPPGRRGGGGGGGSGSGRGGASGSGTGGGADGANLPLVPQGRDAGHTARLPVLSRTNYPDWALLMRVNLQAQGLWTAIEPGYAEYRDDRAALSAILQAVPREMLRGLAKHDTAKAAWDAIKTMRVGVDRVREAKEQGFRRQLEAMRFKDGETPEEFAMRLTAVVADIRDMGGVMEDEHINKKLLRVVPKKYKPVAISLEQLLDVKTMALEELVGRLSTVDSYSDDEEEGGGGKLYLTEEQWQARARKQEQEGSGGSSKSRGSSGTQNNRRGKAGGSPKGKETINSGNTSRDYSKVKCFNCDEFGHFARQCRKPRRQRRGEVNLTQGEEEPTLLMAHAMGVSLAGEETLGRTPGVHEVHLTEKKFGDGSVVDIRGRGTVLFQCKNGDHRSLEAVYFIPKLCKNIISIGRLDARGYDAHIYHGVCTLRDPDGLLLAKVKRSPSFLYILKLNMARPICLAANGTETAWRWHARFGHLNFQALRRLAQAEMVRGLPVIDHVDQLCDGCLAGKQRRVPFPDKARFRAQDALELVHGDLCGPIAPATPGGRKYFLLLVDDMSRFMWIRLLSGKHEAAAAIKQFKAGVEMESGRKLRALRTDRGGEFTSVEFTEFCADRGVSRQLTAPYSPQQNGVVERRNLTVVAAARSMLKAAEMPAQFWGEAVVAAVYLLNRSPTKSLDVKPNLRKLDDRGTRMVFIGYEQGSKAYRMYDPVSRRVYVSRDVVFDEAAMWPWRDPEVTQTGGEEDFTVEFFSTPLGGNRVPDVVVEHGGARETETAPSPLATPDAAPVWSPVTSSSPAGVEFCTPPSDASIESDGAPPRFRTVNNVLATTTPVLDFDYDDECLIAEQEPFSFKEAEKEQCWMKAMEEEMSSIEGNNTWFLCDLPSDHRAIGLKWVYKIKRSAEGEILKYKARLVAKGYVQQQGIDYEEVFAPVARMETVRLLVALAAHEGWQIHHMDVKSAFLNGELEEDVYVVQPPGFVVEHKENKVLKLKKALYGLKQAPRAWYAKLDSTLANLDFVRSATENAVYTRGEGNARLVVGVYVDDLIITGALGTEIAKFKEQMRSMFSMSDLGLLSYYLGMEVKQTEEGITMSQAGYAGRILEKAGMQGCNPCQVPMDARLKLKKGVEDCIDATQFRSIIGSLRYLVNTRPDLSYSVGYFSRYMENPGAEHWAAMKHILRYVAGSLNIGLKFRKGEEKFPRLVGYSDSDMAGDVDDRKSTTGVLFKLGENLITWQSQKQKIVALSSCEAEYIAATTAACQGIWLARLLGELQMKKPCCVMLKVDNKSAINLCKNPVLHDRSKHIDTRYHFIRERVERKEVEVEYTSSAEQLADILTKPLGKVRFLELRGKLGLSPV

SEQ ID NO: 161159 - protein, 39 aa, Oryza sativa
  Clone ID: PAT_MRT4530_60369C.1.pep
MGAARLGLGTVAAPTLARREQDARAGKCVSPGFLEVTLR

SEQ ID NO: 161160 - protein, 195 aa, Oryza sativa
  Clone ID: PAT_MRT4530_6036C.1.pep
MDTIRCCIACILPCGALDVVRIVHSNGRVEEISGPVLAGEIMKAYPKHVLRKPPSTCPADGGGGGIVVQKPVILPPNAELQKGKIYFLMPVMAPPEKEKEKEKAKAAQAQAPAAARRRRRRKETADEAAGGRAASNAAAAPPTRVGSEGEKERLLANERYLSEIMKEKASTARDRRRGRVAVWRPHLESITEDDL

SEQ ID NO: 161161 - protein, 1303 aa, Oryza sativa
  Clone ID: PAT_MRT4530_60370C.1.pep
MSDDGGRYTPPGRRGGGGGGGSGSGRGGASGSGAGDGADGANLPLVPQGRDAGHTARLPVLSRTNYPDWALLMRVNLQAQGLWTAIEPGYAEYRDDRAALSAILQAVPREMLRGLAKHDTAKAAWDAIKTMRVGVDRAMRFKDGETPEEFAMRLTAVVADIRDMGGVMEDEHINKKLLRVVPKKYKPVAISLEQLLDVKTMALEELVGRLSMVNSYSDDEEEGGGDKLYLTEEQWQARARKQEQEGSGGSSKSRGSSGTQNNRRGKAGGSPKGKETINSGNTSRDYSKVKCFNCDEFGHFARQCRKPRRQRRGEVNLTQGEEEPTLLMAHVMGVSLAGEETLGRTPGVHEVHLTEKKVKRSPSFLYILKLNMARPICLAANGTETAWRWHARFGHLNFQALRRLAQAEMVRGLPVIDHVDQLCDGCLAGKQRRVPFPDKARFRAQDALELVHGDLCGPIAPATPGGRKYFLLLVDDMSRFMWIRLLSGKHEAAAAIKQFKAGVEMESGRKLRALRTDRGGEFTSVEFTEFCADRGVSRQLTAPYSPQQNGVVKRRNLTIVAAARSMLKAAGMPAHFWGEAVVAAVYLLNRSPTKSLDGVTPYEAWHGRRPSVEHLKVFGCVGYVKTVKPNLRKLDDRGTRMVFIGYEQGSKAYRMYDPVSRRVYVSRDVVFDEAAMWPWRDPEVTQTGGEEDFTVEFFSTPLGGNRVPDVVVEHGGARETETAPSPLATPDAAPVWSPVTSSSPAGVEFCTPPSDASIESDGAPPRFRTVNNVLATTTPVLDFDYDDECLIAEQEPFSFKEAEKEQCWMKAMEEEMSSIEGNNTWFLCDLPSDHRAIGLKWVYKIKRSAEGEILKYKARLVAKGYVQQQGIDYEEVFAPVARMETVRLLVALAAHEGWQIHHMDVKSAFLNGELEEEVYVVQPPGFVVEHKENKVLKLKKALYGLKQAPRAWYAKLDSTLANLDFVRSATENAVYTRGEGNARLMVGVYVDDLIITGALGTEIAKFKEQMRSMFSMSDLGLLSYYLGMEVKQTEEGITMSQAGYAGRILEKAGMQGCNPCQVPMDARLKLKKGVEDCIDATQFRSIIGSLRYLVNTRPDLSYSVGYVSRYMENPGAEHWAAMKHILRYVAGSLNIGLKFRKGEEKFPRLVGYSDSDMAGDVDDRKSTTGVLFKLGENLITWQSQKQKIVALSSCEAEYIAATTAACQGIWLARLLGELQMKKPCCAMLKVDNKSAINLCKNPVLHDRSKHIDTRYHFIRERVERKEVEVEYTSSAEQLADILTKPLGKVRFLELRGKLGLSPV

SEQ ID NO: 161162 - protein, 1495 aa, Oryza sativa
  Clone ID: PAT_MRT4530_60371C.1.pep
MSDDGGRYTPPGRRGGGGGGGSGSGRGGASGSGAGGGADGANLPLVPQRRDAGHTARLPVLSRTNYPDWALLMRVNLQAQGLWTAIEPGYAEYRDDRAALSAILQAVPREMLRGLAKHDTAKAAWDAIKTMRVGVDRVREAKEQGFRRQFEAMRFKDGETPEEFAMRLTAVVADIRDMGGVMEDEHINKKLLRVVPKKYKPVAISLEQLLDVKTMALEELVGRLSMARARKQEQEGSGGSSKSRGSSGTQNNRRGKAGGSPKGKETINSGNTSRDYSKVKCFNCDEFGHFARQCRKPRRQRRGEVNLTQGEEELTLLMAHVMGVSLAGEETLGRTPGVHEVHLTEKKVILNHEVAEEEDNTTEWFLDTGATNHMTGSRSAFADLDTGVVGTVKFGDGSVVDIRGRGTVLFQCKNGDHRSLEAVYFIPKLCKNIISIGRLDARGYDAHIYHGVCTLRDPDGLLLAKVKRSPSFLYILKLNMARPICLAANGTETAWRWHARFGHLNFQALRRLAQAEMVRGLPVIDHVDQLCDGCLAGKQRRVPFPDKARFRAQDALELVHGDLCGPIAPATPGGRKYFLLLVDDMSRFMWIRLLSGKHEAAAAIKQFKAGVEMESGRKLRALRTDRGGEFTSVEFTEFCADRGVSRQLTAPYSPQQNGVVERRNLTVVAAARSMLKAAGMPAQFWGEAVMAAVYLWNRSPTKSLDGVTPYEAWHGRRPSVEHLKVFGCVGYVKTVKPNLRKLDDRGTRMVFIGYEQGSKAYRMYDPVSRRVYVSRDVVFDEAAMWPWRDPEVTQTGGEEDFTVEFFSTPLGGNRVPDVVVEHGGARETETAPSPLATPDAAPVWSPVTSSSPAGVEFCTPPSDASIESDGAPPRFRTVNNVLATTTPVLDFDYNDECLIAEQEPFSFKEAEKEQCWMKAMEEEMSSIEGNNTWFLCDLPSDHRAIGLKWVYKIKRSAEGEILKYKARLVAKGYVQQQGIDYEEVFAPVARMETVRLLVALAAHEGWQIHHMDVKSAFLNGELEEDVYVVQPPGFVVEHKENKVLKLKKALYGLKQAPRAWYAKLDSTLANLDFVRSATENAVYTRGEGNARLVVGVYVDDLIITGALGTEIAKFKEQMRSMFSMSNLGLLSYYLGMEVKQTEEGITMSQAGYAGRILEKAGMQGCNPCQVPMDARLKLKKGVEDCIDATQFRSIIGSLRYLVNTRPDLSYSVGYVSRYMENPGAEHWAAMKHILRYVAGSLNIGLKFRKGEEKFPRLVGYSDSDMAGDVDDRKSTTGVLFKLGENLITWQSQKQKIVALSSCEAEYIAATTAACQGIWLARLLGELQMKKPCCTMLKVDNKSAINLCKNPVLHDRSKHIDTRYHFIRERVERKEVEVEYTSSAEQLADILIKPLGKRYHGATEGDNVVRSQRVAAGLAGRQSRQHMLVYRADDELVVVVGVVLDHSEEAEAKALPPSRRESVGMHPAPVTVVLHGIDAFHKTGSDAPAVFLIVPA

SEQ ID NO: 161163 - protein, 41 aa, Oryza sativa
  Clone ID: PAT_MRT4530_60373C.1.pep
MSFLHLSPLQCEGHGAAKHKLLLSVSWPRHATMPYPPPPMS

SEQ ID NO: 161164 - protein, 97 aa, Oryza sativa
  unsure (1)..(97): unsure at all Xaa locations
  Clone ID: PAT_MRT4530_60374C.1.pep
HACDHMRKMKNSAIGRYIGHFDIQIDMIYLETXRVVMRITHQAXTDRWTFTETNTGIIGLAEGRVMNFGCATVHTSCVMSCSFTNQVIAQLELRTEK

SEQ ID NO: 161165 - protein, 39 aa, Oryza sativa
  Clone ID: PAT_MRT4530_60375C.1.pep
MWANKEQSCEALPKNLIATISRRRALKAKVPKAYSPVCR

SEQ ID NO: 161166 - protein, 96 aa, Oryza sativa
  Clone ID: PAT_MRT4530_60376C.1.pep
QIHDTIIWVLHLYRNNKNEKGCPVRKKTFMYNERGQLQRSTNTSNKVTQELLDEAVANNLSVSNFFPLKNTSIPLLPVDAHTFIVLPFASNPQVRY

SEQ ID NO: 161167 - protein, 485 aa, Oryza sativa
  Clone ID: PAT_MRT4530_60377C.1.pep
MEDQLSFFPGGLRVMPVDGDTKNTRTATKTLSTLHYSLVATHTTASAGLCTLSSDNMTDVQTVLCDVKKVVSSGFDFRRVVETEHHIPVIYLLSTTEPEQMVAGEDTEFLNHLLLKATYIVRKPLDQATMAQLWRVVAWRRCCLEERIPRDSMDDIAAHAGVVGKDGNDNDVIIIEEPQVHFKVVRSRGSRKRQLTINVDSGSSDGADANPRQKLEHKKDAKGPLGQHVASHLQPQEYCTKQQKDLDERRLLSLDSLFLKAILSTLNVSLCNPLILTVPAAFTPQDGMTMNKDKAPMIELPFGLPVDDFLVGQTAYGSAGPSIGAPDDNDDDAAMYAYTSALNNNAAVGSLMVPPIESTFTIIDPIVGTKGEGSVPVVVVSEDQNNAVAAIEATAPNNAELFMMPEQVAVDAPVDVEEGIMFSLESLLGLDEDMIPMEDAGGEATDDSLNIKEGGMEIGWDLDLDYILMNNTNEFAFLDDMAWIE

SEQ ID NO: 161168 - protein, 78 aa, Oryza sativa
  Clone ID: PAT_MRT4530_60378C.1.pep
DAWADAWASYRDPENQIFGCEHYKRKCKLVAACCNKLFTCRFCHDKVSDHTMERKATVEMMCMQCLKVQPVGPNCQTP

SEQ ID NO: 161169 - protein, 87 aa, Oryza sativa
  Clone ID: PAT_MRT4530_60379C.1.pep
MAHQSSQDSQNWNGSNGDGSHQLGNARADPSEDHIMAMQPKYPETICGTWGFHIIPVSMEARPTPKHYLTWGVKFGSVDYFLHVFSK

SEQ ID NO: 161170 - protein, 56 aa, Oryza sativa
  Clone ID: PAT_MRT4530_6037C.1.pep
MAVERDGTRTGLTAVAIGERDRPGARPFYRHDEEGTLKWPQPPNPHTRGYGKIMMV

SEQ ID NO: 161171 - protein, 88 aa, Oryza sativa
  Clone ID: PAT_MRT4530_60380C.1.pep
RRRGSHQLMISSRRASRTAAATGRSIPWRWRQERCLLVTTCHTRTTRWLPRRRRRRRPGGSVRRQLANHREQPLLLITISRWFQLEIN

SEQ ID NO: 161172 - protein, 254 aa, Oryza sativa
  unsure (1)..(254): unsure at all Xaa locations
  Clone ID: PAT_MRT4530_60381C.1.pep
MRRRMRRPWPTAPRHPPWRGGGRQVALAMTRARRCWRRIWQTRRSSAQGPGAASDSRRRRRAAARKEVDGLGDDPAKVADLADAAVVGARPCLLQRRHGGRRRSTPPSFSPSSPFFASFSPLSFLPQLREQAAAERAAAAAASERAASGSGGSNGSSGSGGSSERRAAAMERAAVAERAXQRSGGGSGGAAAAACGAAASNNGSSGSGGGATASVSGSGGAAAAARGAAASSSTSGEQQRRRAATARQRQQQRR

SEQ ID NO: 161173 - protein, 63 aa, Oryza sativa
  Clone ID: PAT_MRT4530_60382C.1.pep
LHLGCSGTVLYDDATELQPEPYAASIICSYYRAPLIPTGEYLTSTDAVITNISYYQSKSLDEL

SEQ ID NO: 161174 - protein, 460 aa, Oryza sativa
  Clone ID: PAT_MRT4530_60383C.1.pep
MEAPPPPPPDSWETADLDEPMSRPHLPAARRGYASAVLADADADGRQHPSSGRPDSVDQLDQFLREAFEKPWERLSVLRMEQDILKFIHDPTQTEFDFHGLPTSYLRLAAHRLAQHYFLQSIALQDNGLPDGSGSRIILRKTSAECRLPAVRLSDIQVNLPQDESNSIAKVAIKQRPQKHYHNNSSSGAHSSRANLQKSVEERKEEYNKARARIFNNNSSSGNAADGRPGDEVTLPNTLHRSSSLELSSGNRLGEGPEITLERSLTTASSSSRVNRNKTEKDPAFNRNRQNNRVAIFRDRESDRKDPDYDRSYDSEDKDCPFVSSQLIMNGFTGSYTIQPLYAPAVNYNTEFPQLGSHGSPVPVEQQPQSIAQHIPGPWSPAQSPNAIGYRPPDGSMPPPYSPGHAGAPIRSSVFMHTPQQFAMPSRPGVTYVHPQEPMRPFAQTHQQQPEASLRLARPR

SEQ ID NO: 161175 - protein, 366 aa, Oryza sativa
  Clone ID: PAT_MRT4530_60384C.1.pep
MITMVAATTLTSLATLVSSGDGGHGGSCLFLPPPTSTKAQRAFLTATSSLFFFVPELGMKMAVEHRQAKGGEDGGGLHHYHPSPATSPRTRANQPHPPRRGGEGVHSPCRRRRNIARPRDGSSSPTFVFLHSTPITSTSPTMISPAAATSARRGRGTRSSSAPPHTRDATSAPTRRRRGAARSPSLSPPSTKVSAPSTSSPPTPPPLLELSPTSSSTVWKSCSSSSLPGFSPSPTFSPPASASSRALPPPMVPSPPSPTFSPPASASSRALPPPMVPSPPTVRLSTQTSSTTASAAAPPPSAAVSRDGSLPSFRAPPLPPAGQFRQRTRERDSSSSSRRRRRRRRGSNSGGSSSCSSSSSSRRSNN

SEQ ID NO: 161176 - protein, 349 aa, Oryza sativa
  unsure (1)..(349): unsure at all Xaa locations
  Clone ID: PAT_MRT4530_60385C.1.pep
WRRAYISARGHVRVSPISPLESWLWHDLKLKCLDLASVEHTIAHQHSRLVWLKEGNGSTKFFHLHTKARRQRNCITRQRACLXHFCSVMGTFIERDLCLDPHSLGLYSVDFAGLDNIFSEDEVWAVIKQLLLDKAPDYNGFTSHFYKSCWPMIKXEILVALNTLFLANNHGLASLNDALISLLPKKNEVVQVNDFHPINLIFSFGKLFSKVLASCLTPHLNELVAVNRSAYVKGRSLHNNFCYVQLAAKALHARRTPHLLLKVDIAKAFDXVSWLFLLKVLTYLVFSSRWRDWISLILRCSSSQVLVNGVPSHHFLHCRGAXQGDPLSPMLFLLVKYVLNGPFNLCALL

SEQ ID NO: 161177 - protein, 70 aa, Oryza sativa
  Clone ID: PAT_MRT4530_60386C.1.pep
MDISRTNEGYTSCGPLVEISWHRPGVLLLGAQSCLPVLEVPAVGGAGEASCEAGVKIWENPSQNLSHPLE

SEQ ID NO: 161178 - protein, 80 aa, Oryza sativa
  unsure (1)..(80): unsure at all Xaa locations
  Clone ID: PAT_MRT4530_60387C.1.pep
RPRVRSRVRTRVRCTRLRFLEADYGWRPSWHVIPFAYYPCMGAAIIXSPTVPKTSTWIMTQCISDHHLPAMKEESKAFYR

SEQ ID NO: 161179 - protein, 111 aa, Oryza sativa
  Clone ID: PAT_MRT4530_60388C.1.pep
RSIRFSGESHGPVIFRRIVEGCAEVLGQRIVGSGVVFGGGVGHRDRGWRLRRDGGGEEGDFFFVFIFFFIFYFFFIQKTGTCQTSQAGCSSAYMQKTRSLNGMDCTAYPDR

SEQ ID NO: 161180 - protein, 89 aa, Oryza sativa
  Clone ID: PAT_MRT4530_60389C.1.pep
RTRTRKSCADDGSGLPTVAGRGSSLPTVAGRGSSLPAAVGDGSGLPAAVGNGSGLPAVVGHGPGLPTAASDGSDLHVAAGDGSAPPTPP

SEQ ID NO: 161181 - protein, 353 aa, Oryza sativa
  unsure (1)..(353): unsure at all Xaa locations
  Clone ID: PAT_MRT4530_6038C.1.pep
MDLLRQPRGGARGPGPREWGPRGSPTVHGGPGAPGLTPAGAVGPTRQXHLRARAADSGAPRGSRSVRPKATTPAHGGHDGATAERGEGRGETKRRSTAHPGSTATTETATGAEEGGGVARVDGVDGAPAVGNRNGEVDEVGENTAKPKEAAPKREVVRGDDGGGPELDGDGXEREQRRELDSGGERGLXVAETVEGGTGRVYIGLGVRGGGRRRGKRARETRPPLMAPARLGEEFPNESKGEREGKMGGKGEGIPGNISPLLIARGEDGGGGIRGGGGARARARRRERREEGDDGWAPPVSEGGRRARPSAARARGGGRMGRGXGGERKKGKKNGPTRPKGGGGKGLFRAFLF

SEQ ID NO: 161182 - protein, 127 aa, Oryza sativa
  Clone ID: PAT_MRT4530_60390C.1.pep
IDKLPKSLKKMMNLQTLDLKGTYVSQLPSGITKLESLRHLLAYRYYSGRHPPYYYTLGVTLPRGIGNLKELQKLTYVAAHQGNGTIEELANLTQLRRLGIVKLRERDCMHLCSSLPDDELLLVPIPA

SEQ ID NO: 161183 - protein, 120 aa, Oryza sativa
  Clone ID: PAT_MRT4530_60391C.1.pep
MDLPEFLAKILQAIADACLDDNKLPGALISCGVLQAAAALSLVFFIAPSGVFGNHGKALHWLYYGSLVTVVLVGFVEASVGFWVADDRSSDMCLRCLYSTSDSAAHICTRVQKANAANKL

SEQ ID NO: 161184 - protein, 552 aa, Oryza sativa
  Clone ID: PAT_MRT4530_60392C.1.pep
MGDHRATAKVRVNGAPAEATLFCTDPPGAANGGGGDGGELRWRCAGGAAAERVLSLDADVLGVEARGKEVVVKAFVLPADAAARSVSCAAGAGKGGGGRRRRRRDYVFEMAAGEDAAAAWCDRMRGSLDSLGRPKRLFILVNPFGGKKCGKKIYEAEIKPLFEAAGVNVTMQETRYQGHARQVASSLDLARYDGIVCVSGDGVLVEVDFFTDILVYPFRGMRKRLAYDCVKRKGYTSISIGESPDLQERLAKSNKKKDLQVVNGILQRMDWEEAMKIPIGVVPAGTGNGMAKSLLHSASLVADIDIESEKYRWMGSARFDFYFPASQARGSLGVWKSLLENDAFSLKDTLALFQALVRIMNLRKYYGSIQYVPAPGYEAYGDVVKQVENCTVECQEQIGKSLCSYQGPSVEFQGSEWRSLDGPFVSIWINNVQWAAESIMAAPGAKFSDGYMDAVIVRDCPKADLLALLMKMGDGSHVKSPYVTYLKVRCLRLSPGQLVENPKRGGIIDVDGEAIARGEGTYGKNQKQDVMGYGPSIQMTVHRALATMYCPK

SEQ ID NO: 161185 - protein, 392 aa, Oryza sativa
  Clone ID: PAT_MRT4530_60393C.1.pep
MNPIRSALARALLSPKPRPPRARHYATSSTGGATQPESVAAEMVRYALGGARPDEAMRILEQGASNLQGGGEGCGEAVGMLMLAMSTLLYRSGRRQEAMEKLKATNQVAPAAFRVAAWEATMGLCMEAGQVINTSVSPDDLVDLSIKDDNIKWSDQGHLKCRVNAIKGLIALLNGETESENAVLSYCEYLHCVGDFPLATQMYERVLEALTMEDMSGNFLATCNMVPEEVSLGATCSYGQLLSHSGKFSEAEDYLTRALKKAEDQFGANHPKVGIVLTCVARMYKLKAKAEGSSSIMVQEGLYRKALEVLRAPAINSEGVSKQMDWRDIISLARGEYAELLLIQSNRRAEGERMKEWAEHAWRNSRLTLAEALEFSGPSKPTVVDTRIGRVM

SEQ ID NO: 161186 - protein, 75 aa, Oryza sativa
  Clone ID: PAT_MRT4530_60394C.1.pep
LGFFFCFCYCKRMFQFTATFDPYIVKHWEYTKRNIFDGTFYRGDLLQRPGWGRHVAGAAQDLTVRVTCDGGTAYY

SEQ ID NO: 161187 - protein, 460 aa, Oryza sativa
  Clone ID: PAT_MRT4530_60395C.1.pep
MAKGRRLWKTKHLTLRPPCHGGGDGDGDGGHPDWILVDVQAYIADRRNATTATAMLSNGGHQIQVTICVAPPPLVSYICAWSPTTHPAELFDTEPTVEAVDADLLLLRIHVSLNHVHDLVYQASMLPSLTLMPSQDPYLHEPNCIALIPRSSHGFYISTLDTDLRSGIGRYNLCLFDSTNSKWSHESLSLDQLRNPPDKNEVLHITEKVITFINDPHLVAFVDLWRGIIICDILDTKTQTASYVPMLKEIINLRRTRASSITRDIAVVNGRLTVVRLTTVFDPDINGWDWDLSTWSRAVDCLEQEDWREDSLVEASDILIDHNICNVELLPKIQGQPTMAKLHVALPTLSLTDAQVVYVMGKVNESDEKAVLLSIDMANRRLDAVSVYDAARILHYFDVCYTQSTIFRYSAPSSGLNGNLKRPGKFPMPYPRKQQAVNEPFLPDAGRGLETEDRDTMDWE

SEQ ID NO: 161188 - protein, 166 aa, Oryza sativa
  Clone ID: PAT_MRT4530_60396C.1.pep
MGGGGGNRYSTRIQPGPKPPLSPIAKPPSGPAVVQPNKVSNTAFQVESDYAVASLYTGNTSPRQSLIASTNFRFGELNTARYPTSEKEINSEPPWPWVSSNSSSTALASLLYNHYTPSGCSCLKGGSENSTPNPHLPIPVFEGFGELNPDHYVPLQHGGKIRLRTA

SEQ ID NO: 161189 - protein, 68 aa, Oryza sativa
  Clone ID: PAT_MRT4530_60397C.1.pep
FALLGLLHAFKTKPQALFFFCLQTQNLYNTFPISTMRLNSTHHEKKNEKCSLASKELLQHNVFQAIPR

SEQ ID NO: 161190 - protein, 35 aa, Oryza sativa
  Clone ID: PAT_MRT4530_60398C.1.pep
METKDSWQSVIDRAKSYLIEASTIVEVEVSMAAQV

SEQ ID NO: 161191 - protein, 135 aa, Oryza sativa
  Clone ID: PAT_MRT4530_60399C.1.pep
LSFFFFCPFFFFIFFFTFLISKNQLGGCNKPCSLNTCCTLQKFQYICRVFVTSYYYQTLQSHFTVFLARTPIFRLRREINSPCCHPSVFLLFEFCLPTYMHISTHATLISLRLNLDVSITGSQPQQNILNNCHRK

SEQ ID NO: 161192 - protein, 1784 aa, Oryza sativa
  unsure (1)..(1784): unsure at all Xaa locations
  Clone ID: PAT_MRT4530_6039C.1.pep
MSYYVDPYTSVPQYPLYPVYGYPPSTVARQLGGLGIQGSTIMPSSFVDNNVNTSSGQVLPTSTMLVWTQVGEIVCPVYTTMPISTSPPMTGYENAVVTNQDASTSKDPPVETENGLLTTSKFVKDSDATRPCPSDTNRRPAKMTSETIRSWCPIHKTKKHTLQDCWVFVNARAEIRACKERGIQRTSPTRNVYCPIHKTKNHDLSSCKVLLGAIKTPSPKSYVPVRDNGKEQGATLAPDRFIGVIDLNPHEPSVLHLLEDYGSSTSDAAREVLAIDDVGTLAQANAETADQSTTPAQHIRAVQAILRETPYDPVLNNDLERWTERLRASVANLSNAFEEAATAAQQNRLPISDANGEIPEHRESPQRATPPPRGTGDLRDQINGRREARRTRDEANRSRHHVSSRRHDRGSRPHDNRDHDDHDRRGPDNTSHGRRRNDEDGGDRRRDNNERRRQDSRDPGRHPRNRTPEPSDPSSSSSSSASSSLSDRHPRRSRDHRQPTAPSAGCRAFGRSLRDVRWPERFRPGAIEKYDGSIDPEEFLQVYSTVLYAAGADDNAVANYLPTALKGSARSWLMHLPPYSISSWADLWQQFVANFQGTYKRHAIEDDLHALTQNSGESLREYVRRFNECRNTIPEITDASVIRAFKSGVRDRYTTQELATRHITTTRRLFQIVERCAHVDDALRRKNDKPKTGGEKKSAADTSESSKKKNRKNGKRKAQAEVLAAEYANPPRRPDPQGSDTKKSWCPIHKTDRHSLEDCLVFKKSLEKHMAFEKGKRVRVVEKNEESPPHESDSAYPDSDLHVSHILAGAAPKMKWSEQKMEFSEADHPKTAVIPGRYPIVVEPTIRNIKVARVLIDGGSSINLLFASTLEAMGIPQSELTPTDQPFHGITPQSSSRPLGKITLPVTFGQANNFRTEQITFDVAEFDTAYNAIIGRTALAKFVAASHYAYQVLKMPGPKGTITIQGNAKLAVQCDKRSLDMVEQTPTPPATSEPPKKELALIAFLRDNADVFAWQPSDMPGVPREVIEHKLMVRPDAKPVKQRLRRFAPDRKQAIREELDKLLKAGFIREVLHPEWLANPVIVRKANGKWRMCVDFTDLNKACPKDHFPLPRIDQLVYSTAGCELLSFLDAYSGYHQISMVKEDEEKTAFITPFGVFCHVKMPFGLITAGNTFQRTAYVDGIVVKTKTSDSLIDDLRETFDNLRRYRLMLNPEKCTFGVPSGKLLGFLVSGRGIEANPEKIKAIENMKSPTRLKEVQKLTGYMAALSRFVARIGEQGQPFFALLKKQDKFVWTQETKEAFITLKRYLSNPPVLVAPQPNEELFLYIAATPHSVSIVIVVEREKVQRPVYYVSEALHDAKTRYPQIQKLLYAIIMTSRKLRHYFQAHRVTIVSSFPLGEVVRNKDVVGRIAKWVVELSQFDVHFMPQTAIKSQVLADFVADWTMPDNKSDNQGDNETWTMAFDGALNSQGAGAGLILTSPSGDQFKHAIHLNFRATNNTAEYEGLLAGIRAAAALGVKRLIVKGDSELVANQVHKDYKCSNPELSKYLAEVRKLEKRFDGIEVRHVYRKDNVEPDDLARRASRREPLEPDTFLDVLTKPSVKEVSGEVVPSTPDISSDVIEVERAVADIETTDDWRTPLIKFINSEELPENDTEAEKITRKAKIYCMIGNDLYKKVPNGILLKCVSIDDGRQLLLDIHEGICGSHAVGRTLVGKAFRQGFFWPTALKDACDMVQRCEACQFHXQTHKATCTSASNNPSDLAVLVLGARYTWAIPTRTERLQIPIV

SEQ ID NO: 161193 - protein, 54 aa, Oryza sativa
  Clone ID: PAT_MRT4530_603C.1.pep
NIPDEDFPYIKPMRKGVNRFLVSKRKSPLERRLTSPQSRRNLPIVSFEPNEAAN

SEQ ID NO: 161194 - protein, 72 aa, Oryza sativa
  Clone ID: PAT_MRT4530_60400C.1.pep
QGCATNGGLRIGIEGHGDAVQGEDIRPADTDTYGPELLLNITDEICRDFDRPLNVWTLGAADRDPKPRHAVH

SEQ ID NO: 161195 - protein, 364 aa, Oryza sativa
  unsure (1)..(364): unsure at all Xaa locations
  Clone ID: PAT_MRT4530_60401C.1.pep
MDALVTRRRYHILRDRVSGPVDSAAADWYPRLYGWLVTPPFMGIHIPTDXPASVATDWCLCLHGWXIMPPLLGVYDFTAGLPSLPPTGVLTYTDPDPDMHNRIHVFQRLSPTLQEWISQNITTGLPSPAPTGVSSHIRRLIHRRQVFSPIRWVGHTAFDGHLRLHRTAASSATDWCLCLHGWPIMPPLMGVYVFTDRLPSPPQTGALAYTRLRLHHRLAFAAADWCLRLHGWPIMPPLLDVYIFTDLPPRITPTGAIVFTVGHIAATTNRHHHLQRKLPTSAADCWPTTHLLKDDLAVIIGCYTAIDWIIDIVIFINILSSLFGYAYSAAVGGQLRHHNWLSPLPPIVIIADCVCCRQLFSSFA

SEQ ID NO: 161196 - protein, 211 aa, Oryza sativa
  Clone ID: PAT_MRT4530_60402C.1.pep
TSLMGLLAISVRTSTGICGRVHAVSALSLTRLLLCAEEHEEGGVVSGRREDAVANVVWNRLAVGPVDAAARRPRAARGLPPLDLAALGPGSSRSTAPERGGGGDRGGVVSGEGGRRRTLSSPIPTAGEERRGKERRMDGSVAAEDEDMTKIKARLLGLAHGLAHFGGGPKGTTHAASGNPKLDRETCRASCINESDNANPLRPPGPSTNSH

SEQ ID NO: 161197 - protein, 41 aa, Oryza sativa
  Clone ID: PAT_MRT4530_60403C.1.pep
FVLRDNRGHGSGQRVHWTPVKVAKLIQAADPGLTKRTCNAH

SEQ ID NO: 161198 - protein, 104 aa, Oryza sativa
  Clone ID: PAT_MRT4530_60404C.1.pep
TPRRRRRLLLLRPRTPARPRRWPSTACARRRRTRARSGAGCTGHRRRRRRRRRRSCRRRRRRRRRRRRAKKWRRRARSWRGRRGSRGRMVVGIGSSAFILGLLD

SEQ ID NO: 161199 - protein, 735 aa, Oryza sativa
  Clone ID: PAT_MRT4530_60405C.1.pep
MGALLSKLGNLLKEEYKLHRNLREEITFLKSELESMEAALLKVSEAPIDQPPDRQVKIWARDVRDLSYDIEDSVDEFMVCIDSRTPNNSCSFGGFVYRSMDLLNRAKFRHKIGTDIKGIKSRIKEVNDRHDRVNEFVGIDEKSDELVRMLMGTGESSIRKRKRDVSEESKQKLKIVSIVGVGGLGKTTLANVVYERLKTQFYCFAFVPVSLTPNMEKIFKNMLHQFDKKKYRNINEVTWDEAQLIAELREFLRNKRYLIVIDDIWDISAWEKIKCSFVDSENGSGIITTTRNVDVAKEVGGVYQLKPLCHVDSRKLFNLRIFGAEDKCPPQLAELSERILKKCSGVPLAIITIASMLASKIENENAHEDDFKQLSISNLSHVRSLIFFKGFNSFPAYSSFPLLRVLNLSGCQKVDNNHCKDICLYWLHLRYLNLSRTSVTEIPREIENLQSLQVLCINGIEIEDLPSTFVRLGQILYLNVYLKTRIPDGFGSLKYLQELKGRILIGSLTNVHDLGKLTELRRLHIEFQGWETSWKEPLHRCLSNLVSLEDLTIAGCFGSLDSACDDSSPRPQQLCSIGMWNSTIHAVPNWMVSLSTLSNLTIKLDTLKERDLQILGSIPSLSRLYLGVEKPTVDRDERLIISYRFKCLSLFEYWSDTMEIEFAQGAMQNLRTLKLFIDVHKTHDHVDFGLENLSALEHAYLYLNNCPEEMHEVVEAGIRRQIHMNPNSPTLDLSM

SEQ ID NO: 161200 - protein, 1762 aa, Oryza sativa
  Clone ID: PAT_MRT4530_60406C.1.pep
MESGGVDGERPLLREAGDLGGEDGGAGGVPEEGDAKGDVMAAAAILRAPLLPSCQYAKTSRSYCEMLSNEDEKREDGSALENGEDLLASRSLAVEGDEEGYGSCADIGIEEDAEGDASRERLEEEAMTESIREYVTEAVLADHIQEQPDKSKSESEHVKVAQHKSQIAKSREEGPKQSGGEPSVVVEELNGSSSSDDESKATSAPPARSISGAAGRSNGPSLPSRPAGLGASTSLSQPSARPVQQTRANGPVAVDRETRQDVESPEDGDENDEIREKLQMIRVKFLRLANRFGQTPNNMVVSQVLYRLGLAEQLRRNTGQGVFSFDRAQDMAERLEAAGNEPLDFSCTILVLGKTGVGKSATINSIFDDVRLETNAFDTSTRKVQEVVGAVEGIKVKVIDTPGLSCSSSDQHHNQKILNSVKRLISRNPPDIVLYFDRLDMQTRDYGDVPLLQTITRVFGASIWFNAIVVLTHAASAPPDGLNGIPLSYEMFVTQRSHVVQQAIRQAAGDVRLMNPVSLVENHSACRTNRAGQRVLPNGHVWKPQLLLLCFASKVLAEANALLKLQDNPAEEQFGDDDDIEDDLADDSDSDDGSDYDDLPPFKRLTKAQLAKLNHAQRKAYLEELDYREKLFYKKQLKEERMRRKIMKKMAAEASARTDDFSNSNLEDDGSAPTNVAVPMPDMVLPSSFDSDHPSHRYRFLDTPSEWLVRPVLETQGWDHDVGYEGLNVERLFAVKGKVPLSVSGQLSKDKKDCSLQMEVASSLKHGEGKTTSLGLDLQSVGKDMAYTLRGESRFKNFRRNNTAAGISATLLGDSVSAGVKVEDKLVVNKQLRVLVSGGAMSGRGDVAYGGRLEATLKDKDYPIGRMLSTIALSVVDWHGDLAVGCNIQSQIPAGRASNLIGHANLSNKGTGQVGIRLNSSEHLEIALIALVPIYQNIKNWEHTRRPSRLAPFFLMGSRGGDADAWETASARSGVSSSSSGRATAAAAAPAPENKVFVALPAQHKSGRSTLAWALRHVAELAPAAIGGGGEVVVVAAHVHSPAQMIPMSSTPESPNAAPPASPGTAARGVATGAHSGDGEHLRAHNYPEDVSTYRKYEREQVEKNLDEYLEQCTKMKVKCEKIVIENEDIANGITELILLHGESLSRLNMEGTSVDSWDSFRRGSFPSSYRASSTVTEEVLSDSSSSGIPRDGISTLAGCDFPNSALHHEQGDAGSNANLFDKLEEAFAEAEKYRKQAYDESLRRQKTEEELISYHQKARKSEDLFLNEAKQRKEVEETLAKANVEIQLLKEEMDALKHNRDDLSSKLSDVSEQKVTLEQQAVEYGSIIIDLKDTVAASQALIDSMQMEFEQLKHERDNALKHAEELHREKQNMVSSSDLEWSTEFSLLELQQATQNFSDAMKIGEGGFGCVYRGQLRNTTVAIKMLRSQNLQGQSQFQQEVAVLSRVRHPNLVTLVGYCSEASGLVYEFLPNGSLEDHLACESNTSPLTWQIRTRIIGEICSALIFLHSDKPHAVIHGDLKPANILLDANLVSKLGDFGISRLLNRSSTVSTSFYQTTNPRGTFAYMDPEFLTTGELTARSDIYSFGIIILRLVTGKPALGIAREVEVALDKGELELLVDRSAGDWPFVQAEKLMLLGLQCAELSRRKRPDRMNHVWSVVEPLVKSASLPVEPESIGHWVNKNRTPFYFICPISQEVMRDPHIAADGFSYEEEAIKGWLGSGHNTSPMTKSTLEHLQLIPNLALRSAIEEFMQQKQQQIPS

SEQ ID NO: 161201 - protein, 88 aa, Oryza sativa
  unsure (1)..(88): unsure at all Xaa locations
  Clone ID: PAT_MRT4530_60407C.1.pep
VAWQIFPPLWPDIXEGKVRFFPYQPGSRGPKEALYFSKRVGYIQPPGFIWIPPPPALPASQPPRSFVYLGKGPLTCFFCGKIRFKFSP

SEQ ID NO: 161202 - protein, 1027 aa, Oryza sativa
  Clone ID: PAT_MRT4530_60408C.1.pep
MRKGICTGHITYTGRTRGPITEGKEASSAICRGSAKRENGTTWTMEMDGGDEATSSGTRENLGIPERAARYGASFPCVEEHGETKVGQAGVQAPSREECSPGFKWQWITHYRHSWGSRRVCDCELGFGAAGRGRGGGLAEAAAALEGFLADPWLLRPAAAGEGVGVEEEGGVATVQVEVPPVEAAEEGEEEAGRAAVLRQAAAAEDYARRLEGAAAAGTGLRFMPNGFSVLLTLCFFIWGVDTHDYDVVKLEEGDEEDWGQEDVGNAAVKVMCRICFSGENEGSTKAAKMLPCKLCNKKYHRSCLKNWGEHRDLFHWSSWVCPSCRSCEVCRRPGDPNKLMFCKRCDGAYHCYCQQPSHKNVTHGPYLCPKHTRCHSCGSGVPGSGHSTRWFLGYTCCDACGRLFVKGNYCPVCLKVYRDSEVIPMVCCDVCEKWVHIECDGISEEKYQQFQSDQNLQYTCGACRGECSQIRDTEDAVRELWKRRDVVDHDLMASLRAAAALPSLEDVSPSHPNSDDEKLGAYVMKNDGRNTLKFSFKSNSTKPALDSSEQEKNAIKSSGSNKKHSKKKGNQNNKTVSEQDEIFLEKRNETKSLGSLGDQIADVTRDKSSFKNDADAFVLSSAQSAEKALKLQSAKAAAHNADMIPKVKIKGTKVPSLHFKDVGEENAAKSDTGKGTKLVIHIGSRHKSRSGSPKSEMSNSQKEQELVSMHGGKVDVTSQFKSSRSEIKEKSVMKLVRETGVQQNSLLGDLGASKKHATGKRSNAIVSAMENASESGTRSRSFGQKQSVNHLTENQGNASFSVNNSPDSLKPSLLKLKFKRPIFEQPSTQSSQPEEPGTWASPQEELNVAKGQRSKRKRPSLDKMDGSESKAPAAKRHEQSTGEEAMDANWILRKLGKDAIGKRIEVQLASDGKWHQGVVSNVINGTLCLQLDNGRSENIELGKRAIRLIAQRSHTGKRLTHFAPQAPAFGSSQSLIHGRLGGLKRIGFILTSGSVGTNNWEGFLGATLDVEEMPDDGHVHVAVAAE

SEQ ID NO: 161203 - protein, 737 aa, Oryza sativa
  Clone ID: PAT_MRT4530_60409C.1.pep
MGQLRTIAVLDGSNYTEWKNSMDPNLALLDFDLCLREDPPEEIQPPEELNMAEEDYEQLRLSLMYIKNHIPHEIIGGIVDSDNAKTYLANIEENFKSSSKTYASTIISKMITSTYNGKGSVRKHILEMTNMAHQLKSMDMDVTEGFLVHFIMSSLGPDFGPFKINYNTQKEKWTIQELIAHSVEEEERQRAEKQKLKDQLNLANANNKGKRKMYQGEGSNSKKNKSSSSQNPSGSKQEASGPQAGPPKTPYCPFCFADGHWQRNCSRFKAWLAKKGNTNSEEISNVDESLYTEFSLNTWWVDSGATVHVSNSLQGFSGIKKVAKGEQSLRVADGAEIEVRAVGDLTLRLPSGCNLILSNVLFAPSIKRNLISVRVLVETGYDCHFTKRTCYIKFDNKVVGLAFMRDKLYLLSLDDSVLNAINACNNKAETSSKLWHYRLGHISRGRIERLIKEEILLPLDFSDTGHCVDCIKGKFTNTIKKGATQSTSPLEIIHTDICGPFPVTSVDGFDSFITFIDDYSHYGYIYPINDRSESLEKFKIFKAEVENQHNAKIKVVRLDRGGEYYGKHAPFGQILGPFALYLQQHGIVAQYSMPGEPQQNRVVERRNRTLMDMQKPEYPERSKGYRFYYPDRVTKFVETRHAVFLENNEAGSSQAKEIDLEEIRANVPIPEIREINIPFIQTEPHNVVPTTMGNSGPSGSTPNLKKVLMVIMMKLMSLNRIPQHKMKNLHKKMLNRM

SEQ ID NO: 161204 - protein, 1511 aa, Oryza sativa
  Clone ID: PAT_MRT4530_6040C.1.pep
MVEAYDAARIDFHHMVRRGMVVNNMKILELRQENLQLKKDLDALEAQLCQLKMVTTRRTAAIGDGNQPEGSNPNIQGGPPPPPPPPPPPPPDTNPILTQILAQQANMMAAFLHHIQNPPQHNAPPPPPPPQHSKLAEFLRIRPPTFSSSNNPVDALDWLHAVGKKLDTVQCNDEEEVIFATHQLQGPASLWWDHFQATQPEGQPITWARFTAAFRRTHVPAGVMALKKREFRELKQGNRSVMEYLHEFNNLARYAPEDVREDEEKQEKFLAGMDPELSVRLVSGDYPDFQRLVDKSIRLEAKHKELESHKRRLANFRNQQGANQRVRYTNPYLGGSSSQQQQQQPRSAPRPQFVVRVPQPQQQQGRRDAQGQQRLCFNCFEPGHFADKCPKPRRQQGQAPPRPNNGGKDVAQGRVNHVTVEDVLTTPDVIVGTFLIHSIPATILFDSGASHSFISVPFVGRNQLGVERLRNPLLITTPGGDMTAKYYSPAVPIEIQGIPFPSDLILLDTKNLDVILGMNWLAQFQGVVDCVRRTVTLYRGPEQPVVFFAPPTSVGSSELHQIGLSEIPIASEFGDVFPEELPGMPPKREIEFRIDLAPGTTPLYKRPYRMAANELAEVKKQLEELKEKGYIRPSTSPWGAPVIFVEKKDKTKRMCVDYRALNEVTIKNKYPLPRIDDLFDQLKGATVFSKIDLRSGYHQLRIREEDIPKTAFTTRYGLYEFTVMSFGLTNAPAFFMNLMNKVFMEYLDKFVVVFIDDILVYSQSEEDHQQHLRLVLGKLREHQLYAKLSKCEFWLSEVKFLGHVRSAKGVAVDPETVTAVTDWKQPKTVTQVRSFLGLAGYYRSVRKHSKLKEKLVSSPVLILPDTRKDFLVYYDASRQGLGCVLMQEGHVVAYASRQLRPHEGNYPTHDLELAAVVHALKIWRHYLIGNRCEIYTDHKSLKYIFTQSDLNLRQRRWLELIKDYDVGIHYHPGKANVVADALSRKSHCNTLGVRGIPPELNQQLEALNLSIVGRGFLAMLEAKPTLLDQIREAQKNDPDMHGLLKNMKQGKAAGFTEDEHGTLWNGNRVCVPDVRELKQLILQEAHESPYSIHPGSTKMYLDLKEKYWWVSMKREIAEFVALCDVCQRVKAEHQRPAGLLQPLQVLEWKWDEIGMDFITGLPKTQGGYDSIWVVVDRLTKVARFIPVKTTYGGNKLAELYFARIVSLHGVPKKIVSDRGSQFTSHFWKKLQEELGTRLNFSTAYHPQTDGQTERLNQILEDMLRACVLDFGKTWDKSLPYAEFSYNNSYQASIQMAPYEALYGRKCRTPLLWDQVGESQVFGTDILREAEAKVRTIRENLKVAQSRQKSYADNRRRDLEFAVDDFVYLRVTPLRGVHRFQAKGKLAPRFVGPFRIIARRGEVAYQLELPASLGNVHDVFHVSQLKKCLRVPSEQADSEQIEVREDLTYVERPVKILDTMERRTRNRVIRFCKVQWSNHAEEEATWEREDELKAAHPDLFASSSESRGRDSV

SEQ ID NO: 161205 - protein, 128 aa, Oryza sativa
  unsure (1)..(128): unsure at all Xaa locations
  Clone ID: PAT_MRT4530_60410C.1.pep
YKNSTHTPHQSTSLATSSSPLSHIFSSPPPTVSSSSDLPLSLSVERGTVANGERRARWPTATGARGGRRRRAPGVADGDGHAKWPTTSIAKSPSRXAGRCCGREARVRGGFGGAAKRRESAPXRPGRW

SEQ ID NO: 161206 - protein, 154 aa, Oryza sativa
  Clone ID: PAT_MRT4530_60411C.1.pep
MDSSRFRSAAATEAAEEEAAGWVTVEEWAGSSAAALSRTAVLTASPSSSLASRRFETRWGRFDARLSGAFGPRGFPGSVTPDYVPFQMWDTLQGLSTYIRAMLSTQALLGAIGVGEKSGTVIGATFQWVLRDLTGMLGGILVTFYHGSNLDSSA

SEQ ID NO: 161207 - protein, 117 aa, Oryza sativa
  Clone ID: PAT_MRT4530_60412C.1.pep
MASWLAYVWFGFLTLNSLLAIYRSHGDIAGIAFVATSYLSLLLLFWCLQQYERAPANSPAKSRSKAGVWFSSSLLTVVFSWRVSALMPWPVAAAVWLMAASTVVGGFYTLFLWSGRQ

SEQ ID NO: 161208 - protein, 148 aa, Oryza sativa
  Clone ID: PAT_MRT4530_60413C.1.pep
VSSFIKPMYVLLVQYCKVHHRSLNLYRCVIPVPKLANRPFRSSNLFDCVIPVLKLAYHTFRSSNLFSYVTPVPKLGFEYHLGQIGWDRGDTTEQVGGPKRVICKFRDRDNTVKQNGFICTQSIRLKGAGGSGGERVLPATPRLATRLA

SEQ ID NO: 161209 - protein, 79 aa, Oryza sativa
  Clone ID: PAT_MRT4530_60414C.1.pep
MQSPCVVIVRCASKRYPPCALAEWRESKIGWGTAGVRRRGGVAGARRPFESAALPRWAEKGVGAGAGAGGGGFSGSACG

SEQ ID NO: 161210 - protein, 60 aa, Oryza sativa
  Clone ID: PAT_MRT4530_60415C.1.pep
PSHAGYVGDKGDAIGDVHEHAGPDIIGNWVPPLLKPKKRDLDGGGSGLSSQLSNMSVNCC

SEQ ID NO: 161211 - protein, 176 aa, Oryza sativa
  Clone ID: PAT_MRT4530_60416C.1.pep
MVWMWIRAQLGRLSALIITWEEIDMDGMMTRRSSGQIKVHIYLYGPLGRMPHIHHIQHSRDGVGVGSGAELEYVGSGAKLEYVRGSHEVVISESTNGIGGGVELESMPTVVMKNSSWLDSGSVPTAATKKPSVYRRCGVIETPMGMPSSWLLDGEVRIYEDNAGGGDKSVDSVAYA

SEQ ID NO: 161212 - protein, 131 aa, Oryza sativa
  Clone ID: PAT_MRT4530_60417C.1.pep
MGYSDSIRGQEKCEIIRFDTSANCQSKPNTPDSRPPRPAPATTASVGKRRRPGWAYYIGPSLDADELELEEERRSGALQFNTNTPAVPAPASAATTDDNDDWGIVKELDDGVHGEASTTCCAVRPRFCGSL

SEQ ID NO: 161213 - protein, 141 aa, Oryza sativa
  unsure (1)..(141): unsure at all Xaa locations
  Clone ID: PAT_MRT4530_60418C.1.pep
MFFQLITLVDPXHEXEKEGGLYCNLFTAHPPFXQIDANFGFPAALSEMLVQSTGSDLYLLPALXRDKWPQGCVKGLKARGGVTINIRWEEGSLHEALLWSSSSQNSRIKLHYGDQVGTISVSPCQVYRFSKDLKCLKTWAL

SEQ ID NO: 161214 - protein, 325 aa, Oryza sativa
  Clone ID: PAT_MRT4530_60419C.1.pep
MEKCPFVFSCKSLSVISDPAVTLSKDFADIRPRIEELVSKFSVRDLVEEFIYLGIRPLSANWTLSLGEIPEGSSSLLPPFEISANTKIVKDVDGPSKKYIGPYTKKEHGTYLAVQQGRKQNRILSALGQDMMVRVHPDLKKKKKKNSNINPKDAASSSSDNEENSLDGESDSSDESSDDSGSSESSEHTHTAPFVQENSSPALKRKKMPSSSPVDSNLKKVRIALDSDDEDENILSYELPAISEISSVEIGNVSNVNSLSAAADYLSAPLNVLTSAAKEVEEPICIDAIDVDMNPVNPVQTENVPEVVNLNFQSRKNIVEDQATE

SEQ ID NO: 161215 - protein, 93 aa, Oryza sativa
  Clone ID: PAT_MRT4530_6041C.1.pep
MEMDEVGGRWTFSRTNEGYTSCGPVVEMSWHRVGALLLGAQSCLPVPEVPAVGGMVGLGWLGTSWDPGSGCQFGLNHRRPWVKAVREALEKKS

SEQ ID NO: 161216 - protein, 85 aa, Oryza sativa
  Clone ID: PAT_MRT4530_60420C.1.pep
QSWAASWVLGSLEHPSSSSIPPSISFFTYGDEKTRSSKSSITHTFLDFLQTAPSPCLIWSFSPYAIPKLLSSDELAPPSGLYRGE

SEQ ID NO: 161217 - protein, 59 aa, Oryza sativa
  Clone ID: PAT_MRT4530_60421C.1.pep
VHSVYPPYHCHRRRSLIVSHVYHHMVEFDLQSGRLCYVSRFSFHSCPRVKNQKITELLS

SEQ ID NO: 161218 - protein, 85 aa, Oryza sativa
  Clone ID: PAT_MRT4530_60422C.1.pep
MPLGPSRCLAPRPSPNRHLAGPVCDRPIAGHVRLDGWPCPHVASVSGGVEVGLFPVSGGGWRCVLLKDGLLLSLQAKARVMTRSR

SEQ ID NO: 161219 - protein, 175 aa, Oryza sativa
  unsure (1)..(175): unsure at all Xaa locations
  Clone ID: PAT_MRT4530_60423C.1.pep
LRLREEACRERDAALAEREAEVNRREVALRRLGEQLAKREEAAAGREARHLESACAERAAIAARASELEAREKHLAAGGPPGGAGLASELAKAQSTLADLGRLVQDQAGEIAALRLTNELGPGQLSDAVARLERAARRVGVPMRQHSQXKSSSASLARAAVELVLASHQARDPDF

SEQ ID NO: 161220 - protein, 126 aa, Oryza sativa
  unsure (1)..(126): unsure at all Xaa locations
  Clone ID: PAT_MRT4530_60424C.1.pep
MLRPGARAHRKEGDGEAAAMRPDNGAYAEELAXATPAPMRRGAAEWRLGASVAVRXAGPGEGTARVAPSGVRPGSGADAEELDRATTAPMRQLSSSSSSLRPAGGDAASEQLLAXLRVHLRSSVAA

SEQ ID NO: 161221 - protein, 830 aa, Oryza sativa
  unsure (1)..(830): unsure at all Xaa locations
  Clone ID: PAT_MRT4530_60425C.1.pep
MAQDTGDTVLPSPRISADRHLSLPRKIMPDGAVVRAGESRPRPRYPERSVHLLSFAMAGLIPPFSRFFHEVLDFYEIHALHLAPNAVMTMSIFAHLCEMFIEVRPTMRLFQAFFVPQLLQGAVVGGCYFQPRPGTAGQYIESHLRKKWEDWKKDWFYTALPDHPRLRVPAGPPERSAAWLTASELGEEYDAVWDRLRGLRSLGLTGAMVFGDYFRRRIAPLQERSRGAWEYTGPNDPMRKHAGERWDWGEEDAKMVIRRVLGLDSAEQTLIPDGILPLCCDRDRESILAVMSVVGAGRGRPGRGGASGSAASAGGGGASVGGSRPSGPGGGGDSRAPGSGPETTQQRYSFXRGPRGRTPRGGRNPHNRSGXAAADSTVREGLNTQVQALAEERTALDAEWAQLVADRARVDEGHRAVEDMYEAHAEDLAERVRNARGTLDAAAAHERRAAEADTSLQARTAALEAERKALDDRARSVQEFEATIRRRIEVLDRSQREQNARGQEQAQRAQELEEQARLLDQRESTLAAHERTAAETEASLHLREEAAAEHDRITLAAEASAGRRAEELRLREEACRERDAALAEREAEVNRREVALRRLGEQLAKREEAAAGREARHLESACAERAAIAARASELEAREKHLAAGGPPGGAGLASELAKAQSTLADLGRLVQDQAGEIAALRLTNELGPGQLSDAVARLERAARRVGVPMRQHSQLPPTQPALAFRLDGLAAGLERLEEEVGETIKSSSASLARAAVELVLASHQARDPDFMPWCALEDFPPGTEARAREQVREAADAIFSGFEGSAPRFTSGLASDEESGSGGDDSDED

SEQ ID NO: 161222 - protein, 98 aa, Oryza sativa
  unsure (1)..(98): unsure at all Xaa locations
  Clone ID: PAT_MRT4530_60426C.1.pep
SGDLGVGPLAEDEIRTTGAVRAGPEVEVEAGGGPEPEAEAESTRGLGAGDEKNSRSPLRLGHPRGWPRRRGAESRPXVSRGVQQHSVVPGANRGLFFP

SEQ ID NO: 161223 - protein, 131 aa, Oryza sativa
  Clone ID: PAT_MRT4530_60427C.1.pep
MAQDAGDTVLPSSRITADRHLSLPRKIMPDGAIVRAGESRPWPQYPERSVHLLSFAMAGLISPFSRFFHEVLDFYEIHAMHLAPNAVMTLSIFAYLCEMFIGVRPMMRLFQAFFVPQLLQGAVVGGCYFQP

SEQ ID NO: 161224 - protein, 141 aa, Oryza sativa
  unsure (1)..(141): unsure at all Xaa locations
  Clone ID: PAT_MRT4530_60428C.1.pep
MGRGHAAGLEEEVLMPAWEAAVEELRLNFEEFQKEVEGDNKLIHEEIQSQAILAQAHKEEVTKHLKAIQDLLVDSNSKQGQGVVEKGATPSAPXTSQVTHKSEGLAAPGAMGQTPPNSKGVLGGMQNLEFGESSTARNFGQ

SEQ ID NO: 161225 - protein, 764 aa, Oryza sativa
  unsure (1)..(764): unsure at all Xaa locations
  Clone ID: PAT_MRT4530_60429C.1.pep
MAQDKSDTVLPSSRISADRHLSLPRKIMPDGAVVRAGESWPRPRYPERSVHLLSFAMAGLIPPFSRFFHEVLDFYEIHALHLAPNAVMTLSIFAHLCEMFIGVRSTMRLFQAFFVPQLLQGAVVGGCYFQPRPGTAGQYIESHLRKKWEDWKKDWFYTALPDHPRLRVPAGPPERSAAWLAASELGEEYDAVWDRLRGLRSWGLTGAMVFGDYFRRRIAPLQERSRGAWEYTGPNDPMRTHAGERWDWGEEDAKMVIRRVLGLDSAEQTLIPDGILPLCCDRDRESILAVMSVVGAGRGRPGRGGASGGGDSRAPGSGRKPGDDPASDPKGKRKAAESWPPSPPRGGGAERATDLPPAGHKRPAGPEAGRKKKRLRKIGQTEPCRGSYIEPPKWTFNRPPRSDIPSQGTSGSDPSRRTKSAQPEQSGPGQSKAAGSSQPRGGVHRTRTGPDPERPLAGTRPTVGGGGVDAPPGGSSETGVRAERRPGSVGADGREPEVEVEAGGGPELEAEAESTRGLEAGDEKNSRSPLRLGRPRGWPXQKGGREQPPVSRGVQQHSVVPGANRGLFFPIPGEHGATSAGARRHRLHCPGXLNTQVQALAEERTALDAEWAQLVADRARVDEGCRAVEDMVRVGRKKHQAHLAKIQAREEVLDSVMRETEEERHAALIASSALDEALGDIRLQYEAHVEDLAERVRNARGTLDAAAAHERRAAEADASLPARTAALEAERKALDEESGSGGDDSDEDWDNIVSGAGLGGPGTP

SEQ ID NO: 161226 - protein, 315 aa, Oryza sativa
  unsure (1)..(315): unsure at all Xaa locations
  Clone ID: PAT_MRT4530_6042C.1.pep
MATLTVPAAVPPVAEDCEQLRKAFKGWGTNEKLIISILAHRDAAQRRAIRRAYAEAYGEELLRALNDEIHGKFERAVIQWTLDPAERDAVLANEEARKWHPGGRALVEIACTRTPSQLFAAKQAYHERFKRSLEEDVAAXHITGDYRKLLVPLVTVYRYDGPEVNTSLAHSEAKILHEKIHDKAYSDDEIIRILTTRSKAQLLATFNSYNDQFGHPITKDLKADPKDEFLGTLRAIIRCFTCPDRYFEKVIRLALGGMGTDENSLTRIITTRAEVDLKLIKEAYQKRNSVPLERAVAKDTTRDYEDILLALLGAE

SEQ ID NO: 161227 - protein, 93 aa, Oryza sativa
  unsure (1)..(93): unsure at all Xaa locations
  Clone ID: PAT_MRT4530_60430C.1.pep
ARSDMVMDKVMDSGSVHFQSILKNXPTPRTSMGEAMRAFSFSLAEAKYDARDSVRHVVLHTIRSDCLRVRSHQENVGLVKLPKLTHFVDPADG

SEQ ID NO: 161228 - protein, 425 aa, Oryza sativa
  Clone ID: PAT_MRT4530_60431C.1.pep
MEMESPRSPEAEIGHRVEDLWEVAEPQLSPSEKLNSCFEDIAVASFPRPLGSQVIEIPSNASLADTVEILSKNKILSAPIRNVDAPEDASWIDKYIGIVEFAGIAMWLLYQSEAAANGTAGSAVGSPVANLVSRLGSFTFRRTSSGRVETTTDPESDETASVGGSFFETLTSSEFYKNTKVGDISGSFRWAPFLALQTSDTFLTMLLLLSKYRMKSLPVVDIGGDKIENIITQSSVVHMLAECVGLPWFESWGTKKLSELGLPLMKPCKLVKVNEDQPVLKAFQLMREKGVGGLPVMDTSGTKAIGNISIRDVQYLLTAPNIYKDYRTITAKDFLTAVRQHLQEQHEASPLLGSVITCRRDDEVKDIILKLDSEKIHRIYVIDDKGNTEGVITLRDIISKLVHEPRHYFGDFFDGVVPLPPNSTV

SEQ ID NO: 161229 - protein, 78 aa, Oryza sativa
  unsure (1)..(78): unsure at all Xaa locations
  Clone ID: PAT_MRT4530_60432C.1.pep
HAXXPRSAXXTPSXXRGFRXRLPXXXQRGRTEGQEWRRGTXDPASPFXXPSCXRXAQXDLXXXXQXXXGRLXRLQKLY

SEQ ID NO: 161230 - protein, 60 aa, Oryza sativa
  Clone ID: PAT_MRT4530_60433C.1.pep
SVFLDGGVKSIRGGQECSRAQGQGSRCFVKEGVFFHQSGEVDLFWGLPFVRFALPNRLIL

SEQ ID NO: 161231 - protein, 53 aa, Oryza sativa
  Clone ID: PAT_MRT4530_60434C.1.pep
PLFFFFFLFYIFDVFSYVLLFFFFIFFFSFFLFRVCLQHTTPPKGLIKKTRIL

SEQ ID NO: 161232 - protein, 82 aa, Oryza sativa
  Clone ID: PAT_MRT4530_60435C.1.pep
FLILVPPVVPGNVLVSVVTSLLLNAGLEFGPILLPILRSAIPIPETLRVLPQLPLWSHMMVSNDVRSHLSWYIASKRTDAMR

SEQ ID NO: 161233 - protein, 115 aa, Oryza sativa
  Clone ID: PAT_MRT4530_60436C.1.pep
AFPTDLNLSQRELVEVVGDEEAKTPKAKTKSATHEVDSIALVDRKLDATPTWRANCRNMNSAIIKGGSARDLKVDGCGDKGFRQVQALSMRGNTLLLFGDGIALGTAQLSGRNGT

SEQ ID NO: 161234 - protein, 120 aa, Oryza sativa
  Clone ID: PAT_MRT4530_60437C.1.pep
RPSARGSPPTARCGVPAPCASGSRRAPASSAAGAAARRRGGPRGAPSPRRPPAPPSTPLPPPGRASSSPRRRSPPPRAWHPQPPPPPQQQRQRRHRRRWPPRRRRRRSRTRAPRCTSPGS

SEQ ID NO: 161235 - protein, 216 aa, Oryza sativa
  Clone ID: PAT_MRT4530_60438C.1.pep
MSVAEAIGRLRAFEESLKGRRREPEVEYLLLTRAQWENLYIKEKKGEDGSDSNSSERKVDRKKLQIACLFVDLRPVEVHEEVGALRRRSCQPPRRSGDAGLLPRRPDGNGLLPCKPAQPAFSLADLVAAASGAVDPPPLASLVDLAMTMMGGPGPRRGGFTCVSVKCGSGVDDDGGKLSSGGSSGHSPGKGGFAVVGLGCGQWRSHVEFGWCTGTP

SEQ ID NO: 161236 - protein, 93 aa, Oryza sativa
  unsure (1)..(93): unsure at all Xaa locations
  Clone ID: PAT_MRT4530_60439C.1.pep
VWQVXXCRQSRPPVDDGLVQXAGALDHMLSGIYRELGXPVAGHPMAEVFPGCRXGDLVRAAASLPAFLLVVFPXGPGGVCFWLGSPWSPCAGP

SEQ ID NO: 161237 - protein, 76 aa, Oryza sativa
  Clone ID: PAT_MRT4530_6043C.1.pep
MSNQGTPRPHNRDDDDDRTGDPADARGRRAPTMRRPDPIPPATPAAANQPSCRPAPGRPKRQIALAGGAGSRAPGS

SEQ ID NO: 161238 - protein, 341 aa, Oryza sativa
  Clone ID: PAT_MRT4530_60440C.1.pep
MQPDPQPHGRGREKAAGAGPRLPPPVTAPSVGRPASVLPHKTANVRDHYRIGKKLGQGQFGTTYLCVGKPDGGEYACKSIPKRKLLCREDYEDVWREIQIMHHLSEHPNVVRIRGAYEDALFVHIVMELCAGGELFDRIVAKGHYTERAAALLIRTIVGVVEGCHSLGVMHRDLKPENFLFASTAEDAPLKATDFGLSVFYKPGDKFSDVVGSPYYVAPEVLQKIYGPEADVWSAGVILYILLCGVPPFWAETESGIFRQILRGKLDLESDPWPSISDSAKDLVRNMLIRDPTKRFTAHEVLCHPWIVDDAVAPDKPIDSAVLSRLKHFSAMNKLKKMALR

SEQ ID NO: 161239 - protein, 109 aa, Oryza sativa
  Clone ID: PAT_MRT4530_60441C.1.pep
MATPFCAAACRLSISPPNAAPSAPGRARALARRGLVVAVRAEAGVGGINPSIRKEEEKVVDTVLAGELSKPLTPYCRCWRSGTFPLCDGSHVKHNKATGDNVGPLLVKK

SEQ ID NO: 161240 - protein, 272 aa, Oryza sativa
  Clone ID: PAT_MRT4530_60442C.1.pep
MAETNHLLLLLLSPPRLRLLSWTPTTPLACAALSRAAKLSRDLVSEKGERGIRSFKKNIAEQHMHASLGLDQLAAIGSLYQFIRGGGEGKEAASQEEEQTPKLRSVIAHLVSRKRRRDRINEKLKALQELLPNCTKTDKVSMLDEAIDYLKSLQLQLQMLVMGKGMAPVVPPELQQYMHYITADPSQIPPIRPSEPRPFQITHATQQRQSNVESDFLSQMQNLHPSEPPQNFLRPPKLQLYTPEQQRRGLASSSGHNSGWITERNSSYNFLE

SEQ ID NO: 161241 - protein, 80 aa, Oryza sativa
  Clone ID: PAT_MRT4530_60443C.1.pep
VESLMRFMIMIRCVLSLKCRIVGVVLHLSGQNVSPHRERARFGSVGCSSEQACFSLCEEPGIVVWEKWCTWSVIGCQEWR

SEQ ID NO: 161242 - protein, 48 aa, Oryza sativa
  Clone ID: PAT_MRT4530_60444C.1.pep
RLLMLNRFLVQHLYSLWTFLNKEWLVDFETLPLDIKGCPLLLAKAIKL

SEQ ID NO: 161243 - protein, 114 aa, Oryza sativa
  unsure (1)..(114): unsure at all Xaa locations
  Clone ID: PAT_MRT4530_60445C.1.pep
MFMCIDQLVLFLCPENKMYHNSHWPAPFWQPATFQLINNQIMQQQCCQQLKLVAPPSYXHAISCVQAIVHYLQLHKVSVVYFVQTQXKAKPLXVLNLPSICGIYPNYYIALTSI

SEQ ID NO: 161244 - protein, 133 aa, Oryza sativa
  Clone ID: PAT_MRT4530_60446C.1.pep
QSAPQASGSVSSPALSSLIIPSLKEATGDKFNGPVVHTFLDSLMHLEKELPGSCEVLIGRMLHRLGSSKESSLQSLQETATSVFAKKSEPPSEPPSNKKMANTPSLAAPTVSPLARFLLTRWQNQVSQDLNSV

SEQ ID NO: 161245 - protein, 114 aa, Oryza sativa
  Clone ID: PAT_MRT4530_60447C.1.pep
MKLVRFLMKLNNETVTIELKNGTTVHGTITGVDISMNTHLKTVKLTLKGKNPVTFDHLSVRGNNIRYYILPDSLNLETLLVEDTPRVKAKKPTAGKPLGRGRGRGRGRGRGRGR

SEQ ID NO: 161246 - protein, 585 aa, Oryza sativa
  Clone ID: PAT_MRT4530_60448C.1.pep
MSLEHNKMMITLVRLLPLVLVVALAWPAAEAPAAASPPPDPVQCSSGSGTADCTVSSAYGVFPDRSTCRAAAAVYPSTEEELVRAVANATASGTKMKVATRYSHSIPQLACPGDGDGEGLVISTRRLNRVVAVDAGRMEVTVESGISLRELIAEAGKAGMALPYAPYWWGLTVGGMLGTGAHGSSLWGKGSAVHEYVVGMRIVTPAPAADGYAKVRVLTAADPELDAAKVSLGVLGVISQVTLALQPLFKRSVTFMERDDDDLADQVTKFGYQHEFADIAWYPGIGRAVYRVDDRLPMNASGEGVLDFIGFRATPRLLIRTNRLAEELFERAGNGNGKCVTSRVTHAALSSAGYGLMRRSGGLFTGYPVVGPQHLMQASGGCITGPEDALLTACPWDPRVRGSSFFHQTTFSLPVSRAGAFVEEVRRLRDMNPKALCGVELYDGILIRYVKASTAHLGKPAAGGGQARLFEDVLEEIEQMGVFKYGGLPHWGKNRNLAFVGAARKYPRIGEFLRIKDAYDPDGLFSSDWSDMMLGIGGRAPTRDAPGCALEGMCVCSQDAHCAPEQGYVCRPGKVYKDARVCTKV

SEQ ID NO: 161247 - protein, 597 aa, Oryza sativa
  Clone ID: PAT_MRT4530_60449C.1.pep
MMITLVRLLPLVLVVALAWPAAEAPAAASPPPDPVQCSSGSGTADCTVSSAYGVFPDRSTCRAAAAVYPSTEEELVRAVANATASGTKMKVATRYSHSIPQLACPGDGDGEGLVISTRRLNRVVAVDAGRMEVTVESGISLRELIAEAGKAGMALPYAPYWWGLTVGGMLGTGAHGSSLWGKGSAVHEYVVGMRIVTPAPAADGYAKVRVLTAADPELDAAKVSLGVLGVISQVTLALQPLFKRSVTFMERDDDDLADQVTKFGYQHEFADIAWYPGIGRAVYRVDDRLPMNASGEGVLDFIGFRATPRLLIRTNRLAEELFERAGNGNGKCVTSRVTHAALSSAGYGLMRRSGGLFTGYPVVGPQHLMQASGGCITGPEDALLTACPWDPRVRGSSFFHQTTFSLPVSRAGAFVEEVRRLRDMNPKALCGVELYDGILIRYVKASTAHLGKPAAGGGQSDDMVDFDMTYYRSRDPNRARLFEDVLEEIEQMGVFKYGGLPHWGKNRNLAFVGAARKYPRIGEFLRIKDAYDPDGLFSSDWSDMMLGIGGRAPTRDAPGCALEGMCVCSQDAHCAPEQGYVCRPGKVYKDARVCTKV

SEQ ID NO: 161248 - protein, 340 aa, Oryza sativa
  unsure (1)..(340): unsure at all Xaa locations
  Clone ID: PAT_MRT4530_6044C.1.pep
MSRVSTSWGFVXSRVNKAEGRGARTRSTGVGPTRQPLGPRWTGCTRLTPAGAVGPTRQPHPRARAADGRAPHGSRGARPKAASPAQPTGGGTPAPRWSPPATTGAAERRPREGREGGSETAVHGSPRVDGDDGKGYRSRGRRRHSTGRRGRRRSGGRRAKRRGGRGRRGRGERRKRRRXHGECLYSVGRGRERPDEGESAAEDPAAIDXAGEVCGXGFQTNPREREREKWGERGRESRGVISPSLLRAGAAGCGGIRGGGGARARARRRVRREVGDDGWAPPVSEGGGRARPSAARVRGKAGWAAGGRXREREGAGPSRPKKGKXGGERLFRIFLFIKPF

SEQ ID NO: 161249 - protein, 162 aa, Oryza sativa
  unsure (1)..(162): unsure at all Xaa locations
  Clone ID: PAT_MRT4530_60450C.1.pep
SSCRIRXXAKPSDXAKNDAGGESEAAPEAKAKGDNIXAXPXXXTVPXAAVKXAXXDXQXXXDEKNKPXDAXETAPPAAATXXXKXLHFSXTXAGXXXHXXHYPXXFYXAPQPXDXXPHXAXQXKRXXXXPXXGXXVLXSXXPRXPGFPAPPAATAIPRVSSP

SEQ ID NO: 161250 - protein, 124 aa, Oryza sativa
  Clone ID: PAT_MRT4530_60451C.1.pep
NLTGLTHPPPPPPRSQNKVAPPEFILLKQQNFPTHTTHTGPSGPTDRGPTQPTRTQGNEEGAWGLGGVRLCREKKPRTAPPGLKLRVKQVHLPKVPDHRVQLQLDQVLLPKDPKGQAGSGQPPP

SEQ ID NO: 161251 - protein, 74 aa, Oryza sativa
  Clone ID: PAT_MRT4530_60452C.1.pep
PFEGGPQVRCLESSIGTFSSLLRESYAMYVWRLGVSLLHRYGSHRTRTLPLLCSSMGLKGGSKVAERCACAAAT

SEQ ID NO: 161252 - protein, 106 aa, Oryza sativa
  unsure (1)..(106): unsure at all Xaa locations
  Clone ID: PAT_MRT4530_60453C.1.pep
LRRYHEKRIRARILSIGDYVLRRVQSQAGRNKLSPKWEGPYTITQVLRLGAFKIADGDGREDFNQSVPSRXSLTQMTPSVETYPHVPLRSLDKASEEPKGTSAGDA

SEQ ID NO: 161253 - protein, 234 aa, Oryza sativa
  Clone ID: PAT_MRT4530_60454C.1.pep
MAGHDELKLLGHWSSAYVTRVKLALHLKGVSYEYVEEDLRNKSDLLLASNPVHKTVPVLIHNGNPIRESQIIVQYIDEVFSGAGDSILPADPYERAVARFWAAYIDDKLLAPWKKVFRAKTEEERAAWMKQMFVAVDVLEGGLKECSKGKGCFFGGDSVGYVDVVLGGAVSFVHANDMITGGKLFDAARTPLLAAWLERFGELDAAKAVLQDVDRAVEHTKVRYARNAATAAND

SEQ ID NO: 161254 - protein, 73 aa, Oryza sativa
  unsure (1)..(73): unsure at all Xaa locations
  Clone ID: PAT_MRT4530_60455C.1.pep
RDRQVHMMRLIAPNHCMLXSFIVLFAPKPSFVYHKIMERQPLILIIRNRFKYDLTYQEVISISHCSATSWMMC

SEQ ID NO: 161255 - protein, 573 aa, Oryza sativa
  Clone ID: PAT_MRT4530_60456C.1.pep
HTSLAIELASTIPEAGDEAFQIHRLKRSAYAAVLRAFYAQPDLLSGAKEGSLAKLRSEFTIFDTEHREYLMKAISGSQSLSVGLNKASICNIEVTKDSLDLVPMITDAQDTAFQIHCLERSAYASVLRAFFAQSELLSRSQAKLLTELRKKLRISDAELREVLMNVTSNEYIKSLRNCSLANNSGLKDPTFDARAMVPDKLVKDGQSFTSFTNCISLSQESQISPRSMLSVRSVDILRSSHRTKKGPCLYPHAIVPAKKYSGNEYTLSYLKSSPAEQLPVAVSSVQVKRSTDDPLDTKTLPCEVKTGCTLSPIQLKHIQANAGHVPLCIHQDMKASMKRKTEVPEVTGSKSLTVIVSTAGNIEHDFDIMKLDLTANLLSKVEQLFREKPNPDDLETAKAILKVRTLLTWITQYEQEKVLLDAVLKLSEVSYVEECFSTNCQPDEFNQHYEYESDDEMPQKTASTNDAETPPKPVSPSDKEAPPQPVPGRGGGATSKVFCWRPLTSDQAAFSGSFKMLPASSIVLSLHCSSGKWSLAVPISSMVKLYIHHGFVMAEWLTHARSSYAETGIGLNS

SEQ ID NO: 161256 - protein, 68 aa, Oryza sativa
  Clone ID: PAT_MRT4530_60457C.1.pep
LYSLAGVVLSIGIQPGHTHMFPVAFTAGFGLFHRVAFGSQDFPADFTQSSWDSRSTYVDPSGWRPLCS

SEQ ID NO: 161257 - protein, 123 aa, Oryza sativa
  Clone ID: PAT_MRT4530_60458C.1.pep
PWPWRCSSSSSCCRRPPRPSPWTSSRNPHLPRASPSPAQPPSAPPPSPWRPRAPASSSLTPSPSAPHSPPTSPSPCQAQAPSPSSSRPSPPPPASPSAPPPSSPPSPPPPPTAPASHGPSAPT

SEQ ID NO: 161258 - protein, 148 aa, Oryza sativa
  unsure (1)..(148): unsure at all Xaa locations
  Clone ID: PAT_MRT4530_60459C.1.pep
MGDRRRLLPLRARRAARPSTTTIGAAAIGNRFDFPHLFFTQNLVLPKIPKSSRXLKNRFERLFLTPLQFHRVSNSTAMQSFSTAFVIGIIGAFEDQGSGRLAVAEKALKEECSDSKTINIVSNFRRYIRESNLTAQFFGAMQHRVGLK

SEQ ID NO: 161259 - protein, 237 aa, Oryza sativa
  Clone ID: PAT_MRT4530_6045C.1.pep
MGSKSNTERARKALEAMKQLGFSKKEATPVLKNLLRLFGNNWEPIEDECYRALADAILDRHQETAADRGCSATRPTPDDDHHPLTLCGASRDVDTETDEPRTKKPRATNSDPQSPPSLTDDQDVPAAISPPSHGASPQFRPQTRASARLRQASPSSVTAAHKRPRQMMDEDFQDSAFLREPKPEPDIDMDAIQGTAATSDCPNAHLGLIDYPLNASSSRVALPLALLPPDQNVPQIS

SEQ ID NO: 161260 - protein, 67 aa, Oryza sativa
  unsure (1)..(67): unsure at all Xaa locations
  Clone ID: PAT_MRT4530_60460C.1.pep
NEGGRNTFYKSNTMHLFILYKQHXNLQMNYTLGIKASNMNLYQLKYVVLHKLSAQDMTTVHKCILEQ

SEQ ID NO: 161261 - protein, 678 aa, Oryza sativa
  Clone ID: PAT_MRT4530_60461C.1.pep
MMLAGYGILAVVLVLLPPSATPAGIADCDLGVGNTYVGNSTFEANLNHLAAELPGNVSTAHTGGFAVATVGADPDQVFALALCRGDVNATACRACVAAAFVDGKNACPGINGVTVYEDACVVRFSGQRFMDFLSPDQWQVTEMIWVPEQASESVNAPAVGWFNAAIAKILAALVDHAVATATGNNSTTKKYFATGEEDFDPNIYGFAQCVPDLTQEQCKECLNTFLFQAKQVYFGKSLSWVGMNSVWCRLMYSVRPFYGGRAMLQLSAPPPPAAEAPVLSLEPGAGKKKSAAGIAAVVASSVVVLLILSFFAVVLFRRRSKVTETDHQLRKITRAQCLIFDLPALQEATDNFSDNNKLGEGGYGIVYKGVLSDGQEVAVKKLLGTSEHGLDQLQNEVLLLAELQHKNLVKLQGFCLHQGETLLVYEYVKNGSLDNFLFDTSRGNTPNWEQLYNIIFGIAKGILYLHEDSSLRIIHRDLKSNNILLGEDMEPKIADFGLARLLEEGHTNTRTTRIVGTFGYMAPEYAIHGNVSTKIDVLSFGVLVLEIVTGRRNLNSDDHDRGNLLSDVWNCWTKGTVTQLIDQSLEEQFRRQALRCIHIGLLCVQSDPDDRPHMSSVIFMLSRENMNLQPPAQPAFFFDGDSNSCSQPFEQPVYNRPNAIYEEDISVNRMTVTDIYPR

SEQ ID NO: 161262 - protein, 78 aa, Oryza sativa
  Clone ID: PAT_MRT4530_60462C.1.pep
ECLVQFALPACSVSLTAPGTYTGSQCGHRLDSRTCEHPIRVGAPLASGTVRRGCIMFAASSGSSSNMAGIVGCKLWWG

SEQ ID NO: 161263 - protein, 145 aa, Oryza sativa
  Clone ID: PAT_MRT4530_60463C.1.pep
MATSSESVNQLKDDGTEEMDVDDYIGGGSGGGGEALIGMKTVEAPDDGSNCPICLDGGGGGGEKTTTEAWVETPCAHRFHSRCLESWARVKLGTCPMCRRELTAAAAAATTTAGEDVHVLVADPMVADPLQARWNLFVQRSTDGF

SEQ ID NO: 161264 - protein, 157 aa, Oryza sativa
  Clone ID: PAT_MRT4530_60465C.1.pep
MGGSLEYLAGLFSCGDHHHGHKNSKRRQLQTVELKVRMDCDGCELKVKNALSTLKGVESVKINRKQQKVTVSGYVEASKVLRKAQSTGKKSELWPYVPYSAASQPYVAAAAYDRRAPPGHVRNVEASSAAYVSGGGRTEERLTNLFNDEDPNACSLM

SEQ ID NO: 161265 - protein, 220 aa, Oryza sativa
  unsure (1)..(220): unsure at all Xaa locations
  Clone ID: PAT_MRT4530_60466C.1.pep
GAAAPRWCRARRNWVHASGARSRVSLPFSDYLQCRVRCIRPVFVLARSLIRWDFLTIGIRARFRAWTHDRALEVALMPRRRSSSLTKRTLGGSGSHASGSGGNDRGLVIHRVVKEAGGAANYPVLTKTNYNEWSLLMKIKLQARCLTAXWGTIDPGGVAVELHEDRMALDAICSAVPVEMISTLATKETTKAAWNCIKTMRVGKPSAQKLRSEYEALAFR

SEQ ID NO: 161266 - protein, 104 aa, Oryza sativa
  Clone ID: PAT_MRT4530_60467C.1.pep
MAWAASAGIAAEGWGRSLPRGFLQRDGSGGRGRRVASSPWAERAASIGRGRAEIGLVGIGQSLGTAGIADRGWLGRLGGADFGLALQMFDEMTSRGRGEEEREN

SEQ ID NO: 161267 - protein, 86 aa, Oryza sativa
  Clone ID: PAT_MRT4530_60468C.1.pep
MTLRSPSAAAAAAAAAVYRLLFQVLALPLRRASATRRHTTSMSLSKLITGGHRLCYYHQLTNQPFGDRGDGLGGEDGGGIVADDVL

SEQ ID NO: 161268 - protein, 43 aa, Oryza sativa
  Clone ID: PAT_MRT4530_60469C.1.pep
SASESSRFIESNIGVHHLYHHTYASNQKEISNYSSNHTTYMHS

SEQ ID NO: 161269 - protein, 153 aa, Oryza sativa
  unsure (1)..(153): unsure at all Xaa locations
  Clone ID: PAT_MRT4530_6046C.1.pep
QTVHDRLTADDPDDVGNDVTDSGGGSAERTARAAHARRRTAALRHKRRAPARRGRRGELTGDQNGGGRTTDDAGDEEEAAATFGSTAATVLRRSSAVAKRXTGTATTLRTRWWRRRPTTAAATAARRGWSDGDDGGTKRHGARAPELNVEEGL

SEQ ID NO: 161270 - protein, 71 aa, Oryza sativa
  Clone ID: PAT_MRT4530_60470C.1.pep
YAHVSSNALGTFNIVQAIAQQIQLQQFGDLNFDRNLAQAQAMLALYVPSRYGIYPRYYGAPSTITTLAGVL

SEQ ID NO: 161271 - protein, 156 aa, Oryza sativa
  Clone ID: PAT_MRT4530_60471C.1.pep
MTRSDLSFRHDSRKTKPSVRPSPPKTSTRSPIPSMQCLRPSSGSQVRWAVCQVPRASARATPRTTVYGYVPPRASGVEIEWHTYARDKPRADARGVLRVERYLLLRSVQRYACVPHSHAHGGTAHARRLQIKLTARVHCTGAGAACTLATCLTSRW

SEQ ID NO: 161272 - protein, 59 aa, Oryza sativa
  unsure (1)..(59): unsure at all Xaa locations
  Clone ID: PAT_MRT4530_60472C.1.pep
YHLCIHQYMHVNMXLMAIVDVGPNAYLFXIVXVXQHCSQNLCPAGYLPCHVLVIASCLH

SEQ ID NO: 161273 - protein, 661 aa, Oryza sativa
  Clone ID: PAT_MRT4530_60473C.1.pep
MAKMMLYLLLLPLLLLTCIFASYVHSMESSTSKCSNIPIPYPFGILGGNPAPAQGFEITCASSGPMVRINNIMFGILNISLLDGFVSILASATSQQCKRNSSFSLEGTNFTFSDTRNKFTALGCDMVAMLLNGSSGYSGGCASFCSTKSNIIDGMCSGVACCQAPVPKGLKKLELEFTNITGQLSRPKEVNNTPTCGEAFIVEQNSYVFSSVDLSNTNRNNPQYRPVVLEWSIDGGYCEEANRFMSYACKENSYCYNSSNGIGYRCNCSLGFQGNPYLQGPDGCQVTGLALLLLLLVLIFWTHWLVKKRKLAKIRQRYFMQNGGMLLKQKMFSQGAPLRIFTSSELEKATNSFSDDNIIGRGGFGIVYKGILSNQMVVAIKKAQRVDQNQMEQFINELVILSQVNHKNVVQLLGCCLETELPLLVYEFITNGALFSHLQNTSVLISWEDRLRIAVETASALAYLHLATKEPIIHRDVKSSNILLDENFTAKVSDFGASRPIPHNQTHVTTLVQGTLGYMDPEYFQTSQLTEKSDVYSFGVVLIELLTRQKPISDGRTDDVRNLACHFSMLFYQNQLLEIVDSQVAEEAGTKHVKTVAQLALRCLRSRGEERPRMIEVAIELEALRRLMKQHLVLQTEEDPLLCESGQHADVNIEASSEFEP

SEQ ID NO: 161274 - protein, 118 aa, Oryza sativa
  Clone ID: PAT_MRT4530_60474C.1.pep
MVSIIFTAYGTVSFSTYKIVDDVPKQQHHLATSIARKEAGIEKRKDEEEPMGGPSSGDQKAMTCVPSLLDLIPVYTSTNSNGGDQDGNFLDARRATLHDQLPSLPPCSLSNETKTPIG

SEQ ID NO: 161275 - protein, 372 aa, Oryza sativa
  Clone ID: PAT_MRT4530_60475C.1.pep
MVSSMVLAQLLLLCLLSLSSSSSSQISPLKCPNSSVDIPFPFKIATNSSLTSTPGFAISCRQTGPMILLGGNYSVLSISLLEGYVRVTGQTVYSSQCHNNSQGIIDLTATNYMFSHTQNKFTAVGCDAMAMIRNSSDVVGNTNSTVMSRYSGGCVSFCASNGSIISGECSGVGCCQSSVPKGLNKLDLEFTSIRDQLMPPTSAVGSGSTRCSKAFIAEQDSYVFSRHDLYKDLGNLPMVLDWYIQGGNCKEASRSRQTYMCKENSYCYEVEDGAGYRCNCSGGYTGNPYIGCVGGSLGLMAVLIVLGFWTYWIVKKRRLAKQKQRYFLQNGGLLLQQQIFTHQAPARIFTTSELEDATNNFSDDRIVGRGGY

SEQ ID NO: 161276 - protein, 1069 aa, Oryza sativa
  Clone ID: PAT_MRT4530_60476C.1.pep
IFCVCAVTGLALLLLLLVLIFWTHWLVKKRKLAKIRQRYFMQNGGMLLKQKMFSQGAPLRIFTSSELEKATNSFSDDNIIGRGGFGIVYKGILSNQMVVAIKKAQRVDQNQMEQFINELVILSQVNHKNVVQLLGCCLETELPLLVYEFITNGALFSHLQNTSVLISWEDRLRIAVETASALAYLHLATKEPIIHRDVKSSNILLDENFTAKVSDFGASRPIPHNQTHVTTLVQGTLGYMDPEYFQTSQLTEKSDVYSFGVVLIELLTRQKPISDGRTDDVRNLACHFSMLFYQNQLLEIVDSQVAEEAGTKHVKTVAQLALRCLRSRGEERPRMIEVAIELEALRRLMKQHLVLQTEEDPLLCESGQHADVNIEASSELSLSSSSSSQISPLKCPNSSVDIPFPFKIATNSSLTSTPGFAISCRQTGPMILLGGNYSVLSISLLEGYVRVTGQTVYSSQCHNNSQGIIDLTATNYMFSHTQNKFTAVGCDAMAMIRNSSDVVGGCVSFCASNGSIISGECSGVGCCQSSVPKGLNKLDLEFTSIRDQLMPPTSAVGSGSTRCSKAFIAEQDSYVFSRHDLYKDLGNLPMVLDWYIQGGNCKEASRSRQTYMCKENSYCYEVEDGAGYRCNCSGGYTGNPYIGCVDIDECNDGNNYPCTHKCINIAGGYNCTCPMGMTGDGKKQGIGCKRDTTMLSTVGKSLAIFNIILSFSKFYQPISGGSLGLMAVLIVLGFWTYWIVKKRRLAKQKQRYFLQNGGLLLQQQIFTHQAPARIFTTSELEDATNNFSDDRIVGRGGYGTVYKGILSDQTIVAIKKSKLVDQSQMEQFINELIVLSQIDHKNVVKILGCCLETEVPLLVYEFISNGALFHQLHNTNLVPISWEHRLRIATETASALANLHLARKVPIIHRDVKSANILIDENYTAKVSDFGASRLVPSNQTHVTTLVQGTLGYLDPEYFYTSQLTDKSDVYSFGVVLVELLTRQKPISYHRQEEGINLASHFTALAQQNRLQEIVDCVVVKEAGMRHVNVVSHLILKCLKLKGEERPRMVEVAIELEALRRQSIERLEI

SEQ ID NO: 161277 - protein, 91 aa, Oryza sativa
  Clone ID: PAT_MRT4530_60477C.1.pep
REQDVVYTDVWASMGQKEEAEYRKKVFQGFTVDEAMMEMAGPNAFLMHCLPAERGIEVTDGAIEAPNSIVFPQAENRMHAQNAIMLHVLGA

SEQ ID NO: 161278 - protein, 100 aa, Oryza sativa
  unsure (1)..(100): unsure at all Xaa locations
  Clone ID: PAT_MRT4530_60478C.1.pep
MSSVHHVRGIFFKICFFFLSFFLLLLPHKMFEILLGANFLGKREREREXGAFRGEKKNLSVFRLGISQKGLFLFPNWGFKKRQRKCWPHMDPDTNTSRFL

SEQ ID NO: 161279 - protein, 190 aa, Oryza sativa
  unsure (1)..(190): unsure at all Xaa locations
  Clone ID: PAT_MRT4530_60479C.1.pep
VTKLKNEFLXDTFTEKYVRVAVFGIEHNKAPRPDGFSVXFYKNFWNIIKEVLMNILNEFYAEVLPLSSLNFTVITPLSKVQDAYIIHQXYRPIFLLNVGLEIFTKVATNTVNSLTGHVVSSTXTAVMRGCNIQGGIVNLRETVHELHHKKLNFVILKVEQNATGKAIKTSLEQATPHLIHPSTKMEHATA

SEQ ID NO: 161280 - protein, 815 aa, Oryza sativa
  Clone ID: PAT_MRT4530_6047C.1.pep
MLNLVIICLAPGLEWYIPGLEIELCSRDGCSEWLGLYNRMPRYKPEYLFGVEGFVQELRTMSFVIGFGTAPFYAQIPHDRHEEKCRVKVTLNSNSEDIPSVMFEAGGRNYIHACQEVARIAIGELRDRYSDQLADTEYRYHPRQPQGSDRGSYLETEGIENDATTRHLVEMLWAMDESRAETVLAAQDREDRNRGKICKLEDKVDRLEKELAALKGEAPPQKARIRLTARKRALFVPRYQLAPKMVNTRSNGNGPNNPNNNNNGENPTLAQVLAQQTQLMNMMMQQFQNQQNQGNNHAPPQNKLAEFLRVRPPVFSSTTNPVEASDWLHAIEKKLDLLQCTDQEKVSFASHQLHGPASEWWDHFRLNRITAEPITWLEFTAAFRKTHIPSGVVSLEKKEFSARRSFLGGLNDELSYPLMVGDYPDFQKLVDKAIRQEDKYNCMEQRKRRIAHFKAQQGSNQKPRLTLGPQPMSQGGSSSVVRPQRQFFNNNAGNNIRNQAPRPVAAPVQQQPAKREQGSKPVVCFNCGDPGHYADKCPKPRRVKVVPAQSNSAVPASKARVNHVAAAEAQDAPDVILGTFLVNSVPATVLFDSGATHSFLSMSFAGNHGMEVEDLRRPLMVSTPSNQALSLQRSPSVRIEIKGVPFLANLILLESKDLDVILGMDWLARHKDDLPGMPPKRDIEFRIDLVPGTTPIHKRPYRMAANELAEVKRQVDDLLQKGYIRPSSSPWGAPVIFVEKKDHTQRMCVDYRALNDVTIKNKYPLPRIDDLFDQLKGATVFSKIDLRSGYHQLRIKEEDIPKTAFTTRYGLFEGL

SEQ ID NO: 161281 - protein, 84 aa, Oryza sativa
  Clone ID: PAT_MRT4530_60480C.1.pep
MGMYMGCIRSFRWLIEIVGPMGTNTVLKNITIPLTDIGNKSNNSLCAVYAVESSYSLCQVAQLNNFNKQTVSAFNMVSATALQT

SEQ ID NO: 161282 - protein, 58 aa, Oryza sativa
  Clone ID: PAT_MRT4530_60481C.1.pep
PARVLVFLNDITRNIIPSNGPEILLVYYGYRVHPQAHGYTIVAFHPRIFQGYRIYFIP

SEQ ID NO: 161283 - protein, 51 aa, Oryza sativa
  unsure (1)..(51): unsure at all Xaa locations
  Clone ID: PAT_MRT4530_60482C.1.pep
GGVFNEGXGYNKILFSYKGTSFTTNIIKGLNQKIPSSQKELYLEGLPLNFF

SEQ ID NO: 161284 - protein, 357 aa, Oryza sativa
  Clone ID: PAT_MRT4530_60483C.1.pep
MRLHGEVSFDEDEEEVVMVPAAALSSSPLNGGAVPVTRLVVGYALTKKKVKSFLQPNLLLLASPEDFCENRKKGINLVAIDDTRPLAEQGPFDVILHKITSKEWQQVLEDYHEEHPEVTVLDPPNAINHLNNRQSMLAEVSDLNLSSFYGEVCTPRQLVIMRDPSSIPTAVAMAGLTLPLVAKPLVVDGTSKSHELSLAYDEASLSMLDPPLVLQEFVNHGGILFKVYIIGETIQVVRRFSLPDVNTYDLLNNVGVYRFPRVSCAAASADHADLDPHISELPPRPLLEKLGKELRGRLGLRLFNIDMIRELGTKDRYYIIDINYFPGFGKMPGYEHIFTDFLLNLAQSKYKKCLSGG

SEQ ID NO: 161285 - protein, 251 aa, Oryza sativa
  unsure (1)..(251): unsure at all Xaa locations
  Clone ID: PAT_MRT4530_60484C.1.pep
MISTGGWRIRLLPSSIIVISSLTSTIVVPISPFSTVIIMMTSTILSVLVLVRVASLIRNVVSSRRRMALVSIVVNSLFPFGVGSVMYIISLMRQVWGWWFGKIPLEYSRVKCYNGISVRLRMNSVTIIYQKYFCAIAGNYISSNVVKKYQQAFAVRLRLFSFSLLGKAKQWFYAXTNALHGRILSFQQTRDESIPEAWERLQEYVAACPHHGMDDWMILQNFYNGLTPMSRDHLDAVAGGAFSPRSPNSQI

SEQ ID NO: 161286 - protein, 148 aa, Oryza sativa
  Clone ID: PAT_MRT4530_60485C.1.pep
MATDAATTPLQAIPFGRPAAEAWYEARSMSECLAGEMGQVLALVYPSLRIDKTTSRRKPGSEPASPGRDLPRHRPPPRIQAAMRQRCERDPAEASEGQAGASEHLVQQPALSGSRAHGEGEPQGCEELKRDVLLICLSHQFPVASEKR

SEQ ID NO: 161287 - protein, 85 aa, Oryza sativa
  unsure (1)..(85): unsure at all Xaa locations
  Clone ID: PAT_MRT4530_60486C.1.pep
IQXATSXFLPSSPLLXCSXVXTXPXSAAASPAADPPLLAAAQVADRLCFIAPSGYVXLLRXSLAEESGDGGGVXEGFLSGGSRGE

SEQ ID NO: 161288 - protein, 948 aa, Oryza sativa
  Clone ID: PAT_MRT4530_60487C.1.pep
MAATSAANERSIAIPGPGDDQPAAQPAALAGGGDEDEGAWKTAQKWLNRFVRVVAFVERTGNAVGTLAFTWATVVVLGGYSTDLREDFWYAMAIVFLEAYSSWSFMGESDLYYEFVLVPNLVVYNAANRVIGGLRVFSRQNKSDDKFLFKTTGGIRVLKLSSTLELLYFLNAVIVMLCLSVILTVVLTHVFPKKRFPIIWLLKRANRPGSGRRVVAIVLRLTPLAAILALGCSLVLLYGAPPVTVLASVLLLFMTFVLCQQLIAVREKIKRPAPLQRPTAAGEASPPPPSFAQRAWLVLANTMLVVCPPLMVAFLTATFGFLGLYVVLTAVALGNFQIPAAVARVAISSARLAGRVDRVSTGNVNLVPSLKIFYGLVLAQGALYIVACLTDPFSVLLRRWLARRCKLGTRSVDLYYEHAYDAWMEDGLLAMEDANIVSFAVDSLSAPAEPSRSRERVLAGVTVLHCFLRQRRGSKARLASSKIITSTNAIATLIGMLGWGAEEDRQIRLFAAKVIGEVAGELRIARFPGTVQLISSLLDAPSCSKKEQDSGGSTQTKAAAGNVNTDSTCCCCFPKPSCPRRIKNLWSAPDEEPLDDDEDALPIMGMLILEKLASDPENCAEIWRATNLVSKVIGFIACSSNEAQRNRRPITASSLKLVAKLAGAKGEIGVTLRRKISDHPFLVSSLAGILEDDGAGTEEWSPAMDILAKLCVNADTRQEVGEIAAIITRLVQEFFPSQRDQQASSTQDDRQLRLAAGEALATLATESPGNCSAILKEFKGKYCDLVNDLKNMISARDEDGCRCAASLLQNLCAHSGDELRHLGFSDHLASALKVILEKILNTKGKQLEVLIGLTAQIHNAMPACFKDALESLANNTAEALVQKMVDTLNSSKKPSPECPRMRRAIVELAISIVETRTLPYGYAADFRKKGMVEALSKECACSLSALSP

SEQ ID NO: 161289 - protein, 95 aa, Oryza sativa
  unsure (1)..(95): unsure at all Xaa locations
  Clone ID: PAT_MRT4530_60488C.1.pep
MAKNKERAVNVSMNPRHSLHVNRANDNNXRTAAPQAGRGSLSAATVRRLKMYKMRPLRDLGRKILNHDLQSKELPNTRIESNLPWFGNTPVLHHK

SEQ ID NO: 161290 - protein, 633 aa, Oryza sativa
  Clone ID: PAT_MRT4530_60489C.1.pep
MSTSPSPSAASSAEYAEHLSNLIAVPSLSDENHYFLGPVGNLDPTEFIIGETNRIPFRLANLDLGHWKNTFKSWPSLEKTSPEKSWITWYKRMSSNKKVHWDEIGIGQALTLTIANSAKDEPLMAAATYFWSNTINAFLFNQGPMTPTLIDITMITGLDVTSLPNPTWLNLMVMKVVNRPSVIEAEFLRLEPIIEDDGEERTHRKCTSYRGYASTLADTGAKLSAELLKDWFCSFYEGFQKDAPIWFPYEDSALLELPSDFRFEDINHERYEKSREVFSAAISPCILPVGIHQGRNIQVSYEFYHPMSSARQLGMGQLPIGLFFADKIQCRGEISSTLMMDRLLNLEGPPLGSIENIELARFRNLFPDVVPQTTESSPPRKSNSGIDIEYAPGLIPNGGGSSPPVINCHAPKTSSMLQGLIRELADAGKKRKTRASAIDPLAPAPNKKAKSNKTKPTDDLSAVDPSIEQALDEEDIGEDVDQAEAGISEKENYYEKEIGSNNSQTGSTIQALIPEEHADVLTPAAYLEQYQFKLEKAKLRLAERRERRDIEATIQANRQLVHEEKSKLDQLSEGPIKSNIDQLEARKIELLAQLQECNADMTKSLKVISGTDAQDTQAIEEVEHIRQRAISAI

SEQ ID NO: 161291 - protein, 1350 aa, Oryza sativa
  unsure (1)..(1350): unsure at all Xaa locations
  Clone ID: PAT_MRT4530_6048C.1.pep
MVNTRSNGNGPNNPNNIINGEIPTLVQVLAQQSQLMNMMMRQFQNQQNQGNNHAPPQNKLADFLRVRPRVFSSATNPVEASDWLHPIEKKLYLFQCTDQEKVSFASHQLHGHASEWWDHFRLNRTTAEPITWLEFTAAFQKSHIPSGVASLKKKKFRSLTQGSRSVTEYLHEFNRLARYAPEDVRNDEERQEKFLGGLNDELSYPLMVGDYPDFQKLVDKAIRQEDKYNRMEQKKRRIAQFKTQQGNNQKPRLTLGPQSMPQGGSSSVVRPQRQFFNNNAGNNIRNQAPRPVAAPAQQQPCQEGASQQAREAQDAPDVVLGTFLVNXVTATVLFDSGAXTHSFLSMSFAGNHGMEVEDLRRPLMVSTPSNQALSLQRSPSVRIEIKGVPFLANLILLESKDLDVILGMDWLARHKGVIDCANKKVTLTSYDGRVVTVHALSSESLRSRLNQITLEEIPIVREYPDVFPDDLPGMPPKRDIEFRIDLVPGTTPIHKRPYRMAANELAEVKKASRNDFWGPFFKPRRIHRPSHTMGAPVIFVEKKDHTQRMCVDYRALNDVTIKNKYPLPRIDDLFDQLKGATVFSKIDLRSGYYQLRIKEEDIPKTAFTTRYGLFECTVMSFGLTNAPAFFMNLMNKVFMEYLDKFVVVFIDDILIYSRTKEEHEEHLRLALEKLREHQLYAKFSKCEFWLSEVKFLGHVISAGGVAVDPSNVESVTNWKQPKTVSEIRSFLGLAGYYRRFIENFSKIAKPMTRLLQKDVKYKWSEECEQSFQELKSRLISAPILILPDPKKGFQVYCDASKLGLGCVLMQDGKVVAYASRQLRPHEKNYPTHDIELAAVVHALKIWRHYLFGTHTEVYTDHKSLKYIFTQPDLNMRQRRWLELIKDYDMGIHYHPGKANVVADALSRKGYCNVTDGRQLPLELCKEFERLNLGIVNRGFVAALEAKPTLIDQAREAQINDPDIQEIKKNMRRGKAIGFLEDEHGTVWLGERICVPDNKDLKDAILKEAHDTLYSIHPGSTKMYQDLKERFWWASMKREIAEYVAIPEWKWEEIGMDFITGLPRTSSGHDSIWVIVDRLTKVAHFIPTDGQTERVNQILEDMLRACALDFGGSWDKNLPYAEFSYNNSYQASLQMAPYEALYGRKCRTPLLWDQTGERQVFGTDILREAEEKVKIIQERLRVAQSRHKSYADNRRRDLSFEEGDYVYLRVTPLRGVHRFQTKGKLAPRFVGPYKIVSRRGEVAYQLELPQSLAGVHNVFHVSQLKKCLRVPTEEANIDQIEVQEDLTYVEKPIRILETNERRTRNRVIRFCKVQWSNHSEEESTWEREDELKSAHPLLFASSSESRGRDSV

SEQ ID NO: 161292 - protein, 100 aa, Oryza sativa
  unsure (1)..(100): unsure at all Xaa locations
  Clone ID: PAT_MRT4530_60490C.1.pep
MEIGIFIQVRAPELSVDNRVAFLLEFVPGEIKDSAFVSPDSIWRHRRGLAVLIPEIDIRHLVLAYVGLYVDLVSXYIVLGCFRIGHVKLAGRQQTKLQQR

SEQ ID NO: 161293 - protein, 28 aa, Oryza sativa
  Clone ID: PAT_MRT4530_60491C.1.pep
ARGPPPFFFFFFFFFFFFFFFVFFFFFF

SEQ ID NO: 161294 - protein, 126 aa, Oryza sativa
  unsure (1)..(126): unsure at all Xaa locations
  Clone ID: PAT_MRT4530_60492C.1.pep
RLPPPPNCTSGTLTPASPIPSHPLPLPSPPSASSAPPTISASTTGSTTPFLTIPSRPPRLASPPISPRPPPRNHHHQSPPSXSPPDPSPPSRRRVVGNPSTSSGLPPSRDPGTRPDQRQPPGRSST

SEQ ID NO: 161295 - protein, 485 aa, Oryza sativa
  Clone ID: PAT_MRT4530_60493C.1.pep
MASSSSLLVRGRAFALVVAVALVAAPRRINGGAAGPAARTNDPNWHVFSVSSLLPSSACTASKAASNSSALGVVHRHGPCSPVQARPRGGGGAVTHAEILERDQARVDSIHRKVAGAGGAPSVVDPARASEQGVSLPAQRGISLGTGNYVVSVGLGTPAKQYAVIFDTGSDLSWVQCKPCADCYEQQDPLFDPSLSSTYAAVACGAPECQELDASGCSSDSRCRYEVQYGDQSQTDGNLVRDTLTLSASDTLPGFVFGCGDQNAGLFGQVDGLFGLGREKVSLPSQGAPSYGPGFTYCLPSSSSGRGYLSLGGAPPANAQFTALADGATPSFYYIDLVGIKVGGRAIRIPATAFAAAGGTVIDSGTVITRLPPRAYAPLRAAFARSMAQYKKAPALSILDTCYDFTGHRTAQIPTVELAFAGGATVSLDFTGVLYVSKVSQACLAFAPNADDSSIAILGNTQQKTFAVAYDVANQRIGFGAKGCS

SEQ ID NO: 161296 - protein, 535 aa, Oryza sativa
  Clone ID: PAT_MRT4530_60494C.1.pep
MVPPALGAAGAAEGFPGRWKAIAAKLEGLPACLSDLSSHPCFAKNALCRELLQSVAATLAEAAELAARCREPPAAGKLQMQSAIDALAGKLDLNLRDCALLVKTGVLSDAFTPPPPTDEATSTATAAQADVRELLARLQIGHTEAKSLAVDGLLEALNKDEKSVLSVLGRANVAALVQLLTAPATKVREKAATVICQLAESGGCEGLLVSEGALPPLIRLAESGSLLGREKAVITLQRLSMSSDTARAIAGHGGARPLIEMCQTGDSISQSAAAGALKNLSAVPEVRQALADEGIVRVMVGLLDCGTVLGSKEHAADCLQNLTSSSDSFRRAVVSDGGLRSLLVYLDGPLPQESAVSALRNLVSAVSPDSLVSLGVLPRLAHVLRVGSTGAQQAAAAAICRISTTTDMKRVVGEHGCVPLLVRMLDAKSNGAREVAAQAMASLVGYPPNAREVRRDGKSVPCLVQLLDPSPANTAKKYAIACLLSLAAAKRCKKLMISHGAIGYLKKLSDMDVAGAKKLLERLERGKLRSLFSRD

SEQ ID NO: 161297 - protein, 127 aa, Oryza sativa
  Clone ID: PAT_MRT4530_60495C.1.pep
ARRWRRPPRPVLPMTFTSSISVTCYSLDTHGHEDGASLELRRGRSEGDMRDHSEATSKYRSTIPRRSARAPTIHASVSTGIFLLRKISYVILAIHLDHANIVTYLFNCDCTCYTIVSSTSERWYCGH

SEQ ID NO: 161298 - protein, 208 aa, Oryza sativa
  Clone ID: PAT_MRT4530_60496C.1.pep
MGLTTGIDDFAFPPGQAYHFGSLDFSTDSCGKISLFDSDSNQSRGDRISVSFGLLNSAEIYSNALSSESAPNHSDESSAISSSELDDLAGVFTSRAPSPRRSRSNLVSTLVRSGSREVGVILQRLGSVSTEELEGYLSSPNVDSRHPTEITDYNDSNYDDDFNNFNNLDEDIGDNYEDNYTPLFFGVFMADNETEEQRLDREANEESA

SEQ ID NO: 161299 - protein, 187 aa, Oryza sativa
  Clone ID: PAT_MRT4530_60497C.1.pep
YDDSWAALQWAVSAHADDWITEHGDTARVFVAGDSAGGNIVHDVLLRASSNKGPRIEGAIMLHPFFGGSTAIDGESDEAVYIASKVWPFACPGAVNGVDDPRMNPTAPGAPALYKLGCERLLVCTAQEDWLVARGRAYYGAVAASAWLGSAAWHETEGEGHVFFLRDPGCDKAKQLMDRVVAFIASA

SEQ ID NO: 161300 - protein, 1487 aa, Oryza sativa
  Clone ID: PAT_MRT4530_60498C.1.pep
MAAAAARLPLQSSSGHNAAAGGGGGKTIEEMYQKKTQLEHILLRPDTYIGSVEKHTAQLWVYEDGAMVSRSVTYVPGLYKIFDEILVNAADNKQRDPSMDSLRVEIDADEGRISVYNNGDGIPVEIHQEEGVYVPEMIFGHLLTSSNYDDNVKKTTGGRNGYGAKLTNIFSTEFVIETADGRRQKKYKQVFSENMGKKSEPQITKCKQGENWTRVTFKPDLAKFNMTHLENDVVALMRKRVVDMAGTLGKTVKVELDHQKVPVHSFSDYVKLYIKSASKDRDDVNELPSISQKVNDRWEVCVSLSEGQFQQVSFVNRIATIKGGTHVDYVTNQIATHVMNIVNKRNKNAHMKAHNVKSHLWVFVNALIDNPAFDSQTKETLTTRQASFGSKCELSDDFLKKVGSSAIVLNLLSWAEFKLSKELQKTDGSKRSRLTGIPKLEDANGAGGKDSNNCTLILTEGDSAKALAMAGISVVGRDYYGVFPLRGKLLNVREASHKQIMENAEIQNIKQILGLQHGKQYDSTKGLRYGHLMIMTDQATNKRDKKIVLPFYSMPEYEQWKESLGGNASGWSIKYYKGLGTSTSSEGRQYFQDIAKHKKDFVWKNDQDDNDIELAFSKKRITDRKEWLTNFQSGTHLDTEGKYIKYSDFINKELIQFSMADLLRSIPSMVDGLKPGQRKILFCSFKRNLVKEIKVAQFSGYVSEHSAYHHGEQSLASTITGMAQDFVGSNNINLLQPNGQFGTRDQGGKDAASARYIFTLLSPITRSIFPKDDDILLNYLDEDGQSIEPTWYVPILPMVLVNGSEGIGTGWSTFIPNYNPRDIVANLRRLLNDEPVEPMDPWYRGFKGSIQKTGTKAGGVSYTVTGIIEVVDDTTLRITELPIRRWSQDYKEFLISIGGTDKSKDKDKDKGKGKGKVKEKEKKEKDIEPFIEAFDTYSDDKNVEFLITLSKENMAIALQEGLEKKFKLTTTIGTTNMHLFDSNGKIRKYDTPEDILKEFFGLRLEFYEKRKRVLLENIELELKKLSNKVRFILAVVEGDIIVNNRKRAELFVELKQKGFDPFPRKKQRAGPSAVGAIEEDEENEESPEAANVGSSDYEYLLSMAIGTLTLERVQQLIAEKGRMENEVAELKRTRPKSLWMRDLDAFEKELDALDEKDSMDAEERRATRNAGGGAAPNKAAPKRRPRKTATNTQAAESSDGNAAAPAVPKPAAPRKKPAGKASLADSEDEDYIAAIPKPAAQKKQPAKKASTQLSDDEDDEVLALKDRLAAYNLDDHSEDTAMETETTEEQAKGKKGRKEPSKRGAAKKAISSLAVISDDEEDETVPIDEDDEDDFAMEEVPVKKGRGKKPAAEKPKAATRKRAPAQGKSMRQKVMEEMFKPTEDSSTSAPSPEKKVRKMRASPFHKKSGSVLQRASTASTSTEETESSSPSGSSAEPVAARPKRQTRGNKKSYQEVQELSDDDTEDEVQDISDDSDFAGSDFGEDDD

SEQ ID NO: 161301 - protein, 143 aa, Oryza sativa
  Clone ID: PAT_MRT4530_60499C.1.pep
MSSTNSVQCFGKKKTATAVAHCKAGKGLIKVNGRPLQLVQPEILRFKVYEPLLVVGLDKFANVDVRVRVSGGGQVSQVYAIRQAIAKSLIAYYQKFVDEHSKNLLKQALVQFDRTLLVADNRRCEPKKFGGPGARARFQKSYR

SEQ ID NO: 161302 - protein, 34 aa, Oryza sativa
  unsure (1)..(34): unsure at all Xaa locations
  Clone ID: PAT_MRT4530_6049C.1.pep
AMLINIQXLDMAIQICSSSCGTLRYMRFNHSIRP

SEQ ID NO: 161303 - protein, 139 aa, Oryza sativa
  unsure (1)..(139): unsure at all Xaa locations
  Clone ID: PAT_MRT4530_604C.1.pep
MGVEVIPISPGDGSTYPKKNQTVVVHYTGTLDDGSVFDSSRNRGKPFKFCIGKGEVIRGWDEGVARMSVGERAKLVCSSDYAYGSRGHPGVISPNATXLTFDVELLKLEWINKLRLFFKQTEKYFFSKQIINEHSCTQF

SEQ ID NO: 161304 - protein, 67 aa, Oryza sativa
  Clone ID: PAT_MRT4530_60500C.1.pep
LWCFIVVAATRGIDHTTNNRQRIKVHLAILIWEDGQHWIKFYPQPAHLHLGPTRYNNNHKPIRAQVL

SEQ ID NO: 161305 - protein, 52 aa, Oryza sativa
  Clone ID: PAT_MRT4530_60501C.1.pep
MHEDREGPEEDRYPMRRRIAVVKVGSHSTVALDSTIAVEAFSAVWIDSATAD

SEQ ID NO: 161306 - protein, 97 aa, Oryza sativa
  Clone ID: PAT_MRT4530_60502C.1.pep
RTGYYTLLAEMLPHRHSEYQHLKRNGASITAHQPCMKLPDTLGGADSVRMPTSIDNTARLGIRHSLRSGTTPRAFRSMRPVASTSWQRAPEAKSVIT

SEQ ID NO: 161307 - protein, 308 aa, Oryza sativa
  unsure (1)..(308): unsure at all Xaa locations
  Clone ID: PAT_MRT4530_60503C.1.pep
MASAADEGNAAAPRAAVSHVIFDMDGLLLGLSLSSDDSVSYAHSMVSFFAFLVAPIWMELDTEGFYTEVQEKILARYGKVFDWSLKAKMMGKKATESARIFVDECGLDGLLTPEQFLEERESMLQELFPSCAVLPGVLRLIHHLHANGVPMAVATGSHKRHFALKTQNHKEMFTLMHHVVMGDDPDVKTGKPSPDIFLAAMRRFEGNIEPSNCLVFEDAPSGVAAAKNAGMNLVTVPDTMVDILYHNGGDLFQDAPLLVLAAAKKCWNVSXMVPDSRLDVSYHKGADQVLSSLLDFKPGEWGLPPFTD

SEQ ID NO: 161308 - protein, 95 aa, Oryza sativa
  Clone ID: PAT_MRT4530_60504C.1.pep
MAWLLLVGADTEGFYTEVQEKILARYGKVFDWSLKAKMMGKKATESARIFVDQCGLDGHLTPEQFLEERESMLQELFPFAPSCLSVTFDHHFMQM

SEQ ID NO: 161309 - protein, 128 aa, Oryza sativa
  unsure (1)..(128): unsure at all Xaa locations
  Clone ID: PAT_MRT4530_60505C.1.pep
MVLFGXPERLAPSSNMTAPAIMAPRQCHHGTRAVVAMRTWQKRGASHLDAAPHTTAPAWMARLSSVGRAFKPCGPTTFLLSTPIFAXSRSLSRCLLFFSLSPPHLSTSNPVNLNSFFAGFFAMLEDGA

SEQ ID NO: 161310 - protein, 42 aa, Oryza sativa
  Clone ID: PAT_MRT4530_60506C.1.pep
ITYIQNHALHIAPQELFWRYNMYGLNFCHLAHLHKKLTHQKN

SEQ ID NO: 161311 - protein, 541 aa, Oryza sativa
  Clone ID: PAT_MRT4530_60507C.1.pep
PEQPRLQIRKGYSRGATGAVVARGSSSSTRPANGAVAINAAAPAVGSAPAEVARFHSQPPQQDRQSRWAGCFSALSCFGSQKGGKRIVPAARIPDGNASTSRGNAHQSGSNSNQNVALNLSLLAPPSSPASFSNSAIPSTAQSPNRFLSISANSPGGPTSNMFAVGPYANEPQLVSPPVFSTYTTEPSTAPLTPPPELTHATTPSSPDVPYARFLFSAMDLKTAGKDHNMPYLSTAYSGGSGLQASYPLYPESPSSSLISPASATPRTGLSSPIPEQEVPTAHWKTSRSACDTPYSRASPIPEQEVPTAQWKTSRSACDTPYSRNSPSNIFGLDSAASRNYMLDNNFFRPAASAQFYLDQAQQSFPYNNGGRISVSRDKQDAEEVEAYRASFGFSADEIVTTQAYVEIPDALDEGFSISPFGNNAPATEVDKPLFNVKVTTSPKKSADQLSNDSPHNVVHLVIFKGTKGGDLSEDEGVVKDCHPFRKAMDEISLKPIEVRKKVQPGQSSSSDAEIEYRRARSLREANGVLSWRSTLARQLQ

SEQ ID NO: 161312 - protein, 509 aa, Oryza sativa
  Clone ID: PAT_MRT4530_60508C.1.pep
MAATPGSSRPANVAAAAATEARFHSHPPQQDRRSGWAGCLSGLSCFGSQKGGKRIVPAARVPDGNASTSRGNAHQSGANSNQSAALNLSLLAPPSSPVSFSNSAIPSTAQSPNCFLSISANSPGGPTSNMFAVGPYANEPQLVSPPVFSTYTTEPSTAPLTPPPELAHATTPSSPDVPYARFLLSSMDLKTAGKDHNMPYLSTAYSGGSGLQASYPLYPESPSSSLISPASATPRTGLSSPIPEQEVPTAHWKTSRSACDTPYSRASPIPEQEVCTAHWKTSRSACDTPYSRNSPSNIFGLDSAASRNYMLDNNFFRPAASAQFYLDQAQQSFPYNNGGRISVSKDKQDVEEVEAYRASFGFSADEIVTTQTYVEIPDALDEGFSISPFGNNAPATEVDKSLFNVKVITGPKKSTEQKLSNGSPQNVVHLDIFKGTKGGDVCEDEGMVKDCHPFRKGRDEISLKPIEVRKKVGGGQSCSDAEIEYRRARSLREANGVVSWRSTLARQLQ

SEQ ID NO: 161313 - protein, 68 aa, Oryza sativa
  Clone ID: PAT_MRT4530_60509C.1.pep
PMAVWLVLTFQQFIIEYAHKRIYSSISCCRQFFHGLPEEPSNSLNNFLKKFFIVSVSNNDHHKIQNQC

SEQ ID NO: 161314 - protein, 65 aa, Oryza sativa
  Clone ID: PAT_MRT4530_6050C.1.pep
MVKSGAKESFEVPFSAGKADMALPLDKIGRGCEGSRTTAVSSRDKKGRMKVVCFCNKLPDWAGCR

SEQ ID NO: 161315 - protein, 105 aa, Oryza sativa
  Clone ID: PAT_MRT4530_60510C.1.pep
MAAAAARALLSSARVAGAGIAAVSCCCRRSFSAAAAAAVRQQEPATAAAAGTTAKLQAAEGAAAGSKEGFFWMREPRTGNWMPENHFNDVDAADLRSQLLFAKKN

SEQ ID NO: 161316 - protein, 97 aa, Oryza sativa
  Clone ID: PAT_MRT4530_60511C.1.pep
IITLSRATFLTIVIKKYKIADCTSTHYVIIRHMRCAITSLCRLTFNPSVLSFKLEGRPAITIRHNRLLHNEGPFESKDLYRNFIGFKSYRKISYLAL

SEQ ID NO: 161317 - protein, 641 aa, Oryza sativa
  unsure (1)..(641): unsure at all Xaa locations
  Clone ID: PAT_MRT4530_60512C.1.pep
NRPPVAKAEFPXLEPITNENGEXRTHRRCMSYGEYASTPVDSVAKLSAELLKDXFCSFYEGFQKGARVWFSYEDSMSFKLPSDFRFEDINSDKYDKSREVFSAAISPCILPVGIHQGRNIQVSYEFYHPMSSARQFGMGQLPIGLYFVDKIQCRGEISPTLMMDRLLNLQGPPLGSIENIELAKFKSRNFDRWWGEWKLHLFHKSASMYLTDLFPDVIPXVCFLHPCGNNRIGKDIEYAPGLIPNGGGLAPLAMGFHAPKTSSLLHGQMREPADAGKKRRTRSSAMDTLAPVPKKKAKLKKTKPADDLPAFDPSIEQALHEEDIEDDVDQAAVEVSGIERTPSASPKQTPPTPSAPTHFSRKKKTAVKKKLTATIVKPTPPQPPPSSPPVQQSSSDQTPSAVGSHHVEEEEQPVAPAILALADLFSFDIKDYLDEETEDDTTSKSLVPLSDDVKKTLEDISHRLEASSLDNLVVNCGPIRTRQHEIQALIPDELADILTPAIYLEQHQFRLEKAKLRLAERRERKEIEATIQANRQLVHEEKAKLDQLSEGPIKSNIDRLEARKIELLAQLQECNAELVLEHKKLADLPKSVEEQKARLKSAIKNVADLTKSLKVIPRTDAQDAQVIEEVEQIRQRAISAI

SEQ ID NO: 161318 - protein, 68 aa, Oryza sativa
  unsure (1)..(68): unsure at all Xaa locations
  Clone ID: PAT_MRT4530_60513C.1.pep
MHPYSLKSSKGAPFPPRPILVFLIAIFGFYVCYISXFNQITLGDRSXEDSXEEVQAGIHCRKPHLPHE

SEQ ID NO: 161319 - protein, 36 aa, Oryza sativa
  Clone ID: PAT_MRT4530_60514C.1.pep
VIIKTLTASLSLILQPFGAYCDGEFNLRCGYPYFAA

SEQ ID NO: 161320 - protein, 105 aa, Oryza sativa
  Clone ID: PAT_MRT4530_60515C.1.pep
LGIGPIPPSVLSASYAWLLSLGASAFAAPAPTAKRDRISSSSRIARRGGGGGGEARVLSEVPGGGGHLGSPWWRWLLGPAHAGAWCCCSSSRRCSRPIVLYGGSP

SEQ ID NO: 161321 - protein, 586 aa, Oryza sativa
  Clone ID: PAT_MRT4530_60516C.1.pep
MEETPLPSGKNFRSQLAAAARSINWTYAIFWSISTSRPGVLTWKDGFYNGEIKTRKITNSMNLTADELVLQRSEQLRELYDSLLSGECGHRARRPVAALLPEDLADTEWYYVVCMTYAFGPRQGLPGKSFASNEFVWLTNAQSADRKLFHRALIAKSASIKTIVCVPFIMHGVLELGTTDPISEDPALVDRIAASFWDTPPRAAFSSEAGDADIVVFEDLDHGNAAVEATTTTVPGEPHAVAGGEVAECEPNADNDLEQITMDDIGELYSLCEELDVVRPLDDDSSSWAVADPWSSFQLVPTSSPAPDQAPAAEATDVDDVVVAALDGSSIDGSCRPSPSSFVAWKRTADSDEVQAVPLISGEPPQKLLKKAVAGAGAWMNNGDSSAAAMTTQGSSIKNHVMSERRRREKLNEMFLILKSVVPSIHRVDKASILAETIAYLKELEKRVEELESSSQPSPCPLETRSRRKCREITGKKVSAGAKRKAPAPEVASDDDTDGERRHCVSNVNVTIMDNKEVLLELQCQWKELLMTRVFDAIKGVSLDVLSVQASTSDGLLGLKIQAKFASSAAVEPGMITEALRKAIAS

SEQ ID NO: 161322 - protein, 70 aa, Oryza sativa
  Clone ID: PAT_MRT4530_60517C.1.pep
SSIVCRHYLTIRVFSRVLISLELAMSFFFSFQCRVFSVSSFMSCSGCPGSQQHFLASCRVLDIMASNIYA

SEQ ID NO: 161323 - protein, 549 aa, Oryza sativa
  Clone ID: PAT_MRT4530_60518C.1.pep
MADELVLQRSEQLRELYDSLLSGECGHRARRPVAALLPEDLGDTEWYYVVCMTYAFGPRQGCVWLPGKSFASNEFVWLTNAQSADRKLFHRALIAKTIVCVPFIMHGVLELGTTDPISEDPALVDRIAASFWDTPPRAAFSSEAGDADIVVFEDLDHGNAAVEATTTTVPGEPHAVAGGEVAECEPNSDNDLEQITMDDIGELYSLCEELDVVRPLDDDSSSWAVADPWSSFQLVPTSSPAPDQAPAAEATDVDDVVVAALDSSSIDGSCRPSPSSFVAWKRTADSDEVQAVPLISGEPPQKLLKKAVAGAGAWMNNGDSSAAAMTTQGSSIKNHVMSERRRREKLNEMFLILKSVVPSIHRGNTNYYFIRFTIFITINMNMGNARMTYIMKRRECNFFRTKFVKVDKASILAETIAYLKELEKRVEELESSSQPSPCPLETRSRRKCREITGKKVSAGAKRKAPAPEVASDDDTDGERRHCVSNVNVTIMDNKEVLLELQCQWKELLMTRVFDAIKGVSLDVLSVQASTSDGLLGLKIQAKVVISAAK

SEQ ID NO: 161324 - protein, 95 aa, Oryza sativa
  unsure (1)..(95): unsure at all Xaa locations
  Clone ID: PAT_MRT4530_60519C.1.pep
DIDMSHPQMPKGGEVVKIAGLTCPFEPPKPKTKHKVDIDTVEKAQTLGEQEQKHFDEMGQKCIDAGATLGICKWGFDXEANHLLMHRNLPAARWE

SEQ ID NO: 161325 - protein, 291 aa, Oryza sativa
  unsure (1)..(291): unsure at all Xaa locations
  Clone ID: PAT_MRT4530_6051C.1.pep
QRWLEDVANLVMTAQQRLGAGGRSATTTKTSGAATTGSVSSRRRARRAAAAARHSAATPSSTPSTREDQHGEPDARLNIGRRRNSRRTPRATEGASSSRVSPRHGREDQPSVPXTGGVGCRAXVASLRNVRWPPRFRPPITEKYDWSVNPPKFLQVYTPGIKAAGGDDRVMANFFPMALKGQARVGLMNLPPGSVHSWEDLCPQFTMNFQGTYPRPGKEAXLHAVKQGEYESLRSDNQRVCQVRNTIPCIPAHAVIYAFRGGVRPHRMLEKMTSKEPQTTAELFQLADRVA

SEQ ID NO: 161326 - protein, 62 aa, Oryza sativa
  Clone ID: PAT_MRT4530_60520C.1.pep
YHRFNLRGSRYQDPDGKHAAPGAPVHFIASRASSIASLDTPVKNTGSSSTLHLYNEVHQGTI

SEQ ID NO: 161327 - protein, 43 aa, Oryza sativa
  Clone ID: PAT_MRT4530_60521C.1.pep
NYWQSLTNGAGYEHTTQARPQIKQASRASERWNGPLTGTDTPH

SEQ ID NO: 161328 - protein, 303 aa, Oryza sativa
  unsure (1)..(303): unsure at all Xaa locations
  Clone ID: PAT_MRT4530_60522C.1.pep
MSSSSSTAATRNPGSVVADADGLARKVAAIRAAGPAKLQVIADFDGTLTRYWYDGSRGQSSHGLLRQGNEEYDAKREELFEHYHPIEICPDIPLPEKAKLMEEWWEKTHALLIEGGLTYEAIRQSVADAKITFRDGVVKLFEFLEERDSPVLVVSAXLADIIEEVFRQKLHRSFKNIKVVSNRMVFNEEGRLVSFKGKTIHGRDKNEHALDMAAPVHDNLGDPNGYTDDYSLVKKRTNVLLLGDHIGDLGMSDGLNYENRIAVGFLNNNIEKSLKDYSEAFDIVYLNDAPMVGVVELVSELCP

SEQ ID NO: 161329 - protein, 71 aa, Oryza sativa
  unsure (1)..(71): unsure at all Xaa locations
  Clone ID: PAT_MRT4530_60523C.1.pep
NLVCXVXSXPWGCXXXVVVPLPLXQTFWXLICXSICLEXISXSXGGYSXFHXLXFLXFXXKKKKKKKKKKK

SEQ ID NO: 161330 - protein, 206 aa, Oryza sativa
  Clone ID: PAT_MRT4530_60524C.1.pep
MDKTVIVVSAVVGSLGLLSAILGFAAESTKITISDVRVSGDECLYPQNPSLRLGLCAAVLLLLAQVTVSAIGGCGCCCGNGKPRGIPSSKTNRVVGIVFAVASWIAAVIAVVLFVEGAAWNANVARDTAPVCYFLKDGVFAAAAVLALAATALGVASYVMLRRQLPDDDDDAPAGAVASWRQPLLHSGIAMGHPQFPPHPQWHSQV

SEQ ID NO: 161331 - protein, 103 aa, Oryza sativa
  Clone ID: PAT_MRT4530_60525C.1.pep
EVCLLLSCTKGKKKGRKDGSNKKLGRVDRSRACVVAYLSMQVEDAPTGPPFEGVRSSIHQSIPFLLHLSSPRTIDRSPKWLVLSTVLLIPFLFLFFFFSFFLC

SEQ ID NO: 161332 - protein, 256 aa, Oryza sativa
  unsure (1)..(256): unsure at all Xaa locations
  Clone ID: PAT_MRT4530_60526C.1.pep
HSEWLSENIIKTLPIFIAINLISIIVWRLQISQLSMPLILGVIAGGLVDLDNNLTGRIKNLMLSLIAFTISSLGAQFXLVFGWLFLPAAMLSTFILVMMGAVGQRYSTIAFGTLLVAIYTSLTYMQEHPWYSNIILILVGTLIYSLVSXLVYLCFPNRIAQENLAKAYDALSLYLQAKSEFFDPDNDDLAAKQFALAKANQQVTQAFEQTRVSLFYQLKRNSRKTRTNQLLQDYFIAQDILERASSSYYQYHELFQ

SEQ ID NO: 161333 - protein, 41 aa, Oryza sativa
  Clone ID: PAT_MRT4530_60527C.1.pep
MVLLERTPLVVPEAAAAAAAASSRFGGRSPRGLKEGAPGPP

SEQ ID NO: 161334 - protein, 83 aa, Oryza sativa
  unsure (1)..(83): unsure at all Xaa locations
  Clone ID: PAT_MRT4530_60528C.1.pep
VPPRRRLCAAAPRRVPRRASXTPCAAVEPEGIADPSXDQDPQDYEQGKSSLFLEHVDPNCEIILFTNKIACNDEHPTCDYAMP

SEQ ID NO: 161335 - protein, 83 aa, Oryza sativa
  unsure (1)..(83): unsure at all Xaa locations
  Clone ID: PAT_MRT4530_60529C.1.pep
VPPRRCPXAAVPRRVPRWAXTMPCAAVEPEGVADPSEGQDPQDFEQGKSSLFFEHVDPNCEIILFTNKIAXNDEHPTCDYAMS

SEQ ID NO: 161336 - protein, 58 aa, Oryza sativa
  Clone ID: PAT_MRT4530_6052C.1.pep
MDRSWNLYHARTMRGGRVLVASSGGLILYYSSAMGNFAVAILLISLKVAMDLKLLRGA

SEQ ID NO: 161337 - protein, 69 aa, Oryza sativa
  Clone ID: PAT_MRT4530_60530C.1.pep
RRSSPLLLQEVLSQWSSLLICIAPIQAPSSSRDARPAPSSSRGTRSAPRGPDGAVAPGRCRLRPAGPGR

SEQ ID NO: 161338 - protein, 82 aa, Oryza sativa
  unsure (1)..(82): unsure at all Xaa locations
  Clone ID: PAT_MRT4530_60531C.1.pep
CRRTTALGAAAPRGVPRRASXPCAAAAPEGVADPSEDQDPQDYEQCKSSLFFEHVDPNCEIILFTNKIACNDEHPTCDYAMP

SEQ ID NO: 161339 - protein, 75 aa, Oryza sativa
  Clone ID: PAT_MRT4530_60532C.1.pep
HFYSDWYHPDVSTVVTPPMMPCTFILSLRGHSLITRHTFHNHPALPTARSGNAYQGSQCCQPVGRHHRHIARPTV

SEQ ID NO: 161340 - protein, 207 aa, Oryza sativa
  unsure (1)..(207): unsure at all Xaa locations
  Clone ID: PAT_MRT4530_60533C.1.pep
RVGIRCNTYQVSDDSTHVSGDTCKYHVILIRYHAIFYHVSRDTRKVSCETCXVSDDFNHVSRDTHEVSCDTCHVSDDFYHVSRDTREVSDNFYHVSRDTREVSDDFYHMRTAMAAAEDGRGDGGGSGGRACRRWGMGAAAATAAATGDGRRGGGGGGQRRRRRRGRQGRRRSCAGARRRRSGRAPARPATARAPGPSTAAPSARGAA

SEQ ID NO: 161341 - protein, 115 aa, Oryza sativa
  Clone ID: PAT_MRT4530_60534C.1.pep
FLPIFGSSLDVFWPPSSGGSQHFAFLVELSFSLCLGTTFSSFSCPSPLILRGFQSFYFRFFPLFNFCVEFNRFGFFPCDPRTSFCFVATASFIFFGDISNHRCILSGQVAPPVWY

SEQ ID NO: 161342 - protein, 648 aa, Oryza sativa
  Clone ID: PAT_MRT4530_60535C.1.pep
MAVSSPDRRRNWLRGHRKVVSCPLFNSSSNVLCATKKDGNLGGFAPNLALASATDLLVLCIVQQIIGDYLAEARAALAAAAAAPLDGEGGEHSAATAALGLVEAVLEMSPRMEAALELRARSLLALRRYRAVADMLRDYIPSCTKPCSADDTSSSSSSSSSCSSASRTDLLSPARDRSDAASAASRFLCCFDISDLKHRVLAGFSKNTSADTQWRYLVLGQACFHLGLMEDAAALLQTGRRLASAAFRRESVCWSEDSFSPSNLTANAISAPASRRASKSGAAGSEAESVSQLLAHVKLLLRRRAAAVAALDADLPAEAVRHFSKVLDARRGVLPHPFATACLVGRAEALRSSGRAADAIADCNRALALDPAFIPALRSRADLLESVGALSDCLRDLEHLKLLYDAALRDGKLPGPTWRPQGGVRFSEIAGAHRALTPRIQQLRGRVAGGEACSVDYYALLGVRRGCTRSELERAHLLLTLKLRPDRCASFAERLELVDEHRDLEAVRDQARMSALSLYRMLQKGYSFIMSVVQDEEAAERQRAKDAAAATAAAAAAAAAAALAREQEETAAVPEKARISSVSVPSTNVQVQVTQAAAMPTAAMAAAAAMGSPVFQGVFCRDMAVVGTLLSRGGFDRPIPVKCEAMSC

SEQ ID NO: 161343 - protein, 70 aa, Oryza sativa
  Clone ID: PAT_MRT4530_60536C.1.pep
PAVGATVKAGMFQEAISSLEKSASAVKECQDGFGKSNVTSPLSAENDDAFQLAELIVLLIRDEQINNVSP

SEQ ID NO: 161344 - protein, 238 aa, Oryza sativa
  Clone ID: PAT_MRT4530_60537C.1.pep
MGEAKKKTRRKEARKEEEEASRRCSLWPPCLLRKIRGEKAAGREVTPWGRQHRTGTTTTTRVVCGRSRGHRRLASFLAVPASDRTSTRAARPANAFFPLSFADKHKHKDNGDKQDCMSERVANMGESCCGAETATRVVIVVINGYTNHRCSSPIIKPLALADANALLLVGGYWPVALSQVHNSQIKHTIVHKAEQGYQATVSTRGWVPFVTDARGTHGPRPRGIGCLAMVDLGVLEFG

SEQ ID NO: 161345 - protein, 61 aa, Oryza sativa
  Clone ID: PAT_MRT4530_60538C.1.pep
WRLVWFVWRAGKLTSWFLSCLLLRYYQDMASDFLKNFMQLDTDFMTYTMKQYNVVAQKKKK

SEQ ID NO: 161346 - protein, 74 aa, Oryza sativa
  Clone ID: PAT_MRT4530_60539C.1.pep
MASGTAEQQAMTAITGTREDHEGRAASDDNGDHHHLSNHKLVQGAGGADGTGNDAGQGARTPGFGLPGARMRRS

SEQ ID NO: 161347 - protein, 131 aa, Oryza sativa
  unsure (1)..(131): unsure at all Xaa locations
  Clone ID: PAT_MRT4530_6053C.1.pep
VAVDLKIPVRXDGGGEPXLVGDGGERGKRRERDSDGEGERRTAETEERGTGNNXIASGERESGRRRWKPARRSRPPLIAPANFAGTKSDESEGEREGKVGESGEGIAGSNSPHFNARGDGGMRRIRRRRRR

SEQ ID NO: 161348 - protein, 86 aa, Oryza sativa
  unsure (1)..(86): unsure at all Xaa locations
  Clone ID: PAT_MRT4530_60540C.1.pep
MPLGKYYCDYCEKQFQDTPXARKXHLDGAQYHRARALWYXAVXRQELXGGVGGAPPLLHQXRRRAIGFCQHFXRTGTCXFGDSCRY

SEQ ID NO: 161349 - protein, 151 aa, Oryza sativa
  unsure (1)..(151): unsure at all Xaa locations
  Clone ID: PAT_MRT4530_60541C.1.pep
MAMAVERNNVAAAAAALLALLPMMMLSSTATAARPVHGGPPGELPPIIITTPPTAISGESDFSVLRKVPTGPDPITSDPPPPPPPSTPTQFSVLRKVPTGPDPITSDPPPPPLSEFPVLREVPSGPDPITXDPXXXXPXLTEFPILRKVPR

SEQ ID NO: 161350 - protein, 1118 aa, Oryza sativa
  Clone ID: PAT_MRT4530_60542C.1.pep
MEKEVDVSAGAAEAPQPEDKVAPEAEANGDLGDKAEEEASASAAVEVVEESNAPEELLEKAVVSEANGVAAAVELAVEEKLEDNKGEEEEMEAKPEPVSGVIPVVVDDTSSEMIAPVSAESAVEESTEKEQTVDDTSSEMIAHVSAESAVEESTEKEQTVESEASESVEIVGVEKPTEDESNVDGGASSVVSRELAPEETKENNVGQEDEGVAEVIDREEDADDDEEIVLAAADDEDDGTNEADDDEDGVSSDRGPARVAIIESSEAAKQIMKELGEGSASVSPVSGLSSSREYTNSMDGQIVLDDSEEDGDDDDNEDDDEKGFDSAALAALLKAATGASADGNVTVSSQDGSRIFSMDRPAGLGSSAPSLRPTVPRPVARSNLFSPSELAVTAEPTEEMTEEEKKLHDKVELIRVKFLRLVYRLGATPEETVAAQVLYRLSLAEGIRHGRQTNRAFSLDNARKKAMLLEAEGKEELNFSCNILVLGKIGVGKSATINSIFGEEKSKTDAFSSATNSVREIVGNVDGVQIRIIDTPGLRPNVMDQGSNRKILASVKKYTKRCPPDIVLYVDRLDSLSRDLNDLPLLKTITSVLGSSIWFNAIVALTHAASAPPEGLNGAPMTYEVLMAQRSHIIQQSIRQAAGDMRLMNPVALVENHPSCRRNREGQKVLPNGQSWRHQMLLLCYSSKILSEANSLLKLQDPNPGKLFGFRFRSPPLPFLLSSLLQSRAHPKLSPDQGGNEGDSDIDLDDYSDIEQDEDEEEYDQLPPFKPLTKSQLARLTKEQKNAYFDEYDYRVKLLQKKQWKDEIRRLKEMKKRGKTDMDAYGYANIAGENDLDPPPENVSVPLPDMVLPPSFDCDNPTYRYRFLEPTSTVLARPVLDAHGWDHDCGYDGVSVEETLALLNKFPANMAVQVTKDKKEFSIHLDSSISAKLGEDASSLAGFDIQTVGRQLAYILRGETKFKNIKKNKTTGGFSVTFLGDIVATGLKVEDQLSLGKRLALVASTGAMRAQGDTAYGANLEARLKDKDYPIGQSLSTLGLSLMKWRRDLALGANLQSQFSIGRGSKMVVRLGLNNKLSGQITVRTSTSEQVQIALLGLIPVAASIYRSFRPSEPSFAY

SEQ ID NO: 161351 - protein, 66 aa, Oryza sativa
  Clone ID: PAT_MRT4530_60543C.1.pep
MGIKAVMNSDNLLLQMDGLTKTDDLVFVLAATNLPWELDAAMLRRLEKRVSFFLKPSCNFFVHECS

SEQ ID NO: 161352 - protein, 136 aa, Oryza sativa
  unsure (1)..(136): unsure at all Xaa locations
  Clone ID: PAT_MRT4530_60544C.1.pep
YGIPARIRIVPVHVKEIYHVIETESTYGRSPTRTRLGRYHIVRGPISPSPTWRSTDPRYKRDPXAGHKASNLTANTSITXYEVGAYRSQVAGRSSXTNSTTVSSVLTDHNTLYIRSTGIPRRHIRNTVANSRLWQA

SEQ ID NO: 161353 - protein, 163 aa, Oryza sativa
  unsure (1)..(163): unsure at all Xaa locations
  Clone ID: PAT_MRT4530_60545C.1.pep
SPSAPRLVGGWWGAPNPATPEHQWEGTERRRGHAGSDRLPSTGFGRSHVLVGRGGXGSGHPRAPMDDMKGRXEXLXGRXRIWPRXHRRHLCRMXVXGGXRRKXKFRXXXXKKGXKIDFXPIXAPPGDSPXSXTGPPPVGXPXFXSLXXGLFQXXLYLVXPFXX

SEQ ID NO: 161354 - protein, 571 aa, Oryza sativa
  Clone ID: PAT_MRT4530_60546C.1.pep
MAAVAVAIFTSGEYTHVHAIYIEIFTLSLPISSHLVPERIREVELVMEFGRRKSFSFFEEDWKARPTAAARTPVHHHYARSPAREAAPHTPPRLSLSSVHGVELPGLVGVGGGGGGGGGVGGMCSPWVQSPLHGRVRFPPSPAAIYHCLSALHRLDGDVHALAVARGVLFTASDSGRVRAWAAPGCFNRGYLDVGRGRVPAIAACGGTLVTSHSRDHHVRVWTVCASAVCDHIRAKKAATLPAKGGILSFTKRRPPHHRDTVSCLVLHAVAGLLYTASHDHTVKAWKLSDGSCADSFVAHDGAINAMLINEADGCIFTGSADGTVKMWRRVYGGTTHALIIALRSELSPVNALTLCHAAAATGATRRCFLYAGSSDGYVNVWEKEASAGRPAHAGFLKGHRLAVFCLASGCGGRVVVSGSEDATMRVWRRDGKGGSTSHTCLAVIEGHRGPVRCLAVGGGEAGDVEGSMVVYSAGLDKSVKVWRIRVVGKEEEEDDDEDDLDDDDVDVVVGEEDAAETMSTAAGKVDTEARDEAAAAAAVVAEEEAEVVVGLGATPVLSPVWVEKRRTSRG

SEQ ID NO: 161355 - protein, 131 aa, Oryza sativa
  Clone ID: PAT_MRT4530_60547C.1.pep
GDAARRSPLPLARPALSRLRRMPRARAPLLLRACGVEGSGSWLQHHTGQDSARRCRVRGYSILRRPANSTGTVDVVNVGASPNLSTSSAYAAAGIENTGNGEKSPLIIPHDTLNKGKFHKRSNLLLIFLWN

SEQ ID NO: 161356 - protein, 105 aa, Oryza sativa
  Clone ID: PAT_MRT4530_60548C.1.pep
MAIIISGLVHRSTALRVISVLFALAVVVPDAGGRDKHHLYDCLAFTCRRLSNVSPAFRRRGDPSRCRSTYYELTWTDNEATIQIYEGTYCVTGNNYSDCTFSVGD

SEQ ID NO: 161357 - protein, 46 aa, Oryza sativa
  Clone ID: PAT_MRT4530_6054C.1.pep
DGGENANNVEKGALRNFNLFPGGGFCKRVVKRTLGKRGWKLLGGNP

SEQ ID NO: 161358 - protein, 113 aa, Oryza sativa
  Clone ID: PAT_MRT4530_60550C.1.pep
MEKIMGENEIRTRSPVSRRDMASSSKASSSSSASAASSEWTKQQNKQFERALAVYDTDAPDRWHNVARYMGGAKSAEEVRRHYERLQADVEQIEAGGVPFSLGYGATPQAGRR

SEQ ID NO: 161359 - protein, 66 aa, Oryza sativa
  Clone ID: PAT_MRT4530_60551C.1.pep
GSIPPPQFLNWGYSFSPLIKSSNPGKNQGFFEKGEIKCLLTFKSLLFKGTLLTRSHKASCFLPFVP

SEQ ID NO: 161360 - protein, 262 aa, Oryza sativa
  unsure (1)..(262): unsure at all Xaa locations
  Clone ID: PAT_MRT4530_60552C.1.pep
MQGDPGYGYGGYGYGYGYGYGGAGYDMAGYGGGGGGYYTSDPYNAAPAAYEDPLAVAGRRQHDFPAPLTGVEFQPSDTCPKNYVIFDQTYDRSRVMFHPSLANNLGNSGGGYDHHHHCGYGGFEQDYASKSAYYGVEDDGGGGCSIRQKEDTDEIDALMSTEDGEEEDDVLSTGRTPGCRAGGSPDSTCSSGASRSDCGGGRKPEAGGGERKKERMKKMMRTLKGIIPGGEXMDTPAVLDEAVRYLKSLKVEVKKLGVRGSS

SEQ ID NO: 161361 - protein, 61 aa, Oryza sativa
  Clone ID: PAT_MRT4530_60553C.1.pep
RWKYTHRSSQSYIYILDKSNSAHFGTASCYSIMQDDFMWAYLRNRNFAKYIQEYVQFHIKI

SEQ ID NO: 161362 - protein, 514 aa, Oryza sativa
  Clone ID: PAT_MRT4530_60554C.1.pep
MAKSAMKQGIWRRRIGAPFAAVLVAAVLAVVVFSGQFAKGPNDLERTVSSKLEGEDTEQIRLGKGLNKLLEMKGAQEDLNKLRNRLRDQYLNHCLVTFIEREVFLKVKDCDIINRFQTMKERAEPYIKCTAQSDIKICDLSNPRFDICELCGDARTIGQSSTVVYVPQNRASNGEEWIIRAQSRKHLPWIKKVTIKSVNSSEPEPICTSKHHIPAIVFALGGLTANVWHDFSDVLVPLFLTARQFNRDVQLIITNNQPWFIKKYSAIFSRLTRHEIIDFDSDGQIRCYPHVIVGLRSHRDLGIDPSSSPQNYTMVDFRLFVREAYGLPAAEVDIPYKADKDDPDKKPRIMLIDRGKSRRFVNVAHVVQGLDWFGFEVVKADPKIDSNLDEFVRLVDSCDAIMGVHGAGLTNMVFLRSGGVVVHIVPYGIKFMADGFYGAPARDMGLRHVEYSISPEESTLLEKYGWNHTVINDPETIRKGGWEKVAEFYMSKQDIVLNMTRFGPSLLNAIEFIM

SEQ ID NO: 161363 - protein, 68 aa, Oryza sativa
  unsure (1)..(68): unsure at all Xaa locations
  Clone ID: PAT_MRT4530_60555C.1.pep
YYCASTSSLRGASIEADTANHARQAADHVQAAKNCQNDPKGQKYHNGMDHXLCQYNRNSAVRDIANLS

SEQ ID NO: 161364 - protein, 315 aa, Oryza sativa
  Clone ID: PAT_MRT4530_60556C.1.pep
MGSPKMAKSAMKQGIWRRRIGAPFAAVLVAAVLAVVVFSGQFAKGPNASSQFAPVQVDNTLRPTRDKPVSADQDLERTVSSKLEGEDTEQIRLEDGQSPNKEAAIEEQKPSQAAAIDQDDNTLNPGLKQASGDERSAGGSDSLSKESPPQSQEGDGGTAESGAEPYIKCTAQSDIKICDLSNPRFDICELCGDARTIGQSSTVVYVPQNRASNGEEWIIRAQSRKHLPWIKKVTIKSVNSSEPEPICTSKHHIPAIVFALGGLTANVWHDFSDVLVPLFLTARQFNRDVQLIITNNQPWFIKKYSAIFSRLTRHE

SEQ ID NO: 161365 - protein, 69 aa, Oryza sativa
  Clone ID: PAT_MRT4530_60557C.1.pep
VNQHHLYAHKIRLTRRCANGTAAEHSGAGSAVETGEEVTSPRREALATQEQPPHHLHPRSVVVTTHSCS

SEQ ID NO: 161366 - protein, 96 aa, Oryza sativa
  unsure (1)..(96): unsure at all Xaa locations
  Clone ID: PAT_MRT4530_60558C.1.pep
RSGRKRTRRPPSRPSRASPSSSAPRASSAPPSSTSSRSRTPRAAALAHRVRLGRVETEWLHVLSEGWASPLRGFMREGXFLQEFNXNASGGXGAIV

SEQ ID NO: 161367 - protein, 94 aa, Oryza sativa
  unsure (1)..(94): unsure at all Xaa locations
  Clone ID: PAT_MRT4530_60559C.1.pep
DXSVLLDKTPYSSSTEKXAANNIGLDGFDVIDAIKSKLXAAVSCADIVVLAGRDASXILSGGRFTYDVGTGRXDGVVSSAAXADAVLPESTFXF

SEQ ID NO: 161368 - protein, 46 aa, Oryza sativa
  Clone ID: PAT_MRT4530_6055C.1.pep
RLLESRGIEQARSRCVTYAASKAKLQMVHFGSSDKEDQGATHLVNT

SEQ ID NO: 161369 - protein, 68 aa, Oryza sativa
  Clone ID: PAT_MRT4530_60560C.1.pep
SFFFFSHKKPLFGGIPHQNYQQAMLTTAFLPKGGFLHAVFLGIPAHICCPLYHSLINSFHRQHEISLI

SEQ ID NO: 161370 - protein, 126 aa, Oryza sativa
  Clone ID: PAT_MRT4530_60561C.1.pep
MEIGGLQRSSQTFRRSGSSGLVWDGRLMSEDQNQSDQRATGDAEAGSLESKELRHSRSVGSSIKVQRRCSDSVERSRSGNQAFRTRHVPPAMDPPSPKVSRCLFCGIFSKEEPSQPPKPRSLYWQP

SEQ ID NO: 161371 - protein, 116 aa, Oryza sativa
  Clone ID: PAT_MRT4530_60562C.1.pep
KRGSTISVHRHPFYSHCFDEFFILMLGRSIPIIRSKRVPLDGLCIVNIYSRLSGPNSFQVFICFCRSDASYIGMASDDTSSATQLIGYRSNHLARSEPKGRFFGPALELSRSLRPV

SEQ ID NO: 161372 - protein, 54 aa, Oryza sativa
  Clone ID: PAT_MRT4530_60563C.1.pep
MQWLPPLESIRILLLLLQIVAATVVGVRMEMEKDICNWGFRGGRRRPGSGPAAA

SEQ ID NO: 161373 - protein, 69 aa, Oryza sativa
  unsure (1)..(69): unsure at all Xaa locations
  Clone ID: PAT_MRT4530_60564C.1.pep
RKTRRRGRAAARRGSPPAAAPPGAQPXCSSSSPLFFFFFFFFSPHSSLSRNHPSNNSVAQXRESLLRRK

SEQ ID NO: 161374 - protein, 203 aa, Oryza sativa
  Clone ID: PAT_MRT4530_60565C.1.pep
MVDTKPSETRSVTVIQRYKLKVVPNSDSESSTSKDGKAKGDKAKDDEPGDDKSEGEDSQEIKNLQDQIDYAVHHALINQSGVLVNTLTNMIKSVVDGTIAEHQAKGPTFLPNGVFPQYRDLVTGKQQPVSGINPEQPIASTSAFASQQPMASTSAFASSGQPGFKPRVLIRPQPQHMGQNIPLVTPEQIAAMFKGKQLVVDPV

SEQ ID NO: 161375 - protein, 217 aa, Oryza sativa
  Clone ID: PAT_MRT4530_60566C.1.pep
MVVATEEMAVYCFDALVSHYSGDQPPPPAFEEGIHPLFVTWKKATNGSEPRLRGCIGTLEARQIVTGFKEYALTSALRDRRFPPIQSKELPYLECTVSILTEYETALNHLDWEVGKHGLIIEFTDPDYNMRRSATYLPEVAAHEGWTHLETIDSLMRKAGYNGTITDSLRKKLRVTRYQSTLYTMHYGEYAAYVKKNRGAAPEINGAPIINGFKPGH

SEQ ID NO: 161376 - protein, 119 aa, Oryza sativa
  Clone ID: PAT_MRT4530_60567C.1.pep
MDPNGRSAWISRAGLGILTVNSGLAIYRSRGDAAAVAFVLGSYTALLLLFSCLSAFERAPPGSPARGRLKRAVWALSTLVTAMFAWKVAALMPPPVAAVVWALAVATSLGGFLAFFIYT

SEQ ID NO: 161377 - protein, 142 aa, Oryza sativa
  Clone ID: PAT_MRT4530_60568C.1.pep
SPLDSLLNYKNDPRPALPGAAAADAGEQHPAASPMTRRRGAGGGGGGGALRRSLQTPPPTLFGGGLLRLRWAHPPVLEQRGADTAAAPAAAAAASRSEPPPPTPSQRKSAPASCLSMSRNSPSDVGGPPASSRQSRHHGRVG

SEQ ID NO: 161378 - protein, 147 aa, Oryza sativa
  Clone ID: PAT_MRT4530_60569C.1.pep
RSVAGGNGRGTAVWNHEIAREPPLKQGHRRDGDLRIRDGPRMALWRDLLAQVGAQREGSDRPYDEGSGLLRSARGAEYGLRPGVRGLDLAGERAVRRREHRLAQHGDRAGHRRLARSSISLSETRSSSSSPHACAAYPRGVFRTRGR

SEQ ID NO: 161379 - protein, 67 aa, Oryza sativa
  Clone ID: PAT_MRT4530_6056C.1.pep
KNHEVFPGPKGGHHPRVQARPFQLCFQEALWEGLCVLFPHARDWVTPVIVSRRLFLAPNVATFPKID

SEQ ID NO: 161380 - protein, 151 aa, Oryza sativa
  unsure (1)..(151): unsure at all Xaa locations
  Clone ID: PAT_MRT4530_60570C.1.pep
MAMEMEMDSEAHSRMLWESSSSNGRRYISYDALRSDVVPCSRQGVPYYNCRIMTTANPYTRGCETITRGARRLAGDAAPSAPCLLFRGGSEPGTALKRGELVDMAPYPDISPCTLALIHSRRPXPPRPHLPXRCRHRWLAVDHLDGREGEG

SEQ ID NO: 161381 - protein, 90 aa, Oryza sativa
  Clone ID: PAT_MRT4530_60571C.1.pep
CPPSSLPLCPRRRSSRHARGWRRRSQSPPPPPPHHQWRPPRRPPPDPLGGGRGRALPAYYSSPPLELRGAGRGSRGLRHCPPSTALPTAR

SEQ ID NO: 161382 - protein, 115 aa, Oryza sativa
  Clone ID: PAT_MRT4530_60572C.1.pep
AANPPDSDPRQVARCPGSSWGKEGRFLWKEKAMEELSVHQKPPSSCGGARPPSFSTIGLTPTASPSNPPNAPDGYPRFLPRLGWIHGWNPKNLFWLANPMAGSFFPMNLGDGSSS

SEQ ID NO: 161383 - protein, 75 aa, Oryza sativa
  Clone ID: PAT_MRT4530_60573C.1.pep
LIGCLVSAMEKAEASHVYTYSNGFQGFAAKLNKQQAMKLANMPGVISVFPNTKRSLHTTHSWDFMGLSVDAAAEL

SEQ ID NO: 161384 - protein, 276 aa, Oryza sativa
  Clone ID: PAT_MRT4530_60574C.1.pep
MVATARMHAWQLLLVAVVISCFHCHLAAHHGGKNVRQPPSSVVVVVGSVHSGSDATKAAVSGAPVAVRCHDGNGRDVFRQQALTDCRGEFRVHLPPEAKSRLASVTSCSVKLLASNAARPCDDAAATSAATARGFRLAATKHNGGDGARVFNAGAFAVHPELCDDKGIFFPPLPLVPEPPNIGGVPIPPNPITPAPPSLVPPVFPTPSPPSILPPLTPQPPPSSLIPPVLPLPLLNPPPPPPPPPSLLPPVPLLPPLIPGVPPASASRSGRPVSTP

SEQ ID NO: 161385 - protein, 63 aa, Oryza sativa
  Clone ID: PAT_MRT4530_60575C.1.pep
MGYGWSSKIERGDQRDLTYQLDFDAAAYGGTARALGRAALPQASRADPGDRGSRRRRVGHNQG

SEQ ID NO: 161386 - protein, 517 aa, Oryza sativa
  Clone ID: PAT_MRT4530_60576C.1.pep
MDTWHKAVKDALWILHLATCPKESKDAPRIKKKIKRIVFIVLESSRDSGYGFNSFSLFFCGPLVVTAQYGYSSALECNPKLIPWGGYSSVFSPSCMVMTGCRKELGSQGWLLKTPGGHWACPFCGKPKEDSSAQLQEFLESCSTYTVRRVRLHLLPFSLLGRAEQWFYINRATVNTRNKRSTAFLSRFFPMGKTNAPRRRIPSLQLMRDETILKAWERLQEYVTTRPHHEMAEWLILQSFFNGLTPSSWDHLDAAAGGTFFSRTVICQPIEKMLSNKGWSKERLQTRQCDMYTVKWTEMLAAQLDLLMRRLDNNEKDAEQGTVKAMDSHKTCEVDGNTGHSGTDCRKTCENVKLMNNNGNRPQGDQGWSIAPWGRCGGLRRTHPFLYLRNWVPHPAKFVGGMVVLIGPETTSPLPTGWDKFACVEEPGSRLLTMQFLCALLESPLEGIWENSSGGWIHLELQAGNEQHTLEDHVVQSRERQQSVGAQLANFNTMMQQQQADWQAFHCYQGFDPHLEP

SEQ ID NO: 161387 - protein, 180 aa, Oryza sativa
  Clone ID: PAT_MRT4530_60577C.1.pep
MSWHRAGVLLLGAQSCLPIPEIPAVGGVGSVLLSMSRIGWKLCHVFLPYAVVASRSRRDQGSGSAEPGLAQQASRFGRVTDRDTIDLAVAAAAPARVDQAAGRRWWRRSEGRRQEAPRLLLHHYRAGAAGWGMERRAGVGAASSSAAVDTAVGSTEAVDLSTGRAAAIGRDAGGGDLSGS

SEQ ID NO: 161388 - protein, 114 aa, Oryza sativa
  Clone ID: PAT_MRT4530_60578C.1.pep
MSWHRAGVLLLGAQSCLPIPEIPAASRSRRDQGSGSAEPGLAQQASRFGRVTDSRNWDTIDLAVAAAAPARVDQAAGRRWWRRSEGRRQEAPRLLLHHYRAGAAGWGMERRAGV

SEQ ID NO: 161389 - protein, 78 aa, Oryza sativa
  Clone ID: PAT_MRT4530_60579C.1.pep
MAPRVQISLCHVLLAPLATATVSRLHASRPRPAINGAGFYVKEATPTPHEAEPARHCITDSPEWWYKQAGTSCGRILI

SEQ ID NO: 161390 - protein, 168 aa, Oryza sativa
  unsure (1)..(168): unsure at all Xaa locations
  Clone ID: PAT_MRT4530_6057C.1.pep
MRLKFVCWAPASPPPSTLPRPLAALLGPRAAEEAMPPPRPLGEALAAARRAFCLPLAGTANAAVSAPAVHVSLALAAAGARGATRRQXGGGGGGDAASVASRFVKHVLKNRSNSGGPRLEFASGFWADASRSLSPEFMGLAGYMYGSEAEKADFKNKVFISDRMPSFS

SEQ ID NO: 161391 - protein, 62 aa, Oryza sativa
  Clone ID: PAT_MRT4530_60580C.1.pep
PVLDLCLLPLSMVNLIHIICTQYGETSEVSRSILSWRYISLFVLQLMCQLIERFGSDEAGTW

SEQ ID NO: 161392 - protein, 83 aa, Oryza sativa
  unsure (1)..(83): unsure at all Xaa locations
  Clone ID: PAT_MRT4530_60581C.1.pep
PGNLQKMSGALGNFEXQFVNMGGPAEFLGGAMGGSPSLSRAGAGGTPLFQQVPGEXGLGVSVGLPQAPAPAIPIAKEKEKAFF

SEQ ID NO: 161393 - protein, 950 aa, Oryza sativa
  Clone ID: PAT_MRT4530_60582C.1.pep
MEPSAAVASRPPSFTAQTNALLRKNLIFQKRNRKGTIRLIIVPIYLCLLLTILQRVINSVLDKPKFRCGCKCVDVNGTGSCQNVCGIQYSTLDQAGSCPIPNPPEWPALLQLPRPEYRAMQESSLYAGFPDVSCRKSQSCAATIPFTGANETLSNIVMQNLFTSSPLSNLSDNASISSLLLGTDVPGTYTGFIEPAFVSDRPIYVLRPQCKASDSVTVPITFGDINIRKAEMLCIQGLPLWRNSSAIINEETFNGYRKGKSQEGINEIPMAYDFQDSNEKHFSVLALYNSTYQNVSYVPMPFGLLHISRSLNAVSNAYLQFLRGSGVKMLLAFTKEMPKQETRLRFDFSSVIGPLFFEWVVALLFPVMLTYLVYEKQHKLRTMMKMHGLGDGPYWIIYYAYFLILSMVYLVLFVVFGSVIGLNFFKINDYSIQFVFFFSFMNLQIVLAFLTATFFSKVNTAQAIAYLYIFGSGLIAGSLIRNFIEGGKFPKHWITVLEIIPAFSLYRGLYELGQYAIRASEAGSHGMRWSDLNDHANGMRDALIIIILEWLVLLPVAYYLDHSASVGHKSSFLSLIKNLLKKNPTWRRVSINEVVNDAVHVEMVKQDIIKERETVDQVLQQQSSGYAVVCDDLKKVYHGKDGNPDKFAVRGLSLALPYGECLGILGPNGAGKSSFISMMIGLTRPTSGNAFVREFSIQTDMEKIYNSMGVCPQNDMLWEMLTGREHLQFYGRLKSLNGSDLDTAVNESLRSVNLLHGGAPDKQVRKYSGGMKRRLSVAISLIGDAKVVYMDEPSTGLDPASRKSLWDAVKQAKRDRAIVLTTHSMEEAEVLCDRLCIMVDGSLQCIGTPKELIARYGGYYVLTMTTSPEFEQEVENLARKLSPNARKVYHLSGTQKYELPKQQVRIADVFMAVENFKRRTEVQAWGLADTTMEDVFVKVAKGAQSSEELS

SEQ ID NO: 161394 - protein, 50 aa, Oryza sativa
  unsure (1)..(50): unsure at all Xaa locations
  Clone ID: PAT_MRT4530_60583C.1.pep
CGVLKLVGFKGGSMGLXKFFFWVCLYVNFLPXPPPPPFFFAEDDPRLYGV

SEQ ID NO: 161395 - protein, 104 aa, Oryza sativa
  Clone ID: PAT_MRT4530_60584C.1.pep
MGGGGGRRSVAQAVGGGAQSHSGGGGLPVCARPQERRTAAVCLGWADWAEGRKEKFSAQRSISEFLIQFEFGGNWQMRDFPIYLGAIFFEVQFEGIYLEALNKE

SEQ ID NO: 161396 - protein, 399 aa, Oryza sativa
  Clone ID: PAT_MRT4530_60585C.1.pep
MARLPSHRLAALLLLLLVVVSPCHAAAAAAADGGQRPTRPKAVAMPVVRDGATRQYVATFQQRTPRVAVKAVVDLSGGATLWVDCDAAAGYASSSYAGVPCGSKPCRLVESPSCSYIASCLGSPPSPACLNRTCTGHAENTVTSSVGRGNVVTDVLSLPTTFPSAPLAGTFRFSRKFALCLPSVDAGVVVFGDARYVFDGMDHSNSLLYTPLITRTTDRSSEYFISLKRVVVDDRAVPLNATLLDVGTKLSTVSPYTVLETSIHEAVTRAFAASMATAGIPRVPAVAPFELCYDGSKVESSAITGEPAVPVVFELHVQSEVRSKVAPWMVSGANLMARADGGALCLAVVDGGAAPEAPVVIGGHMMEEILLVFDLEKSRLGFSPNLGAFGLSCSKFRLG

SEQ ID NO: 161397 - protein, 488 aa, Oryza sativa
  Clone ID: PAT_MRT4530_60586C.1.pep
MPVVRDGATRQYVATFQQRTPRVAVKAVVDLSGGATLWVDCDAAAGYASSSYAGVPCGSKPCRLVESPSCSYIASCLGSPPSPACLNRTCTGHAENTVTSSVGRGNVVTDVLSLPTTFPSAPVRQGPLATAPAFLFTCGPTSLTQGLAAGAAGMASLSRARLALPAQLAGTFRFSRKFALCLPSVDAGVVVFGDARYVFDGMDHSNSLLYTPLITRTTDRSSEYFISLKRVVVDDRAVPLNATLLDVGTKLSTVSPYTVLETSIHEAVTRAFAASMATAGIPRVPAVAPFELCYDGSKVESSAITGEPAVPVVFELHVQSEVRSKVAPWMVSGANLMARADGGALCLAVVDGGAAPEAPVVIGGHMMEEILLVFDLEKSRLGFSPNLGAFGLSCSKFRLGERGGDCVRSRSAAAASAWSREGGGSGEMVLGRQHCPSCVDGRRRKPLRAVAGGLLGGEGTRNNRSRHKINIQANMRQDKMPDIDFRDK

SEQ ID NO: 161398 - protein, 126 aa, Oryza sativa
  unsure (1)..(126): unsure at all Xaa locations
  Clone ID: PAT_MRT4530_60587C.1.pep
SGPANTRXRPTQTGCILXQLIHDGSPQPXRGRGGATGGGGGNAAGAXMADLQPIPPRRPQPPLLRRRPRQEDAEEPRGVQPNTTPEHHQCHRPHLRQHHPPEPLNHPKRPKRHKKNKHPKNTPPPH

SEQ ID NO: 161399 - protein, 37 aa, Oryza sativa
  Clone ID: PAT_MRT4530_60588C.1.pep
SLYGLYNYYFLFALEDFINVDNQPCKKIVWDMIFLLV

SEQ ID NO: 161400 - protein, 251 aa, Oryza sativa
  Clone ID: PAT_MRT4530_60589C.1.pep
MNTPEKKPLCYTSRRALQQRTESSSELISVSKRATRQNTPRKPDSPPKRTTRSSANLAKCIENKHHSSPLKRRRGSDAATGKSATGPTRRKHKQKRKNDESDEVSRMEKRARYLLIKIKQEQNLLDAYSGDGWNGHSREKIKPEKELQRAKKQIMKYKIAIRDVIHQLDLCSSSGSKDDSVIPPDGCHESVNPEHVFLPTTRHGRLCKHCSSKMKILDAINAHLGTSFTVKCPSSDIFKEAAEHFNSDLVN

SEQ ID NO: 161401 - protein, 367 aa, Oryza sativa
  unsure (1)..(367): unsure at all Xaa locations
  Clone ID: PAT_MRT4530_6058C.1.pep
GPKIASSHTASYQVIKIPYRRPPSSLPTGLFASMVGVLRRRCWWRHHLHQPACLTAVDWCPRLXIQIRICIIGIHGFKLISYASGMDQSEHYHRLAVVTADWCLRLCGWMVTSPLLGVYVFTAGLPSPSPNGALAYTDGWSHHRCWASTLSPPAAFAVTXLVSLPARLAYYAAVDGRLRLHXPAAFATADWYLRLHGWPIMLPLMGVHDFTXRPPRPPPTGVSAYMAGLICRRRWASTYSPTGRLVRRRLVFPPARLAYYATNVGRLRLHRPAASSAADWCFHLHGWPIMSPLLDVYIFTDGPPCMMPTGAIVFTVGHVAATTNRRHDLQCKLSTSATNWFLHSHGCMILPGLIGLIVFTAGRLVCC

SEQ ID NO: 161402 - protein, 848 aa, Oryza sativa
  unsure (1)..(848): unsure at all Xaa locations
  Clone ID: PAT_MRT4530_60590C.1.pep
MLNIGVIQHSQSPFSSPALLDKKKDGTWRQCIDYRQLNSITVKNKYPVPIIEXLLDELSGSHWFSKLDLRAGYHEIRMAKGEEHKTAFQTHSGHYEYKVMSFGLTGAPATFLSAMNATLAPVLRKIAVVFFDDILIXSPDLITHLEHLRRILQLLADNNWNVKLSKCSFAQQEVSYLGHIIGPKGVSADXQKIQDVANWAIPTTVKKLRKXFGLISKPLTQLLRKGIPYKWIAETNQAFQXLALPDFSKQFILETDTSELGIGVVLSQDKHPIAFLSKALGPRTQGLSTYEKEYMAIMLAVEQWRQYLQHGEFIILTDHHSLKHLTEQRLHTQWQQKAYTKLMGLQYHICYRKGVTNSAADALSRKDHANSAELCTVSXCVPSWMQEIVHSYDQDPYATKLIAELAITPTARQHFSSVQGILRYKGRIWVGXNTELQEKLIDALHATPIGGHSGFPVTYRRAKSMFAWTAMKKMIQAKLQTCQTCLQAKPDRAKYPGLLQPLPVPTGAWQTISLDFIEGLPKSSHYNCILVVVDXFPKHAHFIPLSHIFTASSVALEFLKHVYKLHGLPRIIISDRDKIFTSQFWEQLFIRFGTKLHMSTAYHPQSDGHIERVNQFLEIYLKCSVHATPAKWSSWLYLAKFXYNSSYHSTLGKTPFEVIYGYSPSHFGISLNDCPIPYVSQWLQQRKLMQQLLQQHLNRAQQQMKHLADKKRXLQPYVQSLVVVRANHKLSFRHFGPFQVLAKIGTVAYGLQLPASARIHPIFHVSQLKGAKGFSHPVQTELPTDFTRFQIPQQFLNYRVTKKHNSATIQLLTHWSGGAVEDATWEDMQDIHYRFPQAQAWGQAGFQD

SEQ ID NO: 161403 - protein, 88 aa, Oryza sativa
  unsure (1)..(88): unsure at all Xaa locations
  Clone ID: PAT_MRT4530_60591C.1.pep
GGLASPPPLYLFLLGSVPVVSSKGLXGLKXGGARNVEVPLAFVGRPRLGHRRPVPFEGPPSPPNGEILRLPRSSTDREDGGRXRXVLA

SEQ ID NO: 161404 - protein, 626 aa, Oryza sativa
  Clone ID: PAT_MRT4530_60592C.1.pep
MNTPEKKPLCYTSRRALQQRTESSSELISVSKRATRQNTPRKPDSPPKRTTRSSANLAKCIENKHHSSPLKRRRGSDAATGKSATGPTRRKHKQKRKNDESDEVSRMEKRARYLLIKIKQEQNLLDAYSGDGWNGHSREKIKPEKELQRAKKQIMKYKIAIRDVIHQLDLCSSSGSKDDSVIPPDGCHESVNPEHVFLPTTRHGRLCKHCSSKMKILDAINAHLGTSFTVKCPSSDIFKEAAEHFNSDDGLGQDWLSEYSGDEDYDPEENEASSSGEENKSADSNCSGSPLYSPNDDIPDFISADFNDAEGFCRESSNLGIDFGEDGLAEILTHQRPRRDVDYTQLNEQMFGEPIGNDEQSEDEDWGLNKRKKRRTGSTGVGTNSVEGRSDVKSNKKAQPRRKLFRIPPAAVEVLRKAFAENELPARSVKENLSTELGISFEKGESRYSGPSKRSRTSIEKAETSAKVDQMDNSCFLPLSEIINVPTRLQKGLDKKPKSINSPPRPQDNETCLSPTDKTKEGTPPTIKPSITDSSQLMNNNIGTEETAVSWVDTWASDALHFLDVSDDEHFFDVIEKVCGLENRLQRLKENMLSSSSSTDNNVAAESGLQNEVVLVPAAELKDKAS

SEQ ID NO: 161405 - protein, 116 aa, Oryza sativa
  unsure (1)..(116): unsure at all Xaa locations
  Clone ID: PAT_MRT4530_60593C.1.pep
XXXGAVPGRVVPAQXVTRVTVRMAGHNLTDDDDATVIAAGVAPGEYVISLSPRLMHPASDKAADAVANAVRRPWRHCGCGTAAGAAPGLXGGHGGLPLLRRRRXRGLAXNDDDDDD

SEQ ID NO: 161406 - protein, 198 aa, Oryza sativa
  Clone ID: PAT_MRT4530_60594C.1.pep
QTRTSNDDNTSLDSAVPLGLEISRYMMYLFTSQPEMLMPGTRSHLFANACDDITFMAKYSDIVGHSITLAQPAQQLAKGILHTARHRWVYGDCVGPLIPKACELADALIFFMEELLDHSTLEKMVRDVWIEMLCYTASRCGGYLHAVSLGSGIEPLTLVWFSQCYLGMETMADRLQRPVPEPEKEEEKTQGAQDSNKE

SEQ ID NO: 161407 - protein, 58 aa, Oryza sativa
  Clone ID: PAT_MRT4530_60595C.1.pep
KKKKKKKKKKKKKKKKKKKKRGGEKKKGGKKKKKGRPFLGSHFYFPLLATPYFFFRAP

SEQ ID NO: 161408 - protein, 125 aa, Oryza sativa
  unsure (1)..(125): unsure at all Xaa locations
  Clone ID: PAT_MRT4530_60596C.1.pep
RPSPSILATTGGGNRILKHPXGXPXAGEXIXXTTCAQCHTDHNGAGHXQGLXXNGLFXXQXGTXPXXTXSTANXNMXVXWEENTLYDYXXXPXKXXPWNXMVXXGLKNXKXVXIXXPTTPLKGAL

SEQ ID NO: 161409 - protein, 135 aa, Oryza sativa
  Clone ID: PAT_MRT4530_60597C.1.pep
EEKNRRRRQLPVPIPAPPSSPHAATVDLTRGGGGGFRAAAPLLPAAATVAATPLRRRSGGCCSHATSATAAGAPLRCRRLQLLLLLPCGTGCGRCSPTEPVAAAARSSPSSSDGSLFPEKRQQLLLPQSSNTTLL

SEQ ID NO: 161410 - protein, 85 aa, Oryza sativa
  Clone ID: PAT_MRT4530_60598C.1.pep
EPMSKVVIELDSIHFSIKKASQMVKEIGRQVATDRCIMALLFLIVAGVIAIIVVKIVNPQNKTIRDIPGLAPPVSRRLLSIVEDI

SEQ ID NO: 161411 - protein, 131 aa, Oryza sativa
  Clone ID: PAT_MRT4530_60599C.1.pep
MCCRSDRRVSRGQTGAAREFFDLCFIGFRRSNRRRTGGQTGGIPAVRLAGDLRSDRLQRQVTGADLDGQTRDTISVRPTATRRSDRRIYFALIAERTRIDLLTKFYNSDIDRVLGDDDVAGEILLEYVKWS

SEQ ID NO: 161412 - protein, 168 aa, Oryza sativa
  unsure (1)..(168): unsure at all Xaa locations
  Clone ID: PAT_MRT4530_6059C.1.pep
LLLLGIYVFTDLLALAAADWCYRLRRRRLVSPPTWLPYYAAIIERPRLYQPTVDRLLSPPTGVFIVIDGRLCSHIGHLAGCLRHRRLVSPPARLAYYAAVDGRPRLHXPAASSSADWCFRXGRLVRRRLVFPPLLDVYIFTDGPPCMMPTGAIVFTVGHVAATTNRRH

SEQ ID NO: 161413 - protein, 119 aa, Oryza sativa
  unsure (1)..(119): unsure at all Xaa locations
  Clone ID: PAT_MRT4530_605C.1.pep
MACVCWVCGLHVSVPSSSLFKTVMVRCGHCSSLLXPPPPPPAAAHFPHSLNLAPPANPPHHHSLLDEISTASSPTQLXGGLMASAASCRNNVCRNNKKMIAFLRWALQPPSFFRAWHIG

SEQ ID NO: 161414 - protein, 57 aa, Oryza sativa
  Clone ID: PAT_MRT4530_60600C.1.pep
TSYEPMITPSSNTTHYRESWLPPAGTRSQEFPRFRHNASRIPFPKIKEGLDINKHTL

SEQ ID NO: 161415 - protein, 58 aa, Oryza sativa
  Clone ID: PAT_MRT4530_60601C.1.pep
MNCLHVDSSKPLEHSSPSSSASLEIKLCYSELMKNEDGSKALVWRLGVNGTVMPCGTK

SEQ ID NO: 161416 - protein, 94 aa, Oryza sativa
  unsure (1)..(94): unsure at all Xaa locations
  Clone ID: PAT_MRT4530_60602C.1.pep
WAAPPVADVAACTGAGGCGWPARLGDAWPAASRTASVXGCAAGGXSVEVEPGGGRRVKTQLVLARTDNDGARVSFPLLRALSCRLTPQGWLPGE

SEQ ID NO: 161417 - protein, 63 aa, Oryza sativa
  unsure (1)..(63): unsure at all Xaa locations
  Clone ID: PAT_MRT4530_60603C.1.pep
PAYSLVXLNILMPLASIFQVSYHMGHVPTIANKSHQFVQSTGGFCHYCMLSRDYFNKVLPEYY

SEQ ID NO: 161418 - protein, 144 aa, Oryza sativa
  unsure (1)..(144): unsure at all Xaa locations
  Clone ID: PAT_MRT4530_60604C.1.pep
TSAGAWAHCTDAXPGQSPHATTSPGSTSTDITSRCAAITHWPSSTPPATPTRVPPLPVATPSPCRLSATSPSLAGHPQPPAPVHAATSATGGAAHAGLPAAAGTTHTNLPLQWRRPPTPPRRRAVHALFPCRVVHSSSPCRAAP

SEQ ID NO: 161419 - protein, 79 aa, Oryza sativa
  Clone ID: PAT_MRT4530_60605C.1.pep
QHGKHLRKKKTQDRLMQPKSRATAPKLSKKAFWYPRTHAQKETRPASTEAREDRRTSNHGKGPKNHRRTTKSTMKHQDT

SEQ ID NO: 161420 - protein, 224 aa, Oryza sativa
  Clone ID: PAT_MRT4530_60606C.1.pep
MSKEKHHKREHHLRRCCGGMAACILALVLVVGFIALVVYLALRPSKPSFYLQDLQLRSVDLGDPSLSATAQVTLASRNPNDHVGVHYRRLDVFVTYRDEPVTVPVSLPPTYQGHRDVTIWSPVLSGESVPVAGFVADALRQDVAAGYVALQVKVDGRVKWKVGSWVSGSYHLFVSCPAMLASAGPGGVGPMPLGGASAAVVNGTGAGAVASLRFTQPTGCSVEV

SEQ ID NO: 161421 - protein, 277 aa, Oryza sativa
  Clone ID: PAT_MRT4530_60607C.1.pep
MEPGCGEGGGGGGGRDERVPQWGAQETRELIAARGEMERESAAAAAARRSAKTLWEAVSARLRERGYRRTAEQCKCKWKNLVNRYKGKETSDPENGRQCPFFDELHAVFTERARTMQQQLLESESGPSVKKKLKRPSGDLSSEDSDDEEDGSGDSGDEKPIRSRKRKIADKRQQSQRMAEKSRTSISSIHELLQDFLVQQQRMDIQWHEMMERRSQERIVFEQEWRQSMQKLEQERLMLEHTWMEREEQRRMREEARAEKRDALLTTLLNKVLQEDL

SEQ ID NO: 161422 - protein, 536 aa, Oryza sativa
  Clone ID: PAT_MRT4530_60608C.1.pep
MDATATSTVAGGGFTGTTISARRAHMEDGICPVNKRRRLALSPCAEVYNSKRIRSQWVDFQSLPEDILSRIMSKLTLKQAVQMSMVSSVFRRAWIFHPDLLFGTEELFGTSDRQLRALSTNGFIDTINFILRKHSGLGVSDFGVKFELWKEHARDIDGWVSFAIASKARVLVLNFSPYIGLRENSYSFPCHLFNDRNGSHFKVLQLDTVTFGPTPDFCGFANLTMLTLKHVLVLDNFQYFLPKCPALEWLEILMCSQLHNLHVSEPLPRLEFLRVQGCAINKIELHAPKLTTFEYRGCFKVIIALHKCLKLKTASIASHIEDNLEYVFTGLPNGLPHVERLHVKVFVRTQNFLGVFQIPGFTQPPLKFINLRHLIMRITFGSAKRFGKNAVLQLAYLLEAAPLLVDLHLDRCHVSACSGGKNRGPAAPFGSVKGTGRQGQRQMTCADICEDPPARDVIIHRPYYNLKRACMTGFNGNGGQIALVRFILRNAVKLEKMTIVPKGRRTGKMMGEYELSLRMIRKKIVPKDKNGVLVIL

SEQ ID NO: 161423 - protein, 54 aa, Oryza sativa
  Clone ID: PAT_MRT4530_60609C.1.pep
SPFGLRISHPINVKCEVVSSSVTTVFLVIRFRGSCYTYYGMLLKSIHSHFKQTK

SEQ ID NO: 161424 - protein, 128 aa, Oryza sativa
  Clone ID: PAT_MRT4530_6060C.1.pep
RRERKAAALARRRRDGAGGGGTHERWLSAREGRRRQGAAATAVGRRGDDARRRGPRFSSARSQGHGGEPRPRAAHGRQGRREAGPGRRRGRHRARGRADATRGDDNMFIMPCHKQLKSGVLCSYYTCE

SEQ ID NO: 161425 - protein, 134 aa, Oryza sativa
  Clone ID: PAT_MRT4530_60610C.1.pep
MVAGRSKTAQEIEEADCKFFWRSTAKGTAPPARASLSPGAAWFGMGGVGTCRDGTIVTKFPGPLDQRTGSRNVYMDELFVNHGGHRAGFAAPSPELCHPWKDGGSIDKGKMVVKTHLARSRRPDSTPVIMEEEN

SEQ ID NO: 161426 - protein, 89 aa, Oryza sativa
  Clone ID: PAT_MRT4530_60611C.1.pep
MAFLDGLYGSRRRMATAKGAGVAGRRRSSSAVAAPRPVRQLYWKLRSRLRSSSKRHAGGAAAARFGYDLQSYSRNFDDGVGLVVSGHRF

SEQ ID NO: 161427 - protein, 90 aa, Oryza sativa
  Clone ID: PAT_MRT4530_60612C.1.pep
MEEETESLKKLCTFRDRGDEDEACAMLSKAEEIHSALAEEGCIENRRHDNLDHQYEGGSGMDSSWRRPASLIQARRMLVVTVEVAVAMRH

SEQ ID NO: 161428 - protein, 79 aa, Oryza sativa
  unsure (1)..(79): unsure at all Xaa locations
  Clone ID: PAT_MRT4530_60613C.1.pep
IIWSLLGLTETCAGSFVSLPNQMCMIGTVGPPVPNIDVCLESVPEMNYDALATRPRGEICIRGETVFSGYXQREDLTKR

SEQ ID NO: 161429 - protein, 164 aa, Oryza sativa
  Clone ID: PAT_MRT4530_60614C.1.pep
TSRRRRRKAEATGEQASSSREAKTTGEKGPPPAEEAAWDLGAERTNERTGPPEEETKSNQTMHRRGCGRTPGDAARGVEIGAAGRQARELMATGRSARAGQEGGDEKTHPSNSNHRKRAGRGSSELGTRKRRKAHRRRAAGGVGGRTPPRGRLSPSSGAGGVPF

SEQ ID NO: 161430 - protein, 49 aa, Oryza sativa
  Clone ID: PAT_MRT4530_60615C.1.pep
YIEESGLVALVKWFKHNSMTYPQIAKVALLILWQSGESEKDDKVVKVIM

SEQ ID NO: 161431 - protein, 70 aa, Oryza sativa
  Clone ID: PAT_MRT4530_60616C.1.pep
MSGRASSLPPPSLPSPPIAAIASPHAAAAAASPPTGSGEGESAARKDREARVRGMHERERGAVLRFLFAQ

SEQ ID NO: 161432 - protein, 101 aa, Oryza sativa
  unsure (1)..(101): unsure at all Xaa locations
  Clone ID: PAT_MRT4530_60617C.1.pep
GGGDNARRAVRRQAFDAPPLPRHQDSAVPEPSARTGEPPLFTPSPTRRHTGAATARRPGLRHTFIAVPHGSWSRTIPNGVXGNGIRVRPVSDSDEESGSSA

SEQ ID NO: 161433 - protein, 878 aa, Oryza sativa
  Clone ID: PAT_MRT4530_60618C.1.pep
MATAAAAAAAAFSPLRRRLPLHHRGRRLLAVAAALSPEPPAPTPTTSPPPPPRKGYFPKRNEVLELTCEGLAFKGKGVCRVDGSTFVLLCDGALPGERLLARVRRIRRGAFAEAAKLRTLEPHRDAVDAPCPLAADCGGCKAQSLAYAAQIRHKHLQVRELLVNFGKFDPRKMESSEPDAILKPIVPCDEIFRYRNKMEFSFGTKRWMQREWKEEKDDEVVKEEKVEGDGYSLGLHAPGFFDKVLHVEKCLLQSEPADKVLAIVQETWLDPALGLTPYDVHKHVGFLKHLMIRTGRNITTGAPEVMVNFVTSCYKPELLEPLVNNITKIPEVADVLYKLIGESAGLKGDGSEIILDLFCGTGTIGLTLARRAKHVYGYEVVPEAIADAKKNAKLNDPNRPGMHMKLIKWLLEVKAPRIVYVSCNPATCARDLDYLCHGVEEKDLKGCYELKTVIPVDMFPHTPHIEYGGDPFDSLPAAIAADVLGRVADGADIAAYCLASRAFLAASYACSRVHLRAAALARRRSVALAGGGGGGPPGGSAIRAAAGNAASLLGPHLRSLELDASEGWGHPDDATWVEEGEFDEGGDLHLTAREAVVAWADTAAGNALREVDVADYWPQSCWRKAEALPVISHFCHSLLKLRLKNAWLSVDGLKIMPNLTHLTLEFIRLDDEDLNKLNECFPCLQILNLIGVGGLKDPKIHLHQLKTCHWEVSNVPRSLTIRAPNLVRLELKCVRPDMLILDTPSMFTLKLTVDKLGPNVQADGLVSLKNLRIESLDLKSLLQVFAENHDITTLELELPTSTNKYELFEAVKPEYLLQLFAGISEDVPHLAPLFNNCAPSCEVTILFHADSSDDIRQAATSVWTLRYPGIRWQWGTWN

SEQ ID NO: 161434 - protein, 203 aa, Oryza sativa
  Clone ID: PAT_MRT4530_60619C.1.pep
NVPRSLTIRAPNLVGLELKCVRPDMLILDTPSMFTLKLTVDKLGPNVQADGLVSLKNLRIESLDLKSLLQVFAENHDITTLELELPTSTNKYELFEAVKPEYLLQLFAGISEVKLAPRFSCEMTHCLMLCTSNQFRSCLRRLLFHLPPLKDVPHLAPLFNNCAPSCEVTILFHADSSDDIRQAATSVWTLRYPGIRWQWGTWN

SEQ ID NO: 161435 - protein, 214 aa, Oryza sativa
  Clone ID: PAT_MRT4530_6061C.1.pep
MAQDPSHPHRQSKDTAAAPPPPPPQEQPQQQQPELITAPPPRDDVAHQEPSTSSSSGGGGTDAAGLSLQLGLGPSAPGSPSSSRRKRPRTDAHHEAAAGPSTSAADPQLPELRLSVLHPGPGPSSSASAVGAVVAAAPPPPAHEAGTWFVLRAAQNQRREPPLPQIPRSFLRVRDGRMTVRVVMRYLVNKLSLEDDSQVKGVRPSVTSWVTPHD

SEQ ID NO: 161436 - protein, 65 aa, Oryza sativa
  unsure (1)..(65): unsure at all Xaa locations
  Clone ID: PAT_MRT4530_60620C.1.pep
TTQDWGGGTGPCWRLHSSGGDXAEVLDLAVGEDSTGLGRGYXTSCRYSSPANISYLVLAARGRRR

SEQ ID NO: 161437 - protein, 129 aa, Oryza sativa
  unsure (1)..(129): unsure at all Xaa locations
  Clone ID: PAT_MRT4530_60621C.1.pep
QKAAIDFRXRHESGSAGSSSNFSLRLPHIGGDDDVAEEEGLRRDVPSAEEGGGAAAGGVAGVGVRGDDAGGGAAAAAELVVLLLRRVLRLLLVRLLVVVVLLLLPVAVVQPLQLQLPNLLPPQLVPLCS

SEQ ID NO: 161438 - protein, 131 aa, Oryza sativa
  unsure (1)..(131): unsure at all Xaa locations
  Clone ID: PAT_MRT4530_60622C.1.pep
LADSEFXFAISVFCQCKAQKNLKGRPHIFPEHHDRLPKSNLTKSNRKHHVTKSFQQKPPICLYSTQNTGDTILRGNERREGGGYGDLLGCSHPSCARYPGLRATAATPSRLLRRRRRRRTARRREGGGWRA

SEQ ID NO: 161439 - protein, 32 aa, Oryza sativa
  Clone ID: PAT_MRT4530_60623C.1.pep
ESWMFVYLQNGAYTCWNYNRLIACITKPDSRT

SEQ ID NO: 161440 - protein, 313 aa, Oryza sativa
  Clone ID: PAT_MRT4530_60624C.1.pep
GAITAVPYNGSVLAVDGLIVPSGFDLAASESRPPAAVNITKVLADARAFNVAASMLEASGVADEFEADERGAGITVFAPTDDAFAGLPAGDRLQSLPAERKAVVLRFHVLHSYYPLGSLESIVNPVQPTLATEFTQAGRFTLNITRANGSVAIDTGVVQATITRTVFDQNPVAVFAVSKVLLPKEMFSRSDSAIVAVASAPPPAALPAESPESAPTKLSSPPALRDTAGNANHTAAAAAVAAAAATTKPTIGRWCIALLYLLLLPLLLPLICMGLGEEGGEVTGEVRGEERRRVGGGSELAGYTGEGEKFEKR

SEQ ID NO: 161441 - protein, 52 aa, Oryza sativa
  Clone ID: PAT_MRT4530_60625C.1.pep
KKKPNNQLEAKKKKKKKKKKGQTKKKNKRINNTCMQKKKILNRVTIKLIKLS

SEQ ID NO: 161442 - protein, 51 aa, Oryza sativa
  Clone ID: PAT_MRT4530_60626C.1.pep
NHFKNSSCLDRSLACCSSNPLLLFVAKIWVLFFSFFAGFFWRGFASMEGLR

SEQ ID NO: 161443 - protein, 128 aa, Oryza sativa
  unsure (1)..(128): unsure at all Xaa locations
  Clone ID: PAT_MRT4530_60627C.1.pep
CKQRLFHLLTRSHPCKRKQLINPLIPQILISKSLLVSSSTVIISDQIAKSSAQKAADRSRRRGRATNLDRSIDDASEAGCGGRRRRAAGAAGRGPRRRRGRPHRPLPSVQGGSSDQDPPSSXQGILCG

SEQ ID NO: 161444 - protein, 276 aa, Oryza sativa
  Clone ID: PAT_MRT4530_60628C.1.pep
MALPVPDDAFAEILGRLPPKSLAVARCVCKPWRELVDSRGLLLRRLLPRSVDGVLFNYVGHRRPHLLSLRRPSSSSSSSVPASCGGGRVDGDLTASVPAGDRAWWAVVDHRDGLLLCDVYWGSRLFVCNPATRRWATLPQPPPEREPAAACAGGKYLAFDPAVSPHYEVLLIPALPEKAAEDAVDGDEAAAAYLSMEWPPSPYKVEVFSSETGRWEERVFVREEEGEAAAATTVEDMKSWEYVFARPRQGYSVFWKGALYVHSGGHFVTRSLCFIL

SEQ ID NO: 161445 - protein, 166 aa, Oryza sativa
  unsure (1)..(166): unsure at all Xaa locations
  Clone ID: PAT_MRT4530_60629C.1.pep
CKYILVIYIYIYIYIYIYIYTHTHTHICICITYICINTYILCMYICTEPYIHIIXYIYIYIYIYIYIYAYICIETYICMNIYTYVCIYICIYIYIYVCIYMYVCMYTYMYIYVYICIYVHIYRDILYAAAAGGRPPPGSGGGGPVPAGGEPSGPIGNMRYCHVGNL

SEQ ID NO: 161446 - protein, 257 aa, Oryza sativa
  Clone ID: PAT_MRT4530_6062C.1.pep
MAARRLGEQLTKCEEAVARRETRHLESARTERAAMAARVSELGAREKELAARGQPGDAELVSQLTAAQDTLANLGRLVQDQAGEIAALRLTNDTGPGQLYDAIEWLEHAGRRVGISMRRDKKLSPTRPALALRLDEMAADLERLEKEVGDAVKSSSVSLARAAVELVLMSHQAPCDLGFLPWCALEDFPLGTEARTWEQVRDAADAIISSFERTAPRFNLALPSDEESGSDDGGGDDGDEDWGKVVSGAGLGGGGTP

SEQ ID NO: 161447 - protein, 744 aa, Oryza sativa
  Clone ID: PAT_MRT4530_60630C.1.pep
MECNRDDAIRSKEIAERKFNENDIAGAKRFALKAKTLFDSLEGIDNMISALDIHIRAQTKIEGENDLYGILDISASDDDEKIKKQYRKLALQTHPDKNKFSGAESAFKLIQDAWDVLSDKDKKRSYDQKRFGGSSRVYQNGFAENANATPGSTMSSMNGFFWQNSGRHPSYATDTFWTYCDSCQMSFQYSREYVNRNLACSFCQTEFVAVETPPPTAPVYYNVTNLMDTSSNMDDPQGTGVPYSSNKIFDPVLQPVFGSVGGAHASRYPVQQTCKPARKEEVAEVNVARREEATKRKHEQASSSLGSSSSAAKVIHRRKAVTKEMEAEKRRCINNKSKVSGQKNNTNKVVGKSTSSAADGDSGPQMHPAKRKSASSIGTSGTKRRKMPSDHNSGNARTSFGKVFLQLETEIPGLKMEKMKLQIRDKLEEFKSRRANVENKGNVHVSLEKKKTWKWKKPATLFVYTRRNRKEHRKEPGVDAIGAGSSHKHLDGKYSCLDQVPSSDEGSCVMPVPEADFYTFGDHPETSFQNGQIWAAYDEEDGMPRYYALIQKVLSRHPFKVRLAFLKAKDCSEFVTSNWISYGYSKTCGDFIVGTPKNTDQLNTFSHVVTWEKGPGGIIRIFPRKGDIWALYQNWSPEWNTCTPDDTIYKYDLVQVLDSYNPSAGISVMPIVKVPGFVSVFTPLLDPTKSRTIPKEEMLRFSHQVPFHVLTGEEAKNSPKGCYELDPGSTPKELLQVVPQSDGV

SEQ ID NO: 161448 - protein, 156 aa, Oryza sativa
  Clone ID: PAT_MRT4530_60631C.1.pep
DPSSPLIHLGYGQLYSRRLSYLTLTGERTMCAQRLDRHDEQNIHAISHSLSLLNTPLIIFSGVWTNRRTGASPIGHLPHWRALDLEQSRAALCLGGSVRWPYEPATVIATEHIQVFSTHFVLTCAHSGTISRSVTYPEITPRRTREQFPDRSPMHA

SEQ ID NO: 161449 - protein, 152 aa, Oryza sativa
  Clone ID: PAT_MRT4530_60632C.1.pep
MGSALLPTLRRKPEVDAAIRDTLDKVLVLRFGRADDAACLHLDDILAKSSWDISRFATVALVDMDSEEMQVYIDYFDITLVPATIFFFNAQHMKMDSGTPDHTKWIGSFSSKQDFIDVVEAIFRGAMKGKLIVSCPLPPERIPKFQLLFKDV

SEQ ID NO: 161450 - protein, 114 aa, Oryza sativa
  Clone ID: PAT_MRT4530_60633C.1.pep
VRQLMVYPSIFGVWLSEVLCFLKNKFCCIAFFRIVGERRLRSFTVCRGACEMDDDPRSKSASTSNLCTFSNKPRRAFSHCPEFVVLGDLPPGELPPIEGLISPIPAPCVGVKRL

SEQ ID NO: 161451 - protein, 84 aa, Oryza sativa
  unsure (1)..(84): unsure at all Xaa locations
  Clone ID: PAT_MRT4530_60634C.1.pep
PRRLAAGVRVRPTPDPDRRGRIRPPXPPLRAFIPPAAYPPAPDPRRRAWEPAPPPRHRRRPGCPPLQPSSAPPLXPTPHASAHA

SEQ ID NO: 161452 - protein, 43 aa, Oryza sativa
  unsure (1)..(43): unsure at all Xaa locations
  Clone ID: PAT_MRT4530_60635C.1.pep
SNKPLKVPLRFYRYKNVRGFRRWSRLGAKSIHRTKTGRSQAXL

SEQ ID NO: 161453 - protein, 143 aa, Oryza sativa
  unsure (1)..(143): unsure at all Xaa locations
  Clone ID: PAT_MRT4530_60636C.1.pep
MGMENPPLRWPPGFRFSPTDEELVLYFLKRRIATGRPTPYIADVDVYKSHPSHLPERSALRTGDKQWFFFSRMDRKYPNGSRASRTTGEGYWKATGKDRSICNGXGGGTASGRAVGSKKTLVYHHGRAPRGERSDCVMHEYTL

SEQ ID NO: 161454 - protein, 252 aa, Oryza sativa
  Clone ID: PAT_MRT4530_60637C.1.pep
MASRAAAVAVLLLAVAAAPLFAAASAHGRGYLGAKSWPPDGSLSSSSSGEAAAADVDDGHTDWKCYSSCMSKCCHRHDDDDDDKANAKANATAGAAAVGLDDDYKCKKQCLGNCFKDVPAVCYHKCVDDWCAKLPPYSSAKVQCYKKCGDKCFHHGPKPGPKPKPKPSPPKPKPGPKPKPPKPGPKPKPPKPGPKPKPKPPKPGPKPKPKPPKPGPKPKPGPPQPWWPIPFPKPPCPPGADGSSSAVDDKNN

SEQ ID NO: 161455 - protein, 54 aa, Oryza sativa
  Clone ID: PAT_MRT4530_60638C.1.pep
YFPKSLGLEKYSITFQAEEVDMAALRHMTDSDLKALGIPMGPRKKIMLALESRA

SEQ ID NO: 161456 - protein, 618 aa, Oryza sativa
  Clone ID: PAT_MRT4530_60639C.1.pep
MKFMKLGSKPDAFQSDGADVRYVISDLATDVIVHVSEVKFYLHKFPLLSKSSKLQRLVIKATEEGTDEVHIDGFPGGVTAFEICAKFCYGMVVTLSPHNVVAARCAAEYLEMTEDVDKGNLIFKIDVFINSSILRSWKDSIIVLQSTKALLPWSEELKVIGRCIDAIASKTSVDPANVTWSYSHSRKGMSCTEIVESTGRTSIAPKDWWVEDLCELDVDLYKRVMVAVKSKGRMSPELIGEALKAYAVRWLPDSYDALVAEDYMRRNQCLVETIIWLLPSDKTSGCSCRFLLKLLKVAILVGAGQHVKEELMRRISFQLHKASVKDLLLPAASPSDGAHDVKLVHNLVQRFVARTAMSHNGGFVEKSDDKMIELNFEQESTLALGELVDGYLSEVASDPDLSLSTFVELATAVPEAARPVHDSLYSAVDAYLKEHPNISKADKKKICGLIDVKKLSTDASMHATQNDRLPLRLVVQVLFFQQLRAGSSNALALTDGGGHTCAKPIMKDQSDICERRIPRHPNSLNKQATSLSAREVEHRKSEHRGGGRNSFKDQLGGFLLQSRSRRIFDKIWSSKGQGENGKGSETSGSSQSPPLSAKPADVKPSPLPPLRNRRYSVS

SEQ ID NO: 161457 - protein, 455 aa, Oryza sativa
  unsure (1)..(455): unsure at all Xaa locations
  Clone ID: PAT_MRT4530_6063C.1.pep
MTRNHHEPSTPSSSSSPSPPSSSTSTSSAASPTSAPSSTPRSASSSPRRSRSSSPSCPTSSPRPRTPVPPPPPPAVARARSSSSSRCGRGXSSCGCSSSSCSARRWRRFGWRHGTPAPSSAPAASRGSAASSSSTSAPPAARPCSASCGLSAPPSWCSGXPTPRSASAPSPTARTPSSSSPTWRRCFRTMPRSSSSTTPMAAMAGTSSXEMQVFGDGRRRPGXSNRSTPATGSPATSTPSPPSARSGPSPRATISSRRSTWTIASGGSACRSRSSSCCAGASSAXPPMTEAETRHCRDLLFRGLYAGAGDGDGGGAEALFEVMSDEAXSWPSTTTPSSPWCSRAPSSCSPTTSSSRSSCSCSASSSSCSAATATCSSPSEASRATTTPCRPAAWRPWRGACCGPSRRRRRRSSQPSTSPSRRSSSSCSCTRRCGSSSSSSSPTGSCRPTVPRVRP

SEQ ID NO: 161458 - protein, 126 aa, Oryza sativa
  unsure (1)..(126): unsure at all Xaa locations
  Clone ID: PAT_MRT4530_60640C.1.pep
MALVLSTSVDVADAAEERALAARVTTTRGYAEXGGXSQMRRPTPTMEGKGAAGMTQAKDGSSSSAAREVSRVPDPVTGHYRPSNFAGXXRRRRPPSRPPRPKLRPRVMRATSPSXDRRRRHPSIYI

SEQ ID NO: 161459 - protein, 126 aa, Oryza sativa
  Clone ID: PAT_MRT4530_60641C.1.pep
MQARVRVRDPRAIRSPLRFHLQHASPLPLSSPLEALSFFASRMHEQIQKVCRLGRTKELVGGHCTYVEGAMSSMNDTGSGNWSGTTAVTTTVFLLSSLAPSSMAGHLPWRHLHSLLQPSDCCLLWI

SEQ ID NO: 161460 - protein, 495 aa, Oryza sativa
  Clone ID: PAT_MRT4530_60642C.1.pep
MATHQRRHPSVAAELEGTLLISGDLFPYFLLVALEAGGPLRAAVLLAAYPVAALLGVALPDDDLAVRVMTFVSTAGLSVADVAAVARATLPRFFLADLSDAAFRAFARRDAAERYVVTRLPTAMVEPFVREYVAEGARVVGAELRVVGGRFTGAAVNGDRSLGALQAVLGRGRRVIDVGLCSGDGAAKRQPAFMKICQERHVVSTPEKAPAAPLPRSEYLRPLIFHDGRLVGRPDPLACLAVALWLPLGAALAVTRILIAFLPYSVGLLLAAATGFQIRAHLGGAPPRWRGGTLYACNHRTLLDPAVLSTVVHRKVTAVTYSLSGLSEMIAPIPTVRLTRDRGRDRVIMQSVLAGGDLAVCPEGTTCREPYLLRFSPLFAEIAGEVTPVAVRAGGAMFHGTTVRGYKGMDSFFFLMNPAPWYHLQLLDPVPSSSAAADGDGGGDGGGESSRDVANRVQRAIGDALGFECTALTRRDKYRMIAGHDGVDMRGNARL

SEQ ID NO: 161461 - protein, 76 aa, Oryza sativa
  Clone ID: PAT_MRT4530_60643C.1.pep
VVRREYLASGCGFVLLIEGSLNLELDWTVVRKPMIWDNMGSGVGLLWVSSISLQPWVGSACERRDRGESYHIGPNI

SEQ ID NO: 161462 - protein, 329 aa, Oryza sativa
  unsure (1)..(329): unsure at all Xaa locations
  Clone ID: PAT_MRT4530_60644C.1.pep
APSYNDFYNRSSSSTRLRHQASGCRYXRSPRAVVPLLVXTSTGCWNAERFPPQCGLTTGRVLAAALTXSCCCVVLSDRSFAAFVVFLAVRASTTSSSALVIVSHSDYLYMATDIAVQAVGPATSPSSSSNMVHRQRRRIFLDYTSLFSGNCVLLQQFSLYAVLACPRVWQTRRDVSSFTVRLHRLFSVIYLXTTAAIASPSSSXRSRAPWSTTPXPCIHDHSTAPPAXSAARLPRHRXPDYGYIDHGYSTHGYLDHGSLAPFALATSTTAQRAIILIEYSCWFLLQSKCPRCSRLDCGGMLEYMYSIYTGPLRLNTMXPYYAVYLFSYT

SEQ ID NO: 161463 - protein, 88 aa, Oryza sativa
  Clone ID: PAT_MRT4530_60645C.1.pep
MDMHPPAQCTVHASIGASYGTPADQTSGWAADVGSRVVTGYRHRRKMTRAQGGVPCAGAGARESRLGPCTVVDPWCHATVKFREKKYR

SEQ ID NO: 161464 - protein, 377 aa, Oryza sativa
  Clone ID: PAT_MRT4530_60646C.1.pep
MASSPTTDGLTESVAKRKGSPCQQDDDCQDDKRIRSGADLLEDIFWYIHSLMPLRDAARAACVSHSFLRSWRCYPYLMFSEELLRLQESAFSDDERTRNLISKVNHILQNHSGIGVKKLELVFLDSTDVDLSYIDSWLHKAVTRGIEELTLILPINSNAEYSFPCSLLSDGNDHSSILCYALTNLLSIVPNVEKLRISSQTQIVSTQTVPGKYLRLKHLHISLNRSPNFDYLSLVSFLDASPSLETFILHIWDIYIPLGHMGHPWTLGDSEQLRQMPGHRHDSLKKFEVVGSCYAKGLVELTCHILETTSSLDRIKLDTCGYVGLCASGSGRCYPHYTEQIMEACNSVLAIRTYIMGKVPPTVKFELVEPCSRCPVQ

SEQ ID NO: 161465 - protein, 213 aa, Oryza sativa
  Clone ID: PAT_MRT4530_60647C.1.pep
MPHDHGDSSSSDDRHRIMSAYANATRWLLAPSAERAIKSVSLSFLIAEPYLLHAVARAVDDLLLDGSNSSLESLEMDMWTDRVAAGAATLEQRRLFGQRFQSLFDAYPAPFRCLTSLTLQNLRLRGGRDCWSLRQLQHDAATLPWPMPGWAGPTQQMFTWPSRTATYGPVPRSTSKEAFIPTNPGPHQQNMKKRGLPMTCGPGVYIVPTVIDT

SEQ ID NO: 161466 - protein, 83 aa, Oryza sativa
  unsure (1)..(83): unsure at all Xaa locations
  Clone ID: PAT_MRT4530_60648C.1.pep
GFNSLPEWIGQFIYLKEISIFDXPNLTSLPESIWNITTLELLYIYFCPRLAEWCQREDANKISRIPKIMLDGEIFIPGQAIDG

SEQ ID NO: 161467 - protein, 150 aa, Oryza sativa
  unsure (1)..(150): unsure at all Xaa locations
  Clone ID: PAT_MRT4530_60649C.1.pep
TSSRLHLPPPPHSPRHQPSPPXSPPPATAATSFSTPPPPPFPLPSVISHLHPGSPELRPIPPLPTSTHLLPSSTSDPSTAPLTAGEPSSSSLSPSSPSATSPTLGSSPXPSPPAVAPTATWESPQSITPQAEDAAFGSNGSARLVPLRPH

SEQ ID NO: 161468 - protein, 85 aa, Oryza sativa
  unsure (1)..(85): unsure at all Xaa locations
  Clone ID: PAT_MRT4530_6064C.1.pep
SGNGRSATGNRTEVGPPPPPAPASSFRARAXRLQLGPTRELRGGANAVRCSAAVHEIPAPIPLKPERKYAPRGPNRTRTHCHVGP

SEQ ID NO: 161469 - protein, 67 aa, Oryza sativa
  Clone ID: PAT_MRT4530_60650C.1.pep
GEVFCKKNGRVLEGISRAICIQGEDWALALLDVWGGFLQRAEIKSNAKISQARNGVPLGVMDLEGFY

SEQ ID NO: 161470 - protein, 137 aa, Oryza sativa
  unsure (1)..(137): unsure at all Xaa locations
  Clone ID: PAT_MRT4530_60651C.1.pep
MRGGCGWRGRRAAGDRRGAPEALWAASPSMPSTMSFATPGSSSAPSAPSALPSTXGTSWPAASSISASLTAPVVGSTMAVATASPSAXRTSSTSCPSSCPAAPSSPLRGTSAAEARLLSAGRCSSPCSSSLASAAAT

SEQ ID NO: 161471 - protein, 305 aa, Oryza sativa
  Clone ID: PAT_MRT4530_60652C.1.pep
PRVRPRVRPPPPPRGVDDQFPSLTLSPPLPTRNSRRRHRVGRFGSTEMDGGELVLAPSDDHDGCSHQEPPVADASGSSRCRRDMFIGRDGGRGVEFRRRATTVDGPEEDAAVDVKVITSDADIIIDLGADDDDDTPERVLRPVVTRPARRELDWCEPAEVKHVDLAELMTPRASSASASSEKSISTGKPRRSSVSSRRRLKTRTNSPRLAACRKGKPTARATTTTPTQPPLAHSFAVVKTSSDPRRDFLESMEEMIAENGIRDAGDLEDLLACYLSLNSGEYHDLIVEVFEQVWTGLAAACGVMP

SEQ ID NO: 161472 - protein, 154 aa, Oryza sativa
  unsure (1)..(154): unsure at all Xaa locations
  Clone ID: PAT_MRT4530_60653C.1.pep
KGLTDCRCLRLNSARYPSRLPTNGPTPITHADTSPSSATTMSCSASSPPLPPLLCSTLPTAAHSPTCSGHSPPPAPLRLPRPCPLPLAAGTLLHFAGRRRRXFCRRRYLLRRARCLCHRRPPVPAPSSPCAQREPRERKERERERRERNMFVLA

SEQ ID NO: 161473 - protein, 113 aa, Oryza sativa
  Clone ID: PAT_MRT4530_60654C.1.pep
MARPRLRRTTTCRSGARGGHGEAEAAPASFLTGEVAPQRDLGVAELECLRYSADPPPPSSTTTTCRSRPSTPIPAGTATTHRYWSCRHLLRRRRRLLLPLVLLCDHKVVSPEL

SEQ ID NO: 161474 - protein, 67 aa, Oryza sativa
  Clone ID: PAT_MRT4530_60655C.1.pep
WGFLSTVLPLLGVTVAQKKLPKNFPPMSVTPLEYGLFFGYYPNKKPFLVQKKPPKQKITQNQKKMSF

SEQ ID NO: 161475 - protein, 107 aa, Oryza sativa
  Clone ID: PAT_MRT4530_60656C.1.pep
MSTAVKAFLNSPVGPKTTHFWGPVANWGFVLAGLVDMNKPPEMISGNMTAAMCVYSGLFMRFAWMVQPRNYLLLACHASNESVQLYQMSRWARAQGYLEKKEPEAQQ

SEQ ID NO: 161476 - protein, 450 aa, Oryza sativa
  Clone ID: PAT_MRT4530_60657C.1.pep
MAASVSLAVAATAVVALLLALPVALAEIKTTPIVADSRPVILFEEFGFKPGGVSAVSVRGVSWRVAEGSKLQAADPGLMGFILISNSLFFQINNESDYAEATGGAFCPLTSKYVLPLFRLKDIAPDGNGKGSVTIDDDDQYTVLFSSCQDGVEVTMEVRTEMYNVRPGGGRGVREYLPVGLLPLPGIFAAASAVYFVFLGAWAWACARHRATAGQIHAVMGALLLFKALKLACAAEDAWYVERTGTPHGWDVAFYVFGFFKGVLLFTVIVLIGTGWSFLKPYLQEREKKVLMIVIPLQVVENIASAVIGETGPAGRDWLAWNQIFLLVDVICCCAVFFPIIWSIRNLREASKTDGKAARNLKKLTLFKQFYLVVVGYLYFTRIAVSAFAAVLSYRYQWVVTVAMEAASLAFYIFVFYNFKPVENNPYLYVGEDEEEEASGQLEMEGTFEI

SEQ ID NO: 161477 - protein, 120 aa, Oryza sativa
  Clone ID: PAT_MRT4530_60658C.1.pep
PPAPGAGREPRRFLGDKPAPGGFLVGSPGPLPGAPPGQAPYDGHGLIGDHLWGLCPLIISPTCVWVLAPVNTYIYISRFDRLFIRCYPTLMSSKYYYPIIYNSFISFYFSSAYIFTFSFL

SEQ ID NO: 161478 - protein, 88 aa, Oryza sativa
  unsure (1)..(88): unsure at all Xaa locations
  Clone ID: PAT_MRT4530_60659C.1.pep
PTRPPTRPGRSFFFFLLAPARGSTWRPRVAEXXXLSLNPQPAVPSFSGKQPXXDRPCLPTRDACARRRAAPLRPPLYRPSGDACDLQP

SEQ ID NO: 161479 - protein, 165 aa, Oryza sativa
  unsure (1)..(165): unsure at all Xaa locations
  Clone ID: PAT_MRT4530_6065C.1.pep
GGRDRPYPFEEGKLFALTVTAGLDGYHVNVDGRHVASFPYRTGYSLEDATGLSLKGDLDIESILAGHLPNSHPSFAPQRYLEMSEQWKAPPLPTEPVELFIGILSAANHFAERMAVRKSWMIDTRKSSNVVARFFVALNGEKEINEELKKEAXFFSDIVIMPFMG

SEQ ID NO: 161480 - protein, 70 aa, Oryza sativa
  Clone ID: PAT_MRT4530_60660C.1.pep
GCTPGLVALVSRVACCSSPPATKTHRRVAAKAETAVGTAPAGSAPTRCRPRPPSTPPVGFAPRALLSSAR

SEQ ID NO: 161481 - protein, 128 aa, Oryza sativa
  Clone ID: PAT_MRT4530_60661C.1.pep
SALSLSLSRCFPFGLLVGPFSPPPSCSAWYGSHYMTAPTPTDTPLPVAHAPLCVPRVRADALRADVRRAHLRSSEPRSACAPAIPEEHLRRKGVIYSPHRTASRQSDEENATRCYNHAFCQPKRVRTH

SEQ ID NO: 161482 - protein, 34 aa, Oryza sativa
  Clone ID: PAT_MRT4530_60662C.1.pep
MAMQASFSASMLPHLAQRMGSDRAVLVAPSSPSP

SEQ ID NO: 161483 - protein, 47 aa, Oryza sativa
  Clone ID: PAT_MRT4530_60663C.1.pep
KYAAARSRKSGNHSLHKLWSLNPHHVNWQSTTGQTENTLFYAIKLYP

SEQ ID NO: 161484 - protein, 573 aa, Oryza sativa
  unsure (1)..(573): unsure at all Xaa locations
  Clone ID: PAT_MRT4530_60664C.1.pep
ERCGVLFETPAGFALFKVLEEGKHDKVEDLWKEFTTSDSARKXVVELKAFNKFEXNTSDALSGATXLIVDSMPTKGWRXFVQKHXLEERLAENDSKLGNAIKEKLKIDCLHNSAVMELMRWFRNQLTELISGLGAQDLGPMSLGLSHRLSRYKLKFSPEKVDTMIIQAIGLLDDLDKELNTYAMRVREWYGWHFPELTKIVADNIQYAKVVKMMGDRTNAESLDFSEILSDDEVEAQLKEAAVISMGTEVSELDLLNIRELCDQVLALSEYRAQLFDYLRSRMNTIAPNLTALVGELVGARLIAHGGSLVNLAKQPGSTIQILGAEKALFRALKTKHATPKYGLIYHASLIGQAAPKHKGKISRSLAAKTALAIRYDALGDGEDNSIGLESRVKLETRLRVLEGKELGRSAGSTKGKPKIEVYEKDRKKGAGALITPAKTYNPAADLVLGQSTEETPKKPEGASKKRKHQEAEPAGAEETIQEDGDQEGQKKKKKKKSKDSEDSPVADADGGKKKKKKSKESEEPPVATAEGEKKEKKKKKKSDSQDAKDVAMETEESGKKEKKKKKKHHSDE

SEQ ID NO: 161485 - protein, 406 aa, Oryza sativa
  unsure (1)..(406): unsure at all Xaa locations
  Clone ID: PAT_MRT4530_60665C.1.pep
YIYDNEHWSNIISKQDEWKYGKYTGQIASAVGVDRHNWLLPVAYGVFDXKNYDNWEWFMQRLRNAIRTPPGSVIHTDSNKNKGFQSAISDVFGEHVEYRECFRHLLLNFNKKFRGGIFDSYMWHAAWTYVRHKYDVIAQACPATFEHLETYHPHIWTRSKFSPTSKIEYVCNNLTESFNSWIKGIKELPLVDLANKLRQMIMKQMSKRKVVANSLTENILPSVVRALNAKSRGLNYTIIRSGDHGAEVTTFDKKTKKELTFGVCLDKNKCTCRQWQISGKPCLHAITFICSIRGAKIEDYADECFSVAKFKMAYETSITAIGDKSQWPKVDPGFKMLPPKLGRSAGRPKTTRIPNSGEGSSKKGRKQCXRCHEFGHHAKGCKAPKFDPGCMVPPPQPPKAKKRVQL

SEQ ID NO: 161486 - protein, 115 aa, Oryza sativa
  unsure (1)..(115): unsure at all Xaa locations
  Clone ID: PAT_MRT4530_60666C.1.pep
MTSLPTAARHHLLAGERRRGGANEQHLXVEGEVANSPRARTMTDDKRRRRRRGRGSEDVRVDDNGDAPAIFGGNGVRDEDGDDLVIPTATFPSDDDDQSGGGARLDLRRRRRRTG

SEQ ID NO: 161487 - protein, 332 aa, Oryza sativa
  Clone ID: PAT_MRT4530_60667C.1.pep
MLTCNFEVGLPKEKFLATPLSAMAPAGFFDLSILPDDSKSTTTNTSVVARALDLGYSAVALDHPHRGLLTDSHAPIASSLRVSPSASLHRRRHPFLQYTRITLSLDSAAACASALAPSAARLLRTYDIVAARPLTQAAFDHLCQATFDHLNIVSIDFSHKLSFRLKLPMLKLALQKGLHLEIAYSPLIADAASRRQAIAEAKLLVEWTKGKNLIISSAAHTASEIRGPYDAINLSSYLLGLSTQRAKAALSVNCRSLVSKALRKKHFYKETIRIDRLLPNRQLNSADFKLADWISWDPMPHEVDLLSLELPAYKGEPQSLDINPEPSANEDD

SEQ ID NO: 161488 - protein, 114 aa, Oryza sativa
  Clone ID: PAT_MRT4530_60668C.1.pep
DLQYHLIGVDPIPFLHVHLHEIQQRNQSFSVQRNKIMVLGSRAPLGRTCIMYQDYPVASLPRALMPWQRGKDRQPLERDVALALAAEGPGAGDASSATEQPDPLGSGLRTLPQQ

SEQ ID NO: 161489 - protein, 494 aa, Oryza sativa
  Clone ID: PAT_MRT4530_60669C.1.pep
MVATPVRWPRVLTPAHLAGAIRRQKSPLDAVHLYADAPRRYPRSSYRHNDAVHSSLLAAASASSSDLLPSLLRRILPSSPSADSLLAASIPHLPPAAAVSVFRSSLPSSLAPSWSRSFSALLRRLLSDGLLPEAARLFADFAGRPEVSLASEDLTSLITGLCRARRPELALQVLDEMSNQCLAPEKDAYRAIVPALCDAGMLDEATHVLYSMLWRVSQKGCDEDVVVYRALLVALCAAGRGEQAEIVLDKVIRKGLRSSGSRRSLRVPMLAGLSIEDAQEIIDQALVVRGGRTVASFEVMVIDLYDEGRLNEADNLFKEMGKKGFKPTIYMYEAKITSLCREGRLDEAVKVLEEELPKNDLIPTVTTYNLLMRGLCNSMQSMRALRYLGRMDKQLGCVTRKETFSILISGLCSESRFIDAAQIMERMVKGHHRPEAGEFNNVIEGLCSAGRTYDALLWLEEMIDHGETPDVHVWSSLVSAALGLGEGLTTAATH

SEQ ID NO: 161490 - protein, 164 aa, Oryza sativa
  Clone ID: PAT_MRT4530_6066C.1.pep
MPSHSPLACRSSRWKKRKWRGKGISRLPRRIRSGHTVNEKKKRSGTRWQFRDSLTVTRLLSKVARYGSGTRRYIQNMRVGMMGYMEICVTEGVRAKAIMVILQVIRGDGGVKRKKLQGEWSLLKTVSLVYARRAARGEAAKGNNPSLEDRWIGMGEDGGVAMDS

SEQ ID NO: 161491 - protein, 339 aa, Oryza sativa
  Clone ID: PAT_MRT4530_60670C.1.pep
MDQGKRQVMRRTFSFGYECDLKSYTHSTGDTTEKRGRSNERRRCSLYSVHDEQWPNSRPMQCLLEKNSKDGFQSSPTSSSPRTSPSLRDPPLSLPVLPNSDLSVSLPDLHKLRRNEPVTSGILHVRDLSFLRPRSHNGDDDEETEEMTREQEEKYLQWRSSLVEKLAGIELNLERVKFRMSVEIPPSDDFRAMKKESCEEDSEKARHNSCPWCAIQVVCGDEDIIESLHTGHTHYHRKLLGQTRPNNERPLPAAVEPPSTACLSRRPPLASPARTAARSWPPLPPKRVLVINGERCDGVGGFKGVNRIRCKIKRPQMNIFSLETETINWTGKGSIFLVQ

SEQ ID NO: 161492 - protein, 74 aa, Oryza sativa
  Clone ID: PAT_MRT4530_60671C.1.pep
FLVPPLNPLVCLIYKNPGPPPKAPPLARFSPSPPKATIKRVGATPPAFSNVNIPLALGGFFPRLSYPITPPPAP

SEQ ID NO: 161493 - protein, 76 aa, Oryza sativa
  Clone ID: PAT_MRT4530_60672C.1.pep
KGAKKKKKKAKKKRTKRGPRKKREGPKKKRGVEKKDKREEEKKKRGGKKTGGGGGKKKKKKKEKKRGGCEKKKGGG

SEQ ID NO: 161494 - protein, 54 aa, Oryza sativa
  unsure (1)..(54): unsure at all Xaa locations
  Clone ID: PAT_MRT4530_60673C.1.pep
SIXRHHTPLPIITANSSPGRPKPFIXXPATSQTSARFPPLLRSAPAQAQHAXLQ

SEQ ID NO: 161495 - protein, 183 aa, Oryza sativa
  Clone ID: PAT_MRT4530_60674C.1.pep
MARQLPRTGSFSGVWWKLGDDADEQRRLADEEAAVKASIQRRHATARVIRRTIAFTSFALEAAGLFVYGLWTARIKTAANKTKKKKQLLLGVLLSVPAFAALLFAAIARFHKFIDAKDQQKLDRLRAERNKAKMGHSRGSHHNMQKLLLTHNTQESDSESCAEAAATKTASHSRLSFHVGDDD

SEQ ID NO: 161496 - protein, 106 aa, Oryza sativa
  unsure (1)..(106): unsure at all Xaa locations
  Clone ID: PAT_MRT4530_60675C.1.pep
GKLFIINRKAVVFLPEGFELAPPDRISPELKEKTGNLSFQSYRPNKXNILVIGPVPGKKYSEIVFSILSPDPAMKKDVYFLKYPXYVGGNRGRGQIYPDGSKSNTL

SEQ ID NO: 161497 - protein, 115 aa, Oryza sativa
  Clone ID: PAT_MRT4530_60676C.1.pep
PAGIIKHHYSSLVQTLIINIHTLISVFFIIAGDRAKATMFCLLHRLFPFLVGTAVGVYAAQNYKVPNLRGLADRGVDAAKQYEEAYRKKPSSGAGAGGGSKKRMNKAVGIDDDEE

SEQ ID NO: 161498 - protein, 198 aa, Oryza sativa
  unsure (1)..(198): unsure at all Xaa locations
  Clone ID: PAT_MRT4530_60677C.1.pep
FFPSLTHPHQPTNHHTTKTKNQTPTTNDPPGRTPHPHPTQHPPTTHQPATPTRPPPQPPTPPLSLPLPFTTARPSPIPLPARSGGEAPPPPLMSGHRLPSHHCPPPPPPLPXSCWAATPGRIWQRVPPPPFHLPPPAGAAPASPPVGPPLMAGSGGXESLPPSLPPPPTAAVPSSPPTGAIAPSRIWRRAPPPPPPPP

SEQ ID NO: 161499 - protein, 43 aa, Oryza sativa
  Clone ID: PAT_MRT4530_60678C.1.pep
MDHDAQEVWTCYRRGEAAIIEVRRSADYYKEELELHGHRVASV

SEQ ID NO: 161500 - protein, 58 aa, Oryza sativa
  Clone ID: PAT_MRT4530_60679C.1.pep
MASLTGARRGWGSRQPDGGGVDEVDLDHTNPTAVAVRGGEVGNGREWPDFAGQRGEVE

SEQ ID NO: 161501 - protein, 112 aa, Oryza sativa
  Clone ID: PAT_MRT4530_6067C.1.pep
MWAPDVSGYKGWHTVDQVHRGPGDAVDPDHRGSTGGGAAPAGREAAARGRMVADGDGRQSGDRGRGRDAHRADGTMRRGREGSRRRGLATALLGEAARMAARRFPAKAEKQP

SEQ ID NO: 161502 - protein, 67 aa, Oryza sativa
  Clone ID: PAT_MRT4530_60680C.1.pep
LEIHPEPREELPSLTQIRSRGMGYLARMRPAPMRRVNPTPSKVRVSVKLYDFIPFFWVNKAPVGELQ

SEQ ID NO: 161503 - protein, 61 aa, Oryza sativa
  unsure (1)..(61): unsure at all Xaa locations
  Clone ID: PAT_MRT4530_60681C.1.pep
MARVATAVDTGNGCGCGMRAAAAVASVGXDRWTDESDGHGHGRRPWGEGGGMATGDGGDRL

SEQ ID NO: 161504 - protein, 630 aa, Oryza sativa
  Clone ID: PAT_MRT4530_60682C.1.pep
MAGQRSDSQSDESFEYMLLERDPDLYRTVFSGPSQISPWIDPSVLTLQHRIGRGPFGDVWIATHHQRTEDHDRYHEVAVKMLHPIREDQLQAFSVRFDEIFSKCQGLSNVCFLHGISTQNGRICIAMKFYEGSIGDKMARLKGGRIPLSDVLRYGADLARGIIDLHSRGILILNLKPCNFLLDEHDHAVLGDFGIPSLLFGLSLPNPDLIQRLGTPNYMAPEQWQPSIRGPISYETDSWGFAWSILEMLSGIQPWRGKSPDEVYQLVVLKKEKPIFPYNLPPAIENVLSGCFEYDFRDRPQMTDILDAFESAKDVDYENTDQGNSENLRMVSPALPSRTNWSFFKDKLQVGDKVRSRKLKNTCSPTTMEVPDGTIVGMEDNGERDGYILVRIHGLHDPLKVRSSTVERVTYGFAAGDWVRLREDEKKRSQVGILHSIDRSGTVYVGLIGVDTLWKGEYSDLQMAEAYCVGQFVRLKANISSPQFEWQRKRGGGLATGRISQILPNGCLFIKFPGKFNLGEVCSCLADPSEVEVVSFDKCEGIVKKYEHLEDFHWAVRPLFIAVGFFTALKLGIFVGKGIARPRSRKVASVSDQSDHQQLQQQEVQNNANAAWLPPTVANMLFRDGPTLSG

SEQ ID NO: 161505 - protein, 129 aa, Oryza sativa
  unsure (1)..(129): unsure at all Xaa locations
  Clone ID: PAT_MRT4530_60683C.1.pep
WGWTRWARGGRRRADGRAAAGCXGGWRGLDAASSRGTVEGGRTRGGGGGGGGWMHGGWTRDAGGRLDARRRRRQAANWMGDGNNGDDDSGLDRRRRRPVTDWMHDGGGGLDWRRRRWMGMDDEERTPLF

SEQ ID NO: 161506 - protein, 74 aa, Oryza sativa
  Clone ID: PAT_MRT4530_60684C.1.pep
KPQKGRATKRKNGRTARISHYSTWKNTATLIQVKDREKKEFYQQARAKKNRPPSPPRPFYRNFRLLGQPEHVSW

SEQ ID NO: 161507 - protein, 84 aa, Oryza sativa
  unsure (1)..(84): unsure at all Xaa locations
  Clone ID: PAT_MRT4530_60685C.1.pep
MAEPDGEYRCFVGGIDWATDXRSLEADCYTYGXIINYKIINDRETGRSCGIGFVTXSMEQAMRDVIEGMNGRELDSRNMTENEG

SEQ ID NO: 161508 - protein, 621 aa, Oryza sativa
  Clone ID: PAT_MRT4530_60686C.1.pep
MDGPNETQDIIRSAEENQTDQHENPPPPPNPIPSHPLSSPAAAAGGGGSSSSASTTMARIVSRALPFASRSPQLGAALIRSAPMRCPPLPAAAPTASLLSWRGFTPSSEPSRSAPPPPPLPMPPFAGFLAGIRSFRRGRRGQSAARRAQPQDPIPSPPPAPKESEIELYARIGIDDDTPEDPEVLNIVEILKLNVPMAMKIALDGLLDSNYKTRDTSISDVGRYDKVEVSVLLCNDNFIQNLNKEWRGEDSCIEMLSMSQYIPDLDVPILMLGDIVISVETAARQAEERGHTLLDEVRILAVRGILRLLGFDHQTSHESAVEMEKEEQLILKSLRWKGKNLAKSVLDSGKRHTETSDGTLLNSKSQVTARNAEALREARSRGVNIVIATGKARPAVIDALNMVDLSGRTGIVSESSPGIFLQGLLVYGLQGREIYKRNLDQEVCREALLYSLEQKVPLVAFSQDRCFSMYDDPLVDSLHYVYHEPKAEIVSSIDQLLGTAEIQKVLFLETPEGISSALRPFWEKAIEGRARVVQAQPDMLELVPPATSKGNGVKILLDHLCISPDEVMAIGDGENDIEMLQLASLGVALANGSEKTKAVANIIGATNDEDGVAQAIYDYAF

SEQ ID NO: 161509 - protein, 158 aa, Oryza sativa
  unsure (1)..(158): unsure at all Xaa locations
  Clone ID: PAT_MRT4530_60687C.1.pep
PEREGSEEGVNPRQESSEAVGSPSGRGGQRIGAERISAAPSCGEREANGRARDTSLLLFPPRVLTNGFVEPTSEEPSPPRRARAKTLVELKSVLPHLGGFARWXXXXGFALRITSWVSFGPSISYPTVCVLLRPTVSVRDLFSDSQIFGLFYIVSSDQ

SEQ ID NO: 161510 - protein, 99 aa, Oryza sativa
  unsure (1)..(99): unsure at all Xaa locations
  Clone ID: PAT_MRT4530_60688C.1.pep
RGHRPITHLYLRQVFLVKLVEKSSLVGRPDFTIVPVVLKTGTKNIFSPGLKTLRYFSIFSTGWXLPTGTKDLFVVPVDNTNRKKRSPYALLPVGVTNRD

SEQ ID NO: 161511 - protein, 293 aa, Oryza sativa
  unsure (1)..(293): unsure at all Xaa locations
  Clone ID: PAT_MRT4530_60689C.1.pep
MDASHRRRPIVKSIDGLAHALGKIWCPIKGVSCKDLGENHFLFTFHQASGKRRALEDGPWMFNKDLVVMIDLDETKLIEDMIFAFVPIWVRAMKLPLGLMTKETGMAIGREVGEFMTMDLEEDGSAVGQFLRIKIRIDIRKPLMRGVTLFVGADERPLWCPLVYEFLPDFCYICGIVGHTEKLCEKKLAEGEAPLFNKSLRFIPERKIWEGGSSDKTSGSRFQVQRKSGASSCKGSDAPSWQKEITDGSKGKEKGTQGEDEVTSPLKKGFPAERSDRPKKSLFXSKKGAAVEA

SEQ ID NO: 161512 - protein, 67 aa, Oryza sativa
  Clone ID: PAT_MRT4530_6068C.1.pep
GCRCRLHHRLLFVLCRCNRNSESTFVNCRINVSVSLNLCKHVCSFLLDKNVVVIYFGYIDLLVNILL

SEQ ID NO: 161513 - protein, 58 aa, Oryza sativa
  Clone ID: PAT_MRT4530_60690C.1.pep
MTTVESGANKRRVTSTLLKLMKMAQMEVCIDGALGAAATVIGRKIQTENAGLTADSSG

SEQ ID NO: 161514 - protein, 293 aa, Oryza sativa
  Clone ID: PAT_MRT4530_60691C.1.pep
MRPQSYAFLGLVLLLFSLLPLAPCSAANLNNDTLLAGQALAVGDKLISNNGKFTLGFFQPDAGTNVVLPGAKFGWNKITGLNRQCISKKSLIDPGLGSYSVELDTNGTKGVILMLRNPPKVYWYGLTSPTLIPELRSLLAMDPRTRGLIIPTYVDNSQEEYYMYTLSNESPSSFLSLDMSGQIMLNVWHGLLRYWLYRKRGGDDGGGRKEQHAWPGSWQWVWLERSSASARQLGRGGGSRRRKSGRAIASVGSGGGGAGARRRKSGRALFSAAGGGGGGGLDSAGIELHSIYE

SEQ ID NO: 161515 - protein, 99 aa, Oryza sativa
  unsure (1)..(99): unsure at all Xaa locations
  Clone ID: PAT_MRT4530_60692C.1.pep
QPTALASTPLPAPSALAPGQLVRXLMREQPQHSGQVANRLMQDQVAATFLPPQYAVDPIQQQPIQQTLLIQQVVQPIQQQVVQLVQQTPPRQQPPRPIQ

SEQ ID NO: 161516 - protein, 59 aa, Oryza sativa
  Clone ID: PAT_MRT4530_60693C.1.pep
MGAVLRSGPSTSRANLHVHHEHLTVFLLDGEVAGESFDIIPSLNLATSADYLTAVDDDG

SEQ ID NO: 161517 - protein, 70 aa, Oryza sativa
  Clone ID: PAT_MRT4530_60694C.1.pep
MMTSLVYMTVIISHSISLTGADRGGLYHNISIKQNDIATHYPQTYYCIIVKVKKRSHVDPSLVMRPDCVN

SEQ ID NO: 161518 - protein, 140 aa, Oryza sativa
  Clone ID: PAT_MRT4530_60695C.1.pep
YGSLLWLEGVADEEAPCSGSGSATGLPYRRWKFCYSKGISICLLDAADTVVVNSSSEVLLGACVFFPHRNKMGWIFFLHRLVLYVSKNRNMKWKILACVLYANNLIEWITVGSSLFARQTNITYIDGTVIIMELFLLLFT

SEQ ID NO: 161519 - protein, 127 aa, Oryza sativa
  unsure (1)..(127): unsure at all Xaa locations
  Clone ID: PAT_MRT4530_60696C.1.pep
SPSLSLRQVGPVXPTCHPQPPASSNRRPRRPLPPPIPRLPLSXPAWTRXPLHLGTTYRPTPXFFPGELKPRQAGTPGKKPPHSPWKYAGPRPLLXPLSYKITPXGLLFLFPFFPVPHSFTSLPPIPW

SEQ ID NO: 161520 - protein, 206 aa, Oryza sativa
  unsure (1)..(206): unsure at all Xaa locations
  Clone ID: PAT_MRT4530_60697C.1.pep
KRDITFNNTAGAAKHQAMALRLVSDHSIVYQCSXRGNIGISVTINFIVGDAVAVLQNFSLCLHIVFFVGXQNIIAIQGRSDATKKSRFIFQFCTLIGDMCLGNTCTKTSLGHPWKTYLHVMFVDNXLDGIINPLEYLPRNGSIGLSTTYYVEYNNHEADADMSSWVKWQGYDGIISVTKAXHFTIDNFIYGSDWITGTGTAFIHVL

SEQ ID NO: 161521 - protein, 222 aa, Oryza sativa
  unsure (1)..(222): unsure at all Xaa locations
  Clone ID: PAT_MRT4530_60698C.1.pep
GNNSKAEYNHRTQQATPTMQTCKGIQEWLWAVPSSAAVNPAAGQPDTPADPTPLRPPLPSVPRKGLSYTSDQAVTYSRLWXSTISLPGEGXGGADMRAPPVSDXKGAVHGGPSTRSAREAAPRGAHARTGPEATGSGQRGEQRHTRASGGARGAAKKRRRRGSSPRARRRREAASGEGRDGGGGTRRRGSAREGADKRWATLQRGRRGVREEEAAAWSTGEG

SEQ ID NO: 161522 - protein, 53 aa, Oryza sativa
  Clone ID: PAT_MRT4530_60699C.1.pep
MSSSSGRASRVRSDSNELLLSRSRRSLALQDLERRYPRRAPRGTHIRPNSGVV

SEQ ID NO: 161523 - protein, 166 aa, Oryza sativa
  Clone ID: PAT_MRT4530_6069C.1.pep
MAQSSGPLPTLTHSHRRERGAEAGRLQAERPRREALRISGSGGVAARSSQQQQDKLASAVFTSSSISSHRRDAPSCDADQVRRRDTPPPRPVRAGIPVCAATSTSLHLRLAAPPIPCHPEVSSSSCSSAFGRRPWAVGVAARLGGGSGSGAAAEQDASHGGGMAVE

SEQ ID NO: 161524 - protein, 214 aa, Oryza sativa
  Clone ID: PAT_MRT4530_606C.1.pep
MASSASRFIKCVTVGDGAVGKTCMLICYTSNKFPTDYIPTVFDNFSANVVVDSTTVNLGLWDTAGQEDYNRLRPLSYRGADVFVLAFSLVSRASYENIMKKWIPELQHYAPGVPIVLVGTKLDLREDKHYLLDHPGMIPVTTAQGEELRKQIGAAYYIECSSKTQQNVKGVFDAAIKEHVPWKENVMLQILIDRDVPYMMQCSGCNLKLATFGV

SEQ ID NO: 161525 - protein, 87 aa, Oryza sativa
  Clone ID: PAT_MRT4530_60700C.1.pep
YVLILLLYKSNEAHATRKKCISQVEGDSDKAATGVGVKRINRECQRCWKITEDVIQEAMWKVGGCRSRMLVLPEDSHQCMTACCGVE

SEQ ID NO: 161526 - protein, 90 aa, Oryza sativa
  Clone ID: PAT_MRT4530_60701C.1.pep
GNGKLWPGEGLPGGLPALRRPRQVGLLGPGPPLQKGPHAKRPGLPRRPGPINQTPQLQTACPPPCLISGYQGPLFYLVGEIQPANSIPPI

SEQ ID NO: 161527 - protein, 83 aa, Oryza sativa
  Clone ID: PAT_MRT4530_60702C.1.pep
DIFHSVKPSSLVHQCYKHRVLVLAKATRRSAKSQEEGTRSHQKLVEQFRSTYVRSNKRLPCSSPYTLLLVLYSATHKVGGRPA

SEQ ID NO: 161528 - protein, 95 aa, Oryza sativa
  Clone ID: PAT_MRT4530_60703C.1.pep
AWFLVECFHLLAGHLLLHDGLQDLSVAPPYGGAGAVLRDSNGWLAAALSFTSLAGAEVMLPAKQGPRRVAPCHRSSASATKLHAGEPCRRQGTSP

SEQ ID NO: 161529 - protein, 137 aa, Oryza sativa
  Clone ID: PAT_MRT4530_60704C.1.pep
MARMTSPHHLTDRGPVSPRSPFCCYRTSPFSRKLLGALWRMAEWIMKAQADKLIPLPLLLPVPTSGRSGTRTDEFHVVKTVQSSATSSTMGGPSSLPIPSLTGHTILPSSHLSRPTASSDTYPTSPSSFLGSGKSTS

SEQ ID NO: 161530 - protein, 89 aa, Oryza sativa
  Clone ID: PAT_MRT4530_60705C.1.pep
NSKKLFFAELALINNVFDQYSGYTTTACCIIDGNCLGGLKNVLLNGCFLRKERYDEKNCYACDEKIKHPTGSTYKGGHYAEDYLVQGIL

SEQ ID NO: 161531 - protein, 67 aa, Oryza sativa
  unsure (1)..(67): unsure at all Xaa locations
  Clone ID: PAT_MRT4530_60706C.1.pep
SXIXSPXLXESLLXSXPLXTKMXXXXRMXLDCSWIQQXXQTADLFGNLRDYAYLELPEAFRXFYAXX

SEQ ID NO: 161532 - protein, 323 aa, Oryza sativa
  Clone ID: PAT_MRT4530_60707C.1.pep
MKLAGLKSVDGAHEESIWAAAWVPAADHRPAALLLTGALDETVRLWAPDDLASAAASPSRGHALGVVSLAAHPAGAVAAAVSLDSYVRVFDVDSGSSVATLEAPPSEVWGIQFHPKGSALAAAGGGSGSVKLWDTEKWKPITSLAVPRPEGARPDKTGSGKFVLSVAWSPDGKLLACGSMDGTIAVYDAVRMKFLHHLEGHHMPVRSMVFSPVDPHVLFTASDDCHIHIYDAKEKSLIGAMSGHASWVLSIDVSPDGMAVATGSSDRTVRLWDINTRASVQTMSNHNDQVWAVAFRPPGGTGVRAGRLASVSDDKSITLYDYS

SEQ ID NO: 161533 - protein, 42 aa, Oryza sativa
  Clone ID: PAT_MRT4530_60708C.1.pep
HSPSSLLCCFSISSISSSVILATKVSATSRSLRIEPTPILLG

SEQ ID NO: 161534 - protein, 59 aa, Oryza sativa
  Clone ID: PAT_MRT4530_60709C.1.pep
IRRGKPTIRAQPGPCRLQGSYTILNYIHSEPAQFMQESNFLEPACNRASSLQTQSFKLI

SEQ ID NO: 161535 - protein, 21 aa, Oryza sativa
  Clone ID: PAT_MRT4530_6070C.1.pep
SLVISVYLMLKISAQIFNVTD

SEQ ID NO: 161536 - protein, 199 aa, Oryza sativa
  Clone ID: PAT_MRT4530_60710C.1.pep
MAGREDAAAAAAAGVTDEAKLCNLMEQEVSEDEYVQVGGVLERRKRKATVTPGKLQISKIETPHKLQISEVQTPHKLQISEVETPHQLQISEVEIKSKEVQALVLAQDSQRISQENENLRLQLALKTKELEHEENQKLRLQLELKNKDIESLKKQNDELKAEIEYYKKTTKPPRVARRCRWCEEYTTHDYRNCPQRRSY

SEQ ID NO: 161537 - protein, 81 aa, Oryza sativa
  Clone ID: PAT_MRT4530_60711C.1.pep
MWTAQPRSAEYKDLGTYARDELGKAKSDQSHPAQPATPTSSRIVTWRQRVVAGSQPAYAPKKRRYFCARYTTPLCVPVAPG

SEQ ID NO: 161538 - protein, 1182 aa, Oryza sativa
  Clone ID: PAT_MRT4530_60712C.1.pep
MKSTQRFWLRNNAAADSELERSFHLGQKAVGTIIGIYEYKTTRESHSMNSKMIRLFAPCPKFIPLLAVFIISCSLPLAISDDTDTDREALLCFKSQISDPNGSLSSWSNTSQNFCNWQGVSCNNTQTQLRVMALNVSSKGLSGSIPPCIGNLSSIASLDLSRNAFLGKIPSELGRLGQISYLNLSINSLEGRIPDELSSCSNLQVLGLSNNSLQGEIPPSLTQCTHLQQVILYNNKLEGSIPTGFGTLPELKTLDLSNNALRGDIPPLLGSSPSFVYVDLGGNQLTGGIPEFLANSSSLQVLRLTQNSLTGEIPPALFNSSTLTTIYLDRNNLVGSIPPVTAIAAPIQYLSLEQNKLTGGIPASLGNLSSLVHVSLKANNLVGSIPESLSKIPTLERLVLTYNNLSGHVPQAIFNISSLKYLSMANNSLIGQLPPDIGNRLPNLEALILSTTQLNGPIPASLRNMSKLEMVYLAAAGLTGIVPSFGSLPNLQDLDLGYNQLEAGDWSFLSSLANCTQLKKLALDANFLQGTLPSSVGNLPSQLNWLWLRQNKLSGTIPSEIGNLKSLSVLYLDENMFSGSIPPTIGNLSNLLVLSLAQNNLSGLIPDSIGNLAQLTEFHLDGNNFNGSIPSNLGQWRQLEKLDFSHNSFGGSLPSEVFNISSLSQSLDLSHNLFTGPIPLEIGNLINLGSISISNNRLTGEIPSTLGKCVLLEYLHMEGNLLTGSIPQSFMNLKSIKELDLSRNSLSGKVPEFLTLLSSLQKLNLSFNDFEGPIPSNGVFGNASRVILDGNYRLCANDPGYSLPLCPESGSQSKHKSTILKIVIPIAVSVVISLLCLMAVLIKRRKQKPSLQQSSVNMRKISYEDIAKATDGFSPTNLVGLGSFGAVYKGMLPFETNPVAIKVFDLNKYGAPTSFNAECEALRYIRHRNLVKIITLCSTIDPNGYDFKALVFQYMPNGSLEMWLHPEDHGHGKKRFLTLGERISLALDIAYALDYLHNQCVSPLIHCDIKPSNVLLDLEMTAYVSDFGLARFMCANSTAAPGNSTSLADLKGSIGYIAPEYGMGGQISTKGDVYSYGVLLLEILTGKRPTDEKFNDGLSLHDRVDAAFPHRVTEILDPNMLHNDLDGGNSELMQSCVLPLVKVALMCSMASPKDRLGMAQVSTELHSIKQAFLELSSGGKVV

SEQ ID NO: 161539 - protein, 101 aa, Oryza sativa
  Clone ID: PAT_MRT4530_60713C.1.pep
TAVGYKAPSLLSLRHVWFIMYCRDAVCFACIMPMDVFLLLGSFFLSFVAHETCLVSISGCRRSFLKTLFDCSSRQVSWNHQGGISIRPPFFPILLCSRVEM

SEQ ID NO: 161540 - protein, 477 aa, Oryza sativa
  Clone ID: PAT_MRT4530_60714C.1.pep
MKKTVVLYPGLAVGHFNPMMVLADVFLDHGYAVAVALINPSVKDDDAAFTAAVARAVSSKSSATVSFHMLPRIPDPPSLAFDDDKFFTNYFDLVRRYDEHLHDFLCSVQGLHAVVVDASCGFAIQAVRKLGVPAYELYPCDAGALAVNIQIPSLLAGFKKLGGGEEGSAPLELLGVPPMSASHVTDLFGRSLSELISKDPEATTVAAGARVMAEFDGILINTFVSLEERALRALADPRCCPDGVVLPPVYAVGPLVDKAAAGAGDETSRRHESLVWLDGQPDRSIVFLCFGSIGGNHAEQQLREIAAGLDKSGHRFLWVVRRAPSTEHLDALLPEGFLARTSGRGLVVNTWVPQPSVLRHRATAAFVTHCGWNSVLEGITAGVPMLCWPMYAEQRINKVLMVDDMGVGVEMEGWLEGWVTAEEVEAKVRLVVESEHGRKLRERVEAHRDGAAMAWKDGGSSRVAFARLMTELDNAQR

SEQ ID NO: 161541 - protein, 482 aa, Oryza sativa
  unsure (1)..(482): unsure at all Xaa locations
  Clone ID: PAT_MRT4530_60715C.1.pep
NKVRSQNKGASTSRVNEAPDTSCVVVVQRLINQNKLLIELLQQHQTPILNPSQMQPQVQFKEAQELTPQVSAPPASQLAHDAMPHVDSKEARIICFICDEQGHYARKCPQRKRKAPMRTEDEVRKMTITGTEWPPPGMTKRQRGNFFHGAPQLTQHLLANGGRVSDSEDSDQVSSRDEDEKSLQRFKQNKMEHKACSHCGEIGHIASSCVTTCVYCEEDHPPGECPTSKITCFLCEGTDHLPKDCQFSFLLTKKMDNQXSNREKHQGNAIPHQDYSFSLTLVPGQRNQNVKSKSRVRQDISCFNCREMGHFTDKCPKPTNTAASTSVHTTPCNQKLAPQRMVIHASGSSPIARIAIAPTPMSALPQGVNAPFQPHPPIDKTKASIRIVPLDVPVQQPRNQVLDEEPXEEGHYSRNCPRPKRNPRHHSGHYARRRQDHNIRVTGANAVPVKPSARQAGVDACHEGGNLYEVDSNDMNYEKFWN

SEQ ID NO: 161542 - protein, 92 aa, Oryza sativa
  unsure (1)..(92): unsure at all Xaa locations
  Clone ID: PAT_MRT4530_60716C.1.pep
MDQHHVQQQQYVDPYRTMVLSPQPDHLNALQYNHQQQPQPPPQATPPPPQHHHASLASHFHLLHCRCNAAGGRXGDQHQARTASNGESATNG

SEQ ID NO: 161543 - protein, 287 aa, Oryza sativa
  unsure (1)..(287): unsure at all Xaa locations
  Clone ID: PAT_MRT4530_60717C.1.pep
MAQAAKTSTPPPTQAPCTTASTGFCAPLASPGWCGGAPWPRALGHRRQRGGGRGGVVGELGNGGXVGGDDGVGAGVDGAGGGGGSXSSFLGEGAXAGGGGGKQGQLQGKGGGGGGKSGAXTGLHRACGHGGGGGGGVGGGVVGGDGVGGGGGGGGGGGGGVGAGEMNGGASSAAGSSGGGGGGGGGXSRRGRSRGPGGVGNGGGGGGGGGAGAGGSHSSGSGTGGGGGGGGRRGDGDGDGGVCRCCCCCVDFRGGGEGVGRRGGGRRRRGWGWKEGEEMGTSLTLEG

SEQ ID NO: 161544 - protein, 79 aa, Oryza sativa
  unsure (1)..(79): unsure at all Xaa locations
  Clone ID: PAT_MRT4530_60718C.1.pep
KHLASWGKMESSLAVMANLGKGSYFGSNQQPHLRGWWAXRIFESQKHHRAKYFPCGSWALVSSQXIHMPGNQLNGSNFS

SEQ ID NO: 161545 - protein, 86 aa, Oryza sativa
  Clone ID: PAT_MRT4530_60719C.1.pep
FKAGGHLFHGGTTTLTPAPTPTDSPAGEPTPPTAGDGHAPRRNPALQTPLQAHSAPSPILPVRLRRLLLLLIRESTPALSPTTTTP

SEQ ID NO: 161546 - protein, 65 aa, Oryza sativa
  Clone ID: PAT_MRT4530_6071C.1.pep
ETMNRDSWETRSLHNIMLYTAHEWSRAAADYKRCQYILTGPGNKVKTLKSKYTKSTRNAQLVTYV

SEQ ID NO: 161547 - protein, 44 aa, Oryza sativa
  Clone ID: PAT_MRT4530_60720C.1.pep
FFFFFFFLQTSNFFQELNTPINCHNIYQILELIRPTLSQRHPQH

SEQ ID NO: 161548 - protein, 454 aa, Oryza sativa
  Clone ID: PAT_MRT4530_60721C.1.pep
MAADAREHAQAIAIQAEADKEKVKMEKIKQFNELLMIDTSSYIETQIEEDISYQIKKQQRGPPTQQRKYIRRERQDAEDRLKAYYFLENPMYNDTQFRWRYRMKKHLFLHIVQTLSHWSPVFQQRKDAFGKVGFSPLLKCTAALRMLAYGTSADILDENLQIAETTVIESLVNFCKGIIDCFGPKYLRRPTAEDIQRLLHVGEARGFPGMLGSIDCMHWEWKNCPVAWKGQYTRGDHGVPTVMLEAVASHDLWIWHAFFGVAGSNNDINVLNQSSLFTAQRQGIAPDVHFTVNGNEYDMGYYLADGIYPEWAAFVKTFKLPQYEKHKLFAQKQESTRKDIECAFGVLQSRFAIICTPARMWKKPTLGEIMYACIILHNMIVEDERDSYEGRADFNYEQGSSPVPLNGYGQGPIHGFDRVLEIGVAIRNKDMHHRLKNDLTEHIWNKFGGNQPEH

SEQ ID NO: 161549 - protein, 152 aa, Oryza sativa
  unsure (1)..(152): unsure at all Xaa locations
  Clone ID: PAT_MRT4530_60722C.1.pep
GQVRPVPLITIWSRWGWPRPNKLRLSGPQQXSAHALGERPSIQGCRPTLASLPAGNSGGCPHHSHPPNSSSVHPLEERRGPHGRRPTLASLPAGNSGGCPHQPPTEDAGRPPRAGPHPFSSPHMQSVYVDKQCHFWTPARALCTASHTQSWP

SEQ ID NO: 161550 - protein, 111 aa, Oryza sativa
  Clone ID: PAT_MRT4530_60723C.1.pep
MVHQNGLLVLVQMQRKVWISYVHGEKRVHHMHVNGPSKWAHHASHRRASVIGRSDLRNLHHQRPAPGESDNKVFENASRDCLLVFHDDSSSSTLEGCVPTTTPCTARCSCG

SEQ ID NO: 161551 - protein, 622 aa, Oryza sativa
  Clone ID: PAT_MRT4530_60724C.1.pep
MPAASAAVPARLKREDYPRTKHDSLFSPWKVLVGPSDWEDHAAGKEGIQRYRVLNLPENFPGLYELGVARASDEGIRAARRWNGSGGGGVVVVYLGQADSVRARLQQYGRTGSHLDAGNPPPSAGEAETNTRATGNGLFREVFVRGYSLVFRCALMGNKQEAEKTEARLLRVFDYAWNKLQNGGLRREEILIKLEQGAVNNRSSLLSRVRHFKQEVFREKAGIKISRNGSVDVSSGIMKNMLPRIRTFVGFRPQLVNSGDNVDKEIGIRWKNTSEGNSYGKQARRSSEGYKVKRVNVIKRRTMPEQDSNDVCGVMLEDGSSCLDHPVQGRKRCELHKGRRLGRITVNPKGSSCSYSCQVEIPVVESISPLTENESESDQAQQTSELLSKFLPATVKKSSRPWYSFEAKEIKTGEAPIEDGKQETSEVIDICEAKKSDNSACTNKVISGSKKCQLHNGCKAEEFVSSRVIDLLQNEEKVKSMTVDKLSGEEISHGKYQSQENQPSGRMWFELIKLQNPTSTLSSKGQGRQKRVTGNVAAICEALTDNRCRETIPMAGRERCDAHEGIKVTDASSVPFSGSSGWPSICGARASDGSPCKNQPIAGRKRCAMHKGQRACRTPSID

SEQ ID NO: 161552 - protein, 403 aa, Oryza sativa
  Clone ID: PAT_MRT4530_60725C.1.pep
MMGDFLSRVLLLAFGYAYPAYECYKTVELNKPEIEKLIFWCQYWILVALLTVLERFGDFAISWLPLYSEAKLMFFIYLWCPRTKGTSYVYETFFRPYISQYENDIDCSILDLRVRAGDMLVVYWQKVAIIGQTTFFNILKYASAQSPAHSSRSRSTQEIQTPETKICPRNRVDYLPSYINNKIICSTQDLGGISVDHSSAVIYLFLFITLPYQQSYPQKQQQAQPQQPKQSLPQQQQKQSLPQQQQQQMPHEKPTTLRRAASAAARTAGIMQQSEDTKIAYSNPKTRRLLPTKSAPTASTRSTVAATKPVEDLKSSGMKLASAVAPPPSSNAAMPGSEPSAPPLPKSAEDDMSIDEVDIPIEDMDEPVATPEETPMEEAIRVTRGRLRKRIAAVSTADGGAAN

SEQ ID NO: 161553 - protein, 178 aa, Oryza sativa
  unsure (1)..(178): unsure at all Xaa locations
  Clone ID: PAT_MRT4530_60726C.1.pep
LLVLIIGDYYRSGFGDNXFQVMNRVYCFVGXPVRPGGGCRLELIHVVDGDSIWHTMEVLCAYGMRSRIWKESKFGTIGYVKFLSCTRGFPKVFRTLSMSLVRGFRLPTSCINRGGASDRRHRGGPTDGVRAVRPAAATASXQLIRRSDRSSXISVRPVAFRRSDRHDYLGQIAIHRFR

SEQ ID NO: 161554 - protein, 335 aa, Oryza sativa
  Clone ID: PAT_MRT4530_60727C.1.pep
MERGGVFIGERGKEREERGGRLNGDATAAHGARDDGDARRRDSAGREAARGWAHGDGTGDATATGDATATAERGSRRRRRAATAERGSRRRGDGRAATATVTTTATGRRCGAAAASVRQAAGREAAGTRRGDGMAALRQPCPMEMTGKMPARVKRIRFADSQNECEVVLPQTLASGGASSSREPPETKGHNLTCCSAALAAQACRALLAVHHEKLEEIGLEAVACMSLESLEQPDLIRWLMDRTNPVSRPEKYLLQNASVLIPVLGKARTEPQTTPYPLDMWKYGSALQQRPELNPYSSLETMAFRTFGDDREPRFKNLRNDRSYAKHTSKATNL

SEQ ID NO: 161555 - protein, 200 aa, Oryza sativa
  unsure (1)..(200): unsure at all Xaa locations
  Clone ID: PAT_MRT4530_60728C.1.pep
TLGCFCKIKVCFDSYSVMNNWHLXLLVLIFGDYRXSGFGDXSKVMIGFCYFMCPVRPGGGCRLELMHVVGEDSIWHTMKVLCAYGMRSRIWKESKFGTIGYVKFVSCTRGFPKVFRTLSMSLVRGFRLPTSCINRGGACVSPGFGGLTGISAAVRPAAATASXQLIRRSDRSSXISVRPVAFRRSDRHNYLGQTAIHRFR

SEQ ID NO: 161556 - protein, 92 aa, Oryza sativa
  Clone ID: PAT_MRT4530_60729C.1.pep
PRVRLPEDLDYHSMTNLSLEAGEKLSKVRPQTIGQASRIGGVSPADMTVLLIWMESNRRMANYKRQQSTLRSAATKADDSSDEVVHASATNA

SEQ ID NO: 161557 - protein, 213 aa, Oryza sativa
  unsure (1)..(213): unsure at all Xaa locations
  Clone ID: PAT_MRT4530_60730C.1.pep
MWPRVERAKGARSQGQLSWKRGCDAHTVTRDPKVTGDAQAAALSGGGRGGTAREREGRPAAMRQQGGDQGDPRERVGASTRGRELIPPVERARATPREAGDGERRPGQSKGARRDVTNGGGRGAACDKGKGVQWGAHRREXNGVDGADGVAARRSRRRGGAAPRGRGRGRRDGEVQGWGGAELLVDSSCSLAPRHARRQRRARTTTNGETAVV

SEQ ID NO: 161558 - protein, 385 aa, Oryza sativa
  unsure (1)..(385): unsure at all Xaa locations
  Clone ID: PAT_MRT4530_60731C.1.pep
SPASASRAPTSPPPSPPTRGCCAPAWRETSPSASPSSATWASRAPRSRASSPSPRSPFAAAPWPPTSPPPPATAXRHDSPPEVRPFSPPPATXASPPPRTPIPSSPSTSAASSPAPPNPSPSRTTSWSPAAXREPARRRSPGSSPTSGPPPSPTPSSPSSPASASRAPTSPPPSPPTQGCCAPVWTGRWMPASPSSAASASPAPRSRRPPANPXPPPPAARRHDSPPEELPFSPPPSTVSHPGQSPPPPPPPXPALPPPRPSPRNPSPSRTTSSTPAAXREPEPRRPPGSSPTSGPPPTPMPSSPSSPASASPARTSPPWSSTTRSSSAPGWTRRWPPASPSSXPRPVPLPDRAPHPGGPQPLPLQFFKKLGWSQDDLSLAVRSM

SEQ ID NO: 161559 - protein, 151 aa, Oryza sativa
  unsure (1)..(151): unsure at all Xaa locations
  Clone ID: PAT_MRT4530_60732C.1.pep
CKIKVVFDYYSVMNNWHWRLLVLIFRIYSRSGFGDDWISQVIYRILLDLGPVRPGSVRRLELMHVVDGDSIWHTMEVLCAYGMRNRIWKESKFDMIGYAKFVSCTRGFPKVFRTLSMSLVRGFRLPTSGINKGGVSNRXYTGGQTGGKRRH

SEQ ID NO: 161560 - protein, 478 aa, Oryza sativa
  Clone ID: PAT_MRT4530_60733C.1.pep
MPMAATSPPRVRPPYDARRGNSYNLQAHTIGAAEHTIVLPSLASLATAATRSSVCSRHASPSRQPTRPAPGGGAPAAAALAIVGFTPHRQPSAGCFLKMADDLGPPTVLQKIHGQSMMFSKISPYSLMKNPALYNANTSYSVPLKSYNGMDGNNGFSSVTSVSPVFASAPKEKGLSGFMIDFMMGGVSAAVSKTAAAPIERIKLLIQNQDEMIKSGRLSHPYKGIADCFGRTIKDEGVIALWRGNTANVIRYFPTQALNFAFKDHFKRMFNFKKDKDGYWKWFAGNLASGGAAGACSLFFVYSLDYARTRLANDAKAAKKGGGRQFNGLVDVYRKTLASDGIAGLYRGFNISCVGIIVYRGLYFGMYDSLKPVVLVGNLQDNFLASFLLGWGITIGAGLASYPIDTVRRRMMMTSGEAVKYNSSLDAFKQIVAKEGAKSLFKGAGANILRAVAGAGVLAGYDKLQVVVFGKKYGSGGG

SEQ ID NO: 161561 - protein, 108 aa, Oryza sativa
  unsure (1)..(108): unsure at all Xaa locations
  Clone ID: PAT_MRT4530_60734C.1.pep
CKTKGVFDYYSVMNNWAXRLLVLLFGIYSRSGFEDDWISQVNLQDLXGPVRPGFGSRLELMHVVDGDSIWHTMELLCAYGMRSRIWKESKYGTIDYVKFLSCTRGFSK

SEQ ID NO: 161562 - protein, 196 aa, Oryza sativa
  unsure (1)..(196): unsure at all Xaa locations
  Clone ID: PAT_MRT4530_60735C.1.pep
CKIKDVFDYYSVMNNWAXRLLVLLFGIYSRSGFGDDWVXQVNRRIVISCXPVRLGSGSRLELMHVVDGDSIWHTMELLCACGMRSXIWKESKFGTIGYVKFLSCTRGFPKVFRTPSMSLVRGFRLPTPCINRGGASDRRQXGSHTGGNTAVRPAAAIASSRRSRRLDRXSTLVRPAAXLRSDRLIYFGQTDLIEIE

SEQ ID NO: 161563 - protein, 322 aa, Oryza sativa
  Clone ID: PAT_MRT4530_60736C.1.pep
MTAKGGAAPSPGGAGGLPNGRFFTVGLVTAWYSSNIGVLLLNKYLLSNYGFKYPIFLTMCHMSACALLSYAAIAWLRVVPMQLVRSRVQLAKIAALSLVFCGSVVSGNVSLRYLPVSFNQAVGATTPFFTAVFAYIMTVKRESWVTYLTLVPVVTGVMIASGGEPSFHLFGFIMCIGATAARALKTVLQGILLSSEGEKLNSMNLLLYMAPIAVILLLPATIFMEDNVVGITIELAKKDTTIVWLLLFNSCLAYFVNLTNFLVTKHTSALTLQVLGNAKGAVAVVVSILIFRNPVSVTGMLGYTLTVIGVILYSESKKRNKP

SEQ ID NO: 161564 - protein, 207 aa, Oryza sativa
  unsure (1)..(207): unsure at all Xaa locations
  Clone ID: PAT_MRT4530_60737C.1.pep
MIGFTIILCFDYYSVMNNWHMXLLVLIFGDYRRSGFGDNQFLGDXLDSLLFYXPVRPGCVCRLELMHVVSEDSIWHMMEVLCAYGMRSRIWKESKFDTIGYVKFVSCTRGFPEVFRTLSMSLVRGFRLPTSCINRGGASNRRLTGGQTGEAPTVRPARARRSDWRRHQARQGFQGGPTGRSIPVRPAATLRSDRQINLGQTDLHRFR

SEQ ID NO: 161565 - protein, 109 aa, Oryza sativa
  Clone ID: PAT_MRT4530_60738C.1.pep
MGRHIPTSTSAGGRRDVGTWLSADDMTSVRLITNRSFLSTMRQLNSMHVRPSSHNILPVMVRMKPGVYLTGTNVPSLGGNTLALAGDACLEALVLTGWGEACVRPPVAT

SEQ ID NO: 161566 - protein, 87 aa, Oryza sativa
  Clone ID: PAT_MRT4530_60739C.1.pep
MAVVTVFDTPTVSRRTKGKKRVKMSLVGLATGWGGGGLGRNGHAPAHFRTEEEAKPERRGHGEATGEGGKTAQDRMPIAGWLAGYRR

SEQ ID NO: 161567 - protein, 198 aa, Oryza sativa
  unsure (1)..(198): unsure at all Xaa locations
  Clone ID: PAT_MRT4530_60740C.1.pep
SCKINVCFDFYSVMNNWHLXLLVLIFGDYRRSGFGDNQFSGDDXDSLLFYVTGXPGCVCRLELMHVVGEDSIWHTMEVLCAYGMRSRIWKESKFGTIGYVKFVSCTRGFPKVFRTLSMSLVRGFRLPTSCINRGGASNRQLTGGQTDGIVAVRPAAATASGRRLWQFDRSXSTSVRSAASTRSDRQINLGQTDLRRFR

SEQ ID NO: 161568 - protein, 292 aa, Oryza sativa
  unsure (1)..(292): unsure at all Xaa locations
  Clone ID: PAT_MRT4530_60741C.1.pep
ESVEEKPLSVCLRIQQDDRSDHNPIVDSCKIKVCFDSYSVMNNWHLXLLVLIFGDYCRSSFGDNXFQVMNRXAVLSGSVRPGGGCRLELMHVVDGDSIWHTMEVLCAYGMRSRIWKESKFSTIGYVKFLYCTSGFPKVFRTPSMSLVRGFRLPTSYINKGGASNRQLTGGQTGGIAAVRPAGARRSDRRRRQARRAASAVRPVXSIPVRPTASERSDRQGNFGQTNLHRFRGTYRGRSRGDRGSEYYTAMLHVVGAKRLRPVIGEPGRQLYRRLECHAHEQRGHRHQPPALV

SEQ ID NO: 161569 - protein, 92 aa, Oryza sativa
  Clone ID: PAT_MRT4530_60742C.1.pep
MKIIFFFALLAIAAWQAFAQFDAGTQVYRQYQLQPLLMLQQQMLSPCGEVVRQQCSTVATPFFNHPCFTEKLQVCRAVLQQLDDRHSYCSHY

SEQ ID NO: 161570 - protein, 183 aa, Oryza sativa
  unsure (1)..(183): unsure at all Xaa locations
  Clone ID: PAT_MRT4530_60743C.1.pep
GCKIKGGFDYYFVMNNWAXRLLVLLFEIYSRSGFGDDWIXQVIPGFIISCXPVRPGSGSRLELMHVVDGDSIWHTMEVLCAYGMRSRIWKESKFGTFGYVKFLSCTRGFPKVFRTPSMSLVRGFRLPTSCINRGGASNRRSTGGQTGDKAAVRPVACGRSDRRHLLGQTGRSISVRPTSVDFE

SEQ ID NO: 161571 - protein, 337 aa, Oryza sativa
  unsure (1)..(337): unsure at all Xaa locations
  Clone ID: PAT_MRT4530_60744C.1.pep
TKDPEGYVPISVVAGFKKIKALIQSNAMLASALRTSSKLVVSNDGTRVKREQPFTESDLEELQARIVVAENLPDDHCYQNLMKLFSTVGSVKTIRTCYPQTPNGTGPVTNRSAKLDMLFANKLHAFVEYDTVEDAEKAIVELNDERNWRNGLRVRLLNTCMTKGGKGKKGGHDINDGHGVEDDVSTSNQSNEKHGEEALQTPDAQGEQLPDESAGDMGRGRGKGRGRGGKGRGRGYHYHNNNQQSYHNHQQHNHQNSNNRNAAHPVGTPPSNHPAKNEQQQQAQPQPQPQHSHSXPAGANKQPPGPRMPDGTRGFAMGRGKPQTSTTTPSASSGSEP

SEQ ID NO: 161572 - protein, 262 aa, Oryza sativa
  Clone ID: PAT_MRT4530_60745C.1.pep
MPLLARAPPPPPPLRHRGRLLPRFTSSSSPRRRRRPRAARVRASGSDPPPQQQQQQRSEALGLCLAAFSATLPYLGRFLEVGNEMGAGAAERVPLPEGSRQVFAMSDSLSAAQKEDMAWASYVLLRNTNTTSVVSEERKTSITGHSLTMKYRKLCIRGYWDPPEDISKYAMIEWFKSQMQEAGIVDLREDLYFPTFSDTQLGKLLPQGILSVLAQPVLNNPDPTNSEIKAEGFILLASNSSYAYSEKHRVWIRTVANKFQCT

SEQ ID NO: 161573 - protein, 79 aa, Oryza sativa
  unsure (1)..(79): unsure at all Xaa locations
  Clone ID: PAT_MRT4530_60746C.1.pep
ASSSSALSVFKAKEEQIERKKMXVTNKVFTHLXPLKEETKRLPFIRPXLEGMADPTRKEVEVNQKRIDVVNRQLKSLGK

SEQ ID NO: 161574 - protein, 134 aa, Oryza sativa
  unsure (1)..(134): unsure at all Xaa locations
  Clone ID: PAT_MRT4530_60747C.1.pep
ARVTVGXRGGGKXCFGCXVLAEQDVEMEDTDXDQQHLCRVVFFEGRSSSRWTFGETGHSICFGGPARFYHERQSVENVGQVWGWGYTVSAPRTLIHSRWRRSGLAGLGSGLEYESSFIIDAISLVVGSFFLFTS

SEQ ID NO: 161575 - protein, 137 aa, Oryza sativa
  Clone ID: PAT_MRT4530_60748C.1.pep
MDLSPPYGPTTKVSQTVGTGVTAPSWSTGWDTSTRRCTVQTGVICWNDPKDNIKFEGGRSKQICVQVLREITHSFRGTLGHCNGTEDHTIQAVAAGDWQTTPKYARLEHQGTTLVTNEQTGYNGKFAFPQQMTKCSI

SEQ ID NO: 161576 - protein, 606 aa, Oryza sativa
  Clone ID: PAT_MRT4530_60749C.1.pep
MESIAAATFTPSRLAARPATPAAAAAPVRARAAVAAGGRRRTSRRGGVRCSAGKPEASAVINGSAAARAAEEDRRRFFEAAERGSGKGNLVPMWECIVSDHLTPVLAYRCLVPEDNMETPSFLFESVEQGPEGTTNVGRYSMVGAHPVMEVVAKEHKVTIMDHEKGKVTEQVVDDPMQIPRSMMEGWHPQQIDQLPDSFTGGWVGFFSYDTVRYVEKKKLPFSGAPQDDRNLPDVHLGLYDDVLVFDNVEKKVYVIHWVNLDRHATTEDAFQDGKSRLNLLLSKVHNSNVPKLSPGFVKLHTRQFGTPLNKSTMTSDEYKNAVMQAKEHIMAGDIFQIVLSQRFERRTYANPFEVYRALRIVNPSPYMAYVQARGCVLVASSPEILTRVRKGKIINRPLAGTVRRGKTEKEDEMQEQQLLSDEKQCAEHIMLVDLGRNDVGKVSKPGSVKVEKLMNIERYSHVMHISSTVSGELDDHLQSWDALRAALPVGTVSGAPKVKAMELIDELEVTRRGPYSGGLGGISFDGDMLIALALRTIVFSTAPSHNTMYSYKDTERRREWVAHLQAGAGIVADSSPDDEQRECENKAAALARAIDLAESAFVDKE

SEQ ID NO: 161577 - protein, 174 aa, Oryza sativa
  unsure (1)..(174): unsure at all Xaa locations
  Clone ID: PAT_MRT4530_6074C.1.pep
NQSNYTSKCFYKLNFAVLQASRPYLGPWKTKCTMKIKVFIWLLFDDLLNTRDMLDRKKCAPPDADLTCFFLCPSQHRETILHLLSLSRFSEKCWXKLGIFWNTSLLDFFQIVILARLWFRXKGFLEVFFTACXHIWKQQNGKIFQNIGPFFDSWWSAIQNEVLLHMYRMNDPLR

SEQ ID NO: 161578 - protein, 616 aa, Oryza sativa
  Clone ID: PAT_MRT4530_60750C.1.pep
MESIAAATFTPSRLAARPATPAAAAAPVRARAAVAAGGRRRTSRRGGVRCSAGKPEASAVINGSAAARAAEEDRRRFFEAAERGSGKGNLVPMWECIVSDHLTPVLAYRCLVPEDNMETPSFLFESVEQGPEGTTNVGRYSMVGAHPVMEVVAKEHKVTIMDHEKGKVTEQVVDDPMQIPRSMMEGWHPQQIDQLPDSFTGGWVGFFSYDTVRYVEKKKLPFSGAPQDDRNLPDVHLGLYDDVLVFDNVEKKVYVIHWVNLDRHATTEDAFQDGKSRLNLLLSKVHNSNVFYILFHFHSRPKLSPGFVKLHTRQFGTPLNKSTMTSDEYKNAVMQAKEHIMAGDIFQIVLSQRFERRTYANPFEVYRALRIVNPSPYMAYVQARGCVLVASSPEILTRVRKGKIINRPLAGTVRRGKTEKEDEMQEQQLLSDEKQCAEHIMLVDLGRNDVGKVSKPGSVKVEKLMNIERYSHVMHISSTVSGELDDHLQSWDALRAALPVGTVSGAPKVKAMELIDELEVTRRGPYSGGLGGISFDGDMLIALALRTIVFSTAPSHNTMYSYKDTERRREWVAHLQAGAGIVADSSPDDEQRECENKAAALARAIDLAESAFVDKE

SEQ ID NO: 161579 - protein, 391 aa, Oryza sativa
  Clone ID: PAT_MRT4530_60751C.1.pep
MEPAHAPGRDRLSALPDNVLRRIMSFLNARQSVQTCVLSRRWRHLWRSLPRINADYTEFCFACLDEKKEKVQEARFKKFVSTLLLRRDPVPLLDKFWLRYQVSDGNNNEKASAEAGLWISHALQLQTPVVEVLTFQFPLMLDHAVFTSDYLRKLGLSNAYLRMGFFEQLSRGCPQLEDVFLNDCIILDDEISSTTLKTLNIYASRFSEDYRASISTPSLTSLTLYKPDASVPSLKDMKSLVSASIILDDNTDIHELLMSLSGVRNLDLECPQKMVTIAKNTQWCPEFKDLVNLSLGQFCLGSKLYALTVFLKNSPKLEKLTLDPPEVIIDKLEERSFECEHLKIVEVICSEDDSTLLKLVEDIFVTSGMNSLQINRKSSYKQYYSDDFFQI

SEQ ID NO: 161580 - protein, 494 aa, Oryza sativa
  Clone ID: PAT_MRT4530_60752C.1.pep
MSRSGVEVVVSRGCSRLVLPGMQPSSASAASSSSFSRGGHGGGGDRRPLPDGPFAGLVICVTGLSKGRHMLFLSAQHSFAGRKFEHAVKHGAKNGLFVVTLGWLVDCVRRSMRLDESLYSIKNIGENGMPLGEFNRLVGAPVSGNSCLPPMMFQEKTFSDTTEKHRLQTSRKEHDHDEFLFTNDSIYIDPGISGEMRKKVSDAATREGAKLLDHWFIGCHATYVVCEDASVKRYVGHSDNIVTPLWILKTAKEKGLQRLVHLSSDLARQVATILENAQTFQENRKIGDVPSVNSNSSGVPSTQGEIDEIHQERQKFVEVAKKNVRDRRARRMQFSWSDDAFEQQSTTFFDANGDGKDDQSSDSFTRPLRESEKSEVIFKNHFLTVLFPIDRFGELGPSSRTFFSNGGFTRIQVLDHIYNFYQENMSSDEINVALQTDSRHADRLRSLYASTESAERGFVTFKRIDFLGSRRSFEGLKRLSRENNSNVYELVIRA

SEQ ID NO: 161581 - protein, 138 aa, Oryza sativa
  Clone ID: PAT_MRT4530_60753C.1.pep
MLFVRAIAGPGPALLPPVKDEDADGDGNPEASGEGGGVPPVTIRLNQHINFTVPIAYNYNNTADHLVKNTSMSSRGSSTERGLEDSKKKLDEEKTKKVEAVQVGSNSVHGGSPDVHQFAKIVVVERRGPTPHPKKHNL

SEQ ID NO: 161582 - protein, 110 aa, Oryza sativa
  Clone ID: PAT_MRT4530_60754C.1.pep
TLLLFLPHLSPNLSPICSRPPPPRPPAFSPPPPPPPRPHRCALPSPPPQRAAPEGRGADAPPLSPEHPIPSPPDRALAFSPHRACPHGRRARLGFGVGATPTPTPTRPAV

SEQ ID NO: 161583 - protein, 203 aa, Oryza sativa
  unsure (1)..(203): unsure at all Xaa locations
  Clone ID: PAT_MRT4530_60755C.1.pep
RPGSAASPLLALSPHPPPSAPLSPRALSPPRRRAPPPCVSSPFASTGIARRRRSGLPPHLLALSRPLASPRPPPQLXISGHPRRLHSQPSPPSLTSPXHPAPPPQPASRPSFAGSSSPINPISAWRRSPSFSVHRHRLPFSERVQILLIDPISVDSSGAQLLRTTAVKGVASLSLQTTASPVIIHPSITANSCYCPSQSHSLD

SEQ ID NO: 161584 - protein, 131 aa, Oryza sativa
  Clone ID: PAT_MRT4530_60756C.1.pep
MVGGGVRDGDEEAALWPRPIMLEEDYYSRRRRAREHDRRRAAALREEESNERLARECLDHYNALHPGDEHDLAPGDVTLCSAPCNSTTWTHGNFVARRRSGCLASLFLPSRPRTLFFFEHMSSKDFLGVVT

SEQ ID NO: 161585 - protein, 263 aa, Oryza sativa
  Clone ID: PAT_MRT4530_60757C.1.pep
MLELRLVQGSLLKKVLEAIRELVTDANFDCSGTGFSLQAMDSSHVALVALLLRSEGFEHYRCDRNLSMGMNLNNMAKMLRCAGNDDIITIKADDGSDTVTFMFESPNQDKIADFEMKLMDIDSEHLGIPDSEYQAIVRMPSSEFSRICKDLSSIGDTVIISVTKEGVKFSTAGDIGTANIVCRQNKTVDKPEDATIIEMQEPVSLTFALRYMNSFTKASPLSEQVTISLSSELPVVVEYKIAEMGYIRFYLAPKIEEDEEMKS

SEQ ID NO: 161586 - protein, 165 aa, Oryza sativa
  Clone ID: PAT_MRT4530_60758C.1.pep
SGGIKPCVSSFGADQFDDTDPVERTKKGAFFNWFYFAINIGSLISGTVLIWRYRYQIPGGSPLIRVCQVVIAAIHKRNVDLPVDSSVLYELHVATAALVEIKRLEIASDSSVDSAGTHAVCDFLYNPAISVDFVSSFAPTSSIDSATSGKKKSETSVEASGTEMQ

SEQ ID NO: 161587 - protein, 1204 aa, Oryza sativa
  Clone ID: PAT_MRT4530_60759C.1.pep
MGEAEEGLMHRRIEFHAARRPPRAVEGAGGRFWVEILSPDADKAAVVAAARSEGLVRGLEKGEGSGGGIDPELRVARMYLRRIGAGLQNFGNTCYLNSVLQCLTYTEPFVAYLQSGEHMSSCRTIGFCALCALQRHVGISRSFRISRQEDAHELMVSLLESMHKCCLPSGVPSGSPSAYEKSLVHRIFGGLLRSQVRCTTCSHCSNKFDPFLDLSLEIANAATLVKALQHFTAEELLDGGEKQYNCEHCRQKVVAKKRFMIEKAPSVLTIHLKRFSPFNPRHKIDKKVQFQPTLNLKPYVSNPEGMEFKYSLYGVLVHAGWNTQSGHYYCFVRTSSGIWHNLDDNKRTCFGWRVYQVREADVLRQKAYMLFYVRDRTRSSVMYSDNCTVNLSVNKMISEKITCMNGSIKKDTVETKTLRVPSLVKEDVNLKKQNSENGQSSNISNAPQDQCSKSHSNTEVLEAAASPNNDPASTQKASCIRPDTAAVNLPMKTEQTAPDNRREITSPAQADVSVLHNASFNQKLYEKQLQEHQLETDDALTDSRKDAPAALCTYGVGDGLLGRNGQSSEPHIGPCPAALPIHNGGEGLLGANGQASEAHSGPCSSAFPIHNGGEGLLGASGQSSEPHTGPCPAALPIHDGGQGLLGPNGQASEPHTDSCPAAFPIHSGGEGLLGANGQASELHTDPCPAAFPIHSGGEGLLGANGQASEPHTDPCPAAFPIHSAGEGLLGANGQDSEHRTGPIPAAFPVWNGTGVILEKYGQVSGPADPFCKPTPTISDTVSIAQIIPTEHAAVSNGTVSSSDDLTGNTEANESSEFVKNYGEQVMVRDLSAETSGDRANADEQMYFHPCCGPILQWIYHVFSAVLCMKTDLLFVLVHTSMQNNTLEVGKDVAKDTDNVANAEEQVLNHPLAEQVKSEKQIYPGISTTLICSEDTTQLIDKDTGSGKLNKKMNCKSKRQVKYPAVRMFFGPKQLLLASVKLHKKRKHKRSKKHHALSVHIESIITDQQTSTSETVFSKIISHKSRGQKRSCASASSEDGTQLFNKKQHIEGTTNSVPMDNNDTKLASADSNDAKLASAELPSSCTNSLVNQTDSRNNVNANERGPWHFNLLTRGLREITVPRWDDTEIKNTKETEILHPRTRSIGYVLDEWDEEYDRGKRKKIRKPKHGFSGPNPFQETANIRSRQRMRLQSDQTKSGNQPLRI

SEQ ID NO: 161588 - protein, 53 aa, Oryza sativa
  Clone ID: PAT_MRT4530_6075C.1.pep
LYKLYATTFFLAVRVSLFSITACFHAVNPLPDLLNVKLASLECLPVCCIFRPH

SEQ ID NO: 161589 - protein, 60 aa, Oryza sativa
  Clone ID: PAT_MRT4530_60760C.1.pep
HRVLYIQYRGGPAHINNHICVRSTREQFVHQVQHTLFPSAEQSHICAFLYIIPRRWGLFT

SEQ ID NO: 161590 - protein, 47 aa, Oryza sativa
  Clone ID: PAT_MRT4530_60761C.1.pep
TRLIVNHLNSMSTWVSLALSSMPRFSLQTISMLVDSFTLSLYLIYSK

SEQ ID NO: 161591 - protein, 61 aa, Oryza sativa
  Clone ID: PAT_MRT4530_60762C.1.pep
MAIMIMFVALDVEAKPRDAVVGGGSGTGEGVAAGRAELWFRCRAVVAGRHRSSMPAAGGRL

SEQ ID NO: 161592 - protein, 46 aa, Oryza sativa
  unsure (1)..(46): unsure at all Xaa locations
  Clone ID: PAT_MRT4530_60763C.1.pep
LMHLKKKRKKTTXXMQSAADLLFDYGGEGGLWDCAYDPLLLLPLLE

SEQ ID NO: 161593 - protein, 218 aa, Oryza sativa
  unsure (1)..(218): unsure at all Xaa locations
  Clone ID: PAT_MRT4530_60764C.1.pep
MWHSYKRSQAATWHCKIKGVFDYYYVMNNWHWRLLVLLFGIYSRSGFGDDXNLQVNXQVLLFHXPVRPGRCCRLELMHVVDGDSIWHTMEVLCAYGMLSRIWKESKFGMIGYVKFVSCTRGFPKVFRTPSMSLVRGFRLPTSGINRGGASNRXYTGGQTGGKRRLDRRHTAGQTGGGDRHDRRLRRFDRSXSTSVRPTFIRRLDRRNTFSQTAIRRFR

SEQ ID NO: 161594 - protein, 246 aa, Oryza sativa
  unsure (1)..(246): unsure at all Xaa locations
  Clone ID: PAT_MRT4530_60765C.1.pep
MHACSVNCKIKGVFDNYYVMNNWAXRLLVLLFGIYSQSGFGDDWISQVIAGFVILCXPVIPGSGSRLELMHVVDGDSIWHTMEELCAYVMRSXIWKESKFGTIGYVKFLSCTRGFPKVFRTPSMSLVRGFRLPTSCINRGGASNRRSTGGQTGGXAAVRPAGALWSDRRRRQRVAADLGGRTGDLXRSDRQDSFSQTTIRRFRGVGKKEKNGRRGRCAALELIFHAVERGIVLPIFLTLNNHTIRI

SEQ ID NO: 161595 - protein, 313 aa, Oryza sativa
  Clone ID: PAT_MRT4530_60766C.1.pep
MAWPGQWRTRKGAFSRVLSLSSEEPSFEESEAGVGGRAGQGLAAGGGRLHVGRGMATGGVAVRRAARQAVACGSAGGEAGGGSGAHGYVGGLEGPAATPRFSQSFAIAWRAPSEAMEYWYWIDTGAAAGGRRAGEDKHLSKWTDADVDEFIASDPVYSPQLKAMRESRKSALGGALVGGTHLGGIALKYSKAPHDIITNRDLSNQLLFCAVRVRLVPDLVDETAVAYNAEADAWVPLPDMATERDEARGLYVGGVFVVVGGGGDGARSGSHDGAASAVHALLLAAASTMYGVGGGGGFNAPSTAFARRPQPGG

SEQ ID NO: 161596 - protein, 445 aa, Oryza sativa
  unsure (1)..(445): unsure at all Xaa locations
  Clone ID: PAT_MRT4530_60767C.1.pep
MAAASTFPLALLLAIVAACCVAGGEGGALVGDTCTASSASSCGAGMRCATCSPLPGMGPPVCSRTTPLDPKAHGTDLAFNRYTWLTTHNSFAIVGSPSRTGTPIIAPPNQEDTVTAQLKNGVRGLMLDAYDFQNEVWLCHSFGGKCYNFAAYQRAMDVLKEIGAFLDANPSEVITVFVEDYAGPGSLGKVVGGSGLSKYLFPPAKMPKGGGDWPLLKDMIAQNHRLLMFTSKRGKDGSDGLAYEWDYVLETQYGNDGLVGGSCPKRAESMAMDSTKQSLILMNFFSTNPSQSWACGNNSAPLVAKLKACYDASAKRWPNFIAVDYYMRSKGGGAPLATDVANGRQQCGCDSIAYCKPGSAFGSCSLSSPPXRHQRWLLLHRRQRLQHQHQRWLLVHRRQNHQRRRRRLLVQRCDRRPSRGAAATRVQGRQSGARWASGGSRVRLR

SEQ ID NO: 161597 - protein, 126 aa, Oryza sativa
  Clone ID: PAT_MRT4530_60768C.1.pep
MEEAQDTGDVYRFGPLRSSSPESSPESSPFLSGQDLYGYRPNDLLMGRPIPTSTSAGSRCDVGTWLSADDMTSVRPVTNRMKPGIYLTGSNVPPPGANTPAPARDECLEALILTGWGEACVRPPTG

SEQ ID NO: 161598 - protein, 42 aa, Oryza sativa
  unsure (1)..(42): unsure at all Xaa locations
  Clone ID: PAT_MRT4530_60769C.1.pep
FFYVENPXGRKPRAPTGNDHYRRVGYKRREYIGLSHPPWCGL

SEQ ID NO: 161599 - protein, 51 aa, Oryza sativa
  Clone ID: PAT_MRT4530_6076C.1.pep
PLCKRALQTRAHLFIMWACSFGNPPCLLAVFGIGPSWTVQSPSPAWFDCNL

SEQ ID NO: 161600 - protein, 479 aa, Oryza sativa
  unsure (1)..(479): unsure at all Xaa locations
  Clone ID: PAT_MRT4530_60770C.1.pep
MGQTTSKSAGDGKPKPKTTSAAAAAAAVVSETATGSMTMRIAGYSQTKGIGVGNSINSSKFHAGGHTWYIAYYPDGDREEYSDWVSVYLCLARPAAGAAADDVVEAKFTLSLLSGTYGAVVEEKICTAKKFSFANGYWPSWGHTRFIKRKKMDSRLWSCLHLDGQSFYIRCNITMDIIRCEAATTAVAVPPPDLHRHLAALLGSGVGADVRIRVGGKLFAAHKNVLAARSPVFMAELFGNNGGKDQKEAKAAAAATGNGVIRIDDMDLRVFRAMLQFIYTDTLPKIDKGDTAFMAQNLLVAAHRYGIERLKSISVDMIRKAARTMNLIAMIIRNNDEGIATQLRTRGRLGLHLPDAPEKPHRCRRLFELTLCYLSLDSTLLIQAAGDASTRSCDLAEMPDVLDLQASPHWSGLTMEEVIGKPPCRSAPRIAGAATDCQDFYPFPCRRSSITHGVETSTMTMEASIAAAQEEGRRGGRRX

SEQ ID NO: 161601 - protein, 170 aa, Oryza sativa
  Clone ID: PAT_MRT4530_60771C.1.pep
GQDKTMCQMPHHLSFLPSSLSHWIGRAGGLTPPPHTAAEADADVTSSSHHGEGLLDDHRRNHPKLVGGAGARTTTSTTTSRLPPSHRQASERDTAEEREGETAVRGRRTRIPVAGLLEHFKLIGCFDDGSVEFMTVAARGMAPRSSPSGVGWYSGKDQRKLLLYCYFRTG

SEQ ID NO: 161602 - protein, 773 aa, Oryza sativa
  Clone ID: PAT_MRT4530_60772C.1.pep
MATNTLHLQAIALAAVLLICRLSPVTPAASAQQLTGCRDKCGNINVPYPFGIGARCARDEGFQLNCDDSASPPRLLTLQFEQHPQLVSLSLADGEARVLLKPESKCYPPPEERSSDVPTFSYTSINGSTTYRYSPEKNRLVALGCPNLGYIVDGSGNYVSGCMSACRRPSLGNDTVPRLPGRCTGERCCQSIIPPTLNFYVPRMFNFENGTAAVDNELRGGTTPCRYVFLVEHTWINTVYNDTKDFNRSDFEAVPVVLDWAIRNVYNCSAAKRNATDYACRSTNSECFDTIDGQGYRCNCCQGYEGNPYLDGVSVGVFLSVFMCFWLYLGLQKRKLIRTKQKFFEHNGGVILRQQMHSGGGTHGFRIFSTEELKRATHNFASDRVLGRGGHGVVYKGVLEDKTVVAIKKSKMMEEAETKEFAREMFILSQINHRNVVKLLGCCLEVEVPMLVYEFVSNGTLYHYIHGKEPKADIPLDTRLRIAAESAEALSYMHSSASPPILHGDVKTANILLDDKFNAKVSDFGASKLAPTDEAEIATLVQGTCGYLDPEYLMTCQLTDKSDVYSFGVVMLELLTRKKALYLDGPEENRSLVSCFTTAMKVGRHQELLDSQVRNEMSAEMLEEITYLLMRCISMNGEERPTMKEVAERLEMLRRYQQHPWAEAEDNAEEIESLLGREQQNANYQLEQQNVLYNRPRGLAPSGDVGPEGDVFALLLVPPRGSGCTPLGPEGRGAPTPRGFSLRVYGVDRSDRGLGGDRRSDARLAPSRQDEGF

SEQ ID NO: 161603 - protein, 155 aa, Oryza sativa
  unsure (1)..(155): unsure at all Xaa locations
  Clone ID: PAT_MRT4530_60773C.1.pep
MWKARETGNTQDTGDVYRFGPLRSVIPYSCVLGDDLYSCRPSHLLMRRPTTTSTFAGSRCDVESWLSTDDMTGIRPVTXRSFLSTTCQLSNLHARPSSHNILPIMVXRMKPGIYLTRTNVPSLGGNTLAPAGDERLEALVLTGWGEACIRSPVAT

SEQ ID NO: 161604 - protein, 63 aa, Oryza sativa
  Clone ID: PAT_MRT4530_60774C.1.pep
MQPRVRFQAQRLCLEATAAAATCSSDGDENSSGCDLQLHMEAATVAPGGGGCAYASTKHLRRL

SEQ ID NO: 161605 - protein, 420 aa, Oryza sativa
  Clone ID: PAT_MRT4530_60775C.1.pep
MAAAVASSSSSSSCAAVGVPPASTPTTGRPALWGSPSRPGSPGGLVWRRPRRVAPTTFCSAPSLGRVGCPRREGAAWLLSFRAGPVSSPSSAAAGDPSQALSALLPLVVAATAVAALGNPATFSWVSKEYYAPALGGIMLSIGIKLSIDDFALAFKRPVPLTIGYMAQYIVKPLMGVLIARAFGMPSAFFAGFVLTCCVSGAQLSSYASFLSKGDVALSILLTSCSTISSVVVTPVLTGLLIGSVVPVDGIAMAKSILQVVLVPVTLGLLLNTYAKAVVNVIQPVMPFVAMLCTSLCIGSPLAINRSKILSSEGFLLLLPIVTFHIAAFIVGYWISKLPMLRQEEPVCRTISVCTGMQSSTLAGLLATQFLGSSQAVPAACSVVIMAIFGLTLASYWGNGLRIRDIGSRFVPQASAGVSS

SEQ ID NO: 161606 - protein, 99 aa, Oryza sativa
  Clone ID: PAT_MRT4530_60776C.1.pep
IKEKTGCVPLGCCFHNAMYNSRSTFGYTLFSHLFNSRISWMPSEFIVISMTETIIRTTGAASLDIHFNFWCYFQPTGLAFWKWIFHQILLISSHKPRST

SEQ ID NO: 161607 - protein, 2094 aa, Oryza sativa
  Clone ID: PAT_MRT4530_60777C.1.pep
MPGFIRFVTGLTLVMSSADSHVPTSRLLPAEVEVGMGRPIRRSFGRQPYKSPSVYEKVGLLPQQGAPPKFAQLYIYDTENEVSNRMRVFDKESSTDEPDPFIVTELGAMLDEHNDLVKSFRFARKRLKDHGDEKIALRLLGCNSKDEVQYNLPTSGEIAGIIVGDYSNDKYTYDVVVQSCDSRLRRVSALHPSYMALQYPLLFPYGERGFHLGIKYTDFPSITGTSRRYVTMLEYYRYRLHYRLNKPNPYTCCGRLSDSICVDMYSTVEGSRLKFIADNQPDLRSECVQGIADAIDHGLESGDSVGQKYVLPSSFTGGRHYMVQNYQDAMAVCRVFGSPDLFVTFTCNSKWQEIYDALLFEPGQVPSDRSDMIVRVFNMKVNEFITDIREGKTFGPVLAVLYTVEFQKRGLPHIHCLVWLAASTTDFNAATVDGFSSAEIPDVFTDPLGYALVDEFMIHGPCGEKNKSCVCMKNNQCSKHFPKSFQDETIMDEFGFTVYMRRNNGRYVVKNGIKLDNRWVVPYNMKLLKKYQAHINVEWCNKSNMIKYLFKYVTKGSDRTKVYFETTGNTANKPTDSNAAPRNEIDEYINARFLSTCESIWRTLEFDIHYRVPAVERLAVHLPNMNFVRYQKGTDLKKLLESPAAKKTMLTEWFEANKKHSKARHLTYCDFPKEWTWDNSARCWRPRTPVEKIGRMYYINPVAGELYYLRMLLMIVKGATCFADIRTYEGVVYPTFRQACEARGLHENDNEWHLLFDEAIVSASSYQLRQLFVTVVMFCSIGNVRSLFDKYWTYFTDDIQHRVRKMLSNPSYVIPHDRLLSLLIKELKSVFANSGGNIDDYDLPQSTARTDDDSGNRMVNEELALDSVALAAHADSIIPKLNSDQKRVFDTIMCRVNESKPGFFFVYGHGGTGKTFLWNALISKVRSEKKIVLAVASSGVASLLLPRGRTAHSRFKIPIDINENSLCTIKRGTMLAELIQKTSLIIWDEAPMTHRRCFEALDRTLRDLLSEHAPSNGLVPFGGKVVVLGGDFRQILPVVRKGSRASIIDASITNSPLWSHAVLLKLTVNMRLLQCNLGEQQQQELEKFAQWVLALGDGKLPVSKRNDESEATWIDIPDDLLIKTTGDKIHSIVNEVFPGFASKYTDRSYLASRAIVCPNNSTVDDINDRMVDMVPGEVKEYLSCDTISKSSEHIPDFDLLYPTEFLNSISANNFLAHKLALKKGVTVMLLRNLNQSMGLCNGTRLLALSLGQRLLECQILTGTNIGDRVFIPRIALTTTSPKWPFTLQRRQFPVRVCYAMTINKSQGQTLKRVGVYLKKAVFTHGQLYVAVSRSTSRDGLRILIEGDDEACSSKTRNVVYHEVLQTVDLMMGHTLLSDLSLGDDNERICVRVSRFWAFCDQKDDDKILHFGLVLIDEKGTSIAAQIYPPCDEIFRPIITEGKVYYIKYFRVRKCNRQYKPVDNCMSIYFTRWTKLEERVDPPAEIPLYTYSLSPFGGLRSRVGKKDSFTGNSACKWYINADTPEVISLRNRRTARPYGNAYKCQNESCPPLVGASPRFKLSVVAGDDTADAKFVLFGRLAQCLIGRSVEILLEGNAAGKEAIPKEITNLLEENFTWKVAITENTMSSSNVSFQVNMIVGNGNSQNPATHNLHLHLRHPPCPLVVGAKDKNDDVECQSKTPVQVLDEEDEDDDNLPLSQMGGHSATKKTTSKSHNKRARPSPGTGTAKKLFKESGDDTADGRSRFNALSWEKEQLRMEFGYGGELSVAQPRRPSSYGTQRPLVATKFSGCGEISQLLADVIYQQAVVVKVLGAGDPNSTRISAMMYIVLFMDADKQQERAEMACNKKKFTFKTTRLEFEPFKMNLHSVTNPLRQRVILALEGVPPESWNKQAITELMDNSCMVEELYGEHHIHDLSVFKLAAWTTDCDLIPKAIRWNIETKQGARASANVSWNHNAAHSLILVHMEKLFDYTDEDSGSDSDGELLRQYEQQRPRLPVVKTFTWVSCQIDLDNGPIEGFREDVLTVCCGGGGPYNFNESVACGGAAATACEDPSASLYFDGAHLTEAGYRHVADGWLSSINSCLCAQPHTMKLRRA

SEQ ID NO: 161608 - protein, 109 aa, Oryza sativa
  Clone ID: PAT_MRT4530_60778C.1.pep
MGRPIPTSTSAESRCDVGTWLSADDMTSVRPVTNRSFLSTTCQFSNLHVRPSSYNILLVMVGMKPGIYLTGSNVPPPGANTPAPARDECLEALILTGWGEACVKPPVAT

SEQ ID NO: 161609 - protein, 518 aa, Oryza sativa
  Clone ID: PAT_MRT4530_60779C.1.pep
MAEPAKAHDLSPSMSGDDGEPNPRRRARTPPPPPRQSPRREKALERAEGSATSTSTGGGEGRRDGERRLLVYGDGSTPQGALQAAGALLRHPPVVHDPESPAQRWLDDVAKLVMTARQRLGAGGRSSATKASGAATTGSASSRRRARRAAAAVRHSAATPSSTPSTREDLRGGPDARTSIERRRNDRRAAHATEGASSSRVSPQHGRGNQPSVPPVGGVGCRAFVASLRNVRWPPRFRPTIAEKYDGSVNPAEFLQVYTTGIEAAGGDDRVMANFFPMALKGQARGWLMNLPPASVHSWEDLCQQFTMNFQGTYPRPGEEADLHAVQRRDDESLRSYIQRFCQVRNTIPCIPAHAVIYAFRGGVRHNRMLEKIASKEPQTTAELFQLADRVARKEEAWTWNPSGSGVAASAAPGSAAQTGRRDRRRKKRSAHTDDEGHVLAVEGAPRATRKGRPAGDKKKEAGAPSRERPTGKWCTVHNTSLHDLADCRVVTDRSDRGLGGHRRSDTRLTPSRQDEGF

SEQ ID NO: 161610 - protein, 211 aa, Oryza sativa
  Clone ID: PAT_MRT4530_6077C.1.pep
MSEPATTTPTPTPAGDHDAAATACKPAETTTALITCRSSSCSAQQQQQQQQQQEEPLGDDQLGELREIFRSFDRNGDGSLTQLELGSLLRSLGLKPSTDELDSLIQRADTNSNGLIEFSEFVALVAPELLYDRAPYSEDQIRRLFNIFDRDGNGFITAAELAHSMAKLGHALTVKELTGMIKEADTDGDGRISFQEFSRAITAAAFDNIFS

SEQ ID NO: 161611 - protein, 45 aa, Oryza sativa
  Clone ID: PAT_MRT4530_60780C.1.pep
LGRLASIGRVPLGACSPGERKSQLRLQLAGLHGSIHREQFFQNDS

SEQ ID NO: 161612 - protein, 58 aa, Oryza sativa
  Clone ID: PAT_MRT4530_60781C.1.pep
FKKLCLYGCAIFGKILYVLAVSEIEHCMVKFQQNGCRQLQHKTCHMGSSISPCWSQPT

SEQ ID NO: 161613 - protein, 132 aa, Oryza sativa
  Clone ID: PAT_MRT4530_60782C.1.pep
MEAAAPAMLAPSSLGRRQHGITEYLFQSNVPASNQPANTVENISSTADLEPRQMDPEEIAFGEEPEPPHADGRGGGAATTRAAFLLMVSGATMIIAAVGASAGAGDRVPWPRLLAELLIWLVGCITLFAPWL

SEQ ID NO: 161614 - protein, 498 aa, Oryza sativa
  Clone ID: PAT_MRT4530_60783C.1.pep
MMWHLPSSRKCLQQFVHAPLHYVQEKLSTLESKETPEEDAGDKEWDNIDVSKTANDERVDTKTDDSSQNHMPAGGVHVLFRAPVDPMHEEAFSILKKLQIIEKDASSSDFCSRREFARWFIKLHSKLERKKMHRIIPNRLTFGSVRSAFDDIDADDPDFLYIQSLGESGIVSSKLSNFLGTSTSGSSSDSGNSNFLPNSYLSRFDLVNWKALVEHPFATELDQKMLSKNVRILDLRAWPDVPSSILVDLMGGEQSIISKVFGNTRCLQPHKPVTKAQAAAALTSGRMEEVIRDELNRLEAENQSQLSVMGEIMEELINRGDIKRYWEDKMKVEEIREVAVDKQLQHVLQELANEKTDREKELAVLLKERTALEHQNQELMNLRSEIDGMYDRLAMESLEVMTEEQNLEKLSLDVNRKHQAVSESKSYLEAEKEALTMLRPILVAMVFEYFGLGWKKKQHVYMNELKYLRGLFSLNIFMFCGIRASAVSYKQFLVRSSM

SEQ ID NO: 161615 - protein, 74 aa, Oryza sativa
  unsure (1)..(74): unsure at all Xaa locations
  Clone ID: PAT_MRT4530_60784C.1.pep
MATTSLSLHGVPSPTVTKLSSSFLGAPLLPPATRRARCPLARASXRHAHQAGERSVGYKCVRRSTRARRPVGAR

SEQ ID NO: 161616 - protein, 109 aa, Oryza sativa
  Clone ID: PAT_MRT4530_60785C.1.pep
KELAVLLKKRTALEHQNQELMNLRSEIDGMYGSAHVSGLEVMTEEQNLEKLSLDVNRKHQAVSESKSYLEAEKEALTMLRSWVEEEAARVHERAEVLERAVRRWRVPAD

SEQ ID NO: 161617 - protein, 66 aa, Oryza sativa
  Clone ID: PAT_MRT4530_60786C.1.pep
MVYTSVKDNCPGETASLEEGNINIYIDHGLVSWDSPSPYSPLKYFSSFMYTCCFFFHPRPDIIWPV

SEQ ID NO: 161618 - protein, 405 aa, Oryza sativa
  Clone ID: PAT_MRT4530_60787C.1.pep
MDGGRVGGDYISSLLSSSPRLDFGVPVLDAIVAPGGGGGGGDCGLDKLCGDPGFAERAARLSSFNNGGGGVGQRYGGAGAGLFGMPPPAPGDFAGGGSREASSVSDPASSAMKDAAANAKNRKSTAAAAAAAKGKGKEPPVGEEKESDGKRCKTGNGEKESSVKPKAEQAGSDSSVEDGGGGGQKQGKGKNAKPVEPPKDYVHVRARRGQATDSHSLAERVRRERISQRMKVLQDLVPGCNKVIGKALMLDEIINYVQSLQRQVEFLSMKLATVNPLDFSNLPTLLQKDMFQACGPSASSVFSLESSNSAFRFAEQGDVFQQFAQNSMESQCTLNQLDLALSQATNAAQYAFQDGTAGANLQQRNFWEDDLQSVFHIENGQSQENGVSAPNFHGWQQAGHMKMEF

SEQ ID NO: 161619 - protein, 114 aa, Oryza sativa
  Clone ID: PAT_MRT4530_60788C.1.pep
MPAGGVHVLFRAPVDPMHEEAFSILKKLQIIEKDASSSDFCSRREFARWFIKLHSKLERKKMHRIIPNRLTFGSVRSAFDDIDADDPDFLYIQSLGESGIVSSKLSNFLGTSTS

SEQ ID NO: 161620 - protein, 147 aa, Oryza sativa
  unsure (1)..(147): unsure at all Xaa locations
  Clone ID: PAT_MRT4530_60789C.1.pep
TSGVIVNYLNCKLSQRSIQLLSAHRHLFYRGFLLIIRLACFLIANKGFIGVLADELSGRCISLXRVHPIGFYWIRLLSXLYYHPPIVFISLFTSSVRFYINHIADCSRXYRHRLDQIDWHARIPSTFRSALELSRSPRPPCFHINNV

SEQ ID NO: 161621 - protein, 86 aa, Oryza sativa
  Clone ID: PAT_MRT4530_6078C.1.pep
LFYSQKYTQAFKYPHKFTSAIYSKMISSKHASVTTIRSSQQPPRRSRSSRRRWHAAADADPELSAERHLGRQLRGSQRQRQDQSQQ

SEQ ID NO: 161622 - protein, 277 aa, Oryza sativa
  Clone ID: PAT_MRT4530_60790C.1.pep
MSVQCAVRPLAALPAAAGTSRSRRVGGASHVAVAAVPSSPRRPRRAASVAPVRAAESSPPAAAPAPPSSGAAAGKAVVPDEEFTLAKVSFGVIGLGVGGTLLSYGFGAYFNLLPGSEWSALMLTYGFPLTIIGMALKARTIPHYAELKPVPCTTYADAFALREKCATPILNQVRSDVTRYRYGDEQHLDEALKRIFQYGLGGGIPRRSAPILQNIREEVTDDGKYSLVLVFEAKALEISDFEKRQAKFTSFFGPGIKAEIGKGGDDLYEVRLISETT

SEQ ID NO: 161623 - protein, 128 aa, Oryza sativa
  unsure (1)..(128): unsure at all Xaa locations
  Clone ID: PAT_MRT4530_60791C.1.pep
PPSSTRRGRQPPRGAARSPPAPVRRRPPLLRAPRPPAPVWRSAQPAGPRATAPAAPAWRRPPPPLTAASVLYAFDAVAHRRHRHHCPPRPPPSSTPXQPRPPLNLAPPRSPPHLPPPSPPHLPPASCQ

SEQ ID NO: 161624 - protein, 63 aa, Oryza sativa
  Clone ID: PAT_MRT4530_60792C.1.pep
SITLESMFIYLIITQVDTLANIHMNALALSPAEVSPDGGATGLFMGNLARFSCLCSTPLEGPF

SEQ ID NO: 161625 - protein, 71 aa, Oryza sativa
  Clone ID: PAT_MRT4530_60793C.1.pep
MSRGGPSSSSARGVWLMAADLAGDRPQKRGEEDPRRKPSLALDWAGSSYAFGRGNPLEGVAEVPSFLDGGL

SEQ ID NO: 161626 - protein, 120 aa, Oryza sativa
  Clone ID: PAT_MRT4530_60794C.1.pep
MNAPDRYERFVVPEGTKKVSYERDTKIVNAGSFTIEREDHTIGNILRMQLHRDPNVLFAGYKLPHPLQYKILVRVHTANQSTPTQAYTQAINDLDKELENLKQAFEDEKIRYEERPKQGY

SEQ ID NO: 161627 - protein, 75 aa, Oryza sativa
  Clone ID: PAT_MRT4530_60795C.1.pep
MGGGWWRGHRSTWPPTRPPNGQRVDGSIDGVGVSNRELGRVAWREQGESRGIEVEAENKVGVGKESGGEEATTAI

SEQ ID NO: 161628 - protein, 71 aa, Oryza sativa
  Clone ID: PAT_MRT4530_60796C.1.pep
RQHILRPKLRSAHCPCNNYPTHQWAGAETLSSKAKENQRSENDTGSSSNGKPSEKRTGSPAYQANQCQNQK

SEQ ID NO: 161629 - protein, 1376 aa, Oryza sativa
  Clone ID: PAT_MRT4530_60797C.1.pep
MGKPKPASATAAPRGHKRRPKRTRPSGKGGGPEPREEKRKRRELDGVGLAEESPPPGSSLGKILSTESGAIGLEQSDEDDMEDEHTVPGDDETNDMINNKDDAFDEMEASCSFHRHVSRIITNEEVNALLKQKCKFKWEVPAEDIPKSKWVGTEEISDQGYLLAVDTLPFISPLVIILPIPVSICYGVCLYGCGLWGAYVDLIGGVKGKLRDHWQNTLSDQLNSRLNFFSLCSSYRDIMHCNKKPFYLKGGSTVDSSTMDSYLMHALNHINRTREIVVKNDAKLRSDPSKDILDDNSFLDQGFTRPKVLFLLPLKSIARRVVKRLIQLSPLSQKDIIAKFEGKFGESDDEVEEPVQSNKPADFDLLFAGDTDDEFLFGIKYTKKSMNLFSNFYSSDIIVASPLALIKVKDKLLLQEGRDVRWGVHYNCRQKVTPATEGFGAFMFLFCFIHKKINGVDDNGKEPAKERDFDFLSSIEWLTSTIHTFYRDVHAHLISFLSDLKWSCKIDLVSNMLNFSMWNSLHVAKYMDKFTLIVVVDHADVILMQSWSHLYAVFEQLNQLPSKEHGTNVMRIRPWYLDQHARYYRQTILLSSYLTPEMNALFNGLCLNYEGKVKLVTEFKGVLSKIQFEAPQVYERFDASSITEVDDARFDHFCKKVYPKIQESDELGISRKEQPLNSKDGSQATNLREVSPNEILLAKNNLLYSLRLCIELTVKKVKQLQRLGRTTSQQDISRARLWFFEGKKKILLYSERSHFYHRYKIRGAHHLIIYSLPGRKEFYPEEQDELHWNLTSNGVFSIKSDYLALVHSSAPNINRCIWRVITPFVSQCPIPLILFPWAFDKKPEVLRWISRRLQKGVLGARSSNPGDLGLGAVALPFESQGLRGLPRSLRSSPSGAGGPYYGGPGLERGGVASLVPEALSGYLGVSGKVYVVLGGYIPGTPGFTLQQRIRCLPETLRSTSVLRDCVAIAEMASGCRLGFSHELPNCVARPRKFVKALLHIRKKNEEVMMTETSQTEEKPPPVEITPSEEENSTSKTNPPSKGVTIPFDYTKFNPSNHYISVPSGHAPHFDGTHYSAWKHTMKLHLIALHPSLWRMVCTYLNVPLENMNLTPDQEQAVYCKAQATNPILVALSLEEFNKENPNFKKFNPSEVLRRITSHELMEEEAKLAHIGMRILSELLKGVHILGLSNVIFEKDHHKIIGAIAYGPLWTGETQETFKKFARIAQNEFELKIKKIGLSQFVFYWPFLNDPISELVNVEQPLGFEDPNFPNHVYKLHNALHGLKQAPRTWYECLTDFLLNNGFVIDVNNGGVEVLTWISNQIKKLKEGTSICQTKYVKDMLRKFDIESAKHIKTLMPTNGHLDLNKDGKPGDQKESY

SEQ ID NO: 161630 - protein, 255 aa, Oryza sativa
  unsure (1)..(255): unsure at all Xaa locations
  Clone ID: PAT_MRT4530_60798C.1.pep
MMRKAKRRLAATPAETTRSRSGTGRLRRRSGSSGEKPESGSSSGKADGELGDVDAAGGGGGDRLDAGEEVRRGVAAASLAAEPPSSSIPLAAMAISLIFTTTVSSTTTTPTLSPVTTITAGVPVQAQLPGVLVSEVISGSAAAGRPRRRTASSSTFAGSRCDVESWLSADDMTGIRPVTXRSFLSTTCQLSNLHARPSSHNILPVMVRMKPGIYLTRANVPSLGGNTLAPAGDKRLEALVLTGWGEACVRSPVAT

SEQ ID NO: 161631 - protein, 198 aa, Oryza sativa
  unsure (1)..(198): unsure at all Xaa locations
  Clone ID: PAT_MRT4530_60799C.1.pep
CKIKVCFDSYSLMNNWHMXLLVLIFGDYRRSGFGDNQFSGDDXDSLLFYXPVRPGGGCRLELMHVVDGDSIWHTMEVLCTYGMRSRIWKESKFGMIGYVKFVSCTRGFPKVFRTLSMSLVRGFRLPTSCINRGGASDRRHCGGQTGGSTVVRPVAATASDRRLWRFDQSXSTSVRPAASTRLDXQINLGQTDLRRFRG

SEQ ID NO: 161632 - protein, 104 aa, Oryza sativa
  unsure (1)..(104): unsure at all Xaa locations
  Clone ID: PAT_MRT4530_6079C.1.pep
PDKLDIYMDSLNEPGPSGKPYTARYIGSXLVGYFHRKMLXVGICGCPRDQNSNIGKLRMLXECAPISFIATEGAHNGSDVPPNPPDLKRRRIPHRGAASTERAL

SEQ ID NO: 161633 - protein, 83 aa, Oryza sativa
  Clone ID: PAT_MRT4530_607C.1.pep
HFLPKHAGGELKHPVGLGGGHALRKRVLCGDGYPAAHSGSVNWVCGPENQVPPITQSDQGRGTRRLLLCGGGPWCCSGFCAPS

SEQ ID NO: 161634 - protein, 95 aa, Oryza sativa
  unsure (1)..(95): unsure at all Xaa locations
  Clone ID: PAT_MRT4530_60800C.1.pep
MHAWPGLGALEPDDDTRAESNEQGDGQREQQRRRRASVAAVGEAGRSGATAGKSSGGLRATAVGGGGGIRXVAAEPRRVRVPEHEVILEPAVHRA

SEQ ID NO: 161635 - protein, 109 aa, Oryza sativa
  Clone ID: PAT_MRT4530_60801C.1.pep
MGRPIPTSTSAGSRRDVGTWLSADDMTSVRPVTDRSPLSTACQFINLHVCPSSYNILLVMVRMKPGIYLTGTNVPSPGGNTPAPARDECLEALILTGWGKACVRPPVAT

SEQ ID NO: 161636 - protein, 84 aa, Oryza sativa
  Clone ID: PAT_MRT4530_60802C.1.pep
MGRSMRLTACRHLTRDLTDKTRGVGAPRPSGARLESPDPSLGEIRRRAVTSPSGPTSPKVPGHVGGCVCLKPLVTILPVPYHRH

SEQ ID NO: 161637 - protein, 77 aa, Oryza sativa
  unsure (1)..(77): unsure at all Xaa locations
  Clone ID: PAT_MRT4530_60803C.1.pep
WSXMRPLRCGGGAMLQFSSGLFVCYCSGAGGRGVVCRHCKSKLLLLIFFGCYIGKFVESYWNLIFPNYQYQFQGLLS

SEQ ID NO: 161638 - protein, 64 aa, Oryza sativa
  Clone ID: PAT_MRT4530_60804C.1.pep
CRMFHIKWRPHTTKPIYPKVTSPSKTLDPASPTNLSHIHNTQGKSCRPPPDQTPRTQTPTQTSS

SEQ ID NO: 161639 - protein, 88 aa, Oryza sativa
  Clone ID: PAT_MRT4530_60805C.1.pep
MRRATTTSTSAGSRRDVESWLSADDMTGVRPVTSVILVHHVMKPGIYLTRTNVPSLGGNTLAPAGDERLEALVLMGWGEACVRSPVTT

SEQ ID NO: 161640 - protein, 328 aa, Oryza sativa
  unsure (1)..(328): unsure at all Xaa locations
  Clone ID: PAT_MRT4530_60806C.1.pep
MDGDWYGCCPNDTPMGQPTPTFTSGGDRRNVGYWLPVADXPVPDRSFLSTTCQFNNLHVRPSSYNILPVMVRMKPGIYLTGTNVPSPGANTPAPARDECLEALVLTGWGEARSYFGSSHTVRWLNAQPAKSVVERWAEQRRRVAGGGRRAEQRGGVNARRRWPEEEEAEEEVAGERGLHAVSRSTRDAQQNGAAPPRSVAERRLPPRPATDVLDGHIRVGALPPFPVAECAFLLAWPPPPTSSMVTSGSEPSLLARSMSAASLLARSTSAASLLARKHDASRLAAAVEHDVIVALSRQSSMSPKPLAVAPALVGFEGCLTERRKKNGD

SEQ ID NO: 161641 - protein, 123 aa, Oryza sativa
  Clone ID: PAT_MRT4530_60807C.1.pep
MDGDLYSCRPNDLLIGRPIPTSTSAGSRCDVGLWLSADDMTSVRLVTNRSFLSTTCQFSNLHVGPSSHNILPVMVRMKPGIYLTRTNVPSLGGNTLAPAGDERLEALVLTGWGEACVRSPVAT

SEQ ID NO: 161642 - protein, 530 aa, Oryza sativa
  Clone ID: PAT_MRT4530_60808C.1.pep
MRASKHSSLAGASVLAPGDGTLVPVRYIPGFIRFVTGLTLVMSSADSHVPTSRLLPAEVETKSLEPHPGPPAEPAKGGLRGLPVRSPKLRQKVFARSPEKDEKQCPGSNQAPCQSTDKKDGTLQPNSGANRTVIWKMDNGRTMIITGSEFTPEDAARIPKRQRGRNTFRGARQLTRHLIKYGPPRPEDDESGERFSADDDDDNDDDNDDNDDATLDSFRERELKFKACARCGIVGHTASLCLPTCRCGEYTHYSNACPLRKVTCFLCEGTDHVPKDCQLNAVIAKTKKEQGTTVQPIRQPMTIDNSGHNPSALPPTPAPVEANHGRSNVTKDVHKSLLVPVSAAKVHNQKPAPRDQASRFCRNCHKPGHRFSDCPLPRAAKAVRRDSQVTSTAHDTNRHLNVQPPPQRIIVKGTVKGRIVPPAIVSSLQHQRQQGKQCQENNSSLQLQRGGTLPRQHPRQVLSATGRPTVVSSSNAPRIAPIWRPIDKSPLGNPTGKKILPVTADKTVAPPPSKINKQSNVPGETSGSRN

SEQ ID NO: 161643 - protein, 160 aa, Oryza sativa
  Clone ID: PAT_MRT4530_60809C.1.pep
MPGFILTITSKMLFEEGQTCTLLSRRVVDKNDRFVTGLTLLMSSAHSHLPTTCPPQAEVEIHQNTGVGYYASQRPEPVYIARVSRFFLAGDLSTYRESLRFHPKPPAEPAKGGLCGLPNRLVPKAQLPLHALKKITVYSHFGVQYRCHNSTNKKQQSRLA

SEQ ID NO: 161644 - protein, 35 aa, Oryza sativa
  Clone ID: PAT_MRT4530_6080C.1.pep
SGHCQVVRPPAIDCGVESSMHQKSFSTMTEDQAHQ

SEQ ID NO: 161645 - protein, 75 aa, Oryza sativa
  Clone ID: PAT_MRT4530_60810C.1.pep
MVVHTNEWDKRVAPALITYFAAADSARAAEVLVVFAKSSESRHELSSIPSIVVVLAADNIASSGNARAIKPRSPG

SEQ ID NO: 161646 - protein, 250 aa, Oryza sativa
  unsure (1)..(250): unsure at all Xaa locations
  Clone ID: PAT_MRT4530_60811C.1.pep
MAEICCEEAMSPPATATAAVAAAVSASAAAAVSSAIDRRRRRMEMRRIRIASDLELQAGEDGRPGKRQRLARTASGAPRPDEDSASERPSCGRTEEFPRYGVTAVCGXRRREMEDAVSIRPDFLPASGKFHFYGVFDGHGCSHVATTCQDRMHEIVAEEHNKGASGEVAPWRDVMEKSFARMDGEVGNRASTRSDDEPACPCEQQTPSRRDHAGSTAVVAVVSPTQVVVANAGDSRAVISRAGVPVALSV

SEQ ID NO: 161647 - protein, 65 aa, Oryza sativa
  Clone ID: PAT_MRT4530_60812C.1.pep
MIFPRDKINSIPLEYSRVKCYNGISVRLRMNSRVHSPDGTRERESGEEPLAWRPAAVAAACYSRH

SEQ ID NO: 161648 - protein, 200 aa, Oryza sativa
  Clone ID: PAT_MRT4530_60813C.1.pep
LRPLTTGVGPLPACQTTPGAPDPQDGPEATVGRPPLSSSDPEVVGTEDECTPRGRLDKERPRDVAPSEEDRPHRKVQWPVYFVSEALRDAKTRYPQAQKMLYAILMAARKLRHYFQAHRVTVVTSYPLGQILYNREGTGRVVKWAIELSEFDLRFEPSHAIKSQALADFVVEWTPAPELVSAPEASSSPSQLPHTALWVM

SEQ ID NO: 161649 - protein, 105 aa, Oryza sativa
  Clone ID: PAT_MRT4530_60814C.1.pep
MAEEKHPPHPVQHKEGHQAGHRVNFYREGRYPLETVTTEVGPRGPDQYQRVKKEEKQHKHKQDLGEGRGLCAGAFGLYEKHQAKKDPENAHRHKITEEIAATAAV

SEQ ID NO: 161650 - protein, 829 aa, Oryza sativa
  unsure (1)..(829): unsure at all Xaa locations
  Clone ID: PAT_MRT4530_60815C.1.pep
MATTTPPRTPGRDGEEMDSPAIWYFHKLIGEDVRLLEDGQIPELFEMYVEESHFELIVSILDAAKGVPFAINALNPICVVPPEIPAEIHPEIPPQFPADIPHEIPADIPTVGGSDHPTTEEAEVREADIFDNEEEYIGVDDEHIYVPASKQQGQPGSEPQGAAATAQSGENGASASAMAAPEAQITDHDPQIYNIIHDPENPNIVKDALFPDMIALRKAVRHYAIVKGFEFAKDDVYLCVALLVMQIKVLPFEHTCSSTKLHEGKMATQGWCANRLHDWLKTNPGKGPTDCRKKLEEKYEIKLKYSKAWSGMKKAIDQIHGTYEESFQLLFNWKAALQNKSPGTIVEIELQKVGKKMCFKRIFVALKPCIDGFLAGCRPYIGVDATRLTGKYTGQLASATAVDGHNWLYYVAYAVFDSETDDNWLWFMQQLNKAIGDTEGLVISTDACKGLDKACKAFKKVEHRECMRHLYANFMKKYQGPVFTDHLYPAARCYTEDKFQWHLKHIWDVRPDAIEFLEKHHSRIWYRCGFSELSKCDYLTNNVSESFNNQIKGLKGLLLHELVDSIREMIMEKFALRRDCASKMDDEILPSVMKELNTATSNLKVVKVARSDHGFAEVTMVESDNSTQRHIVDLDNQNCSCRVWQVTGKPCKHALAWICSNRGKIQDFVHPYYSVQYFRAAYAGRIQPMTDRSQWPSVDLEFKVHPPRLRRGAGRPRVQRIRGCLEPGRKKVKCKRCNQFEHFEKTCKLAEPLCEDDMATEETPRKRRRPSNVNAEASSSAPNKKKXKLQRRSEHHKRGEFLLLPVLHQELLLEGYQIGLKGLNQPTQL

SEQ ID NO: 161651 - protein, 565 aa, Oryza sativa
  Clone ID: PAT_MRT4530_60816C.1.pep
MATTPLPADPWARRRGDGSRRIQSDHLFKAMSIPNPKSIETYSFNVEFVLSSLVELTWGPNQSPTIWYFCKSISEDVRLLENGQIPELFEIYAEESHFELIVSILDAAKGVPFAINALNPICVAPPEFPAEIHPEIPPDIPHEILADIPASIVGGFDQLTTEEAEVREADIFDNEEKVVRHYAILKGFEFAKGMKTDPTRFIAKGAADGCPWCINASLIEDKKTVKIMVLPFEHTCSSTKLHKGKMATQGWCADRLSDWIKKNPSKGPTDARKKLEERYEIKLKYSKAWSGMKKAMEQIHGTYEESFQLLFNWKVALQNKSPGTIVEIELQKVGKKMCFKRIFVALKPCIDGFLAGCRPYLGVDATRLTGKYTGQLASATAIDGHNWLYYVAYVVFDSTIDDNRLWFMQQLNKAIGDPDGLVISTYASARCYTEDRFQWHLKHIWDVRPDAIEYLEKHHSRIWYRCGFSELSKCDYLTNNVSESFNNQIKGLNGLLIHELVDSIREIVMVKFALRRDCASKMDDGILPGVMKELNIATSNLKVVKVARSDHGFAEVTMVESDNST

SEQ ID NO: 161652 - protein, 48 aa, Oryza sativa
  Clone ID: PAT_MRT4530_60817C.1.pep
NSTHPFYYAYFIVGKIEVLAMKFCTETKFNIHLRASIHKRLTFLSHAL

SEQ ID NO: 161653 - protein, 36 aa, Oryza sativa
  Clone ID: PAT_MRT4530_60818C.1.pep
IIPDFSYDTYELFLSFFFSPFVACESLLEQLLVPMV

SEQ ID NO: 161654 - protein, 45 aa, Oryza sativa
  Clone ID: PAT_MRT4530_60819C.1.pep
QIFSIKLAKVFGVDGSMELYGYIAARDLRDPLLNYIVNIGRDNPI

SEQ ID NO: 161655 - protein, 163 aa, Oryza sativa
  unsure (1)..(163): unsure at all Xaa locations
  Clone ID: PAT_MRT4530_6081C.1.pep
LRLDDWVLCXRIYKQEGRLENHQPRGAAAGDGEQQAAGIERKPXMVGVNSSXELPPAGAEPVVAGPAFPGPAAYYDQXRQDSMPRLHADSTARTGHVXGVQQCEVQSQPKISEWERTLRHPRPINPXASIXDPPAPQSIAQQHDPLLQTSSFGNHLDDQKKKK

SEQ ID NO: 161656 - protein, 1065 aa, Oryza sativa
  unsure (1)..(1065): unsure at all Xaa locations
  Clone ID: PAT_MRT4530_60820C.1.pep
MALGSLVCLSALLLIPLSTVSAASSPGLTESSNNDTDLTALLAFKAQFHDPDNILAGNWTPGTPFCQWVGVSCSRHQQRVVALELPNVPLQGELSSHLGNLSFLSVLNLTNTGLTGLLPDDIGRLHRLELLDLGHNAMLGGIPATIGNLSRLQLLNLQFNQLSGRIPTELQGLRSLININIQTNYLTGLVPNDLFNHTPSLRRLIMGNNSLSGPIPGCIGSLHMLEWLVLQHNNLTGPVPPSIFNMSRLTVIALASNGLTGPIPGNTSFSLPALQRIYISINNFTGQIPMGLAACPYLQTISMHDNLFEGVLPSWLSKLRNLTGLTLSWNNFDAGPIPAGLSNLTMLTALDLNGCNLTGAIPVDIGQLDQLWELQLLGNQLTGPIPASLGNLSSLARLVLNENQLDGSVPASIGNINYLTDFIVSENRLHGDLNFLSTFSNCRNLSWIYIGMNYFTGSIPDYIGNLSGTLQEFRSHRNKLTESIMEMENLLELDLSGNSLVGSIPSNAGMLKNAEHLFLQGNKFSGSIPKGIGNLTKLEILRLSNNQLSSTLPPSLFRLESLIQLNLSQNFLSGALPIDIGQLKRINSMDLSRNRFLGSLPDSIGELQMITILNLSTNSIDGSIPNSFGNLTGLQTLDLSHNRISGTIPEYLANFTILTSLNLSFNNLHGQIPEGGVFTNITLQSLVGNPGLCGVARLGFSLCQTSHKRNGQMLKYLLLAIFISVGVVACCLYVMIRKKVKHQENPADMVDTINHQLLSYNELAHATNDFSDDNMLGSGSFGKVFKGQLSSGLVVAIKVIHQHLEHALRSFDTECRVLRMARHRNLIKILNTCSNLDFRALVLQYMPNGSLEALLHSDQRMQLGFLERLDIMLDVSLAMEYLHHEHCEVVLHCDLKPSNVLFDDDMTAHVSDFGIARLLLGDDNSIISASMPGTVGYMAPEXGTLGKASRKSDVFSYGIMLLEVFTAKRPTDAMFVGELNIRQWVQQAFPAELVHVVDCKLLQDGSSSSSSNMHDFLVPVFELGLLCSADSPEQRMAMSDVVVTLNKIRKDYVKLMATTVSVVQQ

SEQ ID NO: 161657 - protein, 99 aa, Oryza sativa
  unsure (1)..(99): unsure at all Xaa locations
  Clone ID: PAT_MRT4530_60821C.1.pep
RCKSPVRDTAEGDRPNPVCYTAQFIHLQCAHLLKKLISCLAGLTECRVLMQWHRQLVLSWMAXCPRVGAWPCVCLLLRTIISFAVAFFVALFDHELRPS

SEQ ID NO: 161658 - protein, 60 aa, Oryza sativa
  Clone ID: PAT_MRT4530_60822C.1.pep
DVMINVICSSSYSDLLLSCVPQSICDHSLSAYYFSSMLYFAVLLHMQSSNFVLLIDAPYP

SEQ ID NO: 161659 - protein, 46 aa, Oryza sativa
  Clone ID: PAT_MRT4530_60823C.1.pep
MAQLGYALGTWAPPARARGRSTRRERQGVGRSREEEVGSAGKDGPR

SEQ ID NO: 161660 - protein, 101 aa, Oryza sativa
  Clone ID: PAT_MRT4530_60824C.1.pep
MAFDSNAGKQPGLEIWRIEQMNPVRVDKKDYGRFYTGDCYLVLKSTETKGSMAQDLHFWLGANSSQDEQGAAAYRTVELDDQLGGAPVQHREVQGHESAKF

SEQ ID NO: 161661 - protein, 414 aa, Oryza sativa
  Clone ID: PAT_MRT4530_60825C.1.pep
MVTASGLAPPRLAVSCPRAAGRGCGGHHRVGFLRSAPVALAGPAAAQLRCCASTVDDGVVSAAAAPKPRLPRSLNYFRLWNELIKLMGTCRVVGMGSKLIGCGSATPSLSVSNDDLSKIVETSDEWIAARTGIRNRRVLSGNETLRELSVQAAKKALEMAQVNADDVDLVLLCTSTPDDLFGGAAQVLAEVGCANAFGFDITAACSGFIIGLITATRFIKGGGIRNILVIGADALSQFVDWTDRVFQACSADEDGLLGFCVQSDGNGQKHLNCVSSHVESILSKTNGVPSFPPKKATFSNIEMNGKEVFRFAVRCVPQSIEKALEEAGLPASSIDWLLLHQANQRIIDAAASRLDIPSDKVISNLANYGNTSAASIPLALDEAVRAGKVKAGDVIAASGFGAGLTWGSAIVKWC

SEQ ID NO: 161662 - protein, 148 aa, Oryza sativa
  Clone ID: PAT_MRT4530_60826C.1.pep
SSSSSSLTGTIAALDAAFSVVFFACTRRRPPPPSSSGSASFASAAAGGVSTASLASTSCAISWPPPSPSPSPSAVSSTTTVMAAASCSLVITTISCSLELGPPLLCSSSSATARGAPSSSSPATLVLGVSWTSRPLLSSCTAAAGTTC

SEQ ID NO: 161663 - protein, 147 aa, Oryza sativa
  unsure (1)..(147): unsure at all Xaa locations
  Clone ID: PAT_MRT4530_60827C.1.pep
QLRCCASTVDDGVVSAAAAPKPRLPRVVGMGSKLIGCGSATPSLSVSNDDLSKIVETSDEWIAARTGIRNRRVLSGNETLRELSVQAAKXALEMAQVNADDVDLVLLCTSTPDDLFGGAAXRVLAEVGCANAFGFDITAACSGFIIG

SEQ ID NO: 161664 - protein, 133 aa, Oryza sativa
  unsure (1)..(133): unsure at all Xaa locations
  Clone ID: PAT_MRT4530_60828C.1.pep
RINGTKWTRWLACIERWIPRAAGIPARGANAFGFDITAACSGFIIGLITATRFIKGGGIXNILVIGADALSQFVGXWTDRGTCILFGGWLLVAVLVQGMSVLMEDGLLGFCVQSDGXGQKHLNWVSSHVGVYP

SEQ ID NO: 161665 - protein, 135 aa, Oryza sativa
  Clone ID: PAT_MRT4530_60829C.1.pep
MSSDKSSWPEVVGLPAEAAKHIILNDRPDVHVVVLRVGSVVTTEVDPKRVRVFVNNSATVAQATFGSPGSRGIPAHSLGRKAHESLLSRATNVGRRRASSSGETPPALPPYQVRQCPIPQVNLDSNQERFSSGRH

SEQ ID NO: 161666 - protein, 304 aa, Oryza sativa
  Clone ID: PAT_MRT4530_6082C.1.pep
MAFAVAPPVAPPPPSPAAAWGRRRARATPPRFALAASTRDGDPAPPTFERLREQLLQLHAEADLTQSKANSTRVRLVRLTEAAENLKKRAAVSIRMGKENEAVDLLVQKKKLTKALESIKQRIEVLDKLSMKISEAISVKQNMLIEHALHPGMSNGKESNDNIRVFSSKVGDEADETTSSPAKSSEKAFDLQHVVHSGMTGQLEQSELQTSDSFSFSSDLESPNSITNHSSYDAFLDHIGFQLDSLECEIEQYISSQLAEQVDIQKPINAKWQKLSDVLKLVTETRERIAKIVDNTVKEAGSED

SEQ ID NO: 161667 - protein, 437 aa, Oryza sativa
  unsure (1)..(437): unsure at all Xaa locations
  Clone ID: PAT_MRT4530_60830C.1.pep
LIRILESSSEYGELYFSELVNTNIITPVGENYGPNLDEDELCQWQVNPFVLSFLASRAAEKGLVFTSSTLTSLPSCGGNNTRIKRRLALHHPDPLLPAMLQQMDLSQTRSLLISGAVDRTTVPLDKFAYLVLLDLXSWENLKDEDLLQICKMFMLRYLSVRNTRVSKLPPQIKELHILGALDISRTTISEIPSEVWELKHLKMLDLRGTWIRHLPEKVKELTSLERLDISHTKISDLPSGVCRLPNLETLDLRGTLISQLPDQIVRIKWLRNLIVGAAGAGSGMIDSDQTVLTKIPETIHQLRYLKTLATIDLSEFSVKSVQSLGDLKQLEVLTITWSFHQCSDKDYQQALRSSIEGWWELKSMTIHCGLGCSMEFLGSLTEPPENLEKFKVIAGKFSRVPQWIERLDRLTFLQITVCKQVADDVKILAGLIKLQRL

SEQ ID NO: 161668 - protein, 70 aa, Oryza sativa
  Clone ID: PAT_MRT4530_60831C.1.pep
SDQCRREKIDGNNPTGTKAQTPELSSFPIHRLQIRRHAARLIRHISTLCHLQQWRCNSLPMCTSALSYLK

SEQ ID NO: 161669 - protein, 785 aa, Oryza sativa
  Clone ID: PAT_MRT4530_60832C.1.pep
MSSSASPPGAPSAEYAEYLSNLVAILSLSHENHYFLGPVGNPDPTEFIIGETNRIPFRLTNPDLGYWKNTFKSWPSLEKVPPEKSWTTWFKRVSASKRVHWDEIGIGQALDLIIANSAKDEPLMAAASYFWSNTTNAFLFNQGPMTPTLIDISMITGLNVTSSANPMSLNTKNQYDFKTKSIGGDDGEERTHRRCTLYGEYASTPTDAGAKLSAELLNDWFCIFYEGFQKDARVWFLYEDSAQLEHPVDFRFEDINYEVYQSSREIFSAAISPCILPVGIHQGRNIQASYEFYLPMSSARQLEMGQLLIGLFFADKIQCRGGISSTLMMDRLLSLQGPPLGSIDNIELATFRSKNFDRWWGEWKLHLFHQPASLYMTDHFPDVVPQTTESFPPHQSNSGKDIQYAPGLIPNGGGLSPPVISYDAPKTSALLQGLVREPADAGKKRKTRSSAVSIVAPIKKKKTKKTKPADDLPTLDPSIEQALDEEVIEDEVDQAAAEVSDTERTPSASPKQTPPTPSAPVHFSRPSPPPSPPVQQSSSDQTPSAAGSHHVEEEEQPAAPAIPVLTDLFSFDIRDYLDEGEEDTTSKALAPLSDDVKKTLGSILDRLEASSLDSLVVDCGSIRARLHEIQALIPDELADILTPTVYLEQHQFKLEKAKLRLAERREHKDIEATIQANRQLVHEEKSKLDQLCEGPIKSNIDRLEARKIELLAQLEECNAELDMEHKKLADLPKSIEEQKARLKSAIKHVADLTKSLKVIPGTDAQDAQAIEEVEQIRQKAISAIQ

SEQ ID NO: 161670 - protein, 124 aa, Oryza sativa
  unsure (1)..(124): unsure at all Xaa locations
  Clone ID: PAT_MRT4530_60833C.1.pep
MDGDLYGCRPNDLLMGRPIPTSTSAXGGRRDVGSWLSADDMTSVXPVTNRSFLSITRQFSNLHVRPSSYNILPVMVRMKPGIYLTGINVPSPGGNTLASARDECLEALILTGWGEACVRPPVAT

SEQ ID NO: 161671 - protein, 698 aa, Oryza sativa
  Clone ID: PAT_MRT4530_60834C.1.pep
MTPTFIDISMIIGLDVTSSANPMSLNTKNQYDFKTKSIGGWSGYVAAYMGQGSVTPREHVAFLLMWLEKFLFCGSSCGPTTNWQFLAEALEIKRQFPLGKILLGYLYQMLSNASAKITVGSVVGAGGPWWLLQTWLNLIVMKVVNRPSVSEAEFPRLEPIVGDDGEERTHRRCTSYGEYASTPTDAGAKLSAELLKDWFCSFYESFQKDARVWFLYEDSAQLEHPVDFRFKDINHEVYQSSREIFSAAISPCILPVGIHQGRNIQASYEFYHPMSSARQLGMGQLPIGLFFADKIQCRGGISSTLMMDRLLSLQGPPLGSINNIELATFRSKSFDRWQGEWKLHLFHQPASMYMTDLFLDVVRQITESSPPHQSNSGKDIQYAPGLIPNGGGLSPPRISRCRQKEENQISAVSIVSPIKKKKTKKTKPTDDLPTLDPSIEQALDEEVIEDEVDQAAAKIPSFPESPFSQKKSLKNSKASKATPGLEWYIPGLEIELCSRGGCSEWLGLYNRKKKTAVKKKSAATTSKPAPPPSPPPSPPVQQSSSDHTPLAAGSHHIEEEEQPAAPAIPVLADLFSFDIRDYLDEGEEDTTSKALAPLSDDVKKTQGSILDRLEASSLDNLVVDCGSIRAQLPEIQALILDELADILTPAVYLEQHQFNLEKAKLSIAERRERKDIEATIQASRQIVHEEKSKLACLQ

SEQ ID NO: 161672 - protein, 123 aa, Oryza sativa
  Clone ID: PAT_MRT4530_60835C.1.pep
MDGDLHGCPPNILLTGRHIPTSTSAGGRRVVGTWLSADDMISVRPVTNRSFLSTTRQLSNVHVCPSSHNILLVMVRMKPGIYPTGANVPSLGGNTLAPAGDECLEALVLTGWGEACVRPPVAS

SEQ ID NO: 161673 - protein, 777 aa, Oryza sativa
  Clone ID: PAT_MRT4530_60836C.1.pep
MSSSASPSGAPSAEYAEHHSNLVAIPSLSHENHYFLGPVGNPDPTEFIIGETNRIPFRLTNPDLGHWKNTFKSWPSLEKVPPEKSWTTWFKRVSASKRVYWDEIGIGQALDLIIANSAKDEPLMAAASYFWSNTINAFLFNQGPMTPTLIDIIMITGLDVTSSANPMSLNTKNQYDFKTKSIGGWSGYVAAYMGQGSVTPREHVAFLLMWLEKFLFCGSSCGPTTNWQFLAEALETKRQFPLGKILLGYLYQMLNNASAKIAISSVVGASGLWWLLQTWLNLIVMKVVNRPSVSEAEFPRLEPIVGDDGEERTHRRCTSYGEYASMPTNAGAKLSAELLKDWFCSFYEGFQKDARVWFLYEDSAELEHPLDFRFEDINHETIESSPPRQSNSGKDIQYAPGLIPNGDGLTPPVIGYDAPKTSALLQGLIREPADAGKKRKTRSSAVNIAAPSKKKKTKKTKPADDLPTLDPSIEQVLDEEIIEDEIDQAAAEKKKTAVKKKSAVTTSKPSPPPPPPPSPPVQQSSSDQTPSAVGSHHVEQKEPPAAPAIPVLADLFSFDIGDYLDEGEEDTTSKALAPLSDDVKKTLGSILDQLEASSLDSLVVDCGSIRAWLHEIQALIPDELADILTLAVYLEQHQFKLEKAKLRLAELRERKDIEATIQANRQLVHEEKSKLDQLSKGPIKSNIDRLKARKIDLLAQLEECNAELDMEHKKLADLPKSIEEQKSRLKSAIKHVADLTKSLKVIPRTDAQDSQAIEEVEQIRQKAISAIQRYLSQ

SEQ ID NO: 161674 - protein, 456 aa, Oryza sativa
  Clone ID: PAT_MRT4530_60837C.1.pep
MTMEDGSCPPAVAPSGSQAEDYGSWTLKQKLEDLINCDPIHGIMPKNPKYKAYFEEKFEEKLSFMGLGEFLYPDILTNMASQNALRCARVALQGTSPLLRCRRRADPNTRHRYGFAPLHMAAENFSVDMVKLLFRCGASANIRTKGDNVIEGLLPLHVAVENASMHKYIEDHWAHGDHIINLIFLLCLPEMTDNIVDEVWNYIQHEEKHVQAAILLLAAEKQLRGRLNKSSGKASLNGFDIVKSRIGDALSTIHLEGLNMVQEGKNGRALKRLKDKKEALLTALVLVCIVHKAGEALDGYIQTHSQPPPPPRRWFSLAGELSLPNDGAASSATRGLVSGGAEQGGGVVEDREERGGVVEEGEEQANQATTPTAQISFAACPRCGEKTCIPDRGQAAELGCGPRRHVDLNPSWSNEITRQVGALRSRHLLLAHQLRIQLLSAAAHQLLSAAAHHLRR

SEQ ID NO: 161675 - protein, 792 aa, Oryza sativa
  Clone ID: PAT_MRT4530_60838C.1.pep
MVRMKPGIYLTRTNVPSLGGNTLAPAGDERLEALVLTGWGEATIKLALNLFAHYLGHPMGALVLVATSLMLLILQHSGASDGARAGSGSIWQPQPDCPAPAKCGNVNIPYPFGIREGCFRPKGGFNISCKQEQAYIGPDIRVTNFDVVQSEARILTDIPSGTVAWKYNNEFDPIAWTSRGGLRLGNHHMVSSAKNRFTAIGCSTVAFIYGRDKNGSNGQFDQFTSLCGSFCFDEGSIEDGPECSGMGCCQVPISTNLRRFSLGFYNYNTTKKVLNFSSRSYAFVVEKDQFKFKSSYAKADNFMEELARGIPIILQWIAGNETCKEAALKESYACVANNSKCIDVIEAPGYRCNCTQGYEGNPYLKDGCRVVNIADINECNATRFPNSCKGICTNTDGSYDCICISIIFLIICISTLLIKIQRMKLEKEKQRFYDQNGGHILYQKIISGQVNTVEIFTEEVLKNATNNFDSGQKLGAGGHGIVYKGILRDNNVVAVKRSNFLHVTDAEEFVQEIIMLSQINHRNVVRLIGCCLEVEVPILVYEFISNGTLSYLIHGDSRRYASLKLRLRIAQESAEALAYLHLSTNRPIIHGDVESLNIMLDDSYTVKVTDFGASRWLSNEAVEQIAMVQGTRGYLDPEYLQERKLTEKSDVYSFGVVLLELITGKKAIYRHDGDGDFESLAGSFLRAMEERVENILDTSLAGASMEALPLLQEVAKVGSMCLSAKGKERPSMAEVTDMLKAVRIAWRDLLVSSEYNVTEVFVDSSEAPPSGNPSSAVFWTPDMQSLEVETLR

SEQ ID NO: 161676 - protein, 708 aa, Oryza sativa
  Clone ID: PAT_MRT4530_60839C.1.pep
MSSSASPSGAPSAEYADHLSNLVAIPSQSHENHYFLGPVGNPDPTEFIIGEINRIPFRLTNPDLGHWKNTFKSWPSLEKVPPKKSCTTWFKRVSASKRVHWDEIGIGQALDLTIANSAKDEPLMVAASYFWPMTPTLIDISMIMGLDVTSSANPMSLNTKNQYDFKTKSIGGWSSYVAAYMGQGSVTPREHVAFLLMWLEQFLFYGSSCGPTTNWQFLAEALETKIQFPLGKILLGYLYQMLNNASAKIAVGSVVGAGRPWWLLQTWLNLIVMKVVNRPSVSEAEFPRLEPIVNDDGEELTHRRCTSYGEYASTPTDAGVKLSAELLKDWFYSFYESFQKDTRVWFLYEDSAELEHPLDFRFEDINHEIYQLSREIFSAAISPCILPVGIHQGRNIQSSYEFYHPISSARQLGMGQLPIDLFFANKIQCRGEISSTLMMDRLLNLQGPPMGSIDNIELATFRSKNFDRWWGEWKLHLFHQPASMYMTDLFPDVVPQTTESSPPHQSNSGRDIQYAPGLIPNRGGLSPPPPPPSEHQSSSDQTPSAVGSHHIEEEIQPAVPAIPVLADLFSFDIGDYLDEGEEDTTSKALAPLSDDVKKTLGKKSKLDQLSEGPIKSNIDRLEARKIDLLAQLEECNAELDMEHTKLADLPKSIEEQKARLKSAIKHVADLTKSLKVIPRTDAQDAQAIEEVEQIRQKAISAIQRYLSQ

SEQ ID NO: 161677 - protein, 125 aa, Oryza sativa
  Clone ID: PAT_MRT4530_6083C.1.pep
MELDCGGARVVVVDLAARGVSGHGQRGGVGSGSAACLDDDVGAGNGSSGGLSFSLSLLHRHELPSPPLPRAAVASTAASSGPAGSGRRDDGGGQIRRHDDGGGRIHRRRRQGQRRLQIFGDFCDA

SEQ ID NO: 161678 - protein, 160 aa, Oryza sativa
  Clone ID: PAT_MRT4530_60840C.1.pep
RTNMASQNALRCARVALQGTSPLLRCRRRADPNTRHRYGFAPLHMAAENFSVDMVKLLFRCGASANIRTKGDNVIEGLLPLHVAVENASMHKYIEDHWAHGDHIINLIFLLCLPEMKMFLDTTRLIAKQTDNIVDEVWNYIQHEEKHVQAAILLLAAEKQ

SEQ ID NO: 161679 - protein, 216 aa, Oryza sativa
  unsure (1)..(216): unsure at all Xaa locations
  Clone ID: PAT_MRT4530_60841C.1.pep
STRPPRARNRRSARAAIGCKIXGVFDYYSVMNNWAXRLLVLIFGIYSRNGFGDDWISQVIAGFVILCXPVRPSSSSRLELMHVVDGDSIWHTMEVLCAYGMRSRIWKESKFGTIGYVKFLYCTRGFPKVFRTLSMSLVRGFRLPTSGINRGGASDRRQXGSQTDGGEAVRPAVATASGTXSRRLDWRSIXSVRRTTTRRSDRQDSFGQTAIHRIRG

SEQ ID NO: 161680 - protein, 295 aa, Oryza sativa
  Clone ID: PAT_MRT4530_60842C.1.pep
MDMSSIASRLGLSGSRPVVRKAAELRRLCDVTFDSSVLGIGEVCKAIICLEIAASKFQVIFDRAEAVRMSGMSEKAYIRSFNALQNGLGVKTTLDVRELGIQFGCVRLIPFVQKGLSLYKERFLAALPPSRRASTDFGRPVFTAAAFYLCAKRHKLKVDKLKLIDLCGTSSSEFTTVSTSMADLCFDVFGIAKEKKDAKSIKGSRELLDVLPSKRKHDDDSDSSGESSGDDQDELDLPTYKRHKKMEKEAYNDWKSSVLSNKQTKPDPAKPRKQAQLNFKKKPSDMALEVSSAAN

SEQ ID NO: 161681 - protein, 523 aa, Oryza sativa
  Clone ID: PAT_MRT4530_60843C.1.pep
MTMEDGSCPSPVTPSEAEAGAEDYESWTLKQKIEDLVNCDPIHGIVPKNPKYKAYFEEKFQEKLSKYVRVVLPKLRPAIQKDSVKQFFQVYNCWSGFMGRGNFLLPDILTNMANENALRCARVALQGTSPLLRRRRADPNTRHRYGFAPLHMAAENFSVDMVKLLFRYGASANICTKGEYVIEGLLPLHVAVENASMHKYIEDHWAHGDHIINLIFLLCLPEMKMFLDTTRLIAKQTDNIVDEVWNYIREEKHVQAAILLLAAQKQLRGRLNNSSGKASLNGFDIVKSHIDDALNTIHLEGLNMVKEGKNGRALKRLKDKKEALLTALVLVGIVHKAGEALEGYIQTHSQVRHDEIVEHVSSILKSNGIAHSGESIDTGKLECYQHGGGMSIGKSDSQRVGYGETIEADKSSSDIGEVSKMILGKQPPKGSAIREVRDMFFPYWKSVLSRRLQLKIVPSCQLSRKDLLSAEASTKGTKSMDHPCNPIKSMGNLGSMGWPPLSSESRRMLYTVASMSRKVFKRT

SEQ ID NO: 161682 - protein, 260 aa, Oryza sativa
  Clone ID: PAT_MRT4530_60844C.1.pep
IWKRIKKNPLLYGQGPPFISQGDTTCTTSTYFPFWWGPILFFLKLRPPFLHKWAEICNGCRPNDLLIGRPIPTSTSAGSRSDVGTWLSADDMTSVRPVTNRSFLSTTRQFINLHVRPSSYNVLLVTVGMKPGIYLTGTNVSSPGASTLAPARDKCLEALILTGWGEACVRPPGSGRLGPRGRNGSGPIPRGDKERGGLITFGPDPPEGVRPLAPGVMPGRSPSSREAVGRDATYLGLVTSGAGLYSWAETQRSQITHIGN

SEQ ID NO: 161683 - protein, 738 aa, Oryza sativa
  Clone ID: PAT_MRT4530_60845C.1.pep
MTQTLIDISMITGLDVTSSANPMSLNTKNQYDFKTKSIGGWSGYVAAYMDQGSVTPREHVAILLMWLEKFLFCGSSCGPTTNWQFLAGALETKRQFSLGKILLGYLYQMLNNASAKIAIGSVVGAGRPWWLLRTWLNLIVMKVVNRPSVSEAEFPRLEPIVGDDGEERTHQRCTSYGEYASTPTDAGAKLSAELLKDWFCSFYEGFQKDARVWFLYEDSTELEHPLDFRFEDINHEIYQSSREIFSAAISPCILPVGIHQGRNIQASYEFYHPMSSARQLGMGQLPIGLFFADKIQCGGEISSTLMMDRLLNLHGPPLGSIDNIELAMLRNKNFDRWWGEWKLHLFHQPASMYMTDIFPDVVPQTTESSPRRQSNSGKDIQYAPGLIPNGGGLSPPVIGYDAPKTSPLLQGLIREPADAGKKRKTRSSAVDIAAPTKKKKTKKTKPADDLPTLDSSIEQALDEEIIDDEVDQAAVEKKKTAVKKKSATTTSKPALPPSPPPSPPVQQTSSDQTPSAVGSHHVEEEEQPAAPAIPVLADLFSFDIRDYLDEGEEDTTRKTLAPLSDDVKKTLGRILDRLEASSLDSLVVDCGSIRARLHEIQALIPDELANILTPAVYLEQHQFKLEKAKLRLAERRERRDIEATIQANRQLVHEEKSKLDQLSEGLIKSNIDRLKAHKIELLAQLEECNAELDMEHKKLADLPKSIEEQKARLKSAIKHVADLTKSLKFIPRTDAQDA

SEQ ID NO: 161684 - protein, 117 aa, Oryza sativa
  unsure (1)..(117): unsure at all Xaa locations
  Clone ID: PAT_MRT4530_60846C.1.pep
KSPDINIRDKPRHTPSGAYGSRQEGSSAITNLAEYGFEEEDYAVIDYELLNKEQHWLRPTGCRAITCQIRGLNLYKNPCLHLFYLNLAYTXIAIPSKYRSRDMLTTKFGNISIGKGD

SEQ ID NO: 161685 - protein, 638 aa, Oryza sativa
  Clone ID: PAT_MRT4530_60847C.1.pep
SFRNKETIPLGQNSPRLSIPDVAKIVVGSVVGAGGPWWLLQTWLNLIVMKVVNRPSVSEAEFPRLEPIVGDDEEERTHRRCTSYGKYASTPTDAGAKLSAELLKDWFCSFYEGFQKDARVWFLYEDSAQLEHPVDFKFEDINHEVYQSSREIFSAAISPCILPVGIHQGRNIQTSYEFYHPMSSARQLGMGQLPISLFFADKIQCRGGILSTLMMDRLLSLQGPPLGSIDNIELATFRSKSFDRWWESSSPHRSNSGKDIQYAPSLIPNGGGLSPPVIGYDAPKTSALLQGLTREPADAGKKRKTRSSAVDILAPAPNKKIKKKAKPADDLPALDPSIEQALDEEEIGEDVDQAVAEVSDIERTPSASPKQAPPTPSALVHFSRKKKTAVKKKSAATTSKPAPPPSPPPSPSAQQSSSDQTPSAAGSHHVEKEEQPAAPAIPVLADLFSFDIKDYLDEGEEDVTSKALAPLSDDVRKTLRSILDRLEASSLDSLVVDCGPIRARLHEIQALIPDELADVLTPAVYLEQHQYKLEKAKLRLAERPIKSNIDRLEARKIDLLAQLEECNAELDMERKKLVDLPQSIEEQKARLKSAIKHVAELTKSLKVIPGTDAQDAQAIEEVEQIRQQAISAIQQYLS

SEQ ID NO: 161686 - protein, 192 aa, Oryza sativa
  Clone ID: PAT_MRT4530_60848C.1.pep
MGRPIPTSTSAGSRRDVGTWLSADDMTIVRPVTNRSFLSTTCQFNNLHVRPSSYNILPVMVRMKPGIYLTGTNVPSPGANTPAPARDECLEALVLTGWGEACVRPPGSGCLGPRGRDGSGPTPRGDKEKGGRITLGPDPPPPPRGLGHVGDRVFLKSLSHDTPSPMSPTAAPGVMPGRSPSSREAVGRDATS

SEQ ID NO: 161687 - protein, 95 aa, Oryza sativa
  Clone ID: PAT_MRT4530_60849C.1.pep
MGTEDTHKLPARKPRRRTADNNPNANYAHAQMVHENRDNKQTTDENPGANDQHKPPQPPPPTPNRVPHGVASKMELDGSKAPALALPPRQRPTQS

SEQ ID NO: 161688 - protein, 173 aa, Oryza sativa
  unsure (1)..(173): unsure at all Xaa locations
  Clone ID: PAT_MRT4530_6084C.1.pep
RPPVRLVIKMYPQGRMAHHFHXVKGXXYLSVRGPKGRFKYQPGQVRAFGMLAGGSGITPMFQVTRAILENPSDNTKVHLIYANVTYDDILLKEELDSMVETYPDRFKIYYVLNQPPEIWNGGVGFVSMEMIQTHCPAPAADIQILRCGPPPMNKAMAEHLENLGYTKEMQFQF

SEQ ID NO: 161689 - protein, 852 aa, Oryza sativa
  Clone ID: PAT_MRT4530_60850C.1.pep
MSSSASPSGAPTAEYAEHLSHQVAIPSLTHENYYFLGPIGNPDPTEFIVGETNRIPFRLTNPDLGHWKNTFKSWPSLEKVLPEKSWTTWFKRVLASKRVHWDEIGIGQALDLTIANSAKDEPLMAAASYFWSNTTNAFLFNQGPMTPTLIDISMITGLDVTSSANPMSLNTKNQYDFKTKSVGGWSGYVAAYMGQGSVTPREHVAFLLMWLEKFLFCGSSCGPTTNWQFLAEALETKRQFPLGKILLGYLYHMLSNASAKIAVGSVVGAGGPWWLLQTWLNLIVMKVVNRPSVLEAEFPRLEPIVGDDGEERTHRRCTSYGEYASTPTDAGAKLSAELLKDWFCSFYEGFQKDARIWFLYEDSAQLEHPVDFRFEDINHEVYQSSREIFSAAISPCILPVGIHQGRNIQASYEFYHPMSSARQLGMGQLPIGLFFADKIQCRGGISSTLMIDWLLSLQGPPLGSIDNIELATFRSKSFDRWWGKWKLHLFHQPASMYMTYLFPDVVPQTTESSPPHQSNSGKDIRYAPGLIPNGGRLSPPVIGYDAPRTSALLQGLVKEPADAGKKRKTRSSAVSIVALIKKKKKTKKTKPANDLPTLDPSVKQALDEEVIEDEVDQAAAEKKKTAVKKKSAATTSKPGPLVLADLFSFDIRDYLDEGEEDTTSKALAPLSDDVKKTLGSILDRLEASSLDSLVVDCGSIRARLHEIQALIPDELADILTPAVYLEQHQFKLEKAKLRLAERRERKDIEATIQASRQLVHEEKSKLDQLSEGPIKSNIDRLEARKIELLAQLEECNAELDMEHKKLADLPKFIEEQKVRLKSAIKHVVELTKSLKVIPGTDAQDAQAIEEVE

SEQ ID NO: 161690 - protein, 195 aa, Oryza sativa
  Clone ID: PAT_MRT4530_60851C.1.pep
MSPSDPEVVGTEAECAPRGLSDGERPGDVAPDEEDRPRRKVQRPVYFVSEALRDAETRYLQAQKMLYAILMASRKLRHYFQAHRVTVVTSYPLGQILHNREGTGRVVKWAIELSEFNLHFEPRHAIKSQALADFVVEWTPAPELVSAPEASSSPSPPPHTALWVIHNRPRGLAPSGGVGPEGDVFALLFTRSIMT

SEQ ID NO: 161691 - protein, 88 aa, Oryza sativa
  Clone ID: PAT_MRT4530_60852C.1.pep
EHGSEGKFLSPPLEHQQSFFVFGPKEIFFHLHNILKLFSFSSHLDVFLFPLSYPYSGPMLIPIMGVVFQKCLVFSVYKKIELKLIFTL

SEQ ID NO: 161692 - protein, 832 aa, Oryza sativa
  Clone ID: PAT_MRT4530_60853C.1.pep
MSSSASPSGAPSAEYAEHLSNLVAIPNLSHENHYFLGPVGNPDPAEFTIGETNRIPFRLTNPDLEKVPPEKSWTTWFKRVSAGKRVHWDEIGIGQALDLTIAKSAKDEPLMTAASYFWSNTIKAFLFNEGPMTPTLIDISMITGLDVTLSANPMSLNTKNQYDFKTKSIGGWSGYVMAYMGQGSVTPREHVPFLLMWLEKFLFCGSSCGPTTNWQFLAETLETKRQFPLGKILLGYLYQMLNNASAKIAVGSVVGAGGPWWLLQTWSNLLVMKVVNRPSVSEAEFPRLELIVGDDGEERTHRRCTSYGEYASTPTDTGAKLSAELLKDWFCSFYEGFQKNTRVWFLYENSAELEHPLDFRFEDINHEVYQSSREIFSAAISPCILPVGIHQGRNIQASYEFYHPMSSTRQLGMGQLPIGLFFADKIQCRGEISSTLMMDRLLKLQGPPLGSINNIELSTFRSKNFDRWWGEWKLHLFQQPASIYMTDLFPDVVPQTTESSPPHQSNSGKDIQYAPGLIPNGGGLSPPVIGYDAPKTSALLQGLIREPTDAGKKRKTRSSAVSIAAPTKKKKKTKKTKPADDLPTLDPSIEQALDEEIIEDEVDQAAAEVLADLFSFDIRDYLDEGEEDTTSKALAPLSDDVKKTLGSILGRLEASSLDSLVVDCGSIRARLHEIQALIPHELADILTPAVYLEQHQFKLEKAKLRLAEWRERKDIEATIQANRQLVYEEKSKLDQLSEGPIKSNIDRLEARKIELLAQLEECNAELDMEHKKLADLPKSIEEQKARLKSAIKHVGELTKSLKVVPGTDAQDAQAIEEVEQIRQKAISAIQRY

SEQ ID NO: 161693 - protein, 139 aa, Oryza sativa
  Clone ID: PAT_MRT4530_60854C.1.pep
LEVISQNTGVGYYASQRPEPVYIARVLCVSCLASLPHTESLESLPESPAEPAKGGLRGLPVRSPTLRQYRRIVHHKRADALLPPAKTGPARPRLMWGPPLELGTWGPLPSTQPHAPIVYAPGQRHNDIPVPHAVGPTRQ

SEQ ID NO: 161694 - protein, 1251 aa, Oryza sativa
  Clone ID: PAT_MRT4530_60855C.1.pep
MAMEYLHHEHYEIVQHCDQKPSNVLFDEETTVHVADFGIAKLLLGDDTSKITNHGKHAHQNRGKLKLRLRKSSLESDLRIDRLFVGEVTIRQWVNQAFSAKLVHVLDDKLQLDESSIEDLNHLLLPIFESCRQSLVGVDGPRWFDTANEGCLPAVLHTAELLIISLTVTALAAGASSSPSPSINSSSGGGAAADLAALLAFKAQLADPLGVLAGSWTTNVSFCNWVGVSCSRRRRPERVTGLSLPDAPLGGELTAHLGNLSFLYTLDLTNTSLVGPVPADLGRLRRLRSLLLGDNLLSAAIPPAIANLTMLELLHLGNNNLSGEIPPDLLHGMRRLSRIALHMNQLTGDLPPLLFNGTPSLTFVNLGNNSLTGGVPHGVASSPSSLPMLEYLNLRGNRLAGAVPPAVYNMSRLRGLVLSHNNLTGWIPTTSNGSFHLPMLRTFSISSNGFAGRIPAGLAACRYLQTLSISSNSFVDVVPAWLAQLPYLTELFLGGNQLTGSIPPGLGNLTGVTSLDLSFCNLTGEIPSELGLMRSLSTLRLTYNQLTGPIPTSLGNLSQLSFLDLQMNQLTGAVPATLGNIPALNWLTLSLNNLEGNLGFLSSLSNCRQIWIITLDSNSFTGDLPDHTGNLSAQLSIFSASENKLTGGLPSSLSNLSSLEQLQLPGNQLTGPIPESITMMPNLVRLDVSSNDISGPIPTQIGMLSSLQRLDLQRNRLFGSIPDSIGNLSELEHIMLSHNQLNSTIPASFFNLGKLVRLNLSHNSFTGALPNDLSRLKQGDTIDLSSNSLLGSIPESFGQIRMLTYLNLSHNSFGDSIPYSFQELANLATLDLSSNNLSGTIPKFLANFTYLTALNLSFNRLEGQIPDGGVFSNITLQSLIGNAALCGAPRLGFSPCLQKSHSNSRHFLRFLLPVVTVAFGCMVICIFLMIRRKSKNKKEDSSHTPGDDMNHLIVTYHELARATDKFSDDNLLGSGSFGKVFKGQLSSGLVVAIKVLDMHLEEVAIRSFDAECRVLRMARHRNLIKVLNTCSNMEFRALVLHYMPNGSLDMLLHSQGTSSLGLLKRLDIMLDVSMAMEYLHHEHYEVVLHCDLKPSNVLFDEEMTAHVADFGIAKLLLGDDTSKITASMPGTFGYMAPEYGSLGKASRNSDVFSFGIMLLEVFTGKRPTDRLFVGEVTIRQWVNQAFPAKLVHVLDDKLQLDESSIQDLNHLLLPIFEVGLLCSSDLPDQRMSMAGVVVTLKKIRKDYEEKN

SEQ ID NO: 161695 - protein, 767 aa, Oryza sativa
  Clone ID: PAT_MRT4530_60856C.1.pep
CHLPLAHLVRHQPNTLRIPFKLTNPDLCHWKNTFKSWPSLEKVPPEKSWTTCWTTWFKRVSASKRVHWDEIGIGQALDLTIANSAKDEPLMAAASYFWSNTINAFLFNQGPMTPTLIDISMITGLDVTSSANPMSLNTKNQYDFKTKSIGGWSGYVAAYMGQGSVTPREHVAFLLMWLEKFLFYGSSCGPTTNWQFLAEALETKRQFPLGKILLGYLYQMLNNASAKIAVGSVVGAVMKVVNRPSVSEAEFPRLEPIVGDDGEERTHRRCTSYGEYASTPTDAGAKLSVELLKDWFCSFYEGFQKDARVWFLYEDSAELEHPLDFRFEDINHEIYQSSREIFLAAISPCILPVGIHQGRNIQASYEFYHPMSSARQLGMGQLPIGLFFADKIQCRGEISSTLMMHQLLNLQGPPLGNLFSDVVPQTTESSPPRQSNSGKDIQYAPGLIPNGGGLSPPVIGYDAPKTSALLQGLIREPADADKKRKTRSSAVNIVAPTKKKKTKKTKPADDLPTLDSSIEQALDEEIIEDKVDQAAAEKKKTTVKKKSAATTSKPAPPPSPPPSPPVQQTSSDQTPSAVGSHHVEEEEQPAAPAIPVLADLFSFDIRDYLDEGEEDTTSKTLAPLSDDVKKTLGTKLRLAERRERKDIEATIQANRQLVHEEKFKLDQLSEGPIKSNIDRLEAHKIEHLAQLEECNAELDMEHKKLADLPKSIEKQKARLKSAIKHVADLTKSLKVIPGTDAQDAQAIEEVEQIRQKAISAIQRYLSQ

SEQ ID NO: 161696 - protein, 212 aa, Oryza sativa
  Clone ID: PAT_MRT4530_60857C.1.pep
MEGGFGRRSVYVADGAWGSSPGDRAGPPLPVRPGALDGDLYGCRPNDLLMGRPIPTSTSAGSRRDVGTWLSADDMTSVRPVTNRMKPGIYLTGTNVPSPGANTPAPARDECLEALILTGWGEACVRPPGSGRLGPRGRDGSGPTPRGDKEKGGRITLGPDPPPRGLGHVGDRVCLKSLSHDTPGPMSPTVAPGVMPGRSPSSREAVGRDATS

SEQ ID NO: 161697 - protein, 795 aa, Oryza sativa
  Clone ID: PAT_MRT4530_60858C.1.pep
MSSSASPPGAPSAEYAEHISNLVAIPSLSHENHYFLGPVGNPDPTEFIIGETNRIPFRLTNPDLGHWKNTFKFWPSLEKVPPEKSWTTCCGPTTNWQFLAEALETKRQFPLGKILLGYLYQMLSNASAKIAVSSVVGAGGPWWLPQTWLNLVVMKVVNRPSVLEAEFPRLEPIIDDDGEECTHRRCTSYGEYASTPVDAGAKLSAELLKDWFCSFYEGFQKDARIWFLYEDSAQLEHPVDFRFEDINHEVYQSSREIFSAAISPCILPVGIHQGRNIQASYEFYHLMSSARQLGMGQLPIGLFFADKIQCRGGISSTLMMDQLLNLQGPPLGSIDNIELATFRSKSFDRWWGEWKLHLFHQPASMYMTDLFPDVVPQTTESSPPHQSNSGKDIQYAPGLIPNGGGLSPPVIGYDAPKTSALLQGLVREPANAGKKRKTRSSAVSIIAPIKKKKTKKTKPADDLPALDPSIEQALDEEVIEDEVDQAAAEVSDTDRTPSASPKQTSPTPSAPVHFSRKKKTAVKKRSAATTSKPAPQPSPPPSSPVQPSSSDQTPSAVGSHHIEEEEQPAVPAIPVLADLFSFDIKDYLDEGEEDITSKALAPLSDDVKKTLGSILDRLEASSLDSLVVDCGSIRARLHEIQALIPDELADILTPAVYLEQHQFKLEKAKLRLAERRERKDIEATIQANRQHVHEEKSKLDQLSEGPIKSSIDRLEARKIDLLAQLEECNAELDIEHNKLADLPKSIEEQKARLKSAIKHVAELTKSLKVIPGTDAQDAQAIEEVEQIRQKAISAI

SEQ ID NO: 161698 - protein, 96 aa, Oryza sativa
  Clone ID: PAT_MRT4530_60859C.1.pep
AVLSKLAIVGTKSSLEIFAIPWAGTTVGGGLGRIAEGIMLLTDDDPSCADWWCGFGQGIAGESLAEPFGWLTTATPFGVVPLLGGVVLAYPFPFPT

SEQ ID NO: 161699 - protein, 490 aa, Oryza sativa
  Clone ID: PAT_MRT4530_6085C.1.pep
MAIEMGKRKRPVDDGGDSSEPELPADIITHITGRLTSQVDFLNCRNVCPSWERALRGEARRLAAAVERVPWLLLAAKADGSYLGRRQAGDVAAVQLPGRHVRLGRREICLGCSSGWLVVANDFGYARLVNPLTAATAPLPPLWRLPYLDAAHGYDGCVGSFLYVDEHHRGGPGVAFSFDGLCDLVLLKAVVVDISDGGATVAVLYRREREFAMARTGQRSWRLVNNKLDGIVDMARHGDGKLYTVHLSGKVARWKFDCNVRRSPEILESVLVIDSPYHYVVKADNNVNAITMSREYEHDHRDRAGECCYLVGAPRGTLYLLKRVYKHKQVGSDGGGGGRTQRTTATFHVWHLTWASDGGMEWPATMDGAAIYHNLATFVSYTGAVCVGKRDADAVLAGGAVYFTEDAAGYAGAAMAEDFGVRRINIRRQKSRRITRMTRLDDESMKRIKDKLEDEESEEVKPLGRCMNWPPPFWFIPSLDDSLGAAPPGK

SEQ ID NO: 161700 - protein, 338 aa, Oryza sativa
  Clone ID: PAT_MRT4530_60860C.1.pep
RVERREDVKAFKTHLPSNQNNLEAREETRSPASLPCSALINGEAGGGQAAAESALCCDRSHYRSDVCYLRGDVRTDPSTSSVLLYNAPRGSAPEKVRPYTRKFEGSIMSTIDEVTIVPVVDAGSGSNGTTAGDTGKDSLRRRCDVRHPPGVPAVVFSTGGYTGNVYHEFSDGLIPLFITAQRFAGEVVFVVLEYHYWWLGRYGAVLERLTNYKVVDFRYDRRVHCFSEMIVGLRIHGELVVDPKLMPNGAGEIMAQIIIRRGGWMDGWVSEWIGKKRWLLQKRCGEKRVCSSQMRGCETDAGGRIGQPIGASTTAAQRARVPRRFCACSEIRASLGTK

SEQ ID NO: 161701 - protein, 610 aa, Oryza sativa
  Clone ID: PAT_MRT4530_60861C.1.pep
MGEFEAADLGDFVMRAGIGDGGTVDCVATIIGSWIDPLVSASLFFSSVDRVGDERRERSLCSIEFHCKMVPDLTRVHTEYSAPIILFIHTARGTARSMQCPMDAAASGTSPVMQFHGIVDEPPSHSSPLHTALERSQRHCYGHETPGEFPLAATCTFFSKPANFEPNFALSLPEVAAFDMCHKRPMVKLMAQQEREQLKQRCGGSWKLVFKYIVARERNYSRIVAGPGHSIVVTTKGDAYSFGANCWGQLGLGDTEDRFKPCLIRSLQSIKITQAAVGSRQTMLVSDTGSVYAFGKGSFVWEELSDAADHITTPKIVESLKGVFVVQAAIGGYFSAFLSREGQVYTISWGRTERLGHSSDPSDVEPRLLSGPLEGVLVAQISAGNCYLLMLAYQPTGMSVYSVGCGLGGKLGHGCKNNKGTPKLIEHFLTLSFNPVSVAAGTWHAAALGDDGRVCTWGWGHTGCLGHGDEEYRVLPTVVQGLSNVKAVHVSTGEYTTFVVSDNGDTYSFGSAESLNIGFQEDEEAADDADFSTPSLVESLKVLNDKAVQISTTNSSYWLNSEMGYPHTFALMESGKLYAFGGGIKGQLGVKLSEGQERAQNPERVPIDLC

SEQ ID NO: 161702 - protein, 85 aa, Oryza sativa
  Clone ID: PAT_MRT4530_60862C.1.pep
ICSIRVLACYCMGENYMTTLIPALQLTSLCLFLHRKGMIWIQTLPLIIDHCRLYNKPSSIFTMSIRPKRFFINTMMANEDSGLTA

SEQ ID NO: 161703 - protein, 64 aa, Oryza sativa
  Clone ID: PAT_MRT4530_60863C.1.pep
MKLSMKRPSYNRTSRMGIDLAEYIAERRQYPCIVVILGVWESGPTVGQPLVGPRGASAYPGVAI

SEQ ID NO: 161704 - protein, 537 aa, Oryza sativa
  Clone ID: PAT_MRT4530_60864C.1.pep
MQCPMDAAASGTSPVMQFHGIVDEPPSHSSPLHTALERSQRHCYGHETPGEFPLAVSPSIVLHVLSTCELDPKDLAALEATCTFFSKPANFEPNFALSLPEVAAFDMCHKRPMVKLMAQQEREQLKQRCGGSWKLVFKYIVARERNYSRIVAGPGHSIVVTTKGDAYSFGANCWGQLGLGDTEDRFKPCLIRSLQSIKITQAAVGSRQTMLVSDTGSVYAFGKGSFVWEELSDAADHITTPKIVESLKGVFVVQAAIGGYFSAFLSREGQVYTISWGRTERLGHSSDPSDVEPRLLSGPLEGVLVAQISAGNCYLLMLAYQPTGMSVYSVGCGLGGKLGHGCKNNKGTTKLIEHFLTLSFNPVSVAAGTWHAAALGDDGRVCTWGWGHTGCLGHGDEEYRVLPTVVQGLSNVKAVHVSTGEYTTFVVSDNGDTYSFGSAESLNIGFQEDEEAADDADFSTPSLVESLKVLNDKAVQISPTNSSYWLNSEMGYPHTFALMESGKLYAFGGGIKGQLGVKLSEGQERAQNPERVPIDLC

SEQ ID NO: 161705 - protein, 114 aa, Oryza sativa
  unsure (1)..(114): unsure at all Xaa locations
  Clone ID: PAT_MRT4530_60865C.1.pep
MAAMVEGHHPADGASSAAAIXWRRGRRSPGAGALSTAGTTVGGGLGRIAEGTMLLTDDDPSCADWWCGFGQGIAGESLAEPFGWLTTATPFGVVPLLGGVVLAYPFPFPTIFSG

SEQ ID NO: 161706 - protein, 175 aa, Oryza sativa
  Clone ID: PAT_MRT4530_60866C.1.pep
LLNAPPNTTGLVDAADIARLREFRAAVTAIFGTDLAAGSAARASSERGGRFAAANVLDGRDDTYWAPAAAEAEDGGGYWIELRRPASAAARKFNVVRIQEHVAMGQRVERHEVYVDGGGAAVASGTTVGHKRLHRLGAPVAGRTVRVWLASRRGPPLLSAVGLHLDPFAAGGGTM

SEQ ID NO: 161707 - protein, 208 aa, Oryza sativa
  unsure (1)..(208): unsure at all Xaa locations
  Clone ID: PAT_MRT4530_60867C.1.pep
GVHNARTSMPLSAQRRLRACLAEPPTPWHNFAPPSGAPPSQRSRXRSLAHRTAVAAFAVVLLARRRREIGSGERDLGARVLPLSPGRRFIXHGDDRSXPLDRTAQICPTSDRHRRLHCAQWAAEVHRTVPAYVGRAQLLSLRAVELTQLDEDGPAQVWTGXRRPRPNVFKVSQYQMVFFPLQRTGTIASNNKKMKLLVNSYCISNGFL

SEQ ID NO: 161708 - protein, 102 aa, Oryza sativa
  unsure (1)..(102): unsure at all Xaa locations
  Clone ID: PAT_MRT4530_60868C.1.pep
MLATAATSARRQTQRARRGRGDREEKGWTAFPRGANVRGGAWPCGAEGGGGAGWXRPRRRRTTAGVGGGDGERRSSLGEVAKAWEARQIKTIPFSQPTCEKE

SEQ ID NO: 161709 - protein, 95 aa, Oryza sativa
  Clone ID: PAT_MRT4530_60869C.1.pep
MECAVQNNVDEVPHGDWGLPQPADGGGGMRTPPRPVRRSEALCQPTGGVGNGYMWASATGLPPGWSARGIQALAGSVVDGNSFFVEGLGGCGAGK

SEQ ID NO: 161710 - protein, 122 aa, Oryza sativa
  Clone ID: PAT_MRT4530_6086C.1.pep
PKFQQSHMMMYDFIFNIRTIICTIQYQNHNSGMLLGSHSSGQFRVSITHDYGMAQFARSHQQFGLCSFAVCIQKVAHPLNCLPVCPLLPQSLCNNHSHWPGQCSMLCSPSPELVWKHHAACM

SEQ ID NO: 161711 - protein, 908 aa, Oryza sativa
  Clone ID: PAT_MRT4530_60870C.1.pep
MGSSRFVLLLLLLLAVAACVARGQGGGNSSSAAAPAPAAGAGPFVPRDDILLDCGATGKGNDTDGRVWSGDAGSKYAPASLGSASAAGQDPSVPQVPYLTARVSAAPFTYSFPLGAGRKFLRLHFYPANYSSRDAADARFSVSVPAANVTLLSNFSAYQTATALNFAYIVREFSVNVTTPTMELTFTPEKGHPNAYAFVNGIEVVSSPDLFDISTPNLVTGDGNNQPFPIDAGTALQTMYRLNVGGQAISPSKDTGGYRSWDDDSPYVFGAAFGVSYPKDDNVTIAYPSNVPEYVAPVDVYATARSMGPDKNVNLAYNLTWIMQVDAGFTYLVRLHFCEIQYPITMINQRVFNIYINNQTAFQGADVIAWTNNNGIGSPVYQDFVVTTVGSGAMDLWVALYPDVQAKPQYYDAILNGLEVFKLPLSNGSLAGLNPVPTVEPSLDGGAVKKSSVGPIVGGVIGGLVVLALGYCCFMICKRRSRVGKDTGMSDGHSGWLPLSLYGNSHSSGSAKSHTTGSYASSLPSNLCRHFSFAEIKAATNNFDESLLLGVGGFGKVYRGEIDGGVTKVAIKRGNPLSEQGVHEFQTEIEMLSKLRHRHLVSLIGYCEEKNEMILVYDYMAHGTLREHLYKTKNAPLSWRQRLEICIGAARGLHYLHTGAKHTIIHRDVKTTNILLDEKWVAKVSDFGLSKTGPTMDHTHVSTVVKGSFGYLDPEYFRRQQLTDKSDVYSFGVVLFEVLCARPALNPTLAKEEVSLAEWALHCQKKGILDQIVDPHLKGKIAPQCFKKFAETAEKCVSDQGIDRPSMGDVLWNLEFALQMQESAEESGSLGCGMSDDSTPLVIVGKKDPNDPSIESSTTTTTTTSISMGEQSVASIDSDGLTPSAVFSQIMNPKGRHDLFFKRILMSL

SEQ ID NO: 161712 - protein, 162 aa, Oryza sativa
  Clone ID: PAT_MRT4530_60871C.1.pep
MHVCWCGSNRPSPLPHAEVAYFPAPQPPSPSTKKELPSTTEPASAWIPLADQPGGRPVAEAHMYPLPTPPVGWQRASLLGTDAKAACHREEPHRRRRKGPRSLHYPQLWKLLTSASRAGEEFSCRHRRLLAGEGPSRRAALLPDHQAGTDTTTAAPSRRPAG

SEQ ID NO: 161713 - protein, 87 aa, Oryza sativa
  Clone ID: PAT_MRT4530_60872C.1.pep
RRKEVGDSGNLIWTFFWFFLTPTFFTSLPAICKFPWNYIIDLDRVFKTCWEQNHEINALRGKKNFQSFISPLEKKKKKKKKKKKKTK

SEQ ID NO: 161714 - protein, 42 aa, Oryza sativa
  Clone ID: PAT_MRT4530_60873C.1.pep
DAWARGSLFLAGPHTTMAVISCGQVNSAASPCLSYARGGFGP

SEQ ID NO: 161715 - protein, 101 aa, Oryza sativa
  Clone ID: PAT_MRT4530_60874C.1.pep
DSVHFLHTRSICFIHAITILIFTITGRLITPFLQRGGVNGAAMGRGWIIASWLPRKSMKVNLAFPLHPHSMRGWISFPPNIGQMDQGGITKRAGHAWLFLV

SEQ ID NO: 161716 - protein, 95 aa, Oryza sativa
  Clone ID: PAT_MRT4530_60875C.1.pep
HMLFMIISYLLFIFFTKKLKRAPAGYPTPFYTNKWAKISIPSKGGGGTKGETVQWQVAWLSKKLHLGSDQPPARRLTREQSGDIKTNSGGYITTR

SEQ ID NO: 161717 - protein, 56 aa, Oryza sativa
  Clone ID: PAT_MRT4530_60876C.1.pep
GRGSIFYPKELSCHRLGLTLIRTILEERNFPNQIILHKSELTCNQILVFHSLVKYK

SEQ ID NO: 161718 - protein, 95 aa, Oryza sativa
  Clone ID: PAT_MRT4530_60877C.1.pep
GAPRAKFETFKANKKQKWNNLYIYICFFYRDSLTYSFSTATATALLSPIWYYTKFGALTKSLELKKLSFFRAFAAPPFSSPSKENKNSKIKKKKK

SEQ ID NO: 161719 - protein, 477 aa, Oryza sativa
  Clone ID: PAT_MRT4530_60878C.1.pep
MDAAAQESLILELHAIEAIKFGTFVLKSGITSPIYLDLRALVSHPGLLSSIATLLHTLPATRPYDLLCGVPYTALPIASVLSVHRSVPMVMRRKEAKAHGTAKSIEGAFRAGEAVLIIEDLVTSGASVLETAAPLRDQGLVVADAVVVVDREQGGRENLAANGITLHSLMTLTEVLAVLLKHGKVTEEKAREVRQFLDANRKVTVPGAAGAVKPKAVRKGFAERAGLAKNPMGKRLFEVMEAKQSNLCVAADVGTAKELLELAEKVGPEICMLKTHVDILSDFTPDFGAKLCSIAEKHNFLIFEDRKFADIGNTVTMQYEGGIFRILDWADIVNAHIIPGPGIVDGLKLKGLPKGRGLLLLAEMSSAGNLAHGEYTAAAVKIAEQHSDFVIGFISVNPASWSVAPSSPAFIHATPGVQMVSGGDALGQQYNTPHSVINDRGSDIIIVGRGIIKASNPAETAREYRIQGWGAYQSSLP

SEQ ID NO: 161720 - protein, 119 aa, Oryza sativa
  Clone ID: PAT_MRT4530_60879C.1.pep
MAAWRASLAVADGQKQLTREARTYNVNTCRLFFDEKYGAINITTLLLQKNKKPNFQLLMALAFSAAPLTLYVPPVRSLSLFVEAIEAVFRDCAPYSQGAIFRFRLGLSRILSGLARALR

SEQ ID NO: 161721 - protein, 72 aa, Oryza sativa
  Clone ID: PAT_MRT4530_6087C.1.pep
MAPPAHRPASCRTSPAASPCCEYSAACAFRATAMNMQRVVVVVLHPELSTEALEQRTTTALASVALDWIAES

SEQ ID NO: 161722 - protein, 105 aa, Oryza sativa
  unsure (1)..(105): unsure at all Xaa locations
  Clone ID: PAT_MRT4530_60880C.1.pep
QPHFHKRRIRRTVESYSSSHGQAPQSSSLRRRRSADASGVDRPAASCAALRWXRRQLRGSEATRGGGVGEEKAXVLPPPIPNLPLPPIVPGNPPARNSVVNNKSP

SEQ ID NO: 161723 - protein, 350 aa, Oryza sativa
  unsure (1)..(350): unsure at all Xaa locations
  Clone ID: PAT_MRT4530_60881C.1.pep
SGANNFQSGDGGGGSMLNWKSKCSTRSPRTTVAGAKPDDSEFESVNAPLEPQTWEGSFLCGLLKNQPQVLPVAAAKQLQELSNQRKDTLIRWEHSIGSPEDCLHRRIAEMKEHECQTAIEDIMYTLIVYKFFKIEVPLVPNLSKLISNKRLQIWPPREAELESIHGPEVLGLIREHLTSIIRWVHRNGPKINRSTLRIKRMQFSRIYSASIMYGYFLKSVTTRHRLELILAQSQGNKNRKSPLXGSAEISSSSKPSSVVDLHDLKSYMMGFDPKTLELCARLRSCEASNLIEKHSWALFRESMKDFLEPDEAVILDPSSLKRLLLEAIAFGSFLWDVEDYVDEIYKLHDS

SEQ ID NO: 161724 - protein, 82 aa, Oryza sativa
  Clone ID: PAT_MRT4530_60882C.1.pep
MSKTSTSTVANRTNQEERIANIVVEETGKTPLTEVELAELVQAQGAVMVSKGQYEELQKELQRLQALHNQAVGAGGSSDQGL

SEQ ID NO: 161725 - protein, 144 aa, Oryza sativa
  unsure (1)..(144): unsure at all Xaa locations
  Clone ID: PAT_MRT4530_60883C.1.pep
IKSNTGFDQQDLNLAYTLVPVIPISYKYRSRDLKXQQWHACTSPDEIGIIIINNLIYQDHPNFKTRGVTKDIKLYDVERIRNMIHLACVYKEKNFQEQLSTRIGXGQVHPIIENVLDKGRVVGPNLPMKTDDLSHXSVGHGWTI

SEQ ID NO: 161726 - protein, 351 aa, Oryza sativa
  Clone ID: PAT_MRT4530_60884C.1.pep
MLNWKSKCSTRSPRTTVAGAKPDDSEFESVNAPLEPQTWEGSFLCGLLKNQPQVLPVAAAKQLQELSNQRKDTLIRWEHSIGSPEDCLHRRIAEMKEHECQTAIEDIMYTLIVYKFFKIEVPLVPNLSKLISNKRLQIWPPREAELESIHGPEVLGLIREHLTSIIRWVHRNGPKINRSTLRIKRMQFSRIYSASIMYGYFLKSVTTRHRLELILAQSQEFCPPIQFLNAQFNSTQKQEQEESIGGSAEISSSSKPSSVVDLHDLKSYMMGFDPKTLELCARLRSCEASNLIEKHSWALFRESMKDFLEPDEAVILDPSSLKRLLLEAIAFGSFLWDVEDYVDEIYKLHDS

SEQ ID NO: 161727 - protein, 181 aa, Oryza sativa
  Clone ID: PAT_MRT4530_60885C.1.pep
MFKKFSFEDISAQNQVKASVQRKIRQSIADEYPGLEPLLDDLLPKKSPMIVVKCQNHLNLVVVNNVPLFFNIRDGPYMPTLRLLHQYPDIMKKFQVDRGAIKFVLSGANIMCPGLTSPGGSLDVEVEEETPVAIMAEGKQHALAIGYTKMSAKDIKTINKGIGVDNMHYLNDGLWKMERLE

SEQ ID NO: 161728 - protein, 162 aa, Oryza sativa
  unsure (1)..(162): unsure at all Xaa locations
  Clone ID: PAT_MRT4530_60886C.1.pep
RLSTPSSIATNDSCCSNTTFLLTGKFGKSRSYHRPRVSIGFIVLESADENYQVANSRILAIFGCFTVYLNHLDFMTSDLQPMYALTIGSVLIXYHIIISRLVSIGLYYCYILLSSADCLCIIIYVGHIADCXNPIDIGXNRHRLMSAIGWNYSIGLSADRLF

SEQ ID NO: 161729 - protein, 552 aa, Oryza sativa
  Clone ID: PAT_MRT4530_60887C.1.pep
MSSSANPPGAPSAEYAEHLSNLVAIPSLSHENHYFLGPAGNPDPTEFIIGETNRIPFRLTNPDLGHWKNTFKSWPSLEKVPPKKSWTTWFKRVSASKRVHWDEIGIGQALDLTIANSAKDEPLMAAASYFWSNTTNAFLFNQGLITPTLIDISMIIGLNVTSSANPMSLSTKNQYDFKTKCIGGWSGYVATYMGQGSVTPREHVAFLLMWLKKIIFCGSSCGPTTNWQFLVEALETKRQFPLGKILLGYLYQMLSNASAKIAVGSVVGAGGPWWLLQTWLNLIVMKVVNRPSISEAEFPRLEPIVDDDGEERTHRRCTSFGEYASTPIDAGAKLSAELLKDWFCSFYEGFQKDDRIWFIYEDSAQLEHPVDFRFEDINHEVYQSSREIFSAAINPCILSVGIHQGRNIQASYEFYHPMSSARQLGMGQLPIGLFFANKIQCRGGISSTLMMDRLLSLQGPPLGSIDNIELSTFRSKSFDRWWGEWKLHLFHQPASIYMTDLFPYVVPQTTESSPPHQSNSGKDIQYAPGLIPNGGGLLSRPEVPLPCSKFIK

SEQ ID NO: 161730 - protein, 203 aa, Oryza sativa
  Clone ID: PAT_MRT4530_60888C.1.pep
MVMSSADSHVPTSRLLPAEVETNITEEELNATAEKAPRPDGFTGGFFKVAWDIVKGLPLHTRKLRKVDFIPLIDKFGARLPGWKGKFFTSAGRETLVKSVLAALPIYHMTGIQTPKWVIKRIDRFRKAFLWKGDDPDNVSLGSSLVNWSIVCMLKNLGGLRILDLNKFSRAIRLRWFWFSSKEENKPWLGSELTCDNVDKSLF

SEQ ID NO: 161731 - protein, 53 aa, Oryza sativa
  Clone ID: PAT_MRT4530_60889C.1.pep
RPGRMTLSLVLKRAVSRFIKTSAYGLFGREDPVFTWKVVKPLKYQKASSLARR

SEQ ID NO: 161732 - protein, 89 aa, Oryza sativa
  Clone ID: PAT_MRT4530_6088C.1.pep
MLSCSGRKHHRYNGCFDSVEDATLWAERMKTQERQVGLGISIYEEGLSPDQGNGCVGIGSTRALDGPGRDEWSQVGPARKLARADINVE

SEQ ID NO: 161733 - protein, 163 aa, Oryza sativa
  Clone ID: PAT_MRT4530_60890C.1.pep
MAAGSSQRPPADLALHWPDLAPSSDEGGHLPMQRNDDTDDECSQAPPGPWGGGDNGKAPRGQLAMVVIVLRMSVAVERQQQRRISAACSSPAHRRYFRPAAVFVLGGVGSSAGKKATSGFVVVLLESRSCFVLVSLATMIQVGLRLLCFVLVVVMTLVFLTKS

SEQ ID NO: 161734 - protein, 180 aa, Oryza sativa
  unsure (1)..(180): unsure at all Xaa locations
  Clone ID: PAT_MRT4530_60891C.1.pep
MQHDELLHGLQTSXRQYATGMVINPWAINQHNLGVVTDYECAIKRNNSRFQIILRRFMHTKGNHMNSVIPPHGKHFTSFTGPEHNTQTDNMRNEFGKSMDLIQQVYVTQSCRHIEITIYDDGDDITPVWQFGALAXRWHTTQLHVDPRILMTAARRTEXQQLRPQQQQPNCIRPYRLGGG

SEQ ID NO: 161735 - protein, 83 aa, Oryza sativa
  unsure (1)..(83): unsure at all Xaa locations
  Clone ID: PAT_MRT4530_60892C.1.pep
APPPWRAARRSGSAPPPPSAGGSTAPAPPAGRRRRTAAAGTPGTPAGWTIGTHALPRARTHPPARXEAXRSTPNRPQPPPDAW

SEQ ID NO: 161736 - protein, 95 aa, Oryza sativa
  Clone ID: PAT_MRT4530_60893C.1.pep
KPRRDAAESAGRTTKPRALLAVAGMDWDRIGGGHGDGEGGGGGERRSRRRARGNTSRVTVVANGETISYFFVGKNTNLRRGPWEYEILGSGSSDF

SEQ ID NO: 161737 - protein, 46 aa, Oryza sativa
  Clone ID: PAT_MRT4530_60894C.1.pep
CTSAPSFLSPPTNSRTCRRLETCAKCSRRDMSLNRVQLIFFWFHTD

SEQ ID NO: 161738 - protein, 523 aa, Oryza sativa
  unsure (1)..(523): unsure at all Xaa locations
  Clone ID: PAT_MRT4530_60895C.1.pep
MDSGLGRSSETSLKALPSMASNATRNTDPDQQGVRFSSTDQPPCFARPGQSFPAFPPLFGVQSSSLYLPDDIEAKIGNQFESNPSPNNPTMDWDPQAMLSNLSFLEQKIKQVKDIVQSMSNRESQVAGGSSEAQAKQQLVTADLTCIIIQLISTAGSLLPSMKNPISSNPALRHLSNTLCAPMILGTNCNLRPSANDEATIPDISKTHDYEELMNSLNTTQAESDEMMNCQNPCGGEGSEPIPMEDHDVKESDDGGERENLPPGSYVVLQLEKEEILAPHTHFCLICGKGFKRDANLRMHMRGHGDEYKTAAALAKPSKDSSLESAPVTRYSCPYVGCKRNKEHKKFQPLKTILCVKNHYKRSHCDKSYTCSRCNTKKFSVIADLKTHEKHCGRDKWLCSCGTTFSRKDKLFGHVALFQGHTPALPMDDIKVTGASEQPQGSEAMNTMVGSAGYNFPGSSSDDIPNLDMKMADDPRYFSPLSFDPCFGGXLDDFTRPGFDISENPFSFLPSGSCSFGQQNGDS

SEQ ID NO: 161739 - protein, 142 aa, Oryza sativa
  Clone ID: PAT_MRT4530_60896C.1.pep
RQRRRSDEARGDGGGADPVRSGGGGSDAAHGDGGAVDPVRSGGGGSAAAVSVCSGGGGSDAARADGGAADPVCSGHGGSDVARADGGAADPVCSGHDDSDATRSDGGSADPVCSSGSGSDAARGDGSVADPVRNGSDGADAV

SEQ ID NO: 161740 - protein, 60 aa, Oryza sativa
  unsure (1)..(60): unsure at all Xaa locations
  Clone ID: PAT_MRT4530_60897C.1.pep
MEKAIDRQRVLLAHXLPFXXXDQSLLSASACAAGDSAAYQEDFAYGDDVVVVAGYRTPIC

SEQ ID NO: 161741 - protein, 222 aa, Oryza sativa
  Clone ID: PAT_MRT4530_60898C.1.pep
MAPRNAAEAVAVAVAEGGGDGMEPRFRGVRKRPWGRYAAEIRDPARKARVWLGTFDTAEAAARAYDSAALHFRGPKAKTNFPVAFAHAHHHAPPPPLPKAAALAVVSPTSSTVESSSRDTPAAAPVAAAAKAQVPASPSLDLSLGMSAMVAAQPFLFLDPRVAVTVAVAAPVPRRPAVVSVKKEVARLDEQSDTGSSSSVVDASPAVGVGLDLNLPPPIEEA

SEQ ID NO: 161742 - protein, 130 aa, Oryza sativa
  unsure (1)..(130): unsure at all Xaa locations
  Clone ID: PAT_MRT4530_60899C.1.pep
IQPVQQTPPRQQSLXPIQQTPLRQQIVQSIQHQGLVSASAEFATPGGXPVQQLLNQVVPEHLVHHVQPDGTVMPQVVPEHLLRNIWPDPHNYQEGNLSYQYQPPSPQAQYRPGGLAQPQFASQYSQFEPM

SEQ ID NO: 161743 - protein, 370 aa, Oryza sativa
  Clone ID: PAT_MRT4530_6089C.1.pep
MDTFSHVPPGFRFHPTDEELVDYYLRKKVASKKIDLDVIKDVDLYKIEPWDLQEKCKIGMEEQNDWYFFSHKDKKYPTGTRTNRATGAGFWKATGRDKPIYARSCLVGMRKTLVFYKGRAPNGQKSDWIMHEYRLETNENGTTPEEGWVVCRVFKKRVATVRRMADGSPCWFDDHGAVGAFMPDLSSPRQLLPHHHHHHPGSSAALYHGHHHQQLQQMYGHCKPELEYHHLLPQEAFLQHLPQLESPKPPPPPPAAAAYIGGHLGSSSSTALTTHDDEASGSAAQQQPPSLEAVYMAGAGVGIGVDASVTDWRLLDKFVASQLLSKESMSSYGSHPAQVFQAADGGKHEEALDYASTSAGSGGGEADLWK

SEQ ID NO: 161744 - protein, 214 aa, Oryza sativa
  Clone ID: PAT_MRT4530_608C.1.pep
MASSASRFIKCVTVGDGAVGKTCMLICYTSNKFPTDYIPTVFDNFSANVVVDSTTVNLGLWDTAGQEDYNRLRPLSYRGADVFVLAFSLVSRASYENIMKKWIPELQHYAPGVPIVLVGTKLDLREDKHYLLDHPGMIPVTTAQGEELRKQIGAAYYIECSSKTQQNVKGVFDAAIKVVIQPPTKQREKKKKKSRQGCSMMNMFRGRKMSCFKS

SEQ ID NO: 161745 - protein, 314 aa, Oryza sativa
  Clone ID: PAT_MRT4530_60900C.1.pep
MPASTAWAARLAEGGEEGTESIVRCGSPLATTTTSPMPPPPHRGGGGGRDTSAFFAATLVLWAVSVGFEIGARGRRELAPVAAGFAFFQAASAAVRAAVSRDPLFVNTAVSLLHSSLTSASVIFVLVNRWHNKDLKNMFEHEELFGGSWVGAYSALCFSCGYFAYDQLDMLRYRLYSGRIPGILMHHLILLICFTLALYRNVTINYLILTLVCELHSVFLHIRKLRRMAGFRDYNRKIVKLEWVLNWTTFVSARVACHILITYKLIIDAHKFDSGIELPLALFGMAGMNLLNIFLGLDLLKAYTLERNQQTHQD

SEQ ID NO: 161746 - protein, 129 aa, Oryza sativa
  Clone ID: PAT_MRT4530_60901C.1.pep
NGQKKLIFLHFFPPLCNLCSSFYQKDPYTFERNKKETTFKSPLCKMKLSSINYWILIPSKKPKKPIGSLMKSKPNITCHNLHHQQNERTLSPFSFSLTSSQLSTRSGRGLVWIFTCLLDNLIAGTPRNS

SEQ ID NO: 161747 - protein, 200 aa, Oryza sativa
  unsure (1)..(200): unsure at all Xaa locations
  Clone ID: PAT_MRT4530_60902C.1.pep
MASSTAADGDDEVVREFGPILRVYKSGRLERPLVAPPVGPGHDAATGVHSRDVHLGDYSARLYLPPPAAAAAAAERLPVVVYVHGGGFVAESAASPSYHLFLNRLAAACPALCVSVDYRLAPEHPLPAGYDDCLAALRWVLSAADPWXAARGDLDRVFLAGDSAGGNICHHLAMHHHHDAPPRRRLRGAVLIHPWFWGSE

SEQ ID NO: 161748 - protein, 618 aa, Oryza sativa
  unsure (1)..(618): unsure at all Xaa locations
  Clone ID: PAT_MRT4530_60903C.1.pep
MYITNREFNGCDNDLRSLFTSCSPCCLWICYVYTSYSLSCNSHCTDHSFIGIWSXTPPAKVFRLKISSASKTEVPDNDRFSTSRDVQQFMWKPVFYFVLWMFFWSCYVLLLSSMILNKVDGLQEMFEKTYGFILTVKDLSPNIGVLWSFFLIVINMNIVFMVLPLAIRLKHRPCFLAFVYTAIVAMLKSYPSVGDSALYLGLLGLFATELAEMKLTFFLFFGYIGVSLLSPVMHNLWIWRGTGNANFYFATGLAYTCIQTVLVVESKLHHRYLRMEACPVNGATAVRTGPASAPNTDSHKPKAPNTIEPSTQKALKKFGEKERRAGDESSRTLAMAGEAGGDPRAWLAVDETAAAFLSRSLSARPPILLPPPLHRAPLRPGNVVEIAGPSNSGKSQLLLTAAVQCILPKEWKGTYFGGLGKVVMYLDLDCRFDVLRLAQILRNRIGECCGSTNPTNEEFAKDGATNSFSENTLFSECMKRFLRTLSLQSMTETVVQKLRNFLQLQPVLVMATKAPIYGEGFTGNDFQRGTSKQMLEDSTMRCIGQEEEKNISYREFMPSVWQSFVTHRIKLQDLGQEAELFSGQENKELPLRTSEWMQPSLNTKDKFSITDDGVILIH

SEQ ID NO: 161749 - protein, 239 aa, Oryza sativa
  unsure (1)..(239): unsure at all Xaa locations
  Clone ID: PAT_MRT4530_60904C.1.pep
KXXXXXXXXXXXXXXTXXXXXXXXXXXXXXDXXXXXXXXXHXPXXXXTXXXXXXXXTXXXXXXTXXXXXXXXXXXXXXXXXXYXXXQXXXXXNSXXXXXLXXXXXXXXXXXXXXKXXXXXXXXXXXXXXXTXXXXXXXXXXXTXXXLLSXXXXPXLXXXXXXXXXXXXPYXXXXXXXXXXXXXXXXXXXXXXXXXXXSEXIXXXXXXXXYXHXXXXSXXXXXLXLMSXXXXXXXXGXXX

SEQ ID NO: 161750 - protein, 94 aa, Oryza sativa
  Clone ID: PAT_MRT4530_60905C.1.pep
MARPGTKPTGRPWQGGGGDRREGGGAHRRRRRARVKERRRGGVSHRGWPAREEMTANDAGKRWMARQAATGGGGRGSFRGGEAISGGGAAQRGR

SEQ ID NO: 161751 - protein, 213 aa, Oryza sativa
  Clone ID: PAT_MRT4530_60907C.1.pep
VAADARRHRFVSPTAAAAVSRAEGRRGRPGAQPSRRGGRRRAHCGHGRLARRGPRPRRGLPRERRGVAGLPRRQSRRPAGRPRRVVAARHPHRRLRHRRRHRARQACSGELCSISEGIVQSPHPSCIRRYNAFRRAGACWQSGEGDLSCQWITRGENRFCDRGCGARRLLPDVPLLLSSHCCVDGVEEGQATCRPWPACCSAVWYAPSCLEVH

SEQ ID NO: 161752 - protein, 83 aa, Oryza sativa
  Clone ID: PAT_MRT4530_60908C.1.pep
MARPGTKPTGRPWQGGGGDRREGGGAHRRRRRARRREVAAEVASAAAKLSAVVVRRSEGASGDGVRLEMGGGDGSSGRAAQWR

SEQ ID NO: 161753 - protein, 74 aa, Oryza sativa
  Clone ID: PAT_MRT4530_60909C.1.pep
FFFFSHVTTSTRAYTSPAPIPTQHCQSVNNITTVRAHAHHITSKLTLPTSACQPLRQPTPKPYNFRHQHHSSCQ

SEQ ID NO: 161754 - protein, 96 aa, Oryza sativa
  Clone ID: PAT_MRT4530_6090C.1.pep
MGGGGGGGGGTMVACAYACVNEKQILGGSCWDGDGSIDKCRCGGGVCERRHRLAVFGGVRLVGGNGLAEEWEGERWLRLWWLWPLTEKAEEWLGLI

SEQ ID NO: 161755 - protein, 303 aa, Oryza sativa
  unsure (1)..(303): unsure at all Xaa locations
  Clone ID: PAT_MRT4530_60910C.1.pep
SAGSPWTGTTRVVHRRSTGPTVRIDREPIRWRGGGQAWRGLAQSRPAGHGXRWRRRPARGRRCAQEAATRTGEGEEERGGFSPRLAGARRDDGERRRQAXGWRGKRVDDVRSDLGKQKRGFRGREVVRGNWQHRPKASKMEGLTXAAGKTISGGISATGGGGRGSFRGGEAISGGGEGGGGRSRGGAQFAGDMERWRERERVGEGEGGRRRGGRVVGCGRRRRWAAAAVGAGGGGCRXRRNKGPTGGPHLSVTRREEGGDVGRPSKEEGGAGGVGRRPNKRKKRKWKMDPLESTCRHASLSIL

SEQ ID NO: 161756 - protein, 130 aa, Oryza sativa
  Clone ID: PAT_MRT4530_60911C.1.pep
MEDNDGRPAASSTRNSTLPQSSKPVEGKKKSKLCFGDSCRCPKRLLLRVCRSSQRHGHVAYWLTTRLIKHMLIALDKPKTSNKSFSYPALSALICLKLQQQQQQQLLRARIRHHTYMYVSIYIMFVDRTA

SEQ ID NO: 161757 - protein, 54 aa, Oryza sativa
  Clone ID: PAT_MRT4530_60912C.1.pep
WKPGHNMRFVNVSCFCPSGPFTDMNYCSCYLISFCPRLCLKNTKKKKPKKKKNQ

SEQ ID NO: 161758 - protein, 207 aa, Oryza sativa
  unsure (1)..(207): unsure at all Xaa locations
  Clone ID: PAT_MRT4530_60913C.1.pep
SVTYIISLRPSGLLLSQHQCCLDILDHTCMVDCKSCTTPVDICTKLSATDSMPVVDPMDFRSLVGALQNLIFIRNDITYAVQQMCLHMHDPREPRLNALKRILVSRSSKHQVTISRSSAEAEYXAIINVVAEVTXLLQLLHELHSPPPKATLVYXDNLSAVYLSSSPCRRPYGDMEGEMVCGVKQTEDGGGAEMGAMAAPPVRGETT

SEQ ID NO: 161759 - protein, 65 aa, Oryza sativa
  unsure (1)..(65): unsure at all Xaa locations
  Clone ID: PAT_MRT4530_60914C.1.pep
TQGNRRVWGGDRWGRRETGLRRSATGDEXAAATTXEQEGLPPRRRXVWNAXCCLRWALRRKSXAV

SEQ ID NO: 161760 - protein, 92 aa, Oryza sativa
  Clone ID: PAT_MRT4530_60915C.1.pep
TTQPIHQQSLQCSFCVEPNLLRGSLQPTGDPPSCHLVVQPSLLLLAVSGSQGHSFHPCPHPQADNYWHPAHPLEVHSNKEFLPGPRGVDPPG

SEQ ID NO: 161761 - protein, 478 aa, Oryza sativa
  unsure (1)..(478): unsure at all Xaa locations
  Clone ID: PAT_MRT4530_60916C.1.pep
KEFSALLTNRTWELISHPPSINIVIDKXIFKHKFQSDGSLHCYKARWVLRGFTQCLGIDFDETFSPVEKPATIRTVLSLAVHXPIHQLDVKNVFLHGTLXETFYCXNHSGSSTAPTPGDMMCCLNKPLYGLKQAPHSWYSQFASFLLTLTFSKAKSDTSLFILQCGTDIVYLLLYVDDIVLTASSTELFRWSILALQSKFSIKDLSDLHHFLAAXSGLLLSQHQCCLDILDHTCMVDCKSCTTPVDICTKLSATDSMPVVDPMDFRSLVGALQNLIFIRNDITYAVQQMCLHMHDPREPRLNALKRILRYIRGTMDLGLQIQCSTTVDLVIYSDWAGCPNTLCSTLGYXMLLGNNLVSRSSKHQVTISRSSAEAEYXAIINVVAEVTXLLQLLHELHSPPPKATLVYXDNLSAVYLSSNPVQHQRTKHVEIDMHFVREKVAIGATRVLRVPISSQYVDILYQSSPSFTPISTSISMAS

SEQ ID NO: 161762 - protein, 42 aa, Oryza sativa
  Clone ID: PAT_MRT4530_60917C.1.pep
ENSLLIKSYSESHMPLRCVTYNVMTEAREIVLEDWYSINLLL

SEQ ID NO: 161763 - protein, 45 aa, Oryza sativa
  Clone ID: PAT_MRT4530_60918C.1.pep
RAQNVSQDVLARIKCDHRSVYQALIQVMYLILYTTNKQGRAAQLR

SEQ ID NO: 161764 - protein, 74 aa, Oryza sativa
  Clone ID: PAT_MRT4530_60919C.1.pep
GTPAGPSRYSRVDPRVPIQWRLRPGHILIIPPRLTLSCKKAEHEGCPVHVHVKTQCTNSMVTHPCREERNIPGP

SEQ ID NO: 161765 - protein, 38 aa, Oryza sativa
  Clone ID: PAT_MRT4530_6091C.1.pep
VRCCHYNMYVEKVPIMKGINSQQSIAFFHWTQTLQIWI

SEQ ID NO: 161766 - protein, 135 aa, Oryza sativa
  Clone ID: PAT_MRT4530_60920C.1.pep
MRPVEVKEALVGCASEFLNVDPEATIGNLLLWEEEQQGGGAQEEEEEGAEEHGGDGEARHGRLPNLALLASDGRSHHGLAHSVCFTYSLPLLPFFTSTTILLGLSIMKLDVDKSGDNAGAAGLLLLLVAPAVSVI

SEQ ID NO: 161767 - protein, 114 aa, Oryza sativa
  Clone ID: PAT_MRT4530_60921C.1.pep
QDKELSSAAGKLVECQKTIANLGRQLKSLTDLYSVTAEPEKLESGDALLDFREPDVEVPPAGFANGLYDLDLPKSNGSCLSPIPRVQSSSTHSQTSVFSGGLSSLGSYRNKTRK

SEQ ID NO: 161768 - protein, 112 aa, Oryza sativa
  unsure (1)..(112): unsure at all Xaa locations
  Clone ID: PAT_MRT4530_60922C.1.pep
WLAPTARGIEMGYLLRRTRWKINRYNCLNQALSFIGXNSYPNLGPCRAQVMLYRLYRPSASSSFDQLHTLFQPIWYPADVQSDFKFGSIQHQIRFDFFPYFPNLMPNYVVNT

SEQ ID NO: 161769 - protein, 391 aa, Oryza sativa
  Clone ID: PAT_MRT4530_60923C.1.pep
MLPSHLNGHSPLARRCPRLSAASPPATGDSDAAAAAADAPLAEHDRIYFQSYSHIGIHEAMIKDRVRTDAYRSAIMHHQKFIEGKVVMDVGCGTGILSVFCARAGAKCVYAVEASEMATQAREIVKANNLDDKVVVVHGRVEDVEVEDKVDVIISEWMGYMLLYESMLPSVLFARDKWLKPGGLILPSHATLFMAPITNSERYEGSVDFWSDVYGINMSALVPLAKKFTSEEPSIEIIGGENVLSWPFVVKHIDCYTFKAEELKSFTTKYKVSSMMLAPIHGFGLWFEVEFNGPSNPTDKSPSDLNPLDVIRKKRRRGSEDPVVLSTAPEDEPTHWHQTILYFPDPIEVKQDQIIEGSVKVSQSEENPRFLNIQLDCTTGGQTLVKDYAMR

SEQ ID NO: 161770 - protein, 162 aa, Oryza sativa
  unsure (1)..(162): unsure at all Xaa locations
  Clone ID: PAT_MRT4530_60924C.1.pep
YLSSLDLSYNHLTGRIPSGGQLDILYAENPSMYHGNNGLCGCPLRRNCSDDGNNSLCGYPLRRNCSDDGNNGLCGYPLRRNCSDNSCPSKHGVEIKKYSDTMFLYFGLGSGFVAGLWVVFCTILFKKXWRMAYFRLFDKVYDXVYLFVVVTWAHVCQKSGTR

SEQ ID NO: 161771 - protein, 65 aa, Oryza sativa
  Clone ID: PAT_MRT4530_60925C.1.pep
ARGSRKANQKFRPQFRPGVHSFWVSIFFFLFFFDGLLIARLSFILNLVFKQCHIKGLHLIVLVTV

SEQ ID NO: 161772 - protein, 146 aa, Oryza sativa
  Clone ID: PAT_MRT4530_60926C.1.pep
DVEVEDKVDVIISEWMGYMLLYESMLPSVLFARDKWLKPGGLILPSHATLFMAPITNSERYEGSVDFWSDVYGINMSALVPLAKKFTSEEPSIEIIGGENVLSWPFVTILYFPDPIEVKQDQIIEGSVKVSQSEENPRFLNIQLDC

SEQ ID NO: 161773 - protein, 157 aa, Oryza sativa
  Clone ID: PAT_MRT4530_60927C.1.pep
MLPSHLNGHSPLARRCPRLSAASPPATGDSDAAAAAADAPLAEHDRIYFQSYSHIGIHEAMIKGSRHAHIRTRFSRPLRTNPKPPQPLGRPVLTDAYRSGIMHHQKFIDGKVVMDVGCGTGILSVFCARAGAKCVYAVEASEMATQILNISVIFIVI

SEQ ID NO: 161774 - protein, 86 aa, Oryza sativa
  Clone ID: PAT_MRT4530_60928C.1.pep
MGALVYQVLRKSFNEFELGGDARNHHGRMRVEDLAVALRIKDGNKKEWCPSTSKEDSHIIFVLALSLFPCPHGSYRHEGLVSMKHA

SEQ ID NO: 161775 - protein, 137 aa, Oryza sativa
  Clone ID: PAT_MRT4530_60929C.1.pep
MQLNPKERTRRNKTKAKGWRCAEIVLNKNATTIHDIADGVKDGGGGGGTRDLPLRMRSRTETATVAPERSHADGVKDSGGCGCRADNSGDGLTAVAPEAFTEVVDDGGSYGGGRRHWWRERKGREKRGEGGEDETDS

SEQ ID NO: 161776 - protein, 453 aa, Oryza sativa
  unsure (1)..(453): unsure at all Xaa locations
  Clone ID: PAT_MRT4530_6092C.1.pep
MPILCRRLXHFSPPXFELFDLLXRRMVFREQLHAGTMEGPWGEIDSLLTFGGKIYLPLDSVHLHTVVAAAHNTGHEGIQKTLHRVKAXIYIHLACARWSKSLCKSIRFARRTKWNICTPLARYNLCRLXRSLGEHLYGFHGRISQGSWXISDFVGLAVAFFDDIIHLHGIPAQQVYKKYYDAKHRDLVFHTGDCVWLRLLRRSAVSLGVPSRSKLNPKFYGPYQVLARTGDVDYKLRLPAGSLLHDVFHVSLLKPFCGDPPXSTPPLPLLDHGRVVPQVAAIVXARVCRGIRKILVQWVDLPVEEGAXELWMNFAVCIHHFSSRTSCFTRRGEMSCGGTFHIIDDLGSRRTVSKERVPXSFRFCSSPYLANHDSGGCGLVRSIRIIVSHCLAVTQDIHLKIKLLPQEECRDVQDLCLQKMYEGEPESQTSLGSGAPYVLVGDQLGRSLETYKI

SEQ ID NO: 161777 - protein, 141 aa, Oryza sativa
  Clone ID: PAT_MRT4530_60930C.1.pep
MAMAAAATVSPSAADKCEKDLDLLMGSCEGYLRFPAEAKAAPSRACCGAVRRVDVGCLCGMVTPEVEQYVCMDKAVYVAAYCHRPLLPGSYCGSKLTTLGGICEWQHWHEETEADSWRGTELRNGGKAALDDGRHLSELRK

SEQ ID NO: 161778 - protein, 124 aa, Oryza sativa
  unsure (1)..(124): unsure at all Xaa locations
  Clone ID: PAT_MRT4530_60931C.1.pep
HDIADGVKDGGGGGTQDLPSKMRSRTETAAAAPERSHADPRDLPLRMRSRTETATVAPERSHADGVKDSGGCGSCHRRQRRRQLPTLPPRXRADNSGDGLTAVAPEAFTEVVDDGGSYGGGRRH

SEQ ID NO: 161779 - protein, 51 aa, Oryza sativa
  Clone ID: PAT_MRT4530_60932C.1.pep
MGDAREQAGEARAATDGLGGNIPQAPEPHSRFPFHRPYTVFASCALMVPDP

SEQ ID NO: 161780 - protein, 141 aa, Oryza sativa
  Clone ID: PAT_MRT4530_60933C.1.pep
MIWRNNDIVEIREDCWSCYKSQLAGILFTSRKRLLQPFCSHQLLCTTEPTMAVYCHDLLTMDVHVAAWELALHGTCLQRDRLVAKRLAAAMWSSLVYFKALNCYKGEKLEYVFVYTTLTYCTPTRSTPLRTLHTLFVIMHI

SEQ ID NO: 161781 - protein, 63 aa, Oryza sativa
  Clone ID: PAT_MRT4530_60934C.1.pep
VDIPCQVTRPQRCAVRVPICPFSSLPIHCFLVPQVSCFPVWSCSRVPDFAHVIHVLWHLRISG

SEQ ID NO: 161782 - protein, 160 aa, Oryza sativa
  Clone ID: PAT_MRT4530_60935C.1.pep
WGRGRQRRRRRSKRGGRGRQRRRRRRPFPRPDPPAPHGGTAVVGSARATATAPPHCRQIRTVAPLIHLALLAEPSTAVRREERGEEEWGRRGGRGRSRSSGRGGAAAAAAAATAVEAAHEVLWAHGLRYNTTVDGVISYALTAVRQLRWTVARGQGGGHR

SEQ ID NO: 161783 - protein, 684 aa, Oryza sativa
  Clone ID: PAT_MRT4530_60936C.1.pep
MAGMVALWNEWEIRVLVLSSLALQVFLLFSAVIRKRNVSAVLGLLLWLAYLLADSIAIYALGYLSQTRVPRGVDVRSFRNTHRIQAFWAPFLLLHLGGQDTITAFSIEDNELWKRHLLSLLSQVALAMYVFAKSRPGADILAPAVFMFLSGILKYGERTWALKCASMDNLRSGMVTTPDPGPNYAKFMEEYRFTREAGLQAEIVIEPERRGGWVTAAAIAEESVPYTTIITDARRFFVTFKRLFVNLILSFQDRTRSQATFLRLTPEQAYKIIEIELSLMYDTLHSKAAVIHTWYGRLFRCVTLLSTSAACLLFNLLDKDRYESHDTRVDIFITNLLFGGALCLEVYAIGMMLISYWTYAALQGCNCRTLSHLLFKSIKYFRPESRPKWSNLMAQHNLISYCLHDRATLLTKVITMVGLKGHWDSWMHIQHIDVLPELKTLVFRELKDKAVSIVDNAESYRKFSNHRGQWALQCKGYYKELGWSVEVEFDESILLWHIATDLCFYYDIDGSDGDAKLTEYVGISRAVSNYMLFLLVARPFMLTAGIGQIRFGDTCAEAKIFFEREMALPDERAAAAMVLEVNAEIAPRDVKGDRSKSVLFDACRLAKSLLELQPGKRWRLIRVVWVEILCYAASKCRSNFHAKQLSNGGELLTVVWFLMAHLGMGEQYRIEAGHARAKLIVEKN

SEQ ID NO: 161784 - protein, 82 aa, Oryza sativa
  Clone ID: PAT_MRT4530_60937C.1.pep
NLLCPNKIKPRYRSVLMSLGVQVEQAISGRVYGPWGSLARASRRDHTSNGPNGRTSVDIVNTGTQWTYGGTGYLRREWRVTG

SEQ ID NO: 161785 - protein, 298 aa, Oryza sativa
  Clone ID: PAT_MRT4530_60939C.1.pep
MKVGRGSRGGGGRDGGGVVEEERSGGVEAAPPVKRRRVAVAPSAGAGGSRRVQAEASPLQRLFRACRAVFRGTGTVPAPGEVDLLCSMLDKMKPEDVGLRADQEFFTARDDDEGIPLIKNTTLYECDNFTMIIFFLPRNAIIPLHDHPGMTVFSKLLIGSLHIRSYDWVDPEPALSCSSSSGDQLRLAKRVVNGVFTAPCDTSVLYPTTGGNMHRFRAIAPCAILDILGPPYSTEDGRDCTYYRAIPYSRHSVKNGAADQLTGVDEEGHRLSWLTETIPRMLRMRQIRYGGPPISDDE

SEQ ID NO: 161786 - protein, 198 aa, Oryza sativa
  Clone ID: PAT_MRT4530_6093C.1.pep
MAAAAAAATADAADRQEEIGEEDGAAVGRRLERKMERRTGGEDFFARYQNEDSRSKHSGSLQEDEALSIDHEPRRLELGYEGLGGYCGKYGYQVWAKIGGVPKGMARRGVQTLLAEGHVHYSTKPSGRVPASLKARFSKMSLTKNFIRLEAPPKLVPYKDIGGPGSQAGLGFRLPFAMADDYTDGTNEAAASTVVIGE

SEQ ID NO: 161787 - protein, 53 aa, Oryza sativa
  Clone ID: PAT_MRT4530_60940C.1.pep
EATKKRPKSRVLLVRVLTRLHSTQKTDHNAVSRLMPNQILEITNWAQLYCATS

SEQ ID NO: 161788 - protein, 73 aa, Oryza sativa
  Clone ID: PAT_MRT4530_60941C.1.pep
LIDYENPLFRRLRPWSPTEVTLECKVASHFGFVPLPPLSNGMWYCFDMWMLMVCVFLLMFHQIIMGVLLRMMI

SEQ ID NO: 161789 - protein, 445 aa, Oryza sativa
  unsure (1)..(445): unsure at all Xaa locations
  Clone ID: PAT_MRT4530_60942C.1.pep
CMLLCASLVIGKNPRKPRNPPPPLSFSLLPTWDASARQPTPVSPWPPSPRPPAPPPPIVAPTMPPTPPPTQPPSPGPMAPMPSPPPPTQPPSPGPMPPMPPPPAPMPXPPPMQPPAPGPMPPMPPPPAPMPSPPPPTQPPSPGPMPPMPSPPPMQPPSPGPMPPMPPPPAPMPSPPPPTQPPSPGPMPPMPPPLAPMPSPPPMQPPSPGPMPSPPPPTQPPSPGPMPPMPPPPAPMPSPPPMQPPSPGPMPPMPSPPPPTQPPSPGPMPPMPSPPPMQPPSPGPMPSPPPPTQPPSPGPMPPMPPPPAPMPSPPPPTQPPSPGPMPPMPPPPALMPSPPPPTQPPSPGPMPPTPPPPAPMPSPPPQNQPPPPGPGRRPLPPPXPPLRAGRPAPCRSPPSGRPPQLPPPXQPPAPPXPPPRRPPALVKRLPPALRAALGPGPTFSR

SEQ ID NO: 161790 - protein, 82 aa, Oryza sativa
  unsure (1)..(82): unsure at all Xaa locations
  Clone ID: PAT_MRT4530_60943C.1.pep
KSPTHQSTPQGHVEFLQQEGKWVAXELIHKQVQXGPXXTQQEPPFKANKASGIMWEEGTGRAWVDPGNSGPVPXRAVPAFPI

SEQ ID NO: 161791 - protein, 451 aa, Oryza sativa
  Clone ID: PAT_MRT4530_60944C.1.pep
MAAQSSTPSPQDGSGRGEFSDNLVLQTPQPMREDYIQNAVNFLGHPKVKGSPVFYRRSFLEKKGLTKEEIDEAFRRVPDPQPNSTDVAAVASQQAGIANQSAGVQPYETVQAPQAINTGPIVPHAQPQLSWSRTLIGVGVFLGVGASAAVILKKLFVPRLKSWIQGAHVEGDEISGNELKSKFYEEIKAAIQDSASAFSDIAKTNQELLASKDEDKKILTKLAQAFDSQAEAFRSLSDSLNRMSENRFYQYNLMEDHFQSAPWNGPTTNSWRASQQTNAYNTSPRSDFDSGRHPFMPVPGEPSPGAFPARSYVEQQRMQRPGYGFQPQMSNDRWNPGSPLTNYHGAPPYQQYHHGSTNAIDEAPAPAPVPAPAPPAESPFQRRWVPPQPPGVVMPEAVAAIRQPRQQVAAASRPSESAAATEQPQSGDVAGGAAMANAGNGEAEQEREAAA

SEQ ID NO: 161792 - protein, 332 aa, Oryza sativa
  Clone ID: PAT_MRT4530_60945C.1.pep
FCWNEGMRLPSIEECPRCSDNAGSSSRSYNRGNRLNQKKLPVHQRLGPVHQDRFQDEDEGRNSQWCPFGFFTKNQKWRVQRMKNRERFKEVQQEINHRLKKTKQEWRVKSKVTTADEVEANKAKRLLKAKAVASSSVNMVFMLPAEYGANQADVDDVDETSAKLILSSEQAIFEKLEGTENRHLKPLYINGFVNGKPMSKMTVDGGAAVNLLPYTTFRKLGKNADDIIQTNMVLKDFGGNPSETKGVLNVELTIGSKTVPTMFFVIDGKGDKIEIVPADSQLKMESPNYYIEGAVEGSNFYTKDTVDDFDGKLGHGFMLADDLEEVEYRSRG

SEQ ID NO: 161793 - protein, 50 aa, Oryza sativa
  Clone ID: PAT_MRT4530_60946C.1.pep
ILQFGFLKRPPPPGCVLFPTFCRLMDWPTYLKALAQRMWLRLQEGTKLPS

SEQ ID NO: 161794 - protein, 169 aa, Oryza sativa
  Clone ID: PAT_MRT4530_60947C.1.pep
MYGASSVTSTNLRFQRSVVSPAIAFHSCATKLPVERNEKVIAEAPDPNRGREKGEGKNAHLKALENAGERLRLFKADVLDYGSVAAAIAGCDGVFHVASPVTSGRPTNPELSQCSIIPTGQRVSPSTKTAGQMRRPAGRMRKLILHRNGMCAVETLIEGPTCQCLNGTR

SEQ ID NO: 161795 - protein, 70 aa, Oryza sativa
  Clone ID: PAT_MRT4530_60948C.1.pep
FKTNPNFMVSPIAGKGSIFGALPNDVLARAYGFSKEEAQRLKHNRGDELGAFTPIQYKSYQEVYNGAESF

SEQ ID NO: 161796 - protein, 152 aa, Oryza sativa
  unsure (1)..(152): unsure at all Xaa locations
  Clone ID: PAT_MRT4530_60949C.1.pep
LSKDHYVINGTVRDLGEGKNAHLKALENAGERLRLFKADVLDYGSVAAAIAGCDGVFHVASPVTSGRPTNPEVDIIATAVTGTLNVLRASHEAKVKRVVVVSSVVAVFNNPNWPTGEPFNEDSWSDEETCRKNEXWYPYYLSKTLAEREAFE

SEQ ID NO: 161797 - protein, 400 aa, Oryza sativa
  unsure (1)..(400): unsure at all Xaa locations
  Clone ID: PAT_MRT4530_6094C.1.pep
MVFREQLHAGTMEGPWGEIDSLLTFGGKIYLPLDSVHLHTVVAAAHNTGHEGIQKTLHRVKADLHTPRLRAMVQEFVQVNTVCQKNKVEHLHPAGSLQPLPIMTEVWANISMDFMEGFPKVHGESVILSVVDRFCKYTHFIALGHPYSASVAVAFFDDIIHLHGIPVSIVGDRDPVFTGHFWQELIRLANVQLHMSSAFHPQSDGQTEAVNKAIAMYRRCLVGDRPRKWLQSLPWAEFCYNTSVQSSLKETPFKVVYGRDHPTIQSYEPGTAKVAALDQXMCNWDDFLADIRDRLEQAQQVYKKYYDAKHRDLVFHTGDCVWLRLLRRSAVSLGVPSPXSLIPKFYGPYQVXARTGDVDYKLRLPGWFSYWHDVFHVSLLKPLFGGDPPFLKAPPWPLFK

SEQ ID NO: 161798 - protein, 115 aa, Oryza sativa
  unsure (1)..(115): unsure at all Xaa locations
  Clone ID: PAT_MRT4530_60950C.1.pep
VFTPTQLLAMVLSNLKGIAEGNLNAAVFDCCIGIPAYFTDLXRRAVADAAAIAGLRPLRLFHETTATALAYGIYKTDLPEKEWLNVAFIDVGHASMQVSIVGYKKGQLNMLSHAY

SEQ ID NO: 161799 - protein, 697 aa, Oryza sativa
  Clone ID: PAT_MRT4530_60951C.1.pep
MANSKRLPYSTAGGGGGGGGGGGRRGGASGSGVVAPLVVLVFLFVLAPSIFFVARNGGHVHVASGSDPKDREGNQETDWQKQLATNNLKSILSKEMIDALASSQQEAGTLSVDFFRKRASPSWKTDDLVNDLSNASLDVDDKVKSENSSAEHELSLTDKTPKDDTAEHQVDAPAKNARRKLREKRREKRAMDLVRKDDEARVKLENAAIERSKAVDSAVLGKYSIWRKENENENSDSTVRLMRDQIIMARVYSVLAKSKNKNDLYQELQTRIKESQRAVGEATADSDLHHSAPEKVRVMGQLLSKAREDVYDCKAVTQRLRAMLQSADEQVRSLKKQSTFLSQLAAKTIPNSIHCLSMRLTIDYYLLPLEKRKFPRSENLENPELYHYALFSDNVLAASVVVNSTIMNAKEPEKHVFHLVTDKLNFGAMNMWFLLNPPGKATIHVENVDEFKWLNSSYCPVLRQLESAAMKEYYFKADRPTTLSAGSSNLKYRNPKYLSMLNHLRFYLPQVYPKLDKILFLDDDIVVQKDLTGLWDVDLNGKVNGAVETCGESFHRFDKYLNFSNPHIARNFDPNACGWAYGMNIFDLKEWKKKDITGIYHKWQSMNEDRVLWKLGTLPPGLLTFYKLTHPLDKSWHVLGLGYNPSIDRSEIDNAAVVHYNGNMKPWLELAMTKYRPYWTRYIKYDHPYIRGCNLAE

SEQ ID NO: 161800 - protein, 135 aa, Oryza sativa
  unsure (1)..(135): unsure at all Xaa locations
  Clone ID: PAT_MRT4530_60952C.1.pep
MMKGIVKQRLSPARYKTPVECTSLITRIANGLGVIPNDQIAYISTXVDETYLVQGHILKHGADNSLIFFFLGCTNEIPLPNPGYHLYNCHDLTILLQTIKEFRVAVRMYEADXDPTGDAPRWTQAPHYELPTIPI

SEQ ID NO: 161801 - protein, 66 aa, Oryza sativa
  Clone ID: PAT_MRT4530_60953C.1.pep
MAETHRERGGDPVDLPLGGLRGVEDDGGDMVGGSGGVKARAGARTCPRHPAIAVAPLCASDVGRRG

SEQ ID NO: 161802 - protein, 83 aa, Oryza sativa
  unsure (1)..(83): unsure at all Xaa locations
  Clone ID: PAT_MRT4530_60955C.1.pep
KPAPIAFGRADSSRAHARHPSRPYLSLPFSISHVSLTLLSLSLAVLSLPPLSRRXAVGGWPAEAAAVVAPSPPSDPXGGEAVG

SEQ ID NO: 161803 - protein, 272 aa, Oryza sativa
  Clone ID: PAT_MRT4530_60956C.1.pep
MDLDPNNITGRPYFVDVLQSIGHPIPATAVPDITLPVPPGERRTTRPESETVYLNFTPSPEMLYFSRRFAYAYITRTTAPADADDAASTIRDAIHAVLPGLQLDLLPPSYGAHKTVRFLTPDDREAAMEKQPFALGGGGEVKLVREGETSNVERVSLECVVHAALLDYPKEQRNEGDIGRNCGSFGLLMEVDPACYAAPDMSPVRIVVNNKSPSEIPREIRIRYANDRIPPYIVSRHVVPVQILGIWVWDESQSQYVDANGAKYVAMYNHAP

SEQ ID NO: 161804 - protein, 110 aa, Oryza sativa
  Clone ID: PAT_MRT4530_60957C.1.pep
GSCKARFLNLQGRSKKGLNAFKLLLSPHKKSTYFLGVIFPNTTNLNKRLPKFVILGNIPSNPRLVFYGMEGVLGSRGDFYFFRNKKCATIHSWPLCDPKSSATEMKNVRQ

SEQ ID NO: 161805 - protein, 35 aa, Oryza sativa
  Clone ID: PAT_MRT4530_60958C.1.pep
RVMVWPVRVFSKVCILTRLINASLRGVSLYSIRKG

SEQ ID NO: 161806 - protein, 40 aa, Oryza sativa
  Clone ID: PAT_MRT4530_60959C.1.pep
MAAKSRRPSLHQLRWLNYLRPGIKRVNVSGNEEELNLRLH

SEQ ID NO: 161807 - protein, 333 aa, Oryza sativa
  unsure (1)..(333): unsure at all Xaa locations
  Clone ID: PAT_MRT4530_6095C.1.pep
MALSSSSTNSNPLQGHLITEKLGKANHALWKVQISAAVRGARLQGHLTGATKKPPAKISVTVDGATNKTANPVYDDWEATDQQVLGFLLSSLTRDVLMQVSTCETAAEAWSAIEGMYSTHTRARCINTRFALTNTKKGNMTTPEYFAKMKSLGDEMAIAGGRPIDEEELIQYIITGLGEGYSEVISAICARVEPISHDKPFIVERKRSILRTAATSXQGGHSDNSSRGRGNPGGGRGRGNPGGGRGRGRTSGGGVDKRPICQLCFKRGHTTTDCWXAAATSSYGVDTNWYIDMGATDHITGELDKLTVKEKYNGGEQIHTASGAGSNHQENAS

SEQ ID NO: 161808 - protein, 38 aa, Oryza sativa
  Clone ID: PAT_MRT4530_60960C.1.pep
MTVPSLLCKVCFLEVYPEVNVCNLGRVNSMAGTCISVG

SEQ ID NO: 161809 - protein, 64 aa, Oryza sativa
  unsure (1)..(64): unsure at all Xaa locations
  Clone ID: PAT_MRT4530_60961C.1.pep
IRGRLRAEWLWSKGVXRKSITWMWDTVAYALGXIDCDXMNARSMLTIFNLCATETEASILRMLK

SEQ ID NO: 161810 - protein, 165 aa, Oryza sativa
  Clone ID: PAT_MRT4530_60962C.1.pep
MDASTATLPVIEAPWPPPSSCLARLLRDQPSHPASTPGVWRDSPIGPVTYDLGPVDVRLCYTTYDFGYGITDLSCDGFITNGLPLRGVAAIACCSCHSAEDRRRCQLAPGHAEELRRHLLPAALKSCSTACFWRRRAKDFGMGMDLGEGGYRTWANGNFVQRKRG

SEQ ID NO: 161811 - protein, 77 aa, Oryza sativa
  Clone ID: PAT_MRT4530_60963C.1.pep
MASDCDKTPRITQLKATHLSWIIITSSITRGMNSPATPTDFSPLHSLVHHERRSGSDSAERLEEGEDPDMWAPYVGG

SEQ ID NO: 161812 - protein, 165 aa, Oryza sativa
  Clone ID: PAT_MRT4530_60964C.1.pep
MDASTATLPVIEAPWPPPSSCLARLLRDQPSHPASTPGVWRDSPIGPVTYDLGPVDVRLCYTTYDFGYGITDLSCDGTPAASCCSRRRVEEPSPPPSGLAEELEPQLAPGHAEELRRHLLPAALKSCSTACFWRRRAKDFGMGMDLGEGGYRTWANGNFVQRKRG

SEQ ID NO: 161813 - protein, 312 aa, Oryza sativa
  Clone ID: PAT_MRT4530_60965C.1.pep
MGIAESLGAETPFASVAASELFSLDLSKTEEALTQAFHRSIGVRIKAEAEIIEGEVVEISIDRPVSGGSSAPSGVAAAGKIGRLTLKTTDMETVDELGGKMIEALGKEKTQGFLALFTGDTGEIRAEAREQIDTKVAEWREEGKAEIVPDIECFSFLNRALENDVTPILVIATNRGITSIRGINYQSLHGIPPDFLNRLLIITTQPYTEDDIPKVLDIRCDEEDVEMSTAYAKVLLTKIGVETALRYAIHLITSAALAWQKHMGKIVEMEDISRVYQLFLDVKRSAQYLMEYQSQYMFNEVPGEGGDNAMQS

SEQ ID NO: 161814 - protein, 156 aa, Oryza sativa
  Clone ID: PAT_MRT4530_60966C.1.pep
SLPEHPDRVGTEGMSWIRPSRRCRRRMQLGDDERGDGREEAAHKRRDDEPERIGASGGGETTEVAGSTPPVAVDGGSTGEAVDRRQRGRRDDGGRRIHPSRRCRRERRWIGASGGGQMMELGGSTPAVAADGGSTRPWRGDVEERRSTGGGMTESW

SEQ ID NO: 161815 - protein, 476 aa, Oryza sativa
  Clone ID: PAT_MRT4530_60967C.1.pep
MAELKRLSESRDLTRIERIGAHSHIRGLGLDSSLEARGSSEGMVGQLPARRAAGLILQLIRQGKIAGRAVLLAGQPGTGKTALAMGIAKSLGAETPFASVAASELFSLDLSKTEALTQAFRRSIGVRIKEEAEIIEGEVVEISIDRPVSAAAAAGSSAPSGVAAAGKTGRLTLKTTDMETVYELGGKMIEALGKEKVQSGDVVALDKASGKVTKLGRSIGRSRDYDAVGPHTKFVKCPEGELQKRKEVVHCVTLHEIDVINSRTQGFLALFTGDTGEIRAEVREQIDTKVAEWREEGKAEIVPGVLFIDEVHMLDIECFSFLNRALENDMAPILVIATNRGITSIRGTNYRSPHGIPPDFLDRLLIITTQPYTEDDIRKILDIRCDEEDVEMSADAKVLLTKIGVETSLRYAIHLITSAALACQKRKGKVVEMEDISRVYQLFLDVKRSTQYLMEYQSQYMFNEVPGEAGDDAMQS

SEQ ID NO: 161816 - protein, 115 aa, Oryza sativa
  Clone ID: PAT_MRT4530_60968C.1.pep
MAAGVTFNWIKTPLDIRRFHDFSSLSFRCRNTFGSIQPSWLTTDQEPSFSKVRVAADYSDSVPDSKYTRDRGYHPLEEVKERPKKKDLSLTDVETARTVVEANSKGLLVFPARVH

SEQ ID NO: 161817 - protein, 692 aa, Oryza sativa
  Clone ID: PAT_MRT4530_60969C.1.pep
MPPTHQIIKVMRLSLRALAPHLLLAFAEIIVARTEDFSSIGKHGRYFDLVDFSVIEGFKVPADMTICSFKGKRNANDRAWACHCNVSYSSTDRFNLSQERLTEEFGTPVQCQRLWWWTRRQNNTYRVDRPLTTEEEKIPVVHTLAIPKWLNRDDYLVFLKLYDPEKARLRFMDGFTCSSNTKKSSWLRGSGRIELYKEIKFDPWVLCEAIDLHRTFSENEIVTGDIICYQKILKTQDLPKYHSVASFLQHICDQKEEEMKRQILEEKIAGLEHQASADRLEKVETLIAYDQMKHERDNAVRQVNELRDQSTHAILKFSRCDLEQATEHFTDACKVGDTEYGRTYKAIMHGTEVAIKLSSTESLFQQEVTVLGQCRHPNIITFIGVCSKISALVYEWLPNGRNLEDHIVCANNSTPLPWQNRTQIIGEICCALLFLHSNNKNPPTAALIHGDLRPCNILIDDDASYRSRLCNVGLSSLFLQPGTCPPNLMERLSYMDPEFITTGELTTLSDVYSFGVIILRLLTGMAPLNLSKKVAAELESDNLHRLIDKSAGDWPYKEAKQLAVLGVRCAEMAREKRPDLLNDVWRVVRPLMRKPSSCPYFPPASPEVCIPAPFICPILMEIMKDPQVASDGFTYEGEAIRRWFDSGNNRSPMTNLVLPDLKLIPNRVLRSSIHEYLRQQKQQQQQEEGSVT

SEQ ID NO: 161818 - protein, 101 aa, Oryza sativa
  unsure (1)..(101): unsure at all Xaa locations
  Clone ID: PAT_MRT4530_6096C.1.pep
AGADSLPVVALEVTAXLARRVAPKRRVAELDVESQQASGGRRGGCRRHGGGLLGADSVQVLTDEHRGGGVLGGXADGFQLLTEEQHACGYFSDAERHSVCC

SEQ ID NO: 161819 - protein, 44 aa, Oryza sativa
  unsure (1)..(44): unsure at all Xaa locations
  Clone ID: PAT_MRT4530_60970C.1.pep
IISFLIIFTXFXIFIILTTXPLLNKPYYHLLYWIYLTFSYFKTS

SEQ ID NO: 161820 - protein, 73 aa, Oryza sativa
  Clone ID: PAT_MRT4530_60971C.1.pep
VTRYSSLLLYSRLSLLIYSKCNSLHLLTLNTTLEFLLLICFIYGKKGAFSDVSIFLWYMDIVRIKRIGSKLQQ

SEQ ID NO: 161821 - protein, 29 aa, Oryza sativa
  Clone ID: PAT_MRT4530_60972C.1.pep
LTHKEFIAAVQEQLMGFINEQVLDPEGEF

SEQ ID NO: 161822 - protein, 562 aa, Oryza sativa
  Clone ID: PAT_MRT4530_60973C.1.pep
MSQPTQCPYCRASGPARCVTTQPPLSRAVSECSSCARLVLERHLHTHPFFPLLPSLHPLPLVTPDLADAAPSPSPSAASASGDDDDDDDPFLPAGFVSAFSAFSLERHPVLARSASAFSGQLAELERALAVESAASSTPDPAGPMVSVDSLRAYVQIVDVASILRLDRDIADHAFELFKDCSSATCLRNRSVEALATAALVQAIREAQEPRTLQEISTASNLPQKEIGKYIKILGESLKLSQPLNSNSIAVHMPRFCSLLQLNKSAQELAAHIGEVVVNKCFCTRRNPISISAAAIYLACQLEDKRKTQAEICKVTGLTEVTLRKVYKELLENWDDLLPPNYTPATPPEKAFPMTTIYSSRSSSGKDLYQDKQLDSAKLKSSEAAEPDHMVIVKEEEDKKIGPFSRPSAKTETHDLNQAIWTPNVSSTPFSSSPKLDHDKTETSVRGINLNEASCTMDTDRPDMPVKSPFAERWLNESKVIPSPSRQPAPWQLKQGAPSAGSSYHSMPYGLDLLSRGKRNTGDGGDKEGRCFLVKFGSSCHPGVSVSCHVECYTGTKYSVIN

SEQ ID NO: 161823 - protein, 51 aa, Oryza sativa
  Clone ID: PAT_MRT4530_60974C.1.pep
MESTGGIKNSSTTRSLTYEPPLAYSIDDVLPAGGVKKFHPDGYSNCSMMPS

SEQ ID NO: 161824 - protein, 550 aa, Oryza sativa
  unsure (1)..(550): unsure at all Xaa locations
  Clone ID: PAT_MRT4530_60975C.1.pep
THGCGIILVIISPRGASFEFAYTIKPYATNNXAEYEAVLKGLQLLKEVEADAIEIMGDSLLVINQLAGEYEFKNDVLLMYNEKCQELMNSFRLVNLKHVSREQNVEANDLAQGASGYKPMVQDIEVEVAAITADDWRYDVFQYLNDPSQSASRKLRYKALKYALLDGELYYRTIDGVLLRCLSTDQAKVVXGEVHEGICGTHQSAYKMRCTGYFWPTMLEDCLXIXQGCQDRHTFGATQRAGASPMNPIIKPWPFVGWGIXMIGQNNPHSSKGHKFTLVXTDYFPEWAQAVPVXKVDSRDAIQFVIEXMVDRIGVPQTIAPDQVSIFVLDECVQFTASMGIKLLDYLPYXTAQVNGQAXAYNKSFIQLVNKKICDXPRQWHIRLAEALWYYQMECHGSIQVPPYKHVYGHEAVLPWENAIGSRRIDLQDKLTVDEYXTLLVDETEDLIQSRLRALEKVTRDKERVAGHYSKKVVPKSFSEGKLVWKLILPIGTHDNKFGKRSPNWEEPFQIYKIVSKGAXMLEWLYGEVFGRALNEKYLKKYYPSVWINS

SEQ ID NO: 161825 - protein, 265 aa, Oryza sativa
  unsure (1)..(265): unsure at all Xaa locations
  Clone ID: PAT_MRT4530_60976C.1.pep
MDRDHTGGPPPVHGTDGPDRPQRRSDGAGKAARHGSARLQSRPAAMAAGGDTRGHRRGKEGGXGAPHREXRRPARXNEHGGDDRRCGGTDGRWRHPRRRWRGVRRGDDDHGGLNCRPEMEGREKLTGSRGERRSXGGARPKAATSGGARVSRRGRGAGGGGRGRGGGRFGRQRGGGERENGGIQIRIPPLASAREGREMGGRGRRRGEDAGAARRGRGRSGGGSGAAVSAAAVGASAPAAGGGRRPTGLHRLSISGEEGRRKRYL

SEQ ID NO: 161826 - protein, 216 aa, Oryza sativa
  Clone ID: PAT_MRT4530_60977C.1.pep
MPCLGRAKMACFGLGRVVLGPYSHLYKRQSTASSSDNEELSKQELASRVSTVIFLAAVILPLFSFAQAQQPQTPPRRNPPRAPPSPRRAPPPSVSAEPTPAPVIAPSPPPVVAPSQPPAVAPTQPPTPSGGSQCPRENVIALNVCAQLDLSTLLNNPTKAMQDCCPPINSLSSTIAAGCLCEAAKINLGVTADVLFLEAVLRVCGKAELGNLGCFL

SEQ ID NO: 161827 - protein, 148 aa, Oryza sativa
  unsure (1)..(148): unsure at all Xaa locations
  Clone ID: PAT_MRT4530_60978C.1.pep
SDELVPNSARDAASPPTARPPPVARRRVPDGCYXAPAFNTVVGLGLXXTVAAGARHXEAFXVEGGAAXFXAVGFLXAXXXLAVXVLPAKGXKXDPVLXVGLLLIYFXFLCVLPILTHCLHHINFIFLLCKLNCQEDGDDALVGLVGVQ

SEQ ID NO: 161828 - protein, 104 aa, Oryza sativa
  unsure (1)..(104): unsure at all Xaa locations
  Clone ID: PAT_MRT4530_60979C.1.pep
DKNICKSGKKRMASRIPSREKLETGHTTKTTISDKNPGVPTYPHLWRPERSRHAAFNAVCSALNRSVTGRMTDGTQDVWRTIAYVRXRSARHIPSNNDGERFSS

SEQ ID NO: 161829 - protein, 1154 aa, Oryza sativa
  Clone ID: PAT_MRT4530_6097C.1.pep
MALSSSSTNSNPLQGHLITEKLGKANHALWKVQISAAVRGARLQGHLTGATKKPPAKISVTVDGATNKTANPVYDDWEATDQQVLGFLLSSLTRDVLMQVSTCETAAEAWSAIEGMYSTHTRARCINTRFALTNTKKGNMTTPEYFAKMKSLGDEMAIAGGRPIDEEELIQYIITGLGEGYSEVISAICARVLNFEARQAIYSGTQEVNLANRGNFSQGGHSDNSSRGRGNPGGGRGRGNPGGGRGRGRTSGGGVDKRPICQLCFKRGHTTTDCWCRYDEDFVPNNKHVAAAATSSYGVDTNWYIDMGATDHITGELDKLTVKEKYNGGEQIHTASGAAVQAATYLINRVPSRVIQNMSPLEKLHHQKPDYTSLRVLGCACWPNLRPYNNHKLQFRSKRCVFLGFSNMHKGFKCLEVSTGRVYISRDVVFDETIFPFSELHANAGARLRGNEQPPNHVTNPHPNDFSDENESQGSDAEWQDVEDPTGADGAHLQLDSPSISAPTDLSSSFGDMIPGDKSSGDTLASGQPDGDTGQSGGNTGGSSPDAGRHSRTMEHARQHPIGSHHQPTGGAEQQQPTGGANDVADDVDVTSADDVPQDHVRPRIRLQSGVRKEKVYTDGTIKYKNSWFTESGEPTTDIEALKDKNWKLAMDAEYEALRGKNVIGCKWVYKIKRKADGTLDRYKARLVAKGFKQRYGIDYEDTFSLVVKAATIRIILSLAVSRGWSLRQLDVQNAFLHGYLEEEVYMQQPPGFEDPTKPQFVYKLDKALYGLKQAPRAWFARLSKKLTDLGFSGSKADTLLFFLNRGGVTIFVLVYVDDIIVASSSERATAALLQDLKGEFALKDLGELHYFLGIEVSKVENGIVLTQDKYANDLLKRVGLKIHKSGSTLVSGFSDADWAGSLDDRRSTGGFAVFLGSNLVSWSARKQATVSRSSTKSEYKAIANATAEIMWVQTLLAELGIKSPQAAMIWCDNLGAKYLSANPVFHARTKHIEVDYHFVRERRTALVLLFLPETFHRIEPEVGNARRWPSLAAAALASDKRGSRLAERSWALAAGRREGGGGRRGEAPATNAASAAATAFTPISYILAALDAAIHDGVRVLSIFSGHDAGNHLARIQALNRRHAILPSHLHAARDDSHHIGSHHCGGTMRTRR

SEQ ID NO: 161830 - protein, 112 aa, Oryza sativa
  Clone ID: PAT_MRT4530_60980C.1.pep
MGKLYGLFWVMALVLATVAGTKSDEGCSRDLQDLIMECQKYVMNPANPKIEPSNACCSVIQKANVPCLCSKVTKEIEKIVCMEKVVYVADYCKKPLQPGSKCGSYTIPSLQQ

SEQ ID NO: 161831 - protein, 62 aa, Oryza sativa
  Clone ID: PAT_MRT4530_60981C.1.pep
WIPRAAGRHLHLHGVNFFFSGFVAGMHFIVYATVCTCSSDMPIPCLYIYLIAAPKSSVLSIN

SEQ ID NO: 161832 - protein, 41 aa, Oryza sativa
  Clone ID: PAT_MRT4530_60982C.1.pep
SRNLLFCLVGVSFRSTSLSLLKLADVRPATLELSQLVLCAS

SEQ ID NO: 161833 - protein, 96 aa, Oryza sativa
  Clone ID: PAT_MRT4530_60983C.1.pep
RKPVITWLKHPFTTATLGPRGGSIGSPWVATHKVTLRVSITHHLRIGHRSTQPNQRFAALQPRHSRIHTVSSIHATHWRGTGYQLGCGIHGALHNH

SEQ ID NO: 161834 - protein, 60 aa, Oryza sativa
  unsure (1)..(60): unsure at all Xaa locations
  Clone ID: PAT_MRT4530_60984C.1.pep
MKEPAQVRTARGGAADGVEVGVEEEEEPPRYATVKQEEANAVLGAEGSRPFXMRELKEDH

SEQ ID NO: 161835 - protein, 127 aa, Oryza sativa
  Clone ID: PAT_MRT4530_60985C.1.pep
MWHVNVATKGKNSVGPTSQSHPSSLPLVRRAALSTQWHQCPVIIVIAIDDYESHIKATTRRWLSQSRASSCRSTRGNTADGCGGLSLTITVEEHGGLVNVWLCKWSRTVFMGHGMPEMANGSPLPGD

SEQ ID NO: 161836 - protein, 65 aa, Oryza sativa
  Clone ID: PAT_MRT4530_60986C.1.pep
MSSKKVPFHRHKENEEARKKREQDEAARVYEEFVESFKGDSTSGSKFVRGGVIDPNAQAEIDFQG

SEQ ID NO: 161837 - protein, 81 aa, Oryza sativa
  Clone ID: PAT_MRT4530_60987C.1.pep
MGANFPGFFGVVLSVVGDVSVDSEAPMVTSSISPGFAGSVFEDVYREVVAYRPLGGLFLKIAIPEGGESHVAEARSLSGDA

SEQ ID NO: 161838 - protein, 64 aa, Oryza sativa
  Clone ID: PAT_MRT4530_60988C.1.pep
MGTHMSLRKGAKVKSPFAGAKCFSLANLYNLKRKSTRGGFQSIGITHTHTMRKNFFLTLQVLQA

SEQ ID NO: 161839 - protein, 100 aa, Oryza sativa
  unsure (1)..(100): unsure at all Xaa locations
  Clone ID: PAT_MRT4530_60989C.1.pep
EEDEFLINRCDGXFWDVMTSQCAVTMVRKELMTHNDPERCSXQELVQEALRRNSCDNLTVLVVCFSSDPPPQIEVPRFRVRRSISMEGLHMLKGALDSNA

SEQ ID NO: 161840 - protein, 340 aa, Oryza sativa
  Clone ID: PAT_MRT4530_6098C.1.pep
MGDALWEMLGEEMAAAAAAAGEHGLPPGFRFHPTDEELVTFYLAAKVFNGACCGGVDIAEVDLNRCEPWELPEAARMGEKEWYFFSLRDRKYPTGLRTNRATGAGYWKATGKDREVVAAAAAGGALIGMKKTLVFYKGRAPRGEKTKWVLHEYRLDGDFAAARRSTKEEWVICRIFHKVGDQYSKLMMMKSPASYYLPVSHHHPSSIFHDLPPVPFPNPSLVPFHHDLPTSFHPPLLQHSHANSKNSSSNNGGFVFPNEPNTTNSSDNHISCNGAMAAAAAAAFPSFSCASTVTGKGGPPAQLGVNAGQQEPPPPTWMDAYLQHSGFIYEMGPPAVPRGA

SEQ ID NO: 161841 - protein, 61 aa, Oryza sativa
  Clone ID: PAT_MRT4530_60990C.1.pep
MEASLNMTFANEKKNLLENSDRPFVGGGELRQRRRQGLNVRLQQWHGASGEHRPISREEMN

SEQ ID NO: 161842 - protein, 477 aa, Oryza sativa
  Clone ID: PAT_MRT4530_60991C.1.pep
MTMDRPNVAVAAVGLLVAAVAATLPAPSWGQQQPANKLITSTSGSGKGLSKWLAMNQEEYVEKKALHTMATAEELGGKKLDANLTAAEEAKVTWVIDPKGTPGDTTFTTITAALEKVPEGNKKRVILDLKPGAEFREKIFLNLSKPFITFKSDPKNPAVIAWSDTAATRGKDGKPVGTVGSTTVAIESDYFVAHGVVFKNDAPMAKPGAEGGQAVALRLFGTKAAIYNCTIDGGQDTLYDHKGLHYIKDCLIMGSVDFIFGFGRSYYEGCTIVSVTKEVSVLTAQQRSKTIEGALESGFSFKNCSIKGEGQIYLGRAWGESSRVVYAYTDMSKEVVPVGWDGWNIAKPESSGIYYGEFKCTGPGSDAKKRVGWALDLTEEQAKPFIGTHYIYGDSWLIPPDGTSTSSSSASTSSNSTAEAPTASSNSTASANKKESNSTAEAPTATSYSTASATTSNSTASAKATNYSSSSPPAKGK

SEQ ID NO: 161843 - protein, 112 aa, Oryza sativa
  unsure (1)..(112): unsure at all Xaa locations
  Clone ID: PAT_MRT4530_60992C.1.pep
RRPPAAATAAAPREXPXTHSGQAXAQXGNAXREXXRPEXGXXPXGRRGGDXXRGGGDXXXNTPPXETXXGKPAPRAXRXGXGPTXXXEARTXDXRQXXHXGQXSXGKGGAGN

SEQ ID NO: 161844 - protein, 72 aa, Oryza sativa
  Clone ID: PAT_MRT4530_60993C.1.pep
ASPSRPPTRASAPPPPPPPPPPPTHSPPRRRMGLRGPSRRCRRRSRRWSSPQEREGVAEEGEGIGRMGEGMR

SEQ ID NO: 161845 - protein, 405 aa, Oryza sativa
  Clone ID: PAT_MRT4530_60994C.1.pep
MGEPPPAGEGSGMMMPAKRRRERVLPSRFKDSVLVLPTAAAKKGKPAEAAAEGGVVDGELYDVELEEGDPGMLWTGDERPVQTEEELYWACRNIRRSSTSTSGSFSSSIFSGSSAVTSLSNAGGGGGNGRPEGKPTVVVECKPKSDGGERKEDFYWPEEFVLGDVVWARSGKKCPAWPALVIDPLLHAPRVVLNSCIPGALCVMFFGYSNSGLRDYGWVKQGLIFPFVEYLDRFKGQTLYKIKASRFREAIEEAFLAERGLFELETDEGCSLEKSVNDQSIPDGLLEGSGSNNEQECQSEAQVVGKSPGCDICGNRLPCKIASKKKQAGERLLCRHCDKLLQSKQYCGICKKIWHHTDGGNWVCCDECQIWVHVECDQTCIKMEDLENADYFCPDCKSKRKNISS

SEQ ID NO: 161846 - protein, 348 aa, Oryza sativa
  unsure (1)..(348): unsure at all Xaa locations
  Clone ID: PAT_MRT4530_60995C.1.pep
MRHALSLASATAGCAASLAPRLDQREELMLMASEAWLSPASRLFHPPRSSTAAFFSASGLPRLPRRSSCALATSTRGRRLRLGATDQQQQQGKQDGDEVVDSNVLQYCSIDGKGKKAEKRSLGEMEQEFLQALQAFYYDQKAIMSNEEFDNLKEELMWEGSSVVMLSPDEQRLLEASMAYAAGNPIMSDAEFDQLKLRLKKDGSDIVTEGPRCSLRSRKVYSDLTVDYLKMFLLHVLATTLALGLFFFIDELTGFEIXHIPFGFIFTWFAALPLILFIAQSITNAIVNDFLILKGPCPNCGAENLSFFGTILSVSSGGETNKVKCADCSTEMVYDSKSRLITLPEPSQ

SEQ ID NO: 161847 - protein, 1278 aa, Oryza sativa
  Clone ID: PAT_MRT4530_60996C.1.pep
MLNLAHISLFLYTDPKSGSVRFYDYLMEHDMTVEDFIRTNGLGASGLIETNNQGVSTSSVSDCRSCEHVENGSPSTAPPFWDSDGEDDDPVTSGPRPSDLFGRYTWRIENFSKEKKREMKSEPFEAGGYKWYILVYPQGCDVSNHLSLFLCVANHDKLLPGWSHFAQFTIAVGNLDPKKVKYSDTLHKFWKKEHDWGWKKFMELSKIQDGFLVDDVLEIIAQVQVIREKVDRPFRCLDRPYRRELLRVYMTNIEQIYRRFVEERRSKLCKLIEDKMRWSSFRAFWLAIDQSTRHRMSTEKSDVILKIIVKHFFVEKEVTSTLVMDSLYTGLKALECQSKSKSKKGIIDSVDFVELPVPMVHVDVDMFVLAGDVIALLERAALEPLPCQPVSPKDDKCSQSRTKDGSSGEVNKVSIEREERRLTELGQKIIETFALSHIFSGIEVAYQEAVALKRQEELIREEEEAWLLENEMKGKRGSTTEKDKRAKKKQAKQKKNNRKVKDKDREEKCDSNFPERSQDENTIHDREDSKQAGQISMKVDTSEEGASDVSDNLDGSIEIQKKHSTMENKSLSCSSESATMNNAQGKINNLLESKDQISRNRGKARSRSTSNMNITEDVDDLPSSTTSSDRNTSGCGPAPKLDQETVLLTLKDRLRKLGQRLHEKEIEGRKLLQAHLEKKAAAESATGSSSSLSSNSLEETPEVLKSPDQSSVTISDADINASPSKFGASKEVTPVTPTTILSTEPVPTVASTLSKDEPVLCEDHVSCSTPQIDTPITSNPPQVVKTVTLPSGMLLVGHAIQAPSRSPAPQVDRVSKAIAAPTKSPAPQVDKVSIAVPTPSKSPATQGEKVAKAILVPPKSLAPQVGKVAKTIPTPKQPAPLVDKVTSLDPVSKQMSSTSNSEAREAILPKKAAVLSVSQTPAISRPSSAPLFQVPRSTLPPTPAVQVPPMLSRSMTLAGRSRNEPSPSVPSYTAQTYRNAIIGKSNLDTASASLDHSTSFGQNVALSQPLSSYASAASAMVPPVGRNGQLPGKQGFMFGQGKSEAIDNWNPWKGDSNANKYMWKDDSPYHQMTKGDAHTQSWRDNSYQQAGCSGTGEQGEFGGLQYRQFQREIPTNLVSYQLPGPVGEEFPHLDIINDLLEEEQSSGSMAEPTLHGYHTLGLPYSSRGNLVDSEVTSISSSGRLNLADHYYDEGYPMAYDRLNALYRLREGQNSTLDAYSNGRMDSITSKPWLHNFSNPAVNLGVNPNGFSQQMGNYTNLGSGRVNGEHLYRHANGQW

SEQ ID NO: 161848 - protein, 209 aa, Oryza sativa
  Clone ID: PAT_MRT4530_60997C.1.pep
MPPRWAASSPTSVPVSPRCGRARRHPPGSPPSRFCHPIPPGLLDPDASFLELSQVGNAGRRANHRGSPQDAGEALLLQAPCSCAFSSSSRNIKPPPRKERGGNAGRRASRRGSPPRRCRHPYSSEPSPPPLLAGAAGSTILLSHRKVSKLADHSFRSFNLFSCVTTVSKLGFEYHLGTGMTQSNKFEDLNSRFASLWTGMTQRYKFRDR

SEQ ID NO: 161849 - protein, 141 aa, Oryza sativa
  Clone ID: PAT_MRT4530_60998C.1.pep
MLGRRWWLRTVVTAKGSGGWRGATTAAMGEGNVVQDPPLSLGEVRGILEQNHTLIQEISQNHKARDADRLTRNVALIRDLNTNIARVVDLYANLTGSSHSHTTSDVASATNTNATNSSSPSAAAATAEVSKQPHTTDTDAK

SEQ ID NO: 161850 - protein, 304 aa, Oryza sativa
  Clone ID: PAT_MRT4530_60999C.1.pep
MVAADTGGDGNGGPTTPDHGGAAAEGRQDLGKILERLGREIGDRSGENTTPERRGMVGLTGDREIPRSGGFPAKRGGGQGPPRPCGAEGGNGASRRRPKRRRDAAGGGERGGGLGCAVGVVLEGWRGGNKRRPDFPLRWRSWRWRWLGAATAVAAGNGDRSSPECGSAWVRRGESEGEYAGLGKNGETDKGSTGIDFIAQRGEERAGERRISRGSGAASWGKRETREAATWPDFAGRVGGNGADVGGEVPRTNARARGGGGGRKRRRRGRFSAAMAATAAAGLRLGMTPTGGAHLSAARGEEGG

SEQ ID NO: 161851 - protein, 127 aa, Oryza sativa
  unsure (1)..(127): unsure at all Xaa locations
  Clone ID: PAT_MRT4530_6099C.1.pep
PRVRSHSTYPFCAQELKTXNHVLLDCVFARXTWHRVLSPLSWTALSSSVAFRFKTSXPSSRACLPEHLCSGFDYLVLLISWRLREEXNSKVFDLTLRSVFVVLESINLEGRLWSSVGIAAFGGLLRV

SEQ ID NO: 161852 - protein, 245 aa, Oryza sativa
  Clone ID: PAT_MRT4530_609C.1.pep
MALDGHMARGPQPSPRHAILAQLDNRAMLGLHPQHGWRVGGRWSCGPGGSGGGLSRWTTIVVAPSIVLRSHAQEVNFVRYCRQIEQGLWAITDIFVNLQRDAYFGVPPLRSRRLPSGCLIANMANSYSEVTRVEHMEVEEKNPINVLYRDLVLSGDVFGAHCWLAALQRACDRYASLVALGVPHHITGGMHTLCHAPSPDPELRIGHDGRLEDGPQGGAAPAPVARGHDWAVWAGTTRPDVLVEP

SEQ ID NO: 161853 - protein, 82 aa, Oryza sativa
  Clone ID: PAT_MRT4530_60C.1.pep
MSFVISLTLLTIIEDAITGNNLISSWFGMVYSWFGDRTVQPGWLFRMDGPIQQGMLYSVGLILFKYLTVLNSQMFAKCCFCK

SEQ ID NO: 161854 - protein, 126 aa, Oryza sativa
  Clone ID: PAT_MRT4530_61000C.1.pep
KMATLAPESSRWLLRVALLAAPLAALLQNACGSACCSICTPSRRREQQALARAQEVLEAASARGCHRLVLLLSSATRQRRSFPPSAPSPGRPRRPPSPCRRPPPSIGGAVLPSLHACRSTLEDPPS

SEQ ID NO: 161855 - protein, 403 aa, Oryza sativa
  unsure (1)..(403): unsure at all Xaa locations
  Clone ID: PAT_MRT4530_61001C.1.pep
GRQVGPAAPPVGVIPNLXAGSCRCRHGRRKPPTSPPFPPTSSTXARARLSVGPRRPRPRSPPPLSPSKTGAEPPHSPTSPAPLPPSNPPLPATFSPSGTYINDSHTSPPCSRAPPLSGELRPADSAAPPTAAPIRHHCRLRGAVPQPGLYSISPLRLWNTAASCTTSLPRRRRLQPAAAAALVVAAPRRLRRRQRCAKLYLGLCSVSPFHRRNHLSAVDPSSATAVVVSNHRSSPLRSPISLPNRSNIFPRSCRPSAAAPPWSGVVGTPFPSPPVPVAAIFSAAGHLPVVVSPSPSSVRIPTAPSPFSPSAAPHARHRDALPSPVVVWPRARSRRAMAGRVGLGRARAPAAPPRGRPIGFGPIRAVXPVDRRWTASVVSVHGGPAPCAADVWGPPASRPLSLS

SEQ ID NO: 161856 - protein, 360 aa, Oryza sativa
  Clone ID: PAT_MRT4530_61002C.1.pep
MGEAAAAAAAPEPVVEGGGGGGGEGLNPNPSGGGGGGGGGCSDSVSVELSMGGDYYHSCCGDPDPDLRAPEGPKLPYVGDKICSCGRNGSESCRGAWNNGDWLNKFISVVSIFILWMEPLSTLAAEFQSGSPILQEKIKLLGEQYDALRRTRGDGNCFYRSFMFSYLEHILETQDKAEVERILKKIEQCKKTLADLGYIEFTFEDFFSIFIDQLESVLQGHESSIGAEELLERTRDQMVSDYVVMFFRFVTSGEIQRRAEFFEPFISGLTNSTVVQFCKASVEPMGEESDHVHIIALSDALGVPIRVMYLDRSSCDAGNISVNHHDFSPEANSSDGAAAAEKPYITLLYRPGHYDILYPK

SEQ ID NO: 161857 - protein, 76 aa, Oryza sativa
  unsure (1)..(76): unsure at all Xaa locations
  Clone ID: PAT_MRT4530_61003C.1.pep
ELTRTNHXKNKLKRTKYVACGIFQMSTEKLLSSKTQSCKQNLEVLISSNPAKPIRIGCNFFCRCPWIYYFPDSESV

SEQ ID NO: 161858 - protein, 125 aa, Oryza sativa
  unsure (1)..(125): unsure at all Xaa locations
  Clone ID: PAT_MRT4530_61004C.1.pep
SYTSRKDERGIPFTLRYTLHIDMAYPRACGYFLYILRKPFAXFTVGKNPTRTELGRXVLYXGLIPPSSTWRPPDLRYKKDPXGEGLRHRISKPTQPTQSTKPEPTRSKAIXDPVEPTRLRSRWIR

SEQ ID NO: 161859 - protein, 646 aa, Oryza sativa
  Clone ID: PAT_MRT4530_61005C.1.pep
MGEGVKAMLAKPIQLADQVAKQAGWQCFRAECMDLRSRAEKLAALLRQAARAELYERPAARIMADTVRALNKAAGMAARCFQSHSRLRRFFTLNPVSGLPRTLAMLDTALEDVAWLLRISSPHADAGGGGDDDDYDLHGLPNIAQNEPILFLIWDHIARLHTGNLAARADAAHNLASLARDNPHFAKLIIEEDGVAPLVKLLKDGTDDGQEAAATALGLLARDEESVDKLLLAGVCSVFAAALKVPPMRVQAAVAESVAALAHHNQKCQDLLAQTNAVRHLVGHLAAGTIQEHSRYYVAWTGSRNMNMTSLHSVVLAKTLSVHQGGSGSPANEPPSSSEYPGSQQQAGKNQMQSVVQSAMAAKTTANGATVPPGCRHQLTPNGSSGRGSREAEDPATKAHMKAMAAKALWKLARGHVGVCKSITESRALLCFAKLLEQGDGGAGTDLQFYSAMAIMEITRVAEHNLALRQSAFKPSSPAAKAVVEQLLRIVCKGDVDDLLRPCITSLGCLSRTFTASETRVVRPLVELLDERELPVTKEAVVALTKFACTENHLHVSHCKAIVDGGGARHLVQLVYLGDQVQIEALILLCYIALHVPENEELAQAGVLAVLLWASKQPHMVQDLRVDALLPDAKGRLELFQSRASR

SEQ ID NO: 161860 - protein, 363 aa, Oryza sativa
  unsure (1)..(363): unsure at all Xaa locations
  Clone ID: PAT_MRT4530_61006C.1.pep
MDFPGGSGRQQQQQQLPPMTPLPLARQGSVYSLTFDEFQSTLGGVGKDFGSMNMDELLRSIWTAEESHAVGAATTTTATTASVAAAEHAAVGAPPVQRQGSLTLPRTLSQKTVDEVWRDMMCFGGGGASTAPAAAEPPPPAHRQQTLGEITLKEFLVRAGVVREDMSVPPVPPAPTPTAAAVPPPPPPQQQTPMLFGQSNVFPPMVPPLSLGNGLVSGAVGHGGGGAASLVSPVRPVSSNGFGKMEGGDLSSLSPSPVPYVFKGGLRGRKAPGIEKVVERRQRRMIKNRESAARSRQRKQAYMMELEAEVAKLKELNDELQKKQDEMLEQQKNEXVRWQHLMSRQVGPTAKRICLRRTLTGPW

SEQ ID NO: 161861 - protein, 47 aa, Oryza sativa
  Clone ID: PAT_MRT4530_61007C.1.pep
MRLWLPVVILYLELEFDLPTTREIDLLSKRVEVTLMELRQEREKKQR

SEQ ID NO: 161862 - protein, 136 aa, Oryza sativa
  unsure (1)..(136): unsure at all Xaa locations
  Clone ID: PAT_MRT4530_61008C.1.pep
PRATSGGDEXTKCSSAESPDQSHRDRHSHGHGHVMGGGQAPTTLEVTQVHMTRNRIXVRVLEDRASMMHFVXVIGLGKMALQDAYTNPSLEAEMSFQDMFHGRATGCWMLKAADGRMMREVLSLLSSTYTTIGIDV

SEQ ID NO: 161863 - protein, 71 aa, Oryza sativa
  Clone ID: PAT_MRT4530_61009C.1.pep
LGLIPGGIQYRLGLIHDRIQYLVGSPSRIALSLPTNLTHYFCRSEGYTLIKHQLYYITCQLCFNQIELSPD

SEQ ID NO: 161864 - protein, 83 aa, Oryza sativa
  Clone ID: PAT_MRT4530_6100C.1.pep
SPFSAPFFPLSLSLKAGSTNLTRLVSPFLCSSHTRRPYRFLAPPIFLFLSFPLVLSLFVCHSCNCFSVLASPLGFSSHPLYRN

SEQ ID NO: 161865 - protein, 263 aa, Oryza sativa
  Clone ID: PAT_MRT4530_61010C.1.pep
MELKSAVLAVAALCLALALLLPRVALSQRLATADAPAPAPAPRHVDLAELLSLAGPYGTFLGYLTKTGVITTFQSQANDTAAGAPGVTVFAPEDSAFAAVGGGAALSNLTADQLRTLMLCHGVPRYHPLSSFSALAASGPAPTFAGGQQYAVNVTDAAGTVRIQSGWATAKLVSSVYSTSPVAVYALNRVLLPEQIFPTAPKVAPVPAPAPAPVHGDKANDGAPGAGELGASDVKSSSCRVGAGRLLAILAVMVSSFSDDIVV

SEQ ID NO: 161866 - protein, 151 aa, Oryza sativa
  Clone ID: PAT_MRT4530_61011C.1.pep
MAGVSTSVVGLKPAAAVPQSAASPVPKRVHVAVPPKEEQGGGRRAALLGLAAVFAATAAGQGQAKAGVFDEYLEKSKANKELNDKKRLATSGANFARAYTVEFGSCQFPYNFTGCQDLAKQKKVPFISDDLEIECEGKEKYKCGSNVFWKW

SEQ ID NO: 161867 - protein, 78 aa, Oryza sativa
  Clone ID: PAT_MRT4530_61012C.1.pep
RKPECLKDHHQGRGCHCFSQTKTGFGSPKAYFYRVHDNGLSVLQNTGELSKLEHLELLGVAQKTTGKNMQAFFFSFPP

SEQ ID NO: 161868 - protein, 52 aa, Oryza sativa
  unsure (1)..(52): unsure at all Xaa locations
  Clone ID: PAT_MRT4530_61013C.1.pep
AIRHKFALKQHLKRIFIIYKYLVVYYTHLVYSLFCHWSAYXIVRVDQLLFPS

SEQ ID NO: 161869 - protein, 506 aa, Oryza sativa
  Clone ID: PAT_MRT4530_61014C.1.pep
WHTCFICKGRSYYRCFCCPDHSVCRSCVKQAEFVPVMRQTMGFCNNCLRMAIMIEKNVDVDSDGERVDFSDRETYEFLFKDYWDIIREKEGLTLDNMREAYTLLRSGLNCNELSDMEKLPNSEQSSDDDFLGNSDDDDEPVYPSVSNGTSNKVKTILKEGKTKKQVYVGWGSIELIGFMSSIGKDTSKPLDQFGAAEVVKQYIRQNDLLQKDKKKQVLCDGKLWSLFRKSKLKYNKIYSLLEKHIAENITPEDESLDSSEDNTDSIMERKSRIMNSELSTPEEVSERYRRCFASLVRENIKLIYLRRTLVIDLLKQPDTFECKVIGCFVRVKNDPREYSRHKPQKLYQLGQVTGIRKSSEEYKIRDISTDILLCISDMWSDVKISVLSDEDFEEEECEDLRSLSRKEPSKRQTVAEFEEKARSMHADIMSHWINKELQRLEKLIEMANEKEVPRIIPDVEDSKDSGFLVMAANKSSQRNTGLFLGLLELFRVLLLDNESGRGHILS

SEQ ID NO: 161870 - protein, 110 aa, Oryza sativa
  Clone ID: PAT_MRT4530_61015C.1.pep
QPRYVLEMHILDGSWYFSHGTYNKRMQLHVGKGIGSPLAICMPNFQASKSPGRKLQNQIDICDHGGKTTFWHKMRSDRVFPCRSILLEEFTPPSRIFLTTTFRELIPASC

SEQ ID NO: 161871 - protein, 47 aa, Oryza sativa
  Clone ID: PAT_MRT4530_61016C.1.pep
PCPALGKKKPPNVVVLSKMSSHCHDQYQIVQNNLGNNRTARTPRFSS

SEQ ID NO: 161872 - protein, 503 aa, Oryza sativa
  Clone ID: PAT_MRT4530_61017C.1.pep
MAAAARSQGLSPGFKFNPSDQMLVELFLLPYLIDGELPVRGLVFVEDDHLGGLPLPPWILLDRHGRGDEDEAYFVAPMGAGDGARQVRSVAGGGKWVKQRSEGKGEVVVAPGGEAFLWENFSLNFHRDDRRSGSTGWVMHEYIVSPPAGSAVAASHRATHIAFTGHGQNRKRVPDGYVLVLDDAVPPAAAAAAPPPESEQSNQEEQEYAAYTDQIQQQCFVPEQQMSNQEYFPEAAAEQSNQQFFVPAEEQSSHQLFLPAEEQSNQQFFMPAEEQSSHQFLPAEEQSSHQFLPAEEQSNYQQFLPALEQMTQSNQEFAYGEQSQCYIVPEQQQLSNQEYAYSEQSQCYILPEQQQLSDQEYAYSEQSQCYILPEQQELSNQEAEYAFVCYDEQQQQQQQSNQEAEYAFACYDEQQQQQQQQYLHGDLTSWQEPFVTSSSSSSQQFLGQEQLLPDGLLLDGFGEISQQQGDQEYAYCEESQCYIMPEQQQQSNQEAEFAFACYD

SEQ ID NO: 161873 - protein, 88 aa, Oryza sativa
  Clone ID: PAT_MRT4530_61018C.1.pep
LTAHESFLSVGHRWHDESGRAARWRGHDGEGGTRKAGEERIRLLICWVGWRWEGVAVAALLDGKVEGDEAAGESSARGAPADGARALA

SEQ ID NO: 161874 - protein, 76 aa, Oryza sativa
  unsure (1)..(76): unsure at all Xaa locations
  Clone ID: PAT_MRT4530_61019C.1.pep
QVQXALLQVTSTPLRLXRRXRQQAQAIAPPKFDCPRSLSIKTXTCCLFQECLLPFALITMLKILSVIFSMLHPFMC

SEQ ID NO: 161875 - protein, 142 aa, Oryza sativa
  Clone ID: PAT_MRT4530_6101C.1.pep
APRPAGGSPRILPPFGLGGHPEAAPLMVANRGLVRSPSALVPSFEPPWGRFFRDGKNPLVPAHCCAPGFCFGRVVIPLRNGPPGQTFGGPGVPRAHHRPLFVRTCTPNLAPILVPRRKKQAKYKKNKRNIKTKKNPKKKKNT

SEQ ID NO: 161876 - protein, 142 aa, Oryza sativa
  Clone ID: PAT_MRT4530_61020C.1.pep
EKSTLRSICEILENKIPHLASLPPNSLTSLLFLPCPLVVGYCSNSRSSWSGHTAVGEIGTSPRWRQTQIKKQNQTCCSANQSTEQQQKTEQQHSGDGGGGDRRHCTNGGGVETAPVVVETRQERQGAGAWRLGLQDRSGRVG

SEQ ID NO: 161877 - protein, 52 aa, Oryza sativa
  unsure (1)..(52): unsure at all Xaa locations
  Clone ID: PAT_MRT4530_61021C.1.pep
HLSQHSWXXVSLGPRGYLRAAGPFXLGIQLVPVRVITSXWHQSIPIPXVCCN

SEQ ID NO: 161878 - protein, 64 aa, Oryza sativa
  Clone ID: PAT_MRT4530_61022C.1.pep
CISLKGHARSSGVVSHLEKPLFKGRSTSQVNVRDHSRNTTCPGRNQSMKDPHIHFIQDQCKTPG

SEQ ID NO: 161879 - protein, 93 aa, Oryza sativa
  Clone ID: PAT_MRT4530_61023C.1.pep
KSPGKAEQKRGDFNCNSHAPPKWLPVYTSCLLRPIITPAATQTHCEPNKHCRVQHTPLFGQTTDFVMNTFETESMVSNLHILYRKQDQKEPIF

SEQ ID NO: 161880 - protein, 42 aa, Oryza sativa
  Clone ID: PAT_MRT4530_61024C.1.pep
RWARQRSRRLAARREDEFKRNNIRHGEKSMKRVRYRIGEDSS

SEQ ID NO: 161881 - protein, 51 aa, Oryza sativa
  Clone ID: PAT_MRT4530_61025C.1.pep
TQLPNQPVHSNHSGGASSCILCQLSHAVAYLVNSQIPPVFPAFVATSLFKV

SEQ ID NO: 161882 - protein, 90 aa, Oryza sativa
  Clone ID: PAT_MRT4530_61026C.1.pep
MKQPNWSNDQISVVGCFTIKVYPRPLALPCRPRLGDRGQARPGSVEARARLGKARELLLRLEFGSFGARAELESSLGRAKLELLASLELF

SEQ ID NO: 161883 - protein, 427 aa, Oryza sativa
  Clone ID: PAT_MRT4530_61027C.1.pep
MDAKDILGLPKTAFPSVQEKKPRAPKEPQRKPDGVSREVYALTGGVGMAPLMPTIEASHLKRRPAVEKEKIAWQWLPFTSSARTDNLQLYHWVRVVNGAPPTGDYHFAKYNKKADVLKYTDEEYEKYLTDPAWSREETDKLFELCERFDLRFIVIVDRFPTDRSMEDLKSRYYSVTRALLIARARSFDEVAGNPLVKETFNAAHETERKRALSALLSQTKQQERKDAEILAEAKRIMETRAASKHTEEAGALAHFDNVDGVSPLSNTHPLSTATLPAAAVNNSIPASLRMVNLKPKVPTKAVCVEHLELRNEILTLLNLQKQLQNKEAEVSANRENSFTEAPSTPKRANRDVDRPFVPDTVGFAGERAGKRDHKRKIVLWINSILAWKLPGVHFHQEFAPVGRSRSWLLSVQCICPEKVFFVLLVGR

SEQ ID NO: 161884 - protein, 119 aa, Oryza sativa
  Clone ID: PAT_MRT4530_61028C.1.pep
TACWWRSWCSPRRAPVVFSCLGRPSMSTLDKRWLIVLANRSRLRLLSFILSMHATLVPHAYPSHPTLSFCLCLTPRFSSARFLIRFTLARCTGSFSFSFSNFFCLPPSLVFFIQITIPH

SEQ ID NO: 161885 - protein, 401 aa, Oryza sativa
  unsure (1)..(401): unsure at all Xaa locations
  Clone ID: PAT_MRT4530_61029C.1.pep
MDAKDILGLPKTAFPSVQEKKPRAPKEPQRKPDGVSREVYALTGGVGMAPLMPTIEASHLKRRPAVEKEKIAWQWLPFTSSARTDNLQLYHWVRVVNGAPPTGDYHFAKYNKKADVLKYTDEEYEKYLTDPAWSREETDKLFELCERFDLRFIVIVDRFPTDRSMEDLKSRYYSVTRALLIARARSFDEVAGNPLVKETFNAAHETERKRALSALLSQTKQQERKDAEILAEAKRIMETRAASKHTEEAGALAHFDNVDGVSPLSNTHPLSTATLPAAAVNNSIPASLRMVNLKPKVPTKAVCVEHLELRNEILTLLNLQKQLQNKEAEVSANRENSFTEAPSTPKRANRDVDRRGVPDTVGFAGERAGXRDHKRKTTGRFIDAPPSPPQSKRPRKLKASD

SEQ ID NO: 161886 - protein, 47 aa, Oryza sativa
  Clone ID: PAT_MRT4530_6102C.1.pep
HSPTLHPSLTLKLHQLLLLGLVLLGVLLGRRAARDLDLVGRVSYAWA

SEQ ID NO: 161887 - protein, 58 aa, Oryza sativa
  Clone ID: PAT_MRT4530_61030C.1.pep
VVMTVVEVDSSTTIIREQSGAATYGVEMRAGHGGSADPWVPLFSTPFHQGLTSGPYGG

SEQ ID NO: 161888 - protein, 603 aa, Oryza sativa
  Clone ID: PAT_MRT4530_61031C.1.pep
MAAEATTSSSSSTHHPPHATAAVPAPATRHEIQAAIAKATELRALHAALLQGQGAAAANAGSAYSRSPAASLIRLPPGASPALSKAAAAAVAEDYPVFTPTYDEEALSGMNYIRQDNRSLSENWSGIGLDHEGQEDEVAFSDFDNHNTFSSSNSELHFSSSNEHRRNRMGCRNHPSFLQPALSTDSFIKSASKRTDLAEFKAVTTCNTCKPATISRHPEADVDALKNLSSRVPPQSNYHPSICSRPRQKGPHILSWLLPKSKRKVKSDMSPNTVECENMSQLLKEWGVFSLESLKKELAEANENRDAALQEAAEMKSSLGELTTKLVSLEGYCSELKKALKQATSTKNMISHSKRSARSLAVSRDNSMPVSHEVMVEGFLQIVSEARLSIKQFCKVLIQQVEDADNGLSDKLNLLLQPYQVTLTDKHPKVVLYHLEALMNQAMYQDFENCTFQKNGPPKYLDPKEDRQENFASFVALRNLSWNEVLKKGTKYHCEDFSRFCDQKMSCIVSMLNWSWPWAEQLLQCFFVASKCIWLLHLLAFSFSPPLVILRVEENRAFDQMYMEDIHLDKQRSQNPCQVKIMVTPGFYVQDRVLKCRVLGRYS

SEQ ID NO: 161889 - protein, 102 aa, Oryza sativa
  unsure (1)..(102): unsure at all Xaa locations
  Clone ID: PAT_MRT4530_61032C.1.pep
AWSSPEEFRPERFFPGGGXAEAMDLRGGHFQLVPFGAGRRVCPGMQFALATVELALASLVRLFDWEIPPPGELDMSDDPGFTVRRRIPLRLVAKPVGSEDDK

SEQ ID NO: 161890 - protein, 100 aa, Oryza sativa
  Clone ID: PAT_MRT4530_61033C.1.pep
HTADGPGVHPWLLDPVGSSFTEVPAPATPVGSAITDATSATDPTAAASVAAQPPTRTRTPCPAPRRTTNSSPPDRLTYVRPAGAGARKQRTQQLIQLKTE

SEQ ID NO: 161891 - protein, 697 aa, Oryza sativa
  unsure (1)..(697): unsure at all Xaa locations
  Clone ID: PAT_MRT4530_61034C.1.pep
MEIPVIDLKGLAGGDEERERTMAQLHEACKDWGFFWVENHGVEAALMEEVKSFVYRHYDEHLEKKFYASDLAKNLHLNKDDGDVLVDGGDLADQADWEATYFIQHRPKNTAADFPDIPAAGRESLDAYXAQAVSLAELLAGCISTNLGXLAGAAGVVDAFAPLIEENATLLGGFCVGDYFPALAWADAFLSGFAARACRNLRRWDELLEEVIAEHEARLRGGDDGGGEEHREEDFVDVLLALQEESQRHDGSFKLTRDIIKSLLQDMFAAGTDTSFITLEWAMSELVKNPAAMRKLQDEVRRGGGATTAATPYLKAVVKETLRLHPPVPLLVPRECARDTDDDATVLGYHVAGGTRVFVNAWAIHRDAGAWSSPEEFRPERFLPGGGEAEAMDLRGGHFQLVPFGAGRRVCPGMQFALATVELALASLVRLFDWEIPPPGELDMSDDPGFTVRRRIPLRLVAKPVGSGRGVVARGRRALTIVAPAPVSTVLRAALRPRRPVAGGHRQVTRRCGRRGDAAARATWEKGLHSGGGLGGLGAPACSRAAASLSPWARHYDEHLENKFYASDLAKNLQLNKDDDYDALADQDWEATYFVQHRPKNNAADFPDIPPAARESLDTYIAQAVSLAELRAGCISTNLGLSDTDRVRDAFAPPVDRVAVAEVELVPSPWSAPGLDAVVRGVTRRPACSESQRGEEE

SEQ ID NO: 161892 - protein, 129 aa, Oryza sativa
  Clone ID: PAT_MRT4530_61035C.1.pep
GSSSPPWDPACCCCRLCFCSCRPRHGKTRISQLLPAVAVQRAWPRDQPIQGDRHRLQAYYPHHHPYRRLGFMQSAERILNFADTTVYWRSFANPAAYNCSQCEQQGRRCAYSSQRNQTFCMRRASKTHM

SEQ ID NO: 161893 - protein, 152 aa, Oryza sativa
  Clone ID: PAT_MRT4530_61036C.1.pep
MENTDPTDCNPSLDPAIKDLSFGDAIPNPSKSPNLTKSTGANLSQTHTRESQRTQIPAKAATNQARERASSRPNHAQSQGFTYGREETLGAGSVREGKGEEGGRGSPRRSGCRRGRLTSPPSAAAAAAAASENPNWERWRSSSEQSTLRITE

SEQ ID NO: 161894 - protein, 176 aa, Oryza sativa
  Clone ID: PAT_MRT4530_61037C.1.pep
MAAAAAAASTTSMMTRPQLLHLFSRFSFLTSLPEVKARIADAVRDKQEAVAVTTEIQEEILREMGIDPSFGIGCLGKVNVMYEDDMELMVKFYQFVAKEEMAIDEAELDPIEFAEKIHAQHKLQEQQLKMLIQMRKYNPVSQSVILETLRKQLESANFDTDASILTPEQIQEIVEN

SEQ ID NO: 161895 - protein, 96 aa, Oryza sativa
  unsure (1)..(96): unsure at all Xaa locations
  Clone ID: PAT_MRT4530_61038C.1.pep
VRVYHLSPTVRPFFFFFSLRVSLYININSSLRGGGSSYPPAGYPFLIHCGVYLXXWARPPVLRAPLMLQPSSPPSTSSVFYSFPSLFHHVKYILLF

SEQ ID NO: 161896 - protein, 67 aa, Oryza sativa
  Clone ID: PAT_MRT4530_61039C.1.pep
ALVSKDKVHGAQTSIHCSLIDRSQLRGGEYFKDCALSKSNPLTDNQQMQDDLYNMSMELIALCIYKK

SEQ ID NO: 161897 - protein, 71 aa, Oryza sativa
  Clone ID: PAT_MRT4530_6103C.1.pep
MEEEDVEEMGLALTGLTQIRVGVASPIPNCPHPRHSLRLGSHQMDSKPQQRHDLLEDDMAMDYRLLKRSVG

SEQ ID NO: 161898 - protein, 39 aa, Oryza sativa
  unsure (1)..(39): unsure at all Xaa locations
  Clone ID: PAT_MRT4530_61040C.1.pep
AGLNGQRRQRRRTRTCATMVARPWTWXLRRRQRRVARVH

SEQ ID NO: 161899 - protein, 140 aa, Oryza sativa
  Clone ID: PAT_MRT4530_61041C.1.pep
LPASSDPLLESANVFLVSLPAGPEVLLRVTLELVAGDHHLAVKARRLHCPGRRRIIICRLVRVSTALPDRRQQEQGAGGGGGDEGGDAEDAAAGRRLVRLLLLLYLVPLHLAARERERQRESGGGGQWVTGGGDCPAGAS

SEQ ID NO: 161900 - protein, 416 aa, Oryza sativa
  Clone ID: PAT_MRT4530_61042C.1.pep
MAYLPPHKRHSNASTPAPTPAPPPPSLSSSLRSLSLSSSPRGRHHRGATTRPSSKIVHAAGCVSRWSTLPPFPDDDGDDDGSLRLEPFPCDPIERRTGAKPLALVSSSAAEASSPCSAAAAASTVTERFLPDLLAAAWRAKAGDVPEEEEEVKLSVVARVGKVLFESSGGGSPVSMNSLREAVKAGEEGSRSNLHKSFYTNVPSECLDDMERSAAEKMGLEFDSSKEHYHVKVFDKRQSDSTITCKCTVQEDGKLAIHKVQLNQVRHLVEDISCLFKDLDLRLMLSTKRILKNLDAEVKNAINCLVSSAVIDPDVKGGLRWPLGKESIDERFSIVGVWHTNYKAFRNEKLRLKLRHADRFDHRSSTGEVSNEVTFKLIGISASLEAVDQEANSLQEMLESVVGMIWESGLSYKKAP

SEQ ID NO: 161901 - protein, 114 aa, Oryza sativa
  unsure (1)..(114): unsure at all Xaa locations
  Clone ID: PAT_MRT4530_61043C.1.pep
IPSTLGYTSCTDMVYLHVYGCSMYTLRKFITESTDGRSTTRTELDRYCIVWGPTSPSSTWRPIDLRYKRDPWEDLRHGILPPTHPPQPTKPEPTXAKSPGDLVEPTRLQSRWYQ

SEQ ID NO: 161902 - protein, 67 aa, Oryza sativa
  unsure (1)..(67): unsure at all Xaa locations
  Clone ID: PAT_MRT4530_61044C.1.pep
FFFFFFFFFFFFFFFLATEXTVDFAKXLPKXGXITXETQXIQRTEMIMKKQSXPXLHRIHSTMSHGN

SEQ ID NO: 161903 - protein, 33 aa, Oryza sativa
  Clone ID: PAT_MRT4530_61045C.1.pep
RWLVQNVKHFIMQDSIFPLCLNQILASTRSLRF

SEQ ID NO: 161904 - protein, 134 aa, Oryza sativa
  Clone ID: PAT_MRT4530_61046C.1.pep
RNLNFESYVFSETVTPFSHPTRVLSPHPQALCGTSLPRFTTKPPFTPAAHTQTIIQPFQSLVPLKSNQTFRFAHSIFVVHFGVAILILWAHVIFHFHKLPNTSTPQYTFIRAHPPRGPVVHFLQVKQVRSFPLK

SEQ ID NO: 161905 - protein, 39 aa, Oryza sativa
  Clone ID: PAT_MRT4530_61047C.1.pep
VPAHNSLALPPRSIRTHASFPTDHHDMIQPSARFDHHER

SEQ ID NO: 161906 - protein, 301 aa, Oryza sativa
  Clone ID: PAT_MRT4530_61048C.1.pep
WVPGLPPHFGQACNTDDRPQQQHNATDVIVLSDSDEENDAMVCPPAVYDNTTTANGSGFPFTTNGTGYTERYQEDAGVGTSGLGLLSNNVDDFEMNNWQMHSSYQQPEQGFQFFGNDTDVHNTFVGSHNSFGLAPNDYSLDCNVGVEEASVTPALSVCRNSNEMHGSLVDNPLALVGDDPSLQIFLPSQPSSVPLQEELSERANAPNGVQSDDWISLTLAAGGGGNEEPAPADVNSQPQIPSTETGIEPLTDAASAFLSTNIERRSGADLNPRRIENIFSHPRQPRSVRPRLCLSIDTDSE

SEQ ID NO: 161907 - protein, 49 aa, Oryza sativa
  Clone ID: PAT_MRT4530_61049C.1.pep
SLVAVSGDDHGKSSSPEISFSPSISQGFKLAQHVAPSYGFLAPELRHGR

SEQ ID NO: 161908 - protein, 46 aa, Oryza sativa
  Clone ID: PAT_MRT4530_6104C.1.pep
MQRRDDTAALHKNQTQRVPQISKLVQMRSLGGLRAVLADVAPMWLI

SEQ ID NO: 161909 - protein, 158 aa, Oryza sativa
  unsure (1)..(158): unsure at all Xaa locations
  Clone ID: PAT_MRT4530_61050C.1.pep
METTMTTQIISILVFLVLLGQGDTYRYKYKTLXEERGHNQHTXTTDQDTRSTHKPTYVKTRCQISTSEIGMTNPLRCLWLPSGEIXALSLISPDTNSRRKTTLLSTTSQTFRPPCRQQLERLPQILYCLAYILVPTIPILYKYRNRDIKRRHATPGGL

SEQ ID NO: 161910 - protein, 92 aa, Oryza sativa
  Clone ID: PAT_MRT4530_61051C.1.pep
MAELDLGLAGGVWWLEEFMVVFVGQKLGLRSTGLTGTATRSTAALQACSRSAMARSAFPNVHCMKSTELKGNGTCTERRQGNGQEIETTAAQ

SEQ ID NO: 161911 - protein, 155 aa, Oryza sativa
  Clone ID: PAT_MRT4530_61052C.1.pep
MGPEKKCKMLVWLVMQNRDQNLHKELSVAFAPSAPSMQTSIGAIFINFRAAGADRNRRCPGRPQPLGPPAPTIAAAAPRAASANGRRRCPPPQPLRLLVPMGATSTAPRAANAIGSHPRPPSQPLVRRHHLEPPSPQPLGPLVSTRAITVLRSSP

SEQ ID NO: 161912 - protein, 163 aa, Oryza sativa
  Clone ID: PAT_MRT4530_61053C.1.pep
TTAPSSRRTARRAARAPPPPPTTPPRHAEASPAATAARAISEAASTHGYLSSSDPPLAGDLPGWGWLPWMAGASEGSKLPRTEWQWRSKHGIRSLALHPSSRLFSLSDTNCSSDSLSLLLSLCLRENVGGERSHGGAPARQRWSGGRRGEEAILLAKGREMEC

SEQ ID NO: 161913 - protein, 80 aa, Oryza sativa
  Clone ID: PAT_MRT4530_61054C.1.pep
HLTQQFSIESPTSIVSPPKISTSFSPKIWTRTTLSQFLCVKKVKRLMLPLSLVIFTQPHDPLILISQNGNCASSSSTLKC

SEQ ID NO: 161914 - protein, 56 aa, Oryza sativa
  Clone ID: PAT_MRT4530_61055C.1.pep
HQHGLQYFHDKQQRWQYPQPRGTQKHRLHELILRSGLSFSFLLAFGKAHQCQQWRC

SEQ ID NO: 161915 - protein, 67 aa, Oryza sativa
  Clone ID: PAT_MRT4530_61056C.1.pep
PREIFNKIAPFLGGVCLGALQGTWPWGCDYEKQKVFPHVNRSGEAPRQAGHLESRGVPAAMPEPVRG

SEQ ID NO: 161916 - protein, 56 aa, Oryza sativa
  Clone ID: PAT_MRT4530_61057C.1.pep
MAQPHKFRVSGAATSQGACWLIGSMKVYLDYSETVDDWRDHGETVQIGRGDTFLMY

SEQ ID NO: 161917 - protein, 812 aa, Oryza sativa
  Clone ID: PAT_MRT4530_61058C.1.pep
MAHLTNGAVDSLLGVLSKVVKDEAKLLGGVEGDIQFIRDEMDSMNGFLLHLTKSKTPHNDQLRAWMKQVRDVTYVADDCISLYMRDLIPPEAGLWPWLRHIPKRLRTIPARHRLANKIHKLKDRVREVGERRLRYDVKLPELHNSEESSSLLVARDSKVEEKRDEFLRAIDHVHHAPPSPSAIEMLPLDLGKDALEHLHDIKKCLDGGHVASMKMLLRALYAYPYGTIEELKDLSNSLKIKGADVAKLVMIFCYSKLPTHCKSCLQYLAAMGEEDKINRACLVRRWVAEGLLPLRVVEPPLTTTMEEAGELCFKELVFRGFLLPAPSPTDHPQDDDVAVGTCSLNLKSCVVDNAVKKFIPDISKSDNFVVDLPTHLQLQLKIRHMVRSTFPATASAEEKQQPQQQLNPMDGMVKLLKELPEEYRLNVIDLGGCQRLEKSHLKSICKVTSLKYLSLRNTDVSSLPKKMEDLWQLETLDIRDTKKMPATAMRRIYLLNLKHLLAGNNINTDGGGEGKKNESGSTVLVPHRIGKKTETLRHVRIKDGQADLARIGSLEQLRKLGVVLDGSQGNITHLLEAISKRRDTLRSLSVWITEPPPPPAAEHMAGDDVFVTLDHSQEEILAPSKLESLDLNLKCFFKGGNGGDKRGYKLPTWINEKFQALSKITLRYTLLRDDGLRILGKLKSLRCLRLLRKSYIESEVTLEEGEFGELRLLLLDHVSDKTALLIKARAAPKLEKIVWNLNKTKTLVTISPDDIAGINNTAILRFKAADAAAPTKEKVDWNCNSTRKITPDIIRGSIEFNQVQEGAQEFLK

SEQ ID NO: 161918 - protein, 175 aa, Oryza sativa
  Clone ID: PAT_MRT4530_61059C.1.pep
MSDPGRDSNMQQLIPIAPPPKASSGTTGKELVVVDGTGKASGGVKLREDEEDLEVKLRRIMENVPVRVSNTSGSSAGSGSGDFHQYRQMRRREQDRLARMDADYQKRKQMAEFELRREERLKEAEERTAKKRLKRQKKKQRKKEKKRSKTNNGGEQPNGGESSGGDEDSDDEDKP

SEQ ID NO: 161919 - protein, 86 aa, Oryza sativa
  Clone ID: PAT_MRT4530_6105C.1.pep
YQSSCLVKGLSSVCSIQYVSNSFSVVFDSIHPACVVDNVHCELHRVRDMFKLHKSLIKLCHHSVAPRDPCSNLVSFQANPLGMEPA

SEQ ID NO: 161920 - protein, 52 aa, Oryza sativa
  Clone ID: PAT_MRT4530_61060C.1.pep
KKPGWSAEAKKGVPPARPSRAKKARKPPPPKPIQPPKSIRSAISKKAPKASA

SEQ ID NO: 161921 - protein, 186 aa, Oryza sativa
  Clone ID: PAT_MRT4530_61061C.1.pep
MSDPGRDSNMQQLIPIAPPPKASSGTTGKELVVVDGTGKASGGVKLREDEEDLEVKLRRIMENVPVRVSNTSGSSAGSGSGDFHQPHLLMGAYNFHELVGSRREQDRLARMDADYQKRKQMAEFELRREERLKEAEERTAKKRLKRQKKKQRKKEKKRSKTNNGGEQPNGGESSGGDEDSDDEDKP

SEQ ID NO: 161922 - protein, 38 aa, Oryza sativa
  Clone ID: PAT_MRT4530_61062C.1.pep
PTTTDSNYNPVDGPFKTKHPNLRIIQFDSRLIGPNALR

SEQ ID NO: 161923 - protein, 162 aa, Oryza sativa
  Clone ID: PAT_MRT4530_61063C.1.pep
MKLSMKRPPYNRTSRMDFSFPGEPELSLLETWTPRVHEDLGSWSGYCQCKVIEKLCRDESHVLGRGSCVGQSRSAGKVYIHCSVMAYKGFSLSKKAGCCRHLSSRHRHRLRLSAGLLRIGGRHGPRHWSGPRGARAHHPPPSPTCTIAGMTLLRSSSSFVLC

SEQ ID NO: 161924 - protein, 154 aa, Oryza sativa
  Clone ID: PAT_MRT4530_61064C.1.pep
DSRRLKEIPEGSDEEKTTAPYIEQARKKLEELLAHITSKVTNQHEIWATYAKYHEGFGNKEKALDARLKQMRSASPVDWQNDEKKFKTVAEVSLLLVDTYLMQDEEDLKKSLFSAKLHLRGVLKKGEPNFKGTEHYAKLEEKLAIVLDKEQAFK

SEQ ID NO: 161925 - protein, 40 aa, Oryza sativa
  Clone ID: PAT_MRT4530_61065C.1.pep
MVELSTINNALPGGSPDYHFPSSKKQIWTNPCRKIFKIER

SEQ ID NO: 161926 - protein, 82 aa, Oryza sativa
  Clone ID: PAT_MRT4530_61066C.1.pep
MAPHTQSDIHAVWEPIDTHAVNSKPPLPFHSGKICGGNHKCSVNLETIVGSKNGRPKFVHVDRANSGQPADIIACTYTLNDQ

SEQ ID NO: 161927 - protein, 182 aa, Oryza sativa
  Clone ID: PAT_MRT4530_61067C.1.pep
MVVEQPVIPRATPLEEPLIFTAVVDPSGGGSAVGHLFLLFSHIDLATFPDPLPSLPARSSFIHRHFAWRRPACRVGEASGERARRGRSPTNMGRTLISIPFRASSPTPCSSLPGLQLSQQVTSPPRDPTKRTPARRRHTSSRVSPSESQLRGRCHTQQVAPMPWLHQDTVDGGSHEARNMPP

SEQ ID NO: 161928 - protein, 47 aa, Oryza sativa
  Clone ID: PAT_MRT4530_61068C.1.pep
SIKAAATLLPALFGLAGWVPHVVCRKGVVGDDGELLPLDAFGLGMRR

SEQ ID NO: 161929 - protein, 80 aa, Oryza sativa
  Clone ID: PAT_MRT4530_61069C.1.pep
TRGEQGRAAATTPMAIASPLSRRLLHAAVPAISLLFWGWGWGAQLAGLSHAQKSKCSLFECRTRLLLLLLMNLCKHPSSE

SEQ ID NO: 161930 - protein, 70 aa, Oryza sativa
  unsure (1)..(70): unsure at all Xaa locations
  Clone ID: PAT_MRT4530_6106C.1.pep
GPFWGVRVAGAXLQRXDVPGADLLPLWHTRTDVVGGGRLYGWRRPREEGASSPNPPLAXIPVSLYEVATA

SEQ ID NO: 161931 - protein, 133 aa, Oryza sativa
  Clone ID: PAT_MRT4530_61070C.1.pep
GKKKPGETPGNPPIKKPRAGGSGRLKKKKNGAGGPRKKNPEKNPARPNGPQGGGFPPSFPPKTAFGAAPLFPRALSPLAPLNLGGPLGLFKPLTHKIFPLAPPHRNPLFGKNAPLWGLLGNPLLENPGKNLPF

SEQ ID NO: 161932 - protein, 145 aa, Oryza sativa
  Clone ID: PAT_MRT4530_61071C.1.pep
RRGEAAAEEAGQPHRPAAASGPVDCPSKSGGRAARRVPSQQLPPLAEFSLSGGQRWRWTSFVQAARQSELEWPAVEAERPTVEAEAERAVHAASDAAGRWRRRSLSFTAPLAWGTAADGRQRLERNSRRLSDSSGGWSSLATWIE

SEQ ID NO: 161933 - protein, 182 aa, Oryza sativa
  Clone ID: PAT_MRT4530_61072C.1.pep
FVESIVIGMPHRGRLNVLGNVVRKPLRQIFSEFSGGTKPAEEGEGLYTGTGDVKYHLGTSYDRPTRGGKHIHLSLVANPSHLEAVDPVVAGKTRAKQYYSNDLDRTKNLGVLLHGDGSFLGQGVVYETLHLSALPNYTTGGTIHIVVNNQVAFTTDPRAGRSLQHCTDVAKALDAPIFPCEW

SEQ ID NO: 161934 - protein, 100 aa, Oryza sativa
  Clone ID: PAT_MRT4530_61073C.1.pep
PWAFCGAFSHPPLVGFVFPPPCLLGVRAGFFRFSFLSEPVGGRPWVVPGCLGGLLALPLCLFVSFFGASSVCCLVPFVSQPEYKIKKINQKIKPKKKKNT

SEQ ID NO: 161935 - protein, 254 aa, Oryza sativa
  unsure (1)..(254): unsure at all Xaa locations
  Clone ID: PAT_MRT4530_61074C.1.pep
NTYTSHTTVNINIYQQPATRGGRRGRARAGESPGRCTTRSAASRRRPAGPPGRTPPRGAARRAPAAPPSFHPPPPPPRRCPQPLPPPPPPAPPPPPPHFXSSSSDTSRPPPPPTTPCSPPPPHHHPVHPRSRRQWRTAPPPPPPPSPRPSPARXSPCTTSPPPPPPPPSSPTTPPARSSSCCTTSFLFLAPPPPPPPPHIPXATTAAPPPPPPPQPPQRTSRRPDDAAALINGPAGGSPLKRDSWPPPPPPPID

SEQ ID NO: 161936 - protein, 156 aa, Oryza sativa
  unsure (1)..(156): unsure at all Xaa locations
  Clone ID: PAT_MRT4530_61075C.1.pep
FFSSFHPPPPPPRRCPQPLPPPPPPSAPPPPPPXSSSSSSDTSRPPPPPTTPCSPPPPHHHPVHPRSRRQWRTAPPPPPPPSPRPSPARTARARRRRRRRRRRHHPPLPHQPDPPAAAPRPSSSSPHHPHHHRRTSRTATTAAPPPPPPPQPPQRT

SEQ ID NO: 161937 - protein, 149 aa, Oryza sativa
  Clone ID: PAT_MRT4530_61076C.1.pep
MASTSLVSRCLCLLLLLLLLAVAGNTVAVTTPGPHGHGNGAARAAVQMPPKYYDDDAAVVGRGAAGVTTVPPADDDDGCWESVVGTSPPCARDVLLSLALHAPRLSGECCTVLARAGDKCVAGVFSGLPSGEKYLPLVKRICSLVSVIF

SEQ ID NO: 161938 - protein, 256 aa, Oryza sativa
  Clone ID: PAT_MRT4530_61077C.1.pep
MTMRRTGGVGCRNAKGADADATAAGEECGEVGGEAHEDGAREEDAAVSFGIGSLGPVAMSDRGTSSSVSGDTDADSVPTADAAAPLWAPHGRALTGCLVVVNVALVLLVYLYFWRVFSRKRAAAAASARSDDDDDDDEASSSASAPPPAAAAVSVRTRDDVLASLPVFVVRSSGGEKAEAEAECAVCIAELRDGDECRALPRCGHRFHASCVDGWLRLHTTCPLCRASVVALAAAPERKGGVADTTAAAEDVDARV

SEQ ID NO: 161939 - protein, 90 aa, Oryza sativa
  Clone ID: PAT_MRT4530_61078C.1.pep
MTSELPDSYYATPRDSNSLVSDFLAMTSPLTAPIPRHRPLVPILEICLGCSSKKFFGFGKMRTLYHCPWIDMNLTRAADEHIPRIPAYPT

SEQ ID NO: 161940 - protein, 100 aa, Oryza sativa
  Clone ID: PAT_MRT4530_61079C.1.pep
MAKVSLQDLKIQSLFGLSPSPVGLTKPRRRPTTPPSHRRAHLARLVARPGSTENSDAAIALRPILGVTVTRTQWACTCSIDQVAYARNLLAVANRETVTV

SEQ ID NO: 161941 - protein, 146 aa, Oryza sativa
  Clone ID: PAT_MRT4530_6107C.1.pep
MGSPFDPEVSLVLNIPQEQKQKQRVRGGTTSPASSRVEQKQLAFCGTVSSASIDGAKPVGGRRRNIVGSFCCGRWFGEGQQKVLDAAARGSNLNIVGISSKKNALKSMVKKPCKEEAETYSVVSAGFCFGAEPGEGRQQVLDAGEI

SEQ ID NO: 161942 - protein, 238 aa, Oryza sativa
  Clone ID: PAT_MRT4530_61080C.1.pep
MPMITASYLGDNRILKLACLQVDSRGSPYCTPFRDTRSFRDSQSLKRSPEYSGSDQFSYVPRRVDGYMRKPLDLRAQKMPSSPIERFQIETLPPRSAKPLPMSHHRLLSPIKNPGFSSARNAAQIMEAAAKILEPRPQVSSREKICSYSPARIPLRISETRENIPASQRAVSRQLQSSRTNLELPDVRFSRGQQMNRSWNSEDDIVIFRTSSDSYEINNPGFSKNNKGKSISLALQAK

SEQ ID NO: 161943 - protein, 104 aa, Oryza sativa
  unsure (1)..(104): unsure at all Xaa locations
  Clone ID: PAT_MRT4530_61081C.1.pep
SGDGEAAAMWPDNGAYAEELGRVTAAPMRRGATEWMLRASVAVRRRXGPGAGTARVAPSGVRKGSGADAEELGRATTAPMRWGAWPEEPRRPSSRERHSTATGA

SEQ ID NO: 161944 - protein, 58 aa, Oryza sativa
  Clone ID: PAT_MRT4530_61082C.1.pep
PPPPPQASPPPTPWLSPSTSTSTTATAATSHSPSRRCQLLSSSPPPPPPPPTHCRRRR

SEQ ID NO: 161945 - protein, 581 aa, Oryza sativa
  Clone ID: PAT_MRT4530_61083C.1.pep
MRRLLELLPGELRRRVEGHPELPALVEVVMDLGRPPLARFPSGDFLLSQSPISFDDLRHATSQVGDFGADNRAGISRTLHRISAIRNRKGAIIGLTCRVGRAVPGSANLLQDLVKDGGSLLLIGPPGVGKTTVIREIARMLADDYRKRVMIVDTSNEIGGDGDIPHPGIGNARRLQVPNQDMQHKVLIEAVENHMPQAIVIDEIGTKLEAMAASTIAQRGIQLVATAHGITIENLIMNPSLDMLVGGVQSVTLGDEEANRRGVQKTVLERKGPSTFTCAAEIVSKIELRVHRSLEDTVDALLAGKMPNVEIRKVGSKGPVQEVYVQKERLDLGPSEGATQLDTDSLSNARRSLDSAFNLDPAEGHIGRSTEAEPDLNLYAYGISESTALQAIKQLELEDIVTLTYNISEADAVIALQSKLKKNTQIQAVVKSQDIPVFFTKTNSLVQIRRALRALVDDHTDGLMDFEDTEVRSSEETDALEEARLAIEQVVIPKGESVQLLPRPPSIIASQVDLVESFKLKWESIGQEPNACLRILPQFVGVEEGGKSVKQEAATELTDSDNSDDMDYKQNGVSRLPFLPE

SEQ ID NO: 161946 - protein, 94 aa, Oryza sativa
  Clone ID: PAT_MRT4530_61084C.1.pep
VARPMSMLLFLVLPVLFILFRIACASHRRATLHGWSLDHGSVVLDVFWRPRWVSLSYRSALSLSLYLSLSLSLSVSLLTTLVAPRLDSKTPPPP

SEQ ID NO: 161947 - protein, 182 aa, Oryza sativa
  Clone ID: PAT_MRT4530_61085C.1.pep
DSAVADQTLGESSLVDETEDINMSSDASEHTSINNNSVEDETGTEDVMQFFLTNERIPDQRMKIEMDLSITVNDPHKRLHVAVCWEDSGLDQYNFSSLNSLPEVYKAVLFSRRPQDTCSLYACLEAFIKEEPLGPEDMWYCPGCKEHRQASKKLDLWRLPEILIIHPERFSYSRYTINKLET

SEQ ID NO: 161948 - protein, 56 aa, Oryza sativa
  Clone ID: PAT_MRT4530_61086C.1.pep
RTNLSLVNCFDLSQVSICKLHWGTDHLNMELWSEQRAVSKDTPLRICHHYEVRKIN

SEQ ID NO: 161949 - protein, 81 aa, Oryza sativa
  Clone ID: PAT_MRT4530_61087C.1.pep
AHEAFNIVNYQIPSSHVLYISVHEYGIGPRPATFQQGPDEGRHGSSRRFTLLNMSMVEQTDLSLALLPTAQLPSLTREKGG

SEQ ID NO: 161950 - protein, 85 aa, Oryza sativa
  Clone ID: PAT_MRT4530_61088C.1.pep
AASCGSGDLPRGGRLEAELARVVSTEDETDRVAGGGGGARPGGGRLRRSSPGRWQWRQRSPGRPVAEAEADRVADGEGGASATRD

SEQ ID NO: 161951 - protein, 87 aa, Oryza sativa
  Clone ID: PAT_MRT4530_61089C.1.pep
MAGTPGRRPPAAGSAPQRNPTGGRVMVWDASSGISDLGLWKTDLSDDVYQLLSEVKHMNLMMETVATAHSEYANMEWLPLPAVRRIG

SEQ ID NO: 161952 - protein, 369 aa, Oryza sativa
  Clone ID: PAT_MRT4530_6108C.1.pep
MKLTVKTLKGTQFEIRVQPNDTIMAVKKIIEEIQGKDSYPWGQQLLIHNGKVLKDESTLEENKVSEVGFLVVMLSKSKASGSSGALSSLTSSTPLTRQETPADASRAAPQPLVAPTRTPQPERPPAEAPSNAYGQAASNLLSGSNLDTTINQLMEMGGGSWDRDKVQRALRAAYNNPERAVEYLYSGIPITAEVAVPAGGQGANTTEPSSTREASLSGIPNASPLNLFPQGDANDGGGAGGGTLEFLRHNQQFQALREMVHTNPQILQPMLQELSKKNPQLLRLIQENHDEFLQLINEPFDGADGDFLDQPDQDEMPHSINVTPEEQEAIGRLEGMGFDRARVIEAFFACDRNEQLAANYLLEHAADED

SEQ ID NO: 161953 - protein, 111 aa, Oryza sativa
  Clone ID: PAT_MRT4530_61090C.1.pep
QCFGGPLTLWSPQGQRPLPPRCGAAFRPPRLHQGFMLAPRRLSRWSRWALLACLGPVVPVFLLVGVVVCFCSPVVPHSSASLGWAFAVIVVTGWAPHHVGRSACKKQNRTI

SEQ ID NO: 161954 - protein, 95 aa, Oryza sativa
  Clone ID: PAT_MRT4530_61091C.1.pep
MQLLFPVLFLPRGLPLSSLVVASSCGSSRVHARRSSRRGGCAPCPRQIQLRVTGGVLCRPPAGMTHEAILPSFASQSQAAISCKLLQIAADQLTF

SEQ ID NO: 161955 - protein, 226 aa, Oryza sativa
  Clone ID: PAT_MRT4530_61092C.1.pep
MVPSFSSSAAAILLLFLILASSASATNFTCTWPTTCQSAIVYTPPAATTYIELLSSFETTTLRDLFDANGLPPSTPSHTAIPTNATVIVPFRCSCVAGANRPESQPFHIIQINDNMSYIAAQFDDFVTYQEIAAASNISNPDFLEVGQELWIPLPCSCDQVEGNNVTHFAYKVRAADNVSKIAARFGVKESTLLKINGITDPKNLTQGQILDVPVPDYIVTTKPYH

SEQ ID NO: 161956 - protein, 155 aa, Oryza sativa
  Clone ID: PAT_MRT4530_61093C.1.pep
MNIWQLEMNDVRQLDGGGGGGGSGGRGSGRAGREGSGGRRRNTAPCHQCSSKARNGQEGRCRGTDVVLQIGRTAPLAVPVSWFRAMEPQDCIGAAFLSRGTVTVSQFRPGAVNFARGPLAAQWGLRAKFARAANKVPRQYEGRFWPTWRLRGSFD

SEQ ID NO: 161957 - protein, 74 aa, Oryza sativa
  Clone ID: PAT_MRT4530_61094C.1.pep
KLCLMQDMVSFSFLIYSLATSFFILGGSLFNTIDTIIVIGLGNGLTSTIHINTRQFFDQHNDADRELVVARLRS

SEQ ID NO: 161958 - protein, 148 aa, Oryza sativa
  unsure (1)..(148): unsure at all Xaa locations
  Clone ID: PAT_MRT4530_61095C.1.pep
GCRNSARGVGDANRDHACWERPEDMDAXRTVYKVDPSTPGTDVAAETAAALAAASLVFRKSDPAYASRLVARAKRVFEFADKHRGTYSTRLSPYVCPYYCSYSGYQDELLWGAAWLHRGTKNPTYLSYIQMNGQVLGADXQDNTFGWD

SEQ ID NO: 161959 - protein, 73 aa, Oryza sativa
  Clone ID: PAT_MRT4530_61096C.1.pep
ETSPGQRKNDREEGAPPPTGRTHQTRQPLKQNPTQTRTLHKKKNTSHPQRPATHPALSLSLYPLTHDSSVQIL

SEQ ID NO: 161960 - protein, 124 aa, Oryza sativa
  Clone ID: PAT_MRT4530_61097C.1.pep
VAGFHLTCTAMAGDGCGASGVAMACGGRGASGAARQTATGRGPLTIGFTTRGPVAAESTTPAPLLAEDPRPTPLVVHRCRRRHRSTVVTDVKRSQRGVRWGHRVGEGRQEVRENVGAQGSPRVR

SEQ ID NO: 161961 - protein, 80 aa, Oryza sativa
  Clone ID: PAT_MRT4530_61098C.1.pep
MVGGLGGWAAPATLVRSPCHLGTDQLRWLEDDNGASDSGTQKGSFLATDSSPRGRSENGNMEEGAKGSFDISHNFFLLFY

SEQ ID NO: 161962 - protein, 381 aa, Oryza sativa
  Clone ID: PAT_MRT4530_61099C.1.pep
MKEGGGDGGFVRADQIDLKSLDEQLERHLSRAWTMEKRKEEAAADQRGSKPARARRRALLAEPQQRREEWEIDPAKLVVRGVIARGTFGTVHRGVYDGHDVAVKLLDWGEDGHRSEQDIAALRAAFSQEVSVWHKLDHPNVTKFIGAIMGARDLDIQTESGHLAMPSNICCVVVEYLAGGSLKGFLIKNRRKKLAFKVVVQIALDLARGLSYLHSKKIVHRDVKTENMLLDKTRTVKIADFGVARLEASNPSDMTGETGTLGYMAPEVLNGSPYNRKCDVYSFGICLWEIYCCDMPYPDLSFSEVTSAVVRQNLRPEMPRCCPSSLANVMKRCWDANPDKRPEMAEVVSMLEAIDTSKGGGMIPVDQRQGCLSCFRQYRGP

SEQ ID NO: 161963 - protein, 142 aa, Oryza sativa
  Clone ID: PAT_MRT4530_6109C.1.pep
MENRESVVGRTLDSGCVIETVLGFEYDCQVALLSWLLAASYLGLLEASYLFVILHREDRDITPTGVVSHDAKDSGRHLQSATNARQHNGSRCSLRNKGGVSISHGESESYLSTRGEEEAVEALEMTVMRRERRLREKCRVSR

SEQ ID NO: 161964 - protein, 64 aa, Oryza sativa
  unsure (1)..(64): unsure at all Xaa locations
  Clone ID: PAT_MRT4530_610C.1.pep
WLVAGEEPRPAAGGRGGSCRRRVRNRXRQSVGAKAGXGGEQGAEDGSGDSCERRAVARGWKRRV

SEQ ID NO: 161965 - protein, 92 aa, Oryza sativa
  Clone ID: PAT_MRT4530_61100C.1.pep
PSPPPPPPPHQTRLRRTPTPAPPPAGAAALGAPPPPPPRGAAPKPAAARSRTTPASAPSPPTTSTPPRGSTPSRVVPPPPPPPSADRTAANA

SEQ ID NO: 161966 - protein, 92 aa, Oryza sativa
  Clone ID: PAT_MRT4530_61101C.1.pep
MANLHKIVCRHKTIRHLEELHASCQREVLARGLLDNVSREKGEDDNTATVRKVLRENQDMVFIQQPQQREMGGLIMPPRGKTKLGLHLPPIP

SEQ ID NO: 161967 - protein, 306 aa, Oryza sativa
  Clone ID: PAT_MRT4530_61102C.1.pep
MTSQAATTTTTAAAAAAWTREDDKAFENALAACAAPPPADGGAPDDDWFAALAASVPGARSAEEVRRHYEALVEDVAAIDAGRVPLPRYAGEESAAPPDGAGAAAAASKDGGHRRDERKGGGGGYDGGKSCSKAEQERRKGIPWTEEEHRLFLLGLDKFGKGDWRSISRNFVISRTPTQVASHAQKYFIRLNSMNRDRRRSSIHDITSVTAGDQVAAQQGAPITGHQATGNPAAAALGPPGMKHHHHHHPGGAPPPMPMYSAAPMGHPVAGHMVPAAVGTPVVFPPGHAPYVVPVGYPAPPAKMHQ

SEQ ID NO: 161968 - protein, 111 aa, Oryza sativa
  unsure (1)..(111): unsure at all Xaa locations
  Clone ID: PAT_MRT4530_61103C.1.pep
CADERREGRRSAPAHGGAAAAAAATRREEGAAPARRWAAAPVRGGVARQLLPQGGREGQLQRVVVGGAXXSLPCCCHTEGGMGGSTHEGWWHLLLPSGGRVESPSFALGRW

SEQ ID NO: 161969 - protein, 134 aa, Oryza sativa
  Clone ID: PAT_MRT4530_61104C.1.pep
RAKRGTTVGASAWRSSGGGCCHAERGRGSTGAQMGGGAGARRSSAPAVAARREGGAAPARGGRRSGGAGACCCHTEGGMGGSTHGGLVALAAAARRKGGRASSGARKEERRRRRAEGGGAAAPARVGAVVAVRG

SEQ ID NO: 161970 - protein, 138 aa, Oryza sativa
  Clone ID: PAT_MRT4530_61105C.1.pep
MGGAFSTSKPKPAAGEEGGESAVVAVHSKAKWDELWDAHKNTTKLVVIDFSASWCGPCKMMEPVFKEMAGRFTDVAFLKVDVDELAEVARTWRVEAMPTFVLARGGEEVGRIVGADKDELEKTINTLRSSSSSTATTT

SEQ ID NO: 161971 - protein, 122 aa, Oryza sativa
  unsure (1)..(122): unsure at all Xaa locations
  Clone ID: PAT_MRT4530_61106C.1.pep
AILEPVFLVXEIQVPEQAMGGVYSVLTRRPGXVFNEEQRPGTPLFTIKAYLPVMESFGFNADLRQGTSGQAFPQSVFDHWQVLQGGSPLDATSKTGTVVQNTRKRKGLKPEVPGVENYYDKL

SEQ ID NO: 161972 - protein, 54 aa, Oryza sativa
  Clone ID: PAT_MRT4530_61107C.1.pep
MGIWGCAIVWEIVTRQANDDDVRREEDDDGDADILPLPDKRPSTLLHRLAGLDS

SEQ ID NO: 161973 - protein, 40 aa, Oryza sativa
  Clone ID: PAT_MRT4530_61108C.1.pep
SGQPVQHTHGQYQQAGSAQPQFVPQYNQFEPMSQQSQGTP

SEQ ID NO: 161974 - protein, 99 aa, Oryza sativa
  unsure (1)..(99): unsure at all Xaa locations
  Clone ID: PAT_MRT4530_61109C.1.pep
XKTYIXRHSTAYVSMXKNXYTXACISPPCTLHDGTWQTRSQXSHLXSXIRQRLLGRXTSYWSXSXFAVSSSSSTSXQXTSCVSLXXDEAXRRGXTRXPX

SEQ ID NO: 161975 - protein, 138 aa, Oryza sativa
  Clone ID: PAT_MRT4530_6110C.1.pep
MGALLSSHQVIQFTTLDPSLMSTLVIPGELTPQADNVPIDSMIRKMQDTRDELAAKTILSLSERNIVLEKSLDDVNKSWMSLYARKLCEDDIWRRKLADARINHVDDLDKIKSIGDDLVKIKLIGLVVMVTLFPSLDR

SEQ ID NO: 161976 - protein, 58 aa, Oryza sativa
  Clone ID: PAT_MRT4530_61110C.1.pep
DAHPDECARRQGWAGVRYLIKYPKMLEPERPIRAPNNRVIPPRAALPARARAHACVPT

SEQ ID NO: 161977 - protein, 76 aa, Oryza sativa
  Clone ID: PAT_MRT4530_61111C.1.pep
MAAALAPRGGRVSGPSWNESTALRMRVIGGKARFPFSYSPSFIVTDYMGLGPYNIKDSASEYRGGLPQYDNSHSSR

SEQ ID NO: 161978 - protein, 112 aa, Oryza sativa
  Clone ID: PAT_MRT4530_61112C.1.pep
MGGELKLNGCKLVAWRSAGDGQEGRTYGGRRQRARGWRGGGARSFWRSGVGQRAAPPALLSVENSEGGGAVPALSRPPAPGSFLDAVHRLHLMDRHLATYTIDLFRKNNFFG

SEQ ID NO: 161979 - protein, 90 aa, Oryza sativa
  Clone ID: PAT_MRT4530_61113C.1.pep
THVCGYPPHVTHTSGRITGKINDELGRVGSALVLTRPGPLTPPGVRVVEDSDGGATMIWVLADRPPQVLEAHLVAGVGSPRRRSVGWIWG

SEQ ID NO: 161980 - protein, 59 aa, Oryza sativa
  Clone ID: PAT_MRT4530_61114C.1.pep
SSHRRHWPPYLQPLSVQAPLSGASPGHVHIVPTTESFPVHAICPWQTKYPRRQHDQHVV

SEQ ID NO: 161981 - protein, 46 aa, Oryza sativa
  Clone ID: PAT_MRT4530_61115C.1.pep
ALDGSAAKYPHVFGIACGRSVVLRGQTYRLRPCPCDASSPHPVSER

SEQ ID NO: 161982 - protein, 108 aa, Oryza sativa
  Clone ID: PAT_MRT4530_61116C.1.pep
MGRQRKNRIPSALEKGKGKATRQVQCPDCQQFGYRKGSVRCELTGTRKRKRNKKTKTNVGRKRAKGAIDAQATAVDVQANTRRTRAAAAKEAAAESQEAGIRGRSKLR

SEQ ID NO: 161983 - protein, 103 aa, Oryza sativa
  unsure (1)..(103): unsure at all Xaa locations
  Clone ID: PAT_MRT4530_61117C.1.pep
KRVESGHSILGTFPFAVPMKISFNSGLYDNGXNNNLGIDVWNAFPLPXXYSTXRXLWXDXXKXXPTLVXNFXXEWSPXXXQIPQSPXXPXGGIRXKXGXPGGV

SEQ ID NO: 161984 - protein, 1777 aa, Oryza sativa
  Clone ID: PAT_MRT4530_61118C.1.pep
MAPKAGKAKPHKAKGDKKKKEEKVLPTVLDVTVETPDYTQLTLKGISTDKILDVRKLLAVHVDTCHLTNYSLSHEVRGAQLKDTVEVASLKPCHVSIVEEGYTEELAVAHVRRLLDIVACTAAFGPRKSAPEQKPASPSSPDAPPPPPPPASPDAAKTPGSPAGGGGGVGAGGGGGEEPMYPPPKLGQFYEFFSFSHLSPPLHYIRRSTRPFVDDKTEDDFFQIDVRVCSGKPVTIVASKAGFYPAGKRALISHSLVGLLQQTSRAFDGAYKALMKAFVEHNKFGNLPYGFRSNTWVVPPAVADLPSVFPPLPTEDETWGSNGGGQGRDGKHDHRPWAKEFAILAAMPCKTAEERQIRDRKAFLLHSLFVDVAVLKAVAAIQQMVPDKSSLETPNDTTNPDLHTQQIGDMKITVTKDKADASSKLDVKLDGSQAPGMLSDELAKRNLLKGITADESATVHDTATLGVVVVKHCGYTAVVQVPADAQLTTVSLAQHDIDIEDQPEGGSNALNVNSLRMLLHKPCIQPSGGVQRLQSSPQESEYSTNFVRKIMTDSLQKLACEAPRETRPIRWELGACWVQHLQNQTSEKADTKKNEETKDVPTVKGLGKQFGQLKEIKKKTDEKSGKGASTKENTSTNTNDAQTVNSSSTKEDNEAILQRWLPEAAFQRLKESETGLHAKSPDELIEMAHKYYDDTALPKLVADFGSLELSPVDGRTLTDFMHTRGLQMRSLGQVVELADKLPHIQSLCIHEMVVRAFKHVLRAVISAVHDINDMAEAVASCLNILLGPFPEENNDGKCYEDNNLRQRWLEVFLVKRFGWTWKDEYRADLRKYAILRGICHKVGLELVTKDYDMDMPHPFRRSDIISIVPIYKHVACSSADGRTLLESSKTFLDKGKLEDAVNYGTKALAKLVAVCGPYHRMTAGAYSLLAVVLYHTGDFNQATIYQQKALDINERELGLDHPDTMKSYGDLAVFYYRLQHTELALKYVNRALYLLHLTCGPSHPNTAATYINVAMMEEGLGNVHVALRYLHEALKCNKRLLGADHIQTAASYHAIAIALSLMEAYSLSVQHEKTTLRILQAKLGSEDLRTQDAAAWLEYFESKALEQQEAARNGTPKPDASIASRGHLSVSDLLDYINPDDELKAKEMQKKQARAKIKGRAGQNPSEVVDDEDQRSPPPKSDHSLIEKESSEVKENGTFIQKEKLKEEIPGNTLSRIPQDDFTEEYTSDEGWQEAVPKGRSTGNRKTGVSARRPNLAKINTNALNNTENGRYKGRAPSNFSSPRVLPSEAVTAKKLVKSSSFNSKPGSPAISSNSAENSSNPNSLSASPATTPAAAKAVLSSAPIASQTVRKALSYKEVAIAAPGTLVKALNDAQTEEKDATDAGANIETAKAPKESNGHLSKEKDGAVQVSPKDSTSQGSKETGEGKSSNPDDEQTVVLAGSNQSETQPEKKRDLVASDVSSSSQSLTTVTEANAPNEVASMVTEANDSSSNDDERDAGEDAQEQMSSGGENEKSSPSESEKNDSPGAKETASKLSAAAAPFNPSTVPAFGSMAIPGFREHGGLLPSPANVPPMLSIPLRKHPHQSATARVPYGPRLAGGYNRSGHRGPRNKSALPSSEGLTEANTFATRVMNPNAAEFVPGQSRSPNGNPASPNGPLASPGGTEASPHGLPSPSDSIVESPATASPQVSEISQTSPEGNDTTSGVDTENGSEKQDTDGKNHVESKDGEGEPEQTEASKGDGDGAITPEDGSAVTENPKSWADYSDGEAEAVEVAS

SEQ ID NO: 161985 - protein, 54 aa, Oryza sativa
  unsure (1)..(54): unsure at all Xaa locations
  Clone ID: PAT_MRT4530_61119C.1.pep
SRAGSTEGTHFVTEASTDXNALWATIGPLQSTYNANMASMNAPIAKPLGSLEDE

SEQ ID NO: 161986 - protein, 77 aa, Oryza sativa
  Clone ID: PAT_MRT4530_6111C.1.pep
FWFQWSFKFTDFKHPFDQARNSCGCFTSSSSTPSCTYKNTPARKATSSAADDDDDAASPTLAAARRCCDVGAGLLSA

SEQ ID NO: 161987 - protein, 159 aa, Oryza sativa
  Clone ID: PAT_MRT4530_61120C.1.pep
MAGMVAAAAPPASLCRPIAVPRAPMRRRRLTPRVKTTPSLRCEDSPKIALLQVQAMRSSEESSSDEDDEILSELKEKWDAIENKSSVLFYGGGAIIAVWLSSIVVKAVDSVPVLPNILERVGLGYSGWFVYRYLLFKENREELANGFDALKKRITGNEE

SEQ ID NO: 161988 - protein, 1022 aa, Oryza sativa
  unsure (1)..(1022): unsure at all Xaa locations
  Clone ID: PAT_MRT4530_61121C.1.pep
MAPTLGRNPQAAEFCPPYKRSEPTRMTTLRPRSWCLVHKTSKHTLEDCSVILHVQAELYAYWERGIQRTSSTGATYCPKHRSRSHDLTSCRIFLRTLKPPHHRVQQPRVQTPCVAKEPDAAPIPYRFVGYIGDNEPSVLHLLEGYESSSESTRDVNVVDNTETSASAAERTPAHQLRNLDAILRESPFDPATNPDAGQWVERLRETVTNLNAAFAEAAGGPEPRRYEEQPTEDADGENXRQRTSHRRDRDNNDCHRHRSPSRREGDTTHRQHRHCSPPWQERKDGRGNTPNEDRDCRLHNDRRNNDNHRDQGNDRQGQERDGDNQRDRNSQSPHPSQDXGRDHHSRSRAPEPSSPSSSSLSSSSSDRPPQRRRNHXHPPVPGSGCRAFTPMLQNVRWPEKFRLGAMEKYDRSTDPEEFLQVYSTIHYTAGADDNALANYLRAALKGSARSWLVHLPPCSISSWEDLWQQNTIPKITDASVIRAFKSGVRDRYTTKKLTTRRITSALKLFEIIDRCAHADNALRRKEGKSKAGEEKKSTNKDAPESSKKRNRKSGKCKSSGEVLATEQKESPRRPNPQNDDSRKTWCPIHKTSNHTMEDCYVIKKELARQHAIERGKRVRVVETAEEAATGDSDSAFLEYDLHVSHIFGGSTLYTSKREYKKVEREVCFTSQTSTTKMKWSQHKIEVRKLERRFDGIEVRHVYRKDNVEPDDLAQHASRQEPLEPGKFLDVLTKPSIKDTDNESTTTDTGVPQGAAEVTNVITNAETTNDWRTPLIRFLESDELPDDTDAEKLSRQAKIYCMIGNDLYKKEPNGILLNKHTKLTARALQTIPLTCLFSCWGLDILGPFPRGQGGYKFLFVAIDKFTKWIEAEPTREIKVDNAIKFIKGIFCRYGLPHRILTDNGSQFTSGDLQDYCIKLRVKISFASVSHPQSNGQVERANRIVLQGIKTHVYDSLLATTQSGLKNSRRFYGPYELHQRHPTRKHPSFSYMDLKPCSQRSYNIRVHEYRSMLTRNRMKGEATM

SEQ ID NO: 161989 - protein, 728 aa, Oryza sativa
  Clone ID: PAT_MRT4530_61122C.1.pep
MFGDSDGSKDANPGAPPSTTDPPFPNRELTLSSYLCEKPTLASAAAGGGGGAGPSSPPNPAAAAAGDDGKHCVERDFLHLSAPKRGDPPGDDSSVVGGKKPRLDSLQLSLSLNSDGPAAPPSSQPPLASLLQPVPATDGDLRGAAAAAAAVPAAPARRTYSATTARTRSINSDDMSYSYSIFSHNPSCSLTHNSTDIYAAGEGTNGSVHSRFNFRPMGDGSVAFATPPLKEGTSSFFPTELPARMAAAAAAAAASAGGSFDGGRGGLHASRPDKILRDIVSDSVTAMAQVLQDFPSERLELLREAVRGMIDSHEKRDELASLQRKLERRSDLTTETLGRANRTQLEILVAIKTGIATFVTGKGRVPSSELVEMFLMTRCRNLNCKSTLPVDDCDCKICSTKKGFCSACTCSVCHKFDCAANTCTWVGCDVCGHWCHVACALERNLIRPGPTLKGPIGTTEMQFQCLACNHSSEMFGFVKEVFNCCAENWNAETLMKELDFVRKIFAGCEDFEGKGLHAKAEEVLSLLGKKIISPLDATNSILQFFKYGVTDYSVTGSTSKGILAAQASQSTDMRSLQTPTITPPKSSFNFKTTTSILDTDALKPSPKPLSIEPHFSTASKEDDSSLETIVKCKEAEAKLFQKLADDARKEVDSYRQIVRSRTQKLEEEYAAKLAKVCFQETEEKRRKKLEELKMLENSHYDYLKMKMRMQTDIQGLLERMEATKKMWV

SEQ ID NO: 161990 - protein, 131 aa, Oryza sativa
  unsure (1)..(131): unsure at all Xaa locations
  Clone ID: PAT_MRT4530_61123C.1.pep
YWRAGKAGSRNPVPSCRNYIARRCAVCGGRLDCSKKPPRELLEPCXRELAAVPMQRRCDAYSVLLRDEVTEDGDRVAGMISHHAAPGSDAATIVGMASALTDYSRSNLQHTGLSGCPMVGGGWINFLELIN

SEQ ID NO: 161991 - protein, 99 aa, Oryza sativa
  unsure (1)..(99): unsure at all Xaa locations
  Clone ID: PAT_MRT4530_61124C.1.pep
KDPDPKMLLRQTGQIREKMEAQGRGEENQGKKKNPPPRPWKVSFLIWXRGPRGHPPPLEEDHSSYLATPVKGMILPKDFKLLSPSFRGKEEPFVAPPPP

SEQ ID NO: 161992 - protein, 71 aa, Oryza sativa
  unsure (1)..(71): unsure at all Xaa locations
  Clone ID: PAT_MRT4530_61125C.1.pep
FFXXFVIQXGFTLAENLYIDIDSKRRSSFLYXAFGLEEKICXXTTTSTNPFDSCXLHLVLYWWKYTICPRI

SEQ ID NO: 161993 - protein, 41 aa, Oryza sativa
  Clone ID: PAT_MRT4530_61126C.1.pep
MSGTGTSGQPSLSGGLQASLDHLRSPWDTGGETIFTSERDL

SEQ ID NO: 161994 - protein, 209 aa, Oryza sativa
  Clone ID: PAT_MRT4530_61127C.1.pep
PIRARYPVVHGYGLAASQLQRLRDHHIPLTVAVDKVAASGGYMMACVANKIVAAPFAILGSVGVVAQVPNIHRFLKKHEIDVDVMTAGEYKRTVTLAGENTEKGKQKFQQELEETHQLFKQFVANNRPQLEIEKVATGEHWFGQQALTLNLIDEIATSDDLILNAVKDKEVIKLAFKQKKKLAQRLGSQMEQSLENLIAKLLHKNRSNM

SEQ ID NO: 161995 - protein, 59 aa, Oryza sativa
  Clone ID: PAT_MRT4530_61128C.1.pep
RYHSTHCAAEEDAEKSKELSRRHITNSGSIMQKTAGSSFHGMSTESYNREQLADNKVDT

SEQ ID NO: 161996 - protein, 141 aa, Oryza sativa
  Clone ID: PAT_MRT4530_61129C.1.pep
GAWNRPFVWPQSFKTPLVALGPPLWPPKGAPVCAPFFPPKPCWGPSRGQGFSTVFFSAPPWAKPGGEPGGVSGLLPRGRAGVGSFPHFLSPFGSPFFALFFGGGPFRGLSLFFPPPLKTSARFLPPLFSPNLGPCFSLLIF

SEQ ID NO: 161997 - protein, 101 aa, Oryza sativa
  Clone ID: PAT_MRT4530_6112C.1.pep
PMLQELSKKNPQLLRLIQENHDEFLQLINEPFDGADGDFLDQPDQDEMPHSINVTPEEQEAIGRLEGMGFDRARVIEAFFACDRNEQLAANYLLEHAADED

SEQ ID NO: 161998 - protein, 630 aa, Oryza sativa
  Clone ID: PAT_MRT4530_61130C.1.pep
MDRQRSSGSSSTSHYGVVSPKGLILLSFASSSLLFSFLFSLFALRFGRPLHLPFVASSSLAGNASAIARGPVLAAGGGGRSTSGAAVDVLPGRGRSGSLGEAARRSDAGGFPSAGGVGSAMEVKEAALGSENGGAPANGDSGSAMGAEGAPAGGGDGNSAEGENTTKEVADSAMETNLLVSNASASQEAAAPAEEPKKPKSVQDVDSSMGDSDLGSNGEFLQGESGNSSAGAHTSQRVDQGEHSAHSTVRNSSGAAPLSSSKQKTDLVQETVDSKVDAARSDAALCNVYDGRWVFDESYPLYTSDSCPFIDEGFSCEANGRMDGSYRKWRWQPTHCSIPRFDARKMLEMLRGKRLVFVGDSINRNQWESMMCLLRGAVSDPARIHEARGRRITKERGDYNFKFLDYNCSVEYHVTHFLVHEGKARIGSKRTRTLWIDTVDRTSSKWRGADVLVFNTAHWWSHHKTKAGVNYYQEGDHVYPHLDASTAYLKALTTWASWVDHYINPRKTRVFFRSSSPSHFSGGEWNSGGHCRESTLPLSDTRVRPVPEINMILEQVAQQMKTSVTILNITNLSGLRIDGHPSVYGRKAVVGLTASSVQDCSHWCLPGVPDTWNELLFYHLVSSQQKGVTS

SEQ ID NO: 161999 - protein, 917 aa, Oryza sativa
  Clone ID: PAT_MRT4530_61131C.1.pep
MKMPLLLLIAIVVVSLSHGNGEQTDLTRETFPAGFVFGTASSAYQVEGNALQYGRGPCIWDTFLMQPGVTPDNSTANVTVDEYHRYMDDVDNMVRVGFDAYRFSISWSRIFPSGLGKINKDGVDYYHRLIDYMLANNIIPYVVLYHYDLPQVLHDQYKGWLHPRIVRDFVRFADFCFKTYGHKVKNWFTINEPRMMANHGYGDGFFPPGRCTGCQPGGNSATEPYIAAHNLLLSHAAAVRTYRDKLFRRGRLASFSILYGMSHSPTKKRITQLHIEPGSLPLAGDTSYTVHQSLLLHGVRMKVELNFHLKLLLETMQNAVKERLPNFTREQSEMIKGSADYIAINHYTTYYVSHHVNKTSISYLNDWDVKISYERNGVPIGKQAYSNWLYVVPWGIYKAVMHVKEKYKDPIIIIGENGIDQPGNETLPGALYDFFRIQYFDQYLHELKRAIKDGARVTGYFAWSLLDNFEWRLGFTSKFGIVYVDRSTFTRYPKDSTRWFRKMIKSELKHRERRVEESKQEKKEREMAATASLKSSLLLPSPISDFSSAALSISTQARRRSWQPRGARMQVAAAADSKNILVMGGTRFIGVFLSRLLVKEGHQVTLFTRGKAPITQQLPGESDAEYAEFSSKVLHLKGDRQDFDFVKTSLAAKGFDVVYDINVLSRDFSRISAHGFTGREAVEVAPILDALPNLEQYIYCSSAGVYLKSDLLPHFETDAVDPKSRHKGKLETESLLETRDVNWTSIRPVYIYGPLNYNPVEEWFFHRLKAGRPIPVPGAGNQITQLGHVKDLATAFVLTLGNPKASKQVFSISGAKYVTFDGLARACAKAGGFPEPEIVHYNPKDFDFGKKKAFPFRDQHFFASIEKATLELGWKPEYDLVEGLTDSYNLDFGRGTFRKAADFTTDDMILGKKLVSV

SEQ ID NO: 162000 - protein, 85 aa, Oryza sativa
  Clone ID: PAT_MRT4530_61132C.1.pep
SNDRLDVPELRRIDPLQFDHDRGELTGEELQRHEARQLIRRWMCRFQRGDPERDLDGERRRRRLCAARPHRRRRLRVGAPHGGST

SEQ ID NO: 162001 - protein, 275 aa, Oryza sativa
  Clone ID: PAT_MRT4530_61133C.1.pep
LYSATEPYIAAHNLLLSHAAAVRTYRDKYQAIQKGKIGILLDFVWYEPLTDKEEDHAAAHRAREFTLGWYLHPITYGHYPETMQNAVKERLPNFTREQSEMIKGSADYIAINHYTTYYVSHHVNKTSISYLNDWDVKISYERNGVPIGKQAYSNWLYVVPWGIYKAVMHVKEKYKDPIIIIGENGIDQPGNETLPGALYDFFRIQYFDQYLHELKRAIKDGARVTGYFAWSLLDNFEWRLGFTSKFGIVYVDRSTFTRYPKDSTRWFRKMIKSEV

SEQ ID NO: 162002 - protein, 89 aa, Oryza sativa
  Clone ID: PAT_MRT4530_61134C.1.pep
MRSCSEQEAAQSAGQGRGDGLNLGGEWMRRPGRFLASYSEMEKRLSPSFEESSRECAAKESWMQFVSKADFVRNSSFTPLRNSFPPDDS

SEQ ID NO: 162003 - protein, 96 aa, Oryza sativa
  Clone ID: PAT_MRT4530_61135C.1.pep
QSQSGPEQNEHSRTCHVGSSMNLLHVLAVTASSVHSFRDPGTLLIQLEMGLIIIIMIKSLSLTSVHPYPGCEKVHSSIIPTWSMHPLNPCSLMIST

SEQ ID NO: 162004 - protein, 54 aa, Oryza sativa
  Clone ID: PAT_MRT4530_61136C.1.pep
FSEHRCRHRSHQYLCTGRSAASPRISAVPTTESGRAKAPVAEAFRRTPYGRQPK

SEQ ID NO: 162005 - protein, 61 aa, Oryza sativa
  Clone ID: PAT_MRT4530_61137C.1.pep
MADQIEHLHLPIRGLNLHIAQVGKDELGTVVFLHGFPEIWYSWRHQMLAAAAAGYRAVAPD

SEQ ID NO: 162006 - protein, 250 aa, Oryza sativa
  Clone ID: PAT_MRT4530_61138C.1.pep
MRGFPVPVTSWSSAALLGRSISSARDAAEASSPITAAEMVRVAKEVANAADACGVSGKKLLEAAEALSRSDTDAEPRRRAAERIFDAASMVAKEADASGASGLSDAAQNLTCATYAFSVAASGWGSLPESSTSGRDAGDLLTEPLLGSCQDKNEKMTGEGKDFSEMRNSAADSDPLQQSEIKESSLFGKCKELLNYGFLGGPALLPYLGSGLRKTVSPCSPSVFHYIFSSWWICIVVVDELFVRIIDCSQ

SEQ ID NO: 162007 - protein, 225 aa, Oryza sativa
  unsure (1)..(225): unsure at all Xaa locations
  Clone ID: PAT_MRT4530_61139C.1.pep
VFTKKLLDVYRLXXPAEHELVNYYLKHKLLGDDPRVHVIPVIDLCDEEPWNVPVILASSSAIRFGDPDWFFFSPGDFKYLKSKRFNRTTKCGFWKATGKDRDIRTGDTDNTVIGTKKTLVYYQGRVSXGVKSNWVIHEYHAVTFHENQRTFVXCCLMKKPXKTTEGGTDPLICDEGEPSRSMISDYENQPTAEGIASEGTFTGIEAIFQATPWAENCFSPKQQSL

SEQ ID NO: 162008 - protein, 547 aa, Oryza sativa
  Clone ID: PAT_MRT4530_6113C.1.pep
MPADHMEKTVPTVVPARPPNSEGERKSTNFHPSLWGDFFLNYEPPTAPQQACMKGRAEVLREEVRTLLKGLKEVQKILDITMAIQRLGLDMYYVNEINELLHFVYSSDYNDKDLNLVSLRFYLLRKNGYNMSSGIFLSFKDNEGNFIVDDTRSLLNLYNAANLRVYGEKVLDEAATFTISRLEGVLESSDSILSTEVSFALEAPIFRRARIVEMRNYIPIYEIEATRNETILEFAKLNFNLLQLLYCEELNKITLWWKELKVKSNLSFSRDRIVEMYFWMNGALYEPHYSHSRIILTRVTAFMTIIDDIFDTYGTTEESMLLAEAINRWDESAIGLLPEYIRGFYAYLLKTFDSFEEELGPEKRYRLKRLVQAYTKELKWRDEDYTPKTLEEHFEVSMRSSGGFTLAAASFVGMDDIATKDIFEWILSYPSLFKTFDIFVRLSNDIVSNKREQTGDHYASTIQCYMKEHGTTIHETYQRLRELIEDSWKDMVEHCTNPIDDQPLIVPQTVVNFARTVTTMYTHGDAFTSSHTIKEMISSIYVVPIQV

SEQ ID NO: 162009 - protein, 100 aa, Oryza sativa
  Clone ID: PAT_MRT4530_61140C.1.pep
GATTHAPRRQLVASCAAALVFFLVFSAGFFKMTAYVPEKKNAFPEMRNSNKNFPLGATSQLSYWGLTSWPEKILINHTNIFPLFPIHHWNNYANGFFSTG

SEQ ID NO: 162010 - protein, 576 aa, Oryza sativa
  Clone ID: PAT_MRT4530_61141C.1.pep
MVVQSAIKWTFSDTRSGDASFWAVLRVFVAGEKPADRPPGRRRSELGPGETTLPLGAPRELARPPISIPAGSGRWRAAAPSSPFTVADVEAKMENRKNTNKPTLSLLGLALICTYPVSSLDDSGITVESSAHVSCQGQAPRLILLSVWNPKLALGLGFFQVPADFVFPGFSCLGEPCEADAKDEEETNLQTIPPNLNEVNPLASEGESGPVDNTKASDGIIDLEGQDQVDGEPTTMDSTKVPDVIIDLEEGQVEDMDLSDDDVVVKHQYLDASIQSSTSVADVQTLHGVSVELDKDVVDDEDKPSGITIFGDEDPKEEYEEGELPDQALRLSTQSAIIPQIREKNEIEALLVLIVIQDITPMTTDQQAPVMEGLTQIEDGEALQDMKICQPMMVPGHRMLTQADSTQASTARAQRRHRAIPETGMIGTTTTGGEQNMWLICTISTAEESYISQLRIKNLAFRFVSVPVDLILQSTRNKDKETWLFGKRGRRNRARQPLAAQLGPGDDDGEEVEDEEDFFFVSTPYLSTPSWSAAAAAAGASPRKRGDHQAALARLRAAVLYRAGARAVKAARPSGG

SEQ ID NO: 162011 - protein, 886 aa, Oryza sativa
  Clone ID: PAT_MRT4530_61142C.1.pep
MAQRLLHGVMEAKVLEAKLSSVSSEASDYGHGQPKLAAYSKEVDSLNEMEDLRLTLESQKLPRTKLLSLIMKLPFIFTCQRFDKSTDQAHHGDGKCLVYATIGMDAARVARTRATDQPQWTEEPLHVYCAHDASDIVFTIVTTGGHRDGDPEDGTAEEVVGQAYLPADDVGGGKEIDRWLPLCDEKRKPLEGLDKVHVQLRFTDVMSDVTSRWGKGVDGPVPPPPYTGLPRAFFGQHRGCKVTLYQDAHVAPPLAGSRCWEDVFDAVANARSLVYIAGWSVSTDVALVRDPRRPAQTLGHLLKSKAGERVAVLLLVWDDRAATGLGAARRDGRMGAARGEDTASYFRGTGVHCVVCPRDAVFTHHQKAVVADGPRGLVAFLGGIDLCGGRYDTQEHPLFRTLATAHRDDFHQPSFPGASVAKGGPREPWHDVHCRIEGPAAWDVLDNFEQRWRGQGGAGGEALLARLPRSSAAREAVEQDNQEWHVQVFRSIDSRAVDRFPDTAGEAARCGLVTGATGDTVERSIQDGYIHAIRRAKYFIYIESQCFLGSSYGWNRDVAGGAATAKNAAAAAVAPHTIPKELSLKLASKIRSGDSFRVYVVLPMWPEGVPESATVQAVLDWQRRTMEMMYKDVAAALAARGSTQNPREYLSFFCLGNREPYVPGEHAPPERPELDSDYMRAQQARRFKINVNANIMIGRREYIIWTRDIDKIWTFDKNTMIKTKPLTIDRHDFFAVDDEYIIVGSANVNQRSMDGGRDTEMAMGAYQPRHLDTPNSWPRGQVHQFRLALWREHLGQAAFQAAAAAGDDMIYPSRHGCMSRVNQAARQHWDMYASDKFQGSLPGHLMAYPVGVGDRGELWEAVPFFPDTNAKVFGCSSDELPPVLTT

SEQ ID NO: 162012 - protein, 191 aa, Oryza sativa
  unsure (1)..(191): unsure at all Xaa locations
  Clone ID: PAT_MRT4530_61143C.1.pep
RRRPRGIAADDAPEDVVRDRAGDGRLLQLQRRGVXDLQAIPDEHQERTEQLHIHGLLPRHHLRQRRRHRWRRSDDGGAXRRRAEQPVXATRSSFRRVHDMYSSILRGIKSSHRKVARKLKVVRAIRKISQECLVVACGAAAAASVALAAHRLFFGLLVGCPXPLLPAPLRPPPLLPATPAREREREDEREG

SEQ ID NO: 162013 - protein, 369 aa, Oryza sativa
  unsure (1)..(369): unsure at all Xaa locations
  Clone ID: PAT_MRT4530_61144C.1.pep
WWPCSPSSPPASPSPSPARTSPPSSSLSRGCSTRRPTVRRRASPPARPRWWSCSPSSPPASPSPSPARTSPPSSSPSSPASPSPSPARTSPPSSSPSRGCSVRRPTPSLPAXVGSSRPSSSPSPPPPTXPSPPPPLSPEPXPPPSPSPPQPPSQAKPTPGATLPPCAALSPPPPATSFPARAPPPRPRRPARRPPLPSPPPPPAASPTGARPPHXPAQLPHFPPLTGAAPATHCIATLALPPPPSSPSTRPSPPSTRRPLAALRSPPSRERPRRRGPLRAPPTAAFFPLPPSSSLPTSPAILPRRAAVPPPAAPLXPEPPAPQPPLPHQRRSLSPLSFPPPPPCARPPSPAPPEPSLSRVHEPELFVQP

SEQ ID NO: 162014 - protein, 163 aa, Oryza sativa
  Clone ID: PAT_MRT4530_61145C.1.pep
MQKLAKNPLSKPRYAYQSCAFKAATPSCCHRYRRLPQCHVAGLRRRYEMCEGWEQGGPYRGRSDGDYQEAAAVSRPPICVARGGGDGDGNGGAEERRRARGGEHERLRGGSAVTEADTESAAPAAEEAGGGGGGGRRRGSLGVARRKSRRHFPLEREFGSGGN

SEQ ID NO: 162015 - protein, 190 aa, Oryza sativa
  Clone ID: PAT_MRT4530_61146C.1.pep
VQPGETISFDRSMECLLGLLKVRVMRGLNLAICDPLTHSSDPYVVLRHGSQKVKSSIRYHSINPEWNEELTLSITNMMLPVKIEVFDKDTFTKDDSMGDAEFGILDFVEIAKQDHSHLGDGAVMKTIHPDKEENCFAAESHITWKDGKVSQDIVLKLRNTDTGEIILHLQWVNIPGMYKFWNTFSVCHSK

SEQ ID NO: 162016 - protein, 59 aa, Oryza sativa
  Clone ID: PAT_MRT4530_61147C.1.pep
MVTMAELRATPVTRSLATGREAAAQARQQIRRCGKRELGSGLLRCSSVAFLPYRHRAAG

SEQ ID NO: 162017 - protein, 43 aa, Oryza sativa
  Clone ID: PAT_MRT4530_61148C.1.pep
MAQLIEGDESWLWHRYGLGQRKNVSREWDPDQTRHARMDAIVN

SEQ ID NO: 162018 - protein, 129 aa, Oryza sativa
  unsure (1)..(129): unsure at all Xaa locations
  Clone ID: PAT_MRT4530_61149C.1.pep
MYNNYGNSPGMQMPPIGQMPPAAGQMPSANPQPGQFGNPFYGASSGLIKTGLGAYGEKFLGSSSEFMQSNINRYFSNPQYYFHVNDQYVRNKLKVILFPXLHRGHWTRISEPVGGRLSYKPPIYENIFL

SEQ ID NO: 162019 - protein, 69 aa, Oryza sativa
  unsure (1)..(69): unsure at all Xaa locations
  Clone ID: PAT_MRT4530_6114C.1.pep
TAAVRSMKLGSQRLQVSTQGLGSIGMSAFYWTSTPEGXYGALIHHAATSCMTYLKTSGMTGSHSNEIIL

SEQ ID NO: 162020 - protein, 314 aa, Oryza sativa
  Clone ID: PAT_MRT4530_61150C.1.pep
MAPSFDFAASILLCAEDNTAILDLGEESEEISWVVGVDASLGDLSMDFPLQSDDCIEALLGREEQQHIPMEGYLQRLLLQPDGLDLVAVRSDAIDWIWKVHELYKFGPLTAVLSVNYLDRFLSVFDLPQEEACMTQLLAVASLSLAAKMEETVVPHPLDLQVCDAKYVFETRTIKRMELAVLNALKWRMQAVTACSFIDYYLHKFNDDDTPSTSALSRSVDLILSTCKVAEFLVFRPSEIAASVALVALEEHETSMFERVATCYKNLKKFLGNDDDDGDEAAAAVVAAVRWTGAAEDRFTVSLSGEDFVWPCGS

SEQ ID NO: 162021 - protein, 200 aa, Oryza sativa
  Clone ID: PAT_MRT4530_61151C.1.pep
MADSAAAASSSLPRSLASRRPLPSSPLRGGRPRSPRRCRFGSRSLHRLRARAGKDDPEDLYGPYPWDQSLDLTTGLDIQWVPEDRVTLFTSDGLVQIGGSLVPRRITPSEGLDMGRRLCIFGFCRSIEMLSDVVEDTVLEHGGEVVTAEKASKDGLQEKLTMSVAVPLLWGVPPASETLHVAVRSGGGIVEKIYWQWDLF

SEQ ID NO: 162022 - protein, 759 aa, Oryza sativa
  Clone ID: PAT_MRT4530_61152C.1.pep
MEMLQSVINIREAVSTMINFGEASKLEKDLSCLPVSLDKARAVIYRGEWGRFKNKDLAALLWHLKDATYDAEDLLRESNDQVLWQKMEDADRSLAGQFFSSSLNVVQTLIGGSKTRIKEVQDKLNKAVADLEGELNSVGLNFEIVQHMPVTSSVIGVPQVFGHDEERDLVIEKLGVMIGRDNERDLVIEKMGVPLTRFVAARAKGKRAAGGTVAKSASTPKRLKGESSRAGPRISQSKCIGNVSILPIFGIGGVGKTTLAQYIYNDERVRSHFRMRTWVCVSDLFDKKRIIEEIFKSITKKDSSQHSSNDLQEELKKKLKSQKFLLVLDDIWSITNREWEELNALLKDGLKGSMILVTTRLQNVANLVCTNNFEPFELKGLDEDKFWNFFKDCAFGQKRPADSECNNLHKIGQSIASRLCGSPLAAKTLGRLLNMELTSLVKLVSGERTRPEDIGIRYLDDLRSRFLLQIDPKYPDESRYVMHDLIHDMAQSVSVNECLLLQDLSSRNEGRKLHAVRHMSVQVADESLKSELRDIQYLNKLHSLRLGINLKVEITWFNQLSNILFMSLQGCKLVKLPESIGELHSLRYLDISHSCVKELPEKFWRLYSLQVVDARRSSLRAISPDVTKLINLRRLALPTNCALKLSVLTRLGNLSRLRNLKYFTVAPRNGRKIGELKDMDKLSGTLTIKSICNVKSKEEASEARLVDKQYLKTLDLWWRDSDGYNVMSSENGVLEGLCPPRRIECLKVENFRGDSFCSS

SEQ ID NO: 162023 - protein, 117 aa, Oryza sativa
  Clone ID: PAT_MRT4530_61153C.1.pep
TACSTRASAESPRARAPFFFFFFFFFFFFGGFITFFGGFFFFKKTFQPEMKLSAKNEGSHHPEKKGPPSHRGGPNREQEKNQRPVFKPHQKKLGVIWGPGNLVPPPKFKGPPGRPSQ

SEQ ID NO: 162024 - protein, 349 aa, Oryza sativa
  Clone ID: PAT_MRT4530_61154C.1.pep
MPPPPRCAATTAHHSLLGSPTCLARPRRRCCPVRAAVAVQAEAQAKDSPLALAQAHETRDKLKAAHSELAEEGAVEIVIIKTTGDMILDKPLADIGGKGLFTKEIDDALLQGRIDIAVHSMKDVPTYLPEGTILPCNLPREDVRDAFICLTASSLAELPAGSVVGSASLRRQSQILYKYPSLKVVNFRGNVQTRLRKLKEGDVHATLLALAGLKRLNMAETATSVLSVDEMLPAVAQGAIGIACRSSDDTMMNYLSSLNHEDTRLAVACEREFLSVLDGNCRTPIAAYASRDKDGNCSFRGLLASPDGSTVYETSRTGPYDFDIMVEMGKDAGHELKAKAGPGFFDSLQ

SEQ ID NO: 162025 - protein, 160 aa, Oryza sativa
  Clone ID: PAT_MRT4530_61155C.1.pep
MPPAPRCAATTAHHSLLGSPTCFARPRRRCCPVRAAVAVQAEAQAKVSLIRIGTRGSPLALAQAHETRDKLKAAHSELAEEGAVEIVIIKTTGDMILDKPLADIGGKGLFTKEIDDALLQGRIDIAVHSMKDGPPYLPEGAILPCNLPREDVRDAFICLT

SEQ ID NO: 162026 - protein, 50 aa, Oryza sativa
  unsure (1)..(50): unsure at all Xaa locations
  Clone ID: PAT_MRT4530_61156C.1.pep
DDLQCEMEGVEFSSCEGFTLFGFFVSLLLXLVLLFLLHTHCVSLLLCEPL

SEQ ID NO: 162027 - protein, 98 aa, Oryza sativa
  Clone ID: PAT_MRT4530_61157C.1.pep
MARHVVEVMALPRCGSPSPLPGACGPSPHDRIHWKLEQEMVVAVEPWRQAGSILGRPTNEGDDDLDLTHPDLRPWSAKVGEGVASRYRGWERSSGAVR

SEQ ID NO: 162028 - protein, 74 aa, Oryza sativa
  Clone ID: PAT_MRT4530_61158C.1.pep
NFAGWLGDDLCLRDSATVMCSNDLNDAAPGDDDVGDAYKIVFLLLFWRNSPEVSCWGPAPSSHSSPRKDTYGVF

SEQ ID NO: 162029 - protein, 192 aa, Oryza sativa
  unsure (1)..(192): unsure at all Xaa locations
  Clone ID: PAT_MRT4530_61159C.1.pep
PLSPLLTFTSLEPYPLPGPWHLVLLRVRTPPKSRIQFPSSLRPSLPLLPAPSSLLHAAPASPASPASPCPPSCGHADAAAEGYEQIDLMREADLVEGFGSPAAFMAVAERYMALIQETRAKXEEACCLAVLIQEAAATATAGGSDSDATAASEVCKAVDMMHKAEAIDGCGAVGGSDADYSSLFLVLLCSCL

SEQ ID NO: 162030 - protein, 100 aa, Oryza sativa
  Clone ID: PAT_MRT4530_6115C.1.pep
HLHVSLSNVMSACVKIHLCHMIPQVYHQCQFCYAHKLDQPQLRRLSALPIGMASRRAPSASTVASSAQSARPPDAGKRRREPAAVLPCIFTRVVSSAYDV

SEQ ID NO: 162031 - protein, 75 aa, Oryza sativa
  Clone ID: PAT_MRT4530_61160C.1.pep
ATRPRLRKDCSSQGRAESHPEKETPSWLASECDIIAMASGASQNCVLVHTRVKNVWTSQDGGKEISIACNIIENE

SEQ ID NO: 162032 - protein, 187 aa, Oryza sativa
  unsure (1)..(187): unsure at all Xaa locations
  Clone ID: PAT_MRT4530_61161C.1.pep
MAANQPAGEALAANISAMSRPEMYDLMSQMKVMIDHDQERVRRMLVDNPDVTRALFRAQVVLGMVKAPKTAQSSDKAQPAAVQATPSSSVKPTVQDHSSFPQPQLPSSQQNIQPSGPFSSGPSNPASSLXPPSYVSKSTTISTSERLSYPSNASHINNSDIPASKCYPTSSCFITVFKYSITYANSS

SEQ ID NO: 162033 - protein, 101 aa, Oryza sativa
  unsure (1)..(101): unsure at all Xaa locations
  Clone ID: PAT_MRT4530_61162C.1.pep
SKVHHWSLNLDCCIIPVPKLANRPFRFSNLFDCVILLPKLADHSFXSSNLFSCVTPVPKXGWYKNFISKIFRDRGDTTEQXGGPKLMICKFRDRDDTVEQV

SEQ ID NO: 162034 - protein, 137 aa, Oryza sativa
  Clone ID: PAT_MRT4530_61163C.1.pep
LGCSRSTTSILARFHSSLVTVACSFSYFLNHALTLPEAGRGWSIRRHVLGRLVGSKLNRWQLCMCLCRRRWCLVPLTWVACRWLPAPELASCAMAVPWRGFDVRGWHMVALWSAARSQHVKTDNIRAVSTPRVGHRH

SEQ ID NO: 162035 - protein, 79 aa, Oryza sativa
  Clone ID: PAT_MRT4530_61164C.1.pep
MPTSLGHQGARHRTLLQNGSSFEKGLTALSCHQREWFCIAGEHIDLAGEERGIGEENVVIARKGIKGEGKDIGLVLIGY

SEQ ID NO: 162036 - protein, 197 aa, Oryza sativa
  Clone ID: PAT_MRT4530_61165C.1.pep
MERGGPCDGLCRFRIHLGMRGDCPSPAGDGGFVRAVEDACGVVFPLQFKSRLSSSGSKGGGSGGASLGKVRFVTLGSGCSYGDGGRAIGTVDPASGRQRGQRRHRHPLLTANADNDDEATLPPSPPRRQGRHRLMRIRRSRAGVDGGLSIRRRRRRWAAGATDPGLVTTVGGGSDGSGAGNDVRLARAAGIRRSGGS

SEQ ID NO: 162037 - protein, 106 aa, Oryza sativa
  unsure (1)..(106): unsure at all Xaa locations
  Clone ID: PAT_MRT4530_61166C.1.pep
VTHDSVTSPVITQPQCHQSRYLSTTLSVTQACHTSLRLRAGPARPDGWWAVPGREAQPMGRXARAVPARWLMGRAWAGRAFWPSIPPTSPPMNTSSSHSTSCPVIA

SEQ ID NO: 162038 - protein, 207 aa, Oryza sativa
  Clone ID: PAT_MRT4530_61167C.1.pep
MERGGPCDGLCRFRIHLGMRGDCPSPAGDGGFVRAVEDACGVVFPLQFKSRLSSSGSKGGGSGGASLGKVRFVTLGSGCSYGDGGRAIGTVDPASGRQRGQRRHRHPLLTANADNDDEATLPPSPPRRQGRHRLMRIRVGADNRWWSSRSRAGVDGGLSIRRRRRRWAAGATDPGLVTTVGGGSDGSGAGNDVRLARAAGIRRSGGS

SEQ ID NO: 162039 - protein, 661 aa, Oryza sativa
  Clone ID: PAT_MRT4530_61168C.1.pep
MGARWGPRRATVGPHLRDALRHLLFVFLVLLQAQAGRGGATLNGEGMALLELRERVEADPHGALRDWDPADATPCRWSGVHCFDGKVEILNLTGRELVGTLAPEIGRLQLLKSLILRNNNFRGKIPKEFGGLTALEVLDLSSNNLDGTIPEELMAMPLLKQLSLHDNQFQDDISSLHIQDISDEQAGCLSRKLGCWDVGYFGLGEPHIMQNLQSFASAVGRRLLGEVGNLPALSGNYAKSSGPVNSEEIQRAIDVLSLGSGSFSAFPNSEAEVLESAVNTDAAAMQSGAANQSTDEVSGSKHSKWAYFMIIPAAILLISLIVAPILVWRKRGRAAIGPWKTGLSGPLQKAFVTGVPKLNRPELEAACEDFSNIINTFPSCTVFKGTLSSGVEISVVSTAILSLKEWPKSSETCFRKQIDTLSRVNHKNFINLLGYCLENQPFMRMMVFEYAPNGTLSEHLHLKEFEHLDWAARMRIIMGVAYCLQYMHHDLNPPVAITDMRSDTIFMTDDYAAKIADVGIWKEVAIKAKTAKEDSSSRSECPPDIASNVYCFGTLLIEIISGKLPEADDQKSMCNWAAEYLKGKSYSKLVDASLKEHNANELEAVCEVIQECIDPDSDQRPTMRDATRKLRQALNISPEAATPRLSPLWWAELEILSAEAT

SEQ ID NO: 162040 - protein, 733 aa, Oryza sativa
  Clone ID: PAT_MRT4530_61169C.1.pep
MASPPASASRPLDPAWVHAKVIGNSKNALACLHCGKKIGGGGITRFKYHLAGITGQVQACKKVPNDVRRQMKQLVNEHRSRHDTRDGHYSGFEEDSSDAVLSNGSSGVQLRPSRKRRTGCVSPQAAAGFERTGYVSPQAAAGFERIGYISPLAAAGCERTAYVSPQAAAGFEPSNDALLVSRDLVQHSMDGVEVPNDLLHNARVAMARWWYDANIPFSAAKSPFYQPMLDAIASAGAGLKGPLYHDLRGPLLKHLTDDIREYLHDMKKEWNACGCSLIADRKKNHGESSIINFFVYCRRGTMFLKSVDTSAEKANLLEIFDQVVREVGPENIVQFITDLDPRYKTTVKVLEERKEFTGGRDLCRPAISRFATHFLSLQCILKFEKELCQMVTSNKWVKSTYAKGGVGKEVAAMILNAHFWAQCKHVVKVTEPLLCVLRLVDSNEKPSMGYLYEAMEKAKELIRARMMHKVSLYGPYVRVIDARMEKQLNSPLQAAGLFFNPGIFFSPTFKMQSYAHRGLVKTISCLVPDDDIQDKIFLQLEEYKKGTGDFGLPIAIRQREKLDPVAWWDNFGNGTLKLQGLAKRVLGQCCSATGCERNWDIFHHIHSRKISRLERSRLSDVVFLQYNQKLRERNLHKHRDAIDPISIDNIDVLDEWVSEEPSLLCRDDLNWERIDAPFAEPTSEDEEFVAIDDEEAPTASLSWPAAAAEDSYCPPPDQDPYQYVTQEDGILPF

SEQ ID NO: 162041 - protein, 67 aa, Oryza sativa
  Clone ID: PAT_MRT4530_6116C.1.pep
LLDTYMTELLDNGRWGVLERIIWLQEKKEPARSCCFSSADADPIKSWREYRGYVHPQVLPYRHFSRR

SEQ ID NO: 162042 - protein, 93 aa, Oryza sativa
  Clone ID: PAT_MRT4530_61170C.1.pep
VLMIVPPPEPISTGCQWAKCVLPRDLYGLVLRCEDTSNIDVISGLASWVLELRGAAAEEVLFKCFDLEFVSWNVRIEKNVQMLGMIKVSKNRC

SEQ ID NO: 162043 - protein, 61 aa, Oryza sativa
  Clone ID: PAT_MRT4530_61171C.1.pep
STRLLRNRVSAQQARERKKAYMSELEARVKDLERSNSELEERLSTLFMPSRINSGRHIIVS

SEQ ID NO: 162044 - protein, 224 aa, Oryza sativa
  Clone ID: PAT_MRT4530_61172C.1.pep
MEEKKKEKDKQFSTQVIHNVISVSGSCVWGLEGRRKLSWDVGGQEKESYRHGAVMRQGEREVFGFSVFYLIKSRALESAMVGSAAFFLHTRCLVLEEGQHLGSSTTLKPTEALCSSYRPSCLHGSIPLSQRSNTTAAALQIVLAAALEFTPQSQSSTSAATTVAAEIVHHVTLQPACHCTMVISCAKGTVGRGCVEEEENIRARGISGSSSKGVGVTEINFRCY

SEQ ID NO: 162045 - protein, 55 aa, Oryza sativa
  Clone ID: PAT_MRT4530_61173C.1.pep
IHGGPLVRFPRCLHFWAYVSVSCGLELGLVACCINKVSIQSIKNVCTPLKKPTQK

SEQ ID NO: 162046 - protein, 291 aa, Oryza sativa
  Clone ID: PAT_MRT4530_61174C.1.pep
MSSRRDVLAVVLVAALLPPALSRGLWLGHHGLGHGHGRWRAPHVGGHGQGQGPQQHAPLGGGGWSSAHATFYGGGDASGTMGGACGYGNLYSQGYGTNTAALSTALFNNGLSCGACFEVRCDAGGGGSHSCLPGSVVVTATNFCPPNNALPSDDGGWCNPPRAHFDMSQPVFQRIALFKAGIVPVSYRRVACQKKGGIRFTINGHSYFNLVLVTNVGGAGDVHAVAVKSERSAAWQALSRNWGQNWQSAALLDGQALSFRVTTGDGRSVVSNNAVPRGWSFGQTFSGAQFN

SEQ ID NO: 162047 - protein, 326 aa, Oryza sativa
  Clone ID: PAT_MRT4530_61175C.1.pep
MDPYKYLNIRFNPDGSLTRNGAARLLPPAPAGEPVDGVNGPARRIVHSNDAPLNDANGTTVRLFVPSGPCVGADGGGRLPLVLYFHGGGYVLFRAASEPFHNTCTALAATIPAVVASVDYRLAPEHRLPAAFEDAADAVRWVRSYAAGCRPLFLMGSHAGASIAFRAALAAVDEGVELRGLILNQPHHGGVKRTAAEESSVDDRVLPLPANDLLWELALPLGADRDHEYCNPETMLAGVDAARLRRLPPCLVLGRMKDPPRDRQRTLVEALQKAGVTVEAKLDGAGYHAMELFKEDRAAEFIAQVTDFVRRHTGAGSDVHAGRSRL

SEQ ID NO: 162048 - protein, 114 aa, Oryza sativa
  Clone ID: PAT_MRT4530_61176C.1.pep
NSRRCSTRPRRRCCSRRRRAVPVVVRAVRTVQAAKPGAGTLLQRLLQSSSTACRLWVASLVAWRGLLATSLQVSWLDAAGFHWSGAPPFNPGLVKHDEELLYCVIIWEPLSMNY

SEQ ID NO: 162049 - protein, 141 aa, Oryza sativa
  Clone ID: PAT_MRT4530_61177C.1.pep
TIVVIDVSDNAFYGAIPQSIGDLVLLSGVNMSHNALTGLIPSQLGMLHQLESLDLSSNDLSGEIPQELASLDFLSTLNMSYNKLEGRIPESPHFLTFSNLSFLGNMGLCGLQLSKACNNISSDTVLHQSEKVSIDIVLFLF

SEQ ID NO: 162050 - protein, 59 aa, Oryza sativa
  Clone ID: PAT_MRT4530_61178C.1.pep
HYIRATTYDARLQKLGSRCIGRPFFFFQDMADGNANLNYEATGLDTTSTQFIPINYTRR

SEQ ID NO: 162051 - protein, 288 aa, Oryza sativa
  Clone ID: PAT_MRT4530_61179C.1.pep
MVEARMPPGFRFHPRDDELVLDYLLHKLAAGGRGGGVYGGGGGVAIVDVDLNKCEPWDLPDAACVGGKEWYFFSLRDRKYATGHRTNRATRSGYWKATGKDRSITRRSSISSGEPSSSAAAAAVGMRKTLVFYRGRAPKGRKTEWVMHEFRLEPQPLHLKEDWVLCRVFYKTRQTIPSPSSEEAVTLPNELDLPATPSLPPLIDAYIAFDSAPTTTPSMVGSYEQVSCFSGLPALPMKGSISFGDLLAMDTSAEKKAIRVLHNSNTAKLELSPDWGQESGLSQMWNPQ

SEQ ID NO: 162052 - protein, 50 aa, Oryza sativa
  unsure (1)..(50): unsure at all Xaa locations
  Clone ID: PAT_MRT4530_6117C.1.pep
GAQHASKVLKFENALIRGLFSSSWLGFFPNPSLPNKXHYELWNHSSLSRG

SEQ ID NO: 162053 - protein, 51 aa, Oryza sativa
  Clone ID: PAT_MRT4530_61180C.1.pep
VNNVLQINAGNTPKHNTTVASINTTSIQAQAKVAAAVALIILTLSKRPRVR

SEQ ID NO: 162054 - protein, 46 aa, Oryza sativa
  Clone ID: PAT_MRT4530_61181C.1.pep
MTVGRCHFSPRLRRLRRGPGEEKQLPRRPRAPEPGKARRPPGGFQG

SEQ ID NO: 162055 - protein, 183 aa, Oryza sativa
  Clone ID: PAT_MRT4530_61182C.1.pep
MDSSSTSGRKGGGLLLSPPPAAVVVAVAVLLSAAEAATEEPCYPRLFSFGDSLTDTGNFAFIYGNDSREPALRPPYGETFFHRATGRFSDGRLVVDFIADALGLPFVRPYLSGRTAGDFACGANFAVGGATALSPAFFRARGVPMADIVPLDMEMKWFRDLLKLLCPGDLPVCTGLMNQCAVG

SEQ ID NO: 162056 - protein, 41 aa, Oryza sativa
  unsure (1)..(41): unsure at all Xaa locations
  Clone ID: PAT_MRT4530_61183C.1.pep
VRCILAPLHXXXXSXFSVSKLXRXLSSVSXKPXLLXCKXXR

SEQ ID NO: 162057 - protein, 35 aa, Oryza sativa
  Clone ID: PAT_MRT4530_61184C.1.pep
SLSTFFSQKKIILYQHKHILVNGFVELEISSSKKS

SEQ ID NO: 162058 - protein, 75 aa, Oryza sativa
  Clone ID: PAT_MRT4530_61185C.1.pep
MAAATMALSSPVMARAAPSTSSALFGEARITMRKTDAKPKPAATPVRPGYCDWQVLYLEPLCNKHDRFSHQGLMP

SEQ ID NO: 162059 - protein, 46 aa, Oryza sativa
  Clone ID: PAT_MRT4530_61186C.1.pep
GVYRPFQLDSSPRSPLNPFCISPELLSPESMGVKLKPLKTRVSLKV

SEQ ID NO: 162060 - protein, 207 aa, Oryza sativa
  unsure (1)..(207): unsure at all Xaa locations
  Clone ID: PAT_MRT4530_61187C.1.pep
MREMVCKDHHLSMRPGHPHAKIRDLPPLPPPPPAPAPAALDHDGRSRLWIWVGRGLPPPPASSSSSPTXSSSPESETPPDPREGGPPASDPRRPAIARCHPLPPLTPGAGCSLPLPLLAPXPPPPPDPREGGPYAPDXAPPGRRPPPLSPGAGGSHPQPPLAPTASSSSRPTPPAARPRRPPPAPICRHRSLPPPPPRRSPRRPPPA

SEQ ID NO: 162061 - protein, 368 aa, Oryza sativa
  Clone ID: PAT_MRT4530_61188C.1.pep
MGNILRCFKGDDDGGDHYPYYKPTSRPHYQPPHYHGQPAAPPAPLQQQHLGPHGVTPSTVGVAALAHDLLNFESTSMVPDGLSQHVVSSRKAQVKWYQKLLEAYKNTTPPPKTPANAAQLIARALNMIQRADLEGILEFYNLPIPSLPTASSNYQPSLLPEGVQFVLNTLPVYDKCIGDGDGFTAYVPTTDPRESANVPLEVHELVIARTQARKCRDYQSADALLSSLDEAGYKIISCSDDEVLARKYRIRMRGIDAPELKMPYGKESRTALVKLIGGKSVKIYVYDLDQFGRYVGDIYCNNLFIQEQMLKNGHAWHFKTYDKRPEFARWEREARAANRGLWASGNPEKPWDWRRDQRNARQDAIQVY

SEQ ID NO: 162062 - protein, 39 aa, Oryza sativa
  Clone ID: PAT_MRT4530_61189C.1.pep
IPFYWGPLLFTPNKILTTLSYTMQYNICNQNKSHVLFYF

SEQ ID NO: 162063 - protein, 426 aa, Oryza sativa
  Clone ID: PAT_MRT4530_6118C.1.pep
MGSMEASTAPENGTAAAAAAAASTACNGAGGGGGAAAASNGGGVERRLRSSAASASWASHLPLEVGTRVMCRWRDQKLHPVKVIERRKSSTSSSPADYEYYVHYTEFNRRLDEWVKLEQLDLETVETDVDEKVEDKATSLKMTRHQKRKIDETHVEQGHEELDAASLREHEEFTKVKNIAKIELGRYEIDTWYFSPFPPEYNDSPKLFFCEFCLNFMKRKEQLQRHMKKCDLKHPPGDEIYRSGTLSMFETLYYDVDLFLFYVLCECDDRGCHMVGYFSKEKHSEESYNLACILTLPPYQRKGYGKFLIAFSYELSKKEGKVGTPERPLSDLGLLSYRGYWTRVLLEILKKHKSNISIKELSDMTAIKADDILSTLQSLDLIQYRKGQHVICADPKVLDRHLKAAGRGGLEVDVSKLIWTPYKEQG

SEQ ID NO: 162064 - protein, 43 aa, Oryza sativa
  Clone ID: PAT_MRT4530_61190C.1.pep
FLHAVLQHAQDGFQPDAGYTFVAVYVTLYYDRRGYLMGIRVCP

SEQ ID NO: 162065 - protein, 724 aa, Oryza sativa
  Clone ID: PAT_MRT4530_61191C.1.pep
MGGVCSAGIPGDRSPAELSFRAMGLVVEQELKAFPAVAGKVQGKHKTAPVEVAPEPDPPRRLSPEKAPRLSTGGGGGKARRSVSKEPQLVRSSSEKLKAGKSRTSTSGKASLPILFPPSISSSNRISIAIWINRWLTSIMNIFASKLRDCKMWTPSYFVDASDKGSVFGRASTSGIGKAVEVLDTLSSSMTNLSPVGGFVAGAKMKGSPQKILAFEVANTIVKGMSLMQSLSKESVRYLKGTVLRSEGVKRLVSSDMSELMRIAAADKRQELALFSREVIRFGNRCKDTQWHNLDRYFSKLESEITPQPNLKEIAEAEMQQLLTLVRHTADLYHELHALDRFEQDYRRKLEEEKKSVAFERGDTVQIIRQELKSQRRHVKSLKKKSLWNKMLEDVMDKLVDIVHFLHVEIQESFGTYDGALQLNQPSESRQTLGSAGLSLHYANIISQIDNIVSRSTVPPQSTRDALYQGLPPTIKSALRKKLHNCPQPQEVPITEIRSSMERTLQWIIPIANNTARNDAMRRAAGQPDVIKIETFYHADKAKTEACILDLVLWLHHLISYSRPSNGGRSRSPSRSPVRSPPLTPPHQVPTTTSSSSPPPPAVARPSGGTGGGLTREDRAMLQDVYAGRRRRAPCHSRSQELSSARGGGGAGGDSSSAVAAAAQLSKNDRLSKSSNDAPARSGGGGGGGKLFPLSRRPSSAVVSPAVDFDIDGIKALADAQKRQ

SEQ ID NO: 162066 - protein, 100 aa, Oryza sativa
  Clone ID: PAT_MRT4530_61192C.1.pep
MGVIISILFSPFLLSLSHFLWRGNEPGAGGHRSGGRGGKGGPGAMAVDTKVEAAHDMILCYRVSERTPGIIWDVTECDHIRTEMKSASNEIFGSSCIFRY

SEQ ID NO: 162067 - protein, 74 aa, Oryza sativa
  Clone ID: PAT_MRT4530_61193C.1.pep
VSFVRGPICSRTGYVLMDINDGRVKLVVGVDKSIPLFTFNLKDSLKGVQLDLPQVTVPDMGVLTAGQCYLGARL

SEQ ID NO: 162068 - protein, 91 aa, Oryza sativa
  Clone ID: PAT_MRT4530_61194C.1.pep
RERDPLTLIHSFTGSTERRRVLSMRSNTHHGRTHWEHYTDGFPQIGLMIPCRLTQERPCRGLIHNPVHDGTPPHELPTVYRCALERSRRIT

SEQ ID NO: 162069 - protein, 109 aa, Oryza sativa
  unsure (1)..(109): unsure at all Xaa locations
  Clone ID: PAT_MRT4530_61195C.1.pep
LLNCYVGLNVHLFLITFKHXSSVNXSTPGASPAAARRRKQRLHPTRRQRQPSSGKAAAWPGRGRRGSAQGSVSGGGGAPWPPRSSQGSSPWRRQEGEGEKGRGXWRGWK

SEQ ID NO: 162070 - protein, 241 aa, Oryza sativa
  Clone ID: PAT_MRT4530_61196C.1.pep
MYTPYCYCRGFTWNSTQHVLWLMLQYARFTYPPEYHILKKPIGTSQTAVMVRVSIRGRTPLEKDLQYTGYGWDIKSALQNCAYVAIIRLRYELPEIEEFYCYVPSLTEGAQHTTYPGLAEIGVGLHTPYLQLANFVRSLDMLYRSTFAELQRVRTRVASLERIIMPRYRQGHYTPEFMFGEDAMLAPAEDIPPPVGMYIERSPPSRVDVRTAYPPLGTTGPYGPPEYVQWYGRVFKLRMRD

SEQ ID NO: 162071 - protein, 227 aa, Oryza sativa
  unsure (1)..(227): unsure at all Xaa locations
  Clone ID: PAT_MRT4530_61197C.1.pep
MVQCFTFYHSRNTTVTVYERRRVVPAKCGWRIRDPAALLDRVIVLKKPDPDLWKRXMSSPKQGKDRKMTIYVGVCRAGGQSSGRHGRGRRAPPPPPARPHRSRLTTAFPGPYSATEELRWAAAGVSVLDLARAATPSPSPMSPPTPTPTPSLLPSPVAAPAAASRRRGRATPASPRRCGGATAAAADAPTRYRLVGPTSSTLAPLFSISPPCPSTLSTTSPTTPQRH

SEQ ID NO: 162072 - protein, 76 aa, Oryza sativa
  unsure (1)..(76): unsure at all Xaa locations
  Clone ID: PAT_MRT4530_61198C.1.pep
IRFEKAPNLGTALLSSSTQWHNXRKISLWRXSGLRSQLDIISRYALSTLLESPDVLDLXCKAFARTYRARTKSSKN

SEQ ID NO: 162073 - protein, 95 aa, Oryza sativa
  unsure (1)..(95): unsure at all Xaa locations
  Clone ID: PAT_MRT4530_61199C.1.pep
PTYVSGKASPANASCEENAYMAXLAYPAERYXEMRQFMDMAANTTDVLELTVQERNLLSRAYKNMTCARMALWRIISSIEQKEDSPRHAASVASI

SEQ ID NO: 162074 - protein, 696 aa, Oryza sativa
  Clone ID: PAT_MRT4530_6119C.1.pep
MSLLENSVDSNLQIHRTTNNRKAALAREVRTQVDALHRCFSWRHADRAAAKRATHVLAELAKNEEVVNVIVEGGAVPALVCHLKEPPAVAVLQEEQQPRPFEHEVEKGAAFALGLLAVKPEHQQLIVDAGALPLLVNLLKRHKNATNLRAVNSVIRRAADAITNLAHENSNIKTCVRIEGGIPPLVELLESQDLKVQRAAAGALRTLAFKNDENKSQIVDCNALPTLILMLRSEDAAIHYEAVGVIGNLVHSSPNIKKEVLNAGALQPVIGLLSSCCTESQREAALLLGQFASADSDCKVHIVQRGAVRPLIEMLQSADVQLREMSAFALGRLAQRSSFVSQDTHNQAGIAYNGGLVPLLKLLDSKNGSLQHNAAFALYGVADNEDYVSDFIKVGGVQKLQDGEFIVQATKDCVAKTLKRLEEKINGRVLKHLLYMMRVGEKSVQRRVALALAHLCAPEDQRTIFIDNNGLELLLDLLVSVSLKHQLDGSVALYKLANKAAALSPMDAAPPSPTPQVYLGEQYVNSSTLSDVTFLVEGKRFYAHRIALLASSDAFRAMFDGGYREKDARDIEIPNIRWNVFELMMRFIYTGSVEVTSDISQDLLRAADQYLLEGLKRLCEYTIAQDVNVDNVSDMYDLSEAFHAMSLRHTCVLFILEQFEKICVKSGSSQLIQRVIPELRNFFAKALRPSHRNAQP

SEQ ID NO: 162075 - protein, 822 aa, Oryza sativa
  Clone ID: PAT_MRT4530_611C.1.pep
MAVVAVVLATAAPSVSGQLPDYPTANLSTRITYTDGSAVRAIILRSTQTLYGPSFAAGFFCAPPCQAFLFAVFIANFNSGYGLPLEENNMARVIWSANRASPLGENATLELTGDGDLVLREIDGRLVWSSNTSGQSVAGMQITEHGNLVLFDQRNATVWQSFDHPTDVLVPGQSLLQGMKLRANTSTTNWTESKLYMTVLPDGLYAYVGSKPPQLYYKYLVDTNKSRKDPTRVTFTNGSLSIFLQSTQAGKPDKRIALPEAKSTQYIRLEYDGHLRLYEWSGFEWTMVSDVIHMDDVIDVDNCAFPTVCGEYAICTGGQCICPLQTNSSSSYFQPVDERKANLGCAPVTPISCQEMKNHQFLTLTDVYYFDGSIITNAKSRDDCKQACLKNCSCRAVLFRYYHNDSDGECKSVTEVFSLQSIQPEKLHYNSSVYLKVQLPPSASAPTQKRIKVSLGATLAAISSLVLVIIVGIYVRRRRKYQKLDEELDFDILPGMPMRFSFEKLRERTEDFSKKLGEGGFGSVFEGKIGEKRVAVKRLEGARQGKKEFLAEVETIGSIEHINLVKVIGFCAEKSNRLLVYEYMPRGSLDMWIYYRHNNAPLDWCTRCRIILDITKGLCYLHEECRRKIAHLDIKPQNILLDEKFNAKLADFGLSKLIDRDQSKVVTVMRGTPGYLAPEWLTSQITEKVDVYSFGVVLLEIICGRKNIDISQPEESVQLINLLREKAKDNVLIDIIDKKSTDMVSHHQEEVIKMLKLAMWCLQNESSRRPSMSMVVKVLEGAVSVENCLDYSFANANSVISAQDNPSTYSAPPSASILSGPR

SEQ ID NO: 162076 - protein, 181 aa, Oryza sativa
  unsure (1)..(181): unsure at all Xaa locations
  Clone ID: PAT_MRT4530_61200C.1.pep
DTSAPSKTSGQVPVVTSSSSTYNGWDVPGTSSGQSSSKHNKSQNSTFVVPQEALPSLPVPTAPPLAVGTFYDGPIQYPSIDSTPVDVTMPSADGGTAVSSAKPAENEXDAKPAESDANASNSGNTPPGTCVICLDAPVEGACIPCGHMPGCMSCLKDIESKKWVCPICRAKINQIIRLYAV

SEQ ID NO: 162077 - protein, 142 aa, Oryza sativa
  Clone ID: PAT_MRT4530_61201C.1.pep
MAGLTGGVWLVRLEECEPESVFIRSRVSLLGKLLPSPPSTQGTGGTRLAEQEARAGDRPDPCRTDDDEEKEAPKSGDGRRSRRRWAQERQQPRATGSGAAVATTATTMGAAAARRLERQQHDVGDDEDDSDHERWQPGVVMA

SEQ ID NO: 162078 - protein, 249 aa, Oryza sativa
  unsure (1)..(249): unsure at all Xaa locations
  Clone ID: PAT_MRT4530_61202C.1.pep
RSHNSPNKQRRRRRQIHRNQSTPPPNDGCICIAVNSPLAATAAVADTATAADSTANXAAVADSAAAAIVVAAATAPTVIFGAAAAFIRVNQDADMIITXPSKKAKKSESEEHGGSKVSMPNIDVPSKLILSMFGQTXSEYLPQDYECXDIMAQLSIEYSTENCTMVDMGEFLVWKNHLMSLLSEDEFVNDDIISAYIHCMREQANNDRKVYYENPFLSDLLKGAEVNGVDEDSDNFITKIVNNYLFNEL

SEQ ID NO: 162079 - protein, 52 aa, Oryza sativa
  Clone ID: PAT_MRT4530_61203C.1.pep
MDVAEQRVASASLALSVFGGSAILGAQDASCYGRKKQGGYTIVSRPHMFYET

SEQ ID NO: 162080 - protein, 82 aa, Oryza sativa
  unsure (1)..(82): unsure at all Xaa locations
  Clone ID: PAT_MRT4530_61204C.1.pep
HGPAAHHRFISSSDDGSTPAASPPTRRRPLPAAPPVSRCTTSXSSPRPRSPSPSRCASPSPPPASSFSSPPPPPTRRRLDRR

SEQ ID NO: 162081 - protein, 53 aa, Oryza sativa
  Clone ID: PAT_MRT4530_61205C.1.pep
QHRLRSMAPLAAGLPWRAGMLPPLLLGRSAPLFFGSDPTAMGSGRACIRTTVS

SEQ ID NO: 162082 - protein, 94 aa, Oryza sativa
  unsure (1)..(94): unsure at all Xaa locations
  Clone ID: PAT_MRT4530_61206C.1.pep
TCIHKSXAVFSEAGKHHFAKQCXLSSALSXKKTQNKPMXRIXASLITQAYIYXXIKWQSGWQIXSXPAGFFAXRTMXPXLDDKPLFRICHSKMA

SEQ ID NO: 162083 - protein, 44 aa, Oryza sativa
  unsure (1)..(44): unsure at all Xaa locations
  Clone ID: PAT_MRT4530_61207C.1.pep
FXWTPPPPPNSESVQNKRPLLYVYIRLVPPVIVETPPMHQSFTI

SEQ ID NO: 162084 - protein, 184 aa, Oryza sativa
  Clone ID: PAT_MRT4530_61208C.1.pep
MDEETQKKVESTVLEILRGSDMESLTEFKVRTAAADRLGIDLSIPDRKRFVRRVVEGYLESLSQEDEQEQQQEQAGGAGEEGKDEQAEEEEEEEEEEEEERGGGTKREYDDEGDLILCRLSARRRVTLQEFKGKTLLSIREYYFKDGKELPAKGISLTVEQWEAFRDSVPAIEDAIKKLGESSD

SEQ ID NO: 162085 - protein, 1052 aa, Oryza sativa
  Clone ID: PAT_MRT4530_61209C.1.pep
MHCEGVFRRRQKQTAQPDGADATPGGAAAAAAAANATNRGYKKAGKPRRGAPMALRRVLLFVKPFDVYPPRPLAAAASSPPPPPPPLRVSNPKVLNYLDDRCRVHKETINLCKSVLQRKSIDWISVQRNDMSNPIHDVDLVISVGGDGTLLRASHFLNSSIPVLGVNSDPTCPDEVDELTDEFDARRSTGHLCAATAANFEQILDATLDGSRQPSELSRISVKLNGLQLPTYALNDILVSHPCPASVSRFSFRSSGLRVATPAGSTAAMLSAGGFVMPISSHELQYMIREPISPRDADKPLLHGLRSDKNGCSGVCPSSRLTTLDIFGLGAGAALVQKRATFIMRCTSLDLPALGDFLTHVQHKPATHLGENIILLLRKHIYYCLNPESNVHNLMIAADDLRDTIDTIEERILVGECEGKKPKAQATSWIRSAQSVRDESDKIKNGYEARRIHALGCSWNFFFNYSVSNSATKMHANADEIKKRAPENDGMFSSLPLVGREMPLPPYIVGQDEYKDKIVGSIKQGTTGTIGICGMAGSGKTTLLKQLNNIFSCAAETHEFDHVIYVEVSQQQNLETVLQNIASQLGIMLTQNKDATFRSASLYNFLKERSFLLLIDDLWQTLDLVKVGIPQGGRQLGPQNRQMIVITSRLQQVCYGMDGHCQMIVLQRLKFNEAWSLFESNAGIRITNNVQVKCHAESIVEKCGGLPLALKIVGQAMASKGTEHEWELAVNLLEQSQFHKVPDVENDLYSVLYISYDNLPDERTKQCFLFFAFASYGTHLDLSYTPIQSLPVRFRLLKKLRYLYLRYTRKLQTVPDGTISALSMLRVLDIHGSVFFTKVKARSYLEELESLTSLQLLRVTVVDFQSLRRIFNLSRVSLRDRIGTPPSFVPTYQQSKGTTSRSSGSELYEEFGEVDDRLHHLTKLGSIMWKGVMPHACFPKVRTVDIIGCHSIKTLTWINQLPCLEEVYLYNCNSLLEVVSDDDEEDTTMPSATASSSFPRLRHLGLSHLKDLYKICGDGRLGFPCLQRLLVYECPMLARLPFVLWNGSAVCL

SEQ ID NO: 162086 - protein, 133 aa, Oryza sativa
  unsure (1)..(133): unsure at all Xaa locations
  Clone ID: PAT_MRT4530_6120C.1.pep
MRCVWCCCCEGNLSVSFSSKSALPGGVGVVLVFGAGSPPRGAVGWVFTPAPCPVCALQGCIRRLIMPRVGGGLPCAPSVGWGGRRLSRPAPGASAGGLASFWAAMRGFRGFLFLPSPGGTSGGSWHAQQHXDE

SEQ ID NO: 162087 - protein, 215 aa, Oryza sativa
  unsure (1)..(215): unsure at all Xaa locations
  Clone ID: PAT_MRT4530_61210C.1.pep
PHSCLAPAASPPTAGPPPPTAIPLSPPLPPPPTPPPTLTPTLNPNPGLAXPPPPPSSSSGPRPPRMGSHWPSTPGGSSPSSSSSRTQRPAPSPTTRSPPSSSSRPPRPPHARRPSSPPATPRLPSPPXTTSPAPPPSTPPTPSPPSHWLPQPPSTSSPPPRRPXLPTSSPPGSPPPXPAPCHWPPPRPRPPRYPLPRRRPPPPRSAPALSISTRR

SEQ ID NO: 162088 - protein, 199 aa, Oryza sativa
  unsure (1)..(199): unsure at all Xaa locations
  Clone ID: PAT_MRT4530_61211C.1.pep
TVRSSIDRAGKXSKITTLGGRNQENXKKYTTTHTPTAPTYRPRRRLASDWPPLSVTDRRXPTMEHSRDRPKPDPYNQHKTPSNVANLQKLXATTRGYESRXACINFLGGFGKGMPRRRLQGEKRXKHRRRHPSRSXQENRDQAFTRQPHLRGLSLLFLCLTVGPSLSRTPPSCWAGPSRLLSRRPNRGPPRPFLSFPRP

SEQ ID NO: 162089 - protein, 112 aa, Oryza sativa
  unsure (1)..(112): unsure at all Xaa locations
  Clone ID: PAT_MRT4530_61212C.1.pep
CGENPAAPITTLTTSPAPPPSTPPTPSPPSHWLPQPPSTSSHLRLGSPELRPLCRSPASAHLPTSSPPGSPPPXPAPCHRPPPRPRPPRYPLPRRRPPPPRSAPALSISARR

SEQ ID NO: 162090 - protein, 138 aa, Oryza sativa
  Clone ID: PAT_MRT4530_61213C.1.pep
TPSSSSSSQPRPPHSPFASPATAPASLPGLRSDPRDGSPSPPGHPACSTACRPPPPPSSSSGPRPPRTGSHWPSTPGGSSPSSSSSRTQRPAPSPTTRSPPSSSSRPPRPPHARRPSSPPAIDTVSVDSQDFRRLKPP

SEQ ID NO: 162091 - protein, 88 aa, Oryza sativa
  Clone ID: PAT_MRT4530_61214C.1.pep
KACKNIEERNYRLKHAYVSIQQHKYRKTRMTPPPLLSPTPAGFDGRQACGCQIKAMSSEGRRRGDWPNLTAGCTFSHAGTSLVSLSRR

SEQ ID NO: 162092 - protein, 95 aa, Oryza sativa
  Clone ID: PAT_MRT4530_61215C.1.pep
LASTFNSAGRHLQPMQGSGCYPTLAGQLRKLEEIILLPSYLLLYSDAVTGHKAPADNTGGNRLHQALKDRTLNLRHLNPLPSRLFVDNICVTAFR

SEQ ID NO: 162093 - protein, 169 aa, Oryza sativa
  Clone ID: PAT_MRT4530_61216C.1.pep
GSRGTVTRGRRLRAAAWARSCGAAVLVTHDPALRPHAKMELGCLVHANIAANDDAHACTLQREDDDGSEVCVGEVDEARAAADGVPARHERTVVASELPGARAELVGVGLPLRRLQRRSRPARAELVGVGLPLWWGRAAQRQGGTKRRRRPRWAKLPSPREHGNLQLKE

SEQ ID NO: 162094 - protein, 38 aa, Oryza sativa
  Clone ID: PAT_MRT4530_61217C.1.pep
DIFRFIAPQRKRPGKGPFVSCLPVSLLNLPNRQACNTP

SEQ ID NO: 162095 - protein, 54 aa, Oryza sativa
  unsure (1)..(54): unsure at all Xaa locations
  Clone ID: PAT_MRT4530_61218C.1.pep
LTISXFTLLSRFPSSNSIVIPQINPLYNTSIFAXPPLHPQITRVGDGPPMSNWD

SEQ ID NO: 162096 - protein, 102 aa, Oryza sativa
  Clone ID: PAT_MRT4530_61219C.1.pep
AAAAGGPSLADRFRSRFRPARFGRRRGGGAGAADCRVCLARFEPESVVNRLPCGHLFHRACLEKWLDYDHATCPLCRHRLLPATTESPSPSPATATPHFARI

SEQ ID NO: 162097 - protein, 1597 aa, Oryza sativa
  Clone ID: PAT_MRT4530_6121C.1.pep
MANFFPMALKGQARGWLMNLPPASVHSWEDLCQQFTMNFQGTYPRPGEEADLHAVQRRDDESLRSYIQRFCQVRNTIPCIPAHAVIYAFRGGVRHNRMLKKIASKEPQTTAELFQLADRVARKEEAWTWNSTGSGVAASAAPGSAARSGRRDRRRKKRSAHSDDEGHVLAVEGASRATRKGRPASDKKKEAGAPSRGRPTGKWCAVHNTSLHDLADCRAVKSLAERTRKWEEERRQERREGKAPAAPSGNRRSEAKQKAPAEDIDDGDDDLGFQEPGATIATVDGGACAHASRRSLKAMKRELLAAAPTHEATRRARWSEVALTFDQTDHPPCVARGGQIAMVVSPTVCNVKLGRVLIDGGAALNILSPAAFDAIKAPGMVLRPSQLIIGVTPGHTWPLGHIDLPVTFGGSANFRTERVNFDVADLSLPYNAVLGRPALVKFMAAVHYAYLQMKMPGPGGPISVHGNLKVALACMEQCANHLAAASKPEGGNERLSTSVPAAPRQRMITCDEVPEDALVSFLRANADVFAWRPADMPGVPREVIEHRLAVRPGARPVRQKVRRQAPERQAFIREEVARLLEAGFIREVIHPEWLANPVVVPKANGKLRMCIDYTDLNKACPKDPYPLPRIDQIVDSTAGCDLLCFLDAYSGSQIGRNVEAYVDDLVVKTRNQETLLSDLAETFESLRSARIKLNPDKCVFGVPAGKLRGFLVSARGIEANPEKIRAIERMRPPSKLRDVQCVTGCMAALSRFISRLGEKALPLFKLLKRSGPFTWTEEAERALTQLKAYLSSPPVLVAPEPDEPLLLYMAATPQVVSAALVVERDEDNPHSAHPHPASTRPGREQAGEAPEPNGGPRPPTAGAGPPPACPTVPGAPDPQDGPGATAGRPRLSPSDPEVVGTEAECAPHGLSDEERPGDAAPGEKDRPRRKVQRPVYFVSEALRDAKTRYPQAQKMLYAILMASRKLRHYFQAHRVTVVTSYPLGQILHNREGTGRVVKWAIELSEFDLRFEPRHAIKSQALADFVAEWTPAPEPISIPEASSGPSQLPHTAYWVMQFDGSLSLQGAGAGVTLTSPSGDVLRYLVRLDFRATNNMAEYEGLLAGLRVAAGLGIRRLLVLGDSQLVVNQVCKEYRCSDPQMNAYVRQVRRMERHFDGIELRHVPRRDNAVADELSMLASSRAQTPPGAFEERLAQPSARPDPLGETDAPERPPRPVGVQASGPEGSAPSSPRLIAWITEIQAYLADKTLPEDREWSERVQRISKRYVLVEGTLYRRAANGVLLKCIPREQGVELLADIHEGECGAHSASHSLVGKAFRQGFYWPTALNDAVDLVRRCRACQFHAKQTHQPAQALQTIPLSWPFAVWGLDILGPFRRAPGGFEYLYVAVDKFTKWPEAYPVIKIDKHSALKFIRGITARFGVPNRIITDNGTQFTSELFGDYCEDMGIKLCFASPAHPRSNGQVERANAKILKGLKTKTFNILKKHGDSWIEELPAVLWANRTTPSRATGETPFFLVYGAEAVLPSELTLRSPRATMYCEADQDQLRRDDLDYLEERRRRAALRAARYQQSLRRYHQRHVRARHSASTTSSYAASKRVLD

SEQ ID NO: 162098 - protein, 250 aa, Oryza sativa
  Clone ID: PAT_MRT4530_61220C.1.pep
MRLLCSHGGRLVPCGPGGGLRYVGGETRALAVPRGAPFRELTARLAEKAGAGGDAVTAVRYRLADGGLDEDLLVSVTSDEELAHMRDEYDRLRATRPSASFRVFVSTAAGVQQQRRQPVAPPMMMRRARSAQELAGRLARRPCPPAGRSAAAPSVRRVHSAQELAAGGGHSRQCFDDRRRLQSCCWCCHRRRDQCAAVPQPARPVRQLPAAMSKNVNGARQAAPAVSAAAKATGPVVFELENRRACWEFE

SEQ ID NO: 162099 - protein, 83 aa, Oryza sativa
  Clone ID: PAT_MRT4530_61221C.1.pep
SMQQLKKYKLDRNYINTYIGRRNFEGIDSHSLERKDSCTNQEYSVHPITCHPFKIYHSRTVCTHQTEEVVPLKKCYTATCCSL

SEQ ID NO: 162100 - protein, 100 aa, Oryza sativa
  unsure (1)..(100): unsure at all Xaa locations
  Clone ID: PAT_MRT4530_61222C.1.pep
MATSGLRSCSAVGVPSLLAPSSNRIRLFVCAYTTIYGRVTMSAEWMPGXPRSAHLDGSCPVDFVFDPVGLATVPENFELFMVSEVYHFLFSMLFVPGVLL

SEQ ID NO: 162101 - protein, 173 aa, Oryza sativa
  unsure (1)..(173): unsure at all Xaa locations
  Clone ID: PAT_MRT4530_61223C.1.pep
FDCFTPLDKGVNSKHPGGFIWASEKTGFRHLSLHDKNGVCLGPLTQGDWMIDQIAGVNESSGVIYFTGTLDGPLETNLYSTNLFPDWSLPLQVPKRLTHGTGRHSVILDHQLLRFIDVYDSIKSPPVILLCSLLDGSVIMPLYEQPLTVHPLXKVQQLSTEIVQIEGKDGTAL

SEQ ID NO: 162102 - protein, 51 aa, Oryza sativa
  Clone ID: PAT_MRT4530_61224C.1.pep
MQQSAIYFQDEEGASPAPECAGCNNTKNHKLTRSRHAGRVQACPGPSSGPG

SEQ ID NO: 162103 - protein, 101 aa, Oryza sativa
  Clone ID: PAT_MRT4530_61225C.1.pep
MAQWRGDGARGRPPSRVELGEPPSDVTIWLTLSLLATAAEGDGGSEPVVAEARADDHIMAVGGAQSVDSMVSPWAGASLMAIVAEIHQGMRMGHRAFPMAW

SEQ ID NO: 162104 - protein, 90 aa, Oryza sativa
  unsure (1)..(90): unsure at all Xaa locations
  Clone ID: PAT_MRT4530_61226C.1.pep
VRNAADCKKGLAAMPYCCPPLHFKDAXKKKKKKKKKKKKKKEKKKKTKIKKNEIAAARFIGYRLRNSALRPDIYNIVTQKNNQVSYIKQR

SEQ ID NO: 162105 - protein, 63 aa, Oryza sativa
  Clone ID: PAT_MRT4530_61227C.1.pep
FCFFNLLCFFFFFFFFSLFFFFFGLRNLENDFKKFYKFVIPLQPKKKKRKKKHFLKPPYFFCP

SEQ ID NO: 162106 - protein, 67 aa, Oryza sativa
  Clone ID: PAT_MRT4530_61228C.1.pep
KLINTVLLSWRALYLHKTTLKRVLSAVRDTIKCHTIEYTDAKQSLHAFAYRGILLAGYHVYYSDTFY

SEQ ID NO: 162107 - protein, 68 aa, Oryza sativa
  Clone ID: PAT_MRT4530_61229C.1.pep
YLLASMMSSGPGPVPLFQRIRPPGFISPPPTGHAQRPLALLQWPPLLLLARISATSYPLSGGDAWMSG

SEQ ID NO: 162108 - protein, 173 aa, Oryza sativa
  Clone ID: PAT_MRT4530_6122C.1.pep
MAGVGRNMLAPLLVLNLIMYLIVIGFASWNLNHFINGQTNYPGVAGNGATFYFLVFAILAGVVGAASKLAGVHHVRAWRHDSLATNAASSLIAWAITALAFGLACKEIHIGGHRGWRLRVLEAFVIILAFTQLLYVLMLHTGLFGGGDGAYRDHDYGVGAGAAAGEPKGTARV

SEQ ID NO: 162109 - protein, 82 aa, Oryza sativa
  Clone ID: PAT_MRT4530_61230C.1.pep
KDMYWRRNATKDSPPQLGTPSKSPVIAGVCPLSDYRYPMQDIGDPGISMGFIGPSVGINKGLGTVGNHDTERKIIMGSKKKK

SEQ ID NO: 162110 - protein, 55 aa, Oryza sativa
  Clone ID: PAT_MRT4530_61231C.1.pep
TTAIFFSFSVHVDISRLPALSLGCFINLSVMTRTDHVYKSAICAYREGPFKCYFS

SEQ ID NO: 162111 - protein, 45 aa, Oryza sativa
  Clone ID: PAT_MRT4530_61232C.1.pep
GYGYGEPARPGLPRRIEPRLAGSPDFHASLIQPPSQTGENRSEVE

SEQ ID NO: 162112 - protein, 59 aa, Oryza sativa
  Clone ID: PAT_MRT4530_61233C.1.pep
MADKLNGELSLSNDNNNYNDEWLIQTERVYGLQFGLPDIFVGCLLFHKGLDGEIMMTPD

SEQ ID NO: 162113 - protein, 111 aa, Oryza sativa
  unsure (1)..(111): unsure at all Xaa locations
  Clone ID: PAT_MRT4530_61234C.1.pep
AQRKKALRRRRNLRDVXRVDVEEVVDRTGSIFSSSCVLLAVLPRRSAPQSSXASAGYMIRAFNARRTPIRIPIRVKLILGCNPKIPFRSTCQQWPLAERIDRPSIHKDHIG

SEQ ID NO: 162114 - protein, 35 aa, Oryza sativa
  Clone ID: PAT_MRT4530_61235C.1.pep
WIAPSRNRSSSFNGNMMDWWEACRREMIKEQRKNF

SEQ ID NO: 162115 - protein, 122 aa, Oryza sativa
  Clone ID: PAT_MRT4530_61236C.1.pep
PWKQVPEKNSPSKPVLGENKTKNITGPQKKKGPGDLIKRGPTKNKGAPSQKNRNKKPGGGWRRNNPTQGLSSKRAANNSPIGLKAQGITILGSQPGGVYQPNFNPHGHHGHPFGGGGAHPFC

SEQ ID NO: 162116 - protein, 70 aa, Oryza sativa
  Clone ID: PAT_MRT4530_61237C.1.pep
FARLGSIHICHRVAHHGVVIMSTRQSCSGDFQHIHVCLLDLISISTTVSILPSTLFCLSVIDTCTFVGLA

SEQ ID NO: 162117 - protein, 58 aa, Oryza sativa
  Clone ID: PAT_MRT4530_61238C.1.pep
HKGSSQSTLAIWQIYFVSNTVVQANIFVPCLTRFKNEKKKAYSVKLAHFGLGEQHTDT

SEQ ID NO: 162118 - protein, 93 aa, Oryza sativa
  Clone ID: PAT_MRT4530_61239C.1.pep
DEQMRIILFVGLWHKYHVLLYNYPTIIVAKLNNKHVIESWIGCMPVKHKLIQHIVKSKVYREVFHNILGNLFAPLNFLTETKAVWFFTLPNLC

SEQ ID NO: 162119 - protein, 1929 aa, Oryza sativa
  Clone ID: PAT_MRT4530_6123C.1.pep
MAERAVAHNLSPSASGDDGEQNPRRRARTPPPPSRRSLRREEALEGVERSATSPPTSDEEGRRDGERRLLVYGDGSTPQGTLQAAGALLRHPPVVPDPETPARRWLDDVADLVMTAQQRLGAGGRSSAAKASGAATAGSVSSRGAIPSSTPPTQEDVRRGPDARLSIERRRNGRRAAHATEGASSSGAPLRFGRGGQPPVPPLGGVGCRAFVASIRNVRWPPRFRPTITEKYDGSVNPAEFLQVYTTGIEATGGDDRVVANFFPMALKGQARGWLMNLPPASVHSWEDLCQQFTMNFQGTYARPGEEADLHAVQRRDDESLRSYIQRFCQVRNTIPCIPAHAVIYAFRGGVRHNRMLEKIASKEPQTTAELFQLADRVARKEEAWTWNSTGSGVAASAAPGSAARLGRRDRRRKKRSAHSDDEGHVLAVEGASRATRKGRPASDKKKEAGAPSRERPTGKWCAVHNTSLHDLADCRAVKSLAKRTRKWEEERRQERREGKAPAAPSGNRRSEAKQKAPAEDIDDGDDDLGFQEPGGHHRHRRWGSAMKRELLAAAPTHEATRQTRWSEVALTFDQTDHPPCVARGGQIAMVVSPTVCNVKLGRVLIDGGAALNILSPAAFDAIKAPGMVLRPSQPIIGVTPGHTWPLGHIDLPVTFGGSANFRTERVNFDVADLSLPYNAVLGRPALVKFMAAVHYAYLQMKMPGPGGPISVHGNLKVALACMEQRADHLAAASKPEGGNERLSTSVPAAPRQRMITCDEVPEDALVSFLRANADVFAWRPADMPGVPREVIEHRLAVRPSARPVRQKVRRQAPERQDFIREEVARLLEAGFIREVIHPEWLANPVVVPKANGKLRMCIDYTDLNKACPKDPYPLPRIDQIVDSTAGCDLLCFLDAYSGYHQIRMAREDEEKTAFITPIGTYCYTTMPFGLKNAGPTFQRTTRISLGSQIGRNVEAYVDDLVVKTRNQETLLSDLAETFESLRSARIKLNPDKCVFGVPAGKLLGFLVSARGIEANPEKIRAIERMRPPSKLRDVQCVTGCMAALSRFISRLGEKALPLFKLLKRSGPFTWTEEAERALTQLKAYLSSPPVLVAPEPDEPLLLYLAATPHGVSAALVVERNEDNPHSVHPHPASTRPGREQAGEAPEPNGGPRPPTAGAGPPPACPTVPGAPDPQDGPGATAGRPRLSPSDPEVVGTEAECAPRGLSDEERPGDAAPGEEDRPRRKVQRPVYFVSEALRDTKTRYPQAQKMLYAILMASRKLRHYFQAHRVTVVTSYPLGQILHNREGTGRVVKWAIELSEFDLRFEPRHAIKSQALADFVAEWTPAPEPISVPEASSGPSQLPHTAYWGAGAGVTLTSPSGDVLRYLVRLDFRATNNMAEYEGLLAGLRVAAGLGIRRLLVLGDSQLVVNQVCKEYRCSDPQMDAYVRQVRRMERHFDGIELRHVPRRDNADADELSRLASSRAQTPPGAFEERLAQSSARPDPLGETDAPERPPRPVGVQASGPEGSAPSSPRLIAWITEIQAYLADKTLPEHREGSERVQRISKRYVLVEGTFYRRAANGVLLKCIPREQGVELLADIHEGECGAHSASRTLVGKAFRQGFYWPTALNDAVDLVRRCRACQFHAKQTHQPAQALQTIPLSWPFAVWGLDILGPFRRAPGGFEYLYVAVDKFTKWPEAYPVIKIDKHSALKFIRGITARFGVPNRIITDNGTQFTSELFGDYCEDMGIKLCFTSPAHPRSNGQVERANAEILKGLKTKTFNILKKHGDSWIEELPAVLWANRTTPSRATGETPFFLVYGAEAVLPSELTLRSPRATMYCEADQDQLRRDDLDYLEERRRRAALRAARYQQSLRRYHQRHVRARSLCVDDLVLRRVQTRAGLSKLSPMWEGPYRVIGVPRPGSVRLATGDGTELPNPWNIEHLRRFYP

SEQ ID NO: 162120 - protein, 81 aa, Oryza sativa
  Clone ID: PAT_MRT4530_61240C.1.pep
VGGMATATGTSKPVATLGGGGSSSGASTTGTNQGGDDRATGTSHPVPAMSFTGGLAQSMSHYIYTTSIGQAGGCHKGKVKG

SEQ ID NO: 162121 - protein, 441 aa, Oryza sativa
  Clone ID: PAT_MRT4530_61241C.1.pep
MNIILELNHLKQVSLPTRPVVCKGLFIVIALIVLRAIVSPFLAVNPSEKEGFYDPTADLLPGIRRGKFIEVPQIIWGLNNQKIAFARACLTARFLNRSLLMPSLSASLFYKEVDLLRPITFDKVFDFTKFNARCQGFVRLARYSEVSNQTKPFKLQKGSGRRWTVEKDLDQLLQYRRGEADDSEVIEIIGKHPFLWPDHWPVKDYARIFDCLALVPEIETEVVKAISKIREAGIKARHEAGISHNKHVKDGTMNPPVPYIAVHMRIEKDWMIHCKKWEQRSNSKEICSSKEEIIHKVSQITDLRRPVVVYLAVADSLLEDDSITSGWRVGMVAFEKKRLGVTDIYNRQPYLIKSAIDFEVCARADVFVGNSFSTFSNLVVLSRTQRLYNMGEASSCGENVGLSSYAYNVIGDDGGPQRWMTDMSDTSLQNLSYGTNNISCH

SEQ ID NO: 162122 - protein, 110 aa, Oryza sativa
  unsure (1)..(110): unsure at all Xaa locations
  Clone ID: PAT_MRT4530_61242C.1.pep
APDPAQRGDDSQKGAREREQDQPDSSGAKHKKVEMFVKKNIRPLCKSGVITVEQYRWAVAKTXDKVMKYPSDAKNANFLIKEGDKVKKLARQYVEAAQQRLHDTAESVQM

SEQ ID NO: 162123 - protein, 94 aa, Oryza sativa
  unsure (1)..(94): unsure at all Xaa locations
  Clone ID: PAT_MRT4530_61244C.1.pep
NRKRQTTKTDERQXQQGQQTTQSAPSPFPGRRGRRXGDRDSGKREKPNRRGTKKRARQXATVREAERHPPKTRAGEXNXTXTXRARARXHXAXA

SEQ ID NO: 162124 - protein, 69 aa, Oryza sativa
  Clone ID: PAT_MRT4530_61246C.1.pep
SKSLFTEVELFLRDRTRGRTRGRTRGLVFSWKPSKRCHTVVTMFEDNFVASCLKMAIVIMRGLSKICPL

SEQ ID NO: 162125 - protein, 70 aa, Oryza sativa
  Clone ID: PAT_MRT4530_61247C.1.pep
ASTNKTNSQLIIAGLLVPGKLKRGPHMLGPLGEKTTFFFPKGFFKNPGMNCPQRGGGQREGAELNPFNPF

SEQ ID NO: 162126 - protein, 136 aa, Oryza sativa
  Clone ID: PAT_MRT4530_61248C.1.pep
MAETKIANYFRNKFSKQTISGLMLENFLAVVGDVKPGTAERPAKRGAVKPAVSGLRNNIVKPDGGRDIRARGRGIGSVEVERRARENRIGRITRLSRSEHGKNDRGASATTEADQSAATGGRRRFGGVGGVVKHEG

SEQ ID NO: 162127 - protein, 414 aa, Oryza sativa
  Clone ID: PAT_MRT4530_61249C.1.pep
MVNSITREIDLYWSAVESDEGNKLCSIHKVPQHILEVDRNAYEPIILSIGPYHHGAPKLTAMEREKWKCLDFILKLNCELSLQDYIRAIHKLEKQARCYYSEEIPMEKMMFVRLLLLDSCFILVKVDRTVVAAMQLKEVPTDVTPGSIAVKDGLNSGQEVESNCPMQRRETEIAVHEIELTKSHFDHIESKIYLGQRYVGSNQKENEESRLLTRQKDCFQDEQLPIRWRQAVQYHEAGVQLKKRVYSIYEKHSLLDIKFSNGVLEVPCLTIDENTESLFKNLIAFEQMDSQYENYITAYIAFMSQLVSTSEDATLLTERGIIVHMLDNDDEVSAMFTRLSTHLIFGSDTYHYLQTLSYVLEDHYQSRLNRWMAWLWRNHFSNPWLALGVLAAVVVLLCTIVQTILTVLAYRQPH

SEQ ID NO: 162128 - protein, 1715 aa, Oryza sativa
  unsure (1)..(1715): unsure at all Xaa locations
  Clone ID: PAT_MRT4530_6124C.1.pep
MAERAVAHNLSPSASGDDGEQNPRRRARTPPPPSRRSLRREEALEGVERSATSPPTSDGEGRRDGEHRLLVYGDGSTPQGALQAAGALLRHPPVVPDPETPARRWLDDVADLVMTAQQRLGAGGRSSATKASGAATAGSVSSRRRARRAAAVTRRSSAIPSSTPPTQEDVRRGPDARLSIERRRNGRRAAHATEGASSSGAPLRFGRGGQPHVPPVGGVDCRAFVASLRNVRWPSRFRPTITEKYDGSVNPAEFLQVYTTGIEAAGGDDRVMANFFPMALKGQARGWLMNLPPASVHSWEDLCQQFTMNFQGTYPRPGEEADLHARFCQVRNTIPCIPAHAVIYAFRGGVRHNRMLEKIASKEPQTTAELFQLADRVARKEEAWTWNSTGSGVAASAAPGSTARSGRRDRRRKKRSAHSDDEGHVLAVEGASRATRKGRLASDKKKEAGAPSXSARPASGAPCTTPPSMTSRTXRVVKSLTERTRRWEEERRQERREGKAPAAPFGNRRNEAKQKAPAEDIDDGDDDLGFQEPGATIATVDGGACAHASRRSLKAMKRELLAAAPTHEATRRARWSEVALTFDQTDHPPCVARGGQITMVVSPTVCNVKLGRVLIDGGAALNILSPAAFDAIKAPGMVLRPSQPIIGVTPGYTWPLGHIDLPVTFGGSANFRTERVNFDVADLSLPYNAVLGRPALVKFMAAVHYAYLQMKMPGPGGPISVHGDLKVALACMEQRADHLAAASKPEGGNERLSTSVPAAPRQRMITCDEVPEDALVSFLRANADVFAWRPADMPGVPREVIEHHLTVRPGARPVRQKVRRQAPERQAFIREEVARLLEAGFIREVIHPEWLANPVVVPKANGPTFQRTTRISLGSQIGRNVEAYVDDLVVKTRNQETLLSDLAETFESLHSARIKLNPDKCVFGVPAGKLLGFLVSARGIEANPEKIRAIERMRPPSKLRDVQCVTGCMAALSRFISRLGEKALPLFKLLKRSGPFIWTEEAERAFTHLKAYLSSPPVLVAPEPDEPLLLYLAATPQVVSAALVVERDEDNPHLAHPHPVSTRPGREQGGEAPEPNGGPRPPTAGAGPPPACPTVPSAPDPQDGPGATAGRPRQSPSDPEVVGTEAECAPCGLSDEERPGDAAPSEEDRPRRKWTPAPEPVSAPEASSGPSQLPHTAYWVMQFDGSLSLQGAGAGVTLTSSSCDVLRYLVRLDFRATNNMAEYEGLLAGLRVAAGLGIRHLLVLGDSQLVVNQVSKEYQCSDPQMDAYVRQVRRMERHFDGIELRHVPRRDNAVADELSRLASSRAQTPPGAFEERLAQPSARPDPLGETDAPERPPRPVGVQASGPEGSVPGSPRLIAWIAEIQAYLVDKTLPEDREGSERVQRISKRYVLMEETLYRRAANGVLLKCIPREQGVELLADIHEGECGAHSASRTLVGKAFRQGFYWPTALNDAVDLVRRCRACQFHAKQTHQPAQAMQTIPLSWPFAVWGLDILGPFRWAPGGFEYLYVAVDKFTKWPEAYPVIKIDKHSTLKFIKGITARFGVPNRIITDNGXSSLELPAVLWANRTTPSRATGETPFFLVYGTEAVLPSELTLRSPQAXRRDDLDYLEERRRRAALRAARFQQSLRRYHQRHVRARSLCVDDLVLRRVQTRAGLSKLSPMWEGPYRVIGVPRPGSVRLATGDGTELPSVTMFPAWPVSTRGSPQALAPTRAI

SEQ ID NO: 162129 - protein, 33 aa, Oryza sativa
  Clone ID: PAT_MRT4530_61250C.1.pep
SCLDCMSSEWSYLATPSGSILMDVLDKVQGPTL

SEQ ID NO: 162130 - protein, 105 aa, Oryza sativa
  Clone ID: PAT_MRT4530_61251C.1.pep
MKIRIIKKLHIRRTVKVGHRNSGDLRGLCRLRPLEISQFFQVHVWQKDGSLGECCLGGHYASICKEPNYERTTEASHILSTSRTSKTEDKSSTLSAELPMYSNDK

SEQ ID NO: 162131 - protein, 130 aa, Oryza sativa
  Clone ID: PAT_MRT4530_61252C.1.pep
MAASSVLQPAAAAAAWPRFLPSPRRSAAQMCHLFLEQTYQVLSMHKFEWKRPFSGSHRSGILLVCRSSGSSVKAATSSRPEAVSSSHNDQSSKHLFGSVSDAYTIISGYWIGPDMDDGCGNVVAILQRIV

SEQ ID NO: 162132 - protein, 507 aa, Oryza sativa
  Clone ID: PAT_MRT4530_61253C.1.pep
MAGSPPSLLSGSSAGSAGGGGYSLKSSPFSSVGEERVPDPKPRWNPRPEQIRILEAIFNSGMVNPPRDEIPRIRMQLQEYGQVGDANVFYWFQNRKSRSKNKLRSGGTGRAGLGLGGNRASAPAAAHREAVAPSFTPPPPILPAPQPVQPQQQLVSPVAAPTSSSSSSSDRSSGSSKPARATSTQAMSVTTAMDLLSPLAAACHQQMLYQGQPLESPPAPAPKVHGIVPHDEPVFLQWPQSPCLSAVDLGAAILGGQYMHLPVPAPQPPSSPGAAGMFWGLCNDVQAPNNTGHKSCAWSAGLGQHWCGSADQLGLGKSSAASIATVSRPEEAHDVDATKHGLLQYGFGITTPQVHVDVTSSAAGVLPPVPSSPSPPNAAVTVASVAATASLTDFAASAISAGAVANNQFQGLADFGLVAGACSGAGAAAAAAAPEAGSSVAAVVCVSVAGAAPPLFYPAAHFNVRHYGDEAELLRYRGGSRTEPVPVDESGVTVEPLQQGAVYIVVM

SEQ ID NO: 162133 - protein, 75 aa, Oryza sativa
  Clone ID: PAT_MRT4530_61254C.1.pep
MEQHKWRFLRRFLQRAPTVPLSDFVDGVRAVEQRARCCYSESMAIFDDDGDGFTEMLLLLGEAEPRGLVHQQKAN

SEQ ID NO: 162134 - protein, 306 aa, Oryza sativa
  Clone ID: PAT_MRT4530_61255C.1.pep
MMALGVPPPPSRAYVSGPLRDDDTFGGDRVRRRRRWLKEQCPAIIVHGGGRRGGVGHRALAAGVSKMRLPALNAATHRIPSTSPLSIPQTLTITRDPPYPMLPRSHGHRTGGGGFSLKSSPFSSVGEERVPDPKPRRNPRPEQIRILEAIFNSGMVNPPRDEIPRIRMQLQEYGQVGDANVFYWFQNRKSRSKNKLRSGGTGRAGLGLGGNRASEPPAAATAHREAVAPSFTPPPILPPQPVQPQQQLVSPVAAPTSLSSSSSDRSSGSSKPARATLTQAMSVTAAMDLLSPLRRSARPRQEQRHV

SEQ ID NO: 162135 - protein, 66 aa, Oryza sativa
  Clone ID: PAT_MRT4530_61256C.1.pep
AAFSFFFFRGAKRGFIIISGRTGQFLAAYHLLALYLSSYSLSPRQPKRILPRSKRPGCSGGGGVCM

SEQ ID NO: 162136 - protein, 227 aa, Oryza sativa
  Clone ID: PAT_MRT4530_61257C.1.pep
MTVFHFLNCAALTFGPHVVYYSATPLSEYDTIGTCVKAAVVYLGTALVKLVCLATLLKVPENDSFDPYQELMKIFIGFIDVAGLYFALTQLTHRNISQNHKFQAVGLGWAFADSVLHRLAPLWIGARGLEFTWEYIFQGLEANANLVMTLSLAALGSLMWLRKNKPRTLVPIIYACALLLVTMPSITSYLRRSLEWQTPKVVGFELFSSLVMAFISWQLFSACQRPM

SEQ ID NO: 162137 - protein, 91 aa, Oryza sativa
  unsure (1)..(91): unsure at all Xaa locations
  Clone ID: PAT_MRT4530_61258C.1.pep
DVPGRRASGEGGVKQRGXEGDGWNDNTKSSAPAGYGGGGGGLTKRWRERGKGKNELSSVAAGHGKEREFWPMAAPPTSPQPHPKRSLREDS

SEQ ID NO: 162138 - protein, 93 aa, Oryza sativa
  Clone ID: PAT_MRT4530_61259C.1.pep
RGGGGNYLVITFLLKNCKNKNAAFEPWTGLKNLLAKRGGVGDVNGHGVWYALATWAKNLARKTLHRRFTFPAVAISAWIVLLQLSIETHLSEL

SEQ ID NO: 162139 - protein, 1797 aa, Oryza sativa
  Clone ID: PAT_MRT4530_6125C.1.pep
MAERAVAHSLSPNASGDDEEQNPCRRARTPPSPSRRNLGRGEALGEVEGSATSPPAGDGGGRRDGARRRLVYDDGGTPQGALQAAGALLRHPPIVPDPETPARRWLDDVADLVMTAQQRLSACGRSSATEASGAAAAGSMSSRQRARRAAAVTRRSSAIPSPTPPTQEDVCGGPDARLDIERRRDARRAAHATEGASSSGAPLRSGHGGRPPVSPVGGAGCRAFVASLRNVRWPPRFRPTITEKYDGSVNPAEFLQIYTTGIEAAGGDDRVMANFFPMALKGQARGWLMNLPPASVYSWEDLCQQFTTNFQGIYPHPGEEADLHAVQRRDDESLRSYIQRFCQVRNTIPCIPAHAVIYAFRGGVRHNRMLEKIASKEPQTTAQLFELADRVARKEEAWTWNSSGSGVAAPAAPGSAARSGRRDRRRKKGSARSDDEGHVLAVEGASRAPRKGRPASDKKKEAGAPSRERPTGKWCTVHNTSLHDLADCRAVKSLAERTRKWEEEKRQECREGKTPAAPAGNRRAFDAIKAPGMVLRPSQPIIGVTPGHTWPLGHIDLPVTFGGSANFRTERVDFDVADLSLPYNAVLGRPTLVKFMAAVHYAYLQMKMPGPGGPITVHGDLKVALACMEQRADHLAAASKPAGGDERLATSVPAAPRQRMVTCDEVPEDALVSFLRANADVFAWRPADMPGVPREVIEHRLAVRSGARPVWQKVRRQAPERQAFIREEVARLLEVGFIREVIHPEWLANPVVVPKANGKLRMCIDYTDLNKACPKDPYPLPRIDQIVDSTAGCDLLCFLDAYSGYHQIRMAREDEEKTAFITPIGTYCYTTMPFGLKNAGPTFQRTTRISLGSQIGRNVEAYVDDLVVKTRNQETLLSDLAETFESLRSARIKLNPDKCVFGVPAGKLLGFLVSARGIEANPEKIRAIERMRPPSKLRDVQCVTGCMAALSRFISRLGEKALPLFKLLKRSGPFTWMEEAERAFTQLKAYLSSPPVLVAPEPDEPLLLYLAATPQVVSAALVVERDEENPHSAHPHPASTRPGREQGGEAPEPNGGPRPPTAGAGPPPACPMVPGAPDPQDGPGATAGRPRLSPSDLEVVGTEAECAPRGLSDEERPGDAAPGEEDRPRRKVQRPVYFVSEALRDAKTRYPQAQKMLYAILMASRKLRHYFQAHRVTVVTSYPLGQILHNREGIGRVVRWAIELSEFDLRFEPRHAIKSQALADFVAEWSPAPEPVSAPEASSGPSQLPHTAYWVMQFDGSLSLQGAGAGVTLTSPSGDVLRYLVRLDFRATNNMAEYEGLLAGLRVAAGLGIRRLLVLGDSQLVVNQVCKEYQCSDPQMDAYVRQVRRMERHFDGIELRHVPRRDNAVADELLRLASSRAQTPPGAFEERLAQPSARPDPLGETDAPERPPRPVGVQASGPEGSAPSSPRLIAWITEIQAYLADKTLPEDREGSERVRRISKRYVLVEGTLYRRVANGVLLKCIPREQGVELLADVHEGECGAHSASRTLVGKAFRQGFYWPMALNDAVDLVRRCRACQFHARQTHQPAQALQTIPLSWPFAVRGLDILGPFRRAPGGFEYLYVAVDKFTKWPEAYPVIKIDKHSALKFIRGITARFGVPNRIITDNGTQFTSELFASPAHPRSNGQVKRANAEILKGLKTKTFNVLKKHGDSWIEELPAVLWANRTTPSRATGETHFFLVYGAEAVLPSELTLRSPRQSLRRYHQRHVRARSLCVDDLILRRVQTRAGLSKLSPMWEGPYRVIGVPRLGSVRLATGDGTELPNPWNIEHLRRFYP

SEQ ID NO: 162140 - protein, 257 aa, Oryza sativa
  Clone ID: PAT_MRT4530_61260C.1.pep
MRRRRAAGAVWLAVPGHGVASGDGKITRLLASSIEGARGEEAAGGSGGGREVEGGGGCVDEGGHDEEASGEQWRGQVVVVAKRHGAASVVGRRRETKDIASLREAFAAPVDGEVEDLDVAAARCDFYGVFDGHGCSHVADACRERMHELVAEEMGAGAAPREPASWTGAMERSFARMDAEVIAGCRAESGSCRCKGWKCDHMGSTTVVAIVEESHVIVANCGDSSVMLRRDGAPVPEVTVTDRSDGNECLILASDGL

SEQ ID NO: 162141 - protein, 262 aa, Oryza sativa
  Clone ID: PAT_MRT4530_61261C.1.pep
MGRQPCCDKKKVKRGPWTAEEDKKLISFILTHGRCCWRAVPKLAGLLRCGKSCRLRWTNYLRPDLKRGLLTADEEQLVVDLHAKLGNRWSKIAAKLPGRTDNEIKNHWNTHIKKKLIKMGIDPATHQPLPNTKVVSQTRTSTLSTATTESAKSNGMAYPFDPEGGCSRDMSVPTDSMEQSSRNTSSHGLDPLVNWLLEAELPADEPWLNFTSSNEDDFSGIVKQSAWDGSTTDWLLDYQDFSMDDSSLIDGARVQNSDGLNF

SEQ ID NO: 162142 - protein, 105 aa, Oryza sativa
  Clone ID: PAT_MRT4530_61262C.1.pep
PLGCAFATKKSSLGLPLFVPHPIFPPWSQFRGPWGPPFFTRVNGGPRKIWAWFPFFLGPGFLLLGGFLSHVGLARLKPFPFSSFDLIPQKKKKKKKKKKKKTQKI

SEQ ID NO: 162143 - protein, 385 aa, Oryza sativa
  unsure (1)..(385): unsure at all Xaa locations
  Clone ID: PAT_MRT4530_61263C.1.pep
MRTRSGSLYRSGGGGGETAMVGQKRKRSSLPPQYATAGDCCGGGGRRKRLAGGGPDYLDELPDDLVLAVLSKLGASASSPSDLLSVHLTCKRLNGLGRHDMVFAKASPASLAVKAASWSEPVQRFLKLCADAGNLEACYILGMIRFYCLGNRSGGAALLARAAVGGHAAALYSLAVIQFNGSGGAXGPRAGAALCARAAALGHVDALRELGHCLQDGYGVRRDPAEGRRFLVAANARELTLALAAAASHRPFAALPLAGGAAAGAIGCPLLSDFGWSLPEAEPHPANLFMADWWASRGVQATAKKPGLEAPAAATGDSDGGGELRLCSHVRCGRRETRRHEFRRCSVCGAANYCSRACQALDWKRAHKAQCVPMDRWLLAAGEAQ

SEQ ID NO: 162144 - protein, 106 aa, Oryza sativa
  Clone ID: PAT_MRT4530_61264C.1.pep
MMWRRKSSSSGGVSPAGASPRHGGDDNDECNVFPRGYVPIVAGSGDGERVLVPVSLLGDPCIAELLDMAVQQYGYGQPGVLRVPCDGERLRRVVEGALRKGGGQSA

SEQ ID NO: 162145 - protein, 75 aa, Oryza sativa
  Clone ID: PAT_MRT4530_61265C.1.pep
KSPPPFLFNPTPFIFHLSPKNYPQFFPKNLFTPNKNFFPPFFFSGPPHPTLFALFLKPFSTKFSQLIKNTPPFFF

SEQ ID NO: 162146 - protein, 80 aa, Oryza sativa
  Clone ID: PAT_MRT4530_61266C.1.pep
MASQRRCPLRRRGCVGQIPLVAGERRRDAVAGDFAGGGCRRRCPWEGEAATGVVGKSTAVPAVGPATTLGIGMGHRRRHA

SEQ ID NO: 162147 - protein, 183 aa, Oryza sativa
  Clone ID: PAT_MRT4530_61267C.1.pep
LAICPALIVLFRYISLDYDFRRKSTTTTDNDASRALTKTKSIEPNKIPSIQKDGKSDWKSKVNSPPVEAAIEQFTRHLVTEWVTDLWYSRVTPDKEGPEELINIVNNVLGEISVRARNVNLIALLTRDLIDLICKNLELYHLCQAKIGKEKFVNLSTERRDAELKLTLITENKLHPALFSASA

SEQ ID NO: 162148 - protein, 735 aa, Oryza sativa
  unsure (1)..(735): unsure at all Xaa locations
  Clone ID: PAT_MRT4530_61268C.1.pep
MEHTYQYAWVIPLLPLPVIMSMGFGLFLVPTATKNLRRIWAFPSVLLLSIAMVFSVHLSIQQINGSSIYQYLWSWTVNNDFSLEFGYLIDPLTSIMLILITTVGILVLIYSDDYMSHDEGYLRFFVYISFFNTSMLGLVTSSNLIQIYFFWELVGMCSYLLIGFWFTRPIAASACQKAFVTNRVGDFGLLLGILGFFWITGSLEFRDLFKIANNWIPNNEINSLLTILCAFLLFLGAVAKSAQFPLHVWLPDAMEGPTPISALIHAATMVAAGIFLIARLLPLFISLPLIMSFISLIGTLTLFLGATLALAQRDIKRSLAYSTMSQLGYMMLALGIGSYQAALFHLITHAYSKALLFLGSGSVIHSMEPLVGYSPDKSQNMVLMGGLRKYIPITRTCFLWGTLSLCGIPPLACFWSKDEILSNSWLYSPFFGIIASFTAGLTAFYMFRIYLLTFDGYLRVHFQNYSSTKEDSLYSISLWGKRISKGVNRDFVLSTAKSGVSFFSQNLSKIHVNTGNRIGSFSTSLGTKNTFVYPHEPGNTMLFPLLILLLCTLFIGSIGIHFDNEIGELTILSKWLTPSINFFQESSNSSINSYEFITNAISSVSLAIFGLFIXIYVLWICLLFFSEFXDLINSFVKGGPKKYFFHQLKKKIYSWSYNRGYIDIFYTRTFTLGIRGLTELTQFFDKGVIDGITNGVGLASFCIGEEIKYVGGGRISSYLFFFLCYVSVFLFFFLS

SEQ ID NO: 162149 - protein, 80 aa, Oryza sativa
  Clone ID: PAT_MRT4530_61269C.1.pep
MASSSRSSSVLAIPLLLCLLAATTARFAPADNHLLTFGTTAPVVLSDSQRFIPDSGCTSTHLRSRQPSHLWRRSQPWSCG

SEQ ID NO: 162150 - protein, 1709 aa, Oryza sativa
  Clone ID: PAT_MRT4530_6126C.1.pep
MTAQQRLGAGGRSSATKASGAATAGSVSSRRRARRAAAVTHCSSAIPSSTPPTQEDVRRGPDARLSIERRRNGRRAAHTMEGASSSGAPLRFGHGGQPPVPPVGGVGCRAFVASLRNVRWPPRFRPTITEKYDGSVNPADFLQVYTTGIKAAGGDDRVMANFFPMALKGQARGWLMNLPLASVHSWEDLCQQFTMNFQGTYPRPGEEADLHAVQRRNDESLRSYIQRFCQVRNTIPCIPAHAVIYAFRGGVRHNRMLEKIASKEPQTTAELFQLADRVARKEEAWTWNSTGSGVAASAAPGSAARSGRRDRRRKKRSAHSDDEGHVLAVEGASRATRKGRPASDKKKEAGAPSRERPTGKWCTVHNTSLHDLADCRTVKSLAERTRKWEEERRQERREGKAPAAPSGNRRSEAKQKAPAEDIDDGDDDLGFQEPGATIATVDGGACAHASRRSLKAMKRELLAAAPTHEATRRARWSEVALTFDQTDHPPCVARGGQIAMVVSPTVCNVKLGHVLIDGGAALNILSPAAFDVIKAPEMVLRPSQPIIGVTPGHTWPLGHIDLSVTFGGSANFRTERVNFDVADLSLPYNAVLGRPALVKFMAAVHYAYLQMKMPGPGGPISVHGDLKVALACMEQRADHLAAASKPEGGNERLSTSVPAAPRQRMITCDEVPEDALVSFLRANADVFAWRPADMPGVPREVIEHRLAVRPGARPVRQKVRRQAPERQAFIREEVARLLEAGFIREVLHPEWLANPVVVPKANGKLRMCIDYTDLNKACPKDPYPLPRIDQIVDSTAGCDLLCFLDAYSGYHQIRMAREDEEKTAFITPIGTYCYTTMPFGLKNAGPTFQRTTRISLGSQIGRNVEAYVDDLVVKTRNQETLLSDLAETFESLRSARIKLNPDKCVFGVPAGKLLGFLVSARGIEANPEKIRAIERMRPPSKLRDVQCVTGCMAALSRFISRLGEKALPLFKLLKRSGPFIWTEEAERAFTQLKAYLSSPPVLVDPEPDEPLLLYLAATPQVVSAALVLERDEDNPHSAHPHPVSTRPGREQGGEAPESNGGPRPPTAGVGPPPACPTVSGTPDPQDGPGATAGRPRLSPSDPEVVGTEAECAPHGLSDEERSGDAAPSEEDRPRRKVQRPVYFVSEALRDAKTRYPQAQKMLYAILMASRKLRHYFQAHRVTVVTSYPLGQILHNREGTGRVVKWAIELSEFDLHFEPRHAIKSQALADFVAEWTPAPEPISAPEASSGPSQLPHTAYWVMQFDGSLSLQGAGAGVTLTSPSGDVLRYLVRLDFRATNNMAEYEGLLAGLRVAAGLEIRRLLIRLSKRYVLVEGTLYRRAANGVLLKCIPREQGVELLADIHEGECGAHSASRTLVGKAFRQGFYWPTALNDAVDLVRRCRACQFHAKQTHQPAQALQTIPLSWPFAVWGLDILGPFRRAPGGFEYLYVAVDKFTKWPEAYPVIKIDKHSALKFIRGITARFGVPNRIITDNGTQFTSELFGDYCEDMGIKLCFASPAHPRSNGQVERANTEILKGLKTKTFNILKKHSDSWIEELPAVLWANRTTPSRATGETPFFLVYGAEAVLPSELTLRSPRATMYCEADQDQFRRDDLDYLEERRWRAALRAARYQQSLRRYHQRHVRARSLCIDDLVLRRVQTRAGLSKLSPIWEGPYRVIGVPRPGSVRLATGDGTELPNPWNIEHLRRFYP

SEQ ID NO: 162151 - protein, 62 aa, Oryza sativa
  Clone ID: PAT_MRT4530_61270C.1.pep
LSLRDAHLSGYYIASALLHLVAEKANFLKFAICLVLKLKYCLSLFVYVICCCRCNSTVYLFI

SEQ ID NO: 162152 - protein, 118 aa, Oryza sativa
  Clone ID: PAT_MRT4530_61271C.1.pep
MVVTLAAVTALLVAPAVVAATATPPAGYTTAEDVSSDFIKQVGKFAVTVYKLARGVSLYYVSTSQCWSKPAGGGADDYWMVLTATNGAGAAGSYVATIWGIPGSESKTWKLLSFNATS

SEQ ID NO: 162153 - protein, 354 aa, Oryza sativa
  Clone ID: PAT_MRT4530_61272C.1.pep
MWALTPNSGGSSCLPARRTPPPLAAAGEAGSLAAGPGRWCSWRRRQPAERWPKLAVSASGRKSKGGRDEGGGDEPKKNKAASSSSSGKGDASAPSGDVSNNELQSNDTMYVPGNLSYWRDVRASFVVPKVQTVDAHTLPQAATDAPVHCLPRKWAHSIPMPESGCVLVAAEELDGNGTFERTVILLLRLGSRDAYDGPFGVILNRPLYTKMKHVNPSFRNQATPFSDCSLFFGGPVDMSIFLMRTTDDRPIKGFEEVSPGVCFGFRTDLEKASALLKSGAVKPEDLNFYVGYSAWDYDQLLSEIDQGYWHVTSCSSGLISDSLATDPSCLWTEILKLMGGQYAELSQKPKEDGS

SEQ ID NO: 162154 - protein, 71 aa, Oryza sativa
  Clone ID: PAT_MRT4530_61273C.1.pep
LSANTELVSDAWLHHCVHLALWVCTFISTSGPRSRIPCCALLCSRRCVSLAPTRLGANSRATCCPIRSRNI

SEQ ID NO: 162155 - protein, 116 aa, Oryza sativa
  Clone ID: PAT_MRT4530_61274C.1.pep
MGCAGSTPMGAPESDATKKIRKPKPWKHPQPITMVQLTKMREEFWDTAPHYGGRKEIWDALRVAAESEVSLAQAIVESAAIIVSNTDLTLCYDERGAKYELPKYVLSEPTNLIQDS

SEQ ID NO: 162156 - protein, 394 aa, Oryza sativa
  Clone ID: PAT_MRT4530_61275C.1.pep
MPPKKAKLSAGAGAGDRLSALPDALLHHEFAKFAYRFLLERDVSAPVDTLRVLSSPVCDPEVEDYSTCDVDAWIRAAIERRAQVIHISHHPKDEAFSNFDHVPIISCHLKHLKLSGYLFRQRTLMQLSSQCPSLEVLELKGCYLDGHQISSASLKILTIVECRIMEGFTIAAPNLVSLCCVTPYHRAPLFENVGSLTLDAATIVLDDSFLYAGYEYEYEDIDEDAIEGNGSEDGEGSLNDSDYDSDAVSDASTCEYSEIANNYDDEKQLVEHDEVHNRSKGNYHGYDHRYKARPYRGYRKKKFNGGKVLGGDNVLHSLSNARSLELLADAGEVILNRELKTCPTFSNLKTLSLGEWCMGADFGPLISFLQHSPNLEKLFLELKLVHIFISVEFA

SEQ ID NO: 162157 - protein, 381 aa, Oryza sativa
  unsure (1)..(381): unsure at all Xaa locations
  Clone ID: PAT_MRT4530_61276C.1.pep
VNHSPEDKISIMELKLVFSIAFIFCLSHMSSTSHFFISMFSLGDSYIDTGNFVIMATPVAPVWNDKPPYGMSFFGHPTGRVSDGRVIIDFIAEEFGLPFLPASLANSSSVSHGVNFAVGGAPATGIDYFQRNNIVAFKLLNSSLDVQLGWFEELKPSICNTTKGFKNYFSKSLFIVGEFGVNDYNFMWTAKKTEKEVKSLVPQVVEKITTAVERLINQGAVYXVVPGNPPXGCSPIVLTLFMSPNTTDYDGLGCLRAVNRMSKRHNAMLRAALDGLRGKYPHAKIIFADFYRPIIQVLXDPVRFGFAAGGILKACCGGGGPYNWNGNAICGMAGAVACEDPSASVHWDGGHYTEAIYRYIAKGWLXYGPYADPPILTAIRS

SEQ ID NO: 162158 - protein, 1792 aa, Oryza sativa
  Clone ID: PAT_MRT4530_61277C.1.pep
MAEQAKAHNLSPSVSGDDGEPNPRRRARTPPPPPRQSPRREEALERVEGSATSTSTGDGEGRRDGERRLLLYGDGSTPQGALQAAGALLRHPPIVPDSESPAQRWLDDVANLVMTARQRLGAGGGRGERRLLLAIRPPLLRQRLRPRKISVGGQMPASISSAGVMRFCQVRNTIPCIPAHAGGVRHNRMLEKITSKEPQTTAELFQLADRVARKEEAWTWNPSGSGVAASAAPGSAAQTGRRDRRRKKRSAHTDDEGHVLAVEGASRATRKGRPAGDKKKEAGAPSRERPTGKWCIVHNTSLHDLADCRAVKSLAERTRKWEEERRQERREGKSPAVPSGNRRSEAKQKAPAEDIDDGDDDLGFQEPRATIATVDGGACAHVSRRSLKAMKRELLAAAPTHEATRRARWSEVALTFDQTDHPPCVARGGQIAMVVSPTVCNVKLGRVLIDGGAALNILSPAAFDAIKAPGMVLRPSQPIIGVTPGHTWPLGHIDLPVTFGGSANFRTERVNFDVADLSLPYNAVLGRPALVKFMAAVHYAYLQMKMPGPGGPISVHGDLKVALACMEQRADHLAAASKPEGGDERLGTSAPAAPRQRIVTCDEVPEDALVSFLRANADVFAWRPADMPGVPRKVIEHRLAVRPGARPVRQKVRRQAPERQAFIREEVARLLEAGFIREVIHPEWLANPVVVPKANGKLRMCIDNTDLNKACPKDPYPLSRIDQIVDSTAGCDLLCFLDAYSGYHQIRMAREDEEKTAFITPIGTYCYTTMPFGLKNAGPTFQRTTRISLGSQIGRNVEAYVDDLVVKTRNQETLLSDLAETFESLRSARIKLNPDKCVFGVPAGKLLGFLVSARGIEANPEKIRAIERMRPPASLGMCNASPVEAERALTQLKAYLSSPPVLVAPEPNEPLLLYLAATPQVVSAALVVERDEDNPHSAHPHPVLAWPGREQGGEAPEPNGGPRPPTTGAGPLPACQTVPGAPDPQDGPRATAGRPHLSPSDPEANPVPTRPGREQGEEAPEPNGGLRPLTTGVGPLPACPTTPGAPDPQDGPEATVGRPLLSSSDPEVVGTEDECTPRGRLDKERPRDVAPSEEDRPHRKVQRPVYFVSEALRDAKTRYPQAQKMIYAILMASRKLRHYFQAHRVTVVTSYPLGQILHNREGTGRVVKWAIELSEFDLHFEPRHAIKSQALADFVAEWTPAPEPVSVPEASSGPSQLPHTAHWVMQFDGSLSLQGAGAGVTLTSPSGDVLRYLVRLDFRATNNMAEYEGLLAGLRVAAGLGIRRLLMDAYVRQVRRMERHFDGIELRHVPRRDNTVADELSRLASSRAQTPPGAFEERLAQPSARPDPIGETDAPDRPPMPVGVQASGPEGSTPSSLRLIAWIAEIQAYLTDKTLPEDHEGSERVQRISKRYVLVEGTLYRRAANGILLKCIPREQGVELLADIHKGECGAHSASRTLVGKAFRQGFYWPTALNDAVDLVRRCRACQFHAKQIHQPAQALQIIPLSWPFAVWGLDILGPFRRASGGFEYLYIAIDKFTKWPEAYPVIKIDKHSALKFIKGITAQFGVPNRIITDNGTQFTSELFGDYCEDMGIKLCFASPAHPRSNGQVERANAEILRCLKTKTFNILKKHGDSWIEELPAVLWANRITPSRATGETPFFLVYGAEAVLPSELTLRSPRAIMYCEADQDQLRRDDLDYLEERRRREALRAARYQQSLRRYHQRHVRARSLCVDDLVLRRVQTCAGLSKLSPMWEGPYRVIGVPRPGSVRLATSDGTELPNPWNIEHLRRFYP

SEQ ID NO: 162159 - protein, 2034 aa, Oryza sativa
  unsure (1)..(2034): unsure at all Xaa locations
  Clone ID: PAT_MRT4530_61278C.1.pep
MAEQAKAHNLSPSVSGDDGEPNPRRRARTPPPPPRQSPRREEALERVEGSATSTSTGDGEGRRDGERRLLLYGDGSTPQGALQAAGALLRHPPIVPDSESPAQRWLDDVANLVMTARQRLGAGGRSSATKTSGAATTGSVSSRRRARRAAAVARHSAATPSSAPPTQEDQRGGPDARIDIERRRNGRRTPHATEGASSSGVSPQHGRGDQPSVPPXVGGVGCRAFVASLRNVRWPPRFRPTIAEKYDGSVNPAEFLQVYTTGIEAAGGDDRVMANFFPMALKGQARGWLMNLPPASVHSWEDLCQQFTMNFQGTYPRPGEEADLHAVQRRDDESLRSYIQRFCQVRNTIPCIPAHAVIYAFXGGVRHNRMLEKITSKEPQTTAELFQLADRVARKEEAWTWNPSGSGVAASAAPGSAAQTGRRDRRRKKRSAHTDDEGHVLAVEGASRATRKGRPAGDKKKEAGAPSRERPTGKWCIVHNTSLHDLADCRAVKSLAERTRKWEEERRQERREGKSPAVPSGNRRSEAKQKAPAEDIDDGDDDLGFQEPRATIATVDGGACAHVSRRSLKAMKRELLAAAPTHEATRRARWSEVALTFDQTDHPPCVARGGQIAMVVSPTVCNVKLGRVLIDGGAALNILSPAAFDAIKAPGMVLRPSQPIIGVTPGHTWPLGHIDLPVTFGGSANFRTERVNFDVADLSLPYNAVLGRPALVKFMAAVHYAYLQMKMPGPGGPISVHGDLKVALACMEQRADHLAAASKPEGGDERLGTSAPAAPRQRIVTCDEVPVKEVALGDGPVSFLRANADVFAWRPADMPGVPRKVIEHRLAVRPGARPVRQKVRRQAPERQAFIREEVARLLEAGFIREVIHPEWLANPVVVPKANGKLRMCIDNTDLNKACPKDPYPLSRIDQIVDSTAGCDLLCFLDAYSGYHQIRMAREDEEKTAFITPIGTYCYTTMPFGLKNAGPTFQRTTRISLGSQIGRNVEAYVDDLVVKTRNQETLLSDLAETFESLRSARIKLNPDKCVFGVPAGKLLGFLVSARGIEANPEKIRAIERMRPPXKLRDVQCVTGCMAALSRFISRLGEKALPLFKLLKRSGPFTWTEEAERALTQLKAYLSSPPVLVAPEPNEPLLLYLAATPQVVSAALVVERDEDNPHSAHPHPVLAWPGREQGGEAPEPNGGPRPPTTGAGPLPACQTVPGAPDPQDGPRATAGRPHLSPSDPEANPVPTRPGREQGEEAPEPNGGLRPLTTGVGPLPACPTTPGAPDPQDGPEATVGRPLLSSSDPEVVGTEDECTPRGRLDKERPRDVAPSEEDRPHRKVQRPVYFVSEALRDAKTRYPQAQKMIYAILMASRKLRHYFQAHRVTVVTSYPLGQILHNREGTGRVVKWAIELSEFDLHFEPRHAIKSQALADFVAEWTPAPEPVSVPEASSGPSQLPHTAHWVMQFDGSLSLQGAGAGVTLTSPSGDVLRYLVRLDFRATNNMAEYEGLLAGLRVAAGLGIRRLLVLGDSQLVVNXVCKEYRCSDPQMDAYVRQVRRMERHFDGIELRHVPRRDNTVADELSRLASSRAQTPPGAFEERLAQPSARPDPIGETDAPDRPPMPVGVQASGPEGSTPSSLRLIAWIAEIQAYLTDKTLPEDHEGSERVQRISKRYVLVEGTLYRRAANGILLKCIPREQGVELLADIHKGECGAHSASRTLVGKAFRQGFYWPTALNDAVDLVRRCRACQFHAKQIHQPAQALQIIPLSWPFAVWGLDILGPFRRASGGFEYLYIAIDKFTKWPEAYPVIKIDKHSALKFIKGITAQFGVPNRIITDNGTQFTSELFGDYCEDMGIKLCFASPAHPRSNGQVERANAEILRCLKTKTFNILKKHGDSWIEELPAVLWANRITPSRATGETPFFLVYGAEAVLPSELTLRSPRAIMYCEADQDQLRRDDLDYLEERRRREALRAARYQQSLRRYHQRHVRARSLCVDDLVLRRVQTCAGLSKLSPMWEGPYRVIGVPRPGSVRLATSDGTELPNPWNIEHLRRFYP

SEQ ID NO: 162160 - protein, 67 aa, Oryza sativa
  Clone ID: PAT_MRT4530_61279C.1.pep
FRLSMSEAENDGDSPGGLCTIAMQHLAIHAYSRVFIVCSLEIGIIRHTCRPKQQRPSSPTSQTPRRP

SEQ ID NO: 162161 - protein, 1736 aa, Oryza sativa
  unsure (1)..(1736): unsure at all Xaa locations
  Clone ID: PAT_MRT4530_6127C.1.pep
MAERAVAHNLSPSASGDDGEQNPHRRARTPPSPSRRSLGREEALEEVERSATSPLAGNGEGWRDGERRLLVYGDGSTPQGALQAAGALLRHPPVVPDPETPARRWLDDVADLVITAQQRLGAGGRSSATGTSGAAAAGSTSSRRRARRAAAVARRSSAIPSSTPPTQGDVRGGPDARLDIERRRDARHAAHATEGASSSGAPLRFRPTITEKYDGSVNPAEFLQIYTTGIEAAGGDDRVMANFFPMALKGQARGWLMNMPPASVHSWEDLCQQFTMNFQGTYPRPASAAPGSAARSGRRDRRRKKRSAHSGDEGHVLAVEGASRATRKGRPASDKKKEAGAPSRERPTGKWCTMHNTSLHDLADCRAVKSLAERTRKWEEERRQERREGKAPAAPSGNRRSEAKQKAPAEDIDDGDDDLGFQEPGATIATVDGGACAHASRRSLKAMKRELLAAAPTHEATRRARWSEVALTFDQTDHPPCVAWGGQIAMVVSPTVCNVKLGRVLIDGGAALNILSPAAFDAIKAPGMVLRPSQPIIGVTPGHTWPLGHIDLPVTFGGSANFRTERVNFDVADLSLPYNAVLGRPALVKFMAAVHYAYLQMKMPGPGGPISVHGDLKVALACMEQRADHLAAASKPEGGNERLSTSVPAAPRQRMITCDEVPEDALVSFLRANADVFAWRPADMPGVPREVIEHRLAVRPGATPVRQKVRRQAPERQAFIREEVARLLEAGFIREVIHPEWLANPVVVPKANGKLRMCIDYTDLNKACPKDPYPLPRIDQIVDSTAGCDLLCFLDAYSGYHQIRMAREDEEKTAFITPIGTYCYTTMPFGLKNAXTRNQETLLSDLAETFKSLRSARIKLNPDKCVFSVPAGKLLGFLVSARGIEANPEKIRAIERMRPPXKLRDVQCVTGCMAALSRFISRLGEKALPLFKLLKRSGPFIWTEEAERAFTQLKAYLSSPPVLVAPEPDEPLLLYLAATPQVDGPGATAGRPRLPPSDPEVVGTEAECAPRGLSDEERPGDVAPSEEDRPRRKVQRPVYFVSETLRDAKTRYPQAQKMLYAILMASRKLRHYFQAHRVTVVTSYPLGQILHNRGGTGRVVKWAIELSEFDLHFEPRHAIKSQALADFVAEWTPAPESISVPEASSGPSQLPHTAYWGAGAGVTLTSPNGDVLRYLVRLDFRATNNMAEYEGLLAGPRVAAGLGIRRLLVLGDSQLVVNQVCKEYRCSDPQMDAYVRQVRRMERHFDGIELRHVPRRDNAVADELSRLASSRAQTPPGAFEERLAQPSARPDPLGETDAPERPPRPVGVQASGPEGSAPSSLRLVAWIAEIQAYLTDKTLPEDREGSERVQRISKRYVLVEGTLYRRAANGVLLKCIPREQGIELLADIHEGECGAHSAPRTLVGKAFRQGFYWPTALNDAVDLVRRCRACQFHARQTHQPAQALQTIPLSWPFAVWGLDILVPFRRALGGFEYLYVAVDKFTKWPEAYPVIKIDKHSALKFIRGITAWFGVPNRIITDNGTQFTSELFGDYCEDMGIKLCFASPAHPRSNGQVERANAEILKGLKTKTFNILKKHGDSWIEELPAVLWANRTTPSRATGETPFFLVYGAEAVLPSELTLRSPRATMYCEADQDQLRRDDLDYLEERRRRAVLRAARYQQSLRRYHQRHVRARSLCVDDLVLRRVQTRAGLSKLSPVWEGPYRVIGVPRPGSVRLATGDGTELPNPWNIEHLRRFYP

SEQ ID NO: 162162 - protein, 2033 aa, Oryza sativa
  unsure (1)..(2033): unsure at all Xaa locations
  Clone ID: PAT_MRT4530_61280C.1.pep
IGRQPRSHVEPASGGVEVGMGRPIRRSRTPPPPPRQSPKRGEALERVERSATSPTAGDGEERRDGERRLLVYGDGSTPQGALQAAGALLRHPPVVPDPESPAQRWLDDVANLVMTARQRLGAGGRSSATKTSGAATTGSMSSRRRARRAAAVARHSAATPSSAPPTREDQRGGPDAHRGSERRRNGRHAPHVTEGASSSGVSPQHGRGDQPSVPPVGGVGCRAFVASLRNVRWPPRFRPTITEKYDGSVNPAEFLQVYTTGIEAAGGDDRVMANFFPMALKGQARGWLMNLSPASVHSWEDLCQQFTMNFQGTYPLPGEEADLHAVQRRDDESLRSYIQRFCQVRNTIPCIPAHAVIYAFRGGVRHNRMLEKIASKEPQTTAELFQLVDRVARKEEAWTWNPSGSGVAASAAPGSAARTGRRDRRKKKRSVHSDDEGHVLAVEGASRATRKGRPASDKKKEAGAPSRERPTGKWCTVHNTSLHDLVDCRAAKSLAERTRKWEEERRQERREGKSPAVPSGNQRSEAKQKAPAEDIDDGDDDLGFQEPGATIATVDGGACAHVSRQSLKAMKRELLATAPTHEATRRARWSEIALTFDQTDHPPCVAREGQIAMVVSPTVCNVKLGRVLIDGGAALNILSPAAFDAIKAPGMVLQPSQPIIGVTPGHTWPLGHIDFPVTFGGSANFRTERVNFDVADLSLPYNAVLGRPALVKFMVAVHYAYLQMKMPGPGGPISVHDDLKVALACMEQRADHLAAASKPEGGDERLGTSVPAAPRQRMITCDEVPVKEVALGDGPVSFLRANADVFAWRPADMPGVPREVIEHRLAVRPGARPVRQKVRRQAPERQAFIREEVARLLEAGFIREVIHPEWLANPVVVPKANGKLRMCIDYTDLNKACPKDPYPLPRIDQIVDSTAGCDLLCFLDAYSGYHQIRMAREDEKKTAFITPIGTYCYTTMPFGLKNAGPTFQRTTRISLGSQIGRNVEAYVDDLVVKTRNQETLLSDLAETFESLRSARIKLNPDKCVFGVPAGKLLGFLVSARGIEANPEKIRAIERMRPPSKLRDVQCVTGCMAALSRFISRLGEKALPLFKLLKRSGPFTWTEEAERALTQLKAYLSSPPVLVAPEPDEPLLLYLAATPQVVSAALVVERDEDNPHSAYPHPVPTQPGREQGGEAPEPNGGPRPPTTGVGPLPACQTVPGAPNPQDGPRATVGRPHLSPSDPEVNPVPTRPRREQGGEAPEPNGGPRPPTTGAGPLPACPTTPGLPDTQDGPEATVGRPRLSSSDPEVIGTEDECTPHGLLDEECPRDAAPGEEDRPRRKVQRPVYFVSEALRDAKTRYPQAQKMLYAILMASRKLRHYFQAHRVTVVTSYPLGQILHNREGTGRVVKWAIELSEFDLHFEPRHAIKSQALADFVAEWTPALEPVSDPEASSSPSQPPHTTHWVMQFDGSLSLQGAGAGVTLTSPSGDILRYLVRLDFRATNIMAEYEGLLAGLRVAAGLGIRRLLVLGDSQLVVNQVCKEYRCSDPQMDAYVRQVRRMERHFDGIELRHVPKRDNTIADELSRLASSRAQTPPGAFEERLAQPSARPDPLGETDAPDRPPRPVGVQASGPEGSVPSSLRLIAWIAEIQAYLTDKTLPEDREGSERVQRISKRYVLVEGTLYRRAANGILLKCIPREQGVELLADIHEGECGAHFASRTLVGKAFRQGFYWPTALNDVVDLVRRCRACQFHAKQIHQPAQALQIIPLSWPFAVWGLDILGPFRRAPGGFEYLYVAIDKFTKWPEAYPVIKIDKHSALKFIKGITARFGVPNRIITDNGTQFTSELFGDYCEDMGIKLCFASPAHPRSNGQVERANAEILRGLKTKTFNILKKHGDSXIEELPAVLWANRTTPSRATGETPFFLVYGAEAVLPSELTLRSPRATMYCEADQDQLRRDDLNYLQERRRRAALRAARYQQSLRRFHQRHVRARSLCVDDLVLCRVQTRAGLSKLSPMWEGPYRVIGVPQPGSVRLATGDGTELPNPWNIEHLRRFYP

SEQ ID NO: 162163 - protein, 569 aa, Oryza sativa
  Clone ID: PAT_MRT4530_61281C.1.pep
MGREGEGEAGGLRRRQCRFGEPTCAVKSASWRSASGQIGDREDDAGGEVRISQQNLQVRKENIISQEKVLQAFDNALQKHLNPIHRSLESLTERIDTLTHEVGQIKQSNPNHHANEHYRSEANQDAAGFAHYGEAVELRFLNKLKPRLYYTQEKITAEDGTVIQIALFKDNQIVKSGPLSSARIEFVALEGDFNDVAPENWTEYMFNQNIARSPKGPVLGGVCQIKLKNGEASPSGISFVVPSSKSRSGMFILAARVHSSDKAGFRIMEALMNPVEVQVYRNKANINSDTPKLKDDVYRLKGISKKGTRFDWLKHNGINTVEDMLKALNKNEKKIRTECFKLEKNSKDWKETVKHARKCDLEGNCNLKSYRVEEKHVVLFFNCVHDLVGAQFHDGYVTKDNFNSDQQDAVNCLKKQAYDALDDIAFDDKMKDNYPVSLSSAMNTSITDGDASIPLTDRAGTNYPDLHVTSQAVGNSHHAEIYQEPELLQALLNYNSAYEGYRAGAVAQIYGGFSEVDIPIGCYIGQTSEGTSSGGNALIGLMNMSQNGSDGSNIAELIDNDIDPYQYII

SEQ ID NO: 162164 - protein, 2112 aa, Oryza sativa
  unsure (1)..(2112): unsure at all Xaa locations
  Clone ID: PAT_MRT4530_61282C.1.pep
MAEQAKAHNLSPSVSGDDGEPNPRRRARTPPPPPRQSPRREEALERVEGSATATSTGDGEGRRDGERRLLVYGDGSTPQGALQAAGALLRHPPVVPDPESPAQRWLDDMANLVMTARQRLGAGGRSSATKTSGAATTGSVSSRRRARRAAAVARHSAATPSSAPPTREDQCGGPDARIGIEHRRNGRRAAHATEGASSSGVSPQLGRGDQPSVPPVGGVGCRAFVASVWNVRWPSRFRPTIAEKYDGSVNPAEFLLVYTTGIEAAGGDDRVMANFFPMALKGQARGWLMNLPPASVHSWEDLCQQFTMNFQGTYPRPGEEADLHAVQRRDDESLRSYIQRFCQVRNTIPCIPAHAVIYAFXGGVRHNRMLEKIASKEPQTTAELFQLADRVARKEEAWTWNPSGSGVAASAAPGSAARTGRRDRRRKKRSAHSDDEGHVLAVEGASRATRKGRPASDKKKEAGAPSRERPTGKWCTVHNTSLHDLADCRAVKSLAERTRKWEEEMRQERREGKSPAVPSGNRRSEAKQKAPAKDIDDGDDDLGFQEHGATIATVDGGACAHVSRRSLKTMKRELLAAAPTHEATRRARWSEVALTFDQTDHPPYVARGGQIAMVVSPTVCNVKLGRVLIDGGAALNILSPAAFDAIKAPGMVLRPSQPIIGVTPGHTWPQGHIDLPVTFGGSANFRTERVNFDVADLSLPYNAVLGRPALVKFMAAVHYAYLQMKMPGPSGPISVHGDLKVALACMEQRADHLAAASKPEGGDERLGTSVPAAPRQRIVTCDEVPVKEVALGDGPVSFLRANADVFAWRPADMPGVPREVIEHRLTVRPGARPVRQKVRRQAPERQAFIREEVARLLEAGFIREVIHPEWLANPVVVPKANGKLRMCIDYTDLNKACPKDPYPLPRIDQIVDSTAGCDLLCFLDACSGYHQIRMAREDEEKTAFITPIGTYCYTTMPFGLKNAGPTFQRTTRISLGSQIGRNVEAYVDDLVVKTCNQETLLSDLAETFESLRSARIKLNPDKCVFGVPAGKLLGFLVSARGIEANPEKIRAIERMRPPSKLRDVQCVTGCMAALSRFISRLGEKALPLFKLLKRSGPFTWTEEAEHALAQLKAYLSSPPVLVAPEPNEPLLLYLAATPQVVSAALVVERDEDNPHSAHPHPALAWPGREQGGEAPEPNGGPRPPTTGAGPLPACQTVPGAPDPQDGPRATAGRPHLSPSDPEANPVPTRPGREQGEEAPEPNGGLRPLTTGVGPLPACPTTPGAPNPQDGPEATVGRPPLSFSDPEVVGTEDECAPRGRLDEERPRDAAPSEEDRPHRKVQRPVYFVSEALRDVKTRYPQAQKMLYAILMTSRKLHHYFQAHRVTVVTSYPLGQILHNREGTGRVVKWAIELSEFDLHFEPRHAIKSQALADFVAEWTPAPEPVSVPEASSGPSQLPHTAHWVMQFDGSLSLQGAGAGVTLTSPSGDVLRYLVRLDFRATNNMAEYEGLLAGLRVAAGLGIRRLLVLGDSQLVVNQVCKEYRCSDPQMDAYVRQVRRMERHFDGIELRHVPRRDNTVADELSRLASSRAQTPPGAFEERLAQPSARPDPLGETDAPDRPPRPVGVQASGPEGSAPSSLRLIAWIAEIQAYLTDKTLPEDREGSERVQRISKRYVLVEGTLYRRAANGILLKCIPREQGVELLADIHEGECGAHSASRTLVGKAFRQGFYWPTALNDAVDLVRRCRACQFHAKQIHQPAQALQIIPLSWPFAVWGLDILGPFRRAPGGFEYLYVTIDKFTKWPEAYPVVKIDKHSALKFIKGITARFGVPNRIITDNGTQFTSELFGDYCEDMGIKLCFASPAHPRSNGQVERANAEILRGLKTKTFNILKKHGDSWIEELPAVLWANRTTPSRATGETPFFLVYGAEAVLPCSLSQTSASTSTKSGSSEAAASRDNDDDENGGRSGGRWRRGSGCRGRRCSGSRRAKRSGGRSRQPLGEADGGGAESGGGPERRRRRNGVRRRRRRERSTARARIRRRERAVSGGNGRAEHGQRFYSAERGRARPERKETGAEISAAIEDAGDDCGMNPDESEGEREGKTGETGEGIAGNNSPHFNARGDGGRRRDSRRRRR

SEQ ID NO: 162165 - protein, 1912 aa, Oryza sativa
  unsure (1)..(1912): unsure at all Xaa locations
  Clone ID: PAT_MRT4530_61283C.1.pep
MPVGLFPVVTATKTSGAATTGSVSSRRRARRAAAVARRSAATPSSAPLTREDQRGGPDARIGIERRRNGRRATHATEGASSSGVSPQHGRGDQPSVPPVGGVGCRAFVASLRNVRWPPRFRPTIAEKYDGSVNPAEFLQVYTTGIEAAGGDDRVMANFFPMALKRQARGWLMNLPPASVHSWEDLCQQFTMNFQGTYPRPGEEADLHAVQRRDDESLRSYIQRFCQVRNTIPCIPAHAVIYAFXGGVRHNRMLEKIASKEPQTTAELFQLADRVARKEEAWTWNPSGSGVATSAAPGSAAQTGRRDRRRKKRSAHSDDEGHVLTVEGASRATRKGRPASDKKKEAGAPSRERPTGKWCIVHNTSLHDLADCRAVKSLAERTRKWEEERRQERREGKSPAVPSGNRRSEAKQKAPVEDIDGGDDDLGFQEPGATIATVDGGACAHVSRRSLKAMKRELLAAAPTHEATRRARWSEVALTFDQTDHPPCVARGGQIAMVVSPTVCNVKLGRVLIDGGGGGXAALNILSPAAFDAIKAPGMVLWPSQPIIGVTPGHTWPLGHIDLPVTFGGSVNFRTERVNFDVADLSLPYNAVLGRPALVKFMAAVHYAYLQMKMPGPGGPISVHGDLKVALACMEQRADHLAAASKPEGGDERLGTSVPAAPRQRMITCDEVPVKEVALGDGPVSFLRANADVFAWRPADMPGVPREVIEHRLAVRPGARPIRQKVRRQAPERQAFIREEVARLLEAGFIREVIHPEWLANPVVVPKANGKLRMCIDYTDLNKACPKDPYPLPRIDQIVDSTAGCDLLCFLDAYSGYHQIRMAREDEEKTTFITPIGTYCYTTMPFGLKNAGPTFQRTTRISLGSQIGRNVEAYVDDLVVKTRDQETLLSDLAETFESLRSARIKLNPDKCVYGVPAGKLLGFLVSARGIEANPEKIRAIERMRPXKLRDVQCVTGCMAALSRFISRLGEKALPLFKLLKRSGPFTWTEEAERALTQLKAYLSSPPVLIAPEPDEPLLLYLAATPQVVSAALVVERDEDNPHSAHPHPVLAWPGREQGGEAPEPNGGPRPPTTGAGPLPACQTVPGAPDPQDGPGATAGRPHLSPSDLEVNPVPTRPGREQGEEAPEPNGGLRPPTTRVGPLPACPTMPGAPDPQDGPEATVGRPRLSSSDPEVVGTEDECAPRGRLDEERPRDAAPGEEDRPHRKVQRPVYFVSEALRDAKTRYPQAQKMLYAILMASRKLRHYFQAHRVTVVTSYPLGQILHNREGIGRVVKWAIELSEFDLHFEPRHAIKSQALADFVAEWTPAPEPVSLPEASSGPSQLPHTARWVMQFDGSLSLQGAGAGVTLTSPSGEILRYLVRLDFRATNNMAEYEGLLAGLRVAAGLGIRRLLVXNQVCMEYRCSDPQMDAYVRQVRRMERHFDGIELRHVPRRDNTIADELSRLASSRAQTPPGAFEERLAQPSARPDPLGETDAPDRPPRPVGVQASGPEGSAPSSLRLIAWIAEIQAYLTDKTLPEDREGSERVQRISKRYVLVEGTLYRRAANGILLKCIPREQGVELLADIHEGECGAHSASRTLVGKAFRQGFYWPTALNDAVDLVRRCRACQFHAKQIHQPAQALQIIPLSWPFAVWGLDILGPFRQAPGGFEYLYVAIDKFTKWPEAYPVVKIDKHSALKFIKGITARFGVPNRIITDNGTQFTSELFGDHCEDMGIKLCFASPAHPRSNGQVERANAEILRGLKTKTFNILKKHGDSWIEELPAVLWANRTTPSRATGETPFFLVYGAEAVLPSELTLRSPRATMYCEADQDQLRRDDLDYLEERRRRAALRAARYQQSLRRYHQRRIRARSLCVNDLVLRRVQTRAGLSKLSPMWEGPYRVISVPRPGSVRLAAGDGTELPNPWNIEHLRRFYP

SEQ ID NO: 162166 - protein, 98 aa, Oryza sativa
  Clone ID: PAT_MRT4530_61284C.1.pep
MLSCCLCSGVRRLLLLLLLLLVWSAYDFEDYQIGMLFGAFLGYVGCYQLWKAAPSVFVDAALAFVFYKLSVVSSELHRQRKTNSLITRLKFGIHFLRI

SEQ ID NO: 162167 - protein, 2033 aa, Oryza sativa
  unsure (1)..(2033): unsure at all Xaa locations
  Clone ID: PAT_MRT4530_61285C.1.pep
MAEQAKAHNLSPSVSGDDGEPNPRRRARTPPPPPRQSPRREEALERVEGSATSTSTGDGEGRRDGERRLLVYGDGSTPQGVLQAAGALLRHPPVVPDPESPAQRWLDDVANLVMTARQRLGAGGRSSATKTSGAATTGSVSSRRRARRAAAVARHSVATPSSAPPTREDLRGGPDARISIERRRNGRRAAHATEGASSSGVSPQHGRGDQPSVPPVGGVGCRAFVASLRNVRWPPRFRPTIAEKYDGSVNPAEFLQVYTTGIEAAGGDDRVMANFFPMALKGQARGWLMNLPPASVHSWEDLCQQFTMNFQGTYPRPGEEADLHAVQRSDDESLRSYIQRFCQVHNTIPCIPAHAVIYAFXGGVRHNRMLEKIASKEPQTTAELFQLADRVARKEEAWTWNPSGSGVAASAAPGSAARTGRRDRRRKKRSAHSDDEGHVLAVEGASRATRKGRPASDKKKEAGAPSRERPTGKWCIVHNTSLHDLADCRAVKSLAERTRKWEEERRQERREGKSPAVPSGNRRSEAKQKAPAEDIDDGDDDLGFQEPGATIATVDGGACAHVSRRSLKAMKRVLLAAAPTHEATRQARWSEVALTFDQTDHPPCVARGGQIAMVVSPTVCNVKLGRVLIDGGAALNILSPAAFDAIKAPGMVLRPSQPIIGVMPGHTWPLGHIDLPDTFGGSANFRTERVNFDVADLSLPYNAVLGRPALVKFMAAVHYAYLQMKMSGPDGPISVHGDLKVALACMEQRADHLAAASKPEGGDERLGTSAPAAPRQRIVTCDEVPVKEVALGDGPVSFLRANADVFAWRPADMPGVPREVIEHRLAVRPGARPVRQKVRRQAPERQAFIREEVARLLEAGFIREVIHPEWLANPVVVPKANGKLRMCIDYTDLNKACPKDPYPLLRIDXIVDSTAGCDLLCFLDAYSGYHQIRMAREDEEKTAFITPIGTYCYTTMPFGLKNAGPTFQRTTRISLGSQIGRNVEAYVDDLVVKTRNQETLLSDLAETFESLRSARIKLNPDKCVFGVPAGKLLGFFVSARGIEANPEKIRAIERMRPPXKLRDVQCVTGCMAALSRFISRLGEKALPLFKLLKRSGPFTWTEKAERALTQLKAYLSFPPVLVAPEPNEPLLLYLAATPQVVSAALVVERNEDNPHSAHPHPVLAWPGKEQGGEAPEPNGGPRPPTTGAGPLPACQTVPGAPDPQDGPGATAGRPHLSPSDPEANPVPTRPGREQGEEAPEPNGGLRPLTTGVGPLPACPMTPGAPDPQDGPEATVGRPPLSSSDPEVVGTEDECAPRGRLDEERPRDAAPSEEDRPHRKVQRPVYFVSEALRDVKTRYPQAQKMLYAILMASRKLRHYFQAHRVTVVTSYPLGQILHNREGTGRVVKWAIELSEFDLHFEPRHAIKSQALADFVAEWTPAPGPVSVPEASSGPSQLPHTXHWVMQFDGSLSLQGAGAGVTLTSPSGDVLRYLVRLDFRTTNNMAEYEGLLAGLRVAAGLGIRRLLVLGDSQLVVNQVCKEYRCSDPQMDAYVRQVRRMERHFDGIELRHVPRRDNTIADELSRLASSRAQTPPGAFEERLAQPSARPDPLGETDAPDRPPRPVGVQASGPEGSAPSSLRLIAWIAEIQAYLTDKTLPEDREGSERVQRISKRYVLVEGTLYRHAANGILLKCIPREQGVELLADIHEGECGAHSASRTLVGKAFRQGFYWPTALNDAVDLVRRCRACQFHAKQIHQPAQALQIIPLSWPFAVWGLDILGPFRRAPGRFEYLYVAIDKFTKWPEAYPVVKIDKHSALKFIKGITARFGVPNRIITDNGTQFTSELFGDYCEDMGIKLCFASPAHPRSNDQVERANAEILRGLKTKTFNILKKHGDSWIEELPAVLWANRTTPSRATGETPFFLVYGAEAVLPSELTLRSPRVTMYCEADQDQLRRDDLDYLEERRRRAALRAARYQQSLRRYHQRHVRARSLCVDDLVLRRVQTRAGLSKLSPMWEGPYRVIGVPRPGSVRLATGDGTELPNPWNIEHLRRFYP

SEQ ID NO: 162168 - protein, 316 aa, Oryza sativa
  Clone ID: PAT_MRT4530_61286C.1.pep
MSRVRDRAEDFKESVRVAALGHGYTESQLAALMSSFIIRKPPPKLPFTKAAIKTLESIRELEKFIVKHRKDYVDLHRTTEQERDNIEHEVSVFVKACKEQIDILKNRIHEEKGGSTKTWLGTSDESSRLDLIAHQHGVVLILSERLHSVTVQFDRLRTMRFQDAINRAMPRKRIQKKRETKAAEPSKPNLVLKSDVSKVEDQEVSTAPLRVQEQLLDDETRALQVELTNLLDAVQETETKMIEMSALNHLMSTHVLQQAQQIQYLYDQAVEATNNVERGNKELSQAIQRNSSSRTFLLLFFFVLTFSVLFLDWYSK

SEQ ID NO: 162169 - protein, 90 aa, Oryza sativa
  Clone ID: PAT_MRT4530_61287C.1.pep
KSAKEHGCRIQKNPQRGFNVELPDALGRPHIGKIQMAMPHFDVCPMLCATHNGKGLFKMGDFMGSFQLALDDKLVGINKILRERRFLKMD

SEQ ID NO: 162170 - protein, 203 aa, Oryza sativa
  Clone ID: PAT_MRT4530_61288C.1.pep
GGGGNGAPGGRRRRRRPRRPSKATLRRRRRLLLRLPQPGEAGVPARRRDDDDNARERPATGRPRGAAAPHHPRRPSHPPPHHRGRGGAGGRRRVQRQGGHRRREEEQRQRRHRHRSPPRRRRRSRRHDGGGAGAATPGGRGGAGGGAPHPGRSRGWCGRRRGRLRRLGGEPAGVPPRRLRRQAARRGVHPAVHVRQHLLPAKL

SEQ ID NO: 162171 - protein, 1623 aa, Oryza sativa
  Clone ID: PAT_MRT4530_61289C.1.pep
MVLLLSPWNRVSRLLPVLIAGACTASMLQHILEIIRKSTSLNALLHNLTWDLSSLALNMFGHSQEYRSCATRVLLHPLLLSLADVSCVTVHLELAAAPQLKLSRSGFLESIWASCLSLFALGPAERLDAYNILSLYLSTLKHVILGPDEYDLRNSNDFWDEIRRGLVDKDSLVRKQALYILRISLDIFSSSEDNGAQQCSRRRSAALPAQDKSNTAMTKRERWAQKEAKSLGIGEMSQSDENCSSGKDRWKVFLLLYEMLQEYGTHLVEAAWTHQVMLLFESTPRSDYSNHMSYTVFHAQMESFEGFFHWMVVLWERGFTHDNPQVRYLVMHSFLDITWEHYLVCPQIVPRGFVLGPLLRGLNDVVHHKDFEFEVEILKNTALLHQNYLAIFRADSVPKPKVDCVKGVYDSKIIKGAERFFGLYAQRLTTRDRLHLVWSLSSSAKQDSFGRAGLMALAFCVASCACHLNTNDLPCDSAGQEMAKCNGDAHTKVNIEDLLDALMILCEKSKQHFNPKYRLKVCEQVMKATTSLISAAEIPLNQLLYFISAIPREFTDYYGELRPMVQKWFVEKKECSSGNTLLEKLIDFPTTFVKHTEVNGPYLFDDEDVGAWEAEARRWARTLLLVTSEEQHFTQIFVFLEKYGNNLSEEYPTGECIQVKFFIIVLCLIEELEVKHKRLIHQNNTISKEGSDSSNGLEHHALNKKLAKFLLIILENMVIFSRTSCSIFWLRNSEDMDLPSSVKGKLGGPSQRRLPTSTTSLVLQAIWSMRSISSIVTWCNNYCSDISLCSTLTFFWEFCWEVIQHHSYATEWLCLDSLLSFSCCRGENESLLKMLYPLFSESTLRSIFVDIIESLENAGENSVLAILRCVRSVLGLLHFSMRTRNLSSLGISYEMMMQFVKSSWILHLSCNKRRVAPIAALLSAVLHPAIFPNLEMHQENEKGPGPLKWFIENLLGEGSKSPRTIRLAALHLSGIWLMYPKTLSFYMEELKLLSLYGSVAFDEDFEAELSENHEARLEVSMLAQSPDREFTEVRLFAITMSINDKTNWVFDLFTNDEQFDNFIVYPLAMLLQVFINTELYARVSVAVLFDHLWKQIEVKSTLETEEALRSGKLFLLKLLDSAVNDKDISRELYKKYSSVHRRKVRIWQMICVLSQYVEDDIVKEVTSSIHICLYRNNLPAVRQYLETFAILIYLKFPALAEEQLIPIFHDNEMRQQALSSYVFIAANLILHSRELAVQINHLNELFPPIMPFLTSHHHSLRGFTQLLVHCVLSKMGSVLALGSSENPVFERRCFQDLKRYLAENTDCVRLRASVERFLDVFNPDTSGTPSGIFSSRPEVSFDFECVPVSVMERVINFLNDVREDLRQSIAKDSITIKNEDLTAEMHHKEDRTDENIVELLEPSQDVLNFQKKITPYRNFDQPLNVGGHSVVGDDYISRLLLDLEGDDQQLDLALESRNHAVETIKQSQQQLIVVASLVDRIPNLAGLTRTCEIFKAVGLAVADKSIIEDKQFRLISVTAEKWLPMMEVPVNSVKVFLEKKRLEGYSVIGLEQTANSKPLDHFSFPSKTVLVLGREKEGIPVDIIHVLDACVEIPQLGIVRSLNVHVSGAIAVWEYTRQQRIAT

SEQ ID NO: 162172 - protein, 1515 aa, Oryza sativa
  unsure (1)..(1515): unsure at all Xaa locations
  Clone ID: PAT_MRT4530_6128C.1.pep
MAERAVAHNLSPSASGDDGEQNPRRRARTPPPPSRRSLRREEALEGVERSATSPPTSDEEGRRDGERRLLVYGDGSTPQGALQAAGALLRHPPVVPDPETPARRWLDDVADLVMTAQQRLGAGGRSSATKASGAATAGSVSSRRRARRAAAVTRRSFAIPSSTPPTQEDVRRGPDARLSIERRRNGRRAAHATEGASSSGAPLRFGRGGQPPVPPVGGVGCRAFVASLRNVRWPPRFWPTITEKYDGSVNPAEFLQVYTTGIEAAGGDDRVMANFFPMALKGQARGWLMNLPSVSVHSWEDLYQQFTMNFQGTYPCPGEEADLHAVQRRDDESLRSYIQRFCQVRNTIPCIPAHAVIYAFRGGVRHNRMLEKIASKEPQTTXELFQLADRVARKEEAWTWNSTGSGVTASAAPGSAARSGRRDRRRKXEGASRATRKGRPASDKKKEAGAPSRERPTGKWCTVHNTSLHDLADCRAVKSLAERTRKWEEERRQERREGKAPAAPFGNRRSEAKQKAPAEDIDDGDDDLGFQEPGATIATVDGGACAHASRRSLKAMKRELLAAAPTHEATRRARWSEVALTFDQTDHPPCVARGGQIAMVVSPTVCNVKLGRVLIDGGAALNILSSAAFDAIKAPGMVLRPSQPIIGVTPGHTWPLGHIDLPVTFGGSANFRTERVNFDVADLSLPYNAVLGRPALVKFMAAVHYAYLQMKMPGPGGPISVHGNLKVALACMEQRADHLAAASKPEGGNERLSTSVPAAPRQRMITCDEVPEDALVSFLRANADVFAWRPADMPGVPREVIEHRLAVRPGARPVRQKVRRQAPERQAFIREEVARLLEAGFIREVIHPEWLANPVVVPKANGKLRMCIAYTDLNKACPKDPYPLPRIDQIVDSTAGCDLLCFLDAYSGYHQIRMAREDEEKTAFITPIGTYCYTTMPFGLKNAGPTFQRTTRISLGSQIGRNVEAYVDDLVVKTRNQETLLSDLAETFESLRFARIKLHPDKCVFGVPAGKLLGFLVSARGIEANPEKIRAIERMRPPSKLRDVQCVTGCMAALSRFISRLGEKALPLFKLLKRSGPFTWTEEAERALTQLKAYISSPPVLVAPEPNEPLLLYLAATPQVVSAALVVERDEDNPHSAHPHPASTRPGREQAGEAAEPNGGPRPPTAGAGPPPACPTVPGAPDPQDGPGATAGRPRLSPSNPEVVGTEAECAPRGLSDEERPGDAAPGEEDRPRRKVQRPVYFVSEALRDANTRYPQAQKMLYAILMASRKLRHYFQAHRVTVSQALADFVAEWTPAPEPISVPEASSGPSQLPHTAYWVMQFDGSLSLQGAGAGVTLTSPNGDVLRYLVRLDFRATNNMAEYEGLLAGLRVAARLGIRRLLVLGDSQLVVNXDKTLPEDREGSERVRRISKRYVLXRAPGGFEYLYVAVDKFTKWPEAYPVIKIDKHSALKFIRGITGRFGVPNRIITDNGTQFTSELFGDYCEDMGIKLCFASPAHPRSNGQVERANAEILKGL

SEQ ID NO: 162173 - protein, 481 aa, Oryza sativa
  unsure (1)..(481): unsure at all Xaa locations
  Clone ID: PAT_MRT4530_61290C.1.pep
TYVFFLTEKDRHMLTLPFTVEEVKKVVFELKQNKAPGPDGFPGEFYKRFWHIVKNDLMDLVNDFHNGYLDVERLNFGIITLIPKTKDATQIQKFRPICLFNVSFKIITKVLMNRIDKVMSYIISKNQTAFLKNRYIMEGVVILHEIMSSLHVKKQSGILFKVXFEKAYDKVDWVFIHRMLSAKGFSDLWCDWTIKVIRGGKVAVKVNDQIGPYLQTHKGLRKGDPLSPLLFNLAVEALTLMVNRADNNSLLEELGTNENNKIAILQYADDTIFLLLDNLEYDRNLKFILCLFEQLSGLKINFNKSEVFCFGGAIEKQNLYSQIFTCDIGVGGLGMIDLDVMNKALLGKXHWKIESEEGWWQDILREKYLSQKTMSWVAYKPGNSHFWHGLMEIREDFLKFVSKKVGNGKKKTXFWEDSWCGGRPLNLQFPALYNITHTRHITLAKLKEKGWDTIKFRRSLHGDKLRDWIWIKQKCVRCTLS

SEQ ID NO: 162174 - protein, 235 aa, Oryza sativa
  unsure (1)..(235): unsure at all Xaa locations
  Clone ID: PAT_MRT4530_61291C.1.pep
MVLVLPRLVRTPFTXLSSARYGGGGRAERSSCAALALRWYAVAAGGRVYSRILSLKYIGSHTRSGFLESIWASCHSLFALRPAECLDAYSILSLSLYLSTLKYVFSGPDEPQDYDLTNSNEFWDEIRRGLVDKDSLVRKQALYILRISLDIFPSSKNDAAQQCSRKRSAALPVQDKPNTAMTKRERWAQKEARSLGIGETSQSDENCSSRKDRSKVFLLLYEMLQEYGTHLVEAA

SEQ ID NO: 162175 - protein, 111 aa, Oryza sativa
  unsure (1)..(111): unsure at all Xaa locations
  Clone ID: PAT_MRT4530_61292C.1.pep
EQVPTAXTNKXGEKQVGEPHHTGPSKTXXKXDKGPHTXPQNRQHRXKDPTAAPTKKGTRATRPEPSGKGEREGETEHGNHRKEADEEHPAAPDPXKEKHDATATGGHSKGG

SEQ ID NO: 162176 - protein, 95 aa, Oryza sativa
  unsure (1)..(95): unsure at all Xaa locations
  Clone ID: PAT_MRT4530_61293C.1.pep
MAASSSSSSSLAVVVVAAAVALVAGGGAAVAQLCEEYYDCTCPEGGDIXRRVRGDXHRXNXRIFXSLIRLHFHNWFXQGCDXXLLLDSVPGVPXE

SEQ ID NO: 162177 - protein, 1236 aa, Oryza sativa
  unsure (1)..(1236): unsure at all Xaa locations
  Clone ID: PAT_MRT4530_61294C.1.pep
MAKTMEQRRRRAENRAGASXSQRPLRRRMXGEECMSKGDDFAIASSASRRPSGLWANDRLTDHXEPMYLNYTVYPHKCPFHKGSHLSFRKQLAPTVETSKRNHXERMPPKRVVKEKVTRRKESEAGGGMAAEKGAEPSAPIAEDGGAPPASAPAPLLPSSAPAASLGQVPNTAEAAKAAAAARALQTRAEILSTSKLLVPQAAPSQLAAASTALTAVQVNPDPETQAEADMEAMRQNMTXLQDMLRQMQEQQQAYEAARRAKAASAPILQYSAGYIPPQVYPQAPIQPLPPQATQALVYFAGQPSTAAVHPGPHVQLQAQPVTTQAHSQPPGQVSQAMAEGASALQAQLQAFIQQFSQPHSISGIAPSAQPEGSTGHGAPSWLSSNQPGLGALPWSQGPXFDFNNIAQAPTVPPQAPTLGFVANQAPNQSAMAWPQPTFDPSMAAHQASPIGAGQPNTVAQPHAQAVTSPFATPYPXQGAVNRAGGEKGLLLSGGIKTRPIPPQFKFPPVPRYSGEIDPKEFLSIYESAIEAAHGDENTKAKVIHLALNSIARSWYLNLAANSIYSWEQLRDVFVLNFRVTYEEPKTQQHLLGIRQRSGESIREYMRRFLQARCQVQDITEASVINAASAGILEGELTKKIANKEPQTLEHLLRIIDVYAWGEEDSKRWQAIQAEYDKASIAAAKAQVQAQVAEPPPLAVRQPQPANQGXPPRQGQAPITWRKFRTDRAGKAVMAVEEVQALRKEFDSQQASNHQQPVRKKYLNQQISFGPEDAEGVMFPHQDPLVISAEIAGFEVQRILVDGGSSADVIFAGAYAKMGLPTLALTQASASLRGFGGESVQVLGQAQLLVAFGTGKNRREEKIMFDVVDIPYNYNAIFGCATFNKFEAISHHNYLKLKMPGPVGVIVVKGLQPSAASKGDLAIINRAVHNVEAEPHDPAKHAPKPAPHGKVIKIQIDDTDPTKLVSLGGDMGEEEVENILEVLKKNIDNFAWGPDEVGSVSTDLIMHHLAVMPDAKPRKQKLRKMSVDLQEAAKAEVQKLLKARVIQEIDHPEWLANPVLVRKSNDKYRMCVDFTNLNKAWPKDDFPLPRIDQLVDSTAGYELMSFLDAYSGYHQIHMNPADIPKTSFITPFGTFCHLRMPFGLRNAGATFARQVYKVLYKQLGXNVEGYVDDIVVKSRKAFDHVSDLXETFDNLRAAGMTLNPDKCVFGVRAXKLLGFLVSERGIPAVLRRRSTR

SEQ ID NO: 162178 - protein, 94 aa, Oryza sativa
  Clone ID: PAT_MRT4530_61295C.1.pep
MAALGYTALGLYRRREAKARVATDSGDTGDPFTGARRRRRRPTATGDAMEGLGFGRERRIRFEIESGDFQRKLDDTSKREKIEGIPRIISPLLI

SEQ ID NO: 162179 - protein, 1258 aa, Oryza sativa
  unsure (1)..(1258): unsure at all Xaa locations
  Clone ID: PAT_MRT4530_61296C.1.pep
MPSKQATISSPFARRSEKTFTAPSTDAICTPQGAAVEAPREAVQEQAPPAEQCQDVQRRVIQVIIRADLTNQLSKWQKKMQLRMVHNITLAGEGAPQYLSQQISFGPEDAEGVMFPHQDPLVISAELAGFEVRRILVDGGSSADVIFAGGSSADVIFSAELTAKXSRFRGFGGEAVQVLGQAQLLVAFGTGENRREEQILFDIVDIPYNYNAIFGRATLNKFEAISHHNYLKLKMPGPTGVIVVKGLQPLAASKGDLAIINRAVHNVEAKPHDRAKHAPKPAPHNKVIKIQIDDADPTKLVSLGGDIGEEEVENILEVIKKNIDIFAWGPDEMGGVSTDLIMHHPTVKPDTKPRXQKLRKMSVDHQEAAKAEVQKLLKARVIQEIDHPEWLANPVMVRKSNGKWRMCVDFTDLNKACPKDDFPLPQIDQLVDSTAGCELMSFLDAYSGYHQIHMNPADIPKTAFITPFGTFCHLRMPFGLRNAGATFTRLVYKVLYKQLGRNVEAYVDEIVVKSRKAFDHASYLQETIDNLRAVGMKLNPEKCVFGVRAGKLLGFLVFERGIEENPEKIDAIQQMKPPSSVREVQKLAGRIAALSRFLSKAAERGLPFFKTLRGAEKFTWTPECQAAFNELKQYLQSPPAXISSAAELSPFGLHFVARTAIKSQVLADFVAEWTPAFTPEPEPVEXPWVMYSDGSWSHKGAGVAAVLTSPGGVPIRYAARLQFNTTNNAAEYEAILLGLKKAKALGVRRLLIRTDFKLVASHVDKSFEAKEEGIKRYLEAVWSMEKCFAGITVEHLPRGQNEEADALAKSAACXGPHSPGIFFEVLYAPSVPVESLDIMAIDQAELGEDPKDWRTPFVRXLRSGWLPEDEAEAKRLQLRAAKYKMVSGQLYRSGVLQPLLRCISFAKGEEMAKEIHXGLCGAHQAARTVASKVFRQGVYWPTVLKVCVEQVKKCQSCQRHGRSQTAPQYELKPIAPIWPFARWGLDIIGLFPVARNGYKFAIVAIEYFSXWIEAEPLGAITSAAVQKFVWKNIICRFGVPKXFITDNGKQFDSDKFREMCEGLNLEIRFASVAHPQSNGAAERTNGKILXALKKRLEGAAKGKWPDEMLSVLWVLRTTPTRPTKFSPFMLLYGDEAMTPTELGANSPRVMFSRGEEGRELSLELLEGVRVEALEHMRKYTTGTSATYNKKVRPTELLPGHLILRKKANPVAVGKLESKWEGPYLIKHKSRTGSFRLATLEGEEFDHSWNTASLKRFYV

SEQ ID NO: 162180 - protein, 1040 aa, Oryza sativa
  unsure (1)..(1040): unsure at all Xaa locations
  Clone ID: PAT_MRT4530_61297C.1.pep
MAKTMEQGRRRAENRVAGADRGNLRAKPLRANATEEGREGEGYKAKGEQSWRGMAAEEGVEPSAPIAGDGEAPPASASAPLLPSLAPAASLGQPAAASTALAAVQVNPDPETQAEADMEAMRQNMTRLQDMLRQMQEQQQAYEAARVIQVITRADPPNQLSKRQKKMHLRMVNNITSAGEGAPHFLNQQISFGPEDAEGVMFPHQDPLVILAEIAGFEVRQILVDEGSSADVIFAGAYAKIGLPTLALTQAPASLRGFDGEAVQVLGQAQLLVAFGTGENRREEQILFDVVDIPYNYNAIFGRATLNKFEAISHHNYLKLKMTDPAGVIVVKGFQPSVASKGGLAIINRAVHNVEAKPHDRAKHAPKPAPHGKVIKIQIDDANPTKLVSLGGDMGEEEVENILEVLKKNIDIFVWGPDEVGGVSTDLIMHHLAVNPDAKPRKQKLRKMSADLQEATKAEVQKLLKAGVIQEIDHPEWLANPVLVRKSNGKWRMCVDFTDLNKACSKNDFTLPRIDQLVDSTAGCELMSFLDAYSGYHQIYMNPADIPKIAFITPFGTFCHLRIPFGLRNAGATFARLVYKAYVNDIVVKSRKAFDHASDLQETFDNLRAAGKLLGFLVSERGIEANPEKIDAIQQMNPPSSVREVQKLVGRIAALSRFLSKAAKRGGGRCGSTHFARGVPIRYAARLQFDTTNNAAEYEAILLGLKKAKALGVRRLLIRTDSKLVVSHVDKSFEAKEEGMKKYLETVRFMEKCFAGITVEHLPGGQNEEADALAKSAAXVLYTPSVPIESLDIMAIDQAELGEDLEDXRTPFVXGEEMAKEIHQGLCGAHQAARTVASKVFRQXPIAPIWPFARWGLDIIGPFPVARSGYKFAIVAIEYFSRWIEAEPLGAITSTAVQKFVWRNIVCLFGVPKEFITDNGKQFNSDKFREMCEGLNLEIRFASVTHSQSNGATERTNGKILEALKKRLEGAAKGKWLDEMLSVLWALRTTPTRPTKLSPFMLLYGDEAMTPTELGANSPRVMFSGXEEGREVSLELLERV

SEQ ID NO: 162181 - protein, 446 aa, Oryza sativa
  Clone ID: PAT_MRT4530_61298C.1.pep
MDSIMEPYVADLLADDITASMVELLPGDGGAAQMDVGVLDAYLRAIGALPAHPAAPGADLAAAAEVESMASNDDTNGVLYDWDTKVDVKVPCALLPPPPGFPPLPVPGLADEPVYAAPARHLPPPPGFPPLPVPGLADEPVYAAPARRLPPPPGFPPLPVPAKAEPVYAAPVDEGDAIRAFMQQLEWSEQYNGDNDAPAPDNSTASRPQLCAPYDDDIDANLRDMEKDAAQRPSPDYLDTVQGGQISAAARASLVAWMGRLTHRYELAAGTLHRAVSYFDRFLSVRALPSYTAHQLSLVAATAVYTAAKYEDQGTVFKLDAREIASYGEFASAQEVLAMEREMMAALGYRLGGPNAETFVEHFTRYSKGKEELRVQRLACHVADRSLESYGCLGYLPSMVAAAAISIARWTLNPPGALPWSSELQELTGYSSQDISSCILTVLNTQ

SEQ ID NO: 162182 - protein, 332 aa, Oryza sativa
  Clone ID: PAT_MRT4530_61299C.1.pep
KGDRCGPLRYYASWRKGDGEFELGTRGSSRVDLQACKLSFNNLANPTAFQAPTVPPQAPTLGFVANQAPNQSAMAWPQPTFDPSMAAHQASPIGAGQPNTQGAVNRAGGEKGLLLSGGIKTRPIPPQFKFPPVPRYSGEIDPKEFLSIYESAIEAAHGDENTKAKVIHLALNSIARSWYLNLAANSIYSWEQLRDVFVLNFRVTYEEPKTQQHLLGIRQRSGESIREYMRRFLQARCQVQDITEASVINAASAGILEGELTKKIANKEPQTLEHLLRIIDVYAWGEEDSKRWQAIQAEYDKASIAAAKAQVQAQVAEPPPLAVRQPQPANQG

SEQ ID NO: 162183 - protein, 1642 aa, Oryza sativa
  unsure (1)..(1642): unsure at all Xaa locations
  Clone ID: PAT_MRT4530_6129C.1.pep
GEGRRDGERRLLVYGDGSTPQGALQAAGVLLCHPPVVPDPETPAQRWLDDVADLXGPDARLSIERRRNGRRAAHATEGASSSGAPLRFGRGGQPPVPPVGGVGCRAFVASLRNVRWPPRFRPTITEKYDGSVNPAEFLQVYTTGIEAAGGDDRVMANFFPMALKGQARGWLMNLPPASRFCQVRNTIPCIPAHAVIYAFRGGVRHNRMLEKIASKEPQTTAELFQLADRVARKEEAWTWNSTGSGVAASAAPGSAARSGRRDRRRKKRSAHSDDKGHVLAVEGASRATRKGRPASDKKKEAGASSRERPTGKWCTVHNTSLHDLADCRAVKSLAERMRKWEEERRQERREGKAPAAPSGNRRSEAKQKAPAEDIDDGDDDLGFQEPGATIATVDGGACAHASRRSLKAMKRELLAAAPTHEATRRARWSEVALTFDQTDHPPCIARGGQIAMVVSPTVCNVKLGRVLIDGGAALNILSPAAFDAIKALGMVLRSSQPIIGVTPGHTWPLGHIDLPVTFGGSANFRTERVNFDVADLSLPYNAVLGRPALVKFMAAVHYAYLQMKMPGPGGPISVHGDLKVALACMEQRADHLAAASKPEGGNERLSTSVPAAPRQRMITCDEVPEDALVSFLRANANVFAWRPADMPGVPREAPEHQAFIREEVARLLEAGFIREVIHPEWLANPVIVPKANGKLRMCIDYTDLNKACPKDPYPLPRIDQIVDSTAGCDLLCFLDAYSGPTFQRTTRISLGSQIGRNVEAYVDDLVVKTRNQETLLSDLAETFESLRSARIKLNPDKCVFGVPAGKLLGDVQCVTGCMAALSRFISRLGEKALPLFKLLKRSGPFIWTEEAERAFTQLKAYLSSPPVLVAPEPDEPLLLYLAATPQVVSAALVVEHDEDNPHPAHPHPVSTRPGREQGGEAPEPNGGPRPPTAGAGPPPACQTVPGAPDPQDGPGATAGRPRLSPSDPEVVGTEAECAPHDLSDEERPGDAAPSEEDRPRRKVQRPVYFVSEALRDAKTRYPQAQKMLYAILMASRKLRHYFQAHRVTVVTSYPLGQILHNREGTGRVVKWAIELSEFDLHFEPRHAIKSQALANFVAEWTPAPEPISVPETSSGPSQLPPTAYWVMQFDGSLSLQGAGAGVTLTSPNGDVLRYLVRLDFRATNNMAEYEGLLAGLRVAAGLGIRRLLVLGDSQLVVNQAYLTDKTLPEDREGSERVQRISKRYVLVEGTLYRRAANGVLLKCIPQEQGVELLADIHEGECGAHSASRTLAGKAFRQGFYWPTALNDAVDLVRRCRACQFHAKQTHQPAQALQTIPLSWPFAVWGLDILGPFRRAPGGFEYLYVAVDKFTKWPEAYPVIKIDKHTALKFIRGITARFGVPNRIITDNGTQFTSELFGDYCEDMGIKLCFASPAHPRSNGQVERANAEILKGLKTKTFNILKKHGDSWIEELPAVLWANRTTPSRATGETPFFLVYGAEAVLPFELTLRSPRATMYCEADQDQLCRDDLDYLEERRRRAALRAARYQQSLRRYHQRHVRARSLCVDDLVLRRVQTRAGLSKLSPMWEGPYRVIGVPRPGSVRLATADGTELPNPWNIEHLRRFYPYTLVLDPALGGPGRLKSPNGAQNRAVPRGVALAPTRAI

SEQ ID NO: 162184 - protein, 60 aa, Oryza sativa
  Clone ID: PAT_MRT4530_612C.1.pep
HTPPCSFQIFSASLRQTIKLGYHILFNRLKEKELLPVTLAYPQEVTHQSVSEDRQWQRQQ

SEQ ID NO: 162185 - protein, 390 aa, Oryza sativa
  Clone ID: PAT_MRT4530_61300C.1.pep
MDSIMEPYVADLLTDDITASMVELLSGDGGAAQMDVGVLEAYLRAIGALPAHPAAPGADLAAAAEVESMASNDDTNGNWDTKVDAKVPSAFLPPPPGFPPLPVPALADEPVYAAPVDEGDAIRAFMQQLEWSEQYNGDDDAPAPDDSMASRPQLCAPYDDDIDANLRAMEKDAAERPSPDYLDTVHNGQISAASRASLVAWMGRLTHRYELAAGTLHRAVSYFDRFLSARALPSYTEHQLSLVGATAVYTAAKYEDQGTVFKLDTREIASYGEFASAQEVLAMEREMMAALGYRLGGPNAETFVEHFTRYSKGKEELRVQRLARHIADRSLESYGCLGYLPSVVAAAVISIARWTLNPPGALPWSSELHELTGYSSQDISSCVLTVLNTQ

SEQ ID NO: 162186 - protein, 940 aa, Oryza sativa
  unsure (1)..(940): unsure at all Xaa locations
  Clone ID: PAT_MRT4530_61301C.1.pep
MAAKEGAEPSAPIAEDGGAPSASAPAPPLPPSAPATSMGQVPNTADAAARALQTRAEILSTSQLLLPQATSSQPATVSTVLAAAQVNPDLGTQAEADMKAMRQNMTRLQDMLRQMQEQQQAYEAAMSHPKSVHKHRSSPFSHKPRKRQYTSSGSLRPQLCIWPLTCSCKLSRSLPKYTLNRLAKCHKQWQKGLRLYRRCSKLSFNNSANPTSFQFDFINAAQAPSSAASPNARLRSKPSTKPGETDPKEFHSIYESAIEAAHGDENTKAKRLGESTDLIMHHLAVKPDAKLRKQKLRKMSADRQEAAKGEVQTLLKAGVIQEIDHPEWLANPVLIHMNLSDIPKTAFITPFDTFYHLRMPFGLRNAGATFARLVYKVLYKQLGRNVEAYVDDIIVKSRKAFDHASHLQETFDNLRAAXQMKPPSSVREVQKLAGRITALSRFASKAAXRGLPFFKTLRRAGKFTWTPECQAAFDELKQYLQSPPALISPTPRSKLLLYLAASPVAGSAALVQETESGQKPVYFISKALQGAKIRYIEMEKLAYAXILRGKEVTGRLSKWAAELSPFDLHFVARIAMKSQVLADFIAEWTPAFAPEPEPVEQPWVMYSDGSWSHKGAGAAAVLTSPGGVPIRYTARLQFDTTNNAAEYEAILLGLKMAKAXGGMQRYLEAVRSMEKXCFAGITVEHLPRGQNEEADALVKSAACGGPQSPGIFFEVLYTPSVPIESLDIMAIDQAKLGEDPEDWRTPFVKYLKNGWLPEDDAEAKRLQLRAAKYKLVSGQLYRSGXNAKAVSAMAEAKPRPNTSCSLSHQSGXRQKFVWKNIVCRFGIPKEFITDNGNQFDSDRFREMREGLNLEIRFASVMNDKILEALKKRLEGAAKAGQRQRAWRGWAQPRRRETGTVAAGKGARGSGDPPISAAAQGGAGASVAAWQRHGQAQAASG

SEQ ID NO: 162187 - protein, 1656 aa, Oryza sativa
  unsure (1)..(1656): unsure at all Xaa locations
  Clone ID: PAT_MRT4530_61302C.1.pep
TTTKIHHRKNEEGFEKGRKSSKIESTLAPSSTQAPILQYSEGYIPPXVYPQAPIQPLPSXATQAPVYFTRQPSTAAIHPAPHVQLQAQPVAAQTHSQPLGQVSQAMAEGASVXVQAFLQQFSQPHNISGTTPSAXPKGNTSQVRLHQHCSGTKPSAARNNTRLRGKPSTKPGRHGVAPANVRPIHGGSPNSTNQSQATEHRGSTSRAGRDLALRHTISAARCLRGTYEELKTXQHLLGICLRPGESIREYMRRFSQARCQVQDITEASVINAILAGLLEGVLTRKIANKEPQMLEHLLRIINGYARGEEDSKRRQAIQAEYDKASVATAQAQVQAQVTEPPLLAVRQPQPANQGQPPRQGQAPMTWRKFRTDCAGKAVMAVEEVQALRKEFDAQQASNHQQPTRKKVRKDIYCAFHGRSLHTTEQCRNIRQRGNAQDPRPQQGAAVEAPREAIQEQAPPAEQRQDVQCRVIQVITRADPPNQLSKRQKKMQLXMVHNITSAGEGAPQYLNQKISFGSEDAKGVMFPHQDPLVISAEIAGFEVRXILVDGGSSTDVIFARAYAKMGLPSLALTQAPASLCGFGGEAVQVLGQAQLLVAFGIGKNRREEQILFDIVDIPYNYNAIFGRATLNKFEAISHHNYLKLKMPGPAGVIVVKGLXPSAASKGDLAIINRAVHNVEAEPHDRAKHAPKPAPHGKVIKIQIDDADPTKLVSLGGDMGEEKVENILEVLNXNIDLFAWGPDEVGGVSIDLIMHHLAVKPDAKPRKQKLRKMSADRQEAAKAEVQQLLKAGVIQEMDHPDWLANPVLVWKSNGKWRMCVNFIDLNKACPKDDFPXPRIDQLVDSTAGCELMSFFDAYSGYHXDIVVKSRKAFDHASDLXETFDNLRAAGMKLNPEKCVFGVCVGKLLGFLVSKWGIEANHEKMXMKPPSSVREVQKLAGRIAALSRFLSKAAEKNLPFFKTLRGVGKFTWTPEYQAAFDELKQYLQSPPDLICPAPGSELLLYLAASLVAVTAAHVQETESGQKPVYFISXALQGVKIRYIEIEKLAYALVMASRKLKHYFQAHKVTVPSQYPLGVVLRGKEVTGRLSKXVAELSPFDLHFVARTAIKSQVLADFVAEWTPFDTTNNAAEYEAILLGLKNAKALGVRHLLIRTDSKLVASHVDKSFEAKEEGLKKYLEAVRSMEKCFTGITVEHLPRDQNEEVDALAKSVACRGPHSPGIFFXVLHAPSVPIESLDIMAIDQVELGEDPEDWRPPFIRYLKSGWLPEDEAEAKSLQLRAAKYKMVSGQLYRSGVLQPLLRCISFAEVEEMAKEIHQGLCGSQQAARTVASKVFRQGVYWPTVLKVCVEQVKKCESCQRHGRSXTAPQXELQPIAPIWPFARWGLDIIGPFPVARNGYKFAIVAIEYFSXWIEAEPLGAITSAAVXKFVWKNIVCRFGVPKEFITDNGKQFDIDKFREMREGLNMEIMFTSIAHPXSNGAAERTNGKILEALKKRLEGAAKGKWRDEMLSVLWALRTTPTRPTKFSLFMLLYGDEAMTPTXLGANSPRVMFSWGEEGREVSLELLEGVRVEALEQMRKYVAGTSATYNKKVRPTELLPGHLVLRKKANSVAVGKLESKWEGPYLIKHKSRTGSFRLATLEGEEFNRSWNAASLKRFYV

SEQ ID NO: 162188 - protein, 321 aa, Oryza sativa
  unsure (1)..(321): unsure at all Xaa locations
  Clone ID: PAT_MRT4530_61303C.1.pep
NSIYSWEQLRDVFVLNFRVTYEEPKTQQHLLGIRQRSGESIREYMRRFLQARCQVQDITEASVINAASAGILEGELTKKIANKEPQTLEHLLRIIDVYAWGEEDSKRWQAIQAEYDKASIAAAKAQVQAQVAEPPPLAVRQPQPANQGXPPRQGQAPITWRKFRTDRAGKAVMAVEEVQALRKEFDSQQASNHQQPVRKKVQKDLYYAFHGRSLHTTEQCXNIRQRGNVQDPRPQQGAAVEAPREDVQEQAPPAEQRQDVQRRVIQVITRADPPNQLSKXQKKMQHQMVHNITSAGEGAPQYLNQQISFGPEDAEGVMFPH

SEQ ID NO: 162189 - protein, 366 aa, Oryza sativa
  Clone ID: PAT_MRT4530_61304C.1.pep
MTRRCSHCSNNGHNARTCPARGGGGGGGGVRLFGVRLTSPPEVAMKKSASMSCIASSLGSGGGSGGSSPAGTGRGGGGGGEGAAGYASDDPTHASCSTNGRGERKKGTPWTEEEHRMFLMGLQKLGKGDWRGISRNFVVSRTPTQVASHAQKYFIRQTNSSRRKRRSSLFDMVPEMPMDESPVVVEQLMLHSTQDEATSSNQLPISHLVKQKEPEFARHLSDLQLRKHEESEFTEPSLAALDLEMNHAAPFKTKFVLTMPTFYPALIPVPLTLWPPNVANVGESGTNHEILKPTPVNGKEVINKADEVVGMSKLTIGDGSSNSIEPSALSLQLTGPTNTRQSAFHVNPPMAGPDLNKRNNSPIHAV

SEQ ID NO: 162190 - protein, 1082 aa, Oryza sativa
  unsure (1)..(1082): unsure at all Xaa locations
  Clone ID: PAT_MRT4530_61305C.1.pep
MAAKEGAEPSAPIAEDGGAPSASAPAPPLPPSAPATSMGQVPNTADAAARALQTRAEILSTSQLLLPQATSSQPATVSTVLAAAQVNPDLGTQAEADMKAMRQNMTRLQDMLRQMQEQQQAYEAAMSHPKSVHKHRSSPFSHKPRKRQYTSSGSLRPQLCIWPLTCSCKLSRSLPKYTLNRLAKCHKQWQKGLRLYRRCSKLSFNNSANPTSFQXPQFDFINAAQAPXRPQAPTPGFGANQAPNQVAMAWPQPMFDPSIVAHHASPIGAGQPNTVAQPHAQAMTSPFAMPYPHQGAVNRAGGEKGVPLSGGIKIRPIPPQFKFAPIPCYSGETDPKEFHSIYESAIEAAHGDENTKAKVIHLALDGIARSWYFNLLANNNYSWEQLRDVFVLNFRGTYEEPKTQQHLLGILQRLGESTDLIMHHLAVKPDAKLRKQKLRKMSADRQEAAKGEVQTLLKAGVIQEIDHPEWLANPVLIHMNLSDIPKTAFITPFDTFYHLRMPFGLRNAGATFARLVYKVLYKQLGRNVEAYVDDIIVKSRKAFDHASHLQETFDNLRAAXQMKPPSSVREVQKLAGRITALSRFASKAAXRGLPFFKTLRRAGKFTWTPECQAAFDELKQYLQSPPALISPTPRSKLLLYLAASPVAGSAALVQETESGQKPVYFISKALQGAKIRYIEMEKLAYAXILRGKEVTGRLSKWAAELSPFDLHFVARIAMKSQVLADFIAEWTPAFAPEPEPVEQPWVMYSDGSWSHKGAGAAAVLTSPGGVPIRYTARLQFDTTNNAAEYEAILLGLKMAKAXGGMQRYLEAVRSMEKXCFAGITVEHLPRGQNEEADALVKSAACGGPQSPGIFFEVLYTPSVPIESLDIMAIDQAKLGEDPEDWRTPFVKYLKNGWLPEDDAEAKRLQLRAAKYKLVSGQLYRSGXNAKAVSAMAEAKPRPNTSCSLSHQSGXRQKFVWKNIVCRFGIPKEFITDNGNQFDSDRFREMREGLNLEIRFASVMNDKILEALKKRLEGAAKAGQRQRAWRGWAQPRRRETGTVAAGKGARGSGDPPISAAAQGGAGASVAAWQRHGQAQAASG

SEQ ID NO: 162191 - protein, 104 aa, Oryza sativa
  Clone ID: PAT_MRT4530_61306C.1.pep
KVVAHGSPFVWGGHDQFQISLPPCFIWVQVNQLGLGTGPAFSSPRKGALPLLFWEKCCIVPGVEGLSVLSFWNHLASFLGKKKKESQLCEQKKDYLKKIKAPLT

SEQ ID NO: 162192 - protein, 120 aa, Oryza sativa
  Clone ID: PAT_MRT4530_61307C.1.pep
ATAASSLELGSGSATGSTTVFAVADSMGISATIYISAASSPPPPPPPPSLPAAIVPMSVADKREIREREGEEEGEEREDDMWVPHYFFFILAPRKCHVGQRLGQDRHVGVTSAKTTSKTT

SEQ ID NO: 162193 - protein, 201 aa, Oryza sativa
  Clone ID: PAT_MRT4530_61308C.1.pep
LVIICLAPGLEWYIPGLEIELYSRDGCSEWLGLYNRSNNCTQLSICYCVPRLIPGRGFTHIPAPGSELLLYLAASPVVVSAALVQETESGQKPVYFVSEALQGVKIRYIEMEKLAYALVMASCKLKHYFQAHKVTVPSQYPLGEVLRGKEVTGRLSKWAAELSPFDLHFVTRTAIKSQVLTDFVAEWIPVFAAEPEPVEQP

SEQ ID NO: 162194 - protein, 151 aa, Oryza sativa
  Clone ID: PAT_MRT4530_61309C.1.pep
MEMDGMVVAGAIMGCGGNESESDREQPPGLQDETRRDAGLGLWTACALRPCLPVDRLLRRVRTCSSFKFCDSAHSSMGWIDLHGQLHYCAPKRQVRRTSTCSVYRRLPIEPETDWTNDSIGAVTTIVNDVAGGLPRQYREPARFRGLKERD

SEQ ID NO: 162195 - protein, 389 aa, Oryza sativa
  Clone ID: PAT_MRT4530_6130C.1.pep
MRRLVTHLHRLSHRAIPSPPPSRPPTTTSLPFLLSRRLLSDDAAPPPAADVPNKELKRRLETYYGVDDEAELPSVTEAVLERKLADVHSETDDELIEELRSKPLPEVRDRDFESDFEEMHDTDEELDNLYNARQYVEKKIKSDEFFNMDDDKWNKMIKKAVDNGHLGNMNECENILEDMLHWDKLLPDEIKKKVEAKFNELGDMCEKGELEPEQAYELFKEFEDKMVSECTELMEAENPTDVDEFSKMENKSVKLDDPPGEGPVLRWESRIVFAPGGDAWHPKNRKVKLSVTVKELGLSRHAFRRLREVVGNRYNSGKDELTITSERFEHREENRKDCLRTLYAVVEDANKANKLADDARNAYVKNRLKANAQFMERLKVKTQKLRVAA

SEQ ID NO: 162196 - protein, 194 aa, Oryza sativa
  Clone ID: PAT_MRT4530_61310C.1.pep
MALLAPAISGEVGLRLLLAPLSSTVVIRTASCAIGVGLPVYSTFRAIEKKDQKEKERWLLYWAAYGSFSIAEIFADQILSSVPFYYHVKFAILVWLQFPSNSGAKHVYRRYMRPFFLKHQAKIDRILNILSKELNKFVSSHEDEIHFIEHMAARGASTANYIINGPEQSEAVRAAIEGPNSTTTEEAGTPRNET

SEQ ID NO: 162197 - protein, 111 aa, Oryza sativa
  Clone ID: PAT_MRT4530_61311C.1.pep
MADIRDTLEVEADSRCVVSAVAGRPVSKANSRQTKAQSCEGLNAEGIAGGSAWGELAQAPWRALEADWRRLPPVEERRREDKSLELGRSSHMGDMGEDDSAAQPLPAPSRP

SEQ ID NO: 162198 - protein, 462 aa, Oryza sativa
  Clone ID: PAT_MRT4530_61312C.1.pep
MAQPQCPRPQARTPNPLCAATPWPRAGRRANWRGIFCSRWSPSCRDAFRTIQPARLAASRTHPPCTDHTSCNKQQLLYISSEVRVLDRVTRAHDHGLGEVHALPGSCGGGARWRGCTGGLLCHRWPSTKRQLRARAGQVPAEPNWEISGFVEYIGSGHKEQDMILAVPEGAYAVRLGNDATIRQRISVTRHMYYSVTFSAARTCAQAEKLNVSVTLEFGVLPIQTVYTSTGWDSYSWAFKAEHSAVWLSIHNPGVEEDPACGPLIDLVAIKTLPPPHHTRGGTMLRNGDFEEGPYIFADTPWGVLVPPMDEDVHSPLPGWMVMSTTKVVKYVDSARHAVPSGAHAVEMVAGRECALVQEVATVPGRRYTLSFSVGDAGNGCIGSLAVDAYAARATLKVSYESRGTGGHERAELVFAAVANRTRVVFHSSNHHMKSDGTLCGPVVDDVSLVSVDKHTVRRLLM

SEQ ID NO: 162199 - protein, 52 aa, Oryza sativa
  Clone ID: PAT_MRT4530_61313C.1.pep
MAMTVLSGIPFSRHAKVLKYLPTLRQVRSYLRNPCLIIASLIKKMIILEKEK

SEQ ID NO: 162200 - protein, 86 aa, Oryza sativa
  Clone ID: PAT_MRT4530_61314C.1.pep
RRGVSKSRGSVSMSRPRRRGHVRGPWRHHAAGEGSAGEGWVRRRACASVLRSVIRWGRSPRGRDRRSRAPTWPVVRLSDSVEYARS

SEQ ID NO: 162201 - protein, 482 aa, Oryza sativa
  Clone ID: PAT_MRT4530_61315C.1.pep
MSSPTSVVSLSHGTGKWMLQQQRSEAVEEEKKKQPWAVGKNAALFAFFVVVLPTMMILAGVSHTPPPAAATTRLGWTMLGAVQKRAEENNNSCDTSVGRWVRDPSGPAYTAATCPTLPASKNCHKYGKDPGHLYWRWRPDGGCDDLPRSSPARFLAAVRGKRLAFIGDSLARNHMESLLCLLSQAEAPTKVSADDDGVREWRFPAHGFTLMAITTRFLARAEEVLGGDGRPTASFDVHLDAPDPVWASRRLRELDYAVFSTGNWFFRVNYFSEGGRRVACSGCSGDADAGELADFGVAHAVRRVVRAALEATARCGDGDCKRGLVAFVRTYTPSHFEHGSWFDGGYCNRTRPLEEDEAPSWDQSIGWDVRRAHIEEVTSARKTTPATTTRFEVLDVTKAMMLRADGHPGRHYDKRSAGGGANDCLHWCIPGPIDMWNDVLLHKIAETASPPATNLRAEDETIRLKAADDELRVSGGGIEDGA

SEQ ID NO: 162202 - protein, 331 aa, Oryza sativa
  Clone ID: PAT_MRT4530_61316C.1.pep
MPATAKPDETDNNRKPPELDITLLLLLLPSLPPVEAARRERGWESPAARDLERPRREYVFVHQRIWLDSRMAACPRLNRSERVGRARIRIARTDARDKHGVKYSTKVADWAAPLKHLIVLKHYCSIVNCEVIGVLECWSWIVKISSVLVESRPRRPLSRRRSRRRLAGALSPSPLAAGGCDYGLDLHLAAASNSDLSKKNRRAAAVQEDDLKLRLVRVHAGMGQCNLVPSFSSFFSLNFCVVFLIETHRAILERICKIIAYLTTRKGEEAKDRCPKSTYKTGKVCTFYRRRCEAAICSQTRVLFDRFKVIKHSNLMLVAEASQVKNGIANL

SEQ ID NO: 162203 - protein, 378 aa, Oryza sativa
  unsure (1)..(378): unsure at all Xaa locations
  Clone ID: PAT_MRT4530_61317C.1.pep
GRSFHSELLKERRVSDVDHRDLLSCVKSDDIIRSIREGRSTXGLKQWDPIMLSXVLSSAYPYHLSRXSQKASQSFFALPAPLPVMHSQQLALQGPPSSSTAKKGASSGAKGKKTKPGQKVPGGPSVKAMTSSAGPSGRGPHMNRNFPVGLVSFEPSEALHINPLINRKVMSRWPEDNSFYEATITDYNPETDLYALAYDINTANESWEWVDLKQMGPEDIRWQGDDPGIYQGVRGAPGSGGKKSSSRGGPTPGTGRGRGLPKHVSRKDFPPSQNGVGKRSSDDIDILHTESLIKEVERXFSVNNPDPLEVEKAKKVLKEQEQSLIDAIARLAEASDGESDEHNRVRRNAPYAGSQHQANYADAMAVDGGHMLGGADAV

SEQ ID NO: 162204 - protein, 143 aa, Oryza sativa
  unsure (1)..(143): unsure at all Xaa locations
  Clone ID: PAT_MRT4530_61318C.1.pep
QARGSAPSNFDXDYAYALARIFLHMIAPVLTGYMAADANLKDPVNNRRCAAAPLTAMMTVKRHVRGPGAIPIGKPAIHPSTIDLTGNAYELLQEKASNNLLDDLYRTPXSIQYESPCCSAKPITLTIENHDYMGDIEILKDCL

SEQ ID NO: 162205 - protein, 60 aa, Oryza sativa
  Clone ID: PAT_MRT4530_61319C.1.pep
RGTPNLLLSRGNPLADAVLIDCLVTQQRKSWASCGYLGLDLGLHHFFFIDLCFRKSCNLF

SEQ ID NO: 162206 - protein, 1918 aa, Oryza sativa
  unsure (1)..(1918): unsure at all Xaa locations
  Clone ID: PAT_MRT4530_6131C.1.pep
MAERAVAHNLSPSASGDDGEQNPRRRARTPLPPSRRSLRREEALEGVERSATSPPTSDGEGRRDGERRLLVYGDGSTPQGALQAAGALLRHPPVVPDPETPARRWLDDVADLVMKAQQRLGAGGRSSAAKASGAATAGSVSSRRRARRAAAVTRRSSVIPSSTPPTQEDVRRGPDARLSIEHRRNGRRAAHATEGASSSGAPLRFGRGGQPPVPPLGGVGCRAFVASLRNVRWPPRFRPTITEKYDGSVNPAEFLQVYTTGIEAAGGDDRVMANFFPMALKGQARGWLMNLPPASXWEDLCQQFTMNFQGTYPRPXGGVRHNRMLEKIASKEPQTTAELFQLADRVARKEEAWTWNSTGSGVAASAAPGSAARSGRRDRRRKKRSAHSNDEGHVLAVEGASRATRKGRPASDKKKEAGAPSRERPTGKWCAVHNTSLHDLADCCSVKSLAERTRKWEEERRQERREGKASAAPSGNRRSEAKQKAPAEDIDDGDDDLGFQEPGATIATVDGGACAHASRRSLKAMKRELLAAAPTHEAMRRAQWSEVALTFDQTDHPPCVARGGQIAMVVSPTVCNVKLGRVLIDGGAALNILSPAAFDAIKAPGMVLRPSQPIIGVMPGHTWPLGHIDLPVTFGGSANFRTERVNFDVADLSLPYNAVLGRPALVKFMAAVHYAYLQMKMPGPGGPISVHGNLKVVLACMEQRADHLAAASKPEGGNERLSTSVPAAPRQRMITCDEVPEDALVSFLRANADVFAWRPADMPGVPREVIEHRLTVRPGARPVRQKVRRQAPECQAFIREEVARLLEAGFIREVIHPEWLANPVVVPKANGKLRMCIDYTDLNKACPKDPYPLPRIDQIVDSTAWCDLLCFLDAYSGYHQIRMAREDEEKTAFITPIGTYCYTTMPFGLKNAGPTFQRTTRISLGSQIGRNVEAYVDDLVVKTRNQETLLSDLAETFESLRSARIKLNPDKCVFGVPAGKLLGFLVSARGIEANPEKIRAIERMRPPSKLRDVQCVTGCMAALSRFISRLGEKALPLFKLLKRSGPFTWTEEAERALTQLKAYLGSPPVLVAPEPDEPLLLYLAATPQVVSAALVVERDEDNPHSAHPHPASTRPGREQAGEAPEPNGGPRPPTAGAGPPPACPTVPGAPDPQDGPGATAGRPRLSPSDPEVVGTEAECAPRGLSDEERPGDAAPGKEDRPRRKVQRPVYFVSEALRDAKTRYPQAQKMLYAILMASRKLRHYFQAHRVTVVTSYPLGQILHNREGTGRVVKWAIELSEFDLRFEPRHAIKSQALADFVAEWTPAPEPISVPEASSGPSQLSHTAYWVMQFDSSLSLQGAGAGVTLTSPSGDVLRYLVRLDFRVTNNMAEYEGLLAGLRVAAGLGIRRLLVLGDSQLVVNQVCKEYRCSDPQMDAYVRQVRRMERHFDGIEIRHVPRRDNAVADELSRLASSRAQTPPGAFEERLAQPSARPDPLGETDAPERPPRPVGVQASGPEGSAPSSPRLIAWITEIQAYLADKTLPEDREGSERVQRISKRYVLVEGTLYRRAANGVLLKCIPREQGVELLADIHEGECGAHSASRTLVGKAFRQGFYWPTALNDAVDLVRRCRACQFHAKQTHQPAQALQTIPLSWSFAVWGLDILSPFRRAPGGFEYLYVAVDKFTKWPEAYPVIKIDKHSALKFIRGITARFGVPNRIITDNGTQFTSELFGDYCEDMGIKLCFASPAHPRSNGQVERANAEILKGLKTKTFNILKKHGDSWIEELPAVLWANQTTPSRATGETPFFLVYGAEAVLPSELTLRSPRATMYCEADQDQLRRDDLDYLEERRRRAALRAARYQQSLRRYHQRHVRARSLCVDDLVLRRVQTRAGLSKLSPMWEGSYRVIGVPRPGSVRLATGDGTELPNPWNIEHLHRFYP

SEQ ID NO: 162207 - protein, 285 aa, Oryza sativa
  Clone ID: PAT_MRT4530_61320C.1.pep
ISPDSAAAAAPASSRGAALAGARARLPGGGPPQSVDYGGGQASDSSGTADDLPPPYPSNRGIRGSGRVSGNGRAIVPAGSYTRAHTDMATQIHHLEQEAYCSVLRAFKAQSDAITWEKEGLITELRKELRVSDVDHRELLNRVNSDDIIRSIREWRSAGGPQAMLPNNAQPMHDLAPSPTTSGRKRQKTSQSFPALPAPPPVMHSQQLALQGPPSSSTAKKGASSGAKGKKTKPGQKVPGGPSVKAMTSSAGPSGRGPHMNRNSPVGLGSFEPSEALHINPLINR

SEQ ID NO: 162208 - protein, 124 aa, Oryza sativa
  Clone ID: PAT_MRT4530_61321C.1.pep
MTPPVDPPLAHPGHADPPLAGLGEGRGGNVDEEERRRLGSFLSWRRVSTTTTTTLPVGGVDGGGDTMARLSPLPATRGDDDTAAAYGEVEGRRTRGGDVGMTIASTMTAPRCDDDDDAGYGGGG

SEQ ID NO: 162209 - protein, 95 aa, Oryza sativa
  Clone ID: PAT_MRT4530_61322C.1.pep
VVEVHNEQNTRNFGNLTCDGPSQTSDRHGPESKGPSQRWMSPLTAGHPSKVTGLTSGREEVRPAACERSDQRRRQDYVEISIDLRVQRAGSYRYK

SEQ ID NO: 162210 - protein, 712 aa, Oryza sativa
  Clone ID: PAT_MRT4530_61323C.1.pep
MAMEAEALLPEPEPESPPLLAVDHLGGPASRGSSGRWPAAFFLIGAEVGERFAYSGIMGNLVIYLTGPLRQPTAAAAAAVNVWMGTSMLLPLLGSAVADSWLGRYRTIVCASLLYILGLGMITVSSVLAPEESSESSNLAAHVAFFYFSLYVVAFAQGGHKPCAQALGADQFDENDPGELASRSSFFNWWFFASYGGNTVTVPILNYVQESVSWQLGFAIPCIAMAVSLAIFLIGTRSYRFYPPKSKGNPFGEVAEWIRRWIASSCSKLPDSSDELLPSSSSEGDVSNSSSEFVPKEAAELVKLFPIWASSLIYAAVMAQCITFFTKQASTLDRRVGSLVLPAASNGALFNATIMVFLPIYDRIFIPVARRYTKNPSGITTLQRIGVGLVLSIITMIVAAMVEMRRLRIARDFGLVDKPEAVVPMSFLWIVPQNILAAISDMFAVIGLQEFFYGEAPESLRSFSMALFLSIIGVGNFISSFIVYAIDRVTSSFGDSWFSNNPNRGHVDYFYLLITVLNALSLACFLYFAKMYEHRKKWDSGCEQHLPMAYKMKGVFKGLKVISQIFVVKEHQMEIGYPTDVKHVTHIGWDSPTGSAASPSWVPDMMGPPDYSSLNNFGPSTGTSWTSQVCSTDFDHPQDISPFGLYVENAGKEANPPHPDIPKPPRKSRRKKSKNNSPTASSRSSRSRSKRSFSSTADTVVDNSIQNEVRIV

SEQ ID NO: 162211 - protein, 738 aa, Oryza sativa
  Clone ID: PAT_MRT4530_61324C.1.pep
MWRLKQFMPREQPSGLEGRTVDVGNVRVHVREPVAEGGFSCVYLARDAANPAKQYALKHVVIQDEESLDLVRKEIMVMRSLKGHPNVVALVAHAVLDTGGRAREALLVMEFCEKSLVAALESRGAAHFDEQQVALIFRDALGCLLYRICYLKSAFDGESKLQILNGNYRIPELPKYSSPITSLIKDMLQSSPDVWFRVNELLPLELQKDLPDGSPSGSAFESHITEDEAPSRATISPSTDNTRSTSSEDPSNLRSQGLSKAAENFDNLKVNFQNNVSSLNATRRLKEQQLEAEPREKIEGTPPELRQGLFTSSPGTPSPDPKPWSAFPEEPKAQAAVTVKVAYHLYRNYTTKTTIAQGAALAGARARLPGGGPPQSVDYGGGQASDSSGGFWVKGSREISFVERFEALWGEWVSGEFQLNLFPWDVFVRAGTADDLPPPYPSNRGIRGSGRVSGNGRAIVPAGSYTRAHTDMATQIHHLEQEAYCSVLRAFKAQSDAITWEKEGLITELRKELRVSDVDHRELLNRDLYALAYDINTANESWEWVDLKQPDLLHFWVQLKLFGWASASGELELMGPEDIRWQGDDPGIYQGVRGAPGSGGKKSSSRGGPTPGTGRGRGISKSMYPGRIFHPSQNGVGKRSFDDIDILHPESLIKKVERVFSINNPVPLEVEKAKKVLKEQEQSLIDAIARLAEASDGESDEPNRVRRNAPYAGSQHQANYADAMAVDGGHMLGGADAV

SEQ ID NO: 162212 - protein, 95 aa, Oryza sativa
  Clone ID: PAT_MRT4530_61325C.1.pep
SPHFTSMAKWLQIMVSRTCAISISRAKNVLITEISTLQMNILPCICDKPFPVLLKSDEHNRVRRNAPYAGSQHQANYADAMAVDGGHMLGGADAV

SEQ ID NO: 162213 - protein, 169 aa, Oryza sativa
  unsure (1)..(169): unsure at all Xaa locations
  Clone ID: PAT_MRT4530_61326C.1.pep
LSGGACFMGQAIFFSALSIISAGQKFIFRPSSAFSLKGGCFSDSSILLFPNKKNPVGFVLRVEPGPPYEPRGGPFLRPVAPPPKFWGQPQTSVLCRFRGGTPWGLPVCQTGCPFFXAQGSSFSGFPPDPCRPAPFFDVGFFQEGCFCSSVTPPFLRMAFLLGYVMGFFP

SEQ ID NO: 162214 - protein, 63 aa, Oryza sativa
  unsure (1)..(63): unsure at all Xaa locations
  Clone ID: PAT_MRT4530_61327C.1.pep
FYIASGPPFSCLFALGAVMSLSTGLANVSLKHNSVGFYQMXAKIAVTPTIVVAEFMIFQKRGC

SEQ ID NO: 162215 - protein, 122 aa, Oryza sativa
  Clone ID: PAT_MRT4530_61328C.1.pep
IKGLLCGVGILAAALAPARQRRRAGEERRPGKGVAAGPAMDGAVQDGNQRRNGGGRRSRGGAGRSRRGVGSPRPRGGARGGRRRVARPGAAASLRHPAARPRPPFPASPHRPARTRGAGRPV

SEQ ID NO: 162216 - protein, 58 aa, Oryza sativa
  Clone ID: PAT_MRT4530_61329C.1.pep
CKPLFHCKVPCPKEIPERTRTSQFTIIENWASPGSWTQLINLYVAWQPLTNNQSSSKM

SEQ ID NO: 162217 - protein, 305 aa, Oryza sativa
  Clone ID: PAT_MRT4530_6132C.1.pep
MDGVYIRRDTDLPQIYLSTIVLLAAQLSSLCEEEVGIGRMQQRLCVWKETVRPVTCTKNYKTKNSFGVQHIKFDRPLIILWDEQQPSSDQKKMDKLIKIVFGTVVAVGIAAVFSPQSNTSSSLVSRALAISTYTSVIISMAATMTSCGSLWSVTTLYLVSLNWRQVVAVPVALVIFFAAGRWPFVSSVVVVHHPDHDENAIKAVIFRRCDLFIGTGLVGVFFGTSFNDYMTKASRVPGAVVYIWISIYLVFTIGLFLMASIGTGLEALTDDYARKLYYVAAALLTVAFLLVVVVNCLRVSELPTS

SEQ ID NO: 162218 - protein, 151 aa, Oryza sativa
  Clone ID: PAT_MRT4530_61330C.1.pep
SARSSVAPVWTPSLRATKRDAFKEGFTQEFNNPKKQRTIQVLDPQDLPKQRNRKPTTQLQAKEQLQQQLAESARHPSLIPIKLPPMLEISHLQFHAKRTLLPLTDWLLLIYPGYLSVKFLAHQPYIVNTKASLKQKCVEMHRCCTLTILGS

SEQ ID NO: 162219 - protein, 140 aa, Oryza sativa
  unsure (1)..(140): unsure at all Xaa locations
  Clone ID: PAT_MRT4530_61331C.1.pep
RPRQGAPPPCGIKQNGAAAVSDYFKPKDTGVEVEGIRVEEAFFRGRKLQGATISLPDGYRGYVLEKRSGGKDMKKLEGEVSNFKSRAEFQNITXWNHDPTPSAEDPLPRCFHLLTVANAMHKPVTAEEMAYMSAMQNQSS

SEQ ID NO: 162220 - protein, 533 aa, Oryza sativa
  Clone ID: PAT_MRT4530_61332C.1.pep
MAFRRLLSAAVRRRSAAAAAAAGPGNAREASTAVAAAGPGVIAPDAAPVRPPMMVYDRIAEAVNARLRRLEHPDPRFLRYASPVPAHADHTAILAAPETRVTTLPNGLRVATESSLASRTATVGVWIDAGSRYETEDSAGVAHFVEHMLFKGTGDRNAAQLEEEIENIGGHLNAYTSREQTTYYAKVLDKDVPRALNILADILQHSKLEESRIERERDVILREMEEVEGQYEEVIFDHLHATAFQYTSLGRPILGSAENVKSITQEDLQKYIETHYTAPRMVITAAGAVKHDDIVEMATKLFNDLPTDPTTTSMLVSTQPACFTGSEVRIIDDDMPLAQFAVAFNGASWIDPDSIALMVMQSMLGSWNKSAGGGKHMGSELVQRVAINDIAESIMAFNTNYKDTGLFGVYAVAKPDCLDDLAFAIMQEISKLSYRVTEEDVIRARNQLKSSIQLHLDGSTAVVEDIGRQLLIYGRRIPIPELFARIDAVDASTVKRVANRFIFDQDIAIAAMGPIQGLPDYNWFRRRTYMLRY

SEQ ID NO: 162221 - protein, 65 aa, Oryza sativa
  Clone ID: PAT_MRT4530_61333C.1.pep
MGVMEKLKIFAVKEPVVTASCLIAGFGLFLPAVVRPMLDSWETAKQVPPPALNDVVAGVTGKKKE

SEQ ID NO: 162222 - protein, 299 aa, Oryza sativa
  unsure (1)..(299): unsure at all Xaa locations
  Clone ID: PAT_MRT4530_61334C.1.pep
MDSPATPVGLSPSLLSLVSRNKPCYTKAVHGNGRPRSIXPKRTAEIDRXHGRTTRDDDDDVSDDVTTGGGSGXQARRRTTALRHERRAPGRRGRRGELTGDQNGGGRSTDDDGDEEEAAALFGLTTATVLRRTAMTAKGRTRTRRLGDHDGDLPERRRRLERRRRTAEAAAATAALGYTALELFRRREAKARVAAGRGDTGEPFKGARRRRQRPTAAGDEKERSGSEREKPIRFDFESNTFQTNLTDDSKGEKVEEIEKIISPLSIRPEKERIDRILEGNGGGARLGFRAAAAEGRRRL

SEQ ID NO: 162223 - protein, 93 aa, Oryza sativa
  Clone ID: PAT_MRT4530_61335C.1.pep
MGVMEKLKIFAVKEPVVTASCLIAGFGFSNRFRGVLLCKPVALPVPHAAWLKISSLFLPAVVRPMLDSWETAKQVPPPALNDVVAGVTGKKKE

SEQ ID NO: 162224 - protein, 304 aa, Oryza sativa
  Clone ID: PAT_MRT4530_61336C.1.pep
DEWSNSVSKNSKPLASPFSLHRRPLLPPHDAGHLFLFVPHTSSLLLFLSQLSLLLPMAVRECTCSCADEASCGSPRWIGKSLSCVCIKRKGAYERICMNLTPVQEERLQRLRHRMKVYFDPSRRDHQEALKALWHATYPDQELQGLISEQWKDMGWQGRDPSTDFRGAGFISLENLLFFAKTFSASFQRLLKKQCGNRATWEYPFAVAGVNITFMIMQMLDLQSTKPRTFVRAVFIQMLSEDEWAFDLLYCVAFVVMDKQWLDKNASYMDFNEILKSTRTQLERELLLDDVMRIEDMPSYSLLC

SEQ ID NO: 162225 - protein, 219 aa, Oryza sativa
  Clone ID: PAT_MRT4530_61337C.1.pep
MAIARDGIGGAATANPRTDPAAAAGRPLPRGIPLPSLPNPDPAEGRGVDGGAAGGERGSGGRPPSLAGSSSPPLPVLPSPDPAEGRGVSGASSVAAADDDEKDDDEEEVAARSNGGCGGGDRGLRRWRRRRAAAAAAASPTLAAAAPFPTLAAVAAAALLPVSPARRNDGGVRQRRPSLPLSLSLSLSLSPSASTATAATASASSEGGSSGGAAASGIT

SEQ ID NO: 162226 - protein, 617 aa, Oryza sativa
  Clone ID: PAT_MRT4530_61338C.1.pep
MGRGPAAGRSSAGAARHQQFRARAKTRVDDLQEMFSGLQSARKEARSTDAAVLEAQLHQMLREWRAELSGNNRELSDPPSETLRLLQLAAAEEEEDDATSKLVEQQQQHPPSANQAHGHPQAQGGQDMKPEPPEEAVASPADLTVPQQPQSPGQGVLASGGGMLAPAAAAVFHDQSVKRKLQSLCELWYNGTLLVGWMWILGNELHGWRELLEVCEVEKEHEHGTCHGCGWDGTKQMYYVNQELTVEDFLYDDNYKMYLPGYNSDILNNLESTGQLEYPQFNLPQELPPNAYLDTSNCGQNAGDVFLHMSDLLNTMSPVPAAFLRPKCALWDCPRPAQGSERWQDYCSMYHADLAVKEEGPPGTMPVIRPRGIDLKDGPLFAALSAKIQGKHVGIPVCEGAATAKSPWNAPELFDLYIFEGESIREWLFFDKPRRAFESGNRKQRSLPDYNGRGWHESRKQVMKDFGGLKRSYYMDPQPSNSYEWHLYEYEINDCDAFALYRLEFKSSDAKKTAKSKLACNPLNEIQQQMVRLSADSPVENKRSARSRTKANPNDINSNIYLVQNTTVQGSIPNAYQAVSQPDQMTYLNGNVVYGPHLPYGYSTERSDFYWSSNDGA

SEQ ID NO: 162227 - protein, 150 aa, Oryza sativa
  unsure (1)..(150): unsure at all Xaa locations
  Clone ID: PAT_MRT4530_61339C.1.pep
PPKFVANNSALTTDSPSVNLAPSRSRQITCHLPSHXMTRALRLAISLLNAAHRKARATLPEVFDSTTXEHRSPPASINPXSMRPHVSLLKIAHRKGWATHSKGRTHRLDRQSLLSPSTRASRPVVSLLIVANIELFXRRLKCSIPPIKFH

SEQ ID NO: 162228 - protein, 84 aa, Oryza sativa
  Clone ID: PAT_MRT4530_6133C.1.pep
GHATFDMHNNTKLVKKEYTRRVFSFYQGEGSNKAFFFFFKKKGKPLIFSPNFDWPANKKIFYTCLFQWGATIKPNELCIPGLAF

SEQ ID NO: 162229 - protein, 40 aa, Oryza sativa
  Clone ID: PAT_MRT4530_61340C.1.pep
GGGFFFFFFFFFFFFFFFFFFFFWKTTLRGVKFMEIGGLG

SEQ ID NO: 162230 - protein, 389 aa, Oryza sativa
  Clone ID: PAT_MRT4530_61341C.1.pep
MEEMLMAANAAAGANPNPAATAPSSVTGGALRGGGGGGAPPVAGGAGAGSTERRARPQKEKALNCPRCNSTNTKFCYYNNYSLQQPRYFCKTCRRYWTEGGSLRNVPVGGGSRKNKRSSSSAASASPASASTANSVVTSASMSMSMASTGGGASKNPKLVHEGAQDLNLAFPHHGGLQAPGEFPAFPSLESSSVCNPGGPMGTNGRGGGALSAMELLRSTGCYMPLQVPMQMPAEYATPGFALGEFRAPPPPPQSSQSLLGFSLDAHGSVGGPSAAGFGSSAGLQGVPESTGRLLFPFEDLKPTVSSGTGGGGASGGGAGVDGGHQFDHGKEQQAGGGGGGPGGHDTPGFWNGMIGGGSGTSWGIVKRRMKGRTRLGRKKEKWTPITMH

SEQ ID NO: 162231 - protein, 484 aa, Oryza sativa
  Clone ID: PAT_MRT4530_61342C.1.pep
MEQWLPLFRYLLASPAPNAAAFSSSSSSSGDDDVHCPTAPPPAAALLCLLLSPAPTLPASDPPAILFQTLPPLAQSQALSFLASSAGLLDPALVRSLATRVLSEPSGRYGLWARRGARHLLDGLPQGGGIDAPGEFLDGFHEPPQWLKEAAARTRPALPWLPLDRHSVKVGVCSGRYGFDRVGLDSLVLEKDEDSEMQEAKCVPSPSQPAALGTLSVQRALALQKEILMAESILVAQRVAKDLQQLCVESGNAEAVLSIVQPWKADDDTVRVLLSSLVLDGDGMHRKGPALMLCSLFLPKLLEIQRPVSSVLLSAALDLCKRHPAAALEAILLPLVLRKEGLNVPQCDVLTRIVKDCMHPLHVTAFCHRLLSGDEREWRPVCMPEHRSNISSNLVWTESLFALLYSILNQDICLTSSSTENLVSVIDEMASKLPRSLKFGNFLLCFISKCWRVSKIHSVLLERAAEKTDTFLTKAILAKLRTAN

SEQ ID NO: 162232 - protein, 72 aa, Oryza sativa
  Clone ID: PAT_MRT4530_61343C.1.pep
QVYRGAEWWRFIGHLKTINKTPNKILMMIKTKDDGQVVNQSVKAVVTIKKGGSGRAVEEYSDKVAVVSAELL

SEQ ID NO: 162233 - protein, 452 aa, Oryza sativa
  Clone ID: PAT_MRT4530_61344C.1.pep
MAVLPPSLWASPCPNHRTFSSLSPFCSRNPPAAASGGGARSSSSSSLRFVSSGARRSKNCWGGSEVDAVGEPSCMDAAHWHQGLGLVKPMEEMLMAANAAAGANPNPAATAPSSVTGGALRGGGGGGAPPVAGGAGAGSTERRARPQKEKALNCPRCNSTNTKFCYYNNYSLQQPRYFCKTCRRYWTEGGSLRNVPVGGGSRKNKRSSSSAASASPASASTANSVVTSASMSMSMASTGGGASKNPKLVHEGAQDLNLAFPHHGGLQAPGEFPAFPSLESSSVCNPGGPMGTNGRGGGALSAMELLRSTGCYMPLQVPMQMPAEYATPGFALGEFRAPPPPPQSSQSLLGFSLDAHGSVGGPSAAGFGSSAGLQGVPESTGRLLFPFEDLKPTVSSGTGGGGASGGGAGVDGGHQFDHGKEQQAGGGGGGPGGHDTPGFWNGMIGGGSGTSW

SEQ ID NO: 162234 - protein, 215 aa, Oryza sativa
  unsure (1)..(215): unsure at all Xaa locations
  Clone ID: PAT_MRT4530_61345C.1.pep
MWDPPVSSLLSSPPLFFCDASFLPPRARLPNLRHWPPPPGPAPLPPFATRRPPPPFPLRMRTSPPPPFRAVVADAAAPTPPSLPLRGSNQRRGLAAPLHARQPPTPLPHFASSTAAADAAAPSFRARTPTLPPRVAATGPXARPTPMPPPLLPSSCGRLYCSLDVRPTQPPSPPRSRRXPSQPPPPSPQPQSAADAXPPPPRAGAVGAPREPRLH

SEQ ID NO: 162235 - protein, 334 aa, Oryza sativa
  Clone ID: PAT_MRT4530_61346C.1.pep
MAAASSSTSSAGSAAPAHAPAAGGAGGGGSSGVPNHRTRFGDTTLTKVFVGGLAWETPSKGLQDHFQQYGEILEAVVITDRETSRSKGYGFVTFREPESAREAVRNPNPTIGGRRANCNIASMGPPRPSPSRGRAPRGSLFPDQPHMGPQPYMGGRLPPQHMTAPPQQMYYHPQFGEWWDSCSAQSLSIFYNALKKLCKLLQHAVYNSQALQHYYPQLYGPTSPSTPSYQFMGYMPGALGPRAGFSPMQQQAPRPPFIQQPALQFDGGSFPPGPSLPPDFRLQLPPHALSRQPDETTGAQSAPPVSASAAATPTTDSKEASKTVESNSDLNTSN

SEQ ID NO: 162236 - protein, 64 aa, Oryza sativa
  Clone ID: PAT_MRT4530_61347C.1.pep
MYLPSHLSIRFVCVSAQNVSSKVALFDSYLSSLLMVILPVLSVLSFVFPALYVLGMTYQEGLGV

SEQ ID NO: 162237 - protein, 102 aa, Oryza sativa
  Clone ID: PAT_MRT4530_61348C.1.pep
EKARAVIGVPSITRHIPRSQTAKRLRQATYAGKQPQVFRALASFDCTLANCRIASTREQASKPQVYIQGSKRHRCLHSSACSTTILRQDYRMSSESETSVVM

SEQ ID NO: 162238 - protein, 1936 aa, Oryza sativa
  Clone ID: PAT_MRT4530_61349C.1.pep
MLVWTQVGEIVFLVYTTVPISTGPSMTGSQNVVVTTPDGSMSKDPPVEVESGTSTTSEPEKDPNTAKSCPSDENHEPTRTTSEATRSWCPIHKTRKHTLQACWVFLDVQAEIRACKERGIQRTSPTRDVHCPIHKTKNHDLSSCKVLLSTMRTSPPKVQQSQISLRDADKERGVTVISDRFVGVIDIDPHELSVLHLFEDQTSSSTSTPRDVFAIDGTNTSAHANAERRIKCGCRAILIEDDIVMTMTAEIDAGTATVGDDKILENPDVILAALSDWCLSHIASCFGGREGGIFASLSYFSLRLRAPIGVSPTHRIFFWGEGGGHLCLRQLLLAKVCTLNSLRVSEVIRIIVVFLFPDSQFCLPIDEPSSSRGATGFSMLTGSSSCTIEHVPRSLSMRFTYSIPKEHMQILKATYPDRSYYGGLDYECNHCGALFWYQERVVSQSSHRAKRIAYNLCCRGGKISLPPPKPFPPILQDLIRFDGGARSNSFMRLIRQYNSLFAFTSLGANIDRSINTGQGHYVFRINGVVHHRIGSLVTAPGQRPEFAQLYIYDTANELQNRLNIFYHTDDPGDVPDPVIVQELISMLDQFNPLVQQFRLARDKLLSPSAPEIAIKLIGSDHSQSDHYSLPTISELATLIIPGASCEVSKFDVIVQKHSGELCQLSPIHPALMSLQYPLLFPYGDVGFHTGIKLREVDDQPPGSCDEASMLEFYRYESHYRKDEPNPFTCCGRLSDQLAANAFSCIETSRLTYHALNQKKLRSETHQGISDAVVRGDSDGKDVGTKVILPSSFIGGRRYMVQNYHDSMAICRSYGPPQIFSTFTCNSKWPEIIEAIRFEAGQKPSDRSDMVTHVYHMKLDEYITSIKNGEAFGPIKAAQSEEPSPAFIDNLICAEIPDITADRFGFGLVDEFMIHGPCDDDGYPIYRRRNDGRYVVKNGVSLDNRWVVPYNPALLKKFQAHINVEWCNKTYLIKYLFKYINKGSDSTMFVFSHRTSEKTEAHTASDGGIGEVMQYIKSRYLSTCELFWRLYGFEIHGRSPSVERLIVHLPNMQFVTYHDGADLEEVIEDPDSSRTMLTEWFATNQRHIFARDLTYCEFPTKFSWDPEKKVWTKRKRGTKIGRLKHIHPSTGEPFYLRMLLMIVRGCMSFEDIRTYEGVLYGTYREACQARGLIGDDAEWDHLFEEAVIWATSYQLRNLFMTVLAHCDVGDVRVLFDKYWRYMVDDFAYKLTKALGVQRTAIPEVMLQDTLLKELDAILNNDQKMIYDKIFDRIDHHEKCIFFISGHGGTGKTFLWNAIMANMRSRGEIVLAVASSGVAALLMPGGRTAHSRFRIPIDIHDRSMCAIRRGTILGDLIRKASLIIWDEAPMTHKLCFEALDRTLRDIQSADEPANEYKPFGGKPILLGGDFRQVLPVIEKGTRADVVDASLVLDIGEGRAPMNKRQGEVERTWIEIPKELLLTPCGDKITAIIDAVYPDFELNYDYIPYLSQHAIVCPVNTVVDEINDKMLAKVLGDAKDYLSSDTISNTLEKPADFDLLYPIEFLNSISINNFPKHRISLKIGSAVVLLRNINQSLGLCNGIRLMVTRLGDYVFESKIMTGTNIGQLMDYTMLRDVTQESHRWQVRVRVTRFSQFTTANEPDKILRLDLVLLDEQVTLFGPDQSISFLISFVYSLLTALTYSCANFIPYTTPVDAIGIMTPIGPVQTVSCGGVMKAVLNVHITNGSAILYFLCFSHVNQGNSYIVKIAIKDLVPAEAWWYRVAIIGVDPSDLANHDAKTAEFTFFGEIGYQLIGIPVLNLVASVQGARDIVPSKIKAVFGKQYVIRTSVSRGSLQRNRISYQVDSLMLASLDAAHTSTLPSHDASMASSQHGSSPADAIEPHTIIGSSLQSMTPSTPLVLPDPKLLAMAQLDKKRKSSAIDEDLAQEGKTDSTLHFAL

SEQ ID NO: 162239 - protein, 92 aa, Oryza sativa
  Clone ID: PAT_MRT4530_6134C.1.pep
SFSLERTFGTRGLFQIRSQSDWGAVDTLSLVHTQIHQNTGVGYYASQRPEPVYIARVSRFFLARDPSTYRESLRFHPKPPAELAKGGLCGLP

SEQ ID NO: 162240 - protein, 630 aa, Oryza sativa
  Clone ID: PAT_MRT4530_61350C.1.pep
RGCMSFEDIRTYEGVLYGTYREACQARGLIGDDAEWDHLFEEAVIWATSYQLRNLFMTVLAHCDVGDVRVLFDKYWRYMKMIYDKIFDRIDHHEKCIFFISGHGGTGKTFLWNAIMANMRSRGEIVLAVASSGVAALLMPGGRTAHSRFRIPIDIHDRSMCAIRRGTILGDLIRKASLIIWDEAPMTHKLCFEALDRTLRDIQSADEPANEYKPFGGKPILLGGDFRQVLPVIEKGTRADVVDASLVLDIGEGRAPMNKRQGEVERTWIEIPKELLLTPCGDKITAIIDAVYPDFELNYDYIPYLSQHAIVCPVNTVVDEINDKMLAKVLGDAKDYLSSDTISNTLEKPADFDLLYPIEFLNSISINNFPKHRISLKIGSAVVLLRNINQSLGLCNGIRLMVTRLGDYVFESKIMTGTNIGQLMDYTMLRDVTQESHRWQVRVRVTRFSQFTTANEPDKILRLDLVLLDEQVTLFGPDQSISFLISFVYSLLTALTYSCANFIPYTTPVDAIGIMTPIGPVQTVSCGGVMKAVLNVHITNGSETAVIALWGAHDTQFHAENLQQQANHGPELALQGSTVCRWYPNAPIQKTISLISSAILYFLCFSHVNQGNSYIVKIAIKDLVPAEAWW

SEQ ID NO: 162241 - protein, 90 aa, Oryza sativa
  Clone ID: PAT_MRT4530_61351C.1.pep
EYSSYADEYADEEEEYVEEYVEDEEEDEAEEVAAPVAYSPSCCPPRLRPELGHLFGRLFFYTLTYTMTSHTFSQTFSVDNMLIIYHMVSD

SEQ ID NO: 162242 - protein, 314 aa, Oryza sativa
  unsure (1)..(314): unsure at all Xaa locations
  Clone ID: PAT_MRT4530_61352C.1.pep
TRGDLIRKASLIIWDEAPMTHKLCFEALDRTLRDIQSADEPANEYKPFGGKPILLGGDFRQVLPVIEKGTRADVVDASLVRSALWKHVEVLHLTTNMRLHNPSLSQQAKGELAEFAKXVLDIGEGRAPMNKRQGEVERTWIEIPKELLLTPCGDKITAIIDAVYPDFEFNYDCIPYLSQRAIVCPVNSVVDEINDRMLAKVPGEAKDYLSSDTISNTLEKPADFDLLYPIEFLNSISINNFPEHRISLKVGSVVVLLRNINQSLGLCNGTRLIVTRLGDYVFESRIMTRTNIGXLVCIPRIVLSGNSPKWPFML

SEQ ID NO: 162243 - protein, 109 aa, Oryza sativa
  Clone ID: PAT_MRT4530_61353C.1.pep
MSPRRVRWRWTTPKAGATAEDPETGGDNPEGGSAADAPDEGSAAEEARRGRGTAAWIADMAKNILFLVLRLNTILTYCERPKETIARKGTTDNRWMLGNADGRNVISGA

SEQ ID NO: 162244 - protein, 77 aa, Oryza sativa
  unsure (1)..(77): unsure at all Xaa locations
  Clone ID: PAT_MRT4530_61354C.1.pep
VSKVDVCSCSXLIGYYQVFVGQVCSLQGVNLSVCLLRSPPPPSSSLLPPLLVAPSSPPPPTHPLTPSPKGTDPLLLP

SEQ ID NO: 162245 - protein, 185 aa, Oryza sativa
  Clone ID: PAT_MRT4530_61355C.1.pep
MDYTMLRNVTQESHHWQVRVRVTRFSQFTTANEPDKILRLDLVLLDEQIPGRHVSQFKPLLKEDAVYYIKYFEVAEARPQYRPIDRMVMAKFTAHTTVREDTEAPSTFPSHAYKVLSFDELRGRAYRKDILSDAIGIMTAIGPVQTVSCGGVMKAVLNVHITNGSETAVVALWGAHATQFHAENL

SEQ ID NO: 162246 - protein, 110 aa, Oryza sativa
  Clone ID: PAT_MRT4530_61356C.1.pep
MDANRRQSGIQQLLAAEQEAQQIVNAARAAKSARLRQAKEEAEREIAEYRAQMEAEFQRKVAESSGDSGANVKRLEQETAEKIAQLKQQAASISPEVIQMLLRHVTTVKN

SEQ ID NO: 162247 - protein, 82 aa, Oryza sativa
  Clone ID: PAT_MRT4530_61357C.1.pep
MHIIFHLFILLCAYSETAVIALWGAHDTQFHAENLQQQADHGPVVISFVGLTVKFRDHQLALQGSTVCRWYPNAPIQETILS

SEQ ID NO: 162248 - protein, 399 aa, Oryza sativa
  unsure (1)..(399): unsure at all Xaa locations
  Clone ID: PAT_MRT4530_61358C.1.pep
CSWHNTQACWVFLDVQAEIRACKERGIQRTSPTRDVHCPIHKTKNHDLSSCKVLLSTMRTSPPKVQQSQISLRDADKERGVTVISDRFVGVIDIDPHELSVLHLFEDQTSSSTSTPRDVFAIDGTNTSAHANAEXEDQVVTPAQHIRAINALLRETPYDPILNDDLEQWTERLRESVANLSNAFEEAAARAQPEQPPNGGADGEPPEQRTSPRQATPPLRGTSDLLDHLNGRREARRTRDNDDRSXHRVSSRRRGNEEQGGHPSENRDRDNRHNRHEHTNREQRMPGDTDRGRHRDDDDGGDRRRDSNGGRRQDSREPGRHSRNRTPEPSDSSSSSSSSSSSSPSDRHPRRTYDHRQPTAPGGGCRAFSRALRDVRWPERFRPGAIEKYDGSTDPEEFL

SEQ ID NO: 162249 - protein, 143 aa, Oryza sativa
  Clone ID: PAT_MRT4530_61359C.1.pep
GLQEFGTRYRVAIIGVDPSDLANHDARTAEFTFFGEIGYQLIGIPVLNLVASVQGARDIVPSKIKAVFGKQYVIRTSVSRGSLQRNRISYQLLAMAQLDKKRKSSAIDEDLAQEGSSPREHDCQKASVVRALFVDKLPPQPPK

SEQ ID NO: 162250 - protein, 56 aa, Oryza sativa
  Clone ID: PAT_MRT4530_6135C.1.pep
MPVAAYGTMSRQMEIDGFSPSIRHLTGLWIGSYVPGGLKTTINVVMRELMAFDGLG

SEQ ID NO: 162251 - protein, 205 aa, Oryza sativa
  Clone ID: PAT_MRT4530_61360C.1.pep
FHSRHRLLSLSLSLSLPHSSSASLAEEEETHEAGLVLPLRPRVRGSPKPVETPEAGGGGSGRWGEGRGWGGRRRAGGRRPVLYVRSCEPARRRRRRRIRTRSARESAPMAATQEKAPVVVCCGGGGAAAARRVDGGPGSSSRGAIVAAPAAAAAAGKVSMVSGDDPRVAAAAGGGGGAVMEEIIAARQPTTAKVSSKAIPIMTPR

SEQ ID NO: 162252 - protein, 95 aa, Oryza sativa
  Clone ID: PAT_MRT4530_61361C.1.pep
FCFVLFPPHFFFFFFFFFFFFLGLQTGPWNLFLPSIPQNSPALITKALLFGLKTQQGQKTPKLRTPHYPNWGQGWGPTIPLYRGGFISRFYELFN

SEQ ID NO: 162253 - protein, 121 aa, Oryza sativa
  Clone ID: PAT_MRT4530_61362C.1.pep
MAGEGGGDPELLEDDGGQRRRRRCYGKETAAAGAQLGGEAMVEEEKREKREERKEMGQWAVGEGWGFLIYKSKLMEYLRSIAQTRDDNFAHGPGYPQIPDPIGMGVGVNFYPWALGMSQLL

SEQ ID NO: 162254 - protein, 413 aa, Oryza sativa
  Clone ID: PAT_MRT4530_61363C.1.pep
MEAAAAAAAALLSPPAAAAPSRRPGTPGATSLPFARRRGVAAVKGLGRQQLTCRRRGVVVRAASWSPSGPESLPPPPSSSIAPLQMESPVGQFLSQILATHPHLLPAAAEQQLEQLQTDRDAAKDNGGDKPAPSDGDIVLYRRIAEVKEKERKRALEEILYALVVQKFVEAGVSLVPALSHSISSSGRVDQWAESVEGKLEKMHSQEAYEMIENHLALILGQRQADATVAAISKLRVGQVYAASVMYGYFLKRVDQRFQLEKSMKTLPWGSEEEDKLNQVMTTDSRPSPQTSTSHPEMASWTSPNFSAGGPSQSVKPCRLRSYVMSFDSETLQSYATIRSKEAFGIIEKHTEALFGKPEIVITPEGTVDSSKDEHVRISFAGLRRLILEAVTFGSFLWDVESFVDTRYHFVAN

SEQ ID NO: 162255 - protein, 58 aa, Oryza sativa
  Clone ID: PAT_MRT4530_61364C.1.pep
RVGEIIRRSFCASIQNSFHIQPASHLKLLYYIDIKSKQTGSLTKQDCESRALFFLSNY

SEQ ID NO: 162256 - protein, 195 aa, Oryza sativa
  Clone ID: PAT_MRT4530_61365C.1.pep
MGFQGTDGFSVYDHAGTLAFRVDNYSRRRKLFSGDLLLMDGHGSPLLALTPQIISMHDQWNCYRASEEGQGKRTRSQQLFSMRKCSVMQSSHEAEVHMSGCTHASSDRTGHVPAFSIEGSFKRRSCKIRNSGGEEVARITRKKAGAASLSLTLAEDVFSLEVQPNVDCAMIMAFVIVLDRICWKPYTPMILKKRN

SEQ ID NO: 162257 - protein, 68 aa, Oryza sativa
  Clone ID: PAT_MRT4530_61366C.1.pep
MNKPKMYLSDQANQARGQCLSDPRVVRILLRKCWWVFQEISTGTFFADGDGIGKTFFTIQNVFLLALA

SEQ ID NO: 162258 - protein, 122 aa, Oryza sativa
  unsure (1)..(122): unsure at all Xaa locations
  Clone ID: PAT_MRT4530_61367C.1.pep
RRKNYPAKKEKPQCCCSKIDEPLRGDLKAFXLGSDSLKQFSAAWKAVSRHHASAAIMLCGHLAMVEPVPFGLVGLELLGACKEASYLVGATNIGTVSWTSEHPSIAIIGRGLPCSRPKSRGT

SEQ ID NO: 162259 - protein, 236 aa, Oryza sativa
  Clone ID: PAT_MRT4530_61368C.1.pep
MAVQWDKLESIAYPLLLTHRTRTLERFWMSVNVARGMDMGCPPPRRPVGALRCPVLLRAGGGGGGGLAHCFVGARRLVDLDLPAASTGDCYYYRLRRLHLTGVSLGGRFVEQVRLRLPDRKTGKACEPFEPVRPPVEGRSDRRHVAGLTSRVVRSNPVLGPTSFCCASSPDLVSPVVDARNIDLIKRGTFLALDIHDLGMAIVPVYPFVETPLRLGMFLGILLGQMLYPMGKQACA

SEQ ID NO: 162260 - protein, 454 aa, Oryza sativa
  Clone ID: PAT_MRT4530_61369C.1.pep
MEELKLMRRLCLPISALNLLHYVKSMVTVLCLGRLGRAELAGGALAVGLTNVTGYSVLSGLALGLEPLAGQAFGSGTGRTRSRPRRALRRAVLLLLAASFPVAALWGLLPYAIPDLAAASVLLPARVYLRSKGETRRLASCAALAVALVHAPATAYLGARLRVPGVAMAACMTSFATLAFLWISLTWAPAQNEPDEPADLEEWAGVGQWAEWADLLRLSLPSCLSVCLEWWWYELMTIAAGYLRDPHTALATAAIVIQTTSLLYTIPVTLSSAVSTRVANELGAGRPRSAQVSFVVAMGIAMMGSCVGLTWTTFGRGLWVQVFTTDPTIQSLTTSVLPVIGLCELANCPQTTGCGVLRGSARPAVGAAINLYSFYLVGAPVALVLAFGLDMGFLGLCLGLLSAQVVCLISGGFATFQTDWEAEALEAFHLVGGGDEKCGDDLPCLAHKVKIVNL

SEQ ID NO: 162261 - protein, 41 aa, Oryza sativa
  Clone ID: PAT_MRT4530_6136C.1.pep
DYRSSLRPEIVEALFCAKDWLQYSPATPEAPSTALVKVDAP

SEQ ID NO: 162262 - protein, 313 aa, Oryza sativa
  unsure (1)..(313): unsure at all Xaa locations
  Clone ID: PAT_MRT4530_61370C.1.pep
MEAATTVQLRIGGGPSDEWGRGMRRGERLGDGDNDCRRKRERGEEGGRXGGREGGLREVLGDGDASVGWRLPRHGGQEERRHKAAHRALLGSEIFSGWATYMTHLSSKETAPRTEKKKETVRKKITRTLGGPNPSPRRAIPTLRRPLELTHGAAIPHAQQEIANLRPHATAPPAAPPAPRPTLHRPPDLIPPHLTGAALPHATIAALPLPMPRRPPDLSPPHLTGAALPHATISTALPTPPPSSLAAAATGGGSQLRLPHHASHIASPLPPRIYRPTVPPRRRRLLPRHPTPIPALLSVEIGGVAGSQGGASM

SEQ ID NO: 162263 - protein, 101 aa, Oryza sativa
  unsure (1)..(101): unsure at all Xaa locations
  Clone ID: PAT_MRT4530_61371C.1.pep
PILDQTLTPPPAATVANGKHVFLPMPKMAYGKSDAFTDTIPRASNPSPYSTEAATAADEADIAEAFMVTAAAYQMQTECESDTYCEFVTITADXLTEYLMH

SEQ ID NO: 162264 - protein, 284 aa, Oryza sativa
  Clone ID: PAT_MRT4530_61372C.1.pep
MANMLTTKPHVFDGLDFPYWCEKTMESYIMAQDYDIWKNLANADEIPDQINIVALKIEFEYNCKACNIFLSGISRFDFGCVSHPQTTREIWIVLPNFHQGTSNIKELHKDLFKNDYIKFAMKPGETLDDYLARFNKVLSNLKSIDTSYDTNYSQYEMKVISIQESIDMSTLILDSLYTKLKTHERNILFCKVDFKSSVLVSPSTSLDIGASSSNSTALASINVISDDQHEQLEEDLALAIVGIYYEHKIIYRRTYTVVAFTQQYSRVLYPQETCVNNLITEFIQ

SEQ ID NO: 162265 - protein, 282 aa, Oryza sativa
  unsure (1)..(282): unsure at all Xaa locations
  Clone ID: PAT_MRT4530_61373C.1.pep
MANMLTTKPHVFDGLDFPYWCEKTMESYIMAQDYDIWKNLANADEIPDQINIVALKIEFEYNCKACNIFLSGISRFDFGCVSHPQTTREIWIVLPNFHQGTSNIKELHKDLFKNDYIKFAMKPGETLDDYLARFNKVLSNLKSIDTSYDTNYSQYEVSRYFLNGLDISIWXMKVISIQESIDMSTLILDSLYTKLKTHERNILFCKVDFKSSVLVSPSTSLDIGASSSNSTALASINVISDDQHEQLEEDLALAIVGIYYEHKIIYRRTCRLERNADFTFIA

SEQ ID NO: 162266 - protein, 137 aa, Oryza sativa
  Clone ID: PAT_MRT4530_61374C.1.pep
MPLTYNLQIEIFDVWGIDFMGPFPKSRNCEYILVAVDYISKWVEAMPCSAADAKHAKKMFTEIIFPRVKLFYHGKLRSKWEGPFDVIDTSSHWAITLRDDSGGCSIGGAVRIGIKPPATKKPNIFRPKALGPAYIES

SEQ ID NO: 162267 - protein, 41 aa, Oryza sativa
  unsure (1)..(41): unsure at all Xaa locations
  Clone ID: PAT_MRT4530_61375C.1.pep
APSYIXDLPAGWLTCXXPVXXXAXPTCXXXTXXLNVFXFVN

SEQ ID NO: 162268 - protein, 422 aa, Oryza sativa
  Clone ID: PAT_MRT4530_61376C.1.pep
MCIVVTKSPPEIVRPSEPVTTTAATGKIIFSPFDKPLATVPVVVLQVFEHPIHEPVETIRRGLSHALVHYYPLAGRLAGDDYDDVHIDCTGEGVTIVAASANCTVKQLMRDIDGRLPDPSTAVQRELIVDDNPAYGFGRADPLILMQVTTFTCGGFVIGVTWNHGAADGFGIAQFLQAVGELARGLPTTSVIPVRSDKSLQAMSSSTVMAAKQFMFGVKPTTLALHSITIPARVINGVRGPTPTCTVFEAVAAVMWRCRTRVVMSDPDAPTVLAITVNSRKYVGVKDGYYGNCATMQMAVARSGVVADGDMMEVVRTIRRAKEEIPERLKKGDAIAELSKGQLSGYESVLLVTCWRNIGFEAVDFGGGRTARVMTTYEQSGVRPLCVVCLPWQGEEDEGARVLSGCVTPHHADAFLREIATL

SEQ ID NO: 162269 - protein, 313 aa, Oryza sativa
  Clone ID: PAT_MRT4530_61377C.1.pep
MAMNHPLFSQEQPQSWPWGVAMYANFHYHHHYEKEHMFEKPLTPSDVGKLNRLVIPKQHAERYFPLGAGDAADKGLILSFEDEAGAPWRFRYSYWTSSQSYVLTKGWSRYVKEKRLDAGDVVHFERVRGSFGVGDRLFIGCRRRGDAAAAQTPAPPPAVRVAPAAQNAGEQQPWSPMCYSTSGGGSYPTSPANSYAYRRAADHDHGDMHHADESPRDTDSPSFSAGSAPSRRLRLFGVNLDCGPEPEADTTAAATMYGYMHQQSSYAAMSAVPSYCRHGWGGFRKHQVEKERGIEETGRELCNYAMLPFVAIQ

SEQ ID NO: 162270 - protein, 78 aa, Oryza sativa
  Clone ID: PAT_MRT4530_61378C.1.pep
YNSELIKPHISFLLICVQSGCCKPPSSCNFLYVSGTNWTKVPTNSSDPDCNTWVDDGTQLCYNCQSCKARPVATLERD

SEQ ID NO: 162271 - protein, 109 aa, Oryza sativa
  Clone ID: PAT_MRT4530_61379C.1.pep
FLLFFFLFFFFFFFFFFFFFFLNLGRSILFYICPPLEAGGFTPEQKKGGARQQHHKRGHPKISGDPPAAPLKETSPQKKKPEQKWDGKWSRGHNWFGQRENFPLKRASL

SEQ ID NO: 162272 - protein, 121 aa, Oryza sativa
  Clone ID: PAT_MRT4530_6137C.1.pep
MPAAVVGAERWDALLGFSSTLSSSLLTPVRLECEHQLVDQLLDDPNGTDVAHSRTDNLGNKGAFNSDSMGNSRIGNGRPRLSICVWKGRQTLMVAIMWNDLLNVVVYLGANVARVARCLAA

SEQ ID NO: 162273 - protein, 141 aa, Oryza sativa
  unsure (1)..(141): unsure at all Xaa locations
  Clone ID: PAT_MRT4530_61380C.1.pep
MNFLCFFPVTKKPDSSKGAEASPSMEEGEACDDCECEIARLPEELLSAAISLTAPRDAFRAAAVSRAFRAAADSDAVWASFLPRDLPDLADGELSPAPPSKKDLXLRLSXGHYHXLPDRLKGMXLDRETXAQCYVLSARAL

SEQ ID NO: 162274 - protein, 252 aa, Oryza sativa
  Clone ID: PAT_MRT4530_61381C.1.pep
MAAATDGGGLPLLADKAASHSHHHHPERHFTSGEVVRDVIMGVSDGLTVPFALAAGLSGASAPSSLVLTAGLAEVAAGAISMGLGGYLAAKSEADHYQREMKREQEEIIAVPDTEAAEIGEIMSQYGLEPHEYGPVVDGLRRNPQAWLDFMMRFELGLEKPDPKRAIQSALTIALSYVIGGLVPLLPYMFISTAQNAMLTSVGVTLVALLFFGYIKGRFTGNRPFLSAVQTAIIGALASAAAYGMAKAVQTR

SEQ ID NO: 162275 - protein, 67 aa, Oryza sativa
  Clone ID: PAT_MRT4530_61382C.1.pep
LHFRHSVLRSSSPSKKQVYRRQQRRGSGENAVHCRPQFLSGTHMPGAELWRVVDQQTSWTGDATHDT

SEQ ID NO: 162276 - protein, 108 aa, Oryza sativa
  unsure (1)..(108): unsure at all Xaa locations
  Clone ID: PAT_MRT4530_61383C.1.pep
PRVRPRVRKREQEEIIAVPDTEAAEIGEIMSQYGLEPHEYGPVVDGLRRNPQAWLDFMMRIXPTATPFLGLEKPDPKRAIQSALTIALSYVIGGLVPLLPYMFISTAQ

SEQ ID NO: 162277 - protein, 103 aa, Oryza sativa
  Clone ID: PAT_MRT4530_61384C.1.pep
NYYHHLTCLRLPLALCELPLGFFFFCLAMKPPHFTGEGSGSWAHEVKQALRDKLRRAYGTAGAARPAASAVSRGPSHGGDDCRGSAAEDPIRRVMFLAPWGHT

SEQ ID NO: 162278 - protein, 137 aa, Oryza sativa
  Clone ID: PAT_MRT4530_61385C.1.pep
MASKVIAPFLALSLLLFAVIVQGCTPNCSGEQVVPTPPIAVPTPSHHGGHGEHGRCPINTLKLRVCANVLNGLVDAKIGHGTDDCCSLLSGIADLDAAVCLCTAVKANVLGIRVNLPVDLSIMLNKCGKTCPSDFTC

SEQ ID NO: 162279 - protein, 82 aa, Oryza sativa
  Clone ID: PAT_MRT4530_61386C.1.pep
RRFLCNITRKIGVALRWRHRGAVGRPGSRPRGVARRLGELEAGVAEWQWRRRRLRRRPRRSRRRGPPSNGERRRWCRRRVAL

SEQ ID NO: 162280 - protein, 81 aa, Oryza sativa
  Clone ID: PAT_MRT4530_61387C.1.pep
SDSNFTQETAVSFFSPTFNEPPFRATWLSLRARAGFTGWGPASPKGQDLNKLARVPGLGILFPHGLTCSEWGEGHNWGKVV

SEQ ID NO: 162281 - protein, 220 aa, Oryza sativa
  Clone ID: PAT_MRT4530_61388C.1.pep
DRVPVRVRLKLLVADALANNRWIRDLHGSLGVQAILQYLQSSGSYSIRSAYLALFSGRISFQHLPIWRSFAPPRCRYFLWLVAHRRCWTVDRLEKRGLPHPAFCVFCDQVEETIDHILIGCPESLELCWTILSSLGLPQCFPSGVVSFHEWHCSCQLKVPSEHRRGFDTIVTLGAWSIWKERNNRVFNNRPRFWYEVVTAMAQEAALRCLAHSLSPALPS

SEQ ID NO: 162282 - protein, 82 aa, Oryza sativa
  unsure (1)..(82): unsure at all Xaa locations
  Clone ID: PAT_MRT4530_61389C.1.pep
LFQXRGNXRKPRRKRNAVGVYVYXHAXQGXIDKYNDFXHNXXQGRXLFPKLQXGXGIXFXEXVKMRQKGFYFXXXWXXLKKX

SEQ ID NO: 162283 - protein, 111 aa, Oryza sativa
  unsure (1)..(111): unsure at all Xaa locations
  Clone ID: PAT_MRT4530_6138C.1.pep
NMEHQSTFYCFGLFLGXQYKGSLSVTVDYEFAPRTSPSGEFVTKYKGISPFPVGKPVGSRILFAIPCXTFLADVNLFFFSDVLFFKPEFSISILFFFCPAAFLYLFFCLSG

SEQ ID NO: 162284 - protein, 154 aa, Oryza sativa
  Clone ID: PAT_MRT4530_61390C.1.pep
MAGTKLAALGFIVLLSIGLASAVRVERYSNAQGSGTGSGEGTGSVNGAGAGLGSGTGSGRSGYNGAHASGGGGGGGGGYSQYGGSGSGSGSGSGSGSSQTSQNGYYGSSEATNTWYGQYANANAGGNGGGNGQGQYGGSGAGVGSGSGFGDANP

SEQ ID NO: 162285 - protein, 276 aa, Oryza sativa
  unsure (1)..(276): unsure at all Xaa locations
  Clone ID: PAT_MRT4530_61391C.1.pep
LGVPHRISLYADDVVAGELAAAQGILALFGEASGLHTNFTKFSAIPISCSEEEVAVLGNSLPCPVEEFPCKYLGLPLSIRKLRREDLQPLVDRIAQRLPLWRSDWLQPAERDAASSGVVVRMLRVATAGWLGPESELYDRVPVRVRRKHLVADALANNLWICDLHGSLGVQAILQYLHIWSLLALFAGRISFXHLPIWRSFAPPWCRYFLWLVAHRRCWTADRLEKRGLPHPAFCVFCDQVEETIDHIRVFNNRSRSWPEVVTAMAQEAALWRLAH

SEQ ID NO: 162286 - protein, 157 aa, Oryza sativa
  Clone ID: PAT_MRT4530_61392C.1.pep
LEALALVGLANLGKPSVPDGVVLGMIGGPICGISSKFSDPKYQMCEDYWDEFASYRISKEARKMSEQNKASSAMNKVLLCLKEIDELTLALRNPQHPGRMKDQRSTKKSLASEQEPVKLALPRQPPSSQLGMSSKSEGELYSHTPTQVKVQLEQARG

SEQ ID NO: 162287 - protein, 303 aa, Oryza sativa
  unsure (1)..(303): unsure at all Xaa locations
  Clone ID: PAT_MRT4530_61393C.1.pep
EAFLRPVAGELAAAQGILALFGEASGLHTNFTKCSAIPISAIPVYLLIAIAPPKWVLKAIDKIRRGFLWYGRANAQGGHYRLAWSXVCAPLEYGGLGIHNLEFMGIALRSRWLWAQRASQSLSWQGLQISCSRQEREFVAAXTCVLGDGKSILFWEDRWLQGSSLRSXAPELYDRVPVRVRRKLLVADALANNRWIRDLHGSLGVQAILQYLQIWSLLRTTTLSEGHPDSFIXRWESSGSYSTRSAYLALFAGRISFQHLPIWRSFAPPRCRYFLWLVAHRRCWTADRLEKRGLPHPALLCLL

SEQ ID NO: 162288 - protein, 190 aa, Oryza sativa
  Clone ID: PAT_MRT4530_61394C.1.pep
IEHSAAIERHSSGRSLGNLLQHKGSLLSLERPLVFIPTSPNAPRSRSAARRKRSQYSGLQILCSRQECEFVAASMTCVLGDSKLILFWEDKWLQGSSLRSLAPELYDRVPVRVRRKHLVADALANNLWICDLHGSLGVQAILQYLHIWSLLRTTTLSEGHPDSFIWRWESSESYSAQSAYLALFAGRISF

SEQ ID NO: 162289 - protein, 142 aa, Oryza sativa
  Clone ID: PAT_MRT4530_61395C.1.pep
MAEARAGNDDAINHRFPPLGSCRAITLPLHDETIQGLSRQQCSRQVGSPVAAVTGDEVTTQQRSGSRRASLHAAATATADGARPAHGVLDLSRRHGSPSAAAAVAVAWGEALLLPRRRRCRLVARRRIAAAATSCGLTGGLV

SEQ ID NO: 162290 - protein, 124 aa, Oryza sativa
  Clone ID: PAT_MRT4530_61396C.1.pep
SRLIEHMEQSQAESSSQLLKFEEDFKELSVREEQAALDKIAGILAGLTAKKSTMVLDCVGQLNGKCREEQKHLKLQISNLQKVSDSGGKEAAAYAAKVESQFSEDKLSHCKIKDQMGRHLAAKL

SEQ ID NO: 162291 - protein, 46 aa, Oryza sativa
  Clone ID: PAT_MRT4530_61397C.1.pep
GEWPEQKHVQDGRQRRLLATHVPVLRCTARHIRRKLPLFNIHLQIQ

SEQ ID NO: 162292 - protein, 135 aa, Oryza sativa
  Clone ID: PAT_MRT4530_61398C.1.pep
MRGRRHGGLGQLAEGVADDCIWPAQQRLEEGSETGLAQRGAANGSGGRLGARSAAGGGGGDLGEWRSCQWVWRGLRRTKASRRRAPVQGSHMSTEVDWQWSIGVSAVVSQVVSGSGGRSRLAAAGMVLAFSRTCV

SEQ ID NO: 162293 - protein, 126 aa, Oryza sativa
  Clone ID: PAT_MRT4530_61399C.1.pep
GWLPGKSLVLAPLSLDGWLRRFSVASLLEDVVLAPSCCVAISSVFLCWSSGGRSGASLLPDLCLGAVGVWVVVFFFFFLVTTLQGCNLVIFSCYVNRTSHRLVRVVKKKAIKASTIKTHVLKKKKK

SEQ ID NO: 162294 - protein, 575 aa, Oryza sativa
  Clone ID: PAT_MRT4530_6139C.1.pep
MDVKRARSPRAPGVDADDDKKRAAEWRGAVRPHMVLVGFLITLPVLVFVFGGRWGSFQTTSAPNVGGRHVVPGGVTTTQKNEAPKNVSVPATATKSLPQPQDKLLGGLLSAAFEESSCQSRYKSSLYRKKSPFPLSPYLVQKLRKYEAYHKKCGPGTKRYRKAIEQLKAGRNADNAECKYVVWFPCNGLGNRMLTIASTFLYALISNRVLLMHVAAEQEGLFCEPFPGSSWVLPGDFPHNNPQGLHIGAPESYVNMLKNNVVRNDDPGSVSASSLPPYVYLHVEQFRLKLSDNIFCDEDQLILNKFNWMILKSDSYFAPALFMTPMYEKELEKMFPQKESVFHHLGRYLFHPTNKVWGIVSRYYEAYLARVDEKIGFQIRIFPEKPIKFENMYDQLTRCIREQRLLPELGTAEPANTTAEAGKVKAVLIASLYSGYYEKIRGMYYENPTKTGEIVAVYQPSHEEQQQYTSNEHNQKALAEIYLLSYCDKIAMSAWSTFGYVAYSFAGVKPWILLRPDWDKERSEVACVRSTSVEPCLHSPPILSCRAKKEVDAATVKPYVRHCEDVGFGLKLFDS

SEQ ID NO: 162295 - protein, 55 aa, Oryza sativa
  Clone ID: PAT_MRT4530_613C.1.pep
YVCCVKLYVLQDYSHESAMSMIRPSFDTTRYMNSWYVSRYRSYIVACTRASALVL

SEQ ID NO: 162296 - protein, 192 aa, Oryza sativa
  unsure (1)..(192): unsure at all Xaa locations
  Clone ID: PAT_MRT4530_61400C.1.pep
PPPRPPAVSPRGSVAAAPDPSPQPXPPTSPPPLPSPPPPAIVAPPDPSPPXPPSSPPLDLSAAAPDASPQPPXSSPAADPSPPPPAVIGGTGSAQCGGATRGGQAAPAAVALRKREGRLIVVGEEEMAGRRAEAAKPPPAAAVAAPPAAAAQYGGGSGPPEGGAAGSANRADALPSAARRSKRGRGRERASC

SEQ ID NO: 162297 - protein, 50 aa, Oryza sativa
  Clone ID: PAT_MRT4530_61401C.1.pep
MERSKGQPLDRVKASPDSNALASFAPRLRRISREDSGCQYRNGNIPRMMA

SEQ ID NO: 162298 - protein, 196 aa, Oryza sativa
  unsure (1)..(196): unsure at all Xaa locations
  Clone ID: PAT_MRT4530_61402C.1.pep
MTASGRRSSVWRKGRRPAWRXERRSQWQRRPARREKRGRRWRRRPWXVEELPVGVARSSAHEGXPAEGAGAGVPHVDRGXLAVEHRCVSRGFAGGERQVKTQPGLGRTDNNGXFPLLRALSCCLAPQGWLPGESPVLAPLILDGRRRRFSVASLLENVVLAPSCLTISSVFLCWSSGGRSRLAAAGMVLAFSRTCV

SEQ ID NO: 162299 - protein, 106 aa, Oryza sativa
  unsure (1)..(106): unsure at all Xaa locations
  Clone ID: PAT_MRT4530_61403C.1.pep
TLXPXAPXQPILFPXAPGRXXMRSPXVXRASLGKAXGAAALAXAXXAMLAGXAMAQEVXLGANXGVLVFXPNDFTXXSGETIAFKKXAXFPXNVVFDXDXXPIRRL

SEQ ID NO: 162300 - protein, 81 aa, Oryza sativa
  Clone ID: PAT_MRT4530_61404C.1.pep
IRAGRDNLVVTIITGCFILQNNAVPQDQRGAANGLAMTGMSFFKAVAPAGAGIVFSWAQKRQHASFLPARYKLDCSGILQI

SEQ ID NO: 162301 - protein, 490 aa, Oryza sativa
  Clone ID: PAT_MRT4530_61405C.1.pep
MEEEAGAEVPLLKIKGDYHQGCPGCAYDRKKEVYRGLPYKEFLYLWMICLTAALPISSLFPFLYFMIRDLHVAKRTEDIGFYAGFVGASFMFGRCLTSTIWGIAADRIGRKPVVVFGIFAVVIFNTLFGLSFTYWMAIATRFLLGALNGLLGPIKAYAIEVCRPEHEALALSLVSTAWGIGLIIGPAIGGYLSQPAEKFPNVFSPDSLFARFPYFLPCLCISVFAAVVLIGCIWMPETLHKHKADANRSQTVEALESHLIDPEEKADQNGSLDCKKSLLSNWPLMSSIILYCVFSFHDMAYTEIFSLWAESDRKYGGLSLSSEDVGQVLAITGASLLVYQLFIYPRINKVIGHIKASRIAAILCIPILFAYPYMTYLSGPGLTIILNIASVIKNNLGVTIITGCFILQNNAVPQDQRGAANGLAMTGMSFFKAVAPAGAGIVFSWAQKRQHASFLPGDQMVFFLLNLFELLGLILTFKPFLAVPEQHDTN

SEQ ID NO: 162302 - protein, 46 aa, Oryza sativa
  Clone ID: PAT_MRT4530_61406C.1.pep
MTMFILCIERAGAIIWCYSSITLVASGVPILSDPCSPTHAGHTHST

SEQ ID NO: 162303 - protein, 113 aa, Oryza sativa
  Clone ID: PAT_MRT4530_61407C.1.pep
MRLDGLPIYRQALLHIAELTAYVLDSEFQRINHNTAVGGGGDVGIYYLWRNQAVEASPLGGGGFSWRRLDVFSASSSGLCPRSSGGGATYGGQRLTNGEYNGDGGWELPLARF

SEQ ID NO: 162304 - protein, 591 aa, Oryza sativa
  Clone ID: PAT_MRT4530_61408C.1.pep
MTATTPPAVAVAGESPPPLVHLAFNLYSTGFIAATATGLRVFSCFSSPLNKVFARDVEVCPEDDGGCGGGGWKVAIAEMFNEAFAAVVFRREKGGGGGTVDKICFWSIPNGRMYCMHKTLPFDGAVRGVRLVGEFLLVAGDERAALYELPHASAPPKKVKVVETAANPLGLGAVVQPDGNARFVAAAPQRMKGMVQVHRLAEDHVYVRAHYSSLAAIALSADGRLLATAGSKGTLVRIFSTSDGKLLQATFKLRGLYEESGATAAAGDMRDRNQSTCAVVRRAGAGFEVRRFRPGSLNYSSRYDSVRIGGGDDDDDVRSVHVHGDRTVVVHAGRVDVFGLDDGRRKAAVLQRRVETGDNRAGACAVSRGPPGSPFAFACPGVNDGNLRVERWVGGFTPLVIGAHRWRVASVAMSWGAKLVATASVKGTIVRVFRVADGELLQEMKRGFDRADIYSIVFSPDSEWLAVSSDKGTVHVFHINVCSPSSSKTGCQDTTQSYESYGAKAMKKYVSSIKALLIVKDLLTLGYFDPERSVAQFHLCDNVKYLVAFGTRPNKNIVLIIGMDGSFYRCQFDPVNGGEMKQLEYTNFLNM

SEQ ID NO: 162305 - protein, 923 aa, Oryza sativa
  Clone ID: PAT_MRT4530_61409C.1.pep
MVVDTARMGRTRVDMVGVMVEEEACRSSWRRSNICGGGSLLPYAPQLPPYAHGIPILDKNGTDPFSKAPIRHCRWETGNKETVSFQGQLRRWRTARSSSSKTAFWNREAHVDGEVGGAEEDNMGEQTPFSPAALPHGHTSWVRNIGPTRSNNPVLAHHSTPTADTADTLSAVRGPPTLASRSRRPSALPPPLAGTAARRSPSTDPMLRPSHRRKRSLADAVKKLVKQEEEWSWGEKVNFVGAANYAYILREFSLNVTLGSLDLTFFPSTQNGSYAFVNGIEIVPTPDIFTTRTPTHNTEGNLDPSDIDSMTSFQTMYRLNVGGQAIIPQGDSRFYRSWEDDSPYIYGAAFGVTFGKDSNVTITYPGFYYLLRFHFCEIQYPITKMNQRSFFIYINNQTVQDQMDVIRWSGGIGMATYADYLIVTVGSGQMDLWVALHPDLSSRPQYYDAFVNGIEIVPTPDIFTTPTPTSANGGDNVQYGIDPVMGLQTMYRLNVGGQPISPQQPKTDVNPKGVSGGGKLKAAVPAAICAVVVLITACFCVCIICRRKKVAKHSGKTDKKCLTYQTELYKSPSNLCRNFTFHEMQIATSSFDETLLLGRGGFGDVYRGEIDNGTTVAIKRSNPLSLQGVHEFQTEIETLSKVRHGHLVSLIGYCQEKNEMILVYEYMARGTLREHLYSTKRPPLPWKERLKICIGAARGLYYLHTGPKETIIHRDVKTANILLDDKWVAKVSDFGLSKVNPDIDATHVSTVVKGTFGYFDPEYFRLKQLTQRSDVFSFGVVLFEILCARPPVNTELPEEQVSLREWALSCKKIGTLGEIIDPYLQGEIAPDCLKKFADCAEQCVADRSIDRPEMGDVLRNLEVALKMQADAGNYRKFSEETTSSKTTPDMMTIMDTDKQSTYSTMSITGQRTIFSDMMDPQAR

SEQ ID NO: 162306 - protein, 663 aa, Oryza sativa
  Clone ID: PAT_MRT4530_6140C.1.pep
MDVKRARSPRAPGVDADDDKKRAAEWRGAVRPHMVLVGFLITLPVLVFVFGGRWGSFQTTSAPNVGGRHVVPGGVTTTQISSSSVMWRARDDGVVLMPSPLVHPFADLVLPYHCFFQRRSSWLFTRVVPGFTGVADKLKHLGRPHALVKVGGPRWIISAVHVASNNAENEAPKNVSVPATATKSLPQPQDKLLGGLLSAAFEESSCQSRYKSSLYRKKSPFPLSPYLVQKLRKYEAYHKKCGPGTKRYRKAIEQLKAGRNADNAECKYVVWFPCNGLGNRMLTIASTFLYALISNRVLLMHVAAEQEGLFCEPFPGSSWVLPGDFPHNNPQGLHIGAPESYVNMLKNNVVRNDDPGSVSASSLPPYVYLHVEQFRLKLSDNIFCDEDQLILNKFNWMILKSDSYFAPALFMTPMYEKELEKMFPQKESVFHHLGRYLFHPTNKVWGIVSRYYEAYLARVDEKIGFQIRIFPEKPIKFENMYDQLTRCIREQRLLPELGTAEPANTTAEAGKVKAVLIASLYSGYYEKIRGMYYENPTKTGEIVAVYQPSHEEQQQYTSNEHNQKALAEIYLLSYCDKIAMSAWSTFGYVAYSFAGVKPWILLRPDWDKERSEVACVRSTSVEPCLHSPPILSCRAKKEVDAATVKPYVRHCEDVGFGLKLFDS

SEQ ID NO: 162307 - protein, 82 aa, Oryza sativa
  unsure (1)..(82): unsure at all Xaa locations
  Clone ID: PAT_MRT4530_61410C.1.pep
HVIACYSWRLPPPRWLVEELPGDHSEKIVVEARHRXVSGLEFTTFGVKEELPRVIEAWVVLSVGRLPPCPPLDEGGVWWLRG

SEQ ID NO: 162308 - protein, 700 aa, Oryza sativa
  Clone ID: PAT_MRT4530_61411C.1.pep
MQLDINNRSWEGDTRSKFASAMNGIAASATYQDPSLPSLVPYMTSRIFISNYTYSFPISPGRIFVRLYFYPVAYGYYASEDAYFGVKTNNLILLDNFNASQTAQAANYAYILREFSLNVTLGSLDLTFFPSTQNGSYAFVNGIEIVPTPDIFTTRTPTHNTEGNLDPSDIDSMTSFQTMYRLNVGGQAIIPQGDSRFYRSWEDDSPYIYGAAFGVTFGKDSNVTITYPVGSGQMDLWVALHPDLSSRPQYYDAILNGLEVFKLWDIGKKNLAGLNPPLPPQPKTDVNPKGVSGGGKLKAAVPAAICAVVVLITACFCVCIICRRKKVAKHSGKTDKKCLTYQTELYKSPSNLCRNFTFHEMQIATSSFDETLLLGRGGFGDVYRGEIDNGTTVAIKRSNPLSLQGVHEFQTEIETLSKVRHGHLVSLIGYCQEKNEMILVYEYMARGTLREHLYSTKRPPLPWKERLKICIGAARGLYYLHTGPKETIIHRDVKTANILLDDKWVAKVSDFGLSKVNPDIDATHVSTVVKGTFGYFDPEYFRLKQLTQRSDVFSFGVVLFEILCARPPVNTELPEEQVSLREWALSCKKIGTLGEIIDPYLQGEIAPDCLKKFADCAEQCVADRSIDRPEMGDVLRNLEVALKMQECAENNSKFSEETTSSKTTPDMMTIMDTDKQSTYSTMSITGQRTIFSDMMDPQAR

SEQ ID NO: 162309 - protein, 391 aa, Oryza sativa
  Clone ID: PAT_MRT4530_61412C.1.pep
MMMMGEGVSSVPPWSHLPVSGVDVLGGGGGGGDEMTPYVIAALRDYLPANDVGVGADEEEEAAAMAAAVDAYACDEFRMYEFKVRRCARGRSHDWTECPFAHPGEKARRRDPRKYHYSGTACPDFRKGGCKRGDACEFAHGVFECWLHPARYRTQPCKDGTACRRRVCFFAHTPDQLRVLPPQQSSPRGAASSPLAESYDGSPLRRQAFESYLTKSIMSSSPTSTLVSPPRSPPSESPPLSPDAAGALRRGAWAGVGSPVNDVHVSLRQLRLGSPRSAPSCASFLPAGYQYGSPKSPAAAAAAALYSLPSTPTRLSPVTVTTASGAMPTLEPLDLGLIGDEEPVQRVESGRALREKVFERLSRDGAISGDATAFATAGVGLDVDWVSDLIN

SEQ ID NO: 162310 - protein, 385 aa, Oryza sativa
  Clone ID: PAT_MRT4530_61413C.1.pep
MMMGEGVSSVPPWSHLPVSGVDVLGGGGGGGDEMTPYVIAALRDYLPANDVGVGADEEEEAAAMAAAVDAYACDEFRMYEFKVRRCARGRSHDWTECPFAHPGEKARRRDPRKYHYSGTACPDFRKGGCKRGDACEYAHGVFECWLHPARYRTQPCKDGTACRRRVCFFAHTPDQLRVLPAQQSSPRSVASSPLAESYDGSPLRRQAFESYLTKTIMSSSPTSTLMSPPKSPPSESPPLSPDGAAAIRRGSWPGVGSPVNDVLASFRQLRLNKVKSSPSGGWSYPSSSAVYGSPKAATGLYSLPTTPLASTATVTTASSFMPNLEPLDLGLIGDEEPVQRVESGRALREKVFERLSRDGAISGDATAFATAGVDLDVDWVSDLIN

SEQ ID NO: 162311 - protein, 418 aa, Oryza sativa
  Clone ID: PAT_MRT4530_61414C.1.pep
MPQWPSLQLPAAAAARRATPFALCRSSSSSVSASASNQDLVACSWQKEDEAEAQSLVVVGGGAAGVYASIRAKSLAPHLNVLVFDKGRFLSKGMARNYPRGHKELRGSFFKNHGPQDTMRWFSDHGVELKAGKAVTGASVTENGKFVVKVEKRTVDFVDHVNAKYVLVATGSSQQGYSIAAQFGHSIIAPVPSLFTFKITDKRLADLSGVTFPIVKAKLKLDGIKRSAPELTQIGPMLVTHWGLSGPVVLRLSAWGARELHQYNYQAKLTVDFIPDIHIEDVKRILFLHKDHHASLDGDMHWASIPNNNLNTVALRLKQWMFEVVAKGQFKDEFVTAGGVPLSEERYTFVPELATLWISKRTIDLSMTVVQVLNVDGVTGGFNFQNAWTGGYIAGTSIGTLASSNMRQQQPYLQLDGS

SEQ ID NO: 162312 - protein, 112 aa, Oryza sativa
  unsure (1)..(112): unsure at all Xaa locations
  Clone ID: PAT_MRT4530_61415C.1.pep
TFDHFDLQPPYINKKNKNXRGGXXPNPPYSESYYNXLAAXXFFXXXENPGXTXXNRXLAXHPPFXXWRXXXXAXXDXPSQXLRXLNGXWQIQILASKFPPIRPKGIPPFLKL

SEQ ID NO: 162313 - protein, 65 aa, Oryza sativa
  Clone ID: PAT_MRT4530_61416C.1.pep
MDSNMKKKSINIADEDILHYYLLAKTQKSGGNRVSLEIGPFPGWVCIRTVGVRATLSYWASADPT

SEQ ID NO: 162314 - protein, 146 aa, Oryza sativa
  Clone ID: PAT_MRT4530_61417C.1.pep
EMQSAAMMNGHELEAAEHEKHMKKHEQNRQQHLAKEEFKKDADSSSAANHRDEHAQGRGRPALGQPKKGGDGGKYTWGSDKEAIRIGKEEFEFGSESIALDKNDPLAPDRLTADTRPLGAKNGCLFFFNAGWLFGLCAWRSTGLFV

SEQ ID NO: 162315 - protein, 61 aa, Oryza sativa
  Clone ID: PAT_MRT4530_61418C.1.pep
MAHVNKVTENHETRLGFIVPEYFGVLVLEIVTDERALCMFQEMFKLPSIELIYQSNTPSVP

SEQ ID NO: 162316 - protein, 445 aa, Oryza sativa
  Clone ID: PAT_MRT4530_61419C.1.pep
MSNTAKSEITSHAHVHAYGSPYTVSSSYNSASCDVNDYGRISENSASKHLPPYNSTTYSLSPAQPQSFGIEHIPLPKPSVNNFQQNGSFVQSTTHKAEDTHRTNDTKLASSVGGQFVDDFSSKIDNLIEEIYRDVEEKMNAYILSKGSKPIFNQQWKLINLDLSANEKEVAMLDFSGNIGPFVLPAEFRAKEDDEHLDDGARNHDDKVKILESHQRTNLDIAQVKKLECFSNKSDQSYAKDDRFDKRNRSRWSSRKSSAQAEGSSTRKQIWVPKSRGQEKSLAAGAHVSVQNASVQKKAIEPGGHARIQQLGNVHHMNMKREASSAELVTSQNPPKSSGGNGSQLRHSHGLSNWRKKQLHKLSAEKLRERGMAWVLKASVQVQNETDVKVGVGAKNEKGVKRCAPNQRFASNHQVLSPPYYTYSSPMPPIPMSWNQFSETEIFRC

SEQ ID NO: 162317 - protein, 116 aa, Oryza sativa
  Clone ID: PAT_MRT4530_6141C.1.pep
MTWSHRYTIQDLQFSYQEIAWPHFAYGENVLTILDSDHLRNQLYTHWLWPHKNRTSVATGDVVKGTLVEEFVIDPENVKILSLIDPEIHVNMFSYVETNEPLNIYKEVGDLFGRRL

SEQ ID NO: 162318 - protein, 300 aa, Oryza sativa
  Clone ID: PAT_MRT4530_61420C.1.pep
MAAWNGGEMGRHKRSHSLSVTSSATPSSDATKLDFAAADVACQFGRVDALGPVELRKTAYEIFMSCRSSSGGNTAGARGAAMEAAEVSLPVARPRGGGGGSRIKNALGLKARRLSSSAVAATQPMMVRTLSQTLGPALPGRGRQLMTSAEIMRQQIRVTEQNNARLRRTLMRAIVGQEYHQWQFRQVKLLEAGLILHPSLPLDRLNSAVLRFREVMRATEIRAIDTAKNSNAMRTLTSAVHALAWRSGVGSGGGDACHWADGYSLNVLLYISLLHTPSHLEPFLSCPRGNQVILLLRYHR

SEQ ID NO: 162319 - protein, 1804 aa, Oryza sativa
  unsure (1)..(1804): unsure at all Xaa locations
  Clone ID: PAT_MRT4530_61421C.1.pep
MARAAANWERLVRAALRGERLAGAFGVPVTGIAGNVPSSLGNNVHIDEVLRAADEIQDEDPTVARILCEHAYTLAQNLDPNSEGRGVLQFKTGLMSVIRQKLAKREGGAIDRSQDVAKLQEFYKLYREKHKVDELCEDEMKLRESAVFSGNLGELERKTLKRKKVLATLKVLWSVIEEITREISPEDAEKLISEEIFXLSLPSNTLLRRLHLCHRVKHLSTPVRRSRPELLVSLPLKLPPPLNSISLEAVELVFGSYLSRRLLIFIRNPGKTTREGCRSLLXHLLAKEQPSLRKPPRTESLASELGEIIRTXTAESGENCIAHVGVSFLVQVIAPMNEVIAVEVANXHNVRAPHSGLINYDDFKEIFRLGLMIIAFKDRKFDKKTVLTLLSLGPTYVIMKFIENNHNALTILSLWAPVVSIYLLDIHVFYTVMSAICGFLLGARDRLGEIRSVEAVHRFFEKFPEAFMDKLHVAVPKRKQLLSSSQHPELNKFDASKFAPFWNEIVRNMREEDYINNTELDLLLMPKNNGSLPIVQWPLFLLASKVFLAKDIAIDCKDSQEELWLRISKDEYMQYAVVECYHSIYYILTSILDKEGRLWVERIYVGIRESISKRNIQSDLHFSRLPNVIAKLVAVAGILKETESADLRKGAINAIQDLYEVVHHEVLSVDMSGNIDEWEQIKQARAEGRLFNNLKWPTDSGLKDLIKRLYSLLTIKESAANVPKNLEARRRLEFFTNSLFMQMPVARPVSEMLSFSVFTPYYSETVLYSKDELQKRNEDGISTLFYLQKIYPDEWKNFLARINRDENTTDSELFSSPNDMMELRLWASYRGQTLARTVRGMMYYRKALMLQSYLEKLQSEDIESAVATTGLGLADIHFELSPEARAQADLKFTYVVTCQIYGVQKAERKPEAADIALLMQRNEALRVAYVDIVESVKNGKPSTEYYSKLVKADIHGKDKEIYSIKLPGNFKLGEGKPENQNHAIIFTRGNAVQTIDMNQDNYFEEALKMRNLLEEFYQNHGKHKPSILGVREHVFTGSVSSLASFMSNQETSFVTLGQRVLANPLKVRMHYGHPDVFDRIFHITRGGISKASRVINISEDIYAGFNSTLRLGNITHHEYIQVGKGRDVGLNQIALFEGKVAGGNGEQVLSRDIYRLGQLFDFFRMLSFYVTTIGFYFCTMLTVWTVYIFLYGKTYLALSGVGESIQNRVDILQNTALNAALNTQFLFQIGVFTAIPMILGFILEFGVLTAFVSFITMQFQLCSVFFTFSLGTRTHYFGRTILHGGAKYRATGRGFVVRHIKFAENYRLYSRSHFVKGLEVALLLVIFLAYGFNNGGAVGYILLSISSWFMAVSWLFAPYIFNPSGFEWQKVVEDFRDWTNWLFYRGGIGVKGEESWEAWWDEELAHIHNVGGRILETVLSLRFFIFQYGVVYHMDASESSKALLIYWISWAVLGGLFVLLLVFGLNPKAMVHFQLFLRLIKSIALLMVLAGLVVAVVFTSLSVKDVFAAILAFVPTGWGVLSIAVAWKPIVKKLGLWKTVRSLARLYDAGTGMIIFVPIAIFSWFPFISTFQTRLLFNQAFSRGLEISLILAGNNPNAGCKTGDFHGAREVFDEMRRSGFGPNSNSWNYLLGCLLKNGRVAEACELVEAMERSEHNDIPNSLTYEILAYHACKAGRMDSAMRILDQMFLEKLTPRITIHTAFIKGYLYAGRIDDACRYVSAMSTRDRRSVNRNYSLLAKLLCKAGMIVDAGRILYELMEKEALLPDHSAYIRVIKDLHKIGKGDLAAELNLILQKLSVHAESAG

SEQ ID NO: 162320 - protein, 83 aa, Oryza sativa
  Clone ID: PAT_MRT4530_61422C.1.pep
CASLLVGIGQSRVICKISVGFIHCALGGWCQICAWPLGLVYQEPNMFMCTVLKGYSRLEQCKCYTVIAGAQGQNKYALENEGQ

SEQ ID NO: 162321 - protein, 90 aa, Oryza sativa
  unsure (1)..(90): unsure at all Xaa locations
  Clone ID: PAT_MRT4530_61423C.1.pep
LAFVPTGXEFLSIXVAXKPIVKKLGLWKTVRSLARLYDAGTGMIIFVPIAIFSWFPFISTFQTRLLFNQAFSRGLEISLILAGNNPNAGV

SEQ ID NO: 162322 - protein, 2035 aa, Oryza sativa
  Clone ID: PAT_MRT4530_61424C.1.pep
MARAAANWERLVRAALRGERLAGAFGVPVTGIAGNVPSSLGNNVHIDEVLRAADEIQDEDPTVARILCEHAYTLAQNLDPNSEGRGVLQFKTGLMSVIRQKLAKREGGAIDRSQDVAKLQEFYKLYREKHKVDELCEDEMKLRESAVFSGNLGELERKTLKRKKVLATLKVLWSVIEEITREISPEDAEKLISEERYNRGLWLYYFHVVSSQVRAAISALQYHRELPRLPATFSVPDARNSDMLDLLHCVFGFQFVLIVNMLFNMIEEVQKDNVTNQREHVVHLLANEQSRLGKLPGNEPLARELEEIIRRQTAEPAESCISNGGVSFLDQVISPMYEIIAAEAANNDNGRAPHSAWRNYDDFNEFFWLGLMIIAFKDRKFDKKTVLTLLSLGPTYVIMKFIENNHNALTILSLWAPVVSIYLLDIHVFYTVMSAICGFLLGARDRLGEIRSVEAVHRFFEKFPEAFMDKLHVAVPKRKQLLSSSQHPELNKFDASKFAPFWNEIVRNMREEDYINNTELDLLLMPKNNGSLPIVQWPLFLLASKVFLAKDIAIDCKDSQEELWLRISKDEYMQYAVVECYHSIYYILTSILDKEGRLWVERIYVGIRESISKRNIQSDLHFSRLPNVIAKLVAVAGILKETESADLRKGAINAIQDLYEVVHHEVLSVDMSGNIDEWEQIKQARAEGRLFNNLKWPTDSGLKDLIKRLYSLLTIKESAANVPKNLEARRRLEFFTNSLFMQMPVARPVSEMLSFSVFTPYYSETVLYSKDELQKRNEDGISTLFYLQKIYPDEWKNFLARINRDENTTDSELFSSPNDMMELRLWASYRGQTLARTVRGMMYYRKALMLQSYLEKLQSEDIESAVATTGLGLADIHFELSPEARAQADLKFTYVVTCQIYGVQKAERKPEAADIALLMQRNEALRVAYVDIVESVKNGKPSTEYYSKLVKADIHGKDKEIYSIKLPGNFKLGEGKPENQNHAIIFTRGNAVQTIDMNQDNYFEEALKMRNLLEEFYQNHGKHKPSILGVREHVFTGSVSSLASFMSNQETSFVTLGQRVLANPLKVRMHYGHPDVFDRIFHITRGGISKASRVINISEDIYAGFNSTLRLGNITHHEYIQVGKGRDVGLNQIALFEGKVAGGNGEQVLSRDIYRLGQLFDFFRMLSFYVTTIGFYFCTMLTVWTVYIFLYGKTYLALSGVGESIQNRVDILQNTALNAALNTQFLFQIGVFTAIPMILGFILEFGVLTAFVSFITMQFQLCSVFFTFSLGTRTHYFGRTILHGGAKYRATGRGFVVRHIKFAENYRLYSRSHFVKGLEVALLLVIFLAYGFNNGGAVGYILLSISSWFMAVSWLFAPYIFNPSGFEWQKVVEDFRDWTNWLFYRGGIGVKGEESWEAWWDEELAHIHNVGGRILETVLSLRFFIFQYGVVYHMDASESSKALLIYWISWAVLGGLFVLLLVFGLNPKAMVHFQLFLRLIKSIALLMVLAGLVVAVVFTSLSVKDVFAAILAFVPTGWGVLSIAVAWKPIVKKLGLWKTVRSLARLYDAGTGMIIFVPIAIFSWFPFISTFQTRLLFNQAFSRGLEISLILAGNNPNAGSCVRVHSPLSFSMFRLPPLHRAAAVFLRLRLASPRATFSSKPANPRTSSVASAAAPAAAAVSDAIVRLVAAGGRSLEADLDRLDPALSHPIVSATLRALTDRGLPAARFFDWLALRRGFSPSAHAHNLLVENAGSLADYRAMSRAMESMSTRRVPLTERAFAFLNTSQGSARDTAIAILATLDEVGGPCRASGVFSLVKALASIGEFDAAMSVIQETARGARYYNALIAVKCKTGDFHGAREVFDEMRRSGFGPNSNSWNYLLGCLLKNGRVAEACELVEAMERSEHNDIPNSLTYEILAYHACKAGRMDSAMRILDQMFLEKLTPRITIHTAFIKGYLYAGRIDDACRYVSAMSTRDRRSVNRNYSLLAKLLCKAGMIVDAGRILYELMEKEALLPDHSAYIRVIKDLHKIGKGDLAAELNLILQKLSVHAESAG

SEQ ID NO: 162323 - protein, 110 aa, Oryza sativa
  Clone ID: PAT_MRT4530_61425C.1.pep
MVPTPLRSSMPSTCSLRTVEVLYDMAIPVKLSDRDVEASGHEGRCRRSSRPSLLRSSSGHLRPCCPLLARRLLRPPPAPLCRRCSAPPPATFADAAPSVASRPLCFEKRR

SEQ ID NO: 162324 - protein, 74 aa, Oryza sativa
  Clone ID: PAT_MRT4530_61426C.1.pep
MPRLYQEEEDGDDLEAKPEKAPAARPSAKERSVHLIPLLTALCFVILFLFSHDPSASEMSSFGGKVGNRKHKLF

SEQ ID NO: 162325 - protein, 50 aa, Oryza sativa
  Clone ID: PAT_MRT4530_61427C.1.pep
MDYPATPTDFSPLLSLAPRNEPCYTKGRQLGLLSKLEDEQYTGRQTRLSS

SEQ ID NO: 162326 - protein, 235 aa, Oryza sativa
  Clone ID: PAT_MRT4530_61428C.1.pep
MRDDVLAAAAASRRRAAPATCGGGGVAGYGGGGQPVSDLAASTLDPEGEGRREWSWRRRGGGVGRLLGEAGSRQVEEAVNPAYAESGRLHARREEAGHKELGEASGVGGGRQKVLVEVAGGEAEKEDGRRGAAGAVRWSRRLERPIVCCSSACWKAVGHDDQQCGQCPGRRRGFLPTGCCSLLPSIGAPSPLRLAYSSRGVPHVKERDTGLVGRFCLVKIGRPSTLSAPSKSLQQ

SEQ ID NO: 162327 - protein, 137 aa, Oryza sativa
  Clone ID: PAT_MRT4530_61429C.1.pep
LGLLFRRWRRFVFLLCGELMVLQSYGSKGWTTYTDILGGAQISDPVGHLILGDADLELGRGGSGTWIDVRTTVAACCGNVLPNKGPQRWLAALRLGWRADFGADCACCLNVWLPLDGTQMDAMLHCSYNDMKYSYIR

SEQ ID NO: 162328 - protein, 139 aa, Oryza sativa
  Clone ID: PAT_MRT4530_6142C.1.pep
PPMVTSPPQASGSTAMALSCRLLDLGERSGWRSRRNLLKDQLSSSSSWQPSPDPPQPPHFFTVEEAYLAISSIAHHWIRPLHRHRCCPPPGHGSVARAPPTAESTIRDTPVARSTAHAPPAVGLATRSTPMARSTARTP

SEQ ID NO: 162329 - protein, 183 aa, Oryza sativa
  Clone ID: PAT_MRT4530_61430C.1.pep
MEATRFGIGRIDRLLHLPAASFSQQPANSTTTPPPTPLPLAFPFWIQGGGGQIRNRLTAPSISGHTHTATRRLQLATANSSHRLLPAAVAGAARRRDAAAAARTSSLIPRAEEDSSLHGCLPRRRRPCSPSRGSAPLALAVARWRMEGGKWRRLGFFPPARSPAMGATRAGKDELSYAFSFSV

SEQ ID NO: 162330 - protein, 46 aa, Oryza sativa
  Clone ID: PAT_MRT4530_61431C.1.pep
GGPVAWLHTSARLAWSPLATWQLGKGLGSRQGKGLRGLTWHPERLT

SEQ ID NO: 162331 - protein, 106 aa, Oryza sativa
  Clone ID: PAT_MRT4530_61432C.1.pep
MATRRCAALSPAALLHAPGGAAPGRRSLPSFAAAAARSPPPTAPLALTHSPLPLRHRPLAAAPPLPGRSPPPPPPRLGLRGKMATEVVPALVVIPPYPKPVEGDDF

SEQ ID NO: 162332 - protein, 113 aa, Oryza sativa
  unsure (1)..(113): unsure at all Xaa locations
  Clone ID: PAT_MRT4530_61433C.1.pep
GLELWSXRIGGGFLLCFXCAIIVAWLCYWNRLCIIVCLFAISVXFVMLGDLGADLGEAWYLCGSVIKXLLXPXKDTYXIILGGYDGGLALARLXSHMVELIERKMMLCIAAVT

SEQ ID NO: 162333 - protein, 55 aa, Oryza sativa
  Clone ID: PAT_MRT4530_61434C.1.pep
PYVLRSDLGGLKQLPLPGVGTLYIFPRMFATRSGVILGGPEGDLRFDGFFGDSWG

SEQ ID NO: 162334 - protein, 377 aa, Oryza sativa
  Clone ID: PAT_MRT4530_61435C.1.pep
MDQLLALAVAVPLFALASALAAASATPVNKSCLNGSTGAAVSIGYGGASASAGAGAGVSLGTDAYWLACPLAEEIVRDVVERAVAADPRMAASLLRLHFHDCFVNVIIFLFAALHGCDGSVLLDDKPLFIGEKTAGPNANSLRGFEVIDAIKAELENACPETVSCADVLAIAARDSVVASGGPSWQVEVGRKDSRTASLQGANTNLPAPTSGVATLVQKFRNVGLSAKDMVALSGAHTIGKARCTTFSARLAGVGASAGGGATPGDLSFLESLHQLCAVSAGSALAHLDLVTPATFDNQYYVNLLSGEGLLPSDQALASAGAAAAGAEDVAGLIAAYAFDALLFFDDFASSMLRMGRLAPGAGTASGEVRRNCRVVN

SEQ ID NO: 162335 - protein, 113 aa, Oryza sativa
  Clone ID: PAT_MRT4530_61436C.1.pep
KIALGAAKGLAFLHEAEKPVIDRDFKTSNILLDEEYNAKLSDFGLAKDGPVGDKSHVSTRIMGTYGYAAPEYIMTGHLTAMSDVYSYGVVLLELLTGRKSLDKSRPVREQTLA

SEQ ID NO: 162336 - protein, 74 aa, Oryza sativa
  unsure (1)..(74): unsure at all Xaa locations
  Clone ID: PAT_MRT4530_61437C.1.pep
TYYRCGADGDPSSARQDTEHPAVARGCGSSSAADPXIAAIKCPAIAAINNNPSSAAAPCHDSDRAPRGIPHTPT

SEQ ID NO: 162337 - protein, 250 aa, Oryza sativa
  Clone ID: PAT_MRT4530_61438C.1.pep
MKVQCDVCAAEAASVFCCADEAALCDACDRRVHSANKLAGKHRRFSLLQPLASSSSAQKPPLCDICQEKRGFLFCKEDRAILCRECDVTVHTTSELTRRHGRFLLTGVRLSSAPMDSPAPSEEEEEEAGEDYSCSPSSVAGTAAGSASDGSSISEYLTKTLPGWHVEDFLVDEATAASSSSDGLFQGGLLAQIGGVPDGYAAWAGREQLHSGVAVAADERASRERWVPQMNAEWGAGSKRPRASPPCLYW

SEQ ID NO: 162338 - protein, 167 aa, Oryza sativa
  unsure (1)..(167): unsure at all Xaa locations
  Clone ID: PAT_MRT4530_61439C.1.pep
ACAGALGAAGGVPTKEILPYAVKREXGVCTDPSRLPPACMSWWAWRTVTFFAKPDSXHSRAGGGCALDHMMEPSAYILTNSGMATDYHDHXHLNEDNLHGGVSQLTEIKKCRDIHTLSQVNILDASSDLDSAIADDDLRMKIXDCSWRPTAPDXTAASGDRYAVRHT

SEQ ID NO: 162339 - protein, 121 aa, Oryza sativa
  unsure (1)..(121): unsure at all Xaa locations
  Clone ID: PAT_MRT4530_6143C.1.pep
SVWWVKGRGSWPLVXVSIAPKXSSSPNSXSNPRSPEREMQRRRRXGGKNGPPGXSXLFPAAYRFRALFYATPTTTTTLPRRRXEXGGHVFLXSXYSXLPGRASIASXIXAPPPLFSLPVSD

SEQ ID NO: 162340 - protein, 645 aa, Oryza sativa
  Clone ID: PAT_MRT4530_61440C.1.pep
MRHCWGGASSVLRLLLALQCGVVVVVLQCSANALGSDVSALIAFKRAIIEDPRSALADWSDADGNACDWHGVICSSPQGSVISLKLSNSSLKGFIAPELGQLSFLQELYLDRNMLFGTIPKQLGSLRNLRVLDLGVNRLTGPIPPELAGLSSVSVINFHSNGLTGNIPSELGKLQNLVQLRSTAHNGLCPSPRLNVGDFSYNFLVGKIPPCLKYLPRSSFQGNCLQDEYSVRQRAFQICISGSPAGQRGGVKGFKHPTSDHKHERSPQPTWLLVLEISTGILLLVFVITGAITASRSCKLKPSIRISSWNRSKSWSDEITVLIDSDMLKSLPKLSRQELEVACEDFSNIIGSSPETVVYKGTMKDGPEVSVISLCAFEGHWTSQHELFYQNKVIDLARLNHENIAKFLGYCRESDPFSRMLVFEYASNGTLFEHLHSDGEGAQLSWLRRMKIAIGIAQGLRYLHTELQPPFAISELNSNSVYVTEDFTPKLVDFECWKMMFTKQKHEKAPGRINNKSSFPGHLDSSEDKQADIQGNTFAFGVILLEIISGRLPYCKDKGYLIDWAIKYLQQTEEIGKLVDPELTNVRTEDLEVICSVVSRCIDPDPSKRPSMQIITGVLENEIDLSAAAILKESSLAWAELALAL

SEQ ID NO: 162341 - protein, 662 aa, Oryza sativa
  Clone ID: PAT_MRT4530_61441C.1.pep
MRHCWGGASSVLRLLLALQCGVVVVVLQCSANALGSDVSALIAFKRAIIEDPRSALADWSDADGNACDWHGVICSSPQGSVISLKLSNSSLKGFIAPELGQLSFLQELYLDRNMLFGTIPKQLGSLRNLRVLDLGVNRLTGPIPPELAGLSSGFPVSGASLLLKLRLLSFICCRNFHSNGLTGNIPSELGKLQNLVQLRSTAHNGLCPSPRLNVGDFSYNFLVGKIPPCLKYLPRSSFQGNCLQDEYSVRQRAFQICISGSPAGQRGGVKGFKHPTSDHKHERSPQPTWLLILEISTGILLLVFVITGAITASRSCKLKPSIRISSWNRSKSWSDEITVLIDSDMLKSLPKLSRQELEVACEDFSNIIGSSPETVVYKGTMKDGPEVSVISLCAFEGHWTSQHELFYQNKVIDLARLNHENIAKFLGYCRESDPFSRMLVFEYASNGTLFEHLHYGEGAQLSWLRRMKIAIGIAQGLRYLHTELQPPFAISELNSNSVYVTEDFTPKLVDFECWKMMFTKQKHEKAPGRINNKSSFPGHLDSSEDKQADIQGNTFAFGVILLEIISGRLPYCKDKGYLIDWAIKYLQQTEEIGKLVDPELTNVRTEDLMVICSVVSRCIDPDPSKRPSMQIITGVLENGIDLSAAAILKESSLAWAELALAL

SEQ ID NO: 162342 - protein, 389 aa, Oryza sativa
  Clone ID: PAT_MRT4530_61442C.1.pep
MELPADGSALARQGSIYSLTFDEFQSALGSAEKDFGSMNMDELLRNIWTAEESQAIAPAAAAASAAAVVGDAQQQQQPIQRQGSLTLPRTLSQKTVDEVWRDIMGLGGSDDEDPAAAAAAAAPAQRQPTLGEMTLEEFLVRAGVVREDMGQTIVLPPQAQALFPGSNVVAPAMQLANGMLPGVVGVAPGAAAAMTVAAPATPVVLNGLGKVEGGDLSSLSPVPYPFDTALRVRKGPTVEKVVERRQRRMIKNRESAARSRARKQAYIMELEAEVAKLKEQKAELQKKQVEMIQKQNDEVMERITQQLGPKAKRFCLRRTLTGPCCCICSVCCCCVDMSSRLQFSDSVLYPSLRGFSFSDLHFKDKEERLISQMGEKRGNGLAKNIFGRL

SEQ ID NO: 162343 - protein, 134 aa, Oryza sativa
  unsure (1)..(134): unsure at all Xaa locations
  Clone ID: PAT_MRT4530_61443C.1.pep
ISIWEIPGVFEFXGRPFTFLLGYKDPEPSRANLPLLHEWHVRSGLDRYIWIIGMIYAYFHPNVERWMEKLEESETKVRLFIKGAIVTLSLTAGYLWYEYIYRLDKITYNKYHPYTSWIPITVYIWLRNCTQQLR

SEQ ID NO: 162344 - protein, 140 aa, Oryza sativa
  Clone ID: PAT_MRT4530_61444C.1.pep
QRLSASSPPPPASAAVPLPPAGAPFLLPRPARVSQPTPLPLPWACRIWMREISEAMARSSKGDSGASSALPLPSRRRSLRPSSRPPTVASFAVGGCQWGGAVADKGDVEAQGSERRRIVGTTSQRSTRAPIESRGHVVVL

SEQ ID NO: 162345 - protein, 104 aa, Oryza sativa
  Clone ID: PAT_MRT4530_61445C.1.pep
PVPYPFDTALRVRKGPTVEKVVERRQSRMIKNRESAARSRARKQAYIMELEAEVAKLKEQKAELQKKQVEMIQKQNDEVMERITQQLGPKAKRFCLRRTLTGPC

SEQ ID NO: 162346 - protein, 56 aa, Oryza sativa
  Clone ID: PAT_MRT4530_61446C.1.pep
ETRQGMHLHCCQHLREKAQQTNWQDISSDQAMVQKKQLQQFRWHNFNQAKVQAQAM

SEQ ID NO: 162347 - protein, 92 aa, Oryza sativa
  Clone ID: PAT_MRT4530_61447C.1.pep
MELREEDEGTMWLDLEGGMVVARGHDGRTLPSPTRETTSRSRWRRHYKRAPIDSTTSMEKWCDAASNDEKEGTCVVGTQDQGGVGLILRAAQ

SEQ ID NO: 162348 - protein, 985 aa, Oryza sativa
  Clone ID: PAT_MRT4530_61448C.1.pep
MGSNTPPSRAALEPFATLDPAALAGLPASSPLTVRSAAISSPYLYLGTGGGKLLLFTLDSPSPDFLRLLPIGPTRPVSAILPLPAVARLLLLADGLLLLADPLLSRPVRRLGSVRNVAAVAARASESDDDRPSCSLAVSVGKKLLLVDLTLHDADELEVRTRDIALVDGVKALAWVGDSVFVGTASGYSLFSTTNAQGGDIFTLPESSRPPRVKPLSGGDEVMLLVDNVGVVVDRSGHPVESSFVFNTTPDCIAEVYPYVVVAGDSKVDVYRRKNGAHLQAIPFARPGTGGLIVASEDAGIGSDVVVIATAYKVFCYRKVSAVEQIKALLRRKSYAEAISLLQEFEADGEISNDMISFVHAQLGFLLFFDLRFEDAVNHFLLSETMQPAEIFPFIMRDPNRWSDLVPRKRYWGLHAPPKPLEEVIDDGLVTLQQALFLKKAGVDTVVDDDFLSNPPSRADLLEVAIRNIIRYLCASREKDLSSSEMEGVDTLLMYLYRALNLVDDMEKLASSQNSCVVEELESLLDDSGHLRTLAFLYGSKGMCSKSLGIWRILARNYSTGLWKDHAILPETDSLETSVGKMSGEEIAAVEASKILQASSDQDLVLEHLGWVADIDQELATAILTSEMREKQLSPEKVVAAIDPEKVGIHQRYLQWLIEEQECDEPHYHTSYALSLSRSAMDAVRLGSNNEERNNKEFDSDMQFIYLLRERLQFFLQSSDLYDPEEVLYVISESELWLEKAILYRKMGQENIVLQILALKLEDSEAAEQYCAEIGRDDAYIQLLDLYLDPKNGKGPMFTAAVRLLHNHGESLDPIQVLERLSADMPLQLASDTILRMLRARVHHHRQGQVVHNLSRATNLDARLTRLEERSRHVQLTDESICDSCRARLGTKLFVMYPDDSVVCYRCYRNQGDSASPHGRNFRKGGNNNPVGWPLRFLTPVLSDENSVPPPSLEGLLIREACVNTGVAIGRLQLSVHAIVQVLPT

SEQ ID NO: 162349 - protein, 85 aa, Oryza sativa
  Clone ID: PAT_MRT4530_61449C.1.pep
MLDPTGGNHRQRQRRWMTGWKTLEATDGATSTSPSRRHREALPAVYLSSSVIVASIDKELVGTGTLLELGQLADMRKGEGLPRKK

SEQ ID NO: 162350 - protein, 737 aa, Oryza sativa
  Clone ID: PAT_MRT4530_6144C.1.pep
MSRRTAAAVAVSVVLLLLSSCLPCCSEARLHYHRRQHRRAPHRGHHRAAAAAAAATNGGSHISQPPAALPPDFDSGESPAETPGLPPAGVEDAPPRRSPREKPCPTMQPPVKPPEELSPVGAPRSRVRAMPPSPSLSPPAKAPSHSHAKTPSMPPAERPALPPTKAPAAISPATPPQLSPANAHSTHHHAKPPSLPPAEPPVPSPSPEHPPRHSPSKPPAYAPAKPPTALRPAIPPAAMPKPPSVAPVQPPQRPPAPATKPPPSFPPQLAPTMPPPAHAPAETPAPPTTPPALPPATTAPSPKNSSSSPPPPCTGGGGGISNVFDVRAFGATGNGSSADGDTRAFRAAWKAACSAESATVLVPSDGVFTITSTIFAGPCKPGLTFQIDGVLMPPDGPASWPAADGRRQWIVFYRADGMTLSGKGTIEGNGEEWWNLPCKPHRGPNGSTLPGPCESPALIKFVASSDVSVQGLRMENSPQFHLKFDGCSRVLVDGLVVSSPASSPNTDGVHVENTSSVRILNSRISNGDDCVSIGGGCSGVRVENVTCVHGHGISIGGLGARGARACVSNVTVRGARVVDSDNGVRIKTWQGGAGSVSGVVFDAVQMVNVRGCIVIDQYYCDAHGGAGAGCANQTAAVRVDGVAYRGIRGTYNPRGGGGAPVRFACSDTVACTGITMTDVELLPAGGGDEGGGASAGAKLADPYCWNAYGVMETLTQPPVHCLQEGRPESLQDQLASC

SEQ ID NO: 162351 - protein, 82 aa, Oryza sativa
  Clone ID: PAT_MRT4530_61450C.1.pep
WSGSMLLPENRPASRSEMLHRRASFITLQLSSKTIMHQPAYPSHLLLIGSSSLQQLACLPSSFMYIDTAAQTIQYNGNQIFP

SEQ ID NO: 162352 - protein, 150 aa, Oryza sativa
  unsure (1)..(150): unsure at all Xaa locations
  Clone ID: PAT_MRT4530_61451C.1.pep
KANFDYLDPAVTTQDSDTDSVVSSVGSCNPAVAPIGSTHPQEYDCADICSRTDDAEVSVSGRESFSRTDDAEASVSGRESPAPVNDGLKEKTHLLELHAYRATLSXLYASGSISWEQEAMMTNLRLTLNISTDEHLSELRSLVSSEVHSR

SEQ ID NO: 162353 - protein, 38 aa, Oryza sativa
  Clone ID: PAT_MRT4530_61452C.1.pep
WPPEISGDPREVLRHRISPPTHPPQPTKSEPTGAKSSG

SEQ ID NO: 162354 - protein, 208 aa, Oryza sativa
  unsure (1)..(208): unsure at all Xaa locations
  Clone ID: PAT_MRT4530_61453C.1.pep
MCRGGEARLGSRRPGRRRRIPADLRRGTAGDGGARRRGTAAIDGNTERRTSKSERGEREMVMGSQIDATRATSHGGGDGTRERGRXRLGDFPEGDSRQDDXRQRRDARPRMXGGERRRDGXDARRRGSVSPGEXRSEVGLGATRFWRGAASAWCGGGAARXWHDARRTGGCFGATHGSXTTRRPGETFRRTPCVHXLAASRKKKVNRS

SEQ ID NO: 162355 - protein, 171 aa, Oryza sativa
  Clone ID: PAT_MRT4530_61454C.1.pep
MNPASRRHYDSLVARYGDQDALADRFGGQNDGPDAWWSNLRVRMSQDHLLRHEARRRAATLEVFEDRENSHDGAFGCGDRASAKAMVTLHQPNLGETREQDCAVCLEPFEEGNTLRMMPCFHSFHQRCIFSWLRISRICPVCRFTLPSQADFESEKAEKERVSASPEDGNN

SEQ ID NO: 162356 - protein, 242 aa, Oryza sativa
  unsure (1)..(242): unsure at all Xaa locations
  Clone ID: PAT_MRT4530_61455C.1.pep
IPMPAGDNPLTASPSSTPVPSRFLAARPPAPQPHRAISITVRRPRAAVQRASLLVPRAPPRSISPYPQPRLSESPRDRLRPQPAPTLSISIHPTRGAPVGAVVLRTNNNSSSPKKNLGGSCPCWYTMNPASRRHYDSLVARYGDQDALADRFGGQNDGPDAWWSNLRVRMSQDHLLRHEARRRAATLEVFEDRENSHDGAFGCGDRASAKAMVTLHQPNLGETXEQDCAVCLEPFEEATRLE

SEQ ID NO: 162357 - protein, 790 aa, Oryza sativa
  Clone ID: PAT_MRT4530_61456C.1.pep
MVSPDTVRRDESAISDLAGHRPEEEDYPIVDYEKDEEEAEEGLPNAAAVQLGLPPCDCWVARLALEPRARRRRLERPKRPLRSFLRLRYPIRGLPFMLRAKQLGTLTQCARSFYVNGSRPSVKAQTPSVQHVVGSIGRATGYPAPAVHIVPSNSSQETEPASGNTSNHPRTPQVLGNDYVQPSKQTARSISHSAIAGAAMYTGSGHKSQALAGTIKSHGGGPQSNLRSLKSLRSVEQYYHTLQQMKWGPMTEHVLDNLHCKIDAFQANQVLKLLHDHTIALGFFQWLKRQPGFKHDGHSYTTMIGILGQARQFGTMRKLLDEMNSVHCKPTVVTYNRIIHAYGRANYLREAVKVFEEMQKAGYEPDRVTYCTLIDIHAKGGYLEFAMDLYTRMQEVGLSPDTFTYSAMVNCLGKGGHLAAAYKLFCEMVENGCTPNLVTYNIMIALQAKARNYENVVKLYKDMQVAGFRPDKITYSIVMEVLGHCGHLDEAEAVFIEMRHDWAPDEPVYGLLVDLWGKAGNVDKALGWYHAMLQDGLQPNVPTCNSLLSAFLKINRFQDAYSVLQNMLAQGLVPSLQTYTLLLSCCTEAQAQMGLCCQLMAITGHPAHMFLLYLPDAEPGGQNVRDHTRYFLDMMHSEDRESKRGLMDAVIDFLHKSGLKEEAGFIWEVAAQRNVYPDSVREKDPSYWLINLHLMSEGTAVTALSRTLAWFHRQILTMGKCPERIDIVTGWGRRSRVTGSSLVRQSVQKLLHLFEFPFVTTRGNTGCFVGCGEPLNRWLHNPYVERMHLL

SEQ ID NO: 162358 - protein, 385 aa, Oryza sativa
  Clone ID: PAT_MRT4530_61457C.1.pep
MYATKPLSAFAGHPDATSRPLPPAAAEGGCSGYLAVKSDEEGTDETRCWGLRSQPRVRGLPFPQNRVVTVSDPALGKYADAYADAVVFVPVPGAPPSSNRYYAVLAAGKHRGLVRACSREDDAATHCFCRCVRDAKPRPFDPADVYQQMEIVPNRGGFTARSVAADGLPYFLYRSKRWLAYASRPKHFDLAEALGLNDPLRSRSLTTPPPATATATAATAVAVGRWYTPFFYIKEDGVPLKAQMDRSTFYEIVLEQRWDEAMGGEASKRVLVGGSVEGKQEAVGAAASARTGGGSGDGYVWFSAATTTWPAGQRVGVHASLWEKMVWEEQRGGWVADEEVGGGGVRKTMSGGAGGRSVLVERFAVRRLDGSVVVAFDFSHVNKIN

SEQ ID NO: 162359 - protein, 99 aa, Oryza sativa
  unsure (1)..(99): unsure at all Xaa locations
  Clone ID: PAT_MRT4530_61458C.1.pep
GRGPYHRRRRRRRRRRIXREGRRRRRRSPLRQRPPSPPPADLAGXXGSSRRGAAGCQPSLRRRRRRRCFGDDGAAATSFDLIFGFYLDIYVMLSSILFV

SEQ ID NO: 162360 - protein, 649 aa, Oryza sativa
  Clone ID: PAT_MRT4530_61459C.1.pep
MAAVSTCCTHHLLPLLLLAAIVATTTTNHAAAAATLNITNLCPFTVWPAAVPVGGGRRLDPGTSWALDVPAGAAPGRVWARTGCTFDATGANGTCLTGDCGGALSCTGYGEPPQTLAEFSLGQADGQDLFDISLVDGFNVPMDFLPAPPPDQSPPCSKGPRCPANVTAQCPGELRAHGGCNSACRVFKQDKYCCTGNGTNTCEPTTYSLPFVRMCPDAYSYSRNDASSPGFTCPSGTNYQIIFCPPIDLTSSSPASIAVAANNRQGKKVIAGIIIASVIGSTSVLTMVMAYTSIKRRTRRRREIREEEQELEEITLQGMPRRFTFQQLQEATDQFRDKLGEGGFGSVFLGQIGDERVAVKRLDRNGQGMREFLAEVQTIGSIHHINLVRLIGFCAEKSQRLLVYEHMPKGSLDRWIYHQQGAAIFPSVPPLDWQTRYKIITQVAKGLSYLHEECTKRIAHLDVKPQNILLDDKFNAKLSDFGLCKLIDRDKSQVITRMRGTPGYLAPEWLTSQITEKADVYSFGIVVMEIISGRKNVDTSRSEQSIHLITLLQEKVKSDQLVDLIDKDNNDMQVHEQEVIEMMKFAMWCLQIDCKRRPQMSEVVKALEGTISIETNIVHDFVAVNPVSFGFTAVVGSAPPLASDLSGPR

SEQ ID NO: 162361 - protein, 108 aa, Oryza sativa
  Clone ID: PAT_MRT4530_6145C.1.pep
MEAAAATIPSARSGGRGSDSGVGGGSRRRARQREAVIYRREEPSPPPDLAGRVAAVGGLADGRRRDGRWRDSSKMTNHATAMMVDLKRCVSTFDVSTTVFGQYEDRWC

SEQ ID NO: 162362 - protein, 101 aa, Oryza sativa
  Clone ID: PAT_MRT4530_61460C.1.pep
MEAAGSQASASCATAVLSRGWRGGPLPDRGPSLFSPNQGRRGAGAGATGAATDAGVAVVEEAWIWPAPSLLEDLPPPAWRWVVATSAEAGAVRWRRGGGHG

SEQ ID NO: 162363 - protein, 191 aa, Oryza sativa
  Clone ID: PAT_MRT4530_61461C.1.pep
MTSVRAVGSTLPSIRAAAELARQELLRRELVECQLVAGIWCHGFTVSQLRSIRASLPPTARLVVAKNSDVAAAVAGTRWEAVRPFARGMNAWLFVRSDEIPPALRPYRDFQKEWKLQLNDFTGAVFEGRLYSPDDFAQLESMPTRVQSYQYLVGCLQMPAVSVLAALRARQEAMAQPPPADEPAPTPPADK

SEQ ID NO: 162364 - protein, 110 aa, Oryza sativa
  unsure (1)..(110): unsure at all Xaa locations
  Clone ID: PAT_MRT4530_61462C.1.pep
MPPPSPHXPHRNGNHVPXPSXESFAKFFECWISEQSRXLAALRSAASGGKXPAGPPDXAEAPRLVNRVLGHYXHXXRXKSAAXSTXVLRMFSXSWNSTXXLYLWCGGLXP

SEQ ID NO: 162365 - protein, 126 aa, Oryza sativa
  Clone ID: PAT_MRT4530_61463C.1.pep
MALLAVHAMAASPATFPSSHHHAAVSSYCALPAAAAFSRSRSRVAAAAAATLSAPLTPVLEVYCGRGDKKTKRGKRFNHSYGNARPRNKKKGTGPARLFAPPAPPRKDQFDDGEVTPIDIDDDILE

SEQ ID NO: 162366 - protein, 291 aa, Oryza sativa
  Clone ID: PAT_MRT4530_61464C.1.pep
MAASSSSSMASSQPRMMEQSLFYTQPPARAVHTRKVTAVNLHREMSLIRSLMPTFPFVAVDTQFPGVVHPHPRGAGVTADDRYAAVRANADELCLLQLGITLSAADGRLPVDGALVEFMWDFDFAGFDARYHRHAPESVQFLRAQGFDFEAARLAGVPALAFAAELAASGILGLRGVTWVAFGGMYDVAFLLRLATGGAPLPATRLGFLAQVGAVFGTQVFDAKHMASLLHMHGGLAAVGGMLRLPPQLPRRHMAGQNSVMAIQLFMELRRRFNDLGGSLHSCSLKIEGLT

SEQ ID NO: 162367 - protein, 329 aa, Oryza sativa
  Clone ID: PAT_MRT4530_61465C.1.pep
MGHYTNLTDPRTELEVVRDWNGVDQVVLRSPRGAYARVSRFLRMDFDRLGIESFGLVWCDSDGFVFFVVVCVLQAIFKPPKAMRGGIPICFPQFGNSGTLEQHGFARNRIWALDEEHPPLNQNDNNSKASVDLILKPSEDDLKCWPHGFEFRLRVSLTKDGNLSLVSRIRNVNGKPFSFSFGYHTYLSVSDISEVRIEGLETLDYLDNLSQRERFTEQGDAITFESEVDRVYVSSPNVIAVLDHEKKRTFVIRKEGLPDVVVWNPWEKKSKNIVDFGDEEYKQMLCVDAAAAERQITLKPGEEWTGKLELSEVPSTNCSGHLDQPGIII

SEQ ID NO: 162368 - protein, 37 aa, Oryza sativa
  Clone ID: PAT_MRT4530_61466C.1.pep
MVRRFIRDAGVQHDEKDRCIRDARDNASQQDDTHNFL

SEQ ID NO: 162369 - protein, 182 aa, Oryza sativa
  unsure (1)..(182): unsure at all Xaa locations
  Clone ID: PAT_MRT4530_61467C.1.pep
FFFFFFFRPRGPSKPFHSILCGPNFLSPTYKKPRSCSILPAHLTLPIPFFTTSNKTRTPECNPKGFXXKXLACNHHHKVTQHHSNSPILKIPSRRGGGVQVLRSPLCRWFSCIAHISLHFHSPLAQLVCVQQRGPTPASATHSLGKAGPXGSPGKSHGLNHGPFCNFWRIGGIHRYPWVWHD

SEQ ID NO: 162370 - protein, 473 aa, Oryza sativa
  Clone ID: PAT_MRT4530_61468C.1.pep
MEMPRKTGDKERTRRQRGGALRQEKLSSRSPPSLVPLRSPPSAGRSRGGGAGASIVGWDRWDPRTNGPQYPLYLVYGYPPSTALPSCGDPAAASPPAGSGRGEGATACRHLPVGSTPPLQHSPTSITREIEWIEREGLPMDNGRPRYFIGNKGLVTRMFSRISSRPMSLHLIGQPVTFVDEDRQSYAYIKIRKRTDLPQGLLISPSSPPSFPRITADLSLRTVEEHMEGFLVTAATGALKSVLVKLAAMAGEFEGVRGQISFLADEFAAMHAFLLRMSDSEEGNADPQDKAWTREVRELSYDIEDSLDEFMLHVVDGSANPDGFIVKCRNLLTKTMARRRIAKMIAEFKAQIKEVGERNARYMNGGISLMRTANATVDQRALTIFQDVSSLVGVDQPKKELIDLLMKDDGHVASEHLRTISIVGIGGLGKTTIANLIFEELREQFDCSAFVSVSRNPVWILWVPHTHTAWLSD

SEQ ID NO: 162371 - protein, 773 aa, Oryza sativa
  Clone ID: PAT_MRT4530_61469C.1.pep
MVQEGMLDLLLKTLEDNKKKRMEAEERNRMDMKELKAVWKLGYLKLRSRDRQEALVRQWFHIRQTNTVAEYVEKFDSLMHLLLAYEQSVPQVYFVQKFIDGLKDEVRREEALEGVKIGVFRRSDCTNYLRPMHKLHVVHELLDILQEDTEEILSAETATQKEDLIVMAISQQAANVTESGSTNSFIDEQVGMKMIGVEEFQHSLKVQIADGGQLICSKILPGCNWCMQGHSFKNDFKLIPLGSYDIILGMDWLQQHSPMQIDWIQKWVEFQYQNQLIRLHGIKKQSSTYANISIEQLVGMAKSGAIMYLVKIAETTHEEEFPIPEKIQQVLQSYQDVLAEPKNLPPRRNCDHKIPLIEGAQPVNLRPYRYNPELKDELEKQVNEMLELDVKQPSQSAWSPNYFSSSHEQHISPSPEKTHVANVSQVLQLLRKDHWQVKFSKCSFAQQQRLHTPWQQRAFTKLMGLHYKICYKKGSTNSTVDALSRKDNLGDEQAMAISSGVPMWIHEVVQGYDKDEYSSQLLTELAVQPIASIFPFRMAKPERVIYPGVLRPLLVPEGAWQVISMDFIEGLPVSESLEDCSVPDLEEWLRDRKFVHQLIQQHLHRAQQQMKAFPDKNRSFREFAPEDWVYLKLQPYVQSSVAKRANHKLSFKFFGPFQILQKHSLPSPLDSLSVPVAFLDYRLTRKGGDTVDATWEDQANLQTRFPCAPAWGQAGFQGRENVRIPLERLEEKEHGDNELDEQQSEGGKVEAVFQKLKHKRKANTKYMFSEWVV

SEQ ID NO: 162372 - protein, 81 aa, Oryza sativa
  Clone ID: PAT_MRT4530_6146C.1.pep
MGRRRWRRDSEDAEKRRWPGRRGGSARIADMGEATARARRRGGVADSQLGDLAEGCGRIILQKNLLKDFEVISLIKGSDGY

SEQ ID NO: 162373 - protein, 87 aa, Oryza sativa
  Clone ID: PAT_MRT4530_61470C.1.pep
SRSRYQSYIKSERDQVKQNHKLSTAGTMKRLCTNWEHTIHGGRRHGIGVEQLNKAIYDDDGLHATRLLSARGLGGDESEELNLTDVV

SEQ ID NO: 162374 - protein, 66 aa, Oryza sativa
  Clone ID: PAT_MRT4530_61471C.1.pep
MSLGMIEDTTLDPEVTFYVRMRCARWEEGIHQSRSDSKDAQPASNLQCDLSNKHNIYDVTITILNI

SEQ ID NO: 162375 - protein, 69 aa, Oryza sativa
  Clone ID: PAT_MRT4530_61472C.1.pep
SWPLRRRRDRRIDVEDGGRTRHPHEYAKAYCAHLKRSGKMELPEWVDIQKTARLKELPPYDPDWYYTEG

SEQ ID NO: 162376 - protein, 115 aa, Oryza sativa
  unsure (1)..(115): unsure at all Xaa locations
  Clone ID: PAT_MRT4530_61473C.1.pep
PPRRIRRRARNAAAATPHRRLHRRAMPPPHATPRRRRRRHAXPPRQAPARCRHTAVNEHVNENEHVNVRCRENVNENEKDRTNESENEXIERINVNENDNERERERTXNENDRTN

SEQ ID NO: 162377 - protein, 178 aa, Oryza sativa
  Clone ID: PAT_MRT4530_61474C.1.pep
MSDSSFHRSRGAMIRCGKIEPAEDEKEKKKKRRKRKMKKKEWDLDVWVVGRGNRRILAARARASAVHDHEIGLYARAGSRECYYYHHGFCRVFLGFWLCAGVVRGVLHSFRFRGSPGWGILLRFVPHIGGRLVPCISPEKREGMVAGVQIYSFNDLTISFRRRDMLTMVDSLSQEVES

SEQ ID NO: 162378 - protein, 152 aa, Oryza sativa
  Clone ID: PAT_MRT4530_61475C.1.pep
MAAAAAAGTRGMRALAILGRCVRAPFRVLVRARDLYVSRMAACAGGGGRGAPVGLVAVPRCQSHGFYRSAAGGSTDDDIRELIRLASRAGGPPRPPGVGPRSQSVAIGRIDEDEPCEFGLDAEARALAMAPKSKSCTVGPTARTAHRVGPVA

SEQ ID NO: 162379 - protein, 814 aa, Oryza sativa
  Clone ID: PAT_MRT4530_61476C.1.pep
MATQPPKLFLNNGSTEVLGDIGVDGLNIYFIHFNLIPITSTHVIPINSGGDVYNFSWKNPGDSFTFARQGMTFVVTSCDLDVYMVDQEKSTPILLGTIACPSKEIAEMVYRQDSEGPGWYTIDSLPARTVQLQFVRHKTGNTQKYFNLTMLWDRINITVKANLAWNIVDQTRCLNNMEDDRKNHACISNHSSCVSSQYIDVGYACRCNDGYVGNPYIMDGCKLDDGYNPRPQKHNCSRQCGTIVVPFPFGLEEGCAAREVFQLSCLGKPNSVLQYNDFIGVQYINVSEGLVGIKYNSSFVEILFNMFSQFRFSSQGVVSNIFGKGPNLYVDPTESASVQWAVANLTCQQAQQNTSTYACVSTNSSCSRVISTMQGYVGYRCTCLPGYDGNPYIPDGCKGIIIGLTIGFGVLILSSIVIAIIRRWKRDVHKKIRRKYFQKNQGLLLEQLISSDESASEKTKIFSIEELKRATNNFDSTRILGHGGHGTIYKGILSNQHVVAIKKAKVIKEGEINDFINEVAILSLINHRNIVKLFGCCLETEVPLLVYDFIPNGSLFELLHHDSSSTFPLSWGDRLRIAAEAAGALCYLHSAASISIFHRDVKSSNILLDANYTAKVSDFGASRSVPVDQSHVVTNVQGTFGYLDPEYYQTGQLNEKSDVYSFGVVLLELLLRMQPIFTTMSGMKQNLCTYFLSEIKTRPIIDLVDPPVLDKANEEDIRQVASLAEMCIKLKGEERPTMRQVEITLQLLRTEKMTPSHVSPDRNQEIESLLTQGAIDQVIHALVNVDRANVASQRSQTSCYSLEKEFLSSASLPR

SEQ ID NO: 162380 - protein, 55 aa, Oryza sativa
  Clone ID: PAT_MRT4530_61477C.1.pep
TGPEHSKDVSLARQAVGPPNATAVAVSRMRPHIVRPPTTAASLSSRRGMARAPRG

SEQ ID NO: 162381 - protein, 847 aa, Oryza sativa
  unsure (1)..(847): unsure at all Xaa locations
  Clone ID: PAT_MRT4530_61478C.1.pep
MATQPPKLFLNNGSTEVLGDIGVDGLNXPYFIHFNLIPITSTHVIPINSGGDVYNFSWKNPGDSFTFARQGMTFVVTSCDLDVYMVDQEKSTPILLGTIACPSKEIAEMVYRQDSEGPGWYTIDSLPARTVQLQFVRHKTGNTQKYFNLTMLWDRINITVKANLAWNIVDQTRCLNNMEDDRKNHACISNHSSCVSSQYIDVGYACRCNDGYVGNPYIMDGCKLDDGYNPRPQKHNCSRQCGTIVVPFPFGLEEGCAAREVFQLSCLGKPNSVLQYNDFIGVQYINVSEGLVGIKYNSSFVEILFNMFSQFRFSSQGVVSNIFGKGPNLYVDPTESASVQWAVANLTCQQAQQNTSTYACVSTNSSCSRVISTMQGYVGYRCTCLPGYDGNPYIPDGCKDIDECLQTPRIARNFATILKETTAAPCALIIQSIIIGLTIGFGVLILSSIVIAIIRRWKRDVHKKIRRKYFQKNQGLLLEQLISSDESASEKTKIFSIEELKRATNNFDSTRILGHGGHGTIYKGILSNQHVVAIKKAKVIKEGEINDFINEVAILSLINHRNIVKLFGCCLETEVPLLVYDFIPNGSLFELLHHDSSSTFPLSWGDRLRIAAEAAGALCYLHSAASISIFHRDVKSSNILLDANYTAKVSDFGASRSVPVDQSHVVTNVQGTFGYLDPEYYQTGQLNEKSDVYSFGVVLLELLLRMQPIFTTMSGMKQNLCTYFLSEIKTRPIIDLVDPPVLDKANEEDIRQVASLAEMCIKLKGEERPTMRQVEITLQLLRTEKMTPSHVSPDRNQEIESLLTQGAIDQVIHALVNVDRANVASQRSQTSCYSLEKEFLSSASLPR

SEQ ID NO: 162382 - protein, 136 aa, Oryza sativa
  unsure (1)..(136): unsure at all Xaa locations
  Clone ID: PAT_MRT4530_61479C.1.pep
PKVFLGNDAPPLFNPGGGVLGEVKKTPPRVPKNLSPKAPGEKTETFLFXFVKEVQKAKAPKVQAKRKAPATAAGEKEVPRQFPQEEKKVPLFEVYLENLPPSPGVKCPQNFAIFPRIKRGLVFVFIKKKQKKKWVS

SEQ ID NO: 162383 - protein, 131 aa, Oryza sativa
  unsure (1)..(131): unsure at all Xaa locations
  Clone ID: PAT_MRT4530_6147C.1.pep
LARWWVAWSDAPATDPRLERVSERISLLVDRGLTTHMITADFLFHWLAPLSHREXGCWFYSGCGDVTRTHPNDLPVSIVVCIVEAVLHDGLDAAIFLPAGILTLCEDLAREIIQGTLSGLASIYFDCVEVH

SEQ ID NO: 162384 - protein, 68 aa, Oryza sativa
  Clone ID: PAT_MRT4530_61480C.1.pep
GNAQTNTNMYTMPGSSLPVTYTTHYVKIVAQAAKETCELVALQLQNRAYTRPMVLDALIHSYGRVCIP

SEQ ID NO: 162385 - protein, 60 aa, Oryza sativa
  Clone ID: PAT_MRT4530_61481C.1.pep
RAAGIGTRPICHRFLLANPLLLAAVLATGCVVVGLGILCRGEARPAWKSSELAEMSSFCA

SEQ ID NO: 162386 - protein, 79 aa, Oryza sativa
  unsure (1)..(79): unsure at all Xaa locations
  Clone ID: PAT_MRT4530_61482C.1.pep
MEGKEEDVRLGANRYSERQPIGTAAQGAGDDKDYKEPSPAPMIEPGELKSRSLYRSGIDEYDSIFLFXYIIILSVMEVI

SEQ ID NO: 162387 - protein, 249 aa, Oryza sativa
  Clone ID: PAT_MRT4530_61483C.1.pep
MLRGGADLPGTGGGAAGSNPRKEGRERAPVSPMMMYLKRYAYDILDPYCVRVRGAAAAAEDSPSGGGAGSEEKSGGGGLIANDPARGVGGRERMTRREERGEKKGNFLIGVGWRPRLRTWLRGRSIQDPTVRCVLALHVSRQGLLGEGIGWEDPDVWDLNWPVGVTHHHTDGSASSTFEGGCLKICTRRGYAWSTPTYRESSFQGWRPSSSPTEVLREVVDGVESSRVDPDLLYMEASFGPKSALRISS

SEQ ID NO: 162388 - protein, 147 aa, Oryza sativa
  unsure (1)..(147): unsure at all Xaa locations
  Clone ID: PAT_MRT4530_61484C.1.pep
GSSRRCVLLPRKLTLCQAWRWRGRAXLTGDHGEDLGGGGDELELAGXTGRTLVADGTSSSLPAAAGTGGGAESGGGAWDELELADGVGRGGRERRRAASRRQRALGVEAHSGGVGRGRVDRVAWRRRVREMGSSAATTREGERGKGS

SEQ ID NO: 162389 - protein, 35 aa, Oryza sativa
  Clone ID: PAT_MRT4530_61485C.1.pep
FCGAFFSTFREISPCAFFLFGQGLSFFVPPGLLIC

SEQ ID NO: 162390 - protein, 880 aa, Oryza sativa
  Clone ID: PAT_MRT4530_61486C.1.pep
MAGSGLGDSGSAASPHRPNIDVANSDREEFVAHASDVNCVKFGRKTSRILITGGEDQKSLSGLTSPVESVSFDSSEAMIGAGASSGTIKIWDVDEAKVVRTFTGHRSSCASLDFHPFGEFFASGSSDTNMKIWDMRKKGCIHTYKGHTRRIDVLRFTPDGRWIVSGGSDNSVKIWDLTAGKLLHDFRNHEGPINCLDFHPHEFLLATGSADKTVKFWDLETFELIGSSGPENSREYFVPASVVRSMTFNKDGKSLFCGLHESLKVLSWEPIICHDVVDVGWSTLGDLIVHEGKLLGCSYNQSCAGIWVVDLMKIEPYAVSIAEAHLNESVNRSIQADNSISSVLGRLSVSRSPAKEASSDTLLKLSMSASKEVPVPASSAVTKKLPKEPITSNIRLTRSDSLPVVSPRVRLNPKFSDDQKRQTDYAVPITTPRIRSKVDLSIGARAFHRNSVPSVAPTNRSRSKISAYSSEGSSFIPVVVPRHIPKVDSGPNLSKVLTTDLTIVEPQDIERGGLAVDCGEDDKLVCVIDSRSSNMGVQNGRRRKAGDIITHKETPETALTVNMDRDFRRKAPETESMQQDIFHSEPISSKCKYIKETSGAGDINLSGSAITESVKSNEGGDWYNASSFVKPNLTVGRNPETSYINRRTMFGLRHSTDSSEKHAVEHGPSNLSASYERNQYAPTLHNLRRRSSVAREQSASAGDEDDIADLMENHQEFIHAVKSRLTKLEVVYRCWHNNDVKGSIDATRRIQDLDVTADIISVLMENDNSITLDICTCVLPLASSVLEKSSYDRHLKVALEMILKLVKSFGSTISSAVSSTPPVGVDIEAEQRLNRCNLCFLELIKVHSVLFALTRRQGEVGRSAQELSLFLQDIFQLTSR

SEQ ID NO: 162391 - protein, 129 aa, Oryza sativa
  Clone ID: PAT_MRT4530_61487C.1.pep
QAELLLATFRFVSMVKIDDNSVLYIQNLSSKKMYLPGHHRLLSAGTRSCPGPGCRGGSSSRPPAAWRGAAGEWRRRSPSPSPSLVAAGARRARPGGRAVARERGDDDDAGRRRAAVWMDALVPWWCGWL

SEQ ID NO: 162392 - protein, 228 aa, Oryza sativa
  Clone ID: PAT_MRT4530_61488C.1.pep
LIKLGYTFFAKLTAIALAYFSIAAQAAEKLYVYNWTEYVPSSLLEQFTKETGIEVIYSTFESNEEMYSKLKLSNSTGYDIVFPSSYYVNKMAKEGMLTAIDKTKLSNLKNITPELMGKPFDPDNTYSLPYVYELTGIGVNAKEIDPHTVSSWEDLWRDEYKGKLLLMNDAREVFHIALLLDGKSPNTEEAEIKQAYQRLQKLVPNVLVFNSDSPEMPYLQEEVAIGMQ

SEQ ID NO: 162393 - protein, 96 aa, Oryza sativa
  Clone ID: PAT_MRT4530_61489C.1.pep
MIHFLKTLIHVQLGIESKGNLKHSFPSKETSRPGETHSDSDLLVRPATCRRSDRPSTGGLTCQHTAVRPAYSEETDILLKTYTSGRAVPAHKLNQR

SEQ ID NO: 162394 - protein, 196 aa, Oryza sativa
  Clone ID: PAT_MRT4530_6148C.1.pep
MATATSTLFSLSSLSASLPSPAQPAPASLSLRAVSPRARLSASYAAFPIGGIGAWAAATPASSGRWRRRGLEVVCEAAKTGTATGRRPDSVKKRERQNDRHRIRNHARKAEMRTRMKKVLKALEKLRKKADATPEDIIQIEKWISEAYKAIDKTVKVGAMHRNTGNHRKSLLARRKKAIEILRGWYVPNAEPAATS

SEQ ID NO: 162395 - protein, 54 aa, Oryza sativa
  Clone ID: PAT_MRT4530_61490C.1.pep
MELYRRLAWSAYKDLSSQAEQNHGPAGCQCRGLLVQEATAGAHKDVLKFIYDRV

SEQ ID NO: 162396 - protein, 129 aa, Oryza sativa
  Clone ID: PAT_MRT4530_61491C.1.pep
MAIFLSIVLLSMAQLPSLVAGTGRPRVIIIGAGISGISAGKRLSEAGITDILILEATDHIGGRMHKQRFAGVNVEIGANWVEGVNGEKMNPIWPIVNSTLKLRNFLSDFDSLAQNVYKEYVHSMSGWID

SEQ ID NO: 162397 - protein, 394 aa, Oryza sativa
  Clone ID: PAT_MRT4530_61492C.1.pep
QSNACRLTRAFIDNACSMVLKKSLTIMEHGYAVIDLEKLDPHNVDDLFLSRYLAYVLQFVSQRHRPLRGRSAQLLIDYIRTIPCKAALSVAGCYLCAVPRSKGTKVLVCCSVDLMESSSVHMSYKCSYVKQPPPVSEINQIVTEARIYSDQFRQNCPNTPFPSSKFSTDVLNKAKDLKLIGDCTLEKLNYLQTDEHQKFITTKEHGQEQYLEKTSFPYLEVLNLWPGETCHFMGRFLITWRTSEVVVNGMCLHDSQKHTCQYCMVNQDGSLAIRHMFDTDWLFLAEVCKIHSLEENKNYSNALCDKLEDAKLVQHSRYLQLSAMKSLQILRSIPAPARRMLPVLTNSQGAVLSIPCQPGVAEAIATFGTRQVEMKVPLDHCESNFVSAGGGSSA

SEQ ID NO: 162398 - protein, 875 aa, Oryza sativa
  Clone ID: PAT_MRT4530_61493C.1.pep
MRRNLKTNVGITVFPILICVLLVVLQNVINGELDKPKYQCGCECTESDLDGTCLRKECGIQHSTLEQVNVFIVLEYFQLTGVSGRVFPALYPLPNVTDYLMPPPFSPSQVTDYLDILSRIVVPRCMPFMFGTIPYNAGGVPLHIDSFVGLPRLYSDVLLNEPDIQCIEVQMLWRESASVINYELFKGYVQRGGETNEFVAGYDFLNTTGYDLNINVWYNSTYNDNTAYSFIAALRVPRLVNAISNAYLKFIRGSGVDMLLEYVKEMPKVGTRFRLDLSSLLSVLFFTWIVELLFPVMLTYLVYEKEQKLKIMMKMHGLKDGPYWLISYAYFFALSVIYMTFFVIFGSLIGLNFFRLNDYSIQFAFFFIYINLQIALAFFVASFFSSVKTATVIGYIYVFGSGLLGAFLFRFFVEDRTFPNGWLLVMEIVPGFSLYRGLYELGQYAFSGSAMGASGMTWGNLRDPINGMCGIFIIMTVEWAFLLMLAFYLDQVSPVGGGVRKRPLFFFRCLQKKHTPSLQKPSFVQQGSKVIVDMEKPDVAQEREVVEQLLVGRNANQAIICHNLKKIYPGRDGNPDKLAVRGLSLAVPKGQCFGMLGPNGAGKTSFISMMIGLVKPTSGTSYVHGMDINMDMDHIYTNMGVCPQHDLLWEPLTGKEHLFFYGRLKNLKGAVLVKAVEDALKSVNLFHGGVGDKQVGKYSGGMKRRLSVAISLIGDPKVVFMDEPSTGLDPASRNNLWNVVKEAKRNPHSMEEAEVLCDRLGIFVDGDFQCLGNPKELKARYGGAYIFTMTTSPDQEQEVERLVHDLSPSANKIYHLSGTQKFELPKQEVKIAEVFRAVEDAKKRFTVHAWGLVDTTLEDVFIKVAKGAKASSVNS

SEQ ID NO: 162399 - protein, 311 aa, Oryza sativa
  Clone ID: PAT_MRT4530_61494C.1.pep
MAARARRWNTGAAAGVPSCASKLVPCGGYLNATAAPPPASCCGPLREAAANETACLCAILTNKAALQAFGVAPEQGLLLAKRCGVTTDASACAKSASSSATAAAAADAAGAGTAGSTAASSASTGNAASTAPRRRASAVMAATRRRRAVARSLAVELEQEADPEEDVARRPVTRTAGGTEEEDSVERRGGGSWPRGGGGGRGEAEEGHAGASSSCSSSALTVAGSSTSTWGMRSTLALAIQLRCRVAIGMPGSSSGAPPAASRRQLLPPLPPGRSGNSLAKMPAYVLLALLLDCFGRKPLAIGTMLLSGIS

SEQ ID NO: 162400 - protein, 65 aa, Oryza sativa
  Clone ID: PAT_MRT4530_61495C.1.pep
HRLGSGCLLLYVLRVSHACTDVHGFWSVAASVVSNMRDKTRVWLQHAGSSDTPVHARTHPVNSEA

SEQ ID NO: 162401 - protein, 455 aa, Oryza sativa
  Clone ID: PAT_MRT4530_61497C.1.pep
MVSIYIIILIMDLVFFNGNRLVEVRNFFIFLCWHCVHVQVKRVVVDLLLDSNIFLTHNRGFYNNIVEIMDTPYPHGISEFYSNIVLMHNRDFYISYNLYGKFLIEAVRKGLPPVAAWPSPKGVRPEAGRRPFPTRPGVGLLPLIINTFYSNKEILAPRRRSGFVRPCPARPPLQLGPGSSSCRPILLHARPLAAGIASSSRGPAAVAARSLGRLLLLPPPPPISPDRAGRGRARHVACGAAAGDAKAEEEESGLAKTLQLGALFGLWYLFNIYFNIYNKQVLKVFPYPINITTVQFAVGTVVALFMWITGILRRPKISGAQLFAILPLAVVHTMGNLFTNMSLGKVAVSFTHTIKAMEPFFSVLLSAIFLGELPTVWVILSLLPIVGGVALASLTEASFNWAGFWSAMASNVTFQSRNVLSKKLMVKKEGLNVKQVLTRSLLAALCFHAYQQAGS

SEQ ID NO: 162402 - protein, 287 aa, Oryza sativa
  Clone ID: PAT_MRT4530_61498C.1.pep
TPGQPQGRRPRRQAQRRPRRSHRSAATSPPHNGHPGRHRRWSRLQPTARLAASGINATAVVQPPGRCATSSAVDADADAVQPQPQLMHRSLRATPPSAAVAAGPASSRLDPAQGRNRQDAPPPPSTKAVAPSAAVATTTVGESCHCPTAARPAARPSCRRCGLPVAHTPPPSPPPLNPNSSPPPRPDHAATTPPVPVARSPAATTPPRCRPPRRLVRGRRRRRRAPPPPASLLPLPLPPPSSSSRRRRDAPPPTPAHRRPLAPRLRCLAARPIRGPPLGCRLPRPSL

SEQ ID NO: 162403 - protein, 35 aa, Oryza sativa
  Clone ID: PAT_MRT4530_61499C.1.pep
TTSLLGTLWPFDANELLALTARQPRDHAPPLVTHA

SEQ ID NO: 162404 - protein, 75 aa, Oryza sativa
  Clone ID: PAT_MRT4530_6149C.1.pep
AVRLWHCHQTGSSLPPSALAALHRRTPAAAIRRYYATPARTRGAGRGPCPNTGPPSRRNYIRRCCAVSGRPDGPR

SEQ ID NO: 162405 - protein, 57 aa, Oryza sativa
  Clone ID: PAT_MRT4530_614C.1.pep
DQYTDASCKVLVCNPNMLLVCSHNVVEADLCSCVSTLRFFTSQFEQSPYCRGLATFS

SEQ ID NO: 162406 - protein, 130 aa, Oryza sativa
  unsure (1)..(130): unsure at all Xaa locations
  Clone ID: PAT_MRT4530_61500C.1.pep
SMWNRVRWETSGGRPKKSMTWNVDLSPSNDYFGRWKLXLGRLGLLGAAARPAGAGWIGYEARRRHPKDAASRRRVTGDHRRRGGTTRRREGLAAASSRTHGTSASRRRMGGGVGASSCRASRGGGDWRAS

SEQ ID NO: 162407 - protein, 1826 aa, Oryza sativa
  Clone ID: PAT_MRT4530_61501C.1.pep
MAARAPPRLRAYPLALFFLPVALLGVLAGAAPIRGDLRRVVEVEGEPRSVVWAVQLSDLHLSAFHPERAADFRRHVGGALAMVNPSLVLITGDLTDAKSKDLLSSRQEKSEWLEYEELIDEVVGLSGLNKEIFYDLRGNHDSYGVPEVGGMFDFYEKHSINARLGRTGNVQSITLQNSGWKHLFVGFDSAASIGLRSPANVFGQPTDQLLVELDAALSQWDNYSSTSAVTKVTFGHFPMSFSSSTTSGGSLRDVFLKHALSAYLCGHLHTNFGRNLKRHHRSDRNHLSAKQYYQTNMHEGTSTSIGSNNCSTTTESVAEFWEWEMGDWRSARSMRILAIDSGHVSYTDIDFRFGSMDVIIVPTFPLDSRFMQRLSTPHDLNCQANSTSHFGMVRTLVFSKYKIIAVSVKIYDSFSGSHHLVLEKDMEMTSGEGARGAMYTVPWNWKAYVDESPDRYWLQIEAKDLTGKIYYSQLRPFSVNGLTAKVRWTWKEFRVMGCQWGQLYQPIMWSTLAFLCLLILIPRTLLMLYENHMLKCRSSKTAAGVPARFVFSHAVRLHNPESLAAAMSLARQVELMELERPQPPLLQAAQRAPLPPPAARAPLPPTAPRPALQAAPAPLALPAPPVAALPAPPPRGAPNQAKRLSPAEQAERRRLGLCYNCNEPYSRGHNRVCRRIFFIDGIELADEEPAVSDADQGAPVFSLRAVAGMPICDTMQVRVAVGAVVLTALLDTGFTHNFIAESAAPRTGLSVLANLRLTATVANGERIACPGVIRQAPITIAGEAFNVDLYVMPLAGYDLVLGTQWLVTLGPIVWDFTARTMSFSRQDRAVCWSDVTARAPPLVAAVSSPTGLLEELLSAFSGLFAEPTGLPPQHARDHAITLKPGTLPVAVRPYRYPAAHKDELERQCAAMMEQGIVRRSDSAFSSPVLLVKKPDGSWRFCVDYRALNALTIKDAFPIPVVDELLDELHGACYFTKLDLRSGYHQVRMRPADIHKTAFRTHDGLYEFLVMAFGLCNAPATFQALMNDVLRPFLRRFVLVFFDDILIYSRTWADHLRHLRAVFDELRRHQLFLKRSKCAFAAPSVAYLGHVVSAAGVAMDPAKLQAVRYWPPPRSARAVRGFLGLAGYYRKFVHNYGTIAAPLTALLKKDGFSWSPEASAAFDALKEAVTSAPVLAMPDFSKPFVVECDASSHGFGAVLVQDGHPIAYFSRPVAPRHQALAAYERELIGLVQAVRHWRPYLWGRRFTVKTDHYSLKYLLDQRLSTIPQHHWVGKLLGFDFAVEYKPGHTNAVADALSRRDTADEGTVLVLSAPRFDFVQRLRLAQSSDPALVALQEEISAGSRALPWKLTDGLVTYSGRLYIPPASPLLPEALRAVHEEGHEGVQRTLHRLRRDFHFPNMKTVVQDFVRACSVCQRHKSEHLHPAGLLLPLPVPQGIWSDIAMDFVDALPRVKGKSVILTVVDRFSKYCHFIPLAHPYSAESVAQAFFAEVVRLHGVPQSIVSDRDTVFTSNFWRELMRLSGTKLQMTTAFHPQSDGQSESANRVIVMYLRCLTGDRPRDWLRWLPWAEYVFNTAFQSSLRDTPFRVVYGRDPPSLRSYEAGETRVAAVAQTMAERAEFLEDIRHRLEQAQVVQKRHYDQAHRQVSYQVGDWALLRLRQRPTASLPTAVTGKLKPKFYGPYRVVELINEVAVRLDLPPQARLHDVFHVGLLKKFHGAPPPASPPLPPVRHGAVVPEPEQAVKTRLARGVRQVLIQWKGSSPASATWEDVDPFTARYPHFQLEDELRLEEGRDVMWGRTYTRRRRARDLRRAAERAESAAREAGVISG

SEQ ID NO: 162408 - protein, 301 aa, Oryza sativa
  Clone ID: PAT_MRT4530_61502C.1.pep
MESAKRSCLAISLILLLLLVPSIHGARHVAAAIKGTGADSEMVVTERTAGGGGGHGRGYTSHRSHNPNNPNDGGSGTPVVDPHNVATRGHHHRGAATRTAAGGDPRLAACMLRLGATFFLLKILYAINRSLNANEKLLEKKKNATTIHDFADGVKDGGSGGTRDLPSRMRSMTETAAAAPEPSHADGIKDSGGGGGCRFRALPSRMGSRIVTAAGAPEPFRVDGVEDGCSRASCHRRQWQQRLLSLPPQIGPTIVATVVAPEAFTEVADDSSSDGGGRRQWWRERKGKEKRGEGSEDETNS

SEQ ID NO: 162409 - protein, 99 aa, Oryza sativa
  Clone ID: PAT_MRT4530_61503C.1.pep
YRQWGAYHTEDCLITAAVRAFSISHSLYTPSLSATLHIILRLFGGRSMGLVNLYTLGKLDVGYCFVTNLCMYSRSAKSLCFTLTFCWKHLLWNDAQDNL

SEQ ID NO: 162410 - protein, 148 aa, Oryza sativa
  unsure (1)..(148): unsure at all Xaa locations
  Clone ID: PAT_MRT4530_61504C.1.pep
MGKNISQTAAGEGGRRRRRRRRAAPPPESSSAGSPRAGPTRASSGTSTSSARTQGRGGGRGGGGXGAAGAESGAGGRRGEAGDGRQGRGWRARRRGRRRAPRPRMAGAETRLAVGAEARPATGHPVRLLRHRSPGSAGKLRLNSRTLG

SEQ ID NO: 162411 - protein, 118 aa, Oryza sativa
  unsure (1)..(118): unsure at all Xaa locations
  Clone ID: PAT_MRT4530_61505C.1.pep
TLRFMIPCVTSRLSRSRLHLLHRTPPRWRSDEPPAATAARAGGXPRWXXWDPFPPXXGXIXGPXGXSFFXKXXPPRGXTPXFXPRXGXKQXGXXXXXXXFFXXPPPPQKKKKKXXGGG

SEQ ID NO: 162412 - protein, 71 aa, Oryza sativa
  Clone ID: PAT_MRT4530_61506C.1.pep
MGQEYYCNDVWGREEDRRRGEPYDRRVTCESDDVTRWTVPLSSHVSAPRFDLLMRSKVPRAAGLAAPPVRS

SEQ ID NO: 162413 - protein, 98 aa, Oryza sativa
  Clone ID: PAT_MRT4530_61507C.1.pep
YITYKEVAMGEKYHLLYSIIAVRKAMDDMLTFLFYWIDIPLDDMATEDTIPVWGLPYMTTAVTNMNAILQTRNAHIMPGWRLLENAMAMHRMRVTMSG

SEQ ID NO: 162414 - protein, 93 aa, Oryza sativa
  unsure (1)..(93): unsure at all Xaa locations
  Clone ID: PAT_MRT4530_61508C.1.pep
LRYTLRKSITXKNRVRSPTRIGLGLYHIVRGPISPSSTWRSPDPRYKRDPLGXPKASNLTANISTTAYEVEAYRSKTPGXSSRINSTTVSSVS

SEQ ID NO: 162415 - protein, 72 aa, Oryza sativa
  Clone ID: PAT_MRT4530_61509C.1.pep
DLTNESISNVIHSANSDWLQEVTNIVINSCWSNLIKPNHTAWLKTIGQPQPCTVLSVGFANSTCNLNMYSDR

SEQ ID NO: 162416 - protein, 38 aa, Oryza sativa
  Clone ID: PAT_MRT4530_6150C.1.pep
WDPSPALYAFLLCYSRNALRFVVKLCAFSLKKMEAGSL

SEQ ID NO: 162417 - protein, 218 aa, Oryza sativa
  unsure (1)..(218): unsure at all Xaa locations
  Clone ID: PAT_MRT4530_61510C.1.pep
MDRPQVVTENYANAVTCLFHVLFKAGALVFYILFSLFVKSFVIIFVITVFLAALDFWVVKNVSCRILVGMAWWNEIDXTGQLACGKFEXLDGEALARVNNKGLVGCSGGTLYLDCCLSASMGRLLTRMTKKDSWLFWWTLYLTAAAWIILGIFSLIRLEADYLLVVGVCLTLSLANIVGFTRCNKDAKKNIRGYFEGHAQNAITSRITSTLQSAFGVI

SEQ ID NO: 162418 - protein, 155 aa, Oryza sativa
  Clone ID: PAT_MRT4530_61511C.1.pep
MVVGAARRPEHPGGHLDDEPPPQDGLAPNGVHQGHRLDGSTPESLHAAGVRVGDGAFLWSGDASSGVVLRLGWTVCLLCWTGVGAPLWSARSARRSASFALGAAMCCRHMRWVCPVGFPRFLHDFIRRLGNVKSQHNFATRSFAPHHASCMDLWE

SEQ ID NO: 162419 - protein, 36 aa, Oryza sativa
  Clone ID: PAT_MRT4530_61512C.1.pep
GLMVLHFMHRICILYVILMNSLFILVVIYNHGYEKL

SEQ ID NO: 162420 - protein, 70 aa, Oryza sativa
  unsure (1)..(70): unsure at all Xaa locations
  Clone ID: PAT_MRT4530_61513C.1.pep
MAAPSSLTGDSIHDDTIKVITDAVRSSFQHPPGFDDAQATAVAGDAAERAXTAARTALAPVFLGIFQPAP

SEQ ID NO: 162421 - protein, 150 aa, Oryza sativa
  unsure (1)..(150): unsure at all Xaa locations
  Clone ID: PAT_MRT4530_61514C.1.pep
MEAAAVLKHRRRRQRVLLEPSLSLCCGGFLSASARMAEARRSQLGGNPNPRAMQRRFGVASEEGSSSLPGLIGATRYPIGPSGLTLVRCPRCGSAVVECRSWRXGGRVFFKCEDNEQFVPNCCTFFKWIKSYKKMVEAMELNYPDEAVQT

SEQ ID NO: 162422 - protein, 426 aa, Oryza sativa
  Clone ID: PAT_MRT4530_61515C.1.pep
MADLTDMGCCSCFGFLRKPRVSVSRPRDADGILSEDLLNHKSAEDPDGSFYTGDDPDRSFYDRDDLDRSFYNGDDPDRSFYDGDDPDHLYGSDDGQPRKRSEDIILSRAQNGFACRESLVKETKKVFRSEDENGSKMVNQYVHLGKIGSGSYGKVVLYRSMKDGKLYAVKVLNKSYMMKVRVVRSETAMTDVLREVSIMKMLDHPNIVNLIEVIDDPNADKFYMVLEYVEGKMVCDNGLGEATSRNYLRDIISGVMYLHSHNIIHGDIKPDNLLVTSTGSVKIGDFSVSQIFEDDDDLLWRSPGTPVFTAPECCQGSAYHGRAADTWAVGVTLYCMITGHYPFLGDTLQETYDKIVNDPVQIPDNMNPQLADLLERLLCKDPANRITLQAVGEHPWVAGDQGPVVEYFCRCGFGRRKRDDLKGEVQ

SEQ ID NO: 162423 - protein, 142 aa, Oryza sativa
  Clone ID: PAT_MRT4530_61516C.1.pep
GAPRFRVFFFFLGPCGERLWAFLWLFPPGVLPLGTFPVNCRCRFFGGRPRFFFAFSPPEGNWLLQGFRFPPGFCSRARGASPGARVWFPPKGWGPGFFWVKRGFFFPPFGPFFNRALFPFFSLGFPLPNFPPFFGGWGFFPP

SEQ ID NO: 162424 - protein, 364 aa, Oryza sativa
  Clone ID: PAT_MRT4530_61517C.1.pep
MAAILARAGATAAGGLRSGGDVPRRRNMVAIVAATTTTGAGPAVPKEGSLERPAWSGETPLSRLVGALIAFKPLYSLMKLASREVIIRTAEKSNVPWREMTKQVLESDVYEVFDRIRDLNLVYPDYYLNPFHAYDEGNLSWLAAAEAEPATMSIAKRAIPDAGSIEEANQIVRGNWLNAIEEHHLKYSGNCQINDILDIGCSVGVSTRYLAEKFPSARTVGLDLSPYFLAVAAHKEEKLSRQNPIRWVHANGEATGLPSNSFDLVSLAYVCHECPARAITGLVNEAFRLLRPGGTIALTDNSPKSKVLQELSPVLFTLMKSTEPFLDEYYMLDLEETMRQAGFVNVHSILTDPRHRTVTATVPF

SEQ ID NO: 162425 - protein, 471 aa, Oryza sativa
  Clone ID: PAT_MRT4530_61518C.1.pep
MYKEDAYGGSYQKSWQQNAPPPPPEHVVKMHPSPPAAYANRPPQPPSTPPAAMINSSGGSGSYSGGEILPPPSPGAALGFSKSTFTYEELLRATDGFSDANLLGQGGFGYVHRGVLPTGKEIAAKQLKVLSGQVEREFQAEVEIISRVHHKHLVSMGGYCISGGKRLLVYEFVPNNTLEFHLHGKGRPTMEWPTRLKIALGAAKGLAYLHEDCHPKIIHRDIKASNILLDFKFESKVADFGLAKFTSDNNTHVSTRVMGTFGYLAPEYASSGKLTEKSDVFSYGVMLLELITGRRPVDTSQTYMDDSLVDWARPLLMQALENGNYEELVDPRLGKDFNPNEMARMIACAAACVRHSARRRPRMSQVVRALEGDVSLEDLNEGVRPGHSRYFGSYSSSDYDSGQYNEDMKKFRKMAFTNNNDTSSQYSAPTSEYGQIPSASSSEGQQTQEVESRTTKRGGYSGYSSGYSGAS

SEQ ID NO: 162426 - protein, 134 aa, Oryza sativa
  Clone ID: PAT_MRT4530_61519C.1.pep
MAAVRWLVQAVVALVAVLGRAGVLGREDMSARMIGTSLWLRMCHGQFCQLCRHFGTLLLLFGFIYIEKALMGPYIKYRLKKSIENTQLQMIWVNWIHGNANMPIQKNASAMRISATCYWNLEKLKPIDEFPDAS

SEQ ID NO: 162427 - protein, 95 aa, Oryza sativa
  Clone ID: PAT_MRT4530_6151C.1.pep
MGEGGVRQGREGKKLGDRVHLGVMGELELATIKNDTNRRSPQKEMGPIDDCDPDASYPSSTKRRWQHQPSNSCVTRDRASALSPSLPAVVNVKDR

SEQ ID NO: 162428 - protein, 742 aa, Oryza sativa
  Clone ID: PAT_MRT4530_61520C.1.pep
MPRVCAAPRAPPPPCPCHVGVGPLRPRWRASRHGPLRAAGQEQLLTALREQPDPDAALRMLNAALARDDFAPGPEVYEEIIRKLGAVGALDLMKVLVAEMRREGHQVKLGVVHSFLDSYEGQQLFDDAVDLILNQLQPLFGIQADTVVYNHLLNVLVEGSKMKLLESVYSEMGARGIKPDVVTFNTLMKALCRAHQVRTAVLMLEEMSSRGVAPDETTFTTLMQGFVEEGSIEAALRVKARMLEMGCSATKVTVNVLINGYCKLGRVEDALGYIQQEIADGFEPDQITYNTFVNGLCQNDHVGHALKVMDVMVQEGHDPDVFTYNIVVNCLCKNGQLEEAKGILNQMVDRGCLPDITTFNTLIAALCTGNRLEEALDLARQVTVKGVSPDVYTFNILINALCKVGDPHLALRLFEEMKNSGCTPDEVTYNTLIDNLCSLGKLGKALDLLKDMESTGCPRSTITYNTIIDGLCKKMRIEEAEEVFDQMDLQGISRNAITFNTLIDGLCKDKKIDDAFELINQMISEGLQPNNITYNSILTHYCKQGDIKKAADILETMTANGFEVDVVTYGTLINGLCKAGRTQVALKVLRGMRIKGMRPTPKAYNPVLQSLFRRNNIRDALSLFREMAEVGEPPDALTYKIVFRGLCRGGGPIKEAFDFMLEMVDKGFIPEFSSFRMLAEGLLNLGMDDYFIRAIEIIMEKVDLRESDVSAIRGYLKIRKFYDALATFGRFLEINNPQWSYR

SEQ ID NO: 162429 - protein, 506 aa, Oryza sativa
  Clone ID: PAT_MRT4530_61521C.1.pep
MAASVVSDKSSGGASLLRPSRVLFLAVLSTAFWSVIFYAHHSAVQGNATMASVLLRPSSFSRPLLTSFRLIGGGLDRCAGRRVYMYELPPRFNAELVRDCRLYSRSMDVCKLVVNDGFGPALPGGGALPERDVYDTDQYMLALIYHARMRRYECLTGDAAAADAVFVPFYAGFDAAMNLMKSDLAARDALPRQLAEWLVRRPEWRAMGGRDHFMVAARPVWDFYRGGDDGWGNALLTYPAIRNTTVLTVEANPWRGIDFGVPFPSHFHPTSDADVLRWQDRMRRRGRRWLWAFAGAPRPGSTKTVRAQIIEQCTASPSCTHFGSSPGHYNSPGRIMELLESAAFCVQPRGDSYTRKSTFDSMLAGCIPVFLHPASAYTQYTWHLPRDYRSYSVFVPHTDVVAGGRNASIEAALRRIPAATVARMREEVIRLIPRITYRDPAATLVTFRDAFDVAVDAVLDRVARRRRAAAEGREYVDVFDGHDSWKHNLLDDGQTQIGPHEFDPYL

SEQ ID NO: 162430 - protein, 97 aa, Oryza sativa
  Clone ID: PAT_MRT4530_61522C.1.pep
KLNLPQIPFGLKPSDLQWVKPRDHTLVFFTTGITRAFPGNISKPPCLRGGGIILKGGIRGGPSTSNLINRWLIKALPIIQHRSKHRQTDGQTTVYMP

SEQ ID NO: 162431 - protein, 66 aa, Oryza sativa
  Clone ID: PAT_MRT4530_61523C.1.pep
FITPFFWGFIFSMMFTRSLFFNSLCDYPVFLHGGKTTKTRGIGITIIRWRKQNRGIKERCIRMHRC

SEQ ID NO: 162432 - protein, 68 aa, Oryza sativa
  unsure (1)..(68): unsure at all Xaa locations
  Clone ID: PAT_MRT4530_61524C.1.pep
FXFFFLXXSGEGXXQRTKKYNPRTLFACIHMHDELLGRITLSIILAIYRVVNYRIGGIYIKEEMYLGG

SEQ ID NO: 162433 - protein, 68 aa, Oryza sativa
  Clone ID: PAT_MRT4530_61525C.1.pep
AANRSCLKFRHDVHDYRTQIGLTRKLHFNKPLTQPITRKLHFNKPLTQPITRKLHFNKILIQSNGQLN

SEQ ID NO: 162434 - protein, 449 aa, Oryza sativa
  Clone ID: PAT_MRT4530_61526C.1.pep
MAQQQKKNAHVPKFGNWDNGGNVPYTVYFENARKGKVAAAGKMFNPNDPVDNPEAFSSSIAAPSPSRAPPPPPSHHERAPSDAPPPPPPAPYAGGSPYHRHAAGGGETPPARRGGGRTSGGGGSSYSVEHSPSPSPLHPYSDSGSGSYGGGLVANSRAKGGGGGAPRGNETPTRGSAVPRFGDWDSNPASADGYTHIFNKVREEKQTGQAAGKPAAGLGKGGAAAAGHGNAAKRYHDDDFASTVIPNIIRIMSTASTARSRKRAHDGSRQKVDVINLETTAPVVNTGSQHEALILRGTRTSPIDVEALDDKRRSRKIMRRSVAVVDPEKDTGPGGYGVAGAIFSRGRNFQGAVHVICLSPDREEGTSKPKNVAQTSTTHAKVAPKEPTFTCPVCLNKLDKPSTTNCGHIFCEKCIQAWLKAQKKCPTCRKSLGIKSFHRVYLPTPADYD

SEQ ID NO: 162435 - protein, 35 aa, Oryza sativa
  unsure (1)..(35): unsure at all Xaa locations
  Clone ID: PAT_MRT4530_61527C.1.pep
PDAFVGIIGFDNVSQVQLISFIAAXRPGCEKSGGY

SEQ ID NO: 162436 - protein, 60 aa, Oryza sativa
  Clone ID: PAT_MRT4530_61528C.1.pep
ETRGGEGDSSGGTLRQRRRRWQPRAAGGLVAEEPGEDGARVLQVIHVLVLFLPRILGINQ

SEQ ID NO: 162437 - protein, 70 aa, Oryza sativa
  Clone ID: PAT_MRT4530_61529C.1.pep
NMVLPPLIVDGGPREHSWSTISGGRTMVCVCFCLPIEMIGFIKRSLPHPAAASGLVANLIPHRFFSSSCF

SEQ ID NO: 162438 - protein, 56 aa, Oryza sativa
  Clone ID: PAT_MRT4530_6152C.1.pep
MAWQAVNDNAVRRTDGSEDGEEHDKEDAAKFMELIHEVVLALTLKSARPPTNLIFE

SEQ ID NO: 162439 - protein, 86 aa, Oryza sativa
  Clone ID: PAT_MRT4530_61530C.1.pep
MRIGTMRGKLKLATGAGGYGEIAEIYIPNVLVIHQVGRSWDTKEAIVFTGRDLPGYKNWTPSAPLDQGNWPDAKVAIPLKKMGKRV

SEQ ID NO: 162440 - protein, 62 aa, Oryza sativa
  Clone ID: PAT_MRT4530_61531C.1.pep
NTRWKGNSSTASFLHLHCHGTQFLIAHRNLRIPSLRCGHTYPLLTTTDFPSNEPQECLFLNN

SEQ ID NO: 162441 - protein, 87 aa, Oryza sativa
  Clone ID: PAT_MRT4530_61532C.1.pep
MAASWSESENARFEQALATYDSDNPNRWELIATAVGGGKTADDVRRHYDHLQHDVTTIDDDHSHAAGEALPNGNNNNNTNKGNRNQA

SEQ ID NO: 162442 - protein, 169 aa, Oryza sativa
  Clone ID: PAT_MRT4530_61533C.1.pep
IIREIKEKLGYICLDYEEELVKVSHTNLHDQQFELPDGELIQLRDEQFRCGEVLFNPSLMGKQFCWGEKMCGVQELVDQSIQNSPIDTRRSFYDEILIHGGTSLMNGFEKRLKKELINLAPLDTKISLIMPPPRKESVWLGASIICTMPYCEWTTMGEYKEEGNSILYN

SEQ ID NO: 162443 - protein, 137 aa, Oryza sativa
  Clone ID: PAT_MRT4530_61534C.1.pep
MDTHAKTPLATRPPGTHRTRVSRANTVPTRDGGESPNGPCPAQPQAPLAPPTSTTGGRAPRYTGFRGIARESDGDLCLKPSWSLDYVCRSLNLALPEQGPGVQLKYPTTDRIWYVFKSELSGVKQDRNKEILCIQQE

SEQ ID NO: 162444 - protein, 59 aa, Oryza sativa
  Clone ID: PAT_MRT4530_61535C.1.pep
RSKEPVREAVADDLDGALDESGEPPPFTMESFLWYELPCIYKRNKSEYNTLKMKTRSIM

SEQ ID NO: 162445 - protein, 65 aa, Oryza sativa
  Clone ID: PAT_MRT4530_61536C.1.pep
NFCFPPPSKKKKGTFCCMTFGRSLSWSGRSLTSRSLWTAGLGTSEAIKARDAGRTRGRKRGRTSG

SEQ ID NO: 162446 - protein, 117 aa, Oryza sativa
  unsure (1)..(117): unsure at all Xaa locations
  Clone ID: PAT_MRT4530_61537C.1.pep
EKQTYNHYSTNRGRGDGITGRKCKMNXARTCSPTSNGGLGFLQLERFTRALRFIWLRQEWKSAXKAWIGLETLCDEIDKLLFMAAMRVKIGDSATTKGVGTKVLCNIQEKKRVLVIH

SEQ ID NO: 162447 - protein, 212 aa, Oryza sativa
  unsure (1)..(212): unsure at all Xaa locations
  Clone ID: PAT_MRT4530_61538C.1.pep
LVVSRRAAGRPGPTGPARGVSLCSLTPSAPWVLLRPGGLGCLARERSAGRGDAFAVCFGQGHDNDPSAGSPTETLLRLLLPLNDKVQWTSRXSGAANRPRRRDPNTSPDHSIGRSDGRCVQRAGTXSTRADDSRLLGIPRXRPTIAMIYPHHDEISQDYPGLSAKAIYSLNTSVXARVRPRTSKGITDLLLAQTSGGLKGHSPSKKLSCGRD

SEQ ID NO: 162448 - protein, 80 aa, Oryza sativa
  Clone ID: PAT_MRT4530_61539C.1.pep
MVVDGGAAVASRPSTSRRRAAVTAKPRAVVASRYLLPSSRPASPAAATRPAATRRPATMAADAVARAGSVVFQDASYCLD

SEQ ID NO: 162449 - protein, 257 aa, Oryza sativa
  Clone ID: PAT_MRT4530_6153C.1.pep
YDRSALVRYFSAASASFPTKGGAAAGVEKRIGGARFPQCKQPGKELETFKVSLGGLNGRYACRRAPNNCIPTTITGLNGSLSWCLQQDLSQAVQGNIARWLKKEGDKVSPGEVLCEVETDKATVEMECMEEGYLAKIIHGDGAKEIKVGEIIAVTVEEEGDLEKFKDYKPSTSAAPAAPSEPKAQPEPAEPKVKETEPSRTPEPKAPKTEEASQPGGRIFSSPLARKLAEDNNVPLSSVMGTGPDGRILKADIEDYL

SEQ ID NO: 162450 - protein, 160 aa, Oryza sativa
  Clone ID: PAT_MRT4530_61540C.1.pep
MQQGRLYVSNTGLALASSSSSEVQTGLDRHRDAAVARQSGRVELMMSCLDRFASIGCPLHTGFPRGSDGNSGGAPGGVDGIYGGGAGRHHQWRCIGGQKGGIWSCMPRCAHCTHTGQSYSNDHWFFFLHPSFWCFPLLARCCSAMIIASLADSSRSSSRP

SEQ ID NO: 162451 - protein, 60 aa, Oryza sativa
  unsure (1)..(60): unsure at all Xaa locations
  Clone ID: PAT_MRT4530_61541C.1.pep
GHLRCXACXHFALLRLQIIFVLDSLNSKPILRLVGVLLXLHPFMGNIFCTLVGXSTPQGV

SEQ ID NO: 162452 - protein, 444 aa, Oryza sativa
  Clone ID: PAT_MRT4530_61542C.1.pep
MARLEPEPLPLPLPPSLEMACREPEPLRTLTSTEAVLPHNPAEGHSWVVILLRSCGVAIARRPGLVRRPGLVLVGSHIANVALDQSESYPPYQKIGPRERASSTTCARCLESMGDTQQLLKNLPLFFAVFRFHIPGNFQSKDNVCCKRKEEGNNSEQMSTTPAPPGETSRQIPSRDDAKHEKEAANSSSSSSSEEIDEDDFFQIEGPILSTQYSLSPPPAEGGNRDAKQADEPHDPKRIPSAVFARSKSSTPTDWSITSNESLFSINVGNASFSKDHMFLYGKSGELGANDPLPPLPKQSPSSSPLKGEVATPEKPSTSKEKGDGRGLTDRNGDDNTDYTHSSSHRSDGSTTSFAFPILTGSAKTSGSLKDSHPELARQTTAQLTHPSEMRDENENKETPFPAVVMEAPKVEATPAAAATAPAPPAPPATTKWFPCCSCCPFCC

SEQ ID NO: 162453 - protein, 69 aa, Oryza sativa
  Clone ID: PAT_MRT4530_61543C.1.pep
MIRILPVRPGVLDAYVSRPGTRLTRTIGGAGALNARRKRRSHLPKRASRQGTYNGSLNYQNRCKAGPSA

SEQ ID NO: 162454 - protein, 362 aa, Oryza sativa
  Clone ID: PAT_MRT4530_61544C.1.pep
MAPFMACASPPVLTLALLASCGALLATSMLPARATAGSCLDVGDMVMMDRFRAWQGAHNRSYPSAEEALQRFDVYRRNAEFIDAVNLRGDLTYQLAENEFADLTEEEFLATYTGYYAGDGPVDDSVITTGAGDVDASFSYRVDVPASVDWRAQGAVVPPKSQTSTCSSCWAFVTAATIESLNMIKTGKLVSLSEQQLVDCDSYDGGCNLGSYGRAYKWVVENGGLTTEADYPYTARRGPCNRAKSAHHAAKITGFGKVPPRNEAALQAAVARQPVAVAIEVGSGMQFYKGGVYTGPCGTRLAHAVTVVGYGTDASSGAKYWTIKNSWGQSWGERGYIRILRDVGGPGLCGVTLDIAYPTLTL

SEQ ID NO: 162455 - protein, 246 aa, Oryza sativa
  Clone ID: PAT_MRT4530_61545C.1.pep
MSPPRHRGRLFVIVAAREAEVSTDLAGEIGRAAAMEDVLEGDREERRWEGACGTGRYQKFGWTAGVRRPATGDEAAAAAATSDEAARSASTSPPPTRSGRRPRPTTTSPWDALIAYARALSLIEPPDPTTTTTAAFNSSPPHPRRRPAPPRRLPAAPISGSIDRPCLPSWRRLTCSPSMWPLHVMARFECRVADLVAAAVELYLREGRRLLLLSADPAAFGLCFFLSPKAATIAAITAAAAPPPPV

SEQ ID NO: 162456 - protein, 92 aa, Oryza sativa
  unsure (1)..(92): unsure at all Xaa locations
  Clone ID: PAT_MRT4530_61546C.1.pep
ITSPPLQPPSEQFIPXNILPPADEXSRPKPPPSTLEATNPXALKPFSYQPSQEHQHTTTPHTNVPKLGPPAPTPTXXTGPPGPPHPHRPLPH

SEQ ID NO: 162457 - protein, 365 aa, Oryza sativa
  Clone ID: PAT_MRT4530_61547C.1.pep
MAVPASCLRQPGGRFLVRKKSALPADGARPSGGESAVAVSRWHARRSAASPSRPSTCIPKKLLLARVASISIRSPSPRVGQGLDGRRRWARAGAGVRGEAEEREETMRLGVVAARVGEEEEEASHGDGGAWRRLALGRLAPPADGARPSSGESAAAVSRWPARRSTASPSRPSTSACGELHEDTRRSAMANSLGRIAAVEGGDHICRVVAALIRLSSHHQRRRAAFLPRPSHLSAMSVAAAASSREGCAAADEAERRHSPSAVASRGRRTWRRGDAGAGGGISPAGRAPPLPMRLPLSPGRRHSSSQPAPASPLFFSPAGRRPPAAGPLLLSRLSIVVAASPVIAPPDKEQSERKRGKERRGKER

SEQ ID NO: 162458 - protein, 235 aa, Oryza sativa
  unsure (1)..(235): unsure at all Xaa locations
  Clone ID: PAT_MRT4530_61548C.1.pep
LFMLINEDALWQSLLRRKYVNNXSIIQVVKMSGDSHFLSGLMKRQVLKYVHFHGGLDLXIKFWEDKWIDNSSFKEQYPFLYKLVRRKSASIAIVLNSVTHNVSXRAFVGQNLVLWHNLVAYIVQINLNDNKSMFRWNLHHSGXINFXVHSIYLALINNGYIESNNVLWKLRMPLKIKILSRCLYRSVVYYXGNVYDMSGKVVRKCCFCHKDKTIQHFFFQCHLACLFRCQGHVRL

SEQ ID NO: 162459 - protein, 529 aa, Oryza sativa
  Clone ID: PAT_MRT4530_61549C.1.pep
MFTGSHGNTVDARLIPLAHQIAEGNIVPSAQFSWGSAVLAATYRGFCDACVKTGQREAIFTGCPLLVKLWSYEHFSFGHPYMSVAVAHKDDYADTVDDRPTFGTRWCYGPPQWARIQVHNVYKYFTETFESLRENEVRWTPYTNEEAILRGPNGVSILCYRDEAVMRQMGLYQQVPVPVGLHLPPDVHTMTPWIEAWSQALNDVVHETRAYDHNTYEQYMAWYSSQTRIRLLAPEDPDERGELVRDAKTLWEKLRDGIAGTNQEVMATVDSLRRKGKRIMRLASCRHSSNVYTPATSIRTFEQMPEPQPERVPPHSSAPITSQWQGGFAAFAGPTQSVPLHAPTYGTNPWKAQSIDYGGFRPYTASYGDISSFGGGSSLVPNELRASQTDDAPRVTQPTQPEVDDLQGNNNDPHRSNRERHEPNHRVYEYAKSHSVDTISSCLKAGIDAEYHQETLEILKLAIKSTKKLWAVMLDTVGPELQVVNKSKASISLLFSPLTRGRRPPHMFQKTKPNLHVYTGGAPMARPIV

SEQ ID NO: 162460 - protein, 45 aa, Oryza sativa
  Clone ID: PAT_MRT4530_6154C.1.pep
FYPLIHTYPPPVLLAVADGESGRSSPTPALYKVLHFLSPMFSEIN

SEQ ID NO: 162461 - protein, 182 aa, Oryza sativa
  Clone ID: PAT_MRT4530_61550C.1.pep
KEEEEEIRRENPWAAAGNGGEAAVVGEGEGATASEVVEKMVSQAVVEKALWEAFEKVVSEAVEKKSEGAMASEVVETMVSQAVVEKALWEAFEKVVSEAVEKKGGGAVVSEGAVEKVESEVVEEKVLDSAEKASASAGEEEEEEDKEEEEQQQEEEIRPEADSELSSLHVSSDSELSSLHVS

SEQ ID NO: 162462 - protein, 113 aa, Oryza sativa
  Clone ID: PAT_MRT4530_61551C.1.pep
PFPQGKYFAGIAKKPKGAALDLPWANSIGGVGVPTPNIVRHFIKLPTIPTNRQKLGLFFCGVFPCYVASPWNFSFPDALYNSVLPFGQLVVIWSKFCYCIIGSPLKKIGYWPG

SEQ ID NO: 162463 - protein, 1459 aa, Oryza sativa
  Clone ID: PAT_MRT4530_61552C.1.pep
MAGMSAFRVYFGEGEIMENESGVDLSNFRRCTLYHPNPDTLTMPEVWRQGYEYVMLVQACQGRVPTKNAAGQSSNCEELGSSSHEEDEVVAPHRGGDVGPDIQNLSIQGDEVVNRHHTDEADEGEDIPAIVEEIERVDRHAVEDEENLAAKENDDEDEQEVEEMQRQFRVVKSNKTKYMVVCETEGCTFRLHGHVPKYESYRIVSKLQEHSCLIRDTRESHRNLIAAYVANKYYNEIIEGDDLPVQHIIKLVEKGEQYTISYHKAWRAKQKAMEKRYGTFEEAYDTLPQMLNILKSRNPGTNVAVQDRESIRPPNYLVMQRAFFAFGACIHVFQCSRLVLCVDGTFLNGKYRGQISTAVGADANNQIILVAFAFVESENYESWLCRRLMNMFKQLCKANQSTKFDELWKQLDQATRTHIRSKQTNNNPQDVHVPQALEPMDDLIPSNGKKCRSSKNIKCFTHWIECEPNDKWALLHDTNGARHGIMTTNLAEAYNAVLRKLRPLPLTAIVEGIMHRTTMWMKTRRAAALQQMSNAQTPFCKKMAEYLQEKANKARFHTVITTGNVRRRWEVTCRTKGGFGSSTGVITHEVTLGHESDNTCSCSCNKPKLLHKPCSHVLATCDKIKLDSTSYVSTFYLKDRVLNAWSAEILGWRSLQHLGETGGDKRIYVPDLNLLKAGKGRKQTRCLRNDMDASEVGGPVRRCEDCLQYGHRTRDCKNNKEGASSSMEPRQQHMEDEWPYPLLSKEIDARHRAKKISDGNSCSSLAVLIPRTAGWWGIDPRWKPRCINGLPLASQAIVLPDPPEDWRDDIVSRYACILPRYATGDTDDDEDKIFFSEKETHGPTLKWLSQFEVRYMPDDVQEYQLTLYLEAYLLWLFGWVMFTGSHGNTVDARLIPLARQITEGNIAPSAQFSWGSAVLAATYRGFCDACIKTGQREAIFTRCPLLVMLWSYERFSFERPYMSVAVAHKDDYTDAVDDRPTFGTRWCYGLWARIQVHNVYEYFTEAFESLRENKVRWTPYTNEEAILRAPHGVSILCYRDEPYWMTQKMLVYDIFVEGYNVQGQKRQADSKYHRSMHSRMTPWIEAWSQALNDVVQETRAYDHNNYELYMAWYSSQTRIRLLAPKDPDKRGPPTIDQIYDMQLAPSTHLTILLPFKYFVASTDIAGELKRDAKTLWKKLRDGMAGTNQEVMAAVDSLRRKGKRIMRLASCRHSSDVYTPATSRRTFETMPERPSTSSRPSTSARPSASARRSSDGCAGHNRNRGNVNGLSRASYASCKATNDSSNGSRCANLTLARRICTFCRAYSVGSTASTYIWHQLMARTIHGLRCTSFDGGVQGYMDLLQQGDWLFGQYSSHPNEIPYMQAPSTGSFRPEPMSGFRPYTASYGDMSSFGGGSSPATQPEVGEGNDNDPRRSNRERHEPNRMSLSGPRHAAGQRKKTTKKRGETSRTTTDHDDDDE

SEQ ID NO: 162464 - protein, 1261 aa, Oryza sativa
  unsure (1)..(1261): unsure at all Xaa locations
  Clone ID: PAT_MRT4530_61553C.1.pep
MAGMSAFRVYFSEGEIMENESGVNLSNFRQCTLYHPNPDTLTMPEVWYWLTCTFSLDPGIYSVNVRVMWSRSANNIRWELKNVTRSKAWQDWLAGCRRRGYEYVMLVQACQGRVPTESAAGQSSNREELGSSSHEEDEVVAPHHGGDVGPDIQNLSIQGDEVVNRHPTGEADEGEDIPAIVEEIERVDRHAIEDEENLAAEENDDEDEQEVEEVPMPASWNLEDPGYIAENSCHDSIWFYGDGQINLGAMFRDKTGLQDAVKSWSFKTQRQFRVVKSNKTEYTVVFRLHGHVPKYESYWILSKLQEHSCLIRNTRESHRNLTAAYVANKYYKEIIEGDDLPVRHIIKLVEKGEQYTISYHKAWRAKQKAMEKRYGTFEEAYDTLSQMLNILKIRNPRTYVAVQDTGVNSSSKXLVMQRAFFAFGACILAFQCSRPVLCVDGTFLTGKYRGQILTAVGADANNQIIPVAFAFVESENYESWLWFLQHLKWGVVQKRTSICIIHDRNAGLLKAIKELQEDGDGAYYWPDMHSRWCMRHMGANFFKQFNNRRLMNMFKRLCKANQSTKFDELWKQLDEVTRTHIRSKQTNINLLDVHVPQALEPMDDLIPSNGKKRRSSKNIKCFTHWIECEPNDKWALLHDTNGARHGIMTTNLAEAYNVVLSKLRPLPLTAIVEGIMHRTTMWMRTRRAAALQQMSNAQTPFCKKMAEYLQEKANKARFHTVITTGNVRRRWEVTCRTKGDFGSSTGVITHEVTLGHESDNTCSCSCNKPKLLHKPCSHVLAACAKIKLDSTSYVSTFYLKDRVLNAWSAEILGWRSLQHLVETGGDNRIYVPDLDLLKAGKGRRQTRRLRNDMDASEAGGPVRRCENCLQYGHRTRDCKNNKEGLLTFVQMTQARMHYDAREPKQKQMGAHRKRRQNIDKSLLMALVDRWRPETHTFHLPCGEMTITLQDVSMLMGLPLAGQAIVLPDPPKDWRDDIVSRYACILPWYATGDTDDDEDKIFFSEKETHGPTLKWLSQFEVRYMPDDVQEYQLTLYLEAYLLWLFGWVMFTGSHGNTVDAKLIPLAHQIAEDRAKRFSFGRPYMSVAVAHKDDYTNAIDDRPTFGTRWCYGPPQWARIQVHNVYEYFTEAFESLRENEVRWTPYTNEEAILRAPHGGYNVQRVMRQMGLYQQVPVPVGLHLPPDVHTQKRQADNRRPGHTTTTLTNNTWPGELVRDAKTLWEKLRDGTGGYQPGSYGCGRLPPSKRKANHAARIVPAFLGRL

SEQ ID NO: 162465 - protein, 1248 aa, Oryza sativa
  unsure (1)..(1248): unsure at all Xaa locations
  Clone ID: PAT_MRT4530_61554C.1.pep
MAGMSAFRVYFSEGEIMENESGVDLSNFRQCTLYHPNPDTLTMPEVWYWLTCIFSLDPGIYSVNVRVMWSRSANNIRWELKNVIRSKAWQDWLAGCRRRGYEYVMLVQACQGRVPTENAAGQSSNREEMGSSSHEEDEVVAPHHGGDVGPDIQNLSIQGDEVVNRHPTGEADEGEDIPAIVEEIERVDRHAVKDEENLTAEENDDKDEQEVEEVPMSPSWNLEDPGYIAENSCHDSIWFYGDGQINLGAMFHDKTGLQDAVKSWESHCNLTAAYVANKYYKEIIEGDDLPVRHIIKLVEKGEQYTISYHKAWRAKQKAMEKRYGTFEEAYDTLPQMLNILKSRNPRTYVVVQDRESILCIRSMHSCVPVLKASAVCRRRWSMWYMGANFFKQFNSRRLLNMFKRLCKANQSTKFDELWKQLDEGTRTHIRSKQTNNNPQDVHVPQALEPMDDLIPSNGKKRRSSKNIKCFTHWIECEPNDKWALLHDTNGARHGIMTTNLAEAYNAVLHKLRPLPLTAIVEGIMHRTTMWMRMRWATALQQMSNAQTPFCKKMAEHLQEKANKARFHTPKLLHKPCSHILAVCAKIKLDSTSYMSTFYLKDRVLNAWSAEILGWRSLQHLVETGGDKRIYVPDLDLLKAGKGRRQTRHLRNDMDASEAGGPVRRCEDCLQYGHRTRDCRNNKEDTSSSMEPREQHMEEEWPYPLLSKEIDARHRAKKISDGNFCSSLAVLIPRTAGWWGIDPRWKPRLSAAGLLTFVQMTQARMHYDAREPKQKQMGAHSKRRQNIDKSLLMALVDRWRPEXTFHLPCGEMTITLQDVSMLTGLPLASQAITMMRTKYFSLKKXTHGPTLKWLSQFELFGWVMFTGSHRNTVDATLIPLARQIAEGNIAPSAQFSWGSVVLAATYRGFCDACIKTGQREAIFTGRPYMSVAVAHKDDYTDAVDDRPTFGTRCCYGPPQWARIQVHNVYEYFTEAFESLRENEVRWTPYTKEEAILRAPHGVSILCYRDEAYWMTRKMLVYDIFVEGYNVQRVMRQMGQYQQVPVPVGLHLPPDVHTQKRHCMQKRQADNRYRRSMHSRMTPWIEAWSQALNDVVQETRPYDHNTYEQYMAWYSSQTRIRLLAPEDPDEQGPPTIDQIYDMHLAPPAHLTTDIVGELVRGAKTLWEKLRDGIAGTNQEVMAAVDSLRRKGNAYGPSHASYASCKATNDSSNGSRCANLTLARRICTICRAYSVGSTALSRPGKLPFPER

SEQ ID NO: 162466 - protein, 85 aa, Oryza sativa
  unsure (1)..(85): unsure at all Xaa locations
  Clone ID: PAT_MRT4530_61555C.1.pep
LGKTRSGKTHTAGFIILKTFXIKGRKYIVQKSMRLPSWDLAIMSPLVFHHGSTKGHLACGGLNKVRKHLHLGRAQMPPNRRRWCH

SEQ ID NO: 162467 - protein, 168 aa, Oryza sativa
  unsure (1)..(168): unsure at all Xaa locations
  Clone ID: PAT_MRT4530_61556C.1.pep
TQEHSCLIRNTRESHRNLTAAYVANKYYKEIIEGDDLPVRHIIKLVEKGEQYTISYHKAWRAKQKAMEKRYGTFEEAYDTLSQMLNILKIRNPRTYVAVQDRESXSSSNYLVMQRAFFAFGACILAFQCSRPVLCVDGTXLTGKYRGQNIQLLVRMXTPDIPVAFAFV

SEQ ID NO: 162468 - protein, 1116 aa, Oryza sativa
  Clone ID: PAT_MRT4530_61557C.1.pep
MAKAGKPRRYSESKGISGEGILGELQRLRHDEFGIKEAQQAAPGLLGPFAIDQAQPISPLKAHIEINFEAAIVIRARWLKRSRRNLINAACQGRVPTESAAGQSSNREVLGSSSHEEDEVVAPHRGGDVGPDIQNLSIQGDEVVNRHPTGEADEGEDIPAIVEEIERVDRHAVEDEENLTAEENDDEDEQEVDELPMPASWNLEDPGYIAESSCHDSIWFYGDGQINLGAMFRDKTRLQDTVKSWSFQMQRQFRVVKSNKTEYTVVCEMEGCTFRLHGHVPKYESYWIVSKLQEHSCLIRNTRESHRNLTAAYVTNKYYKEIIEGDDLPVRHIIKLVEKGEQYTISYHKAWRAKQKAMEKRYGTFEEAYDTLPQMLNILKSRNPGTYVAVQNRESIRPPNYFVMQWAFFAFGACIHAFQCSRPMLCVDAVGADPKIIPVAFGFVESENYESWLWFLQHLKWGVVQKHTLICIIHDQNAGLLKAIKELQEDGDGAYYWPDMHSHWCMRHMGAKFFKQFNSRQLMNMFKRLCKANQPTKFDELWKQLDEGTRTHIRSKQTNNNPQDVHVTQALEPMDDLIPSNGKKRRSSKNIKCFTHWIECEPNDKWALLHDTNGARHGIMTTNLAEAYNAVLHKLRPLPLTAFVEGIMHRTTMWMRTRRAAALQQMSNAQTPFCKKMAEYLQEKANKARFLTVITNGNVRRRWEVTCRTKGGFGSSTGVITHEVTLGHESDNKCSCSCNKPKLLHKPCSHVPGRDRVLNAWSAEILGWRYLQHLVDTRGDKRIYVPDLDLLKAATYRGFCDACIKTGQREAIFMGCPLLVMLWSYELFSFGRPYMSVAVAHKDDYTDAVDDRPTFGTRWCYGPVHNVYEYFTEAFESLRENEVRWIPYTNEEAILRAPHGVSILCYRDEAYWMTRKILVYDIFFEGYNVQRVMRQMGLYQQVPVPVGLHLLPDVHTEKRQADNRGNVNGPSCASYASCKATYDSSNGSRCANLTLARRICTICRAYSVGSTACTYIWHQPMARTIHGLRCFGGGSSSVPNELRTSQIDDAPHVTQPTQQEVGEGNDNDPRRSNRELHEPNRLSLSGPRHAARARKKTTKKRAGTSRTTTDHDDDDE

SEQ ID NO: 162469 - protein, 149 aa, Oryza sativa
  Clone ID: PAT_MRT4530_61558C.1.pep
MATTTAALAPPSTSTSSVLLPSAAAAAAARCLGPLPRRARLRTARHVALTPRDLSAEDVAAEEAAVAPKIGKRVRVTAPVRVYHVMKAPDLDIKGMEGVVKQYVAVWKGKRITANFPFKVEFHLSVEGQDKPVRFFVHLREDEFEFIDE

SEQ ID NO: 162470 - protein, 717 aa, Oryza sativa
  Clone ID: PAT_MRT4530_61559C.1.pep
MQAVERRKKRHVCISYYYIMGVFEEKEIGEIGKIRKTSEINFEAAIVIRASWLKRSRRVLINAACQGRVPTENAAGQSSNREELGSSSHEEDEVVAPHRGGDVGLDIQNLSIQGDEVVNRHPIGETDEGEDIPAIAEEIERVDRHAVEDEENLAAEENDDEDEQEVEELPMPASWNLEDPGYIAENSCHDSIWFYGDGQINLGAMFRDKTGLQDAVKSWSFQMQRQFRVVKSNRTEYTIVCETEGCTFRLHSHVPKYECYWIVSKLQEHSCLIRNTRESHRNLTAAYVANKYYEEIIEGDDTACAAHNKTGGESTFLTGKYRGQILTAVGADANNQIIPVAFAFVESENYESWLWFLQHLKWGVVQKRTSICIIHDGNAGLLKAIKELQEDGDGAYYWPDMHSRWCMQHMGDNFFKQFNSPRLMNMFKRLYKENQSTKFDELWKQLDEGTRTHIRSKQTNNNPQDAYNAILRKLRPLPLTAIVEGIMYRTTMWMRTRRAVTLQQMSNAQTPFCKKMAEYLQEKANKARFHTVITTGNIRQSAKILGWRSLQHLVETGGDKRIYVPDLDLLKADMEEEWPYPLLSKEINARHRANKISDENSCSSLAVLIPRTAGWWGCVHAHGAAPSRPGNCTSGPSEDWRDDIVSRYACILPQYATGDTDDDEDKIFFSEKETHGPTLTWLSQFEVMFTGSHGNTVDARLILLARQIAEDQSLYRG

SEQ ID NO: 162471 - protein, 548 aa, Oryza sativa
  Clone ID: PAT_MRT4530_6155C.1.pep
MSAAHLLRHSRKLRTLRDALDYDRSALVRYFSAASASFPTKGGAAAGVEKRIGGARFPQCKQPGKELETFKVSLGGLNGRYACRRAPNNCIPTTITGLNGSLSCGQVSSARSFSSSADLPPHQEIGMPSLSPTMTEGNIARWLKKEGDKVSPGEVLCEVETDKATVEMECMEEGYLAKIIHGDGAKEIKVGEIIAVTVEEEGDIEKFKDYKPSTLAAPAAPSEPKAQSEPTEPKVKETEPSRTSEPKAPKTEEASQPGGRIFSSPLARKLAEDNNVPLSSVMGTGPDGRILKADIEDYLASVAKGGKREALAAPGLSYTDVPNTQIRKVTANRLLSSKQTIPHYYLTVDARVDNLIKLRGELNPLQESSGGKKISINDLVIKAAALALRKVPQCNSSWMSDFIRQYHNVNINVAVQTEHGLFVPVIRDADKKGLGTIAEEVKQVAQRARDNSLKPEDYEGGTFTISNLGGPFGIKQFCAIINPPQSAILAIGTAEKRVIPGSVDGQYEFGSFMSATMSCDHRVIDGAIGAEFLKAFKGYIENPNSMLL

SEQ ID NO: 162472 - protein, 190 aa, Oryza sativa
  unsure (1)..(190): unsure at all Xaa locations
  Clone ID: PAT_MRT4530_61560C.1.pep
HKPCSHVLAACAKIKLDSTSYVSTFYLKDRVLNAWSAEILGWRSLPHLVGTWGDTRIYVPDLDLLKAGXGRRQTRRFKKDMEASKAEGPCRYGREWPYSLLSKEIDAXHRAKKIYDGNSCSSLAVLIPRTAGWWGIDRRWEALSAAGLLTFVQMTQAGAHRKRRQNIDKSLLMALVDRWRPETHTFHLPC

SEQ ID NO: 162473 - protein, 149 aa, Oryza sativa
  Clone ID: PAT_MRT4530_61561C.1.pep
MEVGTKRKGEGGTIVYARGQSPSCCHLDLERGRAEGIKKMVVARSRGSHMNEEEQMKQKPQLPSSLPSTLRRAPFAHEDAICHVSIVASCIVRVFIIGLAEDMSLRGSTSLLLPAASSNLRHAARRQVASGGEKGDRRQEAVEESLRFG

SEQ ID NO: 162474 - protein, 124 aa, Oryza sativa
  Clone ID: PAT_MRT4530_61562C.1.pep
MAEYLQEKANKARFHTTFSLKDRVLNAWSAEILGWRSLQHLVETGGDKRIYVLDLDLLKAGKGRRQTRRLRSDMDAFKTGGPVRRCEDCLQYGHRTRDCKNNKEGTSSSMEPRKQRARRNRRGS

SEQ ID NO: 162475 - protein, 236 aa, Oryza sativa
  Clone ID: PAT_MRT4530_61563C.1.pep
MQVIDLVLKSSYPFRTTDRLNGVWFLVVLQVGNRFVGLADTLQFVYVLERHNSVWTRYETTSRCTDLTAKIIISGFVVLDRRSFMISDAATFDCLLLNIVKACQWYRYGALFVRSLCIHGFVYTLFDGGILAFELVVSENDGSYYLDAPIFLRAWSKIVRERSMICFASVGQDDDDDHSCDHCLVFCLARGGYPRAGYSSTVRKKLYDDVQITMIQVMTRETGRGTREPVRPPRGW

SEQ ID NO: 162476 - protein, 95 aa, Oryza sativa
  unsure (1)..(95): unsure at all Xaa locations
  Clone ID: PAT_MRT4530_61564C.1.pep
DDPQPXRHSPPALHPAVVPEYPPPESDADESWXWSQIKAEXRXDXDAEPXLXXFXYXTVLSHXSXDRSLAFHXANKLCSXTLLSTXLYDLXXXSF

SEQ ID NO: 162477 - protein, 150 aa, Oryza sativa
  Clone ID: PAT_MRT4530_61565C.1.pep
MVDQIAIGFVDMVHSTSVWWAGKNRSPSMRWEHAWLGLSVHPGDLILPFLLSQGVLCAVKPPSGSSIRRLQAVKPPSGSSIRRLQASPFEGDSLLRFYILYSLYGLRFRYARALPGGMVAVGVSFVSLLNAAACHCRLPLVSYLWELDGD

SEQ ID NO: 162478 - protein, 887 aa, Oryza sativa
  Clone ID: PAT_MRT4530_61566C.1.pep
MGRRKERRLAAKAAAGGRRVKLDLFLDPSPGGTPSKEGERGENHDQQTGVPTSPSSSDKKENPLALLGQYSDDEEEEEAADQPNDETEANPADAGVKITHERGDLTRNEGDAQSDLAGSANVQQELTEADDKKCTGNIAEENVVAIKPTLEDGTATATEAIPDSSGMQIVGDIGGNWKTIMHEQSNQCYYWNTVTGETSWEIPNVLASEIAADSVTSASAPTHVDYSMEAQAHALTHNAVEAYPSDISVLNGSVAYATLGMGQPTHDAYAYAGAVTSHESMDIDPLQLARYGEELLQRLKPLERLHGSIYNVELLKREIEIRISDCNALSSYGSSLLPLWLHAEVHLKQLEFSVSKLETSYSTTEPRHPEKADTEHKTPNEAEVMMPPSNGEGLKSEVSTDVMMDGNVKNEEPFSTSSIQKSEENDTTTVPSKIESDNDEDMDVDMEVDDDNVEEHKHSNSTPIKEYPPSEQVQSPALLLLDGSAAPLEDSDIPPPPPEDEWIPPPPPENEPAPPPPPEEPAVSSVSTETIPQSYVDQANLVYTVPGMEYYAAAGTEGTHASYYMQTSEPHVVQAHQNGYYAPVSASGISIPVDATSIAPVPVSYYSYPSVTMAATGEAAEPSGYYAASVSATSSSVLDNTTSSSNLAPANSSLHSRESDNIISKEAKLASLSQPVGATSASASIQGSSAQASTSTTSQSKVVRSKKRAVSVATSLRSNKKVSSLVDKWKAAKEELRDEEDEEPESALDALERKRQKDIDEWRKQQIASGEAQENANFVPLGGDWRDRVKRRRAEAKKEANSETISAPVSVTDLHKGQPDLAELCKGLPSGWQNILHLINLFTRDVITVEVQLHKDWLVSSMGKAPSSNLWSIFVVTTFLQIPVSFQ

SEQ ID NO: 162479 - protein, 196 aa, Oryza sativa
  Clone ID: PAT_MRT4530_61567C.1.pep
MRPPRGGGGGRFGGGGGGRFGGGGGRGGRFGGGGRGGRGGGGGFRDEGPPAEVVEVSTFMHACEGDAVTKLTNEKVPYFNAPIYLQNKTQIGKVDEIFGPINESLFSIKMLEGIIATSYSEGDKFYIDPMKLLPLSRFLPQPKGQSQGGGRGGGRGGGRGGFRGRGGGGFRGRGAPRGRGGPPRGGGRGFRGRGRF

SEQ ID NO: 162480 - protein, 43 aa, Oryza sativa
  Clone ID: PAT_MRT4530_61568C.1.pep
QFCLDTINIIKTSLRSSATVYLRRIFICTAKSHKPIYEYHNLF

SEQ ID NO: 162481 - protein, 92 aa, Oryza sativa
  Clone ID: PAT_MRT4530_61569C.1.pep
DLMIPLLLQEEAAFLQGLRKVWLWSVSLPTKTRLRREVAQHPLHKFCVGSRLIWFKRLWLIHLSVYQGFQSVSGVEVSFILEFSLSSEPLFL

SEQ ID NO: 162482 - protein, 84 aa, Oryza sativa
  Clone ID: PAT_MRT4530_6156C.1.pep
REQFGKLFIQLNLGSTGEYPSFEYNKANICLLPSSFLMLQAAAPFFLKARFLFTIHRVSIAALLPFAQDTLRVSGLSWKFNPNL

SEQ ID NO: 162483 - protein, 25 aa, Oryza sativa
  Clone ID: PAT_MRT4530_61570C.1.pep
FFFFFFFFFFFFFFFFFFFFFFGTN

SEQ ID NO: 162484 - protein, 103 aa, Oryza sativa
  Clone ID: PAT_MRT4530_61571C.1.pep
MKTTLSKWILYFLPATYGNNDVTLTGEANPSMWPSWVKHERLHARGIRAFFSNTSYTVDADEAACSIGIRRRTTRIQLSCYYKNEQVQNDYENEPDLWVQERL

SEQ ID NO: 162485 - protein, 72 aa, Oryza sativa
  Clone ID: PAT_MRT4530_61572C.1.pep
MTTMRLASSALRRKMTTMRLASSAWLRRPAGFGCRHSARVSAHRCPTPSHQLRVAMGMCDGSGAPVECHGSS

SEQ ID NO: 162486 - protein, 107 aa, Oryza sativa
  Clone ID: PAT_MRT4530_61573C.1.pep
MALLAATARRFSRSLRRFSSYGVSGGEEAGVPADVVEAESPVRAPPDEQFAAWVARLRPGFTAGYLAEAISSERDPDLALHHHHPLHQPLDHRIRRPRTRCHQIRRP

SEQ ID NO: 162487 - protein, 347 aa, Oryza sativa
  unsure (1)..(347): unsure at all Xaa locations
  Clone ID: PAT_MRT4530_61574C.1.pep
IGSCVVDESTGGSQFAGETVRXLVFHAKSTFEELKSRTKDELDWSDESVGMKGRYNVGAGPISHNFMLDLNREVEWETYVDIVLGSQFKSLEMFAWKKERSKSENEFLDLNXKFAHRIPLYCHEPKNDMFVADRKEXLIVEDVEVGQEVQVEEDMEVXEVPVEDEVEVGEDLSDVGLDVNQVENEMKVELDDRQMASYIRELLXRKIYTRQECEEAMVFNGLNMDLLNVHSDDDVDEYASNSNDDRPMGKMSEEERRVFEKIVGRNPEITQFKDLSNDGLAVADGDPQXDGTIDAIGEESRTGLEFQSMEDLKIWLQSYSIRVHPXFHVKESNASIKYTMACLGYWR

SEQ ID NO: 162488 - protein, 91 aa, Oryza sativa
  Clone ID: PAT_MRT4530_61575C.1.pep
MEFLDFNPNSRLQHDGRLSRMFRVIYGYKYKPPRRRGDRPQSHKATKPQANTRRRISTSKISLAIPHPVPTEAGKRDLAPSLIPPSTNSRR

SEQ ID NO: 162489 - protein, 351 aa, Oryza sativa
  Clone ID: PAT_MRT4530_61576C.1.pep
MSYRRFVNLVLDKVQGNYTVRRMDMSRFFLPRKLATPLDAGAHDGAAAVEYGNLPCPVMSFRASVCPMETMEFMLLGGRHNKIVGTDLTGRTLLYDPDEHVVRSLPTLPMPKFSPVSLTIGDDDLYILDDIQGPFTGGHDHCFHALTYSRESFTDADGDWCCHTLPPPPYMVKQRGDFQFDSYAVVDGVDIWISKQGVGTYRFHTERGEWSAVASGGEWCAMPFTGLAVYVPEHGLFYGLASGTDNVLSASDLISGGRKPEQHSLLPLEYTPPKALTQVSSHLVHLGSANFCIARFFETGFFDADEQHNPELFAVFTAVEVERCDDTGVLRLVKHKSEMYKLISEIYYWVL

SEQ ID NO: 162490 - protein, 108 aa, Oryza sativa
  unsure (1)..(108): unsure at all Xaa locations
  Clone ID: PAT_MRT4530_61577C.1.pep
MPSSHPCSCCRLPSSPPHRXRSSSPSRHSRSSWRSSLRQADRVSSSVLQPLRRLRPRLRVVKPCAGLVSPSSKDHHRSHSITVRLRCPRAVSAAPVRHRRSAPRLVVV

SEQ ID NO: 162491 - protein, 43 aa, Oryza sativa
  unsure (1)..(43): unsure at all Xaa locations
  Clone ID: PAT_MRT4530_61578C.1.pep
DSXXSKQLKMTILAMDPQGDTFVLVITIWNEIYSILKLKSLLL

SEQ ID NO: 162492 - protein, 59 aa, Oryza sativa
  Clone ID: PAT_MRT4530_61579C.1.pep
MAEGGDSGLLDGFEEDGWWRCKTRKRNGALTTVKNQQGSSGRWIDGRYYKEIIDICTFI

SEQ ID NO: 162493 - protein, 66 aa, Oryza sativa
  Clone ID: PAT_MRT4530_6157C.1.pep
MLCHNKHTTTFYCLHNKRSGLITLIHGGGIIQLQETNPWWVIQLPATGYNYNINMRAATKRDPVVT

SEQ ID NO: 162494 - protein, 83 aa, Oryza sativa
  unsure (1)..(83): unsure at all Xaa locations
  Clone ID: PAT_MRT4530_61580C.1.pep
PVWQAIDESGCSVFCLQETEKESFDTAYIKKLFSKRFDSLSFSPSVRAFGGILVCWVGAIFAXYTVITRSGVIINFFLKNFVE

SEQ ID NO: 162495 - protein, 58 aa, Oryza sativa
  Clone ID: PAT_MRT4530_61581C.1.pep
GLPPAPMGLRIIKAGNFVGAGPVFPGCFSGECGKHNNQKKLFARGVFLRLKTTLTRNV

SEQ ID NO: 162496 - protein, 58 aa, Oryza sativa
  Clone ID: PAT_MRT4530_61582C.1.pep
SSPRPGSSHLLQGHMFLFHWSPGRLCSFPCLFSVWTPKRCLSLKIALKVSCTVRSFYS

SEQ ID NO: 162497 - protein, 586 aa, Oryza sativa
  Clone ID: PAT_MRT4530_61583C.1.pep
MATNFFKDLYTKDPLVTPQPLLDLIMLKVTEQMNEDLCKAFSDKEISDALFQIGPIKAPGPDGFPARFFQRNWEVLKNDVCKAVKLFFDQKVMPEGVNTTAIVLIPKKKESKELKDFRPISLCNVIYKVVAKCLVNHLRPILESIISQEQSAFIPGRMITDNALIAFECFHNIAQSKRESQEFCAYKLDLAKAYDRVDWQYLEGVLDRMGFSNTWIQWMMACVTSVRYAVRFNGSMLKSFQPSRGLRQGDPLSPYLFLFVADGLSTILSSAVRTGDLVPLKVCRQAPGISHLLFADDSLLFFKANVEQATVVKEALNLYERCTSQLLSPAKCSMLFGKHCSDQTQPGIKSLLDVQQNSFEDKYLGLPTPEGRMKADRFQSIKERFFKRLIDWAEKHLPMGGKEVLIKSVIQALPTYMMSVFKLPPSFCEEYMQLVRKFWWGEDRSQRKVHWASWQQLIKPKSMGGMGFKDMKIFNQALLARQAWRLVQFPDSLCARVLKAKYYPNGDLLDTAFSSVSSDSWKGIVHGLELLKKGVIWRIGTGRKVHIWRDDWLPREHGLKVMGKKTGTRLKWVSDLLVPNEQSWDE

SEQ ID NO: 162498 - protein, 92 aa, Oryza sativa
  Clone ID: PAT_MRT4530_61584C.1.pep
FASTTARIKNVSPSPPPPPTPRLPVASADDDDVSPGRLRRHRRRVSSTPPPPPPPTPRLLVASAADDDASSRRLRRRQRSRVSPLPSPSGRR

SEQ ID NO: 162499 - protein, 64 aa, Oryza sativa
  Clone ID: PAT_MRT4530_61585C.1.pep
NSIHSCIICLDQILTPNNAVCRISDNHESTRNLCLGIAASLHCLMLGQKIIITWLSHLIATMNI

SEQ ID NO: 162500 - protein, 572 aa, Oryza sativa
  Clone ID: PAT_MRT4530_61586C.1.pep
MGKASKKSVAVAVAPAAVPAKGKGGKKREAEDEIEKAVSAKKQKAAAAPPAKAVPAPKADAKKAKKQPPPKKAASSSSGSSSEEDSSESEEEVKVQVKKTTKPVKQESSSDESSDESSDDEDAKPADPVANNGLKKGKPASSDSESDSDDEMDEDEKPAAPVKKTSVTAQKKKDDSDSSESESDESDSDEDVPTKSKAPAVAAKNDDSTDGSESESDSEDEDAAPKGAAKKESSSDEEDDSSEESSDDEPKQPQQKKAQEESSEESSEEDSDEEDEKLAKTPKKKTPAATKSQNDEPKTPASNQSQGTESATLFMGNLSFNLNQDQVKEFFQEVGEVISVRLATHEDGSSRGFGHVQFASSEEAKKALELHGCDLDGRPVRLDLAHERGAYTPHSRNDTGSFQKQNRGSSQSIFVKGFDSSLEESKIRESLEGHFADCGEITRVSVPMDRETGASKGIAYIDFKDQASFSKALELSGSDLGGYNLYVDEAKPKGDSRDGGGRRGGRSGDRFGGRSGDRFGGRSGGRFGGRDGGRRGGRGGRDGGRRGGRGGFQSRQSAGTASTGKKTTFGDE

SEQ ID NO: 162501 - protein, 133 aa, Oryza sativa
  Clone ID: PAT_MRT4530_61587C.1.pep
TRPRFDAGQFTLNITRVNGSVAIDTGIVQASITRTVFDQNPVAVFAVSKVLLPKEMFGRGGADSDVMAPPPDAMAPDAAENVRTPPTRLSSPPALRGGADSESSSALSTARAVNWWCIRLVLLNLHLLLLPLV

SEQ ID NO: 162502 - protein, 421 aa, Oryza sativa
  Clone ID: PAT_MRT4530_61588C.1.pep
MNGQPRFHDMIGGGGKGMQDNEINGLFNMPSYHKFVEGSQMSVDSADGFNMANYVGGSVAMSVDNSSVGSNESRTVILKHPGLRDAPTASYSVGNSVFRPNRVAAHTLNEDALARVLMDPSHPTEILSNYEEWAIDLGRLDMGVPFAQGAFGKLYRGTYNGEDVAIKLLEKPENDPERAQALEQQFVQEVMMLSRLRHPNIVRFIGACRKSIVWCIITEYAKGGSVRQFLARRQNKSVPLRLAVKQALDIARGMAYVHALGFIHRDLKSDNLLIAADKSIKIADFGVARIEVKTEGMTPETGTYRWMAPEMIQHRPYDHKVDVYSFGIVLWELITGMLPFTNMTAVQAAFAVVNKGARPVIPQDCLPALSHIMTLCWDANPEVRPAFTDIVCMLESAEMEILSNVRKARFRCCITEPMTTD

SEQ ID NO: 162503 - protein, 548 aa, Oryza sativa
  Clone ID: PAT_MRT4530_61589C.1.pep
MLTTFVYHALGSFSCVCLLCFASSLVSVADAGGAPVLQALECTSTAAGNYTQDGAYAANLGRLLAMLPNETVSKNGGFFNGTVGNGTATVYGLAMCAADFSRADCMDCLVAAGISAGGVVKRCPGSTTVSAMFDQCLLRYSDSSFFGTAHISTQLRIVYFQYNIRFGRGDLDRQAASSPARFARVVPCMWDACSELCLACRKCTRDLPPDACKGCLDALAANVSATFPATARGERKSYSCRVRYDVNTSFMVVPFNLSTGSAGTPTSSLAGPGSVNSAKNNGPVMIGSIVAAVVFVVLVSVVVWLCVRHRAIKKVALAGPRSYSYEELYTATNGFSDERKLGQGAFGAVYRGVLSDPSQTLVAVKKIQRMSEAAWQEFVAVITIVTQLKHRNIVDLMGWYNIILDMANGLQYLHTARNECVLHRDIKPSNVMLDENLSCAKLCDFGLVKQINHDEVTPGRQTTVIGTRSYLDPECIRTSIHGHNNKNSLVEWVQDSFRHRKSVADMADERLKGDFDEEQIERVIRVGFLCVLPEPDKRPDMATVVGTT

SEQ ID NO: 162504 - protein, 73 aa, Oryza sativa
  Clone ID: PAT_MRT4530_6158C.1.pep
MPMGRWKRCGVEKGDSDSREAAAGKLSGERGWSRRQGVIGSSDAIAATSCHLGKSMTRVQRKAASSVTQKGFS

SEQ ID NO: 162505 - protein, 1044 aa, Oryza sativa
  Clone ID: PAT_MRT4530_61590C.1.pep
MIRLFASCPKLIPLLAVFIFSSSLPLAISDDTDTDREALLCFKSQISDPNGALSSWTNTSLNFCSWQGVSCNSTQPQLRVMALNVSSKGLGGLIPPCIGNLSSIASLDLSNNAFLGKIPSELGHLGQISYLNLSINSLEGHIPDELSLCSKLKVLSLCNNSLQGEIPPSLTQCTHLQQVVLCNNKLQGRIPTKFGMLHELKTLDLSNNALTGDIPPLLGSSPSFVYVDLGGNQLTGGIPEFLANSSSLQVLSLKQNNLTGGIPPSLFNSSKLTTIYLNRNNLVGSIPPITAVAAPIQYLSLAQNKLTGGIPASLGNLSSMVLLSLGANSLVGSIPESLSKIQTLERLVLTYNKLSGNVPQNIFNMTSLKYLGMANNSLIGRLPPDIGNRLPNLETLILSTTQLNGPIPASLANMSKLEMIYLTATGLTGVVPSFGSLPNLQDLDLAYNQLEAGDWSFLSSLANCTQLKKLALDGNILRGSLPSSVGNLPSQLNWLFLKQNKLSGTIPSEIGNLKSLTVMYMDNNMFSGSIPPTIGNLSNLLVLSFAQNNLSGHIPDSIGSLSQLTEFYIDGNNLNGSIPANIGQWRQLEKLDLSHNFFGGSLPSEVFNISSLSKSLDLSHNLFTGPIPLEIGNLINLGSISISNNRLNGEIPSTLGKCVLLEYLHMEGNLLTGSIPQSFMNLKSIKELDLSRNSLSGKVPEFLTLLSSLQKLNLSFNDFEGAIPSNGVFGNASRVILGGNYRLCANAPGYGLPFCPESGSQSKSKSTVLKIVIPIVVSAVVISLLCLTVVLMKRRKEEPNLQHSSVNLRKISYEDIAKATDGFSATNLVGLGSFGAVYKGLLAFEDNPVAIKIFNLNKYGAPTSFNAECEALRYIRHRNLVKIITLCSTVDPNGYDFKALVFQYMPNGSLEMWLHPEDHGLEYGMGGQISTKGDVYSYGVLLLEILTGKRPTDEKFNDGLSLHDRVDAALPHRVTEVLDPNMLHNDLDGGNSELMQSCVLPLVKVALMCSIASPKDRLGMAQVSTEINSIKQAFVDLSSGGKMV

SEQ ID NO: 162506 - protein, 72 aa, Oryza sativa
  Clone ID: PAT_MRT4530_61591C.1.pep
MVEIPKCGYTPWYDLSHSSRYSMHGSDILMPYTTRFANSLAQPSNGTSRLAAVQYPSEHAGDTVFMLRSSVR

SEQ ID NO: 162507 - protein, 63 aa, Oryza sativa
  Clone ID: PAT_MRT4530_61592C.1.pep
SLNKIIYHNIIYYIFKQAAEESIMQLIWSNITNQSTATVHGYKPDASIPNFYGPRRCHNFPTT

SEQ ID NO: 162508 - protein, 83 aa, Oryza sativa
  Clone ID: PAT_MRT4530_61593C.1.pep
MALAAGSPVTATLSRCFEPAPCVIPLSHGGDMFGQKSAAKTYGILEFVRDNGRVRIKLTGTLTHPKLVAWSLDVMVAHSSGSY

SEQ ID NO: 162509 - protein, 96 aa, Oryza sativa
  Clone ID: PAT_MRT4530_61594C.1.pep
RFTHSLTPWHVGTDKTLPGHSFRTRFLEINKKKKRGFNSRKNRKLFKISNETVYLGSIWTDADVRDSYTVSLMKRAVGPSLWHPISTSAVQLQPLP

SEQ ID NO: 162510 - protein, 93 aa, Oryza sativa
  Clone ID: PAT_MRT4530_61595C.1.pep
SARVISHTLLPCQHFMLHTLDPVFCAASLQTPVMISDPMQGHLPRNPNSRHLRVLAGIVRNCPWNPADARRLCLLGPVIHACTWSGVKNQMSW

SEQ ID NO: 162511 - protein, 59 aa, Oryza sativa
  unsure (1)..(59): unsure at all Xaa locations
  Clone ID: PAT_MRT4530_61596C.1.pep
ESVRMRVRHQEHPDDKCRNCNKIGHWAKDCRSKAKXAEGHIAAEDDDEPTLLMARTCFG

SEQ ID NO: 162512 - protein, 917 aa, Oryza sativa
  Clone ID: PAT_MRT4530_61597C.1.pep
MARTASAATGGDEPPPEPHHQAGVQRPPKNDGDGGEEAGGGNVGVPAAAADEDPTAGAVGAAGRGSRRRRKAGRRAAAPDEEDLDTILAEIDQNMASAALDSMPEMNLAQASASTAMDVAATVNDVGAEVKDDEMEAESAAPKRRKRKKEKEKERKTTSKVAEADAKKPPRHVRVMLEVLAKRKEAEELRKREEELRKRKAEEERLQREEDERMVEEMKMQQKERDKGKTMKKRQDGKTLTGKQKEEARRLDAMRRQFLGQSRILARSDLGNDGGANERKKRPIYDSKRKKVQSKADEAANGDGGHMQELHKVNKEEEECAIMEEQPHYRVEEDGEKIKLEEIKGAESVERINFEERITKEEKNEAMKSSNEEVVSLVTGWKNRIEEWDVDVDENDKDTRKLTPKRDPAKVDKAEKYTDLRSPICCILGHVDTGKTKLLDCIRCTNVQGGEAGGITQQIGATFFPIENIRERTKELKAGAALHVPGFLVIDTPGHQSFSNLRTRGSSLCDIAILVVDIMRGIQAQTIESLNILKRHKADFIIVLNKVDRLFGWKRCPNAPIKKALKQQAEGVKMEFDARLTDCTVLEVKVTEGHCTTIDVVLANGFLREGDQIVTCGMQGPIVTHIRALLTPHPMKELRIKCPYQHHKEIKASQGIKISAPGLEHSVAGTSLFVVQPGDDQEKSVNKAMAEMVVLMNRIDKNSDALIEFLKSPAVNIPIYDFNIGPVHRKDVMKASVMLEKKKEYAAIFAFDVKVMPDAREIANESGVKIFVADVIYHLFDQFTTYIEGLREIEKDEKIVEAVFPCVLKIIPDYVFNLKDPIVLGVDVLEGVAKVGTPLCLPSNGFARIGNIASIQNSSKQVDVARKGEKVAIKNIVLGVFDRSQEALQMSKRNVSGDLTLKEWELVRTLKHIFRIP

SEQ ID NO: 162513 - protein, 100 aa, Oryza sativa
  unsure (1)..(100): unsure at all Xaa locations
  Clone ID: PAT_MRT4530_61598C.1.pep
MTVVTVGIVRNTLQPSLGANPHRSEETLHPAAXGGFGRTTRFGRTXGRPNQPMVWLAASSVVLLRRLVNFGPVCRVNSEFLAHSYTSLVLDIVRLIYRLC

SEQ ID NO: 162514 - protein, 127 aa, Oryza sativa
  Clone ID: PAT_MRT4530_61599C.1.pep
MAMPNAIPRDKVEKAPGARWRGQRGRPGRQRPRLGRSGGWRWRERPPCDGDQGVTNPEVGAEMDGGVEGGGSGVAARTGLRRERAGEREERGALRRNRCGHAEKEEVRNKCGGAWTVDSAGRSFQQS

SEQ ID NO: 162515 - protein, 35 aa, Oryza sativa
  Clone ID: PAT_MRT4530_6159C.1.pep
PRPPIDDLRRCLRRQARRVSGAYKAISSRGLEEVQ

SEQ ID NO: 162516 - protein, 1101 aa, Oryza sativa
  unsure (1)..(1101): unsure at all Xaa locations
  Clone ID: PAT_MRT4530_615C.1.pep
LTSTNYTSWMIRVQAMMEDQGVXETIEPAAGAAVDPKKDKKAKTHLLQSLPEDLLMQVAKKWTAKEVWDCLKTRFVGADWVRNARLQTLKGDXSMVVEAEETLNQYAGRITTMGVRNSALGATTXDMVKKLFDIVPEKFISLVAVIEQFYDIDEIPFEEAVGYLKAYDERVCKKKAAVGGVIAYGXVLHTQVEWXACFKKNGRETSXPQKNKPYGEGANRGQDGCGRGRGRRAGRRGGAQNNNSGGGSGGGGHDKSHIKCFNCDEFGHYSTXCPHPKKKNTETHLAXTKDAGPALLLAMTEAVQNTPRQGVHCGLVVHEDHVWPRLMLAGNGAAAGDVWYLYNGASNHMNGDRRKFRELDKTVTGQVRFGDASSVQIIEKGSILFSFKNGDQWLLDDVYYIASLCCNMVSLGQLTETSHRVMMDGDDLEVFDKITXRLVIRVRRTVNRLYRIELKLASPVCLLASLDSRRPXWLWHARLGHVNFXALKHLVDKEMATGVPAVHHPNQLCQACFVAKPIRQPFPAIANYRAETPLELLHMDLCGPITPSTLAGNRYFMLIVDDFSRWMWVFVIKSKDQALTAFEKFKPLPENMAGRTIKTLRTDRGGEFLSSEFTSVCTEAGIECHLTAPYSPPQXVFKLKKNTTGEVIKHKARLVAKGYVQRQGVDFDEVFAPVAWLDTVQAILAVAANRRWEVHHLDVKSAFLNGDLEEEVFVDQSEGFVKQGKEHLVYKLSKALYGLRQALRGWNTCLDWSMKELGFSRCAQKQAVYTRGTGNAGLIVGVYVDDLIVTGENSSEITTFKQQMVGEFDMSDLGLLTYYLGIEVIQXQGANGIAIKQAAYARKILTQFGMLHCNSTSIPIEHRSQLHKDAKGSPVDATQFRRVIGCLRYLLHTRPDLSYAVGVVSRLMERPTVMHFKVVKQILKYLKGTINCGFTFADGNGAVEITRFTDSDQAGNTDDCQSTSGMAFYLNNSLISWSSQKHKTVALSSCEAKFMAATAAACHALWLRGLLIEIIGAEPRPVKLYTXNQLAIALMKNPVFYGRSKYIDTRYHFIRECVESGKIQIEFVRTKEQRADALTKGLPAARLETARHLLGVRDFGP

SEQ ID NO: 162517 - protein, 44 aa, Oryza sativa
  Clone ID: PAT_MRT4530_61600C.1.pep
ANKSEYSPKRLIGECANQTCRSSSHDPDILLTTHPNVLTFLSRN

SEQ ID NO: 162518 - protein, 92 aa, Oryza sativa
  Clone ID: PAT_MRT4530_61601C.1.pep
RFVHDPSKDPPSNGPCPFPLTTVRLKTSKFIIIPIGNCLPSKKEEEQPRHGTELSRICQPPTTDRARPPRPPHIAFCTPTSQGRGARIRPST

SEQ ID NO: 162519 - protein, 679 aa, Oryza sativa
  Clone ID: PAT_MRT4530_61602C.1.pep
MDHVDCCICYFPVFFVFVVDAATSGPELAALKAEVLRVVQGLPEGVRVALVSFAASVWVHDLGFEGCTRVVVMNGERELESEKIQEFLGVRDARYNKLAMPRSTKVQRFLLPVSECEFNITSAIEDLRSMSACPRGHRPLRATGAAISTAVALLEGCCSPNAGGRIMVFTSGPTTVGPGLVVETDLGKAIRSHRDIFNGNAPLIDKAREFYKKVANRLTAHALVLDLFACSLDQVGAAELRYPIEVSGGLMVHTESFESEQFKACLRHIFNREGVGYLNMNFNATIEIVTSREVKICGALGPCISLHRKNSSVSDKEIGEGGTNYWKMSTVDSKTCIVFFFRVDCSHNTEPPTVFFIQFMTRYRHGDGSYRLRVTTVARRWAGPRSPEIAAGFDQEAAAAVMARLAVHRAETYHVRDVIRWLDKMLIRFTAKFGNYVPEDPSTFRLSTNFSLYPQFMYYLRRSQFIDVFNSSPDETAFFRLMLNREGVVGSLIMIQPTLFQYSFDGPPIPVLLDVSSISPDVILLFDSYFYIVIHYGSKIAQWRKLGYHKDPNHENLRKLLEAPEVDAEALLVDRFPVPKLIKCDQHGSQARFLLARLNPSVTQKTQLSDGSEVIFTDDVSLQVFIEHLQELAVQGLMDHVDCLYVTFWSSVILKVPGELYCLEGWDLLELLYISPAPV

SEQ ID NO: 162520 - protein, 149 aa, Oryza sativa
  unsure (1)..(149): unsure at all Xaa locations
  Clone ID: PAT_MRT4530_61603C.1.pep
KKQARKQFPHKNPHLFNEKKKKEPKQKGQGKTGPGGATQKDNQEGASKNGPGTKXKPFNPPKTPSKKNHRKKGGPTQPPDGQKKNPRDLGPPGQQGQRPAGGGKNGTGRGEPPKGTQTPPPGGPPGKKPGFRGGPKQTHRKGPLKPPGK

SEQ ID NO: 162521 - protein, 55 aa, Oryza sativa
  Clone ID: PAT_MRT4530_61604C.1.pep
KTTPGLIWASTNGLRTLNFKPGGGPAFGEIRTGYQGSPGNFENGLKAGRLKWAQP

SEQ ID NO: 162522 - protein, 98 aa, Oryza sativa
  Clone ID: PAT_MRT4530_61605C.1.pep
RKKKKELKNSQIYMHQRVKEHLHATITPRRRQQLHANGEMQGSGNNGRIQQIPKPRRRWAQMKITNGIPATSRIALIFLKIIMLKIFKPINFTIWYFL

SEQ ID NO: 162523 - protein, 102 aa, Oryza sativa
  Clone ID: PAT_MRT4530_61606C.1.pep
MAAVYGNERPGSNRFKTNGRDHLDLSRVYGDIDDDVGDDVITGDDSASHARRRTTARNGGRDEDGDDFANPAVTFPSDDDDRSGGGARLDKRRRRRHKSSRG

SEQ ID NO: 162524 - protein, 182 aa, Oryza sativa
  Clone ID: PAT_MRT4530_61607C.1.pep
MAELPEGHSSRRVVELIFSSGWGAAAAAAAPPGPTVEAMFRVHSAARAVARFEEARAAARAHGAAARCGADGNEMMRFQCRAAAGPGGVFGAGVATCRLGAADAAVRTFAGSGAAHASAGAGPGRRAMLVCRVIAGRVRSAQHQHGHSRHASDYDSVDMGNGELVVLDSRAVLPCFLIIYKV

SEQ ID NO: 162525 - protein, 2516 aa, Oryza sativa
  Clone ID: PAT_MRT4530_61608C.1.pep
MASSPVKFFSVFLAVSVVGWVVFTFASRLLAWFLSRVLHASVGFRVAGFNCLRDVTIKFSKGSLESISIGEIKLSFRKSLVKLSFGFISKDPKLQLLINDLEIVTRSSQGKKLSKPGKSRSTGKGKCELFSGRCTCRGPKGYGRVPSGAVDIKELKVDTFKIAGPNHILGVKLHLVPLNVHYGDLGLTADPLGNCNQLDAFQSDQISLANSEKVVAPFVCEDLFVTCDFGHEKERGVKIVNLEVKCGVITANIDERLFHKKHTKPEGFSGSENGGDASLDASAMNQTSKSKSILPSLKKQILAFPDKISFSVPKLDVKFTHLGEGLSVDNNIMGIHFTSAKTVPQDDLEEATPHFDVQIDLSEIHLVREGSSSLLEVLKVAAGASLDIPVDPFLPIRAEIDAKLGGTQCNLMLSRLMPWMRLHYLKSKGMKISKENSHRGISQTKEIKLIMWTCTVSAPEMSVMLYNLNGLVLYHICSQSSHLYANNIASKGIQIHTELGELQVHMQDEYKEFLKGNVFGVDTYSGSLMHIARVSLDWGYRGPEIEDMVETSRLTLVFSIDISGICVKFGFKHLESVVLNLMTFRTLFKSLASSRGSSKEKNLEHREKRRKKGVEILKLSVQKLSITYCGDANVVNMPVADPKRVNYGSQGGQVVISVSADGTPRLASITSELPGRSRNLMFSASVAISHLSVCINKEKRSTEAELERVKAIYEEDLSSSVKVTLLDMQNAKIVRRSGGLPDVPACSLFRATDINLRWEPDAHLAILETFIRIKYFLHNNKPINAEVGDICENGPGSISTGPGKPQKSDKRGSIFAVDVEVLRVSAELADGVEANMHIQSIFTENIMIGVLSEGLCLSLNGARIMKSTRIQISCIPFGTSSLLDAKVESSSKRDWVVQGLDVHICMPYRLPLRAIEDAVEDMIRALKLISAAKKTMLFPDGKENPRKVKSGTTSFGSVKFVLRKLTAEIEEEPIQGWLDEHYHLMRNKVCELGVRLKFLEEAISGSVDPNNCSSKEKLLYDGIEVDMHDTAALQKLRDEIHKQAFQSYYTACQKMVHAEGSGACAEGFQAGFKPSSRRASLLSLSASELDVTLTRIDGGEVAMVEFIKGLDPVCQEKDIPFSRLYGSDIAVLAGSLVIQLRDYTSPLFSATSGQCQGRVILAQQATCFQPQIQQNVYVGRWHKVMMLRSASGTTPAIKMYSNLPIYFQRGEISFGVGYEPSFADISYAFQIALRRVNLSTRVKDSGPTNQPPKKERSLPWWDDMRYYIHGKIVLYFNETTWKFLATTNPYEKVDRLQIVSEYMEIQQTDGHVDVSAKEFKMYISSLASMMKNCTLKVPPGVPRPFIYAPFFSLNVVIDWQCESGNPLNHYLHALPIEGEPRKKVYDPFRSTYLSLRWNFSLKPLQVQYDNDALSPSYGNSSMQCGAISDNHSKLANVEFPTMNLGAHDLAWVFKWWSLNYSPPHKLRSFSRWPRYKIPRAARSGNLSLDKVLVEFFFRVDATPCCIRHATLTEDDATLTEDDPANGLTFKMSRLKYELCYSRGKQKYTFDCKRESLDLVYRGLDLYKPEVYIMRDINLSSAETVSNLKTNTQLGKVIHNKGNMGNFQDKHEDGFLLSCDYFTIRRQSRKADPARLMEWQDAGRNLEITYVRSEFENGSESDHTLSEPSDDDDGFNVVLADNCQRIFVYGLRLLWTIENRDAVWSWVGGISKAFEPPKPSPSRQYVQRKMIEQRQTTEGSKLTQDATSSVHVGSPSGQHVEALGSTSPLHSKANLSYDIAGKHGLFDDSDKGGNLQFMVNVIKPQFNLHSEEANGRFLLAAASGRVLARSFHSVVHVGKEMLEQALGASSIQIPELQPEMTWQRADYSVLLEDVQAHVAPTDVDPGAGLQWLPRILGSSEKLKRTGALLERVFMPCEMYFRYTRHKGGTADLKVKPLKELIFNSPNITATMTSRQFQVMLDVLTNLLFARLPKYEDAVVKPPPAANTSYLKFAWAQKYFWLRHCEDGKGKGRSVRRDGSRDRDDPVTYKPRKNSLQYSSDDEDVEEEADEVVPDGVEEVELAKISLEQKERERKLLLDDIRSLMGTGNNHTSNFLSVERDDCLWMINSGKSLLVERLKRDLENLKKSRKSASSTLRKALQKAAQLRLMEKEKNKTPSCAKRISMKISKVVWSMIADGNTFAEAEISEMVFDFDRDYKDIGVGRFTTKCFEVEIHPLKIYLSETMYRMMWDYFFPEEDDSQRRQVSKLQSLKSNVVCGSHPELRRTSSFEMTLEESAVDSITNNNVVSLVNSNVSSRDTNNFMADNSVAAAEMFRSRTKDSKPTKSVRLSQDEKKVGKSHDEKRTRARKLIEFHDIKISQVKKFKAHNRETHDGAVPDHDLNLSDSDGDHHGKPDQFPVSWLKRPGEGAGDGFVTSIRGLFNSQRRKAKAFVLRTVRGDGDNECHDEWSDSDGEFPFARQLTITKKLLRRHTRKLRPRGQKNTGLTLQDSLPSSPRETTPYQSDSDSSSESPYEDFHE

SEQ ID NO: 162526 - protein, 92 aa, Oryza sativa
  Clone ID: PAT_MRT4530_61609C.1.pep
FNTLTKVDLVERTAKNWHEEGSVPSEPFFVPRPGATEEDDGVAISMVSAKDGSGYALVLDGKTFEEVARAKFPYGLPYGLHCCWVPRKRNSK

SEQ ID NO: 162527 - protein, 455 aa, Oryza sativa
  Clone ID: PAT_MRT4530_6160C.1.pep
MLAVSPAMCPDIEDRAAVAGDAGMEVVGMSSDDMDQFDFSVDDIDFGDFFLRLEDGDVLPDLEVDPAEIFTDFEAIATSGGEGVQDQEVPTVELLAPADDVGVLDPCGDVVVGEENAAFAGAGEEKGGCNQDDDAGEANADDGAAAVEAKSSSPSSTTSSSQEAESRHKSSSKSSHGKKKAKVDWTPELHRRFVQAVEQLGIDKAVPSRILEIMGIDSLTRHNIASHLQKYRSHRKHMIAREAEAASWTQRRQIYAAGGGAVAKRPESNAWTVPTIGFPPPPPPPPSPAPMQHFARPLHVWGHPTMDPSRVPVWPPRHLVPRGPAPPWVPPPPPSDPAFWHHPYMRGPAHVPTQGTPCMAMPMPAARFPAPPVPGVVPCPMYRPLTPPALASKNQQDAQLQLQVQPSSESIDAAIGDVLSKPWLPLPLGLKPPSVDSVMGELQRQGVANVPPACG

SEQ ID NO: 162528 - protein, 68 aa, Oryza sativa
  Clone ID: PAT_MRT4530_61610C.1.pep
LFFFLTPIDRGCNNTKAPIPHEFLLAWGCHIHMRVEFNTKLNPFNTRPAGANKSKKRTGFPKFNDLDE

SEQ ID NO: 162529 - protein, 78 aa, Oryza sativa
  Clone ID: PAT_MRT4530_61611C.1.pep
RLGTCFFFLLWRSVRRNRRTLLPLFPQIQRRFPKLAPAARLRWYGFLPCEFARSCSQSFISICQIIRGSPSYRSAFIL

SEQ ID NO: 162530 - protein, 187 aa, Oryza sativa
  unsure (1)..(187): unsure at all Xaa locations
  Clone ID: PAT_MRT4530_61612C.1.pep
LHKIKKTSDKEFFXPDVRSLPTSYVTVEASPTSPLNHGVAGHAALYCNGXKTSHYSAFNARAMASQSDRHRHAGQTAIGSXVRPSSALYRQDETSFKIRISXSDQTTHIGQTAIRAAVIPQFTFQHNQLLVKXXYLLTRVSEFDVLGLYEKLIQRDIQLMKFPSMKHNLKQGERAHTPKDTPPENTT

SEQ ID NO: 162531 - protein, 2289 aa, Oryza sativa
  Clone ID: PAT_MRT4530_61613C.1.pep
MSHPGKFVSVNLNRSYGQPAPSHHGARPSRPSASSGGGGGGGGGGGMVVLSRSRGSSVSKPQPPKLSVPPPLNLPSLRKEHERFDGAAAAAGGGAASAPVRSGAPTAGWTKPAPAVEKPLPPASVLLPGGGPRPPPYGFPEKAAAAAVVLRGEDFPSLKASVAPPPPPPAQRHKDADGVRVATPETRPPLGMRPQVTPSRAAEPLSSTGGTGTGDHVSAEKAQRNDLGPLPLVRLRYDSDWADDERDTGLTLPERDSRERGFGRSEPAVAGRDIYGGMRDPFKKEPFVKDLIASSKEGGQDAAWRSPMSSQQDRERTDGRPYSAGRGSSAQSSYRESMNGDASKDSWNTSREPGVRVYGQNGAEPYRNARVGETPGERYGNISNNWYRGNPFQNSFVSKVQPFPGNKGPLNNEPPANFGREKRLTGTPAKPLIEDGGFDSITAVNLSAIKKKKKGGPRADFHDPVRESFEAELDRILRLQEQERQRVLEEQARAREIVRKQEEERERLIREEEERQRLVEEEARHAAWLAEQERLEAAKRAEEQRIAREEEKRKAAIEEERRKEGARKKLQELEARIARRQAESNIRDGDLASCINDELLPGAVKDKDVPQSANTDDRHDFDRMGERVNTSASSESSSNNRYNDIVPRVHTLRDGHSSLVDREHAHFSGRTSFQDQESAHYSPRRETFTARRGNYPKKDSYDGFVTVTVRPSSRGRTNDSPWASEEYHHGRAPRWDAPRENDRFDKQSDFDTEFFSSDRFGDPAWLPSSSHEGPNRHQGEKMFHSSEDNEFPFTRPRYSMRQPRVPPPPAVARSTVGPSTQHANSSFVESGLRESSSREEHTMQTEYGRVYQEASHQHGTSAEGIGLDEQQNGDRENPILGSQSSLSVSSPPSSPPHVSHDEMDVSGDSPALPTSADGDRTVMSDIDHAASTLDAANTSRINTSSTVSHLEDDEWPSENNENRQKQDEYDEESNSYQEDEINEGDDENLDLDDEFAEGHSTHIEMEPVILGFDEGVQVEIPPNPEVELVSMKNTHSGVMEQQVGSSSVCPSDLVTEAEKALRNLALDQINALTDETNNEPSNSLVASAPGSKLHQAPSTDPIMPPASAVSGRSEVPVNLQFGLFSGPSLIPTPVPAIQIGSIQMPINLHNQINPSLSQVHPSPAPLFQFGQLRYVRPIAQNVQSVSQAMPSIHSSAPAPYILNQYGSSGLPNEINQHTHQNIPREAAQSSSIEKSVVSAANLSFMLQHSDSQKLGAPAINQMVDAEGFHNLLDRSSLGENMCRVSKPESHRNHDISLKRNYRPTSNNRESSQVNSDAKIVSGPKAPGAVPGGRGRKYGYAVKESNIRSTSSVDHSNKDSRGLQRRSRRNIRRTEFRVRENVEKNHIQDESFSHSEQNEKPYSNGTAREIPLKNPNRREGDKSFRANEAIDLSAGPSTCANYYSKTERSTHKAPSYERSHSGNKKSRAGGAIPEGDVNASSQAAVARVVRQQGIEIPVDADGFIEVRSKRQIMSVRRELREKENRSKMRIAKAPRKQHQVSLHSSSSPNLNKGTVSLAEPAKKASLDSVMAVESRVIDPAESSVALKGDKASMTPIGQPLVNAESHTNYYAKKPINSQPSSDAVNSGKLVTSLSEENNKTMPISTPFNIGTWDNSQLNQQVMPLTQTQLEEAMKPGKFEQAGSGFSLEPNNALSPTLGSEKTFPSSASPINSLLAGEKIQFGAVTSPTVLPPVSRTITSGLGPPGSSRPDMKIHRNLPGDSNSTAILFDKETSTTKEPSPNSDDVEAEAEAEAAASAVAVAAISSDEIVGSGADATAASASDNKSFGNKNLAGLASGGQSSTDEPLSVALPADLSVDTPPMSLWHPLPSPQASGPMLSQFPGAQPSHFSCFEMNTMLGGQIFAFGPSDECAGSQVQQPQRSNALPSAPLGAWPQCHSGVESFYRPPTGFAGPFISPGGIPGVQGPPHMVVYNHFAPVGQFSQMGLGFMGTTYISGDKQPDWKQNQGPPVVGVSQSDPNNQNMVPGQVSSPSVPTPVQHLRPTSIMPIPSPLTMFDIAPFQSSTDIQMQPCWPHMPVAPLHTVPLSVPLQQHPMDGTAAAQFVHNIQVDNKASSNNRFQEPSASVVPADNSKNIPNASATQFTDDLGLVEQPASTSSNAQTVQPSFARVGMISNEVPNSAKVMGRSSNTPNVNPGIATGVSNSNGSQVASMPSKPHQSSSSSGQQYQHQVNNQDRRSRVTQKTGAVNEWQRRSGYQGRNQNSGSDKNLGTGRMKQIYVAKSSSASGHAPSG

SEQ ID NO: 162532 - protein, 283 aa, Oryza sativa
  Clone ID: PAT_MRT4530_61614C.1.pep
MATTGRPAGRRRPGVGARAICLMRRRGGVACSVRASICPNDSRRPNHGDGHLAGPKKVHLQYGMQLAAACMAKTQQKYCSSSSASTHLWYEHYYLERNTARQEQEIAAGIFTAEHITGSQGPTCESWESDNGIVQLSGHTRDRAHLTTCTPAQARSSSWGPEILFLVKAREDIVDSQRLLVRASEGGKRECGGESLPELINGGRRMWIWENPSPTSAPDSITRCMRPWLPPRPTRARQQRQRRQPLAGMKSSFADPEDHDEIKLSCKRHVNATWDEDLVKGSM

SEQ ID NO: 162533 - protein, 472 aa, Oryza sativa
  Clone ID: PAT_MRT4530_61615C.1.pep
MLRRVLAGFRALHPRPRRRRHGGAEGKARVTVRRLGSNGRKEAAAAAAGARRDNRGDGATGEAVTIRVATFNAAMFSMAPAVAAASSAETATETARRVTTPAAGGGRRPKGILKAQASLARTASKARVSINLQDNEISRERSKLGSTAARSTTTATTTPAATQQLNGGAEGRRRSVEEVLREVGADIIGLQNVRAEEERGMSPLSELAEGLGMRYVFAESWAPEYGNAVLSRWPIKRWKSQRVADQSDFRCSKIAVTVAVGIRSLLHNPTRGNMITGNVLRATIEVPRAGEVNFHCTHLDHLDESWRMKQMNAILRSSDGPHILTGGLNALDGTDYSDERWADIVKYYEEIGKPTPKAEVMKYLKGKQYVDAKDFAGECEAVVVVAKGQDVQGTCKYGTRVDYILASPNSPYKFVPGSYTVISSKGTSDHHIVKVDVTIQDKKETDEESGNQRQRVVKINKKCSKKGLWAAK

SEQ ID NO: 162534 - protein, 68 aa, Oryza sativa
  unsure (1)..(68): unsure at all Xaa locations
  Clone ID: PAT_MRT4530_61616C.1.pep
LDISRSAYESGEEVTHLEQREAEDINEQIMGPLGFSVDQLMXNLQGLTGHAEDAEVYNLDEHTKELVI

SEQ ID NO: 162535 - protein, 97 aa, Oryza sativa
  unsure (1)..(97): unsure at all Xaa locations
  Clone ID: PAT_MRT4530_61617C.1.pep
LKQVHGGXRQXXPFSCYXPPSSPXPXFPPPPHLPRRRGLSGSRRRSRSPPLSQRWPRRGSWRCPRPRRRXXRPGRXNSRCTTARRRRARXPPGSSXS

SEQ ID NO: 162536 - protein, 179 aa, Oryza sativa
  Clone ID: PAT_MRT4530_61618C.1.pep
NWNHTIPVTFSILFSHAVSVPVLIPSLLPVLSFPGGQDAVAEVITTTVVVLTASLLRRAHSLLSASAHPTAAIDALHLLAARAVGILHAMVNPVELSIISFVSSSSCRFFLLSFFLPPVGVEGSLHDLVNMRHTLVNGGSLHDLLRRGGSSTGASAGAYPVRERRVSSPRYWREDICRW

SEQ ID NO: 162537 - protein, 94 aa, Oryza sativa
  Clone ID: PAT_MRT4530_61619C.1.pep
MAAATMALSSPVMARAAPSTCSGLFGEARITMRKTAGKPKPAASSRSPRYGANRVLYLGPISGETTSYITGEFPGDYRRDTRTLYCEPKTFGKK

SEQ ID NO: 162538 - protein, 79 aa, Oryza sativa
  Clone ID: PAT_MRT4530_6161C.1.pep
MYAMLYKSLTLHHHRCVCSKYTRRQDRASRGRNGAAARRDRAAAPESSLEPRSGGLRPPPSAAGGDGLNVTISGESKAQ

SEQ ID NO: 162539 - protein, 370 aa, Oryza sativa
  unsure (1)..(370): unsure at all Xaa locations
  Clone ID: PAT_MRT4530_61620C.1.pep
YYIQWFNNSGRIKVTQLVRLNFAIGYYCDFVDCDVVPMHACSLLXLLGRLSQYDKNTLHHGRXNQYSFVHNRKKIVLHPMTLEAVFENDVARAKKEKNVEHAKSENQIVAKELVQHNKKDSKSEHEVLGCVSQGRTTRAATDFGVSPTFHIANLKPYLGEEDELKSRTTPMQEGEDDEDINTIDTSTSPQVQLHDPITRARARQLNYQILLARTSALARRSLARTVRWFRFVIEESIGFFLFDQWVVNLLGLGWLKMGINLQPFVHKLIWNVLVFCFNNQIILAVYFAICDSILTHYHELAWLLFLYGSFLTGDETVDLKNGLTCCIYNVISMLTMEMARVSAVNTKTTRYLLVFFMITDKFASVQNIPM

SEQ ID NO: 162540 - protein, 52 aa, Oryza sativa
  Clone ID: PAT_MRT4530_61621C.1.pep
GVTYVFLGPVPVRLRLVGLNASDSGSRMHVSFSAPFVRWTSARSLTSSRTSG

SEQ ID NO: 162541 - protein, 108 aa, Oryza sativa
  unsure (1)..(108): unsure at all Xaa locations
  Clone ID: PAT_MRT4530_61622C.1.pep
FSLELITRKXILDSKKSSLVXVEYVNCYEKEXXGRIMFDNEIPAEENMATLEAIGILAMKCLSDNIDERPEMREVAEPLVMLKMAWKQLTRKHISCHFQDSHWETTQA

SEQ ID NO: 162542 - protein, 210 aa, Oryza sativa
  Clone ID: PAT_MRT4530_61623C.1.pep
MRISGSMGVLMRAQMWMGVDNGDKWQVQTSVTDYSSRATVFDVFLNEKLTYFRKSFFGLVGTISAMLVKVEKGSFCRMEGVRLMLARVLLVLQLVVLVVILSPLAVFYLFGLLITAGLSLWRLLQRDYGAGEEAANLAPALNVLYSLALVQGALFFYYFTSRLLGRRLANLVAGVYSFGGEGEEEDDGGRTSVVEYMRQTRNGCEKDPSS

SEQ ID NO: 162543 - protein, 98 aa, Oryza sativa
  unsure (1)..(98): unsure at all Xaa locations
  Clone ID: PAT_MRT4530_61624C.1.pep
MGGWEILKWKNSQITAVGASETEAARGGGRWAAVGGERRRETRRMRRAEAGGGRXREMRRLPCGARRRRRAGRGXLAEGAXXXLCVSAIGVTSGLRSW

SEQ ID NO: 162544 - protein, 62 aa, Oryza sativa
  Clone ID: PAT_MRT4530_61625C.1.pep
NVPGTSAKDVMDLVLLTQYFDTMKEMGSTSKSSAIFLLHGPGAVADIASQIRDGCLQAHQTK

SEQ ID NO: 162545 - protein, 73 aa, Oryza sativa
  Clone ID: PAT_MRT4530_61626C.1.pep
STPAGPAPRVKPGRSESGPRRRRVVGAASPHPSARAWAGISSSPATPHRIVAIILRRPKSSERCSSSLSKVVV

SEQ ID NO: 162546 - protein, 113 aa, Oryza sativa
  Clone ID: PAT_MRT4530_61627C.1.pep
KEMEGKLREMGFVGASVKPLSGKDGQRSMLVKFASSLAGLSEPERLAQSLEKQGHGRAEWYRVRSVPPGADGGSNPLLVKVGAKGERTWVLYGYLATAWDLDALDLESKQNAV

SEQ ID NO: 162547 - protein, 207 aa, Oryza sativa
  Clone ID: PAT_MRT4530_61628C.1.pep
MEHLTIVLNEPSATAKLADCAGVGIGEVGASPSTRCAANTWDPITVTKEGTLIRANNSDRRRGGREGARSSWRRRGSSIVTEAGRELVVLNKQRPDPTTLRLDPVVKGSLPSCSHHVPSPPVADDAAVDGKGRDAEMDDEGVGIGGGSKHHQSYTYVFLKDTKIYVYRDVEARNRFTGAAWTCGTDGPAAWPHGTARWRGPVARHRA

SEQ ID NO: 162548 - protein, 468 aa, Oryza sativa
  Clone ID: PAT_MRT4530_61629C.1.pep
MDRRAVVYDAEAVDDHERQGTVWTATSHIVAAVVGSGVLALAWTVAQLGWVVGPLVLVGFSCVTYYTSTLLANCYRYPDPVTGTANREYIDAVRCYLGPKNVMLCGCAQYVNLWGTLVGYTITASASMIAVKRVNCFHREGYGAGDCGASGSTYMVVFGVFQLLLSQLPSLHNIAWLSVVAVATSFGYSFISLGLCAAKWASHGGAVRGTLAGADLDFPRDKAFNVLLALGNIAFSYTFADVLIEIQDTLRSPPAENKTMKRASFYGLSMTTVFYLLLGCTGYAAFGNDAPGNILTGFAFYEPFWLVDIANICVIVHLIGAYQVFAQPIFARLESYVACQWPDAKFINATYYVRVPGRWWPAATVAVAPLKLVLRTIIIMFTTLVAMLLPFFNAVLGLIGALGFWPLSVYFPVSMHVARLGIRRGEPRWWSLQAMSFVCLLISIAASIGSVQDIVHNLKAAAPFKTVN

SEQ ID NO: 162549 - protein, 379 aa, Oryza sativa
  Clone ID: PAT_MRT4530_6162C.1.pep
MDGEQLMSGELDNSFNALMVSGEGESGQAHHEGTGTTLLGWKDLPMELLLRILSMAGDDRMVIVGSGVCTGWRDTLEWGVTNLSLSWCQAHMNDLVMSLAQKFTKLQVLSLRQIKPQLEDSAVEAVANNCHDLRELDLSRSFRLSDRSLYALAHGCPHLTRLNISGCSNFSDAALAYLSSQCKNLKCLNLCGCVRAVSDRALQAIACNCGQLQSLNLGWCDSVTDKGVTSLASGCPELRALDLCGCVLITDESVVALANGCPHLRSLGLYYCQNITDRAMYSLAANSRRVRSKGRSWDAAARKNAGAGADGLASLNISQCTALTPPAVQAVCDSFPALHTCPERHSLIISGCLSLTSVHCACAHHPHRHGRAILSNHAY

SEQ ID NO: 162550 - protein, 59 aa, Oryza sativa
  Clone ID: PAT_MRT4530_61630C.1.pep
MAHDGLSRENHSPPMVLLLGVAKSATEGIGAKPVEEFGGAHADSDDQGLLTMVAVNAVW

SEQ ID NO: 162551 - protein, 44 aa, Oryza sativa
  Clone ID: PAT_MRT4530_61631C.1.pep
ANIRFDHYLVACNTATVDPTTYEASQVNLLLGGGEDAALLGLNP

SEQ ID NO: 162552 - protein, 58 aa, Oryza sativa
  Clone ID: PAT_MRT4530_61632C.1.pep
TTTHLQTYLKAHTSNFNHSQQTPYIPNTNKQSQNYPHSPAQLTFSPSCFPPGTSTLPS

SEQ ID NO: 162553 - protein, 212 aa, Oryza sativa
  Clone ID: PAT_MRT4530_61633C.1.pep
MANSSCLSTSPAALRLARPKLPDSAMIMQLQLQLQHAPLFPRPPAARAHHHHHHQRCLLLAVSDHVAAKPVAVPVGRMRMRAATAMVSQEEAAATAVEEQQEEEVEEEQLQEEDGAAVQEEEQGGVLEGSSGGGEAEAEAEAAGITTKLYFGNLPYNCDSAQLAGIVQDYATPEMVEVLYDRATGRSRGFAFVTMSTIEDCARAFFVPQLVN

SEQ ID NO: 162554 - protein, 61 aa, Oryza sativa
  Clone ID: PAT_MRT4530_61634C.1.pep
KKQNLRKIFILAPMCAVFPVIISNHNVNPHLNVCPKIKPWFVTNFHPLFGGTFKYYPHSRI

SEQ ID NO: 162555 - protein, 106 aa, Oryza sativa
  Clone ID: PAT_MRT4530_61635C.1.pep
RWFWYSGAGARRIQQLCVAVMETEGECAAETIAMHAAVMVTKGEHRFLGGDAQSLGLPPVAASVPPPFFLHRHQTTLPVHRCVAEEGTATVKEVWQARAVRRGGGS

SEQ ID NO: 162556 - protein, 95 aa, Oryza sativa
  Clone ID: PAT_MRT4530_61636C.1.pep
MAWSARARRGATGSRRRLGARKEEEAAALGTNPLLSFPLDAGGGRGADGRGGTDSTSRSPPRSEKGASRQWRQRRRSPRPRAAAPDRGGEPSAIG

SEQ ID NO: 162557 - protein, 94 aa, Oryza sativa
  Clone ID: PAT_MRT4530_61637C.1.pep
KAGHPFVPSFQLSGQETFLGIELSLGRVFSVLWRKNYRLGGCPLTNLCPLGEHKWFPYAGLGLSPLLARFSSGARVCLQFKFEKLGLPGKQESS

SEQ ID NO: 162558 - protein, 172 aa, Oryza sativa
  Clone ID: PAT_MRT4530_61638C.1.pep
YAVAATAGEGDAEDAQSCCFETPGGGAAATATDAVSGATSCKACRVTEASVLPPLLRIFGSPDRHARRPVSPSAAARRLSSPSAASRPGTPSPRRSSPVDDVPAPLPIRRPPQLRASASPAAARSHAASAVRRSTPLAVRSSAPFSAGIPRGASALMPRPRHGTARYASLWV

SEQ ID NO: 162559 - protein, 223 aa, Oryza sativa
  Clone ID: PAT_MRT4530_61639C.1.pep
MRAGLEEAQRRHVRALVAAAARAPTGRVRAAEAKLDRACCRNAELEEKSPYAVAAATGEGDAEDAQSCCFETPGGGAAATAADAVSGATSCKACRVTEAFVPLLPCRRLCLCGTCEAAVDACPVCATTKIASVHPGSARTPPRLPVGRCSSVVLPIGRRPSRYPFSPPILTCRRRPGAAPHSPATAAPRLRFAGRRALTRRLRRSPLNPPSPPGCLLPTRRPA

SEQ ID NO: 162560 - protein, 351 aa, Oryza sativa
  Clone ID: PAT_MRT4530_6163C.1.pep
MALEAVLLSRGDLFGRRRCAMEGGGGGWSSPFSGFEGVMDLDGGNWDAAACSSMLLHGFQELEIPAAAAAAAAMAPPPPPVEPANCAENAGGVGGHQEDQAAVAAAATAVQSGRRKRRRARAAKNKEEVESQRMTHIAVERNRRKQMNEYLAVLRSLMPPSYAQRGDQASIVGGAINFVKELEQLLQSLEARKSSRQCAAHDAAAAAAPFASFFTFPQYSMSAAAAAAPVAPVVNELHGRDDGGAGTAEAEASGSKPSAVADVEVTMVESHANLRVLSRRRPRQLLRLVVALQGHRLTVLHLNMTSAGHMVLYSFSLKVEDDCQLTSVDEIATAAHQIIEKIQEEQGCSLD

SEQ ID NO: 162561 - protein, 177 aa, Oryza sativa
  Clone ID: PAT_MRT4530_61640C.1.pep
LAAGAQRAASVGAEELVGASGGEAEAGRGQAAEAGRGRVVVTRGGEAGRGRVIEGEAAPGTKRSSGRAAAVGRRGGAWHRRAGGGSRQGGGRSRRRRSIARATTVADEATVGRSWGRRQSRRWRSARTSVDGCGGDGGCGRADAVRSSRVGRAPPAIFPGWIGPGSKRNISLQGPTH

SEQ ID NO: 162562 - protein, 82 aa, Oryza sativa
  Clone ID: PAT_MRT4530_61641C.1.pep
LKMEIPERLELSSVSLSPSHSPVKPRPSPLIYCYFPSDLTSHSHHVLPHRVIRGDRSGKKGKQTRVVERWSRRTEKWGSGEE

SEQ ID NO: 162563 - protein, 42 aa, Oryza sativa
  Clone ID: PAT_MRT4530_61642C.1.pep
RSLVIITIPVVFSLVTICVAPSKACLFLDSSDDICASCSVPN

SEQ ID NO: 162564 - protein, 111 aa, Oryza sativa
  unsure (1)..(111): unsure at all Xaa locations
  Clone ID: PAT_MRT4530_61643C.1.pep
SGGTXRRRRRNRRRRCLPTRVHGELNRAAAAAVAVAAEVAVLVVLETAPRRRHRHRHRHRPAGGGSSRGGAIPVGRGLGPRGPGRRGAEKRRRGQNARILDPSCPAXXXRP

SEQ ID NO: 162565 - protein, 64 aa, Oryza sativa
  Clone ID: PAT_MRT4530_61644C.1.pep
ILIYHDPPHHRHVVRCRQLKKQVLSHHSRLLLLLRHRRCERLARPIAHDTHKQSRTQSVRQSSC

SEQ ID NO: 162566 - protein, 51 aa, Oryza sativa
  Clone ID: PAT_MRT4530_61645C.1.pep
CPVGMKIILGFALHDIAGCKATEQDDASDDRHEAISAARNSRATSTGSYHT

SEQ ID NO: 162567 - protein, 160 aa, Oryza sativa
  Clone ID: PAT_MRT4530_61646C.1.pep
MVPFHVGAADGVTRSATGGGGAGRRPGNGGAAMRMQRGAARLAARGAARRAEGWRGMACYLWWAAGDGGSAICSLLPCVRFDCSASLASPGTQLGRASELASRRRARAPRPVGTPVALRAIRCGTSCSPVPDTQAQHSYLVGVCRSAVPRSFLLRKDLSG

SEQ ID NO: 162568 - protein, 66 aa, Oryza sativa
  unsure (1)..(66): unsure at all Xaa locations
  Clone ID: PAT_MRT4530_61647C.1.pep
MLMHAIAECNVSDQYDVKSQCYTPSQVQTAVLVQXHVLSPHYVYGTQQAGIAXSRFLLSAAFKLTN

SEQ ID NO: 162569 - protein, 47 aa, Oryza sativa
  Clone ID: PAT_MRT4530_61648C.1.pep
MDAASSELNIIAGASGLEPFSGRSKEFRGCNVDVSRRHSIGAQLRES

SEQ ID NO: 162570 - protein, 80 aa, Oryza sativa
  Clone ID: PAT_MRT4530_61649C.1.pep
MAHLHLGICENHYFCMRVLKSLEAAHGSSRVGAERLADSPESGNGHWIHPSRHHHRQILAHQGGWEVERRWDPRGRWKGA

SEQ ID NO: 162571 - protein, 218 aa, Oryza sativa
  unsure (1)..(218): unsure at all Xaa locations
  Clone ID: PAT_MRT4530_6164C.1.pep
FLNLTSSFFMQFAGINGILYYTPEILEQVGVGGFFSKFDLXSSSTSILLSAIATLVMIPCIGVAVPFVDTKGRNFILLGTIPILLLSLAIMLVANIMNMSTDLHAITSALCVIVYQCVFVMGFGPIPNILCAEIFRSWIRPXCLVICSLAFWICDTIVTYTFPVLMNAIGLAGVFGIFATVCALAXLFVYFKVPETKGIYLLRFCRSVLLLPTSHPKM

SEQ ID NO: 162572 - protein, 525 aa, Oryza sativa
  Clone ID: PAT_MRT4530_61650C.1.pep
PNHVLENVLLESILQFLTTARDRNMASLVCRYWYHAEAETRQELFIRNCYAVSPNRVIERFRGLRSITLKGRPCFADSTLVPKGWGAYASPWVAALGPAYPHLKCIFLKRMTVSDNDLRLIAQSFPQLRELSLMSCDKFSATGLAIIAEQCRHLHVLDLINDKVEDTVDKQVDWISMFPKPSTSLESLLFSCVDTPCNFESLEALVARSPGLCQLGVNRHVTVEQLCCLMAIAPNLTHLGTGVFRSKTGYPAGLQDANPDYLPAIYPVCANLTSLNISSATLTGQQLAPIIRSCGNLRTFCVRDSIGDDGLSAIAETCLDLQDLRVYRLLRGSEHHLSVSDVGLETISKGCQKLKTLTYYCGSMTNAAMVIMSSNCPNLEVFRLSILKTYLPDRITGEPMDEGFGAIVMNCKKLSRLSTSGLVTDKAFAYIGQYGKSIKTLSVAFSGNTDMSLRYVFEGCTRLQKLEEGAVREVSDLANADGDGAAAAKAAAALGRWGGRAARDHDADAPPRPRWRNRVEVYYWA

SEQ ID NO: 162573 - protein, 59 aa, Oryza sativa
  Clone ID: PAT_MRT4530_61651C.1.pep
VPRTLDGMQLSRPCPPGNGGRNAGSPPGGFTNNRPFGKSFSAIKVPIGNGNFPTLCVLR

SEQ ID NO: 162574 - protein, 71 aa, Oryza sativa
  Clone ID: PAT_MRT4530_61652C.1.pep
ALKFLLLIFKQSLQCGVIAESVSTVQLCCFRLQGIVHNHRKMSLVRPVYHSTWKKCYIHFTVNQPLLGISK

SEQ ID NO: 162575 - protein, 159 aa, Oryza sativa
  Clone ID: PAT_MRT4530_61653C.1.pep
MAFAESIWTFMPGKKGSVVQGPNTRTLTNAHDGILDDINCAQIAGKHVGDHSNCANVIKAGVISLLGKLVQYPERPGEPFCRYYMKFGECKHMTFCKYNHPKDRFSCKTTNTIRSESGSPHGQQTTILENQFGLPSLVDKATANTTKSCGICVIFHDTR

SEQ ID NO: 162576 - protein, 47 aa, Oryza sativa
  Clone ID: PAT_MRT4530_61654C.1.pep
MDDNVLTKKIEHTGLGDLLSSCAGPKIAVRLDVGVAAASVDVVLMYP

SEQ ID NO: 162577 - protein, 95 aa, Oryza sativa
  Clone ID: PAT_MRT4530_61655C.1.pep
PWPRPFCAWPVLLAGWISGRPRGSSFFCRLPLWAPPVWPFMFPPGILCAIVSPNFFSPHFWFSLGFPQVSFRSFWGIPGRLQETVQKFPNKNKRT

SEQ ID NO: 162578 - protein, 164 aa, Oryza sativa
  unsure (1)..(164): unsure at all Xaa locations
  Clone ID: PAT_MRT4530_61656C.1.pep
MYRRSGVRRDIEPRGLLLPHYTSGAHLVDIIQGRGIAGPXLPGCPESYQQQXQQSGQAQLTESHSQCQKFKDEHQKSHRFRQGDVSALPAGVAHWCYNDGEVPVVAKXATDLSSGAHKLDPRQREFLLAXGNMEKPSGIRGVRAEEXRAQNIFSGXSTELLSEA

SEQ ID NO: 162579 - protein, 41 aa, Oryza sativa
  Clone ID: PAT_MRT4530_61657C.1.pep
VLKKFWGLFQSSVLHLFYSGLCRKVCFIIRQVMPFLCTKGE

SEQ ID NO: 162580 - protein, 136 aa, Oryza sativa
  Clone ID: PAT_MRT4530_61658C.1.pep
MSTRRGGDDRAGAARRRATATGPLALVSGGDGRPPHGSGGGGGRRDYGGDGSGGRPPRARIRERRPSPARIRQRRPSPVAVRGGGGRAQQRCDWVAVGRGWSRWRWPEKSDDPSGKHQPPAIVPRACALVLGKREK

SEQ ID NO: 162581 - protein, 59 aa, Oryza sativa
  Clone ID: PAT_MRT4530_61659C.1.pep
IIAEKKKISPRSEASNRLLKMQIFVKTLTGKTITLEVESPDTIVIVLATIQDMEVILPV

SEQ ID NO: 162582 - protein, 481 aa, Oryza sativa
  unsure (1)..(481): unsure at all Xaa locations
  Clone ID: PAT_MRT4530_6165C.1.pep
MASSLLSSAASGLPPKPQPPSSTPPSSASARPRGFRRFMLARAAGGRDPEPPPLPEGTEKRSLAVRTGEVFLGLAALLVPPGKGRXPAVEEVEAKDGVVWEQRPEDVEAERRRRELTGPGFSFSAAGLLFPYHIGVAQCLIDRGYLXVIASGNTMRDALQVTKDLADNCRSNGTAFRLGAVLKDVLDRFLPDDVHIRCNGRIRVAITQLSWRPRGLLVDQFDSKDDVISAVITSSFIPGYLAPRPATFFRNRLCIDGGLTLFMPPTSASETVRICAFPASRLGLQGIGISPDCNPENRASPRQLFNWALEPAEDEVLDKLYELGYLDAADLVTQFQEATDEESKERIVANLANFAYDPYNYTFMRQLNILELFLDCITEPNERLIEFGIGGICNSCADPANASVITHCGGIPLVIQCLSSPVKNTVNYALGALYYLCNPSTKKDILKPEVLKAVREYAVAGDANTSFRNLANAFLDKHVNS

SEQ ID NO: 162583 - protein, 93 aa, Oryza sativa
  Clone ID: PAT_MRT4530_61660C.1.pep
MPCQSKLHWAAIKLITGTRPRRCSILQSLEIDFPKFLDTPSYYCLVELKLRIFPLCNPMSRTDTLAVRLSHGAADGWPSSRPTSSNQLPHALP

SEQ ID NO: 162584 - protein, 190 aa, Oryza sativa
  Clone ID: PAT_MRT4530_61661C.1.pep
MADIAYMNQFSCLSGLWFLMLDKGVPRHPGPLKVRPHWEALALQSEYVELVAVNDSFITTEYMVTLDLAKGVYAKFIDWDEQMFDRETYARFLDAVSRNDPDIAKFLMVMALCSTVVPIKRNDGTITYQAQSQDEEALVTAASKLNMVLASKDSNTAEISFNGCKFYYDLLDILEFTSDRKRMFAVVKDV

SEQ ID NO: 162585 - protein, 163 aa, Oryza sativa
  Clone ID: PAT_MRT4530_61662C.1.pep
MQSSLTGMNKCSIGKHVRLLIQLNARFLDAVSCNDPDIAKFLMVMALCSTVVPIKSNGGTITYQAQSQDEEALVTAASKLNTVLVSKDSNTAEISFNGCKFYYDLLDILEFTSDRKRMSAVVKDVQSGKILLLSKGADEAILPRCHQAGDGSCCSRSLILLLS

SEQ ID NO: 162586 - protein, 390 aa, Oryza sativa
  unsure (1)..(390): unsure at all Xaa locations
  Clone ID: PAT_MRT4530_61663C.1.pep
ENNIDFVGIMETVKHDFSPRMPRGLVVIYLRXWNWMPAFGKSGXILVGINTEKFDILEVNRKXFYVKVKLINITTKFKWDLIICGAASKEEKXFLNAFGKSFTSTKKNPLVMGGDFIILRKESEXKNKAGGYNKWSFIFNAIIEQASLRELCLGGRQFTWSNNQDSPTLENLDRVFISNKWEVQFPLIAVRSLPRGLSDHNPLIVTTGXNTISHPIFKFEQSWFLREDLNKVVEEVWNKNYSRTSIEKXQLRLKALRKKXLNGWNKNWEGLYRIEKQDILERIDAIDIRVESMGMSGSDREERRELEKRLKFVIREEKLKWIQRDRNTKFFHAKANGRKRLTTPVTLEELKTLIFEIKKNKAPGPDGITGEFYMHFWDLLWPCNSLRFIT

SEQ ID NO: 162587 - protein, 376 aa, Oryza sativa
  Clone ID: PAT_MRT4530_61664C.1.pep
MDFQVVVLAGGTSEKLSPLVSKDVPKALLPVANRPVLSYVLDLLEASDLKDIIVVVEGQEAARLVGAWASSAYLDRLLVEVVAVPEDIGTAGALRAISKRLTANDVLVISGDLVTDVLPGAVAATHRRNGAAVTALLCSVPISGPSDAASSGGKDKAKKPTRLNIVGLDITRQFLLHIVSGTDVEKDVRVYKRKIRAVGEMEIRSDLMDAHLYAFKRTTLQNILEEKESYRSIRLEVLPYLVRSQLVVGDASHLSGYSFSAQNNIIHPTSVLGSKTTIGPQCMLAEGSQLGDKCSVKRSVIGRHCRIGSNVKIVNSVVMNHVVIEDGCHIQGSVICNNVQLQERAVLKDCQVGAGYIVTASSEHKAESLSKKVERF

SEQ ID NO: 162588 - protein, 92 aa, Oryza sativa
  Clone ID: PAT_MRT4530_61665C.1.pep
MAGQQIVPSFLPSTKAYDCKNVVTKAQPQAWRSMSKKKKKKKKKKGPEMERGAFPNKTAARRLAYNLLILNAPGEKQGSNRGQGLRGEQGTP

SEQ ID NO: 162589 - protein, 1618 aa, Oryza sativa
  Clone ID: PAT_MRT4530_61666C.1.pep
MAITAYVSSNKQRFMNQYFLLIACLQLWSSITPVSPATTWGPLAIIFIVSASKEAWDDYNRYLSDKKANGREVLVIKAQDIHVGNIVWLYQNDEIPCDLVLIGTSDPQGICYVETAALDGETDLKTRIVPSICANLSPDQLGRVKGVVECSNPDNDIRRFDANMRLFPPIIDSEKCPLTINNTLLQSCYLRYTEWACGVAVYTGNQTKSGMSRGTAEPKLTAADAMIDKLTVAIFMFQIVVVLVLGFAGNIWKKNQGLKACSFLKALLLYFIILNCYGLHVTLDLSKGVYAKFIDWDEQMFDRETSYISVSFSTAISEDLGQVEYVLSDKTGTLTENRMIFRRCCISDILYGENNEDALKDARLLDAVSRNDPDIVKFLMVMALCNTVVPIKSNDGTITYQAQSQDEEALVTAASKLNMVLVAFSYLRLIFAFISLFSISTEISFNGSKFYYDLLDILEFTSDRKRMSAVVKDVQSGKILLLSKGADEAILPRCHQGQQIRTYLETVEMYSQLGLRTLCLGWRELEEDEYKDWSKTFQDASCSLENRERKIAEVCHRLEQDLQILGVSAIEDRLQDCAFVLDGWALEIILKHSKESFTKLAMLSRTAICCRMTPLQKAQLVGLLKSVGYLTLAIGDGGNDVRMIQEANIGVGISGREGLQAARAADYSIGKFKFLKRLILVHGRYSYNRTAFISQYSFYKSLLICFIQILLPVTTIIFDKDISEETVLQYPQILLYSQSGRLLNPTTFAGWFGRSVYHALVVFLTTICAYSDEKSEIEELSMVALSGCIWLQAFVVTLDTNSFTYPQIILIWGNFIAFYMINLIVSAVPTLQILTLRFLKPSGETIFLQLIVAELKASQTNQSEASSRHMLSKARHFARWKPIPPPPTHARRLSPRPPRRPSSAATEPEAEADQDAGATTAAAAASAEQIGSAARGVFDGMRRRAALSWNATVAAHARRGRVRDALGTAARMHRSAAGLDEATYASALGACARGRCLRMGWQVHCQVVKSGSDDFPVVGASLLDFYSSCLDLDAARTLFDTLHANNELLWSPMVVALVRFNLLSDALDLLQRMPPSRDLFAWTAIISGYARGANEYCCKSLELFVQLLAEDGVMPNEFTYDSVLRACVKMGALEFGRSIHGCLIQSGFESEQLITSALVDLYCRSGAVDDAVMVYNGLQMPSLITSNTLIAGFISMGRTEDAKLVFSQMTEHDSGSYNLMIKAYADEGRLEDCRRMFEMMPRRNMVTLNSMMSVLLQNGKLEEGRKLFEQIKDERNTVTWNSMISGYVQNDQSSEALKLFAVMCRLSIECSASTFPALLHACATIGTIEQGKMVHALLCKTPFESNGYVGTALVDMYSKCGCVSDARAAFSCIMSPNVASWTSLINGLAQNGHWMEAIVQFARMLKNNVKPNEITFLGILMASARAGLVNKGMRFFHSMESYGVVPTVEHYTCAVDLLGRARRVREAEKFISKMPIPADGVVWGALLTACWYTMDLEMGEKVAEKLFYMGTKHISAYVAMSNIYAKLGKWEDVVKVRTRLRSINAKKEPGCSCIEVKDMVHVFLVEDRNHPEREEIYLMLEDLVSNISYSETDDETHGYYLEPASLDLLTSQKRLANQ

SEQ ID NO: 162590 - protein, 54 aa, Oryza sativa
  Clone ID: PAT_MRT4530_61667C.1.pep
REHYEKKGIFCYCCYEHKATCSTYLFPLKGYEFDDYSPEAIHLNSIISIIKMLK

SEQ ID NO: 162591 - protein, 77 aa, Oryza sativa
  Clone ID: PAT_MRT4530_61668C.1.pep
RSFFYLFFKKKKNAHSRGYTTLFQKTQKNGTSTNSSHGFENGGTIYFKQFRTIKLHILGGGFLRKRTKETPSNVLRE

SEQ ID NO: 162592 - protein, 37 aa, Oryza sativa
  Clone ID: PAT_MRT4530_61669C.1.pep
MESPPESSSSSPVLLNIGSLPFSATTVETLTQREPSS

SEQ ID NO: 162593 - protein, 518 aa, Oryza sativa
  Clone ID: PAT_MRT4530_6166C.1.pep
MLRRACTRVVGGGRRRAPMAPMASSLLSSAASGLPPKPQPPSSTPPSSASARPRGFRRFMLARAAAGRDPEPPPLPEGTEKRSLAVRTGEVFLGLAALLVRAGRGGGAAVEEVEAKDGVVWEQRPEDVEAERRRRELTGPGFSFSAAGLLFPYHIGVAQCLIDRGYLTERTPLAGSSAGAIICAVIASGNTMRDALQVTKDLADNCRSNGTAFRLGAVLKDVLDRFLPDDVHIRCNGRIRVAITQLSWRPRGLLVDQFDSKDDVISAVITSSFIPGYLAPRPATFFRNRLCIDGGLTLFMPPTSASETVRICAFPASRLGLQGIGISPDCNPENRASPRQLFNWALEPAEDEVLDKLYELGYLDAAELVTQFQEATDEESKERIVANLANFAYDPYNYTFMRQLNILELFLDCITEPNERLIEFGIGGICNSCADPANASVITHCGGIPLVIQCLSSPVKNTVNYALGALYYLCNPSTKKDILKPEVLKAVREYAVAGDANTSFRNLANAFLDKHVNS

SEQ ID NO: 162594 - protein, 126 aa, Oryza sativa
  unsure (1)..(126): unsure at all Xaa locations
  Clone ID: PAT_MRT4530_61670C.1.pep
MGXLSKVVRPXXXLXXLVNDGTIXAXRMKIIAQLKANXDXKKKTMTMVEQSXVLNTPXAXXKTKRXFFXYALRQELEXPVLXKXSREVXXXYLRXXXFXXRXLSLASFPNMPPPPNISSHCETFLH

SEQ ID NO: 162595 - protein, 77 aa, Oryza sativa
  Clone ID: PAT_MRT4530_61671C.1.pep
DSQNTTRINYGGNRLRQRAMPCGYTDTVCVLHVLHHTSIDHAAAEGLQGVHTGLWAYGDALGIDHILRAESQIHLQD

SEQ ID NO: 162596 - protein, 129 aa, Oryza sativa
  Clone ID: PAT_MRT4530_61672C.1.pep
MVMEDGEMSLSNLVLGFFEEAEREQRWPENGDDDDEGSSGSGAAESKAFWQNQHSQLHEALAKTSQVESRIREDTEEAIRKMRAAGAVCSCARRAAAGDCRSCTLRHVEQRLRDTGYRRGAARRCGWWW

SEQ ID NO: 162597 - protein, 812 aa, Oryza sativa
  Clone ID: PAT_MRT4530_61673C.1.pep
MAQMLLHGTLHATIFEAASLSNPHRASGSAPKFIRKFVEGIEDTVGVGKGATKVYSTIDLEKARVGRTRMITNEPINPRWYESFHIYCAHMASNVIFTVKIDNPIGATNIGRAYLPVQELLNGEEIDRWLDICDNNREPVGESKIHVKLQYFDVSKDRNWARGVRSTKYPGVPYTFFSQRQGCKVTLYQDAHVPDNFIPKIPLADGKNYEPHRCWEDIFDAISNAQHLIYITGWSVYTEITLVRDSNRPKPGGDVTLGELLKKKASEGVRVLMLVWDDRTSVGLLKRDGLMATHDEETENYFHGSDVNCVLCPRNPDDSGSIVQDLSISTMFTHHQKIVVVDHELPNQGSQQRRIVSFVGGLDLCDGRYDTQYHSLFRTLDSTHHDDFHQPNFATASIKKGGPREPWHDIHSRLEGPIAWDVLYNFEQRWRKQGGKDLLLQLRDLSDTIIPPSPVMFPEDRETWNVQLFRSIDGGAAFGFPDTPEEAAKAGLVSGKDQIIDRSIQDAYIHAIRRAKNFIYIENQYFLGSSYAWKPEGIKPEDIGALHLIPKELALKVVSKIEAGERFTVYVVVPMWPEGVPESGSVQAILDWQRRTMEMMYTDITEALQAKGIEANPKDYLTFFCLGNREVKQAGEYQPEEQPEADTDYSRAQEARRFMIYVHTKMMIVDDEYIIIGSANINQRSMDGARDSEIAMGGYQPYHLATRQPARGQIHGFRMALWYEHLGMLDDVFQRPESLECVQKVNRIAEKYWDMYSSDDLQQDLPGHLLSYPIGVASDGVVTELPGMEYFPDTRARVLGAKSDYMPPILTS

SEQ ID NO: 162598 - protein, 69 aa, Oryza sativa
  Clone ID: PAT_MRT4530_61674C.1.pep
GDGAGVPDGTTLMIDDPSKLARDPSNIDRHTPTLTTTTTVLFRGQKKRQGLPTYKLGPNASKLRARSKL

SEQ ID NO: 162599 - protein, 76 aa, Oryza sativa
  Clone ID: PAT_MRT4530_61675C.1.pep
AAEEQGPSLYVHCPLTGILHPPHPSGQKLQILTCFCLENLFSPRLVPPNLRTLSVLPLICFSSVYRRIIFDHVIRI

SEQ ID NO: 162600 - protein, 86 aa, Oryza sativa
  unsure (1)..(86): unsure at all Xaa locations
  Clone ID: PAT_MRT4530_61676C.1.pep
KADNSDGTPLVNRGLTLQPLEVPHQPLPSRSRNIXSPPPPPPPPPQPPPLXRPNPSPPALVSLPTNAPPPPPPLPGVEREERSYRN

SEQ ID NO: 162601 - protein, 111 aa, Oryza sativa
  unsure (1)..(111): unsure at all Xaa locations
  Clone ID: PAT_MRT4530_61677C.1.pep
FSATRKSVIGNHSSLAQLLDRLLPPARMLDATQTPSARSRLPHRPALASTAPRAWLTQVAAFPRFLPDWGPRHPAYAGRAAEPSLATPRXRXGAEGRRRPVANKAVXXTRP

SEQ ID NO: 162602 - protein, 295 aa, Oryza sativa
  Clone ID: PAT_MRT4530_61678C.1.pep
MSTIQVPNPTDPELAQRLVLDLLDPDLRGHALAELRKKREMFPDLAPLLWHSFGTIIVLLQEIIVVYPVLSPPTLSLLASSRVCNALALLQCVASHPETRSHFLKAHIPLYLCSFLENTSKTRPFEYLRLTSLGVIGALVKAEGTEVINFLLQYEFVPLCLHAMAVGSELSKTVATFIIEKIVLDDAGLGYICATADRFFAVGTALAGMVTSMDDKPSPRLLKHIIHCYLRITDNPRGLEALQTCLPTTLIDGTFNNLTKDDPTMQQWLQELLVKVRSGKMGGLPPPVQGHMPRV

SEQ ID NO: 162603 - protein, 51 aa, Oryza sativa
  Clone ID: PAT_MRT4530_61679C.1.pep
VPLRNSYRVHRFPVTSWLPSEFRITTAKFMYPVYSFLEHGIVQTQYPPLPV

SEQ ID NO: 162604 - protein, 153 aa, Oryza sativa
  unsure (1)..(153): unsure at all Xaa locations
  Clone ID: PAT_MRT4530_6167C.1.pep
IRRRAASTAGFAVARRSSATTSSASKPAETLLPPXPTAVTTFAVSSRSSPAVRTTTGHPPDDAPTVPAVADPTRAPHRHPSSPCRSPSLPXPVSAGCEQPPPLATVLAAAAPPPLPASPLRTAPRPPSRTRPWDRFALHPPSPPPLPSRKSAR

SEQ ID NO: 162605 - protein, 138 aa, Oryza sativa
  unsure (1)..(138): unsure at all Xaa locations
  Clone ID: PAT_MRT4530_61680C.1.pep
MAPPSLPILLVLLSLSSSLYSFSAAAADRWTDAHATFYGGADASGTMGGACGYGNTYGQGYGTDTAALSAVMFGDGLSCGACFELRCGGGXXKKTXKGGLPPADRQAIGGRGTRPGVLGNHCLHRYPGWCVKPHRFNI

SEQ ID NO: 162606 - protein, 79 aa, Oryza sativa
  Clone ID: PAT_MRT4530_61681C.1.pep
MARLSPPAATFSPVSTLPFPFSCKARLGFSSLLPFPSSPPSLFSPCGFLSREHSTARSPRFPPPLPFFGLASSSSSYPA

SEQ ID NO: 162607 - protein, 179 aa, Oryza sativa
  Clone ID: PAT_MRT4530_61682C.1.pep
MMSSSSSPPPPSIPTGGGGFFRGYTKLCKGLAVILLLVHLLIQLFPSAVTYLALVPGRTIPFAWNLITGGYVELTIPGVIISIVGLLLFGKLLEPLWGSKELSKFIFVVNFSTSVCVFITAIALYYTTQEESYLYAPLSGFYGVLTGLLVGIKQLMSEQELNLFVLKIKAKWIPSLVAL

SEQ ID NO: 162608 - protein, 160 aa, Oryza sativa
  unsure (1)..(160): unsure at all Xaa locations
  Clone ID: PAT_MRT4530_61683C.1.pep
MFLTGIKKFKKRKNTIFGHIGVXIGCIRGKNSLRDSSGELLSISANIGIYWXRGCDVFDRNEIVQKATKHDFGTYRCVLGVFVAKTHFVIRAANFCQLIPTLAYIGPHGCDVFDRNEKVQKAPKHDFWTYWSVLGAFVTKTLFMIRAANFCQSMPILAYI

SEQ ID NO: 162609 - protein, 905 aa, Oryza sativa
  Clone ID: PAT_MRT4530_61684C.1.pep
MADLEAGMVAAATDQGNSTRSQDDAATLIPNSGNLGSSNRSTKTARFKDDDELVEITLDVQRDSVAIQEVRGVDEGGSGHGTGFDGLPLVSPSSKSGKLTSKLRQVTNGLKMKSSSRKAPSPQAQQSAKRVRKRLDRTKSSAAVALKGLQFVTAKVGNDGWAAVEKRFNQLQVDGVLLRSRFGKCIGMDGSDEFAVQMFDSLARKRGIVKQVLTKDELKDFYEQLTDQGFDNRLRTFFDMVDKNADGRLTAEEVKEIIALSASANKLSKIKERADEYTALIMEELDPTNLGYIEMEDLEALLLQSPSEAAARSTTTHSSKLSKALSMKLASNKEMSPVRHYWQQFMYFLEENWKRSWVMTLWISICIALFIWKFIQYRNRAVFGIMGYCVTTAKGAAETLKFNMALVLLPVCRNTITWIRSKTQVGAVVPFNDNINFHKVIAAGVAVGVALHAGAHLTCDFPRLLHASDAQYELMKPFFGEKRPPNYWWFVKGTEGWTGVVMVVLMAIAFTLAQPWFRRNKLKDSNPLKKMTGFNAFWFTHHLFVIVYTLLFVHGTCLYLSRKWYKKTTWMYLAVPVVLYVSERILRLFRSHDAVGIQKVAVYPGNVLALYMSKPPGFRYRSGQYIFIKCTAVSPYEWHPFSITSAPGDDYLSVHIRTRGDWTSRLRTVFSEACRPPTEGESGLLRADLSKGITDENARFPKLLVDGPYGAPAQDYREYDVLLLIGLGIGATPLISIVKDVLNHIQGEGSVGTTEPESSSKAKKKPFMTKRAYFYWVTREEGSFEWFRGVMNEVSEKDKDGVIELHNHCSSVYQEGDARSALIVMLQELQHAKKGVDILSGTSVKTHFARPNWRSVFKKVAVSHENQRVGVFYCGEPVLVPQLRQLSADFTHKTNTRFDFHKENF

SEQ ID NO: 162610 - protein, 131 aa, Oryza sativa
  Clone ID: PAT_MRT4530_61685C.1.pep
MPPPPRHAAAATASQRHAAAAVATPPPPPPRCRANRRPDAATPPLTNENENDRTNESENVNENENDRTNESENEHVNVRCRENVNENDRTNESENENDRTKTSKNEGTNVNENKRTNVNENERTNVNELGN

SEQ ID NO: 162611 - protein, 916 aa, Oryza sativa
  Clone ID: PAT_MRT4530_61686C.1.pep
MADLEAGMVAAATDQGNSTRSQDDAATLIPNSGNLGSSNRSTKTARFKDDDELVEITLDVQRDSVAIQEVRGVDEGGSGHGTGFDGLPLVSPSSKSGKLTSKLRQVTNGLKMKSSSRKAPSPQAQQSAKRVRKRLDRTKSSAAVALKGLQFVTAKVGNDGWAAVEKRFNQLQVDGVLLRSRFGKCIGMDGSDEFAVQMFDSLARKRGIVKQVLTKDELKDFYEQLTDQGFDNRLRTFFDMVDKNADGRLTAEEVKEIIALSASANKLSKIKERADEYTALIMEELDPTNLGYIEMEDLEALLLQSPSEAAARSTTTHSSKLSKALSMKLASNKEMSPVRHYWQQFMYFLEENWKRSWVMTLWISICIALFIWKFIQYRNRAVFGIMGYCVTTAKGAAETLKFNMALVLLPVCRNTITWIRSKTQVGAVVPFNDNINFHKVIAAGVAVGVALHAGAHLTCDFPRLLHASDAQYELMKPFFGEKRPPNYWWFVKGTEGWTGVVMVVLMAIAFTLAQPWFRRNKLKDSNPLKKMTGFNAFWFTHHLFVIVYTLLFVHGTCLYLSRKWYKKTTWMYLAVPVVLYVSERILRLFRSHDAVGIQKVAVYPGNVLALYMSKPPGFRYRSGQYIFIKCTAVSPYEWCWSYTFYGKKMHPFSITSAPGDDYLSVHIRTRGDWTSRLRTVFSEACRPPTEGESGLLRADLSKGITDEKARFPKLLVDGPYGAPAQDYREYDVLLLIGLGIGATPLISIVKDVLNHIQGEGSVGTTEPESSSKAKKKPFMTKRAYFYWVTREEGSFEWFRGVMNEVSEKDKDGVIELHNHCSSVYQEGDARSALIVMLQELQHAKKGVDILSGTSVKTHFARPNWRSVFKKVAVSHENQRVGVFYCGEPVLVPQLRQLSADFTHKTNTRFDFHKENF

SEQ ID NO: 162612 - protein, 59 aa, Oryza sativa
  unsure (1)..(59): unsure at all Xaa locations
  Clone ID: PAT_MRT4530_61687C.1.pep
IRAXEREREREREEEEVXVVCMXPXPLPQXQTXAAAAAASEVLQYSSEDLIKRXARGAP

SEQ ID NO: 162613 - protein, 90 aa, Oryza sativa
  Clone ID: PAT_MRT4530_61688C.1.pep
ILFCSVWCACGWGRPRSRVAVAAVGDGAAAAAAAEPNLVVSFGEMLIDFGPDVADASLVQISNYVTDPGWVPALSSFRVDQLFGHCLLYP

SEQ ID NO: 162614 - protein, 51 aa, Oryza sativa
  unsure (1)..(51): unsure at all Xaa locations
  Clone ID: PAT_MRT4530_61689C.1.pep
GVVYFDQTQAXQVQAFLALNLXPICGIYPNYYIAPRSIPTVGGVWFCIVIV

SEQ ID NO: 162615 - protein, 89 aa, Oryza sativa
  Clone ID: PAT_MRT4530_6168C.1.pep
MRKEERENGCSPPDRPLMQREDAGEDRRTPPSKWRGERVVDDVERGCESATPAPPSFLACTRLVFDWAAAREVAAVAVENGRSPIKSIT

SEQ ID NO: 162616 - protein, 98 aa, Oryza sativa
  unsure (1)..(98): unsure at all Xaa locations
  Clone ID: PAT_MRT4530_61690C.1.pep
MSNLSEPSKEAASADDSSAVQKTGAWSNTLNILLQQASVYGVAAGYCLSASLLSIINKWAVMKFPYPGALTALQYFTSXXGVLLCGHLKLIEHDGLNL

SEQ ID NO: 162617 - protein, 83 aa, Oryza sativa
  unsure (1)..(83): unsure at all Xaa locations
  Clone ID: PAT_MRT4530_61691C.1.pep
AHTLWWDLGDQFIDCQNVDLKEAFRLCHKDVNGCVTNRGRAYAVASXRHNPTDGCLXDLNNEGEADGKGTSGFIEVVKHGARR

SEQ ID NO: 162618 - protein, 77 aa, Oryza sativa
  unsure (1)..(77): unsure at all Xaa locations
  Clone ID: PAT_MRT4530_61693C.1.pep
ENDEXXGHTTMGRYWTMWXLPMFGCTDATQVLKGARGXQEXVPDAFVRIIGFDNVRQVQLIXFIAYKPPGCEXSGGN

SEQ ID NO: 162619 - protein, 118 aa, Oryza sativa
  unsure (1)..(118): unsure at all Xaa locations
  Clone ID: PAT_MRT4530_61694C.1.pep
MSNLSEPSKEAASADDSSAVQKTGAWSNTLNILLQQASVYGVAAGYCLSASLLSIINKWAVMKFPYPXALTAXQYFTSVVGVLLCGPLKLIEHDGLNLRTMWKFLPAAVMFYISIFTN

SEQ ID NO: 162620 - protein, 449 aa, Oryza sativa
  Clone ID: PAT_MRT4530_61695C.1.pep
MDDHPGHLVYIPLLEFFRCRCCHNSSSRAVPPARAVKAALAEALVWYYPVAGRLREIAGGKLVVDCTAEGVAFVEADADVRLEELGEPLLPPFPCVEVLLCDAGDIGVVVGKPIVFLQVTEFKCGGFVMGFYISHCIADGFGMIQFIKAIVDIARGEQAPMVLPVWERHILTSRSPPPTIGATNTNTVKFSSVLKDSTSIDDDIMLSTPQESMVGNYFLFRPNHISALRSHVHEHGATTATRFELITAVIWRCRTVALGYKTDHRVHLLFAANSRRHRGDGTLRIPEGYYGNALTYHVAAATAGELCGTTLARTVALIREAKLDGTTEERVRSTVAFLASLRLRRSGGRFPALAFDKAYAVSDFTRLGEDGLDFGWAERVGGGVATPSFVSFHSRWKLVSSDGDGEEEEAVAALMLLPKPAMDRFDKELALWLDLDKPSVGGLCLSSKF

SEQ ID NO: 162621 - protein, 202 aa, Oryza sativa
  Clone ID: PAT_MRT4530_61696C.1.pep
MAAGGGGGYRAEDDYDYLFKTNEFCLESKSTIGVEFATRSIQVDGKVVKAQIWDTAGQERYRAITSAYYRGAVGALLVYDVTRRATFDNVARWLKELRDHTDPSIVVMLVGNKSDLRHLVAVSTEDGKEYAEAESLYFMETSALDATNVENAFAEVLTQIYQTVSKKTVEASDDGSNAPIKGEKINVKDDVSALKRIGCCSN

SEQ ID NO: 162622 - protein, 84 aa, Oryza sativa
  Clone ID: PAT_MRT4530_61697C.1.pep
MSSEVDIMVVVDKLEGIAVVIVSVEIEDETIMNKLGYPALADEFQLQVLSSRTIAIVHEARSNKVTTTTMVLSLRNTMAQLIYA

SEQ ID NO: 162623 - protein, 102 aa, Oryza sativa
  Clone ID: PAT_MRT4530_61698C.1.pep
MLLGASVALMLCGSVTFMLGFFLMPWVIGLACVFLLVGFVTNLSVIWRAILWPASCSSSPKVASTFREDIIPNNVKLNLNFPANLDVLVPHKRTVFYINFLW

SEQ ID NO: 162624 - protein, 133 aa, Oryza sativa
  unsure (1)..(133): unsure at all Xaa locations
  Clone ID: PAT_MRT4530_61699C.1.pep
VVRLFSSPLPSPRPPAGGGSGSRRCGGVCSRRRXGRWRRRRGGAAEEGDEGGRRGDVCSRRRRXGGSGGRGRRRTAAARRRGLGGQRGRSMGDGVGSPPPSLPDFVSQHLKHRLPRRVVVSPPSRAPIRRRNP

SEQ ID NO: 162625 - protein, 54 aa, Oryza sativa
  Clone ID: PAT_MRT4530_6169C.1.pep
IMKPTQCLYSLKVQFFNCIVFMFLISAYISYYLKSQGMNVTIRFKNTETTHTCI

SEQ ID NO: 162626 - protein, 93 aa, Oryza sativa
  Clone ID: PAT_MRT4530_616C.1.pep
CLDKELRDPLQGFPELSRPDVTFGYWTAASRASPYDPDARARPQGPRSSVQSNRVHGAVQPHAAAGGPAGVPGNGRRRRQVGRGQARQGLRGL

SEQ ID NO: 162627 - protein, 96 aa, Oryza sativa
  Clone ID: PAT_MRT4530_61700C.1.pep
MEKYKGKLISHLVSCGEKKSMLREKMVIKGMSNTRALGMKTVGNDRKTASTISVTIFFSETKSETVKSETKTISEISENRKRNNTDGNMSVQIGNR

SEQ ID NO: 162628 - protein, 291 aa, Oryza sativa
  Clone ID: PAT_MRT4530_61701C.1.pep
WRARVGGAISRRISSRSSPTASPSRPTPASAPSAPPGAPPYRRPRRRSSSASTGTATTRGSCPRGSPPRSTRGWPRSSLTGASASAPATAGSPSTTPSSTSCSSASSIPSPASTSPSVRSRISPNTSCGCPRWCSRPTRRRPTSPRRPSPATTRAASSPTRLRGAAGGPTPGAPVSATGTASPTWCTTRNAAAAARGRCTASRRAATCTSSASTTPAARSSRCSTGATRRSTPPPRSRRRTTRSATAPMPRTWWSATTATCTRSGGTTPAPGWGHCPAGESTAWSTTRCSF

SEQ ID NO: 162629 - protein, 81 aa, Oryza sativa
  Clone ID: PAT_MRT4530_61702C.1.pep
MAGYSRATQIEDPATQMSPPPLERAPPSKTTCGLLLRVLTSGSVGAVLNFCKCALNKVCAPFDPEEEKKNEKGSRASKARI

SEQ ID NO: 162630 - protein, 118 aa, Oryza sativa
  Clone ID: PAT_MRT4530_61703C.1.pep
YALYPWIYDGYRYSIPARVRIVSVYIKEIYPMIGTESTDGKSPTRTRLGLYHIVRGPISPSSTWRSTEPRYKRDPLAGSMASNLTANTPTTAYEAGAYKSQVTRRSSRANSTTVSSIS

SEQ ID NO: 162631 - protein, 598 aa, Oryza sativa
  Clone ID: PAT_MRT4530_61704C.1.pep
MEKQQQPGGEEEEEVISMEKQQQPGEKKITGGEEEEEEEVISSVRYRGWKSMPYVIGNETFEKLGTIGTTANLLVYLTTVYHLPSVRAATLLNFFSGTTNLAPLLGAFLSDTFLGRYTTIAAASLASCLGMLVLTLTAAIPSLHPPPCTASSSSSSCQGPTHGQLAALLAAFAFLVVGAGGIRPCNLAFGADQFDPRTDSGRRGIASFFNWYYFTFTVAMMLSATLIIYLQSNVSWAIGLAVPAALMAISCALFFMGTRLYVRVRPEGSPFTSFARVIVAAVRKRRVPAPASADDLFDPPHQSKLVAKIAYTDQFRCLDKAAVVTPESRSSPWRLCTVQQVEEVKCLARIIPVWSAGIVYFIVVTQLGTFVVLQALQMDRRLTRWWAFEVPAGSMVVFNMMAMTVWIPVYDRVVVPALRRVTGKEGGISQLQRIGVGLVLSVATMVVAAAVEQRRRRLGAVGVKMSFLWLVPQQVAAGMSEAFAAIGQTELYYRQFPENMRSVAGALFFLAFALANYASGFMVAAVHRTTGWLAQDLNHARLDLFYLTVAAIAAANVCYFLLCARWYRFKNTTIADHVELPDYHHHQPGTANTIASKV

SEQ ID NO: 162632 - protein, 201 aa, Oryza sativa
  Clone ID: PAT_MRT4530_61705C.1.pep
SMHLTVEMGNRARRRPGGSGDEENEQRKVGGSRRAPSLCPWHPPSSTPHEPIHGEVHAAAREKLRRAAARHQIGQRGRSCDEHETSCWILNSCSPATNSPVLGSAATEGDLGEGGGGIWRSPVLGRAMQRGRSSSPALGGAAIEEELKLTTGHSGTRERKERAHRRLHCVGDKVGSSQIPRGIPQAWVLADDSYPSRNLYL

SEQ ID NO: 162633 - protein, 587 aa, Oryza sativa
  Clone ID: PAT_MRT4530_61706C.1.pep
MDKVKAWAGANYAEPMGSVEQSLRVAYVVLSFCAAFFLGGIKAAVVGPVAAALMVLGNVGVILLLFPAHVWWTIYSLIKTERINAGLKLAVLIALPVLFGLWLGLGIFGSALVALGYGFFTPWIATFEAFRQESESKKFVHGVVDGTWGTIKGSCTVVRDFADLCFHSYPVYLKELRESSQNCEPHSIRVLDVPSCIAVGLLGLIVDIPLYTVIALIKSPYMLFKGWQRLLHDLISREGPFLETVCVPIAGLAILFWPLVVVGSVLLAIVSSIFVGLYGAVVVYQEKSFQRGVSYVVAMVAEFDEYTNDWLYLREGTVLPKPSYRKRKSSSSTEFSVRTNASVKGGDQPSSNEAPAMLVPTLAPARSVREAIQEVKMVQIWENMMKNCELRGRDLLNLNVITTVDLTEWLRTKESGHEAIGLGVPSYSLLCMILHSIKAGSGGLLIGNGIEINQYNRPQDRLIDWFLHPVLVLKDQIQALKMTEEEVRFLEKLTLFIGNSERANGWDNGAEIPQDPVRAGQIQAISRSSSVISEVVLSDPWKVVLMLLVCRLVGIIRYTCMLVLLPFAILFLCPLCLFLPKMNGSTS

SEQ ID NO: 162634 - protein, 59 aa, Oryza sativa
  Clone ID: PAT_MRT4530_61707C.1.pep
EEAAEEEFAAEPPEERQGVRRKPAVRRGQRGPRPALLSKPVLPRAPLRFALHIHGRRDQ

SEQ ID NO: 162635 - protein, 83 aa, Oryza sativa
  Clone ID: PAT_MRT4530_61708C.1.pep
QLMDSRLKGQYHSRGALQGAQLTLKCLSGDPKSRPSMKEVVEALEKIELIKSKSREPRNSSSLVRGQGNSPRSDSARTSSKGR

SEQ ID NO: 162636 - protein, 85 aa, Oryza sativa
  unsure (1)..(85): unsure at all Xaa locations
  Clone ID: PAT_MRT4530_61709C.1.pep
HVDNEPPEEHIGAEDADHYESLIMQRVLSAQMKKAEQNQRHTLIQTKCVIKXRSCRMIIDXGSCNNLASSEMVEKLELSAKPHPH

SEQ ID NO: 162637 - protein, 678 aa, Oryza sativa
  Clone ID: PAT_MRT4530_6170C.1.pep
MAAYYHGGAGTDIQSGTDGLQTLYLMNPSYAGYGDAAAAAAAPGAAANMMLLNSAVTSMTPVSFGHQPSPSSSSAAQHFVGIPLQAPPASGYNLWTPAAATGAGDMSPPTPQHQHQQAHGGGAAGVSAVLSLSSREAAPPVTVAAVVAAGDEGKYLQAVAQGAASHGQMVMSSKYLKAAQELLDEVVSVSKGVDDVKAAAAAKSPASVKKKEDSEGVSGGGTEDGGGAKSGGAPPPPEMSTAERQELQMKKGKLINMLDEVEQRYRQYHQQMQVVVASFEAVAGGGSARTYTALALRTISRQFRCLRDAIAGQVRAASRALGEAVDADGGCGRTVGSRLRYIDHQLRQQRALQQLGMMQSSAWRPQRGLPERSVSILRAWLFEHFLHPYPKDSDKIMLAKQTGLTRSQVSNWFINARVRLWKPMVEEMYLEETKDQDGGGGAGAGDEGSKPGGSKGGGAGVNGGVVDSAAKMDSKAAHMESGGGVHPSLLELAGDHQAQAGFYDDDDEDGGAAAALQQKLKKARTEEQQQAAFHVSDVATLHAHAAAAAAARHDEVSHRELLMKFMESGSAGAGAGAAARDHHHEHHGGVGYSLFAPAPYGQFATEQFAFAGHGGGGGGGGVSLTLGLPHGAEQTASFLMTSSNGSDGAGHVAGGGGYDMNMQSTKSFAAQLMRDFVA

SEQ ID NO: 162638 - protein, 129 aa, Oryza sativa
  Clone ID: PAT_MRT4530_61710C.1.pep
SCCLGRLLPSGCLPPPSEYAAEDSHPRQPGSRRRRGDANASTAATLHPPPTSWTLHCPCSGLPTHPRVGDRLGLHSQPLVLPGTCPGLDDTTGSGNGAVQVERTSSRQEPPCMPCRMAGLQQTCSEGSL

SEQ ID NO: 162639 - protein, 72 aa, Oryza sativa
  Clone ID: PAT_MRT4530_61711C.1.pep
RRPLPSSFLLPDRAKKINAEDARNEDSPAQCICTDISLASKAAPECCSFFACAQDQGFQFWHQPLFQIFLPL

SEQ ID NO: 162640 - protein, 37 aa, Oryza sativa
  Clone ID: PAT_MRT4530_61712C.1.pep
GVLVENPLKHLAVPVKGRLEEDLDVALEGARTRGSTG

SEQ ID NO: 162641 - protein, 1121 aa, Oryza sativa
  Clone ID: PAT_MRT4530_61713C.1.pep
MLVSASRVPAKLSYFPDLKLGVNIARREESRDFLNTDGDKNDYDWLLTPPETPLFRSLDDDEDKLAGPAPRGRAQTKPILISRSSTMENAQRSSRSSASPNRLSLSPRSSSSNTALTRTRSTNSSSRCSPPLSLQSSTPSRRSPTPPGNKTLTPPRRSPSPASRRMSATSSGPTLNGTRGASPVKTNRRSSSPKFQGWQSSDPGFSFDAPPNLRTSMSDRPLSRSRGGSPSSFSGLNMVSRGRRQSMSPTPSRRTISSHSTERDRFSSYSKASATSSGEDDLDSMQSVPIDYSSSPAVKKSLAVMKTRTIASSQKPSKSFSPSSAPKRSFDSAVWLMDHRKAPQSMFRPLLSSVPTTTFVAGKGNVVHRPTFSHISSVTTSSNASSEHGATFSPCVDIDHERHDLVGQWETNDSSRIHEEIFMFDKSDELNEGSNCHQHSLSTTCSGLENSSGRVNCVESTKEGLDMKSRRTADQISCGFASSSEVGDGEMATCTRCGKIFNVMYLSGDNYCEECDFGDGIFSAGSKIQTTEGLHQKDHKFTQSKVCIPSEDRRPIALDCVEDSSDVSLDHQLVSNEPPADYLQRYSTESVVHTNEEKMLGKHLMNLKENISPHDIGDSSMGNSNDISPHTCSVSDYQEAEAAHVTEYKLFRLQKGNQNHEMAQCLSESDCQHNGFISGMVASGSHELGSTGPPSLKVENAEGNGISVLLLEETRSKKWPIVEGRTLVTTNIHCLEPYYTADSVSLMKRSIGRDSSSAASSIDLGPSGQSDVRFERLRSGKKGDFEKSQISCQSIASVSDMSISGSSASHYPQSYVNGDGCHPIYSLETSALTAAVFTEEHDGSFKEALSSAIECWSVAQAIVNDDCEVEDEVTQNQDKERMARDDNLGVDMCSSYTEVPSDMPQSPAADVSFIEKTENDSQEVPAIADYSVATPEHPCDENNSDIPRILSETVAASDDESKLDDCGVSSVPEEGALVSARDETKDEGRRKQFQRCFTLEEATDTILFCSSIVHDLAYKAATVGLEREQEAEFAHAPRPTVTMVEKFIPREDGLLRGPQRRTTRRKVERKIPEGDGESITDTARTEVITKEPAPVRSSSEITTFDSLKPPKMESKCNCTIM

SEQ ID NO: 162642 - protein, 57 aa, Oryza sativa
  Clone ID: PAT_MRT4530_61714C.1.pep
ALDWHAPYRRKEESPSISHLQTKRGVYCTSVTVYQNEYEHPPNLGLDIMTVLIDRTH

SEQ ID NO: 162643 - protein, 131 aa, Oryza sativa
  Clone ID: PAT_MRT4530_61715C.1.pep
MAAAARVFRGCRFLMAAAGGKRPASASASASAAGAKVTKTEAAQAKEKRGIMQPVPVSDALSRFAGGAPEMSRAGAVKLIWNHIKANGLQNPANKREINCDDKLKSLFAGKDKVGMMEIAKLLSPHFIKAN

SEQ ID NO: 162644 - protein, 67 aa, Oryza sativa
  Clone ID: PAT_MRT4530_61716C.1.pep
VRRTLIGSGDTSGERTQHLSKDLGYGSSRGVAGAIWTLLIMVPGGPQRPKAHVLQNCARGEGESQRT

SEQ ID NO: 162645 - protein, 56 aa, Oryza sativa
  Clone ID: PAT_MRT4530_61717C.1.pep
MIQQTSTILKLGKNRTFTGGGKTSNYRMKRKRILSPAVRQFVNPNTSHEPLLRRWG

SEQ ID NO: 162646 - protein, 330 aa, Oryza sativa
  Clone ID: PAT_MRT4530_61718C.1.pep
MPPAHPPPCGVAPAAAATCPLFLLPRRSLSRSLHLRLRRLSLPAPRAASHAHDAVLLRRAADAADRSAGLTSPHPNFGCVIARPQLETDNAEAWVVGEGFLYAQGTPCAELLAAQEAGEHARGATAYLNLEPGDCYGDSTAVSTLVQEALKSCLIVNAPLLYRAAFRVPFSVLKYAMTADAEQKYPTMLYWKLAGKIAASSGHASWSLNLPEEANLWNVHDAYTIVATQRGARRDLQKKLALKGVEVVEFDMLNPRDVMSYCYDRGYLSVLWECGGTLAASAISASVIHKVYAFLAPKIIGGVNAPTPVGELGMNQMTQAIDLIDVSYEQ

SEQ ID NO: 162647 - protein, 351 aa, Oryza sativa
  Clone ID: PAT_MRT4530_61719C.1.pep
MGVTCPQTRRPIHLAEPPLSPEPNPSSPLMDDGAAPAAAAAAELPSPSPSSSGTSPSPRSKRRRTDRYAQGFEFAPRPAPATATATAPAPTPARGTPEWSEGSTFALLDAWGDRFVRAGRRSLRADEWLEVSRLAAAAASRPPGYYSEQQCRNRIDTLRKKYRKEKERMRLAARRPDRPDRPSPSKWIYFDKMQSLMCPPPLPLQPPVVTRRRDTQPVPRQSWGLDAAEYVLGGCENAGTRDSGSGAELGEEQPNEAGAGKGEDFELLVESIRKLGDVYERVESSKRQHMAEVEWLRRDLQRDLEVRRREILEKAQAEIARLTEEDGEEGDLKEGEGDDNKRFGDDGGGEE

SEQ ID NO: 162648 - protein, 58 aa, Oryza sativa
  Clone ID: PAT_MRT4530_6171C.1.pep
GSSQEGYYGEQQQQPGMTRVRVTRTRQYAAQLPSMCRVKPQQCSIFAPASTRFSWLAS

SEQ ID NO: 162649 - protein, 138 aa, Oryza sativa
  Clone ID: PAT_MRT4530_61720C.1.pep
KKNTPLGGPKKNTPPPRGVGHFINGGGPAGFPIGKGAVGPPHFFWVGSLFGPPGFFFFCFGVVFFLDFLGDNIFPRETVFPFFSPSFYSPPFRESWYPSRARSGFSGWPPGSGEGWGGLENKNKVRFFPPPPVKFWVF

SEQ ID NO: 162650 - protein, 53 aa, Oryza sativa
  Clone ID: PAT_MRT4530_61721C.1.pep
MGRSDRRCGAGQTSQGTPVRPAKARRSDRHCVAGLTALVRPNPVITPLIVRQN

SEQ ID NO: 162651 - protein, 142 aa, Oryza sativa
  unsure (1)..(142): unsure at all Xaa locations
  Clone ID: PAT_MRT4530_61722C.1.pep
QDPQFENRYXEKTIEKKLELITIIENTSKPSLRSXLVPGXPIPIFMMTTLTLCTICCALLHQFASASQFCGYLLQGPPLGGIIWSANRTHGLSSPRPFSYHXGLNRKQHLALAPSHLLASISCNNATQLEPGLCSSVGDMCA

SEQ ID NO: 162652 - protein, 578 aa, Oryza sativa
  Clone ID: PAT_MRT4530_61723C.1.pep
MPLATLLGHLAAGRFGLVQALTGAATAAAAHRLLHLLLRTAPPPPLPDLVSLARWSRAHFRAPLPLRLHGLLLARLASKGLYPLLRSELHVLAAARLHSPASILRALPSPSASASASTPLIADMLVLALARASQPLRAYDAFLLAGESHPRHRPSTSSVNALLAGLVGAKRVDLAEKAFRSALRRRVSPDIYTFNTVISGLCRIGQLRKAGDVAKDIKAWGLAPSVATYNSLIDGYCKKGGAGNMYHVDMLLKEMVEAGISPTAVTFGVLINGYCKNSNTAAAVRVFEEMKQQGIAASVVTYNSLISGLCSEGKVEEGVKLMEEMEDLGLSPNEITFGCVLKGFCKKGMMADANDWIDGMTERNVEPDVVIYNILIDVYRRLGKMEDAMAVKEAMAKKGISPNVTTYNCLITGFSRSGDWRSASGLLDEMKEKGIEADVVTYNVLIGALCCKGEVRKAVKLLDEMSEVGLEPNHLTYNTIIQGFCDKGNIKSAYEIRTRMEKCRKRANVVTYNVFIKYFCQIGKMDEANDLLNEMLDKCLVPNGITYETIKEGMMEKGYTPDIRGCTVSQASENPASS

SEQ ID NO: 162653 - protein, 240 aa, Oryza sativa
  unsure (1)..(240): unsure at all Xaa locations
  Clone ID: PAT_MRT4530_61724C.1.pep
PARLRNYRTVAEALLEIIVRWLRHLHYGSGHPSNPGVSQTLGYPYVNPXYRMSXLYDLEYKPIWKSLAPPRYHYFLWLVSLNRCWTTDRLRSRGLSHPECCVLCDQSDETIEHLLVACPEYWQLWWIALRAIGHSECLPINEPSFHLWLCDNRNKVTNAHRRGFDTIATLVVWTIWKESNNRVFNQTSRSWMEITRAMIGEADLWRLARAAIPSLVVHSDREGFSQVDEDGASSSSCSWP

SEQ ID NO: 162654 - protein, 111 aa, Oryza sativa
  Clone ID: PAT_MRT4530_61725C.1.pep
MEAAPISSAQQRPTTWWAGKRNPRHELTAHGQASKLAASQSVVTGNRRDPRGSWGPTPSPEPSLHRRRIEGHHQGEPCFIDGQIHRSPFPLVVGARSTTSLDPCHDALPPE

SEQ ID NO: 162655 - protein, 203 aa, Oryza sativa
  Clone ID: PAT_MRT4530_61726C.1.pep
AAAAAAAAGAVTAALPSGEGRGAAPSVLHAVARSSRAVYTIGFVVVDYKYSLRGLAHGSADYRDKLSEVHLRSAKKILKLCEANRGFYVKAGQFVSSIRQVPKEYSSTLSCLQDQATPCNFQDIKIVIEQKLGKDLHSIFLEFDEHPIAAASIAQVHRGRLNNNQEVAVKVQYPGLERRMKIDIMTMSFLSKSVSWVCYMYQF

SEQ ID NO: 162656 - protein, 416 aa, Oryza sativa
  Clone ID: PAT_MRT4530_61727C.1.pep
MVAEAEVMHQPVPVLEVPYHRCVAKGVEEVAAAAAVAPPPVVEVEVAVQVPHMVYYGVYCLSVYYTRLFSVRGCKRLTQFGLESAAGAPSISVDALQFVPSIRSGSFADIGPRRYMEDEHIRIDDLSAHLGSLLVCPLPSAFYGVFDGHGGLDAAAYMKRHAMRFLFEDSEFPQASQVDETYVQSVENSVRRAFLQADLALADDLDISRSSGTTALTALVFGRQLLVANAGDCRAVLCRRGVAMEMSRDHRANYAEECERVAASGGYIEDGYLNGVLSVTRALGDWDMKMPDGSISPLIAEPEFRQTMLTEDDEFLIMGCDGIWDVMTSQHAVSIVRRGLRQHDDPERCARELVMEAKRLETADNLTVIVVCFVSELGSPRQEQVGGQAGVARPRSCKSLSAEALCNLRSWLETDR

SEQ ID NO: 162657 - protein, 250 aa, Oryza sativa
  Clone ID: PAT_MRT4530_61728C.1.pep
MLRRRRGPLLLAAAAAAAAGAVAAALPSGEGRGAAPSVLHAVARSSRAVYTVRPQFDETLTSISVIWLFQIGFVVVDYKYSLRGLAHGSADYRDKLSEVHLRSAKKILKLCEANRGFYVKAGQFVSSIRQVPKEYSSTLSCLQDQATPCNFQDIKIVIEQKLGKDLHSIMQSCGYRQVHRGRLNNNQEVAVKVQYPGLERRMKIDIMTMSFLSKSLSWIFPDYRFEKLLTEFERTMSMELGASKGIERSL

SEQ ID NO: 162658 - protein, 182 aa, Oryza sativa
  Clone ID: PAT_MRT4530_61729C.1.pep
MAGKGSYVPPQYIPLYGLDTEEDRVSAEENDAARHKLTRDPTQWSSGICACFDDPQSCFIGATCPCFLFGRNAQFLGSGTLAGSCTTHCMLWGLLTSLCCVFTGGLVLAVPGSAVACYACGYRQALRAKYNLPEAPCGDLTTHLFCHLCAICQEYREIRERTDSGSSAPTVTPPAIQTMDEP

SEQ ID NO: 162659 - protein, 305 aa, Oryza sativa
  Clone ID: PAT_MRT4530_6172C.1.pep
MGMSGSDREERRELEKRLKFVIREEKLRWIQRSKEKEVLEGNCNTKFFHAKANGRKRKSQIHSLVHEGEVIEGQDKLLLYITNFYKDLFGHSKENRFSIDMANVSKVAEEDMKKLTTPVTLEELKTMIFELKKNKALCPDGLTGVEILHEVLNSVHQKKQSGILFKADFEKAYDKVDWVFIYRMPKAKGFPDQWCDWSMKVIMGGNVAVKMTQFSLLMIIWSMQKNLKYILCLFEHLNGLKILPKDQGGLGVIDLEAMNKALLGKWIWKLENEEGWWQEIIIEKYYKNKPLSGLKLKPGTVWFLD

SEQ ID NO: 162660 - protein, 166 aa, Oryza sativa
  unsure (1)..(166): unsure at all Xaa locations
  Clone ID: PAT_MRT4530_61730C.1.pep
MATAPVAAAAAAAAAAAAEVIAALTAVAGPCRNHNPPPPSRSSSPHKSGNHEAGSVPIAAAASRSRQWRRGELEIERRHMELDVAATWSGEDLIAAAGRXSPSWLSRGRIRRPRPSSGRVVVAAASPIVAVVDPTSPVMVAADRASPVITMPDPASPVVVAAGSGP

SEQ ID NO: 162661 - protein, 50 aa, Oryza sativa
  Clone ID: PAT_MRT4530_61731C.1.pep
NVEKAFMTMAGQINNSMASHPALNIRKPATVQIRGQPFAQQNKCCFLLSI

SEQ ID NO: 162662 - protein, 145 aa, Oryza sativa
  Clone ID: PAT_MRT4530_61732C.1.pep
MIHRAVCYSLTCDSLISEGKIKGFIGATCPCFLFGRNAQFLGSGTLAGSCTTHCMLWGLLTSLCCVFTGGLVLAVPGSAVACYACGYRQALRAKYNLPEAPCGDLTTHLFCHLCAICQEYREIRERTDSGSSAPTVTPPAIQTMG

SEQ ID NO: 162663 - protein, 664 aa, Oryza sativa
  Clone ID: PAT_MRT4530_61733C.1.pep
MAEEKESFECQWAPSDVTEENLKEMVAHGVLPAKEIIGWRPAFGEAFPTPDTHEVVVFSHFFYGGFSLPTSRFFRGILDFYGISLHHLNPNSIVRIANFIHACEAFLGIRPHFALFRRIFFLKPQPNKSKPCVVGGAGFQLRGTLSQKYFSMPFKTSNKGWHANWFYVQNPEPALPEYSCHPPVYQDTWNSLPMGEEAAQALALMDHMLKLKEQGLQGEQITRHFIKSRLAPIKERSRTAFEFDGKHDPNREDPESLEFKEFALMKSDPPTAQRHSPRRQTSQANGGPKIRSDSQPSTTQSANQSDFRKRKLVLSDDQNDDSEKAGSKRVTGKSTRQANPKKKTSSRPMPKIRKFSSTDSITQIRRKPSDIDPSGKDSEPTDMEMGPSKETGPTAEDHPSDNQSATDNVEPSNEPLTGNQSAEARVGANQEPPAGNQSGAELNKDVPEVEAQMDSPPRKDTSADPGLSSIVSPLFMNIQGPMIGDEEEVLQIRSAEDSRPPIQVKWWDDDMQPQGIMINKQKEDEEVCLLKKALGQATRIVNAQFNVLVNKIKRLEGARDEVANAATPLIQAMFFNNNGPSTFDASEIFDKLRIAPDTYFKNIKEAGSMGASLALAMTKSLYPKIDIDAIDGFADGTSEEAALDLINDAQKAANKIAVDVVERF

SEQ ID NO: 162664 - protein, 518 aa, Oryza sativa
  Clone ID: PAT_MRT4530_61734C.1.pep
MVAHGVLPAKEIIGWRPACGEAFPTPDRHEIVGWHANWFYVQNPEPALPGYSCLPPVYRDTWNSLPMGEEAAQALDLLDRMLKLKEQGLQGEQITRHFIKSRLAPIKERSRTAFEFDGKHDPNREDLESLEFRIMQERMYKIFSNAFVVSYSHLLPVVPYNAFNPPPPEPPTGNQSGTEPNKDIPEVEAQANSPPKTDTGASPGTSSPVRVQGQTRPRPEIITGPMIGDEEEVLRIQSAENSRPPILVKWWDDDMHPQGIVINKQKEDEERIHLRNEAKTATLEKLVPHLGTLEATRNQLHEAKELARKTEHDLRDRIADLQDSNFELNGSSKVQAAKISELEKRIQALEKDKAELARQRDSALKDVEDRKIKSQAQFDVLVNKIKKLEGARDEVANAATPLVQAMFFNNNGPSAFDASEIFDKLRIAPDTYFKNIKEAGSMGASLALAMTKSLYPKIDIDAVDGFADGTSEEAALDLINNAQKAADKIAVDVVERFQDNNLRPTGSNNSDDEKTDTD

SEQ ID NO: 162665 - protein, 506 aa, Oryza sativa
  Clone ID: PAT_MRT4530_61735C.1.pep
MAEERESFESQWAPSDVTEESLKEMVAHGVLPAKEIIGWRPTCGKAFPTPDTHEVVVFSHFFYGGFSLPTSRFFRGILDFYGISLHHLNPNSIVHIANFIHACEAVLGIVPHFALFRRIFFLKPQPNKSKPCVVGGAGFQLRGTLSQKYFSMPFKTSNKGWHANWFYVQNPEPALPEYSCLPPVFDGKLESSCPGIRLDEVRPSNCSTPITSPADWKPSDIDPSGKDSEPTDMETGPSKETGPTTEDCSSDKQPTTNNRIHLRNEAKTATLERLVLHLGTLEATRNQLHEAKELARKTEHDLRDRIAELQDSNFELSGSSKVQAAEISELEKRIQALENDKAELARQRDSALKDVEDRKIKSQAQFDVLVNKIKRLEGVRDEVAIPTTPLVQAMFFNNNGPSTFDASEIFDKLRIAPDTYFKNIKEAGSMGASLTLAMTKSLYPKIDIDAIDGFADGTSEEAALDLINDAQKAADKIAVDVVERFQDNDLRPTGSNNSDDEKTDTD

SEQ ID NO: 162666 - protein, 152 aa, Oryza sativa
  unsure (1)..(152): unsure at all Xaa locations
  Clone ID: PAT_MRT4530_61736C.1.pep
VCDHRARRXPRWHPGSSPMACSPAESYPVPVAADALSPSTRWAVRRAKPRSAGESVSGTGADPMGHGDLLLPVVPTGAGTVSRGLSQGDRSSWLILGAGTGPATGACATPVTVSRWVMAASTAKRAYGYPALETVSFLVQWQPRSCELADAW

SEQ ID NO: 162667 - protein, 79 aa, Oryza sativa
  Clone ID: PAT_MRT4530_61737C.1.pep
NIIHCILVLVCWWCLEERKKIKRRKIIKKKKKIEKQYKKNSAYLLVHATLSSRSCVSPPFFSVQLFSFECPSLHITSSA

SEQ ID NO: 162668 - protein, 673 aa, Oryza sativa
  Clone ID: PAT_MRT4530_61738C.1.pep
MAEERESFESQWAPSDVTKENLKEMVAHDVLLAKEIIGWRPAFGEAFPTHDTHEVVVFSHFFYGGFSLPTSRFFRVYQDTCNSLPMGDEAAQALELMERMIKLKEQGLQGEQITRHFIKSRLAPIKARSRTAFEFDGKHDPNREDPDSLDFEVMKERMYKIFSNAIVVSYSHLLPVVPYNVFNPPPPEFALMKSDPPIAQRRSPRLQTGQESGGPKIRSETQPNTSNPAGQSDSHKRKLVLSDDEGDDARKPEDKGATGKLPKQANPKKKTSSCPMPKIRKSSRKPSDIDPSGKDSYPTNMETGSSKETGPTAKDHPSDNQPATDNVEPSNEPPTGSQSAEAGAEVNQEPPTRNQSDTGPSQEISEVEAQAGSPPGKDASNGPGSRSPVKAQESTRPRREIITGPMIGDEEEILRIRAAEDSRPPILVKWWDNDGIVINKQKEDEEVCLLKKALSQATRIVNRIHLRNEAKTATLEKLVPHLGTLEATRNQLHEAKELARKTKHDLRDRIAEVQESNFELSGSSKVNIVQAAKISQLEKQIQTLENDKAELARQRDSALKDVEDRKIKSQAQFDILVGKIKRLERARDENIKEAGSMGASLALAMTKSLYPKIDIDAVDGFADGTSEEAALDLINDAQKAIDKVAVDVVERLQDTDLRPTGPDNSDDEKTDTN

SEQ ID NO: 162669 - protein, 588 aa, Oryza sativa
  Clone ID: PAT_MRT4530_61739C.1.pep
MVAHGVLPAKEIIGWRLAFGEAFPTPNTHEVVVFSHFFYGGFSLPTSRFFRGILDFYGISLHHLNPNSIVHIANFIHTCEAFLGIRPHFALFRRIFFLKPQPNKSKPSVVGGAGFQLRGTLSQKYFSMPFKTSNKGWHANWFYVQNPEPALPEYSYLPPVYQDTWNSLPMGEEAVQAVTLMDRMLKLKEQGLQGEQITRHFIKSRLAPIKERSRTAFEFDGKHDPNREDPKSLEFKVMKERMYKIFSNAIVVSYSHLLPVVPYNAFNPPPPLESSYPGIRLDEIRPSNYPTPITSPVDRKPSDIDPTGKDSEPTDMETGPSKETGPTAEDHPSDNQPATDNEPPTGNQSGVEPNRDVPKVETQTDSPPKKDTSNDPVSSSPIKGIVINKQKEDEEVCLLKKALSQATRIVNRIHLRNEAKTATLERLVPHLGTLEATRNQLHEARELARKTEHDLRDRIAELQDSNFELSGSSKDRKIKSQAQFDVLVNKIKRLEGARDEVANATTPLVQAMFFNNNGPSTFDASKIFDKLRVAPDTYFKNIKEAGSMGASLVLAMTKSLYPKIDIDAIDGFADGTSEEVALDLINEA

SEQ ID NO: 162670 - protein, 466 aa, Oryza sativa
  Clone ID: PAT_MRT4530_6173C.1.pep
MCEMPLASKLDDRCFGYPGLLFCSRVDGGAAAISVPSDHLVSPPPPRGLRCTLFNNMDAWLTIATDGEVDPVWRSALLIEELPLPRHDAAPRRLAAASLYMHGCSTGCSTLRLAKDIAENNRGACVLVACAEVFLIAWWAVPARFGSAVRLETGMVAARLGMGMAAAWLGTGIVAVWLFGDGSGAVVVGTDPRERDDGDYGEEDEGQMAGGDGEQLHVDKHVAGGRRSSGVGGRARRQAAGEQWLQARRRGGVSARPEQAERRLQRWQAVGERRLLAPTKQRGGGRGGEVSPLSLSPTGLISPTPPGLLSSSPADTRPQRGYDGTLCLNAVASVYLQSWTWHINGSHVNKTTATSSRLNDAANDATTEDHGEHARPPPLSPIALACFARCCRCSRLSPLPTSPAATALTCHRRPCLLLPPPPRSPTPPPPTLLPAFAYRGCARPPSPCPPKKTREEKKIKEKREER

SEQ ID NO: 162671 - protein, 707 aa, Oryza sativa
  unsure (1)..(707): unsure at all Xaa locations
  Clone ID: PAT_MRT4530_61740C.1.pep
MAEERESFESQWAPSDVTEDNLKEMVAHGVLPAKXIIGWRPAFGEAFPTPDTHEIVVFAHFFYGGFSLPTSRFFRGILNFYGISLHHLNPNSIVHIANFIHACEAFLGIRPHFALFRRIFFLKPQPNKNKSCVVGGAGFQLRGTLSQKYFSMPFKTSNKGWHANWFYVQNPEPALPEYSCLPPVYQDTWNSLPMGEEAAQALALMDRMLKLKEQGLQGEQITRHFIKSRLAPIKERSRTAFEFDGKHDPNREDLDSLDFKVMKERMYKIFSNAIVVSGGPKIRSDTQPNTSKSTSQSDSRKRKLVLSDDEGDDAKKTGNKEVTGKQPRQTNPKKKTSSRPMSKIRKSSRKPSDIDPSGKDFEPTDMEIGPSKETGPTAEDHPSDNQPATDNVEPSNKPPTGNQSAEAGVGANQDPPTRNQSGTEPDKDIPEVEAQANSPPKIDTGASPGTSSPVRVQGPARPRPEIKTGLMIGDEEEVLRIQSAEDSRPPILVKWWDDDMQPQGIVIKKQKEDEERIHLRNEAKTATLEKLVPHLGTLEATRNQLHEAKELARKTEHDLRDRIAELQDSNFELSGSSKDRKIKSQTQFDVLVNKIKKLEGARDEIANAATPLVQAMFFNNNGPSAFDATEIFDKLRIAPDTYFKNIKEAGSMGASLALAMTKSLYPKIDIDAVDGFADGTSEEAALDLINDAQKAADKIAVDVVEGF

SEQ ID NO: 162672 - protein, 104 aa, Oryza sativa
  Clone ID: PAT_MRT4530_61741C.1.pep
FYLAAWEAVRYLLRADADLLVAARLVVADRGMTNFSIASPTSVLAFEGALGLAARLAGHPDPHRLLCIWVSLSTRLPEAVNMISQVQGYRPHDTITYRLRDWLV

SEQ ID NO: 162673 - protein, 331 aa, Oryza sativa
  unsure (1)..(331): unsure at all Xaa locations
  Clone ID: PAT_MRT4530_61742C.1.pep
RKETQWEIEERFQKKLSSWKGKFLSVGGRLVLINSVLSSLAMYMLSFFEVAKGILKKLDFFRSRFFWQSDEHKKKYRLTRWSVLCKPKECGGLGIQNLEIQNKCLLSKWLYKLINEEGVWQNLLRRKYLSSKTIMQVQKRRGDSHFWAGLMGVKDTFRSFGSFKLHDGSQVRFWEXDRWLGNQSLDKKYPSLYNLVRNKNEVVAKVVGRVPLNVSFRRAIVGDNLHAWHEIVANVVDLSLKGQKDVFFWEANKNGTFTVNSMYKKLMYGNVIPRKSFIWKLRLPLKIKIFLWYLKEGVILTKDNLAKRRWKGSXRCXFCRSNETIQHLFFD

SEQ ID NO: 162674 - protein, 797 aa, Oryza sativa
  unsure (1)..(797): unsure at all Xaa locations
  Clone ID: PAT_MRT4530_61743C.1.pep
MAEERESFESQWAPSDVTEENLKEMVAHDFLPAKEIIGWRPACGETFPTPDTHEVVVFSHFFYGGFSLPTSSFFRGILDFDRISLHHLNPNSIVHIANFIVACEAFLGIRPHFALFRRIFFLKPQPNKSKPCVVGGAGFQLRGTMSQKYFSMPFKTSNKGWHTNWFYVQNPEPALPGYSCLPPVYRDTWNSLPMGEEAAQALDLLDRMLKLKEQGLQGKQITRHFIKTRLALIKERSRTAFQFDSKHDPNRENPESLEFKIMQERMYKIFSNAIVVSYSHLLPVVPYNSFNPPPPSGGPKIQSDVQPNPSRSTNXSDSCKRKLVSSDDEGDDAEKTGNKRVTGKQPKQANPKKKTSSRPMPKTRKSSKKPSDIDPSRKDPTPTGTETGPSAETGPTAEDRLGNNQPATCNVEINNETPTGNQSAEAGVDADQEPPTGNQSGEXPNKDIPEVEAQADSPPKKDASADPGYSSPVKVQGPARPXPEIITGPMIGDEEEVLWIQSAEDSRPPILVKWWDDNMQPQGIVINKQKEDEEVCLLKKALGQATHLVNRIHLRNVAKTATLXKLVPHLGTLEATRNQLYEAKELARKTEHDLRDRIAELQDSNFELSGSSKVQAAKISELEKRIQTLENDKAEXARQRDSALKDVEDRKIKSQAQFYVLVNKIKRLEGARDEIANAATPLVQAMFFNNNGPSTFDASKIFDKLRIAPXYIKNIKEARSMGASLALAITKSLYPKIDIDAVDGFADGTSEEATLDLINDAQKAADKIAVDVVERFQDNDLRPTRSNNSNDEKTDTN

SEQ ID NO: 162675 - protein, 91 aa, Oryza sativa
  Clone ID: PAT_MRT4530_61744C.1.pep
MRRCSSKGSTSTCAPRRGWCPPTRYSVSSRVFNAVQDPHADAFLANTLLRAYVLGGAPQDTLTTFSAMLRRGHGEALKEEVVGEDEDRSRR

SEQ ID NO: 162676 - protein, 825 aa, Oryza sativa
  unsure (1)..(825): unsure at all Xaa locations
  Clone ID: PAT_MRT4530_61745C.1.pep
MAEERESFESQWAPFDVTEENLKEMVAHGVLPAKEIIGWCPAFGEAFPTPDTHEVVVFSHFFYSGFSLRTSRFFRGILNFYGFSLHHLNPNSIVHIANFIHACEAFFGIRPHFALFRRIFFLKPQPNKSKPCVVGEXGAGFQLRGSLSQKXYFSMPFKTSNKGKHANWFYVQNPEPALPEYSCLPPLYQDTWNSLPIEDEAAQALDLMDRMLKLKEQGLQGEQITRHFIKSRLAPIKERSRTAFEFDSKHDQNREDLDSLDFKVMKERMCKIFSNVIVVSYSHLLPVVPYNAFNLPPPEFALMKSDPPIAQCXSPRQXTGQGSGGPKIRSDAQPNTSKPASQSDSHKRKLVLSDDEGDDAGKFGNKEATGNQPRQANPKKKTSSRPMLKIRKSSRKPSDIDPSGKDSDLTNMETGSSKETRPTAKDHLSDNQPATDNVEPSNMPPTGNQSAEAGIGVNQEPPTGNQSGTEPNQEIPEVETQANNPLGKDADNDPGSSSSVKAXEPTRLRPEIITGPIVSDKEEVLQIQSAEDYRPPILVKWWDDDMQPQGIVINKQKEDEEVCLLKKALSQATRIVNRIYLRNEAKTATLEKLVPHLGTLQATRDQLHEVKELARKTEHDLRDRIVELQESNFELSGSSKVQAAKISQLEKQIQTLENDKAELARQRDSALKDVEDRKIKSQAQFDVLVNKIKRLEGARDEVANATTPLVQAMFFNNNGPSTFDASEIFDKLRVAPDTYFKNIKEARSMGASLALAMTKSLYPRTDIDAIDGFADGTSEEAALDLINDAQKAANKIAVYVVERFQDNDLQPTGSDNSDNEKTDTD

SEQ ID NO: 162677 - protein, 719 aa, Oryza sativa
  Clone ID: PAT_MRT4530_61746C.1.pep
MVVHGVLLVKEIIGWRPACGEAFPTPDTHEVVVFSHFFYGRFSLPTSRFFRGILDFYGISLHHLNPNSIVHIANFIHACEAFLGIRPHFALFRHIFFLKPQPNKSKPCIVGGAGFQLRGTLSQKYFSMPFKTSNKGWHANWFYVQNPEPALPEYSCLPPVYQDTWNSLPMGEEAAQALALMDRMLKLKEQGLQGEQITRHFINSRLAPIKERSRTAFEFNGKHDPNHEDPDSLDFKVMKERMYKIFSNATAVSYSHLLLVVPYNAFNPPPPETSQPDSRKRKLVLSDDEGDDAEKTGDKEATGKQPRQTNLKKKTSSRPMSKIRKSSRKPSDIYPSGKDSEPTDMETGPSKETGLTAEDHPSDNQPATDNVEPSNKPPTGNQSAEARTGANQEPPTGNQSGTEPDKDIPEVEAQANSPPKTDTGVDPGISSPVRVQRPPRPRPEIITGPMIGDEEEILQIQSAEDSRPPILVKWWDDDMQPQGIVINKQKEDEEVCLLKKALGQATRLVNRIHLRNEAKTTTLERLVPHLGTLEATRNQLHETKELARKTEHDLRDRITELQDSNFELSDCKIKSQAQFDVLVNKIKKLEGARDEVANATTPLVQAMFFNNNGPSAFDASEIFDKLRIAADTYFKNIKEAGSMGASLALTMTKSLYPKIDIDAIDGFADETSEEAVLDLINDTQKAADKIAVDVVEIFQDNDLQPTGSNDSDDEKTDTD

SEQ ID NO: 162678 - protein, 72 aa, Oryza sativa
  Clone ID: PAT_MRT4530_61747C.1.pep
YMSGEPRSFGLARSPATGARISAVNDDHLLCFKLLIVSHSIRSISPVYSMKLASGSCLKIASIVENNIESHG

SEQ ID NO: 162679 - protein, 289 aa, Oryza sativa
  Clone ID: PAT_MRT4530_61748C.1.pep
MALLSPRVPRLPLASASAAGAGLRCCVSGGRAGSAAWCHASAAGSVASSSSELEAIRDELYKECAAALDGGAVLSTKNLDAITDSIQRAFATVDANLSTWLEQMDKEDESGATATAMFLRNDVLVVSHIGDSCLVVSRGGRPQAVTNFHRPYGNKKASLEEVKRIRAAGDLIVSSPDVSLVELGPDVEFVLLATDGLWDYIKSSEAVALVRDQLRQHGDVQVACEALGQIALDRRSQDNISIVIADLGRTNWKELPAQRPNLFLELTQAVATVGAVSLGIYISSLLALQ

SEQ ID NO: 162680 - protein, 505 aa, Oryza sativa
  Clone ID: PAT_MRT4530_61749C.1.pep
MDLSGRDIAQHRSPCRQTGQASGGPKIRSDTQPNTSKSASQSDSRKRKLVLSDHEGDDAGKSGNKEVTGKQPRQTNPKKKTSRHPMPKIRKSSRKPSDIDPSGKDSKPTDMETGPSKETGPTAEDHPSDKQPATDNVEPSNEPPTGNQSVEAGIEPNKDIPDVEAQADSPPKKDASADPRSSSPVKVQGPARPRPEIITEEVLQIQSAEHSRPPILVKWWDDDMQPQGIVINKQKEDEEVCLLKKALGQATRLVNRIHLRNEAKTTTLEKLVPHLGTLEATRNQLHETKELARKTEHDLRDRIAELQDSNFEMSSSSKVQAAKISELEKQIQALENDKAELARQRDSALKYVEGADRKIKSQAQFDVLVNKIKRLEEARDEVANVATLLVQAMFFNNNGPSTFDASEIFDKLRIAPDTYFKNIKEAGSMGASLALAMTKSLYPKIDIDAVDGFADGTSEEAALDLINDAQKAADKIAVDVVERFQDNDLRPTGSTNSDDEKTDTD

SEQ ID NO: 162681 - protein, 52 aa, Oryza sativa
  Clone ID: PAT_MRT4530_6174C.1.pep
ASHKSVYERLELFIWPSDLDIYVIIDPKDECLFSSERLTLWSSYISQSHVKI

SEQ ID NO: 162682 - protein, 135 aa, Oryza sativa
  Clone ID: PAT_MRT4530_61750C.1.pep
SMRFLLVLSNDEGNYRLRMSNTPYVHFYAVYTGKITLAVRGFSLQGQHLWLQPFRFFGHVAMICHALWPAMIYLLWRACCLTSHGHPIQYLYAWCKMLAKKLPGACVLAPGDTRCHPPIFFPSFLVLIHVAFMYV

SEQ ID NO: 162683 - protein, 38 aa, Oryza sativa
  Clone ID: PAT_MRT4530_61751C.1.pep
GGMGLSSCSGSHSWPRPREHKDVTSLSCLLTATCQSHF

SEQ ID NO: 162684 - protein, 216 aa, Oryza sativa
  Clone ID: PAT_MRT4530_61752C.1.pep
NLDAITDSIQRAFATVDANLSTWLEQMDKEDESGATATAMFLRNDVLVVSHIGDSCLVVSRGGRPQAVTNFHRPYGNKKASLEEVKRIRAAGGWIVDGRICGEISVSRAFGDIRFKTRKNEMLVKGVKEGRWTEKFISRINFKGDLIVSSPDVSLVELGPDVEFVLLATDGLWDYIKSSEAVALVRDQLRQHGDVQVACEALGQIALDRRSQDNIS

SEQ ID NO: 162685 - protein, 151 aa, Oryza sativa
  unsure (1)..(151): unsure at all Xaa locations
  Clone ID: PAT_MRT4530_61753C.1.pep
MALLSPRVPRLPLASASAAGAGLRCCVSGGRAGSAAWCHASAAGSVASSSSELEAIRWGTAKLQGARDEMEDXEVVLRPGSLLDGFSFAAVFDGHAGFSAVEFLKDEXYKECAAVLDGGAVLSTKNLDAITXDSIQRAFCQRRTPNLFTLA

SEQ ID NO: 162686 - protein, 77 aa, Oryza sativa
  Clone ID: PAT_MRT4530_61754C.1.pep
RNNLSTGSGITCQLGSGLFACWINPRIPLDKVTRRNVRGGSSASTHVTLAGNATRGAGTSNSRPACIFTILATPTRP

SEQ ID NO: 162687 - protein, 708 aa, Oryza sativa
  unsure (1)..(708): unsure at all Xaa locations
  Clone ID: PAT_MRT4530_61755C.1.pep
MEKQNIDFGKVLMEIQESLVSLNRAQGETQXAVNKLDQGVTNWRPQVEAAVKELREEVGDIRQQMDLLGKSQSAPPATSSPRVPLTDEERKAPLLPTPPASRVAAAGDSGDKWASGRQHPHEHRGRAPGVVTTVVPTSVKGTFSSPAPSLGILDWENDFDSGERRFNHRVPKLDFPKFDGSDPHDWRMKCEHYFDVNNTYPGLWVRVSIIYFSGRAASWLRSTRAHLRFPNWEDFCAAVSDKFDRDQHDSLIRQMDQIKQTGSVWEYYERFDELMNQLLVYDPGVNMCYLTHRFIDGLRREIRNAVLLQRPKNLESALAVASLQEEVLESSDSTPVKEGKKFESSGQHKTGGNFKGAFPLPLPPGRHLGVIQSARVDEKKEGEIKRLSASSEKVSALKAQRRAQGLCYICAEKWSPTHKCANTVQLHAVQELFSVLHEACDEAVCNPENSVLSDSQVLMAISVHAVQGSEASGCMRMLGQIQGKDVFILVDSGSTASFISARVAEGLSELSQIATNLQVKVADGATLHYLEPSEEFPLAVQQVLNKFASVFEEPQGLPPVRSFDHTIPLIPGAMPVNVRPYRYTPSQKDEIESQVQEMLSKGLIQPSSSPFSSPVLLDKKHLTYPKVPVWMPPPEDCVKINVDAAISRWGNKGAVGAVCHTVSGEFVAASAMVWEGLSDSATLEALGCNEGLAIAMGCNMSEECKCGQ

SEQ ID NO: 162688 - protein, 70 aa, Oryza sativa
  Clone ID: PAT_MRT4530_61756C.1.pep
MAMDDARASPTPGGPAMSVSPYWSMEAGFADGWGRRSDVSGFCTPGVTENWVGVGPGQGAQAGVNCPGAQ

SEQ ID NO: 162689 - protein, 745 aa, Oryza sativa
  Clone ID: PAT_MRT4530_61757C.1.pep
MEKQNIDFGKVLMEIQESLVSLNRAQGRDATAVNKLDQGVTNWRPQVEAAVKELREEVGDIRQQMDLLGKSQSAPPATSSPRVPLTDEERKAPLLPTPPASRVAAAGDSGDKWASGRQHPHEHRGRAPGVVTTVVPTSVKGTFSSPAPSLGILDWENDFDSGERRFNHRVPKLDFPKFDGSDPHDWRMKCEHYFDVNNTYPGLWVRVSIIYFSGRAASWLRSTRAHLRFPNWEDFCAAVSDKFDRDQHDSLIRQMDQIKQTGSVWEYYERFDELMNQLLVYDPGVNMCYLTHRFIDGLRREIRNAVLLQRPKNLESALAVASLQEEVLESSDSTPVKEGKKFESSGQHKTGGNFKGAFPLPLPPGRHLGVIQSARVDEKKEGEIKRLSASSEKVSALKAQRRAQGLCYICAEKWSPTHKCANTVQLHAVQELFSVLHEACDEAVCNPENSVLSDSQVLMAISVHAVQGSEASGCMRMLGQIQGKDVFILVDSGSTASFISARVAEGLSELSQIATNLQVKVADGATLHYLEPSEEFPLAVQQVLNKFASVFEEPQGLPPVRSFDHTIPLIPGAMPVNVRPYRYTPSQKDEIESQVQEMLSKGLIQPSSSPFSSPVLLDKKHLTYPKVPVWMPPPEDCVKINVDAAISRWGNKGAVGAVCHAVSGEFVAASAMVWEGLSDSATLEALGCNEGLAIAMGGCTAVPCGGGPSTKPPPPPRIVLSIPKVLFPPSNSSNIHELAEELVYS

SEQ ID NO: 162690 - protein, 287 aa, Oryza sativa
  Clone ID: PAT_MRT4530_61758C.1.pep
MVAPALSAKTGTQAWRQACYGSAGGVVVLDGDQRWRGRGRRAGDGRWDRRRGRRRREGGDRWRRAMEDRREAWSCSTGIDGGVAAEDVRVTVDGDWRRGRRRREAGDGGRRVGNREGRRAIGIGGAAEQIEGRRGAWRSAARLRRVTGVTGERENKGKKLREKERGGGEANLRARESRRDQKDRFSWKNNKEGIFTVKSMYKLLMYEGLVPRKNFIWKLKIPLKIKIFLWYLKEGVIFMETHWARTWSLLLKGTDEEIVKNYCKVLEKRVVKFFSVYGWNLRRRWEA

SEQ ID NO: 162691 - protein, 116 aa, Oryza sativa
  Clone ID: PAT_MRT4530_61759C.1.pep
MACLALWQLWRAAPAVCLDAAMAYEFYKLSVMASDLRRRGFSPDLLIRLKFVITIIMLIKDFHKKIIPLDYIRLAIFFMYLSSVWWEMKGLKKYAKYCIPLIFKGFDFETSEEYTA

SEQ ID NO: 162692 - protein, 570 aa, Oryza sativa
  unsure (1)..(570): unsure at all Xaa locations
  Clone ID: PAT_MRT4530_6175C.1.pep
MGRSRGVPNSGDDDTNHRSKRRRVASSGDAPDSLSAACGGAGEGGGKKALYHCNYCNKDISGKIRIKCSKCPDFDLCVECFSVGAEVTPHRSNHPYRVMDNLSFPLICPDWNADEEILLLEGIEMYGLGNWAEVAEHVGTKTKAQCIDHYTTAYMNSXIGISGELDLPLPVTLARTGEVELPFTLSRAGTSVLPGDLTPKDESPFSPPRVKVEDALGEGLAGRSPSHIAGGANKKASNVGQFKDGANVAKVEDGHVDRSIGVKKPRYSADEGPSLTELSGYNSKRHEFDPEYDNDAEQALAEMEFKETDSETDRELKLRVLRIYLSRLDERKRRKEFILERNLLFPNPLEKDLTNEDKEVYHRYKVFMRFLSKEEHEALVRSVLEERKIRRRIQELQECRSAGCRTLAEAKIHIEQKRKKEHEVNAQKAKESGQLLSNTKVVHKTNRPMKIESDGNLDQKKGGASLDSTGRDSPKTTGHAGTKHWDDWDIVGFPGAELLSTSEKNLCCQNRLLPNHYLKMQEVLMQEIFKGSVAKKEDAHVLFKVDPAKVDNVYDMVTKKLGTNEEAPTV

SEQ ID NO: 162693 - protein, 47 aa, Oryza sativa
  Clone ID: PAT_MRT4530_61760C.1.pep
MHPPASTYSGGGDTTDKDITQSSASTILVPSFGARLGPMVTLGMELA

SEQ ID NO: 162694 - protein, 91 aa, Oryza sativa
  Clone ID: PAT_MRT4530_61761C.1.pep
EPSDQIVAPAPHRAARPRTHAPPKNPTLSSSLYHGAPLNRTPPPVHFPLFPRSALVSALLWSALLRGWVLLVPGGDGGGDDGVDGGGGGDA

SEQ ID NO: 162695 - protein, 135 aa, Oryza sativa
  unsure (1)..(135): unsure at all Xaa locations
  Clone ID: PAT_MRT4530_61762C.1.pep
LXDSKRXXXIGRXXRGSXXTDXXHQPFXPXGDVXSYQPNSQXQAAGAWGVXXAAGDRTVLXXAFAFXXGRFXXLGDXFFXPAPCXWXXRGGXXLGFGSGGSXLGXEXXFAXFRRXCFGXGXXQGLXLXESIGXKS

SEQ ID NO: 162696 - protein, 161 aa, Oryza sativa
  Clone ID: PAT_MRT4530_61763C.1.pep
MASGLNGRPDGFLRSSAWLTRCKVDASVASVGARAWQGSGVRSPPPSHFHLPILNCSPLPSLPCRRRLHQIPYGHHHSFGVFSDGGLAADLELPRPTPVEKLQPLLHPLPSPSPASSPLPAPPLFSVATIAFSDRQATRSGDHGGVEQLGAAGSAGEASQR

SEQ ID NO: 162697 - protein, 338 aa, Oryza sativa
  Clone ID: PAT_MRT4530_61764C.1.pep
MEAEDEYSAGCSFSLMCQEDSTDLDDDGGGGGCFAGDGRADLLLVYNAAAAADDEDEEEVEEYMDHLVSKESSFCSSSSSTSSSSCCFSDAGGESAAAAAPMDWFALARRATVKWILERSVMPWAARLLAVACVSLAAKMEEYRAPALSEFRAGVGDDGYEFSCVCIRRMELLVLSTLDWRMAAVTPFDYLPCLSSRLRRHVGGGGGAGASAALIFSAAEAASVLDHRPSTVAAAAVLAATHGALTREALESKMSGLSPSFLLDKEDVFACYSAMLSQPTSPASKSTTTTTGKRSSSSSCSESTDAASSYDATAASFPAAASCGSKRMRLELPGGILR

SEQ ID NO: 162698 - protein, 399 aa, Oryza sativa
  Clone ID: PAT_MRT4530_61765C.1.pep
MAEERESFESQWAPSDITEESLKEMVAHGVLPAKEIIGWRPAFGEAFPTPDTNEVMVFSHFFYGGFSLPTSRFFRGILEFYGISLHHLNPNSIVHIANFIHACDAFLGVRPHFALFRRIFFLKPQPNKNKPCVVGGAGFQLRGTLSQKYFSMPFKTSNKGWHENWFYVQNPEPALPEYSCLPPVYQDTWNSLPMGEEAAQALALMDRMLKLKEQGLQGEQITRHFIKSQLAPIKERSRTTFEFDGKHDPNREDPESLEFKVMKERMYKIFSNAIVVSYSHLLPVVPYSAFNHPPPEFALMKSDPPTAQRRSPRRQTGQAGRGPKIWSDSQPSTTQLANQSDFRKRKLVLSDDENDDSEKAGSKGMTGKPARQANPKKKTSRCPMSKIKKSSRYNLSQEA

SEQ ID NO: 162699 - protein, 114 aa, Oryza sativa
  Clone ID: PAT_MRT4530_61766C.1.pep
MALGHSMAGPAMARGGSARPPAASGGARRGDGCDGGGAIECTGKGGEKGKFGDHVHFLIGSVVYGVGNHDHFLTGLIVHGVRDYELFLARLVHGVSGHRLLIVSLTGLIRGHKP

SEQ ID NO: 162700 - protein, 130 aa, Oryza sativa
  Clone ID: PAT_MRT4530_61767C.1.pep
MEEAKECTFVSAYTICTVGNGVMEHPFCSRRTTGSEGPLFVSPHRPYTPVFRRASSAGEWSLKLSLVAGGSETSREPSGTKVMKDRHRGFDTIAALIAWTIWKERNDRVFNLQQRPWAEIARAMAAEAEL

SEQ ID NO: 162701 - protein, 312 aa, Oryza sativa
  Clone ID: PAT_MRT4530_61768C.1.pep
MYMTDLFPDVIPQTTESSPPHQSNNGRDIEYAPGLIPNGGGPSPPVIGYDAPKTLTLLQGLIREPADTEKTKLDQLSEGPIKSNIDRLEARKIELLAQLEECNDELVVAIAREDRHRGRQVVAVLVRRFTIAEDRRRTVAAVDPIYAAASSSSPALSVVPPPLLWSPHDSLRSTRLRSGGDKPTGVTGESMPLVFEGMIMIQEWKASFLSDKDLYQPMGINMYTRVYIGVVQGCISTFDLLDCSGKRKIVGVEDKTDEDYNQLDGQPPFTVTIDPSILLSNEDTPYSRSDHKEGTIVRRKYVRSTVTADVLP

SEQ ID NO: 162702 - protein, 789 aa, Oryza sativa
  unsure (1)..(789): unsure at all Xaa locations
  Clone ID: PAT_MRT4530_61769C.1.pep
MAEERESFESQWAPSDVMEENLKEMVAHGVIPAKEIIGWRPAFGEAFPTPDTHEVVVFSHFFYGGFSLPTSSFFRGILDFYGISLHHLNPNSIVHITNFIHACEAFLGIRPYFALFRRIFFLKPQPNKSKPCVVGGAGFQLRGTLSQKYFSMPFKTSNKGWHANWFYVQNPEPALLGYSCLPPIYRDTWNSMPMGEEAAQALNLLDRMLKLKEQDPDSLDFKVMKERMYKIFSNAIVVSYSHLLPVVPYNAFNPPPPLTENLEYHAQEFALMKSDTPIAQRRSPRRHTCQASGGPKIQSDVQPNASRTTNQPDSRKRESVLTDDEGHDAKKPSNQKEGAERQPKQANLRKKTSSRPTLKIRKSXDPSGKEPTLTGSETGPSAETGXAAEDCPDNNQPATGNVDTSNEPLTGNQSAEAEAGADEEPPTRNQSGAEHNEDIPKVEAQADSPPKKDASVDPGTSSPVKVQGPAHPRPEIIIGPMIGDEEEVLRIQSAENSRPPILVKWWNHDMQPQGIVINKQKEDEEVCLLKKALSQATCIVNRIHLRNEAKTATLEKLVPHLGTLEATRNQLHEAKELARKTEYDLRDRIAELQESSFELSGSSKVQAAKISELEKQIQTLENDKAELARQRNSALKDVEDRKIKSQAQFDILVNKIKRLEGARDEVANTATPLVQAMFFNNNGPSTFDASEIFDKLRIAPDTYFKNIKDAGNMGASLALAMSKPLYPKIDIDAIDGFADGTSEEAALDLINDAQKAADKIAVDVVERFQDNDLRPTGSNNSDDEKTDTD

SEQ ID NO: 162703 - protein, 500 aa, Oryza sativa
  Clone ID: PAT_MRT4530_6176C.1.pep
MAETSSARSPLLDVDESSGASEELLRREPVPRSVLSRLAAWEAGNLWRISWASILITLLSFTLSLVTQMFVGHLGELELAGASITNIGIQGLAYGIMIGMASAVQTVCGQAYGARKFRAMGIVCQRALVLQFATAIVIAFLYWYAGPFLRLIGQAADVAAAGQLYARGLVPQLLAFALFCPMQRFLQAQNIVNPVAYITMAVLIFHILISWLTVFVLGFGLLGAALTLSFSWWVLVALTWGLMVWTPACKETWTGLSVLAFRGLWGYAKLAFASAVMLALEIWYVQGFVLLTGFLPDPEIALDSLSICINYWNWDFQIMLGLSYAASIRVGNELGAGHPNVARFSVFVVITASVAFSILATILVLVLRYPLSTLYTSSTTVIEAVIKLTPLLSISIFLNGIQPILSGVAVGSGWQVVVAYVNVGAYYLIGLPIGCVLGYKTSLGAAGIWWGLIIGVSVQTVALIIITARTNWDNEVMKAIQRLRQTAVDDGTVPIVDDIE

SEQ ID NO: 162704 - protein, 632 aa, Oryza sativa
  Clone ID: PAT_MRT4530_61770C.1.pep
MAAATYFWSNTINAFLFNQGPMTPTLINITMIIGLDVTSSANPMSMNTKNQFDFRTKSIGGWSGYVAAYMGQGSVTPREHVAFLLMWLEKFLFCGSSCSPTNNWQFVAEALESKRQFPLGRILLGYLYQMLNDASAKIAVGSVVGAGGPWWLLQTWLNLMVMKVINRPSVTEAEFLRCMTYEEYASTPADAGAKLSAELLKDWFCSFYEGFQKDARVWFPYEYSADLKLPSDFRFEDINHERYQKVREVFTAAISPCILPVGIHQGRNIQDSRAETLTDGGGEWKLHLFHQTASIYMTDLFLDVIPQTTESSPPHQSNSGINIQYAPGLIPNGGGPSPPVIGYNAPKTSTLLQGFIREPADTGKKRRTRLSAADTLTLAPKKKAKLKKPKPTDDLPVLDPSIEQALDEEDIEDNVDQAAAEKKKIVVKKKSAAPIFKPAPPVLADLFSFDIRDYLNEETEEDTTSKSLVLLPDDVKKTLEDISHRLEASSLDNLVLEKAKLRLAERRERKDIEATIQANRQLVHEEKTKLDQLSKGPIKSNIDRLEARKIELLAQLEECNAELDMEHRKLADLPKSIEEQKVRLKSAIKNVADLTKSLKIIRGTDAQDAQAIEEVEQIRQRAISAIQQFLSR

SEQ ID NO: 162705 - protein, 597 aa, Oryza sativa
  Clone ID: PAT_MRT4530_61771C.1.pep
MAEERESFESQWTPSDVTEESLKEMVAHGVLPVKEIIGWRPAYGEAFPTPDTHEDTWNSLPMGEEAAQALALMDRMLKLKEQGLQGVQITRHFIKSLLAPIKERSRTAFEFNGKHDPNREDPESLEFKVMKERMYKIFSNAIVVSYSHLLPVVLYNAFNPPPPEFTLMKSDPPTAQRRSPHRQTGQAGGGPKIRSDSQPSTTQSANQSDFRKRKLVMSDDENDDSEKAGSKGPSDIDPSGKDPEPTNMETGPSKETGLTAEDRPSDNQPATDNVETNDEPPTGNQSAEAGVGANQEPPIGNQSGTGQNNDIPEVETQADSPPKTSAGTNSGTNSPARVQGPARPRPEIITEDEEVCLLKKTLGQATRLVNRIHLRNEAKTATLEKLVPHLGTLEATRKQLHEAKELARKTKHDLRDRIAELQDSNFELSSSSKVQAAKISELEKRIQALEKDKAELAKQRDSALKDVEDRKIKSQAKFDVLVNKIKKLEGARDEVTNAATPLVQAMFFNNNDPSSLDAIEIFDKLRAALDTYFKNIKEAGSMGAGLALAMTMYLYPKIDIDAVDGFADGTSDEAALDLISDAQKATDKIAADVVERF

SEQ ID NO: 162706 - protein, 238 aa, Oryza sativa
  unsure (1)..(238): unsure at all Xaa locations
  Clone ID: PAT_MRT4530_61772C.1.pep
TTGIVLDSGDGVSHTVPIYEGYALPHAILRLDLAGRDLTDYLMKILTERGYSFTTTAEREIVRDVKEKLSYIALDFDQEMATAATGSSVEKSYELPDGQVITIGAERFRCPEVLFQPSFVGMEAAGIHETTYNSIMKCDVDIRKDLYGNIVLSGGTTMFPGIADRMSKEITALAPSSMKIKVVAPPERKYSVWIGGSILASLSTFQQMWIAKAEYDESGPXIVTEVLLFLFYLLFINP

SEQ ID NO: 162707 - protein, 114 aa, Oryza sativa
  Clone ID: PAT_MRT4530_61773C.1.pep
MGEEAAQALVLMDRMLKLKEQGLQGEQITRHFIKSRLALIKERSRTAFEFDGKHDPNREDPYPLDFKVIKERMYKIFSNAIVVSYSHLLPVVPYNAFNPPPPEFALMKSDPPTA

SEQ ID NO: 162708 - protein, 118 aa, Oryza sativa
  Clone ID: PAT_MRT4530_61774C.1.pep
QSGIRFKISKVPEPRESRGGRRKGEVGEEGRRDTEAHSPPASGSPRSPLARPFVRSLARRERGGEARAIFMRRARERLGELRRRPWRGGGEDKRKHAAPRERERERERGERTAGRSLV

SEQ ID NO: 162709 - protein, 349 aa, Oryza sativa
  Clone ID: PAT_MRT4530_61775C.1.pep
MIQLLFLVLFAEGAAALLLMVKIGPLRELAMRGVEQAKDGKGPAAVKTLACTLLVIFMSSVASILRIQNRGIKLGTVSPMDQETRITVWVEGSFNPAAHICRPFDLIQVNLMVYLMFQGYILFLAFVIDRLHHYHRKLTILKKTANTSREEVEKLQIELQGKEDKSKEVKKLRAELASLSEKMKKLKSESEEHERQRLEAEAHVNALQKQSEELLLEYDRLLEDNQILQTQLNQASTIRFWVIQREAKLNLTSTEPPKLISLENLCRQAVDIAINNLHEASRVLNSILTHRSGCKGENGKKKERERRKKRKEKEGGGVTAGSTIGIGWRGDVRVLVEGVAVAFRAARER

SEQ ID NO: 162710 - protein, 228 aa, Oryza sativa
  Clone ID: PAT_MRT4530_61776C.1.pep
MVEERESFESQWAPSDVTVESLKEMVAHGVLPAKEIIGWRSAYDEAFPTPDTHEVMVFSYFFYGGFSLPTSRFFRWILDFYGISLHHLNPNSIVHIANFIHACEAFMGVRPHFALFCYIFFLKPQPNKSKPCVVGGAGFQLRGTLSQKYLSMPFKTSNKGWHANWFYVQNPEPALPEYSCLPPVYQDTWNSLLMGKEAAQALALMDCMLKLKEQGLQGEQITRHFIKS

SEQ ID NO: 162711 - protein, 595 aa, Oryza sativa
  unsure (1)..(595): unsure at all Xaa locations
  Clone ID: PAT_MRT4530_61777C.1.pep
MAEERESFESQWAPFDVTEENLKEMVVHGVLPAKEIIGWRPAFGEAFPTPDTHEVMVFSHFFYGGFSLPTSRFFRGILNFYGISLHHLNPNSIVHIANFIHACEAFLGIRPHFALFRRIFFLKPQPNKSRPCVVGGAGFQLTGTLGQKYFSMPFKTSNKGCHANWFYVQNPEHALPEYFCLPPVYQDTWNSLPIGDEAAQALDLMDRMIKLKEQGLQGEQITRHFIKSWLAPIKERSRTAFEFDGKHDPNREDPDSLDFKVMKERMYKIFSNAIVVSYSHLLLVVSYNAFNPPPLQTGQGSGEPKIWSDAQPNTSKPAGQSDSRKRKLVLSDDEGDDAGKSGNKEATSKQPKQANPKKKTSSRPMPKIRKSXQSAEAGVGVNQEPPTGXIPEVEAQANSPLGKDASNDPGSRSPVKAQEPTRPRPEIITGPMVSNEEEVLRIQSAEDSLPPILVKWWDDDMQPQGIVINKQKEDEEVCLLKKALNQATHIVNESNFELSVSSKDRKIKSQAQFDVLVSKIKRLEGARDKVANTATPLVQAMFFNNNGPSTFDASEIFDKLRVAPDTYFKNIKEAGNMRASLALAMTKSLYPEDRY

SEQ ID NO: 162712 - protein, 199 aa, Oryza sativa
  unsure (1)..(199): unsure at all Xaa locations
  Clone ID: PAT_MRT4530_61778C.1.pep
RIHFRNEAKTATLERLVPHLGTLEATRNQLHEAKELARKTEHDLRDRIAELQDSNFELSGSSKVQAAKISELEKWIQALENDKTELARQRDSALKDVEDCKIKSKAQFDVLVNKIKRLEGXRDEVANAATPLVQAMFFNNXLRIAPDTYFKNIKEAGSMGASLALAMTKSLYPKIDIDAIDGFVDGTSEEAALDLINDA

SEQ ID NO: 162713 - protein, 750 aa, Oryza sativa
  Clone ID: PAT_MRT4530_61779C.1.pep
MAEERESFESQWAPSDVTEENLKEMVAHGVLPAKEIIGRRAACGEAFPTPDTHEVVVFSHFFYGGFSLPTSRLFQGILDFYGISLHNLNPNSIVHIANFIHACEAFLGIRPNFALFHRIFFLKPQPNKSKPCVVGGARFQLRGTLSQKYFSMPCKTSNKGWHANWFYVQNLEPALPEYSCLPPVYQDTWNSLPMGEEAAQELALMDRMLKLKEQGLQGEQITRHFIKSRLAPIKERSRTAFEFDGKHDPNREDPESLEFKVMKERMYKIFSNAIVVSYSHLLPVVPYNAFNPPQPEFALMKSDPPIAQRRSPCRQTGQASGGPKIRSDTQSNISKSAIQLDSRKRKLVLSNDEGDDAGKSGNKEPSDIDPSGKDSEPTNVETGPSKETGPTAEDCSSDKQPATDNVEASNEPPTGNQSAQAGADANQEPPTGNQSGTEPSPIISDEEEILQIQSAEDSRPPILVKWWDDDMQPQGIIINKQKEDEEVCLLKKALGQATRIVNRIHLKNEAKTATLERLVPHLKTLEATRNQLHEAKELARKTEHDLRDRIAELQDSNFEMSGSSKVQVAKISELEKRIQALENDKAELARQRDSALKDVEDRKIKSQAQFDVLVNKIKRLEGSRDEVANTATLLVQTMFFNNNGPSTFDASEIFDKLRVAPDTYFTNIKEAGSMGASLALAMTKSLYPKIDIDAINGFADGTSEEAALDLINDAQKTADKIAVDVVERFQDNDLRPTGSDNSDEEKTDTE

SEQ ID NO: 162714 - protein, 561 aa, Oryza sativa
  Clone ID: PAT_MRT4530_6177C.1.pep
MESGARDAMESHFGVGSGSPSCHLDGEPVVVVDSTSVEAAALDHVIITVDAGVGAHLEHPSTPQPKSSVSIAVSCTSDTCNTHWKEHLKPMVGMIFDTLTDVEKFYKSYAHKAGFSVRVAHIVVKLGSDKKYRISSMVEEHNHGFVSLDKRHLLRSNRNVSERAKSTLFSCHKASIGTSQAYRLLHVSEGGFENVGCTKRDLQNYYRDLRTKIKDADAQIFVAQLERKKEVNPAFFYDFMVDEQGRLVRVFWADALCRKNYSVFGDVVSVDSTYTTNQYNMIFVPFTGVNHHLQSVFLGAAFLANEKIESYVWLFKTFLKAMRGVAPHLIITDEDMSMKAAIAQILPDTAHRLCMWHIMEKVPEKVGPTLNKDEKFWDRLNKCVWGFENSDDFESQWNSIITDFGLMGNDWFSTRELLFDDEGNLLDEKPKDPMEVAMQKKISVSRNKFEDLIQMAKNSEQGMDFLHSSLSNLVEPLQKITPATRVNKQDEYESFLGSKIPNEINIHPPNDIKSKGRCKRIRKSKEKKAGSGSKGTSKRKCRKCKQVVDHDARNCPNNVVG

SEQ ID NO: 162715 - protein, 712 aa, Oryza sativa
  Clone ID: PAT_MRT4530_61780C.1.pep
MVMVGLERSNPVTVLRFLLLAADGDEAGRFRLNSSGKQRGTAASSAAPKTPSSQSTEDEELMGSATGRARRPPSSSMGVGGEATETGGIGGGPPAPTSSSSPPPPPPHRPSPHHTPHFFDRSIDRSAPLLLQDVDGGCTVSFGSAAIDTTVTSDAAAADEWVRRVRASAATTPRGGGGLLVGLDCEWKPCDHLWPAVAPTVAILQLCAGDSCLILQLLHVAGARRVPPLVGDLLADPSVRLVGIGIGENAAKLADGYGVRCAAPVDLEDVCDRRLGRLPGARRLGLKGYVREVLGLTMEKPMDVTRSDWERRHLDAAQWGRRLASAAARAARRSGAAVGTRRCRWQWGRQLASAAAGTARTTAVGSSGGYGGGERRRWGAAVVGTRQRGVERRRWCKHEHEHGGGPVVAQTRAPPRRTSYSSSALLRRASSRKSPLPSSPPPTAAAAAAAPHRRRSTPPRPHRRSPPPQPPPLPDLRRRHSPTSASTPQQSPPLATATAATTPLRLVPTVTAAGPPPLPRTPVSVPRAAVVPPSLSLLLLLLPPPAKTPWNDLIAMKDDHHIPCCSSRSQDFAVKSGEDRTSDGEMKVGLLDKSMGEKEKKKRSKKPPRPPRPPSASPLDAADQKLISELSELASLKRARIERMKALKKMKNTKPASSIGNLVALIITIIFCLVILWQGRSHGSLFSIQFYKKNETATSPRSSSSAPKCDSL

SEQ ID NO: 162716 - protein, 88 aa, Oryza sativa
  unsure (1)..(88): unsure at all Xaa locations
  Clone ID: PAT_MRT4530_61781C.1.pep
LKKCLRVPTEXADPDRIELQEDLTYVEKPVRILEVSERNTRNRVIXFCXXXWSNHSXEEATWEREDELKSAHPHLFASSSESRGRDSV

SEQ ID NO: 162717 - protein, 296 aa, Oryza sativa
  Clone ID: PAT_MRT4530_61782C.1.pep
MLISPMLAAPPPPAAAASPRCRGFLPAAAATGSRRHRGGCRLLRRSAPPRVGAVTSTVRTRREEGRLDRDELRRLCQEPNPEAAVNLLDEMLVRGGAGALADLAPEEQAAVLQACGEARSLASLRRAHRLLSKSLPGIATPILHMISTLYCKLGARGDARRALEGASRPRGKDHEQEQEHGDEAKRREAYEKVRELHEEIRAAGYVPDTRYVLHDIDEDAKARALMYHSERLAIAFGLVSTPPGTPLRVIKNLRICGDCHNAVKLIAKVTGREIVVRDNKRFHHFKDGACSCGDYW

SEQ ID NO: 162718 - protein, 72 aa, Oryza sativa
  Clone ID: PAT_MRT4530_61783C.1.pep
VLGRYGRREAKARVAAGRGGPGGAFKGVERRRRRPTAAGDGDGKAEAAMDGRSRPRPAESGALPLAPSLSNQ

SEQ ID NO: 162719 - protein, 205 aa, Oryza sativa
  Clone ID: PAT_MRT4530_61784C.1.pep
MELVFIRHGFSEWNAKNLFTGWRDVNLTERGVEEAKAAGQKLLAAGYEFDIAFTSVLTRAIKTCNIVLEESNQLWIPQVKHWRLNERHYGELQGLDKKATAEKYGDEQVHIWRRSYDTLPPLLAPSDPNSAHNDRRYAHLPKEVVPNGENLKVTLERVLPFWEDQIAPALLSGKRVLVTAHGNSLRALAKHIIGISDAEIMDFEI

SEQ ID NO: 162720 - protein, 536 aa, Oryza sativa
  Clone ID: PAT_MRT4530_61785C.1.pep
MAGGNTHRKKSCACCKEYLEHLGGKMRCFLRRMAADSMHSMIMPDRFVSHFGGKIPGTIKLESPNGILYVVEVTECMNKTLLQCGWEAFVDAHNIKEGESLLFRHIENSRYEVLILDSDDCEKVFSCAGIRNGSCVQDKTVDPVDSSGSSSNDTTQSSRSRNTENLTAMCSSSEKSGEDSPSGYEFHESVEPQTPSGSDYVLSRRTYLSEAQKERVVTHIQDIQPEITVFVAVMKKCNLQSPAPYLVISSRYASVHFPRETATITLQRPSKRKKWYPRFYKRIDKSDHMLRGQWQNFVHDNCLQEEDICLFVPTKGGRNFAFTVHLLQAEVTHSRDGTDVHKIGSSQNKRNSKMASQVHIKEAPGGDVSSESNKHGVSHESLESEDSDGPSEPPYISSMRRRLSQLQKKTVEEKVRAIQSEIPICVATISKLAGSGGKGKFRGLELSSRYAASYLPDKNHQTLVLQCKGMIWQINLVVRRRYTKGKRWFLTAGWRKFAHDNRLRVGDFCLFELKKKKKLTMEVHIISNLQRYPEVE

SEQ ID NO: 162721 - protein, 124 aa, Oryza sativa
  unsure (1)..(124): unsure at all Xaa locations
  Clone ID: PAT_MRT4530_61786C.1.pep
MVAVTVMRKSRNFVGPSPPTPPAEITTTLELSSIDRVPGLCHNVRSLHVFRRHKNSGPVVDGDSRRPAAVIRAALARALADYXAFVGRFVGSLLAGDACVACTRXGAWFVEASADCSLYYVNGL

SEQ ID NO: 162722 - protein, 78 aa, Oryza sativa
  Clone ID: PAT_MRT4530_61787C.1.pep
MTRLEISAAVCFRFLKPESTSDVYIHTHPCTMRLVSAAGTGFFYVKRKNPRRITEKLEFRKYDPRVNKHVLFTEAKMK

SEQ ID NO: 162723 - protein, 78 aa, Oryza sativa
  Clone ID: PAT_MRT4530_61788C.1.pep
MASQVPSKSVRTGGAMAGGDAPQHKPIECPKCHGVFNTRREFVNHKCSNTRLFMLAQAKKAAKKAVLKQIRNKGNKFN

SEQ ID NO: 162724 - protein, 383 aa, Oryza sativa
  Clone ID: PAT_MRT4530_61789C.1.pep
MSSKRKRQDRDEYDRCGGVKTAPAPEKRRKHLYLMLDDRDNAYRMHKIDVDALADSEEDDMLLLPEPALLQFGTDRHSGMCFFALGSSIFATRPPHTPALVYDTDTGGLTVGPPLPNKLCGGPNITMAMADNKTMYALYDYDTNYLNPHPMEAMSWEAVPCTERHLPRVKEWTWKSVPSQPPYGRLDEIVSYAVHPDQRTFFVSVKEAFCSRSDGGNKGTFSFDTKHCEWRWHGDWMLPFERQGYYDAELDAWVGLRLTDGRVCACRVASRSSSAPPEWKLLQEKLFCKDPQERQLMALSGIRPSLAYMQGSGRFCLLECVLREGVDWKHAFGDDAHGCLLRLTIFGLKYDHQGELHTSIHRTNASYIVSKHNSSFSPVAFWM

SEQ ID NO: 162725 - protein, 106 aa, Oryza sativa
  Clone ID: PAT_MRT4530_6178C.1.pep
PIRFLLDFLDIYGVGRDFHRGRSIRGSVKFPVRSAIHTYISQVFNKISQLCDLYCVFRFTMMSAKLLRSMSVRRLLGQQRNSVGGHLVLAFLMFGVRCSSCVYKYN

SEQ ID NO: 162726 - protein, 204 aa, Oryza sativa
  Clone ID: PAT_MRT4530_61790C.1.pep
MAAVTNADVEAVDFDPDDDDLMDEDAADPTPAPAPRLRSTIAGGGGGGGGGDDGQRKTKGRGFRDDAAPRDSRLAGAGRASDFDSLGSDGGPGPVRSIEGWIVLVTGVHEEAQEDDLHNIFRDFGQVKNLHLNLDRRTGFVKGYALIEYETFEEAQAAIKALDGTELLTQIISVDWAFSNGPVKRRNIRKRSPRRSRSPPRRRY

SEQ ID NO: 162727 - protein, 170 aa, Oryza sativa
  Clone ID: PAT_MRT4530_61791C.1.pep
MAGKNGSLYAVLGVASDCSDADLRTAYRKLAMKWHPDKCGAAGSSAGGGAEAAKVRFQKIQGAYAVLSDPNKRILYDVGAYDSDGDDDGAGEILGDILEAMNKTGPTENGKNESFEDLQRQFEELFLRPPAPAPPTSSSFRSACSRRPSFVLIIKLIDQEENDSDNDMTH

SEQ ID NO: 162728 - protein, 47 aa, Oryza sativa
  Clone ID: PAT_MRT4530_61792C.1.pep
GLLPIIIERSLVWCYVEDIQIGNVPYIGTLQSAHIAMLMALALNTYV

SEQ ID NO: 162729 - protein, 1228 aa, Oryza sativa
  unsure (1)..(1228): unsure at all Xaa locations
  Clone ID: PAT_MRT4530_61793C.1.pep
MEMETGETAQNETGRTGVEGSMDVLNTLQVTFHFNRDFVVSGREKHYVGGRKDLNSELRALLDDDSMCQYMNDCIVDGGVAEVYADAPILVDLSYEDEGSDYELEMEEDMGDESDGNGVEQVDMESDNAEMEQVGMEGDNAEVQQVGMEGDNAEAEAEQVHVSERSIVVYTQDLEPLATQTPDLTEEAEPMPMSQALLEVVSRVGIGRHLHLLPLAPMEHLQIVKINAKAKVATQQVQEPAKKGNKSQHSLGNNFNQLKLLREACSSCGPAPDPSHDFGAGSPGYTSSTVSEAHSHATSNDGGSFGLESPVSSLSAAAGAAPPPTAAPSLPPSAPTTSTDQEGAKAAAAVETLQIRDVILSSQILGASQAAASSQQATTSTTITISQANAKLEAQAEADMGAMRQNMTKLQDTLRQMQEQQQAYEAERQAKAYAQQFLTVFTQPQAFPLHAAQVVQAPTYFAKPAPAVAPCPTPDMILAPVRTVAPQVQYPKPTHMPKAMMEAALALQAQFQAFLQQLNQPNNLPRISPSTQAEGTPSQGALAGQLLGQYGISSQANQLAQGVSPRSQLPQFDPSATIQAPMTFMQAXAPRVRNSSTAEPSLDPSHDRPNRGGTXPFRRISKPRRWCLARGTNQRPGPNLITLPSQGIWEKRTQKSSFPSMNPQLKPLMAMRISRRRPGESTREYMCWFSQARCQVQDITKXSVVNAALAGLLEGELTRKIARKEPRTIGHLFRIINGYARVEEDTKQWQEIQADYDKAAAAATAAAQAQAQAIGLAPVLVRPPPPANQGQPPRPSQAPMTWKKFRTNRAGKAVMAVEEVQALCKEFDAQQAGSQQQPFCKKIKKDLYRAFHGRSSHTTEQCRNIRQQVHNIVSAGEGTPRYFAQQISFGPEDAEGVLFPHQDPLVVSAEMAGFEVRCILIDGGSSADVIFAGTYAKMGLPTVALSQAPTSLRGFGGEAVQVLGQALLKVAFGTQENKREEEILFNIVDILYNYNAIFDRGTLNKFEAVSHHNYLKLKMPGPAGVIVVKGLQPSAAVVAPFDREVHTVDIEGQERARPMPKLSLHGKVTQVQIDDIDPTKVVSLGGDLGEQEVNSILAVLKKNIDIFAWGPDEVGGISLDRIMHHLVVKPDAKPKKQKLRKMSADRQEAAKAEVQKLLKAGVIQKIDHPEWLANPVLVKKSNGVVSRLRDIIIWGYMLRMRGGPLMVTAQYGNSAVRGYFSKYQEVIG

SEQ ID NO: 162730 - protein, 188 aa, Oryza sativa
  Clone ID: PAT_MRT4530_61794C.1.pep
MPAKAAAKKPEKEPEGSSGGKAKKKKWSKGKVRDKLNNMVLFDKATYDKCVKDLPQYKLITPAIICERFKVRGSLARAILRELAKKNLIRPVVKHSRQEIYTRATKEDVVAEQEAAKEATTEKKGGGGVKKRAKKNAAACCCRRNCSLIDSFSVWFLFLEIKTFEEKIKNKSLDPKKTREISFVRFFF

SEQ ID NO: 162731 - protein, 253 aa, Oryza sativa
  unsure (1)..(253): unsure at all Xaa locations
  Clone ID: PAT_MRT4530_61795C.1.pep
MDSPATPVDFSPLLSLAHYNEPCYTKDKAVAHAGSRDLGRVIGGHLRVEDDEANPTVLTTTTNDERXWPATKRTAAAARLDGDGGAPVVGGEGGRAAEVLLTTAHLTAAAASGGDDASDGAAWLKTAGGGGELSARGGDSTEHGRPREMGQTKEGNXGVLFIALDXRDRTPPARNRXRENSVLEINSKTSXFGQDTQPFAPILEGKDRGGREDKIPSKTRKKKSRIGADLREKRGGSGDGLGSAGRLLEEEEG

SEQ ID NO: 162732 - protein, 84 aa, Oryza sativa
  Clone ID: PAT_MRT4530_61796C.1.pep
QLCLHIHETEKSSTLPMLNWTCGLTHRLVSNYVCFSCNDGSISGRFIMIQPAVRFQKLDTEVLPIRKDFWNLPIYMPTSCQLKI

SEQ ID NO: 162733 - protein, 118 aa, Oryza sativa
  unsure (1)..(118): unsure at all Xaa locations
  Clone ID: PAT_MRT4530_61797C.1.pep
TRGCRCQSPKRLAVASTPSYPAKDKLLTGAAGTGILRWYGLPHSWLVXAXGTSPXSTPHTTPRPPPPRRVARRMLQRHWRMEWPPHLSPDLCPGRHQHARTQPKAATNHQLSLTDHKS

SEQ ID NO: 162734 - protein, 627 aa, Oryza sativa
  unsure (1)..(627): unsure at all Xaa locations
  Clone ID: PAT_MRT4530_61798C.1.pep
MRCVGGGDTPLGFRGVVEEELEEEVAAVSASGRPMQRQRRRRRRWGEDADDGYSASSTGGGGSSGCGSFGCDSPLAGFVRADGDPDTDLETDGVATPSSNALKRSSVLAEASAAFAEPHDEEEGDEVLCGVVEGDWAQLQEPTKSPADRTTGECLYQRRRSEAVLLQGRKGLKQRPASLDFGSGSPGFNGAPLSPGFVVGGVGLMNKGLVSSSFIRSDVFPSPRTPNYRRHRSSVFGYQKGWSSERVPLASKGNRRYPGSSMAFPFSNGRTLPSKWEDAERWIFSPNSSDVLEKTSFAPARRPKSKSGPLGPPGKFGGQYSSVSLLDNGRVGHLTANSPFLAGVLIPEHYCGEKDNIGRYMSRTAGEEASIGIGGKSCLANGGSHATQYNRVRRRLDTAIESSPSLPSTQASVQDEQVGITEESASIITPIILRKDAATQTSPNLSRSSSPSVSTPFIHLLTTHQVREKENCFSDVIRDVHMDDRVTLTRWSKKHVTRASSKNSTNVIDVKKKTVESKSSSWELTEAKSISKVEREQEKITAWEHLQKAKAEAAIQKLVMKIEKKRSSSLDKIWNTLRSAQRRAQCFLFXAAANQDEQSSGKAKRTSHLNKNGQISSLSGCFTCHAF

SEQ ID NO: 162735 - protein, 546 aa, Oryza sativa
  Clone ID: PAT_MRT4530_61799C.1.pep
MAPPATSLIGGGVGGVAYVVLLLFLANACVSDAGFEVSSRVLMSDEQGRSGLLATWRRLIVETPSPGAGADAAHPGTKSLPLAAARTHRRDPLANLTMYSGGWNISDQHYWASVAYTAVPLILVGMLWFIVFGIVLLIISCCCCFCRKKYNTYSPATYFISLILLIIFTLATIAGCIILHCGQELFHSSTIKTVDYIVGQGNLTVDSLRNFSGSLAAAKNIGVDQVFLPVQVQQKIDVIEDKLNSSANEFSTRALENSKKIKHVMDKMQYNLMVIAAVMLGLAIFGFLFSILGLRFLVSLLVIAGWFVLVITIMMSAAFLLLHNVVADTCVAMDDWVTHPQAHTALDDILPCVDVATANESMYRSEEVTVQLVALVNNVIVNISNRDFPPSFRPLYINQSGPLMPKLCDPFNPDMSPRKCAPGEVNFDTAAAEWKKFECQTTGPPGSEVCATEGRVTPAAYGQMTAAASISQGLYQYGPFLMELQDCSFVRETFTAISDNNCPGLELYSRHVYLGLLLISGAVMMSIVFWMVHTRQRRRRSLGLGR

SEQ ID NO: 162736 - protein, 115 aa, Oryza sativa
  unsure (1)..(115): unsure at all Xaa locations
  Clone ID: PAT_MRT4530_6179C.1.pep
MAAAVDHRFKIFAVANAFNHPLKDVVVAHLRATAXNLSVAEVVNLGVDKYYAATAIATSSSDADPMLEACGMAAGVTILANKKGMELKLVGIMANGEMRIMRESVERGSRPGAWS

SEQ ID NO: 162737 - protein, 319 aa, Oryza sativa
  Clone ID: PAT_MRT4530_617C.1.pep
MELNKAVAVAAAAMVAVVAMVAAPASGQAVAASCTASLITSFTPCFNFITSSSGGGGGNGTAAGGGAPTAECCQSVAAMINTSASCACLVLTGNVPLGIPINRTLAVTLPKACNSIAKSAGVDGRCRIADGDGHAAGDEPDADEAAVSRMAARVAWIGAAAAVVVVALMAGGAAAQPPSSTSGCTQTLLSMSPCLNYLTGNETAPSASCCGKLGEVVKSQPECLCVALNADTAALGLSINRTRALGLPDACKVQTPPVSNCKSGAAAAPAGQTPTTPAGTGSKATPATPVGSGVAPLRVSPVGILAGIVVAAVYAVSAV

SEQ ID NO: 162738 - protein, 46 aa, Oryza sativa
  Clone ID: PAT_MRT4530_61800C.1.pep
MAARRCLSSRRVAGPHLSTAYLHSNLVDELRPFISFAFAATIECDR

SEQ ID NO: 162739 - protein, 35 aa, Oryza sativa
  unsure (1)..(35): unsure at all Xaa locations
  Clone ID: PAT_MRT4530_61801C.1.pep
TFFLSXKKFNFTLKVANTLYKTPQMSTYFHTKTNF

SEQ ID NO: 162740 - protein, 80 aa, Oryza sativa
  Clone ID: PAT_MRT4530_61802C.1.pep
LPGEIKMVVSSIIASAKYGQPTIGPVFHLSALWLVVPRSSLGVWFTQLGVLLLTFQQAPYKCLATLVLFMVLDCTILYRR

SEQ ID NO: 162741 - protein, 66 aa, Oryza sativa
  Clone ID: PAT_MRT4530_61803C.1.pep
TEPEVQNPDLSWTSKQGYPCGHAWRGRTGAKMFTFTVLHEKNPDNSGKNRISYQEILVHLVNSSCR

SEQ ID NO: 162742 - protein, 118 aa, Oryza sativa
  Clone ID: PAT_MRT4530_61804C.1.pep
FGSAVFAGVLRSGLLLFIPQHYAVFHQPECVGSPYLHITANANSFVGPLAGMCSVFRALPVYVVGNAYRISGFLVRFFQQLLLGLVHCPPSYFSFNNSTLVFGISPGAVTSKVMSISY

SEQ ID NO: 162743 - protein, 82 aa, Oryza sativa
  Clone ID: PAT_MRT4530_61805C.1.pep
ECILGYIHLVCTQLNKAKNAKILSVEIRKLSRSWRGSTSAHWNDRRSRLTYSEHKVSSCSLAWFLKYSRPFILSFFFFFFFF

SEQ ID NO: 162744 - protein, 68 aa, Oryza sativa
  Clone ID: PAT_MRT4530_61806C.1.pep
VPRKKIKLKVHRTYLSVFTFFVLRGALSFDKLRNYVILKKYMKMIIYHIYNYIEFRTIFCCIEDMSTK

SEQ ID NO: 162745 - protein, 496 aa, Oryza sativa
  Clone ID: PAT_MRT4530_61807C.1.pep
MALLLRHSPKLRRAHAILGCERGTVVRHFSSSTCSSLVKEDTVSSSNLHPEYAKKIGGSDFSHDRQSGKELQNFKVSPQEASRASNFMRASKYGMPFTANGIHSLFSCGHTNETTAEMECMEEGYLAKIIHGDGAKEIKVGEIIAVTVEEEEDIGKFKDYKAPSSAESAAPAESKPQSEPTEPKKEKEQPKAPEPKATKTEESFLSEDRTFSSPIARKLAEDNNVPLSSIKGTGPDGRILKADIEDYLASVAKGAKKETAAAPGLGYVDLPNTQIRKVTANRLLHSKQTIPHYYLTVDTRVDKLIKLRSELNPLQDTSGGKKISINDLVIKAAALALRNVPECNSSWMNDFIRQYHNVNINVAVQTEDGLFVPVIRDADKKGLATIADEVKQLAQRARDNSLKPEDYEGGTFTVSNLGGPFGIKQFCAIVNPPQSAILAIGSAEKRVIPGAEGQFEVGSFMSATLSCDHRVIDGAIGAEWMKAFKGYIENPTTMLL

SEQ ID NO: 162746 - protein, 45 aa, Oryza sativa
  Clone ID: PAT_MRT4530_61808C.1.pep
MKAGNKGRSKVDYAGHNKSRRQERATGIRSGGICREWLREKEDKV

SEQ ID NO: 162747 - protein, 72 aa, Oryza sativa
  unsure (1)..(72): unsure at all Xaa locations
  Clone ID: PAT_MRT4530_61809C.1.pep
KVFFLTTNNKNFXLVXPXEREXKHXXSLQIFFXXRYSKTTQTXFWITXDXXTXKKNGXWRKMPAXLXHVXFX

SEQ ID NO: 162748 - protein, 62 aa, Oryza sativa
  Clone ID: PAT_MRT4530_6180C.1.pep
MEANPTFNSNSRRKVVVKGGAREDAGRARLAGVSLPASRTDDKTGWQHNRAMEVAEWGWECE

SEQ ID NO: 162749 - protein, 100 aa, Oryza sativa
  Clone ID: PAT_MRT4530_61810C.1.pep
VKSLSYILRTVSITKMMLTAIDRSLGGRDGQPRTKKSSTPNHGKKKAPCSKASKTKDLAYASYESDVAPNTANRTPFAAKAENDSTREVLFLVKKAGSDS

SEQ ID NO: 162750 - protein, 574 aa, Oryza sativa
  Clone ID: PAT_MRT4530_61811C.1.pep
MAANELAEVKRQVDDLLQKGYIRPSSSPWGAPVIFVEKKDHTKRMCVDYRALNDVTIKNKYPLPRIDDLFDQLKGATVFSKIDLRSGYHQLRIKKENIPKTAFTTRYGLFECTVMSFGLTNAPAFFMNLMNKVFMEYLDKFVAVFIDDILIYSRTKEEHEEHLRLALEKLREHQLYAITGVWRHYLFGTHTEVYTDHKSLKYIFTQPDLNMRQRRWLELIKDYDMGIHYHPGKANVVADALSRKGYCNAMEVRQLPWELCKEFERLNMGIVSRGFVAALEAKPTLIDQVREAQINDPDIQEIKKNMRRGKAIGYLEDEQGTIWLGERICVPESKELKDAILKEAHDTLYSIHPGSTKMYQDLKEKFWWASMKREIAEYVAVCDVCQRVKGEHQKPAGLLQPLKIPKWKWEEIGMDFISGLPRTSSGHDSIWVIVDRLTKVAHFIPVRTTYSGSRLAELYMARIVCLHGVPKKIVSDRGVHNMFHASQIKKCLRVPTEEANLEQIEIQEDLKYVEKPIRILETDERRTRNRVICFCKIPTFPESPNLQEKTLKSSKASKASHTDPKQPFEHVDPV

SEQ ID NO: 162751 - protein, 345 aa, Oryza sativa
  unsure (1)..(345): unsure at all Xaa locations
  Clone ID: PAT_MRT4530_61812C.1.pep
MICLINLKEPPFSPRSIFVVHALKXWRHYLFGTHTEVYTDHKSLKYIFTQPDLNMRQRRWLELIKDYDMGIHYHPGKANVVADALSRKGYCNAMEVRQLPWELCKEFERLNMGIVSRGFVAALEAKPTLIDQVREAQINDPDIQEIKKNMRRGKAIGYLEDEQGTIWLGERICVPESKELKDAILKEAHDTLYSIHPGSTKMYQDLKEKFWWASMKREIADRAPPPLWSSSSLGKAAVGIAKSSPSSSRPPFPSKITGAPSSPLQLVAVAVRCRSPSFKPSIPTFPESPNLQEKTLKSSKASKAKTPDVTGRLLAGGGARKEMGLGSPEDGFARGVYVLALFLTC

SEQ ID NO: 162752 - protein, 1550 aa, Oryza sativa
  Clone ID: PAT_MRT4530_61813C.1.pep
MEETTAAAAGGTRGGVRRARSRPTRSSTLYPAGGSRRRRWEGGRITIFPESPNLQEKTLKSSKASKATPGLEWYIPSLEIELCSRDWLFRMVGPMQRYLLNAIYANETILCHPLLSLAFAYLLRGLLSMPYTHLAIIHQGRSSTVMLKMPRFKPEYLFGTEGFVQELRTMSFAIGFGTAPLYAQIPHDRDEEKCRVKVTLNSNREDIPSVMFEAGGGNYPHACQEVARIAIGELRDCYSDQLADTEYRYHPCQPLESDRGSYLEPAGIENDATTRHLVEMLWAMDESRAEVVLVAQDCEDQNRGKICKLEDKVDRLEKELAALKGEAPPQKARVLLTAKKRALFVPRYQLAPKVRVVEEEEAAPVPADPPVVNMVLTRSNGNGPNNNYNKNNGENPTLAQVLAQQAQLMNMMMQQLQNQQNQGNNHAPPQNKLAEFLRVRPPTFSSTTNPVEAASEWWDHFRLNRTTAEPITWLEFTAAFRKTHVPSGVVSLKKKEFRALTQGSRSVTEYLHEFNRLACYAPEDVRTDEELQEKFLEGLNDELSYPLMTGDYSDFQKLVDKAIRQEDKYNRMEQKKRRIAHFKAQQRNSQRLRLAMGPQAHQFFNNNASNNNLNQAPRPVATPTQHQPAKREQGNKPGVYFSCGELGHYSDKCPKPRRVKVVLAQNNSTAPASKARINHVATAEAQGAPDVILGNHGMEIEDLRRPLMVSTPSNQALSSQRSPSVRIEIQGVPFLANLILLESKDLDVILGMDWLARYKGVIDCANRKVTLTSNDGQVVTVYAMHSEPLRSSLNQITLEEISIVRDYPDVFPDDLPGMPPKRDIEFRIDLVPGTTPIHKRPYRMAANELVEVKRQVDDLLQKGYIRPSSSPWGAPVIFVEKKDHTQRMCVDYRALNDVTIKNKYPLPRIDDLFDQLKGATVFSKIDLRLGYHQLRIKEEDIPKTAFTTRYGLFECTVMSFGLTNASAFFMNLMNKVFMEYLDKFVVVFIDDILIYSRTKEEHEEHLCLTLEKLREHQLYAKFSKCEFWLSEKDVKYKWSEVCEQSFQELKSRLISAPILILPDPKKGFQVYCDASKLGLGCVLMQDGKVVAYASRQIRPHEKNYPTHDLELAAVVHALKIWRHYLFGTRTEVYTDHKSLKYIFTQPDLNMRQQRWLELIKDYDMGIYYHPGKANVVADALSRKGYCNATEGRQLPWELCKEFEKLNLGIVREAQINDPDIQEIKKNMRRGKAIGYLEDEQGTIWLGERICVPENKELKDAILKEAHDTLYSIHPGSTKMYQDLKKKFWWASMKHEIAEYVAVCDVCQRVKAEHQKPAGLLQPLKIPEWKWEEIEMDFITGLPRTSSGHDSIWVIVDRLTKVAHFILVRTTYSGSRLAELYMARIVCLHGVPKKIVSDRDSQFTSKFWKKLQEEMGSKLNFSTAYHPQTDGQTERVNQILEDMLRACALDFGGSWDKNLPYAEFSYNNSYQASLQMAPYEALYGRKCRTPLLWDQTGERQVFGTDILREAEEKIPTFPESPNLQEKTLKSSKASKASYTDPKQPFEHVDPI

SEQ ID NO: 162753 - protein, 242 aa, Oryza sativa
  unsure (1)..(242): unsure at all Xaa locations
  Clone ID: PAT_MRT4530_61814C.1.pep
MLASGRCTPCFLVPCHCARAGGGGSTDGCWGRRGRRHGRVQGXEAAPASAPVGGQELGVAASIAHRPKSPPSQPSASRSLGSPTPSPAFRPLTPSPRPPPSSPTLPSSPDHRSLDLAAGKPDLAAGAFPRLPAADAAKSSLQDADLAASRRIWPPGCESGRRRLPYLPTVVHDRRGLSIDCRTLLPLPPTADCLLLPTLIICDGPNVRYPSKTDPFPDAMSVVGTSIDIPNSVDGGDNKAIS

SEQ ID NO: 162754 - protein, 37 aa, Oryza sativa
  Clone ID: PAT_MRT4530_61815C.1.pep
SPTFLESPNLQEKTLKSSKASKASHTDPKQPFEHVDP

SEQ ID NO: 162755 - protein, 127 aa, Oryza sativa
  Clone ID: PAT_MRT4530_61816C.1.pep
RCPRLPYYLNTNNFTSGNLQIQIEFAFSAVNGVMDKMWTSTPLPAIEFVHIYSDIHRAFQVITACSSCLRLVVRTLESSSHHADHGRWQKSMWQLLSIYRRANALLLHFQYIPQFQVMDFDRHGFLT

SEQ ID NO: 162756 - protein, 102 aa, Oryza sativa
  Clone ID: PAT_MRT4530_61817C.1.pep
YKGTHKPSRATAGGRRATRRRRICASAPPLPVSRAALDPPCPRLLGAVCPRCRRAASSALNRLPRCHPPRPRVGACDASAFSPEEESRRWRVSPEKETRRRP

SEQ ID NO: 162757 - protein, 195 aa, Oryza sativa
  unsure (1)..(195): unsure at all Xaa locations
  Clone ID: PAT_MRT4530_61818C.1.pep
AMFATIRDRFMSKLTMIKANKLSHAGVQTEDSKKXVCWRSWEGICKPTDQGGLGIRDLLNVNRSLLIQSTWRIVSNPNDLVSTIIKAKYLNNTSFWKANENISKSAFWSSILKVAELWDENKKWDXKLQQIFDQEAIQAIQNVQLVPNEDPDKLCWKHTPSGGCTTKSAYKEVHKATHSHLQVIYKAFTKHLFRT

SEQ ID NO: 162758 - protein, 384 aa, Oryza sativa
  Clone ID: PAT_MRT4530_61819C.1.pep
MEKALVLIVGAGPSGLATAACLGQLSIPYVIIEREDCTASLWRKHTYDRLKLHLAKEFCEMPHMPYPEDTPTYIPKIQFLRYMDDYVEHFNICPKFNSSVESCLYDDVQKYWVVTTHDQVNGMVSKYAARFLVVASGENSAGNIPSIPGLEDFSGHVIHSSSFRSADSYAAQRVLVVGCGNSGMEIAYDLSSHGANTSIVIRSPLHVMTKELIHMGMKLASWSLPVKFVDFILVVLAYLWFGNLSKYGIVRPNKGPLLLKANTGRSAVIDVGTVELIKKGDIMVFGTISCIKGNVVEFDDGKESYFDAIVFATGYTSTANNWLKNGEDMMNKEGMPKKDFPNHWKGSNGLYCVGFARRGLSGIAHDAKNVANDVKAFLDLMAPF

SEQ ID NO: 162759 - protein, 29 aa, Oryza sativa
  unsure (1)..(29): unsure at all Xaa locations
  Clone ID: PAT_MRT4530_6181C.1.pep
HRLFFNSERLKTVGIYIIPVLSFHXIYNI

SEQ ID NO: 162760 - protein, 519 aa, Oryza sativa
  Clone ID: PAT_MRT4530_61820C.1.pep
MSTEKQSPSSASKPPIPPKTKLPKPPGTNLPSTGVESEVNETNIIPITLDKLTSEQRHELEQMMSSVKDKFMNSFKETRQGIIVQKYKLKVVAADEVGSSSSQGGKCVVDALGDKGDGLQDGVVEDLGEDGAEVQEEPPRCTNFHDQVDYAVQHALINQSGEIVNTLTNMFKSVMVGTIAEHQNTGPVYLPSGVFPNYRNLVIGNQQSTSNAPPVQSTAAASTPAISAAPSSVQRQTINPRLFSREQPQHAEGNLNYQYQPPSPRIQYQQGGLPQPQYVPQLNQFEPIQQQVQGVPQQRPWADLIADVMREQFRLKPKNTGNLYRHPYPERFERVPLPNRYKVPDFSKFSRQNNVSTYEHVSRFLAQCGEASAVDALRVQLFPLSLSGSAFTWFSSLPYNFVQGWVDLEKQLHSYFYSGTHEMKLSDLAAVRQRHDETAQDYIQRFRETYTKADKIFDLLIREKHIQLPASHIIPSADLSLDLDSSGNTTPQASSTARTKPTPRRNHHRTHNRTLRVGR

SEQ ID NO: 162761 - protein, 127 aa, Oryza sativa
  Clone ID: PAT_MRT4530_61821C.1.pep
GKKHRWGPPPISPPSQKKGDMPANKMGKTQGCPSPTGEKPGRPEKLRGPKKKRSKSEEPGGKKGTPKTPPPPEKRRQPAEETLAPIQTTRRGKHPAIIPKKPPRSTLAYPIKSDAAGDPGRPDRHPQ

SEQ ID NO: 162762 - protein, 71 aa, Oryza sativa
  Clone ID: PAT_MRT4530_61822C.1.pep
KFSFLDSRQGNLFCQVLECFENFPPYPGYCPCPVKGEPFCSLSKKLFCPLFVHHSLSVLEHVPFSRRFKVP

SEQ ID NO: 162763 - protein, 359 aa, Oryza sativa
  Clone ID: PAT_MRT4530_61823C.1.pep
MASARRWLCLILAAAAAAAASGAPAPEDDPGMPMAARHRCWMARVGRTYADAAEKARRFEVFRANAERIDAANRAGDLTYTLGLTPFADLTADEFRARHLMPDADVDEPATARVLFEQEEKAAKQHLPPSRPPAVWGSKDWRDLGAVTPVQDQGKNNCNSCWAFAVVAATEGLIKIETGNVTPLSAQQVLDCTGGDNTCKGGHIHEALRYIATASAGGRLSTDKSYRPYDGEKGTCAAGSGSASSSSVAVVIRGVQKVTPHDKDALRAAVERQPVAADMDSSDPEFRGFKGGRVYRGSAGCGKKRNHAVAVVGYGTASDGTPYWLLKNSWATDWGENGYMRIAVDADCGVSSRPAYPFV

SEQ ID NO: 162764 - protein, 171 aa, Oryza sativa
  Clone ID: PAT_MRT4530_61824C.1.pep
MKDRNASAEPVVKPGLSPSRFVKVFMHGEPFGRKINLALHNNYDSLSFTLKKLGNNYSMSPFELEGLVNKEEDGAIDSDFDLLYDDMDGVRYFLGDVPWEVFTTTVKKIYIVPAEQQNENDYQEEEEDNAAAAATADEDGDGAAADDGVAAAADDVDDVAGYTSNDDPSFD

SEQ ID NO: 162765 - protein, 72 aa, Oryza sativa
  unsure (1)..(72): unsure at all Xaa locations
  Clone ID: PAT_MRT4530_61825C.1.pep
DALKEGMGGGSSNXLHSPLDDRALSHNPGGLGGRGHRLKPVEDAAPTMAASLEDLSNGTTNKLNLTWNAMST

SEQ ID NO: 162766 - protein, 86 aa, Oryza sativa
  Clone ID: PAT_MRT4530_61826C.1.pep
MTGVYKENRIEHIKHWLSHQEQEGKNNFEEKNNEAPKLCQESVSGNLSDGQLDQGSPCRGSSLRHDRDWGGPNCRALGRVIGTQAI

SEQ ID NO: 162767 - protein, 623 aa, Oryza sativa
  Clone ID: PAT_MRT4530_61827C.1.pep
MATPSRTSWADVADADPAPAPAPAANGPARPDRSSYVPPHLRNRGASSGGGAAAPPPSSSSSSAPPPRAAPGLLAPRPAAAGMGRMGGGGGGGGFGGPRRWDREPNPFGNDGDAAAGAGDEPEVFDAHQNTGINFDAYEDIPVETSGREVPPPVGTFAEIDLGQALNDNIRRCKYVRPTPVQRYAIPISLAGRDLMACAQTGSGKTAAFCFPIISGIMRGPPAQRPQRGGMRTACPLALILSPTRELSMQIHEEARKFSYQTGVRVVVAYGGAPINQQLRDLERGVDILVATPGRLVDLLERARVSLQSIRYLALDEADRMLDMGFEPQVRRIVEQMDMPPPGARQTMLFSATFPKEIQRMASDFLENYIFLAVGRVGSSTDLIVQRVEFVQEADKRSHLMDLLHAQRDSATPGKPTLTLVFVETKRGADSLEHWLCMNGFPATSIHGDRNQQEREYALRSFKSGHTPILVATDVAARGLDIPHVAHVVNFDLPNDIDDYVHRIGRTGRAGKSGLATAFFNENNSSMARSLAERMQESNQEVPAWLSRYAARPSYGGGGGRNRRSGGGSRFGGRDFRRDSSSGRGGGDYYGGGSSGGAGGYGGSSAYGGGGYGGGAGAPSAWD

SEQ ID NO: 162768 - protein, 51 aa, Oryza sativa
  Clone ID: PAT_MRT4530_61828C.1.pep
FDSYQYRFRLQSTHSLVCSIPSHSQSTQQQPHHIMQQLCGSKKGPGGHFHA

SEQ ID NO: 162769 - protein, 514 aa, Oryza sativa
  Clone ID: PAT_MRT4530_61829C.1.pep
MAVGGDDDMERDFAARLRLAPSPASPNAAAGGGGGGIAFRAPQEQFTVGDFELGKIYGVGSYSKVVRAKKKDTGNVYALKIMDKKFITKENKISYVKMERIVLDQLDHPGVIRLFFTFQDTYSLYMALESCEGGELFDQIVRVGVVLLTMPTMRIIYLKGRLSEDEARFYAAEIVDILEYLHSLGLIHRDVKPENLLLTSDGHIKIADFGSVKPTKDTPIKVLPNSTNERACTFVGTAAYVPPEVLNSAPPTFGNDLWALGCTLYQLLSGSSPFKDASEWLIFQRIIARDLKIPEYFSDDARDLIDKLLDVDPSKRPGAGPDGYVSLKKHPFFRGIDWKNIRSTRAPKLAMEANANEDEDSQDSSWLSHMGSAPVNQHVSPVGNDGASSSSEVRSHISRLASIDSFDSRWQDFLEPGESVVLISKLKKINKLTNKKVQLILTDKPQLICVDPGKMVTKGNIMWSDDPSELNVQVSNSSHFRICTPKKVSSFEDAKQRAWQWKKAIEDLQRCQKN

SEQ ID NO: 162770 - protein, 147 aa, Oryza sativa
  Clone ID: PAT_MRT4530_6182C.1.pep
MASKAGGDGKEAINEQIIANTYGNMRSEMTQLYTKITELEMEVSEHSLVIGAIEPLDHSRRCYRMVGGVLVERTIREVLPAVHRNKEGLEEVIARMHEALEKKKKEITEFELKYKIRIRKADSNADEEEGSKKEGSAQGVLVGPAGQ

SEQ ID NO: 162771 - protein, 63 aa, Oryza sativa
  unsure (1)..(63): unsure at all Xaa locations
  Clone ID: PAT_MRT4530_61830C.1.pep
DXDRPARFFYFCKLQLADSISQVNFQKLEKKISVILKLEVAQGLSLLNSKWQMFRYLVFVRSS

SEQ ID NO: 162772 - protein, 127 aa, Oryza sativa
  Clone ID: PAT_MRT4530_61831C.1.pep
GSCMSAVSLLLLLLSWLSWRWNCALFLSRLWRRRNRTITQPTASSFAHRRRHGRNTHAEIAKNPPPPPTNQGKIEGSNQAKKKTKSNQSAARGNTDMPRTTHGRPAVCNKKKKRMADDAASQLIKKF

SEQ ID NO: 162773 - protein, 513 aa, Oryza sativa
  Clone ID: PAT_MRT4530_61832C.1.pep
MVRFLRRHSLDKNSAQFHRQLSHDSSSSSSDTADMHEPHGNGSGGTPPLPKGRAAAAGAPRSRFGRDGPPSDLDVMKERFAKLLLGEDMSGTGKGVSSALALSNAITNLAASVFGEHRKLEPMAPDTKERWKKEVGWLLSVTDHIVEFVPTRQTAENGTTMEIMSTAQRRDLQMNVPALRKLDAMLIGYMDNFVDQSEFWYEKGGDNKRDDDKWWMPTVKVPAEGLSEVTRKWLQYQKECVNQVLKAAMAINAQVLVEMEIPEVYIESLPKKGKTSLGDAIYRSITDEEFDPIEFLEGVDLSTEHKVLDLKNRIEASTIIWKRKMQTKQEAKSSWGSIISFEKREQFEERAETILHLLKLQFPGTPQSQLDISKIQYNRDVGYAILESYSRVLESLAYSVMSRIEDVLGADAAAQNLTATEAARRLMDGDAAARKLDAMEELEKLNEAPASMTLYDFMGWHFDQDELMRKKEEGTLDEAGEAKLKKAPSLAPKKFSYVDSLSAGGMRSPSARH
